United States Patent Application Publication US 2020/0095579 A1 - sequence listing, part 12

SEQ ID NO: 172084 - DNA, 20 bp, Artificial Sequence
  Description of Artificial Sequence: Synthetic oligonucleotide
  Target: LAMA2; (+) strand; PAM type: NRG; PAM sequence: AGG
ggaaagaaggaagggaaagg

SEQ ID NO: 172085 - DNA, 20 bp, Artificial Sequence
  Description of Artificial Sequence: Synthetic oligonucleotide
  Target: LAMA2; (+) strand; PAM type: NRG; PAM sequence: GGG
gaaagaaggaagggaaagga

SEQ ID NO: 172086 - DNA, 20 bp, Artificial Sequence
  Description of Artificial Sequence: Synthetic oligonucleotide
  Target: LAMA2; (+) strand; PAM type: NRG; PAM sequence: GAG
aagaaggaagggaaaggagg

SEQ ID NO: 172087 - DNA, 20 bp, Artificial Sequence
  Description of Artificial Sequence: Synthetic oligonucleotide
  Target: LAMA2; (+) strand; PAM type: NRG; PAM sequence: AGG
agaaggaagggaaaggaggg

SEQ ID NO: 172088 - DNA, 20 bp, Artificial Sequence
  Description of Artificial Sequence: Synthetic oligonucleotide
  Target: LAMA2; (+) strand; PAM type: NRG; PAM sequence: AAG
aggaagggaaaggagggagg

SEQ ID NO: 172089 - DNA, 20 bp, Artificial Sequence
  Description of Artificial Sequence: Synthetic oligonucleotide
  Target: LAMA2; (+) strand; PAM type: NRG; PAM sequence: AGG
ggaagggaaaggagggagga

SEQ ID NO: 172090 - DNA, 20 bp, Artificial Sequence
  Description of Artificial Sequence: Synthetic oligonucleotide
  Target: LAMA2; (+) strand; PAM type: NRG; PAM sequence: AAG
agggaaaggagggaggaagg

SEQ ID NO: 172091 - DNA, 20 bp, Artificial Sequence
  Description of Artificial Sequence: Synthetic oligonucleotide
  Target: LAMA2; (+) strand; PAM type: NRG; PAM sequence: AAG
aaaggagggaggaaggaaga

SEQ ID NO: 172092 - DNA, 20 bp, Artificial Sequence
  Description of Artificial Sequence: Synthetic oligonucleotide
  Target: LAMA2; (+) strand; PAM type: NRG; PAM sequence: AGG
aaggagggaggaaggaagaa

SEQ ID NO: 172093 - DNA, 20 bp, Artificial Sequence
  Description of Artificial Sequence: Synthetic oligonucleotide
  Target: LAMA2; (+) strand; PAM type: NRG; PAM sequence: TGG
ggaggaaggaagaaaggaaa

SEQ ID NO: 172094 - DNA, 20 bp, Artificial Sequence
  Description of Artificial Sequence: Synthetic oligonucleotide
  Target: LAMA2; (+) strand; PAM type: NRG; PAM sequence: AAG
gaaggaagaaaggaaatgga

SEQ ID NO: 172095 - DNA, 20 bp, Artificial Sequence
  Description of Artificial Sequence: Synthetic oligonucleotide
  Target: LAMA2; (+) strand; PAM type: NRG; PAM sequence: AAG
ggaagaaaggaaatggaaag

SEQ ID NO: 172096 - DNA, 20 bp, Artificial Sequence
  Description of Artificial Sequence: Synthetic oligonucleotide
  Target: LAMA2; (+) strand; PAM type: NRG; PAM sequence: AGG
gaagaaaggaaatggaaaga

SEQ ID NO: 172097 - DNA, 20 bp, Artificial Sequence
  Description of Artificial Sequence: Synthetic oligonucleotide
  Target: LAMA2; (+) strand; PAM type: NRG; PAM sequence: AAG
gaaaggaaatggaaagaagg

SEQ ID NO: 172098 - DNA, 20 bp, Artificial Sequence
  Description of Artificial Sequence: Synthetic oligonucleotide
  Target: LAMA2; (+) strand; PAM type: NRG; PAM sequence: AGG
aaaggaaatggaaagaagga

SEQ ID NO: 172099 - DNA, 20 bp, Artificial Sequence
  Description of Artificial Sequence: Synthetic oligonucleotide
  Target: LAMA2; (+) strand; PAM type: NRG; PAM sequence: AAG
gaaatggaaagaaggaagga

SEQ ID NO: 172100 - DNA, 20 bp, Artificial Sequence
  Description of Artificial Sequence: Synthetic oligonucleotide
  Target: LAMA2; (+) strand; PAM type: NRG; PAM sequence: GAG
aatggaaagaaggaaggaaa

SEQ ID NO: 172101 - DNA, 20 bp, Artificial Sequence
  Description of Artificial Sequence: Synthetic oligonucleotide
  Target: LAMA2; (+) strand; PAM type: NRG; PAM sequence: AGG
atggaaagaaggaaggaaag

SEQ ID NO: 172102 - DNA, 20 bp, Artificial Sequence
  Description of Artificial Sequence: Synthetic oligonucleotide
  Target: LAMA2; (+) strand; PAM type: NRG; PAM sequence: AAG
gaaagaaggaaggaaagagg

SEQ ID NO: 172103 - DNA, 20 bp, Artificial Sequence
  Description of Artificial Sequence: Synthetic oligonucleotide
  Target: LAMA2; (+) strand; PAM type: NRG; PAM sequence: AGG
aaagaaggaaggaaagagga

SEQ ID NO: 172104 - DNA, 20 bp, Artificial Sequence
  Description of Artificial Sequence: Synthetic oligonucleotide
  Target: LAMA2; (+) strand; PAM type: NRG; PAM sequence: GGG
aagaaggaaggaaagaggaa

SEQ ID NO: 172105 - DNA, 20 bp, Artificial Sequence
  Description of Artificial Sequence: Synthetic oligonucleotide
  Target: LAMA2; (+) strand; PAM type: NRG; PAM sequence: GGG
agaaggaaggaaagaggaag

SEQ ID NO: 172106 - DNA, 20 bp, Artificial Sequence
  Description of Artificial Sequence: Synthetic oligonucleotide
  Target: LAMA2; (+) strand; PAM type: NRG; PAM sequence: GGG
gaaggaaggaaagaggaagg

SEQ ID NO: 172107 - DNA, 20 bp, Artificial Sequence
  Description of Artificial Sequence: Synthetic oligonucleotide
  Target: LAMA2; (+) strand; PAM type: NRG; PAM sequence: GGG
aaggaaggaaagaggaaggg

SEQ ID NO: 172108 - DNA, 20 bp, Artificial Sequence
  Description of Artificial Sequence: Synthetic oligonucleotide
  Target: LAMA2; (+) strand; PAM type: NRG; PAM sequence: GGG
aggaaggaaagaggaagggg

SEQ ID NO: 172109 - DNA, 20 bp, Artificial Sequence
  Description of Artificial Sequence: Synthetic oligonucleotide
  Target: LAMA2; (+) strand; PAM type: NRG; PAM sequence: AAG
aggaaagaggaaggggggga

SEQ ID NO: 172110 - DNA, 20 bp, Artificial Sequence
  Description of Artificial Sequence: Synthetic oligonucleotide
  Target: LAMA2; (+) strand; PAM type: NRG; PAM sequence: AAG
aaagaggaagggggggaaag

SEQ ID NO: 172111 - DNA, 20 bp, Artificial Sequence
  Description of Artificial Sequence: Synthetic oligonucleotide
  Target: LAMA2; (+) strand; PAM type: NRG; PAM sequence: AGG
aagaggaagggggggaaaga

SEQ ID NO: 172112 - DNA, 20 bp, Artificial Sequence
  Description of Artificial Sequence: Synthetic oligonucleotide
  Target: LAMA2; (+) strand; PAM type: NRG; PAM sequence: AAG
aggaagggggggaaagaagg

SEQ ID NO: 172113 - DNA, 20 bp, Artificial Sequence
  Description of Artificial Sequence: Synthetic oligonucleotide
  Target: LAMA2; (+) strand; PAM type: NRG; PAM sequence: AGG
ggaagggggggaaagaagga

SEQ ID NO: 172114 - DNA, 20 bp, Artificial Sequence
  Description of Artificial Sequence: Synthetic oligonucleotide
  Target: LAMA2; (+) strand; PAM type: NRG; PAM sequence: GGG
gaagggggggaaagaaggaa

SEQ ID NO: 172115 - DNA, 20 bp, Artificial Sequence
  Description of Artificial Sequence: Synthetic oligonucleotide
  Target: LAMA2; (+) strand; PAM type: NRG; PAM sequence: AAG
ggggggaaagaaggaaggga

SEQ ID NO: 172116 - DNA, 20 bp, Artificial Sequence
  Description of Artificial Sequence: Synthetic oligonucleotide
  Target: LAMA2; (+) strand; PAM type: NRG; PAM sequence: AGG
gggggaaagaaggaagggaa

SEQ ID NO: 172117 - DNA, 20 bp, Artificial Sequence
  Description of Artificial Sequence: Synthetic oligonucleotide
  Target: LAMA2; (+) strand; PAM type: NRG; PAM sequence: GAG
gggaaagaaggaagggaaag

SEQ ID NO: 172118 - DNA, 20 bp, Artificial Sequence
  Description of Artificial Sequence: Synthetic oligonucleotide
  Target: LAMA2; (+) strand; PAM type: NRG; PAM sequence: AGG
ggaaagaaggaagggaaagg

SEQ ID NO: 172119 - DNA, 20 bp, Artificial Sequence
  Description of Artificial Sequence: Synthetic oligonucleotide
  Target: LAMA2; (+) strand; PAM type: NRG; PAM sequence: GGG
gaaagaaggaagggaaagga

SEQ ID NO: 172120 - DNA, 20 bp, Artificial Sequence
  Description of Artificial Sequence: Synthetic oligonucleotide
  Target: LAMA2; (+) strand; PAM type: NRG; PAM sequence: GAG
aagaaggaagggaaaggagg

SEQ ID NO: 172121 - DNA, 20 bp, Artificial Sequence
  Description of Artificial Sequence: Synthetic oligonucleotide
  Target: LAMA2; (+) strand; PAM type: NRG; PAM sequence: AGG
agaaggaagggaaaggaggg

SEQ ID NO: 172122 - DNA, 20 bp, Artificial Sequence
  Description of Artificial Sequence: Synthetic oligonucleotide
  Target: LAMA2; (+) strand; PAM type: NRG; PAM sequence: GGG
gaaggaagggaaaggaggga

SEQ ID NO: 172123 - DNA, 20 bp, Artificial Sequence
  Description of Artificial Sequence: Synthetic oligonucleotide
  Target: LAMA2; (+) strand; PAM type: NRG; PAM sequence: GAG
aggaagggaaaggagggagg

SEQ ID NO: 172124 - DNA, 20 bp, Artificial Sequence
  Description of Artificial Sequence: Synthetic oligonucleotide
  Target: LAMA2; (+) strand; PAM type: NRG; PAM sequence: AGG
ggaagggaaaggagggaggg

SEQ ID NO: 172125 - DNA, 20 bp, Artificial Sequence
  Description of Artificial Sequence: Synthetic oligonucleotide
  Target: LAMA2; (+) strand; PAM type: NRG; PAM sequence: AAG
agggaaaggagggagggagg

SEQ ID NO: 172126 - DNA, 20 bp, Artificial Sequence
  Description of Artificial Sequence: Synthetic oligonucleotide
  Target: LAMA2; (+) strand; PAM type: NRG; PAM sequence: AAG
aaggagggagggaggaagaa

SEQ ID NO: 172127 - DNA, 20 bp, Artificial Sequence
  Description of Artificial Sequence: Synthetic oligonucleotide
  Target: LAMA2; (+) strand; PAM type: NRG; PAM sequence: AAG
gagggagggaggaagaaaag

SEQ ID NO: 172128 - DNA, 20 bp, Artificial Sequence
  Description of Artificial Sequence: Synthetic oligonucleotide
  Target: LAMA2; (+) strand; PAM type: NRG; PAM sequence: AAG
agggaggaagaaaagaagaa

SEQ ID NO: 172129 - DNA, 20 bp, Artificial Sequence
  Description of Artificial Sequence: Synthetic oligonucleotide
  Target: LAMA2; (+) strand; PAM type: NRG; PAM sequence: AGG
gggaggaagaaaagaagaaa

SEQ ID NO: 172130 - DNA, 20 bp, Artificial Sequence
  Description of Artificial Sequence: Synthetic oligonucleotide
  Target: LAMA2; (+) strand; PAM type: NRG; PAM sequence: GGG
ggaggaagaaaagaagaaaa

SEQ ID NO: 172131 - DNA, 20 bp, Artificial Sequence
  Description of Artificial Sequence: Synthetic oligonucleotide
  Target: LAMA2; (+) strand; PAM type: NRG; PAM sequence: AAG
ggaagaaaagaagaaaaggg

SEQ ID NO: 172132 - DNA, 20 bp, Artificial Sequence
  Description of Artificial Sequence: Synthetic oligonucleotide
  Target: LAMA2; (+) strand; PAM type: NRG; PAM sequence: AGG
gaagaaaagaagaaaaggga

SEQ ID NO: 172133 - DNA, 20 bp, Artificial Sequence
  Description of Artificial Sequence: Synthetic oligonucleotide
  Target: LAMA2; (+) strand; PAM type: NRG; PAM sequence: AAG
gaaaagaagaaaagggaagg

SEQ ID NO: 172134 - DNA, 20 bp, Artificial Sequence
  Description of Artificial Sequence: Synthetic oligonucleotide
  Target: LAMA2; (+) strand; PAM type: NRG; PAM sequence: AGG
aaaagaagaaaagggaagga

SEQ ID NO: 172135 - DNA, 20 bp, Artificial Sequence
  Description of Artificial Sequence: Synthetic oligonucleotide
  Target: LAMA2; (+) strand; PAM type: NRG; PAM sequence: AAG
agaagaaaagggaaggaagg

SEQ ID NO: 172136 - DNA, 20 bp, Artificial Sequence
  Description of Artificial Sequence: Synthetic oligonucleotide
  Target: LAMA2; (+) strand; PAM type: NRG; PAM sequence: AGG
gaagaaaagggaaggaagga

SEQ ID NO: 172137 - DNA, 20 bp, Artificial Sequence
  Description of Artificial Sequence: Synthetic oligonucleotide
  Target: LAMA2; (+) strand; PAM type: NRG; PAM sequence: AAG
gaaaagggaaggaaggaagg

SEQ ID NO: 172138 - DNA, 20 bp, Artificial Sequence
  Description of Artificial Sequence: Synthetic oligonucleotide
  Target: LAMA2; (+) strand; PAM type: NRG; PAM sequence: AGG
aaaagggaaggaaggaagga

SEQ ID NO: 172139 - DNA, 20 bp, Artificial Sequence
  Description of Artificial Sequence: Synthetic oligonucleotide
  Target: LAMA2; (+) strand; PAM type: NRG; PAM sequence: AAG
agggaaggaaggaaggaagg

SEQ ID NO: 172140 - DNA, 20 bp, Artificial Sequence
  Description of Artificial Sequence: Synthetic oligonucleotide
  Target: LAMA2; (+) strand; PAM type: NRG; PAM sequence: AGG
gggaaggaaggaaggaagga

SEQ ID NO: 172141 - DNA, 20 bp, Artificial Sequence
  Description of Artificial Sequence: Synthetic oligonucleotide
  Target: LAMA2; (+) strand; PAM type: NRG; PAM sequence: AAG
aaggaaggaaggaaggaagg

SEQ ID NO: 172142 - DNA, 20 bp, Artificial Sequence
  Description of Artificial Sequence: Synthetic oligonucleotide
  Target: LAMA2; (+) strand; PAM type: NRG; PAM sequence: AGG
aggaaggaaggaaggaagga

SEQ ID NO: 172143 - DNA, 20 bp, Artificial Sequence
  Description of Artificial Sequence: Synthetic oligonucleotide
  Target: LAMA2; (+) strand; PAM type: NRG; PAM sequence: GGG
ggaaggaaggaaggaaggaa

SEQ ID NO: 172144 - DNA, 20 bp, Artificial Sequence
  Description of Artificial Sequence: Synthetic oligonucleotide
  Target: LAMA2; (+) strand; PAM type: NRG; PAM sequence: GGG
gaaggaaggaaggaaggaag

SEQ ID NO: 172145 - DNA, 20 bp, Artificial Sequence
  Description of Artificial Sequence: Synthetic oligonucleotide
  Target: LAMA2; (+) strand; PAM type: NRG; PAM sequence: AAG
ggaaggaaggaaggggaaat

SEQ ID NO: 172146 - DNA, 20 bp, Artificial Sequence
  Description of Artificial Sequence: Synthetic oligonucleotide
  Target: LAMA2; (+) strand; PAM type: NRG; PAM sequence: AAG
ggaaggaaggggaaataaga

SEQ ID NO: 172147 - DNA, 20 bp, Artificial Sequence
  Description of Artificial Sequence: Synthetic oligonucleotide
  Target: LAMA2; (+) strand; PAM type: NRG; PAM sequence: AGG
gaaggaaggggaaataagaa

SEQ ID NO: 172148 - DNA, 20 bp, Artificial Sequence
  Description of Artificial Sequence: Synthetic oligonucleotide
  Target: LAMA2; (+) strand; PAM type: NRG; PAM sequence: GGG
aaggaaggggaaataagaaa

SEQ ID NO: 172149 - DNA, 20 bp, Artificial Sequence
  Description of Artificial Sequence: Synthetic oligonucleotide
  Target: LAMA2; (+) strand; PAM type: NRG; PAM sequence: GAG
ggaaggggaaataagaaagg

SEQ ID NO: 172150 - DNA, 20 bp, Artificial Sequence
  Description of Artificial Sequence: Synthetic oligonucleotide
  Target: LAMA2; (+) strand; PAM type: NRG; PAM sequence: AGG
gaaggggaaataagaaaggg

SEQ ID NO: 172151 - DNA, 20 bp, Artificial Sequence
  Description of Artificial Sequence: Synthetic oligonucleotide
  Target: LAMA2; (+) strand; PAM type: NRG; PAM sequence: GGG
aaggggaaataagaaaggga

SEQ ID NO: 172152 - DNA, 20 bp, Artificial Sequence
  Description of Artificial Sequence: Synthetic oligonucleotide
  Target: LAMA2; (+) strand; PAM type: NRG; PAM sequence: CGG
ggaaataagaaagggaggga

SEQ ID NO: 172153 - DNA, 20 bp, Artificial Sequence
  Description of Artificial Sequence: Synthetic oligonucleotide
  Target: LAMA2; (+) strand; PAM type: NRG; PAM sequence: AAG
aataagaaagggagggacgg

SEQ ID NO: 172154 - DNA, 20 bp, Artificial Sequence
  Description of Artificial Sequence: Synthetic oligonucleotide
  Target: LAMA2; (+) strand; PAM type: NRG; PAM sequence: AGG
ataagaaagggagggacgga

SEQ ID NO: 172155 - DNA, 20 bp, Artificial Sequence
  Description of Artificial Sequence: Synthetic oligonucleotide
  Target: LAMA2; (+) strand; PAM type: NRG; PAM sequence: AAG
agaaagggagggacggaagg

SEQ ID NO: 172156 - DNA, 20 bp, Artificial Sequence
  Description of Artificial Sequence: Synthetic oligonucleotide
  Target: LAMA2; (+) strand; PAM type: NRG; PAM sequence: AGG
gaaagggagggacggaagga

SEQ ID NO: 172157 - DNA, 20 bp, Artificial Sequence
  Description of Artificial Sequence: Synthetic oligonucleotide
  Target: LAMA2; (+) strand; PAM type: NRG; PAM sequence: AAG
acggaaggaaggactcacca

SEQ ID NO: 172158 - DNA, 20 bp, Artificial Sequence
  Description of Artificial Sequence: Synthetic oligonucleotide
  Target: LAMA2; (+) strand; PAM type: NRG; PAM sequence: AGG
cggaaggaaggactcaccaa

SEQ ID NO: 172159 - DNA, 20 bp, Artificial Sequence
  Description of Artificial Sequence: Synthetic oligonucleotide
  Target: LAMA2; (+) strand; PAM type: NRG; PAM sequence: AAG
aggactcaccaaaggcttta

SEQ ID NO: 172160 - DNA, 20 bp, Artificial Sequence
  Description of Artificial Sequence: Synthetic oligonucleotide
  Target: LAMA2; (+) strand; PAM type: NRG; PAM sequence: TAG
actcaccaaaggctttaaag

SEQ ID NO: 172161 - DNA, 20 bp, Artificial Sequence
  Description of Artificial Sequence: Synthetic oligonucleotide
  Target: LAMA2; (+) strand; PAM type: NRG; PAM sequence: AGG
ctcaccaaaggctttaaagt

SEQ ID NO: 172162 - DNA, 20 bp, Artificial Sequence
  Description of Artificial Sequence: Synthetic oligonucleotide
  Target: LAMA2; (+) strand; PAM type: NRG; PAM sequence: GAG
tctctctaaactataataat

SEQ ID NO: 172163 - DNA, 20 bp, Artificial Sequence
  Description of Artificial Sequence: Synthetic oligonucleotide
  Target: LAMA2; (+) strand; PAM type: NRG; PAM sequence: AGG
ctctctaaactataataatg

SEQ ID NO: 172164 - DNA, 20 bp, Artificial Sequence
  Description of Artificial Sequence: Synthetic oligonucleotide
  Target: LAMA2; (+) strand; PAM type: NRG; PAM sequence: GGG
tctctaaactataataatga

SEQ ID NO: 172165 - DNA, 20 bp, Artificial Sequence
  Description of Artificial Sequence: Synthetic oligonucleotide
  Target: LAMA2; (+) strand; PAM type: NRG; PAM sequence: CAG
taataatgagggataaccat

SEQ ID NO: 172166 - DNA, 20 bp, Artificial Sequence
  Description of Artificial Sequence: Synthetic oligonucleotide
  Target: LAMA2; (+) strand; PAM type: NRG; PAM sequence: CAG
acttttacatttttgtttgt

SEQ ID NO: 172167 - DNA, 20 bp, Artificial Sequence
  Description of Artificial Sequence: Synthetic oligonucleotide
  Target: LAMA2; (+) strand; PAM type: NRG; PAM sequence: TGG
tcagttgtaataaattgctg

SEQ ID NO: 172168 - DNA, 20 bp, Artificial Sequence
  Description of Artificial Sequence: Synthetic oligonucleotide
  Target: LAMA2; (+) strand; PAM type: NRG; PAM sequence: GGG
cagttgtaataaattgctgt

SEQ ID NO: 172169 - DNA, 20 bp, Artificial Sequence
  Description of Artificial Sequence: Synthetic oligonucleotide
  Target: LAMA2; (+) strand; PAM type: NRG; PAM sequence: AAG
gtaataaattgctgtgggaa

SEQ ID NO: 172170 - DNA, 20 bp, Artificial Sequence
  Description of Artificial Sequence: Synthetic oligonucleotide
  Target: LAMA2; (+) strand; PAM type: NRG; PAM sequence: CAG
tgtgggaaaagtaaatgctt

SEQ ID NO: 172171 - DNA, 20 bp, Artificial Sequence
  Description of Artificial Sequence: Synthetic oligonucleotide
  Target: LAMA2; (+) strand; PAM type: NRG; PAM sequence: CAG
agactgacatttatctattt

SEQ ID NO: 172172 - DNA, 20 bp, Artificial Sequence
  Description of Artificial Sequence: Synthetic oligonucleotide
  Target: LAMA2; (+) strand; PAM type: NRG; PAM sequence: TGG
atctatttcagctttatgtt

SEQ ID NO: 172173 - DNA, 20 bp, Artificial Sequence
  Description of Artificial Sequence: Synthetic oligonucleotide
  Target: LAMA2; (+) strand; PAM type: NRG; PAM sequence: TAG
atttcagctttatgtttgga

SEQ ID NO: 172174 - DNA, 20 bp, Artificial Sequence
  Description of Artificial Sequence: Synthetic oligonucleotide
  Target: LAMA2; (+) strand; PAM type: NRG; PAM sequence: GAG
ttcatcctatctttcattat

SEQ ID NO: 172175 - DNA, 20 bp, Artificial Sequence
  Description of Artificial Sequence: Synthetic oligonucleotide
  Target: LAMA2; (+) strand; PAM type: NRG; PAM sequence: TAG
tatgagtcatgacctcgtta

SEQ ID NO: 172176 - DNA, 20 bp, Artificial Sequence
  Description of Artificial Sequence: Synthetic oligonucleotide
  Target: LAMA2; (+) strand; PAM type: NRG; PAM sequence: AAG
taatcaccttctattcatct

SEQ ID NO: 172177 - DNA, 20 bp, Artificial Sequence
  Description of Artificial Sequence: Synthetic oligonucleotide
  Target: LAMA2; (+) strand; PAM type: NRG; PAM sequence: AGG
aatcaccttctattcatcta

SEQ ID NO: 172178 - DNA, 20 bp, Artificial Sequence
  Description of Artificial Sequence: Synthetic oligonucleotide
  Target: LAMA2; (+) strand; PAM type: NRG; PAM sequence: TAG
accgtgctatgactcctgat

SEQ ID NO: 172179 - DNA, 20 bp, Artificial Sequence
  Description of Artificial Sequence: Synthetic oligonucleotide
  Target: LAMA2; (+) strand; PAM type: NRG; PAM sequence: TAG
tgttttattccacgcattat

SEQ ID NO: 172180 - DNA, 20 bp, Artificial Sequence
  Description of Artificial Sequence: Synthetic oligonucleotide
  Target: LAMA2; (+) strand; PAM type: NRG; PAM sequence: GAG
cacgcattattagaattaat

SEQ ID NO: 172181 - DNA, 20 bp, Artificial Sequence
  Description of Artificial Sequence: Synthetic oligonucleotide
  Target: LAMA2; (+) strand; PAM type: NRG; PAM sequence: TGG
gcattattagaattaatgag

SEQ ID NO: 172182 - DNA, 20 bp, Artificial Sequence
  Description of Artificial Sequence: Synthetic oligonucleotide
  Target: LAMA2; (+) strand; PAM type: NRG; PAM sequence: TAG
ttagaattaatgagtggaca

SEQ ID NO: 172183 - DNA, 20 bp, Artificial Sequence
  Description of Artificial Sequence: Synthetic oligonucleotide
  Target: LAMA2; (+) strand; PAM type: NRG; PAM sequence: AGG
tagaattaatgagtggacat

SEQ ID NO: 172184 - DNA, 20 bp, Artificial Sequence
  Description of Artificial Sequence: Synthetic oligonucleotide
  Target: LAMA2; (+) strand; PAM type: NRG; PAM sequence: TAG
gtggacataggtaaacccat

SEQ ID NO: 172185 - DNA, 20 bp, Artificial Sequence
  Description of Artificial Sequence: Synthetic oligonucleotide
  Target: LAMA2; (+) strand; PAM type: NRG; PAM sequence: TAG
gtttatttcctgacatacaa

SEQ ID NO: 172186 - DNA, 20 bp, Artificial Sequence
  Description of Artificial Sequence: Synthetic oligonucleotide
  Target: LAMA2; (+) strand; PAM type: NRG; PAM sequence: AGG
tttatttcctgacatacaat

SEQ ID NO: 172187 - DNA, 20 bp, Artificial Sequence
  Description of Artificial Sequence: Synthetic oligonucleotide
  Target: LAMA2; (+) strand; PAM type: NRG; PAM sequence: TAG
caataggacttaatcaatga

SEQ ID NO: 172188 - DNA, 20 bp, Artificial Sequence
  Description of Artificial Sequence: Synthetic oligonucleotide
  Target: LAMA2; (+) strand; PAM type: NRG; PAM sequence: CAG
cacctttccttcctgtttct

SEQ ID NO: 172189 - DNA, 20 bp, Artificial Sequence
  Description of Artificial Sequence: Synthetic oligonucleotide
  Target: LAMA2; (+) strand; PAM type: NRG; PAM sequence: CAG
ttccttcctgtttctcagat

SEQ ID NO: 172190 - DNA, 20 bp, Artificial Sequence
  Description of Artificial Sequence: Synthetic oligonucleotide
  Target: LAMA2; (+) strand; PAM type: NRG; PAM sequence: GAG
ccttcctgtttctcagatca

SEQ ID NO: 172191 - DNA, 20 bp, Artificial Sequence
  Description of Artificial Sequence: Synthetic oligonucleotide
  Target: LAMA2; (+) strand; PAM type: NRG; PAM sequence: CAG
ttcttaataaatttacccat

SEQ ID NO: 172192 - DNA, 20 bp, Artificial Sequence
  Description of Artificial Sequence: Synthetic oligonucleotide
  Target: LAMA2; (+) strand; PAM type: NRG; PAM sequence: GAG
cttaataaatttacccatca

SEQ ID NO: 172193 - DNA, 20 bp, Artificial Sequence
  Description of Artificial Sequence: Synthetic oligonucleotide
  Target: LAMA2; (+) strand; PAM type: NRG; PAM sequence: AGG
ttaataaatttacccatcag

SEQ ID NO: 172194 - DNA, 20 bp, Artificial Sequence
  Description of Artificial Sequence: Synthetic oligonucleotide
  Target: LAMA2; (+) strand; PAM type: NRG; PAM sequence: CAG
ccatcagaggattttgtttt

SEQ ID NO: 172195 - DNA, 20 bp, Artificial Sequence
  Description of Artificial Sequence: Synthetic oligonucleotide
  Target: LAMA2; (+) strand; PAM type: NRG; PAM sequence: TAG
gaggattttgttttcagtct

SEQ ID NO: 172196 - DNA, 20 bp, Artificial Sequence
  Description of Artificial Sequence: Synthetic oligonucleotide
  Target: LAMA2; (+) strand; PAM type: NRG; PAM sequence: CAG
tttcagtcttagtatgaaaa

SEQ ID NO: 172197 - DNA, 20 bp, Artificial Sequence
  Description of Artificial Sequence: Synthetic oligonucleotide
  Target: LAMA2; (+) strand; PAM type: NRG; PAM sequence: GAG
aaaacagttttgcttctcct

SEQ ID NO: 172198 - DNA, 20 bp, Artificial Sequence
  Description of Artificial Sequence: Synthetic oligonucleotide
  Target: LAMA2; (+) strand; PAM type: NRG; PAM sequence: AGG
aaacagttttgcttctcctg

SEQ ID NO: 172199 - DNA, 20 bp, Artificial Sequence
  Description of Artificial Sequence: Synthetic oligonucleotide
  Target: LAMA2; (+) strand; PAM type: NRG; PAM sequence: TAG
ggaatttttacttaccttta

SEQ ID NO: 172200 - DNA, 20 bp, Artificial Sequence
  Description of Artificial Sequence: Synthetic oligonucleotide
  Target: LAMA2; (+) strand; PAM type: NRG; PAM sequence: AAG
atagatactgtatgcctctt

SEQ ID NO: 172201 - DNA, 20 bp, Artificial Sequence
  Description of Artificial Sequence: Synthetic oligonucleotide
  Target: LAMA2; (+) strand; PAM type: NRG; PAM sequence: TAG
tttgtattccctgctacgcg

SEQ ID NO: 172202 - DNA, 20 bp, Artificial Sequence
  Description of Artificial Sequence: Synthetic oligonucleotide
  Target: LAMA2; (+) strand; PAM type: NRG; PAM sequence: AAG
cctgctacgcgtagtctact

SEQ ID NO: 172203 - DNA, 20 bp, Artificial Sequence
  Description of Artificial Sequence: Synthetic oligonucleotide
  Target: LAMA2; (+) strand; PAM type: NRG; PAM sequence: TAG
gcgtagtctactaagatgct

SEQ ID NO: 172204 - DNA, 20 bp, Artificial Sequence
  Description of Artificial Sequence: Synthetic oligonucleotide
  Target: LAMA2; (+) strand; PAM type: NRG; PAM sequence: TAG
tagtctactaagatgcttag

SEQ ID NO: 172205 - DNA, 20 bp, Artificial Sequence
  Description of Artificial Sequence: Synthetic oligonucleotide
  Target: LAMA2; (+) strand; PAM type: NRG; PAM sequence: TGG
tctactaagatgcttagtag

SEQ ID NO: 172206 - DNA, 20 bp, Artificial Sequence
  Description of Artificial Sequence: Synthetic oligonucleotide
  Target: LAMA2; (+) strand; PAM type: NRG; PAM sequence: TAG
aagatgcttagtagtggact

SEQ ID NO: 172207 - DNA, 20 bp, Artificial Sequence
  Description of Artificial Sequence: Synthetic oligonucleotide
  Target: LAMA2; (+) strand; PAM type: NRG; PAM sequence: AGG
agatgcttagtagtggactt

SEQ ID NO: 172208 - DNA, 20 bp, Artificial Sequence
  Description of Artificial Sequence: Synthetic oligonucleotide
  Target: LAMA2; (+) strand; PAM type: NRG; PAM sequence: TGG
atgcactgcattgaacgtta

SEQ ID NO: 172209 - DNA, 20 bp, Artificial Sequence
  Description of Artificial Sequence: Synthetic oligonucleotide
  Target: LAMA2; (+) strand; PAM type: NRG; PAM sequence: TGG
ctgcattgaacgttatggca

SEQ ID NO: 172210 - DNA, 20 bp, Artificial Sequence
  Description of Artificial Sequence: Synthetic oligonucleotide
  Target: LAMA2; (+) strand; PAM type: NRG; PAM sequence: TAG
acaacttttttttttacctg

SEQ ID NO: 172211 - DNA, 20 bp, Artificial Sequence
  Description of Artificial Sequence: Synthetic oligonucleotide
  Target: LAMA2; (+) strand; PAM type: NRG; PAM sequence: TAG
attttaattttatctgatat

SEQ ID NO: 172212 - DNA, 20 bp, Artificial Sequence
  Description of Artificial Sequence: Synthetic oligonucleotide
  Target: LAMA2; (+) strand; PAM type: NRG; PAM sequence: AGG
ttttaattttatctgatatt

SEQ ID NO: 172213 - DNA, 20 bp, Artificial Sequence
  Description of Artificial Sequence: Synthetic oligonucleotide
  Target: LAMA2; (+) strand; PAM type: NRG; PAM sequence: AAG
cctaaatcctcctttgaatt

SEQ ID NO: 172214 - DNA, 20 bp, Artificial Sequence
  Description of Artificial Sequence: Synthetic oligonucleotide
  Target: LAMA2; (+) strand; PAM type: NRG; PAM sequence: TGG
aatcctcctttgaattaagt

SEQ ID NO: 172215 - DNA, 20 bp, Artificial Sequence
  Description of Artificial Sequence: Synthetic oligonucleotide
  Target: LAMA2; (+) strand; PAM type: NRG; PAM sequence: AAG
gaattaagttggaaataaat

SEQ ID NO: 172216 - DNA, 20 bp, Artificial Sequence
  Description of Artificial Sequence: Synthetic oligonucleotide
  Target: LAMA2; (+) strand; PAM type: NRG; PAM sequence: AAG
aaataaataagtaaattcca

SEQ ID NO: 172217 - DNA, 20 bp, Artificial Sequence
  Description of Artificial Sequence: Synthetic oligonucleotide
  Target: LAMA2; (+) strand; PAM type: NRG; PAM sequence: TGG
tacaatcattttcaatactg

SEQ ID NO: 172218 - DNA, 20 bp, Artificial Sequence
  Description of Artificial Sequence: Synthetic oligonucleotide
  Target: LAMA2; (+) strand; PAM type: NRG; PAM sequence: GGG
acaatcattttcaatactgt

SEQ ID NO: 172219 - DNA, 20 bp, Artificial Sequence
  Description of Artificial Sequence: Synthetic oligonucleotide
  Target: LAMA2; (+) strand; PAM type: NRG; PAM sequence: AAG
tcattttcaatactgtggga

SEQ ID NO: 172220 - DNA, 20 bp, Artificial Sequence
  Description of Artificial Sequence: Synthetic oligonucleotide
  Target: LAMA2; (+) strand; PAM type: NRG; PAM sequence: AAG
gtgggaaagaaaatatattg

SEQ ID NO: 172221 - DNA, 20 bp, Artificial Sequence
  Description of Artificial Sequence: Synthetic oligonucleotide
  Target: LAMA2; (+) strand; PAM type: NRG; PAM sequence: TAG
aagaaaatatattgaagtga

SEQ ID NO: 172222 - DNA, 20 bp, Artificial Sequence
  Description of Artificial Sequence: Synthetic oligonucleotide
  Target: LAMA2; (+) strand; PAM type: NRG; PAM sequence: AAG
gatagtgcatacttttgaat

SEQ ID NO: 172223 - DNA, 20 bp, Artificial Sequence
  Description of Artificial Sequence: Synthetic oligonucleotide
  Target: LAMA2; (+) strand; PAM type: NRG; PAM sequence: GAG
tagtgcatacttttgaataa

SEQ ID NO: 172224 - DNA, 20 bp, Artificial Sequence
  Description of Artificial Sequence: Synthetic oligonucleotide
  Target: LAMA2; (+) strand; PAM type: NRG; PAM sequence: AAG
tgaaaaacacattcatcttt

SEQ ID NO: 172225 - DNA, 20 bp, Artificial Sequence
  Description of Artificial Sequence: Synthetic oligonucleotide
  Target: LAMA2; (+) strand; PAM type: NRG; PAM sequence: CAG
cattcatctttaagaatgct

SEQ ID NO: 172226 - DNA, 20 bp, Artificial Sequence
  Description of Artificial Sequence: Synthetic oligonucleotide
  Target: LAMA2; (+) strand; PAM type: NRG; PAM sequence: GAG
ttcatctttaagaatgctca

SEQ ID NO: 172227 - DNA, 20 bp, Artificial Sequence
  Description of Artificial Sequence: Synthetic oligonucleotide
  Target: LAMA2; (+) strand; PAM type: NRG; PAM sequence: AAG
atctttaagaatgctcagag

SEQ ID NO: 172228 - DNA, 20 bp, Artificial Sequence
  Description of Artificial Sequence: Synthetic oligonucleotide
  Target: LAMA2; (+) strand; PAM type: NRG; PAM sequence: CAG
aagaatgctcagagaagttc

SEQ ID NO: 172229 - DNA, 20 bp, Artificial Sequence
  Description of Artificial Sequence: Synthetic oligonucleotide
  Target: LAMA2; (+) strand; PAM type: NRG; PAM sequence: TAG
ttccagatcctatttataca

SEQ ID NO: 172230 - DNA, 20 bp, Artificial Sequence
  Description of Artificial Sequence: Synthetic oligonucleotide
  Target: LAMA2; (+) strand; PAM type: NRG; PAM sequence: AGG
tccagatcctatttatacat

SEQ ID NO: 172231 - DNA, 20 bp, Artificial Sequence
  Description of Artificial Sequence: Synthetic oligonucleotide
  Target: LAMA2; (+) strand; PAM type: NRG; PAM sequence: TGG
tcctatttatacataggatc

SEQ ID NO: 172232 - DNA, 20 bp, Artificial Sequence
  Description of Artificial Sequence: Synthetic oligonucleotide
  Target: LAMA2; (+) strand; PAM type: NRG; PAM sequence: AAG
tatgtttatatatgtctata

SEQ ID NO: 172233 - DNA, 20 bp, Artificial Sequence
  Description of Artificial Sequence: Synthetic oligonucleotide
  Target: LAMA2; (+) strand; PAM type: NRG; PAM sequence: GAG
tgtttatatatgtctataaa

SEQ ID NO: 172234 - DNA, 20 bp, Artificial Sequence
  Description of Artificial Sequence: Synthetic oligonucleotide
  Target: LAMA2; (+) strand; PAM type: NRG; PAM sequence: CAG
tatgtctataaagagtgaaa

SEQ ID NO: 172235 - DNA, 20 bp, Artificial Sequence
  Description of Artificial Sequence: Synthetic oligonucleotide
  Target: LAMA2; (+) strand; PAM type: NRG; PAM sequence: TGG
tgatgcttcctttccttttt

SEQ ID NO: 172236 - DNA, 20 bp, Artificial Sequence
  Description of Artificial Sequence: Synthetic oligonucleotide
  Target: LAMA2; (+) strand; PAM type: NRG; PAM sequence: TGG
tgcttcctttccttttttgg

SEQ ID NO: 172237 - DNA, 20 bp, Artificial Sequence
  Description of Artificial Sequence: Synthetic oligonucleotide
  Target: LAMA2; (+) strand; PAM type: NRG; PAM sequence: GGG
gcttcctttccttttttggt

SEQ ID NO: 172238 - DNA, 20 bp, Artificial Sequence
  Description of Artificial Sequence: Synthetic oligonucleotide
  Target: LAMA2; (+) strand; PAM type: NRG; PAM sequence: GGG
cttcctttccttttttggtg

SEQ ID NO: 172239 - DNA, 20 bp, Artificial Sequence
  Description of Artificial Sequence: Synthetic oligonucleotide
  Target: LAMA2; (+) strand; PAM type: NRG; PAM sequence: GGG
ttcctttccttttttggtgg

SEQ ID NO: 172240 - DNA, 20 bp, Artificial Sequence
  Description of Artificial Sequence: Synthetic oligonucleotide
  Target: LAMA2; (+) strand; PAM type: NRG; PAM sequence: GAG
cctttccttttttggtgggg

SEQ ID NO: 172241 - DNA, 20 bp, Artificial Sequence
  Description of Artificial Sequence: Synthetic oligonucleotide
  Target: LAMA2; (+) strand; PAM type: NRG; PAM sequence: AAG
ttttggtgggggagatttct

SEQ ID NO: 172242 - DNA, 20 bp, Artificial Sequence
  Description of Artificial Sequence: Synthetic oligonucleotide
  Target: LAMA2; (+) strand; PAM type: NRG; PAM sequence: TAG
tctaagaaaatcatattgcc

SEQ ID NO: 172243 - DNA, 20 bp, Artificial Sequence
  Description of Artificial Sequence: Synthetic oligonucleotide
  Target: LAMA2; (+) strand; PAM type: NRG; PAM sequence: AAG
agaaaatcatattgcctagc

SEQ ID NO: 172244 - DNA, 20 bp, Artificial Sequence
  Description of Artificial Sequence: Synthetic oligonucleotide
  Target: LAMA2; (+) strand; PAM type: NRG; PAM sequence: TAG
tcatattgcctagcaagtga

SEQ ID NO: 172245 - DNA, 20 bp, Artificial Sequence
  Description of Artificial Sequence: Synthetic oligonucleotide
  Target: LAMA2; (+) strand; PAM type: NRG; PAM sequence: GAG
agcaagtgatagatgcctat

SEQ ID NO: 172246 - DNA, 20 bp, Artificial Sequence
  Description of Artificial Sequence: Synthetic oligonucleotide
  Target: LAMA2; (+) strand; PAM type: NRG; PAM sequence: GAG
caagtgatagatgcctatga

SEQ ID NO: 172247 - DNA, 20 bp, Artificial Sequence
  Description of Artificial Sequence: Synthetic oligonucleotide
  Target: LAMA2; (+) strand; PAM type: NRG; PAM sequence: TGG
atagatgcctatgagagaaa

SEQ ID NO: 172248 - DNA, 20 bp, Artificial Sequence
  Description of Artificial Sequence: Synthetic oligonucleotide
  Target: LAMA2; (+) strand; PAM type: NRG; PAM sequence: CAG
atgagagaaatggaaaatga

SEQ ID NO: 172249 - DNA, 20 bp, Artificial Sequence
  Description of Artificial Sequence: Synthetic oligonucleotide
  Target: LAMA2; (+) strand; PAM type: NRG; PAM sequence: CAG
gcattttaaaatttaacttt

SEQ ID NO: 172250 - DNA, 20 bp, Artificial Sequence
  Description of Artificial Sequence: Synthetic oligonucleotide
  Target: LAMA2; (+) strand; PAM type: NRG; PAM sequence: TAG
ttttaaaatttaactttcag

SEQ ID NO: 172251 - DNA, 20 bp, Artificial Sequence
  Description of Artificial Sequence: Synthetic oligonucleotide
  Target: LAMA2; (+) strand; PAM type: NRG; PAM sequence: TGG
aactttcagtagaaaaataa

SEQ ID NO: 172252 - DNA, 20 bp, Artificial Sequence
  Description of Artificial Sequence: Synthetic oligonucleotide
  Target: LAMA2; (+) strand; PAM type: NRG; PAM sequence: TAG
aatggaaataaaaattaaac

SEQ ID NO: 172253 - DNA, 20 bp, Artificial Sequence
  Description of Artificial Sequence: Synthetic oligonucleotide
  Target: LAMA2; (+) strand; PAM type: NRG; PAM sequence: CAG
gaaataaaaattaaactaga

SEQ ID NO: 172254 - DNA, 20 bp, Artificial Sequence
  Description of Artificial Sequence: Synthetic oligonucleotide
  Target: LAMA2; (+) strand; PAM type: NRG; PAM sequence: GAG
atacaaaaataatgttaaat

SEQ ID NO: 172255 - DNA, 20 bp, Artificial Sequence
  Description of Artificial Sequence: Synthetic oligonucleotide
  Target: LAMA2; (+) strand; PAM type: NRG; PAM sequence: AGG
tacaaaaataatgttaaatg

SEQ ID NO: 172256 - DNA, 20 bp, Artificial Sequence
  Description of Artificial Sequence: Synthetic oligonucleotide
  Target: LAMA2; (+) strand; PAM type: NRG; PAM sequence: GGG
acaaaaataatgttaaatga

SEQ ID NO: 172257 - DNA, 20 bp, Artificial Sequence
  Description of Artificial Sequence: Synthetic oligonucleotide
  Target: LAMA2; (+) strand; PAM type: NRG; PAM sequence: AAG
aaataatgttaaatgagggt

SEQ ID NO: 172258 - DNA, 20 bp, Artificial Sequence
  Description of Artificial Sequence: Synthetic oligonucleotide
  Target: LAMA2; (+) strand; PAM type: NRG; PAM sequence: AAG
atgttaaatgagggtaagta

SEQ ID NO: 172259 - DNA, 20 bp, Artificial Sequence
  Description of Artificial Sequence: Synthetic oligonucleotide
  Target: LAMA2; (+) strand; PAM type: NRG; PAM sequence: CAG
aaatgagggtaagtaaagcg

SEQ ID NO: 172260 - DNA, 20 bp, Artificial Sequence
  Description of Artificial Sequence: Synthetic oligonucleotide
  Target: LAMA2; (+) strand; PAM type: NRG; PAM sequence: TGG
taaagcgcagtgaaataatc

SEQ ID NO: 172261 - DNA, 20 bp, Artificial Sequence
  Description of Artificial Sequence: Synthetic oligonucleotide
  Target: LAMA2; (+) strand; PAM type: NRG; PAM sequence: TGG
aaatgttatccaaattaaac

SEQ ID NO: 172262 - DNA, 20 bp, Artificial Sequence
  Description of Artificial Sequence: Synthetic oligonucleotide
  Target: LAMA2; (+) strand; PAM type: NRG; PAM sequence: AAG
gttatccaaattaaactggc

SEQ ID NO: 172263 - DNA, 20 bp, Artificial Sequence
  Description of Artificial Sequence: Synthetic oligonucleotide
  Target: LAMA2; (+) strand; PAM type: NRG; PAM sequence: TGG
attaaactggcaagttttaa

SEQ ID NO: 172264 - DNA, 20 bp, Artificial Sequence
  Description of Artificial Sequence: Synthetic oligonucleotide
  Target: LAMA2; (+) strand; PAM type: NRG; PAM sequence: GGG
ttaaactggcaagttttaat

SEQ ID NO: 172265 - DNA, 20 bp, Artificial Sequence
  Description of Artificial Sequence: Synthetic oligonucleotide
  Target: LAMA2; (+) strand; PAM type: NRG; PAM sequence: GAG
taatttatctgtgtcccgat

SEQ ID NO: 172266 - DNA, 20 bp, Artificial Sequence
  Description of Artificial Sequence: Synthetic oligonucleotide
  Target: LAMA2; (+) strand; PAM type: NRG; PAM sequence: AGG
aatttatctgtgtcccgatg

SEQ ID NO: 172267 - DNA, 20 bp, Artificial Sequence
  Description of Artificial Sequence: Synthetic oligonucleotide
  Target: LAMA2; (+) strand; PAM type: NRG; PAM sequence: AAG
aaaatttgtttttcataatg

SEQ ID NO: 172268 - DNA, 20 bp, Artificial Sequence
  Description of Artificial Sequence: Synthetic oligonucleotide
  Target: LAMA2; (+) strand; PAM type: NRG; PAM sequence: AAG
tgtttttcataatgaagata

SEQ ID NO: 172269 - DNA, 20 bp, Artificial Sequence
  Description of Artificial Sequence: Synthetic oligonucleotide
  Target: LAMA2; (+) strand; PAM type: NRG; PAM sequence: TAG
ttttcataatgaagataaag

SEQ ID NO: 172270 - DNA, 20 bp, Artificial Sequence
  Description of Artificial Sequence: Synthetic oligonucleotide
  Target: LAMA2; (+) strand; PAM type: NRG; PAM sequence: AAG
cataccaaaaacccatttga

SEQ ID NO: 172271 - DNA, 20 bp, Artificial Sequence
  Description of Artificial Sequence: Synthetic oligonucleotide
  Target: LAMA2; (+) strand; PAM type: NRG; PAM sequence: AAG
atgctctcatttaatccaaa

SEQ ID NO: 172272 - DNA, 20 bp, Artificial Sequence
  Description of Artificial Sequence: Synthetic oligonucleotide
  Target: LAMA2; (+) strand; PAM type: NRG; PAM sequence: AAG
tttaatccaaaaagatactg

SEQ ID NO: 172273 - DNA, 20 bp, Artificial Sequence
  Description of Artificial Sequence: Synthetic oligonucleotide
  Target: LAMA2; (+) strand; PAM type: NRG; PAM sequence: AGG
ttaatccaaaaagatactga

SEQ ID NO: 172274 - DNA, 20 bp, Artificial Sequence
  Description of Artificial Sequence: Synthetic oligonucleotide
  Target: LAMA2; (+) strand; PAM type: NRG; PAM sequence: TGG
ctgaaggcccatgtccattt

SEQ ID NO: 172275 - DNA, 20 bp, Artificial Sequence
  Description of Artificial Sequence: Synthetic oligonucleotide
  Target: LAMA2; (+) strand; PAM type: NRG; PAM sequence: GGG
tgaaggcccatgtccatttt

SEQ ID NO: 172276 - DNA, 20 bp, Artificial Sequence
  Description of Artificial Sequence: Synthetic oligonucleotide
  Target: LAMA2; (+) strand; PAM type: NRG; PAM sequence: GGG
gaaggcccatgtccattttg

SEQ ID NO: 172277 - DNA, 20 bp, Artificial Sequence
  Description of Artificial Sequence: Synthetic oligonucleotide
  Target: LAMA2; (+) strand; PAM type: NRG; PAM sequence: GAG
aggcccatgtccattttggg

SEQ ID NO: 172278 - DNA, 20 bp, Artificial Sequence
  Description of Artificial Sequence: Synthetic oligonucleotide
  Target: LAMA2; (+) strand; PAM type: NRG; PAM sequence: TGG
tgtattttttttacataaca

SEQ ID NO: 172279 - DNA, 20 bp, Artificial Sequence
  Description of Artificial Sequence: Synthetic oligonucleotide
  Target: LAMA2; (+) strand; PAM type: NRG; PAM sequence: GGG
gtattttttttacataacat

SEQ ID NO: 172280 - DNA, 20 bp, Artificial Sequence
  Description of Artificial Sequence: Synthetic oligonucleotide
  Target: LAMA2; (+) strand; PAM type: NRG; PAM sequence: AAG
ataacatgggttgcaacaaa

SEQ ID NO: 172281 - DNA, 20 bp, Artificial Sequence
  Description of Artificial Sequence: Synthetic oligonucleotide
  Target: LAMA2; (+) strand; PAM type: NRG; PAM sequence: TGG
catgggttgcaacaaaaagc

SEQ ID NO: 172282 - DNA, 20 bp, Artificial Sequence
  Description of Artificial Sequence: Synthetic oligonucleotide
  Target: LAMA2; (+) strand; PAM type: NRG; PAM sequence: TGG
ttgcaacaaaaagctggcca

SEQ ID NO: 172283 - DNA, 20 bp, Artificial Sequence
  Description of Artificial Sequence: Synthetic oligonucleotide
  Target: LAMA2; (+) strand; PAM type: NRG; PAM sequence: TAG
acaaaaagctggccatggaa

SEQ ID NO: 172284 - DNA, 20 bp, Artificial Sequence
  Description of Artificial Sequence: Synthetic oligonucleotide
  Target: LAMA2; (+) strand; PAM type: NRG; PAM sequence: CAG
aaaagctggccatggaatag

SEQ ID NO: 172285 - DNA, 20 bp, Artificial Sequence
  Description of Artificial Sequence: Synthetic oligonucleotide
  Target: LAMA2; (+) strand; PAM type: NRG; PAM sequence: AAG
ggaatagcagtttattccat

SEQ ID NO: 172286 - DNA, 20 bp, Artificial Sequence
  Description of Artificial Sequence: Synthetic oligonucleotide
  Target: LAMA2; (+) strand; PAM type: NRG; PAM sequence: CAG
atagcagtttattccataag

SEQ ID NO: 172287 - DNA, 20 bp, Artificial Sequence
  Description of Artificial Sequence: Synthetic oligonucleotide
  Target: LAMA2; (+) strand; PAM type: NRG; PAM sequence: TGG
tgctaaaatgtttgttcttt

SEQ ID NO: 172288 - DNA, 20 bp, Artificial Sequence
  Description of Artificial Sequence: Synthetic oligonucleotide
  Target: LAMA2; (+) strand; PAM type: NRG; PAM sequence: TGG
ctaaccacattgaaatcttc

SEQ ID NO: 172289 - DNA, 20 bp, Artificial Sequence
  Description of Artificial Sequence: Synthetic oligonucleotide
  Target: LAMA2; (+) strand; PAM type: NRG; PAM sequence: GGG
taaccacattgaaatcttct

SEQ ID NO: 172290 - DNA, 20 bp, Artificial Sequence
  Description of Artificial Sequence: Synthetic oligonucleotide
  Target: LAMA2; (+) strand; PAM type: NRG; PAM sequence: CAG
ttctgggactatttcaataa

SEQ ID NO: 172291 - DNA, 20 bp, Artificial Sequence
  Description of Artificial Sequence: Synthetic oligonucleotide
  Target: LAMA2; (+) strand; PAM type: NRG; PAM sequence: TGG
aacaattgataatatccaac

SEQ ID NO: 172292 - DNA, 20 bp, Artificial Sequence
  Description of Artificial Sequence: Synthetic oligonucleotide
  Target: LAMA2; (+) strand; PAM type: NRG; PAM sequence: GAG
aaaaaaacaacctcatgact

SEQ ID NO: 172293 - DNA, 20 bp, Artificial Sequence
  Description of Artificial Sequence: Synthetic oligonucleotide
  Target: LAMA2; (+) strand; PAM type: NRG; PAM sequence: CAG
aacctcatgactgagctgca

SEQ ID NO: 172294 - DNA, 20 bp, Artificial Sequence
  Description of Artificial Sequence: Synthetic oligonucleotide
  Target: LAMA2; (+) strand; PAM type: NRG; PAM sequence: TAG
agctgcacagtgatgtccta

SEQ ID NO: 172295 - DNA, 20 bp, Artificial Sequence
  Description of Artificial Sequence: Synthetic oligonucleotide
  Target: LAMA2; (+) strand; PAM type: NRG; PAM sequence: TGG
gatgtcctatagaaacttta

SEQ ID NO: 172296 - DNA, 20 bp, Artificial Sequence
  Description of Artificial Sequence: Synthetic oligonucleotide
  Target: LAMA2; (+) strand; PAM type: NRG; PAM sequence: GGG
atgtcctatagaaactttat

SEQ ID NO: 172297 - DNA, 20 bp, Artificial Sequence
  Description of Artificial Sequence: Synthetic oligonucleotide
  Target: LAMA2; (+) strand; PAM type: NRG; PAM sequence: GGG
tgtcctatagaaactttatg

SEQ ID NO: 172298 - DNA, 20 bp, Artificial Sequence
  Description of Artificial Sequence: Synthetic oligonucleotide
  Target: LAMA2; (+) strand; PAM type: NRG; PAM sequence: AAG
tttattttcctttttacttt

SEQ ID NO: 172299 - DNA, 20 bp, Artificial Sequence
  Description of Artificial Sequence: Synthetic oligonucleotide
  Target: LAMA2; (+) strand; PAM type: NRG; PAM sequence: TGG
ttcctttttactttaagttc

SEQ ID NO: 172300 - DNA, 20 bp, Artificial Sequence
  Description of Artificial Sequence: Synthetic oligonucleotide
  Target: LAMA2; (+) strand; PAM type: NRG; PAM sequence: GGG
tcctttttactttaagttct

SEQ ID NO: 172301 - DNA, 20 bp, Artificial Sequence
  Description of Artificial Sequence: Synthetic oligonucleotide
  Target: LAMA2; (+) strand; PAM type: NRG; PAM sequence: CAG
taagttctgggatgcatgca

SEQ ID NO: 172302 - DNA, 20 bp, Artificial Sequence
  Description of Artificial Sequence: Synthetic oligonucleotide
  Target: LAMA2; (+) strand; PAM type: NRG; PAM sequence: CAG
ggatgcatgcacagaatgtt

SEQ ID NO: 172303 - DNA, 20 bp, Artificial Sequence
  Description of Artificial Sequence: Synthetic oligonucleotide
  Target: LAMA2; (+) strand; PAM type: NRG; PAM sequence: AGG
gatgcatgcacagaatgttc

SEQ ID NO: 172304 - DNA, 20 bp, Artificial Sequence
  Description of Artificial Sequence: Synthetic oligonucleotide
  Target: LAMA2; (+) strand; PAM type: NRG; PAM sequence: TAG
gaatgttcaggtttgttgca

SEQ ID NO: 172305 - DNA, 20 bp, Artificial Sequence
  Description of Artificial Sequence: Synthetic oligonucleotide
  Target: LAMA2; (+) strand; PAM type: NRG; PAM sequence: AGG
aatgttcaggtttgttgcat

SEQ ID NO: 172306 - DNA, 20 bp, Artificial Sequence
  Description of Artificial Sequence: Synthetic oligonucleotide
  Target: LAMA2; (+) strand; PAM type: NRG; PAM sequence: TGG
gcataggtatacctgtgcca

SEQ ID NO: 172307 - DNA, 20 bp, Artificial Sequence
  Description of Artificial Sequence: Synthetic oligonucleotide
  Target: LAMA2; (+) strand; PAM type: NRG; PAM sequence: TGG
taggtatacctgtgccatgg

SEQ ID NO: 172308 - DNA, 20 bp, Artificial Sequence
  Description of Artificial Sequence: Synthetic oligonucleotide
  Target: LAMA2; (+) strand; PAM type: NRG; PAM sequence: AAG
tgcacctatcaacccatcaa

SEQ ID NO: 172309 - DNA, 20 bp, Artificial Sequence
  Description of Artificial Sequence: Synthetic oligonucleotide
  Target: LAMA2; (+) strand; PAM type: NRG; PAM sequence: AAG
acctatcaacccatcaaaag

SEQ ID NO: 172310 - DNA, 20 bp, Artificial Sequence
  Description of Artificial Sequence: Synthetic oligonucleotide
  Target: LAMA2; (+) strand; PAM type: NRG; PAM sequence: CAG
atcaaaagaagacatttatg

SEQ ID NO: 172311 - DNA, 20 bp, Artificial Sequence
  Description of Artificial Sequence: Synthetic oligonucleotide
  Target: LAMA2; (+) strand; PAM type: NRG; PAM sequence: AAG
agccaacaaacatatgaaaa

SEQ ID NO: 172312 - DNA, 20 bp, Artificial Sequence
  Description of Artificial Sequence: Synthetic oligonucleotide
  Target: LAMA2; (+) strand; PAM type: NRG; PAM sequence: TAG
agctcatcaccactgatcat

SEQ ID NO: 172313 - DNA, 20 bp, Artificial Sequence
  Description of Artificial Sequence: Synthetic oligonucleotide
  Target: LAMA2; (+) strand; PAM type: NRG; PAM sequence: GAG
ctcatcaccactgatcatta

SEQ ID NO: 172314 - DNA, 20 bp, Artificial Sequence
  Description of Artificial Sequence: Synthetic oligonucleotide
  Target: LAMA2; (+) strand; PAM type: NRG; PAM sequence: AAG
actgatcattagagaaatgc

SEQ ID NO: 172315 - DNA, 20 bp, Artificial Sequence
  Description of Artificial Sequence: Synthetic oligonucleotide
  Target: LAMA2; (+) strand; PAM type: NRG; PAM sequence: GAG
atgcaagtcaaaaccacaat

SEQ ID NO: 172316 - DNA, 20 bp, Artificial Sequence
  Description of Artificial Sequence: Synthetic oligonucleotide
  Target: LAMA2; (+) strand; PAM type: NRG; PAM sequence: CAG
aatgagataacatatgacac

SEQ ID NO: 172317 - DNA, 20 bp, Artificial Sequence
  Description of Artificial Sequence: Synthetic oligonucleotide
  Target: LAMA2; (+) strand; PAM type: NRG; PAM sequence: CAG
agataacatatgacaccagt

SEQ ID NO: 172318 - DNA, 20 bp, Artificial Sequence
  Description of Artificial Sequence: Synthetic oligonucleotide
  Target: LAMA2; (+) strand; PAM type: NRG; PAM sequence: TGG
acatatgacaccagtcagat

SEQ ID NO: 172319 - DNA, 20 bp, Artificial Sequence
  Description of Artificial Sequence: Synthetic oligonucleotide
  Target: LAMA2; (+) strand; PAM type: NRG; PAM sequence: AAG
tcagattggtaattattaaa

SEQ ID NO: 172320 - DNA, 20 bp, Artificial Sequence
  Description of Artificial Sequence: Synthetic oligonucleotide
  Target: LAMA2; (+) strand; PAM type: NRG; PAM sequence: CAG
attggtaattattaaaaagt

SEQ ID NO: 172321 - DNA, 20 bp, Artificial Sequence
  Description of Artificial Sequence: Synthetic oligonucleotide
  Target: LAMA2; (+) strand; PAM type: NRG; PAM sequence: AGG
ttggtaattattaaaaagtc

SEQ ID NO: 172322 - DNA, 20 bp, Artificial Sequence
  Description of Artificial Sequence: Synthetic oligonucleotide
  Target: LAMA2; (+) strand; PAM type: NRG; PAM sequence: TAG
attaaaaagtcaggaaacaa

SEQ ID NO: 172323 - DNA, 20 bp, Artificial Sequence
  Description of Artificial Sequence: Synthetic oligonucleotide
  Target: LAMA2; (+) strand; PAM type: NRG; PAM sequence: TGG
agtcaggaaacaatagatgc

SEQ ID NO: 172324 - DNA, 20 bp, Artificial Sequence
  Description of Artificial Sequence: Synthetic oligonucleotide
  Target: LAMA2; (+) strand; PAM type: NRG; PAM sequence: AAG
aggaaacaatagatgctggc

SEQ ID NO: 172325 - DNA, 20 bp, Artificial Sequence
  Description of Artificial Sequence: Synthetic oligonucleotide
  Target: LAMA2; (+) strand; PAM type: NRG; PAM sequence: AGG
ggaaacaatagatgctggca

SEQ ID NO: 172326 - DNA, 20 bp, Artificial Sequence
  Description of Artificial Sequence: Synthetic oligonucleotide
  Target: LAMA2; (+) strand; PAM type: NRG; PAM sequence: TGG
aatagatgctggcaaggctg

SEQ ID NO: 172327 - DNA, 20 bp, Artificial Sequence
  Description of Artificial Sequence: Synthetic oligonucleotide
  Target: LAMA2; (+) strand; PAM type: NRG; PAM sequence: GAG
tagatgctggcaaggctgtg

SEQ ID NO: 172328 - DNA, 20 bp, Artificial Sequence
  Description of Artificial Sequence: Synthetic oligonucleotide
  Target: LAMA2; (+) strand; PAM type: NRG; PAM sequence: AAG
atgctggcaaggctgtggag

SEQ ID NO: 172329 - DNA, 20 bp, Artificial Sequence
  Description of Artificial Sequence: Synthetic oligonucleotide
  Target: LAMA2; (+) strand; PAM type: NRG; PAM sequence: TAG
ctggcaaggctgtggagaag

SEQ ID NO: 172330 - DNA, 20 bp, Artificial Sequence
  Description of Artificial Sequence: Synthetic oligonucleotide
  Target: LAMA2; (+) strand; PAM type: NRG; PAM sequence: TGG
tagaaacacttttacactgt

SEQ ID NO: 172331 - DNA, 20 bp, Artificial Sequence
  Description of Artificial Sequence: Synthetic oligonucleotide
  Target: LAMA2; (+) strand; PAM type: NRG; PAM sequence: TGG
aaacacttttacactgttgg

SEQ ID NO: 172332 - DNA, 20 bp, Artificial Sequence
  Description of Artificial Sequence: Synthetic oligonucleotide
  Target: LAMA2; (+) strand; PAM type: NRG; PAM sequence: GGG
aacacttttacactgttggt

SEQ ID NO: 172333 - DNA, 20 bp, Artificial Sequence
  Description of Artificial Sequence: Synthetic oligonucleotide
  Target: LAMA2; (+) strand; PAM type: NRG; PAM sequence: TAG
ctgttggtgggaatgtaaat

SEQ ID NO: 172334 - DNA, 20 bp, Artificial Sequence
  Description of Artificial Sequence: Synthetic oligonucleotide
  Target: LAMA2; (+) strand; PAM type: NRG; PAM sequence: TGG
gtaaattagtttaaccattg

SEQ ID NO: 172335 - DNA, 20 bp, Artificial Sequence
  Description of Artificial Sequence: Synthetic oligonucleotide
  Target: LAMA2; (+) strand; PAM type: NRG; PAM sequence: AAG
aattagtttaaccattgtgg

SEQ ID NO: 172336 - DNA, 20 bp, Artificial Sequence
  Description of Artificial Sequence: Synthetic oligonucleotide
  Target: LAMA2; (+) strand; PAM type: NRG; PAM sequence: CAG
agtttaaccattgtggaaga

SEQ ID NO: 172337 - DNA, 20 bp, Artificial Sequence
  Description of Artificial Sequence: Synthetic oligonucleotide
  Target: LAMA2; (+) strand; PAM type: NRG; PAM sequence: TGG
aaccattgtggaagacagtg

SEQ ID NO: 172338 - DNA, 20 bp, Artificial Sequence
  Description of Artificial Sequence: Synthetic oligonucleotide
  Target: LAMA2; (+) strand; PAM type: NRG; PAM sequence: AAG
agacagtgtggcgattcctc

SEQ ID NO: 172339 - DNA, 20 bp, Artificial Sequence
  Description of Artificial Sequence: Synthetic oligonucleotide
  Target: LAMA2; (+) strand; PAM type: NRG; PAM sequence: AGG
gacagtgtggcgattcctca

SEQ ID NO: 172340 - DNA, 20 bp, Artificial Sequence
  Description of Artificial Sequence: Synthetic oligonucleotide
  Target: LAMA2; (+) strand; PAM type: NRG; PAM sequence: CAG
gtggcgattcctcaaggatc

SEQ ID NO: 172341 - DNA, 20 bp, Artificial Sequence
  Description of Artificial Sequence: Synthetic oligonucleotide
  Target: LAMA2; (+) strand; PAM type: NRG; PAM sequence: CAG
attcctcaaggatccagaac

SEQ ID NO: 172342 - DNA, 20 bp, Artificial Sequence
  Description of Artificial Sequence: Synthetic oligonucleotide
  Target: LAMA2; (+) strand; PAM type: NRG; PAM sequence: CAG
accagaaataccatttgacc

SEQ ID NO: 172343 - DNA, 20 bp, Artificial Sequence
  Description of Artificial Sequence: Synthetic oligonucleotide
  Target: LAMA2; (+) strand; PAM type: NRG; PAM sequence: TGG
tgacccagcaaccccataac

SEQ ID NO: 172344 - DNA, 20 bp, Artificial Sequence
  Description of Artificial Sequence: Synthetic oligonucleotide
  Target: LAMA2; (+) strand; PAM type: NRG; PAM sequence: GGG
gacccagcaaccccataact

SEQ ID NO: 172345 - DNA, 20 bp, Artificial Sequence
  Description of Artificial Sequence: Synthetic oligonucleotide
  Target: LAMA2; (+) strand; PAM type: NRG; PAM sequence: AAG
cataactgggtatataccca

SEQ ID NO: 172346 - DNA, 20 bp, Artificial Sequence
  Description of Artificial Sequence: Synthetic oligonucleotide
  Target: LAMA2; (+) strand; PAM type: NRG; PAM sequence: AGG
ataactgggtatatacccaa

SEQ ID NO: 172347 - DNA, 20 bp, Artificial Sequence
  Description of Artificial Sequence: Synthetic oligonucleotide
  Target: LAMA2; (+) strand; PAM type: NRG; PAM sequence: AAG
atataaatcattctactcta

SEQ ID NO: 172348 - DNA, 20 bp, Artificial Sequence
  Description of Artificial Sequence: Synthetic oligonucleotide
  Target: LAMA2; (+) strand; PAM type: NRG; PAM sequence: CAG
ctactctaaagacacatata

SEQ ID NO: 172349 - DNA, 20 bp, Artificial Sequence
  Description of Artificial Sequence: Synthetic oligonucleotide
  Target: LAMA2; (+) strand; PAM type: NRG; PAM sequence: AAG
attgcaacactatttatgca

SEQ ID NO: 172350 - DNA, 20 bp, Artificial Sequence
  Description of Artificial Sequence: Synthetic oligonucleotide
  Target: LAMA2; (+) strand; PAM type: NRG; PAM sequence: GAG
tgcaacactatttatgcaaa

SEQ ID NO: 172351 - DNA, 20 bp, Artificial Sequence
  Description of Artificial Sequence: Synthetic oligonucleotide
  Target: LAMA2; (+) strand; PAM type: NRG; PAM sequence: TGG
acactatttatgcaaagaga

SEQ ID NO: 172352 - DNA, 20 bp, Artificial Sequence
  Description of Artificial Sequence: Synthetic oligonucleotide
  Target: LAMA2; (+) strand; PAM type: NRG; PAM sequence: TAG
acccaaatgcccatcaatga

SEQ ID NO: 172353 - DNA, 20 bp, Artificial Sequence
  Description of Artificial Sequence: Synthetic oligonucleotide
  Target: LAMA2; (+) strand; PAM type: NRG; PAM sequence: TAG
aatgcccatcaatgatagat

SEQ ID NO: 172354 - DNA, 20 bp, Artificial Sequence
  Description of Artificial Sequence: Synthetic oligonucleotide
  Target: LAMA2; (+) strand; PAM type: NRG; PAM sequence: AGG
atgcccatcaatgatagatt

SEQ ID NO: 172355 - DNA, 20 bp, Artificial Sequence
  Description of Artificial Sequence: Synthetic oligonucleotide
  Target: LAMA2; (+) strand; PAM type: NRG; PAM sequence: AAG
catcaatgatagattaggta

SEQ ID NO: 172356 - DNA, 20 bp, Artificial Sequence
  Description of Artificial Sequence: Synthetic oligonucleotide
  Target: LAMA2; (+) strand; PAM type: NRG; PAM sequence: TGG
tagattaggtaaagaaaatg

SEQ ID NO: 172357 - DNA, 20 bp, Artificial Sequence
  Description of Artificial Sequence: Synthetic oligonucleotide
  Target: LAMA2; (+) strand; PAM type: NRG; PAM sequence: TGG
aatgtggtacatatacacca

SEQ ID NO: 172358 - DNA, 20 bp, Artificial Sequence
  Description of Artificial Sequence: Synthetic oligonucleotide
  Target: LAMA2; (+) strand; PAM type: NRG; PAM sequence: CAG
atacaccatggaatactatg

SEQ ID NO: 172359 - DNA, 20 bp, Artificial Sequence
  Description of Artificial Sequence: Synthetic oligonucleotide
  Target: LAMA2; (+) strand; PAM type: NRG; PAM sequence: AAG
aatactatgcagccataaaa

SEQ ID NO: 172360 - DNA, 20 bp, Artificial Sequence
  Description of Artificial Sequence: Synthetic oligonucleotide
  Target: LAMA2; (+) strand; PAM type: NRG; PAM sequence: CAG
gaatgatatcatgtcctttg

SEQ ID NO: 172361 - DNA, 20 bp, Artificial Sequence
  Description of Artificial Sequence: Synthetic oligonucleotide
  Target: LAMA2; (+) strand; PAM type: NRG; PAM sequence: AGG
aatgatatcatgtcctttgc

SEQ ID NO: 172362 - DNA, 20 bp, Artificial Sequence
  Description of Artificial Sequence: Synthetic oligonucleotide
  Target: LAMA2; (+) strand; PAM type: NRG; PAM sequence: GGG
atgatatcatgtcctttgca

SEQ ID NO: 172363 - DNA, 20 bp, Artificial Sequence
  Description of Artificial Sequence: Synthetic oligonucleotide
  Target: LAMA2; (+) strand; PAM type: NRG; PAM sequence: TGG
tcatgtcctttgcagggata

SEQ ID NO: 172364 - DNA, 20 bp, Artificial Sequence
  Description of Artificial Sequence: Synthetic oligonucleotide
  Target: LAMA2; (+) strand; PAM type: NRG; PAM sequence: AAG
cctttgcagggatatggatg

SEQ ID NO: 172365 - DNA, 20 bp, Artificial Sequence
  Description of Artificial Sequence: Synthetic oligonucleotide
  Target: LAMA2; (+) strand; PAM type: NRG; PAM sequence: AAG
agggatatggatgaagctga

SEQ ID NO: 172366 - DNA, 20 bp, Artificial Sequence
  Description of Artificial Sequence: Synthetic oligonucleotide
  Target: LAMA2; (+) strand; PAM type: NRG; PAM sequence: CAG
atggatgaagctgaaagctt

SEQ ID NO: 172367 - DNA, 20 bp, Artificial Sequence
  Description of Artificial Sequence: Synthetic oligonucleotide
  Target: LAMA2; (+) strand; PAM type: NRG; PAM sequence: CAG
gctgaaagcttcagcatcct

SEQ ID NO: 172368 - DNA, 20 bp, Artificial Sequence
  Description of Artificial Sequence: Synthetic oligonucleotide
  Target: LAMA2; (+) strand; PAM type: NRG; PAM sequence: CAG
gcatcctcagcaaactaatc

SEQ ID NO: 172369 - DNA, 20 bp, Artificial Sequence
  Description of Artificial Sequence: Synthetic oligonucleotide
  Target: LAMA2; (+) strand; PAM type: NRG; PAM sequence: AGG
catcctcagcaaactaatcc

SEQ ID NO: 172370 - DNA, 20 bp, Artificial Sequence
  Description of Artificial Sequence: Synthetic oligonucleotide
  Target: LAMA2; (+) strand; PAM type: NRG; PAM sequence: TGG
tcagcaaactaatccaggaa

SEQ ID NO: 172371 - DNA, 20 bp, Artificial Sequence
  Description of Artificial Sequence: Synthetic oligonucleotide
  Target: LAMA2; (+) strand; PAM type: NRG; PAM sequence: AAG
caccacatgttctcgctcat

SEQ ID NO: 172372 - DNA, 20 bp, Artificial Sequence
  Description of Artificial Sequence: Synthetic oligonucleotide
  Target: LAMA2; (+) strand; PAM type: NRG; PAM sequence: TGG
cacatgttctcgctcataag

SEQ ID NO: 172373 - DNA, 20 bp, Artificial Sequence
  Description of Artificial Sequence: Synthetic oligonucleotide
  Target: LAMA2; (+) strand; PAM type: NRG; PAM sequence: GGG
acatgttctcgctcataagt

SEQ ID NO: 172374 - DNA, 20 bp, Artificial Sequence
  Description of Artificial Sequence: Synthetic oligonucleotide
  Target: LAMA2; (+) strand; PAM type: NRG; PAM sequence: GAG
atgttctcgctcataagtgg

SEQ ID NO: 172375 - DNA, 20 bp, Artificial Sequence
  Description of Artificial Sequence: Synthetic oligonucleotide
  Target: LAMA2; (+) strand; PAM type: NRG; PAM sequence: CAG
gctcataagtgggagttgaa

SEQ ID NO: 172376 - DNA, 20 bp, Artificial Sequence
  Description of Artificial Sequence: Synthetic oligonucleotide
  Target: LAMA2; (+) strand; PAM type: NRG; PAM sequence: GAG
ataagtgggagttgaacagt

SEQ ID NO: 172377 - DNA, 20 bp, Artificial Sequence
  Description of Artificial Sequence: Synthetic oligonucleotide
  Target: LAMA2; (+) strand; PAM type: NRG; PAM sequence: TGG
agttgaacagtgagaacaca

SEQ ID NO: 172378 - DNA, 20 bp, Artificial Sequence
  Description of Artificial Sequence: Synthetic oligonucleotide
  Target: LAMA2; (+) strand; PAM type: NRG; PAM sequence: AAG
aacagtgagaacacatggac

SEQ ID NO: 172379 - DNA, 20 bp, Artificial Sequence
  Description of Artificial Sequence: Synthetic oligonucleotide
  Target: LAMA2; (+) strand; PAM type: NRG; PAM sequence: AGG
acagtgagaacacatggaca

SEQ ID NO: 172380 - DNA, 20 bp, Artificial Sequence
  Description of Artificial Sequence: Synthetic oligonucleotide
  Target: LAMA2; (+) strand; PAM type: NRG; PAM sequence: GAG
agtgagaacacatggacaag

SEQ ID NO: 172381 - DNA, 20 bp, Artificial Sequence
  Description of Artificial Sequence: Synthetic oligonucleotide
  Target: LAMA2; (+) strand; PAM type: NRG; PAM sequence: AGG
gtgagaacacatggacaagg

SEQ ID NO: 172382 - DNA, 20 bp, Artificial Sequence
  Description of Artificial Sequence: Synthetic oligonucleotide
  Target: LAMA2; (+) strand; PAM type: NRG; PAM sequence: GGG
tgagaacacatggacaagga

SEQ ID NO: 172383 - DNA, 20 bp, Artificial Sequence
  Description of Artificial Sequence: Synthetic oligonucleotide
  Target: LAMA2; (+) strand; PAM type: NRG; PAM sequence: GGG
gagaacacatggacaaggag

SEQ ID NO: 172384 - DNA, 20 bp, Artificial Sequence
  Description of Artificial Sequence: Synthetic oligonucleotide
  Target: LAMA2; (+) strand; PAM type: NRG; PAM sequence: TGG
aggaggggaacaacacacac

SEQ ID NO: 172385 - DNA, 20 bp, Artificial Sequence
  Description of Artificial Sequence: Synthetic oligonucleotide
  Target: LAMA2; (+) strand; PAM type: NRG; PAM sequence: GAG
gaggggaacaacacacactg

SEQ ID NO: 172386 - DNA, 20 bp, Artificial Sequence
  Description of Artificial Sequence: Synthetic oligonucleotide
  Target: LAMA2; (+) strand; PAM type: NRG; PAM sequence: TGG
caacacacactggagtctat

SEQ ID NO: 172387 - DNA, 20 bp, Artificial Sequence
  Description of Artificial Sequence: Synthetic oligonucleotide
  Target: LAMA2; (+) strand; PAM type: NRG; PAM sequence: GGG
aacacacactggagtctatt

SEQ ID NO: 172388 - DNA, 20 bp, Artificial Sequence
  Description of Artificial Sequence: Synthetic oligonucleotide
  Target: LAMA2; (+) strand; PAM type: NRG; PAM sequence: GGG
acacacactggagtctattg

SEQ ID NO: 172389 - DNA, 20 bp, Artificial Sequence
  Description of Artificial Sequence: Synthetic oligonucleotide
  Target: LAMA2; (+) strand; PAM type: NRG; PAM sequence: GGG
cacacactggagtctattgg

SEQ ID NO: 172390 - DNA, 20 bp, Artificial Sequence
  Description of Artificial Sequence: Synthetic oligonucleotide
  Target: LAMA2; (+) strand; PAM type: NRG; PAM sequence: TGG
ctggagtctattgggggttg

SEQ ID NO: 172391 - DNA, 20 bp, Artificial Sequence
  Description of Artificial Sequence: Synthetic oligonucleotide
  Target: LAMA2; (+) strand; PAM type: NRG; PAM sequence: GGG
tggagtctattgggggttgt

SEQ ID NO: 172392 - DNA, 20 bp, Artificial Sequence
  Description of Artificial Sequence: Synthetic oligonucleotide
  Target: LAMA2; (+) strand; PAM type: NRG; PAM sequence: GGG
ggagtctattgggggttgtg

SEQ ID NO: 172393 - DNA, 20 bp, Artificial Sequence
  Description of Artificial Sequence: Synthetic oligonucleotide
  Target: LAMA2; (+) strand; PAM type: NRG; PAM sequence: GAG
agtctattgggggttgtggg

SEQ ID NO: 172394 - DNA, 20 bp, Artificial Sequence
  Description of Artificial Sequence: Synthetic oligonucleotide
  Target: LAMA2; (+) strand; PAM type: NRG; PAM sequence: GAG
tctattgggggttgtgggga

SEQ ID NO: 172395 - DNA, 20 bp, Artificial Sequence
  Description of Artificial Sequence: Synthetic oligonucleotide
  Target: LAMA2; (+) strand; PAM type: NRG; PAM sequence: AGG
ctattgggggttgtggggag

SEQ ID NO: 172396 - DNA, 20 bp, Artificial Sequence
  Description of Artificial Sequence: Synthetic oligonucleotide
  Target: LAMA2; (+) strand; PAM type: NRG; PAM sequence: AAG
gggggttgtggggagaggaa

SEQ ID NO: 172397 - DNA, 20 bp, Artificial Sequence
  Description of Artificial Sequence: Synthetic oligonucleotide
  Target: LAMA2; (+) strand; PAM type: NRG; PAM sequence: AGG
ggggttgtggggagaggaaa

SEQ ID NO: 172398 - DNA, 20 bp, Artificial Sequence
  Description of Artificial Sequence: Synthetic oligonucleotide
  Target: LAMA2; (+) strand; PAM type: NRG; PAM sequence: AAG
ttgtggggagaggaaaagga

SEQ ID NO: 172399 - DNA, 20 bp, Artificial Sequence
  Description of Artificial Sequence: Synthetic oligonucleotide
  Target: LAMA2; (+) strand; PAM type: NRG; PAM sequence: TAG
ggagaggaaaaggaaagcat

SEQ ID NO: 172400 - DNA, 20 bp, Artificial Sequence
  Description of Artificial Sequence: Synthetic oligonucleotide
  Target: LAMA2; (+) strand; PAM type: NRG; PAM sequence: AGG
gagaggaaaaggaaagcatt

SEQ ID NO: 172401 - DNA, 20 bp, Artificial Sequence
  Description of Artificial Sequence: Synthetic oligonucleotide
  Target: LAMA2; (+) strand; PAM type: NRG; PAM sequence: TAG
aaggaaagcattaggacaaa

SEQ ID NO: 172402 - DNA, 20 bp, Artificial Sequence
  Description of Artificial Sequence: Synthetic oligonucleotide
  Target: LAMA2; (+) strand; PAM type: NRG; PAM sequence: GAG
aggacaaatagttaatgcat

SEQ ID NO: 172403 - DNA, 20 bp, Artificial Sequence
  Description of Artificial Sequence: Synthetic oligonucleotide
  Target: LAMA2; (+) strand; PAM type: NRG; PAM sequence: AGG
ggacaaatagttaatgcatg

SEQ ID NO: 172404 - DNA, 20 bp, Artificial Sequence
  Description of Artificial Sequence: Synthetic oligonucleotide
  Target: LAMA2; (+) strand; PAM type: NRG; PAM sequence: GGG
gacaaatagttaatgcatga

SEQ ID NO: 172405 - DNA, 20 bp, Artificial Sequence
  Description of Artificial Sequence: Synthetic oligonucleotide
  Target: LAMA2; (+) strand; PAM type: NRG; PAM sequence: GGG
acaaatagttaatgcatgag

SEQ ID NO: 172406 - DNA, 20 bp, Artificial Sequence
  Description of Artificial Sequence: Synthetic oligonucleotide
  Target: LAMA2; (+) strand; PAM type: NRG; PAM sequence: TAG
gcatgaggggctttaaaacc

SEQ ID NO: 172407 - DNA, 20 bp, Artificial Sequence
  Description of Artificial Sequence: Synthetic oligonucleotide
  Target: LAMA2; (+) strand; PAM type: NRG; PAM sequence: TGG
gggctttaaaacctagatga

SEQ ID NO: 172408 - DNA, 20 bp, Artificial Sequence
  Description of Artificial Sequence: Synthetic oligonucleotide
  Target: LAMA2; (+) strand; PAM type: NRG; PAM sequence: GGG
ggctttaaaacctagatgat

SEQ ID NO: 172409 - DNA, 20 bp, Artificial Sequence
  Description of Artificial Sequence: Synthetic oligonucleotide
  Target: LAMA2; (+) strand; PAM type: NRG; PAM sequence: TGG
ttaaaacctagatgatgggc

SEQ ID NO: 172410 - DNA, 20 bp, Artificial Sequence
  Description of Artificial Sequence: Synthetic oligonucleotide
  Target: LAMA2; (+) strand; PAM type: NRG; PAM sequence: GGG
taaaacctagatgatgggct

SEQ ID NO: 172411 - DNA, 20 bp, Artificial Sequence
  Description of Artificial Sequence: Synthetic oligonucleotide
  Target: LAMA2; (+) strand; PAM type: NRG; PAM sequence: TGG
cctagatgatgggctgggcg

SEQ ID NO: 172412 - DNA, 20 bp, Artificial Sequence
  Description of Artificial Sequence: Synthetic oligonucleotide
  Target: LAMA2; (+) strand; PAM type: NRG; PAM sequence: TGG
agatgatgggctgggcgtgg

SEQ ID NO: 172413 - DNA, 20 bp, Artificial Sequence
  Description of Artificial Sequence: Synthetic oligonucleotide
  Target: LAMA2; (+) strand; PAM type: NRG; PAM sequence: CAG
gtggctcactcctgtaatcc

SEQ ID NO: 172414 - DNA, 20 bp, Artificial Sequence
  Description of Artificial Sequence: Synthetic oligonucleotide
  Target: LAMA2; (+) strand; PAM type: NRG; PAM sequence: GAG
tcctgtaatcccagtacttt

SEQ ID NO: 172415 - DNA, 20 bp, Artificial Sequence
  Description of Artificial Sequence: Synthetic oligonucleotide
  Target: LAMA2; (+) strand; PAM type: NRG; PAM sequence: GAG
ctgtaatcccagtactttga

SEQ ID NO: 172416 - DNA, 20 bp, Artificial Sequence
  Description of Artificial Sequence: Synthetic oligonucleotide
  Target: LAMA2; (+) strand; PAM type: NRG; PAM sequence: AGG
tgtaatcccagtactttgag

SEQ ID NO: 172417 - DNA, 20 bp, Artificial Sequence
  Description of Artificial Sequence: Synthetic oligonucleotide
  Target: LAMA2; (+) strand; PAM type: NRG; PAM sequence: AAG
tcccagtactttgagaggcc

SEQ ID NO: 172418 - DNA, 20 bp, Artificial Sequence
  Description of Artificial Sequence: Synthetic oligonucleotide
  Target: LAMA2; (+) strand; PAM type: NRG; PAM sequence: AGG
cccagtactttgagaggcca

SEQ ID NO: 172419 - DNA, 20 bp, Artificial Sequence
  Description of Artificial Sequence: Synthetic oligonucleotide
  Target: LAMA2; (+) strand; PAM type: NRG; PAM sequence: CAG
agtactttgagaggccaagg

SEQ ID NO: 172420 - DNA, 20 bp, Artificial Sequence
  Description of Artificial Sequence: Synthetic oligonucleotide
  Target: LAMA2; (+) strand; PAM type: NRG; PAM sequence: AGG
gtactttgagaggccaaggc

SEQ ID NO: 172421 - DNA, 20 bp, Artificial Sequence
  Description of Artificial Sequence: Synthetic oligonucleotide
  Target: LAMA2; (+) strand; PAM type: NRG; PAM sequence: CAG
ctttgagaggccaaggcagg

SEQ ID NO: 172422 - DNA, 20 bp, Artificial Sequence
  Description of Artificial Sequence: Synthetic oligonucleotide
  Target: LAMA2; (+) strand; PAM type: NRG; PAM sequence: GAG
ccaaggcaggcagatcacct

SEQ ID NO: 172423 - DNA, 20 bp, Artificial Sequence
  Description of Artificial Sequence: Synthetic oligonucleotide
  Target: LAMA2; (+) strand; PAM type: NRG; PAM sequence: AGG
caaggcaggcagatcacctg

SEQ ID NO: 172424 - DNA, 20 bp, Artificial Sequence
  Description of Artificial Sequence: Synthetic oligonucleotide
  Target: LAMA2; (+) strand; PAM type: NRG; PAM sequence: CAG
gcaggcagatcacctgaggt

SEQ ID NO: 172425 - DNA, 20 bp, Artificial Sequence
  Description of Artificial Sequence: Synthetic oligonucleotide
  Target: LAMA2; (+) strand; PAM type: NRG; PAM sequence: AGG
caggcagatcacctgaggtc

SEQ ID NO: 172426 - DNA, 20 bp, Artificial Sequence
  Description of Artificial Sequence: Synthetic oligonucleotide
  Target: LAMA2; (+) strand; PAM type: NRG; PAM sequence: AAG
tcacctgaggtcaggcgttc

SEQ ID NO: 172427 - DNA, 20 bp, Artificial Sequence
  Description of Artificial Sequence: Synthetic oligonucleotide
  Target: LAMA2; (+) strand; PAM type: NRG; PAM sequence: CAG
tgaggtcaggcgttcaagac

SEQ ID NO: 172428 - DNA, 20 bp, Artificial Sequence
  Description of Artificial Sequence: Synthetic oligonucleotide
  Target: LAMA2; (+) strand; PAM type: NRG; PAM sequence: TGG
tcaggcgttcaagaccagcc

SEQ ID NO: 172429 - DNA, 20 bp, Artificial Sequence
  Description of Artificial Sequence: Synthetic oligonucleotide
  Target: LAMA2; (+) strand; PAM type: NRG; PAM sequence: TGG
caagaccagcctggccaaca

SEQ ID NO: 172430 - DNA, 20 bp, Artificial Sequence
  Description of Artificial Sequence: Synthetic oligonucleotide
  Target: LAMA2; (+) strand; PAM type: NRG; PAM sequence: CAG
tctactaaaaatacaaaaat

SEQ ID NO: 172431 - DNA, 20 bp, Artificial Sequence
  Description of Artificial Sequence: Synthetic oligonucleotide
  Target: LAMA2; (+) strand; PAM type: NRG; PAM sequence: TGG
ctaaaaatacaaaaatcagc

SEQ ID NO: 172432 - DNA, 20 bp, Artificial Sequence
  Description of Artificial Sequence: Synthetic oligonucleotide
  Target: LAMA2; (+) strand; PAM type: NRG; PAM sequence: GGG
taaaaatacaaaaatcagct

SEQ ID NO: 172433 - DNA, 20 bp, Artificial Sequence
  Description of Artificial Sequence: Synthetic oligonucleotide
  Target: LAMA2; (+) strand; PAM type: NRG; PAM sequence: CGG
atacaaaaatcagctgggca

SEQ ID NO: 172434 - DNA, 20 bp, Artificial Sequence
  Description of Artificial Sequence: Synthetic oligonucleotide
  Target: LAMA2; (+) strand; PAM type: NRG; PAM sequence: TGG
caaaaatcagctgggcacgg

SEQ ID NO: 172435 - DNA, 20 bp, Artificial Sequence
  Description of Artificial Sequence: Synthetic oligonucleotide
  Target: LAMA2; (+) strand; PAM type: NRG; PAM sequence: CAG
ggtggcatgcgctataattc

SEQ ID NO: 172436 - DNA, 20 bp, Artificial Sequence
  Description of Artificial Sequence: Synthetic oligonucleotide
  Target: LAMA2; (+) strand; PAM type: NRG; PAM sequence: CGG
gcgctataattccagctact

SEQ ID NO: 172437 - DNA, 20 bp, Artificial Sequence
  Description of Artificial Sequence: Synthetic oligonucleotide
  Target: LAMA2; (+) strand; PAM type: NRG; PAM sequence: GGG
cgctataattccagctactc

SEQ ID NO: 172438 - DNA, 20 bp, Artificial Sequence
  Description of Artificial Sequence: Synthetic oligonucleotide
  Target: LAMA2; (+) strand; PAM type: NRG; PAM sequence: GAG
ctataattccagctactcgg

SEQ ID NO: 172439 - DNA, 20 bp, Artificial Sequence
  Description of Artificial Sequence: Synthetic oligonucleotide
  Target: LAMA2; (+) strand; PAM type: NRG; PAM sequence: AGG
tataattccagctactcggg

SEQ ID NO: 172440 - DNA, 20 bp, Artificial Sequence
  Description of Artificial Sequence: Synthetic oligonucleotide
  Target: LAMA2; (+) strand; PAM type: NRG; PAM sequence: GAG
ttccagctactcgggaggct

SEQ ID NO: 172441 - DNA, 20 bp, Artificial Sequence
  Description of Artificial Sequence: Synthetic oligonucleotide
  Target: LAMA2; (+) strand; PAM type: NRG; PAM sequence: CAG
agctactcgggaggctgaga

SEQ ID NO: 172442 - DNA, 20 bp, Artificial Sequence
  Description of Artificial Sequence: Synthetic oligonucleotide
  Target: LAMA2; (+) strand; PAM type: NRG; PAM sequence: TAG
tactcgggaggctgagacag

SEQ ID NO: 172443 - DNA, 20 bp, Artificial Sequence
  Description of Artificial Sequence: Synthetic oligonucleotide
  Target: LAMA2; (+) strand; PAM type: NRG; PAM sequence: CAG
acagtagaatcgcttgaacc

SEQ ID NO: 172444 - DNA, 20 bp, Artificial Sequence
  Description of Artificial Sequence: Synthetic oligonucleotide
  Target: LAMA2; (+) strand; PAM type: NRG; PAM sequence: AGG
cagtagaatcgcttgaaccc

SEQ ID NO: 172445 - DNA, 20 bp, Artificial Sequence
  Description of Artificial Sequence: Synthetic oligonucleotide
  Target: LAMA2; (+) strand; PAM type: NRG; PAM sequence: GAG
gtagaatcgcttgaacccag

SEQ ID NO: 172446 - DNA, 20 bp, Artificial Sequence
  Description of Artificial Sequence: Synthetic oligonucleotide
  Target: LAMA2; (+) strand; PAM type: NRG; PAM sequence: AGG
tagaatcgcttgaacccagg

SEQ ID NO: 172447 - DNA, 20 bp, Artificial Sequence
  Description of Artificial Sequence: Synthetic oligonucleotide
  Target: LAMA2; (+) strand; PAM type: NRG; PAM sequence: CGG
tcgcttgaacccaggaggtg

SEQ ID NO: 172448 - DNA, 20 bp, Artificial Sequence
  Description of Artificial Sequence: Synthetic oligonucleotide
  Target: LAMA2; (+) strand; PAM type: NRG; PAM sequence: CAG
gaacccaggaggtgcggtcg

SEQ ID NO: 172449 - DNA, 20 bp, Artificial Sequence
  Description of Artificial Sequence: Synthetic oligonucleotide
  Target: LAMA2; (+) strand; PAM type: NRG; PAM sequence: GAG
ccaggaggtgcggtcgcagt

SEQ ID NO: 172450 - DNA, 20 bp, Artificial Sequence
  Description of Artificial Sequence: Synthetic oligonucleotide
  Target: LAMA2; (+) strand; PAM type: NRG; PAM sequence: CAG
ggaggtgcggtcgcagtgag

SEQ ID NO: 172451 - DNA, 20 bp, Artificial Sequence
  Description of Artificial Sequence: Synthetic oligonucleotide
  Target: LAMA2; (+) strand; PAM type: NRG; PAM sequence: CAG
gaaattgtgccactgcactc

SEQ ID NO: 172452 - DNA, 20 bp, Artificial Sequence
  Description of Artificial Sequence: Synthetic oligonucleotide
  Target: LAMA2; (+) strand; PAM type: NRG; PAM sequence: TGG
tgtgccactgcactccagcc

SEQ ID NO: 172453 - DNA, 20 bp, Artificial Sequence
  Description of Artificial Sequence: Synthetic oligonucleotide
  Target: LAMA2; (+) strand; PAM type: NRG; PAM sequence: GGG
gtgccactgcactccagcct

SEQ ID NO: 172454 - DNA, 20 bp, Artificial Sequence
  Description of Artificial Sequence: Synthetic oligonucleotide
  Target: LAMA2; (+) strand; PAM type: NRG; PAM sequence: CAG
ctgcactccagcctgggcaa

SEQ ID NO: 172455 - DNA, 20 bp, Artificial Sequence
  Description of Artificial Sequence: Synthetic oligonucleotide
  Target: LAMA2; (+) strand; PAM type: NRG; PAM sequence: GAG
gcactccagcctgggcaaca

SEQ ID NO: 172456 - DNA, 20 bp, Artificial Sequence
  Description of Artificial Sequence: Synthetic oligonucleotide
  Target: LAMA2; (+) strand; PAM type: NRG; PAM sequence: AAG
tccagcctgggcaacagagc

SEQ ID NO: 172457 - DNA, 20 bp, Artificial Sequence
  Description of Artificial Sequence: Synthetic oligonucleotide
  Target: LAMA2; (+) strand; PAM type: NRG; PAM sequence: TGG
aaaacaaacaaacaaaaaac

SEQ ID NO: 172458 - DNA, 20 bp, Artificial Sequence
  Description of Artificial Sequence: Synthetic oligonucleotide
  Target: LAMA2; (+) strand; PAM type: NRG; PAM sequence: CGG
acaaacaaaaaactggttga

SEQ ID NO: 172459 - DNA, 20 bp, Artificial Sequence
  Description of Artificial Sequence: Synthetic oligonucleotide
  Target: LAMA2; (+) strand; PAM type: NRG; PAM sequence: GGG
caaacaaaaaactggttgac

SEQ ID NO: 172460 - DNA, 20 bp, Artificial Sequence
  Description of Artificial Sequence: Synthetic oligonucleotide
  Target: LAMA2; (+) strand; PAM type: NRG; PAM sequence: TAG
aaaactggttgacgggttga

SEQ ID NO: 172461 - DNA, 20 bp, Artificial Sequence
  Description of Artificial Sequence: Synthetic oligonucleotide
  Target: LAMA2; (+) strand; PAM type: NRG; PAM sequence: AGG
aaactggttgacgggttgat

SEQ ID NO: 172462 - DNA, 20 bp, Artificial Sequence
  Description of Artificial Sequence: Synthetic oligonucleotide
  Target: LAMA2; (+) strand; PAM type: NRG; PAM sequence: CAG
ggttgacgggttgataggtg

SEQ ID NO: 172463 - DNA, 20 bp, Artificial Sequence
  Description of Artificial Sequence: Synthetic oligonucleotide
  Target: LAMA2; (+) strand; PAM type: NRG; PAM sequence: TGG
ataggtgcagcaaaccacca

SEQ ID NO: 172464 - DNA, 20 bp, Artificial Sequence
  Description of Artificial Sequence: Synthetic oligonucleotide
  Target: LAMA2; (+) strand; PAM type: NRG; PAM sequence: AAG
atatgtattcctatgtaaca

SEQ ID NO: 172465 - DNA, 20 bp, Artificial Sequence
  Description of Artificial Sequence: Synthetic oligonucleotide
  Target: LAMA2; (+) strand; PAM type: NRG; PAM sequence: AAG
aatacatgatcattttgcta

SEQ ID NO: 172466 - DNA, 20 bp, Artificial Sequence
  Description of Artificial Sequence: Synthetic oligonucleotide
  Target: LAMA2; (+) strand; PAM type: NRG; PAM sequence: TGG
gattgcttcttgtttacaaa

SEQ ID NO: 172467 - DNA, 20 bp, Artificial Sequence
  Description of Artificial Sequence: Synthetic oligonucleotide
  Target: LAMA2; (+) strand; PAM type: NRG; PAM sequence: AAG
ttacaaatggttttaattta

SEQ ID NO: 172468 - DNA, 20 bp, Artificial Sequence
  Description of Artificial Sequence: Synthetic oligonucleotide
  Target: LAMA2; (+) strand; PAM type: NRG; PAM sequence: AAG
aaattatgtatgccatccaa

SEQ ID NO: 172469 - DNA, 20 bp, Artificial Sequence
  Description of Artificial Sequence: Synthetic oligonucleotide
  Target: LAMA2; (+) strand; PAM type: NRG; PAM sequence: CAG
tgtatgccatccaaaagata

SEQ ID NO: 172470 - DNA, 20 bp, Artificial Sequence
  Description of Artificial Sequence: Synthetic oligonucleotide
  Target: LAMA2; (+) strand; PAM type: NRG; PAM sequence: CAG
tgttgtcattctttttccac

SEQ ID NO: 172471 - DNA, 20 bp, Artificial Sequence
  Description of Artificial Sequence: Synthetic oligonucleotide
  Target: LAMA2; (+) strand; PAM type: NRG; PAM sequence: CAG
ttccaccagattcttctctg

SEQ ID NO: 172472 - DNA, 20 bp, Artificial Sequence
  Description of Artificial Sequence: Synthetic oligonucleotide
  Target: LAMA2; (+) strand; PAM type: NRG; PAM sequence: AAG
caccagattcttctctgcag

SEQ ID NO: 172473 - DNA, 20 bp, Artificial Sequence
  Description of Artificial Sequence: Synthetic oligonucleotide
  Target: LAMA2; (+) strand; PAM type: NRG; PAM sequence: TAG
gattcttctctgcagaagtt

SEQ ID NO: 172474 - DNA, 20 bp, Artificial Sequence
  Description of Artificial Sequence: Synthetic oligonucleotide
  Target: LAMA2; (+) strand; PAM type: NRG; PAM sequence: GAG
ctctgcagaagtttagcttt

SEQ ID NO: 172475 - DNA, 20 bp, Artificial Sequence
  Description of Artificial Sequence: Synthetic oligonucleotide
  Target: LAMA2; (+) strand; PAM type: NRG; PAM sequence: CAG
cagaagtttagctttgagac

SEQ ID NO: 172476 - DNA, 20 bp, Artificial Sequence
  Description of Artificial Sequence: Synthetic oligonucleotide
  Target: LAMA2; (+) strand; PAM type: NRG; PAM sequence: GAG
gaagtttagctttgagacca

SEQ ID NO: 172477 - DNA, 20 bp, Artificial Sequence
  Description of Artificial Sequence: Synthetic oligonucleotide
  Target: LAMA2; (+) strand; PAM type: NRG; PAM sequence: AAG
tagctttgagaccagagcac

SEQ ID NO: 172478 - DNA, 20 bp, Artificial Sequence
  Description of Artificial Sequence: Synthetic oligonucleotide
  Target: LAMA2; (+) strand; PAM type: NRG; PAM sequence: GAG
gctttgagaccagagcacaa

SEQ ID NO: 172479 - DNA, 20 bp, Artificial Sequence
  Description of Artificial Sequence: Synthetic oligonucleotide
  Target: LAMA2; (+) strand; PAM type: NRG; PAM sequence: TAG
agaccagagcacaagagaaa

SEQ ID NO: 172480 - DNA, 20 bp, Artificial Sequence
  Description of Artificial Sequence: Synthetic oligonucleotide
  Target: LAMA2; (+) strand; PAM type: NRG; PAM sequence: GAG
cagagcacaagagaaatagt

SEQ ID NO: 172481 - DNA, 20 bp, Artificial Sequence
  Description of Artificial Sequence: Synthetic oligonucleotide
  Target: LAMA2; (+) strand; PAM type: NRG; PAM sequence: TAG
ttcccttcctctatactgcc

SEQ ID NO: 172482 - DNA, 20 bp, Artificial Sequence
  Description of Artificial Sequence: Synthetic oligonucleotide
  Target: LAMA2; (+) strand; PAM type: NRG; PAM sequence: AGG
tcccttcctctatactgcct

SEQ ID NO: 172483 - DNA, 20 bp, Artificial Sequence
  Description of Artificial Sequence: Synthetic oligonucleotide
  Target: LAMA2; (+) strand; PAM type: NRG; PAM sequence: CAG
tcctctatactgcctaggcc

SEQ ID NO: 172484 - DNA, 20 bp, Artificial Sequence
  Description of Artificial Sequence: Synthetic oligonucleotide
  Target: LAMA2; (+) strand; PAM type: NRG; PAM sequence: TAG
cctaggcccagaatctaaat

SEQ ID NO: 172485 - DNA, 20 bp, Artificial Sequence
  Description of Artificial Sequence: Synthetic oligonucleotide
  Target: LAMA2; (+) strand; PAM type: NRG; PAM sequence: AAG
taaattagatcaaatttcaa

SEQ ID NO: 172486 - DNA, 20 bp, Artificial Sequence
  Description of Artificial Sequence: Synthetic oligonucleotide
  Target: LAMA2; (+) strand; PAM type: NRG; PAM sequence: AAG
tcaaaagatatttcttatga

SEQ ID NO: 172487 - DNA, 20 bp, Artificial Sequence
  Description of Artificial Sequence: Synthetic oligonucleotide
  Target: LAMA2; (+) strand; PAM type: NRG; PAM sequence: AAG
acacacatattcatttaaca

SEQ ID NO: 172488 - DNA, 20 bp, Artificial Sequence
  Description of Artificial Sequence: Synthetic oligonucleotide
  Target: LAMA2; (+) strand; PAM type: NRG; PAM sequence: CAG
tttaacaaagaaaaaacata

SEQ ID NO: 172489 - DNA, 20 bp, Artificial Sequence
  Description of Artificial Sequence: Synthetic oligonucleotide
  Target: LAMA2; (+) strand; PAM type: NRG; PAM sequence: TAG
aaagaaaaaacatacagctt

SEQ ID NO: 172490 - DNA, 20 bp, Artificial Sequence
  Description of Artificial Sequence: Synthetic oligonucleotide
  Target: LAMA2; (+) strand; PAM type: NRG; PAM sequence: CAG
gaaaaaacatacagctttag

SEQ ID NO: 172491 - DNA, 20 bp, Artificial Sequence
  Description of Artificial Sequence: Synthetic oligonucleotide
  Target: LAMA2; (+) strand; PAM type: NRG; PAM sequence: AGG
aaaaaacatacagctttagc

SEQ ID NO: 172492 - DNA, 20 bp, Artificial Sequence
  Description of Artificial Sequence: Synthetic oligonucleotide
  Target: LAMA2; (+) strand; PAM type: NRG; PAM sequence: TGG
aacatacagctttagcaggt

SEQ ID NO: 172493 - DNA, 20 bp, Artificial Sequence
  Description of Artificial Sequence: Synthetic oligonucleotide
  Target: LAMA2; (+) strand; PAM type: NRG; PAM sequence: GGG
acatacagctttagcaggtt

SEQ ID NO: 172494 - DNA, 20 bp, Artificial Sequence
  Description of Artificial Sequence: Synthetic oligonucleotide
  Target: LAMA2; (+) strand; PAM type: NRG; PAM sequence: AAG
tacagctttagcaggttggg

SEQ ID NO: 172495 - DNA, 20 bp, Artificial Sequence
  Description of Artificial Sequence: Synthetic oligonucleotide
  Target: LAMA2; (+) strand; PAM type: NRG; PAM sequence: TGG
agctttagcaggttgggaag

SEQ ID NO: 172496 - DNA, 20 bp, Artificial Sequence
  Description of Artificial Sequence: Synthetic oligonucleotide
  Target: LAMA2; (+) strand; PAM type: NRG; PAM sequence: AAG
aatatcatcttcattttaaa

SEQ ID NO: 172497 - DNA, 20 bp, Artificial Sequence
  Description of Artificial Sequence: Synthetic oligonucleotide
  Target: LAMA2; (+) strand; PAM type: NRG; PAM sequence: GAG
tcatcttcattttaaaaagt

SEQ ID NO: 172498 - DNA, 20 bp, Artificial Sequence
  Description of Artificial Sequence: Synthetic oligonucleotide
  Target: LAMA2; (+) strand; PAM type: NRG; PAM sequence: CAG
aaagtgagtacaaattatat

SEQ ID NO: 172499 - DNA, 20 bp, Artificial Sequence
  Description of Artificial Sequence: Synthetic oligonucleotide
  Target: LAMA2; (+) strand; PAM type: NRG; PAM sequence: TAG
gtgagtacaaattatatcag

SEQ ID NO: 172500 - DNA, 20 bp, Artificial Sequence
  Description of Artificial Sequence: Synthetic oligonucleotide
  Target: LAMA2; (+) strand; PAM type: NRG; PAM sequence: TGG
agttacttacatgctacaat

SEQ ID NO: 172501 - DNA, 20 bp, Artificial Sequence
  Description of Artificial Sequence: Synthetic oligonucleotide
  Target: LAMA2; (+) strand; PAM type: NRG; PAM sequence: AAG
ttacatgctacaattggtta

SEQ ID NO: 172502 - DNA, 20 bp, Artificial Sequence
  Description of Artificial Sequence: Synthetic oligonucleotide
  Target: LAMA2; (+) strand; PAM type: NRG; PAM sequence: CAG
atgctacaattggttaaagt

SEQ ID NO: 172503 - DNA, 20 bp, Artificial Sequence
  Description of Artificial Sequence: Synthetic oligonucleotide
  Target: LAMA2; (+) strand; PAM type: NRG; PAM sequence: CAG
attggttaaagtcagctata

SEQ ID NO: 172504 - DNA, 20 bp, Artificial Sequence
  Description of Artificial Sequence: Synthetic oligonucleotide
  Target: LAMA2; (+) strand; PAM type: NRG; PAM sequence: TAG
gttaaagtcagctatacaga

SEQ ID NO: 172505 - DNA, 20 bp, Artificial Sequence
  Description of Artificial Sequence: Synthetic oligonucleotide
  Target: LAMA2; (+) strand; PAM type: NRG; PAM sequence: CAG
ctatacagatagcatgcact

SEQ ID NO: 172506 - DNA, 20 bp, Artificial Sequence
  Description of Artificial Sequence: Synthetic oligonucleotide
  Target: LAMA2; (+) strand; PAM type: NRG; PAM sequence: AAG
gatagcatgcactcagacta

SEQ ID NO: 172507 - DNA, 20 bp, Artificial Sequence
  Description of Artificial Sequence: Synthetic oligonucleotide
  Target: LAMA2; (+) strand; PAM type: NRG; PAM sequence: AGG
atagcatgcactcagactaa

SEQ ID NO: 172508 - DNA, 20 bp, Artificial Sequence
  Description of Artificial Sequence: Synthetic oligonucleotide
  Target: LAMA2; (+) strand; PAM type: NRG; PAM sequence: GAG
atgcactcagactaaaggat

SEQ ID NO: 172509 - DNA, 20 bp, Artificial Sequence
  Description of Artificial Sequence: Synthetic oligonucleotide
  Target: LAMA2; (+) strand; PAM type: NRG; PAM sequence: TAG
actcagactaaaggatgaga

SEQ ID NO: 172510 - DNA, 20 bp, Artificial Sequence
  Description of Artificial Sequence: Synthetic oligonucleotide
  Target: LAMA2; (+) strand; PAM type: NRG; PAM sequence: TAG
taaaggatgagatagtacca

SEQ ID NO: 172511 - DNA, 20 bp, Artificial Sequence
  Description of Artificial Sequence: Synthetic oligonucleotide
  Target: LAMA2; (+) strand; PAM type: NRG; PAM sequence: AGG
aaaggatgagatagtaccat

SEQ ID NO: 172512 - DNA, 20 bp, Artificial Sequence
  Description of Artificial Sequence: Synthetic oligonucleotide
  Target: LAMA2; (+) strand; PAM type: NRG; PAM sequence: TAG
ggatgagatagtaccatagg

SEQ ID NO: 172513 - DNA, 20 bp, Artificial Sequence
  Description of Artificial Sequence: Synthetic oligonucleotide
  Target: LAMA2; (+) strand; PAM type: NRG; PAM sequence: GAG
atgagatagtaccataggta

SEQ ID NO: 172514 - DNA, 20 bp, Artificial Sequence
  Description of Artificial Sequence: Synthetic oligonucleotide
  Target: LAMA2; (+) strand; PAM type: NRG; PAM sequence: AAG
ctactgctttcttgaaatct

SEQ ID NO: 172515 - DNA, 20 bp, Artificial Sequence
  Description of Artificial Sequence: Synthetic oligonucleotide
  Target: LAMA2; (+) strand; PAM type: NRG; PAM sequence: AAG
ctgctttcttgaaatctaag

SEQ ID NO: 172516 - DNA, 20 bp, Artificial Sequence
  Description of Artificial Sequence: Synthetic oligonucleotide
  Target: LAMA2; (+) strand; PAM type: NRG; PAM sequence: CAG
ctttcttgaaatctaagaag

SEQ ID NO: 172517 - DNA, 20 bp, Artificial Sequence
  Description of Artificial Sequence: Synthetic oligonucleotide
  Target: LAMA2; (+) strand; PAM type: NRG; PAM sequence: AAG
cttgaaatctaagaagcaga

SEQ ID NO: 172518 - DNA, 20 bp, Artificial Sequence
  Description of Artificial Sequence: Synthetic oligonucleotide
  Target: LAMA2; (+) strand; PAM type: NRG; PAM sequence: TGG
agcttcttacatttaatcat

SEQ ID NO: 172519 - DNA, 20 bp, Artificial Sequence
  Description of Artificial Sequence: Synthetic oligonucleotide
  Target: LAMA2; (+) strand; PAM type: NRG; PAM sequence: TGG
acatttaatcattggtactc

SEQ ID NO: 172520 - DNA, 20 bp, Artificial Sequence
  Description of Artificial Sequence: Synthetic oligonucleotide
  Target: LAMA2; (+) strand; PAM type: NRG; PAM sequence: AAG
tttaatcattggtactctgg

SEQ ID NO: 172521 - DNA, 20 bp, Artificial Sequence
  Description of Artificial Sequence: Synthetic oligonucleotide
  Target: LAMA2; (+) strand; PAM type: NRG; PAM sequence: AGG
ttaatcattggtactctgga

SEQ ID NO: 172522 - DNA, 20 bp, Artificial Sequence
  Description of Artificial Sequence: Synthetic oligonucleotide
  Target: LAMA2; (+) strand; PAM type: NRG; PAM sequence: TAG
actctggaaggcttcccacc

SEQ ID NO: 172523 - DNA, 20 bp, Artificial Sequence
  Description of Artificial Sequence: Synthetic oligonucleotide
  Target: LAMA2; (+) strand; PAM type: NRG; PAM sequence: TGG
aggcttcccacctagtttgc

SEQ ID NO: 172524 - DNA, 20 bp, Artificial Sequence
  Description of Artificial Sequence: Synthetic oligonucleotide
  Target: LAMA2; (+) strand; PAM type: NRG; PAM sequence: CAG
tcccacctagtttgctggac

SEQ ID NO: 172525 - DNA, 20 bp, Artificial Sequence
  Description of Artificial Sequence: Synthetic oligonucleotide
  Target: LAMA2; (+) strand; PAM type: NRG; PAM sequence: AGG
cccacctagtttgctggacc

SEQ ID NO: 172526 - DNA, 20 bp, Artificial Sequence
  Description of Artificial Sequence: Synthetic oligonucleotide
  Target: LAMA2; (+) strand; PAM type: NRG; PAM sequence: GGG
ccacctagtttgctggacca

SEQ ID NO: 172527 - DNA, 20 bp, Artificial Sequence
  Description of Artificial Sequence: Synthetic oligonucleotide
  Target: LAMA2; (+) strand; PAM type: NRG; PAM sequence: GAG
acctagtttgctggaccagg

SEQ ID NO: 172528 - DNA, 20 bp, Artificial Sequence
  Description of Artificial Sequence: Synthetic oligonucleotide
  Target: LAMA2; (+) strand; PAM type: NRG; PAM sequence: CAG
cagggagctttcaaactaat

SEQ ID NO: 172529 - DNA, 20 bp, Artificial Sequence
  Description of Artificial Sequence: Synthetic oligonucleotide
  Target: LAMA2; (+) strand; PAM type: NRG; PAM sequence: TGG
ctttcaaactaatcagccta

SEQ ID NO: 172530 - DNA, 20 bp, Artificial Sequence
  Description of Artificial Sequence: Synthetic oligonucleotide
  Target: LAMA2; (+) strand; PAM type: NRG; PAM sequence: GAG
tgtgattctgtaacaaaatt

SEQ ID NO: 172531 - DNA, 20 bp, Artificial Sequence
  Description of Artificial Sequence: Synthetic oligonucleotide
  Target: LAMA2; (+) strand; PAM type: NRG; PAM sequence: CAG
tctgtaacaaaattgagaca

SEQ ID NO: 172532 - DNA, 20 bp, Artificial Sequence
  Description of Artificial Sequence: Synthetic oligonucleotide
  Target: LAMA2; (+) strand; PAM type: NRG; PAM sequence: TAG
aacaaaattgagacacagcc

SEQ ID NO: 172533 - DNA, 20 bp, Artificial Sequence
  Description of Artificial Sequence: Synthetic oligonucleotide
  Target: LAMA2; (+) strand; PAM type: NRG; PAM sequence: AGG
acaaaattgagacacagcct

SEQ ID NO: 172534 - DNA, 20 bp, Artificial Sequence
  Description of Artificial Sequence: Synthetic oligonucleotide
  Target: LAMA2; (+) strand; PAM type: NRG; PAM sequence: TAG
gtgatgtatcttactgacaa

SEQ ID NO: 172535 - DNA, 20 bp, Artificial Sequence
  Description of Artificial Sequence: Synthetic oligonucleotide
  Target: LAMA2; (+) strand; PAM type: NRG; PAM sequence: TGG
atgtatcttactgacaatag

SEQ ID NO: 172536 - DNA, 20 bp, Artificial Sequence
  Description of Artificial Sequence: Synthetic oligonucleotide
  Target: LAMA2; (+) strand; PAM type: NRG; PAM sequence: TGG
tgacaatagtggtgaaatat

SEQ ID NO: 172537 - DNA, 20 bp, Artificial Sequence
  Description of Artificial Sequence: Synthetic oligonucleotide
  Target: LAMA2; (+) strand; PAM type: NRG; PAM sequence: GGG
gacaatagtggtgaaatatt

SEQ ID NO: 172538 - DNA, 20 bp, Artificial Sequence
  Description of Artificial Sequence: Synthetic oligonucleotide
  Target: LAMA2; (+) strand; PAM type: NRG; PAM sequence: GAG
caatagtggtgaaatattgg

SEQ ID NO: 172539 - DNA, 20 bp, Artificial Sequence
  Description of Artificial Sequence: Synthetic oligonucleotide
  Target: LAMA2; (+) strand; PAM type: NRG; PAM sequence: AGG
aatagtggtgaaatattggg

SEQ ID NO: 172540 - DNA, 20 bp, Artificial Sequence
  Description of Artificial Sequence: Synthetic oligonucleotide
  Target: LAMA2; (+) strand; PAM type: NRG; PAM sequence: TGG
gaaatattgggaggattctt

SEQ ID NO: 172541 - DNA, 20 bp, Artificial Sequence
  Description of Artificial Sequence: Synthetic oligonucleotide
  Target: LAMA2; (+) strand; PAM type: NRG; PAM sequence: AAG
aggattctttggcatatgtc

SEQ ID NO: 172542 - DNA, 20 bp, Artificial Sequence
  Description of Artificial Sequence: Synthetic oligonucleotide
  Target: LAMA2; (+) strand; PAM type: NRG; PAM sequence: AGG
ggattctttggcatatgtca

SEQ ID NO: 172543 - DNA, 20 bp, Artificial Sequence
  Description of Artificial Sequence: Synthetic oligonucleotide
  Target: LAMA2; (+) strand; PAM type: NRG; PAM sequence: TAG
atatgtcaaggtataactgt

SEQ ID NO: 172544 - DNA, 20 bp, Artificial Sequence
  Description of Artificial Sequence: Synthetic oligonucleotide
  Target: LAMA2; (+) strand; PAM type: NRG; PAM sequence: AGG
tatgtcaaggtataactgtt

SEQ ID NO: 172545 - DNA, 20 bp, Artificial Sequence
  Description of Artificial Sequence: Synthetic oligonucleotide
  Target: LAMA2; (+) strand; PAM type: NRG; PAM sequence: CAG
gtcaaggtataactgttagg

SEQ ID NO: 172546 - DNA, 20 bp, Artificial Sequence
  Description of Artificial Sequence: Synthetic oligonucleotide
  Target: LAMA2; (+) strand; PAM type: NRG; PAM sequence: TGG
aaggtataactgttaggcag

SEQ ID NO: 172547 - DNA, 20 bp, Artificial Sequence
  Description of Artificial Sequence: Synthetic oligonucleotide
  Target: LAMA2; (+) strand; PAM type: NRG; PAM sequence: GGG
aggtataactgttaggcagt

SEQ ID NO: 172548 - DNA, 20 bp, Artificial Sequence
  Description of Artificial Sequence: Synthetic oligonucleotide
  Target: LAMA2; (+) strand; PAM type: NRG; PAM sequence: AAG
taactgttaggcagtgggtc

SEQ ID NO: 172549 - DNA, 20 bp, Artificial Sequence
  Description of Artificial Sequence: Synthetic oligonucleotide
  Target: LAMA2; (+) strand; PAM type: NRG; PAM sequence: AAG
tgttaggcagtgggtcaaga

SEQ ID NO: 172550 - DNA, 20 bp, Artificial Sequence
  Description of Artificial Sequence: Synthetic oligonucleotide
  Target: LAMA2; (+) strand; PAM type: NRG; PAM sequence: GAG
ttaggcagtgggtcaagaaa

SEQ ID NO: 172551 - DNA, 20 bp, Artificial Sequence
  Description of Artificial Sequence: Synthetic oligonucleotide
  Target: LAMA2; (+) strand; PAM type: NRG; PAM sequence: TAG
gagccaccctcactaacttc

SEQ ID NO: 172552 - DNA, 20 bp, Artificial Sequence
  Description of Artificial Sequence: Synthetic oligonucleotide
  Target: LAMA2; (+) strand; PAM type: NRG; PAM sequence: AGG
agccaccctcactaacttct

SEQ ID NO: 172553 - DNA, 20 bp, Artificial Sequence
  Description of Artificial Sequence: Synthetic oligonucleotide
  Target: LAMA2; (+) strand; PAM type: NRG; PAM sequence: CAG
ctcactaacttctaggaata

SEQ ID NO: 172554 - DNA, 20 bp, Artificial Sequence
  Description of Artificial Sequence: Synthetic oligonucleotide
  Target: LAMA2; (+) strand; PAM type: NRG; PAM sequence: CAG
cctgacaataacttctacca

SEQ ID NO: 172555 - DNA, 20 bp, Artificial Sequence
  Description of Artificial Sequence: Synthetic oligonucleotide
  Target: LAMA2; (+) strand; PAM type: NRG; PAM sequence: AGG
ctgacaataacttctaccac

SEQ ID NO: 172556 - DNA, 20 bp, Artificial Sequence
  Description of Artificial Sequence: Synthetic oligonucleotide
  Target: LAMA2; (+) strand; PAM type: NRG; PAM sequence: GGG
tgacaataacttctaccaca

SEQ ID NO: 172557 - DNA, 20 bp, Artificial Sequence
  Description of Artificial Sequence: Synthetic oligonucleotide
  Target: LAMA2; (+) strand; PAM type: NRG; PAM sequence: TAG
aataacttctaccacagggc

SEQ ID NO: 172558 - DNA, 20 bp, Artificial Sequence
  Description of Artificial Sequence: Synthetic oligonucleotide
  Target: LAMA2; (+) strand; PAM type: NRG; PAM sequence: AGG
ataacttctaccacagggct

SEQ ID NO: 172559 - DNA, 20 bp, Artificial Sequence
  Description of Artificial Sequence: Synthetic oligonucleotide
  Target: LAMA2; (+) strand; PAM type: NRG; PAM sequence: TGG
ttctaccacagggctaggaa

SEQ ID NO: 172560 - DNA, 20 bp, Artificial Sequence
  Description of Artificial Sequence: Synthetic oligonucleotide
  Target: LAMA2; (+) strand; PAM type: NRG; PAM sequence: AAG
aatggccatatttgttcttt

SEQ ID NO: 172561 - DNA, 20 bp, Artificial Sequence
  Description of Artificial Sequence: Synthetic oligonucleotide
  Target: LAMA2; (+) strand; PAM type: NRG; PAM sequence: TGG
tatttctgctaattaaacca

SEQ ID NO: 172562 - DNA, 20 bp, Artificial Sequence
  Description of Artificial Sequence: Synthetic oligonucleotide
  Target: LAMA2; (+) strand; PAM type: NRG; PAM sequence: TAG
taattaaaccatggctgtct

SEQ ID NO: 172563 - DNA, 20 bp, Artificial Sequence
  Description of Artificial Sequence: Synthetic oligonucleotide
  Target: LAMA2; (+) strand; PAM type: NRG; PAM sequence: TGG
catggctgtcttagcccatt

SEQ ID NO: 172564 - DNA, 20 bp, Artificial Sequence
  Description of Artificial Sequence: Synthetic oligonucleotide
  Target: LAMA2; (+) strand; PAM type: NRG; PAM sequence: GGG
atggctgtcttagcccattt

SEQ ID NO: 172565 - DNA, 20 bp, Artificial Sequence
  Description of Artificial Sequence: Synthetic oligonucleotide
  Target: LAMA2; (+) strand; PAM type: NRG; PAM sequence: TAG
ctgctataatgaaaatatca

SEQ ID NO: 172566 - DNA, 20 bp, Artificial Sequence
  Description of Artificial Sequence: Synthetic oligonucleotide
  Target: LAMA2; (+) strand; PAM type: NRG; PAM sequence: AAG
aaatgcatttctcatttgtg

SEQ ID NO: 172567 - DNA, 20 bp, Artificial Sequence
  Description of Artificial Sequence: Synthetic oligonucleotide
  Target: LAMA2; (+) strand; PAM type: NRG; PAM sequence: AGG
aatgcatttctcatttgtga

SEQ ID NO: 172568 - DNA, 20 bp, Artificial Sequence
  Description of Artificial Sequence: Synthetic oligonucleotide
  Target: LAMA2; (+) strand; PAM type: NRG; PAM sequence: GAG
atttctcatttgtgaaggct

SEQ ID NO: 172569 - DNA, 20 bp, Artificial Sequence
  Description of Artificial Sequence: Synthetic oligonucleotide
  Target: LAMA2; (+) strand; PAM type: NRG; PAM sequence: GAG
ttctcatttgtgaaggctga

SEQ ID NO: 172570 - DNA, 20 bp, Artificial Sequence
  Description of Artificial Sequence: Synthetic oligonucleotide
  Target: LAMA2; (+) strand; PAM type: NRG; PAM sequence: AGG
tctcatttgtgaaggctgag

SEQ ID NO: 172571 - DNA, 20 bp, Artificial Sequence
  Description of Artificial Sequence: Synthetic oligonucleotide
  Target: LAMA2; (+) strand; PAM type: NRG; PAM sequence: AAG
ttgtgaaggctgagaggtcc

SEQ ID NO: 172572 - DNA, 20 bp, Artificial Sequence
  Description of Artificial Sequence: Synthetic oligonucleotide
  Target: LAMA2; (+) strand; PAM type: NRG; PAM sequence: AAG
aggctgagaggtccaagatc

SEQ ID NO: 172573 - DNA, 20 bp, Artificial Sequence
  Description of Artificial Sequence: Synthetic oligonucleotide
  Target: LAMA2; (+) strand; PAM type: NRG; PAM sequence: AGG
ggctgagaggtccaagatca

SEQ ID NO: 172574 - DNA, 20 bp, Artificial Sequence
  Description of Artificial Sequence: Synthetic oligonucleotide
  Target: LAMA2; (+) strand; PAM type: NRG; PAM sequence: TGG
gaggtccaagatcaaggtgc

SEQ ID NO: 172575 - DNA, 20 bp, Artificial Sequence
  Description of Artificial Sequence: Synthetic oligonucleotide
  Target: LAMA2; (+) strand; PAM type: NRG; PAM sequence: TGG
tccaagatcaaggtgctggc

SEQ ID NO: 172576 - DNA, 20 bp, Artificial Sequence
  Description of Artificial Sequence: Synthetic oligonucleotide
  Target: LAMA2; (+) strand; PAM type: NRG; PAM sequence: TGG
gatcaaggtgctggctggtt

SEQ ID NO: 172577 - DNA, 20 bp, Artificial Sequence
  Description of Artificial Sequence: Synthetic oligonucleotide
  Target: LAMA2; (+) strand; PAM type: NRG; PAM sequence: TGG
gtgctggctggtttggtgcc

SEQ ID NO: 172578 - DNA, 20 bp, Artificial Sequence
  Description of Artificial Sequence: Synthetic oligonucleotide
  Target: LAMA2; (+) strand; PAM type: NRG; PAM sequence: AAG
tggctggtttggtgcctggt

SEQ ID NO: 172579 - DNA, 20 bp, Artificial Sequence
  Description of Artificial Sequence: Synthetic oligonucleotide
  Target: LAMA2; (+) strand; PAM type: NRG; PAM sequence: AGG
ggctggtttggtgcctggta

SEQ ID NO: 172580 - DNA, 20 bp, Artificial Sequence
  Description of Artificial Sequence: Synthetic oligonucleotide
  Target: LAMA2; (+) strand; PAM type: NRG; PAM sequence: GAG
ctggtttggtgcctggtaag

SEQ ID NO: 172581 - DNA, 20 bp, Artificial Sequence
  Description of Artificial Sequence: Synthetic oligonucleotide
  Target: LAMA2; (+) strand; PAM type: NRG; PAM sequence: TGG
cctggtaaggagctgcttcc

SEQ ID NO: 172582 - DNA, 20 bp, Artificial Sequence
  Description of Artificial Sequence: Synthetic oligonucleotide
  Target: LAMA2; (+) strand; PAM type: NRG; PAM sequence: CAG
taaggagctgcttcctggtt

SEQ ID NO: 172583 - DNA, 20 bp, Artificial Sequence
  Description of Artificial Sequence: Synthetic oligonucleotide
  Target: LAMA2; (+) strand; PAM type: NRG; PAM sequence: GAG
aggagctgcttcctggttca

SEQ ID NO: 172584 - DNA, 20 bp, Artificial Sequence
  Description of Artificial Sequence: Synthetic oligonucleotide
  Target: LAMA2; (+) strand; PAM type: NRG; PAM sequence: TGG
gctgcttcctggttcagaga

SEQ ID NO: 172585 - DNA, 20 bp, Artificial Sequence
  Description of Artificial Sequence: Synthetic oligonucleotide
  Target: LAMA2; (+) strand; PAM type: NRG; PAM sequence: TAG
agatggctgtctccttgtta

SEQ ID NO: 172586 - DNA, 20 bp, Artificial Sequence
  Description of Artificial Sequence: Synthetic oligonucleotide
  Target: LAMA2; (+) strand; PAM type: NRG; PAM sequence: TGG
ctccttgttatagtttcatg

SEQ ID NO: 172587 - DNA, 20 bp, Artificial Sequence
  Description of Artificial Sequence: Synthetic oligonucleotide
  Target: LAMA2; (+) strand; PAM type: NRG; PAM sequence: TAG
cttgttatagtttcatgtgg

SEQ ID NO: 172588 - DNA, 20 bp, Artificial Sequence
  Description of Artificial Sequence: Synthetic oligonucleotide
  Target: LAMA2; (+) strand; PAM type: NRG; PAM sequence: AAG
ttatagtttcatgtggtaga

SEQ ID NO: 172589 - DNA, 20 bp, Artificial Sequence
  Description of Artificial Sequence: Synthetic oligonucleotide
  Target: LAMA2; (+) strand; PAM type: NRG; PAM sequence: AGG
tatagtttcatgtggtagaa

SEQ ID NO: 172590 - DNA, 20 bp, Artificial Sequence
  Description of Artificial Sequence: Synthetic oligonucleotide
  Target: LAMA2; (+) strand; PAM type: NRG; PAM sequence: GGG
atagtttcatgtggtagaaa

SEQ ID NO: 172591 - DNA, 20 bp, Artificial Sequence
  Description of Artificial Sequence: Synthetic oligonucleotide
  Target: LAMA2; (+) strand; PAM type: NRG; PAM sequence: AAG
tttcatgtggtagaaagggc

SEQ ID NO: 172592 - DNA, 20 bp, Artificial Sequence
  Description of Artificial Sequence: Synthetic oligonucleotide
  Target: LAMA2; (+) strand; PAM type: NRG; PAM sequence: AGG
ttcatgtggtagaaagggca

SEQ ID NO: 172593 - DNA, 20 bp, Artificial Sequence
  Description of Artificial Sequence: Synthetic oligonucleotide
  Target: LAMA2; (+) strand; PAM type: NRG; PAM sequence: GGG
tcatgtggtagaaagggcaa

SEQ ID NO: 172594 - DNA, 20 bp, Artificial Sequence
  Description of Artificial Sequence: Synthetic oligonucleotide
  Target: LAMA2; (+) strand; PAM type: NRG; PAM sequence: GGG
catgtggtagaaagggcaag

SEQ ID NO: 172595 - DNA, 20 bp, Artificial Sequence
  Description of Artificial Sequence: Synthetic oligonucleotide
  Target: LAMA2; (+) strand; PAM type: NRG; PAM sequence: GGG
atgtggtagaaagggcaagg

SEQ ID NO: 172596 - DNA, 20 bp, Artificial Sequence
  Description of Artificial Sequence: Synthetic oligonucleotide
  Target: LAMA2; (+) strand; PAM type: NRG; PAM sequence: TGG
gaaagggcaagggggttatc

SEQ ID NO: 172597 - DNA, 20 bp, Artificial Sequence
  Description of Artificial Sequence: Synthetic oligonucleotide
  Target: LAMA2; (+) strand; PAM type: NRG; PAM sequence: AAG
ttatctggcatcccttttat

SEQ ID NO: 172598 - DNA, 20 bp, Artificial Sequence
  Description of Artificial Sequence: Synthetic oligonucleotide
  Target: LAMA2; (+) strand; PAM type: NRG; PAM sequence: GAG
atctggcatcccttttataa

SEQ ID NO: 172599 - DNA, 20 bp, Artificial Sequence
  Description of Artificial Sequence: Synthetic oligonucleotide
  Target: LAMA2; (+) strand; PAM type: NRG; PAM sequence: AAG
tatgacctaatctcctctca

SEQ ID NO: 172600 - DNA, 20 bp, Artificial Sequence
  Description of Artificial Sequence: Synthetic oligonucleotide
  Target: LAMA2; (+) strand; PAM type: NRG; PAM sequence: AGG
atgacctaatctcctctcaa

SEQ ID NO: 172601 - DNA, 20 bp, Artificial Sequence
  Description of Artificial Sequence: Synthetic oligonucleotide
  Target: LAMA2; (+) strand; PAM type: NRG; PAM sequence: AAG
tctcttctcacgctgctata

SEQ ID NO: 172602 - DNA, 20 bp, Artificial Sequence
  Description of Artificial Sequence: Synthetic oligonucleotide
  Target: LAMA2; (+) strand; PAM type: NRG; PAM sequence: GAG
gctgctataaagaactacct

SEQ ID NO: 172603 - DNA, 20 bp, Artificial Sequence
  Description of Artificial Sequence: Synthetic oligonucleotide
  Target: LAMA2; (+) strand; PAM type: NRG; PAM sequence: TGG
tataaagaactacctgagac

SEQ ID NO: 172604 - DNA, 20 bp, Artificial Sequence
  Description of Artificial Sequence: Synthetic oligonucleotide
  Target: LAMA2; (+) strand; PAM type: NRG; PAM sequence: GGG
ataaagaactacctgagact

SEQ ID NO: 172605 - DNA, 20 bp, Artificial Sequence
  Description of Artificial Sequence: Synthetic oligonucleotide
  Target: LAMA2; (+) strand; PAM type: NRG; PAM sequence: AAG
ctgagactgggtaacttatg

SEQ ID NO: 172606 - DNA, 20 bp, Artificial Sequence
  Description of Artificial Sequence: Synthetic oligonucleotide
  Target: LAMA2; (+) strand; PAM type: NRG; PAM sequence: AAG
actgggtaacttatgaagaa

SEQ ID NO: 172607 - DNA, 20 bp, Artificial Sequence
  Description of Artificial Sequence: Synthetic oligonucleotide
  Target: LAMA2; (+) strand; PAM type: NRG; PAM sequence: CAG
aaagacgtataaattgacca

SEQ ID NO: 172608 - DNA, 20 bp, Artificial Sequence
  Description of Artificial Sequence: Synthetic oligonucleotide
  Target: LAMA2; (+) strand; PAM type: NRG; PAM sequence: CAG
ataaattgaccacagttctg

SEQ ID NO: 172609 - DNA, 20 bp, Artificial Sequence
  Description of Artificial Sequence: Synthetic oligonucleotide
  Target: LAMA2; (+) strand; PAM type: NRG; PAM sequence: AGG
taaattgaccacagttctgc

SEQ ID NO: 172610 - DNA, 20 bp, Artificial Sequence
  Description of Artificial Sequence: Synthetic oligonucleotide
  Target: LAMA2; (+) strand; PAM type: NRG; PAM sequence: AAG
cacagttctgcaggcttaac

SEQ ID NO: 172611 - DNA, 20 bp, Artificial Sequence
  Description of Artificial Sequence: Synthetic oligonucleotide
  Target: LAMA2; (+) strand; PAM type: NRG; PAM sequence: AAG
agttctgcaggcttaacaag

SEQ ID NO: 172612 - DNA, 20 bp, Artificial Sequence
  Description of Artificial Sequence: Synthetic oligonucleotide
  Target: LAMA2; (+) strand; PAM type: NRG; PAM sequence: TAG
ggcttaacaagaagcatgac

SEQ ID NO: 172613 - DNA, 20 bp, Artificial Sequence
  Description of Artificial Sequence: Synthetic oligonucleotide
  Target: LAMA2; (+) strand; PAM type: NRG; PAM sequence: AGG
gcttaacaagaagcatgact

SEQ ID NO: 172614 - DNA, 20 bp, Artificial Sequence
  Description of Artificial Sequence: Synthetic oligonucleotide
  Target: LAMA2; (+) strand; PAM type: NRG; PAM sequence: GAG
ttaacaagaagcatgactag

SEQ ID NO: 172615 - DNA, 20 bp, Artificial Sequence
  Description of Artificial Sequence: Synthetic oligonucleotide
  Target: LAMA2; (+) strand; PAM type: NRG; PAM sequence: AGG
taacaagaagcatgactagg

SEQ ID NO: 172616 - DNA, 20 bp, Artificial Sequence
  Description of Artificial Sequence: Synthetic oligonucleotide
  Target: LAMA2; (+) strand; PAM type: NRG; PAM sequence: CAG
gaagcatgactaggaggcct

SEQ ID NO: 172617 - DNA, 20 bp, Artificial Sequence
  Description of Artificial Sequence: Synthetic oligonucleotide
  Target: LAMA2; (+) strand; PAM type: NRG; PAM sequence: AGG
aagcatgactaggaggcctc

SEQ ID NO: 172618 - DNA, 20 bp, Artificial Sequence
  Description of Artificial Sequence: Synthetic oligonucleotide
  Target: LAMA2; (+) strand; PAM type: NRG; PAM sequence: TGG
cctcaggaaatttacgatca

SEQ ID NO: 172619 - DNA, 20 bp, Artificial Sequence
  Description of Artificial Sequence: Synthetic oligonucleotide
  Target: LAMA2; (+) strand; PAM type: NRG; PAM sequence: CAG
caggaaatttacgatcatgg

SEQ ID NO: 172620 - DNA, 20 bp, Artificial Sequence
  Description of Artificial Sequence: Synthetic oligonucleotide
  Target: LAMA2; (+) strand; PAM type: NRG; PAM sequence: AAG
gaaatttacgatcatggcag

SEQ ID NO: 172621 - DNA, 20 bp, Artificial Sequence
  Description of Artificial Sequence: Synthetic oligonucleotide
  Target: LAMA2; (+) strand; PAM type: NRG; PAM sequence: AGG
aaatttacgatcatggcaga

SEQ ID NO: 172622 - DNA, 20 bp, Artificial Sequence
  Description of Artificial Sequence: Synthetic oligonucleotide
  Target: LAMA2; (+) strand; PAM type: NRG; PAM sequence: AAG
tacgatcatggcagaaggca

SEQ ID NO: 172623 - DNA, 20 bp, Artificial Sequence
  Description of Artificial Sequence: Synthetic oligonucleotide
  Target: LAMA2; (+) strand; PAM type: NRG; PAM sequence: AGG
acgatcatggcagaaggcaa

SEQ ID NO: 172624 - DNA, 20 bp, Artificial Sequence
  Description of Artificial Sequence: Synthetic oligonucleotide
  Target: LAMA2; (+) strand; PAM type: NRG; PAM sequence: GGG
cgatcatggcagaaggcaaa

SEQ ID NO: 172625 - DNA, 20 bp, Artificial Sequence
  Description of Artificial Sequence: Synthetic oligonucleotide
  Target: LAMA2; (+) strand; PAM type: NRG; PAM sequence: AAG
catggcagaaggcaaaggga

SEQ ID NO: 172626 - DNA, 20 bp, Artificial Sequence
  Description of Artificial Sequence: Synthetic oligonucleotide
  Target: LAMA2; (+) strand; PAM type: NRG; PAM sequence: AAG
gcagaaggcaaagggaaagc

SEQ ID NO: 172627 - DNA, 20 bp, Artificial Sequence
  Description of Artificial Sequence: Synthetic oligonucleotide
  Target: LAMA2; (+) strand; PAM type: NRG; PAM sequence: AGG
cagaaggcaaagggaaagca

SEQ ID NO: 172628 - DNA, 20 bp, Artificial Sequence
  Description of Artificial Sequence: Synthetic oligonucleotide
  Target: LAMA2; (+) strand; PAM type: NRG; PAM sequence: TAG
aagcaaggaccttcttcaca

SEQ ID NO: 172629 - DNA, 20 bp, Artificial Sequence
  Description of Artificial Sequence: Synthetic oligonucleotide
  Target: LAMA2; (+) strand; PAM type: NRG; PAM sequence: TGG
caaggaccttcttcacatag

SEQ ID NO: 172630 - DNA, 20 bp, Artificial Sequence
  Description of Artificial Sequence: Synthetic oligonucleotide
  Target: LAMA2; (+) strand; PAM type: NRG; PAM sequence: CAG
ggaccttcttcacatagtgg

SEQ ID NO: 172631 - DNA, 20 bp, Artificial Sequence
  Description of Artificial Sequence: Synthetic oligonucleotide
  Target: LAMA2; (+) strand; PAM type: NRG; PAM sequence: AGG
gaccttcttcacatagtggc

SEQ ID NO: 172632 - DNA, 20 bp, Artificial Sequence
  Description of Artificial Sequence: Synthetic oligonucleotide
  Target: LAMA2; (+) strand; PAM type: NRG; PAM sequence: AAG
ttcttcacatagtggcagga

SEQ ID NO: 172633 - DNA, 20 bp, Artificial Sequence
  Description of Artificial Sequence: Synthetic oligonucleotide
  Target: LAMA2; (+) strand; PAM type: NRG; PAM sequence: GAG
cttcacatagtggcaggaaa

SEQ ID NO: 172634 - DNA, 20 bp, Artificial Sequence
  Description of Artificial Sequence: Synthetic oligonucleotide
  Target: LAMA2; (+) strand; PAM type: NRG; PAM sequence: GAG
tcacatagtggcaggaaaga

SEQ ID NO: 172635 - DNA, 20 bp, Artificial Sequence
  Description of Artificial Sequence: Synthetic oligonucleotide
  Target: LAMA2; (+) strand; PAM type: NRG; PAM sequence: GAG
acatagtggcaggaaagaga

SEQ ID NO: 172636 - DNA, 20 bp, Artificial Sequence
  Description of Artificial Sequence: Synthetic oligonucleotide
  Target: LAMA2; (+) strand; PAM type: NRG; PAM sequence: AAG
gcaggaaagagagagaatga

SEQ ID NO: 172637 - DNA, 20 bp, Artificial Sequence
  Description of Artificial Sequence: Synthetic oligonucleotide
  Target: LAMA2; (+) strand; PAM type: NRG; PAM sequence: AGG
caggaaagagagagaatgaa

SEQ ID NO: 172638 - DNA, 20 bp, Artificial Sequence
  Description of Artificial Sequence: Synthetic oligonucleotide
  Target: LAMA2; (+) strand; PAM type: NRG; PAM sequence: GGG
aggaaagagagagaatgaaa

SEQ ID NO: 172639 - DNA, 20 bp, Artificial Sequence
  Description of Artificial Sequence: Synthetic oligonucleotide
  Target: LAMA2; (+) strand; PAM type: NRG; PAM sequence: GGG
ggaaagagagagaatgaaag

SEQ ID NO: 172640 - DNA, 20 bp, Artificial Sequence
  Description of Artificial Sequence: Synthetic oligonucleotide
  Target: LAMA2; (+) strand; PAM type: NRG; PAM sequence: AAG
aagagagagaatgaaagggg

SEQ ID NO: 172641 - DNA, 20 bp, Artificial Sequence
  Description of Artificial Sequence: Synthetic oligonucleotide
  Target: LAMA2; (+) strand; PAM type: NRG; PAM sequence: GAG
ttcgaacaacctgatcttgt

SEQ ID NO: 172642 - DNA, 20 bp, Artificial Sequence
  Description of Artificial Sequence: Synthetic oligonucleotide
  Target: LAMA2; (+) strand; PAM type: NRG; PAM sequence: AAG
gagaatttattcactatcac

SEQ ID NO: 172643 - DNA, 20 bp, Artificial Sequence
  Description of Artificial Sequence: Synthetic oligonucleotide
  Target: LAMA2; (+) strand; PAM type: NRG; PAM sequence: CAG
tttattcactatcacaagaa

SEQ ID NO: 172644 - DNA, 20 bp, Artificial Sequence
  Description of Artificial Sequence: Synthetic oligonucleotide
  Target: LAMA2; (+) strand; PAM type: NRG; PAM sequence: AAG
ttcactatcacaagaacagc

SEQ ID NO: 172645 - DNA, 20 bp, Artificial Sequence
  Description of Artificial Sequence: Synthetic oligonucleotide
  Target: LAMA2; (+) strand; PAM type: NRG; PAM sequence: AGG
tcactatcacaagaacagca

SEQ ID NO: 172646 - DNA, 20 bp, Artificial Sequence
  Description of Artificial Sequence: Synthetic oligonucleotide
  Target: LAMA2; (+) strand; PAM type: NRG; PAM sequence: GGG
cactatcacaagaacagcaa

SEQ ID NO: 172647 - DNA, 20 bp, Artificial Sequence
  Description of Artificial Sequence: Synthetic oligonucleotide
  Target: LAMA2; (+) strand; PAM type: NRG; PAM sequence: GGG
actatcacaagaacagcaag

SEQ ID NO: 172648 - DNA, 20 bp, Artificial Sequence
  Description of Artificial Sequence: Synthetic oligonucleotide
  Target: LAMA2; (+) strand; PAM type: NRG; PAM sequence: GGG
ctatcacaagaacagcaagg

SEQ ID NO: 172649 - DNA, 20 bp, Artificial Sequence
  Description of Artificial Sequence: Synthetic oligonucleotide
  Target: LAMA2; (+) strand; PAM type: NRG; PAM sequence: GGG
tatcacaagaacagcaaggg

SEQ ID NO: 172650 - DNA, 20 bp, Artificial Sequence
  Description of Artificial Sequence: Synthetic oligonucleotide
  Target: LAMA2; (+) strand; PAM type: NRG; PAM sequence: GAG
tcacaagaacagcaaggggg

SEQ ID NO: 172651 - DNA, 20 bp, Artificial Sequence
  Description of Artificial Sequence: Synthetic oligonucleotide
  Target: LAMA2; (+) strand; PAM type: NRG; PAM sequence: AGG
cacaagaacagcaagggggg

SEQ ID NO: 172652 - DNA, 20 bp, Artificial Sequence
  Description of Artificial Sequence: Synthetic oligonucleotide
  Target: LAMA2; (+) strand; PAM type: NRG; PAM sequence: CAG
ggaggtttgctcccatgatt

SEQ ID NO: 172653 - DNA, 20 bp, Artificial Sequence
  Description of Artificial Sequence: Synthetic oligonucleotide
  Target: LAMA2; (+) strand; PAM type: NRG; PAM sequence: CAG
atgattcagtcaccacccac

SEQ ID NO: 172654 - DNA, 20 bp, Artificial Sequence
  Description of Artificial Sequence: Synthetic oligonucleotide
  Target: LAMA2; (+) strand; PAM type: NRG; PAM sequence: AGG
tgattcagtcaccacccacc

SEQ ID NO: 172655 - DNA, 20 bp, Artificial Sequence
  Description of Artificial Sequence: Synthetic oligonucleotide
  Target: LAMA2; (+) strand; PAM type: NRG; PAM sequence: TGG
caggcccctccctcaacatg

SEQ ID NO: 172656 - DNA, 20 bp, Artificial Sequence
  Description of Artificial Sequence: Synthetic oligonucleotide
  Target: LAMA2; (+) strand; PAM type: NRG; PAM sequence: GGG
aggcccctccctcaacatgt

SEQ ID NO: 172657 - DNA, 20 bp, Artificial Sequence
  Description of Artificial Sequence: Synthetic oligonucleotide
  Target: LAMA2; (+) strand; PAM type: NRG; PAM sequence: GAG
acatgtgggtattacaactt

SEQ ID NO: 172658 - DNA, 20 bp, Artificial Sequence
  Description of Artificial Sequence: Synthetic oligonucleotide
  Target: LAMA2; (+) strand; PAM type: NRG; PAM sequence: GAG
tgggtattacaacttgagat

SEQ ID NO: 172659 - DNA, 20 bp, Artificial Sequence
  Description of Artificial Sequence: Synthetic oligonucleotide
  Target: LAMA2; (+) strand; PAM type: NRG; PAM sequence: GAG
tacaacttgagatgagattt

SEQ ID NO: 172660 - DNA, 20 bp, Artificial Sequence
  Description of Artificial Sequence: Synthetic oligonucleotide
  Target: LAMA2; (+) strand; PAM type: NRG; PAM sequence: AGG
acaacttgagatgagatttg

SEQ ID NO: 172661 - DNA, 20 bp, Artificial Sequence
  Description of Artificial Sequence: Synthetic oligonucleotide
  Target: LAMA2; (+) strand; PAM type: NRG; PAM sequence: TGG
acttgagatgagatttgagg

SEQ ID NO: 172662 - DNA, 20 bp, Artificial Sequence
  Description of Artificial Sequence: Synthetic oligonucleotide
  Target: LAMA2; (+) strand; PAM type: NRG; PAM sequence: CGG
gagatgagatttgaggtggt

SEQ ID NO: 172663 - DNA, 20 bp, Artificial Sequence
  Description of Artificial Sequence: Synthetic oligonucleotide
  Target: LAMA2; (+) strand; PAM type: NRG; PAM sequence: TGG
atgagatttgaggtggtcgg

SEQ ID NO: 172664 - DNA, 20 bp, Artificial Sequence
  Description of Artificial Sequence: Synthetic oligonucleotide
  Target: LAMA2; (+) strand; PAM type: NRG; PAM sequence: GGG
tgagatttgaggtggtcggt

SEQ ID NO: 172665 - DNA, 20 bp, Artificial Sequence
  Description of Artificial Sequence: Synthetic oligonucleotide
  Target: LAMA2; (+) strand; PAM type: NRG; PAM sequence: GGG
gagatttgaggtggtcggtg

SEQ ID NO: 172666 - DNA, 20 bp, Artificial Sequence
  Description of Artificial Sequence: Synthetic oligonucleotide
  Target: LAMA2; (+) strand; PAM type: NRG; PAM sequence: GGG
agatttgaggtggtcggtgg

SEQ ID NO: 172667 - DNA, 20 bp, Artificial Sequence
  Description of Artificial Sequence: Synthetic oligonucleotide
  Target: LAMA2; (+) strand; PAM type: NRG; PAM sequence: GGG
gatttgaggtggtcggtggg

SEQ ID NO: 172668 - DNA, 20 bp, Artificial Sequence
  Description of Artificial Sequence: Synthetic oligonucleotide
  Target: LAMA2; (+) strand; PAM type: NRG; PAM sequence: CAG
aggtggtcggtggggggaca

SEQ ID NO: 172669 - DNA, 20 bp, Artificial Sequence
  Description of Artificial Sequence: Synthetic oligonucleotide
  Target: LAMA2; (+) strand; PAM type: NRG; PAM sequence: GAG
gtggtcggtggggggacaca

SEQ ID NO: 172670 - DNA, 20 bp, Artificial Sequence
  Description of Artificial Sequence: Synthetic oligonucleotide
  Target: LAMA2; (+) strand; PAM type: NRG; PAM sequence: CAG
gacacagagaaaaaccatat

SEQ ID NO: 172671 - DNA, 20 bp, Artificial Sequence
  Description of Artificial Sequence: Synthetic oligonucleotide
  Target: LAMA2; (+) strand; PAM type: NRG; PAM sequence: AGG
acacagagaaaaaccatatc

SEQ ID NO: 172672 - DNA, 20 bp, Artificial Sequence
  Description of Artificial Sequence: Synthetic oligonucleotide
  Target: LAMA2; (+) strand; PAM type: NRG; PAM sequence: TGG
gcctccaaataccatcacat

SEQ ID NO: 172673 - DNA, 20 bp, Artificial Sequence
  Description of Artificial Sequence: Synthetic oligonucleotide
  Target: LAMA2; (+) strand; PAM type: NRG; PAM sequence: GGG
cctccaaataccatcacatt

SEQ ID NO: 172674 - DNA, 20 bp, Artificial Sequence
  Description of Artificial Sequence: Synthetic oligonucleotide
  Target: LAMA2; (+) strand; PAM type: NRG; PAM sequence: TAG
aataccatcacattgggaat

SEQ ID NO: 172675 - DNA, 20 bp, Artificial Sequence
  Description of Artificial Sequence: Synthetic oligonucleotide
  Target: LAMA2; (+) strand; PAM type: NRG; PAM sequence: AGG
ataccatcacattgggaatt

SEQ ID NO: 172676 - DNA, 20 bp, Artificial Sequence
  Description of Artificial Sequence: Synthetic oligonucleotide
  Target: LAMA2; (+) strand; PAM type: NRG; PAM sequence: GAG
aggtttcaacatatgaattt

SEQ ID NO: 172677 - DNA, 20 bp, Artificial Sequence
  Description of Artificial Sequence: Synthetic oligonucleotide
  Target: LAMA2; (+) strand; PAM type: NRG; PAM sequence: AGG
ggtttcaacatatgaatttg

SEQ ID NO: 172678 - DNA, 20 bp, Artificial Sequence
  Description of Artificial Sequence: Synthetic oligonucleotide
  Target: LAMA2; (+) strand; PAM type: NRG; PAM sequence: GAG
tttcaacatatgaatttgag

SEQ ID NO: 172679 - DNA, 20 bp, Artificial Sequence
  Description of Artificial Sequence: Synthetic oligonucleotide
  Target: LAMA2; (+) strand; PAM type: NRG; PAM sequence: CAG
gaacataaacattcaatcta

SEQ ID NO: 172680 - DNA, 20 bp, Artificial Sequence
  Description of Artificial Sequence: Synthetic oligonucleotide
  Target: LAMA2; (+) strand; PAM type: NRG; PAM sequence: TGG
aaacattcaatctacagcat

SEQ ID NO: 172681 - DNA, 20 bp, Artificial Sequence
  Description of Artificial Sequence: Synthetic oligonucleotide
  Target: LAMA2; (+) strand; PAM type: NRG; PAM sequence: CAG
caatctacagcattggctat

SEQ ID NO: 172682 - DNA, 20 bp, Artificial Sequence
  Description of Artificial Sequence: Synthetic oligonucleotide
  Target: LAMA2; (+) strand; PAM type: NRG; PAM sequence: AGG
aatctacagcattggctatc

SEQ ID NO: 172683 - DNA, 20 bp, Artificial Sequence
  Description of Artificial Sequence: Synthetic oligonucleotide
  Target: LAMA2; (+) strand; PAM type: NRG; PAM sequence: GGG
atctacagcattggctatca

SEQ ID NO: 172684 - DNA, 20 bp, Artificial Sequence
  Description of Artificial Sequence: Synthetic oligonucleotide
  Target: LAMA2; (+) strand; PAM type: NRG; PAM sequence: AAG
agcattggctatcagggtta

SEQ ID NO: 172685 - DNA, 20 bp, Artificial Sequence
  Description of Artificial Sequence: Synthetic oligonucleotide
  Target: LAMA2; (+) strand; PAM type: NRG; PAM sequence: CAG
cagggttaaagtactgacta

SEQ ID NO: 172686 - DNA, 20 bp, Artificial Sequence
  Description of Artificial Sequence: Synthetic oligonucleotide
  Target: LAMA2; (+) strand; PAM type: NRG; PAM sequence: AGG
agggttaaagtactgactac

SEQ ID NO: 172687 - DNA, 20 bp, Artificial Sequence
  Description of Artificial Sequence: Synthetic oligonucleotide
  Target: LAMA2; (+) strand; PAM type: NRG; PAM sequence: AAG
ctacaggaacttttaaacca

SEQ ID NO: 172688 - DNA, 20 bp, Artificial Sequence
  Description of Artificial Sequence: Synthetic oligonucleotide
  Target: LAMA2; (+) strand; PAM type: NRG; PAM sequence: AAG
aaagacatatataacgaaaa

SEQ ID NO: 172689 - DNA, 20 bp, Artificial Sequence
  Description of Artificial Sequence: Synthetic oligonucleotide
  Target: LAMA2; (+) strand; PAM type: NRG; PAM sequence: AAG
ataacgaaaaaagaattata

SEQ ID NO: 172690 - DNA, 20 bp, Artificial Sequence
  Description of Artificial Sequence: Synthetic oligonucleotide
  Target: LAMA2; (+) strand; PAM type: NRG; PAM sequence: TGG
agaattataaagatgcattg

SEQ ID NO: 172691 - DNA, 20 bp, Artificial Sequence
  Description of Artificial Sequence: Synthetic oligonucleotide
  Target: LAMA2; (+) strand; PAM type: NRG; PAM sequence: AAG
ttataaagatgcattgtgga

SEQ ID NO: 172692 - DNA, 20 bp, Artificial Sequence
  Description of Artificial Sequence: Synthetic oligonucleotide
  Target: LAMA2; (+) strand; PAM type: NRG; PAM sequence: AGG
tataaagatgcattgtggaa

SEQ ID NO: 172693 - DNA, 20 bp, Artificial Sequence
  Description of Artificial Sequence: Synthetic oligonucleotide
  Target: LAMA2; (+) strand; PAM type: NRG; PAM sequence: GGG
ataaagatgcattgtggaaa

SEQ ID NO: 172694 - DNA, 20 bp, Artificial Sequence
  Description of Artificial Sequence: Synthetic oligonucleotide
  Target: LAMA2; (+) strand; PAM type: NRG; PAM sequence: TAG
gcattgtggaaagggtatat

SEQ ID NO: 172695 - DNA, 20 bp, Artificial Sequence
  Description of Artificial Sequence: Synthetic oligonucleotide
  Target: LAMA2; (+) strand; PAM type: NRG; PAM sequence: CAG
ctcaattctttctactatcc

SEQ ID NO: 172696 - DNA, 20 bp, Artificial Sequence
  Description of Artificial Sequence: Synthetic oligonucleotide
  Target: LAMA2; (+) strand; PAM type: NRG; PAM sequence: AAG
ctactatcccagtgtttctc

SEQ ID NO: 172697 - DNA, 20 bp, Artificial Sequence
  Description of Artificial Sequence: Synthetic oligonucleotide
  Target: LAMA2; (+) strand; PAM type: NRG; PAM sequence: TAG
tcccagtgtttctcaagctc

SEQ ID NO: 172698 - DNA, 20 bp, Artificial Sequence
  Description of Artificial Sequence: Synthetic oligonucleotide
  Target: LAMA2; (+) strand; PAM type: NRG; PAM sequence: AGG
cccagtgtttctcaagctct

SEQ ID NO: 172699 - DNA, 20 bp, Artificial Sequence
  Description of Artificial Sequence: Synthetic oligonucleotide
  Target: LAMA2; (+) strand; PAM type: NRG; PAM sequence: GGG
ccagtgtttctcaagctcta

SEQ ID NO: 172700 - DNA, 20 bp, Artificial Sequence
  Description of Artificial Sequence: Synthetic oligonucleotide
  Target: LAMA2; (+) strand; PAM type: NRG; PAM sequence: CAG
tctcaagctctagggtacat

SEQ ID NO: 172701 - DNA, 20 bp, Artificial Sequence
  Description of Artificial Sequence: Synthetic oligonucleotide
  Target: LAMA2; (+) strand; PAM type: NRG; PAM sequence: AAG
caagctctagggtacatcag

SEQ ID NO: 172702 - DNA, 20 bp, Artificial Sequence
  Description of Artificial Sequence: Synthetic oligonucleotide
  Target: LAMA2; (+) strand; PAM type: NRG; PAM sequence: GAG
tagggtacatcagaagctct

SEQ ID NO: 172703 - DNA, 20 bp, Artificial Sequence
  Description of Artificial Sequence: Synthetic oligonucleotide
  Target: LAMA2; (+) strand; PAM type: NRG; PAM sequence: AAG
ggtacatcagaagctctgag

SEQ ID NO: 172704 - DNA, 20 bp, Artificial Sequence
  Description of Artificial Sequence: Synthetic oligonucleotide
  Target: LAMA2; (+) strand; PAM type: NRG; PAM sequence: AGG
gtacatcagaagctctgaga

SEQ ID NO: 172705 - DNA, 20 bp, Artificial Sequence
  Description of Artificial Sequence: Synthetic oligonucleotide
  Target: LAMA2; (+) strand; PAM type: NRG; PAM sequence: AAG
agctctgagaaggcttgtta

SEQ ID NO: 172706 - DNA, 20 bp, Artificial Sequence
  Description of Artificial Sequence: Synthetic oligonucleotide
  Target: LAMA2; (+) strand; PAM type: NRG; PAM sequence: CAG
tgagaaggcttgttaaagcc

SEQ ID NO: 172707 - DNA, 20 bp, Artificial Sequence
  Description of Artificial Sequence: Synthetic oligonucleotide
  Target: LAMA2; (+) strand; PAM type: NRG; PAM sequence: TGG
cttgttaaagcccagattgc

SEQ ID NO: 172708 - DNA, 20 bp, Artificial Sequence
  Description of Artificial Sequence: Synthetic oligonucleotide
  Target: LAMA2; (+) strand; PAM type: NRG; PAM sequence: CAG
agattgctggtcctcacccc

SEQ ID NO: 172709 - DNA, 20 bp, Artificial Sequence
  Description of Artificial Sequence: Synthetic oligonucleotide
  Target: LAMA2; (+) strand; PAM type: NRG; PAM sequence: GAG
tcctcacccccagaatttct

SEQ ID NO: 172710 - DNA, 20 bp, Artificial Sequence
  Description of Artificial Sequence: Synthetic oligonucleotide
  Target: LAMA2; (+) strand; PAM type: NRG; PAM sequence: TAG
ccccagaatttctgagtctg

SEQ ID NO: 172711 - DNA, 20 bp, Artificial Sequence
  Description of Artificial Sequence: Synthetic oligonucleotide
  Target: LAMA2; (+) strand; PAM type: NRG; PAM sequence: AGG
cccagaatttctgagtctgt

SEQ ID NO: 172712 - DNA, 20 bp, Artificial Sequence
  Description of Artificial Sequence: Synthetic oligonucleotide
  Target: LAMA2; (+) strand; PAM type: NRG; PAM sequence: TGG
tttctgagtctgtaggtttg

SEQ ID NO: 172713 - DNA, 20 bp, Artificial Sequence
  Description of Artificial Sequence: Synthetic oligonucleotide
  Target: LAMA2; (+) strand; PAM type: NRG; PAM sequence: CAG
ctgagtctgtaggtttgtgg

SEQ ID NO: 172714 - DNA, 20 bp, Artificial Sequence
  Description of Artificial Sequence: Synthetic oligonucleotide
  Target: LAMA2; (+) strand; PAM type: NRG; PAM sequence: AGG
tgagtctgtaggtttgtggc

SEQ ID NO: 172715 - DNA, 20 bp, Artificial Sequence
  Description of Artificial Sequence: Synthetic oligonucleotide
  Target: LAMA2; (+) strand; PAM type: NRG; PAM sequence: GGG
gagtctgtaggtttgtggca

SEQ ID NO: 172716 - DNA, 20 bp, Artificial Sequence
  Description of Artificial Sequence: Synthetic oligonucleotide
  Target: LAMA2; (+) strand; PAM type: NRG; PAM sequence: GAG
gtaggtttgtggcagggcct

SEQ ID NO: 172717 - DNA, 20 bp, Artificial Sequence
  Description of Artificial Sequence: Synthetic oligonucleotide
  Target: LAMA2; (+) strand; PAM type: NRG; PAM sequence: TGG
ctgagaatctgcatttctaa

SEQ ID NO: 172718 - DNA, 20 bp, Artificial Sequence
  Description of Artificial Sequence: Synthetic oligonucleotide
  Target: LAMA2; (+) strand; PAM type: NRG; PAM sequence: GGG
tgagaatctgcatttctaat

SEQ ID NO: 172719 - DNA, 20 bp, Artificial Sequence
  Description of Artificial Sequence: Synthetic oligonucleotide
  Target: LAMA2; (+) strand; PAM type: NRG; PAM sequence: AAG
ctgcatttctaatgggctcc

SEQ ID NO: 172720 - DNA, 20 bp, Artificial Sequence
  Description of Artificial Sequence: Synthetic oligonucleotide
  Target: LAMA2; (+) strand; PAM type: NRG; PAM sequence: AGG
tgcatttctaatgggctcca

SEQ ID NO: 172721 - DNA, 20 bp, Artificial Sequence
  Description of Artificial Sequence: Synthetic oligonucleotide
  Target: LAMA2; (+) strand; PAM type: NRG; PAM sequence: TGG
atttctaatgggctccaagg

SEQ ID NO: 172722 - DNA, 20 bp, Artificial Sequence
  Description of Artificial Sequence: Synthetic oligonucleotide
  Target: LAMA2; (+) strand; PAM type: NRG; PAM sequence: TAG
ggtgatgctgctgctgctta

SEQ ID NO: 172723 - DNA, 20 bp, Artificial Sequence
  Description of Artificial Sequence: Synthetic oligonucleotide
  Target: LAMA2; (+) strand; PAM type: NRG; PAM sequence: AGG
gtgatgctgctgctgcttat

SEQ ID NO: 172724 - DNA, 20 bp, Artificial Sequence
  Description of Artificial Sequence: Synthetic oligonucleotide
  Target: LAMA2; (+) strand; PAM type: NRG; PAM sequence: GGG
tgatgctgctgctgcttata

SEQ ID NO: 172725 - DNA, 20 bp, Artificial Sequence
  Description of Artificial Sequence: Synthetic oligonucleotide
  Target: LAMA2; (+) strand; PAM type: NRG; PAM sequence: GGG
gatgctgctgctgcttatag

SEQ ID NO: 172726 - DNA, 20 bp, Artificial Sequence
  Description of Artificial Sequence: Synthetic oligonucleotide
  Target: LAMA2; (+) strand; PAM type: NRG; PAM sequence: TAG
gcttataggggaccacattt

SEQ ID NO: 172727 - DNA, 20 bp, Artificial Sequence
  Description of Artificial Sequence: Synthetic oligonucleotide
  Target: LAMA2; (+) strand; PAM type: NRG; PAM sequence: CAG
ctgactatgtacacctgttt

SEQ ID NO: 172728 - DNA, 20 bp, Artificial Sequence
  Description of Artificial Sequence: Synthetic oligonucleotide
  Target: LAMA2; (+) strand; PAM type: NRG; PAM sequence: AGG
tgactatgtacacctgtttc

SEQ ID NO: 172729 - DNA, 20 bp, Artificial Sequence
  Description of Artificial Sequence: Synthetic oligonucleotide
  Target: LAMA2; (+) strand; PAM type: NRG; PAM sequence: GAG
actatgtacacctgtttcag

SEQ ID NO: 172730 - DNA, 20 bp, Artificial Sequence
  Description of Artificial Sequence: Synthetic oligonucleotide
  Target: LAMA2; (+) strand; PAM type: NRG; PAM sequence: CAG
cctgtttcaggagctctgcc

SEQ ID NO: 172731 - DNA, 20 bp, Artificial Sequence
  Description of Artificial Sequence: Synthetic oligonucleotide
  Target: LAMA2; (+) strand; PAM type: NRG; PAM sequence: AAG
cccagtgcaaaactctctcc

SEQ ID NO: 172732 - DNA, 20 bp, Artificial Sequence
  Description of Artificial Sequence: Synthetic oligonucleotide
  Target: LAMA2; (+) strand; PAM type: NRG; PAM sequence: TAG
tgcaaaactctctccaagaa

SEQ ID NO: 172733 - DNA, 20 bp, Artificial Sequence
  Description of Artificial Sequence: Synthetic oligonucleotide
  Target: LAMA2; (+) strand; PAM type: NRG; PAM sequence: CAG
caagaatagaaattaatttt

SEQ ID NO: 172734 - DNA, 20 bp, Artificial Sequence
  Description of Artificial Sequence: Synthetic oligonucleotide
  Target: LAMA2; (+) strand; PAM type: NRG; PAM sequence: AGG
aagaatagaaattaattttc

SEQ ID NO: 172735 - DNA, 20 bp, Artificial Sequence
  Description of Artificial Sequence: Synthetic oligonucleotide
  Target: LAMA2; (+) strand; PAM type: NRG; PAM sequence: AAG
ttcaggaatctctatgtcat

SEQ ID NO: 172736 - DNA, 20 bp, Artificial Sequence
  Description of Artificial Sequence: Synthetic oligonucleotide
  Target: LAMA2; (+) strand; PAM type: NRG; PAM sequence: AGG
tcaggaatctctatgtcata

SEQ ID NO: 172737 - DNA, 20 bp, Artificial Sequence
  Description of Artificial Sequence: Synthetic oligonucleotide
  Target: LAMA2; (+) strand; PAM type: NRG; PAM sequence: GAG
aggaatctctatgtcataag

SEQ ID NO: 172738 - DNA, 20 bp, Artificial Sequence
  Description of Artificial Sequence: Synthetic oligonucleotide
  Target: LAMA2; (+) strand; PAM type: NRG; PAM sequence: CGG
ctatgtcataaggagatctt

SEQ ID NO: 172739 - DNA, 20 bp, Artificial Sequence
  Description of Artificial Sequence: Synthetic oligonucleotide
  Target: LAMA2; (+) strand; PAM type: NRG; PAM sequence: TGG
tcttcggatacacccttgaa

SEQ ID NO: 172740 - DNA, 20 bp, Artificial Sequence
  Description of Artificial Sequence: Synthetic oligonucleotide
  Target: LAMA2; (+) strand; PAM type: NRG; PAM sequence: TAG
tcggatacacccttgaatgg

SEQ ID NO: 172741 - DNA, 20 bp, Artificial Sequence
  Description of Artificial Sequence: Synthetic oligonucleotide
  Target: LAMA2; (+) strand; PAM type: NRG; PAM sequence: TGG
gaatggtagaaaatgcctct

SEQ ID NO: 172742 - DNA, 20 bp, Artificial Sequence
  Description of Artificial Sequence: Synthetic oligonucleotide
  Target: LAMA2; (+) strand; PAM type: NRG; PAM sequence: GAG
aaaatgcctcttggccaacc

SEQ ID NO: 172743 - DNA, 20 bp, Artificial Sequence
  Description of Artificial Sequence: Synthetic oligonucleotide
  Target: LAMA2; (+) strand; PAM type: NRG; PAM sequence: TAG
ccaaccgagacccctcattc

SEQ ID NO: 172744 - DNA, 20 bp, Artificial Sequence
  Description of Artificial Sequence: Synthetic oligonucleotide
  Target: LAMA2; (+) strand; PAM type: NRG; PAM sequence: AGG
caaccgagacccctcattct

SEQ ID NO: 172745 - DNA, 20 bp, Artificial Sequence
  Description of Artificial Sequence: Synthetic oligonucleotide
  Target: LAMA2; (+) strand; PAM type: NRG; PAM sequence: GAG
accgagacccctcattctag

SEQ ID NO: 172746 - DNA, 20 bp, Artificial Sequence
  Description of Artificial Sequence: Synthetic oligonucleotide
  Target: LAMA2; (+) strand; PAM type: NRG; PAM sequence: AAG
cctcattctaggagttttca

SEQ ID NO: 172747 - DNA, 20 bp, Artificial Sequence
  Description of Artificial Sequence: Synthetic oligonucleotide
  Target: LAMA2; (+) strand; PAM type: NRG; PAM sequence: AGG
ctcattctaggagttttcaa

SEQ ID NO: 172748 - DNA, 20 bp, Artificial Sequence
  Description of Artificial Sequence: Synthetic oligonucleotide
  Target: LAMA2; (+) strand; PAM type: NRG; PAM sequence: TAG
agttttcaaaggtaatatta

SEQ ID NO: 172749 - DNA, 20 bp, Artificial Sequence
  Description of Artificial Sequence: Synthetic oligonucleotide
  Target: LAMA2; (+) strand; PAM type: NRG; PAM sequence: AAG
aaaggtaatattatagaaat

SEQ ID NO: 172750 - DNA, 20 bp, Artificial Sequence
  Description of Artificial Sequence: Synthetic oligonucleotide
  Target: LAMA2; (+) strand; PAM type: NRG; PAM sequence: CAG
atattatagaaataagtatt

SEQ ID NO: 172751 - DNA, 20 bp, Artificial Sequence
  Description of Artificial Sequence: Synthetic oligonucleotide
  Target: LAMA2; (+) strand; PAM type: NRG; PAM sequence: AAG
aataagtattcagctgacaa

SEQ ID NO: 172752 - DNA, 20 bp, Artificial Sequence
  Description of Artificial Sequence: Synthetic oligonucleotide
  Target: LAMA2; (+) strand; PAM type: NRG; PAM sequence: GAG
taagtattcagctgacaaaa

SEQ ID NO: 172753 - DNA, 20 bp, Artificial Sequence
  Description of Artificial Sequence: Synthetic oligonucleotide
  Target: LAMA2; (+) strand; PAM type: NRG; PAM sequence: GAG
ttcagctgacaaaagagttt

SEQ ID NO: 172754 - DNA, 20 bp, Artificial Sequence
  Description of Artificial Sequence: Synthetic oligonucleotide
  Target: LAMA2; (+) strand; PAM type: NRG; PAM sequence: TAG
ttcaccaaaaaaatgtccta

SEQ ID NO: 172755 - DNA, 20 bp, Artificial Sequence
  Description of Artificial Sequence: Synthetic oligonucleotide
  Target: LAMA2; (+) strand; PAM type: NRG; PAM sequence: CAG
atgtcctatagaacacactc

SEQ ID NO: 172756 - DNA, 20 bp, Artificial Sequence
  Description of Artificial Sequence: Synthetic oligonucleotide
  Target: LAMA2; (+) strand; PAM type: NRG; PAM sequence: AGG
tgtcctatagaacacactcc

SEQ ID NO: 172757 - DNA, 20 bp, Artificial Sequence
  Description of Artificial Sequence: Synthetic oligonucleotide
  Target: LAMA2; (+) strand; PAM type: NRG; PAM sequence: TAG
gaacacactccaggaaactt

SEQ ID NO: 172758 - DNA, 20 bp, Artificial Sequence
  Description of Artificial Sequence: Synthetic oligonucleotide
  Target: LAMA2; (+) strand; PAM type: NRG; PAM sequence: TAG
ttttaaacttttatttgacg

SEQ ID NO: 172759 - DNA, 20 bp, Artificial Sequence
  Description of Artificial Sequence: Synthetic oligonucleotide
  Target: LAMA2; (+) strand; PAM type: NRG; PAM sequence: CAG
ttctcaaatgaaatcctgcc

SEQ ID NO: 172760 - DNA, 20 bp, Artificial Sequence
  Description of Artificial Sequence: Synthetic oligonucleotide
  Target: LAMA2; (+) strand; PAM type: NRG; PAM sequence: CAG
tgaaatcctgcccagaacat

SEQ ID NO: 172761 - DNA, 20 bp, Artificial Sequence
  Description of Artificial Sequence: Synthetic oligonucleotide
  Target: LAMA2; (+) strand; PAM type: NRG; PAM sequence: AAG
gcccagaacatcagcctata

SEQ ID NO: 172762 - DNA, 20 bp, Artificial Sequence
  Description of Artificial Sequence: Synthetic oligonucleotide
  Target: LAMA2; (+) strand; PAM type: NRG; PAM sequence: CAG
cagaacatcagcctataaag

SEQ ID NO: 172763 - DNA, 20 bp, Artificial Sequence
  Description of Artificial Sequence: Synthetic oligonucleotide
  Target: LAMA2; (+) strand; PAM type: NRG; PAM sequence: TGG
cagcctataaagcagactct

SEQ ID NO: 172764 - DNA, 20 bp, Artificial Sequence
  Description of Artificial Sequence: Synthetic oligonucleotide
  Target: LAMA2; (+) strand; PAM type: NRG; PAM sequence: CAG
cctataaagcagactcttgg

SEQ ID NO: 172765 - DNA, 20 bp, Artificial Sequence
  Description of Artificial Sequence: Synthetic oligonucleotide
  Target: LAMA2; (+) strand; PAM type: NRG; PAM sequence: TAG
aaagcagactcttggcagaa

SEQ ID NO: 172766 - DNA, 20 bp, Artificial Sequence
  Description of Artificial Sequence: Synthetic oligonucleotide
  Target: LAMA2; (+) strand; PAM type: NRG; PAM sequence: TAG
ggcagaatagacatcatttg

SEQ ID NO: 172767 - DNA, 20 bp, Artificial Sequence
  Description of Artificial Sequence: Synthetic oligonucleotide
  Target: LAMA2; (+) strand; PAM type: NRG; PAM sequence: AAG
catcatttgtagaaaacctg

SEQ ID NO: 172768 - DNA, 20 bp, Artificial Sequence
  Description of Artificial Sequence: Synthetic oligonucleotide
  Target: LAMA2; (+) strand; PAM type: NRG; PAM sequence: TGG
tgtagaaaacctgaagcacc

SEQ ID NO: 172769 - DNA, 20 bp, Artificial Sequence
  Description of Artificial Sequence: Synthetic oligonucleotide
  Target: LAMA2; (+) strand; PAM type: NRG; PAM sequence: GAG
tagaaaacctgaagcacctg

SEQ ID NO: 172770 - DNA, 20 bp, Artificial Sequence
  Description of Artificial Sequence: Synthetic oligonucleotide
  Target: LAMA2; (+) strand; PAM type: NRG; PAM sequence: AAG
ctggagaatcctacgattcc

SEQ ID NO: 172771 - DNA, 20 bp, Artificial Sequence
  Description of Artificial Sequence: Synthetic oligonucleotide
  Target: LAMA2; (+) strand; PAM type: NRG; PAM sequence: AGG
tggagaatcctacgattcca

SEQ ID NO: 172772 - DNA, 20 bp, Artificial Sequence
  Description of Artificial Sequence: Synthetic oligonucleotide
  Target: LAMA2; (+) strand; PAM type: NRG; PAM sequence: GAG
gagaatcctacgattccaag

SEQ ID NO: 172773 - DNA, 20 bp, Artificial Sequence
  Description of Artificial Sequence: Synthetic oligonucleotide
  Target: LAMA2; (+) strand; PAM type: NRG; PAM sequence: CAG
tcctacgattccaaggagta

SEQ ID NO: 172774 - DNA, 20 bp, Artificial Sequence
  Description of Artificial Sequence: Synthetic oligonucleotide
  Target: LAMA2; (+) strand; PAM type: NRG; PAM sequence: CAG
catttaatgcataataaaca

SEQ ID NO: 172775 - DNA, 20 bp, Artificial Sequence
  Description of Artificial Sequence: Synthetic oligonucleotide
  Target: LAMA2; (+) strand; PAM type: NRG; PAM sequence: AAG
aataaacacagacccttgtg

SEQ ID NO: 172776 - DNA, 20 bp, Artificial Sequence
  Description of Artificial Sequence: Synthetic oligonucleotide
  Target: LAMA2; (+) strand; PAM type: NRG; PAM sequence: AGG
ataaacacagacccttgtga

SEQ ID NO: 172777 - DNA, 20 bp, Artificial Sequence
  Description of Artificial Sequence: Synthetic oligonucleotide
  Target: LAMA2; (+) strand; PAM type: NRG; PAM sequence: TGG
cttgtgaaggatgctattgc

SEQ ID NO: 172778 - DNA, 20 bp, Artificial Sequence
  Description of Artificial Sequence: Synthetic oligonucleotide
  Target: LAMA2; (+) strand; PAM type: NRG; PAM sequence: AAG
tgaaggatgctattgctgga

SEQ ID NO: 172779 - DNA, 20 bp, Artificial Sequence
  Description of Artificial Sequence: Synthetic oligonucleotide
  Target: LAMA2; (+) strand; PAM type: NRG; PAM sequence: AAG
attgctggaaagtgtccttg

SEQ ID NO: 172780 - DNA, 20 bp, Artificial Sequence
  Description of Artificial Sequence: Synthetic oligonucleotide
  Target: LAMA2; (+) strand; PAM type: NRG; PAM sequence: TAG
ctaatttataacccttctcc

SEQ ID NO: 172781 - DNA, 20 bp, Artificial Sequence
  Description of Artificial Sequence: Synthetic oligonucleotide
  Target: LAMA2; (+) strand; PAM type: NRG; PAM sequence: AAG
atttataacccttctcctag

SEQ ID NO: 172782 - DNA, 20 bp, Artificial Sequence
  Description of Artificial Sequence: Synthetic oligonucleotide
  Target: LAMA2; (+) strand; PAM type: NRG; PAM sequence: AGG
tttataacccttctcctaga

SEQ ID NO: 172783 - DNA, 20 bp, Artificial Sequence
  Description of Artificial Sequence: Synthetic oligonucleotide
  Target: LAMA2; (+) strand; PAM type: NRG; PAM sequence: GGG
ttataacccttctcctagaa

SEQ ID NO: 172784 - DNA, 20 bp, Artificial Sequence
  Description of Artificial Sequence: Synthetic oligonucleotide
  Target: LAMA2; (+) strand; PAM type: NRG; PAM sequence: AAG
ccttctcctagaagggttat

SEQ ID NO: 172785 - DNA, 20 bp, Artificial Sequence
  Description of Artificial Sequence: Synthetic oligonucleotide
  Target: LAMA2; (+) strand; PAM type: NRG; PAM sequence: TAG
tcctagaagggttataagtc

SEQ ID NO: 172786 - DNA, 20 bp, Artificial Sequence
  Description of Artificial Sequence: Synthetic oligonucleotide
  Target: LAMA2; (+) strand; PAM type: NRG; PAM sequence: CAG
gaagggttataagtctagac

SEQ ID NO: 172787 - DNA, 20 bp, Artificial Sequence
  Description of Artificial Sequence: Synthetic oligonucleotide
  Target: LAMA2; (+) strand; PAM type: NRG; PAM sequence: CAG
actcctttaaaaaatgaaca

SEQ ID NO: 172788 - DNA, 20 bp, Artificial Sequence
  Description of Artificial Sequence: Synthetic oligonucleotide
  Target: LAMA2; (+) strand; PAM type: NRG; PAM sequence: AGG
ctcctttaaaaaatgaacac

SEQ ID NO: 172789 - DNA, 20 bp, Artificial Sequence
  Description of Artificial Sequence: Synthetic oligonucleotide
  Target: LAMA2; (+) strand; PAM type: NRG; PAM sequence: GAG
cctttaaaaaatgaacacag

SEQ ID NO: 172790 - DNA, 20 bp, Artificial Sequence
  Description of Artificial Sequence: Synthetic oligonucleotide
  Target: LAMA2; (+) strand; PAM type: NRG; PAM sequence: TGG
atgaacacaggagaactatg

SEQ ID NO: 172791 - DNA, 20 bp, Artificial Sequence
  Description of Artificial Sequence: Synthetic oligonucleotide
  Target: LAMA2; (+) strand; PAM type: NRG; PAM sequence: AAG
ggagaactatgtggaaatac

SEQ ID NO: 172792 - DNA, 20 bp, Artificial Sequence
  Description of Artificial Sequence: Synthetic oligonucleotide
  Target: LAMA2; (+) strand; PAM type: NRG; PAM sequence: AGG
gagaactatgtggaaataca

SEQ ID NO: 172793 - DNA, 20 bp, Artificial Sequence
  Description of Artificial Sequence: Synthetic oligonucleotide
  Target: LAMA2; (+) strand; PAM type: NRG; PAM sequence: GGG
agaactatgtggaaatacaa

SEQ ID NO: 172794 - DNA, 20 bp, Artificial Sequence
  Description of Artificial Sequence: Synthetic oligonucleotide
  Target: LAMA2; (+) strand; PAM type: NRG; PAM sequence: CAG
actatgtggaaatacaaggg

SEQ ID NO: 172795 - DNA, 20 bp, Artificial Sequence
  Description of Artificial Sequence: Synthetic oligonucleotide
  Target: LAMA2; (+) strand; PAM type: NRG; PAM sequence: AGG
ctatgtggaaatacaagggc

SEQ ID NO: 172796 - DNA, 20 bp, Artificial Sequence
  Description of Artificial Sequence: Synthetic oligonucleotide
  Target: LAMA2; (+) strand; PAM type: NRG; PAM sequence: CAG
tacaagggcaggttcatttt

SEQ ID NO: 172797 - DNA, 20 bp, Artificial Sequence
  Description of Artificial Sequence: Synthetic oligonucleotide
  Target: LAMA2; (+) strand; PAM type: NRG; PAM sequence: GAG
caagggcaggttcattttca

SEQ ID NO: 172798 - DNA, 20 bp, Artificial Sequence
  Description of Artificial Sequence: Synthetic oligonucleotide
  Target: LAMA2; (+) strand; PAM type: NRG; PAM sequence: GAG
ttttcagagatctcatcact

SEQ ID NO: 172799 - DNA, 20 bp, Artificial Sequence
  Description of Artificial Sequence: Synthetic oligonucleotide
  Target: LAMA2; (+) strand; PAM type: NRG; PAM sequence: CAG
actgagtgtatttccacact

SEQ ID NO: 172800 - DNA, 20 bp, Artificial Sequence
  Description of Artificial Sequence: Synthetic oligonucleotide
  Target: LAMA2; (+) strand; PAM type: NRG; PAM sequence: TAG
agtatttttaaactgactga

SEQ ID NO: 172801 - DNA, 20 bp, Artificial Sequence
  Description of Artificial Sequence: Synthetic oligonucleotide
  Target: LAMA2; (+) strand; PAM type: NRG; PAM sequence: CAG
cactgctatgactatcttat

SEQ ID NO: 172802 - DNA, 20 bp, Artificial Sequence
  Description of Artificial Sequence: Synthetic oligonucleotide
  Target: LAMA2; (+) strand; PAM type: NRG; PAM sequence: CAG
tgactatcttatcagcaatg

SEQ ID NO: 172803 - DNA, 20 bp, Artificial Sequence
  Description of Artificial Sequence: Synthetic oligonucleotide
  Target: LAMA2; (+) strand; PAM type: NRG; PAM sequence: GAG
actatcttatcagcaatgca

SEQ ID NO: 172804 - DNA, 20 bp, Artificial Sequence
  Description of Artificial Sequence: Synthetic oligonucleotide
  Target: LAMA2; (+) strand; PAM type: NRG; PAM sequence: CAG
caatgcagagcttgcgtttc

SEQ ID NO: 172805 - DNA, 20 bp, Artificial Sequence
  Description of Artificial Sequence: Synthetic oligonucleotide
  Target: LAMA2; (+) strand; PAM type: NRG; PAM sequence: AAG
agcttgcgtttccagcctcc

SEQ ID NO: 172806 - DNA, 20 bp, Artificial Sequence
  Description of Artificial Sequence: Synthetic oligonucleotide
  Target: LAMA2; (+) strand; PAM type: NRG; PAM sequence: CAG
agcctccaagtgttatgcta

SEQ ID NO: 172807 - DNA, 20 bp, Artificial Sequence
  Description of Artificial Sequence: Synthetic oligonucleotide
  Target: LAMA2; (+) strand; PAM type: NRG; PAM sequence: AGG
gcctccaagtgttatgctac

SEQ ID NO: 172808 - DNA, 20 bp, Artificial Sequence
  Description of Artificial Sequence: Synthetic oligonucleotide
  Target: LAMA2; (+) strand; PAM type: NRG; PAM sequence: GAG
ttttttttaaactcttacct

SEQ ID NO: 172809 - DNA, 20 bp, Artificial Sequence
  Description of Artificial Sequence: Synthetic oligonucleotide
  Target: LAMA2; (+) strand; PAM type: NRG; PAM sequence: GAG
tttaattctttctttctttt

SEQ ID NO: 172810 - DNA, 20 bp, Artificial Sequence
  Description of Artificial Sequence: Synthetic oligonucleotide
  Target: LAMA2; (+) strand; PAM type: NRG; PAM sequence: AGG
ttaattctttctttcttttg

SEQ ID NO: 172811 - DNA, 20 bp, Artificial Sequence
  Description of Artificial Sequence: Synthetic oligonucleotide
  Target: LAMA2; (+) strand; PAM type: NRG; PAM sequence: TAG
ttctttctttcttttgaggt

SEQ ID NO: 172812 - DNA, 20 bp, Artificial Sequence
  Description of Artificial Sequence: Synthetic oligonucleotide
  Target: LAMA2; (+) strand; PAM type: NRG; PAM sequence: AAG
ttaattgctgtaacccccaa

SEQ ID NO: 172813 - DNA, 20 bp, Artificial Sequence
  Description of Artificial Sequence: Synthetic oligonucleotide
  Target: LAMA2; (+) strand; PAM type: NRG; PAM sequence: GAG
cccaaaagaaatataatatt

SEQ ID NO: 172814 - DNA, 20 bp, Artificial Sequence
  Description of Artificial Sequence: Synthetic oligonucleotide
  Target: LAMA2; (+) strand; PAM type: NRG; PAM sequence: TGG
tgttgtcttaactgcctctg

SEQ ID NO: 172815 - DNA, 20 bp, Artificial Sequence
  Description of Artificial Sequence: Synthetic oligonucleotide
  Target: LAMA2; (+) strand; PAM type: NRG; PAM sequence: CAG
ttaactgcctctgtggttcc

SEQ ID NO: 172816 - DNA, 20 bp, Artificial Sequence
  Description of Artificial Sequence: Synthetic oligonucleotide
  Target: LAMA2; (+) strand; PAM type: NRG; PAM sequence: CAG
actgcctctgtggttcccag

SEQ ID NO: 172817 - DNA, 20 bp, Artificial Sequence
  Description of Artificial Sequence: Synthetic oligonucleotide
  Target: LAMA2; (+) strand; PAM type: NRG; PAM sequence: AGG
ctgcctctgtggttcccagc

SEQ ID NO: 172818 - DNA, 20 bp, Artificial Sequence
  Description of Artificial Sequence: Synthetic oligonucleotide
  Target: LAMA2; (+) strand; PAM type: NRG; PAM sequence: CGG
gttcccagcaggaacactca

SEQ ID NO: 172819 - DNA, 20 bp, Artificial Sequence
  Description of Artificial Sequence: Synthetic oligonucleotide
  Target: LAMA2; (+) strand; PAM type: NRG; PAM sequence: TGG
acggcaaaatactcttcatt

SEQ ID NO: 172820 - DNA, 20 bp, Artificial Sequence
  Description of Artificial Sequence: Synthetic oligonucleotide
  Target: LAMA2; (+) strand; PAM type: NRG; PAM sequence: GAG
ggcaaaatactcttcatttg

SEQ ID NO: 172821 - DNA, 20 bp, Artificial Sequence
  Description of Artificial Sequence: Synthetic oligonucleotide
  Target: LAMA2; (+) strand; PAM type: NRG; PAM sequence: TGG
aaatactcttcatttggaga

SEQ ID NO: 172822 - DNA, 20 bp, Artificial Sequence
  Description of Artificial Sequence: Synthetic oligonucleotide
  Target: LAMA2; (+) strand; PAM type: NRG; PAM sequence: TGG
tactcttcatttggagatgg

SEQ ID NO: 172823 - DNA, 20 bp, Artificial Sequence
  Description of Artificial Sequence: Synthetic oligonucleotide
  Target: LAMA2; (+) strand; PAM type: NRG; PAM sequence: CAG
catttggagatggtggtgcc

SEQ ID NO: 172824 - DNA, 20 bp, Artificial Sequence
  Description of Artificial Sequence: Synthetic oligonucleotide
  Target: LAMA2; (+) strand; PAM type: NRG; PAM sequence: CAG
ttggagatggtggtgcccag

SEQ ID NO: 172825 - DNA, 20 bp, Artificial Sequence
  Description of Artificial Sequence: Synthetic oligonucleotide
  Target: LAMA2; (+) strand; PAM type: NRG; PAM sequence: TGG
ctgaataccatgttttcatg

SEQ ID NO: 172826 - DNA, 20 bp, Artificial Sequence
  Description of Artificial Sequence: Synthetic oligonucleotide
  Target: LAMA2; (+) strand; PAM type: NRG; PAM sequence: CAG
aaaatttgttttaccccctg

SEQ ID NO: 172827 - DNA, 20 bp, Artificial Sequence
  Description of Artificial Sequence: Synthetic oligonucleotide
  Target: LAMA2; (+) strand; PAM type: NRG; PAM sequence: AAG
ccctgcagctgtaaatgaaa

SEQ ID NO: 172828 - DNA, 20 bp, Artificial Sequence
  Description of Artificial Sequence: Synthetic oligonucleotide
  Target: LAMA2; (+) strand; PAM type: NRG; PAM sequence: TAG
tataaaactaaatgaaactc

SEQ ID NO: 172829 - DNA, 20 bp, Artificial Sequence
  Description of Artificial Sequence: Synthetic oligonucleotide
  Target: LAMA2; (+) strand; PAM type: NRG; PAM sequence: AGG
ataaaactaaatgaaactct

SEQ ID NO: 172830 - DNA, 20 bp, Artificial Sequence
  Description of Artificial Sequence: Synthetic oligonucleotide
  Target: LAMA2; (+) strand; PAM type: NRG; PAM sequence: GAG
aaatgaaactctaggaactc

SEQ ID NO: 172831 - DNA, 20 bp, Artificial Sequence
  Description of Artificial Sequence: Synthetic oligonucleotide
  Target: LAMA2; (+) strand; PAM type: NRG; PAM sequence: GAG
aaactctaggaactcgagac

SEQ ID NO: 172832 - DNA, 20 bp, Artificial Sequence
  Description of Artificial Sequence: Synthetic oligonucleotide
  Target: LAMA2; (+) strand; PAM type: NRG; PAM sequence: AGG
aactctaggaactcgagacg

SEQ ID NO: 172833 - DNA, 20 bp, Artificial Sequence
  Description of Artificial Sequence: Synthetic oligonucleotide
  Target: LAMA2; (+) strand; PAM type: NRG; PAM sequence: GAG
gaactcgagacgaggccttt

SEQ ID NO: 172834 - DNA, 20 bp, Artificial Sequence
  Description of Artificial Sequence: Synthetic oligonucleotide
  Target: LAMA2; (+) strand; PAM type: NRG; PAM sequence: GAG
actcgagacgaggcctttga

SEQ ID NO: 172835 - DNA, 20 bp, Artificial Sequence
  Description of Artificial Sequence: Synthetic oligonucleotide
  Target: LAMA2; (+) strand; PAM type: NRG; PAM sequence: TGG
cgaggcctttgagagaaatt

SEQ ID NO: 172836 - DNA, 20 bp, Artificial Sequence
  Description of Artificial Sequence: Synthetic oligonucleotide
  Target: LAMA2; (+) strand; PAM type: NRG; PAM sequence: AAG
ggcctttgagagaaatttgg

SEQ ID NO: 172837 - DNA, 20 bp, Artificial Sequence
  Description of Artificial Sequence: Synthetic oligonucleotide
  Target: LAMA2; (+) strand; PAM type: NRG; PAM sequence: AGG
gcctttgagagaaatttgga

SEQ ID NO: 172838 - DNA, 20 bp, Artificial Sequence
  Description of Artificial Sequence: Synthetic oligonucleotide
  Target: LAMA2; (+) strand; PAM type: NRG; PAM sequence: GGG
cctttgagagaaatttggaa

SEQ ID NO: 172839 - DNA, 20 bp, Artificial Sequence
  Description of Artificial Sequence: Synthetic oligonucleotide
  Target: LAMA2; (+) strand; PAM type: NRG; PAM sequence: CAG
agagaaatttggaagggctt

SEQ ID NO: 172840 - DNA, 20 bp, Artificial Sequence
  Description of Artificial Sequence: Synthetic oligonucleotide
  Target: LAMA2; (+) strand; PAM type: NRG; PAM sequence: AAG
aaatttggaagggcttcaga

SEQ ID NO: 172841 - DNA, 20 bp, Artificial Sequence
  Description of Artificial Sequence: Synthetic oligonucleotide
  Target: LAMA2; (+) strand; PAM type: NRG; PAM sequence: GAG
atttggaagggcttcagaaa

SEQ ID NO: 172842 - DNA, 20 bp, Artificial Sequence
  Description of Artificial Sequence: Synthetic oligonucleotide
  Target: LAMA2; (+) strand; PAM type: NRG; PAM sequence: CAG
ggcttcagaaagagattgac

SEQ ID NO: 172843 - DNA, 20 bp, Artificial Sequence
  Description of Artificial Sequence: Synthetic oligonucleotide
  Target: LAMA2; (+) strand; PAM type: NRG; PAM sequence: AAG
agagattgaccagatgatta

SEQ ID NO: 172844 - DNA, 20 bp, Artificial Sequence
  Description of Artificial Sequence: Synthetic oligonucleotide
  Target: LAMA2; (+) strand; PAM type: NRG; PAM sequence: GAG
gaccagatgattaaagaact

SEQ ID NO: 172845 - DNA, 20 bp, Artificial Sequence
  Description of Artificial Sequence: Synthetic oligonucleotide
  Target: LAMA2; (+) strand; PAM type: NRG; PAM sequence: AGG
accagatgattaaagaactg

SEQ ID NO: 172846 - DNA, 20 bp, Artificial Sequence
  Description of Artificial Sequence: Synthetic oligonucleotide
  Target: LAMA2; (+) strand; PAM type: NRG; PAM sequence: GAG
cagatgattaaagaactgag

SEQ ID NO: 172847 - DNA, 20 bp, Artificial Sequence
  Description of Artificial Sequence: Synthetic oligonucleotide
  Target: LAMA2; (+) strand; PAM type: NRG; PAM sequence: AGG
agatgattaaagaactgagg

SEQ ID NO: 172848 - DNA, 20 bp, Artificial Sequence
  Description of Artificial Sequence: Synthetic oligonucleotide
  Target: LAMA2; (+) strand; PAM type: NRG; PAM sequence: TAG
agaactgaggaggaaaaatc

SEQ ID NO: 172849 - DNA, 20 bp, Artificial Sequence
  Description of Artificial Sequence: Synthetic oligonucleotide
  Target: LAMA2; (+) strand; PAM type: NRG; PAM sequence: GAG
aactgaggaggaaaaatcta

SEQ ID NO: 172850 - DNA, 20 bp, Artificial Sequence
  Description of Artificial Sequence: Synthetic oligonucleotide
  Target: LAMA2; (+) strand; PAM type: NRG; PAM sequence: AAG
ggaaaaatctagagacacaa

SEQ ID NO: 172851 - DNA, 20 bp, Artificial Sequence
  Description of Artificial Sequence: Synthetic oligonucleotide
  Target: LAMA2; (+) strand; PAM type: NRG; PAM sequence: AGG
gaaaaatctagagacacaaa

SEQ ID NO: 172852 - DNA, 20 bp, Artificial Sequence
  Description of Artificial Sequence: Synthetic oligonucleotide
  Target: LAMA2; (+) strand; PAM type: NRG; PAM sequence: AAG
gacacaaaaggaaattgctg

SEQ ID NO: 172853 - DNA, 20 bp, Artificial Sequence
  Description of Artificial Sequence: Synthetic oligonucleotide
  Target: LAMA2; (+) strand; PAM type: NRG; PAM sequence: GAG
aaaaggaaattgctgaagat

SEQ ID NO: 172854 - DNA, 20 bp, Artificial Sequence
  Description of Artificial Sequence: Synthetic oligonucleotide
  Target: LAMA2; (+) strand; PAM type: NRG; PAM sequence: TGG
ggaaattgctgaagatgagt

SEQ ID NO: 172855 - DNA, 20 bp, Artificial Sequence
  Description of Artificial Sequence: Synthetic oligonucleotide
  Target: LAMA2; (+) strand; PAM type: NRG; PAM sequence: GAG
tgctgaagatgagttggtgt

SEQ ID NO: 172856 - DNA, 20 bp, Artificial Sequence
  Description of Artificial Sequence: Synthetic oligonucleotide
  Target: LAMA2; (+) strand; PAM type: NRG; PAM sequence: TAG
tgaagatgagttggtgtgag

SEQ ID NO: 172857 - DNA, 20 bp, Artificial Sequence
  Description of Artificial Sequence: Synthetic oligonucleotide
  Target: LAMA2; (+) strand; PAM type: NRG; PAM sequence: GAG
atgagttggtgtgagtagat

SEQ ID NO: 172858 - DNA, 20 bp, Artificial Sequence
  Description of Artificial Sequence: Synthetic oligonucleotide
  Target: LAMA2; (+) strand; PAM type: NRG; PAM sequence: GAG
attttttcttttgacaaact

SEQ ID NO: 172859 - DNA, 20 bp, Artificial Sequence
  Description of Artificial Sequence: Synthetic oligonucleotide
  Target: LAMA2; (+) strand; PAM type: NRG; PAM sequence: CAG
ttttgacaaactgagatttc

SEQ ID NO: 172860 - DNA, 20 bp, Artificial Sequence
  Description of Artificial Sequence: Synthetic oligonucleotide
  Target: LAMA2; (+) strand; PAM type: NRG; PAM sequence: CAG
tgagatttccagataattta

SEQ ID NO: 172861 - DNA, 20 bp, Artificial Sequence
  Description of Artificial Sequence: Synthetic oligonucleotide
  Target: LAMA2; (+) strand; PAM type: NRG; PAM sequence: AAG
taaatttttatcacacgtat

SEQ ID NO: 172862 - DNA, 20 bp, Artificial Sequence
  Description of Artificial Sequence: Synthetic oligonucleotide
  Target: LAMA2; (+) strand; PAM type: NRG; PAM sequence: AAG
tttatcacacgtataagtaa

SEQ ID NO: 172863 - DNA, 20 bp, Artificial Sequence
  Description of Artificial Sequence: Synthetic oligonucleotide
  Target: LAMA2; (+) strand; PAM type: NRG; PAM sequence: TGG
gatgctttgtttttccaacc

SEQ ID NO: 172864 - DNA, 20 bp, Artificial Sequence
  Description of Artificial Sequence: Synthetic oligonucleotide
  Target: LAMA2; (+) strand; PAM type: NRG; PAM sequence: GAG
tgctttgtttttccaacctg

SEQ ID NO: 172865 - DNA, 20 bp, Artificial Sequence
  Description of Artificial Sequence: Synthetic oligonucleotide
  Target: LAMA2; (+) strand; PAM type: NRG; PAM sequence: AAG
attgttccaaaatgaatcaa

SEQ ID NO: 172866 - DNA, 20 bp, Artificial Sequence
  Description of Artificial Sequence: Synthetic oligonucleotide
  Target: LAMA2; (+) strand; PAM type: NRG; PAM sequence: AAG
gttcttgcctacatataatc

SEQ ID NO: 172867 - DNA, 20 bp, Artificial Sequence
  Description of Artificial Sequence: Synthetic oligonucleotide
  Target: LAMA2; (+) strand; PAM type: NRG; PAM sequence: TGG
atcaagtaaatgatcttttc

SEQ ID NO: 172868 - DNA, 20 bp, Artificial Sequence
  Description of Artificial Sequence: Synthetic oligonucleotide
  Target: LAMA2; (+) strand; PAM type: NRG; PAM sequence: TAG
ggtgctgctccttctgtaat

SEQ ID NO: 172869 - DNA, 20 bp, Artificial Sequence
  Description of Artificial Sequence: Synthetic oligonucleotide
  Target: LAMA2; (+) strand; PAM type: NRG; PAM sequence: AGG
gtgctgctccttctgtaatt

SEQ ID NO: 172870 - DNA, 20 bp, Artificial Sequence
  Description of Artificial Sequence: Synthetic oligonucleotide
  Target: LAMA2; (+) strand; PAM type: NRG; PAM sequence: GAG
ccttctgtaattaggctaat

SEQ ID NO: 172871 - DNA, 20 bp, Artificial Sequence
  Description of Artificial Sequence: Synthetic oligonucleotide
  Target: LAMA2; (+) strand; PAM type: NRG; PAM sequence: TAG
gttttgttaatcatctgcat

SEQ ID NO: 172872 - DNA, 20 bp, Artificial Sequence
  Description of Artificial Sequence: Synthetic oligonucleotide
  Target: LAMA2; (+) strand; PAM type: NRG; PAM sequence: AGG
ttttgttaatcatctgcatt

SEQ ID NO: 172873 - DNA, 20 bp, Artificial Sequence
  Description of Artificial Sequence: Synthetic oligonucleotide
  Target: LAMA2; (+) strand; PAM type: NRG; PAM sequence: GGG
tttgttaatcatctgcatta

SEQ ID NO: 172874 - DNA, 20 bp, Artificial Sequence
  Description of Artificial Sequence: Synthetic oligonucleotide
  Target: LAMA2; (+) strand; PAM type: NRG; PAM sequence: TGG
tcatctgcattagggacttt

SEQ ID NO: 172875 - DNA, 20 bp, Artificial Sequence
  Description of Artificial Sequence: Synthetic oligonucleotide
  Target: LAMA2; (+) strand; PAM type: NRG; PAM sequence: CAG
attagggacttttggactat

SEQ ID NO: 172876 - DNA, 20 bp, Artificial Sequence
  Description of Artificial Sequence: Synthetic oligonucleotide
  Target: LAMA2; (+) strand; PAM type: NRG; PAM sequence: TGG
tgttttaataaaaatacctt

SEQ ID NO: 172877 - DNA, 20 bp, Artificial Sequence
  Description of Artificial Sequence: Synthetic oligonucleotide
  Target: LAMA2; (+) strand; PAM type: NRG; PAM sequence: AAG
aaaatacctttggataaaca

SEQ ID NO: 172878 - DNA, 20 bp, Artificial Sequence
  Description of Artificial Sequence: Synthetic oligonucleotide
  Target: LAMA2; (+) strand; PAM type: NRG; PAM sequence: TGG
tgactttaccattcatatat

SEQ ID NO: 172879 - DNA, 20 bp, Artificial Sequence
  Description of Artificial Sequence: Synthetic oligonucleotide
  Target: LAMA2; (+) strand; PAM type: NRG; PAM sequence: AAG
cctatacattttatcatctt

SEQ ID NO: 172880 - DNA, 20 bp, Artificial Sequence
  Description of Artificial Sequence: Synthetic oligonucleotide
  Target: LAMA2; (+) strand; PAM type: NRG; PAM sequence: AAG
tcatcttaagaaatgctgaa

SEQ ID NO: 172881 - DNA, 20 bp, Artificial Sequence
  Description of Artificial Sequence: Synthetic oligonucleotide
  Target: LAMA2; (+) strand; PAM type: NRG; PAM sequence: AAG
ttaagaaatgctgaaaagaa

SEQ ID NO: 172882 - DNA, 20 bp, Artificial Sequence
  Description of Artificial Sequence: Synthetic oligonucleotide
  Target: LAMA2; (+) strand; PAM type: NRG; PAM sequence: AAG
aacacctaatactttcaaat

SEQ ID NO: 172883 - DNA, 20 bp, Artificial Sequence
  Description of Artificial Sequence: Synthetic oligonucleotide
  Target: LAMA2; (+) strand; PAM type: NRG; PAM sequence: GAG
cacctaatactttcaaataa

SEQ ID NO: 172884 - DNA, 20 bp, Artificial Sequence
  Description of Artificial Sequence: Synthetic oligonucleotide
  Target: LAMA2; (+) strand; PAM type: NRG; PAM sequence: GAG
caaataagagttgcgaatat

SEQ ID NO: 172885 - DNA, 20 bp, Artificial Sequence
  Description of Artificial Sequence: Synthetic oligonucleotide
  Target: LAMA2; (+) strand; PAM type: NRG; PAM sequence: AGG
aaataagagttgcgaatatg

SEQ ID NO: 172886 - DNA, 20 bp, Artificial Sequence
  Description of Artificial Sequence: Synthetic oligonucleotide
  Target: LAMA2; (+) strand; PAM type: NRG; PAM sequence: GGG
aataagagttgcgaatatga

SEQ ID NO: 172887 - DNA, 20 bp, Artificial Sequence
  Description of Artificial Sequence: Synthetic oligonucleotide
  Target: LAMA2; (+) strand; PAM type: NRG; PAM sequence: TGG
agagttgcgaatatgagggt

SEQ ID NO: 172888 - DNA, 20 bp, Artificial Sequence
  Description of Artificial Sequence: Synthetic oligonucleotide
  Target: LAMA2; (+) strand; PAM type: NRG; PAM sequence: GGG
gagttgcgaatatgagggtt

SEQ ID NO: 172889 - DNA, 20 bp, Artificial Sequence
  Description of Artificial Sequence: Synthetic oligonucleotide
  Target: LAMA2; (+) strand; PAM type: NRG; PAM sequence: AAG
gcgaatatgagggttgggaa

SEQ ID NO: 172890 - DNA, 20 bp, Artificial Sequence
  Description of Artificial Sequence: Synthetic oligonucleotide
  Target: LAMA2; (+) strand; PAM type: NRG; PAM sequence: TAG
atgagggttgggaaaagtga

SEQ ID NO: 172891 - DNA, 20 bp, Artificial Sequence
  Description of Artificial Sequence: Synthetic oligonucleotide
  Target: LAMA2; (+) strand; PAM type: NRG; PAM sequence: AAG
tagtgattttacccatgcta

SEQ ID NO: 172892 - DNA, 20 bp, Artificial Sequence
  Description of Artificial Sequence: Synthetic oligonucleotide
  Target: LAMA2; (+) strand; PAM type: NRG; PAM sequence: TAG
tgataacgcactcaataaaa

SEQ ID NO: 172893 - DNA, 20 bp, Artificial Sequence
  Description of Artificial Sequence: Synthetic oligonucleotide
  Target: LAMA2; (+) strand; PAM type: NRG; PAM sequence: TAG
tagatacatctctacattca

SEQ ID NO: 172894 - DNA, 20 bp, Artificial Sequence
  Description of Artificial Sequence: Synthetic oligonucleotide
  Target: LAMA2; (+) strand; PAM type: NRG; PAM sequence: CAG
tacatctctacattcatagt

SEQ ID NO: 172895 - DNA, 20 bp, Artificial Sequence
  Description of Artificial Sequence: Synthetic oligonucleotide
  Target: LAMA2; (+) strand; PAM type: NRG; PAM sequence: AAG
ttcatagtcagctaacttca

SEQ ID NO: 172896 - DNA, 20 bp, Artificial Sequence
  Description of Artificial Sequence: Synthetic oligonucleotide
  Target: LAMA2; (+) strand; PAM type: NRG; PAM sequence: TGG
atagtcagctaacttcaaag

SEQ ID NO: 172897 - DNA, 20 bp, Artificial Sequence
  Description of Artificial Sequence: Synthetic oligonucleotide
  Target: LAMA2; (+) strand; PAM type: NRG; PAM sequence: TAG
gtcagctaacttcaaagtgg

SEQ ID NO: 172898 - DNA, 20 bp, Artificial Sequence
  Description of Artificial Sequence: Synthetic oligonucleotide
  Target: LAMA2; (+) strand; PAM type: NRG; PAM sequence: CAG
ttaaataatttatactaaac

SEQ ID NO: 172899 - DNA, 20 bp, Artificial Sequence
  Description of Artificial Sequence: Synthetic oligonucleotide
  Target: LAMA2; (+) strand; PAM type: NRG; PAM sequence: CAG
ttatactaaaccagcaatat

SEQ ID NO: 172900 - DNA, 20 bp, Artificial Sequence
  Description of Artificial Sequence: Synthetic oligonucleotide
  Target: LAMA2; (+) strand; PAM type: NRG; PAM sequence: CAG
aaccagcaatatcagcacac

SEQ ID NO: 172901 - DNA, 20 bp, Artificial Sequence
  Description of Artificial Sequence: Synthetic oligonucleotide
  Target: LAMA2; (+) strand; PAM type: NRG; PAM sequence: GAG
ccagcaatatcagcacacca

SEQ ID NO: 172902 - DNA, 20 bp, Artificial Sequence
  Description of Artificial Sequence: Synthetic oligonucleotide
  Target: LAMA2; (+) strand; PAM type: NRG; PAM sequence: CAG
cagagaacttgttaaaaata

SEQ ID NO: 172903 - DNA, 20 bp, Artificial Sequence
  Description of Artificial Sequence: Synthetic oligonucleotide
  Target: LAMA2; (+) strand; PAM type: NRG; PAM sequence: CAG
ttgttaaaaatacagattgt

SEQ ID NO: 172904 - DNA, 20 bp, Artificial Sequence
  Description of Artificial Sequence: Synthetic oligonucleotide
  Target: LAMA2; (+) strand; PAM type: NRG; PAM sequence: CAG
cagattgtcagaccccctcc

SEQ ID NO: 172905 - DNA, 20 bp, Artificial Sequence
  Description of Artificial Sequence: Synthetic oligonucleotide
  Target: LAMA2; (+) strand; PAM type: NRG; PAM sequence: CAG
ccctcccagacctcctgaat

SEQ ID NO: 172906 - DNA, 20 bp, Artificial Sequence
  Description of Artificial Sequence: Synthetic oligonucleotide
  Target: LAMA2; (+) strand; PAM type: NRG; PAM sequence: TGG
acctcctgaatcagaaactt

SEQ ID NO: 172907 - DNA, 20 bp, Artificial Sequence
  Description of Artificial Sequence: Synthetic oligonucleotide
  Target: LAMA2; (+) strand; PAM type: NRG; PAM sequence: GGG
cctcctgaatcagaaacttt

SEQ ID NO: 172908 - DNA, 20 bp, Artificial Sequence
  Description of Artificial Sequence: Synthetic oligonucleotide
  Target: LAMA2; (+) strand; PAM type: NRG; PAM sequence: GGG
ctcctgaatcagaaactttg

SEQ ID NO: 172909 - DNA, 20 bp, Artificial Sequence
  Description of Artificial Sequence: Synthetic oligonucleotide
  Target: LAMA2; (+) strand; PAM type: NRG; PAM sequence: TGG
tgaatcagaaactttgggga

SEQ ID NO: 172910 - DNA, 20 bp, Artificial Sequence
  Description of Artificial Sequence: Synthetic oligonucleotide
  Target: LAMA2; (+) strand; PAM type: NRG; PAM sequence: GGG
gaatcagaaactttggggat

SEQ ID NO: 172911 - DNA, 20 bp, Artificial Sequence
  Description of Artificial Sequence: Synthetic oligonucleotide
  Target: LAMA2; (+) strand; PAM type: NRG; PAM sequence: CAG
gaaactttggggatgggacc

SEQ ID NO: 172912 - DNA, 20 bp, Artificial Sequence
  Description of Artificial Sequence: Synthetic oligonucleotide
  Target: LAMA2; (+) strand; PAM type: NRG; PAM sequence: AAG
ccagcaaaccatgtattaac

SEQ ID NO: 172913 - DNA, 20 bp, Artificial Sequence
  Description of Artificial Sequence: Synthetic oligonucleotide
  Target: LAMA2; (+) strand; PAM type: NRG; PAM sequence: CAG
ccatgtattaacaagccctt

SEQ ID NO: 172914 - DNA, 20 bp, Artificial Sequence
  Description of Artificial Sequence: Synthetic oligonucleotide
  Target: LAMA2; (+) strand; PAM type: NRG; PAM sequence: AGG
catgtattaacaagcccttc

SEQ ID NO: 172915 - DNA, 20 bp, Artificial Sequence
  Description of Artificial Sequence: Synthetic oligonucleotide
  Target: LAMA2; (+) strand; PAM type: NRG; PAM sequence: GGG
atgtattaacaagcccttca

SEQ ID NO: 172916 - DNA, 20 bp, Artificial Sequence
  Description of Artificial Sequence: Synthetic oligonucleotide
  Target: LAMA2; (+) strand; PAM type: NRG; PAM sequence: GGG
tgtattaacaagcccttcag

SEQ ID NO: 172917 - DNA, 20 bp, Artificial Sequence
  Description of Artificial Sequence: Synthetic oligonucleotide
  Target: LAMA2; (+) strand; PAM type: NRG; PAM sequence: GAG
caagcccttcaggggattat

SEQ ID NO: 172918 - DNA, 20 bp, Artificial Sequence
  Description of Artificial Sequence: Synthetic oligonucleotide
  Target: LAMA2; (+) strand; PAM type: NRG; PAM sequence: AGG
aagcccttcaggggattatg

SEQ ID NO: 172919 - DNA, 20 bp, Artificial Sequence
  Description of Artificial Sequence: Synthetic oligonucleotide
  Target: LAMA2; (+) strand; PAM type: NRG; PAM sequence: TAG
caggggattatgaggcatgt

SEQ ID NO: 172920 - DNA, 20 bp, Artificial Sequence
  Description of Artificial Sequence: Synthetic oligonucleotide
  Target: LAMA2; (+) strand; PAM type: NRG; PAM sequence: GAG
attatgaggcatgttagttt

SEQ ID NO: 172921 - DNA, 20 bp, Artificial Sequence
  Description of Artificial Sequence: Synthetic oligonucleotide
  Target: LAMA2; (+) strand; PAM type: NRG; PAM sequence: AAG
tttgagaattactgtctttc

SEQ ID NO: 172922 - DNA, 20 bp, Artificial Sequence
  Description of Artificial Sequence: Synthetic oligonucleotide
  Target: LAMA2; (+) strand; PAM type: NRG; PAM sequence: TAG
attactgtctttcaagtatt

SEQ ID NO: 172923 - DNA, 20 bp, Artificial Sequence
  Description of Artificial Sequence: Synthetic oligonucleotide
  Target: LAMA2; (+) strand; PAM type: NRG; PAM sequence: GAG
tactgtctttcaagtattta

SEQ ID NO: 172924 - DNA, 20 bp, Artificial Sequence
  Description of Artificial Sequence: Synthetic oligonucleotide
  Target: LAMA2; (+) strand; PAM type: NRG; PAM sequence: TAG
tgactcgaaaattatcactt

SEQ ID NO: 172925 - DNA, 20 bp, Artificial Sequence
  Description of Artificial Sequence: Synthetic oligonucleotide
  Target: LAMA2; (+) strand; PAM type: NRG; PAM sequence: TAG
aattatcactttagaaaaac

SEQ ID NO: 172926 - DNA, 20 bp, Artificial Sequence
  Description of Artificial Sequence: Synthetic oligonucleotide
  Target: LAMA2; (+) strand; PAM type: NRG; PAM sequence: AGG
attatcactttagaaaaact

SEQ ID NO: 172927 - DNA, 20 bp, Artificial Sequence
  Description of Artificial Sequence: Synthetic oligonucleotide
  Target: LAMA2; (+) strand; PAM type: NRG; PAM sequence: AAG
tcactttagaaaaactaggt

SEQ ID NO: 172928 - DNA, 20 bp, Artificial Sequence
  Description of Artificial Sequence: Synthetic oligonucleotide
  Target: LAMA2; (+) strand; PAM type: NRG; PAM sequence: CAG
aagttaaatccaaaaacttc

SEQ ID NO: 172929 - DNA, 20 bp, Artificial Sequence
  Description of Artificial Sequence: Synthetic oligonucleotide
  Target: LAMA2; (+) strand; PAM type: NRG; PAM sequence: CAG
ccaaaaacttccagatcaat

SEQ ID NO: 172930 - DNA, 20 bp, Artificial Sequence
  Description of Artificial Sequence: Synthetic oligonucleotide
  Target: LAMA2; (+) strand; PAM type: NRG; PAM sequence: TGG
aaacttccagatcaatcagt

SEQ ID NO: 172931 - DNA, 20 bp, Artificial Sequence
  Description of Artificial Sequence: Synthetic oligonucleotide
  Target: LAMA2; (+) strand; PAM type: NRG; PAM sequence: AAG
cttccagatcaatcagttgg

SEQ ID NO: 172932 - DNA, 20 bp, Artificial Sequence
  Description of Artificial Sequence: Synthetic oligonucleotide
  Target: LAMA2; (+) strand; PAM type: NRG; PAM sequence: AAG
gatcaatcagttggaagaaa

SEQ ID NO: 172933 - DNA, 20 bp, Artificial Sequence
  Description of Artificial Sequence: Synthetic oligonucleotide
  Target: LAMA2; (+) strand; PAM type: NRG; PAM sequence: TAG
agttggaagaaaaagaaaca

SEQ ID NO: 172934 - DNA, 20 bp, Artificial Sequence
  Description of Artificial Sequence: Synthetic oligonucleotide
  Target: LAMA2; (+) strand; PAM type: NRG; PAM sequence: TAG
aacatagattaaaattatgc

SEQ ID NO: 172935 - DNA, 20 bp, Artificial Sequence
  Description of Artificial Sequence: Synthetic oligonucleotide
  Target: LAMA2; (+) strand; PAM type: NRG; PAM sequence: TAG
ttaaaattatgctagtctac

SEQ ID NO: 172936 - DNA, 20 bp, Artificial Sequence
  Description of Artificial Sequence: Synthetic oligonucleotide
  Target: LAMA2; (+) strand; PAM type: NRG; PAM sequence: TAG
ctactagcatgacaatgacc

SEQ ID NO: 172937 - DNA, 20 bp, Artificial Sequence
  Description of Artificial Sequence: Synthetic oligonucleotide
  Target: LAMA2; (+) strand; PAM type: NRG; PAM sequence: CAG
atgacctagaattctgttca

SEQ ID NO: 172938 - DNA, 20 bp, Artificial Sequence
  Description of Artificial Sequence: Synthetic oligonucleotide
  Target: LAMA2; (+) strand; PAM type: NRG; PAM sequence: GAG
gaattctgttcacagtttct

SEQ ID NO: 172939 - DNA, 20 bp, Artificial Sequence
  Description of Artificial Sequence: Synthetic oligonucleotide
  Target: LAMA2; (+) strand; PAM type: NRG; PAM sequence: AAG
aatattcatcattacattca

SEQ ID NO: 172940 - DNA, 20 bp, Artificial Sequence
  Description of Artificial Sequence: Synthetic oligonucleotide
  Target: LAMA2; (+) strand; PAM type: NRG; PAM sequence: TAG
catcattacattcaaagtaa

SEQ ID NO: 172941 - DNA, 20 bp, Artificial Sequence
  Description of Artificial Sequence: Synthetic oligonucleotide
  Target: LAMA2; (+) strand; PAM type: NRG; PAM sequence: GAG
tcattacattcaaagtaata

SEQ ID NO: 172942 - DNA, 20 bp, Artificial Sequence
  Description of Artificial Sequence: Synthetic oligonucleotide
  Target: LAMA2; (+) strand; PAM type: NRG; PAM sequence: AAG
acattcaaagtaatagagaa

SEQ ID NO: 172943 - DNA, 20 bp, Artificial Sequence
  Description of Artificial Sequence: Synthetic oligonucleotide
  Target: LAMA2; (+) strand; PAM type: NRG; PAM sequence: AGG
cattcaaagtaatagagaaa

SEQ ID NO: 172944 - DNA, 20 bp, Artificial Sequence
  Description of Artificial Sequence: Synthetic oligonucleotide
  Target: LAMA2; (+) strand; PAM type: NRG; PAM sequence: CAG
aagtaatagagaaaaggtct

SEQ ID NO: 172945 - DNA, 20 bp, Artificial Sequence
  Description of Artificial Sequence: Synthetic oligonucleotide
  Target: LAMA2; (+) strand; PAM type: NRG; PAM sequence: AAG
aggtctcagtacaatgaaac

SEQ ID NO: 172946 - DNA, 20 bp, Artificial Sequence
  Description of Artificial Sequence: Synthetic oligonucleotide
  Target: LAMA2; (+) strand; PAM type: NRG; PAM sequence: TGG
tctcagtacaatgaaacaag

SEQ ID NO: 172947 - DNA, 20 bp, Artificial Sequence
  Description of Artificial Sequence: Synthetic oligonucleotide
  Target: LAMA2; (+) strand; PAM type: NRG; PAM sequence: TGG
acaagtggattgtttgattt

SEQ ID NO: 172948 - DNA, 20 bp, Artificial Sequence
  Description of Artificial Sequence: Synthetic oligonucleotide
  Target: LAMA2; (+) strand; PAM type: NRG; PAM sequence: AAG
ttgtttgattttggtatgtg

SEQ ID NO: 172949 - DNA, 20 bp, Artificial Sequence
  Description of Artificial Sequence: Synthetic oligonucleotide
  Target: LAMA2; (+) strand; PAM type: NRG; PAM sequence: CAG
ttaaaactcatttcatcaat

SEQ ID NO: 172950 - DNA, 20 bp, Artificial Sequence
  Description of Artificial Sequence: Synthetic oligonucleotide
  Target: LAMA2; (+) strand; PAM type: NRG; PAM sequence: TAG
catttcatcaatcagattcc

SEQ ID NO: 172951 - DNA, 20 bp, Artificial Sequence
  Description of Artificial Sequence: Synthetic oligonucleotide
  Target: LAMA2; (+) strand; PAM type: NRG; PAM sequence: AAG
tattttacttacaaatttaa

SEQ ID NO: 172952 - DNA, 20 bp, Artificial Sequence
  Description of Artificial Sequence: Synthetic oligonucleotide
  Target: LAMA2; (+) strand; PAM type: NRG; PAM sequence: AGG
attttacttacaaatttaaa

SEQ ID NO: 172953 - DNA, 20 bp, Artificial Sequence
  Description of Artificial Sequence: Synthetic oligonucleotide
  Target: LAMA2; (+) strand; PAM type: NRG; PAM sequence: TGG
ttattttaattaattataaa

SEQ ID NO: 172954 - DNA, 20 bp, Artificial Sequence
  Description of Artificial Sequence: Synthetic oligonucleotide
  Target: LAMA2; (+) strand; PAM type: NRG; PAM sequence: CAG
taattaattataaatggtct

SEQ ID NO: 172955 - DNA, 20 bp, Artificial Sequence
  Description of Artificial Sequence: Synthetic oligonucleotide
  Target: LAMA2; (+) strand; PAM type: NRG; PAM sequence: AGG
aattaattataaatggtctc

SEQ ID NO: 172956 - DNA, 20 bp, Artificial Sequence
  Description of Artificial Sequence: Synthetic oligonucleotide
  Target: LAMA2; (+) strand; PAM type: NRG; PAM sequence: CAG
ttataaatggtctcaggtac

SEQ ID NO: 172957 - DNA, 20 bp, Artificial Sequence
  Description of Artificial Sequence: Synthetic oligonucleotide
  Target: LAMA2; (+) strand; PAM type: NRG; PAM sequence: TAG
taccagttttcaacttgatt

SEQ ID NO: 172958 - DNA, 20 bp, Artificial Sequence
  Description of Artificial Sequence: Synthetic oligonucleotide
  Target: LAMA2; (+) strand; PAM type: NRG; PAM sequence: CAG
tttcaacttgatttagcaca

SEQ ID NO: 172959 - DNA, 20 bp, Artificial Sequence
  Description of Artificial Sequence: Synthetic oligonucleotide
  Target: LAMA2; (+) strand; PAM type: NRG; PAM sequence: TAG
ttttctcattcttttcatgt

SEQ ID NO: 172960 - DNA, 20 bp, Artificial Sequence
  Description of Artificial Sequence: Synthetic oligonucleotide
  Target: LAMA2; (+) strand; PAM type: NRG; PAM sequence: TGG
gttagcatctctttgtaaca

SEQ ID NO: 172961 - DNA, 20 bp, Artificial Sequence
  Description of Artificial Sequence: Synthetic oligonucleotide
  Target: LAMA2; (+) strand; PAM type: NRG; PAM sequence: AAG
gtttaataccaataaaccct

SEQ ID NO: 172962 - DNA, 20 bp, Artificial Sequence
  Description of Artificial Sequence: Synthetic oligonucleotide
  Target: LAMA2; (+) strand; PAM type: NRG; PAM sequence: AGG
tttaataccaataaacccta

SEQ ID NO: 172963 - DNA, 20 bp, Artificial Sequence
  Description of Artificial Sequence: Synthetic oligonucleotide
  Target: LAMA2; (+) strand; PAM type: NRG; PAM sequence: CAG
aataccaataaaccctaagg

SEQ ID NO: 172964 - DNA, 20 bp, Artificial Sequence
  Description of Artificial Sequence: Synthetic oligonucleotide
  Target: LAMA2; (+) strand; PAM type: NRG; PAM sequence: GAG
aaaccctaaggcagtgacat

SEQ ID NO: 172965 - DNA, 20 bp, Artificial Sequence
  Description of Artificial Sequence: Synthetic oligonucleotide
  Target: LAMA2; (+) strand; PAM type: NRG; PAM sequence: TGG
atgagctcattgtctattat

SEQ ID NO: 172966 - DNA, 20 bp, Artificial Sequence
  Description of Artificial Sequence: Synthetic oligonucleotide
  Target: LAMA2; (+) strand; PAM type: NRG; PAM sequence: GGG
tgagctcattgtctattatt

SEQ ID NO: 172967 - DNA, 20 bp, Artificial Sequence
  Description of Artificial Sequence: Synthetic oligonucleotide
  Target: LAMA2; (+) strand; PAM type: NRG; PAM sequence: TGG
ctcattgtctattattgggc

SEQ ID NO: 172968 - DNA, 20 bp, Artificial Sequence
  Description of Artificial Sequence: Synthetic oligonucleotide
  Target: LAMA2; (+) strand; PAM type: NRG; PAM sequence: GGG
tcattgtctattattgggct

SEQ ID NO: 172969 - DNA, 20 bp, Artificial Sequence
  Description of Artificial Sequence: Synthetic oligonucleotide
  Target: LAMA2; (+) strand; PAM type: NRG; PAM sequence: GGG
cattgtctattattgggctg

SEQ ID NO: 172970 - DNA, 20 bp, Artificial Sequence
  Description of Artificial Sequence: Synthetic oligonucleotide
  Target: LAMA2; (+) strand; PAM type: NRG; PAM sequence: GGG
attgtctattattgggctgg

SEQ ID NO: 172971 - DNA, 20 bp, Artificial Sequence
  Description of Artificial Sequence: Synthetic oligonucleotide
  Target: LAMA2; (+) strand; PAM type: NRG; PAM sequence: TGG
gtctattattgggctggggg

SEQ ID NO: 172972 - DNA, 20 bp, Artificial Sequence
  Description of Artificial Sequence: Synthetic oligonucleotide
  Target: LAMA2; (+) strand; PAM type: NRG; PAM sequence: CAG
tattgggctgggggtggtta

SEQ ID NO: 172973 - DNA, 20 bp, Artificial Sequence
  Description of Artificial Sequence: Synthetic oligonucleotide
  Target: LAMA2; (+) strand; PAM type: NRG; PAM sequence: GAG
ttgggctgggggtggttaca

SEQ ID NO: 172974 - DNA, 20 bp, Artificial Sequence
  Description of Artificial Sequence: Synthetic oligonucleotide
  Target: LAMA2; (+) strand; PAM type: NRG; PAM sequence: CAG
tgggggtggttacagagctg

SEQ ID NO: 172975 - DNA, 20 bp, Artificial Sequence
  Description of Artificial Sequence: Synthetic oligonucleotide
  Target: LAMA2; (+) strand; PAM type: NRG; PAM sequence: AAG
gggtggttacagagctgcag

SEQ ID NO: 172976 - DNA, 20 bp, Artificial Sequence
  Description of Artificial Sequence: Synthetic oligonucleotide
  Target: LAMA2; (+) strand; PAM type: NRG; PAM sequence: AAG
tgcagaagcccttctgaaaa

SEQ ID NO: 172977 - DNA, 20 bp, Artificial Sequence
  Description of Artificial Sequence: Synthetic oligonucleotide
  Target: LAMA2; (+) strand; PAM type: NRG; PAM sequence: AAG
aagcccttctgaaaaaagtg

SEQ ID NO: 172978 - DNA, 20 bp, Artificial Sequence
  Description of Artificial Sequence: Synthetic oligonucleotide
  Target: LAMA2; (+) strand; PAM type: NRG; PAM sequence: AAG
cccttctgaaaaaagtgaag

SEQ ID NO: 172979 - DNA, 20 bp, Artificial Sequence
  Description of Artificial Sequence: Synthetic oligonucleotide
  Target: LAMA2; (+) strand; PAM type: NRG; PAM sequence: TGG
aaaaaagtgaagaagctgtt

SEQ ID NO: 172980 - DNA, 20 bp, Artificial Sequence
  Description of Artificial Sequence: Synthetic oligonucleotide
  Target: LAMA2; (+) strand; PAM type: NRG; PAM sequence: GAG
aaaagtgaagaagctgtttg

SEQ ID NO: 172981 - DNA, 20 bp, Artificial Sequence
  Description of Artificial Sequence: Synthetic oligonucleotide
  Target: LAMA2; (+) strand; PAM type: NRG; PAM sequence: GAG
aagtgaagaagctgtttgga

SEQ ID NO: 172982 - DNA, 20 bp, Artificial Sequence
  Description of Artificial Sequence: Synthetic oligonucleotide
  Target: LAMA2; (+) strand; PAM type: NRG; PAM sequence: CGG
agaagctgtttggagagtcc

SEQ ID NO: 172983 - DNA, 20 bp, Artificial Sequence
  Description of Artificial Sequence: Synthetic oligonucleotide
  Target: LAMA2; (+) strand; PAM type: NRG; PAM sequence: GGG
gaagctgtttggagagtccc

SEQ ID NO: 172984 - DNA, 20 bp, Artificial Sequence
  Description of Artificial Sequence: Synthetic oligonucleotide
  Target: LAMA2; (+) strand; PAM type: NRG; PAM sequence: GGG
aagctgtttggagagtcccg

SEQ ID NO: 172985 - DNA, 20 bp, Artificial Sequence
  Description of Artificial Sequence: Synthetic oligonucleotide
  Target: LAMA2; (+) strand; PAM type: NRG; PAM sequence: GGG
agctgtttggagagtcccgg

SEQ ID NO: 172986 - DNA, 20 bp, Artificial Sequence
  Description of Artificial Sequence: Synthetic oligonucleotide
  Target: LAMA2; (+) strand; PAM type: NRG; PAM sequence: GGG
gctgtttggagagtcccggg

SEQ ID NO: 172987 - DNA, 20 bp, Artificial Sequence
  Description of Artificial Sequence: Synthetic oligonucleotide
  Target: LAMA2; (+) strand; PAM type: NRG; PAM sequence: AAG
agagtcccggggggaaaatg

SEQ ID NO: 172988 - DNA, 20 bp, Artificial Sequence
  Description of Artificial Sequence: Synthetic oligonucleotide
  Target: LAMA2; (+) strand; PAM type: NRG; PAM sequence: TGG
ccggggggaaaatgaagaaa

SEQ ID NO: 172989 - DNA, 20 bp, Artificial Sequence
  Description of Artificial Sequence: Synthetic oligonucleotide
  Target: LAMA2; (+) strand; PAM type: NRG; PAM sequence: GAG
ggggggaaaatgaagaaatg

SEQ ID NO: 172990 - DNA, 20 bp, Artificial Sequence
  Description of Artificial Sequence: Synthetic oligonucleotide
  Target: LAMA2; (+) strand; PAM type: NRG; PAM sequence: AAG
gggaaaatgaagaaatggag

SEQ ID NO: 172991 - DNA, 20 bp, Artificial Sequence
  Description of Artificial Sequence: Synthetic oligonucleotide
  Target: LAMA2; (+) strand; PAM type: NRG; PAM sequence: AGG
ggaaaatgaagaaatggaga

SEQ ID NO: 172992 - DNA, 20 bp, Artificial Sequence
  Description of Artificial Sequence: Synthetic oligonucleotide
  Target: LAMA2; (+) strand; PAM type: NRG; PAM sequence: CGG
aagaaatggagaaggatctc

SEQ ID NO: 172993 - DNA, 20 bp, Artificial Sequence
  Description of Artificial Sequence: Synthetic oligonucleotide
  Target: LAMA2; (+) strand; PAM type: NRG; PAM sequence: GGG
agaaatggagaaggatctcc

SEQ ID NO: 172994 - DNA, 20 bp, Artificial Sequence
  Description of Artificial Sequence: Synthetic oligonucleotide
  Target: LAMA2; (+) strand; PAM type: NRG; PAM sequence: TGG
gaaggatctccgggaaaaac

SEQ ID NO: 172995 - DNA, 20 bp, Artificial Sequence
  Description of Artificial Sequence: Synthetic oligonucleotide
  Target: LAMA2; (+) strand; PAM type: NRG; PAM sequence: AAG
actggctgactacaaaaaca

SEQ ID NO: 172996 - DNA, 20 bp, Artificial Sequence
  Description of Artificial Sequence: Synthetic oligonucleotide
  Target: LAMA2; (+) strand; PAM type: NRG; PAM sequence: TGG
aaaacaaagttgatgatgct

SEQ ID NO: 172997 - DNA, 20 bp, Artificial Sequence
  Description of Artificial Sequence: Synthetic oligonucleotide
  Target: LAMA2; (+) strand; PAM type: NRG; PAM sequence: GGG
aaacaaagttgatgatgctt

SEQ ID NO: 172998 - DNA, 20 bp, Artificial Sequence
  Description of Artificial Sequence: Synthetic oligonucleotide
  Target: LAMA2; (+) strand; PAM type: NRG; PAM sequence: GAG
gatgatgcttgggacctttt

SEQ ID NO: 172999 - DNA, 20 bp, Artificial Sequence
  Description of Artificial Sequence: Synthetic oligonucleotide
  Target: LAMA2; (+) strand; PAM type: NRG; PAM sequence: GAG
tgatgcttgggaccttttga

SEQ ID NO: 173000 - DNA, 20 bp, Artificial Sequence
  Description of Artificial Sequence: Synthetic oligonucleotide
  Target: LAMA2; (+) strand; PAM type: NRG; PAM sequence: AAG
tgcttgggaccttttgagag

SEQ ID NO: 173001 - DNA, 20 bp, Artificial Sequence
  Description of Artificial Sequence: Synthetic oligonucleotide
  Target: LAMA2; (+) strand; PAM type: NRG; PAM sequence: CAG
ggaccttttgagagaagcca

SEQ ID NO: 173002 - DNA, 20 bp, Artificial Sequence
  Description of Artificial Sequence: Synthetic oligonucleotide
  Target: LAMA2; (+) strand; PAM type: NRG; PAM sequence: CAG
agagaagccacagataaaat

SEQ ID NO: 173003 - DNA, 20 bp, Artificial Sequence
  Description of Artificial Sequence: Synthetic oligonucleotide
  Target: LAMA2; (+) strand; PAM type: NRG; PAM sequence: GAG
agaagccacagataaaatca

SEQ ID NO: 173004 - DNA, 20 bp, Artificial Sequence
  Description of Artificial Sequence: Synthetic oligonucleotide
  Target: LAMA2; (+) strand; PAM type: NRG; PAM sequence: AAG
agccacagataaaatcagag

SEQ ID NO: 173005 - DNA, 20 bp, Artificial Sequence
  Description of Artificial Sequence: Synthetic oligonucleotide
  Target: LAMA2; (+) strand; PAM type: NRG; PAM sequence: CAG
agaagctaatcgcctatttg

SEQ ID NO: 173006 - DNA, 20 bp, Artificial Sequence
  Description of Artificial Sequence: Synthetic oligonucleotide
  Target: LAMA2; (+) strand; PAM type: NRG; PAM sequence: CAG
atcgcctatttgcagtaaat

SEQ ID NO: 173007 - DNA, 20 bp, Artificial Sequence
  Description of Artificial Sequence: Synthetic oligonucleotide
  Target: LAMA2; (+) strand; PAM type: NRG; PAM sequence: TGG
tcagaaaaacatgactgcat

SEQ ID NO: 173008 - DNA, 20 bp, Artificial Sequence
  Description of Artificial Sequence: Synthetic oligonucleotide
  Target: LAMA2; (+) strand; PAM type: NRG; PAM sequence: GAG
agaaaaacatgactgcattg

SEQ ID NO: 173009 - DNA, 20 bp, Artificial Sequence
  Description of Artificial Sequence: Synthetic oligonucleotide
  Target: LAMA2; (+) strand; PAM type: NRG; PAM sequence: AGG
gaaaaacatgactgcattgg

SEQ ID NO: 173010 - DNA, 20 bp, Artificial Sequence
  Description of Artificial Sequence: Synthetic oligonucleotide
  Target: LAMA2; (+) strand; PAM type: NRG; PAM sequence: GAG
aacatgactgcattggaggt

SEQ ID NO: 173011 - DNA, 20 bp, Artificial Sequence
  Description of Artificial Sequence: Synthetic oligonucleotide
  Target: LAMA2; (+) strand; PAM type: NRG; PAM sequence: TAG
actgcattggaggtgagtct

SEQ ID NO: 173012 - DNA, 20 bp, Artificial Sequence
  Description of Artificial Sequence: Synthetic oligonucleotide
  Target: LAMA2; (+) strand; PAM type: NRG; PAM sequence: AGG
ctgcattggaggtgagtctt

SEQ ID NO: 173013 - DNA, 20 bp, Artificial Sequence
  Description of Artificial Sequence: Synthetic oligonucleotide
  Target: LAMA2; (+) strand; PAM type: NRG; PAM sequence: GGG
tgcattggaggtgagtctta

SEQ ID NO: 173014 - DNA, 20 bp, Artificial Sequence
  Description of Artificial Sequence: Synthetic oligonucleotide
  Target: LAMA2; (+) strand; PAM type: NRG; PAM sequence: GGG
gcattggaggtgagtcttag

SEQ ID NO: 173015 - DNA, 20 bp, Artificial Sequence
  Description of Artificial Sequence: Synthetic oligonucleotide
  Target: LAMA2; (+) strand; PAM type: NRG; PAM sequence: CAG
gggcacttttatcttaatct

SEQ ID NO: 173016 - DNA, 20 bp, Artificial Sequence
  Description of Artificial Sequence: Synthetic oligonucleotide
  Target: LAMA2; (+) strand; PAM type: NRG; PAM sequence: AAG
cacttttatcttaatctcag

SEQ ID NO: 173017 - DNA, 20 bp, Artificial Sequence
  Description of Artificial Sequence: Synthetic oligonucleotide
  Target: LAMA2; (+) strand; PAM type: NRG; PAM sequence: AGG
acttttatcttaatctcaga

SEQ ID NO: 173018 - DNA, 20 bp, Artificial Sequence
  Description of Artificial Sequence: Synthetic oligonucleotide
  Target: LAMA2; (+) strand; PAM type: NRG; PAM sequence: TGG
ttatcttaatctcagaaggt

SEQ ID NO: 173019 - DNA, 20 bp, Artificial Sequence
  Description of Artificial Sequence: Synthetic oligonucleotide
  Target: LAMA2; (+) strand; PAM type: NRG; PAM sequence: GGG
tatcttaatctcagaaggtt

SEQ ID NO: 173020 - DNA, 20 bp, Artificial Sequence
  Description of Artificial Sequence: Synthetic oligonucleotide
  Target: LAMA2; (+) strand; PAM type: NRG; PAM sequence: GGG
atcttaatctcagaaggttg

SEQ ID NO: 173021 - DNA, 20 bp, Artificial Sequence
  Description of Artificial Sequence: Synthetic oligonucleotide
  Target: LAMA2; (+) strand; PAM type: NRG; PAM sequence: CGG
tctcagaaggttggggactg

SEQ ID NO: 173022 - DNA, 20 bp, Artificial Sequence
  Description of Artificial Sequence: Synthetic oligonucleotide
  Target: LAMA2; (+) strand; PAM type: NRG; PAM sequence: GGG
ctcagaaggttggggactgc

SEQ ID NO: 173023 - DNA, 20 bp, Artificial Sequence
  Description of Artificial Sequence: Synthetic oligonucleotide
  Target: LAMA2; (+) strand; PAM type: NRG; PAM sequence: GGG
tcagaaggttggggactgcg

SEQ ID NO: 173024 - DNA, 20 bp, Artificial Sequence
  Description of Artificial Sequence: Synthetic oligonucleotide
  Target: LAMA2; (+) strand; PAM type: NRG; PAM sequence: GGG
cagaaggttggggactgcgg

SEQ ID NO: 173025 - DNA, 20 bp, Artificial Sequence
  Description of Artificial Sequence: Synthetic oligonucleotide
  Target: LAMA2; (+) strand; PAM type: NRG; PAM sequence: CAG
aaggttggggactgcggggg

SEQ ID NO: 173026 - DNA, 20 bp, Artificial Sequence
  Description of Artificial Sequence: Synthetic oligonucleotide
  Target: LAMA2; (+) strand; PAM type: NRG; PAM sequence: TGG
tgcgggggcagtgttgaaca

SEQ ID NO: 173027 - DNA, 20 bp, Artificial Sequence
  Description of Artificial Sequence: Synthetic oligonucleotide
  Target: LAMA2; (+) strand; PAM type: NRG; PAM sequence: TGG
ggggcagtgttgaacatggc

SEQ ID NO: 173028 - DNA, 20 bp, Artificial Sequence
  Description of Artificial Sequence: Synthetic oligonucleotide
  Target: LAMA2; (+) strand; PAM type: NRG; PAM sequence: AAG
tgaacatggctggactattc

SEQ ID NO: 173029 - DNA, 20 bp, Artificial Sequence
  Description of Artificial Sequence: Synthetic oligonucleotide
  Target: LAMA2; (+) strand; PAM type: NRG; PAM sequence: AAG
aagttgatgcacatttacaa

SEQ ID NO: 173030 - DNA, 20 bp, Artificial Sequence
  Description of Artificial Sequence: Synthetic oligonucleotide
  Target: LAMA2; (+) strand; PAM type: NRG; PAM sequence: AAG
gatgcacatttacaaaagtc

SEQ ID NO: 173031 - DNA, 20 bp, Artificial Sequence
  Description of Artificial Sequence: Synthetic oligonucleotide
  Target: LAMA2; (+) strand; PAM type: NRG; PAM sequence: GAG
tgcacatttacaaaagtcaa

SEQ ID NO: 173032 - DNA, 20 bp, Artificial Sequence
  Description of Artificial Sequence: Synthetic oligonucleotide
  Target: LAMA2; (+) strand; PAM type: NRG; PAM sequence: AAG
gtcaagagtgacaactctga

SEQ ID NO: 173033 - DNA, 20 bp, Artificial Sequence
  Description of Artificial Sequence: Synthetic oligonucleotide
  Target: LAMA2; (+) strand; PAM type: NRG; PAM sequence: AGG
tcaagagtgacaactctgaa

SEQ ID NO: 173034 - DNA, 20 bp, Artificial Sequence
  Description of Artificial Sequence: Synthetic oligonucleotide
  Target: LAMA2; (+) strand; PAM type: NRG; PAM sequence: GGG
caagagtgacaactctgaaa

SEQ ID NO: 173035 - DNA, 20 bp, Artificial Sequence
  Description of Artificial Sequence: Synthetic oligonucleotide
  Target: LAMA2; (+) strand; PAM type: NRG; PAM sequence: GGG
aagagtgacaactctgaaag

SEQ ID NO: 173036 - DNA, 20 bp, Artificial Sequence
  Description of Artificial Sequence: Synthetic oligonucleotide
  Target: LAMA2; (+) strand; PAM type: NRG; PAM sequence: GGG
agagtgacaactctgaaagg

SEQ ID NO: 173037 - DNA, 20 bp, Artificial Sequence
  Description of Artificial Sequence: Synthetic oligonucleotide
  Target: LAMA2; (+) strand; PAM type: NRG; PAM sequence: AAG
aactctgaaagggggcttct

SEQ ID NO: 173038 - DNA, 20 bp, Artificial Sequence
  Description of Artificial Sequence: Synthetic oligonucleotide
  Target: LAMA2; (+) strand; PAM type: NRG; PAM sequence: CAG
gaaagggggcttctaagaaa

SEQ ID NO: 173039 - DNA, 20 bp, Artificial Sequence
  Description of Artificial Sequence: Synthetic oligonucleotide
  Target: LAMA2; (+) strand; PAM type: NRG; PAM sequence: AAG
gggcttctaagaaacagaac

SEQ ID NO: 173040 - DNA, 20 bp, Artificial Sequence
  Description of Artificial Sequence: Synthetic oligonucleotide
  Target: LAMA2; (+) strand; PAM type: NRG; PAM sequence: CAG
tttgttttgtttttaatgac

SEQ ID NO: 173041 - DNA, 20 bp, Artificial Sequence
  Description of Artificial Sequence: Synthetic oligonucleotide
  Target: LAMA2; (+) strand; PAM type: NRG; PAM sequence: AAG
tgaccagttaccatcgccca

SEQ ID NO: 173042 - DNA, 20 bp, Artificial Sequence
  Description of Artificial Sequence: Synthetic oligonucleotide
  Target: LAMA2; (+) strand; PAM type: NRG; PAM sequence: AAG
tttgataaattaaactgttg

SEQ ID NO: 173043 - DNA, 20 bp, Artificial Sequence
  Description of Artificial Sequence: Synthetic oligonucleotide
  Target: LAMA2; (+) strand; PAM type: NRG; PAM sequence: AAG
ttaaactgttgaagatattt

SEQ ID NO: 173044 - DNA, 20 bp, Artificial Sequence
  Description of Artificial Sequence: Synthetic oligonucleotide
  Target: LAMA2; (+) strand; PAM type: NRG; PAM sequence: CAG
tatttaagaacactgtgata

SEQ ID NO: 173045 - DNA, 20 bp, Artificial Sequence
  Description of Artificial Sequence: Synthetic oligonucleotide
  Target: LAMA2; (+) strand; PAM type: NRG; PAM sequence: TGG
ttaagaacactgtgatacag

SEQ ID NO: 173046 - DNA, 20 bp, Artificial Sequence
  Description of Artificial Sequence: Synthetic oligonucleotide
  Target: LAMA2; (+) strand; PAM type: NRG; PAM sequence: AAG
agaacactgtgatacagtgg

SEQ ID NO: 173047 - DNA, 20 bp, Artificial Sequence
  Description of Artificial Sequence: Synthetic oligonucleotide
  Target: LAMA2; (+) strand; PAM type: NRG; PAM sequence: AAG
acactgtgatacagtggaag

SEQ ID NO: 173048 - DNA, 20 bp, Artificial Sequence
  Description of Artificial Sequence: Synthetic oligonucleotide
  Target: LAMA2; (+) strand; PAM type: NRG; PAM sequence: CAG
acagtggaagaagttcttta

SEQ ID NO: 173049 - DNA, 20 bp, Artificial Sequence
  Description of Artificial Sequence: Synthetic oligonucleotide
  Target: LAMA2; (+) strand; PAM type: NRG; PAM sequence: AGG
cagtggaagaagttctttac

SEQ ID NO: 173050 - DNA, 20 bp, Artificial Sequence
  Description of Artificial Sequence: Synthetic oligonucleotide
  Target: LAMA2; (+) strand; PAM type: NRG; PAM sequence: GGG
agtggaagaagttctttaca

SEQ ID NO: 173051 - DNA, 20 bp, Artificial Sequence
  Description of Artificial Sequence: Synthetic oligonucleotide
  Target: LAMA2; (+) strand; PAM type: NRG; PAM sequence: GAG
tggaagaagttctttacagg

SEQ ID NO: 173052 - DNA, 20 bp, Artificial Sequence
  Description of Artificial Sequence: Synthetic oligonucleotide
  Target: LAMA2; (+) strand; PAM type: NRG; PAM sequence: CAG
agaagttctttacagggagt

SEQ ID NO: 173053 - DNA, 20 bp, Artificial Sequence
  Description of Artificial Sequence: Synthetic oligonucleotide
  Target: LAMA2; (+) strand; PAM type: NRG; PAM sequence: AGG
gaagttctttacagggagtc

SEQ ID NO: 173054 - DNA, 20 bp, Artificial Sequence
  Description of Artificial Sequence: Synthetic oligonucleotide
  Target: LAMA2; (+) strand; PAM type: NRG; PAM sequence: TGG
tacagggagtcaggcgacct

SEQ ID NO: 173055 - DNA, 20 bp, Artificial Sequence
  Description of Artificial Sequence: Synthetic oligonucleotide
  Target: LAMA2; (+) strand; PAM type: NRG; PAM sequence: TAG
atgacaactgtgccactatc

SEQ ID NO: 173056 - DNA, 20 bp, Artificial Sequence
  Description of Artificial Sequence: Synthetic oligonucleotide
  Target: LAMA2; (+) strand; PAM type: NRG; PAM sequence: TGG
cactatctagacatacaaat

SEQ ID NO: 173057 - DNA, 20 bp, Artificial Sequence
  Description of Artificial Sequence: Synthetic oligonucleotide
  Target: LAMA2; (+) strand; PAM type: NRG; PAM sequence: GGG
actatctagacatacaaatt

SEQ ID NO: 173058 - DNA, 20 bp, Artificial Sequence
  Description of Artificial Sequence: Synthetic oligonucleotide
  Target: LAMA2; (+) strand; PAM type: NRG; PAM sequence: AAG
tctagacatacaaattgggc

SEQ ID NO: 173059 - DNA, 20 bp, Artificial Sequence
  Description of Artificial Sequence: Synthetic oligonucleotide
  Target: LAMA2; (+) strand; PAM type: NRG; PAM sequence: AAG
gggcaagtcaattaatctgt

SEQ ID NO: 173060 - DNA, 20 bp, Artificial Sequence
  Description of Artificial Sequence: Synthetic oligonucleotide
  Target: LAMA2; (+) strand; PAM type: NRG; PAM sequence: CAG
gtcaattaatctgtaagcat

SEQ ID NO: 173061 - DNA, 20 bp, Artificial Sequence
  Description of Artificial Sequence: Synthetic oligonucleotide
  Target: LAMA2; (+) strand; PAM type: NRG; PAM sequence: AAG
cagttccccaaatctacaat

SEQ ID NO: 173062 - DNA, 20 bp, Artificial Sequence
  Description of Artificial Sequence: Synthetic oligonucleotide
  Target: LAMA2; (+) strand; PAM type: NRG; PAM sequence: TAG
acaataagtgcattatacta

SEQ ID NO: 173063 - DNA, 20 bp, Artificial Sequence
  Description of Artificial Sequence: Synthetic oligonucleotide
  Target: LAMA2; (+) strand; PAM type: NRG; PAM sequence: TAG
attatactatagcatacata

SEQ ID NO: 173064 - DNA, 20 bp, Artificial Sequence
  Description of Artificial Sequence: Synthetic oligonucleotide
  Target: LAMA2; (+) strand; PAM type: NRG; PAM sequence: AGG
ttatactatagcatacatat

SEQ ID NO: 173065 - DNA, 20 bp, Artificial Sequence
  Description of Artificial Sequence: Synthetic oligonucleotide
  Target: LAMA2; (+) strand; PAM type: NRG; PAM sequence: GGG
tatactatagcatacatata

SEQ ID NO: 173066 - DNA, 20 bp, Artificial Sequence
  Description of Artificial Sequence: Synthetic oligonucleotide
  Target: LAMA2; (+) strand; PAM type: NRG; PAM sequence: CAG
attcatatcatattattttg

SEQ ID NO: 173067 - DNA, 20 bp, Artificial Sequence
  Description of Artificial Sequence: Synthetic oligonucleotide
  Target: LAMA2; (+) strand; PAM type: NRG; PAM sequence: CAG
actaattcacaaatcttgtt

SEQ ID NO: 173068 - DNA, 20 bp, Artificial Sequence
  Description of Artificial Sequence: Synthetic oligonucleotide
  Target: LAMA2; (+) strand; PAM type: NRG; PAM sequence: GAG
taattcacaaatcttgttca

SEQ ID NO: 173069 - DNA, 20 bp, Artificial Sequence
  Description of Artificial Sequence: Synthetic oligonucleotide
  Target: LAMA2; (+) strand; PAM type: NRG; PAM sequence: TAG
gatcttgctgccaaaaatca

SEQ ID NO: 173070 - DNA, 20 bp, Artificial Sequence
  Description of Artificial Sequence: Synthetic oligonucleotide
  Target: LAMA2; (+) strand; PAM type: NRG; PAM sequence: AAG
cttgctgccaaaaatcatag

SEQ ID NO: 173071 - DNA, 20 bp, Artificial Sequence
  Description of Artificial Sequence: Synthetic oligonucleotide
  Target: LAMA2; (+) strand; PAM type: NRG; PAM sequence: GAG
tacactttcaaattcaatct

SEQ ID NO: 173072 - DNA, 20 bp, Artificial Sequence
  Description of Artificial Sequence: Synthetic oligonucleotide
  Target: LAMA2; (+) strand; PAM type: NRG; PAM sequence: TAG
caatctgagcacatgacaaa

SEQ ID NO: 173073 - DNA, 20 bp, Artificial Sequence
  Description of Artificial Sequence: Synthetic oligonucleotide
  Target: LAMA2; (+) strand; PAM type: NRG; PAM sequence: GAG
gacaaatagctcaatgaatt

SEQ ID NO: 173074 - DNA, 20 bp, Artificial Sequence
  Description of Artificial Sequence: Synthetic oligonucleotide
  Target: LAMA2; (+) strand; PAM type: NRG; PAM sequence: CAG
atagctcaatgaattgagac

SEQ ID NO: 173075 - DNA, 20 bp, Artificial Sequence
  Description of Artificial Sequence: Synthetic oligonucleotide
  Target: LAMA2; (+) strand; PAM type: NRG; PAM sequence: GAG
agctcaatgaattgagacca

SEQ ID NO: 173076 - DNA, 20 bp, Artificial Sequence
  Description of Artificial Sequence: Synthetic oligonucleotide
  Target: LAMA2; (+) strand; PAM type: NRG; PAM sequence: TGG
aatgaattgagaccagagct

SEQ ID NO: 173077 - DNA, 20 bp, Artificial Sequence
  Description of Artificial Sequence: Synthetic oligonucleotide
  Target: LAMA2; (+) strand; PAM type: NRG; PAM sequence: TGG
accagagcttggaaaaattt

SEQ ID NO: 173078 - DNA, 20 bp, Artificial Sequence
  Description of Artificial Sequence: Synthetic oligonucleotide
  Target: LAMA2; (+) strand; PAM type: NRG; PAM sequence: TAG
gttctatgcaaatgatcttt

SEQ ID NO: 173079 - DNA, 20 bp, Artificial Sequence
  Description of Artificial Sequence: Synthetic oligonucleotide
  Target: LAMA2; (+) strand; PAM type: NRG; PAM sequence: AAG
ctatgcaaatgatcttttag

SEQ ID NO: 173080 - DNA, 20 bp, Artificial Sequence
  Description of Artificial Sequence: Synthetic oligonucleotide
  Target: LAMA2; (+) strand; PAM type: NRG; PAM sequence: AGG
tatgcaaatgatcttttaga

SEQ ID NO: 173081 - DNA, 20 bp, Artificial Sequence
  Description of Artificial Sequence: Synthetic oligonucleotide
  Target: LAMA2; (+) strand; PAM type: NRG; PAM sequence: TAG
ttagaaggaactaacatgaa

SEQ ID NO: 173082 - DNA, 20 bp, Artificial Sequence
  Description of Artificial Sequence: Synthetic oligonucleotide
  Target: LAMA2; (+) strand; PAM type: NRG; PAM sequence: CAG
aggaactaacatgaatagat

SEQ ID NO: 173083 - DNA, 20 bp, Artificial Sequence
  Description of Artificial Sequence: Synthetic oligonucleotide
  Target: LAMA2; (+) strand; PAM type: NRG; PAM sequence: AGG
ggaactaacatgaatagatc

SEQ ID NO: 173084 - DNA, 20 bp, Artificial Sequence
  Description of Artificial Sequence: Synthetic oligonucleotide
  Target: LAMA2; (+) strand; PAM type: NRG; PAM sequence: CAG
ttttctcctccttttccaca

SEQ ID NO: 173085 - DNA, 20 bp, Artificial Sequence
  Description of Artificial Sequence: Synthetic oligonucleotide
  Target: LAMA2; (+) strand; PAM type: NRG; PAM sequence: CAG
ctccttttccacacagataa

SEQ ID NO: 173086 - DNA, 20 bp, Artificial Sequence
  Description of Artificial Sequence: Synthetic oligonucleotide
  Target: LAMA2; (+) strand; PAM type: NRG; PAM sequence: AAG
taacagttacttctcaactc

SEQ ID NO: 173087 - DNA, 20 bp, Artificial Sequence
  Description of Artificial Sequence: Synthetic oligonucleotide
  Target: LAMA2; (+) strand; PAM type: NRG; PAM sequence: TGG
cttctcaactcaagaaatta

SEQ ID NO: 173088 - DNA, 20 bp, Artificial Sequence
  Description of Artificial Sequence: Synthetic oligonucleotide
  Target: LAMA2; (+) strand; PAM type: NRG; PAM sequence: GGG
ttctcaactcaagaaattat

SEQ ID NO: 173089 - DNA, 20 bp, Artificial Sequence
  Description of Artificial Sequence: Synthetic oligonucleotide
  Target: LAMA2; (+) strand; PAM type: NRG; PAM sequence: CAG
tcaactcaagaaattatggg

SEQ ID NO: 173090 - DNA, 20 bp, Artificial Sequence
  Description of Artificial Sequence: Synthetic oligonucleotide
  Target: LAMA2; (+) strand; PAM type: NRG; PAM sequence: AAG
tgggcagcctctatcttttt

SEQ ID NO: 173091 - DNA, 20 bp, Artificial Sequence
  Description of Artificial Sequence: Synthetic oligonucleotide
  Target: LAMA2; (+) strand; PAM type: NRG; PAM sequence: GAG
ggcagcctctatctttttaa

SEQ ID NO: 173092 - DNA, 20 bp, Artificial Sequence
  Description of Artificial Sequence: Synthetic oligonucleotide
  Target: LAMA2; (+) strand; PAM type: NRG; PAM sequence: TGG
tatctttttaagagttctga

SEQ ID NO: 173093 - DNA, 20 bp, Artificial Sequence
  Description of Artificial Sequence: Synthetic oligonucleotide
  Target: LAMA2; (+) strand; PAM type: NRG; PAM sequence: TAG
tttaagagttctgatggaac

SEQ ID NO: 173094 - DNA, 20 bp, Artificial Sequence
  Description of Artificial Sequence: Synthetic oligonucleotide
  Target: LAMA2; (+) strand; PAM type: NRG; PAM sequence: CAG
tgatggaactagaactaaaa

SEQ ID NO: 173095 - DNA, 20 bp, Artificial Sequence
  Description of Artificial Sequence: Synthetic oligonucleotide
  Target: LAMA2; (+) strand; PAM type: NRG; PAM sequence: TAG
tttctttcttaatcttaaca

SEQ ID NO: 173096 - DNA, 20 bp, Artificial Sequence
  Description of Artificial Sequence: Synthetic oligonucleotide
  Target: LAMA2; (+) strand; PAM type: NRG; PAM sequence: AAG
agtaaattatcacttttcct

SEQ ID NO: 173097 - DNA, 20 bp, Artificial Sequence
  Description of Artificial Sequence: Synthetic oligonucleotide
  Target: LAMA2; (+) strand; PAM type: NRG; PAM sequence: GAG
taaattatcacttttcctaa

SEQ ID NO: 173098 - DNA, 20 bp, Artificial Sequence
  Description of Artificial Sequence: Synthetic oligonucleotide
  Target: LAMA2; (+) strand; PAM type: NRG; PAM sequence: CAG
acttttcctaagagtaaact

SEQ ID NO: 173099 - DNA, 20 bp, Artificial Sequence
  Description of Artificial Sequence: Synthetic oligonucleotide
  Target: LAMA2; (+) strand; PAM type: NRG; PAM sequence: CAG
agtaaactcagcacatataa

SEQ ID NO: 173100 - DNA, 20 bp, Artificial Sequence
  Description of Artificial Sequence: Synthetic oligonucleotide
  Target: LAMA2; (+) strand; PAM type: NRG; PAM sequence: CAG
aaactcagcacatataacag

SEQ ID NO: 173101 - DNA, 20 bp, Artificial Sequence
  Description of Artificial Sequence: Synthetic oligonucleotide
  Target: LAMA2; (+) strand; PAM type: NRG; PAM sequence: CAG
aacaacaacaactttctccc

SEQ ID NO: 173102 - DNA, 20 bp, Artificial Sequence
  Description of Artificial Sequence: Synthetic oligonucleotide
  Target: LAMA2; (+) strand; PAM type: NRG; PAM sequence: GAG
caacaacaactttctcccca

SEQ ID NO: 173103 - DNA, 20 bp, Artificial Sequence
  Description of Artificial Sequence: Synthetic oligonucleotide
  Target: LAMA2; (+) strand; PAM type: NRG; PAM sequence: AAG
atttacctttgctgttttca

SEQ ID NO: 173104 - DNA, 20 bp, Artificial Sequence
  Description of Artificial Sequence: Synthetic oligonucleotide
  Target: LAMA2; (+) strand; PAM type: NRG; PAM sequence: CAG
ttcaaagtatctgactccaa

SEQ ID NO: 173105 - DNA, 20 bp, Artificial Sequence
  Description of Artificial Sequence: Synthetic oligonucleotide
  Target: LAMA2; (+) strand; PAM type: NRG; PAM sequence: AGG
tcaaagtatctgactccaac

SEQ ID NO: 173106 - DNA, 20 bp, Artificial Sequence
  Description of Artificial Sequence: Synthetic oligonucleotide
  Target: LAMA2; (+) strand; PAM type: NRG; PAM sequence: CAG
agtatctgactccaacaggt

SEQ ID NO: 173107 - DNA, 20 bp, Artificial Sequence
  Description of Artificial Sequence: Synthetic oligonucleotide
  Target: LAMA2; (+) strand; PAM type: NRG; PAM sequence: CAG
gactccaacaggtcagaaaa

SEQ ID NO: 173108 - DNA, 20 bp, Artificial Sequence
  Description of Artificial Sequence: Synthetic oligonucleotide
  Target: LAMA2; (+) strand; PAM type: NRG; PAM sequence: CAG
tccaacaggtcagaaaacag

SEQ ID NO: 173109 - DNA, 20 bp, Artificial Sequence
  Description of Artificial Sequence: Synthetic oligonucleotide
  Target: LAMA2; (+) strand; PAM type: NRG; PAM sequence: CAG
aacaggtcagaaaacagcag

SEQ ID NO: 173110 - DNA, 20 bp, Artificial Sequence
  Description of Artificial Sequence: Synthetic oligonucleotide
  Target: LAMA2; (+) strand; PAM type: NRG; PAM sequence: CAG
acacataatttcaccgtcaa

SEQ ID NO: 173111 - DNA, 20 bp, Artificial Sequence
  Description of Artificial Sequence: Synthetic oligonucleotide
  Target: LAMA2; (+) strand; PAM type: NRG; PAM sequence: CAG
tttcaccgtcaacagtaact

SEQ ID NO: 173112 - DNA, 20 bp, Artificial Sequence
  Description of Artificial Sequence: Synthetic oligonucleotide
  Target: LAMA2; (+) strand; PAM type: NRG; PAM sequence: TGG
aacagtaactcagcaccctc

SEQ ID NO: 173113 - DNA, 20 bp, Artificial Sequence
  Description of Artificial Sequence: Synthetic oligonucleotide
  Target: LAMA2; (+) strand; PAM type: NRG; PAM sequence: TAG
actcagcaccctctggcata

SEQ ID NO: 173114 - DNA, 20 bp, Artificial Sequence
  Description of Artificial Sequence: Synthetic oligonucleotide
  Target: LAMA2; (+) strand; PAM type: NRG; PAM sequence: TAG
tctggcatatagtatgtatg

SEQ ID NO: 173115 - DNA, 20 bp, Artificial Sequence
  Description of Artificial Sequence: Synthetic oligonucleotide
  Target: LAMA2; (+) strand; PAM type: NRG; PAM sequence: CAG
tagaaatgtttgttgaatga

SEQ ID NO: 173116 - DNA, 20 bp, Artificial Sequence
  Description of Artificial Sequence: Synthetic oligonucleotide
  Target: LAMA2; (+) strand; PAM type: NRG; PAM sequence: CAG
aacaattgaatacaatcaac

SEQ ID NO: 173117 - DNA, 20 bp, Artificial Sequence
  Description of Artificial Sequence: Synthetic oligonucleotide
  Target: LAMA2; (+) strand; PAM type: NRG; PAM sequence: AGG
acaattgaatacaatcaacc

SEQ ID NO: 173118 - DNA, 20 bp, Artificial Sequence
  Description of Artificial Sequence: Synthetic oligonucleotide
  Target: LAMA2; (+) strand; PAM type: NRG; PAM sequence: TAG
tattcatttctattttcctt

SEQ ID NO: 173119 - DNA, 20 bp, Artificial Sequence
  Description of Artificial Sequence: Synthetic oligonucleotide
  Target: LAMA2; (+) strand; PAM type: NRG; PAM sequence: AAG
tttctattttcctttagatt

SEQ ID NO: 173120 - DNA, 20 bp, Artificial Sequence
  Description of Artificial Sequence: Synthetic oligonucleotide
  Target: LAMA2; (+) strand; PAM type: NRG; PAM sequence: TAG
ctattttcctttagattaag

SEQ ID NO: 173121 - DNA, 20 bp, Artificial Sequence
  Description of Artificial Sequence: Synthetic oligonucleotide
  Target: LAMA2; (+) strand; PAM type: NRG; PAM sequence: AAG
tttcctttagattaagtagt

SEQ ID NO: 173122 - DNA, 20 bp, Artificial Sequence
  Description of Artificial Sequence: Synthetic oligonucleotide
  Target: LAMA2; (+) strand; PAM type: NRG; PAM sequence: GAG
tcctttagattaagtagtaa

SEQ ID NO: 173123 - DNA, 20 bp, Artificial Sequence
  Description of Artificial Sequence: Synthetic oligonucleotide
  Target: LAMA2; (+) strand; PAM type: NRG; PAM sequence: AGG
cctttagattaagtagtaag

SEQ ID NO: 173124 - DNA, 20 bp, Artificial Sequence
  Description of Artificial Sequence: Synthetic oligonucleotide
  Target: LAMA2; (+) strand; PAM type: NRG; PAM sequence: AAG
ttagattaagtagtaagagg

SEQ ID NO: 173125 - DNA, 20 bp, Artificial Sequence
  Description of Artificial Sequence: Synthetic oligonucleotide
  Target: LAMA2; (+) strand; PAM type: NRG; PAM sequence: TGG
ttatttccgtgtccctcttc

SEQ ID NO: 173126 - DNA, 20 bp, Artificial Sequence
  Description of Artificial Sequence: Synthetic oligonucleotide
  Target: LAMA2; (+) strand; PAM type: NRG; PAM sequence: GGG
tatttccgtgtccctcttct

SEQ ID NO: 173127 - DNA, 20 bp, Artificial Sequence
  Description of Artificial Sequence: Synthetic oligonucleotide
  Target: LAMA2; (+) strand; PAM type: NRG; PAM sequence: TAG
cgtgtccctcttctgggact

SEQ ID NO: 173128 - DNA, 20 bp, Artificial Sequence
  Description of Artificial Sequence: Synthetic oligonucleotide
  Target: LAMA2; (+) strand; PAM type: NRG; PAM sequence: TGG
gggacttagccttgtcattc

SEQ ID NO: 173129 - DNA, 20 bp, Artificial Sequence
  Description of Artificial Sequence: Synthetic oligonucleotide
  Target: LAMA2; (+) strand; PAM type: NRG; PAM sequence: TAG
acttagccttgtcattctgg

SEQ ID NO: 173130 - DNA, 20 bp, Artificial Sequence
  Description of Artificial Sequence: Synthetic oligonucleotide
  Target: LAMA2; (+) strand; PAM type: NRG; PAM sequence: AAG
gtcattctggtagaatattg

SEQ ID NO: 173131 - DNA, 20 bp, Artificial Sequence
  Description of Artificial Sequence: Synthetic oligonucleotide
  Target: LAMA2; (+) strand; PAM type: NRG; PAM sequence: GAG
cattctggtagaatattgaa

SEQ ID NO: 173132 - DNA, 20 bp, Artificial Sequence
  Description of Artificial Sequence: Synthetic oligonucleotide
  Target: LAMA2; (+) strand; PAM type: NRG; PAM sequence: AGG
attctggtagaatattgaag

SEQ ID NO: 173133 - DNA, 20 bp, Artificial Sequence
  Description of Artificial Sequence: Synthetic oligonucleotide
  Target: LAMA2; (+) strand; PAM type: NRG; PAM sequence: TGG
actgatgcacctaaccaatt

SEQ ID NO: 173134 - DNA, 20 bp, Artificial Sequence
  Description of Artificial Sequence: Synthetic oligonucleotide
  Target: LAMA2; (+) strand; PAM type: NRG; PAM sequence: GAG
tgatgcacctaaccaatttg

SEQ ID NO: 173135 - DNA, 20 bp, Artificial Sequence
  Description of Artificial Sequence: Synthetic oligonucleotide
  Target: LAMA2; (+) strand; PAM type: NRG; PAM sequence: TAG
tttggagtctactgacatgc

SEQ ID NO: 173136 - DNA, 20 bp, Artificial Sequence
  Description of Artificial Sequence: Synthetic oligonucleotide
  Target: LAMA2; (+) strand; PAM type: NRG; PAM sequence: CAG
ggagtctactgacatgctag

SEQ ID NO: 173137 - DNA, 20 bp, Artificial Sequence
  Description of Artificial Sequence: Synthetic oligonucleotide
  Target: LAMA2; (+) strand; PAM type: NRG; PAM sequence: CAG
ctgacatgctagcagtattc

SEQ ID NO: 173138 - DNA, 20 bp, Artificial Sequence
  Description of Artificial Sequence: Synthetic oligonucleotide
  Target: LAMA2; (+) strand; PAM type: NRG; PAM sequence: GAG
tattccagaaatactgctgt

SEQ ID NO: 173139 - DNA, 20 bp, Artificial Sequence
  Description of Artificial Sequence: Synthetic oligonucleotide
  Target: LAMA2; (+) strand; PAM type: NRG; PAM sequence: AGG
attccagaaatactgctgtg

SEQ ID NO: 173140 - DNA, 20 bp, Artificial Sequence
  Description of Artificial Sequence: Synthetic oligonucleotide
  Target: LAMA2; (+) strand; PAM type: NRG; PAM sequence: CAG
ccagaaatactgctgtgagg

SEQ ID NO: 173141 - DNA, 20 bp, Artificial Sequence
  Description of Artificial Sequence: Synthetic oligonucleotide
  Target: LAMA2; (+) strand; PAM type: NRG; PAM sequence: AGG
cagaaatactgctgtgaggc

SEQ ID NO: 173142 - DNA, 20 bp, Artificial Sequence
  Description of Artificial Sequence: Synthetic oligonucleotide
  Target: LAMA2; (+) strand; PAM type: NRG; PAM sequence: TGG
actgctgtgaggcaggatgc

SEQ ID NO: 173143 - DNA, 20 bp, Artificial Sequence
  Description of Artificial Sequence: Synthetic oligonucleotide
  Target: LAMA2; (+) strand; PAM type: NRG; PAM sequence: GGG
ctgctgtgaggcaggatgct

SEQ ID NO: 173144 - DNA, 20 bp, Artificial Sequence
  Description of Artificial Sequence: Synthetic oligonucleotide
  Target: LAMA2; (+) strand; PAM type: NRG; PAM sequence: CAG
gctgggccactgtcctgtca

SEQ ID NO: 173145 - DNA, 20 bp, Artificial Sequence
  Description of Artificial Sequence: Synthetic oligonucleotide
  Target: LAMA2; (+) strand; PAM type: NRG; PAM sequence: AGG
ctgggccactgtcctgtcac

SEQ ID NO: 173146 - DNA, 20 bp, Artificial Sequence
  Description of Artificial Sequence: Synthetic oligonucleotide
  Target: LAMA2; (+) strand; PAM type: NRG; PAM sequence: CAG
cactgtcctgtcacaggctc

SEQ ID NO: 173147 - DNA, 20 bp, Artificial Sequence
  Description of Artificial Sequence: Synthetic oligonucleotide
  Target: LAMA2; (+) strand; PAM type: NRG; PAM sequence: CGG
ccagcatgattcaccctgct

SEQ ID NO: 173148 - DNA, 20 bp, Artificial Sequence
  Description of Artificial Sequence: Synthetic oligonucleotide
  Target: LAMA2; (+) strand; PAM type: NRG; PAM sequence: CAG
caccctgctcggtgacacac

SEQ ID NO: 173149 - DNA, 20 bp, Artificial Sequence
  Description of Artificial Sequence: Synthetic oligonucleotide
  Target: LAMA2; (+) strand; PAM type: NRG; PAM sequence: AAG
ccagccgtgtgacttacccg

SEQ ID NO: 173150 - DNA, 20 bp, Artificial Sequence
  Description of Artificial Sequence: Synthetic oligonucleotide
  Target: LAMA2; (+) strand; PAM type: NRG; PAM sequence: AGG
cagccgtgtgacttacccga

SEQ ID NO: 173151 - DNA, 20 bp, Artificial Sequence
  Description of Artificial Sequence: Synthetic oligonucleotide
  Target: LAMA2; (+) strand; PAM type: NRG; PAM sequence: TGG
aggtgcacctgtctatttta

SEQ ID NO: 173152 - DNA, 20 bp, Artificial Sequence
  Description of Artificial Sequence: Synthetic oligonucleotide
  Target: LAMA2; (+) strand; PAM type: NRG; PAM sequence: TGG
ataaatgaaaattacctgtg

SEQ ID NO: 173153 - DNA, 20 bp, Artificial Sequence
  Description of Artificial Sequence: Synthetic oligonucleotide
  Target: LAMA2; (+) strand; PAM type: NRG; PAM sequence: AAG
atgaaaattacctgtgtgga

SEQ ID NO: 173154 - DNA, 20 bp, Artificial Sequence
  Description of Artificial Sequence: Synthetic oligonucleotide
  Target: LAMA2; (+) strand; PAM type: NRG; PAM sequence: TAG
aattacctgtgtggaaagca

SEQ ID NO: 173155 - DNA, 20 bp, Artificial Sequence
  Description of Artificial Sequence: Synthetic oligonucleotide
  Target: LAMA2; (+) strand; PAM type: NRG; PAM sequence: AAG
acctgtgtggaaagcatagt

SEQ ID NO: 173156 - DNA, 20 bp, Artificial Sequence
  Description of Artificial Sequence: Synthetic oligonucleotide
  Target: LAMA2; (+) strand; PAM type: NRG; PAM sequence: GAG
ggaaagcatagtaagtattt

SEQ ID NO: 173157 - DNA, 20 bp, Artificial Sequence
  Description of Artificial Sequence: Synthetic oligonucleotide
  Target: LAMA2; (+) strand; PAM type: NRG; PAM sequence: AAG
aagtatttgagaaatatttc

SEQ ID NO: 173158 - DNA, 20 bp, Artificial Sequence
  Description of Artificial Sequence: Synthetic oligonucleotide
  Target: LAMA2; (+) strand; PAM type: NRG; PAM sequence: AAG
tatttgagaaatatttcaag

SEQ ID NO: 173159 - DNA, 20 bp, Artificial Sequence
  Description of Artificial Sequence: Synthetic oligonucleotide
  Target: LAMA2; (+) strand; PAM type: NRG; PAM sequence: GAG
tttgagaaatatttcaagaa

SEQ ID NO: 173160 - DNA, 20 bp, Artificial Sequence
  Description of Artificial Sequence: Synthetic oligonucleotide
  Target: LAMA2; (+) strand; PAM type: NRG; PAM sequence: TGG
atatttcaagaagagttata

SEQ ID NO: 173161 - DNA, 20 bp, Artificial Sequence
  Description of Artificial Sequence: Synthetic oligonucleotide
  Target: LAMA2; (+) strand; PAM type: NRG; PAM sequence: CAG
tcaagaagagttatatggca

SEQ ID NO: 173162 - DNA, 20 bp, Artificial Sequence
  Description of Artificial Sequence: Synthetic oligonucleotide
  Target: LAMA2; (+) strand; PAM type: NRG; PAM sequence: TAG
gagttatatggcacagtcaa

SEQ ID NO: 173163 - DNA, 20 bp, Artificial Sequence
  Description of Artificial Sequence: Synthetic oligonucleotide
  Target: LAMA2; (+) strand; PAM type: NRG; PAM sequence: TAG
ggcacagtcaatagtacctt

SEQ ID NO: 173164 - DNA, 20 bp, Artificial Sequence
  Description of Artificial Sequence: Synthetic oligonucleotide
  Target: LAMA2; (+) strand; PAM type: NRG; PAM sequence: TAG
ctttagctattcgtttcttt

SEQ ID NO: 173165 - DNA, 20 bp, Artificial Sequence
  Description of Artificial Sequence: Synthetic oligonucleotide
  Target: LAMA2; (+) strand; PAM type: NRG; PAM sequence: CAG
cttttagtgatgtttaaaac

SEQ ID NO: 173166 - DNA, 20 bp, Artificial Sequence
  Description of Artificial Sequence: Synthetic oligonucleotide
  Target: LAMA2; (+) strand; PAM type: NRG; PAM sequence: AAG
ttagtgatgtttaaaaccag

SEQ ID NO: 173167 - DNA, 20 bp, Artificial Sequence
  Description of Artificial Sequence: Synthetic oligonucleotide
  Target: LAMA2; (+) strand; PAM type: NRG; PAM sequence: TGG
aaaccagaagtcatcattct

SEQ ID NO: 173168 - DNA, 20 bp, Artificial Sequence
  Description of Artificial Sequence: Synthetic oligonucleotide
  Target: LAMA2; (+) strand; PAM type: NRG; PAM sequence: GGG
aaccagaagtcatcattctt

SEQ ID NO: 173169 - DNA, 20 bp, Artificial Sequence
  Description of Artificial Sequence: Synthetic oligonucleotide
  Target: LAMA2; (+) strand; PAM type: NRG; PAM sequence: TGG
tgggcacccctacaaatacc

SEQ ID NO: 173170 - DNA, 20 bp, Artificial Sequence
  Description of Artificial Sequence: Synthetic oligonucleotide
  Target: LAMA2; (+) strand; PAM type: NRG; PAM sequence: GAG
ggcacccctacaaatacctg

SEQ ID NO: 173171 - DNA, 20 bp, Artificial Sequence
  Description of Artificial Sequence: Synthetic oligonucleotide
  Target: LAMA2; (+) strand; PAM type: NRG; PAM sequence: TAG
aaatacctggagcttatgta

SEQ ID NO: 173172 - DNA, 20 bp, Artificial Sequence
  Description of Artificial Sequence: Synthetic oligonucleotide
  Target: LAMA2; (+) strand; PAM type: NRG; PAM sequence: CGG
acctggagcttatgtatagt

SEQ ID NO: 173173 - DNA, 20 bp, Artificial Sequence
  Description of Artificial Sequence: Synthetic oligonucleotide
  Target: LAMA2; (+) strand; PAM type: NRG; PAM sequence: GAG
atagtcggtattgaaattct

SEQ ID NO: 173174 - DNA, 20 bp, Artificial Sequence
  Description of Artificial Sequence: Synthetic oligonucleotide
  Target: LAMA2; (+) strand; PAM type: NRG; PAM sequence: TGG
gtcggtattgaaattctgag

SEQ ID NO: 173175 - DNA, 20 bp, Artificial Sequence
  Description of Artificial Sequence: Synthetic oligonucleotide
  Target: LAMA2; (+) strand; PAM type: NRG; PAM sequence: TGG
aaattctgagtggtcctgtt

SEQ ID NO: 173176 - DNA, 20 bp, Artificial Sequence
  Description of Artificial Sequence: Synthetic oligonucleotide
  Target: LAMA2; (+) strand; PAM type: NRG; PAM sequence: AAG
gtatgtgccacgtttaacta

SEQ ID NO: 173177 - DNA, 20 bp, Artificial Sequence
  Description of Artificial Sequence: Synthetic oligonucleotide
  Target: LAMA2; (+) strand; PAM type: NRG; PAM sequence: AAG
ttaactaaagacttgtttaa

SEQ ID NO: 173178 - DNA, 20 bp, Artificial Sequence
  Description of Artificial Sequence: Synthetic oligonucleotide
  Target: LAMA2; (+) strand; PAM type: NRG; PAM sequence: TGG
aagacttgtttaaaagttac

SEQ ID NO: 173179 - DNA, 20 bp, Artificial Sequence
  Description of Artificial Sequence: Synthetic oligonucleotide
  Target: LAMA2; (+) strand; PAM type: NRG; PAM sequence: TAG
ttaaaagttactggataaaa

SEQ ID NO: 173180 - DNA, 20 bp, Artificial Sequence
  Description of Artificial Sequence: Synthetic oligonucleotide
  Target: LAMA2; (+) strand; PAM type: NRG; PAM sequence: AAG
ctaactgaatcaatatgaat

SEQ ID NO: 173181 - DNA, 20 bp, Artificial Sequence
  Description of Artificial Sequence: Synthetic oligonucleotide
  Target: LAMA2; (+) strand; PAM type: NRG; PAM sequence: AGG
taactgaatcaatatgaata

SEQ ID NO: 173182 - DNA, 20 bp, Artificial Sequence
  Description of Artificial Sequence: Synthetic oligonucleotide
  Target: LAMA2; (+) strand; PAM type: NRG; PAM sequence: TAG
gaatcaatatgaataaggca

SEQ ID NO: 173183 - DNA, 20 bp, Artificial Sequence
  Description of Artificial Sequence: Synthetic oligonucleotide
  Target: LAMA2; (+) strand; PAM type: NRG; PAM sequence: TGG
aataaggcatagattattta

SEQ ID NO: 173184 - DNA, 20 bp, Artificial Sequence
  Description of Artificial Sequence: Synthetic oligonucleotide
  Target: LAMA2; (+) strand; PAM type: NRG; PAM sequence: TGG
cttaaaccaaataaataatt

SEQ ID NO: 173185 - DNA, 20 bp, Artificial Sequence
  Description of Artificial Sequence: Synthetic oligonucleotide
  Target: LAMA2; (+) strand; PAM type: NRG; PAM sequence: TGG
taatttggttgctgccaaaa

SEQ ID NO: 173186 - DNA, 20 bp, Artificial Sequence
  Description of Artificial Sequence: Synthetic oligonucleotide
  Target: LAMA2; (+) strand; PAM type: NRG; PAM sequence: TGG
caaaatggctgaaaatcaca

SEQ ID NO: 173187 - DNA, 20 bp, Artificial Sequence
  Description of Artificial Sequence: Synthetic oligonucleotide
  Target: LAMA2; (+) strand; PAM type: NRG; PAM sequence: GGG
aaaatggctgaaaatcacat

SEQ ID NO: 173188 - DNA, 20 bp, Artificial Sequence
  Description of Artificial Sequence: Synthetic oligonucleotide
  Target: LAMA2; (+) strand; PAM type: NRG; PAM sequence: GGG
aaatggctgaaaatcacatg

SEQ ID NO: 173189 - DNA, 20 bp, Artificial Sequence
  Description of Artificial Sequence: Synthetic oligonucleotide
  Target: LAMA2; (+) strand; PAM type: NRG; PAM sequence: AAG
aatcacatggggtgtttgtt

SEQ ID NO: 173190 - DNA, 20 bp, Artificial Sequence
  Description of Artificial Sequence: Synthetic oligonucleotide
  Target: LAMA2; (+) strand; PAM type: NRG; PAM sequence: CAG
tggggtgtttgttaagccaa

SEQ ID NO: 173191 - DNA, 20 bp, Artificial Sequence
  Description of Artificial Sequence: Synthetic oligonucleotide
  Target: LAMA2; (+) strand; PAM type: NRG; PAM sequence: AGG
ggggtgtttgttaagccaac

SEQ ID NO: 173192 - DNA, 20 bp, Artificial Sequence
  Description of Artificial Sequence: Synthetic oligonucleotide
  Target: LAMA2; (+) strand; PAM type: NRG; PAM sequence: TGG
tgttaagccaacaggtttca

SEQ ID NO: 173193 - DNA, 20 bp, Artificial Sequence
  Description of Artificial Sequence: Synthetic oligonucleotide
  Target: LAMA2; (+) strand; PAM type: NRG; PAM sequence: GGG
gttaagccaacaggtttcat

SEQ ID NO: 173194 - DNA, 20 bp, Artificial Sequence
  Description of Artificial Sequence: Synthetic oligonucleotide
  Target: LAMA2; (+) strand; PAM type: NRG; PAM sequence: TAG
aggtttcatgggctcccacc

SEQ ID NO: 173195 - DNA, 20 bp, Artificial Sequence
  Description of Artificial Sequence: Synthetic oligonucleotide
  Target: LAMA2; (+) strand; PAM type: NRG; PAM sequence: GAG
gtttcatgggctcccaccta

SEQ ID NO: 173196 - DNA, 20 bp, Artificial Sequence
  Description of Artificial Sequence: Synthetic oligonucleotide
  Target: LAMA2; (+) strand; PAM type: NRG; PAM sequence: GAG
ttcatgggctcccacctaga

SEQ ID NO: 173197 - DNA, 20 bp, Artificial Sequence
  Description of Artificial Sequence: Synthetic oligonucleotide
  Target: LAMA2; (+) strand; PAM type: NRG; PAM sequence: TAG
tcccacctagagagtctgtg

SEQ ID NO: 173198 - DNA, 20 bp, Artificial Sequence
  Description of Artificial Sequence: Synthetic oligonucleotide
  Target: LAMA2; (+) strand; PAM type: NRG; PAM sequence: AGG
cccacctagagagtctgtgt

SEQ ID NO: 173199 - DNA, 20 bp, Artificial Sequence
  Description of Artificial Sequence: Synthetic oligonucleotide
  Target: LAMA2; (+) strand; PAM type: NRG; PAM sequence: TGG
agagtctgtgtaggctgctc

SEQ ID NO: 173200 - DNA, 20 bp, Artificial Sequence
  Description of Artificial Sequence: Synthetic oligonucleotide
  Target: LAMA2; (+) strand; PAM type: NRG; PAM sequence: GGG
gagtctgtgtaggctgctct

SEQ ID NO: 173201 - DNA, 20 bp, Artificial Sequence
  Description of Artificial Sequence: Synthetic oligonucleotide
  Target: LAMA2; (+) strand; PAM type: NRG; PAM sequence: GGG
agtctgtgtaggctgctctg

SEQ ID NO: 173202 - DNA, 20 bp, Artificial Sequence
  Description of Artificial Sequence: Synthetic oligonucleotide
  Target: LAMA2; (+) strand; PAM type: NRG; PAM sequence: TGG
gtgtaggctgctctggggtt

SEQ ID NO: 173203 - DNA, 20 bp, Artificial Sequence
  Description of Artificial Sequence: Synthetic oligonucleotide
  Target: LAMA2; (+) strand; PAM type: NRG; PAM sequence: TGG
gtacattctaacactctccc

SEQ ID NO: 173204 - DNA, 20 bp, Artificial Sequence
  Description of Artificial Sequence: Synthetic oligonucleotide
  Target: LAMA2; (+) strand; PAM type: NRG; PAM sequence: GGG
tacattctaacactctccct

SEQ ID NO: 173205 - DNA, 20 bp, Artificial Sequence
  Description of Artificial Sequence: Synthetic oligonucleotide
  Target: LAMA2; (+) strand; PAM type: NRG; PAM sequence: CAG
gggctaatctgatgcctata

SEQ ID NO: 173206 - DNA, 20 bp, Artificial Sequence
  Description of Artificial Sequence: Synthetic oligonucleotide
  Target: LAMA2; (+) strand; PAM type: NRG; PAM sequence: AGG
ggctaatctgatgcctatac

SEQ ID NO: 173207 - DNA, 20 bp, Artificial Sequence
  Description of Artificial Sequence: Synthetic oligonucleotide
  Target: LAMA2; (+) strand; PAM type: NRG; PAM sequence: GAG
tctgatgcctatacaggttc

SEQ ID NO: 173208 - DNA, 20 bp, Artificial Sequence
  Description of Artificial Sequence: Synthetic oligonucleotide
  Target: LAMA2; (+) strand; PAM type: NRG; PAM sequence: AGG
ctgatgcctatacaggttcg

SEQ ID NO: 173209 - DNA, 20 bp, Artificial Sequence
  Description of Artificial Sequence: Synthetic oligonucleotide
  Target: LAMA2; (+) strand; PAM type: NRG; PAM sequence: AAG
catctatttgattgaataat

SEQ ID NO: 173210 - DNA, 20 bp, Artificial Sequence
  Description of Artificial Sequence: Synthetic oligonucleotide
  Target: LAMA2; (+) strand; PAM type: NRG; PAM sequence: AAG
ttataactgtgtccacaatg

SEQ ID NO: 173211 - DNA, 20 bp, Artificial Sequence
  Description of Artificial Sequence: Synthetic oligonucleotide
  Target: LAMA2; (+) strand; PAM type: NRG; PAM sequence: AGG
tataactgtgtccacaatga

SEQ ID NO: 173212 - DNA, 20 bp, Artificial Sequence
  Description of Artificial Sequence: Synthetic oligonucleotide
  Target: LAMA2; (+) strand; PAM type: NRG; PAM sequence: AAG
aaaaactttttatttatttt

SEQ ID NO: 173213 - DNA, 20 bp, Artificial Sequence
  Description of Artificial Sequence: Synthetic oligonucleotide
  Target: LAMA2; (+) strand; PAM type: NRG; PAM sequence: AGG
aaaactttttatttatttta

SEQ ID NO: 173214 - DNA, 20 bp, Artificial Sequence
  Description of Artificial Sequence: Synthetic oligonucleotide
  Target: LAMA2; (+) strand; PAM type: NRG; PAM sequence: TGG
actttttatttattttaagg

SEQ ID NO: 173215 - DNA, 20 bp, Artificial Sequence
  Description of Artificial Sequence: Synthetic oligonucleotide
  Target: LAMA2; (+) strand; PAM type: NRG; PAM sequence: AAG
ttctttttaaaaattttatc

SEQ ID NO: 173216 - DNA, 20 bp, Artificial Sequence
  Description of Artificial Sequence: Synthetic oligonucleotide
  Target: LAMA2; (+) strand; PAM type: NRG; PAM sequence: CAG
tatcaagcctctaattcatt

SEQ ID NO: 173217 - DNA, 20 bp, Artificial Sequence
  Description of Artificial Sequence: Synthetic oligonucleotide
  Target: LAMA2; (+) strand; PAM type: NRG; PAM sequence: AGG
atcaagcctctaattcattc

SEQ ID NO: 173218 - DNA, 20 bp, Artificial Sequence
  Description of Artificial Sequence: Synthetic oligonucleotide
  Target: LAMA2; (+) strand; PAM type: NRG; PAM sequence: TAG
aattcattcaggaaacgtgc

SEQ ID NO: 173219 - DNA, 20 bp, Artificial Sequence
  Description of Artificial Sequence: Synthetic oligonucleotide
  Target: LAMA2; (+) strand; PAM type: NRG; PAM sequence: CAG
gacaccaaaattgattgtgt

SEQ ID NO: 173220 - DNA, 20 bp, Artificial Sequence
  Description of Artificial Sequence: Synthetic oligonucleotide
  Target: LAMA2; (+) strand; PAM type: NRG; PAM sequence: GAG
aaattgattgtgtcagtgat

SEQ ID NO: 173221 - DNA, 20 bp, Artificial Sequence
  Description of Artificial Sequence: Synthetic oligonucleotide
  Target: LAMA2; (+) strand; PAM type: NRG; PAM sequence: TAG
gtgtcagtgatgagccccct

SEQ ID NO: 173222 - DNA, 20 bp, Artificial Sequence
  Description of Artificial Sequence: Synthetic oligonucleotide
  Target: LAMA2; (+) strand; PAM type: NRG; PAM sequence: GAG
gtcagtgatgagccccctta

SEQ ID NO: 173223 - DNA, 20 bp, Artificial Sequence
  Description of Artificial Sequence: Synthetic oligonucleotide
  Target: LAMA2; (+) strand; PAM type: NRG; PAM sequence: CAG
agtgatgagcccccttagag

SEQ ID NO: 173224 - DNA, 20 bp, Artificial Sequence
  Description of Artificial Sequence: Synthetic oligonucleotide
  Target: LAMA2; (+) strand; PAM type: NRG; PAM sequence: CAG
gatgagcccccttagagcag

SEQ ID NO: 173225 - DNA, 20 bp, Artificial Sequence
  Description of Artificial Sequence: Synthetic oligonucleotide
  Target: LAMA2; (+) strand; PAM type: NRG; PAM sequence: CAG
cccccttagagcagcagcct

SEQ ID NO: 173226 - DNA, 20 bp, Artificial Sequence
  Description of Artificial Sequence: Synthetic oligonucleotide
  Target: LAMA2; (+) strand; PAM type: NRG; PAM sequence: TAG
gcagcagcctcagcgtaacc

SEQ ID NO: 173227 - DNA, 20 bp, Artificial Sequence
  Description of Artificial Sequence: Synthetic oligonucleotide
  Target: LAMA2; (+) strand; PAM type: NRG; PAM sequence: AAG
taacctagcaacttgtcaaa

SEQ ID NO: 173228 - DNA, 20 bp, Artificial Sequence
  Description of Artificial Sequence: Synthetic oligonucleotide
  Target: LAMA2; (+) strand; PAM type: NRG; PAM sequence: TGG
ttgtcaaaaagacaaattct

SEQ ID NO: 173229 - DNA, 20 bp, Artificial Sequence
  Description of Artificial Sequence: Synthetic oligonucleotide
  Target: LAMA2; (+) strand; PAM type: NRG; PAM sequence: CAG
ccatccctaaatgaccaact

SEQ ID NO: 173230 - DNA, 20 bp, Artificial Sequence
  Description of Artificial Sequence: Synthetic oligonucleotide
  Target: LAMA2; (+) strand; PAM type: NRG; PAM sequence: GAG
atgaccaactcagaaactct

SEQ ID NO: 173231 - DNA, 20 bp, Artificial Sequence
  Description of Artificial Sequence: Synthetic oligonucleotide
  Target: LAMA2; (+) strand; PAM type: NRG; PAM sequence: TGG
caactcagaaactctgagaa

SEQ ID NO: 173232 - DNA, 20 bp, Artificial Sequence
  Description of Artificial Sequence: Synthetic oligonucleotide
  Target: LAMA2; (+) strand; PAM type: NRG; PAM sequence: GGG
aactcagaaactctgagaat

SEQ ID NO: 173233 - DNA, 20 bp, Artificial Sequence
  Description of Artificial Sequence: Synthetic oligonucleotide
  Target: LAMA2; (+) strand; PAM type: NRG; PAM sequence: GGG
actcagaaactctgagaatg

SEQ ID NO: 173234 - DNA, 20 bp, Artificial Sequence
  Description of Artificial Sequence: Synthetic oligonucleotide
  Target: LAMA2; (+) strand; PAM type: NRG; PAM sequence: CAG
gaaactctgagaatggggcc

SEQ ID NO: 173235 - DNA, 20 bp, Artificial Sequence
  Description of Artificial Sequence: Synthetic oligonucleotide
  Target: LAMA2; (+) strand; PAM type: NRG; PAM sequence: CAG
ccgtgttttaaaaattcctc

SEQ ID NO: 173236 - DNA, 20 bp, Artificial Sequence
  Description of Artificial Sequence: Synthetic oligonucleotide
  Target: LAMA2; (+) strand; PAM type: NRG; PAM sequence: AAG
taaaaattcctccagtgatt

SEQ ID NO: 173237 - DNA, 20 bp, Artificial Sequence
  Description of Artificial Sequence: Synthetic oligonucleotide
  Target: LAMA2; (+) strand; PAM type: NRG; PAM sequence: CAG
ttcctccagtgattaagatg

SEQ ID NO: 173238 - DNA, 20 bp, Artificial Sequence
  Description of Artificial Sequence: Synthetic oligonucleotide
  Target: LAMA2; (+) strand; PAM type: NRG; PAM sequence: AAG
agtgattaagatgcagcttc

SEQ ID NO: 173239 - DNA, 20 bp, Artificial Sequence
  Description of Artificial Sequence: Synthetic oligonucleotide
  Target: LAMA2; (+) strand; PAM type: NRG; PAM sequence: AGG
gtgattaagatgcagcttca

SEQ ID NO: 173240 - DNA, 20 bp, Artificial Sequence
  Description of Artificial Sequence: Synthetic oligonucleotide
  Target: LAMA2; (+) strand; PAM type: NRG; PAM sequence: GAG
taagatgcagcttcaaggtt

SEQ ID NO: 173241 - DNA, 20 bp, Artificial Sequence
  Description of Artificial Sequence: Synthetic oligonucleotide
  Target: LAMA2; (+) strand; PAM type: NRG; PAM sequence: CGG
agcttcaaggttgagaacca

SEQ ID NO: 173242 - DNA, 20 bp, Artificial Sequence
  Description of Artificial Sequence: Synthetic oligonucleotide
  Target: LAMA2; (+) strand; PAM type: NRG; PAM sequence: GGG
gcttcaaggttgagaaccac

SEQ ID NO: 173243 - DNA, 20 bp, Artificial Sequence
  Description of Artificial Sequence: Synthetic oligonucleotide
  Target: LAMA2; (+) strand; PAM type: NRG; PAM sequence: AAG
acaccatctctgattacttc

SEQ ID NO: 173244 - DNA, 20 bp, Artificial Sequence
  Description of Artificial Sequence: Synthetic oligonucleotide
  Target: LAMA2; (+) strand; PAM type: NRG; PAM sequence: TAG
tacttcaagtaacttgtatt

SEQ ID NO: 173245 - DNA, 20 bp, Artificial Sequence
  Description of Artificial Sequence: Synthetic oligonucleotide
  Target: LAMA2; (+) strand; PAM type: NRG; PAM sequence: TGG
ttcaagtaacttgtatttag

SEQ ID NO: 173246 - DNA, 20 bp, Artificial Sequence
  Description of Artificial Sequence: Synthetic oligonucleotide
  Target: LAMA2; (+) strand; PAM type: NRG; PAM sequence: GGG
tcaagtaacttgtatttagt

SEQ ID NO: 173247 - DNA, 20 bp, Artificial Sequence
  Description of Artificial Sequence: Synthetic oligonucleotide
  Target: LAMA2; (+) strand; PAM type: NRG; PAM sequence: GAG
aagtaacttgtatttagtgg

SEQ ID NO: 173248 - DNA, 20 bp, Artificial Sequence
  Description of Artificial Sequence: Synthetic oligonucleotide
  Target: LAMA2; (+) strand; PAM type: NRG; PAM sequence: AGG
agtaacttgtatttagtggg

SEQ ID NO: 173249 - DNA, 20 bp, Artificial Sequence
  Description of Artificial Sequence: Synthetic oligonucleotide
  Target: LAMA2; (+) strand; PAM type: NRG; PAM sequence: AAG
atttagtgggaggtacacat

SEQ ID NO: 173250 - DNA, 20 bp, Artificial Sequence
  Description of Artificial Sequence: Synthetic oligonucleotide
  Target: LAMA2; (+) strand; PAM type: NRG; PAM sequence: CAG
atacgctaccataattatca

SEQ ID NO: 173251 - DNA, 20 bp, Artificial Sequence
  Description of Artificial Sequence: Synthetic oligonucleotide
  Target: LAMA2; (+) strand; PAM type: NRG; PAM sequence: AGG
tacgctaccataattatcac

SEQ ID NO: 173252 - DNA, 20 bp, Artificial Sequence
  Description of Artificial Sequence: Synthetic oligonucleotide
  Target: LAMA2; (+) strand; PAM type: NRG; PAM sequence: AAG
accataattatcacaggcgt

SEQ ID NO: 173253 - DNA, 20 bp, Artificial Sequence
  Description of Artificial Sequence: Synthetic oligonucleotide
  Target: LAMA2; (+) strand; PAM type: NRG; PAM sequence: AAG
aattatcacaggcgtaagca

SEQ ID NO: 173254 - DNA, 20 bp, Artificial Sequence
  Description of Artificial Sequence: Synthetic oligonucleotide
  Target: LAMA2; (+) strand; PAM type: NRG; PAM sequence: AGG
attatcacaggcgtaagcaa

SEQ ID NO: 173255 - DNA, 20 bp, Artificial Sequence
  Description of Artificial Sequence: Synthetic oligonucleotide
  Target: LAMA2; (+) strand; PAM type: NRG; PAM sequence: GAG
tatcacaggcgtaagcaaag

SEQ ID NO: 173256 - DNA, 20 bp, Artificial Sequence
  Description of Artificial Sequence: Synthetic oligonucleotide
  Target: LAMA2; (+) strand; PAM type: NRG; PAM sequence: AGG
atcacaggcgtaagcaaagg

SEQ ID NO: 173257 - DNA, 20 bp, Artificial Sequence
  Description of Artificial Sequence: Synthetic oligonucleotide
  Target: LAMA2; (+) strand; PAM type: NRG; PAM sequence: GGG
tcacaggcgtaagcaaagga

SEQ ID NO: 173258 - DNA, 20 bp, Artificial Sequence
  Description of Artificial Sequence: Synthetic oligonucleotide
  Target: LAMA2; (+) strand; PAM type: NRG; PAM sequence: GAG
acaggcgtaagcaaaggagg

SEQ ID NO: 173259 - DNA, 20 bp, Artificial Sequence
  Description of Artificial Sequence: Synthetic oligonucleotide
  Target: LAMA2; (+) strand; PAM type: NRG; PAM sequence: AAG
gtaagcaaaggagggagtct

SEQ ID NO: 173260 - DNA, 20 bp, Artificial Sequence
  Description of Artificial Sequence: Synthetic oligonucleotide
  Target: LAMA2; (+) strand; PAM type: NRG; PAM sequence: GAG
agggagtctaagtcacccct

SEQ ID NO: 173261 - DNA, 20 bp, Artificial Sequence
  Description of Artificial Sequence: Synthetic oligonucleotide
  Target: LAMA2; (+) strand; PAM type: NRG; PAM sequence: TAG
gtctaagtcacccctgagtt

SEQ ID NO: 173262 - DNA, 20 bp, Artificial Sequence
  Description of Artificial Sequence: Synthetic oligonucleotide
  Target: LAMA2; (+) strand; PAM type: NRG; PAM sequence: AGG
tctaagtcacccctgagttt

SEQ ID NO: 173263 - DNA, 20 bp, Artificial Sequence
  Description of Artificial Sequence: Synthetic oligonucleotide
  Target: LAMA2; (+) strand; PAM type: NRG; PAM sequence: AAG
aagtcacccctgagtttagg

SEQ ID NO: 173264 - DNA, 20 bp, Artificial Sequence
  Description of Artificial Sequence: Synthetic oligonucleotide
  Target: LAMA2; (+) strand; PAM type: NRG; PAM sequence: GAG
gtcacccctgagtttaggaa

SEQ ID NO: 173265 - DNA, 20 bp, Artificial Sequence
  Description of Artificial Sequence: Synthetic oligonucleotide
  Target: LAMA2; (+) strand; PAM type: NRG; PAM sequence: TAG
tgagtttaggaagagctttg

SEQ ID NO: 173266 - DNA, 20 bp, Artificial Sequence
  Description of Artificial Sequence: Synthetic oligonucleotide
  Target: LAMA2; (+) strand; PAM type: NRG; PAM sequence: GAG
agtttaggaagagctttgta

SEQ ID NO: 173267 - DNA, 20 bp, Artificial Sequence
  Description of Artificial Sequence: Synthetic oligonucleotide
  Target: LAMA2; (+) strand; PAM type: NRG; PAM sequence: AGG
gtttaggaagagctttgtag

SEQ ID NO: 173268 - DNA, 20 bp, Artificial Sequence
  Description of Artificial Sequence: Synthetic oligonucleotide
  Target: LAMA2; (+) strand; PAM type: NRG; PAM sequence: TAG
agaggccctgacacttgtgc

SEQ ID NO: 173269 - DNA, 20 bp, Artificial Sequence
  Description of Artificial Sequence: Synthetic oligonucleotide
  Target: LAMA2; (+) strand; PAM type: NRG; PAM sequence: AAG
gacacttgtgctagatccta

SEQ ID NO: 173270 - DNA, 20 bp, Artificial Sequence
  Description of Artificial Sequence: Synthetic oligonucleotide
  Target: LAMA2; (+) strand; PAM type: NRG; PAM sequence: AGG
acacttgtgctagatcctaa

SEQ ID NO: 173271 - DNA, 20 bp, Artificial Sequence
  Description of Artificial Sequence: Synthetic oligonucleotide
  Target: LAMA2; (+) strand; PAM type: NRG; PAM sequence: AAG
tgtgctagatcctaaaggat

SEQ ID NO: 173272 - DNA, 20 bp, Artificial Sequence
  Description of Artificial Sequence: Synthetic oligonucleotide
  Target: LAMA2; (+) strand; PAM type: NRG; PAM sequence: TGG
agatcctaaaggataagcac

SEQ ID NO: 173273 - DNA, 20 bp, Artificial Sequence
  Description of Artificial Sequence: Synthetic oligonucleotide
  Target: LAMA2; (+) strand; PAM type: NRG; PAM sequence: GGG
gatcctaaaggataagcact

SEQ ID NO: 173274 - DNA, 20 bp, Artificial Sequence
  Description of Artificial Sequence: Synthetic oligonucleotide
  Target: LAMA2; (+) strand; PAM type: NRG; PAM sequence: CAG
aaaggataagcactgggtca

SEQ ID NO: 173275 - DNA, 20 bp, Artificial Sequence
  Description of Artificial Sequence: Synthetic oligonucleotide
  Target: LAMA2; (+) strand; PAM type: NRG; PAM sequence: AAG
ggataagcactgggtcacag

SEQ ID NO: 173276 - DNA, 20 bp, Artificial Sequence
  Description of Artificial Sequence: Synthetic oligonucleotide
  Target: LAMA2; (+) strand; PAM type: NRG; PAM sequence: AAG
cactgggtcacagaagaata

SEQ ID NO: 173277 - DNA, 20 bp, Artificial Sequence
  Description of Artificial Sequence: Synthetic oligonucleotide
  Target: LAMA2; (+) strand; PAM type: NRG; PAM sequence: GAG
ctgggtcacagaagaataaa

SEQ ID NO: 173278 - DNA, 20 bp, Artificial Sequence
  Description of Artificial Sequence: Synthetic oligonucleotide
  Target: LAMA2; (+) strand; PAM type: NRG; PAM sequence: AAG
ggtcacagaagaataaagag

SEQ ID NO: 173279 - DNA, 20 bp, Artificial Sequence
  Description of Artificial Sequence: Synthetic oligonucleotide
  Target: LAMA2; (+) strand; PAM type: NRG; PAM sequence: CAG
gaataaagagaagaacattt

SEQ ID NO: 173280 - DNA, 20 bp, Artificial Sequence
  Description of Artificial Sequence: Synthetic oligonucleotide
  Target: LAMA2; (+) strand; PAM type: NRG; PAM sequence: TGG
gagaagaacatttcagaaac

SEQ ID NO: 173281 - DNA, 20 bp, Artificial Sequence
  Description of Artificial Sequence: Synthetic oligonucleotide
  Target: LAMA2; (+) strand; PAM type: NRG; PAM sequence: GGG
agaagaacatttcagaaact

SEQ ID NO: 173282 - DNA, 20 bp, Artificial Sequence
  Description of Artificial Sequence: Synthetic oligonucleotide
  Target: LAMA2; (+) strand; PAM type: NRG; PAM sequence: AAG
aactgggaaaaacatataca

SEQ ID NO: 173283 - DNA, 20 bp, Artificial Sequence
  Description of Artificial Sequence: Synthetic oligonucleotide
  Target: LAMA2; (+) strand; PAM type: NRG; PAM sequence: AGG
actgggaaaaacatatacaa

SEQ ID NO: 173284 - DNA, 20 bp, Artificial Sequence
  Description of Artificial Sequence: Synthetic oligonucleotide
  Target: LAMA2; (+) strand; PAM type: NRG; PAM sequence: TGG
gaaaaacatatacaaaggca

SEQ ID NO: 173285 - DNA, 20 bp, Artificial Sequence
  Description of Artificial Sequence: Synthetic oligonucleotide
  Target: LAMA2; (+) strand; PAM type: NRG; PAM sequence: GAG
aaaacatatacaaaggcatg

SEQ ID NO: 173286 - DNA, 20 bp, Artificial Sequence
  Description of Artificial Sequence: Synthetic oligonucleotide
  Target: LAMA2; (+) strand; PAM type: NRG; PAM sequence: AGG
aaacatatacaaaggcatgg

SEQ ID NO: 173287 - DNA, 20 bp, Artificial Sequence
  Description of Artificial Sequence: Synthetic oligonucleotide
  Target: LAMA2; (+) strand; PAM type: NRG; PAM sequence: AAG
atatacaaaggcatggagga

SEQ ID NO: 173288 - DNA, 20 bp, Artificial Sequence
  Description of Artificial Sequence: Synthetic oligonucleotide
  Target: LAMA2; (+) strand; PAM type: NRG; PAM sequence: TGG
gaggaaagaaaatgacattt

SEQ ID NO: 173289 - DNA, 20 bp, Artificial Sequence
  Description of Artificial Sequence: Synthetic oligonucleotide
  Target: LAMA2; (+) strand; PAM type: NRG; PAM sequence: GGG
aggaaagaaaatgacatttt

SEQ ID NO: 173290 - DNA, 20 bp, Artificial Sequence
  Description of Artificial Sequence: Synthetic oligonucleotide
  Target: LAMA2; (+) strand; PAM type: NRG; PAM sequence: GGG
ggaaagaaaatgacattttg

SEQ ID NO: 173291 - DNA, 20 bp, Artificial Sequence
  Description of Artificial Sequence: Synthetic oligonucleotide
  Target: LAMA2; (+) strand; PAM type: NRG; PAM sequence: GGG
gaaagaaaatgacattttgg

SEQ ID NO: 173292 - DNA, 20 bp, Artificial Sequence
  Description of Artificial Sequence: Synthetic oligonucleotide
  Target: LAMA2; (+) strand; PAM type: NRG; PAM sequence: AAG
gaaaatgacattttggggga

SEQ ID NO: 173293 - DNA, 20 bp, Artificial Sequence
  Description of Artificial Sequence: Synthetic oligonucleotide
  Target: LAMA2; (+) strand; PAM type: NRG; PAM sequence: CAG
tgacattttgggggaaagtt

SEQ ID NO: 173294 - DNA, 20 bp, Artificial Sequence
  Description of Artificial Sequence: Synthetic oligonucleotide
  Target: LAMA2; (+) strand; PAM type: NRG; PAM sequence: TGG
cattttgggggaaagttcag

SEQ ID NO: 173295 - DNA, 20 bp, Artificial Sequence
  Description of Artificial Sequence: Synthetic oligonucleotide
  Target: LAMA2; (+) strand; PAM type: NRG; PAM sequence: TAG
gggaaagttcagtggtttga

SEQ ID NO: 173296 - DNA, 20 bp, Artificial Sequence
  Description of Artificial Sequence: Synthetic oligonucleotide
  Target: LAMA2; (+) strand; PAM type: NRG; PAM sequence: AGG
ggaaagttcagtggtttgat

SEQ ID NO: 173297 - DNA, 20 bp, Artificial Sequence
  Description of Artificial Sequence: Synthetic oligonucleotide
  Target: LAMA2; (+) strand; PAM type: NRG; PAM sequence: TGG
gttcagtggtttgataggct

SEQ ID NO: 173298 - DNA, 20 bp, Artificial Sequence
  Description of Artificial Sequence: Synthetic oligonucleotide
  Target: LAMA2; (+) strand; PAM type: NRG; PAM sequence: AAG
agtggtttgataggcttgga

SEQ ID NO: 173299 - DNA, 20 bp, Artificial Sequence
  Description of Artificial Sequence: Synthetic oligonucleotide
  Target: LAMA2; (+) strand; PAM type: NRG; PAM sequence: AAG
ggtttgataggcttggaaag

SEQ ID NO: 173300 - DNA, 20 bp, Artificial Sequence
  Description of Artificial Sequence: Synthetic oligonucleotide
  Target: LAMA2; (+) strand; PAM type: NRG; PAM sequence: AAG
agactgcatgtgaacgactg

SEQ ID NO: 173301 - DNA, 20 bp, Artificial Sequence
  Description of Artificial Sequence: Synthetic oligonucleotide
  Target: LAMA2; (+) strand; PAM type: NRG; PAM sequence: AGG
gactgcatgtgaacgactga

SEQ ID NO: 173302 - DNA, 20 bp, Artificial Sequence
  Description of Artificial Sequence: Synthetic oligonucleotide
  Target: LAMA2; (+) strand; PAM type: NRG; PAM sequence: GGG
actgcatgtgaacgactgaa

SEQ ID NO: 173303 - DNA, 20 bp, Artificial Sequence
  Description of Artificial Sequence: Synthetic oligonucleotide
  Target: LAMA2; (+) strand; PAM type: NRG; PAM sequence: TAG
catgtgaacgactgaaggga

SEQ ID NO: 173304 - DNA, 20 bp, Artificial Sequence
  Description of Artificial Sequence: Synthetic oligonucleotide
  Target: LAMA2; (+) strand; PAM type: NRG; PAM sequence: AAG
tgaacgactgaagggataga

SEQ ID NO: 173305 - DNA, 20 bp, Artificial Sequence
  Description of Artificial Sequence: Synthetic oligonucleotide
  Target: LAMA2; (+) strand; PAM type: NRG; PAM sequence: AAG
cgactgaagggatagaaaga

SEQ ID NO: 173306 - DNA, 20 bp, Artificial Sequence
  Description of Artificial Sequence: Synthetic oligonucleotide
  Target: LAMA2; (+) strand; PAM type: NRG; PAM sequence: GAG
actgaagggatagaaagaaa

SEQ ID NO: 173307 - DNA, 20 bp, Artificial Sequence
  Description of Artificial Sequence: Synthetic oligonucleotide
  Target: LAMA2; (+) strand; PAM type: NRG; PAM sequence: AAG
gaagggatagaaagaaagag

SEQ ID NO: 173308 - DNA, 20 bp, Artificial Sequence
  Description of Artificial Sequence: Synthetic oligonucleotide
  Target: LAMA2; (+) strand; PAM type: NRG; PAM sequence: TAG
ggatagaaagaaagagaaga

SEQ ID NO: 173309 - DNA, 20 bp, Artificial Sequence
  Description of Artificial Sequence: Synthetic oligonucleotide
  Target: LAMA2; (+) strand; PAM type: NRG; PAM sequence: AGG
gatagaaagaaagagaagat

SEQ ID NO: 173310 - DNA, 20 bp, Artificial Sequence
  Description of Artificial Sequence: Synthetic oligonucleotide
  Target: LAMA2; (+) strand; PAM type: NRG; PAM sequence: CAG
agaaagaaagagaagatagg

SEQ ID NO: 173311 - DNA, 20 bp, Artificial Sequence
  Description of Artificial Sequence: Synthetic oligonucleotide
  Target: LAMA2; (+) strand; PAM type: NRG; PAM sequence: GAG
aaagaaagagaagataggca

SEQ ID NO: 173312 - DNA, 20 bp, Artificial Sequence
  Description of Artificial Sequence: Synthetic oligonucleotide
  Target: LAMA2; (+) strand; PAM type: NRG; PAM sequence: CAG
aagagaagataggcagagtg

SEQ ID NO: 173313 - DNA, 20 bp, Artificial Sequence
  Description of Artificial Sequence: Synthetic oligonucleotide
  Target: LAMA2; (+) strand; PAM type: NRG; PAM sequence: CAG
ataggcagagtgcagacctt

SEQ ID NO: 173314 - DNA, 20 bp, Artificial Sequence
  Description of Artificial Sequence: Synthetic oligonucleotide
  Target: LAMA2; (+) strand; PAM type: NRG; PAM sequence: AAG
gagtgcagaccttcagttat

SEQ ID NO: 173315 - DNA, 20 bp, Artificial Sequence
  Description of Artificial Sequence: Synthetic oligonucleotide
  Target: LAMA2; (+) strand; PAM type: NRG; PAM sequence: GAG
gtgcagaccttcagttataa

SEQ ID NO: 173316 - DNA, 20 bp, Artificial Sequence
  Description of Artificial Sequence: Synthetic oligonucleotide
  Target: LAMA2; (+) strand; PAM type: NRG; PAM sequence: GAG
ttataagagaatcgcattgt

SEQ ID NO: 173317 - DNA, 20 bp, Artificial Sequence
  Description of Artificial Sequence: Synthetic oligonucleotide
  Target: LAMA2; (+) strand; PAM type: NRG; PAM sequence: AAG
gagaatcgcattgtgagact

SEQ ID NO: 173318 - DNA, 20 bp, Artificial Sequence
  Description of Artificial Sequence: Synthetic oligonucleotide
  Target: LAMA2; (+) strand; PAM type: NRG; PAM sequence: AAG
tcgcattgtgagactaagct

SEQ ID NO: 173319 - DNA, 20 bp, Artificial Sequence
  Description of Artificial Sequence: Synthetic oligonucleotide
  Target: LAMA2; (+) strand; PAM type: NRG; PAM sequence: AGG
cgcattgtgagactaagcta

SEQ ID NO: 173320 - DNA, 20 bp, Artificial Sequence
  Description of Artificial Sequence: Synthetic oligonucleotide
  Target: LAMA2; (+) strand; PAM type: NRG; PAM sequence: TGG
gtgagactaagctaaggaat

SEQ ID NO: 173321 - DNA, 20 bp, Artificial Sequence
  Description of Artificial Sequence: Synthetic oligonucleotide
  Target: LAMA2; (+) strand; PAM type: NRG; PAM sequence: GAG
aaggaattggtttttatcct

SEQ ID NO: 173322 - DNA, 20 bp, Artificial Sequence
  Description of Artificial Sequence: Synthetic oligonucleotide
  Target: LAMA2; (+) strand; PAM type: NRG; PAM sequence: GAG
ggaattggtttttatcctga

SEQ ID NO: 173323 - DNA, 20 bp, Artificial Sequence
  Description of Artificial Sequence: Synthetic oligonucleotide
  Target: LAMA2; (+) strand; PAM type: NRG; PAM sequence: TAG
ggtttttatcctgagagcca

SEQ ID NO: 173324 - DNA, 20 bp, Artificial Sequence
  Description of Artificial Sequence: Synthetic oligonucleotide
  Target: LAMA2; (+) strand; PAM type: NRG; PAM sequence: AGG
gtttttatcctgagagccat

SEQ ID NO: 173325 - DNA, 20 bp, Artificial Sequence
  Description of Artificial Sequence: Synthetic oligonucleotide
  Target: LAMA2; (+) strand; PAM type: NRG; PAM sequence: AAG
tttatcctgagagccatagg

SEQ ID NO: 173326 - DNA, 20 bp, Artificial Sequence
  Description of Artificial Sequence: Synthetic oligonucleotide
  Target: LAMA2; (+) strand; PAM type: NRG; PAM sequence: CAG
aggaagcaattgaaatattg

SEQ ID NO: 173327 - DNA, 20 bp, Artificial Sequence
  Description of Artificial Sequence: Synthetic oligonucleotide
  Target: LAMA2; (+) strand; PAM type: NRG; PAM sequence: TGG
caattgaaatattgcagtca

SEQ ID NO: 173328 - DNA, 20 bp, Artificial Sequence
  Description of Artificial Sequence: Synthetic oligonucleotide
  Target: LAMA2; (+) strand; PAM type: NRG; PAM sequence: GGG
aattgaaatattgcagtcat

SEQ ID NO: 173329 - DNA, 20 bp, Artificial Sequence
  Description of Artificial Sequence: Synthetic oligonucleotide
  Target: LAMA2; (+) strand; PAM type: NRG; PAM sequence: CAG
tgggttaaaataaaatgttg

SEQ ID NO: 173330 - DNA, 20 bp, Artificial Sequence
  Description of Artificial Sequence: Synthetic oligonucleotide
  Target: LAMA2; (+) strand; PAM type: NRG; PAM sequence: GAG
aataaaatgttgcagaattt

SEQ ID NO: 173331 - DNA, 20 bp, Artificial Sequence
  Description of Artificial Sequence: Synthetic oligonucleotide
  Target: LAMA2; (+) strand; PAM type: NRG; PAM sequence: TGG
aaaatgttgcagaatttgag

SEQ ID NO: 173332 - DNA, 20 bp, Artificial Sequence
  Description of Artificial Sequence: Synthetic oligonucleotide
  Target: LAMA2; (+) strand; PAM type: NRG; PAM sequence: TGG
gctcacttaaactgaataaa

SEQ ID NO: 173333 - DNA, 20 bp, Artificial Sequence
  Description of Artificial Sequence: Synthetic oligonucleotide
  Target: LAMA2; (+) strand; PAM type: NRG; PAM sequence: CGG
ctgaataaatggttttttat

SEQ ID NO: 173334 - DNA, 20 bp, Artificial Sequence
  Description of Artificial Sequence: Synthetic oligonucleotide
  Target: LAMA2; (+) strand; PAM type: NRG; PAM sequence: TAG
aatggttttttatcggaaaa

SEQ ID NO: 173335 - DNA, 20 bp, Artificial Sequence
  Description of Artificial Sequence: Synthetic oligonucleotide
  Target: LAMA2; (+) strand; PAM type: NRG; PAM sequence: TAG
atcggaaaatagtgtgatat

SEQ ID NO: 173336 - DNA, 20 bp, Artificial Sequence
  Description of Artificial Sequence: Synthetic oligonucleotide
  Target: LAMA2; (+) strand; PAM type: NRG; PAM sequence: AGG
tcggaaaatagtgtgatatt

SEQ ID NO: 173337 - DNA, 20 bp, Artificial Sequence
  Description of Artificial Sequence: Synthetic oligonucleotide
  Target: LAMA2; (+) strand; PAM type: NRG; PAM sequence: TAG
aaaatagtgtgatattaggc

SEQ ID NO: 173338 - DNA, 20 bp, Artificial Sequence
  Description of Artificial Sequence: Synthetic oligonucleotide
  Target: LAMA2; (+) strand; PAM type: NRG; PAM sequence: AAG
agtgtgatattaggctagaa

SEQ ID NO: 173339 - DNA, 20 bp, Artificial Sequence
  Description of Artificial Sequence: Synthetic oligonucleotide
  Target: LAMA2; (+) strand; PAM type: NRG; PAM sequence: TAG
gtgatattaggctagaaaag

SEQ ID NO: 173340 - DNA, 20 bp, Artificial Sequence
  Description of Artificial Sequence: Synthetic oligonucleotide
  Target: LAMA2; (+) strand; PAM type: NRG; PAM sequence: AGG
tgatattaggctagaaaagt

SEQ ID NO: 173341 - DNA, 20 bp, Artificial Sequence
  Description of Artificial Sequence: Synthetic oligonucleotide
  Target: LAMA2; (+) strand; PAM type: NRG; PAM sequence: TGG
attaggctagaaaagtaggc

SEQ ID NO: 173342 - DNA, 20 bp, Artificial Sequence
  Description of Artificial Sequence: Synthetic oligonucleotide
  Target: LAMA2; (+) strand; PAM type: NRG; PAM sequence: GGG
ttaggctagaaaagtaggct

SEQ ID NO: 173343 - DNA, 20 bp, Artificial Sequence
  Description of Artificial Sequence: Synthetic oligonucleotide
  Target: LAMA2; (+) strand; PAM type: NRG; PAM sequence: CAG
atatttatctacatatctgt

SEQ ID NO: 173344 - DNA, 20 bp, Artificial Sequence
  Description of Artificial Sequence: Synthetic oligonucleotide
  Target: LAMA2; (+) strand; PAM type: NRG; PAM sequence: AGG
tatttatctacatatctgtc

SEQ ID NO: 173345 - DNA, 20 bp, Artificial Sequence
  Description of Artificial Sequence: Synthetic oligonucleotide
  Target: LAMA2; (+) strand; PAM type: NRG; PAM sequence: AAG
tgtcaggtacctaccatatc

SEQ ID NO: 173346 - DNA, 20 bp, Artificial Sequence
  Description of Artificial Sequence: Synthetic oligonucleotide
  Target: LAMA2; (+) strand; PAM type: NRG; PAM sequence: AGG
gtcaggtacctaccatatca

SEQ ID NO: 173347 - DNA, 20 bp, Artificial Sequence
  Description of Artificial Sequence: Synthetic oligonucleotide
  Target: LAMA2; (+) strand; PAM type: NRG; PAM sequence: TGG
ctaccatatcaaggtactgt

SEQ ID NO: 173348 - DNA, 20 bp, Artificial Sequence
  Description of Artificial Sequence: Synthetic oligonucleotide
  Target: LAMA2; (+) strand; PAM type: NRG; PAM sequence: CAG
atcaaggtactgttggtaac

SEQ ID NO: 173349 - DNA, 20 bp, Artificial Sequence
  Description of Artificial Sequence: Synthetic oligonucleotide
  Target: LAMA2; (+) strand; PAM type: NRG; PAM sequence: AGG
tcaaggtactgttggtaacc

SEQ ID NO: 173350 - DNA, 20 bp, Artificial Sequence
  Description of Artificial Sequence: Synthetic oligonucleotide
  Target: LAMA2; (+) strand; PAM type: NRG; PAM sequence: GGG
caaggtactgttggtaacca

SEQ ID NO: 173351 - DNA, 20 bp, Artificial Sequence
  Description of Artificial Sequence: Synthetic oligonucleotide
  Target: LAMA2; (+) strand; PAM type: NRG; PAM sequence: GAG
tgttggtaaccagggtattt

SEQ ID NO: 173352 - DNA, 20 bp, Artificial Sequence
  Description of Artificial Sequence: Synthetic oligonucleotide
  Target: LAMA2; (+) strand; PAM type: NRG; PAM sequence: AGG
gttggtaaccagggtatttg

SEQ ID NO: 173353 - DNA, 20 bp, Artificial Sequence
  Description of Artificial Sequence: Synthetic oligonucleotide
  Target: LAMA2; (+) strand; PAM type: NRG; PAM sequence: TAG
ccagggtatttgaggttgaa

SEQ ID NO: 173354 - DNA, 20 bp, Artificial Sequence
  Description of Artificial Sequence: Synthetic oligonucleotide
  Target: LAMA2; (+) strand; PAM type: NRG; PAM sequence: TGG
ggttgaatagaaatgattcc

SEQ ID NO: 173355 - DNA, 20 bp, Artificial Sequence
  Description of Artificial Sequence: Synthetic oligonucleotide
  Target: LAMA2; (+) strand; PAM type: NRG; PAM sequence: AAG
agaaatgattcctggcctca

SEQ ID NO: 173356 - DNA, 20 bp, Artificial Sequence
  Description of Artificial Sequence: Synthetic oligonucleotide
  Target: LAMA2; (+) strand; PAM type: NRG; PAM sequence: CAG
ttacaacctcctgaaaaatt

SEQ ID NO: 173357 - DNA, 20 bp, Artificial Sequence
  Description of Artificial Sequence: Synthetic oligonucleotide
  Target: LAMA2; (+) strand; PAM type: NRG; PAM sequence: TGG
aatactatgataatattgac

SEQ ID NO: 173358 - DNA, 20 bp, Artificial Sequence
  Description of Artificial Sequence: Synthetic oligonucleotide
  Target: LAMA2; (+) strand; PAM type: NRG; PAM sequence: GGG
atactatgataatattgact

SEQ ID NO: 173359 - DNA, 20 bp, Artificial Sequence
  Description of Artificial Sequence: Synthetic oligonucleotide
  Target: LAMA2; (+) strand; PAM type: NRG; PAM sequence: GAG
actatgataatattgactgg

SEQ ID NO: 173360 - DNA, 20 bp, Artificial Sequence
  Description of Artificial Sequence: Synthetic oligonucleotide
  Target: LAMA2; (+) strand; PAM type: NRG; PAM sequence: CAG
ataatattgactgggagatt

SEQ ID NO: 173361 - DNA, 20 bp, Artificial Sequence
  Description of Artificial Sequence: Synthetic oligonucleotide
  Target: LAMA2; (+) strand; PAM type: NRG; PAM sequence: AAG
ttgactgggagattcagcaa

SEQ ID NO: 173362 - DNA, 20 bp, Artificial Sequence
  Description of Artificial Sequence: Synthetic oligonucleotide
  Target: LAMA2; (+) strand; PAM type: NRG; PAM sequence: CAG
caaaagtttcacaaaaataa

SEQ ID NO: 173363 - DNA, 20 bp, Artificial Sequence
  Description of Artificial Sequence: Synthetic oligonucleotide
  Target: LAMA2; (+) strand; PAM type: NRG; PAM sequence: TAG
tcacaaaaataacagcatca

SEQ ID NO: 173364 - DNA, 20 bp, Artificial Sequence
  Description of Artificial Sequence: Synthetic oligonucleotide
  Target: LAMA2; (+) strand; PAM type: NRG; PAM sequence: CAG
caaaaataacagcatcatag

SEQ ID NO: 173365 - DNA, 20 bp, Artificial Sequence
  Description of Artificial Sequence: Synthetic oligonucleotide
  Target: LAMA2; (+) strand; PAM type: NRG; PAM sequence: AAG
aaataacagcatcatagcag

SEQ ID NO: 173366 - DNA, 20 bp, Artificial Sequence
  Description of Artificial Sequence: Synthetic oligonucleotide
  Target: LAMA2; (+) strand; PAM type: NRG; PAM sequence: TGG
taacagcatcatagcagaag

SEQ ID NO: 173367 - DNA, 20 bp, Artificial Sequence
  Description of Artificial Sequence: Synthetic oligonucleotide
  Target: LAMA2; (+) strand; PAM type: NRG; PAM sequence: GAG
acagcatcatagcagaagtg

SEQ ID NO: 173368 - DNA, 20 bp, Artificial Sequence
  Description of Artificial Sequence: Synthetic oligonucleotide
  Target: LAMA2; (+) strand; PAM type: NRG; PAM sequence: GAG
agcatcatagcagaagtgga

SEQ ID NO: 173369 - DNA, 20 bp, Artificial Sequence
  Description of Artificial Sequence: Synthetic oligonucleotide
  Target: LAMA2; (+) strand; PAM type: NRG; PAM sequence: AGG
gcatcatagcagaagtggag

SEQ ID NO: 173370 - DNA, 20 bp, Artificial Sequence
  Description of Artificial Sequence: Synthetic oligonucleotide
  Target: LAMA2; (+) strand; PAM type: NRG; PAM sequence: TGG
tagcagaagtggagaggaat

SEQ ID NO: 173371 - DNA, 20 bp, Artificial Sequence
  Description of Artificial Sequence: Synthetic oligonucleotide
  Target: LAMA2; (+) strand; PAM type: NRG; PAM sequence: AAG
cagaagtggagaggaattgg

SEQ ID NO: 173372 - DNA, 20 bp, Artificial Sequence
  Description of Artificial Sequence: Synthetic oligonucleotide
  Target: LAMA2; (+) strand; PAM type: NRG; PAM sequence: AAG
agtggagaggaattggaaga

SEQ ID NO: 173373 - DNA, 20 bp, Artificial Sequence
  Description of Artificial Sequence: Synthetic oligonucleotide
  Target: LAMA2; (+) strand; PAM type: NRG; PAM sequence: CAG
gagaggaattggaagaaaga

SEQ ID NO: 173374 - DNA, 20 bp, Artificial Sequence
  Description of Artificial Sequence: Synthetic oligonucleotide
  Target: LAMA2; (+) strand; PAM type: NRG; PAM sequence: GAG
gaggaattggaagaaagaca

SEQ ID NO: 173375 - DNA, 20 bp, Artificial Sequence
  Description of Artificial Sequence: Synthetic oligonucleotide
  Target: LAMA2; (+) strand; PAM type: NRG; PAM sequence: CAG
ttggaagaaagacagagcaa

SEQ ID NO: 173376 - DNA, 20 bp, Artificial Sequence
  Description of Artificial Sequence: Synthetic oligonucleotide
  Target: LAMA2; (+) strand; PAM type: NRG; PAM sequence: AGG
tggaagaaagacagagcaac

SEQ ID NO: 173377 - DNA, 20 bp, Artificial Sequence
  Description of Artificial Sequence: Synthetic oligonucleotide
  Target: LAMA2; (+) strand; PAM type: NRG; PAM sequence: CAG
agacagagcaacaggaaccc

SEQ ID NO: 173378 - DNA, 20 bp, Artificial Sequence
  Description of Artificial Sequence: Synthetic oligonucleotide
  Target: LAMA2; (+) strand; PAM type: NRG; PAM sequence: CAG
agagcaacaggaaccccagc

SEQ ID NO: 173379 - DNA, 20 bp, Artificial Sequence
  Description of Artificial Sequence: Synthetic oligonucleotide
  Target: LAMA2; (+) strand; PAM type: NRG; PAM sequence: GAG
agcaacaggaaccccagcca

SEQ ID NO: 173380 - DNA, 20 bp, Artificial Sequence
  Description of Artificial Sequence: Synthetic oligonucleotide
  Target: LAMA2; (+) strand; PAM type: NRG; PAM sequence: TGG
aggaaccccagccagagctt

SEQ ID NO: 173381 - DNA, 20 bp, Artificial Sequence
  Description of Artificial Sequence: Synthetic oligonucleotide
  Target: LAMA2; (+) strand; PAM type: NRG; PAM sequence: AAG
aaccccagccagagctttgg

SEQ ID NO: 173382 - DNA, 20 bp, Artificial Sequence
  Description of Artificial Sequence: Synthetic oligonucleotide
  Target: LAMA2; (+) strand; PAM type: NRG; PAM sequence: AAG
agccagagctttggaagtgt

SEQ ID NO: 173383 - DNA, 20 bp, Artificial Sequence
  Description of Artificial Sequence: Synthetic oligonucleotide
  Target: LAMA2; (+) strand; PAM type: NRG; PAM sequence: AGG
gccagagctttggaagtgta

SEQ ID NO: 173384 - DNA, 20 bp, Artificial Sequence
  Description of Artificial Sequence: Synthetic oligonucleotide
  Target: LAMA2; (+) strand; PAM type: NRG; PAM sequence: TAG
ttggaagtgtaaggtgatct

SEQ ID NO: 173385 - DNA, 20 bp, Artificial Sequence
  Description of Artificial Sequence: Synthetic oligonucleotide
  Target: LAMA2; (+) strand; PAM type: NRG; PAM sequence: AGG
tggaagtgtaaggtgatctt

SEQ ID NO: 173386 - DNA, 20 bp, Artificial Sequence
  Description of Artificial Sequence: Synthetic oligonucleotide
  Target: LAMA2; (+) strand; PAM type: NRG; PAM sequence: AAG
aagtgtaaggtgatcttagg

SEQ ID NO: 173387 - DNA, 20 bp, Artificial Sequence
  Description of Artificial Sequence: Synthetic oligonucleotide
  Target: LAMA2; (+) strand; PAM type: NRG; PAM sequence: CAG
aggtgatcttaggaagtgtc

SEQ ID NO: 173388 - DNA, 20 bp, Artificial Sequence
  Description of Artificial Sequence: Synthetic oligonucleotide
  Target: LAMA2; (+) strand; PAM type: NRG; PAM sequence: CAG
atcttaggaagtgtccagta

SEQ ID NO: 173389 - DNA, 20 bp, Artificial Sequence
  Description of Artificial Sequence: Synthetic oligonucleotide
  Target: LAMA2; (+) strand; PAM type: NRG; PAM sequence: CAG
ttaggaagtgtccagtacag

SEQ ID NO: 173390 - DNA, 20 bp, Artificial Sequence
  Description of Artificial Sequence: Synthetic oligonucleotide
  Target: LAMA2; (+) strand; PAM type: NRG; PAM sequence: AAG
tacagcagaaaaactttcaa

SEQ ID NO: 173391 - DNA, 20 bp, Artificial Sequence
  Description of Artificial Sequence: Synthetic oligonucleotide
  Target: LAMA2; (+) strand; PAM type: NRG; PAM sequence: TAG
aaaagctacgtaaaaatctg

SEQ ID NO: 173392 - DNA, 20 bp, Artificial Sequence
  Description of Artificial Sequence: Synthetic oligonucleotide
  Target: LAMA2; (+) strand; PAM type: NRG; PAM sequence: CAG
agctacgtaaaaatctgtag

SEQ ID NO: 173393 - DNA, 20 bp, Artificial Sequence
  Description of Artificial Sequence: Synthetic oligonucleotide
  Target: LAMA2; (+) strand; PAM type: NRG; PAM sequence: GAG
ctacgtaaaaatctgtagca

SEQ ID NO: 173394 - DNA, 20 bp, Artificial Sequence
  Description of Artificial Sequence: Synthetic oligonucleotide
  Target: LAMA2; (+) strand; PAM type: NRG; PAM sequence: AAG
cgtaaaaatctgtagcagag

SEQ ID NO: 173395 - DNA, 20 bp, Artificial Sequence
  Description of Artificial Sequence: Synthetic oligonucleotide
  Target: LAMA2; (+) strand; PAM type: NRG; PAM sequence: AGG
gtaaaaatctgtagcagaga

SEQ ID NO: 173396 - DNA, 20 bp, Artificial Sequence
  Description of Artificial Sequence: Synthetic oligonucleotide
  Target: LAMA2; (+) strand; PAM type: NRG; PAM sequence: TGG
atctgtagcagagaaggctc

SEQ ID NO: 173397 - DNA, 20 bp, Artificial Sequence
  Description of Artificial Sequence: Synthetic oligonucleotide
  Target: LAMA2; (+) strand; PAM type: NRG; PAM sequence: TGG
gcagagaaggctctggaatt

SEQ ID NO: 173398 - DNA, 20 bp, Artificial Sequence
  Description of Artificial Sequence: Synthetic oligonucleotide
  Target: LAMA2; (+) strand; PAM type: NRG; PAM sequence: GAG
agagaaggctctggaatttg

SEQ ID NO: 173399 - DNA, 20 bp, Artificial Sequence
  Description of Artificial Sequence: Synthetic oligonucleotide
  Target: LAMA2; (+) strand; PAM type: NRG; PAM sequence: CAG
aaggctctggaatttggagc

SEQ ID NO: 173400 - DNA, 20 bp, Artificial Sequence
  Description of Artificial Sequence: Synthetic oligonucleotide
  Target: LAMA2; (+) strand; PAM type: NRG; PAM sequence: TAG
tggaatttggagccagatca

SEQ ID NO: 173401 - DNA, 20 bp, Artificial Sequence
  Description of Artificial Sequence: Synthetic oligonucleotide
  Target: LAMA2; (+) strand; PAM type: NRG; PAM sequence: AAG
aatttggagccagatcatag

SEQ ID NO: 173402 - DNA, 20 bp, Artificial Sequence
  Description of Artificial Sequence: Synthetic oligonucleotide
  Target: LAMA2; (+) strand; PAM type: NRG; PAM sequence: AGG
atttggagccagatcataga

SEQ ID NO: 173403 - DNA, 20 bp, Artificial Sequence
  Description of Artificial Sequence: Synthetic oligonucleotide
  Target: LAMA2; (+) strand; PAM type: NRG; PAM sequence: TGG
agccagatcatagaaggctt

SEQ ID NO: 173404 - DNA, 20 bp, Artificial Sequence
  Description of Artificial Sequence: Synthetic oligonucleotide
  Target: LAMA2; (+) strand; PAM type: NRG; PAM sequence: CAG
atcatagaaggctttggatg

SEQ ID NO: 173405 - DNA, 20 bp, Artificial Sequence
  Description of Artificial Sequence: Synthetic oligonucleotide
  Target: LAMA2; (+) strand; PAM type: NRG; PAM sequence: TAG
aggctttggatgcagccaac

SEQ ID NO: 173406 - DNA, 20 bp, Artificial Sequence
  Description of Artificial Sequence: Synthetic oligonucleotide
  Target: LAMA2; (+) strand; PAM type: NRG; PAM sequence: TGG
tttggatgcagccaactaga

SEQ ID NO: 173407 - DNA, 20 bp, Artificial Sequence
  Description of Artificial Sequence: Synthetic oligonucleotide
  Target: LAMA2; (+) strand; PAM type: NRG; PAM sequence: TGG
tgcagccaactagatggtga

SEQ ID NO: 173408 - DNA, 20 bp, Artificial Sequence
  Description of Artificial Sequence: Synthetic oligonucleotide
  Target: LAMA2; (+) strand; PAM type: NRG; PAM sequence: GAG
cagccaactagatggtgatg

SEQ ID NO: 173409 - DNA, 20 bp, Artificial Sequence
  Description of Artificial Sequence: Synthetic oligonucleotide
  Target: LAMA2; (+) strand; PAM type: NRG; PAM sequence: TGG
caactagatggtgatggagt

SEQ ID NO: 173410 - DNA, 20 bp, Artificial Sequence
  Description of Artificial Sequence: Synthetic oligonucleotide
  Target: LAMA2; (+) strand; PAM type: NRG; PAM sequence: AAG
tagatggtgatggagttgga

SEQ ID NO: 173411 - DNA, 20 bp, Artificial Sequence
  Description of Artificial Sequence: Synthetic oligonucleotide
  Target: LAMA2; (+) strand; PAM type: NRG; PAM sequence: AGG
agatggtgatggagttggaa

SEQ ID NO: 173412 - DNA, 20 bp, Artificial Sequence
  Description of Artificial Sequence: Synthetic oligonucleotide
  Target: LAMA2; (+) strand; PAM type: NRG; PAM sequence: CAG
tggagttggaaaggcatttc

SEQ ID NO: 173413 - DNA, 20 bp, Artificial Sequence
  Description of Artificial Sequence: Synthetic oligonucleotide
  Target: LAMA2; (+) strand; PAM type: NRG; PAM sequence: CAG
agttggaaaggcatttccag

SEQ ID NO: 173414 - DNA, 20 bp, Artificial Sequence
  Description of Artificial Sequence: Synthetic oligonucleotide
  Target: LAMA2; (+) strand; PAM type: NRG; PAM sequence: TGG
tggaaaggcatttccagcag

SEQ ID NO: 173415 - DNA, 20 bp, Artificial Sequence
  Description of Artificial Sequence: Synthetic oligonucleotide
  Target: LAMA2; (+) strand; PAM type: NRG; PAM sequence: GAG
gaaaggcatttccagcagtg

SEQ ID NO: 173416 - DNA, 20 bp, Artificial Sequence
  Description of Artificial Sequence: Synthetic oligonucleotide
  Target: LAMA2; (+) strand; PAM type: NRG; PAM sequence: GAG
aaggcatttccagcagtgga

SEQ ID NO: 173417 - DNA, 20 bp, Artificial Sequence
  Description of Artificial Sequence: Synthetic oligonucleotide
  Target: LAMA2; (+) strand; PAM type: NRG; PAM sequence: GAG
ggcatttccagcagtggaga

SEQ ID NO: 173418 - DNA, 20 bp, Artificial Sequence
  Description of Artificial Sequence: Synthetic oligonucleotide
  Target: LAMA2; (+) strand; PAM type: NRG; PAM sequence: AGG
gcatttccagcagtggagag

SEQ ID NO: 173419 - DNA, 20 bp, Artificial Sequence
  Description of Artificial Sequence: Synthetic oligonucleotide
  Target: LAMA2; (+) strand; PAM type: NRG; PAM sequence: GGG
catttccagcagtggagaga

SEQ ID NO: 173420 - DNA, 20 bp, Artificial Sequence
  Description of Artificial Sequence: Synthetic oligonucleotide
  Target: LAMA2; (+) strand; PAM type: NRG; PAM sequence: AAG
ccagcagtggagagagggct

SEQ ID NO: 173421 - DNA, 20 bp, Artificial Sequence
  Description of Artificial Sequence: Synthetic oligonucleotide
  Target: LAMA2; (+) strand; PAM type: NRG; PAM sequence: AGG
cagcagtggagagagggcta

SEQ ID NO: 173422 - DNA, 20 bp, Artificial Sequence
  Description of Artificial Sequence: Synthetic oligonucleotide
  Target: LAMA2; (+) strand; PAM type: NRG; PAM sequence: GGG
agcagtggagagagggctaa

SEQ ID NO: 173423 - DNA, 20 bp, Artificial Sequence
  Description of Artificial Sequence: Synthetic oligonucleotide
  Target: LAMA2; (+) strand; PAM type: NRG; PAM sequence: TGG
ggagagagggctaagggaac

SEQ ID NO: 173424 - DNA, 20 bp, Artificial Sequence
  Description of Artificial Sequence: Synthetic oligonucleotide
  Target: LAMA2; (+) strand; PAM type: NRG; PAM sequence: GGG
gagagagggctaagggaact

SEQ ID NO: 173425 - DNA, 20 bp, Artificial Sequence
  Description of Artificial Sequence: Synthetic oligonucleotide
  Target: LAMA2; (+) strand; PAM type: NRG; PAM sequence: GGG
agagagggctaagggaactg

SEQ ID NO: 173426 - DNA, 20 bp, Artificial Sequence
  Description of Artificial Sequence: Synthetic oligonucleotide
  Target: LAMA2; (+) strand; PAM type: NRG; PAM sequence: TGG
taagggaactggggacgtca

SEQ ID NO: 173427 - DNA, 20 bp, Artificial Sequence
  Description of Artificial Sequence: Synthetic oligonucleotide
  Target: LAMA2; (+) strand; PAM type: NRG; PAM sequence: GGG
aagggaactggggacgtcat

SEQ ID NO: 173428 - DNA, 20 bp, Artificial Sequence
  Description of Artificial Sequence: Synthetic oligonucleotide
  Target: LAMA2; (+) strand; PAM type: NRG; PAM sequence: AAG
ggaactggggacgtcatggg

SEQ ID NO: 173429 - DNA, 20 bp, Artificial Sequence
  Description of Artificial Sequence: Synthetic oligonucleotide
  Target: LAMA2; (+) strand; PAM type: NRG; PAM sequence: AAG
tggggacgtcatgggaagaa

SEQ ID NO: 173430 - DNA, 20 bp, Artificial Sequence
  Description of Artificial Sequence: Synthetic oligonucleotide
  Target: LAMA2; (+) strand; PAM type: NRG; PAM sequence: GAG
gggacgtcatgggaagaaaa

SEQ ID NO: 173431 - DNA, 20 bp, Artificial Sequence
  Description of Artificial Sequence: Synthetic oligonucleotide
  Target: LAMA2; (+) strand; PAM type: NRG; PAM sequence: AAG
acgtcatgggaagaaaagag

SEQ ID NO: 173432 - DNA, 20 bp, Artificial Sequence
  Description of Artificial Sequence: Synthetic oligonucleotide
  Target: LAMA2; (+) strand; PAM type: NRG; PAM sequence: CAG
aaaagagaagacaaatattt

SEQ ID NO: 173433 - DNA, 20 bp, Artificial Sequence
  Description of Artificial Sequence: Synthetic oligonucleotide
  Target: LAMA2; (+) strand; PAM type: NRG; PAM sequence: AAG
agaagacaaatatttcagtg

SEQ ID NO: 173434 - DNA, 20 bp, Artificial Sequence
  Description of Artificial Sequence: Synthetic oligonucleotide
  Target: LAMA2; (+) strand; PAM type: NRG; PAM sequence: GAG
gaagcaaaataatatgtatt

SEQ ID NO: 173435 - DNA, 20 bp, Artificial Sequence
  Description of Artificial Sequence: Synthetic oligonucleotide
  Target: LAMA2; (+) strand; PAM type: NRG; PAM sequence: CAG
gcaaaataatatgtattgag

SEQ ID NO: 173436 - DNA, 20 bp, Artificial Sequence
  Description of Artificial Sequence: Synthetic oligonucleotide
  Target: LAMA2; (+) strand; PAM type: NRG; PAM sequence: AAG
ctaccattatatccttgcca

SEQ ID NO: 173437 - DNA, 20 bp, Artificial Sequence
  Description of Artificial Sequence: Synthetic oligonucleotide
  Target: LAMA2; (+) strand; PAM type: NRG; PAM sequence: AAG
ccattatatccttgccaaag

SEQ ID NO: 173438 - DNA, 20 bp, Artificial Sequence
  Description of Artificial Sequence: Synthetic oligonucleotide
  Target: LAMA2; (+) strand; PAM type: NRG; PAM sequence: AGG
cattatatccttgccaaaga

SEQ ID NO: 173439 - DNA, 20 bp, Artificial Sequence
  Description of Artificial Sequence: Synthetic oligonucleotide
  Target: LAMA2; (+) strand; PAM type: NRG; PAM sequence: CAG
tatatccttgccaaagaagg

SEQ ID NO: 173440 - DNA, 20 bp, Artificial Sequence
  Description of Artificial Sequence: Synthetic oligonucleotide
  Target: LAMA2; (+) strand; PAM type: NRG; PAM sequence: CGG
ccttgccaaagaaggcagtg

SEQ ID NO: 173441 - DNA, 20 bp, Artificial Sequence
  Description of Artificial Sequence: Synthetic oligonucleotide
  Target: LAMA2; (+) strand; PAM type: NRG; PAM sequence: AAG
caaagaaggcagtgcggatc

SEQ ID NO: 173442 - DNA, 20 bp, Artificial Sequence
  Description of Artificial Sequence: Synthetic oligonucleotide
  Target: LAMA2; (+) strand; PAM type: NRG; PAM sequence: AAG
aaggcagtgcggatcaagta

SEQ ID NO: 173443 - DNA, 20 bp, Artificial Sequence
  Description of Artificial Sequence: Synthetic oligonucleotide
  Target: LAMA2; (+) strand; PAM type: NRG; PAM sequence: GAG
ggcagtgcggatcaagtaaa

SEQ ID NO: 173444 - DNA, 20 bp, Artificial Sequence
  Description of Artificial Sequence: Synthetic oligonucleotide
  Target: LAMA2; (+) strand; PAM type: NRG; PAM sequence: AAG
gtgcggatcaagtaaagagt

SEQ ID NO: 173445 - DNA, 20 bp, Artificial Sequence
  Description of Artificial Sequence: Synthetic oligonucleotide
  Target: LAMA2; (+) strand; PAM type: NRG; PAM sequence: AAG
aaagagtaagttgctacata

SEQ ID NO: 173446 - DNA, 20 bp, Artificial Sequence
  Description of Artificial Sequence: Synthetic oligonucleotide
  Target: LAMA2; (+) strand; PAM type: NRG; PAM sequence: CAG
gttgctacataaagaataca

SEQ ID NO: 173447 - DNA, 20 bp, Artificial Sequence
  Description of Artificial Sequence: Synthetic oligonucleotide
  Target: LAMA2; (+) strand; PAM type: NRG; PAM sequence: AGG
ttgctacataaagaatacac

SEQ ID NO: 173448 - DNA, 20 bp, Artificial Sequence
  Description of Artificial Sequence: Synthetic oligonucleotide
  Target: LAMA2; (+) strand; PAM type: NRG; PAM sequence: CAG
tacataaagaatacacaggc

SEQ ID NO: 173449 - DNA, 20 bp, Artificial Sequence
  Description of Artificial Sequence: Synthetic oligonucleotide
  Target: LAMA2; (+) strand; PAM type: NRG; PAM sequence: GAG
aagaatacacaggccagcct

SEQ ID NO: 173450 - DNA, 20 bp, Artificial Sequence
  Description of Artificial Sequence: Synthetic oligonucleotide
  Target: LAMA2; (+) strand; PAM type: NRG; PAM sequence: TGG
acaggccagcctgagcaaca

SEQ ID NO: 173451 - DNA, 20 bp, Artificial Sequence
  Description of Artificial Sequence: Synthetic oligonucleotide
  Target: LAMA2; (+) strand; PAM type: NRG; PAM sequence: TAG
atggtgacaccctatctcta

SEQ ID NO: 173452 - DNA, 20 bp, Artificial Sequence
  Description of Artificial Sequence: Synthetic oligonucleotide
  Target: LAMA2; (+) strand; PAM type: NRG; PAM sequence: TAG
ctatagaaaaatacaaaaat

SEQ ID NO: 173453 - DNA, 20 bp, Artificial Sequence
  Description of Artificial Sequence: Synthetic oligonucleotide
  Target: LAMA2; (+) strand; PAM type: NRG; PAM sequence: CGG
agaaaaatacaaaaattagt

SEQ ID NO: 173454 - DNA, 20 bp, Artificial Sequence
  Description of Artificial Sequence: Synthetic oligonucleotide
  Target: LAMA2; (+) strand; PAM type: NRG; PAM sequence: GGG
gaaaaatacaaaaattagtc

SEQ ID NO: 173455 - DNA, 20 bp, Artificial Sequence
  Description of Artificial Sequence: Synthetic oligonucleotide
  Target: LAMA2; (+) strand; PAM type: NRG; PAM sequence: TGG
atacaaaaattagtcgggca

SEQ ID NO: 173456 - DNA, 20 bp, Artificial Sequence
  Description of Artificial Sequence: Synthetic oligonucleotide
  Target: LAMA2; (+) strand; PAM type: NRG; PAM sequence: TGG
caaaaattagtcgggcatgg

SEQ ID NO: 173457 - DNA, 20 bp, Artificial Sequence
  Description of Artificial Sequence: Synthetic oligonucleotide
  Target: LAMA2; (+) strand; PAM type: NRG; PAM sequence: TGG
ggcatggtggtgcatgcctg

SEQ ID NO: 173458 - DNA, 20 bp, Artificial Sequence
  Description of Artificial Sequence: Synthetic oligonucleotide
  Target: LAMA2; (+) strand; PAM type: NRG; PAM sequence: CAG
gtggtgcatgcctgtggtcc

SEQ ID NO: 173459 - DNA, 20 bp, Artificial Sequence
  Description of Artificial Sequence: Synthetic oligonucleotide
  Target: LAMA2; (+) strand; PAM type: NRG; PAM sequence: TGG
tgcctgtggtcccagctact

SEQ ID NO: 173460 - DNA, 20 bp, Artificial Sequence
  Description of Artificial Sequence: Synthetic oligonucleotide
  Target: LAMA2; (+) strand; PAM type: NRG; PAM sequence: GAG
cctgtggtcccagctacttg

SEQ ID NO: 173461 - DNA, 20 bp, Artificial Sequence
  Description of Artificial Sequence: Synthetic oligonucleotide
  Target: LAMA2; (+) strand; PAM type: NRG; PAM sequence: AGG
ctgtggtcccagctacttgg

SEQ ID NO: 173462 - DNA, 20 bp, Artificial Sequence
  Description of Artificial Sequence: Synthetic oligonucleotide
  Target: LAMA2; (+) strand; PAM type: NRG; PAM sequence: GAG
gtcccagctacttggaggct

SEQ ID NO: 173463 - DNA, 20 bp, Artificial Sequence
  Description of Artificial Sequence: Synthetic oligonucleotide
  Target: LAMA2; (+) strand; PAM type: NRG; PAM sequence: AGG
tcccagctacttggaggctg

SEQ ID NO: 173464 - DNA, 20 bp, Artificial Sequence
  Description of Artificial Sequence: Synthetic oligonucleotide
  Target: LAMA2; (+) strand; PAM type: NRG; PAM sequence: TGG
cagctacttggaggctgagg

SEQ ID NO: 173465 - DNA, 20 bp, Artificial Sequence
  Description of Artificial Sequence: Synthetic oligonucleotide
  Target: LAMA2; (+) strand; PAM type: NRG; PAM sequence: GGG
agctacttggaggctgaggt

SEQ ID NO: 173466 - DNA, 20 bp, Artificial Sequence
  Description of Artificial Sequence: Synthetic oligonucleotide
  Target: LAMA2; (+) strand; PAM type: NRG; PAM sequence: GAG
ctacttggaggctgaggtgg

SEQ ID NO: 173467 - DNA, 20 bp, Artificial Sequence
  Description of Artificial Sequence: Synthetic oligonucleotide
  Target: LAMA2; (+) strand; PAM type: NRG; PAM sequence: AGG
tacttggaggctgaggtggg

SEQ ID NO: 173468 - DNA, 20 bp, Artificial Sequence
  Description of Artificial Sequence: Synthetic oligonucleotide
  Target: LAMA2; (+) strand; PAM type: NRG; PAM sequence: GAG
ctgaggtgggaggattgctt

SEQ ID NO: 173469 - DNA, 20 bp, Artificial Sequence
  Description of Artificial Sequence: Synthetic oligonucleotide
  Target: LAMA2; (+) strand; PAM type: NRG; PAM sequence: CAG
gtgggaggattgcttgagcc

SEQ ID NO: 173470 - DNA, 20 bp, Artificial Sequence
  Description of Artificial Sequence: Synthetic oligonucleotide
  Target: LAMA2; (+) strand; PAM type: NRG; PAM sequence: AAG
ggaggattgcttgagcccag

SEQ ID NO: 173471 - DNA, 20 bp, Artificial Sequence
  Description of Artificial Sequence: Synthetic oligonucleotide
  Target: LAMA2; (+) strand; PAM type: NRG; PAM sequence: GAG
ttgcttgagcccagaagttt

SEQ ID NO: 173472 - DNA, 20 bp, Artificial Sequence
  Description of Artificial Sequence: Synthetic oligonucleotide
  Target: LAMA2; (+) strand; PAM type: NRG; PAM sequence: CAG
agcccagaagtttgagcctg

SEQ ID NO: 173473 - DNA, 20 bp, Artificial Sequence
  Description of Artificial Sequence: Synthetic oligonucleotide
  Target: LAMA2; (+) strand; PAM type: NRG; PAM sequence: GAG
cagaagtttgagcctgcagt

SEQ ID NO: 173474 - DNA, 20 bp, Artificial Sequence
  Description of Artificial Sequence: Synthetic oligonucleotide
  Target: LAMA2; (+) strand; PAM type: NRG; PAM sequence: CAG
agtgagctgtgatcatgcca

SEQ ID NO: 173475 - DNA, 20 bp, Artificial Sequence
  Description of Artificial Sequence: Synthetic oligonucleotide
  Target: LAMA2; (+) strand; PAM type: NRG; PAM sequence: CAG
gtgatcatgccacagcactc

SEQ ID NO: 173476 - DNA, 20 bp, Artificial Sequence
  Description of Artificial Sequence: Synthetic oligonucleotide
  Target: LAMA2; (+) strand; PAM type: NRG; PAM sequence: TGG
catgccacagcactccagcc

SEQ ID NO: 173477 - DNA, 20 bp, Artificial Sequence
  Description of Artificial Sequence: Synthetic oligonucleotide
  Target: LAMA2; (+) strand; PAM type: NRG; PAM sequence: CAG
cagcactccagcctggatga

SEQ ID NO: 173478 - DNA, 20 bp, Artificial Sequence
  Description of Artificial Sequence: Synthetic oligonucleotide
  Target: LAMA2; (+) strand; PAM type: NRG; PAM sequence: GAG
actccagcctggatgacagt

SEQ ID NO: 173479 - DNA, 20 bp, Artificial Sequence
  Description of Artificial Sequence: Synthetic oligonucleotide
  Target: LAMA2; (+) strand; PAM type: NRG; PAM sequence: GAG
ctggatgacagtgagacaat

SEQ ID NO: 173480 - DNA, 20 bp, Artificial Sequence
  Description of Artificial Sequence: Synthetic oligonucleotide
  Target: LAMA2; (+) strand; PAM type: NRG; PAM sequence: CAG
atgacagtgagacaatgaga

SEQ ID NO: 173481 - DNA, 20 bp, Artificial Sequence
  Description of Artificial Sequence: Synthetic oligonucleotide
  Target: LAMA2; (+) strand; PAM type: NRG; PAM sequence: GAG
cagtgagacaatgagacagt

SEQ ID NO: 173482 - DNA, 20 bp, Artificial Sequence
  Description of Artificial Sequence: Synthetic oligonucleotide
  Target: LAMA2; (+) strand; PAM type: NRG; PAM sequence: CAG
gagacaatgagacagtgaga

SEQ ID NO: 173483 - DNA, 20 bp, Artificial Sequence
  Description of Artificial Sequence: Synthetic oligonucleotide
  Target: LAMA2; (+) strand; PAM type: NRG; PAM sequence: AAG
gtgtctcaaaaaaaaaaaaa

SEQ ID NO: 173484 - DNA, 20 bp, Artificial Sequence
  Description of Artificial Sequence: Synthetic oligonucleotide
  Target: LAMA2; (+) strand; PAM type: NRG; PAM sequence: AAG
caaaaaaaaaaaaaaagaaa

SEQ ID NO: 173485 - DNA, 20 bp, Artificial Sequence
  Description of Artificial Sequence: Synthetic oligonucleotide
  Target: LAMA2; (+) strand; PAM type: NRG; PAM sequence: AAG
aaaaaagaaaaagaaaataa

SEQ ID NO: 173486 - DNA, 20 bp, Artificial Sequence
  Description of Artificial Sequence: Synthetic oligonucleotide
  Target: LAMA2; (+) strand; PAM type: NRG; PAM sequence: TAG
aaaataaaagaaaacaataa

SEQ ID NO: 173487 - DNA, 20 bp, Artificial Sequence
  Description of Artificial Sequence: Synthetic oligonucleotide
  Target: LAMA2; (+) strand; PAM type: NRG; PAM sequence: CAG
taaaagaaaacaataataga

SEQ ID NO: 173488 - DNA, 20 bp, Artificial Sequence
  Description of Artificial Sequence: Synthetic oligonucleotide
  Target: LAMA2; (+) strand; PAM type: NRG; PAM sequence: AGG
aaaagaaaacaataatagac

SEQ ID NO: 173489 - DNA, 20 bp, Artificial Sequence
  Description of Artificial Sequence: Synthetic oligonucleotide
  Target: LAMA2; (+) strand; PAM type: NRG; PAM sequence: AAG
agaaaacaataatagacagg

SEQ ID NO: 173490 - DNA, 20 bp, Artificial Sequence
  Description of Artificial Sequence: Synthetic oligonucleotide
  Target: LAMA2; (+) strand; PAM type: NRG; PAM sequence: TAG
aacaataatagacaggaaga

SEQ ID NO: 173491 - DNA, 20 bp, Artificial Sequence
  Description of Artificial Sequence: Synthetic oligonucleotide
  Target: LAMA2; (+) strand; PAM type: NRG; PAM sequence: CAG
agacaggaagatagcttttg

SEQ ID NO: 173492 - DNA, 20 bp, Artificial Sequence
  Description of Artificial Sequence: Synthetic oligonucleotide
  Target: LAMA2; (+) strand; PAM type: NRG; PAM sequence: AGG
gacaggaagatagcttttgc

SEQ ID NO: 173493 - DNA, 20 bp, Artificial Sequence
  Description of Artificial Sequence: Synthetic oligonucleotide
  Target: LAMA2; (+) strand; PAM type: NRG; PAM sequence: AAG
atagcttttgcaggttcctg

SEQ ID NO: 173494 - DNA, 20 bp, Artificial Sequence
  Description of Artificial Sequence: Synthetic oligonucleotide
  Target: LAMA2; (+) strand; PAM type: NRG; PAM sequence: AAG
acaccaacacaccaaaaaaa

SEQ ID NO: 173495 - DNA, 20 bp, Artificial Sequence
  Description of Artificial Sequence: Synthetic oligonucleotide
  Target: LAMA2; (+) strand; PAM type: NRG; PAM sequence: AAG
caacacaccaaaaaaaaaga

SEQ ID NO: 173496 - DNA, 20 bp, Artificial Sequence
  Description of Artificial Sequence: Synthetic oligonucleotide
  Target: LAMA2; (+) strand; PAM type: NRG; PAM sequence: AAG
acaccaaaaaaaaagaaaga

SEQ ID NO: 173497 - DNA, 20 bp, Artificial Sequence
  Description of Artificial Sequence: Synthetic oligonucleotide
  Target: LAMA2; (+) strand; PAM type: NRG; PAM sequence: AAG
aaaaaaaagaaagaaagaaa

SEQ ID NO: 173498 - DNA, 20 bp, Artificial Sequence
  Description of Artificial Sequence: Synthetic oligonucleotide
  Target: LAMA2; (+) strand; PAM type: NRG; PAM sequence: AAG
aaaagaaagaaagaaaaaga

SEQ ID NO: 173499 - DNA, 20 bp, Artificial Sequence
  Description of Artificial Sequence: Synthetic oligonucleotide
  Target: LAMA2; (+) strand; PAM type: NRG; PAM sequence: AAG
aagaaagtgtccaatttgca

SEQ ID NO: 173500 - DNA, 20 bp, Artificial Sequence
  Description of Artificial Sequence: Synthetic oligonucleotide
  Target: LAMA2; (+) strand; PAM type: NRG; PAM sequence: TGG
gtgtccaatttgcaaagctc

SEQ ID NO: 173501 - DNA, 20 bp, Artificial Sequence
  Description of Artificial Sequence: Synthetic oligonucleotide
  Target: LAMA2; (+) strand; PAM type: NRG; PAM sequence: AAG
gcaaagctctggaataaata

SEQ ID NO: 173502 - DNA, 20 bp, Artificial Sequence
  Description of Artificial Sequence: Synthetic oligonucleotide
  Target: LAMA2; (+) strand; PAM type: NRG; PAM sequence: AAG
ataaagatctaattaattac

SEQ ID NO: 173503 - DNA, 20 bp, Artificial Sequence
  Description of Artificial Sequence: Synthetic oligonucleotide
  Target: LAMA2; (+) strand; PAM type: NRG; PAM sequence: AAG
tctaattaattacaagttaa

SEQ ID NO: 173504 - DNA, 20 bp, Artificial Sequence
  Description of Artificial Sequence: Synthetic oligonucleotide
  Target: LAMA2; (+) strand; PAM type: NRG; PAM sequence: TAG
aattaattacaagttaaaag

SEQ ID NO: 173505 - DNA, 20 bp, Artificial Sequence
  Description of Artificial Sequence: Synthetic oligonucleotide
  Target: LAMA2; (+) strand; PAM type: NRG; PAM sequence: GAG
ttcatatccaaacaataatt

SEQ ID NO: 173506 - DNA, 20 bp, Artificial Sequence
  Description of Artificial Sequence: Synthetic oligonucleotide
  Target: LAMA2; (+) strand; PAM type: NRG; PAM sequence: TAG
tacttatgccatactttttg

SEQ ID NO: 173507 - DNA, 20 bp, Artificial Sequence
  Description of Artificial Sequence: Synthetic oligonucleotide
  Target: LAMA2; (+) strand; PAM type: NRG; PAM sequence: TAG
agaataattctccctataca

SEQ ID NO: 173508 - DNA, 20 bp, Artificial Sequence
  Description of Artificial Sequence: Synthetic oligonucleotide
  Target: LAMA2; (+) strand; PAM type: NRG; PAM sequence: AGG
gaataattctccctatacat

SEQ ID NO: 173509 - DNA, 20 bp, Artificial Sequence
  Description of Artificial Sequence: Synthetic oligonucleotide
  Target: LAMA2; (+) strand; PAM type: NRG; PAM sequence: AAG
ttctgtttcttaaatactct

SEQ ID NO: 173510 - DNA, 20 bp, Artificial Sequence
  Description of Artificial Sequence: Synthetic oligonucleotide
  Target: LAMA2; (+) strand; PAM type: NRG; PAM sequence: TAG
atactctaagtttcctatct

SEQ ID NO: 173511 - DNA, 20 bp, Artificial Sequence
  Description of Artificial Sequence: Synthetic oligonucleotide
  Target: LAMA2; (+) strand; PAM type: NRG; PAM sequence: AGG
tactctaagtttcctatctt

SEQ ID NO: 173512 - DNA, 20 bp, Artificial Sequence
  Description of Artificial Sequence: Synthetic oligonucleotide
  Target: LAMA2; (+) strand; PAM type: NRG; PAM sequence: AAG
tactcatctaatctttcttt

SEQ ID NO: 173513 - DNA, 20 bp, Artificial Sequence
  Description of Artificial Sequence: Synthetic oligonucleotide
  Target: LAMA2; (+) strand; PAM type: NRG; PAM sequence: AAG
attttatctctcctccacac

SEQ ID NO: 173514 - DNA, 20 bp, Artificial Sequence
  Description of Artificial Sequence: Synthetic oligonucleotide
  Target: LAMA2; (+) strand; PAM type: NRG; PAM sequence: GAG
ctctcctccacacaagccat

SEQ ID NO: 173515 - DNA, 20 bp, Artificial Sequence
  Description of Artificial Sequence: Synthetic oligonucleotide
  Target: LAMA2; (+) strand; PAM type: NRG; PAM sequence: AGG
tctcctccacacaagccatg

SEQ ID NO: 173516 - DNA, 20 bp, Artificial Sequence
  Description of Artificial Sequence: Synthetic oligonucleotide
  Target: LAMA2; (+) strand; PAM type: NRG; PAM sequence: TAG
ttcctcacatcccccaatcc

SEQ ID NO: 173517 - DNA, 20 bp, Artificial Sequence
  Description of Artificial Sequence: Synthetic oligonucleotide
  Target: LAMA2; (+) strand; PAM type: NRG; PAM sequence: CAG
cacatcccccaatcctagaa

SEQ ID NO: 173518 - DNA, 20 bp, Artificial Sequence
  Description of Artificial Sequence: Synthetic oligonucleotide
  Target: LAMA2; (+) strand; PAM type: NRG; PAM sequence: TAG
cccaatcctagaacagtatc

SEQ ID NO: 173519 - DNA, 20 bp, Artificial Sequence
  Description of Artificial Sequence: Synthetic oligonucleotide
  Target: LAMA2; (+) strand; PAM type: NRG; PAM sequence: AAG
tcctagaacagtatctagca

SEQ ID NO: 173520 - DNA, 20 bp, Artificial Sequence
  Description of Artificial Sequence: Synthetic oligonucleotide
  Target: LAMA2; (+) strand; PAM type: NRG; PAM sequence: AGG
cctagaacagtatctagcaa

SEQ ID NO: 173521 - DNA, 20 bp, Artificial Sequence
  Description of Artificial Sequence: Synthetic oligonucleotide
  Target: LAMA2; (+) strand; PAM type: NRG; PAM sequence: CAG
agtatctagcaaaggcaaaa

SEQ ID NO: 173522 - DNA, 20 bp, Artificial Sequence
  Description of Artificial Sequence: Synthetic oligonucleotide
  Target: LAMA2; (+) strand; PAM type: NRG; PAM sequence: AAG
ttgttttccgtgaataaata

SEQ ID NO: 173523 - DNA, 20 bp, Artificial Sequence
  Description of Artificial Sequence: Synthetic oligonucleotide
  Target: LAMA2; (+) strand; PAM type: NRG; PAM sequence: TAG
cgtgaataaataaagtgcca

SEQ ID NO: 173524 - DNA, 20 bp, Artificial Sequence
  Description of Artificial Sequence: Synthetic oligonucleotide
  Target: LAMA2; (+) strand; PAM type: NRG; PAM sequence: CAG
aaagtgccatagaacaaacc

SEQ ID NO: 173525 - DNA, 20 bp, Artificial Sequence
  Description of Artificial Sequence: Synthetic oligonucleotide
  Target: LAMA2; (+) strand; PAM type: NRG; PAM sequence: GAG
atacttttgtcaatatttgt

SEQ ID NO: 173526 - DNA, 20 bp, Artificial Sequence
  Description of Artificial Sequence: Synthetic oligonucleotide
  Target: LAMA2; (+) strand; PAM type: NRG; PAM sequence: CGG
tccaaatttccatcttttct

SEQ ID NO: 173527 - DNA, 20 bp, Artificial Sequence
  Description of Artificial Sequence: Synthetic oligonucleotide
  Target: LAMA2; (+) strand; PAM type: NRG; PAM sequence: AAG
ttccatcttttctcggttca

SEQ ID NO: 173528 - DNA, 20 bp, Artificial Sequence
  Description of Artificial Sequence: Synthetic oligonucleotide
  Target: LAMA2; (+) strand; PAM type: NRG; PAM sequence: TAG
atcttttctcggttcaaagc

SEQ ID NO: 173529 - DNA, 20 bp, Artificial Sequence
  Description of Artificial Sequence: Synthetic oligonucleotide
  Target: LAMA2; (+) strand; PAM type: NRG; PAM sequence: CAG
ggttcaaagctagaacccat

SEQ ID NO: 173530 - DNA, 20 bp, Artificial Sequence
  Description of Artificial Sequence: Synthetic oligonucleotide
  Target: LAMA2; (+) strand; PAM type: NRG; PAM sequence: AAG
tcagtatctaatctgaaaac

SEQ ID NO: 173531 - DNA, 20 bp, Artificial Sequence
  Description of Artificial Sequence: Synthetic oligonucleotide
  Target: LAMA2; (+) strand; PAM type: NRG; PAM sequence: CAG
aaatttatttaacctcatcc

SEQ ID NO: 173532 - DNA, 20 bp, Artificial Sequence
  Description of Artificial Sequence: Synthetic oligonucleotide
  Target: LAMA2; (+) strand; PAM type: NRG; PAM sequence: TGG
ttaacctcatcccagcactc

SEQ ID NO: 173533 - DNA, 20 bp, Artificial Sequence
  Description of Artificial Sequence: Synthetic oligonucleotide
  Target: LAMA2; (+) strand; PAM type: NRG; PAM sequence: GGG
taacctcatcccagcactct

SEQ ID NO: 173534 - DNA, 20 bp, Artificial Sequence
  Description of Artificial Sequence: Synthetic oligonucleotide
  Target: LAMA2; (+) strand; PAM type: NRG; PAM sequence: GAG
acctcatcccagcactctgg

SEQ ID NO: 173535 - DNA, 20 bp, Artificial Sequence
  Description of Artificial Sequence: Synthetic oligonucleotide
  Target: LAMA2; (+) strand; PAM type: NRG; PAM sequence: AGG
cctcatcccagcactctggg

SEQ ID NO: 173536 - DNA, 20 bp, Artificial Sequence
  Description of Artificial Sequence: Synthetic oligonucleotide
  Target: LAMA2; (+) strand; PAM type: NRG; PAM sequence: GAG
tcccagcactctgggaggct

SEQ ID NO: 173537 - DNA, 20 bp, Artificial Sequence
  Description of Artificial Sequence: Synthetic oligonucleotide
  Target: LAMA2; (+) strand; PAM type: NRG; PAM sequence: AGG
cccagcactctgggaggctg

SEQ ID NO: 173538 - DNA, 20 bp, Artificial Sequence
  Description of Artificial Sequence: Synthetic oligonucleotide
  Target: LAMA2; (+) strand; PAM type: NRG; PAM sequence: CAG
agcactctgggaggctgagg

SEQ ID NO: 173539 - DNA, 20 bp, Artificial Sequence
  Description of Artificial Sequence: Synthetic oligonucleotide
  Target: LAMA2; (+) strand; PAM type: NRG; PAM sequence: AGG
gcactctgggaggctgaggc

SEQ ID NO: 173540 - DNA, 20 bp, Artificial Sequence
  Description of Artificial Sequence: Synthetic oligonucleotide
  Target: LAMA2; (+) strand; PAM type: NRG; PAM sequence: GAG
actctgggaggctgaggcag

SEQ ID NO: 173541 - DNA, 20 bp, Artificial Sequence
  Description of Artificial Sequence: Synthetic oligonucleotide
  Target: LAMA2; (+) strand; PAM type: NRG; PAM sequence: AGG
ctctgggaggctgaggcagg

SEQ ID NO: 173542 - DNA, 20 bp, Artificial Sequence
  Description of Artificial Sequence: Synthetic oligonucleotide
  Target: LAMA2; (+) strand; PAM type: NRG; PAM sequence: GAG
ggctgaggcaggaggatcat

SEQ ID NO: 173543 - DNA, 20 bp, Artificial Sequence
  Description of Artificial Sequence: Synthetic oligonucleotide
  Target: LAMA2; (+) strand; PAM type: NRG; PAM sequence: AGG
gctgaggcaggaggatcatg

SEQ ID NO: 173544 - DNA, 20 bp, Artificial Sequence
  Description of Artificial Sequence: Synthetic oligonucleotide
  Target: LAMA2; (+) strand; PAM type: NRG; PAM sequence: CAG
aggcaggaggatcatgaggt

SEQ ID NO: 173545 - DNA, 20 bp, Artificial Sequence
  Description of Artificial Sequence: Synthetic oligonucleotide
  Target: LAMA2; (+) strand; PAM type: NRG; PAM sequence: AGG
ggcaggaggatcatgaggtc

SEQ ID NO: 173546 - DNA, 20 bp, Artificial Sequence
  Description of Artificial Sequence: Synthetic oligonucleotide
  Target: LAMA2; (+) strand; PAM type: NRG; PAM sequence: GAG
caggaggatcatgaggtcag

SEQ ID NO: 173547 - DNA, 20 bp, Artificial Sequence
  Description of Artificial Sequence: Synthetic oligonucleotide
  Target: LAMA2; (+) strand; PAM type: NRG; PAM sequence: GAG
gatcatgaggtcaggagatc

SEQ ID NO: 173548 - DNA, 20 bp, Artificial Sequence
  Description of Artificial Sequence: Synthetic oligonucleotide
  Target: LAMA2; (+) strand; PAM type: NRG; PAM sequence: TGG
tcaggagatcgagaccatcc

SEQ ID NO: 173549 - DNA, 20 bp, Artificial Sequence
  Description of Artificial Sequence: Synthetic oligonucleotide
  Target: LAMA2; (+) strand; PAM type: NRG; PAM sequence: TGG
cgagaccatcctggctaaca

SEQ ID NO: 173550 - DNA, 20 bp, Artificial Sequence
  Description of Artificial Sequence: Synthetic oligonucleotide
  Target: LAMA2; (+) strand; PAM type: NRG; PAM sequence: TAG
aatacaaaaataaaaaaaat

SEQ ID NO: 173551 - DNA, 20 bp, Artificial Sequence
  Description of Artificial Sequence: Synthetic oligonucleotide
  Target: LAMA2; (+) strand; PAM type: NRG; PAM sequence: CAG
caaaaataaaaaaaattagc

SEQ ID NO: 173552 - DNA, 20 bp, Artificial Sequence
  Description of Artificial Sequence: Synthetic oligonucleotide
  Target: LAMA2; (+) strand; PAM type: NRG; PAM sequence: AGG
aaaaataaaaaaaattagcc

SEQ ID NO: 173553 - DNA, 20 bp, Artificial Sequence
  Description of Artificial Sequence: Synthetic oligonucleotide
  Target: LAMA2; (+) strand; PAM type: NRG; PAM sequence: TGG
taaaaaaaattagccaggcg

SEQ ID NO: 173554 - DNA, 20 bp, Artificial Sequence
  Description of Artificial Sequence: Synthetic oligonucleotide
  Target: LAMA2; (+) strand; PAM type: NRG; PAM sequence: TGG
aaaaaattagccaggcgtgg

SEQ ID NO: 173555 - DNA, 20 bp, Artificial Sequence
  Description of Artificial Sequence: Synthetic oligonucleotide
  Target: LAMA2; (+) strand; PAM type: NRG; PAM sequence: CAG
aaattagccaggcgtggtgg

SEQ ID NO: 173556 - DNA, 20 bp, Artificial Sequence
  Description of Artificial Sequence: Synthetic oligonucleotide
  Target: LAMA2; (+) strand; PAM type: NRG; PAM sequence: AGG
aattagccaggcgtggtggc

SEQ ID NO: 173557 - DNA, 20 bp, Artificial Sequence
  Description of Artificial Sequence: Synthetic oligonucleotide
  Target: LAMA2; (+) strand; PAM type: NRG; PAM sequence: CAG
ggcgtggtggcaggcacctg

SEQ ID NO: 173558 - DNA, 20 bp, Artificial Sequence
  Description of Artificial Sequence: Synthetic oligonucleotide
  Target: LAMA2; (+) strand; PAM type: NRG; PAM sequence: CGG
aggcacctgcagtccctact

SEQ ID NO: 173559 - DNA, 20 bp, Artificial Sequence
  Description of Artificial Sequence: Synthetic oligonucleotide
  Target: LAMA2; (+) strand; PAM type: NRG; PAM sequence: GGG
ggcacctgcagtccctactc

SEQ ID NO: 173560 - DNA, 20 bp, Artificial Sequence
  Description of Artificial Sequence: Synthetic oligonucleotide
  Target: LAMA2; (+) strand; PAM type: NRG; PAM sequence: GAG
cacctgcagtccctactcgg

SEQ ID NO: 173561 - DNA, 20 bp, Artificial Sequence
  Description of Artificial Sequence: Synthetic oligonucleotide
  Target: LAMA2; (+) strand; PAM type: NRG; PAM sequence: AGG
acctgcagtccctactcggg

SEQ ID NO: 173562 - DNA, 20 bp, Artificial Sequence
  Description of Artificial Sequence: Synthetic oligonucleotide
  Target: LAMA2; (+) strand; PAM type: NRG; PAM sequence: GAG
cagtccctactcgggaggct

SEQ ID NO: 173563 - DNA, 20 bp, Artificial Sequence
  Description of Artificial Sequence: Synthetic oligonucleotide
  Target: LAMA2; (+) strand; PAM type: NRG; PAM sequence: AGG
agtccctactcgggaggctg

SEQ ID NO: 173564 - DNA, 20 bp, Artificial Sequence
  Description of Artificial Sequence: Synthetic oligonucleotide
  Target: LAMA2; (+) strand; PAM type: NRG; PAM sequence: CAG
ccctactcgggaggctgagg

SEQ ID NO: 173565 - DNA, 20 bp, Artificial Sequence
  Description of Artificial Sequence: Synthetic oligonucleotide
  Target: LAMA2; (+) strand; PAM type: NRG; PAM sequence: AGG
cctactcgggaggctgaggc

SEQ ID NO: 173566 - DNA, 20 bp, Artificial Sequence
  Description of Artificial Sequence: Synthetic oligonucleotide
  Target: LAMA2; (+) strand; PAM type: NRG; PAM sequence: GAG
tactcgggaggctgaggcag

SEQ ID NO: 173567 - DNA, 20 bp, Artificial Sequence
  Description of Artificial Sequence: Synthetic oligonucleotide
  Target: LAMA2; (+) strand; PAM type: NRG; PAM sequence: TGG
gggaggctgaggcaggagaa

SEQ ID NO: 173568 - DNA, 20 bp, Artificial Sequence
  Description of Artificial Sequence: Synthetic oligonucleotide
  Target: LAMA2; (+) strand; PAM type: NRG; PAM sequence: TGG
gcaggagaatggtgtgaacc

SEQ ID NO: 173569 - DNA, 20 bp, Artificial Sequence
  Description of Artificial Sequence: Synthetic oligonucleotide
  Target: LAMA2; (+) strand; PAM type: NRG; PAM sequence: GGG
caggagaatggtgtgaacct

SEQ ID NO: 173570 - DNA, 20 bp, Artificial Sequence
  Description of Artificial Sequence: Synthetic oligonucleotide
  Target: LAMA2; (+) strand; PAM type: NRG; PAM sequence: GAG
ggagaatggtgtgaacctgg

SEQ ID NO: 173571 - DNA, 20 bp, Artificial Sequence
  Description of Artificial Sequence: Synthetic oligonucleotide
  Target: LAMA2; (+) strand; PAM type: NRG; PAM sequence: AGG
gagaatggtgtgaacctggg

SEQ ID NO: 173572 - DNA, 20 bp, Artificial Sequence
  Description of Artificial Sequence: Synthetic oligonucleotide
  Target: LAMA2; (+) strand; PAM type: NRG; PAM sequence: CAG
aatggtgtgaacctgggagg

SEQ ID NO: 173573 - DNA, 20 bp, Artificial Sequence
  Description of Artificial Sequence: Synthetic oligonucleotide
  Target: LAMA2; (+) strand; PAM type: NRG; PAM sequence: GAG
tggtgtgaacctgggaggca

SEQ ID NO: 173574 - DNA, 20 bp, Artificial Sequence
  Description of Artificial Sequence: Synthetic oligonucleotide
  Target: LAMA2; (+) strand; PAM type: NRG; PAM sequence: CAG
aacctgggaggcagagcttg

SEQ ID NO: 173575 - DNA, 20 bp, Artificial Sequence
  Description of Artificial Sequence: Synthetic oligonucleotide
  Target: LAMA2; (+) strand; PAM type: NRG; PAM sequence: GAG
tgggaggcagagcttgcagt

SEQ ID NO: 173576 - DNA, 20 bp, Artificial Sequence
  Description of Artificial Sequence: Synthetic oligonucleotide
  Target: LAMA2; (+) strand; PAM type: NRG; PAM sequence: AAG
ggcagagcttgcagtgagcc

SEQ ID NO: 173577 - DNA, 20 bp, Artificial Sequence
  Description of Artificial Sequence: Synthetic oligonucleotide
  Target: LAMA2; (+) strand; PAM type: NRG; PAM sequence: CAG
aagattgctccactgcactc

SEQ ID NO: 173578 - DNA, 20 bp, Artificial Sequence
  Description of Artificial Sequence: Synthetic oligonucleotide
  Target: LAMA2; (+) strand; PAM type: NRG; PAM sequence: TGG
tgctccactgcactccagcc

SEQ ID NO: 173579 - DNA, 20 bp, Artificial Sequence
  Description of Artificial Sequence: Synthetic oligonucleotide
  Target: LAMA2; (+) strand; PAM type: NRG; PAM sequence: GGG
gctccactgcactccagcct

SEQ ID NO: 173580 - DNA, 20 bp, Artificial Sequence
  Description of Artificial Sequence: Synthetic oligonucleotide
  Target: LAMA2; (+) strand; PAM type: NRG; PAM sequence: CAG
ctgcactccagcctgggcga

SEQ ID NO: 173581 - DNA, 20 bp, Artificial Sequence
  Description of Artificial Sequence: Synthetic oligonucleotide
  Target: LAMA2; (+) strand; PAM type: NRG; PAM sequence: GAG
gcactccagcctgggcgaca

SEQ ID NO: 173582 - DNA, 20 bp, Artificial Sequence
  Description of Artificial Sequence: Synthetic oligonucleotide
  Target: LAMA2; (+) strand; PAM type: NRG; PAM sequence: GAG
tccagcctgggcgacagagt

SEQ ID NO: 173583 - DNA, 20 bp, Artificial Sequence
  Description of Artificial Sequence: Synthetic oligonucleotide
  Target: LAMA2; (+) strand; PAM type: NRG; PAM sequence: CAG
gacagagtgagactccgtct

SEQ ID NO: 173584 - DNA, 20 bp, Artificial Sequence
  Description of Artificial Sequence: Synthetic oligonucleotide
  Target: LAMA2; (+) strand; PAM type: NRG; PAM sequence: GAG
cttgatcatcatttctgatt

SEQ ID NO: 173585 - DNA, 20 bp, Artificial Sequence
  Description of Artificial Sequence: Synthetic oligonucleotide
  Target: LAMA2; (+) strand; PAM type: NRG; PAM sequence: AAG
catttctgattgagtatgct

SEQ ID NO: 173586 - DNA, 20 bp, Artificial Sequence
  Description of Artificial Sequence: Synthetic oligonucleotide
  Target: LAMA2; (+) strand; PAM type: NRG; PAM sequence: AAG
ttctgattgagtatgctaag

SEQ ID NO: 173587 - DNA, 20 bp, Artificial Sequence
  Description of Artificial Sequence: Synthetic oligonucleotide
  Target: LAMA2; (+) strand; PAM type: NRG; PAM sequence: AAG
tttgatctttgcttttacaa

SEQ ID NO: 173588 - DNA, 20 bp, Artificial Sequence
  Description of Artificial Sequence: Synthetic oligonucleotide
  Target: LAMA2; (+) strand; PAM type: NRG; PAM sequence: TAG
tattgaaatcaaaatatata

SEQ ID NO: 173589 - DNA, 20 bp, Artificial Sequence
  Description of Artificial Sequence: Synthetic oligonucleotide
  Target: LAMA2; (+) strand; PAM type: NRG; PAM sequence: TGG
ctcttcaattaacacacgtg

SEQ ID NO: 173590 - DNA, 20 bp, Artificial Sequence
  Description of Artificial Sequence: Synthetic oligonucleotide
  Target: LAMA2; (+) strand; PAM type: NRG; PAM sequence: CAG
ggaaatatcttccctgtttc

SEQ ID NO: 173591 - DNA, 20 bp, Artificial Sequence
  Description of Artificial Sequence: Synthetic oligonucleotide
  Target: LAMA2; (+) strand; PAM type: NRG; PAM sequence: TGG
aatatcttccctgtttccag

SEQ ID NO: 173592 - DNA, 20 bp, Artificial Sequence
  Description of Artificial Sequence: Synthetic oligonucleotide
  Target: LAMA2; (+) strand; PAM type: NRG; PAM sequence: CAG
cttccctgtttccagtggca

SEQ ID NO: 173593 - DNA, 20 bp, Artificial Sequence
  Description of Artificial Sequence: Synthetic oligonucleotide
  Target: LAMA2; (+) strand; PAM type: NRG; PAM sequence: AAG
cttgatccattaattcaaac

SEQ ID NO: 173594 - DNA, 20 bp, Artificial Sequence
  Description of Artificial Sequence: Synthetic oligonucleotide
  Target: LAMA2; (+) strand; PAM type: NRG; PAM sequence: AAG
tcaaacaagccatgttgtaa

SEQ ID NO: 173595 - DNA, 20 bp, Artificial Sequence
  Description of Artificial Sequence: Synthetic oligonucleotide
  Target: LAMA2; (+) strand; PAM type: NRG; PAM sequence: AAG
ttctgtacatgctatacttt

SEQ ID NO: 173596 - DNA, 20 bp, Artificial Sequence
  Description of Artificial Sequence: Synthetic oligonucleotide
  Target: LAMA2; (+) strand; PAM type: NRG; PAM sequence: CAG
gtacatgctatactttaagt

SEQ ID NO: 173597 - DNA, 20 bp, Artificial Sequence
  Description of Artificial Sequence: Synthetic oligonucleotide
  Target: LAMA2; (+) strand; PAM type: NRG; PAM sequence: AAG
ctttaagtcagctcatacaa

SEQ ID NO: 173598 - DNA, 20 bp, Artificial Sequence
  Description of Artificial Sequence: Synthetic oligonucleotide
  Target: LAMA2; (+) strand; PAM type: NRG; PAM sequence: AAG
agtcagctcatacaaaagct

SEQ ID NO: 173599 - DNA, 20 bp, Artificial Sequence
  Description of Artificial Sequence: Synthetic oligonucleotide
  Target: LAMA2; (+) strand; PAM type: NRG; PAM sequence: AGG
gtcagctcatacaaaagcta

SEQ ID NO: 173600 - DNA, 20 bp, Artificial Sequence
  Description of Artificial Sequence: Synthetic oligonucleotide
  Target: LAMA2; (+) strand; PAM type: NRG; PAM sequence: GGG
tcagctcatacaaaagctaa

SEQ ID NO: 173601 - DNA, 20 bp, Artificial Sequence
  Description of Artificial Sequence: Synthetic oligonucleotide
  Target: LAMA2; (+) strand; PAM type: NRG; PAM sequence: TGG
caaaagctaagggctaaaat

SEQ ID NO: 173602 - DNA, 20 bp, Artificial Sequence
  Description of Artificial Sequence: Synthetic oligonucleotide
  Target: LAMA2; (+) strand; PAM type: NRG; PAM sequence: CAG
aagctaagggctaaaattgg

SEQ ID NO: 173603 - DNA, 20 bp, Artificial Sequence
  Description of Artificial Sequence: Synthetic oligonucleotide
  Target: LAMA2; (+) strand; PAM type: NRG; PAM sequence: AAG
taaaattggcagttgtgtaa

SEQ ID NO: 173604 - DNA, 20 bp, Artificial Sequence
  Description of Artificial Sequence: Synthetic oligonucleotide
  Target: LAMA2; (+) strand; PAM type: NRG; PAM sequence: TAG
gcagttgtgtaaaagaatgt

SEQ ID NO: 173605 - DNA, 20 bp, Artificial Sequence
  Description of Artificial Sequence: Synthetic oligonucleotide
  Target: LAMA2; (+) strand; PAM type: NRG; PAM sequence: TGG
gtaaaagaatgttagaccct

SEQ ID NO: 173606 - DNA, 20 bp, Artificial Sequence
  Description of Artificial Sequence: Synthetic oligonucleotide
  Target: LAMA2; (+) strand; PAM type: NRG; PAM sequence: AAG
aaagaatgttagacccttgg

SEQ ID NO: 173607 - DNA, 20 bp, Artificial Sequence
  Description of Artificial Sequence: Synthetic oligonucleotide
  Target: LAMA2; (+) strand; PAM type: NRG; PAM sequence: AAG
atgttagacccttggaagat

SEQ ID NO: 173608 - DNA, 20 bp, Artificial Sequence
  Description of Artificial Sequence: Synthetic oligonucleotide
  Target: LAMA2; (+) strand; PAM type: NRG; PAM sequence: CAG
gataagatatgacttgtaat

SEQ ID NO: 173609 - DNA, 20 bp, Artificial Sequence
  Description of Artificial Sequence: Synthetic oligonucleotide
  Target: LAMA2; (+) strand; PAM type: NRG; PAM sequence: AGG
ataagatatgacttgtaatc

SEQ ID NO: 173610 - DNA, 20 bp, Artificial Sequence
  Description of Artificial Sequence: Synthetic oligonucleotide
  Target: LAMA2; (+) strand; PAM type: NRG; PAM sequence: GGG
taagatatgacttgtaatca

SEQ ID NO: 173611 - DNA, 20 bp, Artificial Sequence
  Description of Artificial Sequence: Synthetic oligonucleotide
  Target: LAMA2; (+) strand; PAM type: NRG; PAM sequence: GAG
agatatgacttgtaatcagg

SEQ ID NO: 173612 - DNA, 20 bp, Artificial Sequence
  Description of Artificial Sequence: Synthetic oligonucleotide
  Target: LAMA2; (+) strand; PAM type: NRG; PAM sequence: CAG
gtaatcagggagattgtaat

SEQ ID NO: 173613 - DNA, 20 bp, Artificial Sequence
  Description of Artificial Sequence: Synthetic oligonucleotide
  Target: LAMA2; (+) strand; PAM type: NRG; PAM sequence: AGG
taatcagggagattgtaatc

SEQ ID NO: 173614 - DNA, 20 bp, Artificial Sequence
  Description of Artificial Sequence: Synthetic oligonucleotide
  Target: LAMA2; (+) strand; PAM type: NRG; PAM sequence: GGG
aatcagggagattgtaatca

SEQ ID NO: 173615 - DNA, 20 bp, Artificial Sequence
  Description of Artificial Sequence: Synthetic oligonucleotide
  Target: LAMA2; (+) strand; PAM type: NRG; PAM sequence: TGG
gagattgtaatcagggacat

SEQ ID NO: 173616 - DNA, 20 bp, Artificial Sequence
  Description of Artificial Sequence: Synthetic oligonucleotide
  Target: LAMA2; (+) strand; PAM type: NRG; PAM sequence: GGG
agattgtaatcagggacatt

SEQ ID NO: 173617 - DNA, 20 bp, Artificial Sequence
  Description of Artificial Sequence: Synthetic oligonucleotide
  Target: LAMA2; (+) strand; PAM type: NRG; PAM sequence: AAG
tcccacatttgttgtctgtg

SEQ ID NO: 173618 - DNA, 20 bp, Artificial Sequence
  Description of Artificial Sequence: Synthetic oligonucleotide
  Target: LAMA2; (+) strand; PAM type: NRG; PAM sequence: GAG
ccacatttgttgtctgtgaa

SEQ ID NO: 173619 - DNA, 20 bp, Artificial Sequence
  Description of Artificial Sequence: Synthetic oligonucleotide
  Target: LAMA2; (+) strand; PAM type: NRG; PAM sequence: TAG
tatcaaaacttcccctgaat

SEQ ID NO: 173620 - DNA, 20 bp, Artificial Sequence
  Description of Artificial Sequence: Synthetic oligonucleotide
  Target: LAMA2; (+) strand; PAM type: NRG; PAM sequence: TGG
aacttcccctgaattagtga

SEQ ID NO: 173621 - DNA, 20 bp, Artificial Sequence
  Description of Artificial Sequence: Synthetic oligonucleotide
  Target: LAMA2; (+) strand; PAM type: NRG; PAM sequence: GGG
acttcccctgaattagtgat

SEQ ID NO: 173622 - DNA, 20 bp, Artificial Sequence
  Description of Artificial Sequence: Synthetic oligonucleotide
  Target: LAMA2; (+) strand; PAM type: NRG; PAM sequence: GAG
ttcccctgaattagtgatgg

SEQ ID NO: 173623 - DNA, 20 bp, Artificial Sequence
  Description of Artificial Sequence: Synthetic oligonucleotide
  Target: LAMA2; (+) strand; PAM type: NRG; PAM sequence: TAG
ccctgaattagtgatgggag

SEQ ID NO: 173624 - DNA, 20 bp, Artificial Sequence
  Description of Artificial Sequence: Synthetic oligonucleotide
  Target: LAMA2; (+) strand; PAM type: NRG; PAM sequence: GAG
agtgatgggagtagctgaat

SEQ ID NO: 173625 - DNA, 20 bp, Artificial Sequence
  Description of Artificial Sequence: Synthetic oligonucleotide
  Target: LAMA2; (+) strand; PAM type: NRG; PAM sequence: AAG
tgggagtagctgaatgagcc

SEQ ID NO: 173626 - DNA, 20 bp, Artificial Sequence
  Description of Artificial Sequence: Synthetic oligonucleotide
  Target: LAMA2; (+) strand; PAM type: NRG; PAM sequence: CAG
tagctgaatgagccaagtgt

SEQ ID NO: 173627 - DNA, 20 bp, Artificial Sequence
  Description of Artificial Sequence: Synthetic oligonucleotide
  Target: LAMA2; (+) strand; PAM type: NRG; PAM sequence: CAG
ctgaatgagccaagtgtcag

SEQ ID NO: 173628 - DNA, 20 bp, Artificial Sequence
  Description of Artificial Sequence: Synthetic oligonucleotide
  Target: LAMA2; (+) strand; PAM type: NRG; PAM sequence: AAG
gagccaagtgtcagcagcac

SEQ ID NO: 173629 - DNA, 20 bp, Artificial Sequence
  Description of Artificial Sequence: Synthetic oligonucleotide
  Target: LAMA2; (+) strand; PAM type: NRG; PAM sequence: CAG
agtgtcagcagcacaagtcc

SEQ ID NO: 173630 - DNA, 20 bp, Artificial Sequence
  Description of Artificial Sequence: Synthetic oligonucleotide
  Target: LAMA2; (+) strand; PAM type: NRG; PAM sequence: AGG
gtgtcagcagcacaagtccc

SEQ ID NO: 173631 - DNA, 20 bp, Artificial Sequence
  Description of Artificial Sequence: Synthetic oligonucleotide
  Target: LAMA2; (+) strand; PAM type: NRG; PAM sequence: TGG
agcagcacaagtcccaggaa

SEQ ID NO: 173632 - DNA, 20 bp, Artificial Sequence
  Description of Artificial Sequence: Synthetic oligonucleotide
  Target: LAMA2; (+) strand; PAM type: NRG; PAM sequence: GAG
tttttttttttttttttttt

SEQ ID NO: 173633 - DNA, 20 bp, Artificial Sequence
  Description of Artificial Sequence: Synthetic oligonucleotide
  Target: LAMA2; (+) strand; PAM type: NRG; PAM sequence: CAG
ttttttttttttttttgaga

SEQ ID NO: 173634 - DNA, 20 bp, Artificial Sequence
  Description of Artificial Sequence: Synthetic oligonucleotide
  Target: LAMA2; (+) strand; PAM type: NRG; PAM sequence: GAG
ttttttttttttttgagaca

SEQ ID NO: 173635 - DNA, 20 bp, Artificial Sequence
  Description of Artificial Sequence: Synthetic oligonucleotide
  Target: LAMA2; (+) strand; PAM type: NRG; PAM sequence: CAG
agagtttcgctcttgtcacc

SEQ ID NO: 173636 - DNA, 20 bp, Artificial Sequence
  Description of Artificial Sequence: Synthetic oligonucleotide
  Target: LAMA2; (+) strand; PAM type: NRG; PAM sequence: AGG
gagtttcgctcttgtcaccc

SEQ ID NO: 173637 - DNA, 20 bp, Artificial Sequence
  Description of Artificial Sequence: Synthetic oligonucleotide
  Target: LAMA2; (+) strand; PAM type: NRG; PAM sequence: TGG
ttcgctcttgtcacccaggc

SEQ ID NO: 173638 - DNA, 20 bp, Artificial Sequence
  Description of Artificial Sequence: Synthetic oligonucleotide
  Target: LAMA2; (+) strand; PAM type: NRG; PAM sequence: TGG
tcacccaggctggattgcaa

SEQ ID NO: 173639 - DNA, 20 bp, Artificial Sequence
  Description of Artificial Sequence: Synthetic oligonucleotide
  Target: LAMA2; (+) strand; PAM type: NRG; PAM sequence: TGG
ggattgcaatggtgcaatct

SEQ ID NO: 173640 - DNA, 20 bp, Artificial Sequence
  Description of Artificial Sequence: Synthetic oligonucleotide
  Target: LAMA2; (+) strand; PAM type: NRG; PAM sequence: CAG
tcactttaacctccacctct

SEQ ID NO: 173641 - DNA, 20 bp, Artificial Sequence
  Description of Artificial Sequence: Synthetic oligonucleotide
  Target: LAMA2; (+) strand; PAM type: NRG; PAM sequence: AGG
cactttaacctccacctctc

SEQ ID NO: 173642 - DNA, 20 bp, Artificial Sequence
  Description of Artificial Sequence: Synthetic oligonucleotide
  Target: LAMA2; (+) strand; PAM type: NRG; PAM sequence: AAG
taacctccacctctcaggtc

SEQ ID NO: 173643 - DNA, 20 bp, Artificial Sequence
  Description of Artificial Sequence: Synthetic oligonucleotide
  Target: LAMA2; (+) strand; PAM type: NRG; PAM sequence: CAG
gtcaagtgattctcctgcct

SEQ ID NO: 173644 - DNA, 20 bp, Artificial Sequence
  Description of Artificial Sequence: Synthetic oligonucleotide
  Target: LAMA2; (+) strand; PAM type: NRG; PAM sequence: AAG
ttctcctgcctcagcctccc

SEQ ID NO: 173645 - DNA, 20 bp, Artificial Sequence
  Description of Artificial Sequence: Synthetic oligonucleotide
  Target: LAMA2; (+) strand; PAM type: NRG; PAM sequence: TAG
tcctgcctcagcctcccaag

SEQ ID NO: 173646 - DNA, 20 bp, Artificial Sequence
  Description of Artificial Sequence: Synthetic oligonucleotide
  Target: LAMA2; (+) strand; PAM type: NRG; PAM sequence: GAG
cctcagcctcccaagtagct

SEQ ID NO: 173647 - DNA, 20 bp, Artificial Sequence
  Description of Artificial Sequence: Synthetic oligonucleotide
  Target: LAMA2; (+) strand; PAM type: NRG; PAM sequence: CAG
ctcccaagtagctgagatta

SEQ ID NO: 173648 - DNA, 20 bp, Artificial Sequence
  Description of Artificial Sequence: Synthetic oligonucleotide
  Target: LAMA2; (+) strand; PAM type: NRG; PAM sequence: AGG
tcccaagtagctgagattac

SEQ ID NO: 173649 - DNA, 20 bp, Artificial Sequence
  Description of Artificial Sequence: Synthetic oligonucleotide
  Target: LAMA2; (+) strand; PAM type: NRG; PAM sequence: CAG
caggcatgcaccaccacacc

SEQ ID NO: 173650 - DNA, 20 bp, Artificial Sequence
  Description of Artificial Sequence: Synthetic oligonucleotide
  Target: LAMA2; (+) strand; PAM type: NRG; PAM sequence: TAG
cccagctaattttgtatttt

SEQ ID NO: 173651 - DNA, 20 bp, Artificial Sequence
  Description of Artificial Sequence: Synthetic oligonucleotide
  Target: LAMA2; (+) strand; PAM type: NRG; PAM sequence: TAG
agctaattttgtatttttag

SEQ ID NO: 173652 - DNA, 20 bp, Artificial Sequence
  Description of Artificial Sequence: Synthetic oligonucleotide
  Target: LAMA2; (+) strand; PAM type: NRG; PAM sequence: GAG
ctaattttgtatttttagta

SEQ ID NO: 173653 - DNA, 20 bp, Artificial Sequence
  Description of Artificial Sequence: Synthetic oligonucleotide
  Target: LAMA2; (+) strand; PAM type: NRG; PAM sequence: GAG
tttgtatttttagtagagac

SEQ ID NO: 173654 - DNA, 20 bp, Artificial Sequence
  Description of Artificial Sequence: Synthetic oligonucleotide
  Target: LAMA2; (+) strand; PAM type: NRG; PAM sequence: AGG
ttgtatttttagtagagacg

SEQ ID NO: 173655 - DNA, 20 bp, Artificial Sequence
  Description of Artificial Sequence: Synthetic oligonucleotide
  Target: LAMA2; (+) strand; PAM type: NRG; PAM sequence: TGG
gagacgaggtttcaccatgt

SEQ ID NO: 173656 - DNA, 20 bp, Artificial Sequence
  Description of Artificial Sequence: Synthetic oligonucleotide
  Target: LAMA2; (+) strand; PAM type: NRG; PAM sequence: CAG
cgaggtttcaccatgttggc

SEQ ID NO: 173657 - DNA, 20 bp, Artificial Sequence
  Description of Artificial Sequence: Synthetic oligonucleotide
  Target: LAMA2; (+) strand; PAM type: NRG; PAM sequence: AGG
gaggtttcaccatgttggcc

SEQ ID NO: 173658 - DNA, 20 bp, Artificial Sequence
  Description of Artificial Sequence: Synthetic oligonucleotide
  Target: LAMA2; (+) strand; PAM type: NRG; PAM sequence: TGG
tttcaccatgttggccaggc

SEQ ID NO: 173659 - DNA, 20 bp, Artificial Sequence
  Description of Artificial Sequence: Synthetic oligonucleotide
  Target: LAMA2; (+) strand; PAM type: NRG; PAM sequence: CGG
catgttggccaggctggtct

SEQ ID NO: 173660 - DNA, 20 bp, Artificial Sequence
  Description of Artificial Sequence: Synthetic oligonucleotide
  Target: LAMA2; (+) strand; PAM type: NRG; PAM sequence: CAG
tggtctcggactcctgacct

SEQ ID NO: 173661 - DNA, 20 bp, Artificial Sequence
  Description of Artificial Sequence: Synthetic oligonucleotide
  Target: LAMA2; (+) strand; PAM type: NRG; PAM sequence: AGG
ggtctcggactcctgacctc

SEQ ID NO: 173662 - DNA, 20 bp, Artificial Sequence
  Description of Artificial Sequence: Synthetic oligonucleotide
  Target: LAMA2; (+) strand; PAM type: NRG; PAM sequence: TGG
ctcaggtgatccacctgcct

SEQ ID NO: 173663 - DNA, 20 bp, Artificial Sequence
  Description of Artificial Sequence: Synthetic oligonucleotide
  Target: LAMA2; (+) strand; PAM type: NRG; PAM sequence: AAG
ccacctgccttggcctccca

SEQ ID NO: 173664 - DNA, 20 bp, Artificial Sequence
  Description of Artificial Sequence: Synthetic oligonucleotide
  Target: LAMA2; (+) strand; PAM type: NRG; PAM sequence: TGG
gccttggcctcccaaagtgc

SEQ ID NO: 173665 - DNA, 20 bp, Artificial Sequence
  Description of Artificial Sequence: Synthetic oligonucleotide
  Target: LAMA2; (+) strand; PAM type: NRG; PAM sequence: GGG
ccttggcctcccaaagtgct

SEQ ID NO: 173666 - DNA, 20 bp, Artificial Sequence
  Description of Artificial Sequence: Synthetic oligonucleotide
  Target: LAMA2; (+) strand; PAM type: NRG; PAM sequence: CAG
ctcccaaagtgctgggataa

SEQ ID NO: 173667 - DNA, 20 bp, Artificial Sequence
  Description of Artificial Sequence: Synthetic oligonucleotide
  Target: LAMA2; (+) strand; PAM type: NRG; PAM sequence: AGG
tcccaaagtgctgggataac

SEQ ID NO: 173668 - DNA, 20 bp, Artificial Sequence
  Description of Artificial Sequence: Synthetic oligonucleotide
  Target: LAMA2; (+) strand; PAM type: NRG; PAM sequence: GAG
agtgctgggataacaggcat

SEQ ID NO: 173669 - DNA, 20 bp, Artificial Sequence
  Description of Artificial Sequence: Synthetic oligonucleotide
  Target: LAMA2; (+) strand; PAM type: NRG; PAM sequence: GAG
tttattaaaaaatatttatt

SEQ ID NO: 173670 - DNA, 20 bp, Artificial Sequence
  Description of Artificial Sequence: Synthetic oligonucleotide
  Target: LAMA2; (+) strand; PAM type: NRG; PAM sequence: AGG
ttattaaaaaatatttattg

SEQ ID NO: 173671 - DNA, 20 bp, Artificial Sequence
  Description of Artificial Sequence: Synthetic oligonucleotide
  Target: LAMA2; (+) strand; PAM type: NRG; PAM sequence: TAG
gaggaaactcatctacatac

SEQ ID NO: 173672 - DNA, 20 bp, Artificial Sequence
  Description of Artificial Sequence: Synthetic oligonucleotide
  Target: LAMA2; (+) strand; PAM type: NRG; PAM sequence: GAG
ggaaactcatctacatacta

SEQ ID NO: 173673 - DNA, 20 bp, Artificial Sequence
  Description of Artificial Sequence: Synthetic oligonucleotide
  Target: LAMA2; (+) strand; PAM type: NRG; PAM sequence: TAG
actcatctacatactagaga

SEQ ID NO: 173674 - DNA, 20 bp, Artificial Sequence
  Description of Artificial Sequence: Synthetic oligonucleotide
  Target: LAMA2; (+) strand; PAM type: NRG; PAM sequence: TGG
gatatataaaactgtcttta

SEQ ID NO: 173675 - DNA, 20 bp, Artificial Sequence
  Description of Artificial Sequence: Synthetic oligonucleotide
  Target: LAMA2; (+) strand; PAM type: NRG; PAM sequence: CAG
tctttatggaatttgtgtta

SEQ ID NO: 173676 - DNA, 20 bp, Artificial Sequence
  Description of Artificial Sequence: Synthetic oligonucleotide
  Target: LAMA2; (+) strand; PAM type: NRG; PAM sequence: CAG
atggaatttgtgttacagtg

SEQ ID NO: 173677 - DNA, 20 bp, Artificial Sequence
  Description of Artificial Sequence: Synthetic oligonucleotide
  Target: LAMA2; (+) strand; PAM type: NRG; PAM sequence: AGG
tggaatttgtgttacagtgc

SEQ ID NO: 173678 - DNA, 20 bp, Artificial Sequence
  Description of Artificial Sequence: Synthetic oligonucleotide
  Target: LAMA2; (+) strand; PAM type: NRG; PAM sequence: GAG
gaatttgtgttacagtgcag

SEQ ID NO: 173679 - DNA, 20 bp, Artificial Sequence
  Description of Artificial Sequence: Synthetic oligonucleotide
  Target: LAMA2; (+) strand; PAM type: NRG; PAM sequence: CAG
ttgtgttacagtgcaggaga

SEQ ID NO: 173680 - DNA, 20 bp, Artificial Sequence
  Description of Artificial Sequence: Synthetic oligonucleotide
  Target: LAMA2; (+) strand; PAM type: NRG; PAM sequence: AAG
cagtgcaggagacagtcact

SEQ ID NO: 173681 - DNA, 20 bp, Artificial Sequence
  Description of Artificial Sequence: Synthetic oligonucleotide
  Target: LAMA2; (+) strand; PAM type: NRG; PAM sequence: AAG
cagtcactaagtcaataaat

SEQ ID NO: 173682 - DNA, 20 bp, Artificial Sequence
  Description of Artificial Sequence: Synthetic oligonucleotide
  Target: LAMA2; (+) strand; PAM type: NRG; PAM sequence: AAG
ctaagtcaataaataagcat

SEQ ID NO: 173683 - DNA, 20 bp, Artificial Sequence
  Description of Artificial Sequence: Synthetic oligonucleotide
  Target: LAMA2; (+) strand; PAM type: NRG; PAM sequence: AAG
aagcataagctacgaccata

SEQ ID NO: 173684 - DNA, 20 bp, Artificial Sequence
  Description of Artificial Sequence: Synthetic oligonucleotide
  Target: LAMA2; (+) strand; PAM type: NRG; PAM sequence: TGG
taagctacgaccataaagtc

SEQ ID NO: 173685 - DNA, 20 bp, Artificial Sequence
  Description of Artificial Sequence: Synthetic oligonucleotide
  Target: LAMA2; (+) strand; PAM type: NRG; PAM sequence: CGG
gaccataaagtctggatgca

SEQ ID NO: 173686 - DNA, 20 bp, Artificial Sequence
  Description of Artificial Sequence: Synthetic oligonucleotide
  Target: LAMA2; (+) strand; PAM type: NRG; PAM sequence: GGG
accataaagtctggatgcac

SEQ ID NO: 173687 - DNA, 20 bp, Artificial Sequence
  Description of Artificial Sequence: Synthetic oligonucleotide
  Target: LAMA2; (+) strand; PAM type: NRG; PAM sequence: AAG
atgcacgggctgataaacat

SEQ ID NO: 173688 - DNA, 20 bp, Artificial Sequence
  Description of Artificial Sequence: Synthetic oligonucleotide
  Target: LAMA2; (+) strand; PAM type: NRG; PAM sequence: TGG
gtttactgatatgtaataaa

SEQ ID NO: 173689 - DNA, 20 bp, Artificial Sequence
  Description of Artificial Sequence: Synthetic oligonucleotide
  Target: LAMA2; (+) strand; PAM type: NRG; PAM sequence: TAG
tgttgcatgatattgcataa

SEQ ID NO: 173690 - DNA, 20 bp, Artificial Sequence
  Description of Artificial Sequence: Synthetic oligonucleotide
  Target: LAMA2; (+) strand; PAM type: NRG; PAM sequence: TAG
tgtccttcattaacaatgtg

SEQ ID NO: 173691 - DNA, 20 bp, Artificial Sequence
  Description of Artificial Sequence: Synthetic oligonucleotide
  Target: LAMA2; (+) strand; PAM type: NRG; PAM sequence: CAG
attaacaatgtgtagttcaa

SEQ ID NO: 173692 - DNA, 20 bp, Artificial Sequence
  Description of Artificial Sequence: Synthetic oligonucleotide
  Target: LAMA2; (+) strand; PAM type: NRG; PAM sequence: AGG
ttaacaatgtgtagttcaac

SEQ ID NO: 173693 - DNA, 20 bp, Artificial Sequence
  Description of Artificial Sequence: Synthetic oligonucleotide
  Target: LAMA2; (+) strand; PAM type: NRG; PAM sequence: TAG
aacaggctgtgcctttctgc

SEQ ID NO: 173694 - DNA, 20 bp, Artificial Sequence
  Description of Artificial Sequence: Synthetic oligonucleotide
  Target: LAMA2; (+) strand; PAM type: NRG; PAM sequence: TGG
tacatgtatctgtgatgcat

SEQ ID NO: 173695 - DNA, 20 bp, Artificial Sequence
  Description of Artificial Sequence: Synthetic oligonucleotide
  Target: LAMA2; (+) strand; PAM type: NRG; PAM sequence: TAG
tattacctaatctttgtttt

SEQ ID NO: 173696 - DNA, 20 bp, Artificial Sequence
  Description of Artificial Sequence: Synthetic oligonucleotide
  Target: LAMA2; (+) strand; PAM type: NRG; PAM sequence: CGG
tctttgtttttagcaactcc

SEQ ID NO: 173697 - DNA, 20 bp, Artificial Sequence
  Description of Artificial Sequence: Synthetic oligonucleotide
  Target: LAMA2; (+) strand; PAM type: NRG; PAM sequence: AAG
tttttagcaactcccggcaa

SEQ ID NO: 173698 - DNA, 20 bp, Artificial Sequence
  Description of Artificial Sequence: Synthetic oligonucleotide
  Target: LAMA2; (+) strand; PAM type: NRG; PAM sequence: AAG
aactcccggcaaaagtaatc

SEQ ID NO: 173699 - DNA, 20 bp, Artificial Sequence
  Description of Artificial Sequence: Synthetic oligonucleotide
  Target: LAMA2; (+) strand; PAM type: NRG; PAM sequence: AAG
acgaatcaatctatataaaa

SEQ ID NO: 173700 - DNA, 20 bp, Artificial Sequence
  Description of Artificial Sequence: Synthetic oligonucleotide
  Target: LAMA2; (+) strand; PAM type: NRG; PAM sequence: TAG
tctatgtttctaccactctg

SEQ ID NO: 173701 - DNA, 20 bp, Artificial Sequence
  Description of Artificial Sequence: Synthetic oligonucleotide
  Target: LAMA2; (+) strand; PAM type: NRG; PAM sequence: CAG
ccactctgtagaatataatt

SEQ ID NO: 173702 - DNA, 20 bp, Artificial Sequence
  Description of Artificial Sequence: Synthetic oligonucleotide
  Target: LAMA2; (+) strand; PAM type: NRG; PAM sequence: TGG
tagaatataattcagataaa

SEQ ID NO: 173703 - DNA, 20 bp, Artificial Sequence
  Description of Artificial Sequence: Synthetic oligonucleotide
  Target: LAMA2; (+) strand; PAM type: NRG; PAM sequence: GGG
agaatataattcagataaat

SEQ ID NO: 173704 - DNA, 20 bp, Artificial Sequence
  Description of Artificial Sequence: Synthetic oligonucleotide
  Target: LAMA2; (+) strand; PAM type: NRG; PAM sequence: AAG
aattcagataaatgggttct

SEQ ID NO: 173705 - DNA, 20 bp, Artificial Sequence
  Description of Artificial Sequence: Synthetic oligonucleotide
  Target: LAMA2; (+) strand; PAM type: NRG; PAM sequence: AAG
tcagataaatgggttctaag

SEQ ID NO: 173706 - DNA, 20 bp, Artificial Sequence
  Description of Artificial Sequence: Synthetic oligonucleotide
  Target: LAMA2; (+) strand; PAM type: NRG; PAM sequence: AAG
ggttctaagaagaacaaaat

SEQ ID NO: 173707 - DNA, 20 bp, Artificial Sequence
  Description of Artificial Sequence: Synthetic oligonucleotide
  Target: LAMA2; (+) strand; PAM type: NRG; PAM sequence: AGG
gttctaagaagaacaaaata

SEQ ID NO: 173708 - DNA, 20 bp, Artificial Sequence
  Description of Artificial Sequence: Synthetic oligonucleotide
  Target: LAMA2; (+) strand; PAM type: NRG; PAM sequence: TAG
acaaaataaggtaattataa

SEQ ID NO: 173709 - DNA, 20 bp, Artificial Sequence
  Description of Artificial Sequence: Synthetic oligonucleotide
  Target: LAMA2; (+) strand; PAM type: NRG; PAM sequence: CAG
aattataatagttaaaatta

SEQ ID NO: 173710 - DNA, 20 bp, Artificial Sequence
  Description of Artificial Sequence: Synthetic oligonucleotide
  Target: LAMA2; (+) strand; PAM type: NRG; PAM sequence: TGG
agttaaaattacagtgttac

SEQ ID NO: 173711 - DNA, 20 bp, Artificial Sequence
  Description of Artificial Sequence: Synthetic oligonucleotide
  Target: LAMA2; (+) strand; PAM type: NRG; PAM sequence: GGG
gttaaaattacagtgttact

SEQ ID NO: 173712 - DNA, 20 bp, Artificial Sequence
  Description of Artificial Sequence: Synthetic oligonucleotide
  Target: LAMA2; (+) strand; PAM type: NRG; PAM sequence: CAG
attacagtgttactgggtgc

SEQ ID NO: 173713 - DNA, 20 bp, Artificial Sequence
  Description of Artificial Sequence: Synthetic oligonucleotide
  Target: LAMA2; (+) strand; PAM type: NRG; PAM sequence: AGG
ttacagtgttactgggtgcc

SEQ ID NO: 173714 - DNA, 20 bp, Artificial Sequence
  Description of Artificial Sequence: Synthetic oligonucleotide
  Target: LAMA2; (+) strand; PAM type: NRG; PAM sequence: CAG
cagtgttactgggtgccagg

SEQ ID NO: 173715 - DNA, 20 bp, Artificial Sequence
  Description of Artificial Sequence: Synthetic oligonucleotide
  Target: LAMA2; (+) strand; PAM type: NRG; PAM sequence: AAG
tgggtgccaggcagtgttct

SEQ ID NO: 173716 - DNA, 20 bp, Artificial Sequence
  Description of Artificial Sequence: Synthetic oligonucleotide
  Target: LAMA2; (+) strand; PAM type: NRG; PAM sequence: TGG
tacaatgtctatcaatcatg

SEQ ID NO: 173717 - DNA, 20 bp, Artificial Sequence
  Description of Artificial Sequence: Synthetic oligonucleotide
  Target: LAMA2; (+) strand; PAM type: NRG; PAM sequence: GGG
acaatgtctatcaatcatgt

SEQ ID NO: 173718 - DNA, 20 bp, Artificial Sequence
  Description of Artificial Sequence: Synthetic oligonucleotide
  Target: LAMA2; (+) strand; PAM type: NRG; PAM sequence: GGG
caatgtctatcaatcatgtg

SEQ ID NO: 173719 - DNA, 20 bp, Artificial Sequence
  Description of Artificial Sequence: Synthetic oligonucleotide
  Target: LAMA2; (+) strand; PAM type: NRG; PAM sequence: AAG
atcatgtggggttcttgtta

SEQ ID NO: 173720 - DNA, 20 bp, Artificial Sequence
  Description of Artificial Sequence: Synthetic oligonucleotide
  Target: LAMA2; (+) strand; PAM type: NRG; PAM sequence: CAG
gtggggttcttgttaaagtg

SEQ ID NO: 173721 - DNA, 20 bp, Artificial Sequence
  Description of Artificial Sequence: Synthetic oligonucleotide
  Target: LAMA2; (+) strand; PAM type: NRG; PAM sequence: GAG
cttgttaaagtgcagattct

SEQ ID NO: 173722 - DNA, 20 bp, Artificial Sequence
  Description of Artificial Sequence: Synthetic oligonucleotide
  Target: LAMA2; (+) strand; PAM type: NRG; PAM sequence: CAG
ttaaagtgcagattctgagt

SEQ ID NO: 173723 - DNA, 20 bp, Artificial Sequence
  Description of Artificial Sequence: Synthetic oligonucleotide
  Target: LAMA2; (+) strand; PAM type: NRG; PAM sequence: TAG
aagtgcagattctgagtcag

SEQ ID NO: 173724 - DNA, 20 bp, Artificial Sequence
  Description of Artificial Sequence: Synthetic oligonucleotide
  Target: LAMA2; (+) strand; PAM type: NRG; PAM sequence: CAG
gattctgagtcagtagttcc

SEQ ID NO: 173725 - DNA, 20 bp, Artificial Sequence
  Description of Artificial Sequence: Synthetic oligonucleotide
  Target: LAMA2; (+) strand; PAM type: NRG; PAM sequence: AGG
attctgagtcagtagttccc

SEQ ID NO: 173726 - DNA, 20 bp, Artificial Sequence
  Description of Artificial Sequence: Synthetic oligonucleotide
  Target: LAMA2; (+) strand; PAM type: NRG; PAM sequence: TGG
gagtcagtagttcccaggaa

SEQ ID NO: 173727 - DNA, 20 bp, Artificial Sequence
  Description of Artificial Sequence: Synthetic oligonucleotide
  Target: LAMA2; (+) strand; PAM type: NRG; PAM sequence: GAG
gtagttcccaggaatggatt

SEQ ID NO: 173728 - DNA, 20 bp, Artificial Sequence
  Description of Artificial Sequence: Synthetic oligonucleotide
  Target: LAMA2; (+) strand; PAM type: NRG; PAM sequence: GAG
tgagattatgcatttctaat

SEQ ID NO: 173729 - DNA, 20 bp, Artificial Sequence
  Description of Artificial Sequence: Synthetic oligonucleotide
  Target: LAMA2; (+) strand; PAM type: NRG; PAM sequence: CAG
atgcatttctaatgagcttc

SEQ ID NO: 173730 - DNA, 20 bp, Artificial Sequence
  Description of Artificial Sequence: Synthetic oligonucleotide
  Target: LAMA2; (+) strand; PAM type: NRG; PAM sequence: AGG
tgcatttctaatgagcttcc

SEQ ID NO: 173731 - DNA, 20 bp, Artificial Sequence
  Description of Artificial Sequence: Synthetic oligonucleotide
  Target: LAMA2; (+) strand; PAM type: NRG; PAM sequence: TGG
ccaggtgacgctgatgctgc

SEQ ID NO: 173732 - DNA, 20 bp, Artificial Sequence
  Description of Artificial Sequence: Synthetic oligonucleotide
  Target: LAMA2; (+) strand; PAM type: NRG; PAM sequence: TGG
acgctgatgctgctggtgaa

SEQ ID NO: 173733 - DNA, 20 bp, Artificial Sequence
  Description of Artificial Sequence: Synthetic oligonucleotide
  Target: LAMA2; (+) strand; PAM type: NRG; PAM sequence: GGG
cgctgatgctgctggtgaat

SEQ ID NO: 173734 - DNA, 20 bp, Artificial Sequence
  Description of Artificial Sequence: Synthetic oligonucleotide
  Target: LAMA2; (+) strand; PAM type: NRG; PAM sequence: GAG
tggtgaatgggctgcacatt

SEQ ID NO: 173735 - DNA, 20 bp, Artificial Sequence
  Description of Artificial Sequence: Synthetic oligonucleotide
  Target: LAMA2; (+) strand; PAM type: NRG; PAM sequence: TAG
tgaatgggctgcacattgag

SEQ ID NO: 173736 - DNA, 20 bp, Artificial Sequence
  Description of Artificial Sequence: Synthetic oligonucleotide
  Target: LAMA2; (+) strand; PAM type: NRG; PAM sequence: AGG
gaatgggctgcacattgagt

SEQ ID NO: 173737 - DNA, 20 bp, Artificial Sequence
  Description of Artificial Sequence: Synthetic oligonucleotide
  Target: LAMA2; (+) strand; PAM type: NRG; PAM sequence: GGG
aatgggctgcacattgagta

SEQ ID NO: 173738 - DNA, 20 bp, Artificial Sequence
  Description of Artificial Sequence: Synthetic oligonucleotide
  Target: LAMA2; (+) strand; PAM type: NRG; PAM sequence: GAG
tgggctgcacattgagtagg

SEQ ID NO: 173739 - DNA, 20 bp, Artificial Sequence
  Description of Artificial Sequence: Synthetic oligonucleotide
  Target: LAMA2; (+) strand; PAM type: NRG; PAM sequence: AGG
gggctgcacattgagtaggg

SEQ ID NO: 173740 - DNA, 20 bp, Artificial Sequence
  Description of Artificial Sequence: Synthetic oligonucleotide
  Target: LAMA2; (+) strand; PAM type: NRG; PAM sequence: GGG
ggctgcacattgagtaggga

SEQ ID NO: 173741 - DNA, 20 bp, Artificial Sequence
  Description of Artificial Sequence: Synthetic oligonucleotide
  Target: LAMA2; (+) strand; PAM type: NRG; PAM sequence: AAG
gggactaaacattttgtatg

SEQ ID NO: 173742 - DNA, 20 bp, Artificial Sequence
  Description of Artificial Sequence: Synthetic oligonucleotide
  Target: LAMA2; (+) strand; PAM type: NRG; PAM sequence: AGG
ggactaaacattttgtatga

SEQ ID NO: 173743 - DNA, 20 bp, Artificial Sequence
  Description of Artificial Sequence: Synthetic oligonucleotide
  Target: LAMA2; (+) strand; PAM type: NRG; PAM sequence: AAG
tgaaggtaaattacttcctt

SEQ ID NO: 173744 - DNA, 20 bp, Artificial Sequence
  Description of Artificial Sequence: Synthetic oligonucleotide
  Target: LAMA2; (+) strand; PAM type: NRG; PAM sequence: AGG
gaaggtaaattacttcctta

SEQ ID NO: 173745 - DNA, 20 bp, Artificial Sequence
  Description of Artificial Sequence: Synthetic oligonucleotide
  Target: LAMA2; (+) strand; PAM type: NRG; PAM sequence: TAG
attacttccttaaggtttca

SEQ ID NO: 173746 - DNA, 20 bp, Artificial Sequence
  Description of Artificial Sequence: Synthetic oligonucleotide
  Target: LAMA2; (+) strand; PAM type: NRG; PAM sequence: TGG
ttccttaaggtttcatagct

SEQ ID NO: 173747 - DNA, 20 bp, Artificial Sequence
  Description of Artificial Sequence: Synthetic oligonucleotide
  Target: LAMA2; (+) strand; PAM type: NRG; PAM sequence: GGG
tccttaaggtttcatagctt

SEQ ID NO: 173748 - DNA, 20 bp, Artificial Sequence
  Description of Artificial Sequence: Synthetic oligonucleotide
  Target: LAMA2; (+) strand; PAM type: NRG; PAM sequence: GAG
cttaaggtttcatagcttgg

SEQ ID NO: 173749 - DNA, 20 bp, Artificial Sequence
  Description of Artificial Sequence: Synthetic oligonucleotide
  Target: LAMA2; (+) strand; PAM type: NRG; PAM sequence: GAG
aggtttcatagcttgggagt

SEQ ID NO: 173750 - DNA, 20 bp, Artificial Sequence
  Description of Artificial Sequence: Synthetic oligonucleotide
  Target: LAMA2; (+) strand; PAM type: NRG; PAM sequence: CAG
tttcatagcttgggagtgag

SEQ ID NO: 173751 - DNA, 20 bp, Artificial Sequence
  Description of Artificial Sequence: Synthetic oligonucleotide
  Target: LAMA2; (+) strand; PAM type: NRG; PAM sequence: GAG
tcatagcttgggagtgagca

SEQ ID NO: 173752 - DNA, 20 bp, Artificial Sequence
  Description of Artificial Sequence: Synthetic oligonucleotide
  Target: LAMA2; (+) strand; PAM type: NRG; PAM sequence: CAG
gcagagctgtgatcccaaac

SEQ ID NO: 173753 - DNA, 20 bp, Artificial Sequence
  Description of Artificial Sequence: Synthetic oligonucleotide
  Target: LAMA2; (+) strand; PAM type: NRG; PAM sequence: AAG
gagctgtgatcccaaaccag

SEQ ID NO: 173754 - DNA, 20 bp, Artificial Sequence
  Description of Artificial Sequence: Synthetic oligonucleotide
  Target: LAMA2; (+) strand; PAM type: NRG; PAM sequence: AGG
agctgtgatcccaaaccaga

SEQ ID NO: 173755 - DNA, 20 bp, Artificial Sequence
  Description of Artificial Sequence: Synthetic oligonucleotide
  Target: LAMA2; (+) strand; PAM type: NRG; PAM sequence: GGG
gctgtgatcccaaaccagaa

SEQ ID NO: 173756 - DNA, 20 bp, Artificial Sequence
  Description of Artificial Sequence: Synthetic oligonucleotide
  Target: LAMA2; (+) strand; PAM type: NRG; PAM sequence: TGG
aaaccagaagggctgtcact

SEQ ID NO: 173757 - DNA, 20 bp, Artificial Sequence
  Description of Artificial Sequence: Synthetic oligonucleotide
  Target: LAMA2; (+) strand; PAM type: NRG; PAM sequence: TAG
gaagggctgtcacttggatg

SEQ ID NO: 173758 - DNA, 20 bp, Artificial Sequence
  Description of Artificial Sequence: Synthetic oligonucleotide
  Target: LAMA2; (+) strand; PAM type: NRG; PAM sequence: TAG
agcttttaatcactgtgccc

SEQ ID NO: 173759 - DNA, 20 bp, Artificial Sequence
  Description of Artificial Sequence: Synthetic oligonucleotide
  Target: LAMA2; (+) strand; PAM type: NRG; PAM sequence: TAG
aatcactgtgccctagtaca

SEQ ID NO: 173760 - DNA, 20 bp, Artificial Sequence
  Description of Artificial Sequence: Synthetic oligonucleotide
  Target: LAMA2; (+) strand; PAM type: NRG; PAM sequence: GAG
tcactgtgccctagtacata

SEQ ID NO: 173761 - DNA, 20 bp, Artificial Sequence
  Description of Artificial Sequence: Synthetic oligonucleotide
  Target: LAMA2; (+) strand; PAM type: NRG; PAM sequence: GAG
ctagtacatagagaatgatt

SEQ ID NO: 173762 - DNA, 20 bp, Artificial Sequence
  Description of Artificial Sequence: Synthetic oligonucleotide
  Target: LAMA2; (+) strand; PAM type: NRG; PAM sequence: AAG
acatagagaatgattgagac

SEQ ID NO: 173763 - DNA, 20 bp, Artificial Sequence
  Description of Artificial Sequence: Synthetic oligonucleotide
  Target: LAMA2; (+) strand; PAM type: NRG; PAM sequence: AGG
catagagaatgattgagaca

SEQ ID NO: 173764 - DNA, 20 bp, Artificial Sequence
  Description of Artificial Sequence: Synthetic oligonucleotide
  Target: LAMA2; (+) strand; PAM type: NRG; PAM sequence: TAG
gagaatgattgagacaagga

SEQ ID NO: 173765 - DNA, 20 bp, Artificial Sequence
  Description of Artificial Sequence: Synthetic oligonucleotide
  Target: LAMA2; (+) strand; PAM type: NRG; PAM sequence: AGG
agaatgattgagacaaggat

SEQ ID NO: 173766 - DNA, 20 bp, Artificial Sequence
  Description of Artificial Sequence: Synthetic oligonucleotide
  Target: LAMA2; (+) strand; PAM type: NRG; PAM sequence: TAG
gacaaggataggtgctattt

SEQ ID NO: 173767 - DNA, 20 bp, Artificial Sequence
  Description of Artificial Sequence: Synthetic oligonucleotide
  Target: LAMA2; (+) strand; PAM type: NRG; PAM sequence: TAG
aggataggtgctattttaga

SEQ ID NO: 173768 - DNA, 20 bp, Artificial Sequence
  Description of Artificial Sequence: Synthetic oligonucleotide
  Target: LAMA2; (+) strand; PAM type: NRG; PAM sequence: AGG
ggataggtgctattttagat

SEQ ID NO: 173769 - DNA, 20 bp, Artificial Sequence
  Description of Artificial Sequence: Synthetic oligonucleotide
  Target: LAMA2; (+) strand; PAM type: NRG; PAM sequence: CAG
tgctattttagataggtaat

SEQ ID NO: 173770 - DNA, 20 bp, Artificial Sequence
  Description of Artificial Sequence: Synthetic oligonucleotide
  Target: LAMA2; (+) strand; PAM type: NRG; PAM sequence: GAG
ctattttagataggtaatca

SEQ ID NO: 173771 - DNA, 20 bp, Artificial Sequence
  Description of Artificial Sequence: Synthetic oligonucleotide
  Target: LAMA2; (+) strand; PAM type: NRG; PAM sequence: AGG
tattttagataggtaatcag

SEQ ID NO: 173772 - DNA, 20 bp, Artificial Sequence
  Description of Artificial Sequence: Synthetic oligonucleotide
  Target: LAMA2; (+) strand; PAM type: NRG; PAM sequence: GAG
ttttagataggtaatcagag

SEQ ID NO: 173773 - DNA, 20 bp, Artificial Sequence
  Description of Artificial Sequence: Synthetic oligonucleotide
  Target: LAMA2; (+) strand; PAM type: NRG; PAM sequence: TGG
tagataggtaatcagaggag

SEQ ID NO: 173774 - DNA, 20 bp, Artificial Sequence
  Description of Artificial Sequence: Synthetic oligonucleotide
  Target: LAMA2; (+) strand; PAM type: NRG; PAM sequence: CAG
atcagaggagtggctattac

SEQ ID NO: 173775 - DNA, 20 bp, Artificial Sequence
  Description of Artificial Sequence: Synthetic oligonucleotide
  Target: LAMA2; (+) strand; PAM type: NRG; PAM sequence: TGG
aggagtggctattaccagaa

SEQ ID NO: 173776 - DNA, 20 bp, Artificial Sequence
  Description of Artificial Sequence: Synthetic oligonucleotide
  Target: LAMA2; (+) strand; PAM type: NRG; PAM sequence: GAG
gagtggctattaccagaatg

SEQ ID NO: 173777 - DNA, 20 bp, Artificial Sequence
  Description of Artificial Sequence: Synthetic oligonucleotide
  Target: LAMA2; (+) strand; PAM type: NRG; PAM sequence: AGG
agtggctattaccagaatgg

SEQ ID NO: 173778 - DNA, 20 bp, Artificial Sequence
  Description of Artificial Sequence: Synthetic oligonucleotide
  Target: LAMA2; (+) strand; PAM type: NRG; PAM sequence: GGG
gtggctattaccagaatgga

SEQ ID NO: 173779 - DNA, 20 bp, Artificial Sequence
  Description of Artificial Sequence: Synthetic oligonucleotide
  Target: LAMA2; (+) strand; PAM type: NRG; PAM sequence: GAG
ggctattaccagaatggagg

SEQ ID NO: 173780 - DNA, 20 bp, Artificial Sequence
  Description of Artificial Sequence: Synthetic oligonucleotide
  Target: LAMA2; (+) strand; PAM type: NRG; PAM sequence: AGG
gctattaccagaatggaggg

SEQ ID NO: 173781 - DNA, 20 bp, Artificial Sequence
  Description of Artificial Sequence: Synthetic oligonucleotide
  Target: LAMA2; (+) strand; PAM type: NRG; PAM sequence: AAG
ccagaatggagggaggacac

SEQ ID NO: 173782 - DNA, 20 bp, Artificial Sequence
  Description of Artificial Sequence: Synthetic oligonucleotide
  Target: LAMA2; (+) strand; PAM type: NRG; PAM sequence: AAG
tggagggaggacacaagcca

SEQ ID NO: 173783 - DNA, 20 bp, Artificial Sequence
  Description of Artificial Sequence: Synthetic oligonucleotide
  Target: LAMA2; (+) strand; PAM type: NRG; PAM sequence: GAG
gagggaggacacaagccaaa

SEQ ID NO: 173784 - DNA, 20 bp, Artificial Sequence
  Description of Artificial Sequence: Synthetic oligonucleotide
  Target: LAMA2; (+) strand; PAM type: NRG; PAM sequence: TAG
ggaggacacaagccaaagag

SEQ ID NO: 173785 - DNA, 20 bp, Artificial Sequence
  Description of Artificial Sequence: Synthetic oligonucleotide
  Target: LAMA2; (+) strand; PAM type: NRG; PAM sequence: AGG
gaggacacaagccaaagagt

SEQ ID NO: 173786 - DNA, 20 bp, Artificial Sequence
  Description of Artificial Sequence: Synthetic oligonucleotide
  Target: LAMA2; (+) strand; PAM type: NRG; PAM sequence: AAG
gacacaagccaaagagtagg

SEQ ID NO: 173787 - DNA, 20 bp, Artificial Sequence
  Description of Artificial Sequence: Synthetic oligonucleotide
  Target: LAMA2; (+) strand; PAM type: NRG; PAM sequence: GAG
cacaagccaaagagtaggaa

SEQ ID NO: 173788 - DNA, 20 bp, Artificial Sequence
  Description of Artificial Sequence: Synthetic oligonucleotide
  Target: LAMA2; (+) strand; PAM type: NRG; PAM sequence: TAG
caaagagtaggaagagcaca

SEQ ID NO: 173789 - DNA, 20 bp, Artificial Sequence
  Description of Artificial Sequence: Synthetic oligonucleotide
  Target: LAMA2; (+) strand; PAM type: NRG; PAM sequence: TGG
agagtaggaagagcacatag

SEQ ID NO: 173790 - DNA, 20 bp, Artificial Sequence
  Description of Artificial Sequence: Synthetic oligonucleotide
  Target: LAMA2; (+) strand; PAM type: NRG; PAM sequence: GGG
gagtaggaagagcacatagt

SEQ ID NO: 173791 - DNA, 20 bp, Artificial Sequence
  Description of Artificial Sequence: Synthetic oligonucleotide
  Target: LAMA2; (+) strand; PAM type: NRG; PAM sequence: AAG
cacatagtgggaatatctgc

SEQ ID NO: 173792 - DNA, 20 bp, Artificial Sequence
  Description of Artificial Sequence: Synthetic oligonucleotide
  Target: LAMA2; (+) strand; PAM type: NRG; PAM sequence: AAG
tgggaatatctgcaagtgca

SEQ ID NO: 173793 - DNA, 20 bp, Artificial Sequence
  Description of Artificial Sequence: Synthetic oligonucleotide
  Target: LAMA2; (+) strand; PAM type: NRG; PAM sequence: AGG
gggaatatctgcaagtgcaa

SEQ ID NO: 173794 - DNA, 20 bp, Artificial Sequence
  Description of Artificial Sequence: Synthetic oligonucleotide
  Target: LAMA2; (+) strand; PAM type: NRG; PAM sequence: TAG
tatctgcaagtgcaaaggct

SEQ ID NO: 173795 - DNA, 20 bp, Artificial Sequence
  Description of Artificial Sequence: Synthetic oligonucleotide
  Target: LAMA2; (+) strand; PAM type: NRG; PAM sequence: GAG
tctgcaagtgcaaaggctta

SEQ ID NO: 173796 - DNA, 20 bp, Artificial Sequence
  Description of Artificial Sequence: Synthetic oligonucleotide
  Target: LAMA2; (+) strand; PAM type: NRG; PAM sequence: AGG
ctgcaagtgcaaaggcttag

SEQ ID NO: 173797 - DNA, 20 bp, Artificial Sequence
  Description of Artificial Sequence: Synthetic oligonucleotide
  Target: LAMA2; (+) strand; PAM type: NRG; PAM sequence: CAG
caagtgcaaaggcttagagg

SEQ ID NO: 173798 - DNA, 20 bp, Artificial Sequence
  Description of Artificial Sequence: Synthetic oligonucleotide
  Target: LAMA2; (+) strand; PAM type: NRG; PAM sequence: AGG
aagtgcaaaggcttagaggc

SEQ ID NO: 173799 - DNA, 20 bp, Artificial Sequence
  Description of Artificial Sequence: Synthetic oligonucleotide
  Target: LAMA2; (+) strand; PAM type: NRG; PAM sequence: TAG
aaaggcttagaggcaggaac

SEQ ID NO: 173800 - DNA, 20 bp, Artificial Sequence
  Description of Artificial Sequence: Synthetic oligonucleotide
  Target: LAMA2; (+) strand; PAM type: NRG; PAM sequence: TGG
aggaactagttgtatgtacc

SEQ ID NO: 173801 - DNA, 20 bp, Artificial Sequence
  Description of Artificial Sequence: Synthetic oligonucleotide
  Target: LAMA2; (+) strand; PAM type: NRG; PAM sequence: TGG
tacctggcaacatactgaat

SEQ ID NO: 173802 - DNA, 20 bp, Artificial Sequence
  Description of Artificial Sequence: Synthetic oligonucleotide
  Target: LAMA2; (+) strand; PAM type: NRG; PAM sequence: CGG
tggcaacatactgaattggt

SEQ ID NO: 173803 - DNA, 20 bp, Artificial Sequence
  Description of Artificial Sequence: Synthetic oligonucleotide
  Target: LAMA2; (+) strand; PAM type: NRG; PAM sequence: AAG
acatactgaattggtcggtg

SEQ ID NO: 173804 - DNA, 20 bp, Artificial Sequence
  Description of Artificial Sequence: Synthetic oligonucleotide
  Target: LAMA2; (+) strand; PAM type: NRG; PAM sequence: AGG
catactgaattggtcggtga

SEQ ID NO: 173805 - DNA, 20 bp, Artificial Sequence
  Description of Artificial Sequence: Synthetic oligonucleotide
  Target: LAMA2; (+) strand; PAM type: NRG; PAM sequence: GGG
atactgaattggtcggtgaa

SEQ ID NO: 173806 - DNA, 20 bp, Artificial Sequence
  Description of Artificial Sequence: Synthetic oligonucleotide
  Target: LAMA2; (+) strand; PAM type: NRG; PAM sequence: AAG
ctgaattggtcggtgaaggg

SEQ ID NO: 173807 - DNA, 20 bp, Artificial Sequence
  Description of Artificial Sequence: Synthetic oligonucleotide
  Target: LAMA2; (+) strand; PAM type: NRG; PAM sequence: AGG
tgaattggtcggtgaaggga

SEQ ID NO: 173808 - DNA, 20 bp, Artificial Sequence
  Description of Artificial Sequence: Synthetic oligonucleotide
  Target: LAMA2; (+) strand; PAM type: NRG; PAM sequence: AAG
ttggtcggtgaagggaagga

SEQ ID NO: 173809 - DNA, 20 bp, Artificial Sequence
  Description of Artificial Sequence: Synthetic oligonucleotide
  Target: LAMA2; (+) strand; PAM type: NRG; PAM sequence: AAG
gtcggtgaagggaaggaaag

SEQ ID NO: 173810 - DNA, 20 bp, Artificial Sequence
  Description of Artificial Sequence: Synthetic oligonucleotide
  Target: LAMA2; (+) strand; PAM type: NRG; PAM sequence: AGG
tcggtgaagggaaggaaaga

SEQ ID NO: 173811 - DNA, 20 bp, Artificial Sequence
  Description of Artificial Sequence: Synthetic oligonucleotide
  Target: LAMA2; (+) strand; PAM type: NRG; PAM sequence: GGG
cggtgaagggaaggaaagaa

SEQ ID NO: 173812 - DNA, 20 bp, Artificial Sequence
  Description of Artificial Sequence: Synthetic oligonucleotide
  Target: LAMA2; (+) strand; PAM type: NRG; PAM sequence: TAG
aggaaagaagggtatgaaat

SEQ ID NO: 173813 - DNA, 20 bp, Artificial Sequence
  Description of Artificial Sequence: Synthetic oligonucleotide
  Target: LAMA2; (+) strand; PAM type: NRG; PAM sequence: TAG
gaagggtatgaaattagcac

SEQ ID NO: 173814 - DNA, 20 bp, Artificial Sequence
  Description of Artificial Sequence: Synthetic oligonucleotide
  Target: LAMA2; (+) strand; PAM type: NRG; PAM sequence: CAG
gtatgaaattagcactagct

SEQ ID NO: 173815 - DNA, 20 bp, Artificial Sequence
  Description of Artificial Sequence: Synthetic oligonucleotide
  Target: LAMA2; (+) strand; PAM type: NRG; PAM sequence: TAG
taaaactgtgatttctataa

SEQ ID NO: 173816 - DNA, 20 bp, Artificial Sequence
  Description of Artificial Sequence: Synthetic oligonucleotide
  Target: LAMA2; (+) strand; PAM type: NRG; PAM sequence: AAG
aactgtgatttctataatag

SEQ ID NO: 173817 - DNA, 20 bp, Artificial Sequence
  Description of Artificial Sequence: Synthetic oligonucleotide
  Target: LAMA2; (+) strand; PAM type: NRG; PAM sequence: GAG
ctgtgatttctataatagaa

SEQ ID NO: 173818 - DNA, 20 bp, Artificial Sequence
  Description of Artificial Sequence: Synthetic oligonucleotide
  Target: LAMA2; (+) strand; PAM type: NRG; PAM sequence: TAG
gatttctataatagaagaga

SEQ ID NO: 173819 - DNA, 20 bp, Artificial Sequence
  Description of Artificial Sequence: Synthetic oligonucleotide
  Target: LAMA2; (+) strand; PAM type: NRG; PAM sequence: TAG
tagaagagatagtattttcg

SEQ ID NO: 173820 - DNA, 20 bp, Artificial Sequence
  Description of Artificial Sequence: Synthetic oligonucleotide
  Target: LAMA2; (+) strand; PAM type: NRG; PAM sequence: AAG
gagatagtattttcgtagtc

SEQ ID NO: 173821 - DNA, 20 bp, Artificial Sequence
  Description of Artificial Sequence: Synthetic oligonucleotide
  Target: LAMA2; (+) strand; PAM type: NRG; PAM sequence: AGG
agatagtattttcgtagtca

SEQ ID NO: 173822 - DNA, 20 bp, Artificial Sequence
  Description of Artificial Sequence: Synthetic oligonucleotide
  Target: LAMA2; (+) strand; PAM type: NRG; PAM sequence: CAG
tattttcgtagtcaaggacc

SEQ ID NO: 173823 - DNA, 20 bp, Artificial Sequence
  Description of Artificial Sequence: Synthetic oligonucleotide
  Target: LAMA2; (+) strand; PAM type: NRG; PAM sequence: AGG
attttcgtagtcaaggaccc

SEQ ID NO: 173824 - DNA, 20 bp, Artificial Sequence
  Description of Artificial Sequence: Synthetic oligonucleotide
  Target: LAMA2; (+) strand; PAM type: NRG; PAM sequence: AAG
aggacccaggatctatcatt

SEQ ID NO: 173825 - DNA, 20 bp, Artificial Sequence
  Description of Artificial Sequence: Synthetic oligonucleotide
  Target: LAMA2; (+) strand; PAM type: NRG; PAM sequence: TAG
acccaggatctatcattaag

SEQ ID NO: 173826 - DNA, 20 bp, Artificial Sequence
  Description of Artificial Sequence: Synthetic oligonucleotide
  Target: LAMA2; (+) strand; PAM type: NRG; PAM sequence: CAG
aggatctatcattaagtaga

SEQ ID NO: 173827 - DNA, 20 bp, Artificial Sequence
  Description of Artificial Sequence: Synthetic oligonucleotide
  Target: LAMA2; (+) strand; PAM type: NRG; PAM sequence: AGG
ggatctatcattaagtagac

SEQ ID NO: 173828 - DNA, 20 bp, Artificial Sequence
  Description of Artificial Sequence: Synthetic oligonucleotide
  Target: LAMA2; (+) strand; PAM type: NRG; PAM sequence: GGG
gatctatcattaagtagaca

SEQ ID NO: 173829 - DNA, 20 bp, Artificial Sequence
  Description of Artificial Sequence: Synthetic oligonucleotide
  Target: LAMA2; (+) strand; PAM type: NRG; PAM sequence: GGG
atctatcattaagtagacag

SEQ ID NO: 173830 - DNA, 20 bp, Artificial Sequence
  Description of Artificial Sequence: Synthetic oligonucleotide
  Target: LAMA2; (+) strand; PAM type: NRG; PAM sequence: AAG
cactgtactatgtgacctta

SEQ ID NO: 173831 - DNA, 20 bp, Artificial Sequence
  Description of Artificial Sequence: Synthetic oligonucleotide
  Target: LAMA2; (+) strand; PAM type: NRG; PAM sequence: AGG
actgtactatgtgaccttaa

SEQ ID NO: 173832 - DNA, 20 bp, Artificial Sequence
  Description of Artificial Sequence: Synthetic oligonucleotide
  Target: LAMA2; (+) strand; PAM type: NRG; PAM sequence: TAG
aaaggaatcatttaatatct

SEQ ID NO: 173833 - DNA, 20 bp, Artificial Sequence
  Description of Artificial Sequence: Synthetic oligonucleotide
  Target: LAMA2; (+) strand; PAM type: NRG; PAM sequence: GAG
tttaatatcttagttcatct

SEQ ID NO: 173834 - DNA, 20 bp, Artificial Sequence
  Description of Artificial Sequence: Synthetic oligonucleotide
  Target: LAMA2; (+) strand; PAM type: NRG; PAM sequence: TAG
ttagttcatctgagctgcta

SEQ ID NO: 173835 - DNA, 20 bp, Artificial Sequence
  Description of Artificial Sequence: Synthetic oligonucleotide
  Target: LAMA2; (+) strand; PAM type: NRG; PAM sequence: AAG
ttcatctgagctgctatagc

SEQ ID NO: 173836 - DNA, 20 bp, Artificial Sequence
  Description of Artificial Sequence: Synthetic oligonucleotide
  Target: LAMA2; (+) strand; PAM type: NRG; PAM sequence: GAG
catctgagctgctatagcaa

SEQ ID NO: 173837 - DNA, 20 bp, Artificial Sequence
  Description of Artificial Sequence: Synthetic oligonucleotide
  Target: LAMA2; (+) strand; PAM type: NRG; PAM sequence: GAG
atagcaagagaccaaaaact

SEQ ID NO: 173838 - DNA, 20 bp, Artificial Sequence
  Description of Artificial Sequence: Synthetic oligonucleotide
  Target: LAMA2; (+) strand; PAM type: NRG; PAM sequence: TGG
gcaagagaccaaaaactgag

SEQ ID NO: 173839 - DNA, 20 bp, Artificial Sequence
  Description of Artificial Sequence: Synthetic oligonucleotide
  Target: LAMA2; (+) strand; PAM type: NRG; PAM sequence: TGG
caatcaaaacttatttctta

SEQ ID NO: 173840 - DNA, 20 bp, Artificial Sequence
  Description of Artificial Sequence: Synthetic oligonucleotide
  Target: LAMA2; (+) strand; PAM type: NRG; PAM sequence: TGG
aaacttatttcttatggttc

SEQ ID NO: 173841 - DNA, 20 bp, Artificial Sequence
  Description of Artificial Sequence: Synthetic oligonucleotide
  Target: LAMA2; (+) strand; PAM type: NRG; PAM sequence: GAG
acttatttcttatggttctg

SEQ ID NO: 173842 - DNA, 20 bp, Artificial Sequence
  Description of Artificial Sequence: Synthetic oligonucleotide
  Target: LAMA2; (+) strand; PAM type: NRG; PAM sequence: AGG
cttatttcttatggttctgg

SEQ ID NO: 173843 - DNA, 20 bp, Artificial Sequence
  Description of Artificial Sequence: Synthetic oligonucleotide
  Target: LAMA2; (+) strand; PAM type: NRG; PAM sequence: TGG
tttcttatggttctggaggc

SEQ ID NO: 173844 - DNA, 20 bp, Artificial Sequence
  Description of Artificial Sequence: Synthetic oligonucleotide
  Target: LAMA2; (+) strand; PAM type: NRG; PAM sequence: GGG
ttcttatggttctggaggct

SEQ ID NO: 173845 - DNA, 20 bp, Artificial Sequence
  Description of Artificial Sequence: Synthetic oligonucleotide
  Target: LAMA2; (+) strand; PAM type: NRG; PAM sequence: AAG
ggctgggaaatccatgatca

SEQ ID NO: 173846 - DNA, 20 bp, Artificial Sequence
  Description of Artificial Sequence: Synthetic oligonucleotide
  Target: LAMA2; (+) strand; PAM type: NRG; PAM sequence: TGG
gaaatccatgatcaaagtat

SEQ ID NO: 173847 - DNA, 20 bp, Artificial Sequence
  Description of Artificial Sequence: Synthetic oligonucleotide
  Target: LAMA2; (+) strand; PAM type: NRG; PAM sequence: CAG
atccatgatcaaagtattgg

SEQ ID NO: 173848 - DNA, 20 bp, Artificial Sequence
  Description of Artificial Sequence: Synthetic oligonucleotide
  Target: LAMA2; (+) strand; PAM type: NRG; PAM sequence: TGG
gatcaaagtattggcagatt

SEQ ID NO: 173849 - DNA, 20 bp, Artificial Sequence
  Description of Artificial Sequence: Synthetic oligonucleotide
  Target: LAMA2; (+) strand; PAM type: NRG; PAM sequence: GAG
tggcagatttggtgtctgat

SEQ ID NO: 173850 - DNA, 20 bp, Artificial Sequence
  Description of Artificial Sequence: Synthetic oligonucleotide
  Target: LAMA2; (+) strand; PAM type: NRG; PAM sequence: AGG
ggcagatttggtgtctgatg

SEQ ID NO: 173851 - DNA, 20 bp, Artificial Sequence
  Description of Artificial Sequence: Synthetic oligonucleotide
  Target: LAMA2; (+) strand; PAM type: NRG; PAM sequence: GGG
gcagatttggtgtctgatga

SEQ ID NO: 173852 - DNA, 20 bp, Artificial Sequence
  Description of Artificial Sequence: Synthetic oligonucleotide
  Target: LAMA2; (+) strand; PAM type: NRG; PAM sequence: TGG
tctgatgagggaccactttc

SEQ ID NO: 173853 - DNA, 20 bp, Artificial Sequence
  Description of Artificial Sequence: Synthetic oligonucleotide
  Target: LAMA2; (+) strand; PAM type: NRG; PAM sequence: TAG
agggaccactttctggttca

SEQ ID NO: 173854 - DNA, 20 bp, Artificial Sequence
  Description of Artificial Sequence: Synthetic oligonucleotide
  Target: LAMA2; (+) strand; PAM type: NRG; PAM sequence: TGG
gttttcactgtgtcctcaca

SEQ ID NO: 173855 - DNA, 20 bp, Artificial Sequence
  Description of Artificial Sequence: Synthetic oligonucleotide
  Target: LAMA2; (+) strand; PAM type: NRG; PAM sequence: AAG
actgtgtcctcacatggtaa

SEQ ID NO: 173856 - DNA, 20 bp, Artificial Sequence
  Description of Artificial Sequence: Synthetic oligonucleotide
  Target: LAMA2; (+) strand; PAM type: NRG; PAM sequence: AGG
ctgtgtcctcacatggtaaa

SEQ ID NO: 173857 - DNA, 20 bp, Artificial Sequence
  Description of Artificial Sequence: Synthetic oligonucleotide
  Target: LAMA2; (+) strand; PAM type: NRG; PAM sequence: AAG
cacatggtaaaaggatgaac

SEQ ID NO: 173858 - DNA, 20 bp, Artificial Sequence
  Description of Artificial Sequence: Synthetic oligonucleotide
  Target: LAMA2; (+) strand; PAM type: NRG; PAM sequence: CAG
aaaggatgaacaagctcctt

SEQ ID NO: 173859 - DNA, 20 bp, Artificial Sequence
  Description of Artificial Sequence: Synthetic oligonucleotide
  Target: LAMA2; (+) strand; PAM type: NRG; PAM sequence: AGG
aaggatgaacaagctccttc

SEQ ID NO: 173860 - DNA, 20 bp, Artificial Sequence
  Description of Artificial Sequence: Synthetic oligonucleotide
  Target: LAMA2; (+) strand; PAM type: NRG; PAM sequence: AAG
ctccttcaggtcttttttat

SEQ ID NO: 173861 - DNA, 20 bp, Artificial Sequence
  Description of Artificial Sequence: Synthetic oligonucleotide
  Target: LAMA2; (+) strand; PAM type: NRG; PAM sequence: AGG
tccttcaggtcttttttata

SEQ ID NO: 173862 - DNA, 20 bp, Artificial Sequence
  Description of Artificial Sequence: Synthetic oligonucleotide
  Target: LAMA2; (+) strand; PAM type: NRG; PAM sequence: GGG
ccttcaggtcttttttataa

SEQ ID NO: 173863 - DNA, 20 bp, Artificial Sequence
  Description of Artificial Sequence: Synthetic oligonucleotide
  Target: LAMA2; (+) strand; PAM type: NRG; PAM sequence: CAG
tcaggtcttttttataaggg

SEQ ID NO: 173864 - DNA, 20 bp, Artificial Sequence
  Description of Artificial Sequence: Synthetic oligonucleotide
  Target: LAMA2; (+) strand; PAM type: NRG; PAM sequence: AAG
gggcagtaatcccgtttatg

SEQ ID NO: 173865 - DNA, 20 bp, Artificial Sequence
  Description of Artificial Sequence: Synthetic oligonucleotide
  Target: LAMA2; (+) strand; PAM type: NRG; PAM sequence: TGG
gaagtctctgcttcatgacc

SEQ ID NO: 173866 - DNA, 20 bp, Artificial Sequence
  Description of Artificial Sequence: Synthetic oligonucleotide
  Target: LAMA2; (+) strand; PAM type: NRG; PAM sequence: AAG
tcatgacctggtcacctcca

SEQ ID NO: 173867 - DNA, 20 bp, Artificial Sequence
  Description of Artificial Sequence: Synthetic oligonucleotide
  Target: LAMA2; (+) strand; PAM type: NRG; PAM sequence: AGG
catgacctggtcacctccaa

SEQ ID NO: 173868 - DNA, 20 bp, Artificial Sequence
  Description of Artificial Sequence: Synthetic oligonucleotide
  Target: LAMA2; (+) strand; PAM type: NRG; PAM sequence: GAG
cttcctaatcctatcacctt

SEQ ID NO: 173869 - DNA, 20 bp, Artificial Sequence
  Description of Artificial Sequence: Synthetic oligonucleotide
  Target: LAMA2; (+) strand; PAM type: NRG; PAM sequence: AGG
ttcctaatcctatcaccttg

SEQ ID NO: 173870 - DNA, 20 bp, Artificial Sequence
  Description of Artificial Sequence: Synthetic oligonucleotide
  Target: LAMA2; (+) strand; PAM type: NRG; PAM sequence: TAG
aatcctatcaccttgaggat

SEQ ID NO: 173871 - DNA, 20 bp, Artificial Sequence
  Description of Artificial Sequence: Synthetic oligonucleotide
  Target: LAMA2; (+) strand; PAM type: NRG; PAM sequence: AGG
atcctatcaccttgaggatt

SEQ ID NO: 173872 - DNA, 20 bp, Artificial Sequence
  Description of Artificial Sequence: Synthetic oligonucleotide
  Target: LAMA2; (+) strand; PAM type: NRG; PAM sequence: CAG
gatttcaacatatgaatttt

SEQ ID NO: 173873 - DNA, 20 bp, Artificial Sequence
  Description of Artificial Sequence: Synthetic oligonucleotide
  Target: LAMA2; (+) strand; PAM type: NRG; PAM sequence: AGG
atttcaacatatgaattttc

SEQ ID NO: 173874 - DNA, 20 bp, Artificial Sequence
  Description of Artificial Sequence: Synthetic oligonucleotide
  Target: LAMA2; (+) strand; PAM type: NRG; PAM sequence: GGG
tttcaacatatgaattttca

SEQ ID NO: 173875 - DNA, 20 bp, Artificial Sequence
  Description of Artificial Sequence: Synthetic oligonucleotide
  Target: LAMA2; (+) strand; PAM type: NRG; PAM sequence: GGG
ttcaacatatgaattttcag

SEQ ID NO: 173876 - DNA, 20 bp, Artificial Sequence
  Description of Artificial Sequence: Synthetic oligonucleotide
  Target: LAMA2; (+) strand; PAM type: NRG; PAM sequence: CAG
atatgaattttcaggggaca

SEQ ID NO: 173877 - DNA, 20 bp, Artificial Sequence
  Description of Artificial Sequence: Synthetic oligonucleotide
  Target: LAMA2; (+) strand; PAM type: NRG; PAM sequence: CAG
tttcaggggacacagacatt

SEQ ID NO: 173878 - DNA, 20 bp, Artificial Sequence
  Description of Artificial Sequence: Synthetic oligonucleotide
  Target: LAMA2; (+) strand; PAM type: NRG; PAM sequence: AGG
ttcaggggacacagacattc

SEQ ID NO: 173879 - DNA, 20 bp, Artificial Sequence
  Description of Artificial Sequence: Synthetic oligonucleotide
  Target: LAMA2; (+) strand; PAM type: NRG; PAM sequence: AAG
caatttcccacttatgtaaa

SEQ ID NO: 173880 - DNA, 20 bp, Artificial Sequence
  Description of Artificial Sequence: Synthetic oligonucleotide
  Target: LAMA2; (+) strand; PAM type: NRG; PAM sequence: TGG
tatgtaaaaagtgatcaaca

SEQ ID NO: 173881 - DNA, 20 bp, Artificial Sequence
  Description of Artificial Sequence: Synthetic oligonucleotide
  Target: LAMA2; (+) strand; PAM type: NRG; PAM sequence: GGG
atgtaaaaagtgatcaacat

SEQ ID NO: 173882 - DNA, 20 bp, Artificial Sequence
  Description of Artificial Sequence: Synthetic oligonucleotide
  Target: LAMA2; (+) strand; PAM type: NRG; PAM sequence: AAG
agtgatcaacatgggatcca

SEQ ID NO: 173883 - DNA, 20 bp, Artificial Sequence
  Description of Artificial Sequence: Synthetic oligonucleotide
  Target: LAMA2; (+) strand; PAM type: NRG; PAM sequence: TGG
tcaacatgggatccaaagat

SEQ ID NO: 173884 - DNA, 20 bp, Artificial Sequence
  Description of Artificial Sequence: Synthetic oligonucleotide
  Target: LAMA2; (+) strand; PAM type: NRG; PAM sequence: TGG
caaaatgcttacaaactgtc

SEQ ID NO: 173885 - DNA, 20 bp, Artificial Sequence
  Description of Artificial Sequence: Synthetic oligonucleotide
  Target: LAMA2; (+) strand; PAM type: NRG; PAM sequence: GAG
caaactgtctggcacatatt

SEQ ID NO: 173886 - DNA, 20 bp, Artificial Sequence
  Description of Artificial Sequence: Synthetic oligonucleotide
  Target: LAMA2; (+) strand; PAM type: NRG; PAM sequence: TAG
atattgagatctaaatgaat

SEQ ID NO: 173887 - DNA, 20 bp, Artificial Sequence
  Description of Artificial Sequence: Synthetic oligonucleotide
  Target: LAMA2; (+) strand; PAM type: NRG; PAM sequence: TAG
tgaattagcattattgtcta

SEQ ID NO: 173888 - DNA, 20 bp, Artificial Sequence
  Description of Artificial Sequence: Synthetic oligonucleotide
  Target: LAMA2; (+) strand; PAM type: NRG; PAM sequence: AAG
tgtctatagaaaaaaactat

SEQ ID NO: 173889 - DNA, 20 bp, Artificial Sequence
  Description of Artificial Sequence: Synthetic oligonucleotide
  Target: LAMA2; (+) strand; PAM type: NRG; PAM sequence: TGG
ctatagaaaaaaactataag

SEQ ID NO: 173890 - DNA, 20 bp, Artificial Sequence
  Description of Artificial Sequence: Synthetic oligonucleotide
  Target: LAMA2; (+) strand; PAM type: NRG; PAM sequence: AAG
aaaaaaactataagtggtca

SEQ ID NO: 173891 - DNA, 20 bp, Artificial Sequence
  Description of Artificial Sequence: Synthetic oligonucleotide
  Target: LAMA2; (+) strand; PAM type: NRG; PAM sequence: CAG
gcttaaaattataattgatg

SEQ ID NO: 173892 - DNA, 20 bp, Artificial Sequence
  Description of Artificial Sequence: Synthetic oligonucleotide
  Target: LAMA2; (+) strand; PAM type: NRG; PAM sequence: TAG
aattgatgcagttaaatctg

SEQ ID NO: 173893 - DNA, 20 bp, Artificial Sequence
  Description of Artificial Sequence: Synthetic oligonucleotide
  Target: LAMA2; (+) strand; PAM type: NRG; PAM sequence: AGG
attgatgcagttaaatctgt

SEQ ID NO: 173894 - DNA, 20 bp, Artificial Sequence
  Description of Artificial Sequence: Synthetic oligonucleotide
  Target: LAMA2; (+) strand; PAM type: NRG; PAM sequence: TAG
gatgcagttaaatctgtagg

SEQ ID NO: 173895 - DNA, 20 bp, Artificial Sequence
  Description of Artificial Sequence: Synthetic oligonucleotide
  Target: LAMA2; (+) strand; PAM type: NRG; PAM sequence: TGG
agttaaatctgtaggtagaa

SEQ ID NO: 173896 - DNA, 20 bp, Artificial Sequence
  Description of Artificial Sequence: Synthetic oligonucleotide
  Target: LAMA2; (+) strand; PAM type: NRG; PAM sequence: CAG
tgtaggtagaatggtgattt

SEQ ID NO: 173897 - DNA, 20 bp, Artificial Sequence
  Description of Artificial Sequence: Synthetic oligonucleotide
  Target: LAMA2; (+) strand; PAM type: NRG; PAM sequence: AGG
gtaggtagaatggtgatttc

SEQ ID NO: 173898 - DNA, 20 bp, Artificial Sequence
  Description of Artificial Sequence: Synthetic oligonucleotide
  Target: LAMA2; (+) strand; PAM type: NRG; PAM sequence: TAG
tagaatggtgatttcaggaa

SEQ ID NO: 173899 - DNA, 20 bp, Artificial Sequence
  Description of Artificial Sequence: Synthetic oligonucleotide
  Target: LAMA2; (+) strand; PAM type: NRG; PAM sequence: AGG
agaatggtgatttcaggaat

SEQ ID NO: 173900 - DNA, 20 bp, Artificial Sequence
  Description of Artificial Sequence: Synthetic oligonucleotide
  Target: LAMA2; (+) strand; PAM type: NRG; PAM sequence: CAG
tttcaggaataggaatgaat

SEQ ID NO: 173901 - DNA, 20 bp, Artificial Sequence
  Description of Artificial Sequence: Synthetic oligonucleotide
  Target: LAMA2; (+) strand; PAM type: NRG; PAM sequence: AAG
caggaataggaatgaatcag

SEQ ID NO: 173902 - DNA, 20 bp, Artificial Sequence
  Description of Artificial Sequence: Synthetic oligonucleotide
  Target: LAMA2; (+) strand; PAM type: NRG; PAM sequence: AAG
aggaatgaatcagaagtata

SEQ ID NO: 173903 - DNA, 20 bp, Artificial Sequence
  Description of Artificial Sequence: Synthetic oligonucleotide
  Target: LAMA2; (+) strand; PAM type: NRG; PAM sequence: AAG
agaagtataaagaataaaat

SEQ ID NO: 173904 - DNA, 20 bp, Artificial Sequence
  Description of Artificial Sequence: Synthetic oligonucleotide
  Target: LAMA2; (+) strand; PAM type: NRG; PAM sequence: TAG
agaataaaataagtaaaaaa

SEQ ID NO: 173905 - DNA, 20 bp, Artificial Sequence
  Description of Artificial Sequence: Synthetic oligonucleotide
  Target: LAMA2; (+) strand; PAM type: NRG; PAM sequence: TGG
agtaaaaaatagaccccaaa

SEQ ID NO: 173906 - DNA, 20 bp, Artificial Sequence
  Description of Artificial Sequence: Synthetic oligonucleotide
  Target: LAMA2; (+) strand; PAM type: NRG; PAM sequence: GAG
taaaaaatagaccccaaatg

SEQ ID NO: 173907 - DNA, 20 bp, Artificial Sequence
  Description of Artificial Sequence: Synthetic oligonucleotide
  Target: LAMA2; (+) strand; PAM type: NRG; PAM sequence: TAG
atagaccccaaatggagaaa

SEQ ID NO: 173908 - DNA, 20 bp, Artificial Sequence
  Description of Artificial Sequence: Synthetic oligonucleotide
  Target: LAMA2; (+) strand; PAM type: NRG; PAM sequence: TAG
tctcactgattttactcttc

SEQ ID NO: 173909 - DNA, 20 bp, Artificial Sequence
  Description of Artificial Sequence: Synthetic oligonucleotide
  Target: LAMA2; (+) strand; PAM type: NRG; PAM sequence: AGG
ctcactgattttactcttct

SEQ ID NO: 173910 - DNA, 20 bp, Artificial Sequence
  Description of Artificial Sequence: Synthetic oligonucleotide
  Target: LAMA2; (+) strand; PAM type: NRG; PAM sequence: CAG
ctgattttactcttctaggc

SEQ ID NO: 173911 - DNA, 20 bp, Artificial Sequence
  Description of Artificial Sequence: Synthetic oligonucleotide
  Target: LAMA2; (+) strand; PAM type: NRG; PAM sequence: AGG
tgattttactcttctaggcc

SEQ ID NO: 173912 - DNA, 20 bp, Artificial Sequence
  Description of Artificial Sequence: Synthetic oligonucleotide
  Target: LAMA2; (+) strand; PAM type: NRG; PAM sequence: GAG
tactcttctaggccaggatt

SEQ ID NO: 173913 - DNA, 20 bp, Artificial Sequence
  Description of Artificial Sequence: Synthetic oligonucleotide
  Target: LAMA2; (+) strand; PAM type: NRG; PAM sequence: GAG
attgagtttcatgtactttt

SEQ ID NO: 173914 - DNA, 20 bp, Artificial Sequence
  Description of Artificial Sequence: Synthetic oligonucleotide
  Target: LAMA2; (+) strand; PAM type: NRG; PAM sequence: AAG
gtttcatgtacttttgagac

SEQ ID NO: 173915 - DNA, 20 bp, Artificial Sequence
  Description of Artificial Sequence: Synthetic oligonucleotide
  Target: LAMA2; (+) strand; PAM type: NRG; PAM sequence: AAG
gagacaagctatatgttcca

SEQ ID NO: 173916 - DNA, 20 bp, Artificial Sequence
  Description of Artificial Sequence: Synthetic oligonucleotide
  Target: LAMA2; (+) strand; PAM type: NRG; PAM sequence: CAG
taatctattctctcatgaaa

SEQ ID NO: 173917 - DNA, 20 bp, Artificial Sequence
  Description of Artificial Sequence: Synthetic oligonucleotide
  Target: LAMA2; (+) strand; PAM type: NRG; PAM sequence: TAG
tctctcatgaaacagtccat

SEQ ID NO: 173918 - DNA, 20 bp, Artificial Sequence
  Description of Artificial Sequence: Synthetic oligonucleotide
  Target: LAMA2; (+) strand; PAM type: NRG; PAM sequence: AGG
ctctcatgaaacagtccatt

SEQ ID NO: 173919 - DNA, 20 bp, Artificial Sequence
  Description of Artificial Sequence: Synthetic oligonucleotide
  Target: LAMA2; (+) strand; PAM type: NRG; PAM sequence: TGG
aggttgattcttccatgtga

SEQ ID NO: 173920 - DNA, 20 bp, Artificial Sequence
  Description of Artificial Sequence: Synthetic oligonucleotide
  Target: LAMA2; (+) strand; PAM type: NRG; PAM sequence: AAG
tggtttctctatttcttaaa

SEQ ID NO: 173921 - DNA, 20 bp, Artificial Sequence
  Description of Artificial Sequence: Synthetic oligonucleotide
  Target: LAMA2; (+) strand; PAM type: NRG; PAM sequence: AAG
tcttaaaaagtattttccct

SEQ ID NO: 173922 - DNA, 20 bp, Artificial Sequence
  Description of Artificial Sequence: Synthetic oligonucleotide
  Target: LAMA2; (+) strand; PAM type: NRG; PAM sequence: CAG
aaatctcacttcaaatttca

SEQ ID NO: 173923 - DNA, 20 bp, Artificial Sequence
  Description of Artificial Sequence: Synthetic oligonucleotide
  Target: LAMA2; (+) strand; PAM type: NRG; PAM sequence: AAG
tgcttatgtttatgctcaca

SEQ ID NO: 173924 - DNA, 20 bp, Artificial Sequence
  Description of Artificial Sequence: Synthetic oligonucleotide
  Target: LAMA2; (+) strand; PAM type: NRG; PAM sequence: TAG
acaaagtactcatttgtata

SEQ ID NO: 173925 - DNA, 20 bp, Artificial Sequence
  Description of Artificial Sequence: Synthetic oligonucleotide
  Target: LAMA2; (+) strand; PAM type: NRG; PAM sequence: TAG
actcatttgtatatagattc

SEQ ID NO: 173926 - DNA, 20 bp, Artificial Sequence
  Description of Artificial Sequence: Synthetic oligonucleotide
  Target: LAMA2; (+) strand; PAM type: NRG; PAM sequence: TAG
agattctagaattcaatatg

SEQ ID NO: 173927 - DNA, 20 bp, Artificial Sequence
  Description of Artificial Sequence: Synthetic oligonucleotide
  Target: LAMA2; (+) strand; PAM type: NRG; PAM sequence: CAG
gtagtaccaatataactatt

SEQ ID NO: 173928 - DNA, 20 bp, Artificial Sequence
  Description of Artificial Sequence: Synthetic oligonucleotide
  Target: LAMA2; (+) strand; PAM type: NRG; PAM sequence: TAG
actattcagcacttatattt

SEQ ID NO: 173929 - DNA, 20 bp, Artificial Sequence
  Description of Artificial Sequence: Synthetic oligonucleotide
  Target: LAMA2; (+) strand; PAM type: NRG; PAM sequence: TAG
ttcagcacttatattttagt

SEQ ID NO: 173930 - DNA, 20 bp, Artificial Sequence
  Description of Artificial Sequence: Synthetic oligonucleotide
  Target: LAMA2; (+) strand; PAM type: NRG; PAM sequence: TGG
acttatattttagttagaaa

SEQ ID NO: 173931 - DNA, 20 bp, Artificial Sequence
  Description of Artificial Sequence: Synthetic oligonucleotide
  Target: LAMA2; (+) strand; PAM type: NRG; PAM sequence: AAG
gatgctccatctttctttaa

SEQ ID NO: 173932 - DNA, 20 bp, Artificial Sequence
  Description of Artificial Sequence: Synthetic oligonucleotide
  Target: LAMA2; (+) strand; PAM type: NRG; PAM sequence: TAG
gctccatctttctttaaaag

SEQ ID NO: 173933 - DNA, 20 bp, Artificial Sequence
  Description of Artificial Sequence: Synthetic oligonucleotide
  Target: LAMA2; (+) strand; PAM type: NRG; PAM sequence: TAG
agtagttttaattccttaac

SEQ ID NO: 173934 - DNA, 20 bp, Artificial Sequence
  Description of Artificial Sequence: Synthetic oligonucleotide
  Target: LAMA2; (+) strand; PAM type: NRG; PAM sequence: TGG
tcgcataacttttcttcgct

SEQ ID NO: 173935 - DNA, 20 bp, Artificial Sequence
  Description of Artificial Sequence: Synthetic oligonucleotide
  Target: LAMA2; (+) strand; PAM type: NRG; PAM sequence: GAG
ttggatgactttctcacaat

SEQ ID NO: 173936 - DNA, 20 bp, Artificial Sequence
  Description of Artificial Sequence: Synthetic oligonucleotide
  Target: LAMA2; (+) strand; PAM type: NRG; PAM sequence: AAG
gatgactttctcacaatgag

SEQ ID NO: 173937 - DNA, 20 bp, Artificial Sequence
  Description of Artificial Sequence: Synthetic oligonucleotide
  Target: LAMA2; (+) strand; PAM type: NRG; PAM sequence: AAG
gactttctcacaatgagaag

SEQ ID NO: 173938 - DNA, 20 bp, Artificial Sequence
  Description of Artificial Sequence: Synthetic oligonucleotide
  Target: LAMA2; (+) strand; PAM type: NRG; PAM sequence: AAG
gaagaagaaataacctgtac

SEQ ID NO: 173939 - DNA, 20 bp, Artificial Sequence
  Description of Artificial Sequence: Synthetic oligonucleotide
  Target: LAMA2; (+) strand; PAM type: NRG; PAM sequence: TAG
aacctgtacaagcctctaca

SEQ ID NO: 173940 - DNA, 20 bp, Artificial Sequence
  Description of Artificial Sequence: Synthetic oligonucleotide
  Target: LAMA2; (+) strand; PAM type: NRG; PAM sequence: AAG
ctgtacaagcctctacatag

SEQ ID NO: 173941 - DNA, 20 bp, Artificial Sequence
  Description of Artificial Sequence: Synthetic oligonucleotide
  Target: LAMA2; (+) strand; PAM type: NRG; PAM sequence: AAG
tctacatagaagaactcttc

SEQ ID NO: 173942 - DNA, 20 bp, Artificial Sequence
  Description of Artificial Sequence: Synthetic oligonucleotide
  Target: LAMA2; (+) strand; PAM type: NRG; PAM sequence: AGG
ctacatagaagaactcttca

SEQ ID NO: 173943 - DNA, 20 bp, Artificial Sequence
  Description of Artificial Sequence: Synthetic oligonucleotide
  Target: LAMA2; (+) strand; PAM type: NRG; PAM sequence: TGG
tagaagaactcttcaaggac

SEQ ID NO: 173944 - DNA, 20 bp, Artificial Sequence
  Description of Artificial Sequence: Synthetic oligonucleotide
  Target: LAMA2; (+) strand; PAM type: NRG; PAM sequence: AAG
gaactcttcaaggactggct

SEQ ID NO: 173945 - DNA, 20 bp, Artificial Sequence
  Description of Artificial Sequence: Synthetic oligonucleotide
  Target: LAMA2; (+) strand; PAM type: NRG; PAM sequence: TAG
ctcttcaaggactggctaag

SEQ ID NO: 173946 - DNA, 20 bp, Artificial Sequence
  Description of Artificial Sequence: Synthetic oligonucleotide
  Target: LAMA2; (+) strand; PAM type: NRG; PAM sequence: TAG
tagtttatatttttctcatc

SEQ ID NO: 173947 - DNA, 20 bp, Artificial Sequence
  Description of Artificial Sequence: Synthetic oligonucleotide
  Target: LAMA2; (+) strand; PAM type: NRG; PAM sequence: AAG
catgatgtaccttttttgct

SEQ ID NO: 173948 - DNA, 20 bp, Artificial Sequence
  Description of Artificial Sequence: Synthetic oligonucleotide
  Target: LAMA2; (+) strand; PAM type: NRG; PAM sequence: CAG
ttgctaagcttttattcaaa

SEQ ID NO: 173949 - DNA, 20 bp, Artificial Sequence
  Description of Artificial Sequence: Synthetic oligonucleotide
  Target: LAMA2; (+) strand; PAM type: NRG; PAM sequence: CAG
aagcttttattcaaacagct

SEQ ID NO: 173950 - DNA, 20 bp, Artificial Sequence
  Description of Artificial Sequence: Synthetic oligonucleotide
  Target: LAMA2; (+) strand; PAM type: NRG; PAM sequence: AGG
agcttttattcaaacagctc

SEQ ID NO: 173951 - DNA, 20 bp, Artificial Sequence
  Description of Artificial Sequence: Synthetic oligonucleotide
  Target: LAMA2; (+) strand; PAM type: NRG; PAM sequence: AAG
tttattcaaacagctcagga

SEQ ID NO: 173952 - DNA, 20 bp, Artificial Sequence
  Description of Artificial Sequence: Synthetic oligonucleotide
  Target: LAMA2; (+) strand; PAM type: NRG; PAM sequence: CAG
ttcaaacagctcaggaaagt

SEQ ID NO: 173953 - DNA, 20 bp, Artificial Sequence
  Description of Artificial Sequence: Synthetic oligonucleotide
  Target: LAMA2; (+) strand; PAM type: NRG; PAM sequence: AGG
tcaaacagctcaggaaagtc

SEQ ID NO: 173954 - DNA, 20 bp, Artificial Sequence
  Description of Artificial Sequence: Synthetic oligonucleotide
  Target: LAMA2; (+) strand; PAM type: NRG; PAM sequence: AAG
ctcaggaaagtcaggaatac

SEQ ID NO: 173955 - DNA, 20 bp, Artificial Sequence
  Description of Artificial Sequence: Synthetic oligonucleotide
  Target: LAMA2; (+) strand; PAM type: NRG; PAM sequence: AGG
tcaggaaagtcaggaataca

SEQ ID NO: 173956 - DNA, 20 bp, Artificial Sequence
  Description of Artificial Sequence: Synthetic oligonucleotide
  Target: LAMA2; (+) strand; PAM type: NRG; PAM sequence: GGG
caggaaagtcaggaatacaa

SEQ ID NO: 173957 - DNA, 20 bp, Artificial Sequence
  Description of Artificial Sequence: Synthetic oligonucleotide
  Target: LAMA2; (+) strand; PAM type: NRG; PAM sequence: GGG
aggaaagtcaggaatacaag

SEQ ID NO: 173958 - DNA, 20 bp, Artificial Sequence
  Description of Artificial Sequence: Synthetic oligonucleotide
  Target: LAMA2; (+) strand; PAM type: NRG; PAM sequence: TAG
aaagtcaggaatacaagggg

SEQ ID NO: 173959 - DNA, 20 bp, Artificial Sequence
  Description of Artificial Sequence: Synthetic oligonucleotide
  Target: LAMA2; (+) strand; PAM type: NRG; PAM sequence: AGG
aagtcaggaatacaaggggt

SEQ ID NO: 173960 - DNA, 20 bp, Artificial Sequence
  Description of Artificial Sequence: Synthetic oligonucleotide
  Target: LAMA2; (+) strand; PAM type: NRG; PAM sequence: TGG
ttttgatgtcttgttcataa

SEQ ID NO: 173961 - DNA, 20 bp, Artificial Sequence
  Description of Artificial Sequence: Synthetic oligonucleotide
  Target: LAMA2; (+) strand; PAM type: NRG; PAM sequence: CAG
gtcttgttcataatggtcta

SEQ ID NO: 173962 - DNA, 20 bp, Artificial Sequence
  Description of Artificial Sequence: Synthetic oligonucleotide
  Target: LAMA2; (+) strand; PAM type: NRG; PAM sequence: AAG
ttcataatggtctacagaaa

SEQ ID NO: 173963 - DNA, 20 bp, Artificial Sequence
  Description of Artificial Sequence: Synthetic oligonucleotide
  Target: LAMA2; (+) strand; PAM type: NRG; PAM sequence: AAG
ataatggtctacagaaaaag

SEQ ID NO: 173964 - DNA, 20 bp, Artificial Sequence
  Description of Artificial Sequence: Synthetic oligonucleotide
  Target: LAMA2; (+) strand; PAM type: NRG; PAM sequence: AGG
taatggtctacagaaaaaga

SEQ ID NO: 173965 - DNA, 20 bp, Artificial Sequence
  Description of Artificial Sequence: Synthetic oligonucleotide
  Target: LAMA2; (+) strand; PAM type: NRG; PAM sequence: GAG
atggtctacagaaaaagaag

SEQ ID NO: 173966 - DNA, 20 bp, Artificial Sequence
  Description of Artificial Sequence: Synthetic oligonucleotide
  Target: LAMA2; (+) strand; PAM type: NRG; PAM sequence: AGG
tggtctacagaaaaagaagg

SEQ ID NO: 173967 - DNA, 20 bp, Artificial Sequence
  Description of Artificial Sequence: Synthetic oligonucleotide
  Target: LAMA2; (+) strand; PAM type: NRG; PAM sequence: AAG
aaaaagaaggaggctgttga

SEQ ID NO: 173968 - DNA, 20 bp, Artificial Sequence
  Description of Artificial Sequence: Synthetic oligonucleotide
  Target: LAMA2; (+) strand; PAM type: NRG; PAM sequence: CGG
aagaaggaggctgttgaaag

SEQ ID NO: 173969 - DNA, 20 bp, Artificial Sequence
  Description of Artificial Sequence: Synthetic oligonucleotide
  Target: LAMA2; (+) strand; PAM type: NRG; PAM sequence: GAG
aaagcggcaaacgacaaatt

SEQ ID NO: 173970 - DNA, 20 bp, Artificial Sequence
  Description of Artificial Sequence: Synthetic oligonucleotide
  Target: LAMA2; (+) strand; PAM type: NRG; PAM sequence: AAG
acaaattgagaacactttaa

SEQ ID NO: 173971 - DNA, 20 bp, Artificial Sequence
  Description of Artificial Sequence: Synthetic oligonucleotide
  Target: LAMA2; (+) strand; PAM type: NRG; PAM sequence: GAG
aaattgagaacactttaaaa

SEQ ID NO: 173972 - DNA, 20 bp, Artificial Sequence
  Description of Artificial Sequence: Synthetic oligonucleotide
  Target: LAMA2; (+) strand; PAM type: NRG; PAM sequence: AGG
aattgagaacactttaaaag

SEQ ID NO: 173973 - DNA, 20 bp, Artificial Sequence
  Description of Artificial Sequence: Synthetic oligonucleotide
  Target: LAMA2; (+) strand; PAM type: NRG; PAM sequence: GGG
attgagaacactttaaaaga

SEQ ID NO: 173974 - DNA, 20 bp, Artificial Sequence
  Description of Artificial Sequence: Synthetic oligonucleotide
  Target: LAMA2; (+) strand; PAM type: NRG; PAM sequence: AAG
gggcaatgacatactcgatg

SEQ ID NO: 173975 - DNA, 20 bp, Artificial Sequence
  Description of Artificial Sequence: Synthetic oligonucleotide
  Target: LAMA2; (+) strand; PAM type: NRG; PAM sequence: CAG
cgatgaagccaaccgtcttg

SEQ ID NO: 173976 - DNA, 20 bp, Artificial Sequence
  Description of Artificial Sequence: Synthetic oligonucleotide
  Target: LAMA2; (+) strand; PAM type: NRG; PAM sequence: TAG
agatgaaatcaactccatca

SEQ ID NO: 173977 - DNA, 20 bp, Artificial Sequence
  Description of Artificial Sequence: Synthetic oligonucleotide
  Target: LAMA2; (+) strand; PAM type: NRG; PAM sequence: GAG
atcaactccatcatagacgt

SEQ ID NO: 173978 - DNA, 20 bp, Artificial Sequence
  Description of Artificial Sequence: Synthetic oligonucleotide
  Target: LAMA2; (+) strand; PAM type: NRG; PAM sequence: TGG
tccatcatagacgtgagtat

SEQ ID NO: 173979 - DNA, 20 bp, Artificial Sequence
  Description of Artificial Sequence: Synthetic oligonucleotide
  Target: LAMA2; (+) strand; PAM type: NRG; PAM sequence: GGG
ccatcatagacgtgagtatt

SEQ ID NO: 173980 - DNA, 20 bp, Artificial Sequence
  Description of Artificial Sequence: Synthetic oligonucleotide
  Target: LAMA2; (+) strand; PAM type: NRG; PAM sequence: AAG
gagtattgggtaaaactcaa

SEQ ID NO: 173981 - DNA, 20 bp, Artificial Sequence
  Description of Artificial Sequence: Synthetic oligonucleotide
  Target: LAMA2; (+) strand; PAM type: NRG; PAM sequence: GAG
gtattgggtaaaactcaaaa

SEQ ID NO: 173982 - DNA, 20 bp, Artificial Sequence
  Description of Artificial Sequence: Synthetic oligonucleotide
  Target: LAMA2; (+) strand; PAM type: NRG; PAM sequence: GAG
attgggtaaaactcaaaaga

SEQ ID NO: 173983 - DNA, 20 bp, Artificial Sequence
  Description of Artificial Sequence: Synthetic oligonucleotide
  Target: LAMA2; (+) strand; PAM type: NRG; PAM sequence: TGG
gagagatgataatgaataaa

SEQ ID NO: 173984 - DNA, 20 bp, Artificial Sequence
  Description of Artificial Sequence: Synthetic oligonucleotide
  Target: LAMA2; (+) strand; PAM type: NRG; PAM sequence: GGG
agagatgataatgaataaat

SEQ ID NO: 173985 - DNA, 20 bp, Artificial Sequence
  Description of Artificial Sequence: Synthetic oligonucleotide
  Target: LAMA2; (+) strand; PAM type: NRG; PAM sequence: GAG
agatgataatgaataaatgg

SEQ ID NO: 173986 - DNA, 20 bp, Artificial Sequence
  Description of Artificial Sequence: Synthetic oligonucleotide
  Target: LAMA2; (+) strand; PAM type: NRG; PAM sequence: GAG
atgaataaatgggagccgat

SEQ ID NO: 173987 - DNA, 20 bp, Artificial Sequence
  Description of Artificial Sequence: Synthetic oligonucleotide
  Target: LAMA2; (+) strand; PAM type: NRG; PAM sequence: AAG
ataaatgggagccgatgaga

SEQ ID NO: 173988 - DNA, 20 bp, Artificial Sequence
  Description of Artificial Sequence: Synthetic oligonucleotide
  Target: LAMA2; (+) strand; PAM type: NRG; PAM sequence: CAG
tgggagccgatgagaaagct

SEQ ID NO: 173989 - DNA, 20 bp, Artificial Sequence
  Description of Artificial Sequence: Synthetic oligonucleotide
  Target: LAMA2; (+) strand; PAM type: NRG; PAM sequence: TAG
ccgatgagaaagctcagtaa

SEQ ID NO: 173990 - DNA, 20 bp, Artificial Sequence
  Description of Artificial Sequence: Synthetic oligonucleotide
  Target: LAMA2; (+) strand; PAM type: NRG; PAM sequence: AAG
atgagaaagctcagtaatag

SEQ ID NO: 173991 - DNA, 20 bp, Artificial Sequence
  Description of Artificial Sequence: Synthetic oligonucleotide
  Target: LAMA2; (+) strand; PAM type: NRG; PAM sequence: TAG
tcagtaatagaagcaaatac

SEQ ID NO: 173992 - DNA, 20 bp, Artificial Sequence
  Description of Artificial Sequence: Synthetic oligonucleotide
  Target: LAMA2; (+) strand; PAM type: NRG; PAM sequence: TGG
tactagtacttgttttcttg

SEQ ID NO: 173993 - DNA, 20 bp, Artificial Sequence
  Description of Artificial Sequence: Synthetic oligonucleotide
  Target: LAMA2; (+) strand; PAM type: NRG; PAM sequence: GAG
ctagtacttgttttcttgtg

SEQ ID NO: 173994 - DNA, 20 bp, Artificial Sequence
  Description of Artificial Sequence: Synthetic oligonucleotide
  Target: LAMA2; (+) strand; PAM type: NRG; PAM sequence: TGG
ctgtgaccatgcctatctat

SEQ ID NO: 173995 - DNA, 20 bp, Artificial Sequence
  Description of Artificial Sequence: Synthetic oligonucleotide
  Target: LAMA2; (+) strand; PAM type: NRG; PAM sequence: TGG
gcctatctattggtgacaac

SEQ ID NO: 173996 - DNA, 20 bp, Artificial Sequence
  Description of Artificial Sequence: Synthetic oligonucleotide
  Target: LAMA2; (+) strand; PAM type: NRG; PAM sequence: TGG
atatcactttgttctcccaa

SEQ ID NO: 173997 - DNA, 20 bp, Artificial Sequence
  Description of Artificial Sequence: Synthetic oligonucleotide
  Target: LAMA2; (+) strand; PAM type: NRG; PAM sequence: GAG
tttgttctcccaatggacat

SEQ ID NO: 173998 - DNA, 20 bp, Artificial Sequence
  Description of Artificial Sequence: Synthetic oligonucleotide
  Target: LAMA2; (+) strand; PAM type: NRG; PAM sequence: AAG
atggacatgagtgtttgtgt

SEQ ID NO: 173999 - DNA, 20 bp, Artificial Sequence
  Description of Artificial Sequence: Synthetic oligonucleotide
  Target: LAMA2; (+) strand; PAM type: NRG; PAM sequence: CAG
cacatatctgtttttgtcca

SEQ ID NO: 174000 - DNA, 20 bp, Artificial Sequence
  Description of Artificial Sequence: Synthetic oligonucleotide
  Target: LAMA2; (+) strand; PAM type: NRG; PAM sequence: AAG
tgtttttgtccacagcgatg

SEQ ID NO: 174001 - DNA, 20 bp, Artificial Sequence
  Description of Artificial Sequence: Synthetic oligonucleotide
  Target: LAMA2; (+) strand; PAM type: NRG; PAM sequence: AGG
gtttttgtccacagcgatga

SEQ ID NO: 174002 - DNA, 20 bp, Artificial Sequence
  Description of Artificial Sequence: Synthetic oligonucleotide
  Target: LAMA2; (+) strand; PAM type: NRG; PAM sequence: TAG
tgaaggacatttcttgttcc

SEQ ID NO: 174003 - DNA, 20 bp, Artificial Sequence
  Description of Artificial Sequence: Synthetic oligonucleotide
  Target: LAMA2; (+) strand; PAM type: NRG; PAM sequence: GAG
aaggacatttcttgttccta

SEQ ID NO: 174004 - DNA, 20 bp, Artificial Sequence
  Description of Artificial Sequence: Synthetic oligonucleotide
  Target: LAMA2; (+) strand; PAM type: NRG; PAM sequence: CAG
gacatttcttgttcctagag

SEQ ID NO: 174005 - DNA, 20 bp, Artificial Sequence
  Description of Artificial Sequence: Synthetic oligonucleotide
  Target: LAMA2; (+) strand; PAM type: NRG; PAM sequence: TAG
cttcaatatttatataacat

SEQ ID NO: 174006 - DNA, 20 bp, Artificial Sequence
  Description of Artificial Sequence: Synthetic oligonucleotide
  Target: LAMA2; (+) strand; PAM type: NRG; PAM sequence: AAG
atttatataacattagttaa

SEQ ID NO: 174007 - DNA, 20 bp, Artificial Sequence
  Description of Artificial Sequence: Synthetic oligonucleotide
  Target: LAMA2; (+) strand; PAM type: NRG; PAM sequence: CAG
gacaaatgtaaatttacaaa

SEQ ID NO: 174008 - DNA, 20 bp, Artificial Sequence
  Description of Artificial Sequence: Synthetic oligonucleotide
  Target: LAMA2; (+) strand; PAM type: NRG; PAM sequence: AGG
acaaatgtaaatttacaaac

SEQ ID NO: 174009 - DNA, 20 bp, Artificial Sequence
  Description of Artificial Sequence: Synthetic oligonucleotide
  Target: LAMA2; (+) strand; PAM type: NRG; PAM sequence: TAG
gtaatgtctaatgcattaca

SEQ ID NO: 174010 - DNA, 20 bp, Artificial Sequence
  Description of Artificial Sequence: Synthetic oligonucleotide
  Target: LAMA2; (+) strand; PAM type: NRG; PAM sequence: GAG
aatgtctaatgcattacata

SEQ ID NO: 174011 - DNA, 20 bp, Artificial Sequence
  Description of Artificial Sequence: Synthetic oligonucleotide
  Target: LAMA2; (+) strand; PAM type: NRG; PAM sequence: TGG
gcattacatagagtgatatg

SEQ ID NO: 174012 - DNA, 20 bp, Artificial Sequence
  Description of Artificial Sequence: Synthetic oligonucleotide
  Target: LAMA2; (+) strand; PAM type: NRG; PAM sequence: TAG
catagagtgatatgtggtca

SEQ ID NO: 174013 - DNA, 20 bp, Artificial Sequence
  Description of Artificial Sequence: Synthetic oligonucleotide
  Target: LAMA2; (+) strand; PAM type: NRG; PAM sequence: TGG
tgtggtcatagaaatgcaaa

SEQ ID NO: 174014 - DNA, 20 bp, Artificial Sequence
  Description of Artificial Sequence: Synthetic oligonucleotide
  Target: LAMA2; (+) strand; PAM type: NRG; PAM sequence: AAG
catagaaatgcaaatggcct

SEQ ID NO: 174015 - DNA, 20 bp, Artificial Sequence
  Description of Artificial Sequence: Synthetic oligonucleotide
  Target: LAMA2; (+) strand; PAM type: NRG; PAM sequence: GAG
tagaaatgcaaatggcctaa

SEQ ID NO: 174016 - DNA, 20 bp, Artificial Sequence
  Description of Artificial Sequence: Synthetic oligonucleotide
  Target: LAMA2; (+) strand; PAM type: NRG; PAM sequence: AAG
taatgacatgtatacctatg

SEQ ID NO: 174017 - DNA, 20 bp, Artificial Sequence
  Description of Artificial Sequence: Synthetic oligonucleotide
  Target: LAMA2; (+) strand; PAM type: NRG; PAM sequence: TGG
tgacatgtatacctatgaag

SEQ ID NO: 174018 - DNA, 20 bp, Artificial Sequence
  Description of Artificial Sequence: Synthetic oligonucleotide
  Target: LAMA2; (+) strand; PAM type: NRG; PAM sequence: TAG
atgaagtggcattgtttaaa

SEQ ID NO: 174019 - DNA, 20 bp, Artificial Sequence
  Description of Artificial Sequence: Synthetic oligonucleotide
  Target: LAMA2; (+) strand; PAM type: NRG; PAM sequence: TAG
agtggcattgtttaaataga

SEQ ID NO: 174020 - DNA, 20 bp, Artificial Sequence
  Description of Artificial Sequence: Synthetic oligonucleotide
  Target: LAMA2; (+) strand; PAM type: NRG; PAM sequence: AGG
gtggcattgtttaaatagat

SEQ ID NO: 174021 - DNA, 20 bp, Artificial Sequence
  Description of Artificial Sequence: Synthetic oligonucleotide
  Target: LAMA2; (+) strand; PAM type: NRG; PAM sequence: TGG
ttaaatagataggcttttct

SEQ ID NO: 174022 - DNA, 20 bp, Artificial Sequence
  Description of Artificial Sequence: Synthetic oligonucleotide
  Target: LAMA2; (+) strand; PAM type: NRG; PAM sequence: AAG
agataggcttttcttggtct

SEQ ID NO: 174023 - DNA, 20 bp, Artificial Sequence
  Description of Artificial Sequence: Synthetic oligonucleotide
  Target: LAMA2; (+) strand; PAM type: NRG; PAM sequence: TGG
aggcttttcttggtctaagt

SEQ ID NO: 174024 - DNA, 20 bp, Artificial Sequence
  Description of Artificial Sequence: Synthetic oligonucleotide
  Target: LAMA2; (+) strand; PAM type: NRG; PAM sequence: TAG
agttggtttcttaaatttcc

SEQ ID NO: 174025 - DNA, 20 bp, Artificial Sequence
  Description of Artificial Sequence: Synthetic oligonucleotide
  Target: LAMA2; (+) strand; PAM type: NRG; PAM sequence: TAG
ctctattctttttgctatgt

SEQ ID NO: 174026 - DNA, 20 bp, Artificial Sequence
  Description of Artificial Sequence: Synthetic oligonucleotide
  Target: LAMA2; (+) strand; PAM type: NRG; PAM sequence: AAG
attctttttgctatgttagt

SEQ ID NO: 174027 - DNA, 20 bp, Artificial Sequence
  Description of Artificial Sequence: Synthetic oligonucleotide
  Target: LAMA2; (+) strand; PAM type: NRG; PAM sequence: AAG
ttgctatgttagtaagtttg

SEQ ID NO: 174028 - DNA, 20 bp, Artificial Sequence
  Description of Artificial Sequence: Synthetic oligonucleotide
  Target: LAMA2; (+) strand; PAM type: NRG; PAM sequence: TGG
tcattttaaaactaaacatg

SEQ ID NO: 174029 - DNA, 20 bp, Artificial Sequence
  Description of Artificial Sequence: Synthetic oligonucleotide
  Target: LAMA2; (+) strand; PAM type: NRG; PAM sequence: GGG
cattttaaaactaaacatgt

SEQ ID NO: 174030 - DNA, 20 bp, Artificial Sequence
  Description of Artificial Sequence: Synthetic oligonucleotide
  Target: LAMA2; (+) strand; PAM type: NRG; PAM sequence: CAG
ttaaaactaaacatgtgggc

SEQ ID NO: 174031 - DNA, 20 bp, Artificial Sequence
  Description of Artificial Sequence: Synthetic oligonucleotide
  Target: LAMA2; (+) strand; PAM type: NRG; PAM sequence: AGG
taaaactaaacatgtgggcc

SEQ ID NO: 174032 - DNA, 20 bp, Artificial Sequence
  Description of Artificial Sequence: Synthetic oligonucleotide
  Target: LAMA2; (+) strand; PAM type: NRG; PAM sequence: CGG
ctaaacatgtgggccaggca

SEQ ID NO: 174033 - DNA, 20 bp, Artificial Sequence
  Description of Artificial Sequence: Synthetic oligonucleotide
  Target: LAMA2; (+) strand; PAM type: NRG; PAM sequence: TGG
aacatgtgggccaggcacgg

SEQ ID NO: 174034 - DNA, 20 bp, Artificial Sequence
  Description of Artificial Sequence: Synthetic oligonucleotide
  Target: LAMA2; (+) strand; PAM type: NRG; PAM sequence: CAG
gtggctcatgcctgtaatcc

SEQ ID NO: 174035 - DNA, 20 bp, Artificial Sequence
  Description of Artificial Sequence: Synthetic oligonucleotide
  Target: LAMA2; (+) strand; PAM type: NRG; PAM sequence: TGG
tgcctgtaatcccagcactt

SEQ ID NO: 174036 - DNA, 20 bp, Artificial Sequence
  Description of Artificial Sequence: Synthetic oligonucleotide
  Target: LAMA2; (+) strand; PAM type: NRG; PAM sequence: GGG
gcctgtaatcccagcacttt

SEQ ID NO: 174037 - DNA, 20 bp, Artificial Sequence
  Description of Artificial Sequence: Synthetic oligonucleotide
  Target: LAMA2; (+) strand; PAM type: NRG; PAM sequence: GAG
ctgtaatcccagcactttgg

SEQ ID NO: 174038 - DNA, 20 bp, Artificial Sequence
  Description of Artificial Sequence: Synthetic oligonucleotide
  Target: LAMA2; (+) strand; PAM type: NRG; PAM sequence: AGG
tgtaatcccagcactttggg

SEQ ID NO: 174039 - DNA, 20 bp, Artificial Sequence
  Description of Artificial Sequence: Synthetic oligonucleotide
  Target: LAMA2; (+) strand; PAM type: NRG; PAM sequence: GAG
tcccagcactttgggaggcc

SEQ ID NO: 174040 - DNA, 20 bp, Artificial Sequence
  Description of Artificial Sequence: Synthetic oligonucleotide
  Target: LAMA2; (+) strand; PAM type: NRG; PAM sequence: AGG
cccagcactttgggaggccg

SEQ ID NO: 174041 - DNA, 20 bp, Artificial Sequence
  Description of Artificial Sequence: Synthetic oligonucleotide
  Target: LAMA2; (+) strand; PAM type: NRG; PAM sequence: TGG
agcactttgggaggccgagg

SEQ ID NO: 174042 - DNA, 20 bp, Artificial Sequence
  Description of Artificial Sequence: Synthetic oligonucleotide
  Target: LAMA2; (+) strand; PAM type: NRG; PAM sequence: GGG
gcactttgggaggccgaggt

SEQ ID NO: 174043 - DNA, 20 bp, Artificial Sequence
  Description of Artificial Sequence: Synthetic oligonucleotide
  Target: LAMA2; (+) strand; PAM type: NRG; PAM sequence: CAG
ctttgggaggccgaggtggg

SEQ ID NO: 174044 - DNA, 20 bp, Artificial Sequence
  Description of Artificial Sequence: Synthetic oligonucleotide
  Target: LAMA2; (+) strand; PAM type: NRG; PAM sequence: GAG
ccgaggtgggcagactgcct

SEQ ID NO: 174045 - DNA, 20 bp, Artificial Sequence
  Description of Artificial Sequence: Synthetic oligonucleotide
  Target: LAMA2; (+) strand; PAM type: NRG; PAM sequence: CGG
gtgggcagactgcctgagct

SEQ ID NO: 174046 - DNA, 20 bp, Artificial Sequence
  Description of Artificial Sequence: Synthetic oligonucleotide
  Target: LAMA2; (+) strand; PAM type: NRG; PAM sequence: GGG
tgggcagactgcctgagctc

SEQ ID NO: 174047 - DNA, 20 bp, Artificial Sequence
  Description of Artificial Sequence: Synthetic oligonucleotide
  Target: LAMA2; (+) strand; PAM type: NRG; PAM sequence: GAG
ggcagactgcctgagctcgg

SEQ ID NO: 174048 - DNA, 20 bp, Artificial Sequence
  Description of Artificial Sequence: Synthetic oligonucleotide
  Target: LAMA2; (+) strand; PAM type: NRG; PAM sequence: CAG
tgagctcgggagttcaaaac

SEQ ID NO: 174049 - DNA, 20 bp, Artificial Sequence
  Description of Artificial Sequence: Synthetic oligonucleotide
  Target: LAMA2; (+) strand; PAM type: NRG; PAM sequence: TGG
tcgggagttcaaaaccagcc

SEQ ID NO: 174050 - DNA, 20 bp, Artificial Sequence
  Description of Artificial Sequence: Synthetic oligonucleotide
  Target: LAMA2; (+) strand; PAM type: NRG; PAM sequence: GGG
cgggagttcaaaaccagcct

SEQ ID NO: 174051 - DNA, 20 bp, Artificial Sequence
  Description of Artificial Sequence: Synthetic oligonucleotide
  Target: LAMA2; (+) strand; PAM type: NRG; PAM sequence: TGG
caaaaccagcctgggcaaca

SEQ ID NO: 174052 - DNA, 20 bp, Artificial Sequence
  Description of Artificial Sequence: Synthetic oligonucleotide
  Target: LAMA2; (+) strand; PAM type: NRG; PAM sequence: TAG
ctattaaatattcaaaaaat

SEQ ID NO: 174053 - DNA, 20 bp, Artificial Sequence
  Description of Artificial Sequence: Synthetic oligonucleotide
  Target: LAMA2; (+) strand; PAM type: NRG; PAM sequence: TGG
taaatattcaaaaaattagc

SEQ ID NO: 174054 - DNA, 20 bp, Artificial Sequence
  Description of Artificial Sequence: Synthetic oligonucleotide
  Target: LAMA2; (+) strand; PAM type: NRG; PAM sequence: GGG
aaatattcaaaaaattagct

SEQ ID NO: 174055 - DNA, 20 bp, Artificial Sequence
  Description of Artificial Sequence: Synthetic oligonucleotide
  Target: LAMA2; (+) strand; PAM type: NRG; PAM sequence: TGG
ttcaaaaaattagctgggtg

SEQ ID NO: 174056 - DNA, 20 bp, Artificial Sequence
  Description of Artificial Sequence: Synthetic oligonucleotide
  Target: LAMA2; (+) strand; PAM type: NRG; PAM sequence: TGG
aaaaaattagctgggtgtgg

SEQ ID NO: 174057 - DNA, 20 bp, Artificial Sequence
  Description of Artificial Sequence: Synthetic oligonucleotide
  Target: LAMA2; (+) strand; PAM type: NRG; PAM sequence: TGG
aaattagctgggtgtggtgg

SEQ ID NO: 174058 - DNA, 20 bp, Artificial Sequence
  Description of Artificial Sequence: Synthetic oligonucleotide
  Target: LAMA2; (+) strand; PAM type: NRG; PAM sequence: GGG
aattagctgggtgtggtggt

SEQ ID NO: 174059 - DNA, 20 bp, Artificial Sequence
  Description of Artificial Sequence: Synthetic oligonucleotide
  Target: LAMA2; (+) strand; PAM type: NRG; PAM sequence: CAG
gtggtgggcacctgtaatcc

SEQ ID NO: 174060 - DNA, 20 bp, Artificial Sequence
  Description of Artificial Sequence: Synthetic oligonucleotide
  Target: LAMA2; (+) strand; PAM type: NRG; PAM sequence: CAG
cacctgtaatcccagctact

SEQ ID NO: 174061 - DNA, 20 bp, Artificial Sequence
  Description of Artificial Sequence: Synthetic oligonucleotide
  Target: LAMA2; (+) strand; PAM type: NRG; PAM sequence: AGG
acctgtaatcccagctactc

SEQ ID NO: 174062 - DNA, 20 bp, Artificial Sequence
  Description of Artificial Sequence: Synthetic oligonucleotide
  Target: LAMA2; (+) strand; PAM type: NRG; PAM sequence: GAG
ctgtaatcccagctactcag

SEQ ID NO: 174063 - DNA, 20 bp, Artificial Sequence
  Description of Artificial Sequence: Synthetic oligonucleotide
  Target: LAMA2; (+) strand; PAM type: NRG; PAM sequence: AGG
tgtaatcccagctactcagg

SEQ ID NO: 174064 - DNA, 20 bp, Artificial Sequence
  Description of Artificial Sequence: Synthetic oligonucleotide
  Target: LAMA2; (+) strand; PAM type: NRG; PAM sequence: GAG
tcccagctactcaggaggct

SEQ ID NO: 174065 - DNA, 20 bp, Artificial Sequence
  Description of Artificial Sequence: Synthetic oligonucleotide
  Target: LAMA2; (+) strand; PAM type: NRG; PAM sequence: AGG
cccagctactcaggaggctg

SEQ ID NO: 174066 - DNA, 20 bp, Artificial Sequence
  Description of Artificial Sequence: Synthetic oligonucleotide
  Target: LAMA2; (+) strand; PAM type: NRG; PAM sequence: CAG
agctactcaggaggctgagg

SEQ ID NO: 174067 - DNA, 20 bp, Artificial Sequence
  Description of Artificial Sequence: Synthetic oligonucleotide
  Target: LAMA2; (+) strand; PAM type: NRG; PAM sequence: AGG
gctactcaggaggctgaggc

SEQ ID NO: 174068 - DNA, 20 bp, Artificial Sequence
  Description of Artificial Sequence: Synthetic oligonucleotide
  Target: LAMA2; (+) strand; PAM type: NRG; PAM sequence: GAG
tactcaggaggctgaggcag

SEQ ID NO: 174069 - DNA, 20 bp, Artificial Sequence
  Description of Artificial Sequence: Synthetic oligonucleotide
  Target: LAMA2; (+) strand; PAM type: NRG; PAM sequence: CAG
ggcaggagaattgcttgaac

SEQ ID NO: 174070 - DNA, 20 bp, Artificial Sequence
  Description of Artificial Sequence: Synthetic oligonucleotide
  Target: LAMA2; (+) strand; PAM type: NRG; PAM sequence: AGG
gcaggagaattgcttgaacc

SEQ ID NO: 174071 - DNA, 20 bp, Artificial Sequence
  Description of Artificial Sequence: Synthetic oligonucleotide
  Target: LAMA2; (+) strand; PAM type: NRG; PAM sequence: GGG
caggagaattgcttgaacca

SEQ ID NO: 174072 - DNA, 20 bp, Artificial Sequence
  Description of Artificial Sequence: Synthetic oligonucleotide
  Target: LAMA2; (+) strand; PAM type: NRG; PAM sequence: GAG
ggagaattgcttgaaccagg

SEQ ID NO: 174073 - DNA, 20 bp, Artificial Sequence
  Description of Artificial Sequence: Synthetic oligonucleotide
  Target: LAMA2; (+) strand; PAM type: NRG; PAM sequence: AGG
gagaattgcttgaaccaggg

SEQ ID NO: 174074 - DNA, 20 bp, Artificial Sequence
  Description of Artificial Sequence: Synthetic oligonucleotide
  Target: LAMA2; (+) strand; PAM type: NRG; PAM sequence: CAG
aattgcttgaaccagggagg

SEQ ID NO: 174075 - DNA, 20 bp, Artificial Sequence
  Description of Artificial Sequence: Synthetic oligonucleotide
  Target: LAMA2; (+) strand; PAM type: NRG; PAM sequence: GAG
ttgcttgaaccagggaggca

SEQ ID NO: 174076 - DNA, 20 bp, Artificial Sequence
  Description of Artificial Sequence: Synthetic oligonucleotide
  Target: LAMA2; (+) strand; PAM type: NRG; PAM sequence: AGG
tgcttgaaccagggaggcag

SEQ ID NO: 174077 - DNA, 20 bp, Artificial Sequence
  Description of Artificial Sequence: Synthetic oligonucleotide
  Target: LAMA2; (+) strand; PAM type: NRG; PAM sequence: CAG
aaccagggaggcagaggttg

SEQ ID NO: 174078 - DNA, 20 bp, Artificial Sequence
  Description of Artificial Sequence: Synthetic oligonucleotide
  Target: LAMA2; (+) strand; PAM type: NRG; PAM sequence: GAG
agggaggcagaggttgcagt

SEQ ID NO: 174079 - DNA, 20 bp, Artificial Sequence
  Description of Artificial Sequence: Synthetic oligonucleotide
  Target: LAMA2; (+) strand; PAM type: NRG; PAM sequence: GAG
ggcagaggttgcagtgagct

SEQ ID NO: 174080 - DNA, 20 bp, Artificial Sequence
  Description of Artificial Sequence: Synthetic oligonucleotide
  Target: LAMA2; (+) strand; PAM type: NRG; PAM sequence: CAG
gagatcgcaccactgcattc

SEQ ID NO: 174081 - DNA, 20 bp, Artificial Sequence
  Description of Artificial Sequence: Synthetic oligonucleotide
  Target: LAMA2; (+) strand; PAM type: NRG; PAM sequence: TGG
cgcaccactgcattccagcc

SEQ ID NO: 174082 - DNA, 20 bp, Artificial Sequence
  Description of Artificial Sequence: Synthetic oligonucleotide
  Target: LAMA2; (+) strand; PAM type: NRG; PAM sequence: GGG
gcaccactgcattccagcct

SEQ ID NO: 174083 - DNA, 20 bp, Artificial Sequence
  Description of Artificial Sequence: Synthetic oligonucleotide
  Target: LAMA2; (+) strand; PAM type: NRG; PAM sequence: CAG
ctgcattccagcctgggtga

SEQ ID NO: 174084 - DNA, 20 bp, Artificial Sequence
  Description of Artificial Sequence: Synthetic oligonucleotide
  Target: LAMA2; (+) strand; PAM type: NRG; PAM sequence: GAG
gcattccagcctgggtgaca

SEQ ID NO: 174085 - DNA, 20 bp, Artificial Sequence
  Description of Artificial Sequence: Synthetic oligonucleotide
  Target: LAMA2; (+) strand; PAM type: NRG; PAM sequence: AAG
tccagcctgggtgacagagc

SEQ ID NO: 174086 - DNA, 20 bp, Artificial Sequence
  Description of Artificial Sequence: Synthetic oligonucleotide
  Target: LAMA2; (+) strand; PAM type: NRG; PAM sequence: TAG
aaaaaactaaactaaacgtg

SEQ ID NO: 174087 - DNA, 20 bp, Artificial Sequence
  Description of Artificial Sequence: Synthetic oligonucleotide
  Target: LAMA2; (+) strand; PAM type: NRG; PAM sequence: TAG
aaacgtgtagttatgtctca

SEQ ID NO: 174088 - DNA, 20 bp, Artificial Sequence
  Description of Artificial Sequence: Synthetic oligonucleotide
  Target: LAMA2; (+) strand; PAM type: NRG; PAM sequence: GAG
acgtgtagttatgtctcata

SEQ ID NO: 174089 - DNA, 20 bp, Artificial Sequence
  Description of Artificial Sequence: Synthetic oligonucleotide
  Target: LAMA2; (+) strand; PAM type: NRG; PAM sequence: TAG
gttatgtctcatagagaaat

SEQ ID NO: 174090 - DNA, 20 bp, Artificial Sequence
  Description of Artificial Sequence: Synthetic oligonucleotide
  Target: LAMA2; (+) strand; PAM type: NRG; PAM sequence: AAG
tctcatagagaaattagtaa

SEQ ID NO: 174091 - DNA, 20 bp, Artificial Sequence
  Description of Artificial Sequence: Synthetic oligonucleotide
  Target: LAMA2; (+) strand; PAM type: NRG; PAM sequence: GAG
tcatagagaaattagtaaaa

SEQ ID NO: 174092 - DNA, 20 bp, Artificial Sequence
  Description of Artificial Sequence: Synthetic oligonucleotide
  Target: LAMA2; (+) strand; PAM type: NRG; PAM sequence: GAG
atagagaaattagtaaaaga

SEQ ID NO: 174093 - DNA, 20 bp, Artificial Sequence
  Description of Artificial Sequence: Synthetic oligonucleotide
  Target: LAMA2; (+) strand; PAM type: NRG; PAM sequence: AGG
tagagaaattagtaaaagag

SEQ ID NO: 174094 - DNA, 20 bp, Artificial Sequence
  Description of Artificial Sequence: Synthetic oligonucleotide
  Target: LAMA2; (+) strand; PAM type: NRG; PAM sequence: GAG
gagaaattagtaaaagagag

SEQ ID NO: 174095 - DNA, 20 bp, Artificial Sequence
  Description of Artificial Sequence: Synthetic oligonucleotide
  Target: LAMA2; (+) strand; PAM type: NRG; PAM sequence: AGG
agaaattagtaaaagagagg

SEQ ID NO: 174096 - DNA, 20 bp, Artificial Sequence
  Description of Artificial Sequence: Synthetic oligonucleotide
  Target: LAMA2; (+) strand; PAM type: NRG; PAM sequence: CAG
atgccctcttctctacatat

SEQ ID NO: 174097 - DNA, 20 bp, Artificial Sequence
  Description of Artificial Sequence: Synthetic oligonucleotide
  Target: LAMA2; (+) strand; PAM type: NRG; PAM sequence: AAG
ctctacatatcagtatgttg

SEQ ID NO: 174098 - DNA, 20 bp, Artificial Sequence
  Description of Artificial Sequence: Synthetic oligonucleotide
  Target: LAMA2; (+) strand; PAM type: NRG; PAM sequence: GAG
ctaaattgccacctatgtct

SEQ ID NO: 174099 - DNA, 20 bp, Artificial Sequence
  Description of Artificial Sequence: Synthetic oligonucleotide
  Target: LAMA2; (+) strand; PAM type: NRG; PAM sequence: AGG
taaattgccacctatgtctg

SEQ ID NO: 174100 - DNA, 20 bp, Artificial Sequence
  Description of Artificial Sequence: Synthetic oligonucleotide
  Target: LAMA2; (+) strand; PAM type: NRG; PAM sequence: GAG
aattgccacctatgtctgag

SEQ ID NO: 174101 - DNA, 20 bp, Artificial Sequence
  Description of Artificial Sequence: Synthetic oligonucleotide
  Target: LAMA2; (+) strand; PAM type: NRG; PAM sequence: TAG
tgaggagcttaatgataaaa

SEQ ID NO: 174102 - DNA, 20 bp, Artificial Sequence
  Description of Artificial Sequence: Synthetic oligonucleotide
  Target: LAMA2; (+) strand; PAM type: NRG; PAM sequence: AAG
taaaatagatgacctctccc

SEQ ID NO: 174103 - DNA, 20 bp, Artificial Sequence
  Description of Artificial Sequence: Synthetic oligonucleotide
  Target: LAMA2; (+) strand; PAM type: NRG; PAM sequence: AAG
atgacctctcccaagaaata

SEQ ID NO: 174104 - DNA, 20 bp, Artificial Sequence
  Description of Artificial Sequence: Synthetic oligonucleotide
  Target: LAMA2; (+) strand; PAM type: NRG; PAM sequence: AGG
tgacctctcccaagaaataa

SEQ ID NO: 174105 - DNA, 20 bp, Artificial Sequence
  Description of Artificial Sequence: Synthetic oligonucleotide
  Target: LAMA2; (+) strand; PAM type: NRG; PAM sequence: CAG
ctctcccaagaaataaagga

SEQ ID NO: 174106 - DNA, 20 bp, Artificial Sequence
  Description of Artificial Sequence: Synthetic oligonucleotide
  Target: LAMA2; (+) strand; PAM type: NRG; PAM sequence: AGG
tctcccaagaaataaaggac

SEQ ID NO: 174107 - DNA, 20 bp, Artificial Sequence
  Description of Artificial Sequence: Synthetic oligonucleotide
  Target: LAMA2; (+) strand; PAM type: NRG; PAM sequence: AAG
cccaagaaataaaggacagg

SEQ ID NO: 174108 - DNA, 20 bp, Artificial Sequence
  Description of Artificial Sequence: Synthetic oligonucleotide
  Target: LAMA2; (+) strand; PAM type: NRG; PAM sequence: GAG
taaaggacaggaagcttgct

SEQ ID NO: 174109 - DNA, 20 bp, Artificial Sequence
  Description of Artificial Sequence: Synthetic oligonucleotide
  Target: LAMA2; (+) strand; PAM type: NRG; PAM sequence: AAG
aggacaggaagcttgctgag

SEQ ID NO: 174110 - DNA, 20 bp, Artificial Sequence
  Description of Artificial Sequence: Synthetic oligonucleotide
  Target: LAMA2; (+) strand; PAM type: NRG; PAM sequence: AGG
ggacaggaagcttgctgaga

SEQ ID NO: 174111 - DNA, 20 bp, Artificial Sequence
  Description of Artificial Sequence: Synthetic oligonucleotide
  Target: LAMA2; (+) strand; PAM type: NRG; PAM sequence: CAG
agcttgctgagaaggtgtcc

SEQ ID NO: 174112 - DNA, 20 bp, Artificial Sequence
  Description of Artificial Sequence: Synthetic oligonucleotide
  Target: LAMA2; (+) strand; PAM type: NRG; PAM sequence: AGG
gcttgctgagaaggtgtccc

SEQ ID NO: 174113 - DNA, 20 bp, Artificial Sequence
  Description of Artificial Sequence: Synthetic oligonucleotide
  Target: LAMA2; (+) strand; PAM type: NRG; PAM sequence: GAG
ctgagaaggtgtcccaggct

SEQ ID NO: 174114 - DNA, 20 bp, Artificial Sequence
  Description of Artificial Sequence: Synthetic oligonucleotide
  Target: LAMA2; (+) strand; PAM type: NRG; PAM sequence: GAG
gagaaggtgtcccaggctga

SEQ ID NO: 174115 - DNA, 20 bp, Artificial Sequence
  Description of Artificial Sequence: Synthetic oligonucleotide
  Target: LAMA2; (+) strand; PAM type: NRG; PAM sequence: CAG
gtcccaggctgagagccacg

SEQ ID NO: 174116 - DNA, 20 bp, Artificial Sequence
  Description of Artificial Sequence: Synthetic oligonucleotide
  Target: LAMA2; (+) strand; PAM type: NRG; PAM sequence: CAG
aggctgagagccacgcagct

SEQ ID NO: 174117 - DNA, 20 bp, Artificial Sequence
  Description of Artificial Sequence: Synthetic oligonucleotide
  Target: LAMA2; (+) strand; PAM type: NRG; PAM sequence: TGG
gactcatctgctgtccttga

SEQ ID NO: 174118 - DNA, 20 bp, Artificial Sequence
  Description of Artificial Sequence: Synthetic oligonucleotide
  Target: LAMA2; (+) strand; PAM type: NRG; PAM sequence: GGG
actcatctgctgtccttgat

SEQ ID NO: 174119 - DNA, 20 bp, Artificial Sequence
  Description of Artificial Sequence: Synthetic oligonucleotide
  Target: LAMA2; (+) strand; PAM type: NRG; PAM sequence: TGG
atgggtatgtcatttgtttt

SEQ ID NO: 174120 - DNA, 20 bp, Artificial Sequence
  Description of Artificial Sequence: Synthetic oligonucleotide
  Target: LAMA2; (+) strand; PAM type: NRG; PAM sequence: AAG
tgtattttgatgcttgtcca

SEQ ID NO: 174121 - DNA, 20 bp, Artificial Sequence
  Description of Artificial Sequence: Synthetic oligonucleotide
  Target: LAMA2; (+) strand; PAM type: NRG; PAM sequence: AGG
gtattttgatgcttgtccaa

SEQ ID NO: 174122 - DNA, 20 bp, Artificial Sequence
  Description of Artificial Sequence: Synthetic oligonucleotide
  Target: LAMA2; (+) strand; PAM type: NRG; PAM sequence: TAG
gcttgtccaaaggttttgac

SEQ ID NO: 174123 - DNA, 20 bp, Artificial Sequence
  Description of Artificial Sequence: Synthetic oligonucleotide
  Target: LAMA2; (+) strand; PAM type: NRG; PAM sequence: TAG
aaggttttgactagcataaa

SEQ ID NO: 174124 - DNA, 20 bp, Artificial Sequence
  Description of Artificial Sequence: Synthetic oligonucleotide
  Target: LAMA2; (+) strand; PAM type: NRG; PAM sequence: TAG
gttttgactagcataaatag

SEQ ID NO: 174125 - DNA, 20 bp, Artificial Sequence
  Description of Artificial Sequence: Synthetic oligonucleotide
  Target: LAMA2; (+) strand; PAM type: NRG; PAM sequence: GAG
tttgactagcataaatagta

SEQ ID NO: 174126 - DNA, 20 bp, Artificial Sequence
  Description of Artificial Sequence: Synthetic oligonucleotide
  Target: LAMA2; (+) strand; PAM type: NRG; PAM sequence: TAG
tctgttaattatgaacacac

SEQ ID NO: 174127 - DNA, 20 bp, Artificial Sequence
  Description of Artificial Sequence: Synthetic oligonucleotide
  Target: LAMA2; (+) strand; PAM type: NRG; PAM sequence: TGG
ttatgaacacactagctata

SEQ ID NO: 174128 - DNA, 20 bp, Artificial Sequence
  Description of Artificial Sequence: Synthetic oligonucleotide
  Target: LAMA2; (+) strand; PAM type: NRG; PAM sequence: TGG
ctagctatatggcctttctg

SEQ ID NO: 174129 - DNA, 20 bp, Artificial Sequence
  Description of Artificial Sequence: Synthetic oligonucleotide
  Target: LAMA2; (+) strand; PAM type: NRG; PAM sequence: TAG
ctatatggcctttctgtgga

SEQ ID NO: 174130 - DNA, 20 bp, Artificial Sequence
  Description of Artificial Sequence: Synthetic oligonucleotide
  Target: LAMA2; (+) strand; PAM type: NRG; PAM sequence: AGG
tatatggcctttctgtggat

SEQ ID NO: 174131 - DNA, 20 bp, Artificial Sequence
  Description of Artificial Sequence: Synthetic oligonucleotide
  Target: LAMA2; (+) strand; PAM type: NRG; PAM sequence: TAG
tttctgtggataggcttaat

SEQ ID NO: 174132 - DNA, 20 bp, Artificial Sequence
  Description of Artificial Sequence: Synthetic oligonucleotide
  Target: LAMA2; (+) strand; PAM type: NRG; PAM sequence: AGG
ttctgtggataggcttaatt

SEQ ID NO: 174133 - DNA, 20 bp, Artificial Sequence
  Description of Artificial Sequence: Synthetic oligonucleotide
  Target: LAMA2; (+) strand; PAM type: NRG; PAM sequence: GAG
ctgtggataggcttaattag

SEQ ID NO: 174134 - DNA, 20 bp, Artificial Sequence
  Description of Artificial Sequence: Synthetic oligonucleotide
  Target: LAMA2; (+) strand; PAM type: NRG; PAM sequence: AGG
tgtggataggcttaattagg

SEQ ID NO: 174135 - DNA, 20 bp, Artificial Sequence
  Description of Artificial Sequence: Synthetic oligonucleotide
  Target: LAMA2; (+) strand; PAM type: NRG; PAM sequence: GGG
gtggataggcttaattagga

SEQ ID NO: 174136 - DNA, 20 bp, Artificial Sequence
  Description of Artificial Sequence: Synthetic oligonucleotide
  Target: LAMA2; (+) strand; PAM type: NRG; PAM sequence: TGG
taggcttaattaggagggtc

SEQ ID NO: 174137 - DNA, 20 bp, Artificial Sequence
  Description of Artificial Sequence: Synthetic oligonucleotide
  Target: LAMA2; (+) strand; PAM type: NRG; PAM sequence: GGG
aggcttaattaggagggtct

SEQ ID NO: 174138 - DNA, 20 bp, Artificial Sequence
  Description of Artificial Sequence: Synthetic oligonucleotide
  Target: LAMA2; (+) strand; PAM type: NRG; PAM sequence: AAG
taattaggagggtctgggca

SEQ ID NO: 174139 - DNA, 20 bp, Artificial Sequence
  Description of Artificial Sequence: Synthetic oligonucleotide
  Target: LAMA2; (+) strand; PAM type: NRG; PAM sequence: CAG
gtctgggcaaagctttgcta

SEQ ID NO: 174140 - DNA, 20 bp, Artificial Sequence
  Description of Artificial Sequence: Synthetic oligonucleotide
  Target: LAMA2; (+) strand; PAM type: NRG; PAM sequence: CAG
tgggcaaagctttgctacag

SEQ ID NO: 174141 - DNA, 20 bp, Artificial Sequence
  Description of Artificial Sequence: Synthetic oligonucleotide
  Target: LAMA2; (+) strand; PAM type: NRG; PAM sequence: AAG
ctttgctacagcagcatcaa

SEQ ID NO: 174142 - DNA, 20 bp, Artificial Sequence
  Description of Artificial Sequence: Synthetic oligonucleotide
  Target: LAMA2; (+) strand; PAM type: NRG; PAM sequence: AAG
gcatcaaaagtctgatttac

SEQ ID NO: 174143 - DNA, 20 bp, Artificial Sequence
  Description of Artificial Sequence: Synthetic oligonucleotide
  Target: LAMA2; (+) strand; PAM type: NRG; PAM sequence: TAG
tcaaaagtctgatttacaag

SEQ ID NO: 174144 - DNA, 20 bp, Artificial Sequence
  Description of Artificial Sequence: Synthetic oligonucleotide
  Target: LAMA2; (+) strand; PAM type: NRG; PAM sequence: TGG
tttacaagtagactcaaata

SEQ ID NO: 174145 - DNA, 20 bp, Artificial Sequence
  Description of Artificial Sequence: Synthetic oligonucleotide
  Target: LAMA2; (+) strand; PAM type: NRG; PAM sequence: TAG
aagtagactcaaatatggct

SEQ ID NO: 174146 - DNA, 20 bp, Artificial Sequence
  Description of Artificial Sequence: Synthetic oligonucleotide
  Target: LAMA2; (+) strand; PAM type: NRG; PAM sequence: TAG
tagactcaaatatggcttag

SEQ ID NO: 174147 - DNA, 20 bp, Artificial Sequence
  Description of Artificial Sequence: Synthetic oligonucleotide
  Target: LAMA2; (+) strand; PAM type: NRG; PAM sequence: AGG
agactcaaatatggcttagt

SEQ ID NO: 174148 - DNA, 20 bp, Artificial Sequence
  Description of Artificial Sequence: Synthetic oligonucleotide
  Target: LAMA2; (+) strand; PAM type: NRG; PAM sequence: AAG
ctcaaatatggcttagtagg

SEQ ID NO: 174149 - DNA, 20 bp, Artificial Sequence
  Description of Artificial Sequence: Synthetic oligonucleotide
  Target: LAMA2; (+) strand; PAM type: NRG; PAM sequence: TAG
ggcttagtaggaagtgaaca

SEQ ID NO: 174150 - DNA, 20 bp, Artificial Sequence
  Description of Artificial Sequence: Synthetic oligonucleotide
  Target: LAMA2; (+) strand; PAM type: NRG; PAM sequence: TAG
gtaggaagtgaacatagccc

SEQ ID NO: 174151 - DNA, 20 bp, Artificial Sequence
  Description of Artificial Sequence: Synthetic oligonucleotide
  Target: LAMA2; (+) strand; PAM type: NRG; PAM sequence: AGG
taggaagtgaacatagccct

SEQ ID NO: 174152 - DNA, 20 bp, Artificial Sequence
  Description of Artificial Sequence: Synthetic oligonucleotide
  Target: LAMA2; (+) strand; PAM type: NRG; PAM sequence: TAG
acatagccctaggctacact

SEQ ID NO: 174153 - DNA, 20 bp, Artificial Sequence
  Description of Artificial Sequence: Synthetic oligonucleotide
  Target: LAMA2; (+) strand; PAM type: NRG; PAM sequence: AAG
attttctgttctttattaaa

SEQ ID NO: 174154 - DNA, 20 bp, Artificial Sequence
  Description of Artificial Sequence: Synthetic oligonucleotide
  Target: LAMA2; (+) strand; PAM type: NRG; PAM sequence: CAG
ctgttctttattaaaaagca

SEQ ID NO: 174155 - DNA, 20 bp, Artificial Sequence
  Description of Artificial Sequence: Synthetic oligonucleotide
  Target: LAMA2; (+) strand; PAM type: NRG; PAM sequence: TGG
ttctttattaaaaagcacag

SEQ ID NO: 174156 - DNA, 20 bp, Artificial Sequence
  Description of Artificial Sequence: Synthetic oligonucleotide
  Target: LAMA2; (+) strand; PAM type: NRG; PAM sequence: TAG
aagcacagtggttgccttat

SEQ ID NO: 174157 - DNA, 20 bp, Artificial Sequence
  Description of Artificial Sequence: Synthetic oligonucleotide
  Target: LAMA2; (+) strand; PAM type: NRG; PAM sequence: CAG
atacattctgtttcaaattt

SEQ ID NO: 174158 - DNA, 20 bp, Artificial Sequence
  Description of Artificial Sequence: Synthetic oligonucleotide
  Target: LAMA2; (+) strand; PAM type: NRG; PAM sequence: TGG
tttcagtttcatgtttctaa

SEQ ID NO: 174159 - DNA, 20 bp, Artificial Sequence
  Description of Artificial Sequence: Synthetic oligonucleotide
  Target: LAMA2; (+) strand; PAM type: NRG; PAM sequence: AAG
tcaaaacaatttattgttaa

SEQ ID NO: 174160 - DNA, 20 bp, Artificial Sequence
  Description of Artificial Sequence: Synthetic oligonucleotide
  Target: LAMA2; (+) strand; PAM type: NRG; PAM sequence: AGG
caaaacaatttattgttaaa

SEQ ID NO: 174161 - DNA, 20 bp, Artificial Sequence
  Description of Artificial Sequence: Synthetic oligonucleotide
  Target: LAMA2; (+) strand; PAM type: NRG; PAM sequence: TGG
acaatttattgttaaaagga

SEQ ID NO: 174162 - DNA, 20 bp, Artificial Sequence
  Description of Artificial Sequence: Synthetic oligonucleotide
  Target: LAMA2; (+) strand; PAM type: NRG; PAM sequence: TGG
aaggatggcttttgaaaatt

SEQ ID NO: 174163 - DNA, 20 bp, Artificial Sequence
  Description of Artificial Sequence: Synthetic oligonucleotide
  Target: LAMA2; (+) strand; PAM type: NRG; PAM sequence: TAG
tgaaaatttggccccatacg

SEQ ID NO: 174164 - DNA, 20 bp, Artificial Sequence
  Description of Artificial Sequence: Synthetic oligonucleotide
  Target: LAMA2; (+) strand; PAM type: NRG; PAM sequence: AAG
tggccccatacgtagtcttt

SEQ ID NO: 174165 - DNA, 20 bp, Artificial Sequence
  Description of Artificial Sequence: Synthetic oligonucleotide
  Target: LAMA2; (+) strand; PAM type: NRG; PAM sequence: AAG
ttttttatttttcctctttt

SEQ ID NO: 174166 - DNA, 20 bp, Artificial Sequence
  Description of Artificial Sequence: Synthetic oligonucleotide
  Target: LAMA2; (+) strand; PAM type: NRG; PAM sequence: CAG
atttttcctcttttaagctc

SEQ ID NO: 174167 - DNA, 20 bp, Artificial Sequence
  Description of Artificial Sequence: Synthetic oligonucleotide
  Target: LAMA2; (+) strand; PAM type: NRG; PAM sequence: AGG
tttttcctcttttaagctcc

SEQ ID NO: 174168 - DNA, 20 bp, Artificial Sequence
  Description of Artificial Sequence: Synthetic oligonucleotide
  Target: LAMA2; (+) strand; PAM type: NRG; PAM sequence: GGG
ttttcctcttttaagctcca

SEQ ID NO: 174169 - DNA, 20 bp, Artificial Sequence
  Description of Artificial Sequence: Synthetic oligonucleotide
  Target: LAMA2; (+) strand; PAM type: NRG; PAM sequence: GAG
ttcctcttttaagctccagg

SEQ ID NO: 174170 - DNA, 20 bp, Artificial Sequence
  Description of Artificial Sequence: Synthetic oligonucleotide
  Target: LAMA2; (+) strand; PAM type: NRG; PAM sequence: TAG
ttacattttctcctgtaaaa

SEQ ID NO: 174171 - DNA, 20 bp, Artificial Sequence
  Description of Artificial Sequence: Synthetic oligonucleotide
  Target: LAMA2; (+) strand; PAM type: NRG; PAM sequence: CAG
cattttctcctgtaaaatag

SEQ ID NO: 174172 - DNA, 20 bp, Artificial Sequence
  Description of Artificial Sequence: Synthetic oligonucleotide
  Target: LAMA2; (+) strand; PAM type: NRG; PAM sequence: TAG
tgtaaaatagcagcttattc

SEQ ID NO: 174173 - DNA, 20 bp, Artificial Sequence
  Description of Artificial Sequence: Synthetic oligonucleotide
  Target: LAMA2; (+) strand; PAM type: NRG; PAM sequence: TGG
aaatagcagcttattctagc

SEQ ID NO: 174174 - DNA, 20 bp, Artificial Sequence
  Description of Artificial Sequence: Synthetic oligonucleotide
  Target: LAMA2; (+) strand; PAM type: NRG; PAM sequence: GGG
aatagcagcttattctagct

SEQ ID NO: 174175 - DNA, 20 bp, Artificial Sequence
  Description of Artificial Sequence: Synthetic oligonucleotide
  Target: LAMA2; (+) strand; PAM type: NRG; PAM sequence: AAG
ttctagctgggattattaca

SEQ ID NO: 174176 - DNA, 20 bp, Artificial Sequence
  Description of Artificial Sequence: Synthetic oligonucleotide
  Target: LAMA2; (+) strand; PAM type: NRG; PAM sequence: AGG
tctagctgggattattacaa

SEQ ID NO: 174177 - DNA, 20 bp, Artificial Sequence
  Description of Artificial Sequence: Synthetic oligonucleotide
  Target: LAMA2; (+) strand; PAM type: NRG; PAM sequence: TAG
tgggattattacaaaggtca

SEQ ID NO: 174178 - DNA, 20 bp, Artificial Sequence
  Description of Artificial Sequence: Synthetic oligonucleotide
  Target: LAMA2; (+) strand; PAM type: NRG; PAM sequence: AGG
gggattattacaaaggtcat

SEQ ID NO: 174179 - DNA, 20 bp, Artificial Sequence
  Description of Artificial Sequence: Synthetic oligonucleotide
  Target: LAMA2; (+) strand; PAM type: NRG; PAM sequence: GAG
gattattacaaaggtcatag

SEQ ID NO: 174180 - DNA, 20 bp, Artificial Sequence
  Description of Artificial Sequence: Synthetic oligonucleotide
  Target: LAMA2; (+) strand; PAM type: NRG; PAM sequence: AGG
attattacaaaggtcatagg

SEQ ID NO: 174181 - DNA, 20 bp, Artificial Sequence
  Description of Artificial Sequence: Synthetic oligonucleotide
  Target: LAMA2; (+) strand; PAM type: NRG; PAM sequence: GGG
ttattacaaaggtcatagga

SEQ ID NO: 174182 - DNA, 20 bp, Artificial Sequence
  Description of Artificial Sequence: Synthetic oligonucleotide
  Target: LAMA2; (+) strand; PAM type: NRG; PAM sequence: GAG
attacaaaggtcataggagg

SEQ ID NO: 174183 - DNA, 20 bp, Artificial Sequence
  Description of Artificial Sequence: Synthetic oligonucleotide
  Target: LAMA2; (+) strand; PAM type: NRG; PAM sequence: GAG
tacaaaggtcataggaggga

SEQ ID NO: 174184 - DNA, 20 bp, Artificial Sequence
  Description of Artificial Sequence: Synthetic oligonucleotide
  Target: LAMA2; (+) strand; PAM type: NRG; PAM sequence: AAG
aggtcataggagggagagta

SEQ ID NO: 174185 - DNA, 20 bp, Artificial Sequence
  Description of Artificial Sequence: Synthetic oligonucleotide
  Target: LAMA2; (+) strand; PAM type: NRG; PAM sequence: GAG
gtcataggagggagagtaaa

SEQ ID NO: 174186 - DNA, 20 bp, Artificial Sequence
  Description of Artificial Sequence: Synthetic oligonucleotide
  Target: LAMA2; (+) strand; PAM type: NRG; PAM sequence: AGG
tcataggagggagagtaaag

SEQ ID NO: 174187 - DNA, 20 bp, Artificial Sequence
  Description of Artificial Sequence: Synthetic oligonucleotide
  Target: LAMA2; (+) strand; PAM type: NRG; PAM sequence: GGG
cataggagggagagtaaaga

SEQ ID NO: 174188 - DNA, 20 bp, Artificial Sequence
  Description of Artificial Sequence: Synthetic oligonucleotide
  Target: LAMA2; (+) strand; PAM type: NRG; PAM sequence: AAG
aggagggagagtaaagaggg

SEQ ID NO: 174189 - DNA, 20 bp, Artificial Sequence
  Description of Artificial Sequence: Synthetic oligonucleotide
  Target: LAMA2; (+) strand; PAM type: NRG; PAM sequence: CAG
gtatacatttgacttacaaa

SEQ ID NO: 174190 - DNA, 20 bp, Artificial Sequence
  Description of Artificial Sequence: Synthetic oligonucleotide
  Target: LAMA2; (+) strand; PAM type: NRG; PAM sequence: TGG
atatgcttttcctacaattt

SEQ ID NO: 174191 - DNA, 20 bp, Artificial Sequence
  Description of Artificial Sequence: Synthetic oligonucleotide
  Target: LAMA2; (+) strand; PAM type: NRG; PAM sequence: GGG
tatgcttttcctacaatttt

SEQ ID NO: 174192 - DNA, 20 bp, Artificial Sequence
  Description of Artificial Sequence: Synthetic oligonucleotide
  Target: LAMA2; (+) strand; PAM type: NRG; PAM sequence: TAG
ttgggattgtcgtaatttaa

SEQ ID NO: 174193 - DNA, 20 bp, Artificial Sequence
  Description of Artificial Sequence: Synthetic oligonucleotide
  Target: LAMA2; (+) strand; PAM type: NRG; PAM sequence: CGG
ggattgtcgtaatttaatag

SEQ ID NO: 174194 - DNA, 20 bp, Artificial Sequence
  Description of Artificial Sequence: Synthetic oligonucleotide
  Target: LAMA2; (+) strand; PAM type: NRG; PAM sequence: TAG
taatttaatagcggtgctat

SEQ ID NO: 174195 - DNA, 20 bp, Artificial Sequence
  Description of Artificial Sequence: Synthetic oligonucleotide
  Target: LAMA2; (+) strand; PAM type: NRG; PAM sequence: AAG
atagcggtgctattagcccc

SEQ ID NO: 174196 - DNA, 20 bp, Artificial Sequence
  Description of Artificial Sequence: Synthetic oligonucleotide
  Target: LAMA2; (+) strand; PAM type: NRG; PAM sequence: CAG
agccccaagaataatttgcc

SEQ ID NO: 174197 - DNA, 20 bp, Artificial Sequence
  Description of Artificial Sequence: Synthetic oligonucleotide
  Target: LAMA2; (+) strand; PAM type: NRG; PAM sequence: AAG
ataaatctacatcacatgca

SEQ ID NO: 174198 - DNA, 20 bp, Artificial Sequence
  Description of Artificial Sequence: Synthetic oligonucleotide
  Target: LAMA2; (+) strand; PAM type: NRG; PAM sequence: AAG
acttaatacttactgttata

SEQ ID NO: 174199 - DNA, 20 bp, Artificial Sequence
  Description of Artificial Sequence: Synthetic oligonucleotide
  Target: LAMA2; (+) strand; PAM type: NRG; PAM sequence: AAG
agaaaaaatgctaatgtttg

SEQ ID NO: 174200 - DNA, 20 bp, Artificial Sequence
  Description of Artificial Sequence: Synthetic oligonucleotide
  Target: LAMA2; (+) strand; PAM type: NRG; PAM sequence: TGG
atgctaatgtttgaagacct

SEQ ID NO: 174201 - DNA, 20 bp, Artificial Sequence
  Description of Artificial Sequence: Synthetic oligonucleotide
  Target: LAMA2; (+) strand; PAM type: NRG; PAM sequence: AAG
acttttgccactttataatg

SEQ ID NO: 174202 - DNA, 20 bp, Artificial Sequence
  Description of Artificial Sequence: Synthetic oligonucleotide
  Target: LAMA2; (+) strand; PAM type: NRG; PAM sequence: AGG
cttttgccactttataatga

SEQ ID NO: 174203 - DNA, 20 bp, Artificial Sequence
  Description of Artificial Sequence: Synthetic oligonucleotide
  Target: LAMA2; (+) strand; PAM type: NRG; PAM sequence: GGG
ttttgccactttataatgaa

SEQ ID NO: 174204 - DNA, 20 bp, Artificial Sequence
  Description of Artificial Sequence: Synthetic oligonucleotide
  Target: LAMA2; (+) strand; PAM type: NRG; PAM sequence: TGG
tgccactttataatgaaggg

SEQ ID NO: 174205 - DNA, 20 bp, Artificial Sequence
  Description of Artificial Sequence: Synthetic oligonucleotide
  Target: LAMA2; (+) strand; PAM type: NRG; PAM sequence: GGG
gccactttataatgaagggt

SEQ ID NO: 174206 - DNA, 20 bp, Artificial Sequence
  Description of Artificial Sequence: Synthetic oligonucleotide
  Target: LAMA2; (+) strand; PAM type: NRG; PAM sequence: TGG
actttataatgaagggtggg

SEQ ID NO: 174207 - DNA, 20 bp, Artificial Sequence
  Description of Artificial Sequence: Synthetic oligonucleotide
  Target: LAMA2; (+) strand; PAM type: NRG; PAM sequence: CAG
ttataatgaagggtgggtgg

SEQ ID NO: 174208 - DNA, 20 bp, Artificial Sequence
  Description of Artificial Sequence: Synthetic oligonucleotide
  Target: LAMA2; (+) strand; PAM type: NRG; PAM sequence: AAG
tgggtggcagatgaaacaca

SEQ ID NO: 174209 - DNA, 20 bp, Artificial Sequence
  Description of Artificial Sequence: Synthetic oligonucleotide
  Target: LAMA2; (+) strand; PAM type: NRG; PAM sequence: TAG
tggcagatgaaacacaaagc

SEQ ID NO: 174210 - DNA, 20 bp, Artificial Sequence
  Description of Artificial Sequence: Synthetic oligonucleotide
  Target: LAMA2; (+) strand; PAM type: NRG; PAM sequence: AGG
ggcagatgaaacacaaagct

SEQ ID NO: 174211 - DNA, 20 bp, Artificial Sequence
  Description of Artificial Sequence: Synthetic oligonucleotide
  Target: LAMA2; (+) strand; PAM type: NRG; PAM sequence: CAG
aacacaaagctaggtatcat

SEQ ID NO: 174212 - DNA, 20 bp, Artificial Sequence
  Description of Artificial Sequence: Synthetic oligonucleotide
  Target: LAMA2; (+) strand; PAM type: NRG; PAM sequence: CAG
aagctaggtatcatcagatc

SEQ ID NO: 174213 - DNA, 20 bp, Artificial Sequence
  Description of Artificial Sequence: Synthetic oligonucleotide
  Target: LAMA2; (+) strand; PAM type: NRG; PAM sequence: AGG
agctaggtatcatcagatcc

SEQ ID NO: 174214 - DNA, 20 bp, Artificial Sequence
  Description of Artificial Sequence: Synthetic oligonucleotide
  Target: LAMA2; (+) strand; PAM type: NRG; PAM sequence: AAG
tatcatcagatccaggctct

SEQ ID NO: 174215 - DNA, 20 bp, Artificial Sequence
  Description of Artificial Sequence: Synthetic oligonucleotide
  Target: LAMA2; (+) strand; PAM type: NRG; PAM sequence: TGG
ccaggctctaagtccttact

SEQ ID NO: 174216 - DNA, 20 bp, Artificial Sequence
  Description of Artificial Sequence: Synthetic oligonucleotide
  Target: LAMA2; (+) strand; PAM type: NRG; PAM sequence: GGG
caggctctaagtccttactt

SEQ ID NO: 174217 - DNA, 20 bp, Artificial Sequence
  Description of Artificial Sequence: Synthetic oligonucleotide
  Target: LAMA2; (+) strand; PAM type: NRG; PAM sequence: GGG
aggctctaagtccttacttg

SEQ ID NO: 174218 - DNA, 20 bp, Artificial Sequence
  Description of Artificial Sequence: Synthetic oligonucleotide
  Target: LAMA2; (+) strand; PAM type: NRG; PAM sequence: TGG
gtccttacttggggacatat

SEQ ID NO: 174219 - DNA, 20 bp, Artificial Sequence
  Description of Artificial Sequence: Synthetic oligonucleotide
  Target: LAMA2; (+) strand; PAM type: NRG; PAM sequence: TGG
ttggggacatattggtcatt

SEQ ID NO: 174220 - DNA, 20 bp, Artificial Sequence
  Description of Artificial Sequence: Synthetic oligonucleotide
  Target: LAMA2; (+) strand; PAM type: NRG; PAM sequence: CAG
attggtcatttggcctgaaa

SEQ ID NO: 174221 - DNA, 20 bp, Artificial Sequence
  Description of Artificial Sequence: Synthetic oligonucleotide
  Target: LAMA2; (+) strand; PAM type: NRG; PAM sequence: AGG
ttggtcatttggcctgaaac

SEQ ID NO: 174222 - DNA, 20 bp, Artificial Sequence
  Description of Artificial Sequence: Synthetic oligonucleotide
  Target: LAMA2; (+) strand; PAM type: NRG; PAM sequence: TGG
ttaaccttctgaaattcact

SEQ ID NO: 174223 - DNA, 20 bp, Artificial Sequence
  Description of Artificial Sequence: Synthetic oligonucleotide
  Target: LAMA2; (+) strand; PAM type: NRG; PAM sequence: TGG
gaaattcacttggtctcttc

SEQ ID NO: 174224 - DNA, 20 bp, Artificial Sequence
  Description of Artificial Sequence: Synthetic oligonucleotide
  Target: LAMA2; (+) strand; PAM type: NRG; PAM sequence: GGG
aaattcacttggtctcttct

SEQ ID NO: 174225 - DNA, 20 bp, Artificial Sequence
  Description of Artificial Sequence: Synthetic oligonucleotide
  Target: LAMA2; (+) strand; PAM type: NRG; PAM sequence: AAG
ttcacttggtctcttctggg

SEQ ID NO: 174226 - DNA, 20 bp, Artificial Sequence
  Description of Artificial Sequence: Synthetic oligonucleotide
  Target: LAMA2; (+) strand; PAM type: NRG; PAM sequence: CAG
tctgggaagtgcacctaccc

SEQ ID NO: 174227 - DNA, 20 bp, Artificial Sequence
  Description of Artificial Sequence: Synthetic oligonucleotide
  Target: LAMA2; (+) strand; PAM type: NRG; PAM sequence: AAG
ggaagtgcacctaccccaga

SEQ ID NO: 174228 - DNA, 20 bp, Artificial Sequence
  Description of Artificial Sequence: Synthetic oligonucleotide
  Target: LAMA2; (+) strand; PAM type: NRG; PAM sequence: CAG
agattttgtgaaattaattc

SEQ ID NO: 174229 - DNA, 20 bp, Artificial Sequence
  Description of Artificial Sequence: Synthetic oligonucleotide
  Target: LAMA2; (+) strand; PAM type: NRG; PAM sequence: TAG
tgaaattaattccagtaatg

SEQ ID NO: 174230 - DNA, 20 bp, Artificial Sequence
  Description of Artificial Sequence: Synthetic oligonucleotide
  Target: LAMA2; (+) strand; PAM type: NRG; PAM sequence: AAG
taattccagtaatgtagtac

SEQ ID NO: 174231 - DNA, 20 bp, Artificial Sequence
  Description of Artificial Sequence: Synthetic oligonucleotide
  Target: LAMA2; (+) strand; PAM type: NRG; PAM sequence: CAG
tacaagtgctctgaatctca

SEQ ID NO: 174232 - DNA, 20 bp, Artificial Sequence
  Description of Artificial Sequence: Synthetic oligonucleotide
  Target: LAMA2; (+) strand; PAM type: NRG; PAM sequence: AAG
tcacagcatgcttcacaaat

SEQ ID NO: 174233 - DNA, 20 bp, Artificial Sequence
  Description of Artificial Sequence: Synthetic oligonucleotide
  Target: LAMA2; (+) strand; PAM type: NRG; PAM sequence: AGG
cacagcatgcttcacaaata

SEQ ID NO: 174234 - DNA, 20 bp, Artificial Sequence
  Description of Artificial Sequence: Synthetic oligonucleotide
  Target: LAMA2; (+) strand; PAM type: NRG; PAM sequence: AAG
catgcttcacaaataaggtg

SEQ ID NO: 174235 - DNA, 20 bp, Artificial Sequence
  Description of Artificial Sequence: Synthetic oligonucleotide
  Target: LAMA2; (+) strand; PAM type: NRG; PAM sequence: TAG
gtctcatatcacacacctgc

SEQ ID NO: 174236 - DNA, 20 bp, Artificial Sequence
  Description of Artificial Sequence: Synthetic oligonucleotide
  Target: LAMA2; (+) strand; PAM type: NRG; PAM sequence: GAG
ctcatatcacacacctgcta

SEQ ID NO: 174237 - DNA, 20 bp, Artificial Sequence
  Description of Artificial Sequence: Synthetic oligonucleotide
  Target: LAMA2; (+) strand; PAM type: NRG; PAM sequence: TGG
cacacacctgctagagcacc

SEQ ID NO: 174238 - DNA, 20 bp, Artificial Sequence
  Description of Artificial Sequence: Synthetic oligonucleotide
  Target: LAMA2; (+) strand; PAM type: NRG; PAM sequence: CAG
cctgctagagcacctggttg

SEQ ID NO: 174239 - DNA, 20 bp, Artificial Sequence
  Description of Artificial Sequence: Synthetic oligonucleotide
  Target: LAMA2; (+) strand; PAM type: NRG; PAM sequence: GAG
tgctagagcacctggttgca

SEQ ID NO: 174240 - DNA, 20 bp, Artificial Sequence
  Description of Artificial Sequence: Synthetic oligonucleotide
  Target: LAMA2; (+) strand; PAM type: NRG; PAM sequence: TGG
cacctggttgcagagacttt

SEQ ID NO: 174241 - DNA, 20 bp, Artificial Sequence
  Description of Artificial Sequence: Synthetic oligonucleotide
  Target: LAMA2; (+) strand; PAM type: NRG; PAM sequence: GAG
cctggttgcagagacttttg

SEQ ID NO: 174242 - DNA, 20 bp, Artificial Sequence
  Description of Artificial Sequence: Synthetic oligonucleotide
  Target: LAMA2; (+) strand; PAM type: NRG; PAM sequence: AGG
ctggttgcagagacttttgg

SEQ ID NO: 174243 - DNA, 20 bp, Artificial Sequence
  Description of Artificial Sequence: Synthetic oligonucleotide
  Target: LAMA2; (+) strand; PAM type: NRG; PAM sequence: TGG
gagacttttggaggatgcta

SEQ ID NO: 174244 - DNA, 20 bp, Artificial Sequence
  Description of Artificial Sequence: Synthetic oligonucleotide
  Target: LAMA2; (+) strand; PAM type: NRG; PAM sequence: GGG
agacttttggaggatgctat

SEQ ID NO: 174245 - DNA, 20 bp, Artificial Sequence
  Description of Artificial Sequence: Synthetic oligonucleotide
  Target: LAMA2; (+) strand; PAM type: NRG; PAM sequence: AAG
ggaggatgctatgggtattt

SEQ ID NO: 174246 - DNA, 20 bp, Artificial Sequence
  Description of Artificial Sequence: Synthetic oligonucleotide
  Target: LAMA2; (+) strand; PAM type: NRG; PAM sequence: TGG
tatgggtatttaagatatgt

SEQ ID NO: 174247 - DNA, 20 bp, Artificial Sequence
  Description of Artificial Sequence: Synthetic oligonucleotide
  Target: LAMA2; (+) strand; PAM type: NRG; PAM sequence: TAG
gggtatttaagatatgttgg

SEQ ID NO: 174248 - DNA, 20 bp, Artificial Sequence
  Description of Artificial Sequence: Synthetic oligonucleotide
  Target: LAMA2; (+) strand; PAM type: NRG; PAM sequence: TAG
gatatgttggtagtatttca

SEQ ID NO: 174249 - DNA, 20 bp, Artificial Sequence
  Description of Artificial Sequence: Synthetic oligonucleotide
  Target: LAMA2; (+) strand; PAM type: NRG; PAM sequence: TAG
gtatttcatagctgaattat

SEQ ID NO: 174250 - DNA, 20 bp, Artificial Sequence
  Description of Artificial Sequence: Synthetic oligonucleotide
  Target: LAMA2; (+) strand; PAM type: NRG; PAM sequence: AAG
agctgaattattagaaatat

SEQ ID NO: 174251 - DNA, 20 bp, Artificial Sequence
  Description of Artificial Sequence: Synthetic oligonucleotide
  Target: LAMA2; (+) strand; PAM type: NRG; PAM sequence: TAG
aattattagaaatataagtt

SEQ ID NO: 174252 - DNA, 20 bp, Artificial Sequence
  Description of Artificial Sequence: Synthetic oligonucleotide
  Target: LAMA2; (+) strand; PAM type: NRG; PAM sequence: AGG
attattagaaatataagttt

SEQ ID NO: 174253 - DNA, 20 bp, Artificial Sequence
  Description of Artificial Sequence: Synthetic oligonucleotide
  Target: LAMA2; (+) strand; PAM type: NRG; PAM sequence: TAG
agaaatataagtttaggtta

SEQ ID NO: 174254 - DNA, 20 bp, Artificial Sequence
  Description of Artificial Sequence: Synthetic oligonucleotide
  Target: LAMA2; (+) strand; PAM type: NRG; PAM sequence: TAG
gtttaggttatagaaaacta

SEQ ID NO: 174255 - DNA, 20 bp, Artificial Sequence
  Description of Artificial Sequence: Synthetic oligonucleotide
  Target: LAMA2; (+) strand; PAM type: NRG; PAM sequence: AGG
tttaggttatagaaaactat

SEQ ID NO: 174256 - DNA, 20 bp, Artificial Sequence
  Description of Artificial Sequence: Synthetic oligonucleotide
  Target: LAMA2; (+) strand; PAM type: NRG; PAM sequence: AAG
aaactataggacaatataat

SEQ ID NO: 174257 - DNA, 20 bp, Artificial Sequence
  Description of Artificial Sequence: Synthetic oligonucleotide
  Target: LAMA2; (+) strand; PAM type: NRG; PAM sequence: TAG
ctataggacaatataataag

SEQ ID NO: 174258 - DNA, 20 bp, Artificial Sequence
  Description of Artificial Sequence: Synthetic oligonucleotide
  Target: LAMA2; (+) strand; PAM type: NRG; PAM sequence: TGG
gtagatacttcactattatt

SEQ ID NO: 174259 - DNA, 20 bp, Artificial Sequence
  Description of Artificial Sequence: Synthetic oligonucleotide
  Target: LAMA2; (+) strand; PAM type: NRG; PAM sequence: TAG
actattatttggaattgtca

SEQ ID NO: 174260 - DNA, 20 bp, Artificial Sequence
  Description of Artificial Sequence: Synthetic oligonucleotide
  Target: LAMA2; (+) strand; PAM type: NRG; PAM sequence: TGG
tggaattgtcatagatatat

SEQ ID NO: 174261 - DNA, 20 bp, Artificial Sequence
  Description of Artificial Sequence: Synthetic oligonucleotide
  Target: LAMA2; (+) strand; PAM type: NRG; PAM sequence: TGG
atatattggccatgatcatt

SEQ ID NO: 174262 - DNA, 20 bp, Artificial Sequence
  Description of Artificial Sequence: Synthetic oligonucleotide
  Target: LAMA2; (+) strand; PAM type: NRG; PAM sequence: AAG
tattggccatgatcatttgg

SEQ ID NO: 174263 - DNA, 20 bp, Artificial Sequence
  Description of Artificial Sequence: Synthetic oligonucleotide
  Target: LAMA2; (+) strand; PAM type: NRG; PAM sequence: CAG
ggccatgatcatttggaagc

SEQ ID NO: 174264 - DNA, 20 bp, Artificial Sequence
  Description of Artificial Sequence: Synthetic oligonucleotide
  Target: LAMA2; (+) strand; PAM type: NRG; PAM sequence: TAG
gaagccagatttcatataat

SEQ ID NO: 174265 - DNA, 20 bp, Artificial Sequence
  Description of Artificial Sequence: Synthetic oligonucleotide
  Target: LAMA2; (+) strand; PAM type: NRG; PAM sequence: AGG
aagccagatttcatataatt

SEQ ID NO: 174266 - DNA, 20 bp, Artificial Sequence
  Description of Artificial Sequence: Synthetic oligonucleotide
  Target: LAMA2; (+) strand; PAM type: NRG; PAM sequence: GAG
aattaggacgttcttcattt

SEQ ID NO: 174267 - DNA, 20 bp, Artificial Sequence
  Description of Artificial Sequence: Synthetic oligonucleotide
  Target: LAMA2; (+) strand; PAM type: NRG; PAM sequence: GAG
ttcttcatttgagtaccatt

SEQ ID NO: 174268 - DNA, 20 bp, Artificial Sequence
  Description of Artificial Sequence: Synthetic oligonucleotide
  Target: LAMA2; (+) strand; PAM type: NRG; PAM sequence: CAG
ccttttttgaatcatcccac

SEQ ID NO: 174269 - DNA, 20 bp, Artificial Sequence
  Description of Artificial Sequence: Synthetic oligonucleotide
  Target: LAMA2; (+) strand; PAM type: NRG; PAM sequence: GAG
atcccaccagaatccttgat

SEQ ID NO: 174270 - DNA, 20 bp, Artificial Sequence
  Description of Artificial Sequence: Synthetic oligonucleotide
  Target: LAMA2; (+) strand; PAM type: NRG; PAM sequence: AGG
tcccaccagaatccttgatg

SEQ ID NO: 174271 - DNA, 20 bp, Artificial Sequence
  Description of Artificial Sequence: Synthetic oligonucleotide
  Target: LAMA2; (+) strand; PAM type: NRG; PAM sequence: CAG
catctccttcaatgccactg

SEQ ID NO: 174272 - DNA, 20 bp, Artificial Sequence
  Description of Artificial Sequence: Synthetic oligonucleotide
  Target: LAMA2; (+) strand; PAM type: NRG; PAM sequence: AAG
caatgccactgcagccttca

SEQ ID NO: 174273 - DNA, 20 bp, Artificial Sequence
  Description of Artificial Sequence: Synthetic oligonucleotide
  Target: LAMA2; (+) strand; PAM type: NRG; PAM sequence: CAG
actgcagccttcaaagctta

SEQ ID NO: 174274 - DNA, 20 bp, Artificial Sequence
  Description of Artificial Sequence: Synthetic oligonucleotide
  Target: LAMA2; (+) strand; PAM type: NRG; PAM sequence: AAG
tcaaagcttacagcaatatt

SEQ ID NO: 174275 - DNA, 20 bp, Artificial Sequence
  Description of Artificial Sequence: Synthetic oligonucleotide
  Target: LAMA2; (+) strand; PAM type: NRG; PAM sequence: AGG
caaagcttacagcaatatta

SEQ ID NO: 174276 - DNA, 20 bp, Artificial Sequence
  Description of Artificial Sequence: Synthetic oligonucleotide
  Target: LAMA2; (+) strand; PAM type: NRG; PAM sequence: AAG
tattaaggactatattgatg

SEQ ID NO: 174277 - DNA, 20 bp, Artificial Sequence
  Description of Artificial Sequence: Synthetic oligonucleotide
  Target: LAMA2; (+) strand; PAM type: NRG; PAM sequence: GAG
aggactatattgatgaagct

SEQ ID NO: 174278 - DNA, 20 bp, Artificial Sequence
  Description of Artificial Sequence: Synthetic oligonucleotide
  Target: LAMA2; (+) strand; PAM type: NRG; PAM sequence: AAG
ctatattgatgaagctgaga

SEQ ID NO: 174279 - DNA, 20 bp, Artificial Sequence
  Description of Artificial Sequence: Synthetic oligonucleotide
  Target: LAMA2; (+) strand; PAM type: NRG; PAM sequence: AAG
tgaagctgagaaagttgcca

SEQ ID NO: 174280 - DNA, 20 bp, Artificial Sequence
  Description of Artificial Sequence: Synthetic oligonucleotide
  Target: LAMA2; (+) strand; PAM type: NRG; PAM sequence: AAG
agctgagaaagttgccaaag

SEQ ID NO: 174281 - DNA, 20 bp, Artificial Sequence
  Description of Artificial Sequence: Synthetic oligonucleotide
  Target: LAMA2; (+) strand; PAM type: NRG; PAM sequence: AAG
gaaagttgccaaagaagcca

SEQ ID NO: 174282 - DNA, 20 bp, Artificial Sequence
  Description of Artificial Sequence: Synthetic oligonucleotide
  Target: LAMA2; (+) strand; PAM type: NRG; PAM sequence: AAG
agccaaagatcttgcacatg

SEQ ID NO: 174283 - DNA, 20 bp, Artificial Sequence
  Description of Artificial Sequence: Synthetic oligonucleotide
  Target: LAMA2; (+) strand; PAM type: NRG; PAM sequence: TGG
tgcacatgaagctacaaaac

SEQ ID NO: 174284 - DNA, 20 bp, Artificial Sequence
  Description of Artificial Sequence: Synthetic oligonucleotide
  Target: LAMA2; (+) strand; PAM type: NRG; PAM sequence: AAG
catgaagctacaaaactggt

SEQ ID NO: 174285 - DNA, 20 bp, Artificial Sequence
  Description of Artificial Sequence: Synthetic oligonucleotide
  Target: LAMA2; (+) strand; PAM type: NRG; PAM sequence: TGG
caaaactggtaagaaacaaa

SEQ ID NO: 174286 - DNA, 20 bp, Artificial Sequence
  Description of Artificial Sequence: Synthetic oligonucleotide
  Target: LAMA2; (+) strand; PAM type: NRG; PAM sequence: TGG
gaaacaaatggcacatgtgc

SEQ ID NO: 174287 - DNA, 20 bp, Artificial Sequence
  Description of Artificial Sequence: Synthetic oligonucleotide
  Target: LAMA2; (+) strand; PAM type: NRG; PAM sequence: GGG
aaacaaatggcacatgtgct

SEQ ID NO: 174288 - DNA, 20 bp, Artificial Sequence
  Description of Artificial Sequence: Synthetic oligonucleotide
  Target: LAMA2; (+) strand; PAM type: NRG; PAM sequence: TGG
aatggcacatgtgctgggaa

SEQ ID NO: 174289 - DNA, 20 bp, Artificial Sequence
  Description of Artificial Sequence: Synthetic oligonucleotide
  Target: LAMA2; (+) strand; PAM type: NRG; PAM sequence: AAG
ggcacatgtgctgggaatgg

SEQ ID NO: 174290 - DNA, 20 bp, Artificial Sequence
  Description of Artificial Sequence: Synthetic oligonucleotide
  Target: LAMA2; (+) strand; PAM type: NRG; PAM sequence: AAG
tttttgaatttttcaaatgt

SEQ ID NO: 174291 - DNA, 20 bp, Artificial Sequence
  Description of Artificial Sequence: Synthetic oligonucleotide
  Target: LAMA2; (+) strand; PAM type: NRG; PAM sequence: CAG
tgaatttttcaaatgtaagt

SEQ ID NO: 174292 - DNA, 20 bp, Artificial Sequence
  Description of Artificial Sequence: Synthetic oligonucleotide
  Target: LAMA2; (+) strand; PAM type: NRG; PAM sequence: TGG
ttttcaaatgtaagtcagtc

SEQ ID NO: 174293 - DNA, 20 bp, Artificial Sequence
  Description of Artificial Sequence: Synthetic oligonucleotide
  Target: LAMA2; (+) strand; PAM type: NRG; PAM sequence: CAG
taagtcagtctggaaaatcc

SEQ ID NO: 174294 - DNA, 20 bp, Artificial Sequence
  Description of Artificial Sequence: Synthetic oligonucleotide
  Target: LAMA2; (+) strand; PAM type: NRG; PAM sequence: TGG
tctggaaaatcccagtaaat

SEQ ID NO: 174295 - DNA, 20 bp, Artificial Sequence
  Description of Artificial Sequence: Synthetic oligonucleotide
  Target: LAMA2; (+) strand; PAM type: NRG; PAM sequence: TGG
gtaaattggtatatttgttt

SEQ ID NO: 174296 - DNA, 20 bp, Artificial Sequence
  Description of Artificial Sequence: Synthetic oligonucleotide
  Target: LAMA2; (+) strand; PAM type: NRG; PAM sequence: GGG
taaattggtatatttgtttt

SEQ ID NO: 174297 - DNA, 20 bp, Artificial Sequence
  Description of Artificial Sequence: Synthetic oligonucleotide
  Target: LAMA2; (+) strand; PAM type: NRG; PAM sequence: AAG
tttgttttgggttatttttg

SEQ ID NO: 174298 - DNA, 20 bp, Artificial Sequence
  Description of Artificial Sequence: Synthetic oligonucleotide
  Target: LAMA2; (+) strand; PAM type: NRG; PAM sequence: CGG
atttgcctaaaataaattct

SEQ ID NO: 174299 - DNA, 20 bp, Artificial Sequence
  Description of Artificial Sequence: Synthetic oligonucleotide
  Target: LAMA2; (+) strand; PAM type: NRG; PAM sequence: TAG
ttctcggtatgctataatta

SEQ ID NO: 174300 - DNA, 20 bp, Artificial Sequence
  Description of Artificial Sequence: Synthetic oligonucleotide
  Target: LAMA2; (+) strand; PAM type: NRG; PAM sequence: CAG
tcggtatgctataattatag

SEQ ID NO: 174301 - DNA, 20 bp, Artificial Sequence
  Description of Artificial Sequence: Synthetic oligonucleotide
  Target: LAMA2; (+) strand; PAM type: NRG; PAM sequence: CAG
ttatagcagaactcttttct

SEQ ID NO: 174302 - DNA, 20 bp, Artificial Sequence
  Description of Artificial Sequence: Synthetic oligonucleotide
  Target: LAMA2; (+) strand; PAM type: NRG; PAM sequence: TAG
cagtcacccactaccactgt

SEQ ID NO: 174303 - DNA, 20 bp, Artificial Sequence
  Description of Artificial Sequence: Synthetic oligonucleotide
  Target: LAMA2; (+) strand; PAM type: NRG; PAM sequence: AGG
agtcacccactaccactgtt

SEQ ID NO: 174304 - DNA, 20 bp, Artificial Sequence
  Description of Artificial Sequence: Synthetic oligonucleotide
  Target: LAMA2; (+) strand; PAM type: NRG; PAM sequence: GGG
gtcacccactaccactgtta

SEQ ID NO: 174305 - DNA, 20 bp, Artificial Sequence
  Description of Artificial Sequence: Synthetic oligonucleotide
  Target: LAMA2; (+) strand; PAM type: NRG; PAM sequence: CAG
ttagggtcttaaaattatct

SEQ ID NO: 174306 - DNA, 20 bp, Artificial Sequence
  Description of Artificial Sequence: Synthetic oligonucleotide
  Target: LAMA2; (+) strand; PAM type: NRG; PAM sequence: AAG
ttaaaattatctcagaaacc

SEQ ID NO: 174307 - DNA, 20 bp, Artificial Sequence
  Description of Artificial Sequence: Synthetic oligonucleotide
  Target: LAMA2; (+) strand; PAM type: NRG; PAM sequence: AAG
aattatctcagaaaccaagc

SEQ ID NO: 174308 - DNA, 20 bp, Artificial Sequence
  Description of Artificial Sequence: Synthetic oligonucleotide
  Target: LAMA2; (+) strand; PAM type: NRG; PAM sequence: CAG
taccaactcacaaaataaaa

SEQ ID NO: 174309 - DNA, 20 bp, Artificial Sequence
  Description of Artificial Sequence: Synthetic oligonucleotide
  Target: LAMA2; (+) strand; PAM type: NRG; PAM sequence: AGG
accaactcacaaaataaaac

SEQ ID NO: 174310 - DNA, 20 bp, Artificial Sequence
  Description of Artificial Sequence: Synthetic oligonucleotide
  Target: LAMA2; (+) strand; PAM type: NRG; PAM sequence: AAG
ctcacaaaataaaacaggca

SEQ ID NO: 174311 - DNA, 20 bp, Artificial Sequence
  Description of Artificial Sequence: Synthetic oligonucleotide
  Target: LAMA2; (+) strand; PAM type: NRG; PAM sequence: TGG
aacaggcaaagacaacactc

SEQ ID NO: 174312 - DNA, 20 bp, Artificial Sequence
  Description of Artificial Sequence: Synthetic oligonucleotide
  Target: LAMA2; (+) strand; PAM type: NRG; PAM sequence: TAG
ggcaaagacaacactctgga

SEQ ID NO: 174313 - DNA, 20 bp, Artificial Sequence
  Description of Artificial Sequence: Synthetic oligonucleotide
  Target: LAMA2; (+) strand; PAM type: NRG; PAM sequence: AGG
gcaaagacaacactctggat

SEQ ID NO: 174314 - DNA, 20 bp, Artificial Sequence
  Description of Artificial Sequence: Synthetic oligonucleotide
  Target: LAMA2; (+) strand; PAM type: NRG; PAM sequence: GGG
caaagacaacactctggata

SEQ ID NO: 174315 - DNA, 20 bp, Artificial Sequence
  Description of Artificial Sequence: Synthetic oligonucleotide
  Target: LAMA2; (+) strand; PAM type: NRG; PAM sequence: TGG
tttatcaccattatctcaaa

SEQ ID NO: 174316 - DNA, 20 bp, Artificial Sequence
  Description of Artificial Sequence: Synthetic oligonucleotide
  Target: LAMA2; (+) strand; PAM type: NRG; PAM sequence: TAG
accattatctcaaatggcat

SEQ ID NO: 174317 - DNA, 20 bp, Artificial Sequence
  Description of Artificial Sequence: Synthetic oligonucleotide
  Target: LAMA2; (+) strand; PAM type: NRG; PAM sequence: AAG
ctcaaatggcattagtaaaa

SEQ ID NO: 174318 - DNA, 20 bp, Artificial Sequence
  Description of Artificial Sequence: Synthetic oligonucleotide
  Target: LAMA2; (+) strand; PAM type: NRG; PAM sequence: AAG
cattagtaaaaaagaaaaaa

SEQ ID NO: 174319 - DNA, 20 bp, Artificial Sequence
  Description of Artificial Sequence: Synthetic oligonucleotide
  Target: LAMA2; (+) strand; PAM type: NRG; PAM sequence: TGG
gtatataatcacacacaaat

SEQ ID NO: 174320 - DNA, 20 bp, Artificial Sequence
  Description of Artificial Sequence: Synthetic oligonucleotide
  Target: LAMA2; (+) strand; PAM type: NRG; PAM sequence: AAG
acacaaattggttacatatg

SEQ ID NO: 174321 - DNA, 20 bp, Artificial Sequence
  Description of Artificial Sequence: Synthetic oligonucleotide
  Target: LAMA2; (+) strand; PAM type: NRG; PAM sequence: TGG
aattggttacatatgaagtt

SEQ ID NO: 174322 - DNA, 20 bp, Artificial Sequence
  Description of Artificial Sequence: Synthetic oligonucleotide
  Target: LAMA2; (+) strand; PAM type: NRG; PAM sequence: TGG
actttttaataaaaacatac

SEQ ID NO: 174323 - DNA, 20 bp, Artificial Sequence
  Description of Artificial Sequence: Synthetic oligonucleotide
  Target: LAMA2; (+) strand; PAM type: NRG; PAM sequence: AAG
ttatgaatttttgaattaaa

SEQ ID NO: 174324 - DNA, 20 bp, Artificial Sequence
  Description of Artificial Sequence: Synthetic oligonucleotide
  Target: LAMA2; (+) strand; PAM type: NRG; PAM sequence: TGG
attaaaaagctcttaacctt

SEQ ID NO: 174325 - DNA, 20 bp, Artificial Sequence
  Description of Artificial Sequence: Synthetic oligonucleotide
  Target: LAMA2; (+) strand; PAM type: NRG; PAM sequence: TGG
atcattgttcgtaatacatt

SEQ ID NO: 174326 - DNA, 20 bp, Artificial Sequence
  Description of Artificial Sequence: Synthetic oligonucleotide
  Target: LAMA2; (+) strand; PAM type: NRG; PAM sequence: AAG
gttcgtaatacatttggaac

SEQ ID NO: 174327 - DNA, 20 bp, Artificial Sequence
  Description of Artificial Sequence: Synthetic oligonucleotide
  Target: LAMA2; (+) strand; PAM type: NRG; PAM sequence: TAG
tacatttggaacaagtattt

SEQ ID NO: 174328 - DNA, 20 bp, Artificial Sequence
  Description of Artificial Sequence: Synthetic oligonucleotide
  Target: LAMA2; (+) strand; PAM type: NRG; PAM sequence: GAG
catttggaacaagtatttta

SEQ ID NO: 174329 - DNA, 20 bp, Artificial Sequence
  Description of Artificial Sequence: Synthetic oligonucleotide
  Target: LAMA2; (+) strand; PAM type: NRG; PAM sequence: TGG
ggaacaagtattttagagtt

SEQ ID NO: 174330 - DNA, 20 bp, Artificial Sequence
  Description of Artificial Sequence: Synthetic oligonucleotide
  Target: LAMA2; (+) strand; PAM type: NRG; PAM sequence: GGG
gaacaagtattttagagttt

SEQ ID NO: 174331 - DNA, 20 bp, Artificial Sequence
  Description of Artificial Sequence: Synthetic oligonucleotide
  Target: LAMA2; (+) strand; PAM type: NRG; PAM sequence: AAG
ttttagagtttgggcattcc

SEQ ID NO: 174332 - DNA, 20 bp, Artificial Sequence
  Description of Artificial Sequence: Synthetic oligonucleotide
  Target: LAMA2; (+) strand; PAM type: NRG; PAM sequence: TGG
cattatttgaatgccttcaa

SEQ ID NO: 174333 - DNA, 20 bp, Artificial Sequence
  Description of Artificial Sequence: Synthetic oligonucleotide
  Target: LAMA2; (+) strand; PAM type: NRG; PAM sequence: TAG
ggtgacaaatctttatgctt

SEQ ID NO: 174334 - DNA, 20 bp, Artificial Sequence
  Description of Artificial Sequence: Synthetic oligonucleotide
  Target: LAMA2; (+) strand; PAM type: NRG; PAM sequence: AAG
atctttatgctttagatgta

SEQ ID NO: 174335 - DNA, 20 bp, Artificial Sequence
  Description of Artificial Sequence: Synthetic oligonucleotide
  Target: LAMA2; (+) strand; PAM type: NRG; PAM sequence: GAG
taaagcaacattttgtacat

SEQ ID NO: 174336 - DNA, 20 bp, Artificial Sequence
  Description of Artificial Sequence: Synthetic oligonucleotide
  Target: LAMA2; (+) strand; PAM type: NRG; PAM sequence: TAG
tttgtacatgagttgtgtga

SEQ ID NO: 174337 - DNA, 20 bp, Artificial Sequence
  Description of Artificial Sequence: Synthetic oligonucleotide
  Target: LAMA2; (+) strand; PAM type: NRG; PAM sequence: AAG
tacatgagttgtgtgatagt

SEQ ID NO: 174338 - DNA, 20 bp, Artificial Sequence
  Description of Artificial Sequence: Synthetic oligonucleotide
  Target: LAMA2; (+) strand; PAM type: NRG; PAM sequence: TGG
tgagttgtgtgatagtaagt

SEQ ID NO: 174339 - DNA, 20 bp, Artificial Sequence
  Description of Artificial Sequence: Synthetic oligonucleotide
  Target: LAMA2; (+) strand; PAM type: NRG; PAM sequence: TAG
gttgtgtgatagtaagttgg

SEQ ID NO: 174340 - DNA, 20 bp, Artificial Sequence
  Description of Artificial Sequence: Synthetic oligonucleotide
  Target: LAMA2; (+) strand; PAM type: NRG; PAM sequence: CAG
gtaagttggtagtactattt

SEQ ID NO: 174341 - DNA, 20 bp, Artificial Sequence
  Description of Artificial Sequence: Synthetic oligonucleotide
  Target: LAMA2; (+) strand; PAM type: NRG; PAM sequence: AGG
taagttggtagtactatttc

SEQ ID NO: 174342 - DNA, 20 bp, Artificial Sequence
  Description of Artificial Sequence: Synthetic oligonucleotide
  Target: LAMA2; (+) strand; PAM type: NRG; PAM sequence: TAG
ttcaggttaaaaaaatctca

SEQ ID NO: 174343 - DNA, 20 bp, Artificial Sequence
  Description of Artificial Sequence: Synthetic oligonucleotide
  Target: LAMA2; (+) strand; PAM type: NRG; PAM sequence: AGG
tcaggttaaaaaaatctcat

SEQ ID NO: 174344 - DNA, 20 bp, Artificial Sequence
  Description of Artificial Sequence: Synthetic oligonucleotide
  Target: LAMA2; (+) strand; PAM type: NRG; PAM sequence: CAG
atcatcctgaataaaatgtt

SEQ ID NO: 174345 - DNA, 20 bp, Artificial Sequence
  Description of Artificial Sequence: Synthetic oligonucleotide
  Target: LAMA2; (+) strand; PAM type: NRG; PAM sequence: TAG
tttatttattttgtttcaca

SEQ ID NO: 174346 - DNA, 20 bp, Artificial Sequence
  Description of Artificial Sequence: Synthetic oligonucleotide
  Target: LAMA2; (+) strand; PAM type: NRG; PAM sequence: GAG
atagaacctaccaaacacat

SEQ ID NO: 174347 - DNA, 20 bp, Artificial Sequence
  Description of Artificial Sequence: Synthetic oligonucleotide
  Target: LAMA2; (+) strand; PAM type: NRG; PAM sequence: TGG
ccaaacacatgagaattttt

SEQ ID NO: 174348 - DNA, 20 bp, Artificial Sequence
  Description of Artificial Sequence: Synthetic oligonucleotide
  Target: LAMA2; (+) strand; PAM type: NRG; PAM sequence: GGG
caaacacatgagaatttttt

SEQ ID NO: 174349 - DNA, 20 bp, Artificial Sequence
  Description of Artificial Sequence: Synthetic oligonucleotide
  Target: LAMA2; (+) strand; PAM type: NRG; PAM sequence: GGG
aaacacatgagaattttttg

SEQ ID NO: 174350 - DNA, 20 bp, Artificial Sequence
  Description of Artificial Sequence: Synthetic oligonucleotide
  Target: LAMA2; (+) strand; PAM type: NRG; PAM sequence: GGG
aacacatgagaattttttgg

SEQ ID NO: 174351 - DNA, 20 bp, Artificial Sequence
  Description of Artificial Sequence: Synthetic oligonucleotide
  Target: LAMA2; (+) strand; PAM type: NRG; PAM sequence: GAG
cacatgagaattttttgggg

SEQ ID NO: 174352 - DNA, 20 bp, Artificial Sequence
  Description of Artificial Sequence: Synthetic oligonucleotide
  Target: LAMA2; (+) strand; PAM type: NRG; PAM sequence: TGG
ttttgggggagaaatctgat

SEQ ID NO: 174353 - DNA, 20 bp, Artificial Sequence
  Description of Artificial Sequence: Synthetic oligonucleotide
  Target: LAMA2; (+) strand; PAM type: NRG; PAM sequence: GAG
ctgattggacatttgactgt

SEQ ID NO: 174354 - DNA, 20 bp, Artificial Sequence
  Description of Artificial Sequence: Synthetic oligonucleotide
  Target: LAMA2; (+) strand; PAM type: NRG; PAM sequence: AAG
actgtgagtgaaatacacat

SEQ ID NO: 174355 - DNA, 20 bp, Artificial Sequence
  Description of Artificial Sequence: Synthetic oligonucleotide
  Target: LAMA2; (+) strand; PAM type: NRG; PAM sequence: CAG
gtgagtgaaatacacataag

SEQ ID NO: 174356 - DNA, 20 bp, Artificial Sequence
  Description of Artificial Sequence: Synthetic oligonucleotide
  Target: LAMA2; (+) strand; PAM type: NRG; PAM sequence: TGG
agtgaaatacacataagcag

SEQ ID NO: 174357 - DNA, 20 bp, Artificial Sequence
  Description of Artificial Sequence: Synthetic oligonucleotide
  Target: LAMA2; (+) strand; PAM type: NRG; PAM sequence: AAG
acacataagcagtggtgtta

SEQ ID NO: 174358 - DNA, 20 bp, Artificial Sequence
  Description of Artificial Sequence: Synthetic oligonucleotide
  Target: LAMA2; (+) strand; PAM type: NRG; PAM sequence: CAG
gatcaatattttctttgctt

SEQ ID NO: 174359 - DNA, 20 bp, Artificial Sequence
  Description of Artificial Sequence: Synthetic oligonucleotide
  Target: LAMA2; (+) strand; PAM type: NRG; PAM sequence: TGG
tattttctttgcttcagtgt

SEQ ID NO: 174360 - DNA, 20 bp, Artificial Sequence
  Description of Artificial Sequence: Synthetic oligonucleotide
  Target: LAMA2; (+) strand; PAM type: NRG; PAM sequence: GGG
attttctttgcttcagtgtt

SEQ ID NO: 174361 - DNA, 20 bp, Artificial Sequence
  Description of Artificial Sequence: Synthetic oligonucleotide
  Target: LAMA2; (+) strand; PAM type: NRG; PAM sequence: TAG
tgttgggcaaaaatactttc

SEQ ID NO: 174362 - DNA, 20 bp, Artificial Sequence
  Description of Artificial Sequence: Synthetic oligonucleotide
  Target: LAMA2; (+) strand; PAM type: NRG; PAM sequence: AGG
gttgggcaaaaatactttct

SEQ ID NO: 174363 - DNA, 20 bp, Artificial Sequence
  Description of Artificial Sequence: Synthetic oligonucleotide
  Target: LAMA2; (+) strand; PAM type: NRG; PAM sequence: TAG
caaaaatactttctaggatt

SEQ ID NO: 174364 - DNA, 20 bp, Artificial Sequence
  Description of Artificial Sequence: Synthetic oligonucleotide
  Target: LAMA2; (+) strand; PAM type: NRG; PAM sequence: AGG
aaaaatactttctaggattt

SEQ ID NO: 174365 - DNA, 20 bp, Artificial Sequence
  Description of Artificial Sequence: Synthetic oligonucleotide
  Target: LAMA2; (+) strand; PAM type: NRG; PAM sequence: GGG
aaaatactttctaggattta

SEQ ID NO: 174366 - DNA, 20 bp, Artificial Sequence
  Description of Artificial Sequence: Synthetic oligonucleotide
  Target: LAMA2; (+) strand; PAM type: NRG; PAM sequence: GGG
aaatactttctaggatttag

SEQ ID NO: 174367 - DNA, 20 bp, Artificial Sequence
  Description of Artificial Sequence: Synthetic oligonucleotide
  Target: LAMA2; (+) strand; PAM type: NRG; PAM sequence: TAG
ttctaggatttaggggatat

SEQ ID NO: 174368 - DNA, 20 bp, Artificial Sequence
  Description of Artificial Sequence: Synthetic oligonucleotide
  Target: LAMA2; (+) strand; PAM type: NRG; PAM sequence: GAG
ctaggatttaggggatatta

SEQ ID NO: 174369 - DNA, 20 bp, Artificial Sequence
  Description of Artificial Sequence: Synthetic oligonucleotide
  Target: LAMA2; (+) strand; PAM type: NRG; PAM sequence: CAG
gagatatcccctaaatgaac

SEQ ID NO: 174370 - DNA, 20 bp, Artificial Sequence
  Description of Artificial Sequence: Synthetic oligonucleotide
  Target: LAMA2; (+) strand; PAM type: NRG; PAM sequence: TAG
tcccctaaatgaaccagtct

SEQ ID NO: 174371 - DNA, 20 bp, Artificial Sequence
  Description of Artificial Sequence: Synthetic oligonucleotide
  Target: LAMA2; (+) strand; PAM type: NRG; PAM sequence: CAG
cctaaatgaaccagtcttag

SEQ ID NO: 174372 - DNA, 20 bp, Artificial Sequence
  Description of Artificial Sequence: Synthetic oligonucleotide
  Target: LAMA2; (+) strand; PAM type: NRG; PAM sequence: AGG
ctaaatgaaccagtcttagc

SEQ ID NO: 174373 - DNA, 20 bp, Artificial Sequence
  Description of Artificial Sequence: Synthetic oligonucleotide
  Target: LAMA2; (+) strand; PAM type: NRG; PAM sequence: GAG
aatgaaacatcatattctat

SEQ ID NO: 174374 - DNA, 20 bp, Artificial Sequence
  Description of Artificial Sequence: Synthetic oligonucleotide
  Target: LAMA2; (+) strand; PAM type: NRG; PAM sequence: TGG
tgagcaatttgtactgtttt

SEQ ID NO: 174375 - DNA, 20 bp, Artificial Sequence
  Description of Artificial Sequence: Synthetic oligonucleotide
  Target: LAMA2; (+) strand; PAM type: NRG; PAM sequence: GAG
tactgtttttggtttctctt

SEQ ID NO: 174376 - DNA, 20 bp, Artificial Sequence
  Description of Artificial Sequence: Synthetic oligonucleotide
  Target: LAMA2; (+) strand; PAM type: NRG; PAM sequence: GAG
gtttttggtttctcttgagt

SEQ ID NO: 174377 - DNA, 20 bp, Artificial Sequence
  Description of Artificial Sequence: Synthetic oligonucleotide
  Target: LAMA2; (+) strand; PAM type: NRG; PAM sequence: TAG
tgttgacttcttattcaaaa

SEQ ID NO: 174378 - DNA, 20 bp, Artificial Sequence
  Description of Artificial Sequence: Synthetic oligonucleotide
  Target: LAMA2; (+) strand; PAM type: NRG; PAM sequence: TGG
tgacttcttattcaaaatag

SEQ ID NO: 174379 - DNA, 20 bp, Artificial Sequence
  Description of Artificial Sequence: Synthetic oligonucleotide
  Target: LAMA2; (+) strand; PAM type: NRG; PAM sequence: CAG
aaatagtggcatgatcattg

SEQ ID NO: 174380 - DNA, 20 bp, Artificial Sequence
  Description of Artificial Sequence: Synthetic oligonucleotide
  Target: LAMA2; (+) strand; PAM type: NRG; PAM sequence: AAG
tagtggcatgatcattgcag

SEQ ID NO: 174381 - DNA, 20 bp, Artificial Sequence
  Description of Artificial Sequence: Synthetic oligonucleotide
  Target: LAMA2; (+) strand; PAM type: NRG; PAM sequence: CAG
tgcagaagcatttctatgtt

SEQ ID NO: 174382 - DNA, 20 bp, Artificial Sequence
  Description of Artificial Sequence: Synthetic oligonucleotide
  Target: LAMA2; (+) strand; PAM type: NRG; PAM sequence: CAG
tctatgttcagttatccttt

SEQ ID NO: 174383 - DNA, 20 bp, Artificial Sequence
  Description of Artificial Sequence: Synthetic oligonucleotide
  Target: LAMA2; (+) strand; PAM type: NRG; PAM sequence: TAG
aattttaatccatcttctgt

SEQ ID NO: 174384 - DNA, 20 bp, Artificial Sequence
  Description of Artificial Sequence: Synthetic oligonucleotide
  Target: LAMA2; (+) strand; PAM type: NRG; PAM sequence: AAG
ttagataattttctatttta

SEQ ID NO: 174385 - DNA, 20 bp, Artificial Sequence
  Description of Artificial Sequence: Synthetic oligonucleotide
  Target: LAMA2; (+) strand; PAM type: NRG; PAM sequence: AAG
attttaaagaccctaatttc

SEQ ID NO: 174386 - DNA, 20 bp, Artificial Sequence
  Description of Artificial Sequence: Synthetic oligonucleotide
  Target: LAMA2; (+) strand; PAM type: NRG; PAM sequence: CAG
ttttattgtatgattatttt

SEQ ID NO: 174387 - DNA, 20 bp, Artificial Sequence
  Description of Artificial Sequence: Synthetic oligonucleotide
  Target: LAMA2; (+) strand; PAM type: NRG; PAM sequence: TGG
attattttcagcacctaaaa

SEQ ID NO: 174388 - DNA, 20 bp, Artificial Sequence
  Description of Artificial Sequence: Synthetic oligonucleotide
  Target: LAMA2; (+) strand; PAM type: NRG; PAM sequence: TGG
tcagcacctaaaatggtgcc

SEQ ID NO: 174389 - DNA, 20 bp, Artificial Sequence
  Description of Artificial Sequence: Synthetic oligonucleotide
  Target: LAMA2; (+) strand; PAM type: NRG; PAM sequence: TAG
ctaaaatggtgcctggcaaa

SEQ ID NO: 174390 - DNA, 20 bp, Artificial Sequence
  Description of Artificial Sequence: Synthetic oligonucleotide
  Target: LAMA2; (+) strand; PAM type: NRG; PAM sequence: TAG
aaatggtgcctggcaaatag

SEQ ID NO: 174391 - DNA, 20 bp, Artificial Sequence
  Description of Artificial Sequence: Synthetic oligonucleotide
  Target: LAMA2; (+) strand; PAM type: NRG; PAM sequence: AGG
aatggtgcctggcaaatagt

SEQ ID NO: 174392 - DNA, 20 bp, Artificial Sequence
  Description of Artificial Sequence: Synthetic oligonucleotide
  Target: LAMA2; (+) strand; PAM type: NRG; PAM sequence: GAG
gtaggcacttataaatgaat

SEQ ID NO: 174393 - DNA, 20 bp, Artificial Sequence
  Description of Artificial Sequence: Synthetic oligonucleotide
  Target: LAMA2; (+) strand; PAM type: NRG; PAM sequence: TAG
ataccaataaaaatttgctg

SEQ ID NO: 174394 - DNA, 20 bp, Artificial Sequence
  Description of Artificial Sequence: Synthetic oligonucleotide
  Target: LAMA2; (+) strand; PAM type: NRG; PAM sequence: AAG
ttcttgtaacattttatgat

SEQ ID NO: 174395 - DNA, 20 bp, Artificial Sequence
  Description of Artificial Sequence: Synthetic oligonucleotide
  Target: LAMA2; (+) strand; PAM type: NRG; PAM sequence: AGG
tcttgtaacattttatgata

SEQ ID NO: 174396 - DNA, 20 bp, Artificial Sequence
  Description of Artificial Sequence: Synthetic oligonucleotide
  Target: LAMA2; (+) strand; PAM type: NRG; PAM sequence: GAG
ttgtaacattttatgataag

SEQ ID NO: 174397 - DNA, 20 bp, Artificial Sequence
  Description of Artificial Sequence: Synthetic oligonucleotide
  Target: LAMA2; (+) strand; PAM type: NRG; PAM sequence: AGG
tgtaacattttatgataagg

SEQ ID NO: 174398 - DNA, 20 bp, Artificial Sequence
  Description of Artificial Sequence: Synthetic oligonucleotide
  Target: LAMA2; (+) strand; PAM type: NRG; PAM sequence: TAG
ttaccctaatttaatacctt

SEQ ID NO: 174399 - DNA, 20 bp, Artificial Sequence
  Description of Artificial Sequence: Synthetic oligonucleotide
  Target: LAMA2; (+) strand; PAM type: NRG; PAM sequence: AGG
taccctaatttaataccttt

SEQ ID NO: 174400 - DNA, 20 bp, Artificial Sequence
  Description of Artificial Sequence: Synthetic oligonucleotide
  Target: LAMA2; (+) strand; PAM type: NRG; PAM sequence: AAG
aatcattttttgccaacatg

SEQ ID NO: 174401 - DNA, 20 bp, Artificial Sequence
  Description of Artificial Sequence: Synthetic oligonucleotide
  Target: LAMA2; (+) strand; PAM type: NRG; PAM sequence: TGG
ttaccacccatgcttataca

SEQ ID NO: 174402 - DNA, 20 bp, Artificial Sequence
  Description of Artificial Sequence: Synthetic oligonucleotide
  Target: LAMA2; (+) strand; PAM type: NRG; PAM sequence: TAG
ccacccatgcttatacatgg

SEQ ID NO: 174403 - DNA, 20 bp, Artificial Sequence
  Description of Artificial Sequence: Synthetic oligonucleotide
  Target: LAMA2; (+) strand; PAM type: NRG; PAM sequence: AGG
cacccatgcttatacatggt

SEQ ID NO: 174404 - DNA, 20 bp, Artificial Sequence
  Description of Artificial Sequence: Synthetic oligonucleotide
  Target: LAMA2; (+) strand; PAM type: NRG; PAM sequence: CAG
gtaggctaaccaacctcaaa

SEQ ID NO: 174405 - DNA, 20 bp, Artificial Sequence
  Description of Artificial Sequence: Synthetic oligonucleotide
  Target: LAMA2; (+) strand; PAM type: NRG; PAM sequence: GAG
aggctaaccaacctcaaaca

SEQ ID NO: 174406 - DNA, 20 bp, Artificial Sequence
  Description of Artificial Sequence: Synthetic oligonucleotide
  Target: LAMA2; (+) strand; PAM type: NRG; PAM sequence: GAG
gctaaccaacctcaaacaga

SEQ ID NO: 174407 - DNA, 20 bp, Artificial Sequence
  Description of Artificial Sequence: Synthetic oligonucleotide
  Target: LAMA2; (+) strand; PAM type: NRG; PAM sequence: TGG
caacctcaaacagagagtga

SEQ ID NO: 174408 - DNA, 20 bp, Artificial Sequence
  Description of Artificial Sequence: Synthetic oligonucleotide
  Target: LAMA2; (+) strand; PAM type: NRG; PAM sequence: GAG
ctcaaacagagagtgatggt

SEQ ID NO: 174409 - DNA, 20 bp, Artificial Sequence
  Description of Artificial Sequence: Synthetic oligonucleotide
  Target: LAMA2; (+) strand; PAM type: NRG; PAM sequence: AAG
tgtctgaaaaattacaaaat

SEQ ID NO: 174410 - DNA, 20 bp, Artificial Sequence
  Description of Artificial Sequence: Synthetic oligonucleotide
  Target: LAMA2; (+) strand; PAM type: NRG; PAM sequence: TAG
aaattacaaaataagtgcta

SEQ ID NO: 174411 - DNA, 20 bp, Artificial Sequence
  Description of Artificial Sequence: Synthetic oligonucleotide
  Target: LAMA2; (+) strand; PAM type: NRG; PAM sequence: GAG
attacaaaataagtgctata

SEQ ID NO: 174412 - DNA, 20 bp, Artificial Sequence
  Description of Artificial Sequence: Synthetic oligonucleotide
  Target: LAMA2; (+) strand; PAM type: NRG; PAM sequence: CAG
aaataagtgctatagagaat

SEQ ID NO: 174413 - DNA, 20 bp, Artificial Sequence
  Description of Artificial Sequence: Synthetic oligonucleotide
  Target: LAMA2; (+) strand; PAM type: NRG; PAM sequence: TGG
gtgatttattaaatgactat

SEQ ID NO: 174414 - DNA, 20 bp, Artificial Sequence
  Description of Artificial Sequence: Synthetic oligonucleotide
  Target: LAMA2; (+) strand; PAM type: NRG; PAM sequence: AAG
ttattaaatgactattggat

SEQ ID NO: 174415 - DNA, 20 bp, Artificial Sequence
  Description of Artificial Sequence: Synthetic oligonucleotide
  Target: LAMA2; (+) strand; PAM type: NRG; PAM sequence: AAG
aatgactattggataagaaa

SEQ ID NO: 174416 - DNA, 20 bp, Artificial Sequence
  Description of Artificial Sequence: Synthetic oligonucleotide
  Target: LAMA2; (+) strand; PAM type: NRG; PAM sequence: AAG
gactattggataagaaaaag

SEQ ID NO: 174417 - DNA, 20 bp, Artificial Sequence
  Description of Artificial Sequence: Synthetic oligonucleotide
  Target: LAMA2; (+) strand; PAM type: NRG; PAM sequence: CAG
aaaaagaagacaatctgtcc

SEQ ID NO: 174418 - DNA, 20 bp, Artificial Sequence
  Description of Artificial Sequence: Synthetic oligonucleotide
  Target: LAMA2; (+) strand; PAM type: NRG; PAM sequence: TGG
atctgtcccagaaattttgt

SEQ ID NO: 174419 - DNA, 20 bp, Artificial Sequence
  Description of Artificial Sequence: Synthetic oligonucleotide
  Target: LAMA2; (+) strand; PAM type: NRG; PAM sequence: CAG
gttggaatgtttttcatgaa

SEQ ID NO: 174420 - DNA, 20 bp, Artificial Sequence
  Description of Artificial Sequence: Synthetic oligonucleotide
  Target: LAMA2; (+) strand; PAM type: NRG; PAM sequence: TAG
gaacagaatgaataaaattt

SEQ ID NO: 174421 - DNA, 20 bp, Artificial Sequence
  Description of Artificial Sequence: Synthetic oligonucleotide
  Target: LAMA2; (+) strand; PAM type: NRG; PAM sequence: TAG
tgaataaaattttagtttaa

SEQ ID NO: 174422 - DNA, 20 bp, Artificial Sequence
  Description of Artificial Sequence: Synthetic oligonucleotide
  Target: LAMA2; (+) strand; PAM type: NRG; PAM sequence: CAG
aaaattttagtttaatagat

SEQ ID NO: 174423 - DNA, 20 bp, Artificial Sequence
  Description of Artificial Sequence: Synthetic oligonucleotide
  Target: LAMA2; (+) strand; PAM type: NRG; PAM sequence: TAG
tttaatagatcagtataata

SEQ ID NO: 174424 - DNA, 20 bp, Artificial Sequence
  Description of Artificial Sequence: Synthetic oligonucleotide
  Target: LAMA2; (+) strand; PAM type: NRG; PAM sequence: TGG
ataatatagttctactttgc

SEQ ID NO: 174425 - DNA, 20 bp, Artificial Sequence
  Description of Artificial Sequence: Synthetic oligonucleotide
  Target: LAMA2; (+) strand; PAM type: NRG; PAM sequence: AAG
atagttctactttgctggaa

SEQ ID NO: 174426 - DNA, 20 bp, Artificial Sequence
  Description of Artificial Sequence: Synthetic oligonucleotide
  Target: LAMA2; (+) strand; PAM type: NRG; PAM sequence: AAG
ggaaaagaaatatatttgaa

SEQ ID NO: 174427 - DNA, 20 bp, Artificial Sequence
  Description of Artificial Sequence: Synthetic oligonucleotide
  Target: LAMA2; (+) strand; PAM type: NRG; PAM sequence: GAG
tatttgaaaagcattacgtt

SEQ ID NO: 174428 - DNA, 20 bp, Artificial Sequence
  Description of Artificial Sequence: Synthetic oligonucleotide
  Target: LAMA2; (+) strand; PAM type: NRG; PAM sequence: TAG
cattacgttgagtaattatc

SEQ ID NO: 174429 - DNA, 20 bp, Artificial Sequence
  Description of Artificial Sequence: Synthetic oligonucleotide
  Target: LAMA2; (+) strand; PAM type: NRG; PAM sequence: TAG
acgttgagtaattatctaga

SEQ ID NO: 174430 - DNA, 20 bp, Artificial Sequence
  Description of Artificial Sequence: Synthetic oligonucleotide
  Target: LAMA2; (+) strand; PAM type: NRG; PAM sequence: AGG
cgttgagtaattatctagat

SEQ ID NO: 174431 - DNA, 20 bp, Artificial Sequence
  Description of Artificial Sequence: Synthetic oligonucleotide
  Target: LAMA2; (+) strand; PAM type: NRG; PAM sequence: AAG
gactaacatcccataaatat

SEQ ID NO: 174432 - DNA, 20 bp, Artificial Sequence
  Description of Artificial Sequence: Synthetic oligonucleotide
  Target: LAMA2; (+) strand; PAM type: NRG; PAM sequence: AAG
aaatataagatctgatataa

SEQ ID NO: 174433 - DNA, 20 bp, Artificial Sequence
  Description of Artificial Sequence: Synthetic oligonucleotide
  Target: LAMA2; (+) strand; PAM type: NRG; PAM sequence: TAG
aagatctgatataaaagcta

SEQ ID NO: 174434 - DNA, 20 bp, Artificial Sequence
  Description of Artificial Sequence: Synthetic oligonucleotide
  Target: LAMA2; (+) strand; PAM type: NRG; PAM sequence: CAG
atataaaagctatagctcaa

SEQ ID NO: 174435 - DNA, 20 bp, Artificial Sequence
  Description of Artificial Sequence: Synthetic oligonucleotide
  Target: LAMA2; (+) strand; PAM type: NRG; PAM sequence: GAG
ataaaagctatagctcaaca

SEQ ID NO: 174436 - DNA, 20 bp, Artificial Sequence
  Description of Artificial Sequence: Synthetic oligonucleotide
  Target: LAMA2; (+) strand; PAM type: NRG; PAM sequence: AAG
aaagctatagctcaacagag

SEQ ID NO: 174437 - DNA, 20 bp, Artificial Sequence
  Description of Artificial Sequence: Synthetic oligonucleotide
  Target: LAMA2; (+) strand; PAM type: NRG; PAM sequence: GAG
atagctcaacagagaagaat

SEQ ID NO: 174438 - DNA, 20 bp, Artificial Sequence
  Description of Artificial Sequence: Synthetic oligonucleotide
  Target: LAMA2; (+) strand; PAM type: NRG; PAM sequence: AAG
atgagattaaatgtattatt

SEQ ID NO: 174439 - DNA, 20 bp, Artificial Sequence
  Description of Artificial Sequence: Synthetic oligonucleotide
  Target: LAMA2; (+) strand; PAM type: NRG; PAM sequence: TAG
attaaatgtattattaagta

SEQ ID NO: 174440 - DNA, 20 bp, Artificial Sequence
  Description of Artificial Sequence: Synthetic oligonucleotide
  Target: LAMA2; (+) strand; PAM type: NRG; PAM sequence: AAG
aaatgtattattaagtatag

SEQ ID NO: 174441 - DNA, 20 bp, Artificial Sequence
  Description of Artificial Sequence: Synthetic oligonucleotide
  Target: LAMA2; (+) strand; PAM type: NRG; PAM sequence: GAG
atgtattattaagtatagaa

SEQ ID NO: 174442 - DNA, 20 bp, Artificial Sequence
  Description of Artificial Sequence: Synthetic oligonucleotide
  Target: LAMA2; (+) strand; PAM type: NRG; PAM sequence: AAG
attaagtatagaagagttca

SEQ ID NO: 174443 - DNA, 20 bp, Artificial Sequence
  Description of Artificial Sequence: Synthetic oligonucleotide
  Target: LAMA2; (+) strand; PAM type: NRG; PAM sequence: CAG
gagttcaaagcttaacaata

SEQ ID NO: 174444 - DNA, 20 bp, Artificial Sequence
  Description of Artificial Sequence: Synthetic oligonucleotide
  Target: LAMA2; (+) strand; PAM type: NRG; PAM sequence: AAG
ttcaaagcttaacaatacag

SEQ ID NO: 174445 - DNA, 20 bp, Artificial Sequence
  Description of Artificial Sequence: Synthetic oligonucleotide
  Target: LAMA2; (+) strand; PAM type: NRG; PAM sequence: GAG
caaagcttaacaatacagaa

SEQ ID NO: 174446 - DNA, 20 bp, Artificial Sequence
  Description of Artificial Sequence: Synthetic oligonucleotide
  Target: LAMA2; (+) strand; PAM type: NRG; PAM sequence: GAG
gaagagtcctctactccttt

SEQ ID NO: 174447 - DNA, 20 bp, Artificial Sequence
  Description of Artificial Sequence: Synthetic oligonucleotide
  Target: LAMA2; (+) strand; PAM type: NRG; PAM sequence: TAG
gtcctctactcctttgagtc

SEQ ID NO: 174448 - DNA, 20 bp, Artificial Sequence
  Description of Artificial Sequence: Synthetic oligonucleotide
  Target: LAMA2; (+) strand; PAM type: NRG; PAM sequence: AAG
cctttgagtctagccctata

SEQ ID NO: 174449 - DNA, 20 bp, Artificial Sequence
  Description of Artificial Sequence: Synthetic oligonucleotide
  Target: LAMA2; (+) strand; PAM type: NRG; PAM sequence: AAG
ttgagtctagccctataaag

SEQ ID NO: 174450 - DNA, 20 bp, Artificial Sequence
  Description of Artificial Sequence: Synthetic oligonucleotide
  Target: LAMA2; (+) strand; PAM type: NRG; PAM sequence: AGG
tgagtctagccctataaaga

SEQ ID NO: 174451 - DNA, 20 bp, Artificial Sequence
  Description of Artificial Sequence: Synthetic oligonucleotide
  Target: LAMA2; (+) strand; PAM type: NRG; PAM sequence: AAG
gtctagccctataaagaagg

SEQ ID NO: 174452 - DNA, 20 bp, Artificial Sequence
  Description of Artificial Sequence: Synthetic oligonucleotide
  Target: LAMA2; (+) strand; PAM type: NRG; PAM sequence: AAG
gaatgttttcaataacttaa

SEQ ID NO: 174453 - DNA, 20 bp, Artificial Sequence
  Description of Artificial Sequence: Synthetic oligonucleotide
  Target: LAMA2; (+) strand; PAM type: NRG; PAM sequence: AGG
aatgttttcaataacttaaa

SEQ ID NO: 174454 - DNA, 20 bp, Artificial Sequence
  Description of Artificial Sequence: Synthetic oligonucleotide
  Target: LAMA2; (+) strand; PAM type: NRG; PAM sequence: AAG
ataacttaaaaggaaaaaca

SEQ ID NO: 174455 - DNA, 20 bp, Artificial Sequence
  Description of Artificial Sequence: Synthetic oligonucleotide
  Target: LAMA2; (+) strand; PAM type: NRG; PAM sequence: CAG
agaaacaatttatacatttg

SEQ ID NO: 174456 - DNA, 20 bp, Artificial Sequence
  Description of Artificial Sequence: Synthetic oligonucleotide
  Target: LAMA2; (+) strand; PAM type: NRG; PAM sequence: AGG
gaaacaatttatacatttgc

SEQ ID NO: 174457 - DNA, 20 bp, Artificial Sequence
  Description of Artificial Sequence: Synthetic oligonucleotide
  Target: LAMA2; (+) strand; PAM type: NRG; PAM sequence: GAG
aacaatttatacatttgcag

SEQ ID NO: 174458 - DNA, 20 bp, Artificial Sequence
  Description of Artificial Sequence: Synthetic oligonucleotide
  Target: LAMA2; (+) strand; PAM type: NRG; PAM sequence: AAG
tttatacatttgcaggagaa

SEQ ID NO: 174459 - DNA, 20 bp, Artificial Sequence
  Description of Artificial Sequence: Synthetic oligonucleotide
  Target: LAMA2; (+) strand; PAM type: NRG; PAM sequence: AGG
ttatacatttgcaggagaaa

SEQ ID NO: 174460 - DNA, 20 bp, Artificial Sequence
  Description of Artificial Sequence: Synthetic oligonucleotide
  Target: LAMA2; (+) strand; PAM type: NRG; PAM sequence: AAG
catttgcaggagaaaaggaa

SEQ ID NO: 174461 - DNA, 20 bp, Artificial Sequence
  Description of Artificial Sequence: Synthetic oligonucleotide
  Target: LAMA2; (+) strand; PAM type: NRG; PAM sequence: AGG
atttgcaggagaaaaggaaa

SEQ ID NO: 174462 - DNA, 20 bp, Artificial Sequence
  Description of Artificial Sequence: Synthetic oligonucleotide
  Target: LAMA2; (+) strand; PAM type: NRG; PAM sequence: AAG
caggagaaaaggaaaaggtc

SEQ ID NO: 174463 - DNA, 20 bp, Artificial Sequence
  Description of Artificial Sequence: Synthetic oligonucleotide
  Target: LAMA2; (+) strand; PAM type: NRG; PAM sequence: TAG
gagaaaaggaaaaggtcaag

SEQ ID NO: 174464 - DNA, 20 bp, Artificial Sequence
  Description of Artificial Sequence: Synthetic oligonucleotide
  Target: LAMA2; (+) strand; PAM type: NRG; PAM sequence: TAG
aaaaggaaaaggtcaagtag

SEQ ID NO: 174465 - DNA, 20 bp, Artificial Sequence
  Description of Artificial Sequence: Synthetic oligonucleotide
  Target: LAMA2; (+) strand; PAM type: NRG; PAM sequence: GAG
aaggaaaaggtcaagtagta

SEQ ID NO: 174466 - DNA, 20 bp, Artificial Sequence
  Description of Artificial Sequence: Synthetic oligonucleotide
  Target: LAMA2; (+) strand; PAM type: NRG; PAM sequence: AAG
agcaaccaacgaccactatg

SEQ ID NO: 174467 - DNA, 20 bp, Artificial Sequence
  Description of Artificial Sequence: Synthetic oligonucleotide
  Target: LAMA2; (+) strand; PAM type: NRG; PAM sequence: AAG
accaacgaccactatgaaga

SEQ ID NO: 174468 - DNA, 20 bp, Artificial Sequence
  Description of Artificial Sequence: Synthetic oligonucleotide
  Target: LAMA2; (+) strand; PAM type: NRG; PAM sequence: TGG
aacgaccactatgaagaaag

SEQ ID NO: 174469 - DNA, 20 bp, Artificial Sequence
  Description of Artificial Sequence: Synthetic oligonucleotide
  Target: LAMA2; (+) strand; PAM type: NRG; PAM sequence: GAG
cgaccactatgaagaaagtg

SEQ ID NO: 174470 - DNA, 20 bp, Artificial Sequence
  Description of Artificial Sequence: Synthetic oligonucleotide
  Target: LAMA2; (+) strand; PAM type: NRG; PAM sequence: AGG
gaccactatgaagaaagtgg

SEQ ID NO: 174471 - DNA, 20 bp, Artificial Sequence
  Description of Artificial Sequence: Synthetic oligonucleotide
  Target: LAMA2; (+) strand; PAM type: NRG; PAM sequence: CAG
actatgaagaaagtggaggt

SEQ ID NO: 174472 - DNA, 20 bp, Artificial Sequence
  Description of Artificial Sequence: Synthetic oligonucleotide
  Target: LAMA2; (+) strand; PAM type: NRG; PAM sequence: GAG
aagtggaggtcagacaattt

SEQ ID NO: 174473 - DNA, 20 bp, Artificial Sequence
  Description of Artificial Sequence: Synthetic oligonucleotide
  Target: LAMA2; (+) strand; PAM type: NRG; PAM sequence: AAG
tggaggtcagacaatttgag

SEQ ID NO: 174474 - DNA, 20 bp, Artificial Sequence
  Description of Artificial Sequence: Synthetic oligonucleotide
  Target: LAMA2; (+) strand; PAM type: NRG; PAM sequence: AAG
agacaatttgagaagaaaaa

SEQ ID NO: 174475 - DNA, 20 bp, Artificial Sequence
  Description of Artificial Sequence: Synthetic oligonucleotide
  Target: LAMA2; (+) strand; PAM type: NRG; PAM sequence: AAG
aaaagcattgaaaataccat

SEQ ID NO: 174476 - DNA, 20 bp, Artificial Sequence
  Description of Artificial Sequence: Synthetic oligonucleotide
  Target: LAMA2; (+) strand; PAM type: NRG; PAM sequence: AAG
cattgaaaataccataagaa

SEQ ID NO: 174477 - DNA, 20 bp, Artificial Sequence
  Description of Artificial Sequence: Synthetic oligonucleotide
  Target: LAMA2; (+) strand; PAM type: NRG; PAM sequence: AAG
ataccataagaaaagaaaca

SEQ ID NO: 174478 - DNA, 20 bp, Artificial Sequence
  Description of Artificial Sequence: Synthetic oligonucleotide
  Target: LAMA2; (+) strand; PAM type: NRG; PAM sequence: TAG
gaaaagaaacaaagaaatga

SEQ ID NO: 174479 - DNA, 20 bp, Artificial Sequence
  Description of Artificial Sequence: Synthetic oligonucleotide
  Target: LAMA2; (+) strand; PAM type: NRG; PAM sequence: AAG
aaatgatagaaataacctcc

SEQ ID NO: 174480 - DNA, 20 bp, Artificial Sequence
  Description of Artificial Sequence: Synthetic oligonucleotide
  Target: LAMA2; (+) strand; PAM type: NRG; PAM sequence: AAG
aataacctccaagcataatt

SEQ ID NO: 174481 - DNA, 20 bp, Artificial Sequence
  Description of Artificial Sequence: Synthetic oligonucleotide
  Target: LAMA2; (+) strand; PAM type: NRG; PAM sequence: TAG
ttcctatatataaacacaca

SEQ ID NO: 174482 - DNA, 20 bp, Artificial Sequence
  Description of Artificial Sequence: Synthetic oligonucleotide
  Target: LAMA2; (+) strand; PAM type: NRG; PAM sequence: AAG
ataaacacacatagacaatc

SEQ ID NO: 174483 - DNA, 20 bp, Artificial Sequence
  Description of Artificial Sequence: Synthetic oligonucleotide
  Target: LAMA2; (+) strand; PAM type: NRG; PAM sequence: AAG
acaatcaagaatcacactga

SEQ ID NO: 174484 - DNA, 20 bp, Artificial Sequence
  Description of Artificial Sequence: Synthetic oligonucleotide
  Target: LAMA2; (+) strand; PAM type: NRG; PAM sequence: AGG
caatcaagaatcacactgaa

SEQ ID NO: 174485 - DNA, 20 bp, Artificial Sequence
  Description of Artificial Sequence: Synthetic oligonucleotide
  Target: LAMA2; (+) strand; PAM type: NRG; PAM sequence: GAG
tcacactgaaaggaaaatat

SEQ ID NO: 174486 - DNA, 20 bp, Artificial Sequence
  Description of Artificial Sequence: Synthetic oligonucleotide
  Target: LAMA2; (+) strand; PAM type: NRG; PAM sequence: GAG
actgaaaggaaaatatgagt

SEQ ID NO: 174487 - DNA, 20 bp, Artificial Sequence
  Description of Artificial Sequence: Synthetic oligonucleotide
  Target: LAMA2; (+) strand; PAM type: NRG; PAM sequence: AAG
gaaaggaaaatatgagtgag

SEQ ID NO: 174488 - DNA, 20 bp, Artificial Sequence
  Description of Artificial Sequence: Synthetic oligonucleotide
  Target: LAMA2; (+) strand; PAM type: NRG; PAM sequence: AGG
aaaggaaaatatgagtgaga

SEQ ID NO: 174489 - DNA, 20 bp, Artificial Sequence
  Description of Artificial Sequence: Synthetic oligonucleotide
  Target: LAMA2; (+) strand; PAM type: NRG; PAM sequence: AAG
ggaaaatatgagtgagaagg

SEQ ID NO: 174490 - DNA, 20 bp, Artificial Sequence
  Description of Artificial Sequence: Synthetic oligonucleotide
  Target: LAMA2; (+) strand; PAM type: NRG; PAM sequence: TGG
aaatatgagtgagaaggaag

SEQ ID NO: 174491 - DNA, 20 bp, Artificial Sequence
  Description of Artificial Sequence: Synthetic oligonucleotide
  Target: LAMA2; (+) strand; PAM type: NRG; PAM sequence: AAG
gaaggaagtggatcctttat

SEQ ID NO: 174492 - DNA, 20 bp, Artificial Sequence
  Description of Artificial Sequence: Synthetic oligonucleotide
  Target: LAMA2; (+) strand; PAM type: NRG; PAM sequence: CAG
ggaagtggatcctttataag

SEQ ID NO: 174493 - DNA, 20 bp, Artificial Sequence
  Description of Artificial Sequence: Synthetic oligonucleotide
  Target: LAMA2; (+) strand; PAM type: NRG; PAM sequence: AGG
gaagtggatcctttataagc

SEQ ID NO: 174494 - DNA, 20 bp, Artificial Sequence
  Description of Artificial Sequence: Synthetic oligonucleotide
  Target: LAMA2; (+) strand; PAM type: NRG; PAM sequence: GAG
agtggatcctttataagcag

SEQ ID NO: 174495 - DNA, 20 bp, Artificial Sequence
  Description of Artificial Sequence: Synthetic oligonucleotide
  Target: LAMA2; (+) strand; PAM type: NRG; PAM sequence: AAG
gatcctttataagcaggaga

SEQ ID NO: 174496 - DNA, 20 bp, Artificial Sequence
  Description of Artificial Sequence: Synthetic oligonucleotide
  Target: LAMA2; (+) strand; PAM type: NRG; PAM sequence: CAG
aatacgatttgtttgtactg

SEQ ID NO: 174497 - DNA, 20 bp, Artificial Sequence
  Description of Artificial Sequence: Synthetic oligonucleotide
  Target: LAMA2; (+) strand; PAM type: NRG; PAM sequence: AAG
tactgcagtattattttgta

SEQ ID NO: 174498 - DNA, 20 bp, Artificial Sequence
  Description of Artificial Sequence: Synthetic oligonucleotide
  Target: LAMA2; (+) strand; PAM type: NRG; PAM sequence: GAG
ctgcagtattattttgtaaa

SEQ ID NO: 174499 - DNA, 20 bp, Artificial Sequence
  Description of Artificial Sequence: Synthetic oligonucleotide
  Target: LAMA2; (+) strand; PAM type: NRG; PAM sequence: TAG
tattattttgtaaagagtaa

SEQ ID NO: 174500 - DNA, 20 bp, Artificial Sequence
  Description of Artificial Sequence: Synthetic oligonucleotide
  Target: LAMA2; (+) strand; PAM type: NRG; PAM sequence: CAG
taactaatttctttaaatat

SEQ ID NO: 174501 - DNA, 20 bp, Artificial Sequence
  Description of Artificial Sequence: Synthetic oligonucleotide
  Target: LAMA2; (+) strand; PAM type: NRG; PAM sequence: AAG
tcagaatgaaatgttatttt

SEQ ID NO: 174502 - DNA, 20 bp, Artificial Sequence
  Description of Artificial Sequence: Synthetic oligonucleotide
  Target: LAMA2; (+) strand; PAM type: NRG; PAM sequence: TAG
gaaatgttattttaagaatt

SEQ ID NO: 174503 - DNA, 20 bp, Artificial Sequence
  Description of Artificial Sequence: Synthetic oligonucleotide
  Target: LAMA2; (+) strand; PAM type: NRG; PAM sequence: TGG
aacaaatgctatttttctat

SEQ ID NO: 174504 - DNA, 20 bp, Artificial Sequence
  Description of Artificial Sequence: Synthetic oligonucleotide
  Target: LAMA2; (+) strand; PAM type: NRG; PAM sequence: CGG
tgctatttttctattggtgt

SEQ ID NO: 174505 - DNA, 20 bp, Artificial Sequence
  Description of Artificial Sequence: Synthetic oligonucleotide
  Target: LAMA2; (+) strand; PAM type: NRG; PAM sequence: GGG
gctatttttctattggtgtc

SEQ ID NO: 174506 - DNA, 20 bp, Artificial Sequence
  Description of Artificial Sequence: Synthetic oligonucleotide
  Target: LAMA2; (+) strand; PAM type: NRG; PAM sequence: GAG
tttttctattggtgtcgggt

SEQ ID NO: 174507 - DNA, 20 bp, Artificial Sequence
  Description of Artificial Sequence: Synthetic oligonucleotide
  Target: LAMA2; (+) strand; PAM type: NRG; PAM sequence: AGG
ttttctattggtgtcgggtg

SEQ ID NO: 174508 - DNA, 20 bp, Artificial Sequence
  Description of Artificial Sequence: Synthetic oligonucleotide
  Target: LAMA2; (+) strand; PAM type: NRG; PAM sequence: AAG
ctattggtgtcgggtgagga

SEQ ID NO: 174509 - DNA, 20 bp, Artificial Sequence
  Description of Artificial Sequence: Synthetic oligonucleotide
  Target: LAMA2; (+) strand; PAM type: NRG; PAM sequence: AAG
cgggtgaggaaagtactata

SEQ ID NO: 174510 - DNA, 20 bp, Artificial Sequence
  Description of Artificial Sequence: Synthetic oligonucleotide
  Target: LAMA2; (+) strand; PAM type: NRG; PAM sequence: AAG
ttttcctacatataatcacc

SEQ ID NO: 174511 - DNA, 20 bp, Artificial Sequence
  Description of Artificial Sequence: Synthetic oligonucleotide
  Target: LAMA2; (+) strand; PAM type: NRG; PAM sequence: TAG
caccaagaaaatatctcatt

SEQ ID NO: 174512 - DNA, 20 bp, Artificial Sequence
  Description of Artificial Sequence: Synthetic oligonucleotide
  Target: LAMA2; (+) strand; PAM type: NRG; PAM sequence: TAG
tatctcatttagtacttctc

SEQ ID NO: 174513 - DNA, 20 bp, Artificial Sequence
  Description of Artificial Sequence: Synthetic oligonucleotide
  Target: LAMA2; (+) strand; PAM type: NRG; PAM sequence: GAG
tctcatttagtacttctcta

SEQ ID NO: 174514 - DNA, 20 bp, Artificial Sequence
  Description of Artificial Sequence: Synthetic oligonucleotide
  Target: LAMA2; (+) strand; PAM type: NRG; PAM sequence: AGG
ctcatttagtacttctctag

SEQ ID NO: 174515 - DNA, 20 bp, Artificial Sequence
  Description of Artificial Sequence: Synthetic oligonucleotide
  Target: LAMA2; (+) strand; PAM type: NRG; PAM sequence: GGG
tcatttagtacttctctaga

SEQ ID NO: 174516 - DNA, 20 bp, Artificial Sequence
  Description of Artificial Sequence: Synthetic oligonucleotide
  Target: LAMA2; (+) strand; PAM type: NRG; PAM sequence: AAG
agtacttctctagagggtgc

SEQ ID NO: 174517 - DNA, 20 bp, Artificial Sequence
  Description of Artificial Sequence: Synthetic oligonucleotide
  Target: LAMA2; (+) strand; PAM type: NRG; PAM sequence: AGG
gtacttctctagagggtgca

SEQ ID NO: 174518 - DNA, 20 bp, Artificial Sequence
  Description of Artificial Sequence: Synthetic oligonucleotide
  Target: LAMA2; (+) strand; PAM type: NRG; PAM sequence: CAG
tctagagggtgcaaggaaaa

SEQ ID NO: 174519 - DNA, 20 bp, Artificial Sequence
  Description of Artificial Sequence: Synthetic oligonucleotide
  Target: LAMA2; (+) strand; PAM type: NRG; PAM sequence: AAG
gagggtgcaaggaaaacaga

SEQ ID NO: 174520 - DNA, 20 bp, Artificial Sequence
  Description of Artificial Sequence: Synthetic oligonucleotide
  Target: LAMA2; (+) strand; PAM type: NRG; PAM sequence: AGG
agggtgcaaggaaaacagaa

SEQ ID NO: 174521 - DNA, 20 bp, Artificial Sequence
  Description of Artificial Sequence: Synthetic oligonucleotide
  Target: LAMA2; (+) strand; PAM type: NRG; PAM sequence: GAG
ggtgcaaggaaaacagaaag

SEQ ID NO: 174522 - DNA, 20 bp, Artificial Sequence
  Description of Artificial Sequence: Synthetic oligonucleotide
  Target: LAMA2; (+) strand; PAM type: NRG; PAM sequence: TGG
gagatatgtcactcataaaa

SEQ ID NO: 174523 - DNA, 20 bp, Artificial Sequence
  Description of Artificial Sequence: Synthetic oligonucleotide
  Target: LAMA2; (+) strand; PAM type: NRG; PAM sequence: TGG
ctcataaaatggaataaaaa

SEQ ID NO: 174524 - DNA, 20 bp, Artificial Sequence
  Description of Artificial Sequence: Synthetic oligonucleotide
  Target: LAMA2; (+) strand; PAM type: NRG; PAM sequence: TGG
aatggaataaaaatggaata

SEQ ID NO: 174525 - DNA, 20 bp, Artificial Sequence
  Description of Artificial Sequence: Synthetic oligonucleotide
  Target: LAMA2; (+) strand; PAM type: NRG; PAM sequence: CAG
taaaaatggaatatggacat

SEQ ID NO: 174526 - DNA, 20 bp, Artificial Sequence
  Description of Artificial Sequence: Synthetic oligonucleotide
  Target: LAMA2; (+) strand; PAM type: NRG; PAM sequence: TAG
tcagtaattttttctcatct

SEQ ID NO: 174527 - DNA, 20 bp, Artificial Sequence
  Description of Artificial Sequence: Synthetic oligonucleotide
  Target: LAMA2; (+) strand; PAM type: NRG; PAM sequence: AAG
cttagttgctttgatcctat

SEQ ID NO: 174528 - DNA, 20 bp, Artificial Sequence
  Description of Artificial Sequence: Synthetic oligonucleotide
  Target: LAMA2; (+) strand; PAM type: NRG; PAM sequence: GAG
tagttgctttgatcctataa

SEQ ID NO: 174529 - DNA, 20 bp, Artificial Sequence
  Description of Artificial Sequence: Synthetic oligonucleotide
  Target: LAMA2; (+) strand; PAM type: NRG; PAM sequence: CAG
tataagagactctaaaataa

SEQ ID NO: 174530 - DNA, 20 bp, Artificial Sequence
  Description of Artificial Sequence: Synthetic oligonucleotide
  Target: LAMA2; (+) strand; PAM type: NRG; PAM sequence: GAG
taagagactctaaaataaca

SEQ ID NO: 174531 - DNA, 20 bp, Artificial Sequence
  Description of Artificial Sequence: Synthetic oligonucleotide
  Target: LAMA2; (+) strand; PAM type: NRG; PAM sequence: TAG
actctaaaataacagagaat

SEQ ID NO: 174532 - DNA, 20 bp, Artificial Sequence
  Description of Artificial Sequence: Synthetic oligonucleotide
  Target: LAMA2; (+) strand; PAM type: NRG; PAM sequence: CAG
agatgtttttaaaacatttc

SEQ ID NO: 174533 - DNA, 20 bp, Artificial Sequence
  Description of Artificial Sequence: Synthetic oligonucleotide
  Target: LAMA2; (+) strand; PAM type: NRG; PAM sequence: AGG
gatgtttttaaaacatttcc

SEQ ID NO: 174534 - DNA, 20 bp, Artificial Sequence
  Description of Artificial Sequence: Synthetic oligonucleotide
  Target: LAMA2; (+) strand; PAM type: NRG; PAM sequence: TAG
tttaaaacatttccaggtca

SEQ ID NO: 174535 - DNA, 20 bp, Artificial Sequence
  Description of Artificial Sequence: Synthetic oligonucleotide
  Target: LAMA2; (+) strand; PAM type: NRG; PAM sequence: AAG
tccaggtcatagtaaactca

SEQ ID NO: 174536 - DNA, 20 bp, Artificial Sequence
  Description of Artificial Sequence: Synthetic oligonucleotide
  Target: LAMA2; (+) strand; PAM type: NRG; PAM sequence: CAG
tcaaagcctacattatctat

SEQ ID NO: 174537 - DNA, 20 bp, Artificial Sequence
  Description of Artificial Sequence: Synthetic oligonucleotide
  Target: LAMA2; (+) strand; PAM type: NRG; PAM sequence: CAG
gcctacattatctatcagat

SEQ ID NO: 174538 - DNA, 20 bp, Artificial Sequence
  Description of Artificial Sequence: Synthetic oligonucleotide
  Target: LAMA2; (+) strand; PAM type: NRG; PAM sequence: TAG
atgaatgtattaatgttctc

SEQ ID NO: 174539 - DNA, 20 bp, Artificial Sequence
  Description of Artificial Sequence: Synthetic oligonucleotide
  Target: LAMA2; (+) strand; PAM type: NRG; PAM sequence: AAG
aatgtattaatgttctctag

SEQ ID NO: 174540 - DNA, 20 bp, Artificial Sequence
  Description of Artificial Sequence: Synthetic oligonucleotide
  Target: LAMA2; (+) strand; PAM type: NRG; PAM sequence: AGG
atgtattaatgttctctaga

SEQ ID NO: 174541 - DNA, 20 bp, Artificial Sequence
  Description of Artificial Sequence: Synthetic oligonucleotide
  Target: LAMA2; (+) strand; PAM type: NRG; PAM sequence: CAG
attaatgttctctagaagga

SEQ ID NO: 174542 - DNA, 20 bp, Artificial Sequence
  Description of Artificial Sequence: Synthetic oligonucleotide
  Target: LAMA2; (+) strand; PAM type: NRG; PAM sequence: TAG
ctctagaaggacagaactaa

SEQ ID NO: 174543 - DNA, 20 bp, Artificial Sequence
  Description of Artificial Sequence: Synthetic oligonucleotide
  Target: LAMA2; (+) strand; PAM type: NRG; PAM sequence: AGG
tctagaaggacagaactaat

SEQ ID NO: 174544 - DNA, 20 bp, Artificial Sequence
  Description of Artificial Sequence: Synthetic oligonucleotide
  Target: LAMA2; (+) strand; PAM type: NRG; PAM sequence: TAG
gaaggacagaactaatagga

SEQ ID NO: 174545 - DNA, 20 bp, Artificial Sequence
  Description of Artificial Sequence: Synthetic oligonucleotide
  Target: LAMA2; (+) strand; PAM type: NRG; PAM sequence: AAG
ctaataggatagatgtatac

SEQ ID NO: 174546 - DNA, 20 bp, Artificial Sequence
  Description of Artificial Sequence: Synthetic oligonucleotide
  Target: LAMA2; (+) strand; PAM type: NRG; PAM sequence: AAG
ataggatagatgtatacaag

SEQ ID NO: 174547 - DNA, 20 bp, Artificial Sequence
  Description of Artificial Sequence: Synthetic oligonucleotide
  Target: LAMA2; (+) strand; PAM type: NRG; PAM sequence: AGG
taggatagatgtatacaaga

SEQ ID NO: 174548 - DNA, 20 bp, Artificial Sequence
  Description of Artificial Sequence: Synthetic oligonucleotide
  Target: LAMA2; (+) strand; PAM type: NRG; PAM sequence: GGG
aggatagatgtatacaagaa

SEQ ID NO: 174549 - DNA, 20 bp, Artificial Sequence
  Description of Artificial Sequence: Synthetic oligonucleotide
  Target: LAMA2; (+) strand; PAM type: NRG; PAM sequence: GGG
ggatagatgtatacaagaag

SEQ ID NO: 174550 - DNA, 20 bp, Artificial Sequence
  Description of Artificial Sequence: Synthetic oligonucleotide
  Target: LAMA2; (+) strand; PAM type: NRG; PAM sequence: GGG
gatagatgtatacaagaagg

SEQ ID NO: 174551 - DNA, 20 bp, Artificial Sequence
  Description of Artificial Sequence: Synthetic oligonucleotide
  Target: LAMA2; (+) strand; PAM type: NRG; PAM sequence: GGG
atagatgtatacaagaaggg

SEQ ID NO: 174552 - DNA, 20 bp, Artificial Sequence
  Description of Artificial Sequence: Synthetic oligonucleotide
  Target: LAMA2; (+) strand; PAM type: NRG; PAM sequence: AAG
tacaagaaggggggtttact

SEQ ID NO: 174553 - DNA, 20 bp, Artificial Sequence
  Description of Artificial Sequence: Synthetic oligonucleotide
  Target: LAMA2; (+) strand; PAM type: NRG; PAM sequence: AGG
acaagaaggggggtttacta

SEQ ID NO: 174554 - DNA, 20 bp, Artificial Sequence
  Description of Artificial Sequence: Synthetic oligonucleotide
  Target: LAMA2; (+) strand; PAM type: NRG; PAM sequence: AAG
atattgacccacgccatcac

SEQ ID NO: 174555 - DNA, 20 bp, Artificial Sequence
  Description of Artificial Sequence: Synthetic oligonucleotide
  Target: LAMA2; (+) strand; PAM type: NRG; PAM sequence: AAG
acccacgccatcacaagatg

SEQ ID NO: 174556 - DNA, 20 bp, Artificial Sequence
  Description of Artificial Sequence: Synthetic oligonucleotide
  Target: LAMA2; (+) strand; PAM type: NRG; PAM sequence: TAG
cacaagatgaagtcccacaa

SEQ ID NO: 174557 - DNA, 20 bp, Artificial Sequence
  Description of Artificial Sequence: Synthetic oligonucleotide
  Target: LAMA2; (+) strand; PAM type: NRG; PAM sequence: AGG
acaagatgaagtcccacaat

SEQ ID NO: 174558 - DNA, 20 bp, Artificial Sequence
  Description of Artificial Sequence: Synthetic oligonucleotide
  Target: LAMA2; (+) strand; PAM type: NRG; PAM sequence: AAG
tcccacaataggccatctgc

SEQ ID NO: 174559 - DNA, 20 bp, Artificial Sequence
  Description of Artificial Sequence: Synthetic oligonucleotide
  Target: LAMA2; (+) strand; PAM type: NRG; PAM sequence: GAG
caataggccatctgcaagct

SEQ ID NO: 174560 - DNA, 20 bp, Artificial Sequence
  Description of Artificial Sequence: Synthetic oligonucleotide
  Target: LAMA2; (+) strand; PAM type: NRG; PAM sequence: AGG
aataggccatctgcaagctg

SEQ ID NO: 174561 - DNA, 20 bp, Artificial Sequence
  Description of Artificial Sequence: Synthetic oligonucleotide
  Target: LAMA2; (+) strand; PAM type: NRG; PAM sequence: GAG
taggccatctgcaagctgag

SEQ ID NO: 174562 - DNA, 20 bp, Artificial Sequence
  Description of Artificial Sequence: Synthetic oligonucleotide
  Target: LAMA2; (+) strand; PAM type: NRG; PAM sequence: CAG
gccatctgcaagctgaggag

SEQ ID NO: 174563 - DNA, 20 bp, Artificial Sequence
  Description of Artificial Sequence: Synthetic oligonucleotide
  Target: LAMA2; (+) strand; PAM type: NRG; PAM sequence: AGG
ccatctgcaagctgaggagc

SEQ ID NO: 174564 - DNA, 20 bp, Artificial Sequence
  Description of Artificial Sequence: Synthetic oligonucleotide
  Target: LAMA2; (+) strand; PAM type: NRG; PAM sequence: GGG
catctgcaagctgaggagca

SEQ ID NO: 174565 - DNA, 20 bp, Artificial Sequence
  Description of Artificial Sequence: Synthetic oligonucleotide
  Target: LAMA2; (+) strand; PAM type: NRG; PAM sequence: AAG
ctgcaagctgaggagcaggg

SEQ ID NO: 174566 - DNA, 20 bp, Artificial Sequence
  Description of Artificial Sequence: Synthetic oligonucleotide
  Target: LAMA2; (+) strand; PAM type: NRG; PAM sequence: CAG
aagctgaggagcagggaagc

SEQ ID NO: 174567 - DNA, 20 bp, Artificial Sequence
  Description of Artificial Sequence: Synthetic oligonucleotide
  Target: LAMA2; (+) strand; PAM type: NRG; PAM sequence: GAG
aggagcagggaagccagccc

SEQ ID NO: 174568 - DNA, 20 bp, Artificial Sequence
  Description of Artificial Sequence: Synthetic oligonucleotide
  Target: LAMA2; (+) strand; PAM type: NRG; PAM sequence: AAG
cccgagtcccaaaacctcaa

SEQ ID NO: 174569 - DNA, 20 bp, Artificial Sequence
  Description of Artificial Sequence: Synthetic oligonucleotide
  Target: LAMA2; (+) strand; PAM type: NRG; PAM sequence: TAG
gagtcccaaaacctcaaaag

SEQ ID NO: 174570 - DNA, 20 bp, Artificial Sequence
  Description of Artificial Sequence: Synthetic oligonucleotide
  Target: LAMA2; (+) strand; PAM type: NRG; PAM sequence: AGG
agtcccaaaacctcaaaagt

SEQ ID NO: 174571 - DNA, 20 bp, Artificial Sequence
  Description of Artificial Sequence: Synthetic oligonucleotide
  Target: LAMA2; (+) strand; PAM type: NRG; PAM sequence: GGG
gtcccaaaacctcaaaagta

SEQ ID NO: 174572 - DNA, 20 bp, Artificial Sequence
  Description of Artificial Sequence: Synthetic oligonucleotide
  Target: LAMA2; (+) strand; PAM type: NRG; PAM sequence: AAG
ccaaaacctcaaaagtaggg

SEQ ID NO: 174573 - DNA, 20 bp, Artificial Sequence
  Description of Artificial Sequence: Synthetic oligonucleotide
  Target: LAMA2; (+) strand; PAM type: NRG; PAM sequence: CAG
ctcaaaagtagggaagctga

SEQ ID NO: 174574 - DNA, 20 bp, Artificial Sequence
  Description of Artificial Sequence: Synthetic oligonucleotide
  Target: LAMA2; (+) strand; PAM type: NRG; PAM sequence: CAG
aagtagggaagctgacagtg

SEQ ID NO: 174575 - DNA, 20 bp, Artificial Sequence
  Description of Artificial Sequence: Synthetic oligonucleotide
  Target: LAMA2; (+) strand; PAM type: NRG; PAM sequence: CAG
gaagctgacagtgcagcctt

SEQ ID NO: 174576 - DNA, 20 bp, Artificial Sequence
  Description of Artificial Sequence: Synthetic oligonucleotide
  Target: LAMA2; (+) strand; PAM type: NRG; PAM sequence: TGG
acagtgcagccttcagtctg

SEQ ID NO: 174577 - DNA, 20 bp, Artificial Sequence
  Description of Artificial Sequence: Synthetic oligonucleotide
  Target: LAMA2; (+) strand; PAM type: NRG; PAM sequence: AAG
cagccttcagtctgtggtta

SEQ ID NO: 174578 - DNA, 20 bp, Artificial Sequence
  Description of Artificial Sequence: Synthetic oligonucleotide
  Target: LAMA2; (+) strand; PAM type: NRG; PAM sequence: AGG
agccttcagtctgtggttaa

SEQ ID NO: 174579 - DNA, 20 bp, Artificial Sequence
  Description of Artificial Sequence: Synthetic oligonucleotide
  Target: LAMA2; (+) strand; PAM type: NRG; PAM sequence: CAG
gtctgtggttaaaggcctga

SEQ ID NO: 174580 - DNA, 20 bp, Artificial Sequence
  Description of Artificial Sequence: Synthetic oligonucleotide
  Target: LAMA2; (+) strand; PAM type: NRG; PAM sequence: TGG
gttaaaggcctgacagcccc

SEQ ID NO: 174581 - DNA, 20 bp, Artificial Sequence
  Description of Artificial Sequence: Synthetic oligonucleotide
  Target: LAMA2; (+) strand; PAM type: NRG; PAM sequence: TGG
gacagcccctggcaaacccc

SEQ ID NO: 174582 - DNA, 20 bp, Artificial Sequence
  Description of Artificial Sequence: Synthetic oligonucleotide
  Target: LAMA2; (+) strand; PAM type: NRG; PAM sequence: AAG
ccctggcaaacccctggtgt

SEQ ID NO: 174583 - DNA, 20 bp, Artificial Sequence
  Description of Artificial Sequence: Synthetic oligonucleotide
  Target: LAMA2; (+) strand; PAM type: NRG; PAM sequence: CAG
gcaaacccctggtgtaagtc

SEQ ID NO: 174584 - DNA, 20 bp, Artificial Sequence
  Description of Artificial Sequence: Synthetic oligonucleotide
  Target: LAMA2; (+) strand; PAM type: NRG; PAM sequence: AGG
caaacccctggtgtaagtcc

SEQ ID NO: 174585 - DNA, 20 bp, Artificial Sequence
  Description of Artificial Sequence: Synthetic oligonucleotide
  Target: LAMA2; (+) strand; PAM type: NRG; PAM sequence: AAG
gtgtaagtccaggaatccaa

SEQ ID NO: 174586 - DNA, 20 bp, Artificial Sequence
  Description of Artificial Sequence: Synthetic oligonucleotide
  Target: LAMA2; (+) strand; PAM type: NRG; PAM sequence: AAG
gtccaggaatccaaaagctg

SEQ ID NO: 174587 - DNA, 20 bp, Artificial Sequence
  Description of Artificial Sequence: Synthetic oligonucleotide
  Target: LAMA2; (+) strand; PAM type: NRG; PAM sequence: TGG
aatccaaaagctgaagaact

SEQ ID NO: 174588 - DNA, 20 bp, Artificial Sequence
  Description of Artificial Sequence: Synthetic oligonucleotide
  Target: LAMA2; (+) strand; PAM type: NRG; PAM sequence: GAG
tccaaaagctgaagaacttg

SEQ ID NO: 174589 - DNA, 20 bp, Artificial Sequence
  Description of Artificial Sequence: Synthetic oligonucleotide
  Target: LAMA2; (+) strand; PAM type: NRG; PAM sequence: AAG
gaacttggagtgtgatgttc

SEQ ID NO: 174590 - DNA, 20 bp, Artificial Sequence
  Description of Artificial Sequence: Synthetic oligonucleotide
  Target: LAMA2; (+) strand; PAM type: NRG; PAM sequence: AGG
aacttggagtgtgatgttca

SEQ ID NO: 174591 - DNA, 20 bp, Artificial Sequence
  Description of Artificial Sequence: Synthetic oligonucleotide
  Target: LAMA2; (+) strand; PAM type: NRG; PAM sequence: GGG
acttggagtgtgatgttcaa

SEQ ID NO: 174592 - DNA, 20 bp, Artificial Sequence
  Description of Artificial Sequence: Synthetic oligonucleotide
  Target: LAMA2; (+) strand; PAM type: NRG; PAM sequence: CAG
tggagtgtgatgttcaaggg

SEQ ID NO: 174593 - DNA, 20 bp, Artificial Sequence
  Description of Artificial Sequence: Synthetic oligonucleotide
  Target: LAMA2; (+) strand; PAM type: NRG; PAM sequence: AGG
ggagtgtgatgttcaagggc

SEQ ID NO: 174594 - DNA, 20 bp, Artificial Sequence
  Description of Artificial Sequence: Synthetic oligonucleotide
  Target: LAMA2; (+) strand; PAM type: NRG; PAM sequence: AAG
gtgtgatgttcaagggcagg

SEQ ID NO: 174595 - DNA, 20 bp, Artificial Sequence
  Description of Artificial Sequence: Synthetic oligonucleotide
  Target: LAMA2; (+) strand; PAM type: NRG; PAM sequence: CAG
gttcaagggcaggaagtatc

SEQ ID NO: 174596 - DNA, 20 bp, Artificial Sequence
  Description of Artificial Sequence: Synthetic oligonucleotide
  Target: LAMA2; (+) strand; PAM type: NRG; PAM sequence: TGG
agggcaggaagtatccagca

SEQ ID NO: 174597 - DNA, 20 bp, Artificial Sequence
  Description of Artificial Sequence: Synthetic oligonucleotide
  Target: LAMA2; (+) strand; PAM type: NRG; PAM sequence: GGG
gggcaggaagtatccagcat

SEQ ID NO: 174598 - DNA, 20 bp, Artificial Sequence
  Description of Artificial Sequence: Synthetic oligonucleotide
  Target: LAMA2; (+) strand; PAM type: NRG; PAM sequence: AAG
gaagtatccagcatgggtga

SEQ ID NO: 174599 - DNA, 20 bp, Artificial Sequence
  Description of Artificial Sequence: Synthetic oligonucleotide
  Target: LAMA2; (+) strand; PAM type: NRG; PAM sequence: AAG
tccagcatgggtgaaagatg

SEQ ID NO: 174600 - DNA, 20 bp, Artificial Sequence
  Description of Artificial Sequence: Synthetic oligonucleotide
  Target: LAMA2; (+) strand; PAM type: NRG; PAM sequence: AGG
ccagcatgggtgaaagatga

SEQ ID NO: 174601 - DNA, 20 bp, Artificial Sequence
  Description of Artificial Sequence: Synthetic oligonucleotide
  Target: LAMA2; (+) strand; PAM type: NRG; PAM sequence: TGG
catgggtgaaagatgaaggc

SEQ ID NO: 174602 - DNA, 20 bp, Artificial Sequence
  Description of Artificial Sequence: Synthetic oligonucleotide
  Target: LAMA2; (+) strand; PAM type: NRG; PAM sequence: AAG
gggtgaaagatgaaggctgg

SEQ ID NO: 174603 - DNA, 20 bp, Artificial Sequence
  Description of Artificial Sequence: Synthetic oligonucleotide
  Target: LAMA2; (+) strand; PAM type: NRG; PAM sequence: GAG
gtgaaagatgaaggctggaa

SEQ ID NO: 174604 - DNA, 20 bp, Artificial Sequence
  Description of Artificial Sequence: Synthetic oligonucleotide
  Target: LAMA2; (+) strand; PAM type: NRG; PAM sequence: CAG
aagatgaaggctggaagagt

SEQ ID NO: 174605 - DNA, 20 bp, Artificial Sequence
  Description of Artificial Sequence: Synthetic oligonucleotide
  Target: LAMA2; (+) strand; PAM type: NRG; PAM sequence: AAG
atgaaggctggaagagtcag

SEQ ID NO: 174606 - DNA, 20 bp, Artificial Sequence
  Description of Artificial Sequence: Synthetic oligonucleotide
  Target: LAMA2; (+) strand; PAM type: NRG; PAM sequence: TAG
tcttctgcctgcttttattc

SEQ ID NO: 174607 - DNA, 20 bp, Artificial Sequence
  Description of Artificial Sequence: Synthetic oligonucleotide
  Target: LAMA2; (+) strand; PAM type: NRG; PAM sequence: TGG
tgcttttattctagccacac

SEQ ID NO: 174608 - DNA, 20 bp, Artificial Sequence
  Description of Artificial Sequence: Synthetic oligonucleotide
  Target: LAMA2; (+) strand; PAM type: NRG; PAM sequence: CAG
ttttattctagccacactgg

SEQ ID NO: 174609 - DNA, 20 bp, Artificial Sequence
  Description of Artificial Sequence: Synthetic oligonucleotide
  Target: LAMA2; (+) strand; PAM type: NRG; PAM sequence: TAG
tagccacactggcagcttat

SEQ ID NO: 174610 - DNA, 20 bp, Artificial Sequence
  Description of Artificial Sequence: Synthetic oligonucleotide
  Target: LAMA2; (+) strand; PAM type: NRG; PAM sequence: TGG
cacactggcagcttattaga

SEQ ID NO: 174611 - DNA, 20 bp, Artificial Sequence
  Description of Artificial Sequence: Synthetic oligonucleotide
  Target: LAMA2; (+) strand; PAM type: NRG; PAM sequence: GAG
agatggtgcccacccacatt

SEQ ID NO: 174612 - DNA, 20 bp, Artificial Sequence
  Description of Artificial Sequence: Synthetic oligonucleotide
  Target: LAMA2; (+) strand; PAM type: NRG; PAM sequence: AGG
gatggtgcccacccacattg

SEQ ID NO: 174613 - DNA, 20 bp, Artificial Sequence
  Description of Artificial Sequence: Synthetic oligonucleotide
  Target: LAMA2; (+) strand; PAM type: NRG; PAM sequence: GGG
atggtgcccacccacattga

SEQ ID NO: 174614 - DNA, 20 bp, Artificial Sequence
  Description of Artificial Sequence: Synthetic oligonucleotide
  Target: LAMA2; (+) strand; PAM type: NRG; PAM sequence: TGG
gtgcccacccacattgaggg

SEQ ID NO: 174615 - DNA, 20 bp, Artificial Sequence
  Description of Artificial Sequence: Synthetic oligonucleotide
  Target: LAMA2; (+) strand; PAM type: NRG; PAM sequence: GGG
tgcccacccacattgagggt

SEQ ID NO: 174616 - DNA, 20 bp, Artificial Sequence
  Description of Artificial Sequence: Synthetic oligonucleotide
  Target: LAMA2; (+) strand; PAM type: NRG; PAM sequence: CAG
gagggtgggtctgcctcttc

SEQ ID NO: 174617 - DNA, 20 bp, Artificial Sequence
  Description of Artificial Sequence: Synthetic oligonucleotide
  Target: LAMA2; (+) strand; PAM type: NRG; PAM sequence: CAG
tgggtctgcctcttccagtc

SEQ ID NO: 174618 - DNA, 20 bp, Artificial Sequence
  Description of Artificial Sequence: Synthetic oligonucleotide
  Target: LAMA2; (+) strand; PAM type: NRG; PAM sequence: TGG
actcaaattttaatctcctt

SEQ ID NO: 174619 - DNA, 20 bp, Artificial Sequence
  Description of Artificial Sequence: Synthetic oligonucleotide
  Target: LAMA2; (+) strand; PAM type: NRG; PAM sequence: CAG
ctcctttggcaacaccctca

SEQ ID NO: 174620 - DNA, 20 bp, Artificial Sequence
  Description of Artificial Sequence: Synthetic oligonucleotide
  Target: LAMA2; (+) strand; PAM type: NRG; PAM sequence: GAG
cctttggcaacaccctcaca

SEQ ID NO: 174621 - DNA, 20 bp, Artificial Sequence
  Description of Artificial Sequence: Synthetic oligonucleotide
  Target: LAMA2; (+) strand; PAM type: NRG; PAM sequence: CAG
aacaccctcacagagacacc

SEQ ID NO: 174622 - DNA, 20 bp, Artificial Sequence
  Description of Artificial Sequence: Synthetic oligonucleotide
  Target: LAMA2; (+) strand; PAM type: NRG; PAM sequence: AGG
acaccctcacagagacaccc

SEQ ID NO: 174623 - DNA, 20 bp, Artificial Sequence
  Description of Artificial Sequence: Synthetic oligonucleotide
  Target: LAMA2; (+) strand; PAM type: NRG; PAM sequence: AAG
ttgcatcgttcaatccaatc

SEQ ID NO: 174624 - DNA, 20 bp, Artificial Sequence
  Description of Artificial Sequence: Synthetic oligonucleotide
  Target: LAMA2; (+) strand; PAM type: NRG; PAM sequence: TAG
atcaagctgatactcaatat

SEQ ID NO: 174625 - DNA, 20 bp, Artificial Sequence
  Description of Artificial Sequence: Synthetic oligonucleotide
  Target: LAMA2; (+) strand; PAM type: NRG; PAM sequence: AAG
tactcaatattagtcatcac

SEQ ID NO: 174626 - DNA, 20 bp, Artificial Sequence
  Description of Artificial Sequence: Synthetic oligonucleotide
  Target: LAMA2; (+) strand; PAM type: NRG; PAM sequence: AAG
tcatacataatctccaaata

SEQ ID NO: 174627 - DNA, 20 bp, Artificial Sequence
  Description of Artificial Sequence: Synthetic oligonucleotide
  Target: LAMA2; (+) strand; PAM type: NRG; PAM sequence: CAG
taattatacctaacataata

SEQ ID NO: 174628 - DNA, 20 bp, Artificial Sequence
  Description of Artificial Sequence: Synthetic oligonucleotide
  Target: LAMA2; (+) strand; PAM type: NRG; PAM sequence: CAG
acagctatcccttgtacaat

SEQ ID NO: 174629 - DNA, 20 bp, Artificial Sequence
  Description of Artificial Sequence: Synthetic oligonucleotide
  Target: LAMA2; (+) strand; PAM type: NRG; PAM sequence: AAG
gctatcccttgtacaatcag

SEQ ID NO: 174630 - DNA, 20 bp, Artificial Sequence
  Description of Artificial Sequence: Synthetic oligonucleotide
  Target: LAMA2; (+) strand; PAM type: NRG; PAM sequence: AAG
aacctaaatgctattacata

SEQ ID NO: 174631 - DNA, 20 bp, Artificial Sequence
  Description of Artificial Sequence: Synthetic oligonucleotide
  Target: LAMA2; (+) strand; PAM type: NRG; PAM sequence: AAG
aacacttaaatgctgatatg

SEQ ID NO: 174632 - DNA, 20 bp, Artificial Sequence
  Description of Artificial Sequence: Synthetic oligonucleotide
  Target: LAMA2; (+) strand; PAM type: NRG; PAM sequence: AAG
aaattttatgtcacatgata

SEQ ID NO: 174633 - DNA, 20 bp, Artificial Sequence
  Description of Artificial Sequence: Synthetic oligonucleotide
  Target: LAMA2; (+) strand; PAM type: NRG; PAM sequence: AGG
aattttatgtcacatgataa

SEQ ID NO: 174634 - DNA, 20 bp, Artificial Sequence
  Description of Artificial Sequence: Synthetic oligonucleotide
  Target: LAMA2; (+) strand; PAM type: NRG; PAM sequence: AAG
atgtcacatgataaaggaaa

SEQ ID NO: 174635 - DNA, 20 bp, Artificial Sequence
  Description of Artificial Sequence: Synthetic oligonucleotide
  Target: LAMA2; (+) strand; PAM type: NRG; PAM sequence: AAG
cacatgataaaggaaaaaga

SEQ ID NO: 174636 - DNA, 20 bp, Artificial Sequence
  Description of Artificial Sequence: Synthetic oligonucleotide
  Target: LAMA2; (+) strand; PAM type: NRG; PAM sequence: AAG
aaggaaaaagaaagcaaatg

SEQ ID NO: 174637 - DNA, 20 bp, Artificial Sequence
  Description of Artificial Sequence: Synthetic oligonucleotide
  Target: LAMA2; (+) strand; PAM type: NRG; PAM sequence: TAG
agcaaatgaagatattttcc

SEQ ID NO: 174638 - DNA, 20 bp, Artificial Sequence
  Description of Artificial Sequence: Synthetic oligonucleotide
  Target: LAMA2; (+) strand; PAM type: NRG; PAM sequence: AAG
tgaagatattttcctagtac

SEQ ID NO: 174639 - DNA, 20 bp, Artificial Sequence
  Description of Artificial Sequence: Synthetic oligonucleotide
  Target: LAMA2; (+) strand; PAM type: NRG; PAM sequence: CAG
atgcacaaacatattcttaa

SEQ ID NO: 174640 - DNA, 20 bp, Artificial Sequence
  Description of Artificial Sequence: Synthetic oligonucleotide
  Target: LAMA2; (+) strand; PAM type: NRG; PAM sequence: AAG
aaacatattcttaacagaat

SEQ ID NO: 174641 - DNA, 20 bp, Artificial Sequence
  Description of Artificial Sequence: Synthetic oligonucleotide
  Target: LAMA2; (+) strand; PAM type: NRG; PAM sequence: AGG
aacatattcttaacagaata

SEQ ID NO: 174642 - DNA, 20 bp, Artificial Sequence
  Description of Artificial Sequence: Synthetic oligonucleotide
  Target: LAMA2; (+) strand; PAM type: NRG; PAM sequence: GAG
catattcttaacagaataag

SEQ ID NO: 174643 - DNA, 20 bp, Artificial Sequence
  Description of Artificial Sequence: Synthetic oligonucleotide
  Target: LAMA2; (+) strand; PAM type: NRG; PAM sequence: AGG
atattcttaacagaataagg

SEQ ID NO: 174644 - DNA, 20 bp, Artificial Sequence
  Description of Artificial Sequence: Synthetic oligonucleotide
  Target: LAMA2; (+) strand; PAM type: NRG; PAM sequence: CAG
gaggaaatatatgacaatta

SEQ ID NO: 174645 - DNA, 20 bp, Artificial Sequence
  Description of Artificial Sequence: Synthetic oligonucleotide
  Target: LAMA2; (+) strand; PAM type: NRG; PAM sequence: TGG
acagtcttcatttctgcaac

SEQ ID NO: 174646 - DNA, 20 bp, Artificial Sequence
  Description of Artificial Sequence: Synthetic oligonucleotide
  Target: LAMA2; (+) strand; PAM type: NRG; PAM sequence: TGG
catttctgcaactggccacg

SEQ ID NO: 174647 - DNA, 20 bp, Artificial Sequence
  Description of Artificial Sequence: Synthetic oligonucleotide
  Target: LAMA2; (+) strand; PAM type: NRG; PAM sequence: TAG
tgcaactggccacgtggttg

SEQ ID NO: 174648 - DNA, 20 bp, Artificial Sequence
  Description of Artificial Sequence: Synthetic oligonucleotide
  Target: LAMA2; (+) strand; PAM type: NRG; PAM sequence: TGG
actggccacgtggttgtagc

SEQ ID NO: 174649 - DNA, 20 bp, Artificial Sequence
  Description of Artificial Sequence: Synthetic oligonucleotide
  Target: LAMA2; (+) strand; PAM type: NRG; PAM sequence: AAG
gtattccctttgccttctgc

SEQ ID NO: 174650 - DNA, 20 bp, Artificial Sequence
  Description of Artificial Sequence: Synthetic oligonucleotide
  Target: LAMA2; (+) strand; PAM type: NRG; PAM sequence: CAG
tttgccttctgcaagcacct

SEQ ID NO: 174651 - DNA, 20 bp, Artificial Sequence
  Description of Artificial Sequence: Synthetic oligonucleotide
  Target: LAMA2; (+) strand; PAM type: NRG; PAM sequence: CGG
gccttctgcaagcacctcag

SEQ ID NO: 174652 - DNA, 20 bp, Artificial Sequence
  Description of Artificial Sequence: Synthetic oligonucleotide
  Target: LAMA2; (+) strand; PAM type: NRG; PAM sequence: GGG
ccttctgcaagcacctcagc

SEQ ID NO: 174653 - DNA, 20 bp, Artificial Sequence
  Description of Artificial Sequence: Synthetic oligonucleotide
  Target: LAMA2; (+) strand; PAM type: NRG; PAM sequence: TGG
gcaagcacctcagcgggtca

SEQ ID NO: 174654 - DNA, 20 bp, Artificial Sequence
  Description of Artificial Sequence: Synthetic oligonucleotide
  Target: LAMA2; (+) strand; PAM type: NRG; PAM sequence: TGG
gcgggtcatggctttttacc

SEQ ID NO: 174655 - DNA, 20 bp, Artificial Sequence
  Description of Artificial Sequence: Synthetic oligonucleotide
  Target: LAMA2; (+) strand; PAM type: NRG; PAM sequence: TGG
ggtcatggctttttacctgg

SEQ ID NO: 174656 - DNA, 20 bp, Artificial Sequence
  Description of Artificial Sequence: Synthetic oligonucleotide
  Target: LAMA2; (+) strand; PAM type: NRG; PAM sequence: GGG
gtcatggctttttacctggt

SEQ ID NO: 174657 - DNA, 20 bp, Artificial Sequence
  Description of Artificial Sequence: Synthetic oligonucleotide
  Target: LAMA2; (+) strand; PAM type: NRG; PAM sequence: GGG
tcatggctttttacctggtg

SEQ ID NO: 174658 - DNA, 20 bp, Artificial Sequence
  Description of Artificial Sequence: Synthetic oligonucleotide
  Target: LAMA2; (+) strand; PAM type: NRG; PAM sequence: TGG
ggtgacccaaacctttattc

SEQ ID NO: 174659 - DNA, 20 bp, Artificial Sequence
  Description of Artificial Sequence: Synthetic oligonucleotide
  Target: LAMA2; (+) strand; PAM type: NRG; PAM sequence: AAG
gacccaaacctttattctgg

SEQ ID NO: 174660 - DNA, 20 bp, Artificial Sequence
  Description of Artificial Sequence: Synthetic oligonucleotide
  Target: LAMA2; (+) strand; PAM type: NRG; PAM sequence: AGG
acccaaacctttattctgga

SEQ ID NO: 174661 - DNA, 20 bp, Artificial Sequence
  Description of Artificial Sequence: Synthetic oligonucleotide
  Target: LAMA2; (+) strand; PAM type: NRG; PAM sequence: TAG
ggaaggacctgtgccatttg

SEQ ID NO: 174662 - DNA, 20 bp, Artificial Sequence
  Description of Artificial Sequence: Synthetic oligonucleotide
  Target: LAMA2; (+) strand; PAM type: NRG; PAM sequence: TGG
gtgccatttgtagtcctgtc

SEQ ID NO: 174663 - DNA, 20 bp, Artificial Sequence
  Description of Artificial Sequence: Synthetic oligonucleotide
  Target: LAMA2; (+) strand; PAM type: NRG; PAM sequence: TGG
atttgtagtcctgtctggat

SEQ ID NO: 174664 - DNA, 20 bp, Artificial Sequence
  Description of Artificial Sequence: Synthetic oligonucleotide
  Target: LAMA2; (+) strand; PAM type: NRG; PAM sequence: GGG
tttgtagtcctgtctggatt

SEQ ID NO: 174665 - DNA, 20 bp, Artificial Sequence
  Description of Artificial Sequence: Synthetic oligonucleotide
  Target: LAMA2; (+) strand; PAM type: NRG; PAM sequence: TGG
tagtcctgtctggattgggt

SEQ ID NO: 174666 - DNA, 20 bp, Artificial Sequence
  Description of Artificial Sequence: Synthetic oligonucleotide
  Target: LAMA2; (+) strand; PAM type: NRG; PAM sequence: TGG
ctgtctggattgggttggat

SEQ ID NO: 174667 - DNA, 20 bp, Artificial Sequence
  Description of Artificial Sequence: Synthetic oligonucleotide
  Target: LAMA2; (+) strand; PAM type: NRG; PAM sequence: GGG
tgtctggattgggttggatt

SEQ ID NO: 174668 - DNA, 20 bp, Artificial Sequence
  Description of Artificial Sequence: Synthetic oligonucleotide
  Target: LAMA2; (+) strand; PAM type: NRG; PAM sequence: TAG
tgggttggattgggttgttg

SEQ ID NO: 174669 - DNA, 20 bp, Artificial Sequence
  Description of Artificial Sequence: Synthetic oligonucleotide
  Target: LAMA2; (+) strand; PAM type: NRG; PAM sequence: CAG
tttcccattgaccttaaaca

SEQ ID NO: 174670 - DNA, 20 bp, Artificial Sequence
  Description of Artificial Sequence: Synthetic oligonucleotide
  Target: LAMA2; (+) strand; PAM type: NRG; PAM sequence: GAG
tcccattgaccttaaacaca

SEQ ID NO: 174671 - DNA, 20 bp, Artificial Sequence
  Description of Artificial Sequence: Synthetic oligonucleotide
  Target: LAMA2; (+) strand; PAM type: NRG; PAM sequence: AGG
cccattgaccttaaacacag

SEQ ID NO: 174672 - DNA, 20 bp, Artificial Sequence
  Description of Artificial Sequence: Synthetic oligonucleotide
  Target: LAMA2; (+) strand; PAM type: NRG; PAM sequence: TGG
ttgaccttaaacacagagga

SEQ ID NO: 174673 - DNA, 20 bp, Artificial Sequence
  Description of Artificial Sequence: Synthetic oligonucleotide
  Target: LAMA2; (+) strand; PAM type: NRG; PAM sequence: AAG
acacagaggatggtaatatt

SEQ ID NO: 174674 - DNA, 20 bp, Artificial Sequence
  Description of Artificial Sequence: Synthetic oligonucleotide
  Target: LAMA2; (+) strand; PAM type: NRG; PAM sequence: GAG
acagaggatggtaatattaa

SEQ ID NO: 174675 - DNA, 20 bp, Artificial Sequence
  Description of Artificial Sequence: Synthetic oligonucleotide
  Target: LAMA2; (+) strand; PAM type: NRG; PAM sequence: TGG
taatattaagagatgcccta

SEQ ID NO: 174676 - DNA, 20 bp, Artificial Sequence
  Description of Artificial Sequence: Synthetic oligonucleotide
  Target: LAMA2; (+) strand; PAM type: NRG; PAM sequence: GGG
aatattaagagatgccctat

SEQ ID NO: 174677 - DNA, 20 bp, Artificial Sequence
  Description of Artificial Sequence: Synthetic oligonucleotide
  Target: LAMA2; (+) strand; PAM type: NRG; PAM sequence: TGG
gctcttccttgccttcattg

SEQ ID NO: 174678 - DNA, 20 bp, Artificial Sequence
  Description of Artificial Sequence: Synthetic oligonucleotide
  Target: LAMA2; (+) strand; PAM type: NRG; PAM sequence: TAG
tccttgccttcattgtggaa

SEQ ID NO: 174679 - DNA, 20 bp, Artificial Sequence
  Description of Artificial Sequence: Synthetic oligonucleotide
  Target: LAMA2; (+) strand; PAM type: NRG; PAM sequence: TAG
ttgccttcattgtggaatag

SEQ ID NO: 174680 - DNA, 20 bp, Artificial Sequence
  Description of Artificial Sequence: Synthetic oligonucleotide
  Target: LAMA2; (+) strand; PAM type: NRG; PAM sequence: TGG
ctgatttcaccttgatattc

SEQ ID NO: 174681 - DNA, 20 bp, Artificial Sequence
  Description of Artificial Sequence: Synthetic oligonucleotide
  Target: LAMA2; (+) strand; PAM type: NRG; PAM sequence: GGG
tgatttcaccttgatattct

SEQ ID NO: 174682 - DNA, 20 bp, Artificial Sequence
  Description of Artificial Sequence: Synthetic oligonucleotide
  Target: LAMA2; (+) strand; PAM type: NRG; PAM sequence: CAG
gatattctgggtcaattacc

SEQ ID NO: 174683 - DNA, 20 bp, Artificial Sequence
  Description of Artificial Sequence: Synthetic oligonucleotide
  Target: LAMA2; (+) strand; PAM type: NRG; PAM sequence: TAG
caacactgaaacccccttct

SEQ ID NO: 174684 - DNA, 20 bp, Artificial Sequence
  Description of Artificial Sequence: Synthetic oligonucleotide
  Target: LAMA2; (+) strand; PAM type: NRG; PAM sequence: TGG
cccttcttagcctgttgact

SEQ ID NO: 174685 - DNA, 20 bp, Artificial Sequence
  Description of Artificial Sequence: Synthetic oligonucleotide
  Target: LAMA2; (+) strand; PAM type: NRG; PAM sequence: GAG
cttcttagcctgttgacttg

SEQ ID NO: 174686 - DNA, 20 bp, Artificial Sequence
  Description of Artificial Sequence: Synthetic oligonucleotide
  Target: LAMA2; (+) strand; PAM type: NRG; PAM sequence: AGG
ttcttagcctgttgacttgg

SEQ ID NO: 174687 - DNA, 20 bp, Artificial Sequence
  Description of Artificial Sequence: Synthetic oligonucleotide
  Target: LAMA2; (+) strand; PAM type: NRG; PAM sequence: TAG
ttagcctgttgacttggagg

SEQ ID NO: 174688 - DNA, 20 bp, Artificial Sequence
  Description of Artificial Sequence: Synthetic oligonucleotide
  Target: LAMA2; (+) strand; PAM type: NRG; PAM sequence: AGG
tagcctgttgacttggaggt

SEQ ID NO: 174689 - DNA, 20 bp, Artificial Sequence
  Description of Artificial Sequence: Synthetic oligonucleotide
  Target: LAMA2; (+) strand; PAM type: NRG; PAM sequence: GAG
gcctgttgacttggaggtag

SEQ ID NO: 174690 - DNA, 20 bp, Artificial Sequence
  Description of Artificial Sequence: Synthetic oligonucleotide
  Target: LAMA2; (+) strand; PAM type: NRG; PAM sequence: AGG
cctgttgacttggaggtagg

SEQ ID NO: 174691 - DNA, 20 bp, Artificial Sequence
  Description of Artificial Sequence: Synthetic oligonucleotide
  Target: LAMA2; (+) strand; PAM type: NRG; PAM sequence: GGG
ctgttgacttggaggtagga

SEQ ID NO: 174692 - DNA, 20 bp, Artificial Sequence
  Description of Artificial Sequence: Synthetic oligonucleotide
  Target: LAMA2; (+) strand; PAM type: NRG; PAM sequence: TGG
ggaggtaggagggccccaat

SEQ ID NO: 174693 - DNA, 20 bp, Artificial Sequence
  Description of Artificial Sequence: Synthetic oligonucleotide
  Target: LAMA2; (+) strand; PAM type: NRG; PAM sequence: CAG
gtaggagggccccaattggc

SEQ ID NO: 174694 - DNA, 20 bp, Artificial Sequence
  Description of Artificial Sequence: Synthetic oligonucleotide
  Target: LAMA2; (+) strand; PAM type: NRG; PAM sequence: AGG
taggagggccccaattggcc

SEQ ID NO: 174695 - DNA, 20 bp, Artificial Sequence
  Description of Artificial Sequence: Synthetic oligonucleotide
  Target: LAMA2; (+) strand; PAM type: NRG; PAM sequence: TGG
gagggccccaattggccagg

SEQ ID NO: 174696 - DNA, 20 bp, Artificial Sequence
  Description of Artificial Sequence: Synthetic oligonucleotide
  Target: LAMA2; (+) strand; PAM type: NRG; PAM sequence: CAG
caggtggtaatcttaacttc

SEQ ID NO: 174697 - DNA, 20 bp, Artificial Sequence
  Description of Artificial Sequence: Synthetic oligonucleotide
  Target: LAMA2; (+) strand; PAM type: NRG; PAM sequence: TGG
aatcttaacttccagtttaa

SEQ ID NO: 174698 - DNA, 20 bp, Artificial Sequence
  Description of Artificial Sequence: Synthetic oligonucleotide
  Target: LAMA2; (+) strand; PAM type: NRG; PAM sequence: TGG
ggaatcattgttgtatccct

SEQ ID NO: 174699 - DNA, 20 bp, Artificial Sequence
  Description of Artificial Sequence: Synthetic oligonucleotide
  Target: LAMA2; (+) strand; PAM type: NRG; PAM sequence: CAG
attgttgtatcccttggtga

SEQ ID NO: 174700 - DNA, 20 bp, Artificial Sequence
  Description of Artificial Sequence: Synthetic oligonucleotide
  Target: LAMA2; (+) strand; PAM type: NRG; PAM sequence: TGG
ggtgacagcattcttccctc

SEQ ID NO: 174701 - DNA, 20 bp, Artificial Sequence
  Description of Artificial Sequence: Synthetic oligonucleotide
  Target: LAMA2; (+) strand; PAM type: NRG; PAM sequence: AAG
gcattcttccctctggaact

SEQ ID NO: 174702 - DNA, 20 bp, Artificial Sequence
  Description of Artificial Sequence: Synthetic oligonucleotide
  Target: LAMA2; (+) strand; PAM type: NRG; PAM sequence: TAG
ccctctggaactaagatgtc

SEQ ID NO: 174703 - DNA, 20 bp, Artificial Sequence
  Description of Artificial Sequence: Synthetic oligonucleotide
  Target: LAMA2; (+) strand; PAM type: NRG; PAM sequence: AGG
cctctggaactaagatgtct

SEQ ID NO: 174704 - DNA, 20 bp, Artificial Sequence
  Description of Artificial Sequence: Synthetic oligonucleotide
  Target: LAMA2; (+) strand; PAM type: NRG; PAM sequence: CAG
tggaactaagatgtctaggc

SEQ ID NO: 174705 - DNA, 20 bp, Artificial Sequence
  Description of Artificial Sequence: Synthetic oligonucleotide
  Target: LAMA2; (+) strand; PAM type: NRG; PAM sequence: CAG
aactaagatgtctaggccag

SEQ ID NO: 174706 - DNA, 20 bp, Artificial Sequence
  Description of Artificial Sequence: Synthetic oligonucleotide
  Target: LAMA2; (+) strand; PAM type: NRG; PAM sequence: TGG
gccagcagaacataatgttg

SEQ ID NO: 174707 - DNA, 20 bp, Artificial Sequence
  Description of Artificial Sequence: Synthetic oligonucleotide
  Target: LAMA2; (+) strand; PAM type: NRG; PAM sequence: GGG
ccagcagaacataatgttgt

SEQ ID NO: 174708 - DNA, 20 bp, Artificial Sequence
  Description of Artificial Sequence: Synthetic oligonucleotide
  Target: LAMA2; (+) strand; PAM type: NRG; PAM sequence: CAG
agaacataatgttgtgggaa

SEQ ID NO: 174709 - DNA, 20 bp, Artificial Sequence
  Description of Artificial Sequence: Synthetic oligonucleotide
  Target: LAMA2; (+) strand; PAM type: NRG; PAM sequence: AGG
gaacataatgttgtgggaac

SEQ ID NO: 174710 - DNA, 20 bp, Artificial Sequence
  Description of Artificial Sequence: Synthetic oligonucleotide
  Target: LAMA2; (+) strand; PAM type: NRG; PAM sequence: AAG
cataatgttgtgggaacagg

SEQ ID NO: 174711 - DNA, 20 bp, Artificial Sequence
  Description of Artificial Sequence: Synthetic oligonucleotide
  Target: LAMA2; (+) strand; PAM type: NRG; PAM sequence: TAG
aacaggaagcaaaattttgc

SEQ ID NO: 174712 - DNA, 20 bp, Artificial Sequence
  Description of Artificial Sequence: Synthetic oligonucleotide
  Target: LAMA2; (+) strand; PAM type: NRG; PAM sequence: TGG
aggaagcaaaattttgctag

SEQ ID NO: 174713 - DNA, 20 bp, Artificial Sequence
  Description of Artificial Sequence: Synthetic oligonucleotide
  Target: LAMA2; (+) strand; PAM type: NRG; PAM sequence: GGG
ggaagcaaaattttgctagt

SEQ ID NO: 174714 - DNA, 20 bp, Artificial Sequence
  Description of Artificial Sequence: Synthetic oligonucleotide
  Target: LAMA2; (+) strand; PAM type: NRG; PAM sequence: TAG
aaattttgctagtgggtcac

SEQ ID NO: 174715 - DNA, 20 bp, Artificial Sequence
  Description of Artificial Sequence: Synthetic oligonucleotide
  Target: LAMA2; (+) strand; PAM type: NRG; PAM sequence: TGG
ttttgctagtgggtcactag

SEQ ID NO: 174716 - DNA, 20 bp, Artificial Sequence
  Description of Artificial Sequence: Synthetic oligonucleotide
  Target: LAMA2; (+) strand; PAM type: NRG; PAM sequence: TGG
tagtgggtcactagtggtga

SEQ ID NO: 174717 - DNA, 20 bp, Artificial Sequence
  Description of Artificial Sequence: Synthetic oligonucleotide
  Target: LAMA2; (+) strand; PAM type: NRG; PAM sequence: GAG
gggtcactagtggtgatggt

SEQ ID NO: 174718 - DNA, 20 bp, Artificial Sequence
  Description of Artificial Sequence: Synthetic oligonucleotide
  Target: LAMA2; (+) strand; PAM type: NRG; PAM sequence: TGG
tcactagtggtgatggtgag

SEQ ID NO: 174719 - DNA, 20 bp, Artificial Sequence
  Description of Artificial Sequence: Synthetic oligonucleotide
  Target: LAMA2; (+) strand; PAM type: NRG; PAM sequence: TGG
ccgcttccaccccttgattc

SEQ ID NO: 174720 - DNA, 20 bp, Artificial Sequence
  Description of Artificial Sequence: Synthetic oligonucleotide
  Target: LAMA2; (+) strand; PAM type: NRG; PAM sequence: GGG
cgcttccaccccttgattct

SEQ ID NO: 174721 - DNA, 20 bp, Artificial Sequence
  Description of Artificial Sequence: Synthetic oligonucleotide
  Target: LAMA2; (+) strand; PAM type: NRG; PAM sequence: TGG
attctgggacacgtgaacac

SEQ ID NO: 174722 - DNA, 20 bp, Artificial Sequence
  Description of Artificial Sequence: Synthetic oligonucleotide
  Target: LAMA2; (+) strand; PAM type: NRG; PAM sequence: TGG
ggacacgtgaacactggcta

SEQ ID NO: 174723 - DNA, 20 bp, Artificial Sequence
  Description of Artificial Sequence: Synthetic oligonucleotide
  Target: LAMA2; (+) strand; PAM type: NRG; PAM sequence: GGG
gacacgtgaacactggctat

SEQ ID NO: 174724 - DNA, 20 bp, Artificial Sequence
  Description of Artificial Sequence: Synthetic oligonucleotide
  Target: LAMA2; (+) strand; PAM type: NRG; PAM sequence: GAG
cacgtgaacactggctatgg

SEQ ID NO: 174725 - DNA, 20 bp, Artificial Sequence
  Description of Artificial Sequence: Synthetic oligonucleotide
  Target: LAMA2; (+) strand; PAM type: NRG; PAM sequence: CAG
aacactggctatgggagaaa

SEQ ID NO: 174726 - DNA, 20 bp, Artificial Sequence
  Description of Artificial Sequence: Synthetic oligonucleotide
  Target: LAMA2; (+) strand; PAM type: NRG; PAM sequence: TGG
ggagaaacagtaccatattt

SEQ ID NO: 174727 - DNA, 20 bp, Artificial Sequence
  Description of Artificial Sequence: Synthetic oligonucleotide
  Target: LAMA2; (+) strand; PAM type: NRG; PAM sequence: AAG
catattttggacactgattc

SEQ ID NO: 174728 - DNA, 20 bp, Artificial Sequence
  Description of Artificial Sequence: Synthetic oligonucleotide
  Target: LAMA2; (+) strand; PAM type: NRG; PAM sequence: AGG
atattttggacactgattca

SEQ ID NO: 174729 - DNA, 20 bp, Artificial Sequence
  Description of Artificial Sequence: Synthetic oligonucleotide
  Target: LAMA2; (+) strand; PAM type: NRG; PAM sequence: CAG
acactgattcaaggcataca

SEQ ID NO: 174730 - DNA, 20 bp, Artificial Sequence
  Description of Artificial Sequence: Synthetic oligonucleotide
  Target: LAMA2; (+) strand; PAM type: NRG; PAM sequence: TGG
tcaaggcatacacagccttc

SEQ ID NO: 174731 - DNA, 20 bp, Artificial Sequence
  Description of Artificial Sequence: Synthetic oligonucleotide
  Target: LAMA2; (+) strand; PAM type: NRG; PAM sequence: GAG
aaggcatacacagccttctg

SEQ ID NO: 174732 - DNA, 20 bp, Artificial Sequence
  Description of Artificial Sequence: Synthetic oligonucleotide
  Target: LAMA2; (+) strand; PAM type: NRG; PAM sequence: CAG
ccttctggagaactttgccc

SEQ ID NO: 174733 - DNA, 20 bp, Artificial Sequence
  Description of Artificial Sequence: Synthetic oligonucleotide
  Target: LAMA2; (+) strand; PAM type: NRG; PAM sequence: CGG
tggagaactttgccccagtc

SEQ ID NO: 174734 - DNA, 20 bp, Artificial Sequence
  Description of Artificial Sequence: Synthetic oligonucleotide
  Target: LAMA2; (+) strand; PAM type: NRG; PAM sequence: AAG
aactttgccccagtccggca

SEQ ID NO: 174735 - DNA, 20 bp, Artificial Sequence
  Description of Artificial Sequence: Synthetic oligonucleotide
  Target: LAMA2; (+) strand; PAM type: NRG; PAM sequence: TAG
tccggcaaagtattgtcacc

SEQ ID NO: 174736 - DNA, 20 bp, Artificial Sequence
  Description of Artificial Sequence: Synthetic oligonucleotide
  Target: LAMA2; (+) strand; PAM type: NRG; PAM sequence: TGG
gcaaagtattgtcacctagt

SEQ ID NO: 174737 - DNA, 20 bp, Artificial Sequence
  Description of Artificial Sequence: Synthetic oligonucleotide
  Target: LAMA2; (+) strand; PAM type: NRG; PAM sequence: AAG
cattgtaattatgacttcaa

SEQ ID NO: 174738 - DNA, 20 bp, Artificial Sequence
  Description of Artificial Sequence: Synthetic oligonucleotide
  Target: LAMA2; (+) strand; PAM type: NRG; PAM sequence: AGG
attgtaattatgacttcaaa

SEQ ID NO: 174739 - DNA, 20 bp, Artificial Sequence
  Description of Artificial Sequence: Synthetic oligonucleotide
  Target: LAMA2; (+) strand; PAM type: NRG; PAM sequence: GGG
ttgtaattatgacttcaaaa

SEQ ID NO: 174740 - DNA, 20 bp, Artificial Sequence
  Description of Artificial Sequence: Synthetic oligonucleotide
  Target: LAMA2; (+) strand; PAM type: NRG; PAM sequence: CAG
ttctatcaatccacctgctt

SEQ ID NO: 174741 - DNA, 20 bp, Artificial Sequence
  Description of Artificial Sequence: Synthetic oligonucleotide
  Target: LAMA2; (+) strand; PAM type: NRG; PAM sequence: AGG
tctatcaatccacctgcttc

SEQ ID NO: 174742 - DNA, 20 bp, Artificial Sequence
  Description of Artificial Sequence: Synthetic oligonucleotide
  Target: LAMA2; (+) strand; PAM type: NRG; PAM sequence: TGG
atccacctgcttcaggatga

SEQ ID NO: 174743 - DNA, 20 bp, Artificial Sequence
  Description of Artificial Sequence: Synthetic oligonucleotide
  Target: LAMA2; (+) strand; PAM type: NRG; PAM sequence: GGG
tccacctgcttcaggatgat

SEQ ID NO: 174744 - DNA, 20 bp, Artificial Sequence
  Description of Artificial Sequence: Synthetic oligonucleotide
  Target: LAMA2; (+) strand; PAM type: NRG; PAM sequence: AAG
aggatgatgggaaacatgat

SEQ ID NO: 174745 - DNA, 20 bp, Artificial Sequence
  Description of Artificial Sequence: Synthetic oligonucleotide
  Target: LAMA2; (+) strand; PAM type: NRG; PAM sequence: CAG
gatgggaaacatgataagac

SEQ ID NO: 174746 - DNA, 20 bp, Artificial Sequence
  Description of Artificial Sequence: Synthetic oligonucleotide
  Target: LAMA2; (+) strand; PAM type: NRG; PAM sequence: GAG
ataagaccagtgaattccat

SEQ ID NO: 174747 - DNA, 20 bp, Artificial Sequence
  Description of Artificial Sequence: Synthetic oligonucleotide
  Target: LAMA2; (+) strand; PAM type: NRG; PAM sequence: GAG
ccagtgaattccatgagcat

SEQ ID NO: 174748 - DNA, 20 bp, Artificial Sequence
  Description of Artificial Sequence: Synthetic oligonucleotide
  Target: LAMA2; (+) strand; PAM type: NRG; PAM sequence: CAG
gaattccatgagcatgagcc

SEQ ID NO: 174749 - DNA, 20 bp, Artificial Sequence
  Description of Artificial Sequence: Synthetic oligonucleotide
  Target: LAMA2; (+) strand; PAM type: NRG; PAM sequence: TAG
agcccagtgctgcacttctt

SEQ ID NO: 174750 - DNA, 20 bp, Artificial Sequence
  Description of Artificial Sequence: Synthetic oligonucleotide
  Target: LAMA2; (+) strand; PAM type: NRG; PAM sequence: AAG
gctgcacttctttagctgta

SEQ ID NO: 174751 - DNA, 20 bp, Artificial Sequence
  Description of Artificial Sequence: Synthetic oligonucleotide
  Target: LAMA2; (+) strand; PAM type: NRG; PAM sequence: GAG
cacttctttagctgtaaagt

SEQ ID NO: 174752 - DNA, 20 bp, Artificial Sequence
  Description of Artificial Sequence: Synthetic oligonucleotide
  Target: LAMA2; (+) strand; PAM type: NRG; PAM sequence: CAG
tgtaaagtgagtgccttgtt

SEQ ID NO: 174753 - DNA, 20 bp, Artificial Sequence
  Description of Artificial Sequence: Synthetic oligonucleotide
  Target: LAMA2; (+) strand; PAM type: NRG; PAM sequence: GAG
taaagtgagtgccttgttca

SEQ ID NO: 174754 - DNA, 20 bp, Artificial Sequence
  Description of Artificial Sequence: Synthetic oligonucleotide
  Target: LAMA2; (+) strand; PAM type: NRG; PAM sequence: AGG
aaagtgagtgccttgttcag

SEQ ID NO: 174755 - DNA, 20 bp, Artificial Sequence
  Description of Artificial Sequence: Synthetic oligonucleotide
  Target: LAMA2; (+) strand; PAM type: NRG; PAM sequence: TGG
tgttcagaggcaatgctgtg

SEQ ID NO: 174756 - DNA, 20 bp, Artificial Sequence
  Description of Artificial Sequence: Synthetic oligonucleotide
  Target: LAMA2; (+) strand; PAM type: NRG; PAM sequence: CAG
tgctgtgtggaataccatga

SEQ ID NO: 174757 - DNA, 20 bp, Artificial Sequence
  Description of Artificial Sequence: Synthetic oligonucleotide
  Target: LAMA2; (+) strand; PAM type: NRG; PAM sequence: AAG
ggaataccatgacagcgaat

SEQ ID NO: 174758 - DNA, 20 bp, Artificial Sequence
  Description of Artificial Sequence: Synthetic oligonucleotide
  Target: LAMA2; (+) strand; PAM type: NRG; PAM sequence: AGG
gaataccatgacagcgaata

SEQ ID NO: 174759 - DNA, 20 bp, Artificial Sequence
  Description of Artificial Sequence: Synthetic oligonucleotide
  Target: LAMA2; (+) strand; PAM type: NRG; PAM sequence: TGG
tgacagcgaataaggcattc

SEQ ID NO: 174760 - DNA, 20 bp, Artificial Sequence
  Description of Artificial Sequence: Synthetic oligonucleotide
  Target: LAMA2; (+) strand; PAM type: NRG; PAM sequence: GGG
gacagcgaataaggcattct

SEQ ID NO: 174761 - DNA, 20 bp, Artificial Sequence
  Description of Artificial Sequence: Synthetic oligonucleotide
  Target: LAMA2; (+) strand; PAM type: NRG; PAM sequence: GAG
cagcgaataaggcattctgg

SEQ ID NO: 174762 - DNA, 20 bp, Artificial Sequence
  Description of Artificial Sequence: Synthetic oligonucleotide
  Target: LAMA2; (+) strand; PAM type: NRG; PAM sequence: CGG
taaggcattctgggagttca

SEQ ID NO: 174763 - DNA, 20 bp, Artificial Sequence
  Description of Artificial Sequence: Synthetic oligonucleotide
  Target: LAMA2; (+) strand; PAM type: NRG; PAM sequence: TGG
gcattctgggagttcacgga

SEQ ID NO: 174764 - DNA, 20 bp, Artificial Sequence
  Description of Artificial Sequence: Synthetic oligonucleotide
  Target: LAMA2; (+) strand; PAM type: NRG; PAM sequence: TGG
gagttcacggatggtactct

SEQ ID NO: 174765 - DNA, 20 bp, Artificial Sequence
  Description of Artificial Sequence: Synthetic oligonucleotide
  Target: LAMA2; (+) strand; PAM type: NRG; PAM sequence: CAG
ttcacggatggtactcttgg

SEQ ID NO: 174766 - DNA, 20 bp, Artificial Sequence
  Description of Artificial Sequence: Synthetic oligonucleotide
  Target: LAMA2; (+) strand; PAM type: NRG; PAM sequence: TGG
ggtactcttggcagaaacat

SEQ ID NO: 174767 - DNA, 20 bp, Artificial Sequence
  Description of Artificial Sequence: Synthetic oligonucleotide
  Target: LAMA2; (+) strand; PAM type: NRG; PAM sequence: GGG
gtactcttggcagaaacatt

SEQ ID NO: 174768 - DNA, 20 bp, Artificial Sequence
  Description of Artificial Sequence: Synthetic oligonucleotide
  Target: LAMA2; (+) strand; PAM type: NRG; PAM sequence: TAG
cttggcagaaacattgggcg

SEQ ID NO: 174769 - DNA, 20 bp, Artificial Sequence
  Description of Artificial Sequence: Synthetic oligonucleotide
  Target: LAMA2; (+) strand; PAM type: NRG; PAM sequence: AGG
ttggcagaaacattgggcgt

SEQ ID NO: 174770 - DNA, 20 bp, Artificial Sequence
  Description of Artificial Sequence: Synthetic oligonucleotide
  Target: LAMA2; (+) strand; PAM type: NRG; PAM sequence: TGG
cagaaacattgggcgtagga

SEQ ID NO: 174771 - DNA, 20 bp, Artificial Sequence
  Description of Artificial Sequence: Synthetic oligonucleotide
  Target: LAMA2; (+) strand; PAM type: NRG; PAM sequence: GGG
agaaacattgggcgtaggat

SEQ ID NO: 174772 - DNA, 20 bp, Artificial Sequence
  Description of Artificial Sequence: Synthetic oligonucleotide
  Target: LAMA2; (+) strand; PAM type: NRG; PAM sequence: CAG
aggatgggcaaatccatatc

SEQ ID NO: 174773 - DNA, 20 bp, Artificial Sequence
  Description of Artificial Sequence: Synthetic oligonucleotide
  Target: LAMA2; (+) strand; PAM type: NRG; PAM sequence: AAG
ggcaaatccatatccagaat

SEQ ID NO: 174774 - DNA, 20 bp, Artificial Sequence
  Description of Artificial Sequence: Synthetic oligonucleotide
  Target: LAMA2; (+) strand; PAM type: NRG; PAM sequence: GAG
gaataagtgcctattccatt

SEQ ID NO: 174775 - DNA, 20 bp, Artificial Sequence
  Description of Artificial Sequence: Synthetic oligonucleotide
  Target: LAMA2; (+) strand; PAM type: NRG; PAM sequence: AGG
aataagtgcctattccattg

SEQ ID NO: 174776 - DNA, 20 bp, Artificial Sequence
  Description of Artificial Sequence: Synthetic oligonucleotide
  Target: LAMA2; (+) strand; PAM type: NRG; PAM sequence: TGG
aaacctctgcctttgcatga

SEQ ID NO: 174777 - DNA, 20 bp, Artificial Sequence
  Description of Artificial Sequence: Synthetic oligonucleotide
  Target: LAMA2; (+) strand; PAM type: NRG; PAM sequence: AAG
cctctgcctttgcatgatgg

SEQ ID NO: 174778 - DNA, 20 bp, Artificial Sequence
  Description of Artificial Sequence: Synthetic oligonucleotide
  Target: LAMA2; (+) strand; PAM type: NRG; PAM sequence: GAG
tctgcctttgcatgatggaa

SEQ ID NO: 174779 - DNA, 20 bp, Artificial Sequence
  Description of Artificial Sequence: Synthetic oligonucleotide
  Target: LAMA2; (+) strand; PAM type: NRG; PAM sequence: AGG
ctgcctttgcatgatggaag

SEQ ID NO: 174780 - DNA, 20 bp, Artificial Sequence
  Description of Artificial Sequence: Synthetic oligonucleotide
  Target: LAMA2; (+) strand; PAM type: NRG; PAM sequence: AAG
gatataatcaacctgccacc

SEQ ID NO: 174781 - DNA, 20 bp, Artificial Sequence
  Description of Artificial Sequence: Synthetic oligonucleotide
  Target: LAMA2; (+) strand; PAM type: NRG; PAM sequence: AAG
ataatcaacctgccaccaag

SEQ ID NO: 174782 - DNA, 20 bp, Artificial Sequence
  Description of Artificial Sequence: Synthetic oligonucleotide
  Target: LAMA2; (+) strand; PAM type: NRG; PAM sequence: TGG
tcaacctgccaccaagaagc

SEQ ID NO: 174783 - DNA, 20 bp, Artificial Sequence
  Description of Artificial Sequence: Synthetic oligonucleotide
  Target: LAMA2; (+) strand; PAM type: NRG; PAM sequence: GAG
agaagctggctgatcaccct

SEQ ID NO: 174784 - DNA, 20 bp, Artificial Sequence
  Description of Artificial Sequence: Synthetic oligonucleotide
  Target: LAMA2; (+) strand; PAM type: NRG; PAM sequence: AGG
gaagctggctgatcaccctg

SEQ ID NO: 174785 - DNA, 20 bp, Artificial Sequence
  Description of Artificial Sequence: Synthetic oligonucleotide
  Target: LAMA2; (+) strand; PAM type: NRG; PAM sequence: AAG
gctggctgatcaccctgagg

SEQ ID NO: 174786 - DNA, 20 bp, Artificial Sequence
  Description of Artificial Sequence: Synthetic oligonucleotide
  Target: LAMA2; (+) strand; PAM type: NRG; PAM sequence: AGG
ctggctgatcaccctgagga

SEQ ID NO: 174787 - DNA, 20 bp, Artificial Sequence
  Description of Artificial Sequence: Synthetic oligonucleotide
  Target: LAMA2; (+) strand; PAM type: NRG; PAM sequence: CAG
atcaccctgaggaaggatgc

SEQ ID NO: 174788 - DNA, 20 bp, Artificial Sequence
  Description of Artificial Sequence: Synthetic oligonucleotide
  Target: LAMA2; (+) strand; PAM type: NRG; PAM sequence: CGG
ccctgaggaaggatgccaga

SEQ ID NO: 174789 - DNA, 20 bp, Artificial Sequence
  Description of Artificial Sequence: Synthetic oligonucleotide
  Target: LAMA2; (+) strand; PAM type: NRG; PAM sequence: GAG
ctgaggaaggatgccagacg

SEQ ID NO: 174790 - DNA, 20 bp, Artificial Sequence
  Description of Artificial Sequence: Synthetic oligonucleotide
  Target: LAMA2; (+) strand; PAM type: NRG; PAM sequence: AGG
tgaggaaggatgccagacgg

SEQ ID NO: 174791 - DNA, 20 bp, Artificial Sequence
  Description of Artificial Sequence: Synthetic oligonucleotide
  Target: LAMA2; (+) strand; PAM type: NRG; PAM sequence: GGG
gaggaaggatgccagacgga

SEQ ID NO: 174792 - DNA, 20 bp, Artificial Sequence
  Description of Artificial Sequence: Synthetic oligonucleotide
  Target: LAMA2; (+) strand; PAM type: NRG; PAM sequence: CAG
aggatgccagacggagggct

SEQ ID NO: 174793 - DNA, 20 bp, Artificial Sequence
  Description of Artificial Sequence: Synthetic oligonucleotide
  Target: LAMA2; (+) strand; PAM type: NRG; PAM sequence: TGG
ccagacggagggctcagtgt

SEQ ID NO: 174794 - DNA, 20 bp, Artificial Sequence
  Description of Artificial Sequence: Synthetic oligonucleotide
  Target: LAMA2; (+) strand; PAM type: NRG; PAM sequence: TGG
tcagtgttggtttctgctgc

SEQ ID NO: 174795 - DNA, 20 bp, Artificial Sequence
  Description of Artificial Sequence: Synthetic oligonucleotide
  Target: LAMA2; (+) strand; PAM type: NRG; PAM sequence: TGG
ggtttctgctgctggcaaat

SEQ ID NO: 174796 - DNA, 20 bp, Artificial Sequence
  Description of Artificial Sequence: Synthetic oligonucleotide
  Target: LAMA2; (+) strand; PAM type: NRG; PAM sequence: GGG
gtttctgctgctggcaaatt

SEQ ID NO: 174797 - DNA, 20 bp, Artificial Sequence
  Description of Artificial Sequence: Synthetic oligonucleotide
  Target: LAMA2; (+) strand; PAM type: NRG; PAM sequence: CAG
ctgctggcaaattgggcact

SEQ ID NO: 174798 - DNA, 20 bp, Artificial Sequence
  Description of Artificial Sequence: Synthetic oligonucleotide
  Target: LAMA2; (+) strand; PAM type: NRG; PAM sequence: CGG
ctggcaaattgggcactcag

SEQ ID NO: 174799 - DNA, 20 bp, Artificial Sequence
  Description of Artificial Sequence: Synthetic oligonucleotide
  Target: LAMA2; (+) strand; PAM type: NRG; PAM sequence: TGG
gcaaattgggcactcagcgg

SEQ ID NO: 174800 - DNA, 20 bp, Artificial Sequence
  Description of Artificial Sequence: Synthetic oligonucleotide
  Target: LAMA2; (+) strand; PAM type: NRG; PAM sequence: TAG
tgggcactcagcggtggcta

SEQ ID NO: 174801 - DNA, 20 bp, Artificial Sequence
  Description of Artificial Sequence: Synthetic oligonucleotide
  Target: LAMA2; (+) strand; PAM type: NRG; PAM sequence: CAG
cactcagcggtggctatagt

SEQ ID NO: 174802 - DNA, 20 bp, Artificial Sequence
  Description of Artificial Sequence: Synthetic oligonucleotide
  Target: LAMA2; (+) strand; PAM type: NRG; PAM sequence: AGG
actcagcggtggctatagtc

SEQ ID NO: 174803 - DNA, 20 bp, Artificial Sequence
  Description of Artificial Sequence: Synthetic oligonucleotide
  Target: LAMA2; (+) strand; PAM type: NRG; PAM sequence: CAG
agcggtggctatagtcaggt

SEQ ID NO: 174804 - DNA, 20 bp, Artificial Sequence
  Description of Artificial Sequence: Synthetic oligonucleotide
  Target: LAMA2; (+) strand; PAM type: NRG; PAM sequence: GAG
tcaggtcagtccatgttgct

SEQ ID NO: 174805 - DNA, 20 bp, Artificial Sequence
  Description of Artificial Sequence: Synthetic oligonucleotide
  Target: LAMA2; (+) strand; PAM type: NRG; PAM sequence: TGG
aacctccattcctgccacca

SEQ ID NO: 174806 - DNA, 20 bp, Artificial Sequence
  Description of Artificial Sequence: Synthetic oligonucleotide
  Target: LAMA2; (+) strand; PAM type: NRG; PAM sequence: GAG
accatggccactttgttcat

SEQ ID NO: 174807 - DNA, 20 bp, Artificial Sequence
  Description of Artificial Sequence: Synthetic oligonucleotide
  Target: LAMA2; (+) strand; PAM type: NRG; PAM sequence: GAG
actttgttcatgagcccatt

SEQ ID NO: 174808 - DNA, 20 bp, Artificial Sequence
  Description of Artificial Sequence: Synthetic oligonucleotide
  Target: LAMA2; (+) strand; PAM type: NRG; PAM sequence: CAG
atgagcccattgagcgatga

SEQ ID NO: 174809 - DNA, 20 bp, Artificial Sequence
  Description of Artificial Sequence: Synthetic oligonucleotide
  Target: LAMA2; (+) strand; PAM type: NRG; PAM sequence: AGG
tgagcccattgagcgatgac

SEQ ID NO: 174810 - DNA, 20 bp, Artificial Sequence
  Description of Artificial Sequence: Synthetic oligonucleotide
  Target: LAMA2; (+) strand; PAM type: NRG; PAM sequence: GGG
gagcccattgagcgatgaca

SEQ ID NO: 174811 - DNA, 20 bp, Artificial Sequence
  Description of Artificial Sequence: Synthetic oligonucleotide
  Target: LAMA2; (+) strand; PAM type: NRG; PAM sequence: TGG
cccattgagcgatgacaggg

SEQ ID NO: 174812 - DNA, 20 bp, Artificial Sequence
  Description of Artificial Sequence: Synthetic oligonucleotide
  Target: LAMA2; (+) strand; PAM type: NRG; PAM sequence: TGG
ttgagcgatgacagggtggc

SEQ ID NO: 174813 - DNA, 20 bp, Artificial Sequence
  Description of Artificial Sequence: Synthetic oligonucleotide
  Target: LAMA2; (+) strand; PAM type: NRG; PAM sequence: GGG
tgagcgatgacagggtggct

SEQ ID NO: 174814 - DNA, 20 bp, Artificial Sequence
  Description of Artificial Sequence: Synthetic oligonucleotide
  Target: LAMA2; (+) strand; PAM type: NRG; PAM sequence: GGG
gagcgatgacagggtggctg

SEQ ID NO: 174815 - DNA, 20 bp, Artificial Sequence
  Description of Artificial Sequence: Synthetic oligonucleotide
  Target: LAMA2; (+) strand; PAM type: NRG; PAM sequence: AAG
gatgacagggtggctgggga

SEQ ID NO: 174816 - DNA, 20 bp, Artificial Sequence
  Description of Artificial Sequence: Synthetic oligonucleotide
  Target: LAMA2; (+) strand; PAM type: NRG; PAM sequence: GAG
tgacagggtggctggggaaa

SEQ ID NO: 174817 - DNA, 20 bp, Artificial Sequence
  Description of Artificial Sequence: Synthetic oligonucleotide
  Target: LAMA2; (+) strand; PAM type: NRG; PAM sequence: AGG
gacagggtggctggggaaag

SEQ ID NO: 174818 - DNA, 20 bp, Artificial Sequence
  Description of Artificial Sequence: Synthetic oligonucleotide
  Target: LAMA2; (+) strand; PAM type: NRG; PAM sequence: GAG
ggtggctggggaaagaggct

SEQ ID NO: 174819 - DNA, 20 bp, Artificial Sequence
  Description of Artificial Sequence: Synthetic oligonucleotide
  Target: LAMA2; (+) strand; PAM type: NRG; PAM sequence: TGG
ggctggggaaagaggctgag

SEQ ID NO: 174820 - DNA, 20 bp, Artificial Sequence
  Description of Artificial Sequence: Synthetic oligonucleotide
  Target: LAMA2; (+) strand; PAM type: NRG; PAM sequence: CAG
aagaggctgagtggtgtaca

SEQ ID NO: 174821 - DNA, 20 bp, Artificial Sequence
  Description of Artificial Sequence: Synthetic oligonucleotide
  Target: LAMA2; (+) strand; PAM type: NRG; PAM sequence: GAG
ctgagtggtgtacacagaat

SEQ ID NO: 174822 - DNA, 20 bp, Artificial Sequence
  Description of Artificial Sequence: Synthetic oligonucleotide
  Target: LAMA2; (+) strand; PAM type: NRG; PAM sequence: CAG
ttgattattaaaatcctcct

SEQ ID NO: 174823 - DNA, 20 bp, Artificial Sequence
  Description of Artificial Sequence: Synthetic oligonucleotide
  Target: LAMA2; (+) strand; PAM type: NRG; PAM sequence: GAG
tattaaaatcctcctcagct

SEQ ID NO: 174824 - DNA, 20 bp, Artificial Sequence
  Description of Artificial Sequence: Synthetic oligonucleotide
  Target: LAMA2; (+) strand; PAM type: NRG; PAM sequence: AGG
attaaaatcctcctcagctg

SEQ ID NO: 174825 - DNA, 20 bp, Artificial Sequence
  Description of Artificial Sequence: Synthetic oligonucleotide
  Target: LAMA2; (+) strand; PAM type: NRG; PAM sequence: TGG
cctcagctgaggtcacccgt

SEQ ID NO: 174826 - DNA, 20 bp, Artificial Sequence
  Description of Artificial Sequence: Synthetic oligonucleotide
  Target: LAMA2; (+) strand; PAM type: NRG; PAM sequence: GAG
agctgaggtcacccgttggt

SEQ ID NO: 174827 - DNA, 20 bp, Artificial Sequence
  Description of Artificial Sequence: Synthetic oligonucleotide
  Target: LAMA2; (+) strand; PAM type: NRG; PAM sequence: TAG
cccgttggtgagcactcaca

SEQ ID NO: 174828 - DNA, 20 bp, Artificial Sequence
  Description of Artificial Sequence: Synthetic oligonucleotide
  Target: LAMA2; (+) strand; PAM type: NRG; PAM sequence: AGG
ccgttggtgagcactcacat

SEQ ID NO: 174829 - DNA, 20 bp, Artificial Sequence
  Description of Artificial Sequence: Synthetic oligonucleotide
  Target: LAMA2; (+) strand; PAM type: NRG; PAM sequence: CAG
ataggatacaaatatcttca

SEQ ID NO: 174830 - DNA, 20 bp, Artificial Sequence
  Description of Artificial Sequence: Synthetic oligonucleotide
  Target: LAMA2; (+) strand; PAM type: NRG; PAM sequence: CAG
cttcacagtttttgaccact

SEQ ID NO: 174831 - DNA, 20 bp, Artificial Sequence
  Description of Artificial Sequence: Synthetic oligonucleotide
  Target: LAMA2; (+) strand; PAM type: NRG; PAM sequence: GAG
tcacagtttttgaccactca

SEQ ID NO: 174832 - DNA, 20 bp, Artificial Sequence
  Description of Artificial Sequence: Synthetic oligonucleotide
  Target: LAMA2; (+) strand; PAM type: NRG; PAM sequence: GAG
acagtttttgaccactcaga

SEQ ID NO: 174833 - DNA, 20 bp, Artificial Sequence
  Description of Artificial Sequence: Synthetic oligonucleotide
  Target: LAMA2; (+) strand; PAM type: NRG; PAM sequence: AGG
cagtttttgaccactcagag

SEQ ID NO: 174834 - DNA, 20 bp, Artificial Sequence
  Description of Artificial Sequence: Synthetic oligonucleotide
  Target: LAMA2; (+) strand; PAM type: NRG; PAM sequence: CAG
ccatccacatacctcttccc

SEQ ID NO: 174835 - DNA, 20 bp, Artificial Sequence
  Description of Artificial Sequence: Synthetic oligonucleotide
  Target: LAMA2; (+) strand; PAM type: NRG; PAM sequence: AAG
tttttaatcatgcttcttcc

SEQ ID NO: 174836 - DNA, 20 bp, Artificial Sequence
  Description of Artificial Sequence: Synthetic oligonucleotide
  Target: LAMA2; (+) strand; PAM type: NRG; PAM sequence: CAG
cttccaagtccctgaccatc

SEQ ID NO: 174837 - DNA, 20 bp, Artificial Sequence
  Description of Artificial Sequence: Synthetic oligonucleotide
  Target: LAMA2; (+) strand; PAM type: NRG; PAM sequence: TGG
tgaccatccagccaaaccat

SEQ ID NO: 174838 - DNA, 20 bp, Artificial Sequence
  Description of Artificial Sequence: Synthetic oligonucleotide
  Target: LAMA2; (+) strand; PAM type: NRG; PAM sequence: CAG
tccagccaaaccattggcta

SEQ ID NO: 174839 - DNA, 20 bp, Artificial Sequence
  Description of Artificial Sequence: Synthetic oligonucleotide
  Target: LAMA2; (+) strand; PAM type: NRG; PAM sequence: TAG
attggctacagcacattaat

SEQ ID NO: 174840 - DNA, 20 bp, Artificial Sequence
  Description of Artificial Sequence: Synthetic oligonucleotide
  Target: LAMA2; (+) strand; PAM type: NRG; PAM sequence: TGG
ttagtatataattacacatc

SEQ ID NO: 174841 - DNA, 20 bp, Artificial Sequence
  Description of Artificial Sequence: Synthetic oligonucleotide
  Target: LAMA2; (+) strand; PAM type: NRG; PAM sequence: AAG
atctggccatttcttcttcc

SEQ ID NO: 174842 - DNA, 20 bp, Artificial Sequence
  Description of Artificial Sequence: Synthetic oligonucleotide
  Target: LAMA2; (+) strand; PAM type: NRG; PAM sequence: AAG
ggccatttcttcttccaagc

SEQ ID NO: 174843 - DNA, 20 bp, Artificial Sequence
  Description of Artificial Sequence: Synthetic oligonucleotide
  Target: LAMA2; (+) strand; PAM type: NRG; PAM sequence: CAG
cttccaagcaagtgcacaac

SEQ ID NO: 174844 - DNA, 20 bp, Artificial Sequence
  Description of Artificial Sequence: Synthetic oligonucleotide
  Target: LAMA2; (+) strand; PAM type: NRG; PAM sequence: AGG
ttccaagcaagtgcacaacc

SEQ ID NO: 174845 - DNA, 20 bp, Artificial Sequence
  Description of Artificial Sequence: Synthetic oligonucleotide
  Target: LAMA2; (+) strand; PAM type: NRG; PAM sequence: TGG
ctgctcaaaattctgccccc

SEQ ID NO: 174846 - DNA, 20 bp, Artificial Sequence
  Description of Artificial Sequence: Synthetic oligonucleotide
  Target: LAMA2; (+) strand; PAM type: NRG; PAM sequence: GGG
tgctcaaaattctgccccct

SEQ ID NO: 174847 - DNA, 20 bp, Artificial Sequence
  Description of Artificial Sequence: Synthetic oligonucleotide
  Target: LAMA2; (+) strand; PAM type: NRG; PAM sequence: AAG
tcaaaattctgccccctggg

SEQ ID NO: 174848 - DNA, 20 bp, Artificial Sequence
  Description of Artificial Sequence: Synthetic oligonucleotide
  Target: LAMA2; (+) strand; PAM type: NRG; PAM sequence: CAG
ttccctttgctactgtcctt

SEQ ID NO: 174849 - DNA, 20 bp, Artificial Sequence
  Description of Artificial Sequence: Synthetic oligonucleotide
  Target: LAMA2; (+) strand; PAM type: NRG; PAM sequence: AGG
tccctttgctactgtccttc

SEQ ID NO: 174850 - DNA, 20 bp, Artificial Sequence
  Description of Artificial Sequence: Synthetic oligonucleotide
  Target: LAMA2; (+) strand; PAM type: NRG; PAM sequence: GGG
ccctttgctactgtccttca

SEQ ID NO: 174851 - DNA, 20 bp, Artificial Sequence
  Description of Artificial Sequence: Synthetic oligonucleotide
  Target: LAMA2; (+) strand; PAM type: NRG; PAM sequence: TAG
actgtccttcagggatgtcc

SEQ ID NO: 174852 - DNA, 20 bp, Artificial Sequence
  Description of Artificial Sequence: Synthetic oligonucleotide
  Target: LAMA2; (+) strand; PAM type: NRG; PAM sequence: AAG
tccttcagggatgtcctaga

SEQ ID NO: 174853 - DNA, 20 bp, Artificial Sequence
  Description of Artificial Sequence: Synthetic oligonucleotide
  Target: LAMA2; (+) strand; PAM type: NRG; PAM sequence: AGG
ccttcagggatgtcctagaa

SEQ ID NO: 174854 - DNA, 20 bp, Artificial Sequence
  Description of Artificial Sequence: Synthetic oligonucleotide
  Target: LAMA2; (+) strand; PAM type: NRG; PAM sequence: GGG
cttcagggatgtcctagaaa

SEQ ID NO: 174855 - DNA, 20 bp, Artificial Sequence
  Description of Artificial Sequence: Synthetic oligonucleotide
  Target: LAMA2; (+) strand; PAM type: NRG; PAM sequence: GGG
ttcagggatgtcctagaaag

SEQ ID NO: 174856 - DNA, 20 bp, Artificial Sequence
  Description of Artificial Sequence: Synthetic oligonucleotide
  Target: LAMA2; (+) strand; PAM type: NRG; PAM sequence: TAG
gatgtcctagaaaggggctg

SEQ ID NO: 174857 - DNA, 20 bp, Artificial Sequence
  Description of Artificial Sequence: Synthetic oligonucleotide
  Target: LAMA2; (+) strand; PAM type: NRG; PAM sequence: CAG
agaaaggggctgtagtgctg

SEQ ID NO: 174858 - DNA, 20 bp, Artificial Sequence
  Description of Artificial Sequence: Synthetic oligonucleotide
  Target: LAMA2; (+) strand; PAM type: NRG; PAM sequence: TGG
gtgctgcagctgtccacttt

SEQ ID NO: 174859 - DNA, 20 bp, Artificial Sequence
  Description of Artificial Sequence: Synthetic oligonucleotide
  Target: LAMA2; (+) strand; PAM type: NRG; PAM sequence: GGG
tgctgcagctgtccactttt

SEQ ID NO: 174860 - DNA, 20 bp, Artificial Sequence
  Description of Artificial Sequence: Synthetic oligonucleotide
  Target: LAMA2; (+) strand; PAM type: NRG; PAM sequence: CAG
ggtgctacctgcatatcttg

SEQ ID NO: 174861 - DNA, 20 bp, Artificial Sequence
  Description of Artificial Sequence: Synthetic oligonucleotide
  Target: LAMA2; (+) strand; PAM type: NRG; PAM sequence: CAG
ttgcagaatcatctgtgaac

SEQ ID NO: 174862 - DNA, 20 bp, Artificial Sequence
  Description of Artificial Sequence: Synthetic oligonucleotide
  Target: LAMA2; (+) strand; PAM type: NRG; PAM sequence: AGG
tgcagaatcatctgtgaacc

SEQ ID NO: 174863 - DNA, 20 bp, Artificial Sequence
  Description of Artificial Sequence: Synthetic oligonucleotide
  Target: LAMA2; (+) strand; PAM type: NRG; PAM sequence: TAG
atcatctgtgaaccaggccc

SEQ ID NO: 174864 - DNA, 20 bp, Artificial Sequence
  Description of Artificial Sequence: Synthetic oligonucleotide
  Target: LAMA2; (+) strand; PAM type: NRG; PAM sequence: TGG
ctgcctctgtcaactgatca

SEQ ID NO: 174865 - DNA, 20 bp, Artificial Sequence
  Description of Artificial Sequence: Synthetic oligonucleotide
  Target: LAMA2; (+) strand; PAM type: NRG; PAM sequence: GGG
tgcctctgtcaactgatcat

SEQ ID NO: 174866 - DNA, 20 bp, Artificial Sequence
  Description of Artificial Sequence: Synthetic oligonucleotide
  Target: LAMA2; (+) strand; PAM type: NRG; PAM sequence: GGG
gcctctgtcaactgatcatg

SEQ ID NO: 174867 - DNA, 20 bp, Artificial Sequence
  Description of Artificial Sequence: Synthetic oligonucleotide
  Target: LAMA2; (+) strand; PAM type: NRG; PAM sequence: GAG
gatcatggggaactccctgt

SEQ ID NO: 174868 - DNA, 20 bp, Artificial Sequence
  Description of Artificial Sequence: Synthetic oligonucleotide
  Target: LAMA2; (+) strand; PAM type: NRG; PAM sequence: AGG
atcatggggaactccctgtg

SEQ ID NO: 174869 - DNA, 20 bp, Artificial Sequence
  Description of Artificial Sequence: Synthetic oligonucleotide
  Target: LAMA2; (+) strand; PAM type: NRG; PAM sequence: CAG
ggaactccctgtgaggccat

SEQ ID NO: 174870 - DNA, 20 bp, Artificial Sequence
  Description of Artificial Sequence: Synthetic oligonucleotide
  Target: LAMA2; (+) strand; PAM type: NRG; PAM sequence: CAG
tccctgtgaggccatcagtg

SEQ ID NO: 174871 - DNA, 20 bp, Artificial Sequence
  Description of Artificial Sequence: Synthetic oligonucleotide
  Target: LAMA2; (+) strand; PAM type: NRG; PAM sequence: AGG
ccctgtgaggccatcagtgc

SEQ ID NO: 174872 - DNA, 20 bp, Artificial Sequence
  Description of Artificial Sequence: Synthetic oligonucleotide
  Target: LAMA2; (+) strand; PAM type: NRG; PAM sequence: TGG
tgaggccatcagtgcaggct

SEQ ID NO: 174873 - DNA, 20 bp, Artificial Sequence
  Description of Artificial Sequence: Synthetic oligonucleotide
  Target: LAMA2; (+) strand; PAM type: NRG; PAM sequence: GGG
gaggccatcagtgcaggctt

SEQ ID NO: 174874 - DNA, 20 bp, Artificial Sequence
  Description of Artificial Sequence: Synthetic oligonucleotide
  Target: LAMA2; (+) strand; PAM type: NRG; PAM sequence: GGG
aggccatcagtgcaggcttg

SEQ ID NO: 174875 - DNA, 20 bp, Artificial Sequence
  Description of Artificial Sequence: Synthetic oligonucleotide
  Target: LAMA2; (+) strand; PAM type: NRG; PAM sequence: GAG
gccatcagtgcaggcttggg

SEQ ID NO: 174876 - DNA, 20 bp, Artificial Sequence
  Description of Artificial Sequence: Synthetic oligonucleotide
  Target: LAMA2; (+) strand; PAM type: NRG; PAM sequence: GAG
catcagtgcaggcttgggga

SEQ ID NO: 174877 - DNA, 20 bp, Artificial Sequence
  Description of Artificial Sequence: Synthetic oligonucleotide
  Target: LAMA2; (+) strand; PAM type: NRG; PAM sequence: AAG
cagtgcaggcttggggagag

SEQ ID NO: 174878 - DNA, 20 bp, Artificial Sequence
  Description of Artificial Sequence: Synthetic oligonucleotide
  Target: LAMA2; (+) strand; PAM type: NRG; PAM sequence: AGG
agtgcaggcttggggagaga

SEQ ID NO: 174879 - DNA, 20 bp, Artificial Sequence
  Description of Artificial Sequence: Synthetic oligonucleotide
  Target: LAMA2; (+) strand; PAM type: NRG; PAM sequence: CAG
gcaggcttggggagagaagg

SEQ ID NO: 174880 - DNA, 20 bp, Artificial Sequence
  Description of Artificial Sequence: Synthetic oligonucleotide
  Target: LAMA2; (+) strand; PAM type: NRG; PAM sequence: AGG
caggcttggggagagaaggc

SEQ ID NO: 174881 - DNA, 20 bp, Artificial Sequence
  Description of Artificial Sequence: Synthetic oligonucleotide
  Target: LAMA2; (+) strand; PAM type: NRG; PAM sequence: GGG
aggcttggggagagaaggca

SEQ ID NO: 174882 - DNA, 20 bp, Artificial Sequence
  Description of Artificial Sequence: Synthetic oligonucleotide
  Target: LAMA2; (+) strand; PAM type: NRG; PAM sequence: TGG
cttggggagagaaggcaggg

SEQ ID NO: 174883 - DNA, 20 bp, Artificial Sequence
  Description of Artificial Sequence: Synthetic oligonucleotide
  Target: LAMA2; (+) strand; PAM type: NRG; PAM sequence: CAG
ggggagagaaggcagggtgg

SEQ ID NO: 174884 - DNA, 20 bp, Artificial Sequence
  Description of Artificial Sequence: Synthetic oligonucleotide
  Target: LAMA2; (+) strand; PAM type: NRG; PAM sequence: AGG
gggagagaaggcagggtggc

SEQ ID NO: 174885 - DNA, 20 bp, Artificial Sequence
  Description of Artificial Sequence: Synthetic oligonucleotide
  Target: LAMA2; (+) strand; PAM type: NRG; PAM sequence: GAG
gagagaaggcagggtggcag

SEQ ID NO: 174886 - DNA, 20 bp, Artificial Sequence
  Description of Artificial Sequence: Synthetic oligonucleotide
  Target: LAMA2; (+) strand; PAM type: NRG; PAM sequence: TGG
agaaggcagggtggcaggag

SEQ ID NO: 174887 - DNA, 20 bp, Artificial Sequence
  Description of Artificial Sequence: Synthetic oligonucleotide
  Target: LAMA2; (+) strand; PAM type: NRG; PAM sequence: GAG
aaggcagggtggcaggagtg

SEQ ID NO: 174888 - DNA, 20 bp, Artificial Sequence
  Description of Artificial Sequence: Synthetic oligonucleotide
  Target: LAMA2; (+) strand; PAM type: NRG; PAM sequence: AGG
aggcagggtggcaggagtgg

SEQ ID NO: 174889 - DNA, 20 bp, Artificial Sequence
  Description of Artificial Sequence: Synthetic oligonucleotide
  Target: LAMA2; (+) strand; PAM type: NRG; PAM sequence: TGG
ggtggcaggagtggaggcca

SEQ ID NO: 174890 - DNA, 20 bp, Artificial Sequence
  Description of Artificial Sequence: Synthetic oligonucleotide
  Target: LAMA2; (+) strand; PAM type: NRG; PAM sequence: GGG
gtggcaggagtggaggccat

SEQ ID NO: 174891 - DNA, 20 bp, Artificial Sequence
  Description of Artificial Sequence: Synthetic oligonucleotide
  Target: LAMA2; (+) strand; PAM type: NRG; PAM sequence: GAG
agtggaggccatgggcgttt

SEQ ID NO: 174892 - DNA, 20 bp, Artificial Sequence
  Description of Artificial Sequence: Synthetic oligonucleotide
  Target: LAMA2; (+) strand; PAM type: NRG; PAM sequence: TAG
atgcaactgacttgtgcctt

SEQ ID NO: 174893 - DNA, 20 bp, Artificial Sequence
  Description of Artificial Sequence: Synthetic oligonucleotide
  Target: LAMA2; (+) strand; PAM type: NRG; PAM sequence: AGG
tgcaactgacttgtgccttt

SEQ ID NO: 174894 - DNA, 20 bp, Artificial Sequence
  Description of Artificial Sequence: Synthetic oligonucleotide
  Target: LAMA2; (+) strand; PAM type: NRG; PAM sequence: TGG
ctgacttgtgcctttaggac

SEQ ID NO: 174895 - DNA, 20 bp, Artificial Sequence
  Description of Artificial Sequence: Synthetic oligonucleotide
  Target: LAMA2; (+) strand; PAM type: NRG; PAM sequence: GAG
tgtgcctttaggactggctc

SEQ ID NO: 174896 - DNA, 20 bp, Artificial Sequence
  Description of Artificial Sequence: Synthetic oligonucleotide
  Target: LAMA2; (+) strand; PAM type: NRG; PAM sequence: CAG
gatcatgtatataccactta

SEQ ID NO: 174897 - DNA, 20 bp, Artificial Sequence
  Description of Artificial Sequence: Synthetic oligonucleotide
  Target: LAMA2; (+) strand; PAM type: NRG; PAM sequence: TGG
ataccacttacagttgatga

SEQ ID NO: 174898 - DNA, 20 bp, Artificial Sequence
  Description of Artificial Sequence: Synthetic oligonucleotide
  Target: LAMA2; (+) strand; PAM type: NRG; PAM sequence: AAG
ccacttacagttgatgatgg

SEQ ID NO: 174899 - DNA, 20 bp, Artificial Sequence
  Description of Artificial Sequence: Synthetic oligonucleotide
  Target: LAMA2; (+) strand; PAM type: NRG; PAM sequence: AGG
cacttacagttgatgatgga

SEQ ID NO: 174900 - DNA, 20 bp, Artificial Sequence
  Description of Artificial Sequence: Synthetic oligonucleotide
  Target: LAMA2; (+) strand; PAM type: NRG; PAM sequence: TGG
gctgtgtatgcccaacttta

SEQ ID NO: 174901 - DNA, 20 bp, Artificial Sequence
  Description of Artificial Sequence: Synthetic oligonucleotide
  Target: LAMA2; (+) strand; PAM type: NRG; PAM sequence: TAG
tgtatgcccaactttatggc

SEQ ID NO: 174902 - DNA, 20 bp, Artificial Sequence
  Description of Artificial Sequence: Synthetic oligonucleotide
  Target: LAMA2; (+) strand; PAM type: NRG; PAM sequence: TGG
tgcccaactttatggctaga

SEQ ID NO: 174903 - DNA, 20 bp, Artificial Sequence
  Description of Artificial Sequence: Synthetic oligonucleotide
  Target: LAMA2; (+) strand; PAM type: NRG; PAM sequence: GGG
gcccaactttatggctagat

SEQ ID NO: 174904 - DNA, 20 bp, Artificial Sequence
  Description of Artificial Sequence: Synthetic oligonucleotide
  Target: LAMA2; (+) strand; PAM type: NRG; PAM sequence: CAG
aactttatggctagatgggt

SEQ ID NO: 174905 - DNA, 20 bp, Artificial Sequence
  Description of Artificial Sequence: Synthetic oligonucleotide
  Target: LAMA2; (+) strand; PAM type: NRG; PAM sequence: AAG
ttatggctagatgggtcaga

SEQ ID NO: 174906 - DNA, 20 bp, Artificial Sequence
  Description of Artificial Sequence: Synthetic oligonucleotide
  Target: LAMA2; (+) strand; PAM type: NRG; PAM sequence: CAG
tagatgggtcagaaagcatc

SEQ ID NO: 174907 - DNA, 20 bp, Artificial Sequence
  Description of Artificial Sequence: Synthetic oligonucleotide
  Target: LAMA2; (+) strand; PAM type: NRG; PAM sequence: AAG
agaaagcatccagttcatga

SEQ ID NO: 174908 - DNA, 20 bp, Artificial Sequence
  Description of Artificial Sequence: Synthetic oligonucleotide
  Target: LAMA2; (+) strand; PAM type: NRG; PAM sequence: AGG
gaaagcatccagttcatgaa

SEQ ID NO: 174909 - DNA, 20 bp, Artificial Sequence
  Description of Artificial Sequence: Synthetic oligonucleotide
  Target: LAMA2; (+) strand; PAM type: NRG; PAM sequence: CAG
agcatccagttcatgaaagg

SEQ ID NO: 174910 - DNA, 20 bp, Artificial Sequence
  Description of Artificial Sequence: Synthetic oligonucleotide
  Target: LAMA2; (+) strand; PAM type: NRG; PAM sequence: TAG
ccagttcatgaaaggcagtt

SEQ ID NO: 174911 - DNA, 20 bp, Artificial Sequence
  Description of Artificial Sequence: Synthetic oligonucleotide
  Target: LAMA2; (+) strand; PAM type: NRG; PAM sequence: AGG
cagttcatgaaaggcagttt

SEQ ID NO: 174912 - DNA, 20 bp, Artificial Sequence
  Description of Artificial Sequence: Synthetic oligonucleotide
  Target: LAMA2; (+) strand; PAM type: NRG; PAM sequence: TGG
gaaaggcagtttaggttgca

SEQ ID NO: 174913 - DNA, 20 bp, Artificial Sequence
  Description of Artificial Sequence: Synthetic oligonucleotide
  Target: LAMA2; (+) strand; PAM type: NRG; PAM sequence: CAG
catggtgacttgatgaccta

SEQ ID NO: 174914 - DNA, 20 bp, Artificial Sequence
  Description of Artificial Sequence: Synthetic oligonucleotide
  Target: LAMA2; (+) strand; PAM type: NRG; PAM sequence: CAG
atgacctacagtcaaacatt

SEQ ID NO: 174915 - DNA, 20 bp, Artificial Sequence
  Description of Artificial Sequence: Synthetic oligonucleotide
  Target: LAMA2; (+) strand; PAM type: NRG; PAM sequence: AAG
caaacattcagtttctacca

SEQ ID NO: 174916 - DNA, 20 bp, Artificial Sequence
  Description of Artificial Sequence: Synthetic oligonucleotide
  Target: LAMA2; (+) strand; PAM type: NRG; PAM sequence: CAG
attcagtttctaccaaagcc

SEQ ID NO: 174917 - DNA, 20 bp, Artificial Sequence
  Description of Artificial Sequence: Synthetic oligonucleotide
  Target: LAMA2; (+) strand; PAM type: NRG; PAM sequence: CAG
tttctaccaaagcccagtaa

SEQ ID NO: 174918 - DNA, 20 bp, Artificial Sequence
  Description of Artificial Sequence: Synthetic oligonucleotide
  Target: LAMA2; (+) strand; PAM type: NRG; PAM sequence: AGG
ttctaccaaagcccagtaac

SEQ ID NO: 174919 - DNA, 20 bp, Artificial Sequence
  Description of Artificial Sequence: Synthetic oligonucleotide
  Target: LAMA2; (+) strand; PAM type: NRG; PAM sequence: AAG
ccaaagcccagtaacaggcc

SEQ ID NO: 174920 - DNA, 20 bp, Artificial Sequence
  Description of Artificial Sequence: Synthetic oligonucleotide
  Target: LAMA2; (+) strand; PAM type: NRG; PAM sequence: GAG
aaagcccagtaacaggccaa

SEQ ID NO: 174921 - DNA, 20 bp, Artificial Sequence
  Description of Artificial Sequence: Synthetic oligonucleotide
  Target: LAMA2; (+) strand; PAM type: NRG; PAM sequence: TGG
gccaagagttgtctctcaaa

SEQ ID NO: 174922 - DNA, 20 bp, Artificial Sequence
  Description of Artificial Sequence: Synthetic oligonucleotide
  Target: LAMA2; (+) strand; PAM type: NRG; PAM sequence: GAG
caagagttgtctctcaaatg

SEQ ID NO: 174923 - DNA, 20 bp, Artificial Sequence
  Description of Artificial Sequence: Synthetic oligonucleotide
  Target: LAMA2; (+) strand; PAM type: NRG; PAM sequence: GAG
agagttgtctctcaaatgga

SEQ ID NO: 174924 - DNA, 20 bp, Artificial Sequence
  Description of Artificial Sequence: Synthetic oligonucleotide
  Target: LAMA2; (+) strand; PAM type: NRG; PAM sequence: TAG
gttgtctctcaaatggagag

SEQ ID NO: 174925 - DNA, 20 bp, Artificial Sequence
  Description of Artificial Sequence: Synthetic oligonucleotide
  Target: LAMA2; (+) strand; PAM type: NRG; PAM sequence: CAG
aaatggagagtagtgatctg

SEQ ID NO: 174926 - DNA, 20 bp, Artificial Sequence
  Description of Artificial Sequence: Synthetic oligonucleotide
  Target: LAMA2; (+) strand; PAM type: NRG; PAM sequence: AAG
tggagagtagtgatctgcag

SEQ ID NO: 174927 - DNA, 20 bp, Artificial Sequence
  Description of Artificial Sequence: Synthetic oligonucleotide
  Target: LAMA2; (+) strand; PAM type: NRG; PAM sequence: TGG
gagtagtgatctgcagaaga

SEQ ID NO: 174928 - DNA, 20 bp, Artificial Sequence
  Description of Artificial Sequence: Synthetic oligonucleotide
  Target: LAMA2; (+) strand; PAM type: NRG; PAM sequence: CAG
tagtgatctgcagaagatgg

SEQ ID NO: 174929 - DNA, 20 bp, Artificial Sequence
  Description of Artificial Sequence: Synthetic oligonucleotide
  Target: LAMA2; (+) strand; PAM type: NRG; PAM sequence: AGG
agtgatctgcagaagatggc

SEQ ID NO: 174930 - DNA, 20 bp, Artificial Sequence
  Description of Artificial Sequence: Synthetic oligonucleotide
  Target: LAMA2; (+) strand; PAM type: NRG; PAM sequence: GGG
gtgatctgcagaagatggca

SEQ ID NO: 174931 - DNA, 20 bp, Artificial Sequence
  Description of Artificial Sequence: Synthetic oligonucleotide
  Target: LAMA2; (+) strand; PAM type: NRG; PAM sequence: TAG
agggccttgctccaaaatcc

SEQ ID NO: 174932 - DNA, 20 bp, Artificial Sequence
  Description of Artificial Sequence: Synthetic oligonucleotide
  Target: LAMA2; (+) strand; PAM type: NRG; PAM sequence: GAG
ggccttgctccaaaatccta

SEQ ID NO: 174933 - DNA, 20 bp, Artificial Sequence
  Description of Artificial Sequence: Synthetic oligonucleotide
  Target: LAMA2; (+) strand; PAM type: NRG; PAM sequence: AGG
gccttgctccaaaatcctag

SEQ ID NO: 174934 - DNA, 20 bp, Artificial Sequence
  Description of Artificial Sequence: Synthetic oligonucleotide
  Target: LAMA2; (+) strand; PAM type: NRG; PAM sequence: TAG
atcctagaggcttccacctc

SEQ ID NO: 174935 - DNA, 20 bp, Artificial Sequence
  Description of Artificial Sequence: Synthetic oligonucleotide
  Target: LAMA2; (+) strand; PAM type: NRG; PAM sequence: AGG
tcctagaggcttccacctct

SEQ ID NO: 174936 - DNA, 20 bp, Artificial Sequence
  Description of Artificial Sequence: Synthetic oligonucleotide
  Target: LAMA2; (+) strand; PAM type: NRG; PAM sequence: GAG
ctagaggcttccacctctag

SEQ ID NO: 174937 - DNA, 20 bp, Artificial Sequence
  Description of Artificial Sequence: Synthetic oligonucleotide
  Target: LAMA2; (+) strand; PAM type: NRG; PAM sequence: TGG
ccacctctaggagtcaccta

SEQ ID NO: 174938 - DNA, 20 bp, Artificial Sequence
  Description of Artificial Sequence: Synthetic oligonucleotide
  Target: LAMA2; (+) strand; PAM type: NRG; PAM sequence: GGG
cacctctaggagtcacctat

SEQ ID NO: 174939 - DNA, 20 bp, Artificial Sequence
  Description of Artificial Sequence: Synthetic oligonucleotide
  Target: LAMA2; (+) strand; PAM type: NRG; PAM sequence: GAG
cctctaggagtcacctatgg

SEQ ID NO: 174940 - DNA, 20 bp, Artificial Sequence
  Description of Artificial Sequence: Synthetic oligonucleotide
  Target: LAMA2; (+) strand; PAM type: NRG; PAM sequence: AAG
tcacctatgggagcctgcca

SEQ ID NO: 174941 - DNA, 20 bp, Artificial Sequence
  Description of Artificial Sequence: Synthetic oligonucleotide
  Target: LAMA2; (+) strand; PAM type: NRG; PAM sequence: AGG
cacctatgggagcctgccaa

SEQ ID NO: 174942 - DNA, 20 bp, Artificial Sequence
  Description of Artificial Sequence: Synthetic oligonucleotide
  Target: LAMA2; (+) strand; PAM type: NRG; PAM sequence: CAG
agcctgccaaaggcttcaaa

SEQ ID NO: 174943 - DNA, 20 bp, Artificial Sequence
  Description of Artificial Sequence: Synthetic oligonucleotide
  Target: LAMA2; (+) strand; PAM type: NRG; PAM sequence: AGG
gcctgccaaaggcttcaaac

SEQ ID NO: 174944 - DNA, 20 bp, Artificial Sequence
  Description of Artificial Sequence: Synthetic oligonucleotide
  Target: LAMA2; (+) strand; PAM type: NRG; PAM sequence: AAG
ctgtctgccattgacacctc

SEQ ID NO: 174945 - DNA, 20 bp, Artificial Sequence
  Description of Artificial Sequence: Synthetic oligonucleotide
  Target: LAMA2; (+) strand; PAM type: NRG; PAM sequence: AGG
tgtctgccattgacacctca

SEQ ID NO: 174946 - DNA, 20 bp, Artificial Sequence
  Description of Artificial Sequence: Synthetic oligonucleotide
  Target: LAMA2; (+) strand; PAM type: NRG; PAM sequence: TGG
attgacacctcaaggactat

SEQ ID NO: 174947 - DNA, 20 bp, Artificial Sequence
  Description of Artificial Sequence: Synthetic oligonucleotide
  Target: LAMA2; (+) strand; PAM type: NRG; PAM sequence: TAG
tcaaggactattggatctgc

SEQ ID NO: 174948 - DNA, 20 bp, Artificial Sequence
  Description of Artificial Sequence: Synthetic oligonucleotide
  Target: LAMA2; (+) strand; PAM type: NRG; PAM sequence: AGG
caaggactattggatctgct

SEQ ID NO: 174949 - DNA, 20 bp, Artificial Sequence
  Description of Artificial Sequence: Synthetic oligonucleotide
  Target: LAMA2; (+) strand; PAM type: NRG; PAM sequence: CGG
attggatctgctaggtcata

SEQ ID NO: 174950 - DNA, 20 bp, Artificial Sequence
  Description of Artificial Sequence: Synthetic oligonucleotide
  Target: LAMA2; (+) strand; PAM type: NRG; PAM sequence: CGG
gctaggtcatacggcccaat

SEQ ID NO: 174951 - DNA, 20 bp, Artificial Sequence
  Description of Artificial Sequence: Synthetic oligonucleotide
  Target: LAMA2; (+) strand; PAM type: NRG; PAM sequence: CAG
aggtcatacggcccaatcgg

SEQ ID NO: 174952 - DNA, 20 bp, Artificial Sequence
  Description of Artificial Sequence: Synthetic oligonucleotide
  Target: LAMA2; (+) strand; PAM type: NRG; PAM sequence: GAG
gtcatacggcccaatcggca

SEQ ID NO: 174953 - DNA, 20 bp, Artificial Sequence
  Description of Artificial Sequence: Synthetic oligonucleotide
  Target: LAMA2; (+) strand; PAM type: NRG; PAM sequence: CAG
atacggcccaatcggcagag

SEQ ID NO: 174954 - DNA, 20 bp, Artificial Sequence
  Description of Artificial Sequence: Synthetic oligonucleotide
  Target: LAMA2; (+) strand; PAM type: NRG; PAM sequence: CAG
aatcggcagagcagtttgca

SEQ ID NO: 174955 - DNA, 20 bp, Artificial Sequence
  Description of Artificial Sequence: Synthetic oligonucleotide
  Target: LAMA2; (+) strand; PAM type: NRG; PAM sequence: CAG
cggcagagcagtttgcacag

SEQ ID NO: 174956 - DNA, 20 bp, Artificial Sequence
  Description of Artificial Sequence: Synthetic oligonucleotide
  Target: LAMA2; (+) strand; PAM type: NRG; PAM sequence: TGG
gagcagtttgcacagcagtc

SEQ ID NO: 174957 - DNA, 20 bp, Artificial Sequence
  Description of Artificial Sequence: Synthetic oligonucleotide
  Target: LAMA2; (+) strand; PAM type: NRG; PAM sequence: CAG
acagcagtctggacttgttg

SEQ ID NO: 174958 - DNA, 20 bp, Artificial Sequence
  Description of Artificial Sequence: Synthetic oligonucleotide
  Target: LAMA2; (+) strand; PAM type: NRG; PAM sequence: GAG
agcagtctggacttgttgca

SEQ ID NO: 174959 - DNA, 20 bp, Artificial Sequence
  Description of Artificial Sequence: Synthetic oligonucleotide
  Target: LAMA2; (+) strand; PAM type: NRG; PAM sequence: TGG
ttgcagagcccacttaaaat

SEQ ID NO: 174960 - DNA, 20 bp, Artificial Sequence
  Description of Artificial Sequence: Synthetic oligonucleotide
  Target: LAMA2; (+) strand; PAM type: NRG; PAM sequence: CAG
cagagcccacttaaaattgg

SEQ ID NO: 174961 - DNA, 20 bp, Artificial Sequence
  Description of Artificial Sequence: Synthetic oligonucleotide
  Target: LAMA2; (+) strand; PAM type: NRG; PAM sequence: CAG
acttaaaattggcagccttt

SEQ ID NO: 174962 - DNA, 20 bp, Artificial Sequence
  Description of Artificial Sequence: Synthetic oligonucleotide
  Target: LAMA2; (+) strand; PAM type: NRG; PAM sequence: AGG
cttaaaattggcagcctttc

SEQ ID NO: 174963 - DNA, 20 bp, Artificial Sequence
  Description of Artificial Sequence: Synthetic oligonucleotide
  Target: LAMA2; (+) strand; PAM type: NRG; PAM sequence: TGG
ctttcaggtcactcaataaa

SEQ ID NO: 174964 - DNA, 20 bp, Artificial Sequence
  Description of Artificial Sequence: Synthetic oligonucleotide
  Target: LAMA2; (+) strand; PAM type: NRG; PAM sequence: GGG
tttcaggtcactcaataaat

SEQ ID NO: 174965 - DNA, 20 bp, Artificial Sequence
  Description of Artificial Sequence: Synthetic oligonucleotide
  Target: LAMA2; (+) strand; PAM type: NRG; PAM sequence: CAG
tgggcccattttaacacacc

SEQ ID NO: 174966 - DNA, 20 bp, Artificial Sequence
  Description of Artificial Sequence: Synthetic oligonucleotide
  Target: LAMA2; (+) strand; PAM type: NRG; PAM sequence: AGG
gggcccattttaacacaccc

SEQ ID NO: 174967 - DNA, 20 bp, Artificial Sequence
  Description of Artificial Sequence: Synthetic oligonucleotide
  Target: LAMA2; (+) strand; PAM type: NRG; PAM sequence: AAG
ttgcatccttcaatacaatc

SEQ ID NO: 174968 - DNA, 20 bp, Artificial Sequence
  Description of Artificial Sequence: Synthetic oligonucleotide
  Target: LAMA2; (+) strand; PAM type: NRG; PAM sequence: TGG
atccttcaatacaatcaagt

SEQ ID NO: 174969 - DNA, 20 bp, Artificial Sequence
  Description of Artificial Sequence: Synthetic oligonucleotide
  Target: LAMA2; (+) strand; PAM type: NRG; PAM sequence: CAG
aatacaatcaagttggcact

SEQ ID NO: 174970 - DNA, 20 bp, Artificial Sequence
  Description of Artificial Sequence: Synthetic oligonucleotide
  Target: LAMA2; (+) strand; PAM type: NRG; PAM sequence: CAG
gcactcagtattaaccatca

SEQ ID NO: 174971 - DNA, 20 bp, Artificial Sequence
  Description of Artificial Sequence: Synthetic oligonucleotide
  Target: LAMA2; (+) strand; PAM type: NRG; PAM sequence: TAG
taaccatcacagtgaatgaa

SEQ ID NO: 174972 - DNA, 20 bp, Artificial Sequence
  Description of Artificial Sequence: Synthetic oligonucleotide
  Target: LAMA2; (+) strand; PAM type: NRG; PAM sequence: TGG
tttctatgacgttgactcct

SEQ ID NO: 174973 - DNA, 20 bp, Artificial Sequence
  Description of Artificial Sequence: Synthetic oligonucleotide
  Target: LAMA2; (+) strand; PAM type: NRG; PAM sequence: CAG
tgactccttggaatgaccac

SEQ ID NO: 174974 - DNA, 20 bp, Artificial Sequence
  Description of Artificial Sequence: Synthetic oligonucleotide
  Target: LAMA2; (+) strand; PAM type: NRG; PAM sequence: GAG
actccttggaatgaccacca

SEQ ID NO: 174975 - DNA, 20 bp, Artificial Sequence
  Description of Artificial Sequence: Synthetic oligonucleotide
  Target: LAMA2; (+) strand; PAM type: NRG; PAM sequence: AGG
ctccttggaatgaccaccag

SEQ ID NO: 174976 - DNA, 20 bp, Artificial Sequence
  Description of Artificial Sequence: Synthetic oligonucleotide
  Target: LAMA2; (+) strand; PAM type: NRG; PAM sequence: AAG
gaatgaccaccagaggcaat

SEQ ID NO: 174977 - DNA, 20 bp, Artificial Sequence
  Description of Artificial Sequence: Synthetic oligonucleotide
  Target: LAMA2; (+) strand; PAM type: NRG; PAM sequence: CAG
agaggcaataagcacactct

SEQ ID NO: 174978 - DNA, 20 bp, Artificial Sequence
  Description of Artificial Sequence: Synthetic oligonucleotide
  Target: LAMA2; (+) strand; PAM type: NRG; PAM sequence: GAG
aagcacactctcagtgacac

SEQ ID NO: 174979 - DNA, 20 bp, Artificial Sequence
  Description of Artificial Sequence: Synthetic oligonucleotide
  Target: LAMA2; (+) strand; PAM type: NRG; PAM sequence: AGG
agcacactctcagtgacacg

SEQ ID NO: 174980 - DNA, 20 bp, Artificial Sequence
  Description of Artificial Sequence: Synthetic oligonucleotide
  Target: LAMA2; (+) strand; PAM type: NRG; PAM sequence: GAG
tctcagtgacacgaggatat

SEQ ID NO: 174981 - DNA, 20 bp, Artificial Sequence
  Description of Artificial Sequence: Synthetic oligonucleotide
  Target: LAMA2; (+) strand; PAM type: NRG; PAM sequence: AGG
ctcagtgacacgaggatatg

SEQ ID NO: 174982 - DNA, 20 bp, Artificial Sequence
  Description of Artificial Sequence: Synthetic oligonucleotide
  Target: LAMA2; (+) strand; PAM type: NRG; PAM sequence: TGG
cctcctctgcccatttacac

SEQ ID NO: 174983 - DNA, 20 bp, Artificial Sequence
  Description of Artificial Sequence: Synthetic oligonucleotide
  Target: LAMA2; (+) strand; PAM type: NRG; PAM sequence: TAG
catttacactggaaatgtct

SEQ ID NO: 174984 - DNA, 20 bp, Artificial Sequence
  Description of Artificial Sequence: Synthetic oligonucleotide
  Target: LAMA2; (+) strand; PAM type: NRG; PAM sequence: TAG
tggaaatgtcttagatgtct

SEQ ID NO: 174985 - DNA, 20 bp, Artificial Sequence
  Description of Artificial Sequence: Synthetic oligonucleotide
  Target: LAMA2; (+) strand; PAM type: NRG; PAM sequence: CAG
atgtcttagtgcttttcaat

SEQ ID NO: 174986 - DNA, 20 bp, Artificial Sequence
  Description of Artificial Sequence: Synthetic oligonucleotide
  Target: LAMA2; (+) strand; PAM type: NRG; PAM sequence: AGG
tgtcttagtgcttttcaatc

SEQ ID NO: 174987 - DNA, 20 bp, Artificial Sequence
  Description of Artificial Sequence: Synthetic oligonucleotide
  Target: LAMA2; (+) strand; PAM type: NRG; PAM sequence: AAG
aacaaacaaacaaataaaat

SEQ ID NO: 174988 - DNA, 20 bp, Artificial Sequence
  Description of Artificial Sequence: Synthetic oligonucleotide
  Target: LAMA2; (+) strand; PAM type: NRG; PAM sequence: CAG
caaataaaataagactaatg

SEQ ID NO: 174989 - DNA, 20 bp, Artificial Sequence
  Description of Artificial Sequence: Synthetic oligonucleotide
  Target: LAMA2; (+) strand; PAM type: NRG; PAM sequence: TAG
ctaatgcagaatgaattcca

SEQ ID NO: 174990 - DNA, 20 bp, Artificial Sequence
  Description of Artificial Sequence: Synthetic oligonucleotide
  Target: LAMA2; (+) strand; PAM type: NRG; PAM sequence: CAG
gcagaatgaattccatagtt

SEQ ID NO: 174991 - DNA, 20 bp, Artificial Sequence
  Description of Artificial Sequence: Synthetic oligonucleotide
  Target: LAMA2; (+) strand; PAM type: NRG; PAM sequence: AAG
ttccatagttcagattcttc

SEQ ID NO: 174992 - DNA, 20 bp, Artificial Sequence
  Description of Artificial Sequence: Synthetic oligonucleotide
  Target: LAMA2; (+) strand; PAM type: NRG; PAM sequence: TGG
gttcagattcttcaagataa

SEQ ID NO: 174993 - DNA, 20 bp, Artificial Sequence
  Description of Artificial Sequence: Synthetic oligonucleotide
  Target: LAMA2; (+) strand; PAM type: NRG; PAM sequence: AAG
ctccctttctccctttctct

SEQ ID NO: 174994 - DNA, 20 bp, Artificial Sequence
  Description of Artificial Sequence: Synthetic oligonucleotide
  Target: LAMA2; (+) strand; PAM type: NRG; PAM sequence: CAG
ctttctccctttctctaagt

SEQ ID NO: 174995 - DNA, 20 bp, Artificial Sequence
  Description of Artificial Sequence: Synthetic oligonucleotide
  Target: LAMA2; (+) strand; PAM type: NRG; PAM sequence: TGG
tctccctttctctaagtcag

SEQ ID NO: 174996 - DNA, 20 bp, Artificial Sequence
  Description of Artificial Sequence: Synthetic oligonucleotide
  Target: LAMA2; (+) strand; PAM type: NRG; PAM sequence: TAG
ctttctctaagtcagtggaa

SEQ ID NO: 174997 - DNA, 20 bp, Artificial Sequence
  Description of Artificial Sequence: Synthetic oligonucleotide
  Target: LAMA2; (+) strand; PAM type: NRG; PAM sequence: TAG
tctaagtcagtggaatagtc

SEQ ID NO: 174998 - DNA, 20 bp, Artificial Sequence
  Description of Artificial Sequence: Synthetic oligonucleotide
  Target: LAMA2; (+) strand; PAM type: NRG; PAM sequence: TAG
agtctagtttaactttgatg

SEQ ID NO: 174999 - DNA, 20 bp, Artificial Sequence
  Description of Artificial Sequence: Synthetic oligonucleotide
  Target: LAMA2; (+) strand; PAM type: NRG; PAM sequence: TAG
taactttgatgtagaaaatt

SEQ ID NO: 175000 - DNA, 20 bp, Artificial Sequence
  Description of Artificial Sequence: Synthetic oligonucleotide
  Target: LAMA2; (+) strand; PAM type: NRG; PAM sequence: AGG
aactttgatgtagaaaattt

SEQ ID NO: 175001 - DNA, 20 bp, Artificial Sequence
  Description of Artificial Sequence: Synthetic oligonucleotide
  Target: LAMA2; (+) strand; PAM type: NRG; PAM sequence: CAG
tttgatgtagaaaatttagg

SEQ ID NO: 175002 - DNA, 20 bp, Artificial Sequence
  Description of Artificial Sequence: Synthetic oligonucleotide
  Target: LAMA2; (+) strand; PAM type: NRG; PAM sequence: TAG
taggcagtcctcaacctctc

SEQ ID NO: 175003 - DNA, 20 bp, Artificial Sequence
  Description of Artificial Sequence: Synthetic oligonucleotide
  Target: LAMA2; (+) strand; PAM type: NRG; PAM sequence: AGG
aggcagtcctcaacctctct

SEQ ID NO: 175004 - DNA, 20 bp, Artificial Sequence
  Description of Artificial Sequence: Synthetic oligonucleotide
  Target: LAMA2; (+) strand; PAM type: NRG; PAM sequence: AAG
atgctgaattaaaaaaaaaa

SEQ ID NO: 175005 - DNA, 20 bp, Artificial Sequence
  Description of Artificial Sequence: Synthetic oligonucleotide
  Target: LAMA2; (+) strand; PAM type: NRG; PAM sequence: TGG
aatgacatttttaattccca

SEQ ID NO: 175006 - DNA, 20 bp, Artificial Sequence
  Description of Artificial Sequence: Synthetic oligonucleotide
  Target: LAMA2; (+) strand; PAM type: NRG; PAM sequence: TGG
tttttaattcccatggcaaa

SEQ ID NO: 175007 - DNA, 20 bp, Artificial Sequence
  Description of Artificial Sequence: Synthetic oligonucleotide
  Target: LAMA2; (+) strand; PAM type: NRG; PAM sequence: GAG
tttaattcccatggcaaatg

SEQ ID NO: 175008 - DNA, 20 bp, Artificial Sequence
  Description of Artificial Sequence: Synthetic oligonucleotide
  Target: LAMA2; (+) strand; PAM type: NRG; PAM sequence: TAG
atttcctttctcaatttgtt

SEQ ID NO: 175009 - DNA, 20 bp, Artificial Sequence
  Description of Artificial Sequence: Synthetic oligonucleotide
  Target: LAMA2; (+) strand; PAM type: NRG; PAM sequence: TAG
cctttctcaatttgtttagt

SEQ ID NO: 175010 - DNA, 20 bp, Artificial Sequence
  Description of Artificial Sequence: Synthetic oligonucleotide
  Target: LAMA2; (+) strand; PAM type: NRG; PAM sequence: TAG
ttgtttagttagatcttcac

SEQ ID NO: 175011 - DNA, 20 bp, Artificial Sequence
  Description of Artificial Sequence: Synthetic oligonucleotide
  Target: LAMA2; (+) strand; PAM type: NRG; PAM sequence: AAG
gttagatcttcactagaaat

SEQ ID NO: 175012 - DNA, 20 bp, Artificial Sequence
  Description of Artificial Sequence: Synthetic oligonucleotide
  Target: LAMA2; (+) strand; PAM type: NRG; PAM sequence: TAG
tcttcactagaaataagtat

SEQ ID NO: 175013 - DNA, 20 bp, Artificial Sequence
  Description of Artificial Sequence: Synthetic oligonucleotide
  Target: LAMA2; (+) strand; PAM type: NRG; PAM sequence: TGG
tagaaataagtattagaaat

SEQ ID NO: 175014 - DNA, 20 bp, Artificial Sequence
  Description of Artificial Sequence: Synthetic oligonucleotide
  Target: LAMA2; (+) strand; PAM type: NRG; PAM sequence: GGG
agaaataagtattagaaatt

SEQ ID NO: 175015 - DNA, 20 bp, Artificial Sequence
  Description of Artificial Sequence: Synthetic oligonucleotide
  Target: LAMA2; (+) strand; PAM type: NRG; PAM sequence: AAG
taagtattagaaattgggaa

SEQ ID NO: 175016 - DNA, 20 bp, Artificial Sequence
  Description of Artificial Sequence: Synthetic oligonucleotide
  Target: LAMA2; (+) strand; PAM type: NRG; PAM sequence: TGG
aaattgggaaaagtttatac

SEQ ID NO: 175017 - DNA, 20 bp, Artificial Sequence
  Description of Artificial Sequence: Synthetic oligonucleotide
  Target: LAMA2; (+) strand; PAM type: NRG; PAM sequence: TAG
aaagtttatactggttgtat

SEQ ID NO: 175018 - DNA, 20 bp, Artificial Sequence
  Description of Artificial Sequence: Synthetic oligonucleotide
  Target: LAMA2; (+) strand; PAM type: NRG; PAM sequence: AGG
aagtttatactggttgtatt

SEQ ID NO: 175019 - DNA, 20 bp, Artificial Sequence
  Description of Artificial Sequence: Synthetic oligonucleotide
  Target: LAMA2; (+) strand; PAM type: NRG; PAM sequence: GGG
agtttatactggttgtatta

SEQ ID NO: 175020 - DNA, 20 bp, Artificial Sequence
  Description of Artificial Sequence: Synthetic oligonucleotide
  Target: LAMA2; (+) strand; PAM type: NRG; PAM sequence: CAG
attagggttctccaaataaa

SEQ ID NO: 175021 - DNA, 20 bp, Artificial Sequence
  Description of Artificial Sequence: Synthetic oligonucleotide
  Target: LAMA2; (+) strand; PAM type: NRG; PAM sequence: TAG
ctccaaataaacagaactat

SEQ ID NO: 175022 - DNA, 20 bp, Artificial Sequence
  Description of Artificial Sequence: Synthetic oligonucleotide
  Target: LAMA2; (+) strand; PAM type: NRG; PAM sequence: AGG
tccaaataaacagaactatt

SEQ ID NO: 175023 - DNA, 20 bp, Artificial Sequence
  Description of Artificial Sequence: Synthetic oligonucleotide
  Target: LAMA2; (+) strand; PAM type: NRG; PAM sequence: GAG
caaataaacagaactattag

SEQ ID NO: 175024 - DNA, 20 bp, Artificial Sequence
  Description of Artificial Sequence: Synthetic oligonucleotide
  Target: LAMA2; (+) strand; PAM type: NRG; PAM sequence: TGG
taaacagaactattaggaga

SEQ ID NO: 175025 - DNA, 20 bp, Artificial Sequence
  Description of Artificial Sequence: Synthetic oligonucleotide
  Target: LAMA2; (+) strand; PAM type: NRG; PAM sequence: TAG
cagaactattaggagatgga

SEQ ID NO: 175026 - DNA, 20 bp, Artificial Sequence
  Description of Artificial Sequence: Synthetic oligonucleotide
  Target: LAMA2; (+) strand; PAM type: NRG; PAM sequence: TAG
actattaggagatggataga

SEQ ID NO: 175027 - DNA, 20 bp, Artificial Sequence
  Description of Artificial Sequence: Synthetic oligonucleotide
  Target: LAMA2; (+) strand; PAM type: NRG; PAM sequence: TAG
ttaggagatggatagataga

SEQ ID NO: 175028 - DNA, 20 bp, Artificial Sequence
  Description of Artificial Sequence: Synthetic oligonucleotide
  Target: LAMA2; (+) strand; PAM type: NRG; PAM sequence: TAG
tagatagatacattgattga

SEQ ID NO: 175029 - DNA, 20 bp, Artificial Sequence
  Description of Artificial Sequence: Synthetic oligonucleotide
  Target: LAMA2; (+) strand; PAM type: NRG; PAM sequence: CAG
atacattgattgatagatga

SEQ ID NO: 175030 - DNA, 20 bp, Artificial Sequence
  Description of Artificial Sequence: Synthetic oligonucleotide
  Target: LAMA2; (+) strand; PAM type: NRG; PAM sequence: TAG
attgattgatagatgacaga

SEQ ID NO: 175031 - DNA, 20 bp, Artificial Sequence
  Description of Artificial Sequence: Synthetic oligonucleotide
  Target: LAMA2; (+) strand; PAM type: NRG; PAM sequence: TGG
atagatgacagatagatgaa

SEQ ID NO: 175032 - DNA, 20 bp, Artificial Sequence
  Description of Artificial Sequence: Synthetic oligonucleotide
  Target: LAMA2; (+) strand; PAM type: NRG; PAM sequence: TGG
atgacagatagatgaatgga

SEQ ID NO: 175033 - DNA, 20 bp, Artificial Sequence
  Description of Artificial Sequence: Synthetic oligonucleotide
  Target: LAMA2; (+) strand; PAM type: NRG; PAM sequence: TAG
cagatagatgaatggatgga

SEQ ID NO: 175034 - DNA, 20 bp, Artificial Sequence
  Description of Artificial Sequence: Synthetic oligonucleotide
  Target: LAMA2; (+) strand; PAM type: NRG; PAM sequence: AGG
agatagatgaatggatggat

SEQ ID NO: 175035 - DNA, 20 bp, Artificial Sequence
  Description of Artificial Sequence: Synthetic oligonucleotide
  Target: LAMA2; (+) strand; PAM type: NRG; PAM sequence: TGG
tagatgaatggatggatagg

SEQ ID NO: 175036 - DNA, 20 bp, Artificial Sequence
  Description of Artificial Sequence: Synthetic oligonucleotide
  Target: LAMA2; (+) strand; PAM type: NRG; PAM sequence: TAG
atggatggataggtggataa

SEQ ID NO: 175037 - DNA, 20 bp, Artificial Sequence
  Description of Artificial Sequence: Synthetic oligonucleotide
  Target: LAMA2; (+) strand; PAM type: NRG; PAM sequence: AGG
tggatggataggtggataat

SEQ ID NO: 175038 - DNA, 20 bp, Artificial Sequence
  Description of Artificial Sequence: Synthetic oligonucleotide
  Target: LAMA2; (+) strand; PAM type: NRG; PAM sequence: TGG
tggataggtggataataggc

SEQ ID NO: 175039 - DNA, 20 bp, Artificial Sequence
  Description of Artificial Sequence: Synthetic oligonucleotide
  Target: LAMA2; (+) strand; PAM type: NRG; PAM sequence: TAG
ataggtggataataggctgg

SEQ ID NO: 175040 - DNA, 20 bp, Artificial Sequence
  Description of Artificial Sequence: Synthetic oligonucleotide
  Target: LAMA2; (+) strand; PAM type: NRG; PAM sequence: TAG
gataataggctggtagatga

SEQ ID NO: 175041 - DNA, 20 bp, Artificial Sequence
  Description of Artificial Sequence: Synthetic oligonucleotide
  Target: LAMA2; (+) strand; PAM type: NRG; PAM sequence: TGG
ataggctggtagatgataga

SEQ ID NO: 175042 - DNA, 20 bp, Artificial Sequence
  Description of Artificial Sequence: Synthetic oligonucleotide
  Target: LAMA2; (+) strand; PAM type: NRG; PAM sequence: TAG
ggtagatgatagatggatga

SEQ ID NO: 175043 - DNA, 20 bp, Artificial Sequence
  Description of Artificial Sequence: Synthetic oligonucleotide
  Target: LAMA2; (+) strand; PAM type: NRG; PAM sequence: CAG
gatgatagatggatgataga

SEQ ID NO: 175044 - DNA, 20 bp, Artificial Sequence
  Description of Artificial Sequence: Synthetic oligonucleotide
  Target: LAMA2; (+) strand; PAM type: NRG; PAM sequence: TAG
tagatggatgatagacagat

SEQ ID NO: 175045 - DNA, 20 bp, Artificial Sequence
  Description of Artificial Sequence: Synthetic oligonucleotide
  Target: LAMA2; (+) strand; PAM type: NRG; PAM sequence: TAG
tggatgatagacagattaga

SEQ ID NO: 175046 - DNA, 20 bp, Artificial Sequence
  Description of Artificial Sequence: Synthetic oligonucleotide
  Target: LAMA2; (+) strand; PAM type: NRG; PAM sequence: TAG
tgatagacagattagataga

SEQ ID NO: 175047 - DNA, 20 bp, Artificial Sequence
  Description of Artificial Sequence: Synthetic oligonucleotide
  Target: LAMA2; (+) strand; PAM type: NRG; PAM sequence: TAG
agacagattagatagataga

SEQ ID NO: 175048 - DNA, 20 bp, Artificial Sequence
  Description of Artificial Sequence: Synthetic oligonucleotide
  Target: LAMA2; (+) strand; PAM type: NRG; PAM sequence: TAG
agattagatagatagataga

SEQ ID NO: 175049 - DNA, 20 bp, Artificial Sequence
  Description of Artificial Sequence: Synthetic oligonucleotide
  Target: LAMA2; (+) strand; PAM type: NRG; PAM sequence: TAG
tagatagatagatagataga

SEQ ID NO: 175050 - DNA, 20 bp, Artificial Sequence
  Description of Artificial Sequence: Synthetic oligonucleotide
  Target: LAMA2; (+) strand; PAM type: NRG; PAM sequence: TAG
tagatagatagatagataga

SEQ ID NO: 175051 - DNA, 20 bp, Artificial Sequence
  Description of Artificial Sequence: Synthetic oligonucleotide
  Target: LAMA2; (+) strand; PAM type: NRG; PAM sequence: TAG
tagatagatagatagataga

SEQ ID NO: 175052 - DNA, 20 bp, Artificial Sequence
  Description of Artificial Sequence: Synthetic oligonucleotide
  Target: LAMA2; (+) strand; PAM type: NRG; PAM sequence: TAG
tagatagatagatagataga

SEQ ID NO: 175053 - DNA, 20 bp, Artificial Sequence
  Description of Artificial Sequence: Synthetic oligonucleotide
  Target: LAMA2; (+) strand; PAM type: NRG; PAM sequence: TAG
tagatagatagatagataga

SEQ ID NO: 175054 - DNA, 20 bp, Artificial Sequence
  Description of Artificial Sequence: Synthetic oligonucleotide
  Target: LAMA2; (+) strand; PAM type: NRG; PAM sequence: TAG
atagatagatagatagataa

SEQ ID NO: 175055 - DNA, 20 bp, Artificial Sequence
  Description of Artificial Sequence: Synthetic oligonucleotide
  Target: LAMA2; (+) strand; PAM type: NRG; PAM sequence: TAG
tagatagatagataatagat

SEQ ID NO: 175056 - DNA, 20 bp, Artificial Sequence
  Description of Artificial Sequence: Synthetic oligonucleotide
  Target: LAMA2; (+) strand; PAM type: NRG; PAM sequence: TAG
atagataatagattagatga

SEQ ID NO: 175057 - DNA, 20 bp, Artificial Sequence
  Description of Artificial Sequence: Synthetic oligonucleotide
  Target: LAMA2; (+) strand; PAM type: NRG; PAM sequence: CAG
ataatagattagatgataga

SEQ ID NO: 175058 - DNA, 20 bp, Artificial Sequence
  Description of Artificial Sequence: Synthetic oligonucleotide
  Target: LAMA2; (+) strand; PAM type: NRG; PAM sequence: AAG
tagattagatgatagacaga

SEQ ID NO: 175059 - DNA, 20 bp, Artificial Sequence
  Description of Artificial Sequence: Synthetic oligonucleotide
  Target: LAMA2; (+) strand; PAM type: NRG; PAM sequence: AAG
agatgatagacagaaagaat

SEQ ID NO: 175060 - DNA, 20 bp, Artificial Sequence
  Description of Artificial Sequence: Synthetic oligonucleotide
  Target: LAMA2; (+) strand; PAM type: NRG; PAM sequence: GAG
atgatagacagaaagaataa

SEQ ID NO: 175061 - DNA, 20 bp, Artificial Sequence
  Description of Artificial Sequence: Synthetic oligonucleotide
  Target: LAMA2; (+) strand; PAM type: NRG; PAM sequence: AAG
agaataagagatttattatg

SEQ ID NO: 175062 - DNA, 20 bp, Artificial Sequence
  Description of Artificial Sequence: Synthetic oligonucleotide
  Target: LAMA2; (+) strand; PAM type: NRG; PAM sequence: TGG
agagatttattatgaagaat

SEQ ID NO: 175063 - DNA, 20 bp, Artificial Sequence
  Description of Artificial Sequence: Synthetic oligonucleotide
  Target: LAMA2; (+) strand; PAM type: NRG; PAM sequence: TGG
agaattggcttacgtgatta

SEQ ID NO: 175064 - DNA, 20 bp, Artificial Sequence
  Description of Artificial Sequence: Synthetic oligonucleotide
  Target: LAMA2; (+) strand; PAM type: NRG; PAM sequence: GAG
aattggcttacgtgattatg

SEQ ID NO: 175065 - DNA, 20 bp, Artificial Sequence
  Description of Artificial Sequence: Synthetic oligonucleotide
  Target: LAMA2; (+) strand; PAM type: NRG; PAM sequence: AGG
attggcttacgtgattatgg

SEQ ID NO: 175066 - DNA, 20 bp, Artificial Sequence
  Description of Artificial Sequence: Synthetic oligonucleotide
  Target: LAMA2; (+) strand; PAM type: NRG; PAM sequence: AAG
acgtgattatggaggctgca

SEQ ID NO: 175067 - DNA, 20 bp, Artificial Sequence
  Description of Artificial Sequence: Synthetic oligonucleotide
  Target: LAMA2; (+) strand; PAM type: NRG; PAM sequence: CAG
ttatggaggctgcaaagtcc

SEQ ID NO: 175068 - DNA, 20 bp, Artificial Sequence
  Description of Artificial Sequence: Synthetic oligonucleotide
  Target: LAMA2; (+) strand; PAM type: NRG; PAM sequence: GAG
tgcaaagtcccagtatctgt

SEQ ID NO: 175069 - DNA, 20 bp, Artificial Sequence
  Description of Artificial Sequence: Synthetic oligonucleotide
  Target: LAMA2; (+) strand; PAM type: NRG; PAM sequence: CAG
gtcccagtatctgtgagctg

SEQ ID NO: 175070 - DNA, 20 bp, Artificial Sequence
  Description of Artificial Sequence: Synthetic oligonucleotide
  Target: LAMA2; (+) strand; PAM type: NRG; PAM sequence: TAG
tgagctgcagatccatgata

SEQ ID NO: 175071 - DNA, 20 bp, Artificial Sequence
  Description of Artificial Sequence: Synthetic oligonucleotide
  Target: LAMA2; (+) strand; PAM type: NRG; PAM sequence: GAG
tccatgatatagttcacttt

SEQ ID NO: 175072 - DNA, 20 bp, Artificial Sequence
  Description of Artificial Sequence: Synthetic oligonucleotide
  Target: LAMA2; (+) strand; PAM type: NRG; PAM sequence: AAG
tatagttcactttgagtcca

SEQ ID NO: 175073 - DNA, 20 bp, Artificial Sequence
  Description of Artificial Sequence: Synthetic oligonucleotide
  Target: LAMA2; (+) strand; PAM type: NRG; PAM sequence: AGG
atagttcactttgagtccaa

SEQ ID NO: 175074 - DNA, 20 bp, Artificial Sequence
  Description of Artificial Sequence: Synthetic oligonucleotide
  Target: LAMA2; (+) strand; PAM type: NRG; PAM sequence: CAG
ttcactttgagtccaaaggc

SEQ ID NO: 175075 - DNA, 20 bp, Artificial Sequence
  Description of Artificial Sequence: Synthetic oligonucleotide
  Target: LAMA2; (+) strand; PAM type: NRG; PAM sequence: GAG
cactttgagtccaaaggcca

SEQ ID NO: 175076 - DNA, 20 bp, Artificial Sequence
  Description of Artificial Sequence: Synthetic oligonucleotide
  Target: LAMA2; (+) strand; PAM type: NRG; PAM sequence: CGG
gtccaaaggccagagaatca

SEQ ID NO: 175077 - DNA, 20 bp, Artificial Sequence
  Description of Artificial Sequence: Synthetic oligonucleotide
  Target: LAMA2; (+) strand; PAM type: NRG; PAM sequence: GGG
tccaaaggccagagaatcac

SEQ ID NO: 175078 - DNA, 20 bp, Artificial Sequence
  Description of Artificial Sequence: Synthetic oligonucleotide
  Target: LAMA2; (+) strand; PAM type: NRG; PAM sequence: GAG
caaaggccagagaatcacgg

SEQ ID NO: 175079 - DNA, 20 bp, Artificial Sequence
  Description of Artificial Sequence: Synthetic oligonucleotide
  Target: LAMA2; (+) strand; PAM type: NRG; PAM sequence: TGG
cagagaatcacgggagctga

SEQ ID NO: 175080 - DNA, 20 bp, Artificial Sequence
  Description of Artificial Sequence: Synthetic oligonucleotide
  Target: LAMA2; (+) strand; PAM type: NRG; PAM sequence: CAG
ggagctgatggtacaaacca

SEQ ID NO: 175081 - DNA, 20 bp, Artificial Sequence
  Description of Artificial Sequence: Synthetic oligonucleotide
  Target: LAMA2; (+) strand; PAM type: NRG; PAM sequence: AAG
gatggtacaaaccacagttc

SEQ ID NO: 175082 - DNA, 20 bp, Artificial Sequence
  Description of Artificial Sequence: Synthetic oligonucleotide
  Target: LAMA2; (+) strand; PAM type: NRG; PAM sequence: TAG
acaaaccacagttcaagaac

SEQ ID NO: 175083 - DNA, 20 bp, Artificial Sequence
  Description of Artificial Sequence: Synthetic oligonucleotide
  Target: LAMA2; (+) strand; PAM type: NRG; PAM sequence: GAG
aaaccacagttcaagaacta

SEQ ID NO: 175084 - DNA, 20 bp, Artificial Sequence
  Description of Artificial Sequence: Synthetic oligonucleotide
  Target: LAMA2; (+) strand; PAM type: NRG; PAM sequence: GAG
accacagttcaagaactaga

SEQ ID NO: 175085 - DNA, 20 bp, Artificial Sequence
  Description of Artificial Sequence: Synthetic oligonucleotide
  Target: LAMA2; (+) strand; PAM type: NRG; PAM sequence: GAG
tcaagaactagagagaaaat

SEQ ID NO: 175086 - DNA, 20 bp, Artificial Sequence
  Description of Artificial Sequence: Synthetic oligonucleotide
  Target: LAMA2; (+) strand; PAM type: NRG; PAM sequence: GAG
aactagagagaaaatgagat

SEQ ID NO: 175087 - DNA, 20 bp, Artificial Sequence
  Description of Artificial Sequence: Synthetic oligonucleotide
  Target: LAMA2; (+) strand; PAM type: NRG; PAM sequence: CAG
gaaaatgagatgagatgtcc

SEQ ID NO: 175088 - DNA, 20 bp, Artificial Sequence
  Description of Artificial Sequence: Synthetic oligonucleotide
  Target: LAMA2; (+) strand; PAM type: NRG; PAM sequence: AAG
gatgtcccagctcaatctgt

SEQ ID NO: 175089 - DNA, 20 bp, Artificial Sequence
  Description of Artificial Sequence: Synthetic oligonucleotide
  Target: LAMA2; (+) strand; PAM type: NRG; PAM sequence: AGG
atgtcccagctcaatctgta

SEQ ID NO: 175090 - DNA, 20 bp, Artificial Sequence
  Description of Artificial Sequence: Synthetic oligonucleotide
  Target: LAMA2; (+) strand; PAM type: NRG; PAM sequence: CAG
tcccagctcaatctgtaagg

SEQ ID NO: 175091 - DNA, 20 bp, Artificial Sequence
  Description of Artificial Sequence: Synthetic oligonucleotide
  Target: LAMA2; (+) strand; PAM type: NRG; PAM sequence: AAG
gctcaatctgtaaggcagaa

SEQ ID NO: 175092 - DNA, 20 bp, Artificial Sequence
  Description of Artificial Sequence: Synthetic oligonucleotide
  Target: LAMA2; (+) strand; PAM type: NRG; PAM sequence: AAG
caatctgtaaggcagaaaag

SEQ ID NO: 175093 - DNA, 20 bp, Artificial Sequence
  Description of Artificial Sequence: Synthetic oligonucleotide
  Target: LAMA2; (+) strand; PAM type: NRG; PAM sequence: AGG
aatctgtaaggcagaaaaga

SEQ ID NO: 175094 - DNA, 20 bp, Artificial Sequence
  Description of Artificial Sequence: Synthetic oligonucleotide
  Target: LAMA2; (+) strand; PAM type: NRG; PAM sequence: GGG
atctgtaaggcagaaaagaa

SEQ ID NO: 175095 - DNA, 20 bp, Artificial Sequence
  Description of Artificial Sequence: Synthetic oligonucleotide
  Target: LAMA2; (+) strand; PAM type: NRG; PAM sequence: AAG
tgtaaggcagaaaagaaggg

SEQ ID NO: 175096 - DNA, 20 bp, Artificial Sequence
  Description of Artificial Sequence: Synthetic oligonucleotide
  Target: LAMA2; (+) strand; PAM type: NRG; PAM sequence: AGG
gtaaggcagaaaagaaggga

SEQ ID NO: 175097 - DNA, 20 bp, Artificial Sequence
  Description of Artificial Sequence: Synthetic oligonucleotide
  Target: LAMA2; (+) strand; PAM type: NRG; PAM sequence: CAG
tctttgctttttgttctatt

SEQ ID NO: 175098 - DNA, 20 bp, Artificial Sequence
  Description of Artificial Sequence: Synthetic oligonucleotide
  Target: LAMA2; (+) strand; PAM type: NRG; PAM sequence: AAG
ttttgttctattcagccctc

SEQ ID NO: 175099 - DNA, 20 bp, Artificial Sequence
  Description of Artificial Sequence: Synthetic oligonucleotide
  Target: LAMA2; (+) strand; PAM type: NRG; PAM sequence: GAG
ttgttctattcagccctcaa

SEQ ID NO: 175100 - DNA, 20 bp, Artificial Sequence
  Description of Artificial Sequence: Synthetic oligonucleotide
  Target: LAMA2; (+) strand; PAM type: NRG; PAM sequence: TGG
ctattcagccctcaagagat

SEQ ID NO: 175101 - DNA, 20 bp, Artificial Sequence
  Description of Artificial Sequence: Synthetic oligonucleotide
  Target: LAMA2; (+) strand; PAM type: NRG; PAM sequence: GGG
tattcagccctcaagagatt

SEQ ID NO: 175102 - DNA, 20 bp, Artificial Sequence
  Description of Artificial Sequence: Synthetic oligonucleotide
  Target: LAMA2; (+) strand; PAM type: NRG; PAM sequence: CAG
tcaagagattgggtgatgca

SEQ ID NO: 175103 - DNA, 20 bp, Artificial Sequence
  Description of Artificial Sequence: Synthetic oligonucleotide
  Target: LAMA2; (+) strand; PAM type: NRG; PAM sequence: GAG
gggtgatgcacagcaatatt

SEQ ID NO: 175104 - DNA, 20 bp, Artificial Sequence
  Description of Artificial Sequence: Synthetic oligonucleotide
  Target: LAMA2; (+) strand; PAM type: NRG; PAM sequence: AGG
ggtgatgcacagcaatattg

SEQ ID NO: 175105 - DNA, 20 bp, Artificial Sequence
  Description of Artificial Sequence: Synthetic oligonucleotide
  Target: LAMA2; (+) strand; PAM type: NRG; PAM sequence: GAG
tgatgcacagcaatattgag

SEQ ID NO: 175106 - DNA, 20 bp, Artificial Sequence
  Description of Artificial Sequence: Synthetic oligonucleotide
  Target: LAMA2; (+) strand; PAM type: NRG; PAM sequence: AGG
gatgcacagcaatattgagg

SEQ ID NO: 175107 - DNA, 20 bp, Artificial Sequence
  Description of Artificial Sequence: Synthetic oligonucleotide
  Target: LAMA2; (+) strand; PAM type: NRG; PAM sequence: GGG
atgcacagcaatattgagga

SEQ ID NO: 175108 - DNA, 20 bp, Artificial Sequence
  Description of Artificial Sequence: Synthetic oligonucleotide
  Target: LAMA2; (+) strand; PAM type: NRG; PAM sequence: CAG
caatctcttttactgtcatc

SEQ ID NO: 175109 - DNA, 20 bp, Artificial Sequence
  Description of Artificial Sequence: Synthetic oligonucleotide
  Target: LAMA2; (+) strand; PAM type: NRG; PAM sequence: CAG
gtcatccagaaacaccctca

SEQ ID NO: 175110 - DNA, 20 bp, Artificial Sequence
  Description of Artificial Sequence: Synthetic oligonucleotide
  Target: LAMA2; (+) strand; PAM type: NRG; PAM sequence: CGG
aacaccctcacagacacacc

SEQ ID NO: 175111 - DNA, 20 bp, Artificial Sequence
  Description of Artificial Sequence: Synthetic oligonucleotide
  Target: LAMA2; (+) strand; PAM type: NRG; PAM sequence: TAG
cccggaaataatgtttaatt

SEQ ID NO: 175112 - DNA, 20 bp, Artificial Sequence
  Description of Artificial Sequence: Synthetic oligonucleotide
  Target: LAMA2; (+) strand; PAM type: NRG; PAM sequence: AGG
ccggaaataatgtttaattt

SEQ ID NO: 175113 - DNA, 20 bp, Artificial Sequence
  Description of Artificial Sequence: Synthetic oligonucleotide
  Target: LAMA2; (+) strand; PAM type: NRG; PAM sequence: TGG
atgtttaatttaggtgccca

SEQ ID NO: 175114 - DNA, 20 bp, Artificial Sequence
  Description of Artificial Sequence: Synthetic oligonucleotide
  Target: LAMA2; (+) strand; PAM type: NRG; PAM sequence: CAG
ttaatttaggtgcccatggc

SEQ ID NO: 175115 - DNA, 20 bp, Artificial Sequence
  Description of Artificial Sequence: Synthetic oligonucleotide
  Target: LAMA2; (+) strand; PAM type: NRG; PAM sequence: AAG
ttaggtgcccatggccagtc

SEQ ID NO: 175116 - DNA, 20 bp, Artificial Sequence
  Description of Artificial Sequence: Synthetic oligonucleotide
  Target: LAMA2; (+) strand; PAM type: NRG; PAM sequence: TGG
catacaatttacaatgacac

SEQ ID NO: 175117 - DNA, 20 bp, Artificial Sequence
  Description of Artificial Sequence: Synthetic oligonucleotide
  Target: LAMA2; (+) strand; PAM type: NRG; PAM sequence: CAG
atgacactggccttcaactc

SEQ ID NO: 175118 - DNA, 20 bp, Artificial Sequence
  Description of Artificial Sequence: Synthetic oligonucleotide
  Target: LAMA2; (+) strand; PAM type: NRG; PAM sequence: TGG
ttcaactccagtgcacaatg

SEQ ID NO: 175119 - DNA, 20 bp, Artificial Sequence
  Description of Artificial Sequence: Synthetic oligonucleotide
  Target: LAMA2; (+) strand; PAM type: NRG; PAM sequence: AAG
cctctttattctccaaattc

SEQ ID NO: 175120 - DNA, 20 bp, Artificial Sequence
  Description of Artificial Sequence: Synthetic oligonucleotide
  Target: LAMA2; (+) strand; PAM type: NRG; PAM sequence: CAG
tcaagttctcttacttgcta

SEQ ID NO: 175121 - DNA, 20 bp, Artificial Sequence
  Description of Artificial Sequence: Synthetic oligonucleotide
  Target: LAMA2; (+) strand; PAM type: NRG; PAM sequence: TGG
ctacagttgtccatatttct

SEQ ID NO: 175122 - DNA, 20 bp, Artificial Sequence
  Description of Artificial Sequence: Synthetic oligonucleotide
  Target: LAMA2; (+) strand; PAM type: NRG; PAM sequence: GGG
tacagttgtccatatttctt

SEQ ID NO: 175123 - DNA, 20 bp, Artificial Sequence
  Description of Artificial Sequence: Synthetic oligonucleotide
  Target: LAMA2; (+) strand; PAM type: NRG; PAM sequence: CAG
tcattctaaaaaatgttgac

SEQ ID NO: 175124 - DNA, 20 bp, Artificial Sequence
  Description of Artificial Sequence: Synthetic oligonucleotide
  Target: LAMA2; (+) strand; PAM type: NRG; PAM sequence: AGG
cattctaaaaaatgttgacc

SEQ ID NO: 175125 - DNA, 20 bp, Artificial Sequence
  Description of Artificial Sequence: Synthetic oligonucleotide
  Target: LAMA2; (+) strand; PAM type: NRG; PAM sequence: TAG
aatgttgaccaggcctttct

SEQ ID NO: 175126 - DNA, 20 bp, Artificial Sequence
  Description of Artificial Sequence: Synthetic oligonucleotide
  Target: LAMA2; (+) strand; PAM type: NRG; PAM sequence: AGG
atgttgaccaggcctttctt

SEQ ID NO: 175127 - DNA, 20 bp, Artificial Sequence
  Description of Artificial Sequence: Synthetic oligonucleotide
  Target: LAMA2; (+) strand; PAM type: NRG; PAM sequence: TAG
aggcctttcttaggcatttc

SEQ ID NO: 175128 - DNA, 20 bp, Artificial Sequence
  Description of Artificial Sequence: Synthetic oligonucleotide
  Target: LAMA2; (+) strand; PAM type: NRG; PAM sequence: AGG
ggcctttcttaggcatttct

SEQ ID NO: 175129 - DNA, 20 bp, Artificial Sequence
  Description of Artificial Sequence: Synthetic oligonucleotide
  Target: LAMA2; (+) strand; PAM type: NRG; PAM sequence: CAG
aggaaaaataatataaaata

SEQ ID NO: 175130 - DNA, 20 bp, Artificial Sequence
  Description of Artificial Sequence: Synthetic oligonucleotide
  Target: LAMA2; (+) strand; PAM type: NRG; PAM sequence: AAG
ataatataaaatacagaata

SEQ ID NO: 175131 - DNA, 20 bp, Artificial Sequence
  Description of Artificial Sequence: Synthetic oligonucleotide
  Target: LAMA2; (+) strand; PAM type: NRG; PAM sequence: GAG
tataaaatacagaataaagt

SEQ ID NO: 175132 - DNA, 20 bp, Artificial Sequence
  Description of Artificial Sequence: Synthetic oligonucleotide
  Target: LAMA2; (+) strand; PAM type: NRG; PAM sequence: AGG
ataaaatacagaataaagtg

SEQ ID NO: 175133 - DNA, 20 bp, Artificial Sequence
  Description of Artificial Sequence: Synthetic oligonucleotide
  Target: LAMA2; (+) strand; PAM type: NRG; PAM sequence: GGG
taaaatacagaataaagtga

SEQ ID NO: 175134 - DNA, 20 bp, Artificial Sequence
  Description of Artificial Sequence: Synthetic oligonucleotide
  Target: LAMA2; (+) strand; PAM type: NRG; PAM sequence: GGG
aaaatacagaataaagtgag

SEQ ID NO: 175135 - DNA, 20 bp, Artificial Sequence
  Description of Artificial Sequence: Synthetic oligonucleotide
  Target: LAMA2; (+) strand; PAM type: NRG; PAM sequence: GAG
aatacagaataaagtgaggg

SEQ ID NO: 175136 - DNA, 20 bp, Artificial Sequence
  Description of Artificial Sequence: Synthetic oligonucleotide
  Target: LAMA2; (+) strand; PAM type: NRG; PAM sequence: CAG
agaataaagtgaggggagtt

SEQ ID NO: 175137 - DNA, 20 bp, Artificial Sequence
  Description of Artificial Sequence: Synthetic oligonucleotide
  Target: LAMA2; (+) strand; PAM type: NRG; PAM sequence: TAG
cagatataatgcatttctca

SEQ ID NO: 175138 - DNA, 20 bp, Artificial Sequence
  Description of Artificial Sequence: Synthetic oligonucleotide
  Target: LAMA2; (+) strand; PAM type: NRG; PAM sequence: TAG
atttctcatagaaaaaatga

SEQ ID NO: 175139 - DNA, 20 bp, Artificial Sequence
  Description of Artificial Sequence: Synthetic oligonucleotide
  Target: LAMA2; (+) strand; PAM type: NRG; PAM sequence: TGG
tctcatagaaaaaatgatag

SEQ ID NO: 175140 - DNA, 20 bp, Artificial Sequence
  Description of Artificial Sequence: Synthetic oligonucleotide
  Target: LAMA2; (+) strand; PAM type: NRG; PAM sequence: GGG
ctcatagaaaaaatgatagt

SEQ ID NO: 175141 - DNA, 20 bp, Artificial Sequence
  Description of Artificial Sequence: Synthetic oligonucleotide
  Target: LAMA2; (+) strand; PAM type: NRG; PAM sequence: TGG
tagaaaaaatgatagtggga

SEQ ID NO: 175142 - DNA, 20 bp, Artificial Sequence
  Description of Artificial Sequence: Synthetic oligonucleotide
  Target: LAMA2; (+) strand; PAM type: NRG; PAM sequence: TAG
aaaaatgatagtgggatggt

SEQ ID NO: 175143 - DNA, 20 bp, Artificial Sequence
  Description of Artificial Sequence: Synthetic oligonucleotide
  Target: LAMA2; (+) strand; PAM type: NRG; PAM sequence: AAG
tgatagtgggatggttagta

SEQ ID NO: 175144 - DNA, 20 bp, Artificial Sequence
  Description of Artificial Sequence: Synthetic oligonucleotide
  Target: LAMA2; (+) strand; PAM type: NRG; PAM sequence: AAG
agtaaagaactgtgctgtgt

SEQ ID NO: 175145 - DNA, 20 bp, Artificial Sequence
  Description of Artificial Sequence: Synthetic oligonucleotide
  Target: LAMA2; (+) strand; PAM type: NRG; PAM sequence: AAG
aagaactgtgctgtgtaagc

SEQ ID NO: 175146 - DNA, 20 bp, Artificial Sequence
  Description of Artificial Sequence: Synthetic oligonucleotide
  Target: LAMA2; (+) strand; PAM type: NRG; PAM sequence: AAG
gtgctgtgtaagcaagatgt

SEQ ID NO: 175147 - DNA, 20 bp, Artificial Sequence
  Description of Artificial Sequence: Synthetic oligonucleotide
  Target: LAMA2; (+) strand; PAM type: NRG; PAM sequence: AAG
caagatgtaagctttaaaca

SEQ ID NO: 175148 - DNA, 20 bp, Artificial Sequence
  Description of Artificial Sequence: Synthetic oligonucleotide
  Target: LAMA2; (+) strand; PAM type: NRG; PAM sequence: AAG
tgtaagctttaaacaaagtg

SEQ ID NO: 175149 - DNA, 20 bp, Artificial Sequence
  Description of Artificial Sequence: Synthetic oligonucleotide
  Target: LAMA2; (+) strand; PAM type: NRG; PAM sequence: AAG
gctttaaacaaagtgaagaa

SEQ ID NO: 175150 - DNA, 20 bp, Artificial Sequence
  Description of Artificial Sequence: Synthetic oligonucleotide
  Target: LAMA2; (+) strand; PAM type: NRG; PAM sequence: AGG
ctttaaacaaagtgaagaaa

SEQ ID NO: 175151 - DNA, 20 bp, Artificial Sequence
  Description of Artificial Sequence: Synthetic oligonucleotide
  Target: LAMA2; (+) strand; PAM type: NRG; PAM sequence: GGG
tttaaacaaagtgaagaaaa

SEQ ID NO: 175152 - DNA, 20 bp, Artificial Sequence
  Description of Artificial Sequence: Synthetic oligonucleotide
  Target: LAMA2; (+) strand; PAM type: NRG; PAM sequence: GGG
ttaaacaaagtgaagaaaag

SEQ ID NO: 175153 - DNA, 20 bp, Artificial Sequence
  Description of Artificial Sequence: Synthetic oligonucleotide
  Target: LAMA2; (+) strand; PAM type: NRG; PAM sequence: GAG
aaacaaagtgaagaaaaggg

SEQ ID NO: 175154 - DNA, 20 bp, Artificial Sequence
  Description of Artificial Sequence: Synthetic oligonucleotide
  Target: LAMA2; (+) strand; PAM type: NRG; PAM sequence: AAG
caaagtgaagaaaaggggag

SEQ ID NO: 175155 - DNA, 20 bp, Artificial Sequence
  Description of Artificial Sequence: Synthetic oligonucleotide
  Target: LAMA2; (+) strand; PAM type: NRG; PAM sequence: TAG
tgaagaaaaggggagaagcc

SEQ ID NO: 175156 - DNA, 20 bp, Artificial Sequence
  Description of Artificial Sequence: Synthetic oligonucleotide
  Target: LAMA2; (+) strand; PAM type: NRG; PAM sequence: CAG
ctagaaaaaataacattata

SEQ ID NO: 175157 - DNA, 20 bp, Artificial Sequence
  Description of Artificial Sequence: Synthetic oligonucleotide
  Target: LAMA2; (+) strand; PAM type: NRG; PAM sequence: AAG
aaaaaataacattatacaga

SEQ ID NO: 175158 - DNA, 20 bp, Artificial Sequence
  Description of Artificial Sequence: Synthetic oligonucleotide
  Target: LAMA2; (+) strand; PAM type: NRG; PAM sequence: GAG
aaaataacattatacagaaa

SEQ ID NO: 175159 - DNA, 20 bp, Artificial Sequence
  Description of Artificial Sequence: Synthetic oligonucleotide
  Target: LAMA2; (+) strand; PAM type: NRG; PAM sequence: TAG
aaatatgtcaacttctctta

SEQ ID NO: 175160 - DNA, 20 bp, Artificial Sequence
  Description of Artificial Sequence: Synthetic oligonucleotide
  Target: LAMA2; (+) strand; PAM type: NRG; PAM sequence: CAG
ttctcttatagcaaatttcc

SEQ ID NO: 175161 - DNA, 20 bp, Artificial Sequence
  Description of Artificial Sequence: Synthetic oligonucleotide
  Target: LAMA2; (+) strand; PAM type: NRG; PAM sequence: AAG
ccagtgttcattcctaatac

SEQ ID NO: 175162 - DNA, 20 bp, Artificial Sequence
  Description of Artificial Sequence: Synthetic oligonucleotide
  Target: LAMA2; (+) strand; PAM type: NRG; PAM sequence: AGG
cagtgttcattcctaataca

SEQ ID NO: 175163 - DNA, 20 bp, Artificial Sequence
  Description of Artificial Sequence: Synthetic oligonucleotide
  Target: LAMA2; (+) strand; PAM type: NRG; PAM sequence: GAG
gtgttcattcctaatacaag

SEQ ID NO: 175164 - DNA, 20 bp, Artificial Sequence
  Description of Artificial Sequence: Synthetic oligonucleotide
  Target: LAMA2; (+) strand; PAM type: NRG; PAM sequence: GAG
gttcattcctaatacaagga

SEQ ID NO: 175165 - DNA, 20 bp, Artificial Sequence
  Description of Artificial Sequence: Synthetic oligonucleotide
  Target: LAMA2; (+) strand; PAM type: NRG; PAM sequence: TAG
caaggagagtaaaaactcca

SEQ ID NO: 175166 - DNA, 20 bp, Artificial Sequence
  Description of Artificial Sequence: Synthetic oligonucleotide
  Target: LAMA2; (+) strand; PAM type: NRG; PAM sequence: AAG
aactccatagaaacctcaaa

SEQ ID NO: 175167 - DNA, 20 bp, Artificial Sequence
  Description of Artificial Sequence: Synthetic oligonucleotide
  Target: LAMA2; (+) strand; PAM type: NRG; PAM sequence: GAG
ctccatagaaacctcaaaaa

SEQ ID NO: 175168 - DNA, 20 bp, Artificial Sequence
  Description of Artificial Sequence: Synthetic oligonucleotide
  Target: LAMA2; (+) strand; PAM type: NRG; PAM sequence: TGG
aaaagagctttttcttgcaa

SEQ ID NO: 175169 - DNA, 20 bp, Artificial Sequence
  Description of Artificial Sequence: Synthetic oligonucleotide
  Target: LAMA2; (+) strand; PAM type: NRG; PAM sequence: GGG
aaagagctttttcttgcaat

SEQ ID NO: 175170 - DNA, 20 bp, Artificial Sequence
  Description of Artificial Sequence: Synthetic oligonucleotide
  Target: LAMA2; (+) strand; PAM type: NRG; PAM sequence: GGG
aagagctttttcttgcaatg

SEQ ID NO: 175171 - DNA, 20 bp, Artificial Sequence
  Description of Artificial Sequence: Synthetic oligonucleotide
  Target: LAMA2; (+) strand; PAM type: NRG; PAM sequence: TAG
gctttttcttgcaatggggt

SEQ ID NO: 175172 - DNA, 20 bp, Artificial Sequence
  Description of Artificial Sequence: Synthetic oligonucleotide
  Target: LAMA2; (+) strand; PAM type: NRG; PAM sequence: AGG
ctttttcttgcaatggggtt

SEQ ID NO: 175173 - DNA, 20 bp, Artificial Sequence
  Description of Artificial Sequence: Synthetic oligonucleotide
  Target: LAMA2; (+) strand; PAM type: NRG; PAM sequence: AAG
tgcaatggggttaggtgtct

SEQ ID NO: 175174 - DNA, 20 bp, Artificial Sequence
  Description of Artificial Sequence: Synthetic oligonucleotide
  Target: LAMA2; (+) strand; PAM type: NRG; PAM sequence: AGG
gcaatggggttaggtgtcta

SEQ ID NO: 175175 - DNA, 20 bp, Artificial Sequence
  Description of Artificial Sequence: Synthetic oligonucleotide
  Target: LAMA2; (+) strand; PAM type: NRG; PAM sequence: CAG
ttaggtgtctaaggaataaa

SEQ ID NO: 175176 - DNA, 20 bp, Artificial Sequence
  Description of Artificial Sequence: Synthetic oligonucleotide
  Target: LAMA2; (+) strand; PAM type: NRG; PAM sequence: AGG
taggtgtctaaggaataaac

SEQ ID NO: 175177 - DNA, 20 bp, Artificial Sequence
  Description of Artificial Sequence: Synthetic oligonucleotide
  Target: LAMA2; (+) strand; PAM type: NRG; PAM sequence: CAG
gaaactttactcttatgtga

SEQ ID NO: 175178 - DNA, 20 bp, Artificial Sequence
  Description of Artificial Sequence: Synthetic oligonucleotide
  Target: LAMA2; (+) strand; PAM type: NRG; PAM sequence: CAG
tttactcttatgtgacagat

SEQ ID NO: 175179 - DNA, 20 bp, Artificial Sequence
  Description of Artificial Sequence: Synthetic oligonucleotide
  Target: LAMA2; (+) strand; PAM type: NRG; PAM sequence: GAG
ctcttatgtgacagatcagt

SEQ ID NO: 175180 - DNA, 20 bp, Artificial Sequence
  Description of Artificial Sequence: Synthetic oligonucleotide
  Target: LAMA2; (+) strand; PAM type: NRG; PAM sequence: AGG
tcttatgtgacagatcagtg

SEQ ID NO: 175181 - DNA, 20 bp, Artificial Sequence
  Description of Artificial Sequence: Synthetic oligonucleotide
  Target: LAMA2; (+) strand; PAM type: NRG; PAM sequence: GAG
ttatgtgacagatcagtgag

SEQ ID NO: 175182 - DNA, 20 bp, Artificial Sequence
  Description of Artificial Sequence: Synthetic oligonucleotide
  Target: LAMA2; (+) strand; PAM type: NRG; PAM sequence: AGG
tatgtgacagatcagtgagg

SEQ ID NO: 175183 - DNA, 20 bp, Artificial Sequence
  Description of Artificial Sequence: Synthetic oligonucleotide
  Target: LAMA2; (+) strand; PAM type: NRG; PAM sequence: AAG
tgaggaggaaacacgctgat

SEQ ID NO: 175184 - DNA, 20 bp, Artificial Sequence
  Description of Artificial Sequence: Synthetic oligonucleotide
  Target: LAMA2; (+) strand; PAM type: NRG; PAM sequence: AAG
ggaggaaacacgctgataag

SEQ ID NO: 175185 - DNA, 20 bp, Artificial Sequence
  Description of Artificial Sequence: Synthetic oligonucleotide
  Target: LAMA2; (+) strand; PAM type: NRG; PAM sequence: AAG
tataataaaattcacttcaa

SEQ ID NO: 175186 - DNA, 20 bp, Artificial Sequence
  Description of Artificial Sequence: Synthetic oligonucleotide
  Target: LAMA2; (+) strand; PAM type: NRG; PAM sequence: AGG
ataataaaattcacttcaaa

SEQ ID NO: 175187 - DNA, 20 bp, Artificial Sequence
  Description of Artificial Sequence: Synthetic oligonucleotide
  Target: LAMA2; (+) strand; PAM type: NRG; PAM sequence: AAG
aaggaatgtgaacaaaatga

SEQ ID NO: 175188 - DNA, 20 bp, Artificial Sequence
  Description of Artificial Sequence: Synthetic oligonucleotide
  Target: LAMA2; (+) strand; PAM type: NRG; PAM sequence: TGG
gtgaacaaaatgaaagaact

SEQ ID NO: 175189 - DNA, 20 bp, Artificial Sequence
  Description of Artificial Sequence: Synthetic oligonucleotide
  Target: LAMA2; (+) strand; PAM type: NRG; PAM sequence: AAG
aatgaaagaacttggatata

SEQ ID NO: 175190 - DNA, 20 bp, Artificial Sequence
  Description of Artificial Sequence: Synthetic oligonucleotide
  Target: LAMA2; (+) strand; PAM type: NRG; PAM sequence: AGG
atgaaagaacttggatataa

SEQ ID NO: 175191 - DNA, 20 bp, Artificial Sequence
  Description of Artificial Sequence: Synthetic oligonucleotide
  Target: LAMA2; (+) strand; PAM type: NRG; PAM sequence: GGG
tgaaagaacttggatataaa

SEQ ID NO: 175192 - DNA, 20 bp, Artificial Sequence
  Description of Artificial Sequence: Synthetic oligonucleotide
  Target: LAMA2; (+) strand; PAM type: NRG; PAM sequence: GGG
gaaagaacttggatataaag

SEQ ID NO: 175193 - DNA, 20 bp, Artificial Sequence
  Description of Artificial Sequence: Synthetic oligonucleotide
  Target: LAMA2; (+) strand; PAM type: NRG; PAM sequence: AAG
acttggatataaaggggcaa

SEQ ID NO: 175194 - DNA, 20 bp, Artificial Sequence
  Description of Artificial Sequence: Synthetic oligonucleotide
  Target: LAMA2; (+) strand; PAM type: NRG; PAM sequence: AAG
aaggggcaaaagtgaacaaa

SEQ ID NO: 175195 - DNA, 20 bp, Artificial Sequence
  Description of Artificial Sequence: Synthetic oligonucleotide
  Target: LAMA2; (+) strand; PAM type: NRG; PAM sequence: TAG
ggcaaaagtgaacaaaaaga

SEQ ID NO: 175196 - DNA, 20 bp, Artificial Sequence
  Description of Artificial Sequence: Synthetic oligonucleotide
  Target: LAMA2; (+) strand; PAM type: NRG; PAM sequence: AAG
tagaaaatgtgtacaaatct

SEQ ID NO: 175197 - DNA, 20 bp, Artificial Sequence
  Description of Artificial Sequence: Synthetic oligonucleotide
  Target: LAMA2; (+) strand; PAM type: NRG; PAM sequence: AAG
aaatgtgtacaaatctaagt

SEQ ID NO: 175198 - DNA, 20 bp, Artificial Sequence
  Description of Artificial Sequence: Synthetic oligonucleotide
  Target: LAMA2; (+) strand; PAM type: NRG; PAM sequence: TGG
acaaatctaagtaagcatta

SEQ ID NO: 175199 - DNA, 20 bp, Artificial Sequence
  Description of Artificial Sequence: Synthetic oligonucleotide
  Target: LAMA2; (+) strand; PAM type: NRG; PAM sequence: AAG
atctaagtaagcattatgga

SEQ ID NO: 175200 - DNA, 20 bp, Artificial Sequence
  Description of Artificial Sequence: Synthetic oligonucleotide
  Target: LAMA2; (+) strand; PAM type: NRG; PAM sequence: TGG
gataataattattaaatatg

SEQ ID NO: 175201 - DNA, 20 bp, Artificial Sequence
  Description of Artificial Sequence: Synthetic oligonucleotide
  Target: LAMA2; (+) strand; PAM type: NRG; PAM sequence: AAG
aatatgtggaattaaaaaca

SEQ ID NO: 175202 - DNA, 20 bp, Artificial Sequence
  Description of Artificial Sequence: Synthetic oligonucleotide
  Target: LAMA2; (+) strand; PAM type: NRG; PAM sequence: TGG
atgtggaattaaaaacaaag

SEQ ID NO: 175203 - DNA, 20 bp, Artificial Sequence
  Description of Artificial Sequence: Synthetic oligonucleotide
  Target: LAMA2; (+) strand; PAM type: NRG; PAM sequence: AAG
acaaagtggaactaaaacac

SEQ ID NO: 175204 - DNA, 20 bp, Artificial Sequence
  Description of Artificial Sequence: Synthetic oligonucleotide
  Target: LAMA2; (+) strand; PAM type: NRG; PAM sequence: GAG
aaagtggaactaaaacacaa

SEQ ID NO: 175205 - DNA, 20 bp, Artificial Sequence
  Description of Artificial Sequence: Synthetic oligonucleotide
  Target: LAMA2; (+) strand; PAM type: NRG; PAM sequence: TGG
aacacaagagactaataaaa

SEQ ID NO: 175206 - DNA, 20 bp, Artificial Sequence
  Description of Artificial Sequence: Synthetic oligonucleotide
  Target: LAMA2; (+) strand; PAM type: NRG; PAM sequence: TGG
gagactaataaaatggaaaa

SEQ ID NO: 175207 - DNA, 20 bp, Artificial Sequence
  Description of Artificial Sequence: Synthetic oligonucleotide
  Target: LAMA2; (+) strand; PAM type: NRG; PAM sequence: GGG
agactaataaaatggaaaat

SEQ ID NO: 175208 - DNA, 20 bp, Artificial Sequence
  Description of Artificial Sequence: Synthetic oligonucleotide
  Target: LAMA2; (+) strand; PAM type: NRG; PAM sequence: GGG
gactaataaaatggaaaatg

SEQ ID NO: 175209 - DNA, 20 bp, Artificial Sequence
  Description of Artificial Sequence: Synthetic oligonucleotide
  Target: LAMA2; (+) strand; PAM type: NRG; PAM sequence: CAG
taataaaatggaaaatgggg

SEQ ID NO: 175210 - DNA, 20 bp, Artificial Sequence
  Description of Artificial Sequence: Synthetic oligonucleotide
  Target: LAMA2; (+) strand; PAM type: NRG; PAM sequence: AGG
aataaaatggaaaatggggc

SEQ ID NO: 175211 - DNA, 20 bp, Artificial Sequence
  Description of Artificial Sequence: Synthetic oligonucleotide
  Target: LAMA2; (+) strand; PAM type: NRG; PAM sequence: TAG
aaaatggaaaatggggcagg

SEQ ID NO: 175212 - DNA, 20 bp, Artificial Sequence
  Description of Artificial Sequence: Synthetic oligonucleotide
  Target: LAMA2; (+) strand; PAM type: NRG; PAM sequence: CAG
tggaaaatggggcaggtagt

SEQ ID NO: 175213 - DNA, 20 bp, Artificial Sequence
  Description of Artificial Sequence: Synthetic oligonucleotide
  Target: LAMA2; (+) strand; PAM type: NRG; PAM sequence: AAG
ggtagtcagttatttaataa

SEQ ID NO: 175214 - DNA, 20 bp, Artificial Sequence
  Description of Artificial Sequence: Synthetic oligonucleotide
  Target: LAMA2; (+) strand; PAM type: NRG; PAM sequence: TGG
tttttaatattcttgaattc

SEQ ID NO: 175215 - DNA, 20 bp, Artificial Sequence
  Description of Artificial Sequence: Synthetic oligonucleotide
  Target: LAMA2; (+) strand; PAM type: NRG; PAM sequence: GGG
ttttaatattcttgaattct

SEQ ID NO: 175216 - DNA, 20 bp, Artificial Sequence
  Description of Artificial Sequence: Synthetic oligonucleotide
  Target: LAMA2; (+) strand; PAM type: NRG; PAM sequence: GGG
tttaatattcttgaattctg

SEQ ID NO: 175217 - DNA, 20 bp, Artificial Sequence
  Description of Artificial Sequence: Synthetic oligonucleotide
  Target: LAMA2; (+) strand; PAM type: NRG; PAM sequence: GAG
taatattcttgaattctggg

SEQ ID NO: 175218 - DNA, 20 bp, Artificial Sequence
  Description of Artificial Sequence: Synthetic oligonucleotide
  Target: LAMA2; (+) strand; PAM type: NRG; PAM sequence: AGG
aatattcttgaattctgggg

SEQ ID NO: 175219 - DNA, 20 bp, Artificial Sequence
  Description of Artificial Sequence: Synthetic oligonucleotide
  Target: LAMA2; (+) strand; PAM type: NRG; PAM sequence: AAG
ttcttgaattctggggagga

SEQ ID NO: 175220 - DNA, 20 bp, Artificial Sequence
  Description of Artificial Sequence: Synthetic oligonucleotide
  Target: LAMA2; (+) strand; PAM type: NRG; PAM sequence: AAG
attctggggaggaaagcaaa

SEQ ID NO: 175221 - DNA, 20 bp, Artificial Sequence
  Description of Artificial Sequence: Synthetic oligonucleotide
  Target: LAMA2; (+) strand; PAM type: NRG; PAM sequence: TAG
agcaaaaagctaattaactt

SEQ ID NO: 175222 - DNA, 20 bp, Artificial Sequence
  Description of Artificial Sequence: Synthetic oligonucleotide
  Target: LAMA2; (+) strand; PAM type: NRG; PAM sequence: AAG
aattaactttagttttcact

SEQ ID NO: 175223 - DNA, 20 bp, Artificial Sequence
  Description of Artificial Sequence: Synthetic oligonucleotide
  Target: LAMA2; (+) strand; PAM type: NRG; PAM sequence: TGG
ttaaacattgaaaaaaaatc

SEQ ID NO: 175224 - DNA, 20 bp, Artificial Sequence
  Description of Artificial Sequence: Synthetic oligonucleotide
  Target: LAMA2; (+) strand; PAM type: NRG; PAM sequence: GAG
aaataaaattgacaatattc

SEQ ID NO: 175225 - DNA, 20 bp, Artificial Sequence
  Description of Artificial Sequence: Synthetic oligonucleotide
  Target: LAMA2; (+) strand; PAM type: NRG; PAM sequence: CAG
ttgacaatattcgagttctc

SEQ ID NO: 175226 - DNA, 20 bp, Artificial Sequence
  Description of Artificial Sequence: Synthetic oligonucleotide
  Target: LAMA2; (+) strand; PAM type: NRG; PAM sequence: GAG
gacaatattcgagttctcca

SEQ ID NO: 175227 - DNA, 20 bp, Artificial Sequence
  Description of Artificial Sequence: Synthetic oligonucleotide
  Target: LAMA2; (+) strand; PAM type: NRG; PAM sequence: CAG
attcgagttctccagagaaa

SEQ ID NO: 175228 - DNA, 20 bp, Artificial Sequence
  Description of Artificial Sequence: Synthetic oligonucleotide
  Target: LAMA2; (+) strand; PAM type: NRG; PAM sequence: TGG
tccagagaaacagaacaaat

SEQ ID NO: 175229 - DNA, 20 bp, Artificial Sequence
  Description of Artificial Sequence: Synthetic oligonucleotide
  Target: LAMA2; (+) strand; PAM type: NRG; PAM sequence: AAG
agagaaacagaacaaattgg

SEQ ID NO: 175230 - DNA, 20 bp, Artificial Sequence
  Description of Artificial Sequence: Synthetic oligonucleotide
  Target: LAMA2; (+) strand; PAM type: NRG; PAM sequence: CAG
attggaagtgtatatataca

SEQ ID NO: 175231 - DNA, 20 bp, Artificial Sequence
  Description of Artificial Sequence: Synthetic oligonucleotide
  Target: LAMA2; (+) strand; PAM type: NRG; PAM sequence: AAG
cagatatattatatatttta

SEQ ID NO: 175232 - DNA, 20 bp, Artificial Sequence
  Description of Artificial Sequence: Synthetic oligonucleotide
  Target: LAMA2; (+) strand; PAM type: NRG; PAM sequence: GAG
attttaaagaattgactcat

SEQ ID NO: 175233 - DNA, 20 bp, Artificial Sequence
  Description of Artificial Sequence: Synthetic oligonucleotide
  Target: LAMA2; (+) strand; PAM type: NRG; PAM sequence: TGG
agaattgactcatgagattg

SEQ ID NO: 175234 - DNA, 20 bp, Artificial Sequence
  Description of Artificial Sequence: Synthetic oligonucleotide
  Target: LAMA2; (+) strand; PAM type: NRG; PAM sequence: GGG
gaattgactcatgagattgt

SEQ ID NO: 175235 - DNA, 20 bp, Artificial Sequence
  Description of Artificial Sequence: Synthetic oligonucleotide
  Target: LAMA2; (+) strand; PAM type: NRG; PAM sequence: GGG
aattgactcatgagattgtg

SEQ ID NO: 175236 - DNA, 20 bp, Artificial Sequence
  Description of Artificial Sequence: Synthetic oligonucleotide
  Target: LAMA2; (+) strand; PAM type: NRG; PAM sequence: TGG
actcatgagattgtggggtc

SEQ ID NO: 175237 - DNA, 20 bp, Artificial Sequence
  Description of Artificial Sequence: Synthetic oligonucleotide
  Target: LAMA2; (+) strand; PAM type: NRG; PAM sequence: CAG
gagattgtggggtctggctg

SEQ ID NO: 175238 - DNA, 20 bp, Artificial Sequence
  Description of Artificial Sequence: Synthetic oligonucleotide
  Target: LAMA2; (+) strand; PAM type: NRG; PAM sequence: AGG
agattgtggggtctggctgc

SEQ ID NO: 175239 - DNA, 20 bp, Artificial Sequence
  Description of Artificial Sequence: Synthetic oligonucleotide
  Target: LAMA2; (+) strand; PAM type: NRG; PAM sequence: GGG
gattgtggggtctggctgca

SEQ ID NO: 175240 - DNA, 20 bp, Artificial Sequence
  Description of Artificial Sequence: Synthetic oligonucleotide
  Target: LAMA2; (+) strand; PAM type: NRG; PAM sequence: TAG
tggggtctggctgcagggaa

SEQ ID NO: 175241 - DNA, 20 bp, Artificial Sequence
  Description of Artificial Sequence: Synthetic oligonucleotide
  Target: LAMA2; (+) strand; PAM type: NRG; PAM sequence: AGG
ggggtctggctgcagggaat

SEQ ID NO: 175242 - DNA, 20 bp, Artificial Sequence
  Description of Artificial Sequence: Synthetic oligonucleotide
  Target: LAMA2; (+) strand; PAM type: NRG; PAM sequence: AAG
atattgccgtcttgaatcca

SEQ ID NO: 175243 - DNA, 20 bp, Artificial Sequence
  Description of Artificial Sequence: Synthetic oligonucleotide
  Target: LAMA2; (+) strand; PAM type: NRG; PAM sequence: AGG
tattgccgtcttgaatccaa

SEQ ID NO: 175244 - DNA, 20 bp, Artificial Sequence
  Description of Artificial Sequence: Synthetic oligonucleotide
  Target: LAMA2; (+) strand; PAM type: NRG; PAM sequence: CAG
tgccgtcttgaatccaaagg

SEQ ID NO: 175245 - DNA, 20 bp, Artificial Sequence
  Description of Artificial Sequence: Synthetic oligonucleotide
  Target: LAMA2; (+) strand; PAM type: NRG; PAM sequence: TGG
tcttgaatccaaaggcagtt

SEQ ID NO: 175246 - DNA, 20 bp, Artificial Sequence
  Description of Artificial Sequence: Synthetic oligonucleotide
  Target: LAMA2; (+) strand; PAM type: NRG; PAM sequence: GAG
ttgaatccaaaggcagtttg

SEQ ID NO: 175247 - DNA, 20 bp, Artificial Sequence
  Description of Artificial Sequence: Synthetic oligonucleotide
  Target: LAMA2; (+) strand; PAM type: NRG; PAM sequence: AGG
tgaatccaaaggcagtttgg

SEQ ID NO: 175248 - DNA, 20 bp, Artificial Sequence
  Description of Artificial Sequence: Synthetic oligonucleotide
  Target: LAMA2; (+) strand; PAM type: NRG; PAM sequence: CAG
atccaaaggcagtttggagg

SEQ ID NO: 175249 - DNA, 20 bp, Artificial Sequence
  Description of Artificial Sequence: Synthetic oligonucleotide
  Target: LAMA2; (+) strand; PAM type: NRG; PAM sequence: CAG
aggcagaatttcttcttctt

SEQ ID NO: 175250 - DNA, 20 bp, Artificial Sequence
  Description of Artificial Sequence: Synthetic oligonucleotide
  Target: LAMA2; (+) strand; PAM type: NRG; PAM sequence: AGG
ggcagaatttcttcttcttc

SEQ ID NO: 175251 - DNA, 20 bp, Artificial Sequence
  Description of Artificial Sequence: Synthetic oligonucleotide
  Target: LAMA2; (+) strand; PAM type: NRG; PAM sequence: GGG
gcagaatttcttcttcttca

SEQ ID NO: 175252 - DNA, 20 bp, Artificial Sequence
  Description of Artificial Sequence: Synthetic oligonucleotide
  Target: LAMA2; (+) strand; PAM type: NRG; PAM sequence: GGG
cagaatttcttcttcttcag

SEQ ID NO: 175253 - DNA, 20 bp, Artificial Sequence
  Description of Artificial Sequence: Synthetic oligonucleotide
  Target: LAMA2; (+) strand; PAM type: NRG; PAM sequence: CAG
tcttcttcttcaggggacct

SEQ ID NO: 175254 - DNA, 20 bp, Artificial Sequence
  Description of Artificial Sequence: Synthetic oligonucleotide
  Target: LAMA2; (+) strand; PAM type: NRG; PAM sequence: AAG
ggacctcagtaattcttctt

SEQ ID NO: 175255 - DNA, 20 bp, Artificial Sequence
  Description of Artificial Sequence: Synthetic oligonucleotide
  Target: LAMA2; (+) strand; PAM type: NRG; PAM sequence: AGG
gacctcagtaattcttctta

SEQ ID NO: 175256 - DNA, 20 bp, Artificial Sequence
  Description of Artificial Sequence: Synthetic oligonucleotide
  Target: LAMA2; (+) strand; PAM type: NRG; PAM sequence: TGG
ttcttaaggcctctgactgt

SEQ ID NO: 175257 - DNA, 20 bp, Artificial Sequence
  Description of Artificial Sequence: Synthetic oligonucleotide
  Target: LAMA2; (+) strand; PAM type: NRG; PAM sequence: GAG
aaggcctctgactgttggat

SEQ ID NO: 175258 - DNA, 20 bp, Artificial Sequence
  Description of Artificial Sequence: Synthetic oligonucleotide
  Target: LAMA2; (+) strand; PAM type: NRG; PAM sequence: AGG
aggcctctgactgttggatg

SEQ ID NO: 175259 - DNA, 20 bp, Artificial Sequence
  Description of Artificial Sequence: Synthetic oligonucleotide
  Target: LAMA2; (+) strand; PAM type: NRG; PAM sequence: TGG
gatgaggttccccaacatca

SEQ ID NO: 175260 - DNA, 20 bp, Artificial Sequence
  Description of Artificial Sequence: Synthetic oligonucleotide
  Target: LAMA2; (+) strand; PAM type: NRG; PAM sequence: GAG
tgaggttccccaacatcatg

SEQ ID NO: 175261 - DNA, 20 bp, Artificial Sequence
  Description of Artificial Sequence: Synthetic oligonucleotide
  Target: LAMA2; (+) strand; PAM type: NRG; PAM sequence: AGG
gaggttccccaacatcatgg

SEQ ID NO: 175262 - DNA, 20 bp, Artificial Sequence
  Description of Artificial Sequence: Synthetic oligonucleotide
  Target: LAMA2; (+) strand; PAM type: NRG; PAM sequence: GGG
aggttccccaacatcatgga

SEQ ID NO: 175263 - DNA, 20 bp, Artificial Sequence
  Description of Artificial Sequence: Synthetic oligonucleotide
  Target: LAMA2; (+) strand; PAM type: NRG; PAM sequence: AAG
agggtgacctgctttactca

SEQ ID NO: 175264 - DNA, 20 bp, Artificial Sequence
  Description of Artificial Sequence: Synthetic oligonucleotide
  Target: LAMA2; (+) strand; PAM type: NRG; PAM sequence: CAG
acatctaaaaaatacattca

SEQ ID NO: 175265 - DNA, 20 bp, Artificial Sequence
  Description of Artificial Sequence: Synthetic oligonucleotide
  Target: LAMA2; (+) strand; PAM type: NRG; PAM sequence: TAG
aatacattcacagcaacatc

SEQ ID NO: 175266 - DNA, 20 bp, Artificial Sequence
  Description of Artificial Sequence: Synthetic oligonucleotide
  Target: LAMA2; (+) strand; PAM type: NRG; PAM sequence: AAG
ctgctgttttaccaaaaacc

SEQ ID NO: 175267 - DNA, 20 bp, Artificial Sequence
  Description of Artificial Sequence: Synthetic oligonucleotide
  Target: LAMA2; (+) strand; PAM type: NRG; PAM sequence: TAG
ttaccaaaaaccaagtacca

SEQ ID NO: 175268 - DNA, 20 bp, Artificial Sequence
  Description of Artificial Sequence: Synthetic oligonucleotide
  Target: LAMA2; (+) strand; PAM type: NRG; PAM sequence: TAG
aaaaaccaagtaccatagcc

SEQ ID NO: 175269 - DNA, 20 bp, Artificial Sequence
  Description of Artificial Sequence: Synthetic oligonucleotide
  Target: LAMA2; (+) strand; PAM type: NRG; PAM sequence: AAG
ccaagtaccatagcctagcc

SEQ ID NO: 175270 - DNA, 20 bp, Artificial Sequence
  Description of Artificial Sequence: Synthetic oligonucleotide
  Target: LAMA2; (+) strand; PAM type: NRG; PAM sequence: TGG
agtaccatagcctagccaag

SEQ ID NO: 175271 - DNA, 20 bp, Artificial Sequence
  Description of Artificial Sequence: Synthetic oligonucleotide
  Target: LAMA2; (+) strand; PAM type: NRG; PAM sequence: CAG
tataaattaacgatcacaaa

SEQ ID NO: 175272 - DNA, 20 bp, Artificial Sequence
  Description of Artificial Sequence: Synthetic oligonucleotide
  Target: LAMA2; (+) strand; PAM type: NRG; PAM sequence: AAG
aacagctaaacattccaaac

SEQ ID NO: 175273 - DNA, 20 bp, Artificial Sequence
  Description of Artificial Sequence: Synthetic oligonucleotide
  Target: LAMA2; (+) strand; PAM type: NRG; PAM sequence: CAG
agctaaacattccaaacaag

SEQ ID NO: 175274 - DNA, 20 bp, Artificial Sequence
  Description of Artificial Sequence: Synthetic oligonucleotide
  Target: LAMA2; (+) strand; PAM type: NRG; PAM sequence: CAG
aaacattccaaacaagcaga

SEQ ID NO: 175275 - DNA, 20 bp, Artificial Sequence
  Description of Artificial Sequence: Synthetic oligonucleotide
  Target: LAMA2; (+) strand; PAM type: NRG; PAM sequence: GAG
acattccaaacaagcagaca

SEQ ID NO: 175276 - DNA, 20 bp, Artificial Sequence
  Description of Artificial Sequence: Synthetic oligonucleotide
  Target: LAMA2; (+) strand; PAM type: NRG; PAM sequence: GAG
attccaaacaagcagacaga

SEQ ID NO: 175277 - DNA, 20 bp, Artificial Sequence
  Description of Artificial Sequence: Synthetic oligonucleotide
  Target: LAMA2; (+) strand; PAM type: NRG; PAM sequence: GAG
tccaaacaagcagacagaga

SEQ ID NO: 175278 - DNA, 20 bp, Artificial Sequence
  Description of Artificial Sequence: Synthetic oligonucleotide
  Target: LAMA2; (+) strand; PAM type: NRG; PAM sequence: AAG
gacagagagagaaaaaaata

SEQ ID NO: 175279 - DNA, 20 bp, Artificial Sequence
  Description of Artificial Sequence: Synthetic oligonucleotide
  Target: LAMA2; (+) strand; PAM type: NRG; PAM sequence: AAG
gaaaaaaataaagaaatgtg

SEQ ID NO: 175280 - DNA, 20 bp, Artificial Sequence
  Description of Artificial Sequence: Synthetic oligonucleotide
  Target: LAMA2; (+) strand; PAM type: NRG; PAM sequence: AGG
aaaaaaataaagaaatgtga

SEQ ID NO: 175281 - DNA, 20 bp, Artificial Sequence
  Description of Artificial Sequence: Synthetic oligonucleotide
  Target: LAMA2; (+) strand; PAM type: NRG; PAM sequence: GGG
aaaaaataaagaaatgtgaa

SEQ ID NO: 175282 - DNA, 20 bp, Artificial Sequence
  Description of Artificial Sequence: Synthetic oligonucleotide
  Target: LAMA2; (+) strand; PAM type: NRG; PAM sequence: GGG
aaaaataaagaaatgtgaag

SEQ ID NO: 175283 - DNA, 20 bp, Artificial Sequence
  Description of Artificial Sequence: Synthetic oligonucleotide
  Target: LAMA2; (+) strand; PAM type: NRG; PAM sequence: GAG
aaataaagaaatgtgaaggg

SEQ ID NO: 175284 - DNA, 20 bp, Artificial Sequence
  Description of Artificial Sequence: Synthetic oligonucleotide
  Target: LAMA2; (+) strand; PAM type: NRG; PAM sequence: AGG
aataaagaaatgtgaagggg

SEQ ID NO: 175285 - DNA, 20 bp, Artificial Sequence
  Description of Artificial Sequence: Synthetic oligonucleotide
  Target: LAMA2; (+) strand; PAM type: NRG; PAM sequence: GAG
taaagaaatgtgaaggggag

SEQ ID NO: 175286 - DNA, 20 bp, Artificial Sequence
  Description of Artificial Sequence: Synthetic oligonucleotide
  Target: LAMA2; (+) strand; PAM type: NRG; PAM sequence: TGG
ggagaattttcaatcaattc

SEQ ID NO: 175287 - DNA, 20 bp, Artificial Sequence
  Description of Artificial Sequence: Synthetic oligonucleotide
  Target: LAMA2; (+) strand; PAM type: NRG; PAM sequence: AAG
attttcaatcaattctggaa

SEQ ID NO: 175288 - DNA, 20 bp, Artificial Sequence
  Description of Artificial Sequence: Synthetic oligonucleotide
  Target: LAMA2; (+) strand; PAM type: NRG; PAM sequence: AAG
aattctggaaaagacaaaaa

SEQ ID NO: 175289 - DNA, 20 bp, Artificial Sequence
  Description of Artificial Sequence: Synthetic oligonucleotide
  Target: LAMA2; (+) strand; PAM type: NRG; PAM sequence: GAG
ttctggaaaagacaaaaaaa

SEQ ID NO: 175290 - DNA, 20 bp, Artificial Sequence
  Description of Artificial Sequence: Synthetic oligonucleotide
  Target: LAMA2; (+) strand; PAM type: NRG; PAM sequence: AAG
aaaagacaaaaaaagagaaa

SEQ ID NO: 175291 - DNA, 20 bp, Artificial Sequence
  Description of Artificial Sequence: Synthetic oligonucleotide
  Target: LAMA2; (+) strand; PAM type: NRG; PAM sequence: GAG
aagacaaaaaaagagaaaaa

SEQ ID NO: 175292 - DNA, 20 bp, Artificial Sequence
  Description of Artificial Sequence: Synthetic oligonucleotide
  Target: LAMA2; (+) strand; PAM type: NRG; PAM sequence: TGG
atcataaatataaaatataa

SEQ ID NO: 175293 - DNA, 20 bp, Artificial Sequence
  Description of Artificial Sequence: Synthetic oligonucleotide
  Target: LAMA2; (+) strand; PAM type: NRG; PAM sequence: CAG
ttaaatccatatacaacaat

SEQ ID NO: 175294 - DNA, 20 bp, Artificial Sequence
  Description of Artificial Sequence: Synthetic oligonucleotide
  Target: LAMA2; (+) strand; PAM type: NRG; PAM sequence: AGG
taaatccatatacaacaatc

SEQ ID NO: 175295 - DNA, 20 bp, Artificial Sequence
  Description of Artificial Sequence: Synthetic oligonucleotide
  Target: LAMA2; (+) strand; PAM type: NRG; PAM sequence: GGG
aaatccatatacaacaatca

SEQ ID NO: 175296 - DNA, 20 bp, Artificial Sequence
  Description of Artificial Sequence: Synthetic oligonucleotide
  Target: LAMA2; (+) strand; PAM type: NRG; PAM sequence: CAG
acaatcagggtaattatcac

SEQ ID NO: 175297 - DNA, 20 bp, Artificial Sequence
  Description of Artificial Sequence: Synthetic oligonucleotide
  Target: LAMA2; (+) strand; PAM type: NRG; PAM sequence: AAG
taattatcaccagctgcctc

SEQ ID NO: 175298 - DNA, 20 bp, Artificial Sequence
  Description of Artificial Sequence: Synthetic oligonucleotide
  Target: LAMA2; (+) strand; PAM type: NRG; PAM sequence: TGG
acccctgaaatctcacatga

SEQ ID NO: 175299 - DNA, 20 bp, Artificial Sequence
  Description of Artificial Sequence: Synthetic oligonucleotide
  Target: LAMA2; (+) strand; PAM type: NRG; PAM sequence: AAG
tcacatgatggacataattc

SEQ ID NO: 175300 - DNA, 20 bp, Artificial Sequence
  Description of Artificial Sequence: Synthetic oligonucleotide
  Target: LAMA2; (+) strand; PAM type: NRG; PAM sequence: GAG
ctcacatcacaacacaatgt

SEQ ID NO: 175301 - DNA, 20 bp, Artificial Sequence
  Description of Artificial Sequence: Synthetic oligonucleotide
  Target: LAMA2; (+) strand; PAM type: NRG; PAM sequence: TAG
ataccaccttttgcatcttg

SEQ ID NO: 175302 - DNA, 20 bp, Artificial Sequence
  Description of Artificial Sequence: Synthetic oligonucleotide
  Target: LAMA2; (+) strand; PAM type: NRG; PAM sequence: CAG
catcttgtagtgacaccata

SEQ ID NO: 175303 - DNA, 20 bp, Artificial Sequence
  Description of Artificial Sequence: Synthetic oligonucleotide
  Target: LAMA2; (+) strand; PAM type: NRG; PAM sequence: TAG
tgtagtgacaccatacagtg

SEQ ID NO: 175304 - DNA, 20 bp, Artificial Sequence
  Description of Artificial Sequence: Synthetic oligonucleotide
  Target: LAMA2; (+) strand; PAM type: NRG; PAM sequence: AAG
caccatacagtgtagcctcc

SEQ ID NO: 175305 - DNA, 20 bp, Artificial Sequence
  Description of Artificial Sequence: Synthetic oligonucleotide
  Target: LAMA2; (+) strand; PAM type: NRG; PAM sequence: AGG
accatacagtgtagcctcca

SEQ ID NO: 175306 - DNA, 20 bp, Artificial Sequence
  Description of Artificial Sequence: Synthetic oligonucleotide
  Target: LAMA2; (+) strand; PAM type: NRG; PAM sequence: CAG
atacagtgtagcctccaagg

SEQ ID NO: 175307 - DNA, 20 bp, Artificial Sequence
  Description of Artificial Sequence: Synthetic oligonucleotide
  Target: LAMA2; (+) strand; PAM type: NRG; PAM sequence: AGG
tacagtgtagcctccaaggc

SEQ ID NO: 175308 - DNA, 20 bp, Artificial Sequence
  Description of Artificial Sequence: Synthetic oligonucleotide
  Target: LAMA2; (+) strand; PAM type: NRG; PAM sequence: GGG
acagtgtagcctccaaggca

SEQ ID NO: 175309 - DNA, 20 bp, Artificial Sequence
  Description of Artificial Sequence: Synthetic oligonucleotide
  Target: LAMA2; (+) strand; PAM type: NRG; PAM sequence: AAG
gtgtagcctccaaggcaggg

SEQ ID NO: 175310 - DNA, 20 bp, Artificial Sequence
  Description of Artificial Sequence: Synthetic oligonucleotide
  Target: LAMA2; (+) strand; PAM type: NRG; PAM sequence: GAG
gtagcctccaaggcagggaa

SEQ ID NO: 175311 - DNA, 20 bp, Artificial Sequence
  Description of Artificial Sequence: Synthetic oligonucleotide
  Target: LAMA2; (+) strand; PAM type: NRG; PAM sequence: AAG
ggcagggaagagaaaaaatg

SEQ ID NO: 175312 - DNA, 20 bp, Artificial Sequence
  Description of Artificial Sequence: Synthetic oligonucleotide
  Target: LAMA2; (+) strand; PAM type: NRG; PAM sequence: GAG
cagggaagagaaaaaatgaa

SEQ ID NO: 175313 - DNA, 20 bp, Artificial Sequence
  Description of Artificial Sequence: Synthetic oligonucleotide
  Target: LAMA2; (+) strand; PAM type: NRG; PAM sequence: TAG
agaaaaaatgaagagacatg

SEQ ID NO: 175314 - DNA, 20 bp, Artificial Sequence
  Description of Artificial Sequence: Synthetic oligonucleotide
  Target: LAMA2; (+) strand; PAM type: NRG; PAM sequence: AGG
gaaaaaatgaagagacatgt

SEQ ID NO: 175315 - DNA, 20 bp, Artificial Sequence
  Description of Artificial Sequence: Synthetic oligonucleotide
  Target: LAMA2; (+) strand; PAM type: NRG; PAM sequence: TGG
catgtaggcccctaccatac

SEQ ID NO: 175316 - DNA, 20 bp, Artificial Sequence
  Description of Artificial Sequence: Synthetic oligonucleotide
  Target: LAMA2; (+) strand; PAM type: NRG; PAM sequence: AAG
ccctaccatactggctcatg

SEQ ID NO: 175317 - DNA, 20 bp, Artificial Sequence
  Description of Artificial Sequence: Synthetic oligonucleotide
  Target: LAMA2; (+) strand; PAM type: NRG; PAM sequence: TGG
ccatactggctcatgaagcc

SEQ ID NO: 175318 - DNA, 20 bp, Artificial Sequence
  Description of Artificial Sequence: Synthetic oligonucleotide
  Target: LAMA2; (+) strand; PAM type: NRG; PAM sequence: TGG
catgaagcctggaccacgtc

SEQ ID NO: 175319 - DNA, 20 bp, Artificial Sequence
  Description of Artificial Sequence: Synthetic oligonucleotide
  Target: LAMA2; (+) strand; PAM type: NRG; PAM sequence: GAG
gcctggaccacgtctggtct

SEQ ID NO: 175320 - DNA, 20 bp, Artificial Sequence
  Description of Artificial Sequence: Synthetic oligonucleotide
  Target: LAMA2; (+) strand; PAM type: NRG; PAM sequence: CAG
gtctggtctgagtcattgac

SEQ ID NO: 175321 - DNA, 20 bp, Artificial Sequence
  Description of Artificial Sequence: Synthetic oligonucleotide
  Target: LAMA2; (+) strand; PAM type: NRG; PAM sequence: AAG
tggtctgagtcattgaccag

SEQ ID NO: 175322 - DNA, 20 bp, Artificial Sequence
  Description of Artificial Sequence: Synthetic oligonucleotide
  Target: LAMA2; (+) strand; PAM type: NRG; PAM sequence: TAG
tctgagtcattgaccagaag

SEQ ID NO: 175323 - DNA, 20 bp, Artificial Sequence
  Description of Artificial Sequence: Synthetic oligonucleotide
  Target: LAMA2; (+) strand; PAM type: NRG; PAM sequence: AAG
cagaagtagccgtgtgcccc

SEQ ID NO: 175324 - DNA, 20 bp, Artificial Sequence
  Description of Artificial Sequence: Synthetic oligonucleotide
  Target: LAMA2; (+) strand; PAM type: NRG; PAM sequence: AAG
gtgtgccccaagctaactgt

SEQ ID NO: 175325 - DNA, 20 bp, Artificial Sequence
  Description of Artificial Sequence: Synthetic oligonucleotide
  Target: LAMA2; (+) strand; PAM type: NRG; PAM sequence: AGG
tgtgccccaagctaactgta

SEQ ID NO: 175326 - DNA, 20 bp, Artificial Sequence
  Description of Artificial Sequence: Synthetic oligonucleotide
  Target: LAMA2; (+) strand; PAM type: NRG; PAM sequence: GGG
gtgccccaagctaactgtaa

SEQ ID NO: 175327 - DNA, 20 bp, Artificial Sequence
  Description of Artificial Sequence: Synthetic oligonucleotide
  Target: LAMA2; (+) strand; PAM type: NRG; PAM sequence: GAG
gccccaagctaactgtaagg

SEQ ID NO: 175328 - DNA, 20 bp, Artificial Sequence
  Description of Artificial Sequence: Synthetic oligonucleotide
  Target: LAMA2; (+) strand; PAM type: NRG; PAM sequence: AGG
ccccaagctaactgtaaggg

SEQ ID NO: 175329 - DNA, 20 bp, Artificial Sequence
  Description of Artificial Sequence: Synthetic oligonucleotide
  Target: LAMA2; (+) strand; PAM type: NRG; PAM sequence: TGG
agctaactgtaagggaggtc

SEQ ID NO: 175330 - DNA, 20 bp, Artificial Sequence
  Description of Artificial Sequence: Synthetic oligonucleotide
  Target: LAMA2; (+) strand; PAM type: NRG; PAM sequence: AAG
actgtaagggaggtctggaa

SEQ ID NO: 175331 - DNA, 20 bp, Artificial Sequence
  Description of Artificial Sequence: Synthetic oligonucleotide
  Target: LAMA2; (+) strand; PAM type: NRG; PAM sequence: TAG
gtaagggaggtctggaaaag

SEQ ID NO: 175332 - DNA, 20 bp, Artificial Sequence
  Description of Artificial Sequence: Synthetic oligonucleotide
  Target: LAMA2; (+) strand; PAM type: NRG; PAM sequence: AGG
taagggaggtctggaaaagt

SEQ ID NO: 175333 - DNA, 20 bp, Artificial Sequence
  Description of Artificial Sequence: Synthetic oligonucleotide
  Target: LAMA2; (+) strand; PAM type: NRG; PAM sequence: GAG
agggaggtctggaaaagtag

SEQ ID NO: 175334 - DNA, 20 bp, Artificial Sequence
  Description of Artificial Sequence: Synthetic oligonucleotide
  Target: LAMA2; (+) strand; PAM type: NRG; PAM sequence: AGG
gggaggtctggaaaagtagg

SEQ ID NO: 175335 - DNA, 20 bp, Artificial Sequence
  Description of Artificial Sequence: Synthetic oligonucleotide
  Target: LAMA2; (+) strand; PAM type: NRG; PAM sequence: TAG
ctggaaaagtaggaggcaca

SEQ ID NO: 175336 - DNA, 20 bp, Artificial Sequence
  Description of Artificial Sequence: Synthetic oligonucleotide
  Target: LAMA2; (+) strand; PAM type: NRG; PAM sequence: AGG
tggaaaagtaggaggcacat

SEQ ID NO: 175337 - DNA, 20 bp, Artificial Sequence
  Description of Artificial Sequence: Synthetic oligonucleotide
  Target: LAMA2; (+) strand; PAM type: NRG; PAM sequence: GAG
aggcacataggatatttgat

SEQ ID NO: 175338 - DNA, 20 bp, Artificial Sequence
  Description of Artificial Sequence: Synthetic oligonucleotide
  Target: LAMA2; (+) strand; PAM type: NRG; PAM sequence: CAG
agcactaactatctctgctt

SEQ ID NO: 175339 - DNA, 20 bp, Artificial Sequence
  Description of Artificial Sequence: Synthetic oligonucleotide
  Target: LAMA2; (+) strand; PAM type: NRG; PAM sequence: AGG
gcactaactatctctgcttc

SEQ ID NO: 175340 - DNA, 20 bp, Artificial Sequence
  Description of Artificial Sequence: Synthetic oligonucleotide
  Target: LAMA2; (+) strand; PAM type: NRG; PAM sequence: CAG
aatgcaaacattaaaattga

SEQ ID NO: 175341 - DNA, 20 bp, Artificial Sequence
  Description of Artificial Sequence: Synthetic oligonucleotide
  Target: LAMA2; (+) strand; PAM type: NRG; PAM sequence: AGG
atgcaaacattaaaattgac

SEQ ID NO: 175342 - DNA, 20 bp, Artificial Sequence
  Description of Artificial Sequence: Synthetic oligonucleotide
  Target: LAMA2; (+) strand; PAM type: NRG; PAM sequence: TGG
ggttactatgattttcatat

SEQ ID NO: 175343 - DNA, 20 bp, Artificial Sequence
  Description of Artificial Sequence: Synthetic oligonucleotide
  Target: LAMA2; (+) strand; PAM type: NRG; PAM sequence: AAG
ggattaaaatgtctaaaaca

SEQ ID NO: 175344 - DNA, 20 bp, Artificial Sequence
  Description of Artificial Sequence: Synthetic oligonucleotide
  Target: LAMA2; (+) strand; PAM type: NRG; PAM sequence: AGG
gattaaaatgtctaaaacaa

SEQ ID NO: 175345 - DNA, 20 bp, Artificial Sequence
  Description of Artificial Sequence: Synthetic oligonucleotide
  Target: LAMA2; (+) strand; PAM type: NRG; PAM sequence: GGG
attaaaatgtctaaaacaaa

SEQ ID NO: 175346 - DNA, 20 bp, Artificial Sequence
  Description of Artificial Sequence: Synthetic oligonucleotide
  Target: LAMA2; (+) strand; PAM type: NRG; PAM sequence: TAG
tacacaaatactgcaaatct

SEQ ID NO: 175347 - DNA, 20 bp, Artificial Sequence
  Description of Artificial Sequence: Synthetic oligonucleotide
  Target: LAMA2; (+) strand; PAM type: NRG; PAM sequence: AGG
acacaaatactgcaaatctt

SEQ ID NO: 175348 - DNA, 20 bp, Artificial Sequence
  Description of Artificial Sequence: Synthetic oligonucleotide
  Target: LAMA2; (+) strand; PAM type: NRG; PAM sequence: GGG
cacaaatactgcaaatctta

SEQ ID NO: 175349 - DNA, 20 bp, Artificial Sequence
  Description of Artificial Sequence: Synthetic oligonucleotide
  Target: LAMA2; (+) strand; PAM type: NRG; PAM sequence: GGG
acaaatactgcaaatcttag

SEQ ID NO: 175350 - DNA, 20 bp, Artificial Sequence
  Description of Artificial Sequence: Synthetic oligonucleotide
  Target: LAMA2; (+) strand; PAM type: NRG; PAM sequence: CAG
tactgcaaatcttaggggaa

SEQ ID NO: 175351 - DNA, 20 bp, Artificial Sequence
  Description of Artificial Sequence: Synthetic oligonucleotide
  Target: LAMA2; (+) strand; PAM type: NRG; PAM sequence: AAG
gcaaatcttaggggaacaga

SEQ ID NO: 175352 - DNA, 20 bp, Artificial Sequence
  Description of Artificial Sequence: Synthetic oligonucleotide
  Target: LAMA2; (+) strand; PAM type: NRG; PAM sequence: GAG
ggaacagaaagactgaaaat

SEQ ID NO: 175353 - DNA, 20 bp, Artificial Sequence
  Description of Artificial Sequence: Synthetic oligonucleotide
  Target: LAMA2; (+) strand; PAM type: NRG; PAM sequence: GAG
aacagaaagactgaaaatga

SEQ ID NO: 175354 - DNA, 20 bp, Artificial Sequence
  Description of Artificial Sequence: Synthetic oligonucleotide
  Target: LAMA2; (+) strand; PAM type: NRG; PAM sequence: AAG
aaagactgaaaatgagagat

SEQ ID NO: 175355 - DNA, 20 bp, Artificial Sequence
  Description of Artificial Sequence: Synthetic oligonucleotide
  Target: LAMA2; (+) strand; PAM type: NRG; PAM sequence: CAG
tacactatgcaaactctaac

SEQ ID NO: 175356 - DNA, 20 bp, Artificial Sequence
  Description of Artificial Sequence: Synthetic oligonucleotide
  Target: LAMA2; (+) strand; PAM type: NRG; PAM sequence: AAG
actatgcaaactctaaccag

SEQ ID NO: 175357 - DNA, 20 bp, Artificial Sequence
  Description of Artificial Sequence: Synthetic oligonucleotide
  Target: LAMA2; (+) strand; PAM type: NRG; PAM sequence: AAG
tgcaaactctaaccagaaga

SEQ ID NO: 175358 - DNA, 20 bp, Artificial Sequence
  Description of Artificial Sequence: Synthetic oligonucleotide
  Target: LAMA2; (+) strand; PAM type: NRG; PAM sequence: TGG
aactctaaccagaagaaagc

SEQ ID NO: 175359 - DNA, 20 bp, Artificial Sequence
  Description of Artificial Sequence: Synthetic oligonucleotide
  Target: LAMA2; (+) strand; PAM type: NRG; PAM sequence: TAG
agctggtatgctaccattaa

SEQ ID NO: 175360 - DNA, 20 bp, Artificial Sequence
  Description of Artificial Sequence: Synthetic oligonucleotide
  Target: LAMA2; (+) strand; PAM type: NRG; PAM sequence: AAG
taccattaatagcaatcaaa

SEQ ID NO: 175361 - DNA, 20 bp, Artificial Sequence
  Description of Artificial Sequence: Synthetic oligonucleotide
  Target: LAMA2; (+) strand; PAM type: NRG; PAM sequence: AAG
aaagactttaatttttttaa

SEQ ID NO: 175362 - DNA, 20 bp, Artificial Sequence
  Description of Artificial Sequence: Synthetic oligonucleotide
  Target: LAMA2; (+) strand; PAM type: NRG; PAM sequence: AAG
atttttttaaaagaattatt

SEQ ID NO: 175363 - DNA, 20 bp, Artificial Sequence
  Description of Artificial Sequence: Synthetic oligonucleotide
  Target: LAMA2; (+) strand; PAM type: NRG; PAM sequence: AGG
tttttttaaaagaattatta

SEQ ID NO: 175364 - DNA, 20 bp, Artificial Sequence
  Description of Artificial Sequence: Synthetic oligonucleotide
  Target: LAMA2; (+) strand; PAM type: NRG; PAM sequence: AAG
taaaagaattattaaggaca

SEQ ID NO: 175365 - DNA, 20 bp, Artificial Sequence
  Description of Artificial Sequence: Synthetic oligonucleotide
  Target: LAMA2; (+) strand; PAM type: NRG; PAM sequence: AAG
agaattattaaggacaaaga

SEQ ID NO: 175366 - DNA, 20 bp, Artificial Sequence
  Description of Artificial Sequence: Synthetic oligonucleotide
  Target: LAMA2; (+) strand; PAM type: NRG; PAM sequence: TAG
gacaaagaaagtgatcatga

SEQ ID NO: 175367 - DNA, 20 bp, Artificial Sequence
  Description of Artificial Sequence: Synthetic oligonucleotide
  Target: LAMA2; (+) strand; PAM type: NRG; PAM sequence: AAG
aagtgatcatgatagaataa

SEQ ID NO: 175368 - DNA, 20 bp, Artificial Sequence
  Description of Artificial Sequence: Synthetic oligonucleotide
  Target: LAMA2; (+) strand; PAM type: NRG; PAM sequence: AGG
agtgatcatgatagaataaa

SEQ ID NO: 175369 - DNA, 20 bp, Artificial Sequence
  Description of Artificial Sequence: Synthetic oligonucleotide
  Target: LAMA2; (+) strand; PAM type: NRG; PAM sequence: AAG
catgatagaataaaaggaac

SEQ ID NO: 175370 - DNA, 20 bp, Artificial Sequence
  Description of Artificial Sequence: Synthetic oligonucleotide
  Target: LAMA2; (+) strand; PAM type: NRG; PAM sequence: AGG
atgatagaataaaaggaaca

SEQ ID NO: 175371 - DNA, 20 bp, Artificial Sequence
  Description of Artificial Sequence: Synthetic oligonucleotide
  Target: LAMA2; (+) strand; PAM type: NRG; PAM sequence: GAG
aaggaaaactaaaaaattat

SEQ ID NO: 175372 - DNA, 20 bp, Artificial Sequence
  Description of Artificial Sequence: Synthetic oligonucleotide
  Target: LAMA2; (+) strand; PAM type: NRG; PAM sequence: AAG
ctaaaaaattatgagcctgc

SEQ ID NO: 175373 - DNA, 20 bp, Artificial Sequence
  Description of Artificial Sequence: Synthetic oligonucleotide
  Target: LAMA2; (+) strand; PAM type: NRG; PAM sequence: AGG
taaaaaattatgagcctgca

SEQ ID NO: 175374 - DNA, 20 bp, Artificial Sequence
  Description of Artificial Sequence: Synthetic oligonucleotide
  Target: LAMA2; (+) strand; PAM type: NRG; PAM sequence: AAG
cctgcaaggtcataataaca

SEQ ID NO: 175375 - DNA, 20 bp, Artificial Sequence
  Description of Artificial Sequence: Synthetic oligonucleotide
  Target: LAMA2; (+) strand; PAM type: NRG; PAM sequence: TGG
ggtcataataacaaagccta

SEQ ID NO: 175376 - DNA, 20 bp, Artificial Sequence
  Description of Artificial Sequence: Synthetic oligonucleotide
  Target: LAMA2; (+) strand; PAM type: NRG; PAM sequence: AAG
acaaagcctatggataaata

SEQ ID NO: 175377 - DNA, 20 bp, Artificial Sequence
  Description of Artificial Sequence: Synthetic oligonucleotide
  Target: LAMA2; (+) strand; PAM type: NRG; PAM sequence: CAG
ataaataaagataaatatat

SEQ ID NO: 175378 - DNA, 20 bp, Artificial Sequence
  Description of Artificial Sequence: Synthetic oligonucleotide
  Target: LAMA2; (+) strand; PAM type: NRG; PAM sequence: GAG
aaagataaatatatcagaat

SEQ ID NO: 175379 - DNA, 20 bp, Artificial Sequence
  Description of Artificial Sequence: Synthetic oligonucleotide
  Target: LAMA2; (+) strand; PAM type: NRG; PAM sequence: TAG
gaacattttcatatatataa

SEQ ID NO: 175380 - DNA, 20 bp, Artificial Sequence
  Description of Artificial Sequence: Synthetic oligonucleotide
  Target: LAMA2; (+) strand; PAM type: NRG; PAM sequence: AGG
aacattttcatatatataat

SEQ ID NO: 175381 - DNA, 20 bp, Artificial Sequence
  Description of Artificial Sequence: Synthetic oligonucleotide
  Target: LAMA2; (+) strand; PAM type: NRG; PAM sequence: GGG
acattttcatatatataata

SEQ ID NO: 175382 - DNA, 20 bp, Artificial Sequence
  Description of Artificial Sequence: Synthetic oligonucleotide
  Target: LAMA2; (+) strand; PAM type: NRG; PAM sequence: AAG
tttaccatatctctcttaaa

SEQ ID NO: 175383 - DNA, 20 bp, Artificial Sequence
  Description of Artificial Sequence: Synthetic oligonucleotide
  Target: LAMA2; (+) strand; PAM type: NRG; PAM sequence: TAG
atatctctcttaaaaagtga

SEQ ID NO: 175384 - DNA, 20 bp, Artificial Sequence
  Description of Artificial Sequence: Synthetic oligonucleotide
  Target: LAMA2; (+) strand; PAM type: NRG; PAM sequence: AAG
ctcttaaaaagtgatagatc

SEQ ID NO: 175385 - DNA, 20 bp, Artificial Sequence
  Description of Artificial Sequence: Synthetic oligonucleotide
  Target: LAMA2; (+) strand; PAM type: NRG; PAM sequence: AAG
aaaaagtgatagatcaagca

SEQ ID NO: 175386 - DNA, 20 bp, Artificial Sequence
  Description of Artificial Sequence: Synthetic oligonucleotide
  Target: LAMA2; (+) strand; PAM type: NRG; PAM sequence: GAG
aaagtgatagatcaagcaaa

SEQ ID NO: 175387 - DNA, 20 bp, Artificial Sequence
  Description of Artificial Sequence: Synthetic oligonucleotide
  Target: LAMA2; (+) strand; PAM type: NRG; PAM sequence: CAG
atagatcaagcaaagagaca

SEQ ID NO: 175388 - DNA, 20 bp, Artificial Sequence
  Description of Artificial Sequence: Synthetic oligonucleotide
  Target: LAMA2; (+) strand; PAM type: NRG; PAM sequence: AAG
caaagagacacagattttaa

SEQ ID NO: 175389 - DNA, 20 bp, Artificial Sequence
  Description of Artificial Sequence: Synthetic oligonucleotide
  Target: LAMA2; (+) strand; PAM type: NRG; PAM sequence: AAG
attttaaaagtaccttacac

SEQ ID NO: 175390 - DNA, 20 bp, Artificial Sequence
  Description of Artificial Sequence: Synthetic oligonucleotide
  Target: LAMA2; (+) strand; PAM type: NRG; PAM sequence: TGG
ccttacacaagataacttaa

SEQ ID NO: 175391 - DNA, 20 bp, Artificial Sequence
  Description of Artificial Sequence: Synthetic oligonucleotide
  Target: LAMA2; (+) strand; PAM type: NRG; PAM sequence: TAG
aagataacttaatggcctta

SEQ ID NO: 175392 - DNA, 20 bp, Artificial Sequence
  Description of Artificial Sequence: Synthetic oligonucleotide
  Target: LAMA2; (+) strand; PAM type: NRG; PAM sequence: TAG
ttatagaactctatgtcaac

SEQ ID NO: 175393 - DNA, 20 bp, Artificial Sequence
  Description of Artificial Sequence: Synthetic oligonucleotide
  Target: LAMA2; (+) strand; PAM type: NRG; PAM sequence: AAG
tctacatgccccattcgatg

SEQ ID NO: 175394 - DNA, 20 bp, Artificial Sequence
  Description of Artificial Sequence: Synthetic oligonucleotide
  Target: LAMA2; (+) strand; PAM type: NRG; PAM sequence: AAG
agtaactcatgaaacaaaca

SEQ ID NO: 175395 - DNA, 20 bp, Artificial Sequence
  Description of Artificial Sequence: Synthetic oligonucleotide
  Target: LAMA2; (+) strand; PAM type: NRG; PAM sequence: AGG
gtaactcatgaaacaaacaa

SEQ ID NO: 175396 - DNA, 20 bp, Artificial Sequence
  Description of Artificial Sequence: Synthetic oligonucleotide
  Target: LAMA2; (+) strand; PAM type: NRG; PAM sequence: TAG
acaaacaaaggaccacaacc

SEQ ID NO: 175397 - DNA, 20 bp, Artificial Sequence
  Description of Artificial Sequence: Synthetic oligonucleotide
  Target: LAMA2; (+) strand; PAM type: NRG; PAM sequence: AAG
ggaccacaacctagatcata

SEQ ID NO: 175398 - DNA, 20 bp, Artificial Sequence
  Description of Artificial Sequence: Synthetic oligonucleotide
  Target: LAMA2; (+) strand; PAM type: NRG; PAM sequence: AAG
cacaacctagatcataaagc

SEQ ID NO: 175399 - DNA, 20 bp, Artificial Sequence
  Description of Artificial Sequence: Synthetic oligonucleotide
  Target: LAMA2; (+) strand; PAM type: NRG; PAM sequence: CAG
ctagatcataaagcaagtat

SEQ ID NO: 175400 - DNA, 20 bp, Artificial Sequence
  Description of Artificial Sequence: Synthetic oligonucleotide
  Target: LAMA2; (+) strand; PAM type: NRG; PAM sequence: TAG
agcaaatcctaatgatccaa

SEQ ID NO: 175401 - DNA, 20 bp, Artificial Sequence
  Description of Artificial Sequence: Synthetic oligonucleotide
  Target: LAMA2; (+) strand; PAM type: NRG; PAM sequence: TAG
cctaatgatccaatagcatc

SEQ ID NO: 175402 - DNA, 20 bp, Artificial Sequence
  Description of Artificial Sequence: Synthetic oligonucleotide
  Target: LAMA2; (+) strand; PAM type: NRG; PAM sequence: TAG
ttatcataatgcaatacaat

SEQ ID NO: 175403 - DNA, 20 bp, Artificial Sequence
  Description of Artificial Sequence: Synthetic oligonucleotide
  Target: LAMA2; (+) strand; PAM type: NRG; PAM sequence: TGG
aatgcaatacaattagaaat

SEQ ID NO: 175404 - DNA, 20 bp, Artificial Sequence
  Description of Artificial Sequence: Synthetic oligonucleotide
  Target: LAMA2; (+) strand; PAM type: NRG; PAM sequence: AAG
ggtacaaaacaattgacaaa

SEQ ID NO: 175405 - DNA, 20 bp, Artificial Sequence
  Description of Artificial Sequence: Synthetic oligonucleotide
  Target: LAMA2; (+) strand; PAM type: NRG; PAM sequence: AAG
aaaataaaaaacatacttca

SEQ ID NO: 175406 - DNA, 20 bp, Artificial Sequence
  Description of Artificial Sequence: Synthetic oligonucleotide
  Target: LAMA2; (+) strand; PAM type: NRG; PAM sequence: TGG
acatacttcaaagtaatcca

SEQ ID NO: 175407 - DNA, 20 bp, Artificial Sequence
  Description of Artificial Sequence: Synthetic oligonucleotide
  Target: LAMA2; (+) strand; PAM type: NRG; PAM sequence: GAG
ttcaaagtaatccatggctt

SEQ ID NO: 175408 - DNA, 20 bp, Artificial Sequence
  Description of Artificial Sequence: Synthetic oligonucleotide
  Target: LAMA2; (+) strand; PAM type: NRG; PAM sequence: CAG
catggcttgagaaaaaaaca

SEQ ID NO: 175409 - DNA, 20 bp, Artificial Sequence
  Description of Artificial Sequence: Synthetic oligonucleotide
  Target: LAMA2; (+) strand; PAM type: NRG; PAM sequence: AAG
aaacacagtttaaatttacg

SEQ ID NO: 175410 - DNA, 20 bp, Artificial Sequence
  Description of Artificial Sequence: Synthetic oligonucleotide
  Target: LAMA2; (+) strand; PAM type: NRG; PAM sequence: CAG
atttacgaagtatttaataa

SEQ ID NO: 175411 - DNA, 20 bp, Artificial Sequence
  Description of Artificial Sequence: Synthetic oligonucleotide
  Target: LAMA2; (+) strand; PAM type: NRG; PAM sequence: TGG
cgaagtatttaataacagaa

SEQ ID NO: 175412 - DNA, 20 bp, Artificial Sequence
  Description of Artificial Sequence: Synthetic oligonucleotide
  Target: LAMA2; (+) strand; PAM type: NRG; PAM sequence: AAG
aaaatttgtgtgtgcaaata

SEQ ID NO: 175413 - DNA, 20 bp, Artificial Sequence
  Description of Artificial Sequence: Synthetic oligonucleotide
  Target: LAMA2; (+) strand; PAM type: NRG; PAM sequence: TGG
atttgtgtgtgcaaataaag

SEQ ID NO: 175414 - DNA, 20 bp, Artificial Sequence
  Description of Artificial Sequence: Synthetic oligonucleotide
  Target: LAMA2; (+) strand; PAM type: NRG; PAM sequence: CAG
tgcaaataaagtggtaccaa

SEQ ID NO: 175415 - DNA, 20 bp, Artificial Sequence
  Description of Artificial Sequence: Synthetic oligonucleotide
  Target: LAMA2; (+) strand; PAM type: NRG; PAM sequence: AGG
gcaaataaagtggtaccaac

SEQ ID NO: 175416 - DNA, 20 bp, Artificial Sequence
  Description of Artificial Sequence: Synthetic oligonucleotide
  Target: LAMA2; (+) strand; PAM type: NRG; PAM sequence: CAG
ggtaccaacaggaaaatgta

SEQ ID NO: 175417 - DNA, 20 bp, Artificial Sequence
  Description of Artificial Sequence: Synthetic oligonucleotide
  Target: LAMA2; (+) strand; PAM type: NRG; PAM sequence: TGG
caacaggaaaatgtacagtt

SEQ ID NO: 175418 - DNA, 20 bp, Artificial Sequence
  Description of Artificial Sequence: Synthetic oligonucleotide
  Target: LAMA2; (+) strand; PAM type: NRG; PAM sequence: CAG
aaaatgtacagtttggaatg

SEQ ID NO: 175419 - DNA, 20 bp, Artificial Sequence
  Description of Artificial Sequence: Synthetic oligonucleotide
  Target: LAMA2; (+) strand; PAM type: NRG; PAM sequence: TAG
acagtttggaatgcagatat

SEQ ID NO: 175420 - DNA, 20 bp, Artificial Sequence
  Description of Artificial Sequence: Synthetic oligonucleotide
  Target: LAMA2; (+) strand; PAM type: NRG; PAM sequence: AGG
cagtttggaatgcagatatt

SEQ ID NO: 175421 - DNA, 20 bp, Artificial Sequence
  Description of Artificial Sequence: Synthetic oligonucleotide
  Target: LAMA2; (+) strand; PAM type: NRG; PAM sequence: AAG
ttggaatgcagatattaggc

SEQ ID NO: 175422 - DNA, 20 bp, Artificial Sequence
  Description of Artificial Sequence: Synthetic oligonucleotide
  Target: LAMA2; (+) strand; PAM type: NRG; PAM sequence: AGG
tggaatgcagatattaggca

SEQ ID NO: 175423 - DNA, 20 bp, Artificial Sequence
  Description of Artificial Sequence: Synthetic oligonucleotide
  Target: LAMA2; (+) strand; PAM type: NRG; PAM sequence: GGG
ggaatgcagatattaggcaa

SEQ ID NO: 175424 - DNA, 20 bp, Artificial Sequence
  Description of Artificial Sequence: Synthetic oligonucleotide
  Target: LAMA2; (+) strand; PAM type: NRG; PAM sequence: AAG
tgcagatattaggcaagggt

SEQ ID NO: 175425 - DNA, 20 bp, Artificial Sequence
  Description of Artificial Sequence: Synthetic oligonucleotide
  Target: LAMA2; (+) strand; PAM type: NRG; PAM sequence: AAG
agaactgatactaattatct

SEQ ID NO: 175426 - DNA, 20 bp, Artificial Sequence
  Description of Artificial Sequence: Synthetic oligonucleotide
  Target: LAMA2; (+) strand; PAM type: NRG; PAM sequence: AGG
gaactgatactaattatcta

SEQ ID NO: 175427 - DNA, 20 bp, Artificial Sequence
  Description of Artificial Sequence: Synthetic oligonucleotide
  Target: LAMA2; (+) strand; PAM type: NRG; PAM sequence: AAG
attatctaaggtttctgctc

SEQ ID NO: 175428 - DNA, 20 bp, Artificial Sequence
  Description of Artificial Sequence: Synthetic oligonucleotide
  Target: LAMA2; (+) strand; PAM type: NRG; PAM sequence: AAG
tctgctcaagatgtttaaaa

SEQ ID NO: 175429 - DNA, 20 bp, Artificial Sequence
  Description of Artificial Sequence: Synthetic oligonucleotide
  Target: LAMA2; (+) strand; PAM type: NRG; PAM sequence: CAG
aagatgtttaaaaaagtaca

SEQ ID NO: 175430 - DNA, 20 bp, Artificial Sequence
  Description of Artificial Sequence: Synthetic oligonucleotide
  Target: LAMA2; (+) strand; PAM type: NRG; PAM sequence: AAG
tgtttaaaaaagtacacaga

SEQ ID NO: 175431 - DNA, 20 bp, Artificial Sequence
  Description of Artificial Sequence: Synthetic oligonucleotide
  Target: LAMA2; (+) strand; PAM type: NRG; PAM sequence: AAG
acagaaagaaataaaaataa

SEQ ID NO: 175432 - DNA, 20 bp, Artificial Sequence
  Description of Artificial Sequence: Synthetic oligonucleotide
  Target: LAMA2; (+) strand; PAM type: NRG; PAM sequence: CAG
gaaagaaataaaaataaaag

SEQ ID NO: 175433 - DNA, 20 bp, Artificial Sequence
  Description of Artificial Sequence: Synthetic oligonucleotide
  Target: LAMA2; (+) strand; PAM type: NRG; PAM sequence: AAG
aaagcagaaattaatgacct

SEQ ID NO: 175434 - DNA, 20 bp, Artificial Sequence
  Description of Artificial Sequence: Synthetic oligonucleotide
  Target: LAMA2; (+) strand; PAM type: NRG; PAM sequence: AGG
aagcagaaattaatgaccta

SEQ ID NO: 175435 - DNA, 20 bp, Artificial Sequence
  Description of Artificial Sequence: Synthetic oligonucleotide
  Target: LAMA2; (+) strand; PAM type: NRG; PAM sequence: AAG
agaaattaatgacctaagga

SEQ ID NO: 175436 - DNA, 20 bp, Artificial Sequence
  Description of Artificial Sequence: Synthetic oligonucleotide
  Target: LAMA2; (+) strand; PAM type: NRG; PAM sequence: AGG
gaaattaatgacctaaggaa

SEQ ID NO: 175437 - DNA, 20 bp, Artificial Sequence
  Description of Artificial Sequence: Synthetic oligonucleotide
  Target: LAMA2; (+) strand; PAM type: NRG; PAM sequence: TAG
aatgacctaaggaaaggcat

SEQ ID NO: 175438 - DNA, 20 bp, Artificial Sequence
  Description of Artificial Sequence: Synthetic oligonucleotide
  Target: LAMA2; (+) strand; PAM type: NRG; PAM sequence: CAG
acctaaggaaaggcattaga

SEQ ID NO: 175439 - DNA, 20 bp, Artificial Sequence
  Description of Artificial Sequence: Synthetic oligonucleotide
  Target: LAMA2; (+) strand; PAM type: NRG; PAM sequence: AGG
cctaaggaaaggcattagac

SEQ ID NO: 175440 - DNA, 20 bp, Artificial Sequence
  Description of Artificial Sequence: Synthetic oligonucleotide
  Target: LAMA2; (+) strand; PAM type: NRG; PAM sequence: GGG
ctaaggaaaggcattagaca

SEQ ID NO: 175441 - DNA, 20 bp, Artificial Sequence
  Description of Artificial Sequence: Synthetic oligonucleotide
  Target: LAMA2; (+) strand; PAM type: NRG; PAM sequence: CAG
attagacagggttgacaaaa

SEQ ID NO: 175442 - DNA, 20 bp, Artificial Sequence
  Description of Artificial Sequence: Synthetic oligonucleotide
  Target: LAMA2; (+) strand; PAM type: NRG; PAM sequence: AAG
gacagggttgacaaaacagc

SEQ ID NO: 175443 - DNA, 20 bp, Artificial Sequence
  Description of Artificial Sequence: Synthetic oligonucleotide
  Target: LAMA2; (+) strand; PAM type: NRG; PAM sequence: TAG
caaaacagcaagttgattct

SEQ ID NO: 175444 - DNA, 20 bp, Artificial Sequence
  Description of Artificial Sequence: Synthetic oligonucleotide
  Target: LAMA2; (+) strand; PAM type: NRG; PAM sequence: TAG
agttgattcttagaataaac

SEQ ID NO: 175445 - DNA, 20 bp, Artificial Sequence
  Description of Artificial Sequence: Synthetic oligonucleotide
  Target: LAMA2; (+) strand; PAM type: NRG; PAM sequence: CAG
agaataaactagcaaataaa

SEQ ID NO: 175446 - DNA, 20 bp, Artificial Sequence
  Description of Artificial Sequence: Synthetic oligonucleotide
  Target: LAMA2; (+) strand; PAM type: NRG; PAM sequence: AAG
ataaactagcaaataaacag

SEQ ID NO: 175447 - DNA, 20 bp, Artificial Sequence
  Description of Artificial Sequence: Synthetic oligonucleotide
  Target: LAMA2; (+) strand; PAM type: NRG; PAM sequence: AAG
ctagcaaataaacagaagac

SEQ ID NO: 175448 - DNA, 20 bp, Artificial Sequence
  Description of Artificial Sequence: Synthetic oligonucleotide
  Target: LAMA2; (+) strand; PAM type: NRG; PAM sequence: AAG
aacagaagacaagaacaatt

SEQ ID NO: 175449 - DNA, 20 bp, Artificial Sequence
  Description of Artificial Sequence: Synthetic oligonucleotide
  Target: LAMA2; (+) strand; PAM type: NRG; PAM sequence: AAG
aagacaagaacaattaagca

SEQ ID NO: 175450 - DNA, 20 bp, Artificial Sequence
  Description of Artificial Sequence: Synthetic oligonucleotide
  Target: LAMA2; (+) strand; PAM type: NRG; PAM sequence: GAG
gacaagaacaattaagcaaa

SEQ ID NO: 175451 - DNA, 20 bp, Artificial Sequence
  Description of Artificial Sequence: Synthetic oligonucleotide
  Target: LAMA2; (+) strand; PAM type: NRG; PAM sequence: GAG
caagaacaattaagcaaaga

SEQ ID NO: 175452 - DNA, 20 bp, Artificial Sequence
  Description of Artificial Sequence: Synthetic oligonucleotide
  Target: LAMA2; (+) strand; PAM type: NRG; PAM sequence: TAG
agagagacaacacaaatgaa

SEQ ID NO: 175453 - DNA, 20 bp, Artificial Sequence
  Description of Artificial Sequence: Synthetic oligonucleotide
  Target: LAMA2; (+) strand; PAM type: NRG; PAM sequence: AGG
gagagacaacacaaatgaat

SEQ ID NO: 175454 - DNA, 20 bp, Artificial Sequence
  Description of Artificial Sequence: Synthetic oligonucleotide
  Target: LAMA2; (+) strand; PAM type: NRG; PAM sequence: AAG
caacacaaatgaataggatc

SEQ ID NO: 175455 - DNA, 20 bp, Artificial Sequence
  Description of Artificial Sequence: Synthetic oligonucleotide
  Target: LAMA2; (+) strand; PAM type: NRG; PAM sequence: AAG
tgaataggatcaagaatgaa

SEQ ID NO: 175456 - DNA, 20 bp, Artificial Sequence
  Description of Artificial Sequence: Synthetic oligonucleotide
  Target: LAMA2; (+) strand; PAM type: NRG; PAM sequence: AGG
gaataggatcaagaatgaaa

SEQ ID NO: 175457 - DNA, 20 bp, Artificial Sequence
  Description of Artificial Sequence: Synthetic oligonucleotide
  Target: LAMA2; (+) strand; PAM type: NRG; PAM sequence: GGG
aataggatcaagaatgaaaa

SEQ ID NO: 175458 - DNA, 20 bp, Artificial Sequence
  Description of Artificial Sequence: Synthetic oligonucleotide
  Target: LAMA2; (+) strand; PAM type: NRG; PAM sequence: GGG
ataggatcaagaatgaaaag

SEQ ID NO: 175459 - DNA, 20 bp, Artificial Sequence
  Description of Artificial Sequence: Synthetic oligonucleotide
  Target: LAMA2; (+) strand; PAM type: NRG; PAM sequence: TAG
tgaaaaggggatcataactg

SEQ ID NO: 175460 - DNA, 20 bp, Artificial Sequence
  Description of Artificial Sequence: Synthetic oligonucleotide
  Target: LAMA2; (+) strand; PAM type: NRG; PAM sequence: TAG
tcataactgtagatacatta

SEQ ID NO: 175461 - DNA, 20 bp, Artificial Sequence
  Description of Artificial Sequence: Synthetic oligonucleotide
  Target: LAMA2; (+) strand; PAM type: NRG; PAM sequence: TGG
tatagattgaaaaataaaaa

SEQ ID NO: 175462 - DNA, 20 bp, Artificial Sequence
  Description of Artificial Sequence: Synthetic oligonucleotide
  Target: LAMA2; (+) strand; PAM type: NRG; PAM sequence: TGG
aaaaataaaaatggatatat

SEQ ID NO: 175463 - DNA, 20 bp, Artificial Sequence
  Description of Artificial Sequence: Synthetic oligonucleotide
  Target: LAMA2; (+) strand; PAM type: NRG; PAM sequence: GAG
aaataaaaatggatatattg

SEQ ID NO: 175464 - DNA, 20 bp, Artificial Sequence
  Description of Artificial Sequence: Synthetic oligonucleotide
  Target: LAMA2; (+) strand; PAM type: NRG; PAM sequence: AGG
aataaaaatggatatattgg

SEQ ID NO: 175465 - DNA, 20 bp, Artificial Sequence
  Description of Artificial Sequence: Synthetic oligonucleotide
  Target: LAMA2; (+) strand; PAM type: NRG; PAM sequence: TAG
ttcaaacacatttgaatact

SEQ ID NO: 175466 - DNA, 20 bp, Artificial Sequence
  Description of Artificial Sequence: Synthetic oligonucleotide
  Target: LAMA2; (+) strand; PAM type: NRG; PAM sequence: AGG
tcaaacacatttgaatactt

SEQ ID NO: 175467 - DNA, 20 bp, Artificial Sequence
  Description of Artificial Sequence: Synthetic oligonucleotide
  Target: LAMA2; (+) strand; PAM type: NRG; PAM sequence: AAG
cacatttgaatacttaggtg

SEQ ID NO: 175468 - DNA, 20 bp, Artificial Sequence
  Description of Artificial Sequence: Synthetic oligonucleotide
  Target: LAMA2; (+) strand; PAM type: NRG; PAM sequence: CAG
gaatacttaggtgaagtaaa

SEQ ID NO: 175469 - DNA, 20 bp, Artificial Sequence
  Description of Artificial Sequence: Synthetic oligonucleotide
  Target: LAMA2; (+) strand; PAM type: NRG; PAM sequence: AAG
acttaggtgaagtaaacagt

SEQ ID NO: 175470 - DNA, 20 bp, Artificial Sequence
  Description of Artificial Sequence: Synthetic oligonucleotide
  Target: LAMA2; (+) strand; PAM type: NRG; PAM sequence: TAG
ggtgaagtaaacagtaagtt

SEQ ID NO: 175471 - DNA, 20 bp, Artificial Sequence
  Description of Artificial Sequence: Synthetic oligonucleotide
  Target: LAMA2; (+) strand; PAM type: NRG; PAM sequence: GAG
tgaagtaaacagtaagttta

SEQ ID NO: 175472 - DNA, 20 bp, Artificial Sequence
  Description of Artificial Sequence: Synthetic oligonucleotide
  Target: LAMA2; (+) strand; PAM type: NRG; PAM sequence: AAG
tagagcaaaatttactcaaa

SEQ ID NO: 175473 - DNA, 20 bp, Artificial Sequence
  Description of Artificial Sequence: Synthetic oligonucleotide
  Target: LAMA2; (+) strand; PAM type: NRG; PAM sequence: TAG
aaaatttactcaaaaagaaa

SEQ ID NO: 175474 - DNA, 20 bp, Artificial Sequence
  Description of Artificial Sequence: Synthetic oligonucleotide
  Target: LAMA2; (+) strand; PAM type: NRG; PAM sequence: GAG
caaaaagaaatagtacacct

SEQ ID NO: 175475 - DNA, 20 bp, Artificial Sequence
  Description of Artificial Sequence: Synthetic oligonucleotide
  Target: LAMA2; (+) strand; PAM type: NRG; PAM sequence: CAG
aaccgttaaataaattgcat

SEQ ID NO: 175476 - DNA, 20 bp, Artificial Sequence
  Description of Artificial Sequence: Synthetic oligonucleotide
  Target: LAMA2; (+) strand; PAM type: NRG; PAM sequence: TAG
cgttaaataaattgcatcag

SEQ ID NO: 175477 - DNA, 20 bp, Artificial Sequence
  Description of Artificial Sequence: Synthetic oligonucleotide
  Target: LAMA2; (+) strand; PAM type: NRG; PAM sequence: AAG
acaatatgtacaaaaatgta

SEQ ID NO: 175478 - DNA, 20 bp, Artificial Sequence
  Description of Artificial Sequence: Synthetic oligonucleotide
  Target: LAMA2; (+) strand; PAM type: NRG; PAM sequence: AGG
caatatgtacaaaaatgtaa

SEQ ID NO: 175479 - DNA, 20 bp, Artificial Sequence
  Description of Artificial Sequence: Synthetic oligonucleotide
  Target: LAMA2; (+) strand; PAM type: NRG; PAM sequence: AAG
ccattatgcaatttgttccc

SEQ ID NO: 175480 - DNA, 20 bp, Artificial Sequence
  Description of Artificial Sequence: Synthetic oligonucleotide
  Target: LAMA2; (+) strand; PAM type: NRG; PAM sequence: TGG
atgcaatttgttcccaagaa

SEQ ID NO: 175481 - DNA, 20 bp, Artificial Sequence
  Description of Artificial Sequence: Synthetic oligonucleotide
  Target: LAMA2; (+) strand; PAM type: NRG; PAM sequence: AAG
tttgttcccaagaatggaaa

SEQ ID NO: 175482 - DNA, 20 bp, Artificial Sequence
  Description of Artificial Sequence: Synthetic oligonucleotide
  Target: LAMA2; (+) strand; PAM type: NRG; PAM sequence: AAG
gttcccaagaatggaaaaag

SEQ ID NO: 175483 - DNA, 20 bp, Artificial Sequence
  Description of Artificial Sequence: Synthetic oligonucleotide
  Target: LAMA2; (+) strand; PAM type: NRG; PAM sequence: CAG
aaaaagaagaaaaatttcct

SEQ ID NO: 175484 - DNA, 20 bp, Artificial Sequence
  Description of Artificial Sequence: Synthetic oligonucleotide
  Target: LAMA2; (+) strand; PAM type: NRG; PAM sequence: GAG
atttcctcagcttattttat

SEQ ID NO: 175485 - DNA, 20 bp, Artificial Sequence
  Description of Artificial Sequence: Synthetic oligonucleotide
  Target: LAMA2; (+) strand; PAM type: NRG; PAM sequence: AGG
tttcctcagcttattttatg

SEQ ID NO: 175486 - DNA, 20 bp, Artificial Sequence
  Description of Artificial Sequence: Synthetic oligonucleotide
  Target: LAMA2; (+) strand; PAM type: NRG; PAM sequence: TGG
tgaggctgatacaatcttga

SEQ ID NO: 175487 - DNA, 20 bp, Artificial Sequence
  Description of Artificial Sequence: Synthetic oligonucleotide
  Target: LAMA2; (+) strand; PAM type: NRG; PAM sequence: AAG
gctgatacaatcttgatggc

SEQ ID NO: 175488 - DNA, 20 bp, Artificial Sequence
  Description of Artificial Sequence: Synthetic oligonucleotide
  Target: LAMA2; (+) strand; PAM type: NRG; PAM sequence: CAG
aatcttgatggcaagcccta

SEQ ID NO: 175489 - DNA, 20 bp, Artificial Sequence
  Description of Artificial Sequence: Synthetic oligonucleotide
  Target: LAMA2; (+) strand; PAM type: NRG; PAM sequence: GAG
tcttgatggcaagccctaca

SEQ ID NO: 175490 - DNA, 20 bp, Artificial Sequence
  Description of Artificial Sequence: Synthetic oligonucleotide
  Target: LAMA2; (+) strand; PAM type: NRG; PAM sequence: AGG
cttgatggcaagccctacag

SEQ ID NO: 175491 - DNA, 20 bp, Artificial Sequence
  Description of Artificial Sequence: Synthetic oligonucleotide
  Target: LAMA2; (+) strand; PAM type: NRG; PAM sequence: CAG
atggcaagccctacagagga

SEQ ID NO: 175492 - DNA, 20 bp, Artificial Sequence
  Description of Artificial Sequence: Synthetic oligonucleotide
  Target: LAMA2; (+) strand; PAM type: NRG; PAM sequence: AAG
ctacagaggacagtactaca

SEQ ID NO: 175493 - DNA, 20 bp, Artificial Sequence
  Description of Artificial Sequence: Synthetic oligonucleotide
  Target: LAMA2; (+) strand; PAM type: NRG; PAM sequence: TAG
agtactacaaagaaaaacta

SEQ ID NO: 175494 - DNA, 20 bp, Artificial Sequence
  Description of Artificial Sequence: Synthetic oligonucleotide
  Target: LAMA2; (+) strand; PAM type: NRG; PAM sequence: AGG
gtactacaaagaaaaactat

SEQ ID NO: 175495 - DNA, 20 bp, Artificial Sequence
  Description of Artificial Sequence: Synthetic oligonucleotide
  Target: LAMA2; (+) strand; PAM type: NRG; PAM sequence: CAG
tacaaagaaaaactataggc

SEQ ID NO: 175496 - DNA, 20 bp, Artificial Sequence
  Description of Artificial Sequence: Synthetic oligonucleotide
  Target: LAMA2; (+) strand; PAM type: NRG; PAM sequence: TAG
ctataggccagttatttaaa

SEQ ID NO: 175497 - DNA, 20 bp, Artificial Sequence
  Description of Artificial Sequence: Synthetic oligonucleotide
  Target: LAMA2; (+) strand; PAM type: NRG; PAM sequence: GAG
ataggccagttatttaaata

SEQ ID NO: 175498 - DNA, 20 bp, Artificial Sequence
  Description of Artificial Sequence: Synthetic oligonucleotide
  Target: LAMA2; (+) strand; PAM type: NRG; PAM sequence: AAG
ggccagttatttaaatagag

SEQ ID NO: 175499 - DNA, 20 bp, Artificial Sequence
  Description of Artificial Sequence: Synthetic oligonucleotide
  Target: LAMA2; (+) strand; PAM type: NRG; PAM sequence: CAG
aaatgaaatattataaaacc

SEQ ID NO: 175500 - DNA, 20 bp, Artificial Sequence
  Description of Artificial Sequence: Synthetic oligonucleotide
  Target: LAMA2; (+) strand; PAM type: NRG; PAM sequence: AAG
gttcaaatgtacatatttta

SEQ ID NO: 175501 - DNA, 20 bp, Artificial Sequence
  Description of Artificial Sequence: Synthetic oligonucleotide
  Target: LAMA2; (+) strand; PAM type: NRG; PAM sequence: CAG
tttaaagatctgtaaatata

SEQ ID NO: 175502 - DNA, 20 bp, Artificial Sequence
  Description of Artificial Sequence: Synthetic oligonucleotide
  Target: LAMA2; (+) strand; PAM type: NRG; PAM sequence: CAG
agtaaaacattaacatttgc

SEQ ID NO: 175503 - DNA, 20 bp, Artificial Sequence
  Description of Artificial Sequence: Synthetic oligonucleotide
  Target: LAMA2; (+) strand; PAM type: NRG; PAM sequence: CAG
acattaacatttgccagata

SEQ ID NO: 175504 - DNA, 20 bp, Artificial Sequence
  Description of Artificial Sequence: Synthetic oligonucleotide
  Target: LAMA2; (+) strand; PAM type: NRG; PAM sequence: TGG
catttgccagatacagatga

SEQ ID NO: 175505 - DNA, 20 bp, Artificial Sequence
  Description of Artificial Sequence: Synthetic oligonucleotide
  Target: LAMA2; (+) strand; PAM type: NRG; PAM sequence: GGG
atttgccagatacagatgat

SEQ ID NO: 175506 - DNA, 20 bp, Artificial Sequence
  Description of Artificial Sequence: Synthetic oligonucleotide
  Target: LAMA2; (+) strand; PAM type: NRG; PAM sequence: TAG
ccagatacagatgatgggaa

SEQ ID NO: 175507 - DNA, 20 bp, Artificial Sequence
  Description of Artificial Sequence: Synthetic oligonucleotide
  Target: LAMA2; (+) strand; PAM type: NRG; PAM sequence: GAG
agatacagatgatgggaata

SEQ ID NO: 175508 - DNA, 20 bp, Artificial Sequence
  Description of Artificial Sequence: Synthetic oligonucleotide
  Target: LAMA2; (+) strand; PAM type: NRG; PAM sequence: AGG
gatacagatgatgggaatag

SEQ ID NO: 175509 - DNA, 20 bp, Artificial Sequence
  Description of Artificial Sequence: Synthetic oligonucleotide
  Target: LAMA2; (+) strand; PAM type: NRG; PAM sequence: TAG
tatcttatttcctacttaaa

SEQ ID NO: 175510 - DNA, 20 bp, Artificial Sequence
  Description of Artificial Sequence: Synthetic oligonucleotide
  Target: LAMA2; (+) strand; PAM type: NRG; PAM sequence: CAG
agtttaattaaaatgaacct

SEQ ID NO: 175511 - DNA, 20 bp, Artificial Sequence
  Description of Artificial Sequence: Synthetic oligonucleotide
  Target: LAMA2; (+) strand; PAM type: NRG; PAM sequence: GAG
tttaattaaaatgaacctca

SEQ ID NO: 175512 - DNA, 20 bp, Artificial Sequence
  Description of Artificial Sequence: Synthetic oligonucleotide
  Target: LAMA2; (+) strand; PAM type: NRG; PAM sequence: AGG
ttaattaaaatgaacctcag

SEQ ID NO: 175513 - DNA, 20 bp, Artificial Sequence
  Description of Artificial Sequence: Synthetic oligonucleotide
  Target: LAMA2; (+) strand; PAM type: NRG; PAM sequence: GAG
aattaaaatgaacctcagag

SEQ ID NO: 175514 - DNA, 20 bp, Artificial Sequence
  Description of Artificial Sequence: Synthetic oligonucleotide
  Target: LAMA2; (+) strand; PAM type: NRG; PAM sequence: TAG
aaaatgaacctcagaggaga

SEQ ID NO: 175515 - DNA, 20 bp, Artificial Sequence
  Description of Artificial Sequence: Synthetic oligonucleotide
  Target: LAMA2; (+) strand; PAM type: NRG; PAM sequence: AAG
aaatctgttctaaaataata

SEQ ID NO: 175516 - DNA, 20 bp, Artificial Sequence
  Description of Artificial Sequence: Synthetic oligonucleotide
  Target: LAMA2; (+) strand; PAM type: NRG; PAM sequence: TAG
ttctaaaataataaagaaaa

SEQ ID NO: 175517 - DNA, 20 bp, Artificial Sequence
  Description of Artificial Sequence: Synthetic oligonucleotide
  Target: LAMA2; (+) strand; PAM type: NRG; PAM sequence: AGG
tctaaaataataaagaaaat

SEQ ID NO: 175518 - DNA, 20 bp, Artificial Sequence
  Description of Artificial Sequence: Synthetic oligonucleotide
  Target: LAMA2; (+) strand; PAM type: NRG; PAM sequence: TGG
taaagaaaataggtctaaaa

SEQ ID NO: 175519 - DNA, 20 bp, Artificial Sequence
  Description of Artificial Sequence: Synthetic oligonucleotide
  Target: LAMA2; (+) strand; PAM type: NRG; PAM sequence: GGG
aaagaaaataggtctaaaat

SEQ ID NO: 175520 - DNA, 20 bp, Artificial Sequence
  Description of Artificial Sequence: Synthetic oligonucleotide
  Target: LAMA2; (+) strand; PAM type: NRG; PAM sequence: TGG
aaataggtctaaaatgggtc

SEQ ID NO: 175521 - DNA, 20 bp, Artificial Sequence
  Description of Artificial Sequence: Synthetic oligonucleotide
  Target: LAMA2; (+) strand; PAM type: NRG; PAM sequence: CAG
acaaccctcatcctttacac

SEQ ID NO: 175522 - DNA, 20 bp, Artificial Sequence
  Description of Artificial Sequence: Synthetic oligonucleotide
  Target: LAMA2; (+) strand; PAM type: NRG; PAM sequence: AAG
ccctcatcctttacaccagc

SEQ ID NO: 175523 - DNA, 20 bp, Artificial Sequence
  Description of Artificial Sequence: Synthetic oligonucleotide
  Target: LAMA2; (+) strand; PAM type: NRG; PAM sequence: AAG
tcatcctttacaccagcaag

SEQ ID NO: 175524 - DNA, 20 bp, Artificial Sequence
  Description of Artificial Sequence: Synthetic oligonucleotide
  Target: LAMA2; (+) strand; PAM type: NRG; PAM sequence: CAG
tttaatttcttttaaatgat

SEQ ID NO: 175525 - DNA, 20 bp, Artificial Sequence
  Description of Artificial Sequence: Synthetic oligonucleotide
  Target: LAMA2; (+) strand; PAM type: NRG; PAM sequence: GAG
taatttcttttaaatgatca

SEQ ID NO: 175526 - DNA, 20 bp, Artificial Sequence
  Description of Artificial Sequence: Synthetic oligonucleotide
  Target: LAMA2; (+) strand; PAM type: NRG; PAM sequence: AGG
aatttcttttaaatgatcag

SEQ ID NO: 175527 - DNA, 20 bp, Artificial Sequence
  Description of Artificial Sequence: Synthetic oligonucleotide
  Target: LAMA2; (+) strand; PAM type: NRG; PAM sequence: AAG
gatcagaggctgataattgc

SEQ ID NO: 175528 - DNA, 20 bp, Artificial Sequence
  Description of Artificial Sequence: Synthetic oligonucleotide
  Target: LAMA2; (+) strand; PAM type: NRG; PAM sequence: AAG
acctaacttttctctcaact

SEQ ID NO: 175529 - DNA, 20 bp, Artificial Sequence
  Description of Artificial Sequence: Synthetic oligonucleotide
  Target: LAMA2; (+) strand; PAM type: NRG; PAM sequence: CAG
ttttctctcaactaagctca

SEQ ID NO: 175530 - DNA, 20 bp, Artificial Sequence
  Description of Artificial Sequence: Synthetic oligonucleotide
  Target: LAMA2; (+) strand; PAM type: NRG; PAM sequence: CAG
ctcaactaagctcacagctc

SEQ ID NO: 175531 - DNA, 20 bp, Artificial Sequence
  Description of Artificial Sequence: Synthetic oligonucleotide
  Target: LAMA2; (+) strand; PAM type: NRG; PAM sequence: AGG
tcaactaagctcacagctcc

SEQ ID NO: 175532 - DNA, 20 bp, Artificial Sequence
  Description of Artificial Sequence: Synthetic oligonucleotide
  Target: LAMA2; (+) strand; PAM type: NRG; PAM sequence: TAG
tcttcttttactacatctct

SEQ ID NO: 175533 - DNA, 20 bp, Artificial Sequence
  Description of Artificial Sequence: Synthetic oligonucleotide
  Target: LAMA2; (+) strand; PAM type: NRG; PAM sequence: AAG
gtgccatcacgtatttcatt

SEQ ID NO: 175534 - DNA, 20 bp, Artificial Sequence
  Description of Artificial Sequence: Synthetic oligonucleotide
  Target: LAMA2; (+) strand; PAM type: NRG; PAM sequence: TGG
ccatcacgtatttcattaag

SEQ ID NO: 175535 - DNA, 20 bp, Artificial Sequence
  Description of Artificial Sequence: Synthetic oligonucleotide
  Target: LAMA2; (+) strand; PAM type: NRG; PAM sequence: GGG
catcacgtatttcattaagt

SEQ ID NO: 175536 - DNA, 20 bp, Artificial Sequence
  Description of Artificial Sequence: Synthetic oligonucleotide
  Target: LAMA2; (+) strand; PAM type: NRG; PAM sequence: GGG
atcacgtatttcattaagtg

SEQ ID NO: 175537 - DNA, 20 bp, Artificial Sequence
  Description of Artificial Sequence: Synthetic oligonucleotide
  Target: LAMA2; (+) strand; PAM type: NRG; PAM sequence: AAG
atttaattactgctatgatg

SEQ ID NO: 175538 - DNA, 20 bp, Artificial Sequence
  Description of Artificial Sequence: Synthetic oligonucleotide
  Target: LAMA2; (+) strand; PAM type: NRG; PAM sequence: AGG
tttaattactgctatgatga

SEQ ID NO: 175539 - DNA, 20 bp, Artificial Sequence
  Description of Artificial Sequence: Synthetic oligonucleotide
  Target: LAMA2; (+) strand; PAM type: NRG; PAM sequence: GAG
taattactgctatgatgaag

SEQ ID NO: 175540 - DNA, 20 bp, Artificial Sequence
  Description of Artificial Sequence: Synthetic oligonucleotide
  Target: LAMA2; (+) strand; PAM type: NRG; PAM sequence: TAG
ctgctatgatgaaggagatg

SEQ ID NO: 175541 - DNA, 20 bp, Artificial Sequence
  Description of Artificial Sequence: Synthetic oligonucleotide
  Target: LAMA2; (+) strand; PAM type: NRG; PAM sequence: CAG
aaggagatgtagttcactta

SEQ ID NO: 175542 - DNA, 20 bp, Artificial Sequence
  Description of Artificial Sequence: Synthetic oligonucleotide
  Target: LAMA2; (+) strand; PAM type: NRG; PAM sequence: CAG
catcacattttcccaccctt

SEQ ID NO: 175543 - DNA, 20 bp, Artificial Sequence
  Description of Artificial Sequence: Synthetic oligonucleotide
  Target: LAMA2; (+) strand; PAM type: NRG; PAM sequence: TAG
cacccttcagtttcccaata

SEQ ID NO: 175544 - DNA, 20 bp, Artificial Sequence
  Description of Artificial Sequence: Synthetic oligonucleotide
  Target: LAMA2; (+) strand; PAM type: NRG; PAM sequence: AGG
acccttcagtttcccaatat

SEQ ID NO: 175545 - DNA, 20 bp, Artificial Sequence
  Description of Artificial Sequence: Synthetic oligonucleotide
  Target: LAMA2; (+) strand; PAM type: NRG; PAM sequence: TAG
tataggtacattactgtgct

SEQ ID NO: 175546 - DNA, 20 bp, Artificial Sequence
  Description of Artificial Sequence: Synthetic oligonucleotide
  Target: LAMA2; (+) strand; PAM type: NRG; PAM sequence: GAG
catttttaacctaatatact

SEQ ID NO: 175547 - DNA, 20 bp, Artificial Sequence
  Description of Artificial Sequence: Synthetic oligonucleotide
  Target: LAMA2; (+) strand; PAM type: NRG; PAM sequence: GAG
tttttaacctaatatactga

SEQ ID NO: 175548 - DNA, 20 bp, Artificial Sequence
  Description of Artificial Sequence: Synthetic oligonucleotide
  Target: LAMA2; (+) strand; PAM type: NRG; PAM sequence: TAG
attatttcctgtataaatga

SEQ ID NO: 175549 - DNA, 20 bp, Artificial Sequence
  Description of Artificial Sequence: Synthetic oligonucleotide
  Target: LAMA2; (+) strand; PAM type: NRG; PAM sequence: AAG
tgatagactctgcactcttt

SEQ ID NO: 175550 - DNA, 20 bp, Artificial Sequence
  Description of Artificial Sequence: Synthetic oligonucleotide
  Target: LAMA2; (+) strand; PAM type: NRG; PAM sequence: AAG
actctgcactctttaagatg

SEQ ID NO: 175551 - DNA, 20 bp, Artificial Sequence
  Description of Artificial Sequence: Synthetic oligonucleotide
  Target: LAMA2; (+) strand; PAM type: NRG; PAM sequence: TAG
tatgtcctcattcttccctt

SEQ ID NO: 175552 - DNA, 20 bp, Artificial Sequence
  Description of Artificial Sequence: Synthetic oligonucleotide
  Target: LAMA2; (+) strand; PAM type: NRG; PAM sequence: CAG
tccttttttcctcgtcctct

SEQ ID NO: 175553 - DNA, 20 bp, Artificial Sequence
  Description of Artificial Sequence: Synthetic oligonucleotide
  Target: LAMA2; (+) strand; PAM type: NRG; PAM sequence: TGG
ctttaactttgatattgtga

SEQ ID NO: 175554 - DNA, 20 bp, Artificial Sequence
  Description of Artificial Sequence: Synthetic oligonucleotide
  Target: LAMA2; (+) strand; PAM type: NRG; PAM sequence: TGG
ctataaccataattgtgcca

SEQ ID NO: 175555 - DNA, 20 bp, Artificial Sequence
  Description of Artificial Sequence: Synthetic oligonucleotide
  Target: LAMA2; (+) strand; PAM type: NRG; PAM sequence: CAG
taaccataattgtgccatgg

SEQ ID NO: 175556 - DNA, 20 bp, Artificial Sequence
  Description of Artificial Sequence: Synthetic oligonucleotide
  Target: LAMA2; (+) strand; PAM type: NRG; PAM sequence: CAG
aattgtgccatggcagaata

SEQ ID NO: 175557 - DNA, 20 bp, Artificial Sequence
  Description of Artificial Sequence: Synthetic oligonucleotide
  Target: LAMA2; (+) strand; PAM type: NRG; PAM sequence: AAG
tgtgccatggcagaatacag

SEQ ID NO: 175558 - DNA, 20 bp, Artificial Sequence
  Description of Artificial Sequence: Synthetic oligonucleotide
  Target: LAMA2; (+) strand; PAM type: NRG; PAM sequence: AAG
atacagaagtcccttctctg

SEQ ID NO: 175559 - DNA, 20 bp, Artificial Sequence
  Description of Artificial Sequence: Synthetic oligonucleotide
  Target: LAMA2; (+) strand; PAM type: NRG; PAM sequence: AAG
tgaagacattttattcctta

SEQ ID NO: 175560 - DNA, 20 bp, Artificial Sequence
  Description of Artificial Sequence: Synthetic oligonucleotide
  Target: LAMA2; (+) strand; PAM type: NRG; PAM sequence: AGG
gaagacattttattccttaa

SEQ ID NO: 175561 - DNA, 20 bp, Artificial Sequence
  Description of Artificial Sequence: Synthetic oligonucleotide
  Target: LAMA2; (+) strand; PAM type: NRG; PAM sequence: CAG
gactccctttgatttttttt

SEQ ID NO: 175562 - DNA, 20 bp, Artificial Sequence
  Description of Artificial Sequence: Synthetic oligonucleotide
  Target: LAMA2; (+) strand; PAM type: NRG; PAM sequence: TGG
tccctttgattttttttcag

SEQ ID NO: 175563 - DNA, 20 bp, Artificial Sequence
  Description of Artificial Sequence: Synthetic oligonucleotide
  Target: LAMA2; (+) strand; PAM type: NRG; PAM sequence: GGG
ccctttgattttttttcagt

SEQ ID NO: 175564 - DNA, 20 bp, Artificial Sequence
  Description of Artificial Sequence: Synthetic oligonucleotide
  Target: LAMA2; (+) strand; PAM type: NRG; PAM sequence: CAG
gccatttgatgcttgattgc

SEQ ID NO: 175565 - DNA, 20 bp, Artificial Sequence
  Description of Artificial Sequence: Synthetic oligonucleotide
  Target: LAMA2; (+) strand; PAM type: NRG; PAM sequence: CAG
tgattgccagttgctctgtg

SEQ ID NO: 175566 - DNA, 20 bp, Artificial Sequence
  Description of Artificial Sequence: Synthetic oligonucleotide
  Target: LAMA2; (+) strand; PAM type: NRG; PAM sequence: AAG
ttgccagttgctctgtgcag

SEQ ID NO: 175567 - DNA, 20 bp, Artificial Sequence
  Description of Artificial Sequence: Synthetic oligonucleotide
  Target: LAMA2; (+) strand; PAM type: NRG; PAM sequence: GAG
gccagttgctctgtgcagaa

SEQ ID NO: 175568 - DNA, 20 bp, Artificial Sequence
  Description of Artificial Sequence: Synthetic oligonucleotide
  Target: LAMA2; (+) strand; PAM type: NRG; PAM sequence: AAG
agttgctctgtgcagaagag

SEQ ID NO: 175569 - DNA, 20 bp, Artificial Sequence
  Description of Artificial Sequence: Synthetic oligonucleotide
  Target: LAMA2; (+) strand; PAM type: NRG; PAM sequence: AGG
gttgctctgtgcagaagaga

SEQ ID NO: 175570 - DNA, 20 bp, Artificial Sequence
  Description of Artificial Sequence: Synthetic oligonucleotide
  Target: LAMA2; (+) strand; PAM type: NRG; PAM sequence: GGG
ttgctctgtgcagaagagaa

SEQ ID NO: 175571 - DNA, 20 bp, Artificial Sequence
  Description of Artificial Sequence: Synthetic oligonucleotide
  Target: LAMA2; (+) strand; PAM type: NRG; PAM sequence: GGG
tgctctgtgcagaagagaag

SEQ ID NO: 175572 - DNA, 20 bp, Artificial Sequence
  Description of Artificial Sequence: Synthetic oligonucleotide
  Target: LAMA2; (+) strand; PAM type: NRG; PAM sequence: CAG
ttattccataaaataacttg

SEQ ID NO: 175573 - DNA, 20 bp, Artificial Sequence
  Description of Artificial Sequence: Synthetic oligonucleotide
  Target: LAMA2; (+) strand; PAM type: NRG; PAM sequence: GAG
ctaccttacctgttctttct

SEQ ID NO: 175574 - DNA, 20 bp, Artificial Sequence
  Description of Artificial Sequence: Synthetic oligonucleotide
  Target: LAMA2; (+) strand; PAM type: NRG; PAM sequence: AGG
taccttacctgttctttctg

SEQ ID NO: 175575 - DNA, 20 bp, Artificial Sequence
  Description of Artificial Sequence: Synthetic oligonucleotide
  Target: LAMA2; (+) strand; PAM type: NRG; PAM sequence: TGG
tacctgttctttctgaggcc

SEQ ID NO: 175576 - DNA, 20 bp, Artificial Sequence
  Description of Artificial Sequence: Synthetic oligonucleotide
  Target: LAMA2; (+) strand; PAM type: NRG; PAM sequence: TGG
aattttttctatctccttgc

SEQ ID NO: 175577 - DNA, 20 bp, Artificial Sequence
  Description of Artificial Sequence: Synthetic oligonucleotide
  Target: LAMA2; (+) strand; PAM type: NRG; PAM sequence: TAG
ccttgctggcatatacccta

SEQ ID NO: 175578 - DNA, 20 bp, Artificial Sequence
  Description of Artificial Sequence: Synthetic oligonucleotide
  Target: LAMA2; (+) strand; PAM type: NRG; PAM sequence: AAG
tggcatataccctatagtgc

SEQ ID NO: 175579 - DNA, 20 bp, Artificial Sequence
  Description of Artificial Sequence: Synthetic oligonucleotide
  Target: LAMA2; (+) strand; PAM type: NRG; PAM sequence: TGG
ataccctatagtgcaagttg

SEQ ID NO: 175580 - DNA, 20 bp, Artificial Sequence
  Description of Artificial Sequence: Synthetic oligonucleotide
  Target: LAMA2; (+) strand; PAM type: NRG; PAM sequence: GGG
taccctatagtgcaagttgt

SEQ ID NO: 175581 - DNA, 20 bp, Artificial Sequence
  Description of Artificial Sequence: Synthetic oligonucleotide
  Target: LAMA2; (+) strand; PAM type: NRG; PAM sequence: AAG
tgtgggtacaataactgcaa

SEQ ID NO: 175582 - DNA, 20 bp, Artificial Sequence
  Description of Artificial Sequence: Synthetic oligonucleotide
  Target: LAMA2; (+) strand; PAM type: NRG; PAM sequence: GAG
tacaataactgcaaaagatt

SEQ ID NO: 175583 - DNA, 20 bp, Artificial Sequence
  Description of Artificial Sequence: Synthetic oligonucleotide
  Target: LAMA2; (+) strand; PAM type: NRG; PAM sequence: AGG
acaataactgcaaaagattg

SEQ ID NO: 175584 - DNA, 20 bp, Artificial Sequence
  Description of Artificial Sequence: Synthetic oligonucleotide
  Target: LAMA2; (+) strand; PAM type: NRG; PAM sequence: GAG
aataactgcaaaagattgag

SEQ ID NO: 175585 - DNA, 20 bp, Artificial Sequence
  Description of Artificial Sequence: Synthetic oligonucleotide
  Target: LAMA2; (+) strand; PAM type: NRG; PAM sequence: CAG
aactgcaaaagattgaggag

SEQ ID NO: 175586 - DNA, 20 bp, Artificial Sequence
  Description of Artificial Sequence: Synthetic oligonucleotide
  Target: LAMA2; (+) strand; PAM type: NRG; PAM sequence: AGG
actgcaaaagattgaggagc

SEQ ID NO: 175587 - DNA, 20 bp, Artificial Sequence
  Description of Artificial Sequence: Synthetic oligonucleotide
  Target: LAMA2; (+) strand; PAM type: NRG; PAM sequence: TGG
aggaactatctaaataacca

SEQ ID NO: 175588 - DNA, 20 bp, Artificial Sequence
  Description of Artificial Sequence: Synthetic oligonucleotide
  Target: LAMA2; (+) strand; PAM type: NRG; PAM sequence: TGG
aactatctaaataaccatgg

SEQ ID NO: 175589 - DNA, 20 bp, Artificial Sequence
  Description of Artificial Sequence: Synthetic oligonucleotide
  Target: LAMA2; (+) strand; PAM type: NRG; PAM sequence: TGG
atctaaataaccatggtggc

SEQ ID NO: 175590 - DNA, 20 bp, Artificial Sequence
  Description of Artificial Sequence: Synthetic oligonucleotide
  Target: LAMA2; (+) strand; PAM type: NRG; PAM sequence: GGG
tctaaataaccatggtggct

SEQ ID NO: 175591 - DNA, 20 bp, Artificial Sequence
  Description of Artificial Sequence: Synthetic oligonucleotide
  Target: LAMA2; (+) strand; PAM type: NRG; PAM sequence: CAG
ataaccatggtggctgggtg

SEQ ID NO: 175592 - DNA, 20 bp, Artificial Sequence
  Description of Artificial Sequence: Synthetic oligonucleotide
  Target: LAMA2; (+) strand; PAM type: NRG; PAM sequence: CGG
ctgggtgcagtgactcatgc

SEQ ID NO: 175593 - DNA, 20 bp, Artificial Sequence
  Description of Artificial Sequence: Synthetic oligonucleotide
  Target: LAMA2; (+) strand; PAM type: NRG; PAM sequence: CAG
gtgactcatgccggtaatcc

SEQ ID NO: 175594 - DNA, 20 bp, Artificial Sequence
  Description of Artificial Sequence: Synthetic oligonucleotide
  Target: LAMA2; (+) strand; PAM type: NRG; PAM sequence: TGG
tgccggtaatcccagcactt

SEQ ID NO: 175595 - DNA, 20 bp, Artificial Sequence
  Description of Artificial Sequence: Synthetic oligonucleotide
  Target: LAMA2; (+) strand; PAM type: NRG; PAM sequence: GGG
gccggtaatcccagcacttt

SEQ ID NO: 175596 - DNA, 20 bp, Artificial Sequence
  Description of Artificial Sequence: Synthetic oligonucleotide
  Target: LAMA2; (+) strand; PAM type: NRG; PAM sequence: GAG
cggtaatcccagcactttgg

SEQ ID NO: 175597 - DNA, 20 bp, Artificial Sequence
  Description of Artificial Sequence: Synthetic oligonucleotide
  Target: LAMA2; (+) strand; PAM type: NRG; PAM sequence: AGG
ggtaatcccagcactttggg

SEQ ID NO: 175598 - DNA, 20 bp, Artificial Sequence
  Description of Artificial Sequence: Synthetic oligonucleotide
  Target: LAMA2; (+) strand; PAM type: NRG; PAM sequence: GAG
tcccagcactttgggaggct

SEQ ID NO: 175599 - DNA, 20 bp, Artificial Sequence
  Description of Artificial Sequence: Synthetic oligonucleotide
  Target: LAMA2; (+) strand; PAM type: NRG; PAM sequence: AGG
cccagcactttgggaggctg

SEQ ID NO: 175600 - DNA, 20 bp, Artificial Sequence
  Description of Artificial Sequence: Synthetic oligonucleotide
  Target: LAMA2; (+) strand; PAM type: NRG; PAM sequence: TGG
agcactttgggaggctgagg

SEQ ID NO: 175601 - DNA, 20 bp, Artificial Sequence
  Description of Artificial Sequence: Synthetic oligonucleotide
  Target: LAMA2; (+) strand; PAM type: NRG; PAM sequence: GGG
gcactttgggaggctgaggt

SEQ ID NO: 175602 - DNA, 20 bp, Artificial Sequence
  Description of Artificial Sequence: Synthetic oligonucleotide
  Target: LAMA2; (+) strand; PAM type: NRG; PAM sequence: AAG
ctttgggaggctgaggtggg

SEQ ID NO: 175603 - DNA, 20 bp, Artificial Sequence
  Description of Artificial Sequence: Synthetic oligonucleotide
  Target: LAMA2; (+) strand; PAM type: NRG; PAM sequence: GAG
ctgaggtgggaagattgctt

SEQ ID NO: 175604 - DNA, 20 bp, Artificial Sequence
  Description of Artificial Sequence: Synthetic oligonucleotide
  Target: LAMA2; (+) strand; PAM type: NRG; PAM sequence: CAG
gtgggaagattgcttgagcc

SEQ ID NO: 175605 - DNA, 20 bp, Artificial Sequence
  Description of Artificial Sequence: Synthetic oligonucleotide
  Target: LAMA2; (+) strand; PAM type: NRG; PAM sequence: AGG
tgggaagattgcttgagccc

SEQ ID NO: 175606 - DNA, 20 bp, Artificial Sequence
  Description of Artificial Sequence: Synthetic oligonucleotide
  Target: LAMA2; (+) strand; PAM type: NRG; PAM sequence: GAG
ggaagattgcttgagcccag

SEQ ID NO: 175607 - DNA, 20 bp, Artificial Sequence
  Description of Artificial Sequence: Synthetic oligonucleotide
  Target: LAMA2; (+) strand; PAM type: NRG; PAM sequence: GAG
ttgcttgagcccaggagttt

SEQ ID NO: 175608 - DNA, 20 bp, Artificial Sequence
  Description of Artificial Sequence: Synthetic oligonucleotide
  Target: LAMA2; (+) strand; PAM type: NRG; PAM sequence: CAG
tgagcccaggagtttgagac

SEQ ID NO: 175609 - DNA, 20 bp, Artificial Sequence
  Description of Artificial Sequence: Synthetic oligonucleotide
  Target: LAMA2; (+) strand; PAM type: NRG; PAM sequence: TGG
ccaggagtttgagaccagcc

SEQ ID NO: 175610 - DNA, 20 bp, Artificial Sequence
  Description of Artificial Sequence: Synthetic oligonucleotide
  Target: LAMA2; (+) strand; PAM type: NRG; PAM sequence: TGG
tgagaccagcctggacaaca

SEQ ID NO: 175611 - DNA, 20 bp, Artificial Sequence
  Description of Artificial Sequence: Synthetic oligonucleotide
  Target: LAMA2; (+) strand; PAM type: NRG; PAM sequence: TAG
tctactaaaaatacaaaaat

SEQ ID NO: 175612 - DNA, 20 bp, Artificial Sequence
  Description of Artificial Sequence: Synthetic oligonucleotide
  Target: LAMA2; (+) strand; PAM type: NRG; PAM sequence: CAG
ctaaaaatacaaaaattagc

SEQ ID NO: 175613 - DNA, 20 bp, Artificial Sequence
  Description of Artificial Sequence: Synthetic oligonucleotide
  Target: LAMA2; (+) strand; PAM type: NRG; PAM sequence: AGG
taaaaatacaaaaattagcc

SEQ ID NO: 175614 - DNA, 20 bp, Artificial Sequence
  Description of Artificial Sequence: Synthetic oligonucleotide
  Target: LAMA2; (+) strand; PAM type: NRG; PAM sequence: TGG
atacaaaaattagccaggca

SEQ ID NO: 175615 - DNA, 20 bp, Artificial Sequence
  Description of Artificial Sequence: Synthetic oligonucleotide
  Target: LAMA2; (+) strand; PAM type: NRG; PAM sequence: CAG
ggtgacacatgcctgtaatc

SEQ ID NO: 175616 - DNA, 20 bp, Artificial Sequence
  Description of Artificial Sequence: Synthetic oligonucleotide
  Target: LAMA2; (+) strand; PAM type: NRG; PAM sequence: AGG
gtgacacatgcctgtaatcc

SEQ ID NO: 175617 - DNA, 20 bp, Artificial Sequence
  Description of Artificial Sequence: Synthetic oligonucleotide
  Target: LAMA2; (+) strand; PAM type: NRG; PAM sequence: CAG
tgcctgtaatccaggctact

SEQ ID NO: 175618 - DNA, 20 bp, Artificial Sequence
  Description of Artificial Sequence: Synthetic oligonucleotide
  Target: LAMA2; (+) strand; PAM type: NRG; PAM sequence: AGG
gcctgtaatccaggctactc

SEQ ID NO: 175619 - DNA, 20 bp, Artificial Sequence
  Description of Artificial Sequence: Synthetic oligonucleotide
  Target: LAMA2; (+) strand; PAM type: NRG; PAM sequence: GAG
ctgtaatccaggctactcag

SEQ ID NO: 175620 - DNA, 20 bp, Artificial Sequence
  Description of Artificial Sequence: Synthetic oligonucleotide
  Target: LAMA2; (+) strand; PAM type: NRG; PAM sequence: AGG
tgtaatccaggctactcagg

SEQ ID NO: 175621 - DNA, 20 bp, Artificial Sequence
  Description of Artificial Sequence: Synthetic oligonucleotide
  Target: LAMA2; (+) strand; PAM type: NRG; PAM sequence: GAG
tccaggctactcaggaggct

SEQ ID NO: 175622 - DNA, 20 bp, Artificial Sequence
  Description of Artificial Sequence: Synthetic oligonucleotide
  Target: LAMA2; (+) strand; PAM type: NRG; PAM sequence: AGG
ccaggctactcaggaggctg

SEQ ID NO: 175623 - DNA, 20 bp, Artificial Sequence
  Description of Artificial Sequence: Synthetic oligonucleotide
  Target: LAMA2; (+) strand; PAM type: NRG; PAM sequence: TGG
ggctactcaggaggctgagg

SEQ ID NO: 175624 - DNA, 20 bp, Artificial Sequence
  Description of Artificial Sequence: Synthetic oligonucleotide
  Target: LAMA2; (+) strand; PAM type: NRG; PAM sequence: GGG
gctactcaggaggctgaggt

SEQ ID NO: 175625 - DNA, 20 bp, Artificial Sequence
  Description of Artificial Sequence: Synthetic oligonucleotide
  Target: LAMA2; (+) strand; PAM type: NRG; PAM sequence: GAG
tactcaggaggctgaggtgg

SEQ ID NO: 175626 - DNA, 20 bp, Artificial Sequence
  Description of Artificial Sequence: Synthetic oligonucleotide
  Target: LAMA2; (+) strand; PAM type: NRG; PAM sequence: AGG
actcaggaggctgaggtggg

SEQ ID NO: 175627 - DNA, 20 bp, Artificial Sequence
  Description of Artificial Sequence: Synthetic oligonucleotide
  Target: LAMA2; (+) strand; PAM type: NRG; PAM sequence: GAG
ctgaggtgggaggatcccct

SEQ ID NO: 175628 - DNA, 20 bp, Artificial Sequence
  Description of Artificial Sequence: Synthetic oligonucleotide
  Target: LAMA2; (+) strand; PAM type: NRG; PAM sequence: TGG
gtgggaggatcccctgagcc

SEQ ID NO: 175629 - DNA, 20 bp, Artificial Sequence
  Description of Artificial Sequence: Synthetic oligonucleotide
  Target: LAMA2; (+) strand; PAM type: NRG; PAM sequence: GGG
tgggaggatcccctgagcct

SEQ ID NO: 175630 - DNA, 20 bp, Artificial Sequence
  Description of Artificial Sequence: Synthetic oligonucleotide
  Target: LAMA2; (+) strand; PAM type: NRG; PAM sequence: AAG
gaggatcccctgagcctggg

SEQ ID NO: 175631 - DNA, 20 bp, Artificial Sequence
  Description of Artificial Sequence: Synthetic oligonucleotide
  Target: LAMA2; (+) strand; PAM type: NRG; PAM sequence: AAG
tcccctgagcctgggaagtc

SEQ ID NO: 175632 - DNA, 20 bp, Artificial Sequence
  Description of Artificial Sequence: Synthetic oligonucleotide
  Target: LAMA2; (+) strand; PAM type: NRG; PAM sequence: AGG
cccctgagcctgggaagtca

SEQ ID NO: 175633 - DNA, 20 bp, Artificial Sequence
  Description of Artificial Sequence: Synthetic oligonucleotide
  Target: LAMA2; (+) strand; PAM type: NRG; PAM sequence: CAG
agcctgggaagtcaaggctg

SEQ ID NO: 175634 - DNA, 20 bp, Artificial Sequence
  Description of Artificial Sequence: Synthetic oligonucleotide
  Target: LAMA2; (+) strand; PAM type: NRG; PAM sequence: GAG
tgggaagtcaaggctgcagt

SEQ ID NO: 175635 - DNA, 20 bp, Artificial Sequence
  Description of Artificial Sequence: Synthetic oligonucleotide
  Target: LAMA2; (+) strand; PAM type: NRG; PAM sequence: AAG
agtcaaggctgcagtgagcc

SEQ ID NO: 175636 - DNA, 20 bp, Artificial Sequence
  Description of Artificial Sequence: Synthetic oligonucleotide
  Target: LAMA2; (+) strand; PAM type: NRG; PAM sequence: CAG
aagatcatgccactgcactc

SEQ ID NO: 175637 - DNA, 20 bp, Artificial Sequence
  Description of Artificial Sequence: Synthetic oligonucleotide
  Target: LAMA2; (+) strand; PAM type: NRG; PAM sequence: CAG
ctgcactccagcctgcgtga

SEQ ID NO: 175638 - DNA, 20 bp, Artificial Sequence
  Description of Artificial Sequence: Synthetic oligonucleotide
  Target: LAMA2; (+) strand; PAM type: NRG; PAM sequence: GAG
gcactccagcctgcgtgaca

SEQ ID NO: 175639 - DNA, 20 bp, Artificial Sequence
  Description of Artificial Sequence: Synthetic oligonucleotide
  Target: LAMA2; (+) strand; PAM type: NRG; PAM sequence: AAG
tccagcctgcgtgacagagc

SEQ ID NO: 175640 - DNA, 20 bp, Artificial Sequence
  Description of Artificial Sequence: Synthetic oligonucleotide
  Target: LAMA2; (+) strand; PAM type: NRG; PAM sequence: AAG
caagaccttatctcacaaaa

SEQ ID NO: 175641 - DNA, 20 bp, Artificial Sequence
  Description of Artificial Sequence: Synthetic oligonucleotide
  Target: LAMA2; (+) strand; PAM type: NRG; PAM sequence: AAG
tctcacaaaaaagaaaataa

SEQ ID NO: 175642 - DNA, 20 bp, Artificial Sequence
  Description of Artificial Sequence: Synthetic oligonucleotide
  Target: LAMA2; (+) strand; PAM type: NRG; PAM sequence: AGG
ctcacaaaaaagaaaataaa

SEQ ID NO: 175643 - DNA, 20 bp, Artificial Sequence
  Description of Artificial Sequence: Synthetic oligonucleotide
  Target: LAMA2; (+) strand; PAM type: NRG; PAM sequence: TGG
aaaagaaaataaaaggccca

SEQ ID NO: 175644 - DNA, 20 bp, Artificial Sequence
  Description of Artificial Sequence: Synthetic oligonucleotide
  Target: LAMA2; (+) strand; PAM type: NRG; PAM sequence: TGG
agaaaataaaaggcccatgg

SEQ ID NO: 175645 - DNA, 20 bp, Artificial Sequence
  Description of Artificial Sequence: Synthetic oligonucleotide
  Target: LAMA2; (+) strand; PAM type: NRG; PAM sequence: TGG
ataaaaggcccatggtggtg

SEQ ID NO: 175646 - DNA, 20 bp, Artificial Sequence
  Description of Artificial Sequence: Synthetic oligonucleotide
  Target: LAMA2; (+) strand; PAM type: NRG; PAM sequence: TAG
aaggcccatggtggtgtggc

SEQ ID NO: 175647 - DNA, 20 bp, Artificial Sequence
  Description of Artificial Sequence: Synthetic oligonucleotide
  Target: LAMA2; (+) strand; PAM type: NRG; PAM sequence: AGG
aggcccatggtggtgtggct

SEQ ID NO: 175648 - DNA, 20 bp, Artificial Sequence
  Description of Artificial Sequence: Synthetic oligonucleotide
  Target: LAMA2; (+) strand; PAM type: NRG; PAM sequence: AAG
ccatggtggtgtggctagga

SEQ ID NO: 175649 - DNA, 20 bp, Artificial Sequence
  Description of Artificial Sequence: Synthetic oligonucleotide
  Target: LAMA2; (+) strand; PAM type: NRG; PAM sequence: GAG
atggtggtgtggctaggaaa

SEQ ID NO: 175650 - DNA, 20 bp, Artificial Sequence
  Description of Artificial Sequence: Synthetic oligonucleotide
  Target: LAMA2; (+) strand; PAM type: NRG; PAM sequence: AAG
aagagtgccaaccctgtcca

SEQ ID NO: 175651 - DNA, 20 bp, Artificial Sequence
  Description of Artificial Sequence: Synthetic oligonucleotide
  Target: LAMA2; (+) strand; PAM type: NRG; PAM sequence: AGG
agagtgccaaccctgtccaa

SEQ ID NO: 175652 - DNA, 20 bp, Artificial Sequence
  Description of Artificial Sequence: Synthetic oligonucleotide
  Target: LAMA2; (+) strand; PAM type: NRG; PAM sequence: GGG
gagtgccaaccctgtccaaa

SEQ ID NO: 175653 - DNA, 20 bp, Artificial Sequence
  Description of Artificial Sequence: Synthetic oligonucleotide
  Target: LAMA2; (+) strand; PAM type: NRG; PAM sequence: AAG
tgccaaccctgtccaaaggg

SEQ ID NO: 175654 - DNA, 20 bp, Artificial Sequence
  Description of Artificial Sequence: Synthetic oligonucleotide
  Target: LAMA2; (+) strand; PAM type: NRG; PAM sequence: GAG
tttttttttttttttttttt

SEQ ID NO: 175655 - DNA, 20 bp, Artificial Sequence
  Description of Artificial Sequence: Synthetic oligonucleotide
  Target: LAMA2; (+) strand; PAM type: NRG; PAM sequence: CGG
ttttttttttttttttgaga

SEQ ID NO: 175656 - DNA, 20 bp, Artificial Sequence
  Description of Artificial Sequence: Synthetic oligonucleotide
  Target: LAMA2; (+) strand; PAM type: NRG; PAM sequence: GAG
ttttttttttttttgagacg

SEQ ID NO: 175657 - DNA, 20 bp, Artificial Sequence
  Description of Artificial Sequence: Synthetic oligonucleotide
  Target: LAMA2; (+) strand; PAM type: NRG; PAM sequence: CAG
cggagtctcgctctgtcgcc

SEQ ID NO: 175658 - DNA, 20 bp, Artificial Sequence
  Description of Artificial Sequence: Synthetic oligonucleotide
  Target: LAMA2; (+) strand; PAM type: NRG; PAM sequence: AGG
ggagtctcgctctgtcgccc

SEQ ID NO: 175659 - DNA, 20 bp, Artificial Sequence
  Description of Artificial Sequence: Synthetic oligonucleotide
  Target: LAMA2; (+) strand; PAM type: NRG; PAM sequence: TGG
tctcgctctgtcgcccaggc

SEQ ID NO: 175660 - DNA, 20 bp, Artificial Sequence
  Description of Artificial Sequence: Synthetic oligonucleotide
  Target: LAMA2; (+) strand; PAM type: NRG; PAM sequence: GAG
tcgctctgtcgcccaggctg

SEQ ID NO: 175661 - DNA, 20 bp, Artificial Sequence
  Description of Artificial Sequence: Synthetic oligonucleotide
  Target: LAMA2; (+) strand; PAM type: NRG; PAM sequence: CAG
ctgtcgcccaggctggagtg

SEQ ID NO: 175662 - DNA, 20 bp, Artificial Sequence
  Description of Artificial Sequence: Synthetic oligonucleotide
  Target: LAMA2; (+) strand; PAM type: NRG; PAM sequence: TGG
tcgcccaggctggagtgcag

SEQ ID NO: 175663 - DNA, 20 bp, Artificial Sequence
  Description of Artificial Sequence: Synthetic oligonucleotide
  Target: LAMA2; (+) strand; PAM type: NRG; PAM sequence: CGG
cccaggctggagtgcagtgg

SEQ ID NO: 175664 - DNA, 20 bp, Artificial Sequence
  Description of Artificial Sequence: Synthetic oligonucleotide
  Target: LAMA2; (+) strand; PAM type: NRG; PAM sequence: GGG
ccaggctggagtgcagtggc

SEQ ID NO: 175665 - DNA, 20 bp, Artificial Sequence
  Description of Artificial Sequence: Synthetic oligonucleotide
  Target: LAMA2; (+) strand; PAM type: NRG; PAM sequence: CGG
ggagtgcagtggcgggatct

SEQ ID NO: 175666 - DNA, 20 bp, Artificial Sequence
  Description of Artificial Sequence: Synthetic oligonucleotide
  Target: LAMA2; (+) strand; PAM type: NRG; PAM sequence: AAG
gcgggatctcggctcactgc

SEQ ID NO: 175667 - DNA, 20 bp, Artificial Sequence
  Description of Artificial Sequence: Synthetic oligonucleotide
  Target: LAMA2; (+) strand; PAM type: NRG; PAM sequence: CGG
tcactgcaagctccgcctcc

SEQ ID NO: 175668 - DNA, 20 bp, Artificial Sequence
  Description of Artificial Sequence: Synthetic oligonucleotide
  Target: LAMA2; (+) strand; PAM type: NRG; PAM sequence: GGG
cactgcaagctccgcctccc

SEQ ID NO: 175669 - DNA, 20 bp, Artificial Sequence
  Description of Artificial Sequence: Synthetic oligonucleotide
  Target: LAMA2; (+) strand; PAM type: NRG; PAM sequence: CAG
ttcacgccattctcctgcct

SEQ ID NO: 175670 - DNA, 20 bp, Artificial Sequence
  Description of Artificial Sequence: Synthetic oligonucleotide
  Target: LAMA2; (+) strand; PAM type: NRG; PAM sequence: AAG
ttctcctgcctcagcctccc

SEQ ID NO: 175671 - DNA, 20 bp, Artificial Sequence
  Description of Artificial Sequence: Synthetic oligonucleotide
  Target: LAMA2; (+) strand; PAM type: NRG; PAM sequence: TAG
tcctgcctcagcctcccaag

SEQ ID NO: 175672 - DNA, 20 bp, Artificial Sequence
  Description of Artificial Sequence: Synthetic oligonucleotide
  Target: LAMA2; (+) strand; PAM type: NRG; PAM sequence: TGG
gcctcagcctcccaagtagc

SEQ ID NO: 175673 - DNA, 20 bp, Artificial Sequence
  Description of Artificial Sequence: Synthetic oligonucleotide
  Target: LAMA2; (+) strand; PAM type: NRG; PAM sequence: GGG
cctcagcctcccaagtagct

SEQ ID NO: 175674 - DNA, 20 bp, Artificial Sequence
  Description of Artificial Sequence: Synthetic oligonucleotide
  Target: LAMA2; (+) strand; PAM type: NRG; PAM sequence: CAG
ctcccaagtagctgggacta

SEQ ID NO: 175675 - DNA, 20 bp, Artificial Sequence
  Description of Artificial Sequence: Synthetic oligonucleotide
  Target: LAMA2; (+) strand; PAM type: NRG; PAM sequence: AGG
tcccaagtagctgggactac

SEQ ID NO: 175676 - DNA, 20 bp, Artificial Sequence
  Description of Artificial Sequence: Synthetic oligonucleotide
  Target: LAMA2; (+) strand; PAM type: NRG; PAM sequence: CGG
caggcgcccgccactacgcc

SEQ ID NO: 175677 - DNA, 20 bp, Artificial Sequence
  Description of Artificial Sequence: Synthetic oligonucleotide
  Target: LAMA2; (+) strand; PAM type: NRG; PAM sequence: TAG
ggctaatttttttgtatttt

SEQ ID NO: 175678 - DNA, 20 bp, Artificial Sequence
  Description of Artificial Sequence: Synthetic oligonucleotide
  Target: LAMA2; (+) strand; PAM type: NRG; PAM sequence: TAG
taatttttttgtatttttag

SEQ ID NO: 175679 - DNA, 20 bp, Artificial Sequence
  Description of Artificial Sequence: Synthetic oligonucleotide
  Target: LAMA2; (+) strand; PAM type: NRG; PAM sequence: GAG
atttttttgtatttttagta

SEQ ID NO: 175680 - DNA, 20 bp, Artificial Sequence
  Description of Artificial Sequence: Synthetic oligonucleotide
  Target: LAMA2; (+) strand; PAM type: NRG; PAM sequence: CGG
ttttgtatttttagtagaga

SEQ ID NO: 175681 - DNA, 20 bp, Artificial Sequence
  Description of Artificial Sequence: Synthetic oligonucleotide
  Target: LAMA2; (+) strand; PAM type: NRG; PAM sequence: GGG
tttgtatttttagtagagac

SEQ ID NO: 175682 - DNA, 20 bp, Artificial Sequence
  Description of Artificial Sequence: Synthetic oligonucleotide
  Target: LAMA2; (+) strand; PAM type: NRG; PAM sequence: GGG
ttgtatttttagtagagacg

SEQ ID NO: 175683 - DNA, 20 bp, Artificial Sequence
  Description of Artificial Sequence: Synthetic oligonucleotide
  Target: LAMA2; (+) strand; PAM type: NRG; PAM sequence: TAG
gagacggggtttcaccgttt

SEQ ID NO: 175684 - DNA, 20 bp, Artificial Sequence
  Description of Artificial Sequence: Synthetic oligonucleotide
  Target: LAMA2; (+) strand; PAM type: NRG; PAM sequence: CGG
cggggtttcaccgttttagc

SEQ ID NO: 175685 - DNA, 20 bp, Artificial Sequence
  Description of Artificial Sequence: Synthetic oligonucleotide
  Target: LAMA2; (+) strand; PAM type: NRG; PAM sequence: GGG
ggggtttcaccgttttagcc

SEQ ID NO: 175686 - DNA, 20 bp, Artificial Sequence
  Description of Artificial Sequence: Synthetic oligonucleotide
  Target: LAMA2; (+) strand; PAM type: NRG; PAM sequence: TGG
tttcaccgttttagccggga

SEQ ID NO: 175687 - DNA, 20 bp, Artificial Sequence
  Description of Artificial Sequence: Synthetic oligonucleotide
  Target: LAMA2; (+) strand; PAM type: NRG; PAM sequence: AAG
cctcgtgatccgcccgccca

SEQ ID NO: 175688 - DNA, 20 bp, Artificial Sequence
  Description of Artificial Sequence: Synthetic oligonucleotide
  Target: LAMA2; (+) strand; PAM type: NRG; PAM sequence: TGG
gatccgcccgcccaaagtgc

SEQ ID NO: 175689 - DNA, 20 bp, Artificial Sequence
  Description of Artificial Sequence: Synthetic oligonucleotide
  Target: LAMA2; (+) strand; PAM type: NRG; PAM sequence: GGG
atccgcccgcccaaagtgct

SEQ ID NO: 175690 - DNA, 20 bp, Artificial Sequence
  Description of Artificial Sequence: Synthetic oligonucleotide
  Target: LAMA2; (+) strand; PAM type: NRG; PAM sequence: CAG
cgcccaaagtgctgggatta

SEQ ID NO: 175691 - DNA, 20 bp, Artificial Sequence
  Description of Artificial Sequence: Synthetic oligonucleotide
  Target: LAMA2; (+) strand; PAM type: NRG; PAM sequence: AGG
gcccaaagtgctgggattac

SEQ ID NO: 175692 - DNA, 20 bp, Artificial Sequence
  Description of Artificial Sequence: Synthetic oligonucleotide
  Target: LAMA2; (+) strand; PAM type: NRG; PAM sequence: GAG
agtgctgggattacaggcgt

SEQ ID NO: 175693 - DNA, 20 bp, Artificial Sequence
  Description of Artificial Sequence: Synthetic oligonucleotide
  Target: LAMA2; (+) strand; PAM type: NRG; PAM sequence: CGG
caggcgtgagccaccgcgcc

SEQ ID NO: 175694 - DNA, 20 bp, Artificial Sequence
  Description of Artificial Sequence: Synthetic oligonucleotide
  Target: LAMA2; (+) strand; PAM type: NRG; PAM sequence: TAG
aacttctttttactccgtca

SEQ ID NO: 175695 - DNA, 20 bp, Artificial Sequence
  Description of Artificial Sequence: Synthetic oligonucleotide
  Target: LAMA2; (+) strand; PAM type: NRG; PAM sequence: CGG
tattccccaccaatctcccc

SEQ ID NO: 175696 - DNA, 20 bp, Artificial Sequence
  Description of Artificial Sequence: Synthetic oligonucleotide
  Target: LAMA2; (+) strand; PAM type: NRG; PAM sequence: CAG
ccccaccaatctcccccgga

SEQ ID NO: 175697 - DNA, 20 bp, Artificial Sequence
  Description of Artificial Sequence: Synthetic oligonucleotide
  Target: LAMA2; (+) strand; PAM type: NRG; PAM sequence: TAG
gacagtcactccattttact

SEQ ID NO: 175698 - DNA, 20 bp, Artificial Sequence
  Description of Artificial Sequence: Synthetic oligonucleotide
  Target: LAMA2; (+) strand; PAM type: NRG; PAM sequence: TGG
ctccattttacttagtctct

SEQ ID NO: 175699 - DNA, 20 bp, Artificial Sequence
  Description of Artificial Sequence: Synthetic oligonucleotide
  Target: LAMA2; (+) strand; PAM type: NRG; PAM sequence: CAG
tagtctcttggtactattct

SEQ ID NO: 175700 - DNA, 20 bp, Artificial Sequence
  Description of Artificial Sequence: Synthetic oligonucleotide
  Target: LAMA2; (+) strand; PAM type: NRG; PAM sequence: AAG
ttaattaatctgtatttctg

SEQ ID NO: 175701 - DNA, 20 bp, Artificial Sequence
  Description of Artificial Sequence: Synthetic oligonucleotide
  Target: LAMA2; (+) strand; PAM type: NRG; PAM sequence: GAG
aattaatctgtatttctgaa

SEQ ID NO: 175702 - DNA, 20 bp, Artificial Sequence
  Description of Artificial Sequence: Synthetic oligonucleotide
  Target: LAMA2; (+) strand; PAM type: NRG; PAM sequence: TGG
tgtatattttgctttctcca

SEQ ID NO: 175703 - DNA, 20 bp, Artificial Sequence
  Description of Artificial Sequence: Synthetic oligonucleotide
  Target: LAMA2; (+) strand; PAM type: NRG; PAM sequence: GGG
gtatattttgctttctccat

SEQ ID NO: 175704 - DNA, 20 bp, Artificial Sequence
  Description of Artificial Sequence: Synthetic oligonucleotide
  Target: LAMA2; (+) strand; PAM type: NRG; PAM sequence: AAG
attttgctttctccatggga

SEQ ID NO: 175705 - DNA, 20 bp, Artificial Sequence
  Description of Artificial Sequence: Synthetic oligonucleotide
  Target: LAMA2; (+) strand; PAM type: NRG; PAM sequence: TGG
ctccatgggaaagatatgct

SEQ ID NO: 175706 - DNA, 20 bp, Artificial Sequence
  Description of Artificial Sequence: Synthetic oligonucleotide
  Target: LAMA2; (+) strand; PAM type: NRG; PAM sequence: GGG
tccatgggaaagatatgctt

SEQ ID NO: 175707 - DNA, 20 bp, Artificial Sequence
  Description of Artificial Sequence: Synthetic oligonucleotide
  Target: LAMA2; (+) strand; PAM type: NRG; PAM sequence: GAG
catgggaaagatatgcttgg

SEQ ID NO: 175708 - DNA, 20 bp, Artificial Sequence
  Description of Artificial Sequence: Synthetic oligonucleotide
  Target: LAMA2; (+) strand; PAM type: NRG; PAM sequence: CAG
atatgcttgggagcctcatg

SEQ ID NO: 175709 - DNA, 20 bp, Artificial Sequence
  Description of Artificial Sequence: Synthetic oligonucleotide
  Target: LAMA2; (+) strand; PAM type: NRG; PAM sequence: TGG
ttgggagcctcatgcagtct

SEQ ID NO: 175710 - DNA, 20 bp, Artificial Sequence
  Description of Artificial Sequence: Synthetic oligonucleotide
  Target: LAMA2; (+) strand; PAM type: NRG; PAM sequence: TGG
ggagcctcatgcagtcttgg

SEQ ID NO: 175711 - DNA, 20 bp, Artificial Sequence
  Description of Artificial Sequence: Synthetic oligonucleotide
  Target: LAMA2; (+) strand; PAM type: NRG; PAM sequence: GGG
gagcctcatgcagtcttggt

SEQ ID NO: 175712 - DNA, 20 bp, Artificial Sequence
  Description of Artificial Sequence: Synthetic oligonucleotide
  Target: LAMA2; (+) strand; PAM type: NRG; PAM sequence: GAG
gcctcatgcagtcttggtgg

SEQ ID NO: 175713 - DNA, 20 bp, Artificial Sequence
  Description of Artificial Sequence: Synthetic oligonucleotide
  Target: LAMA2; (+) strand; PAM type: NRG; PAM sequence: TGG
ggtgggagttatgtaaccac

SEQ ID NO: 175714 - DNA, 20 bp, Artificial Sequence
  Description of Artificial Sequence: Synthetic oligonucleotide
  Target: LAMA2; (+) strand; PAM type: NRG; PAM sequence: GGG
gtgggagttatgtaaccact

SEQ ID NO: 175715 - DNA, 20 bp, Artificial Sequence
  Description of Artificial Sequence: Synthetic oligonucleotide
  Target: LAMA2; (+) strand; PAM type: NRG; PAM sequence: CAG
gagttatgtaaccactgggc

SEQ ID NO: 175716 - DNA, 20 bp, Artificial Sequence
  Description of Artificial Sequence: Synthetic oligonucleotide
  Target: LAMA2; (+) strand; PAM type: NRG; PAM sequence: CAG
aaccactgggccagatatgt

SEQ ID NO: 175717 - DNA, 20 bp, Artificial Sequence
  Description of Artificial Sequence: Synthetic oligonucleotide
  Target: LAMA2; (+) strand; PAM type: NRG; PAM sequence: AGG
accactgggccagatatgtc

SEQ ID NO: 175718 - DNA, 20 bp, Artificial Sequence
  Description of Artificial Sequence: Synthetic oligonucleotide
  Target: LAMA2; (+) strand; PAM type: NRG; PAM sequence: GGG
ccactgggccagatatgtca

SEQ ID NO: 175719 - DNA, 20 bp, Artificial Sequence
  Description of Artificial Sequence: Synthetic oligonucleotide
  Target: LAMA2; (+) strand; PAM type: NRG; PAM sequence: CAG
gccagatatgtcagggcaca

SEQ ID NO: 175720 - DNA, 20 bp, Artificial Sequence
  Description of Artificial Sequence: Synthetic oligonucleotide
  Target: LAMA2; (+) strand; PAM type: NRG; PAM sequence: TGG
atatgtcagggcacacagca

SEQ ID NO: 175721 - DNA, 20 bp, Artificial Sequence
  Description of Artificial Sequence: Synthetic oligonucleotide
  Target: LAMA2; (+) strand; PAM type: NRG; PAM sequence: GAG
gtcagggcacacagcatggt

SEQ ID NO: 175722 - DNA, 20 bp, Artificial Sequence
  Description of Artificial Sequence: Synthetic oligonucleotide
  Target: LAMA2; (+) strand; PAM type: NRG; PAM sequence: TGG
cagcatggtgagccattccc

SEQ ID NO: 175723 - DNA, 20 bp, Artificial Sequence
  Description of Artificial Sequence: Synthetic oligonucleotide
  Target: LAMA2; (+) strand; PAM type: NRG; PAM sequence: CAG
atggtgagccattccctggc

SEQ ID NO: 175724 - DNA, 20 bp, Artificial Sequence
  Description of Artificial Sequence: Synthetic oligonucleotide
  Target: LAMA2; (+) strand; PAM type: NRG; PAM sequence: CAG
ccctggccagttccatcgcc

SEQ ID NO: 175725 - DNA, 20 bp, Artificial Sequence
  Description of Artificial Sequence: Synthetic oligonucleotide
  Target: LAMA2; (+) strand; PAM type: NRG; PAM sequence: GAG
ctggccagttccatcgccca

SEQ ID NO: 175726 - DNA, 20 bp, Artificial Sequence
  Description of Artificial Sequence: Synthetic oligonucleotide
  Target: LAMA2; (+) strand; PAM type: NRG; PAM sequence: CAG
ccagttccatcgcccagagc

SEQ ID NO: 175727 - DNA, 20 bp, Artificial Sequence
  Description of Artificial Sequence: Synthetic oligonucleotide
  Target: LAMA2; (+) strand; PAM type: NRG; PAM sequence: TGG
tcgcccagagccagaccctt

SEQ ID NO: 175728 - DNA, 20 bp, Artificial Sequence
  Description of Artificial Sequence: Synthetic oligonucleotide
  Target: LAMA2; (+) strand; PAM type: NRG; PAM sequence: GGG
cgcccagagccagacccttt

SEQ ID NO: 175729 - DNA, 20 bp, Artificial Sequence
  Description of Artificial Sequence: Synthetic oligonucleotide
  Target: LAMA2; (+) strand; PAM type: NRG; PAM sequence: CAG
cagaccctttgggccctaca

SEQ ID NO: 175730 - DNA, 20 bp, Artificial Sequence
  Description of Artificial Sequence: Synthetic oligonucleotide
  Target: LAMA2; (+) strand; PAM type: NRG; PAM sequence: CAG
tgggccctacacagactgca

SEQ ID NO: 175731 - DNA, 20 bp, Artificial Sequence
  Description of Artificial Sequence: Synthetic oligonucleotide
  Target: LAMA2; (+) strand; PAM type: NRG; PAM sequence: CAG
ctacacagactgcacagccc

SEQ ID NO: 175732 - DNA, 20 bp, Artificial Sequence
  Description of Artificial Sequence: Synthetic oligonucleotide
  Target: LAMA2; (+) strand; PAM type: NRG; PAM sequence: TGG
gactgcacagccccagcatg

SEQ ID NO: 175733 - DNA, 20 bp, Artificial Sequence
  Description of Artificial Sequence: Synthetic oligonucleotide
  Target: LAMA2; (+) strand; PAM type: NRG; PAM sequence: GGG
actgcacagccccagcatgt

SEQ ID NO: 175734 - DNA, 20 bp, Artificial Sequence
  Description of Artificial Sequence: Synthetic oligonucleotide
  Target: LAMA2; (+) strand; PAM type: NRG; PAM sequence: GGG
ctgcacagccccagcatgtg

SEQ ID NO: 175735 - DNA, 20 bp, Artificial Sequence
  Description of Artificial Sequence: Synthetic oligonucleotide
  Target: LAMA2; (+) strand; PAM type: NRG; PAM sequence: GGG
tgcacagccccagcatgtgg

SEQ ID NO: 175736 - DNA, 20 bp, Artificial Sequence
  Description of Artificial Sequence: Synthetic oligonucleotide
  Target: LAMA2; (+) strand; PAM type: NRG; PAM sequence: AAG
cagcatgtgggggcttgtat

SEQ ID NO: 175737 - DNA, 20 bp, Artificial Sequence
  Description of Artificial Sequence: Synthetic oligonucleotide
  Target: LAMA2; (+) strand; PAM type: NRG; PAM sequence: AGG
agcatgtgggggcttgtata

SEQ ID NO: 175738 - DNA, 20 bp, Artificial Sequence
  Description of Artificial Sequence: Synthetic oligonucleotide
  Target: LAMA2; (+) strand; PAM type: NRG; PAM sequence: GGG
gcatgtgggggcttgtataa

SEQ ID NO: 175739 - DNA, 20 bp, Artificial Sequence
  Description of Artificial Sequence: Synthetic oligonucleotide
  Target: LAMA2; (+) strand; PAM type: NRG; PAM sequence: AAG
tgtgggggcttgtataaggg

SEQ ID NO: 175740 - DNA, 20 bp, Artificial Sequence
  Description of Artificial Sequence: Synthetic oligonucleotide
  Target: LAMA2; (+) strand; PAM type: NRG; PAM sequence: CAG
taagggaagttctgatgtca

SEQ ID NO: 175741 - DNA, 20 bp, Artificial Sequence
  Description of Artificial Sequence: Synthetic oligonucleotide
  Target: LAMA2; (+) strand; PAM type: NRG; PAM sequence: AGG
aagggaagttctgatgtcac

SEQ ID NO: 175742 - DNA, 20 bp, Artificial Sequence
  Description of Artificial Sequence: Synthetic oligonucleotide
  Target: LAMA2; (+) strand; PAM type: NRG; PAM sequence: TGG
ttctgatgtcacaggatcct

SEQ ID NO: 175743 - DNA, 20 bp, Artificial Sequence
  Description of Artificial Sequence: Synthetic oligonucleotide
  Target: LAMA2; (+) strand; PAM type: NRG; PAM sequence: GGG
tctgatgtcacaggatcctt

SEQ ID NO: 175744 - DNA, 20 bp, Artificial Sequence
  Description of Artificial Sequence: Synthetic oligonucleotide
  Target: LAMA2; (+) strand; PAM type: NRG; PAM sequence: GGG
ctgatgtcacaggatccttg

SEQ ID NO: 175745 - DNA, 20 bp, Artificial Sequence
  Description of Artificial Sequence: Synthetic oligonucleotide
  Target: LAMA2; (+) strand; PAM type: NRG; PAM sequence: CAG
tccttggggtgtttcttcac

SEQ ID NO: 175746 - DNA, 20 bp, Artificial Sequence
  Description of Artificial Sequence: Synthetic oligonucleotide
  Target: LAMA2; (+) strand; PAM type: NRG; PAM sequence: TGG
tggggtgtttcttcaccagc

SEQ ID NO: 175747 - DNA, 20 bp, Artificial Sequence
  Description of Artificial Sequence: Synthetic oligonucleotide
  Target: LAMA2; (+) strand; PAM type: NRG; PAM sequence: TGG
tcaccagctggaaacctctg

SEQ ID NO: 175748 - DNA, 20 bp, Artificial Sequence
  Description of Artificial Sequence: Synthetic oligonucleotide
  Target: LAMA2; (+) strand; PAM type: NRG; PAM sequence: CAG
cagctggaaacctctgtggc

SEQ ID NO: 175749 - DNA, 20 bp, Artificial Sequence
  Description of Artificial Sequence: Synthetic oligonucleotide
  Target: LAMA2; (+) strand; PAM type: NRG; PAM sequence: TGG
ctggaaacctctgtggccag

SEQ ID NO: 175750 - DNA, 20 bp, Artificial Sequence
  Description of Artificial Sequence: Synthetic oligonucleotide
  Target: LAMA2; (+) strand; PAM type: NRG; PAM sequence: GAG
ggccagtggcacctttgcct

SEQ ID NO: 175751 - DNA, 20 bp, Artificial Sequence
  Description of Artificial Sequence: Synthetic oligonucleotide
  Target: LAMA2; (+) strand; PAM type: NRG; PAM sequence: GAG
acctttgcctgagttttgct

SEQ ID NO: 175752 - DNA, 20 bp, Artificial Sequence
  Description of Artificial Sequence: Synthetic oligonucleotide
  Target: LAMA2; (+) strand; PAM type: NRG; PAM sequence: AGG
cctttgcctgagttttgctg

SEQ ID NO: 175753 - DNA, 20 bp, Artificial Sequence
  Description of Artificial Sequence: Synthetic oligonucleotide
  Target: LAMA2; (+) strand; PAM type: NRG; PAM sequence: TGG
tgagttttgctgaggtccac

SEQ ID NO: 175754 - DNA, 20 bp, Artificial Sequence
  Description of Artificial Sequence: Synthetic oligonucleotide
  Target: LAMA2; (+) strand; PAM type: NRG; PAM sequence: GGG
gagttttgctgaggtccact

SEQ ID NO: 175755 - DNA, 20 bp, Artificial Sequence
  Description of Artificial Sequence: Synthetic oligonucleotide
  Target: LAMA2; (+) strand; PAM type: NRG; PAM sequence: CAG
ctgggcacattccgcccact

SEQ ID NO: 175756 - DNA, 20 bp, Artificial Sequence
  Description of Artificial Sequence: Synthetic oligonucleotide
  Target: LAMA2; (+) strand; PAM type: NRG; PAM sequence: TGG
cacattccgcccactcagcc

SEQ ID NO: 175757 - DNA, 20 bp, Artificial Sequence
  Description of Artificial Sequence: Synthetic oligonucleotide
  Target: LAMA2; (+) strand; PAM type: NRG; PAM sequence: CAG
attccgcccactcagcctgg

SEQ ID NO: 175758 - DNA, 20 bp, Artificial Sequence
  Description of Artificial Sequence: Synthetic oligonucleotide
  Target: LAMA2; (+) strand; PAM type: NRG; PAM sequence: AGG
ttccgcccactcagcctggc

SEQ ID NO: 175759 - DNA, 20 bp, Artificial Sequence
  Description of Artificial Sequence: Synthetic oligonucleotide
  Target: LAMA2; (+) strand; PAM type: NRG; PAM sequence: TGG
tcagcctggcaggctacact

SEQ ID NO: 175760 - DNA, 20 bp, Artificial Sequence
  Description of Artificial Sequence: Synthetic oligonucleotide
  Target: LAMA2; (+) strand; PAM type: NRG; PAM sequence: TGG
ttggctcacactaccactac

SEQ ID NO: 175761 - DNA, 20 bp, Artificial Sequence
  Description of Artificial Sequence: Synthetic oligonucleotide
  Target: LAMA2; (+) strand; PAM type: NRG; PAM sequence: GGG
tggctcacactaccactact

SEQ ID NO: 175762 - DNA, 20 bp, Artificial Sequence
  Description of Artificial Sequence: Synthetic oligonucleotide
  Target: LAMA2; (+) strand; PAM type: NRG; PAM sequence: TGG
tcacactaccactactgggc

SEQ ID NO: 175763 - DNA, 20 bp, Artificial Sequence
  Description of Artificial Sequence: Synthetic oligonucleotide
  Target: LAMA2; (+) strand; PAM type: NRG; PAM sequence: AAG
ggctggatcccacacctgcc

SEQ ID NO: 175764 - DNA, 20 bp, Artificial Sequence
  Description of Artificial Sequence: Synthetic oligonucleotide
  Target: LAMA2; (+) strand; PAM type: NRG; PAM sequence: AGG
gctggatcccacacctgcca

SEQ ID NO: 175765 - DNA, 20 bp, Artificial Sequence
  Description of Artificial Sequence: Synthetic oligonucleotide
  Target: LAMA2; (+) strand; PAM type: NRG; PAM sequence: GGG
ctggatcccacacctgccaa

SEQ ID NO: 175766 - DNA, 20 bp, Artificial Sequence
  Description of Artificial Sequence: Synthetic oligonucleotide
  Target: LAMA2; (+) strand; PAM type: NRG; PAM sequence: CAG
cacacctgccaagggtgatt

SEQ ID NO: 175767 - DNA, 20 bp, Artificial Sequence
  Description of Artificial Sequence: Synthetic oligonucleotide
  Target: LAMA2; (+) strand; PAM type: NRG; PAM sequence: AGG
acacctgccaagggtgattc

SEQ ID NO: 175768 - DNA, 20 bp, Artificial Sequence
  Description of Artificial Sequence: Synthetic oligonucleotide
  Target: LAMA2; (+) strand; PAM type: NRG; PAM sequence: GGG
cacctgccaagggtgattca

SEQ ID NO: 175769 - DNA, 20 bp, Artificial Sequence
  Description of Artificial Sequence: Synthetic oligonucleotide
  Target: LAMA2; (+) strand; PAM type: NRG; PAM sequence: CAG
ctgccaagggtgattcaggg

SEQ ID NO: 175770 - DNA, 20 bp, Artificial Sequence
  Description of Artificial Sequence: Synthetic oligonucleotide
  Target: LAMA2; (+) strand; PAM type: NRG; PAM sequence: GAG
gccaagggtgattcagggca

SEQ ID NO: 175771 - DNA, 20 bp, Artificial Sequence
  Description of Artificial Sequence: Synthetic oligonucleotide
  Target: LAMA2; (+) strand; PAM type: NRG; PAM sequence: TGG
aagggtgattcagggcagag

SEQ ID NO: 175772 - DNA, 20 bp, Artificial Sequence
  Description of Artificial Sequence: Synthetic oligonucleotide
  Target: LAMA2; (+) strand; PAM type: NRG; PAM sequence: GAG
gtgattcagggcagagtggc

SEQ ID NO: 175773 - DNA, 20 bp, Artificial Sequence
  Description of Artificial Sequence: Synthetic oligonucleotide
  Target: LAMA2; (+) strand; PAM type: NRG; PAM sequence: AGG
tgattcagggcagagtggcg

SEQ ID NO: 175774 - DNA, 20 bp, Artificial Sequence
  Description of Artificial Sequence: Synthetic oligonucleotide
  Target: LAMA2; (+) strand; PAM type: NRG; PAM sequence: GGG
gattcagggcagagtggcga

SEQ ID NO: 175775 - DNA, 20 bp, Artificial Sequence
  Description of Artificial Sequence: Synthetic oligonucleotide
  Target: LAMA2; (+) strand; PAM type: NRG; PAM sequence: GGG
attcagggcagagtggcgag

SEQ ID NO: 175776 - DNA, 20 bp, Artificial Sequence
  Description of Artificial Sequence: Synthetic oligonucleotide
  Target: LAMA2; (+) strand; PAM type: NRG; PAM sequence: GAG
cagagtggcgaggggtgtgt

SEQ ID NO: 175777 - DNA, 20 bp, Artificial Sequence
  Description of Artificial Sequence: Synthetic oligonucleotide
  Target: LAMA2; (+) strand; PAM type: NRG; PAM sequence: GAG
gtggcgaggggtgtgtgagt

SEQ ID NO: 175778 - DNA, 20 bp, Artificial Sequence
  Description of Artificial Sequence: Synthetic oligonucleotide
  Target: LAMA2; (+) strand; PAM type: NRG; PAM sequence: TGG
gaggggtgtgtgagtgagcg

SEQ ID NO: 175779 - DNA, 20 bp, Artificial Sequence
  Description of Artificial Sequence: Synthetic oligonucleotide
  Target: LAMA2; (+) strand; PAM type: NRG; PAM sequence: GGG
aggggtgtgtgagtgagcgt

SEQ ID NO: 175780 - DNA, 20 bp, Artificial Sequence
  Description of Artificial Sequence: Synthetic oligonucleotide
  Target: LAMA2; (+) strand; PAM type: NRG; PAM sequence: CAG
gtgtgagtgagcgtgggctc

SEQ ID NO: 175781 - DNA, 20 bp, Artificial Sequence
  Description of Artificial Sequence: Synthetic oligonucleotide
  Target: LAMA2; (+) strand; PAM type: NRG; PAM sequence: CAG
tgggctccagccactgtgca

SEQ ID NO: 175782 - DNA, 20 bp, Artificial Sequence
  Description of Artificial Sequence: Synthetic oligonucleotide
  Target: LAMA2; (+) strand; PAM type: NRG; PAM sequence: AAG
tccagccactgtgcacagct

SEQ ID NO: 175783 - DNA, 20 bp, Artificial Sequence
  Description of Artificial Sequence: Synthetic oligonucleotide
  Target: LAMA2; (+) strand; PAM type: NRG; PAM sequence: CAG
ctgtgcacagctaagcgtgc

SEQ ID NO: 175784 - DNA, 20 bp, Artificial Sequence
  Description of Artificial Sequence: Synthetic oligonucleotide
  Target: LAMA2; (+) strand; PAM type: NRG; PAM sequence: CAG
acagctaagcgtgccagctg

SEQ ID NO: 175785 - DNA, 20 bp, Artificial Sequence
  Description of Artificial Sequence: Synthetic oligonucleotide
  Target: LAMA2; (+) strand; PAM type: NRG; PAM sequence: TGG
gctaagcgtgccagctgcag

SEQ ID NO: 175786 - DNA, 20 bp, Artificial Sequence
  Description of Artificial Sequence: Synthetic oligonucleotide
  Target: LAMA2; (+) strand; PAM type: NRG; PAM sequence: GGG
ctaagcgtgccagctgcagt

SEQ ID NO: 175787 - DNA, 20 bp, Artificial Sequence
  Description of Artificial Sequence: Synthetic oligonucleotide
  Target: LAMA2; (+) strand; PAM type: NRG; PAM sequence: TGG
gcgtgccagctgcagtgggc

SEQ ID NO: 175788 - DNA, 20 bp, Artificial Sequence
  Description of Artificial Sequence: Synthetic oligonucleotide
  Target: LAMA2; (+) strand; PAM type: NRG; PAM sequence: GGG
cgtgccagctgcagtgggct

SEQ ID NO: 175789 - DNA, 20 bp, Artificial Sequence
  Description of Artificial Sequence: Synthetic oligonucleotide
  Target: LAMA2; (+) strand; PAM type: NRG; PAM sequence: CAG
gccagctgcagtgggctggg

SEQ ID NO: 175790 - DNA, 20 bp, Artificial Sequence
  Description of Artificial Sequence: Synthetic oligonucleotide
  Target: LAMA2; (+) strand; PAM type: NRG; PAM sequence: CAG
tgcagtgggctgggcagctc

SEQ ID NO: 175791 - DNA, 20 bp, Artificial Sequence
  Description of Artificial Sequence: Synthetic oligonucleotide
  Target: LAMA2; (+) strand; PAM type: NRG; PAM sequence: AGG
gcagtgggctgggcagctcc

SEQ ID NO: 175792 - DNA, 20 bp, Artificial Sequence
  Description of Artificial Sequence: Synthetic oligonucleotide
  Target: LAMA2; (+) strand; PAM type: NRG; PAM sequence: TGG
ggctgggcagctccaggtcc

SEQ ID NO: 175793 - DNA, 20 bp, Artificial Sequence
  Description of Artificial Sequence: Synthetic oligonucleotide
  Target: LAMA2; (+) strand; PAM type: NRG; PAM sequence: GAG
tccaggtcctggctctatgt

SEQ ID NO: 175794 - DNA, 20 bp, Artificial Sequence
  Description of Artificial Sequence: Synthetic oligonucleotide
  Target: LAMA2; (+) strand; PAM type: NRG; PAM sequence: AGG
ccaggtcctggctctatgtg

SEQ ID NO: 175795 - DNA, 20 bp, Artificial Sequence
  Description of Artificial Sequence: Synthetic oligonucleotide
  Target: LAMA2; (+) strand; PAM type: NRG; PAM sequence: TGG
cctggctctatgtgaggctg

SEQ ID NO: 175796 - DNA, 20 bp, Artificial Sequence
  Description of Artificial Sequence: Synthetic oligonucleotide
  Target: LAMA2; (+) strand; PAM type: NRG; PAM sequence: CAG
atgtgaggctgtggctgaac

SEQ ID NO: 175797 - DNA, 20 bp, Artificial Sequence
  Description of Artificial Sequence: Synthetic oligonucleotide
  Target: LAMA2; (+) strand; PAM type: NRG; PAM sequence: TGG
tgaaccagacatactacaat

SEQ ID NO: 175798 - DNA, 20 bp, Artificial Sequence
  Description of Artificial Sequence: Synthetic oligonucleotide
  Target: LAMA2; (+) strand; PAM type: NRG; PAM sequence: TGG
ctacaattggcttccaccac

SEQ ID NO: 175799 - DNA, 20 bp, Artificial Sequence
  Description of Artificial Sequence: Synthetic oligonucleotide
  Target: LAMA2; (+) strand; PAM type: NRG; PAM sequence: CAG
ttggcttccaccactggtac

SEQ ID NO: 175800 - DNA, 20 bp, Artificial Sequence
  Description of Artificial Sequence: Synthetic oligonucleotide
  Target: LAMA2; (+) strand; PAM type: NRG; PAM sequence: AGG
tggcttccaccactggtacc

SEQ ID NO: 175801 - DNA, 20 bp, Artificial Sequence
  Description of Artificial Sequence: Synthetic oligonucleotide
  Target: LAMA2; (+) strand; PAM type: NRG; PAM sequence: GGG
ggcttccaccactggtacca

SEQ ID NO: 175802 - DNA, 20 bp, Artificial Sequence
  Description of Artificial Sequence: Synthetic oligonucleotide
  Target: LAMA2; (+) strand; PAM type: NRG; PAM sequence: CGG
accactggtaccagggaatg

SEQ ID NO: 175803 - DNA, 20 bp, Artificial Sequence
  Description of Artificial Sequence: Synthetic oligonucleotide
  Target: LAMA2; (+) strand; PAM type: NRG; PAM sequence: TGG
actggtaccagggaatgcgg

SEQ ID NO: 175804 - DNA, 20 bp, Artificial Sequence
  Description of Artificial Sequence: Synthetic oligonucleotide
  Target: LAMA2; (+) strand; PAM type: NRG; PAM sequence: CAG
ccagggaatgcggtggcacc

SEQ ID NO: 175805 - DNA, 20 bp, Artificial Sequence
  Description of Artificial Sequence: Synthetic oligonucleotide
  Target: LAMA2; (+) strand; PAM type: NRG; PAM sequence: AGG
cagggaatgcggtggcaccc

SEQ ID NO: 175806 - DNA, 20 bp, Artificial Sequence
  Description of Artificial Sequence: Synthetic oligonucleotide
  Target: LAMA2; (+) strand; PAM type: NRG; PAM sequence: GAG
gggaatgcggtggcacccag

SEQ ID NO: 175807 - DNA, 20 bp, Artificial Sequence
  Description of Artificial Sequence: Synthetic oligonucleotide
  Target: LAMA2; (+) strand; PAM type: NRG; PAM sequence: TGG
tgcggtggcacccaggagct

SEQ ID NO: 175808 - DNA, 20 bp, Artificial Sequence
  Description of Artificial Sequence: Synthetic oligonucleotide
  Target: LAMA2; (+) strand; PAM type: NRG; PAM sequence: GAG
cggtggcacccaggagcttg

SEQ ID NO: 175809 - DNA, 20 bp, Artificial Sequence
  Description of Artificial Sequence: Synthetic oligonucleotide
  Target: LAMA2; (+) strand; PAM type: NRG; PAM sequence: CAG
acccaggagcttggagatgc

SEQ ID NO: 175810 - DNA, 20 bp, Artificial Sequence
  Description of Artificial Sequence: Synthetic oligonucleotide
  Target: LAMA2; (+) strand; PAM type: NRG; PAM sequence: AGG
cccaggagcttggagatgcc

SEQ ID NO: 175811 - DNA, 20 bp, Artificial Sequence
  Description of Artificial Sequence: Synthetic oligonucleotide
  Target: LAMA2; (+) strand; PAM type: NRG; PAM sequence: CAG
cttggagatgccaggaacca

SEQ ID NO: 175812 - DNA, 20 bp, Artificial Sequence
  Description of Artificial Sequence: Synthetic oligonucleotide
  Target: LAMA2; (+) strand; PAM type: NRG; PAM sequence: GAG
tggagatgccaggaaccaca

SEQ ID NO: 175813 - DNA, 20 bp, Artificial Sequence
  Description of Artificial Sequence: Synthetic oligonucleotide
  Target: LAMA2; (+) strand; PAM type: NRG; PAM sequence: AAG
ccaggaaccacagagtctga

SEQ ID NO: 175814 - DNA, 20 bp, Artificial Sequence
  Description of Artificial Sequence: Synthetic oligonucleotide
  Target: LAMA2; (+) strand; PAM type: NRG; PAM sequence: GAG
aggaaccacagagtctgaaa

SEQ ID NO: 175815 - DNA, 20 bp, Artificial Sequence
  Description of Artificial Sequence: Synthetic oligonucleotide
  Target: LAMA2; (+) strand; PAM type: NRG; PAM sequence: AGG
ggaaccacagagtctgaaag

SEQ ID NO: 175816 - DNA, 20 bp, Artificial Sequence
  Description of Artificial Sequence: Synthetic oligonucleotide
  Target: LAMA2; (+) strand; PAM type: NRG; PAM sequence: GGG
gaaccacagagtctgaaaga

SEQ ID NO: 175817 - DNA, 20 bp, Artificial Sequence
  Description of Artificial Sequence: Synthetic oligonucleotide
  Target: LAMA2; (+) strand; PAM type: NRG; PAM sequence: CAG
gagtctgaaagagggtctca

SEQ ID NO: 175818 - DNA, 20 bp, Artificial Sequence
  Description of Artificial Sequence: Synthetic oligonucleotide
  Target: LAMA2; (+) strand; PAM type: NRG; PAM sequence: TGG
gaaagagggtctcacagccc

SEQ ID NO: 175819 - DNA, 20 bp, Artificial Sequence
  Description of Artificial Sequence: Synthetic oligonucleotide
  Target: LAMA2; (+) strand; PAM type: NRG; PAM sequence: CAG
agggtctcacagccctggct

SEQ ID NO: 175820 - DNA, 20 bp, Artificial Sequence
  Description of Artificial Sequence: Synthetic oligonucleotide
  Target: LAMA2; (+) strand; PAM type: NRG; PAM sequence: AGG
gggtctcacagccctggctc

SEQ ID NO: 175821 - DNA, 20 bp, Artificial Sequence
  Description of Artificial Sequence: Synthetic oligonucleotide
  Target: LAMA2; (+) strand; PAM type: NRG; PAM sequence: GGG
ggtctcacagccctggctca

SEQ ID NO: 175822 - DNA, 20 bp, Artificial Sequence
  Description of Artificial Sequence: Synthetic oligonucleotide
  Target: LAMA2; (+) strand; PAM type: NRG; PAM sequence: GAG
tctcacagccctggctcagg

SEQ ID NO: 175823 - DNA, 20 bp, Artificial Sequence
  Description of Artificial Sequence: Synthetic oligonucleotide
  Target: LAMA2; (+) strand; PAM type: NRG; PAM sequence: TAG
gccctggctcagggagtcca

SEQ ID NO: 175824 - DNA, 20 bp, Artificial Sequence
  Description of Artificial Sequence: Synthetic oligonucleotide
  Target: LAMA2; (+) strand; PAM type: NRG; PAM sequence: AGG
ccctggctcagggagtccat

SEQ ID NO: 175825 - DNA, 20 bp, Artificial Sequence
  Description of Artificial Sequence: Synthetic oligonucleotide
  Target: LAMA2; (+) strand; PAM type: NRG; PAM sequence: CAG
ctcagggagtccataggtct

SEQ ID NO: 175826 - DNA, 20 bp, Artificial Sequence
  Description of Artificial Sequence: Synthetic oligonucleotide
  Target: LAMA2; (+) strand; PAM type: NRG; PAM sequence: AAG
cataggtctcagctccccaa

SEQ ID NO: 175827 - DNA, 20 bp, Artificial Sequence
  Description of Artificial Sequence: Synthetic oligonucleotide
  Target: LAMA2; (+) strand; PAM type: NRG; PAM sequence: AGG
ataggtctcagctccccaaa

SEQ ID NO: 175828 - DNA, 20 bp, Artificial Sequence
  Description of Artificial Sequence: Synthetic oligonucleotide
  Target: LAMA2; (+) strand; PAM type: NRG; PAM sequence: CAG
ctcagctccccaaaaggcca

SEQ ID NO: 175829 - DNA, 20 bp, Artificial Sequence
  Description of Artificial Sequence: Synthetic oligonucleotide
  Target: LAMA2; (+) strand; PAM type: NRG; PAM sequence: TGG
cctgctcattgctgtcaaca

SEQ ID NO: 175830 - DNA, 20 bp, Artificial Sequence
  Description of Artificial Sequence: Synthetic oligonucleotide
  Target: LAMA2; (+) strand; PAM type: NRG; PAM sequence: GAG
ctcattgctgtcaacatggt

SEQ ID NO: 175831 - DNA, 20 bp, Artificial Sequence
  Description of Artificial Sequence: Synthetic oligonucleotide
  Target: LAMA2; (+) strand; PAM type: NRG; PAM sequence: TGG
ttgctgtcaacatggtgagc

SEQ ID NO: 175832 - DNA, 20 bp, Artificial Sequence
  Description of Artificial Sequence: Synthetic oligonucleotide
  Target: LAMA2; (+) strand; PAM type: NRG; PAM sequence: GGG
tgctgtcaacatggtgagct

SEQ ID NO: 175833 - DNA, 20 bp, Artificial Sequence
  Description of Artificial Sequence: Synthetic oligonucleotide
  Target: LAMA2; (+) strand; PAM type: NRG; PAM sequence: GGG
gctgtcaacatggtgagctg

SEQ ID NO: 175834 - DNA, 20 bp, Artificial Sequence
  Description of Artificial Sequence: Synthetic oligonucleotide
  Target: LAMA2; (+) strand; PAM type: NRG; PAM sequence: AAG
gtcaacatggtgagctgggg

SEQ ID NO: 175835 - DNA, 20 bp, Artificial Sequence
  Description of Artificial Sequence: Synthetic oligonucleotide
  Target: LAMA2; (+) strand; PAM type: NRG; PAM sequence: AGG
tcaacatggtgagctgggga

SEQ ID NO: 175836 - DNA, 20 bp, Artificial Sequence
  Description of Artificial Sequence: Synthetic oligonucleotide
  Target: LAMA2; (+) strand; PAM type: NRG; PAM sequence: GGG
caacatggtgagctggggaa

SEQ ID NO: 175837 - DNA, 20 bp, Artificial Sequence
  Description of Artificial Sequence: Synthetic oligonucleotide
  Target: LAMA2; (+) strand; PAM type: NRG; PAM sequence: GGG
aacatggtgagctggggaag

SEQ ID NO: 175838 - DNA, 20 bp, Artificial Sequence
  Description of Artificial Sequence: Synthetic oligonucleotide
  Target: LAMA2; (+) strand; PAM type: NRG; PAM sequence: GGG
acatggtgagctggggaagg

SEQ ID NO: 175839 - DNA, 20 bp, Artificial Sequence
  Description of Artificial Sequence: Synthetic oligonucleotide
  Target: LAMA2; (+) strand; PAM type: NRG; PAM sequence: TAG
tttcaaccctgtttgtgttg

SEQ ID NO: 175840 - DNA, 20 bp, Artificial Sequence
  Description of Artificial Sequence: Synthetic oligonucleotide
  Target: LAMA2; (+) strand; PAM type: NRG; PAM sequence: CGG
tctctcatttccaccatttg

SEQ ID NO: 175841 - DNA, 20 bp, Artificial Sequence
  Description of Artificial Sequence: Synthetic oligonucleotide
  Target: LAMA2; (+) strand; PAM type: NRG; PAM sequence: GGG
ctctcatttccaccatttgc

SEQ ID NO: 175842 - DNA, 20 bp, Artificial Sequence
  Description of Artificial Sequence: Synthetic oligonucleotide
  Target: LAMA2; (+) strand; PAM type: NRG; PAM sequence: GGG
tctcatttccaccatttgcg

SEQ ID NO: 175843 - DNA, 20 bp, Artificial Sequence
  Description of Artificial Sequence: Synthetic oligonucleotide
  Target: LAMA2; (+) strand; PAM type: NRG; PAM sequence: GGG
ctcatttccaccatttgcgg

SEQ ID NO: 175844 - DNA, 20 bp, Artificial Sequence
  Description of Artificial Sequence: Synthetic oligonucleotide
  Target: LAMA2; (+) strand; PAM type: NRG; PAM sequence: GGG
tcatttccaccatttgcggg

SEQ ID NO: 175845 - DNA, 20 bp, Artificial Sequence
  Description of Artificial Sequence: Synthetic oligonucleotide
  Target: LAMA2; (+) strand; PAM type: NRG; PAM sequence: GGG
catttccaccatttgcgggg

SEQ ID NO: 175846 - DNA, 20 bp, Artificial Sequence
  Description of Artificial Sequence: Synthetic oligonucleotide
  Target: LAMA2; (+) strand; PAM type: NRG; PAM sequence: AAG
accatttgcgggggggtccc

SEQ ID NO: 175847 - DNA, 20 bp, Artificial Sequence
  Description of Artificial Sequence: Synthetic oligonucleotide
  Target: LAMA2; (+) strand; PAM type: NRG; PAM sequence: TGG
caagttcttgtcccacatcc

SEQ ID NO: 175848 - DNA, 20 bp, Artificial Sequence
  Description of Artificial Sequence: Synthetic oligonucleotide
  Target: LAMA2; (+) strand; PAM type: NRG; PAM sequence: AAG
gttcttgtcccacatcctgg

SEQ ID NO: 175849 - DNA, 20 bp, Artificial Sequence
  Description of Artificial Sequence: Synthetic oligonucleotide
  Target: LAMA2; (+) strand; PAM type: NRG; PAM sequence: GAG
gtcccacatcctggaagaat

SEQ ID NO: 175850 - DNA, 20 bp, Artificial Sequence
  Description of Artificial Sequence: Synthetic oligonucleotide
  Target: LAMA2; (+) strand; PAM type: NRG; PAM sequence: AGG
tcccacatcctggaagaatg

SEQ ID NO: 175851 - DNA, 20 bp, Artificial Sequence
  Description of Artificial Sequence: Synthetic oligonucleotide
  Target: LAMA2; (+) strand; PAM type: NRG; PAM sequence: CAG
tcctggaagaatgaggtttg

SEQ ID NO: 175852 - DNA, 20 bp, Artificial Sequence
  Description of Artificial Sequence: Synthetic oligonucleotide
  Target: LAMA2; (+) strand; PAM type: NRG; PAM sequence: TGG
gaatgaggtttgcagacaac

SEQ ID NO: 175853 - DNA, 20 bp, Artificial Sequence
  Description of Artificial Sequence: Synthetic oligonucleotide
  Target: LAMA2; (+) strand; PAM type: NRG; PAM sequence: GAG
atgaggtttgcagacaactg

SEQ ID NO: 175854 - DNA, 20 bp, Artificial Sequence
  Description of Artificial Sequence: Synthetic oligonucleotide
  Target: LAMA2; (+) strand; PAM type: NRG; PAM sequence: AGG
tgaggtttgcagacaactgg

SEQ ID NO: 175855 - DNA, 20 bp, Artificial Sequence
  Description of Artificial Sequence: Synthetic oligonucleotide
  Target: LAMA2; (+) strand; PAM type: NRG; PAM sequence: GGG
gaggtttgcagacaactgga

SEQ ID NO: 175856 - DNA, 20 bp, Artificial Sequence
  Description of Artificial Sequence: Synthetic oligonucleotide
  Target: LAMA2; (+) strand; PAM type: NRG; PAM sequence: TAG
tttgcagacaactggagggt

SEQ ID NO: 175857 - DNA, 20 bp, Artificial Sequence
  Description of Artificial Sequence: Synthetic oligonucleotide
  Target: LAMA2; (+) strand; PAM type: NRG; PAM sequence: AAG
cagacaactggagggttagc

SEQ ID NO: 175858 - DNA, 20 bp, Artificial Sequence
  Description of Artificial Sequence: Synthetic oligonucleotide
  Target: LAMA2; (+) strand; PAM type: NRG; PAM sequence: AGG
agacaactggagggttagca

SEQ ID NO: 175859 - DNA, 20 bp, Artificial Sequence
  Description of Artificial Sequence: Synthetic oligonucleotide
  Target: LAMA2; (+) strand; PAM type: NRG; PAM sequence: AAG
actggagggttagcaaggtg

SEQ ID NO: 175860 - DNA, 20 bp, Artificial Sequence
  Description of Artificial Sequence: Synthetic oligonucleotide
  Target: LAMA2; (+) strand; PAM type: NRG; PAM sequence: GAG
tggagggttagcaaggtgaa

SEQ ID NO: 175861 - DNA, 20 bp, Artificial Sequence
  Description of Artificial Sequence: Synthetic oligonucleotide
  Target: LAMA2; (+) strand; PAM type: NRG; PAM sequence: AGG
ggagggttagcaaggtgaag

SEQ ID NO: 175862 - DNA, 20 bp, Artificial Sequence
  Description of Artificial Sequence: Synthetic oligonucleotide
  Target: LAMA2; (+) strand; PAM type: NRG; PAM sequence: GAG
aggtgaagaggtgctttatt

SEQ ID NO: 175863 - DNA, 20 bp, Artificial Sequence
  Description of Artificial Sequence: Synthetic oligonucleotide
  Target: LAMA2; (+) strand; PAM type: NRG; PAM sequence: CAG
agaggtgctttattgagtga

SEQ ID NO: 175864 - DNA, 20 bp, Artificial Sequence
  Description of Artificial Sequence: Synthetic oligonucleotide
  Target: LAMA2; (+) strand; PAM type: NRG; PAM sequence: CAG
ttgagtgacagtgcaactct

SEQ ID NO: 175865 - DNA, 20 bp, Artificial Sequence
  Description of Artificial Sequence: Synthetic oligonucleotide
  Target: LAMA2; (+) strand; PAM type: NRG; PAM sequence: AGG
tgagtgacagtgcaactctc

SEQ ID NO: 175866 - DNA, 20 bp, Artificial Sequence
  Description of Artificial Sequence: Synthetic oligonucleotide
  Target: LAMA2; (+) strand; PAM type: NRG; PAM sequence: GAG
agtgacagtgcaactctcag

SEQ ID NO: 175867 - DNA, 20 bp, Artificial Sequence
  Description of Artificial Sequence: Synthetic oligonucleotide
  Target: LAMA2; (+) strand; PAM type: NRG; PAM sequence: AGG
gtgacagtgcaactctcagg

SEQ ID NO: 175868 - DNA, 20 bp, Artificial Sequence
  Description of Artificial Sequence: Synthetic oligonucleotide
  Target: LAMA2; (+) strand; PAM type: NRG; PAM sequence: TGG
aactctcaggaggcctgaaa

SEQ ID NO: 175869 - DNA, 20 bp, Artificial Sequence
  Description of Artificial Sequence: Synthetic oligonucleotide
  Target: LAMA2; (+) strand; PAM type: NRG; PAM sequence: GGG
actctcaggaggcctgaaat

SEQ ID NO: 175870 - DNA, 20 bp, Artificial Sequence
  Description of Artificial Sequence: Synthetic oligonucleotide
  Target: LAMA2; (+) strand; PAM type: NRG; PAM sequence: TAG
ctcaggaggcctgaaatggg

SEQ ID NO: 175871 - DNA, 20 bp, Artificial Sequence
  Description of Artificial Sequence: Synthetic oligonucleotide
  Target: LAMA2; (+) strand; PAM type: NRG; PAM sequence: CAG
aaatgggtagctccgttcca

SEQ ID NO: 175872 - DNA, 20 bp, Artificial Sequence
  Description of Artificial Sequence: Synthetic oligonucleotide
  Target: LAMA2; (+) strand; PAM type: NRG; PAM sequence: AGG
aatgggtagctccgttccac

SEQ ID NO: 175873 - DNA, 20 bp, Artificial Sequence
  Description of Artificial Sequence: Synthetic oligonucleotide
  Target: LAMA2; (+) strand; PAM type: NRG; PAM sequence: CAG
gggtagctccgttccacagg

SEQ ID NO: 175874 - DNA, 20 bp, Artificial Sequence
  Description of Artificial Sequence: Synthetic oligonucleotide
  Target: LAMA2; (+) strand; PAM type: NRG; PAM sequence: AGG
ggtagctccgttccacaggc

SEQ ID NO: 175875 - DNA, 20 bp, Artificial Sequence
  Description of Artificial Sequence: Synthetic oligonucleotide
  Target: LAMA2; (+) strand; PAM type: NRG; PAM sequence: CAG
gttccacaggcaggtaattc

SEQ ID NO: 175876 - DNA, 20 bp, Artificial Sequence
  Description of Artificial Sequence: Synthetic oligonucleotide
  Target: LAMA2; (+) strand; PAM type: NRG; PAM sequence: CAG
aggtaattccagcatctgtg

SEQ ID NO: 175877 - DNA, 20 bp, Artificial Sequence
  Description of Artificial Sequence: Synthetic oligonucleotide
  Target: LAMA2; (+) strand; PAM type: NRG; PAM sequence: CAG
catctgtgcagcaccctcaa

SEQ ID NO: 175878 - DNA, 20 bp, Artificial Sequence
  Description of Artificial Sequence: Synthetic oligonucleotide
  Target: LAMA2; (+) strand; PAM type: NRG; PAM sequence: GAG
tctgtgcagcaccctcaaca

SEQ ID NO: 175879 - DNA, 20 bp, Artificial Sequence
  Description of Artificial Sequence: Synthetic oligonucleotide
  Target: LAMA2; (+) strand; PAM type: NRG; PAM sequence: AGG
ctgtgcagcaccctcaacag

SEQ ID NO: 175880 - DNA, 20 bp, Artificial Sequence
  Description of Artificial Sequence: Synthetic oligonucleotide
  Target: LAMA2; (+) strand; PAM type: NRG; PAM sequence: GAG
gcagcaccctcaacagaggt

SEQ ID NO: 175881 - DNA, 20 bp, Artificial Sequence
  Description of Artificial Sequence: Synthetic oligonucleotide
  Target: LAMA2; (+) strand; PAM type: NRG; PAM sequence: CAG
ctcaacagaggtgagacaca

SEQ ID NO: 175882 - DNA, 20 bp, Artificial Sequence
  Description of Artificial Sequence: Synthetic oligonucleotide
  Target: LAMA2; (+) strand; PAM type: NRG; PAM sequence: TGG
aacagaggtgagacacacag

SEQ ID NO: 175883 - DNA, 20 bp, Artificial Sequence
  Description of Artificial Sequence: Synthetic oligonucleotide
  Target: LAMA2; (+) strand; PAM type: NRG; PAM sequence: GGG
acagaggtgagacacacagt

SEQ ID NO: 175884 - DNA, 20 bp, Artificial Sequence
  Description of Artificial Sequence: Synthetic oligonucleotide
  Target: LAMA2; (+) strand; PAM type: NRG; PAM sequence: TAG
gaggtgagacacacagtggg

SEQ ID NO: 175885 - DNA, 20 bp, Artificial Sequence
  Description of Artificial Sequence: Synthetic oligonucleotide
  Target: LAMA2; (+) strand; PAM type: NRG; PAM sequence: CAG
cagtgggtagctcctatcca

SEQ ID NO: 175886 - DNA, 20 bp, Artificial Sequence
  Description of Artificial Sequence: Synthetic oligonucleotide
  Target: LAMA2; (+) strand; PAM type: NRG; PAM sequence: AGG
agtgggtagctcctatccac

SEQ ID NO: 175887 - DNA, 20 bp, Artificial Sequence
  Description of Artificial Sequence: Synthetic oligonucleotide
  Target: LAMA2; (+) strand; PAM type: NRG; PAM sequence: TAG
gggtagctcctatccacagg

SEQ ID NO: 175888 - DNA, 20 bp, Artificial Sequence
  Description of Artificial Sequence: Synthetic oligonucleotide
  Target: LAMA2; (+) strand; PAM type: NRG; PAM sequence: TGG
tcctgttgtctgcccacgtc

SEQ ID NO: 175889 - DNA, 20 bp, Artificial Sequence
  Description of Artificial Sequence: Synthetic oligonucleotide
  Target: LAMA2; (+) strand; PAM type: NRG; PAM sequence: GAG
ttgtctgcccacgtctggct

SEQ ID NO: 175890 - DNA, 20 bp, Artificial Sequence
  Description of Artificial Sequence: Synthetic oligonucleotide
  Target: LAMA2; (+) strand; PAM type: NRG; PAM sequence: CGG
tgcccacgtctggctgagtc

SEQ ID NO: 175891 - DNA, 20 bp, Artificial Sequence
  Description of Artificial Sequence: Synthetic oligonucleotide
  Target: LAMA2; (+) strand; PAM type: NRG; PAM sequence: GGG
gcccacgtctggctgagtcc

SEQ ID NO: 175892 - DNA, 20 bp, Artificial Sequence
  Description of Artificial Sequence: Synthetic oligonucleotide
  Target: LAMA2; (+) strand; PAM type: NRG; PAM sequence: GGG
cccacgtctggctgagtccg

SEQ ID NO: 175893 - DNA, 20 bp, Artificial Sequence
  Description of Artificial Sequence: Synthetic oligonucleotide
  Target: LAMA2; (+) strand; PAM type: NRG; PAM sequence: TGG
gctgagtccggggtttttta

SEQ ID NO: 175894 - DNA, 20 bp, Artificial Sequence
  Description of Artificial Sequence: Synthetic oligonucleotide
  Target: LAMA2; (+) strand; PAM type: NRG; PAM sequence: GGG
ctgagtccggggttttttat

SEQ ID NO: 175895 - DNA, 20 bp, Artificial Sequence
  Description of Artificial Sequence: Synthetic oligonucleotide
  Target: LAMA2; (+) strand; PAM type: NRG; PAM sequence: CAG
ccggggttttttatgggcct

SEQ ID NO: 175896 - DNA, 20 bp, Artificial Sequence
  Description of Artificial Sequence: Synthetic oligonucleotide
  Target: LAMA2; (+) strand; PAM type: NRG; PAM sequence: GAG
ggggttttttatgggcctca

SEQ ID NO: 175897 - DNA, 20 bp, Artificial Sequence
  Description of Artificial Sequence: Synthetic oligonucleotide
  Target: LAMA2; (+) strand; PAM type: NRG; PAM sequence: AGG
gggttttttatgggcctcag

SEQ ID NO: 175898 - DNA, 20 bp, Artificial Sequence
  Description of Artificial Sequence: Synthetic oligonucleotide
  Target: LAMA2; (+) strand; PAM type: NRG; PAM sequence: GGG
ggttttttatgggcctcaga

SEQ ID NO: 175899 - DNA, 20 bp, Artificial Sequence
  Description of Artificial Sequence: Synthetic oligonucleotide
  Target: LAMA2; (+) strand; PAM type: NRG; PAM sequence: GGG
gttttttatgggcctcagag

SEQ ID NO: 175900 - DNA, 20 bp, Artificial Sequence
  Description of Artificial Sequence: Synthetic oligonucleotide
  Target: LAMA2; (+) strand; PAM type: NRG; PAM sequence: GAG
tttttatgggcctcagaggg

SEQ ID NO: 175901 - DNA, 20 bp, Artificial Sequence
  Description of Artificial Sequence: Synthetic oligonucleotide
  Target: LAMA2; (+) strand; PAM type: NRG; PAM sequence: AGG
ttttatgggcctcagagggg

SEQ ID NO: 175902 - DNA, 20 bp, Artificial Sequence
  Description of Artificial Sequence: Synthetic oligonucleotide
  Target: LAMA2; (+) strand; PAM type: NRG; PAM sequence: AAG
tatgggcctcagaggggagg

SEQ ID NO: 175903 - DNA, 20 bp, Artificial Sequence
  Description of Artificial Sequence: Synthetic oligonucleotide
  Target: LAMA2; (+) strand; PAM type: NRG; PAM sequence: TGG
gggaggaagtgtatgctgat

SEQ ID NO: 175904 - DNA, 20 bp, Artificial Sequence
  Description of Artificial Sequence: Synthetic oligonucleotide
  Target: LAMA2; (+) strand; PAM type: NRG; PAM sequence: TGG
agtgtatgctgattggtcca

SEQ ID NO: 175905 - DNA, 20 bp, Artificial Sequence
  Description of Artificial Sequence: Synthetic oligonucleotide
  Target: LAMA2; (+) strand; PAM type: NRG; PAM sequence: GGG
gtgtatgctgattggtccat

SEQ ID NO: 175906 - DNA, 20 bp, Artificial Sequence
  Description of Artificial Sequence: Synthetic oligonucleotide
  Target: LAMA2; (+) strand; PAM type: NRG; PAM sequence: TGG
tatgctgattggtccatggg

SEQ ID NO: 175907 - DNA, 20 bp, Artificial Sequence
  Description of Artificial Sequence: Synthetic oligonucleotide
  Target: LAMA2; (+) strand; PAM type: NRG; PAM sequence: GAG
attggtccatgggtggccat

SEQ ID NO: 175908 - DNA, 20 bp, Artificial Sequence
  Description of Artificial Sequence: Synthetic oligonucleotide
  Target: LAMA2; (+) strand; PAM type: NRG; PAM sequence: TGG
gtccatgggtggccatgagc

SEQ ID NO: 175909 - DNA, 20 bp, Artificial Sequence
  Description of Artificial Sequence: Synthetic oligonucleotide
  Target: LAMA2; (+) strand; PAM type: NRG; PAM sequence: AAG
gccatgagctggcccaaaaa

SEQ ID NO: 175910 - DNA, 20 bp, Artificial Sequence
  Description of Artificial Sequence: Synthetic oligonucleotide
  Target: LAMA2; (+) strand; PAM type: NRG; PAM sequence: AAG
tggcccaaaaaaagcaccat

SEQ ID NO: 175911 - DNA, 20 bp, Artificial Sequence
  Description of Artificial Sequence: Synthetic oligonucleotide
  Target: LAMA2; (+) strand; PAM type: NRG; PAM sequence: CAG
agcaccataagttctcactc

SEQ ID NO: 175912 - DNA, 20 bp, Artificial Sequence
  Description of Artificial Sequence: Synthetic oligonucleotide
  Target: LAMA2; (+) strand; PAM type: NRG; PAM sequence: TGG
taagttctcactccagtttg

SEQ ID NO: 175913 - DNA, 20 bp, Artificial Sequence
  Description of Artificial Sequence: Synthetic oligonucleotide
  Target: LAMA2; (+) strand; PAM type: NRG; PAM sequence: CAG
actccagtttgtggaaccga

SEQ ID NO: 175914 - DNA, 20 bp, Artificial Sequence
  Description of Artificial Sequence: Synthetic oligonucleotide
  Target: LAMA2; (+) strand; PAM type: NRG; PAM sequence: CAG
agtttgtggaaccgacagtc

SEQ ID NO: 175915 - DNA, 20 bp, Artificial Sequence
  Description of Artificial Sequence: Synthetic oligonucleotide
  Target: LAMA2; (+) strand; PAM type: NRG; PAM sequence: CAG
acagtccagcccccttcctt

SEQ ID NO: 175916 - DNA, 20 bp, Artificial Sequence
  Description of Artificial Sequence: Synthetic oligonucleotide
  Target: LAMA2; (+) strand; PAM type: NRG; PAM sequence: AGG
cagtccagcccccttccttc

SEQ ID NO: 175917 - DNA, 20 bp, Artificial Sequence
  Description of Artificial Sequence: Synthetic oligonucleotide
  Target: LAMA2; (+) strand; PAM type: NRG; PAM sequence: CAG
tccagcccccttccttcagg

SEQ ID NO: 175918 - DNA, 20 bp, Artificial Sequence
  Description of Artificial Sequence: Synthetic oligonucleotide
  Target: LAMA2; (+) strand; PAM type: NRG; PAM sequence: TGG
cccttccttcaggcagtccc

SEQ ID NO: 175919 - DNA, 20 bp, Artificial Sequence
  Description of Artificial Sequence: Synthetic oligonucleotide
  Target: LAMA2; (+) strand; PAM type: NRG; PAM sequence: AAG
ttcaggcagtccctggcttg

SEQ ID NO: 175920 - DNA, 20 bp, Artificial Sequence
  Description of Artificial Sequence: Synthetic oligonucleotide
  Target: LAMA2; (+) strand; PAM type: NRG; PAM sequence: AGG
tcaggcagtccctggcttga

SEQ ID NO: 175921 - DNA, 20 bp, Artificial Sequence
  Description of Artificial Sequence: Synthetic oligonucleotide
  Target: LAMA2; (+) strand; PAM type: NRG; PAM sequence: TGG
ggcagtccctggcttgaagg

SEQ ID NO: 175922 - DNA, 20 bp, Artificial Sequence
  Description of Artificial Sequence: Synthetic oligonucleotide
  Target: LAMA2; (+) strand; PAM type: NRG; PAM sequence: GAG
cagtccctggcttgaaggtg

SEQ ID NO: 175923 - DNA, 20 bp, Artificial Sequence
  Description of Artificial Sequence: Synthetic oligonucleotide
  Target: LAMA2; (+) strand; PAM type: NRG; PAM sequence: GAG
cttgaaggtggagcttcact

SEQ ID NO: 175924 - DNA, 20 bp, Artificial Sequence
  Description of Artificial Sequence: Synthetic oligonucleotide
  Target: LAMA2; (+) strand; PAM type: NRG; PAM sequence: AGG
ttgaaggtggagcttcactg

SEQ ID NO: 175925 - DNA, 20 bp, Artificial Sequence
  Description of Artificial Sequence: Synthetic oligonucleotide
  Target: LAMA2; (+) strand; PAM type: NRG; PAM sequence: GGG
tgaaggtggagcttcactga

SEQ ID NO: 175926 - DNA, 20 bp, Artificial Sequence
  Description of Artificial Sequence: Synthetic oligonucleotide
  Target: LAMA2; (+) strand; PAM type: NRG; PAM sequence: CAG
agggcccacccctttccacc

SEQ ID NO: 175927 - DNA, 20 bp, Artificial Sequence
  Description of Artificial Sequence: Synthetic oligonucleotide
  Target: LAMA2; (+) strand; PAM type: NRG; PAM sequence: AGG
gggcccacccctttccaccc

SEQ ID NO: 175928 - DNA, 20 bp, Artificial Sequence
  Description of Artificial Sequence: Synthetic oligonucleotide
  Target: LAMA2; (+) strand; PAM type: NRG; PAM sequence: CGG
caccaccaacctgccatcca

SEQ ID NO: 175929 - DNA, 20 bp, Artificial Sequence
  Description of Artificial Sequence: Synthetic oligonucleotide
  Target: LAMA2; (+) strand; PAM type: NRG; PAM sequence: TGG
ctgccatccacggcgcccac

SEQ ID NO: 175930 - DNA, 20 bp, Artificial Sequence
  Description of Artificial Sequence: Synthetic oligonucleotide
  Target: LAMA2; (+) strand; PAM type: NRG; PAM sequence: CAG
ccacggcgcccactggcacc

SEQ ID NO: 175931 - DNA, 20 bp, Artificial Sequence
  Description of Artificial Sequence: Synthetic oligonucleotide
  Target: LAMA2; (+) strand; PAM type: NRG; PAM sequence: AGG
cacggcgcccactggcaccc

SEQ ID NO: 175932 - DNA, 20 bp, Artificial Sequence
  Description of Artificial Sequence: Synthetic oligonucleotide
  Target: LAMA2; (+) strand; PAM type: NRG; PAM sequence: TAG
gcacccaggctgttcatgcc

SEQ ID NO: 175933 - DNA, 20 bp, Artificial Sequence
  Description of Artificial Sequence: Synthetic oligonucleotide
  Target: LAMA2; (+) strand; PAM type: NRG; PAM sequence: AGG
cacccaggctgttcatgcct

SEQ ID NO: 175934 - DNA, 20 bp, Artificial Sequence
  Description of Artificial Sequence: Synthetic oligonucleotide
  Target: LAMA2; (+) strand; PAM type: NRG; PAM sequence: GGG
acccaggctgttcatgccta

SEQ ID NO: 175935 - DNA, 20 bp, Artificial Sequence
  Description of Artificial Sequence: Synthetic oligonucleotide
  Target: LAMA2; (+) strand; PAM type: NRG; PAM sequence: CAG
ttcatgcctagggtcacctt

SEQ ID NO: 175936 - DNA, 20 bp, Artificial Sequence
  Description of Artificial Sequence: Synthetic oligonucleotide
  Target: LAMA2; (+) strand; PAM type: NRG; PAM sequence: AGG
tcatgcctagggtcaccttc

SEQ ID NO: 175937 - DNA, 20 bp, Artificial Sequence
  Description of Artificial Sequence: Synthetic oligonucleotide
  Target: LAMA2; (+) strand; PAM type: NRG; PAM sequence: CAG
gggtcaccttcaggcccatg

SEQ ID NO: 175938 - DNA, 20 bp, Artificial Sequence
  Description of Artificial Sequence: Synthetic oligonucleotide
  Target: LAMA2; (+) strand; PAM type: NRG; PAM sequence: GAG
gtcaccttcaggcccatgca

SEQ ID NO: 175939 - DNA, 20 bp, Artificial Sequence
  Description of Artificial Sequence: Synthetic oligonucleotide
  Target: LAMA2; (+) strand; PAM type: NRG; PAM sequence: TGG
agccaccctcaactccccct

SEQ ID NO: 175940 - DNA, 20 bp, Artificial Sequence
  Description of Artificial Sequence: Synthetic oligonucleotide
  Target: LAMA2; (+) strand; PAM type: NRG; PAM sequence: TGG
ggcctccctaatgtgctcct

SEQ ID NO: 175941 - DNA, 20 bp, Artificial Sequence
  Description of Artificial Sequence: Synthetic oligonucleotide
  Target: LAMA2; (+) strand; PAM type: NRG; PAM sequence: CAG
gctccttggcacccaaaatc

SEQ ID NO: 175942 - DNA, 20 bp, Artificial Sequence
  Description of Artificial Sequence: Synthetic oligonucleotide
  Target: LAMA2; (+) strand; PAM type: NRG; PAM sequence: AAG
ccttggcacccaaaatccag

SEQ ID NO: 175943 - DNA, 20 bp, Artificial Sequence
  Description of Artificial Sequence: Synthetic oligonucleotide
  Target: LAMA2; (+) strand; PAM type: NRG; PAM sequence: AGG
cttggcacccaaaatccaga

SEQ ID NO: 175944 - DNA, 20 bp, Artificial Sequence
  Description of Artificial Sequence: Synthetic oligonucleotide
  Target: LAMA2; (+) strand; PAM type: NRG; PAM sequence: GGG
ttggcacccaaaatccagaa

SEQ ID NO: 175945 - DNA, 20 bp, Artificial Sequence
  Description of Artificial Sequence: Synthetic oligonucleotide
  Target: LAMA2; (+) strand; PAM type: NRG; PAM sequence: GGG
tggcacccaaaatccagaag

SEQ ID NO: 175946 - DNA, 20 bp, Artificial Sequence
  Description of Artificial Sequence: Synthetic oligonucleotide
  Target: LAMA2; (+) strand; PAM type: NRG; PAM sequence: AAG
cccaaaatccagaaggggcc

SEQ ID NO: 175947 - DNA, 20 bp, Artificial Sequence
  Description of Artificial Sequence: Synthetic oligonucleotide
  Target: LAMA2; (+) strand; PAM type: NRG; PAM sequence: TAG
aaatccagaaggggccaaga

SEQ ID NO: 175948 - DNA, 20 bp, Artificial Sequence
  Description of Artificial Sequence: Synthetic oligonucleotide
  Target: LAMA2; (+) strand; PAM type: NRG; PAM sequence: TAG
tccagaaggggccaagatag

SEQ ID NO: 175949 - DNA, 20 bp, Artificial Sequence
  Description of Artificial Sequence: Synthetic oligonucleotide
  Target: LAMA2; (+) strand; PAM type: NRG; PAM sequence: AGG
ccagaaggggccaagatagt

SEQ ID NO: 175950 - DNA, 20 bp, Artificial Sequence
  Description of Artificial Sequence: Synthetic oligonucleotide
  Target: LAMA2; (+) strand; PAM type: NRG; PAM sequence: GGG
cagaaggggccaagatagta

SEQ ID NO: 175951 - DNA, 20 bp, Artificial Sequence
  Description of Artificial Sequence: Synthetic oligonucleotide
  Target: LAMA2; (+) strand; PAM type: NRG; PAM sequence: GGG
agaaggggccaagatagtag

SEQ ID NO: 175952 - DNA, 20 bp, Artificial Sequence
  Description of Artificial Sequence: Synthetic oligonucleotide
  Target: LAMA2; (+) strand; PAM type: NRG; PAM sequence: GGG
gaaggggccaagatagtagg

SEQ ID NO: 175953 - DNA, 20 bp, Artificial Sequence
  Description of Artificial Sequence: Synthetic oligonucleotide
  Target: LAMA2; (+) strand; PAM type: NRG; PAM sequence: TAG
gggccaagatagtagggggc

SEQ ID NO: 175954 - DNA, 20 bp, Artificial Sequence
  Description of Artificial Sequence: Synthetic oligonucleotide
  Target: LAMA2; (+) strand; PAM type: NRG; PAM sequence: GAG
gccaagatagtagggggcta

SEQ ID NO: 175955 - DNA, 20 bp, Artificial Sequence
  Description of Artificial Sequence: Synthetic oligonucleotide
  Target: LAMA2; (+) strand; PAM type: NRG; PAM sequence: CAG
atagtagggggctagagtgt

SEQ ID NO: 175956 - DNA, 20 bp, Artificial Sequence
  Description of Artificial Sequence: Synthetic oligonucleotide
  Target: LAMA2; (+) strand; PAM type: NRG; PAM sequence: GAG
tagagtgtcagtgctgcccc

SEQ ID NO: 175957 - DNA, 20 bp, Artificial Sequence
  Description of Artificial Sequence: Synthetic oligonucleotide
  Target: LAMA2; (+) strand; PAM type: NRG; PAM sequence: TGG
gccccgagcatatgcacacc

SEQ ID NO: 175958 - DNA, 20 bp, Artificial Sequence
  Description of Artificial Sequence: Synthetic oligonucleotide
  Target: LAMA2; (+) strand; PAM type: NRG; PAM sequence: TGG
cgagcatatgcacacctggc

SEQ ID NO: 175959 - DNA, 20 bp, Artificial Sequence
  Description of Artificial Sequence: Synthetic oligonucleotide
  Target: LAMA2; (+) strand; PAM type: NRG; PAM sequence: GGG
gagcatatgcacacctggct

SEQ ID NO: 175960 - DNA, 20 bp, Artificial Sequence
  Description of Artificial Sequence: Synthetic oligonucleotide
  Target: LAMA2; (+) strand; PAM type: NRG; PAM sequence: CAG
cacacctggctgggttgcaa

SEQ ID NO: 175961 - DNA, 20 bp, Artificial Sequence
  Description of Artificial Sequence: Synthetic oligonucleotide
  Target: LAMA2; (+) strand; PAM type: NRG; PAM sequence: CAG
tggctgggttgcaacagcct

SEQ ID NO: 175962 - DNA, 20 bp, Artificial Sequence
  Description of Artificial Sequence: Synthetic oligonucleotide
  Target: LAMA2; (+) strand; PAM type: NRG; PAM sequence: CAG
cctcagctttgctctgaaat

SEQ ID NO: 175963 - DNA, 20 bp, Artificial Sequence
  Description of Artificial Sequence: Synthetic oligonucleotide
  Target: LAMA2; (+) strand; PAM type: NRG; PAM sequence: TGG
gctttgctctgaaatcagcc

SEQ ID NO: 175964 - DNA, 20 bp, Artificial Sequence
  Description of Artificial Sequence: Synthetic oligonucleotide
  Target: LAMA2; (+) strand; PAM type: NRG; PAM sequence: GGG
ctttgctctgaaatcagcct

SEQ ID NO: 175965 - DNA, 20 bp, Artificial Sequence
  Description of Artificial Sequence: Synthetic oligonucleotide
  Target: LAMA2; (+) strand; PAM type: NRG; PAM sequence: CGG
tctgaaatcagcctgggtgc

SEQ ID NO: 175966 - DNA, 20 bp, Artificial Sequence
  Description of Artificial Sequence: Synthetic oligonucleotide
  Target: LAMA2; (+) strand; PAM type: NRG; PAM sequence: GGG
ctgaaatcagcctgggtgcc

SEQ ID NO: 175967 - DNA, 20 bp, Artificial Sequence
  Description of Artificial Sequence: Synthetic oligonucleotide
  Target: LAMA2; (+) strand; PAM type: NRG; PAM sequence: CAG
atcagcctgggtgccgggaa

SEQ ID NO: 175968 - DNA, 20 bp, Artificial Sequence
  Description of Artificial Sequence: Synthetic oligonucleotide
  Target: LAMA2; (+) strand; PAM type: NRG; PAM sequence: GAG
gcctgggtgccgggaacagt

SEQ ID NO: 175969 - DNA, 20 bp, Artificial Sequence
  Description of Artificial Sequence: Synthetic oligonucleotide
  Target: LAMA2; (+) strand; PAM type: NRG; PAM sequence: GAG
ctgggtgccgggaacagtga

SEQ ID NO: 175970 - DNA, 20 bp, Artificial Sequence
  Description of Artificial Sequence: Synthetic oligonucleotide
  Target: LAMA2; (+) strand; PAM type: NRG; PAM sequence: CAG
tgccgggaacagtgagagac

SEQ ID NO: 175971 - DNA, 20 bp, Artificial Sequence
  Description of Artificial Sequence: Synthetic oligonucleotide
  Target: LAMA2; (+) strand; PAM type: NRG; PAM sequence: AGG
gccgggaacagtgagagacc

SEQ ID NO: 175972 - DNA, 20 bp, Artificial Sequence
  Description of Artificial Sequence: Synthetic oligonucleotide
  Target: LAMA2; (+) strand; PAM type: NRG; PAM sequence: AAG
gggaacagtgagagaccagg

SEQ ID NO: 175973 - DNA, 20 bp, Artificial Sequence
  Description of Artificial Sequence: Synthetic oligonucleotide
  Target: LAMA2; (+) strand; PAM type: NRG; PAM sequence: AAG
aacagtgagagaccaggaag

SEQ ID NO: 175974 - DNA, 20 bp, Artificial Sequence
  Description of Artificial Sequence: Synthetic oligonucleotide
  Target: LAMA2; (+) strand; PAM type: NRG; PAM sequence: AGG
acagtgagagaccaggaaga

SEQ ID NO: 175975 - DNA, 20 bp, Artificial Sequence
  Description of Artificial Sequence: Synthetic oligonucleotide
  Target: LAMA2; (+) strand; PAM type: NRG; PAM sequence: GAG
agtgagagaccaggaagaag

SEQ ID NO: 175976 - DNA, 20 bp, Artificial Sequence
  Description of Artificial Sequence: Synthetic oligonucleotide
  Target: LAMA2; (+) strand; PAM type: NRG; PAM sequence: CGG
gagagaccaggaagaaggag

SEQ ID NO: 175977 - DNA, 20 bp, Artificial Sequence
  Description of Artificial Sequence: Synthetic oligonucleotide
  Target: LAMA2; (+) strand; PAM type: NRG; PAM sequence: GGG
agagaccaggaagaaggagc

SEQ ID NO: 175978 - DNA, 20 bp, Artificial Sequence
  Description of Artificial Sequence: Synthetic oligonucleotide
  Target: LAMA2; (+) strand; PAM type: NRG; PAM sequence: GAG
aagaaggagcgggcacttct

SEQ ID NO: 175979 - DNA, 20 bp, Artificial Sequence
  Description of Artificial Sequence: Synthetic oligonucleotide
  Target: LAMA2; (+) strand; PAM type: NRG; PAM sequence: TAG
agcgggcacttctgagcctg

SEQ ID NO: 175980 - DNA, 20 bp, Artificial Sequence
  Description of Artificial Sequence: Synthetic oligonucleotide
  Target: LAMA2; (+) strand; PAM type: NRG; PAM sequence: AGG
gcgggcacttctgagcctgt

SEQ ID NO: 175981 - DNA, 20 bp, Artificial Sequence
  Description of Artificial Sequence: Synthetic oligonucleotide
  Target: LAMA2; (+) strand; PAM type: NRG; PAM sequence: GGG
cgggcacttctgagcctgta

SEQ ID NO: 175982 - DNA, 20 bp, Artificial Sequence
  Description of Artificial Sequence: Synthetic oligonucleotide
  Target: LAMA2; (+) strand; PAM type: NRG; PAM sequence: GGG
gggcacttctgagcctgtag

SEQ ID NO: 175983 - DNA, 20 bp, Artificial Sequence
  Description of Artificial Sequence: Synthetic oligonucleotide
  Target: LAMA2; (+) strand; PAM type: NRG; PAM sequence: AAG
cacttctgagcctgtagggg

SEQ ID NO: 175984 - DNA, 20 bp, Artificial Sequence
  Description of Artificial Sequence: Synthetic oligonucleotide
  Target: LAMA2; (+) strand; PAM type: NRG; PAM sequence: GAG
cttctgagcctgtaggggaa

SEQ ID NO: 175985 - DNA, 20 bp, Artificial Sequence
  Description of Artificial Sequence: Synthetic oligonucleotide
  Target: LAMA2; (+) strand; PAM type: NRG; PAM sequence: GAG
tctgagcctgtaggggaaga

SEQ ID NO: 175986 - DNA, 20 bp, Artificial Sequence
  Description of Artificial Sequence: Synthetic oligonucleotide
  Target: LAMA2; (+) strand; PAM type: NRG; PAM sequence: AGG
ctgagcctgtaggggaagag

SEQ ID NO: 175987 - DNA, 20 bp, Artificial Sequence
  Description of Artificial Sequence: Synthetic oligonucleotide
  Target: LAMA2; (+) strand; PAM type: NRG; PAM sequence: TGG
agcctgtaggggaagagagg

SEQ ID NO: 175988 - DNA, 20 bp, Artificial Sequence
  Description of Artificial Sequence: Synthetic oligonucleotide
  Target: LAMA2; (+) strand; PAM type: NRG; PAM sequence: GAG
gtaggggaagagaggtggct

SEQ ID NO: 175989 - DNA, 20 bp, Artificial Sequence
  Description of Artificial Sequence: Synthetic oligonucleotide
  Target: LAMA2; (+) strand; PAM type: NRG; PAM sequence: AGG
taggggaagagaggtggctg

SEQ ID NO: 175990 - DNA, 20 bp, Artificial Sequence
  Description of Artificial Sequence: Synthetic oligonucleotide
  Target: LAMA2; (+) strand; PAM type: NRG; PAM sequence: GGG
aggggaagagaggtggctga

SEQ ID NO: 175991 - DNA, 20 bp, Artificial Sequence
  Description of Artificial Sequence: Synthetic oligonucleotide
  Target: LAMA2; (+) strand; PAM type: NRG; PAM sequence: CAG
aagagaggtggctgagggca

SEQ ID NO: 175992 - DNA, 20 bp, Artificial Sequence
  Description of Artificial Sequence: Synthetic oligonucleotide
  Target: LAMA2; (+) strand; PAM type: NRG; PAM sequence: AGG
agagaggtggctgagggcac

SEQ ID NO: 175993 - DNA, 20 bp, Artificial Sequence
  Description of Artificial Sequence: Synthetic oligonucleotide
  Target: LAMA2; (+) strand; PAM type: NRG; PAM sequence: GGG
gagaggtggctgagggcaca

SEQ ID NO: 175994 - DNA, 20 bp, Artificial Sequence
  Description of Artificial Sequence: Synthetic oligonucleotide
  Target: LAMA2; (+) strand; PAM type: NRG; PAM sequence: TGG
gctgagggcacagggatgcc

SEQ ID NO: 175995 - DNA, 20 bp, Artificial Sequence
  Description of Artificial Sequence: Synthetic oligonucleotide
  Target: LAMA2; (+) strand; PAM type: NRG; PAM sequence: GGG
ctgagggcacagggatgcct

SEQ ID NO: 175996 - DNA, 20 bp, Artificial Sequence
  Description of Artificial Sequence: Synthetic oligonucleotide
  Target: LAMA2; (+) strand; PAM type: NRG; PAM sequence: CAG
cacagggatgcctgggtcca

SEQ ID NO: 175997 - DNA, 20 bp, Artificial Sequence
  Description of Artificial Sequence: Synthetic oligonucleotide
  Target: LAMA2; (+) strand; PAM type: NRG; PAM sequence: TGG
gggatgcctgggtccacagc

SEQ ID NO: 175998 - DNA, 20 bp, Artificial Sequence
  Description of Artificial Sequence: Synthetic oligonucleotide
  Target: LAMA2; (+) strand; PAM type: NRG; PAM sequence: TGG
tgcctgggtccacagctggc

SEQ ID NO: 175999 - DNA, 20 bp, Artificial Sequence
  Description of Artificial Sequence: Synthetic oligonucleotide
  Target: LAMA2; (+) strand; PAM type: NRG; PAM sequence: GGG
gcctgggtccacagctggct

SEQ ID NO: 176000 - DNA, 20 bp, Artificial Sequence
  Description of Artificial Sequence: Synthetic oligonucleotide
  Target: LAMA2; (+) strand; PAM type: NRG; PAM sequence: TGG
tgggtccacagctggctggg

SEQ ID NO: 176001 - DNA, 20 bp, Artificial Sequence
  Description of Artificial Sequence: Synthetic oligonucleotide
  Target: LAMA2; (+) strand; PAM type: NRG; PAM sequence: CAG
cacagctggctgggtggctg

SEQ ID NO: 176002 - DNA, 20 bp, Artificial Sequence
  Description of Artificial Sequence: Synthetic oligonucleotide
  Target: LAMA2; (+) strand; PAM type: NRG; PAM sequence: CAG
tgggtggctgcagctgcacc

SEQ ID NO: 176003 - DNA, 20 bp, Artificial Sequence
  Description of Artificial Sequence: Synthetic oligonucleotide
  Target: LAMA2; (+) strand; PAM type: NRG; PAM sequence: TAG
gtggctgcagctgcacccag

SEQ ID NO: 176004 - DNA, 20 bp, Artificial Sequence
  Description of Artificial Sequence: Synthetic oligonucleotide
  Target: LAMA2; (+) strand; PAM type: NRG; PAM sequence: AGG
tggctgcagctgcacccagt

SEQ ID NO: 176005 - DNA, 20 bp, Artificial Sequence
  Description of Artificial Sequence: Synthetic oligonucleotide
  Target: LAMA2; (+) strand; PAM type: NRG; PAM sequence: GGG
ggctgcagctgcacccagta

SEQ ID NO: 176006 - DNA, 20 bp, Artificial Sequence
  Description of Artificial Sequence: Synthetic oligonucleotide
  Target: LAMA2; (+) strand; PAM type: NRG; PAM sequence: CAG
tgcagctgcacccagtaggg

SEQ ID NO: 176007 - DNA, 20 bp, Artificial Sequence
  Description of Artificial Sequence: Synthetic oligonucleotide
  Target: LAMA2; (+) strand; PAM type: NRG; PAM sequence: AGG
gcagctgcacccagtagggc

SEQ ID NO: 176008 - DNA, 20 bp, Artificial Sequence
  Description of Artificial Sequence: Synthetic oligonucleotide
  Target: LAMA2; (+) strand; PAM type: NRG; PAM sequence: GGG
cagctgcacccagtagggca

SEQ ID NO: 176009 - DNA, 20 bp, Artificial Sequence
  Description of Artificial Sequence: Synthetic oligonucleotide
  Target: LAMA2; (+) strand; PAM type: NRG; PAM sequence: CGG
gggttcccccaccttcaact

SEQ ID NO: 176010 - DNA, 20 bp, Artificial Sequence
  Description of Artificial Sequence: Synthetic oligonucleotide
  Target: LAMA2; (+) strand; PAM type: NRG; PAM sequence: AAG
ttcccccaccttcaactcgg

SEQ ID NO: 176011 - DNA, 20 bp, Artificial Sequence
  Description of Artificial Sequence: Synthetic oligonucleotide
  Target: LAMA2; (+) strand; PAM type: NRG; PAM sequence: AGG
tcccccaccttcaactcgga

SEQ ID NO: 176012 - DNA, 20 bp, Artificial Sequence
  Description of Artificial Sequence: Synthetic oligonucleotide
  Target: LAMA2; (+) strand; PAM type: NRG; PAM sequence: GGG
cccccaccttcaactcggaa

SEQ ID NO: 176013 - DNA, 20 bp, Artificial Sequence
  Description of Artificial Sequence: Synthetic oligonucleotide
  Target: LAMA2; (+) strand; PAM type: NRG; PAM sequence: GGG
ccccaccttcaactcggaag

SEQ ID NO: 176014 - DNA, 20 bp, Artificial Sequence
  Description of Artificial Sequence: Synthetic oligonucleotide
  Target: LAMA2; (+) strand; PAM type: NRG; PAM sequence: TGG
cttcaactcggaaggggaca

SEQ ID NO: 176015 - DNA, 20 bp, Artificial Sequence
  Description of Artificial Sequence: Synthetic oligonucleotide
  Target: LAMA2; (+) strand; PAM type: NRG; PAM sequence: TGG
acatggctcccacttgttcc

SEQ ID NO: 176016 - DNA, 20 bp, Artificial Sequence
  Description of Artificial Sequence: Synthetic oligonucleotide
  Target: LAMA2; (+) strand; PAM type: NRG; PAM sequence: CAG
cacttgttcctggctcccac

SEQ ID NO: 176017 - DNA, 20 bp, Artificial Sequence
  Description of Artificial Sequence: Synthetic oligonucleotide
  Target: LAMA2; (+) strand; PAM type: NRG; PAM sequence: TGG
cctggctcccaccagctctg

SEQ ID NO: 176018 - DNA, 20 bp, Artificial Sequence
  Description of Artificial Sequence: Synthetic oligonucleotide
  Target: LAMA2; (+) strand; PAM type: NRG; PAM sequence: GAG
tggctcccaccagctctgtg

SEQ ID NO: 176019 - DNA, 20 bp, Artificial Sequence
  Description of Artificial Sequence: Synthetic oligonucleotide
  Target: LAMA2; (+) strand; PAM type: NRG; PAM sequence: AAG
caccagctctgtggagcaca

SEQ ID NO: 176020 - DNA, 20 bp, Artificial Sequence
  Description of Artificial Sequence: Synthetic oligonucleotide
  Target: LAMA2; (+) strand; PAM type: NRG; PAM sequence: CAG
agctctgtggagcacaaagc

SEQ ID NO: 176021 - DNA, 20 bp, Artificial Sequence
  Description of Artificial Sequence: Synthetic oligonucleotide
  Target: LAMA2; (+) strand; PAM type: NRG; PAM sequence: CAG
ctgtggagcacaaagccaga

SEQ ID NO: 176022 - DNA, 20 bp, Artificial Sequence
  Description of Artificial Sequence: Synthetic oligonucleotide
  Target: LAMA2; (+) strand; PAM type: NRG; PAM sequence: AGG
tgtggagcacaaagccagac

SEQ ID NO: 176023 - DNA, 20 bp, Artificial Sequence
  Description of Artificial Sequence: Synthetic oligonucleotide
  Target: LAMA2; (+) strand; PAM type: NRG; PAM sequence: GAG
aggctgacactgccattact

SEQ ID NO: 176024 - DNA, 20 bp, Artificial Sequence
  Description of Artificial Sequence: Synthetic oligonucleotide
  Target: LAMA2; (+) strand; PAM type: NRG; PAM sequence: CAG
tactgagaccctcttgctct

SEQ ID NO: 176025 - DNA, 20 bp, Artificial Sequence
  Description of Artificial Sequence: Synthetic oligonucleotide
  Target: LAMA2; (+) strand; PAM type: NRG; PAM sequence: AAG
tgagaccctcttgctctcag

SEQ ID NO: 176026 - DNA, 20 bp, Artificial Sequence
  Description of Artificial Sequence: Synthetic oligonucleotide
  Target: LAMA2; (+) strand; PAM type: NRG; PAM sequence: GAG
agaccctcttgctctcagaa

SEQ ID NO: 176027 - DNA, 20 bp, Artificial Sequence
  Description of Artificial Sequence: Synthetic oligonucleotide
  Target: LAMA2; (+) strand; PAM type: NRG; PAM sequence: TGG
ctccctctgttttcactgct

SEQ ID NO: 176028 - DNA, 20 bp, Artificial Sequence
  Description of Artificial Sequence: Synthetic oligonucleotide
  Target: LAMA2; (+) strand; PAM type: NRG; PAM sequence: TGG
ttttcactgcttggtgactg

SEQ ID NO: 176029 - DNA, 20 bp, Artificial Sequence
  Description of Artificial Sequence: Synthetic oligonucleotide
  Target: LAMA2; (+) strand; PAM type: NRG; PAM sequence: CAG
ttgttcctatttccttttct

SEQ ID NO: 176030 - DNA, 20 bp, Artificial Sequence
  Description of Artificial Sequence: Synthetic oligonucleotide
  Target: LAMA2; (+) strand; PAM type: NRG; PAM sequence: AAG
cctatttccttttctcagaa

SEQ ID NO: 176031 - DNA, 20 bp, Artificial Sequence
  Description of Artificial Sequence: Synthetic oligonucleotide
  Target: LAMA2; (+) strand; PAM type: NRG; PAM sequence: AAG
tttccttttctcagaaaaga

SEQ ID NO: 176032 - DNA, 20 bp, Artificial Sequence
  Description of Artificial Sequence: Synthetic oligonucleotide
  Target: LAMA2; (+) strand; PAM type: NRG; PAM sequence: TAG
ttctcagaaaagaaagtctt

SEQ ID NO: 176033 - DNA, 20 bp, Artificial Sequence
  Description of Artificial Sequence: Synthetic oligonucleotide
  Target: LAMA2; (+) strand; PAM type: NRG; PAM sequence: AAG
agtctttagaattaaaattt

SEQ ID NO: 176034 - DNA, 20 bp, Artificial Sequence
  Description of Artificial Sequence: Synthetic oligonucleotide
  Target: LAMA2; (+) strand; PAM type: NRG; PAM sequence: TAG
attaaaatttaagctgacaa

SEQ ID NO: 176035 - DNA, 20 bp, Artificial Sequence
  Description of Artificial Sequence: Synthetic oligonucleotide
  Target: LAMA2; (+) strand; PAM type: NRG; PAM sequence: CAG
gacaatagatcccctctccc

SEQ ID NO: 176036 - DNA, 20 bp, Artificial Sequence
  Description of Artificial Sequence: Synthetic oligonucleotide
  Target: LAMA2; (+) strand; PAM type: NRG; PAM sequence: AGG
acaatagatcccctctcccc

SEQ ID NO: 176037 - DNA, 20 bp, Artificial Sequence
  Description of Artificial Sequence: Synthetic oligonucleotide
  Target: LAMA2; (+) strand; PAM type: NRG; PAM sequence: GGG
caatagatcccctctcccca

SEQ ID NO: 176038 - DNA, 20 bp, Artificial Sequence
  Description of Artificial Sequence: Synthetic oligonucleotide
  Target: LAMA2; (+) strand; PAM type: NRG; PAM sequence: GAG
atagatcccctctccccagg

SEQ ID NO: 176039 - DNA, 20 bp, Artificial Sequence
  Description of Artificial Sequence: Synthetic oligonucleotide
  Target: LAMA2; (+) strand; PAM type: NRG; PAM sequence: CAG
gatcccctctccccagggag

SEQ ID NO: 176040 - DNA, 20 bp, Artificial Sequence
  Description of Artificial Sequence: Synthetic oligonucleotide
  Target: LAMA2; (+) strand; PAM type: NRG; PAM sequence: TGG
ctccccagggagcagaaata

SEQ ID NO: 176041 - DNA, 20 bp, Artificial Sequence
  Description of Artificial Sequence: Synthetic oligonucleotide
  Target: LAMA2; (+) strand; PAM type: NRG; PAM sequence: AAG
cagaaatatggatatcccta

SEQ ID NO: 176042 - DNA, 20 bp, Artificial Sequence
  Description of Artificial Sequence: Synthetic oligonucleotide
  Target: LAMA2; (+) strand; PAM type: NRG; PAM sequence: AGG
agaaatatggatatccctaa

SEQ ID NO: 176043 - DNA, 20 bp, Artificial Sequence
  Description of Artificial Sequence: Synthetic oligonucleotide
  Target: LAMA2; (+) strand; PAM type: NRG; PAM sequence: GAG
tggatatccctaaaggtctt

SEQ ID NO: 176044 - DNA, 20 bp, Artificial Sequence
  Description of Artificial Sequence: Synthetic oligonucleotide
  Target: LAMA2; (+) strand; PAM type: NRG; PAM sequence: CGG
cctaaaggtcttgagtgttt

SEQ ID NO: 176045 - DNA, 20 bp, Artificial Sequence
  Description of Artificial Sequence: Synthetic oligonucleotide
  Target: LAMA2; (+) strand; PAM type: NRG; PAM sequence: TAG
aatattccatgatttttatc

SEQ ID NO: 176046 - DNA, 20 bp, Artificial Sequence
  Description of Artificial Sequence: Synthetic oligonucleotide
  Target: LAMA2; (+) strand; PAM type: NRG; PAM sequence: TGG
gatttttatctagatatgcc

SEQ ID NO: 176047 - DNA, 20 bp, Artificial Sequence
  Description of Artificial Sequence: Synthetic oligonucleotide
  Target: LAMA2; (+) strand; PAM type: NRG; PAM sequence: TGG
ttttatctagatatgcctgg

SEQ ID NO: 176048 - DNA, 20 bp, Artificial Sequence
  Description of Artificial Sequence: Synthetic oligonucleotide
  Target: LAMA2; (+) strand; PAM type: NRG; PAM sequence: CAG
tagatatgcctggtggacaa

SEQ ID NO: 176049 - DNA, 20 bp, Artificial Sequence
  Description of Artificial Sequence: Synthetic oligonucleotide
  Target: LAMA2; (+) strand; PAM type: NRG; PAM sequence: AGG
agatatgcctggtggacaac

SEQ ID NO: 176050 - DNA, 20 bp, Artificial Sequence
  Description of Artificial Sequence: Synthetic oligonucleotide
  Target: LAMA2; (+) strand; PAM type: NRG; PAM sequence: TAG
caacaggtgatcgccaaata

SEQ ID NO: 176051 - DNA, 20 bp, Artificial Sequence
  Description of Artificial Sequence: Synthetic oligonucleotide
  Target: LAMA2; (+) strand; PAM type: NRG; PAM sequence: AGG
aacaggtgatcgccaaatat

SEQ ID NO: 176052 - DNA, 20 bp, Artificial Sequence
  Description of Artificial Sequence: Synthetic oligonucleotide
  Target: LAMA2; (+) strand; PAM type: NRG; PAM sequence: TAG
ccatctccaaattctgatgc

SEQ ID NO: 176053 - DNA, 20 bp, Artificial Sequence
  Description of Artificial Sequence: Synthetic oligonucleotide
  Target: LAMA2; (+) strand; PAM type: NRG; PAM sequence: CAG
caaattctgatgctagaaat

SEQ ID NO: 176054 - DNA, 20 bp, Artificial Sequence
  Description of Artificial Sequence: Synthetic oligonucleotide
  Target: LAMA2; (+) strand; PAM type: NRG; PAM sequence: AGG
aaattctgatgctagaaatc

SEQ ID NO: 176055 - DNA, 20 bp, Artificial Sequence
  Description of Artificial Sequence: Synthetic oligonucleotide
  Target: LAMA2; (+) strand; PAM type: NRG; PAM sequence: TGG
ctgatgctagaaatcaggaa

SEQ ID NO: 176056 - DNA, 20 bp, Artificial Sequence
  Description of Artificial Sequence: Synthetic oligonucleotide
  Target: LAMA2; (+) strand; PAM type: NRG; PAM sequence: TAG
gaaatcaggaatggctatga

SEQ ID NO: 176057 - DNA, 20 bp, Artificial Sequence
  Description of Artificial Sequence: Synthetic oligonucleotide
  Target: LAMA2; (+) strand; PAM type: NRG; PAM sequence: CAG
caggaatggctatgatagtc

SEQ ID NO: 176058 - DNA, 20 bp, Artificial Sequence
  Description of Artificial Sequence: Synthetic oligonucleotide
  Target: LAMA2; (+) strand; PAM type: NRG; PAM sequence: CAG
gctatgatagtccagatttt

SEQ ID NO: 176059 - DNA, 20 bp, Artificial Sequence
  Description of Artificial Sequence: Synthetic oligonucleotide
  Target: LAMA2; (+) strand; PAM type: NRG; PAM sequence: AAG
tccagattttcagaattgat

SEQ ID NO: 176060 - DNA, 20 bp, Artificial Sequence
  Description of Artificial Sequence: Synthetic oligonucleotide
  Target: LAMA2; (+) strand; PAM type: NRG; PAM sequence: AAG
taagatatttatattaccct

SEQ ID NO: 176061 - DNA, 20 bp, Artificial Sequence
  Description of Artificial Sequence: Synthetic oligonucleotide
  Target: LAMA2; (+) strand; PAM type: NRG; PAM sequence: GAG
agatatttatattaccctaa

SEQ ID NO: 176062 - DNA, 20 bp, Artificial Sequence
  Description of Artificial Sequence: Synthetic oligonucleotide
  Target: LAMA2; (+) strand; PAM type: NRG; PAM sequence: CGG
ttatattaccctaagagata

SEQ ID NO: 176063 - DNA, 20 bp, Artificial Sequence
  Description of Artificial Sequence: Synthetic oligonucleotide
  Target: LAMA2; (+) strand; PAM type: NRG; PAM sequence: AAG
tattaccctaagagatacgg

SEQ ID NO: 176064 - DNA, 20 bp, Artificial Sequence
  Description of Artificial Sequence: Synthetic oligonucleotide
  Target: LAMA2; (+) strand; PAM type: NRG; PAM sequence: CAG
taagagatacggaagttgaa

SEQ ID NO: 176065 - DNA, 20 bp, Artificial Sequence
  Description of Artificial Sequence: Synthetic oligonucleotide
  Target: LAMA2; (+) strand; PAM type: NRG; PAM sequence: AAG
aataaaaaaattcaaaataa

SEQ ID NO: 176066 - DNA, 20 bp, Artificial Sequence
  Description of Artificial Sequence: Synthetic oligonucleotide
  Target: LAMA2; (+) strand; PAM type: NRG; PAM sequence: TAG
aattactttctttccctgtt

SEQ ID NO: 176067 - DNA, 20 bp, Artificial Sequence
  Description of Artificial Sequence: Synthetic oligonucleotide
  Target: LAMA2; (+) strand; PAM type: NRG; PAM sequence: GAG
tttctttccctgtttagttt

SEQ ID NO: 176068 - DNA, 20 bp, Artificial Sequence
  Description of Artificial Sequence: Synthetic oligonucleotide
  Target: LAMA2; (+) strand; PAM type: NRG; PAM sequence: CAG
ttgagatcatgtgtaaatat

SEQ ID NO: 176069 - DNA, 20 bp, Artificial Sequence
  Description of Artificial Sequence: Synthetic oligonucleotide
  Target: LAMA2; (+) strand; PAM type: NRG; PAM sequence: TAG
tcagtgaacgtgatgtcata

SEQ ID NO: 176070 - DNA, 20 bp, Artificial Sequence
  Description of Artificial Sequence: Synthetic oligonucleotide
  Target: LAMA2; (+) strand; PAM type: NRG; PAM sequence: AGG
cagtgaacgtgatgtcatat

SEQ ID NO: 176071 - DNA, 20 bp, Artificial Sequence
  Description of Artificial Sequence: Synthetic oligonucleotide
  Target: LAMA2; (+) strand; PAM type: NRG; PAM sequence: CAG
taggatttttttttattgat

SEQ ID NO: 176072 - DNA, 20 bp, Artificial Sequence
  Description of Artificial Sequence: Synthetic oligonucleotide
  Target: LAMA2; (+) strand; PAM type: NRG; PAM sequence: TAG
ttttttttattgatcagaat

SEQ ID NO: 176073 - DNA, 20 bp, Artificial Sequence
  Description of Artificial Sequence: Synthetic oligonucleotide
  Target: LAMA2; (+) strand; PAM type: NRG; PAM sequence: AGG
tttttttattgatcagaatt

SEQ ID NO: 176074 - DNA, 20 bp, Artificial Sequence
  Description of Artificial Sequence: Synthetic oligonucleotide
  Target: LAMA2; (+) strand; PAM type: NRG; PAM sequence: AAG
tattgatcagaattaggttc

SEQ ID NO: 176075 - DNA, 20 bp, Artificial Sequence
  Description of Artificial Sequence: Synthetic oligonucleotide
  Target: LAMA2; (+) strand; PAM type: NRG; PAM sequence: TGG
attaggttcaagttgtgttc

SEQ ID NO: 176076 - DNA, 20 bp, Artificial Sequence
  Description of Artificial Sequence: Synthetic oligonucleotide
  Target: LAMA2; (+) strand; PAM type: NRG; PAM sequence: GAG
tggaaacttctaattaaatt

SEQ ID NO: 176077 - DNA, 20 bp, Artificial Sequence
  Description of Artificial Sequence: Synthetic oligonucleotide
  Target: LAMA2; (+) strand; PAM type: NRG; PAM sequence: AGG
ggaaacttctaattaaattg

SEQ ID NO: 176078 - DNA, 20 bp, Artificial Sequence
  Description of Artificial Sequence: Synthetic oligonucleotide
  Target: LAMA2; (+) strand; PAM type: NRG; PAM sequence: GGG
gaaacttctaattaaattga

SEQ ID NO: 176079 - DNA, 20 bp, Artificial Sequence
  Description of Artificial Sequence: Synthetic oligonucleotide
  Target: LAMA2; (+) strand; PAM type: NRG; PAM sequence: AAG
acttctaattaaattgaggg

SEQ ID NO: 176080 - DNA, 20 bp, Artificial Sequence
  Description of Artificial Sequence: Synthetic oligonucleotide
  Target: LAMA2; (+) strand; PAM type: NRG; PAM sequence: TAG
attaaattgagggaagatgc

SEQ ID NO: 176081 - DNA, 20 bp, Artificial Sequence
  Description of Artificial Sequence: Synthetic oligonucleotide
  Target: LAMA2; (+) strand; PAM type: NRG; PAM sequence: CAG
aaattgagggaagatgctag

SEQ ID NO: 176082 - DNA, 20 bp, Artificial Sequence
  Description of Artificial Sequence: Synthetic oligonucleotide
  Target: LAMA2; (+) strand; PAM type: NRG; PAM sequence: AGG
aattgagggaagatgctagc

SEQ ID NO: 176083 - DNA, 20 bp, Artificial Sequence
  Description of Artificial Sequence: Synthetic oligonucleotide
  Target: LAMA2; (+) strand; PAM type: NRG; PAM sequence: CAG
gagggaagatgctagcaggc

SEQ ID NO: 176084 - DNA, 20 bp, Artificial Sequence
  Description of Artificial Sequence: Synthetic oligonucleotide
  Target: LAMA2; (+) strand; PAM type: NRG; PAM sequence: TGG
gatgctagcaggccagaatt

SEQ ID NO: 176085 - DNA, 20 bp, Artificial Sequence
  Description of Artificial Sequence: Synthetic oligonucleotide
  Target: LAMA2; (+) strand; PAM type: NRG; PAM sequence: GGG
atgctagcaggccagaattt

SEQ ID NO: 176086 - DNA, 20 bp, Artificial Sequence
  Description of Artificial Sequence: Synthetic oligonucleotide
  Target: LAMA2; (+) strand; PAM type: NRG; PAM sequence: TAG
gcaggccagaatttgggaat

SEQ ID NO: 176087 - DNA, 20 bp, Artificial Sequence
  Description of Artificial Sequence: Synthetic oligonucleotide
  Target: LAMA2; (+) strand; PAM type: NRG; PAM sequence: TGG
aatttgggaattagatgatc

SEQ ID NO: 176088 - DNA, 20 bp, Artificial Sequence
  Description of Artificial Sequence: Synthetic oligonucleotide
  Target: LAMA2; (+) strand; PAM type: NRG; PAM sequence: TAG
atacatattgtctatgtaat

SEQ ID NO: 176089 - DNA, 20 bp, Artificial Sequence
  Description of Artificial Sequence: Synthetic oligonucleotide
  Target: LAMA2; (+) strand; PAM type: NRG; PAM sequence: AAG
tgtaccaataatgccttttc

SEQ ID NO: 176090 - DNA, 20 bp, Artificial Sequence
  Description of Artificial Sequence: Synthetic oligonucleotide
  Target: LAMA2; (+) strand; PAM type: NRG; PAM sequence: CAG
ccttttcaagaaacactgtg

SEQ ID NO: 176091 - DNA, 20 bp, Artificial Sequence
  Description of Artificial Sequence: Synthetic oligonucleotide
  Target: LAMA2; (+) strand; PAM type: NRG; PAM sequence: TGG
gtctgttctgattcctccat

SEQ ID NO: 176092 - DNA, 20 bp, Artificial Sequence
  Description of Artificial Sequence: Synthetic oligonucleotide
  Target: LAMA2; (+) strand; PAM type: NRG; PAM sequence: TAG
cttaattcctataataaata

SEQ ID NO: 176093 - DNA, 20 bp, Artificial Sequence
  Description of Artificial Sequence: Synthetic oligonucleotide
  Target: LAMA2; (+) strand; PAM type: NRG; PAM sequence: AAG
tataataaatatagtttcca

SEQ ID NO: 176094 - DNA, 20 bp, Artificial Sequence
  Description of Artificial Sequence: Synthetic oligonucleotide
  Target: LAMA2; (+) strand; PAM type: NRG; PAM sequence: CAG
aaagtttataacttaatttt

SEQ ID NO: 176095 - DNA, 20 bp, Artificial Sequence
  Description of Artificial Sequence: Synthetic oligonucleotide
  Target: LAMA2; (+) strand; PAM type: NRG; PAM sequence: CAG
aatttatttattttaattga

SEQ ID NO: 176096 - DNA, 20 bp, Artificial Sequence
  Description of Artificial Sequence: Synthetic oligonucleotide
  Target: LAMA2; (+) strand; PAM type: NRG; PAM sequence: AAG
ttattttaattgacagataa

SEQ ID NO: 176097 - DNA, 20 bp, Artificial Sequence
  Description of Artificial Sequence: Synthetic oligonucleotide
  Target: LAMA2; (+) strand; PAM type: NRG; PAM sequence: TGG
ttttaattgacagataaaag

SEQ ID NO: 176098 - DNA, 20 bp, Artificial Sequence
  Description of Artificial Sequence: Synthetic oligonucleotide
  Target: LAMA2; (+) strand; PAM type: NRG; PAM sequence: AAG
acaacatgatgctttgaaat

SEQ ID NO: 176099 - DNA, 20 bp, Artificial Sequence
  Description of Artificial Sequence: Synthetic oligonucleotide
  Target: LAMA2; (+) strand; PAM type: NRG; PAM sequence: TGG
tttgaaataagtatacattg

SEQ ID NO: 176100 - DNA, 20 bp, Artificial Sequence
  Description of Artificial Sequence: Synthetic oligonucleotide
  Target: LAMA2; (+) strand; PAM type: NRG; PAM sequence: TGG
aataagtatacattgtggaa

SEQ ID NO: 176101 - DNA, 20 bp, Artificial Sequence
  Description of Artificial Sequence: Synthetic oligonucleotide
  Target: LAMA2; (+) strand; PAM type: NRG; PAM sequence: GAG
cattgtggaatggctaaatc

SEQ ID NO: 176102 - DNA, 20 bp, Artificial Sequence
  Description of Artificial Sequence: Synthetic oligonucleotide
  Target: LAMA2; (+) strand; PAM type: NRG; PAM sequence: AGG
attgtggaatggctaaatcg

SEQ ID NO: 176103 - DNA, 20 bp, Artificial Sequence
  Description of Artificial Sequence: Synthetic oligonucleotide
  Target: LAMA2; (+) strand; PAM type: NRG; PAM sequence: TGG
atatgcactacctcacatac

SEQ ID NO: 176104 - DNA, 20 bp, Artificial Sequence
  Description of Artificial Sequence: Synthetic oligonucleotide
  Target: LAMA2; (+) strand; PAM type: NRG; PAM sequence: GAG
actggtcatttttctgtgtt

SEQ ID NO: 176105 - DNA, 20 bp, Artificial Sequence
  Description of Artificial Sequence: Synthetic oligonucleotide
  Target: LAMA2; (+) strand; PAM type: NRG; PAM sequence: TAG
acacttaaaatctactctct

SEQ ID NO: 176106 - DNA, 20 bp, Artificial Sequence
  Description of Artificial Sequence: Synthetic oligonucleotide
  Target: LAMA2; (+) strand; PAM type: NRG; PAM sequence: AAG
taaaatctactctcttagca

SEQ ID NO: 176107 - DNA, 20 bp, Artificial Sequence
  Description of Artificial Sequence: Synthetic oligonucleotide
  Target: LAMA2; (+) strand; PAM type: NRG; PAM sequence: TGG
ctctcttagcaaagccatgc

SEQ ID NO: 176108 - DNA, 20 bp, Artificial Sequence
  Description of Artificial Sequence: Synthetic oligonucleotide
  Target: LAMA2; (+) strand; PAM type: NRG; PAM sequence: TAG
tagcaaagccatgctggctt

SEQ ID NO: 176109 - DNA, 20 bp, Artificial Sequence
  Description of Artificial Sequence: Synthetic oligonucleotide
  Target: LAMA2; (+) strand; PAM type: NRG; PAM sequence: TGG
ttgtacatgatactctcatt

SEQ ID NO: 176110 - DNA, 20 bp, Artificial Sequence
  Description of Artificial Sequence: Synthetic oligonucleotide
  Target: LAMA2; (+) strand; PAM type: NRG; PAM sequence: GGG
tgtacatgatactctcattt

SEQ ID NO: 176111 - DNA, 20 bp, Artificial Sequence
  Description of Artificial Sequence: Synthetic oligonucleotide
  Target: LAMA2; (+) strand; PAM type: NRG; PAM sequence: AAG
tgggtcaataatttttttaa

SEQ ID NO: 176112 - DNA, 20 bp, Artificial Sequence
  Description of Artificial Sequence: Synthetic oligonucleotide
  Target: LAMA2; (+) strand; PAM type: NRG; PAM sequence: TGG
taatttttttaaaagtctat

SEQ ID NO: 176113 - DNA, 20 bp, Artificial Sequence
  Description of Artificial Sequence: Synthetic oligonucleotide
  Target: LAMA2; (+) strand; PAM type: NRG; PAM sequence: AAG
tttttttaaaagtctattgg

SEQ ID NO: 176114 - DNA, 20 bp, Artificial Sequence
  Description of Artificial Sequence: Synthetic oligonucleotide
  Target: LAMA2; (+) strand; PAM type: NRG; PAM sequence: CAG
ttttaaaagtctattggaag

SEQ ID NO: 176115 - DNA, 20 bp, Artificial Sequence
  Description of Artificial Sequence: Synthetic oligonucleotide
  Target: LAMA2; (+) strand; PAM type: NRG; PAM sequence: GAG
ttaaaagtctattggaagca

SEQ ID NO: 176116 - DNA, 20 bp, Artificial Sequence
  Description of Artificial Sequence: Synthetic oligonucleotide
  Target: LAMA2; (+) strand; PAM type: NRG; PAM sequence: CAG
gagaaataaattttttgacc

SEQ ID NO: 176117 - DNA, 20 bp, Artificial Sequence
  Description of Artificial Sequence: Synthetic oligonucleotide
  Target: LAMA2; (+) strand; PAM type: NRG; PAM sequence: TAG
taaattttttgacccagcct

SEQ ID NO: 176118 - DNA, 20 bp, Artificial Sequence
  Description of Artificial Sequence: Synthetic oligonucleotide
  Target: LAMA2; (+) strand; PAM type: NRG; PAM sequence: AAG
ccagccttagatgtatttaa

SEQ ID NO: 176119 - DNA, 20 bp, Artificial Sequence
  Description of Artificial Sequence: Synthetic oligonucleotide
  Target: LAMA2; (+) strand; PAM type: NRG; PAM sequence: CAG
cttagatgtatttaaaagtt

SEQ ID NO: 176120 - DNA, 20 bp, Artificial Sequence
  Description of Artificial Sequence: Synthetic oligonucleotide
  Target: LAMA2; (+) strand; PAM type: NRG; PAM sequence: AGG
ttagatgtatttaaaagttc

SEQ ID NO: 176121 - DNA, 20 bp, Artificial Sequence
  Description of Artificial Sequence: Synthetic oligonucleotide
  Target: LAMA2; (+) strand; PAM type: NRG; PAM sequence: GGG
tagatgtatttaaaagttca

SEQ ID NO: 176122 - DNA, 20 bp, Artificial Sequence
  Description of Artificial Sequence: Synthetic oligonucleotide
  Target: LAMA2; (+) strand; PAM type: NRG; PAM sequence: TAG
aagttcagggcataaaatga

SEQ ID NO: 176123 - DNA, 20 bp, Artificial Sequence
  Description of Artificial Sequence: Synthetic oligonucleotide
  Target: LAMA2; (+) strand; PAM type: NRG; PAM sequence: CAG
gcataaaatgatagatgtct

SEQ ID NO: 176124 - DNA, 20 bp, Artificial Sequence
  Description of Artificial Sequence: Synthetic oligonucleotide
  Target: LAMA2; (+) strand; PAM type: NRG; PAM sequence: AGG
cataaaatgatagatgtctc

SEQ ID NO: 176125 - DNA, 20 bp, Artificial Sequence
  Description of Artificial Sequence: Synthetic oligonucleotide
  Target: LAMA2; (+) strand; PAM type: NRG; PAM sequence: GGG
ataaaatgatagatgtctca

SEQ ID NO: 176126 - DNA, 20 bp, Artificial Sequence
  Description of Artificial Sequence: Synthetic oligonucleotide
  Target: LAMA2; (+) strand; PAM type: NRG; PAM sequence: CAG
tgtctcagggtttgtgtcat

SEQ ID NO: 176127 - DNA, 20 bp, Artificial Sequence
  Description of Artificial Sequence: Synthetic oligonucleotide
  Target: LAMA2; (+) strand; PAM type: NRG; PAM sequence: CGG
tcagggtttgtgtcatcagt

SEQ ID NO: 176128 - DNA, 20 bp, Artificial Sequence
  Description of Artificial Sequence: Synthetic oligonucleotide
  Target: LAMA2; (+) strand; PAM type: NRG; PAM sequence: CAG
tgtgtcatcagtcggaaaca

SEQ ID NO: 176129 - DNA, 20 bp, Artificial Sequence
  Description of Artificial Sequence: Synthetic oligonucleotide
  Target: LAMA2; (+) strand; PAM type: NRG; PAM sequence: AAG
acaatgccacaatgcaatct

SEQ ID NO: 176130 - DNA, 20 bp, Artificial Sequence
  Description of Artificial Sequence: Synthetic oligonucleotide
  Target: LAMA2; (+) strand; PAM type: NRG; PAM sequence: AAG
agtttgatctaattttcttc

SEQ ID NO: 176131 - DNA, 20 bp, Artificial Sequence
  Description of Artificial Sequence: Synthetic oligonucleotide
  Target: LAMA2; (+) strand; PAM type: NRG; PAM sequence: TGG
cttcaagacaataatgctct

SEQ ID NO: 176132 - DNA, 20 bp, Artificial Sequence
  Description of Artificial Sequence: Synthetic oligonucleotide
  Target: LAMA2; (+) strand; PAM type: NRG; PAM sequence: TAG
ctctttatgatttctacccg

SEQ ID NO: 176133 - DNA, 20 bp, Artificial Sequence
  Description of Artificial Sequence: Synthetic oligonucleotide
  Target: LAMA2; (+) strand; PAM type: NRG; PAM sequence: AGG
tctttatgatttctacccgt

SEQ ID NO: 176134 - DNA, 20 bp, Artificial Sequence
  Description of Artificial Sequence: Synthetic oligonucleotide
  Target: LAMA2; (+) strand; PAM type: NRG; PAM sequence: TAG
ttatgatttctacccgtagg

SEQ ID NO: 176135 - DNA, 20 bp, Artificial Sequence
  Description of Artificial Sequence: Synthetic oligonucleotide
  Target: LAMA2; (+) strand; PAM type: NRG; PAM sequence: AAG
tacccgtaggtagaataatc

SEQ ID NO: 176136 - DNA, 20 bp, Artificial Sequence
  Description of Artificial Sequence: Synthetic oligonucleotide
  Target: LAMA2; (+) strand; PAM type: NRG; PAM sequence: GAG
cccgtaggtagaataatcaa

SEQ ID NO: 176137 - DNA, 20 bp, Artificial Sequence
  Description of Artificial Sequence: Synthetic oligonucleotide
  Target: LAMA2; (+) strand; PAM type: NRG; PAM sequence: AGG
ccgtaggtagaataatcaag

SEQ ID NO: 176138 - DNA, 20 bp, Artificial Sequence
  Description of Artificial Sequence: Synthetic oligonucleotide
  Target: LAMA2; (+) strand; PAM type: NRG; PAM sequence: GAG
aggtagaataatcaagaggt

SEQ ID NO: 176139 - DNA, 20 bp, Artificial Sequence
  Description of Artificial Sequence: Synthetic oligonucleotide
  Target: LAMA2; (+) strand; PAM type: NRG; PAM sequence: TGG
attgatgttgtttttgattc

SEQ ID NO: 176140 - DNA, 20 bp, Artificial Sequence
  Description of Artificial Sequence: Synthetic oligonucleotide
  Target: LAMA2; (+) strand; PAM type: NRG; PAM sequence: TAG
ttttgattctggacattaac

SEQ ID NO: 176141 - DNA, 20 bp, Artificial Sequence
  Description of Artificial Sequence: Synthetic oligonucleotide
  Target: LAMA2; (+) strand; PAM type: NRG; PAM sequence: GAG
ttgattctggacattaacta

SEQ ID NO: 176142 - DNA, 20 bp, Artificial Sequence
  Description of Artificial Sequence: Synthetic oligonucleotide
  Target: LAMA2; (+) strand; PAM type: NRG; PAM sequence: AGG
tgattctggacattaactag

SEQ ID NO: 176143 - DNA, 20 bp, Artificial Sequence
  Description of Artificial Sequence: Synthetic oligonucleotide
  Target: LAMA2; (+) strand; PAM type: NRG; PAM sequence: GGG
gattctggacattaactaga

SEQ ID NO: 176144 - DNA, 20 bp, Artificial Sequence
  Description of Artificial Sequence: Synthetic oligonucleotide
  Target: LAMA2; (+) strand; PAM type: NRG; PAM sequence: AAG
ttaactagagggaaaattcg

SEQ ID NO: 176145 - DNA, 20 bp, Artificial Sequence
  Description of Artificial Sequence: Synthetic oligonucleotide
  Target: LAMA2; (+) strand; PAM type: NRG; PAM sequence: AAG
gggaaaattcgaagccctct

SEQ ID NO: 176146 - DNA, 20 bp, Artificial Sequence
  Description of Artificial Sequence: Synthetic oligonucleotide
  Target: LAMA2; (+) strand; PAM type: NRG; PAM sequence: TGG
aattcgaagccctctaagaa

SEQ ID NO: 176147 - DNA, 20 bp, Artificial Sequence
  Description of Artificial Sequence: Synthetic oligonucleotide
  Target: LAMA2; (+) strand; PAM type: NRG; PAM sequence: TAG
aagaatggtatctaacttaa

SEQ ID NO: 176148 - DNA, 20 bp, Artificial Sequence
  Description of Artificial Sequence: Synthetic oligonucleotide
  Target: LAMA2; (+) strand; PAM type: NRG; PAM sequence: AAG
cattacctttactcaaaact

SEQ ID NO: 176149 - DNA, 20 bp, Artificial Sequence
  Description of Artificial Sequence: Synthetic oligonucleotide
  Target: LAMA2; (+) strand; PAM type: NRG; PAM sequence: TGG
ctcaaaactaagactctttg

SEQ ID NO: 176150 - DNA, 20 bp, Artificial Sequence
  Description of Artificial Sequence: Synthetic oligonucleotide
  Target: LAMA2; (+) strand; PAM type: NRG; PAM sequence: TGG
aactaagactctttgtggta

SEQ ID NO: 176151 - DNA, 20 bp, Artificial Sequence
  Description of Artificial Sequence: Synthetic oligonucleotide
  Target: LAMA2; (+) strand; PAM type: NRG; PAM sequence: GGG
actaagactctttgtggtat

SEQ ID NO: 176152 - DNA, 20 bp, Artificial Sequence
  Description of Artificial Sequence: Synthetic oligonucleotide
  Target: LAMA2; (+) strand; PAM type: NRG; PAM sequence: TAG
gtatgggcccaccccacctc

SEQ ID NO: 176153 - DNA, 20 bp, Artificial Sequence
  Description of Artificial Sequence: Synthetic oligonucleotide
  Target: LAMA2; (+) strand; PAM type: NRG; PAM sequence: TAG
tgggcccaccccacctctag

SEQ ID NO: 176154 - DNA, 20 bp, Artificial Sequence
  Description of Artificial Sequence: Synthetic oligonucleotide
  Target: LAMA2; (+) strand; PAM type: NRG; PAM sequence: CAG
cccaccccacctctagtagc

SEQ ID NO: 176155 - DNA, 20 bp, Artificial Sequence
  Description of Artificial Sequence: Synthetic oligonucleotide
  Target: LAMA2; (+) strand; PAM type: NRG; PAM sequence: TAG
cacctctagtagccagctgc

SEQ ID NO: 176156 - DNA, 20 bp, Artificial Sequence
  Description of Artificial Sequence: Synthetic oligonucleotide
  Target: LAMA2; (+) strand; PAM type: NRG; PAM sequence: CAG
ctagtagccagctgctagtc

SEQ ID NO: 176157 - DNA, 20 bp, Artificial Sequence
  Description of Artificial Sequence: Synthetic oligonucleotide
  Target: LAMA2; (+) strand; PAM type: NRG; PAM sequence: AAG
gtccagtgtctgtctcactg

SEQ ID NO: 176158 - DNA, 20 bp, Artificial Sequence
  Description of Artificial Sequence: Synthetic oligonucleotide
  Target: LAMA2; (+) strand; PAM type: NRG; PAM sequence: CAG
cagtgtctgtctcactgaag

SEQ ID NO: 176159 - DNA, 20 bp, Artificial Sequence
  Description of Artificial Sequence: Synthetic oligonucleotide
  Target: LAMA2; (+) strand; PAM type: NRG; PAM sequence: TAG
tctgtctcactgaagcagtc

SEQ ID NO: 176160 - DNA, 20 bp, Artificial Sequence
  Description of Artificial Sequence: Synthetic oligonucleotide
  Target: LAMA2; (+) strand; PAM type: NRG; PAM sequence: TGG
gtctcactgaagcagtctag

SEQ ID NO: 176161 - DNA, 20 bp, Artificial Sequence
  Description of Artificial Sequence: Synthetic oligonucleotide
  Target: LAMA2; (+) strand; PAM type: NRG; PAM sequence: TAG
aagcagtctagtggtacaca

SEQ ID NO: 176162 - DNA, 20 bp, Artificial Sequence
  Description of Artificial Sequence: Synthetic oligonucleotide
  Target: LAMA2; (+) strand; PAM type: NRG; PAM sequence: AGG
agcagtctagtggtacacat

SEQ ID NO: 176163 - DNA, 20 bp, Artificial Sequence
  Description of Artificial Sequence: Synthetic oligonucleotide
  Target: LAMA2; (+) strand; PAM type: NRG; PAM sequence: GAG
tagtggtacacataggtact

SEQ ID NO: 176164 - DNA, 20 bp, Artificial Sequence
  Description of Artificial Sequence: Synthetic oligonucleotide
  Target: LAMA2; (+) strand; PAM type: NRG; PAM sequence: GAG
atgtctgtcatgctgtaatt

SEQ ID NO: 176165 - DNA, 20 bp, Artificial Sequence
  Description of Artificial Sequence: Synthetic oligonucleotide
  Target: LAMA2; (+) strand; PAM type: NRG; PAM sequence: AGG
tgtctgtcatgctgtaattg

SEQ ID NO: 176166 - DNA, 20 bp, Artificial Sequence
  Description of Artificial Sequence: Synthetic oligonucleotide
  Target: LAMA2; (+) strand; PAM type: NRG; PAM sequence: TGG
gctcccttgattgtccttct

SEQ ID NO: 176167 - DNA, 20 bp, Artificial Sequence
  Description of Artificial Sequence: Synthetic oligonucleotide
  Target: LAMA2; (+) strand; PAM type: NRG; PAM sequence: AAG
tccttcttggtgttcccata

SEQ ID NO: 176168 - DNA, 20 bp, Artificial Sequence
  Description of Artificial Sequence: Synthetic oligonucleotide
  Target: LAMA2; (+) strand; PAM type: NRG; PAM sequence: GAG
cacgaattttaaattatcat

SEQ ID NO: 176169 - DNA, 20 bp, Artificial Sequence
  Description of Artificial Sequence: Synthetic oligonucleotide
  Target: LAMA2; (+) strand; PAM type: NRG; PAM sequence: TGG
ttaaattatcatgagcaatt

SEQ ID NO: 176170 - DNA, 20 bp, Artificial Sequence
  Description of Artificial Sequence: Synthetic oligonucleotide
  Target: LAMA2; (+) strand; PAM type: NRG; PAM sequence: GGG
taaattatcatgagcaattt

SEQ ID NO: 176171 - DNA, 20 bp, Artificial Sequence
  Description of Artificial Sequence: Synthetic oligonucleotide
  Target: LAMA2; (+) strand; PAM type: NRG; PAM sequence: GGG
aaattatcatgagcaatttg

SEQ ID NO: 176172 - DNA, 20 bp, Artificial Sequence
  Description of Artificial Sequence: Synthetic oligonucleotide
  Target: LAMA2; (+) strand; PAM type: NRG; PAM sequence: GGG
aattatcatgagcaatttgg

SEQ ID NO: 176173 - DNA, 20 bp, Artificial Sequence
  Description of Artificial Sequence: Synthetic oligonucleotide
  Target: LAMA2; (+) strand; PAM type: NRG; PAM sequence: GAG
ggatttcctattttatcact

SEQ ID NO: 176174 - DNA, 20 bp, Artificial Sequence
  Description of Artificial Sequence: Synthetic oligonucleotide
  Target: LAMA2; (+) strand; PAM type: NRG; PAM sequence: GAG
tttatcactgagtctccttt

SEQ ID NO: 176175 - DNA, 20 bp, Artificial Sequence
  Description of Artificial Sequence: Synthetic oligonucleotide
  Target: LAMA2; (+) strand; PAM type: NRG; PAM sequence: CAG
ctgagtctcctttgagtgct

SEQ ID NO: 176176 - DNA, 20 bp, Artificial Sequence
  Description of Artificial Sequence: Synthetic oligonucleotide
  Target: LAMA2; (+) strand; PAM type: NRG; PAM sequence: CAG
tcagctgctttcaatcttga

SEQ ID NO: 176177 - DNA, 20 bp, Artificial Sequence
  Description of Artificial Sequence: Synthetic oligonucleotide
  Target: LAMA2; (+) strand; PAM type: NRG; PAM sequence: TAG
tctgacccatctaccaccct

SEQ ID NO: 176178 - DNA, 20 bp, Artificial Sequence
  Description of Artificial Sequence: Synthetic oligonucleotide
  Target: LAMA2; (+) strand; PAM type: NRG; PAM sequence: AGG
ctgacccatctaccaccctt

SEQ ID NO: 176179 - DNA, 20 bp, Artificial Sequence
  Description of Artificial Sequence: Synthetic oligonucleotide
  Target: LAMA2; (+) strand; PAM type: NRG; PAM sequence: GGG
tgacccatctaccaccctta

SEQ ID NO: 176180 - DNA, 20 bp, Artificial Sequence
  Description of Artificial Sequence: Synthetic oligonucleotide
  Target: LAMA2; (+) strand; PAM type: NRG; PAM sequence: CAG
tagggtatgctatgcgatgc

SEQ ID NO: 176181 - DNA, 20 bp, Artificial Sequence
  Description of Artificial Sequence: Synthetic oligonucleotide
  Target: LAMA2; (+) strand; PAM type: NRG; PAM sequence: AGG
agggtatgctatgcgatgcc

SEQ ID NO: 176182 - DNA, 20 bp, Artificial Sequence
  Description of Artificial Sequence: Synthetic oligonucleotide
  Target: LAMA2; (+) strand; PAM type: NRG; PAM sequence: GGG
gggtatgctatgcgatgcca

SEQ ID NO: 176183 - DNA, 20 bp, Artificial Sequence
  Description of Artificial Sequence: Synthetic oligonucleotide
  Target: LAMA2; (+) strand; PAM type: NRG; PAM sequence: CAG
tatgcgatgccagggaccta

SEQ ID NO: 176184 - DNA, 20 bp, Artificial Sequence
  Description of Artificial Sequence: Synthetic oligonucleotide
  Target: LAMA2; (+) strand; PAM type: NRG; PAM sequence: AAG
ccagggacctacagcctttt

SEQ ID NO: 176185 - DNA, 20 bp, Artificial Sequence
  Description of Artificial Sequence: Synthetic oligonucleotide
  Target: LAMA2; (+) strand; PAM type: NRG; PAM sequence: GAG
agggacctacagccttttaa

SEQ ID NO: 176186 - DNA, 20 bp, Artificial Sequence
  Description of Artificial Sequence: Synthetic oligonucleotide
  Target: LAMA2; (+) strand; PAM type: NRG; PAM sequence: AAG
ttttaagagatttttgacca

SEQ ID NO: 176187 - DNA, 20 bp, Artificial Sequence
  Description of Artificial Sequence: Synthetic oligonucleotide
  Target: LAMA2; (+) strand; PAM type: NRG; PAM sequence: TGG
tttgaccaaagccgtctctt

SEQ ID NO: 176188 - DNA, 20 bp, Artificial Sequence
  Description of Artificial Sequence: Synthetic oligonucleotide
  Target: LAMA2; (+) strand; PAM type: NRG; PAM sequence: GGG
ttgaccaaagccgtctcttt

SEQ ID NO: 176189 - DNA, 20 bp, Artificial Sequence
  Description of Artificial Sequence: Synthetic oligonucleotide
  Target: LAMA2; (+) strand; PAM type: NRG; PAM sequence: GGG
tgaccaaagccgtctctttg

SEQ ID NO: 176190 - DNA, 20 bp, Artificial Sequence
  Description of Artificial Sequence: Synthetic oligonucleotide
  Target: LAMA2; (+) strand; PAM type: NRG; PAM sequence: TAG
tatttaattttaataaccta

SEQ ID NO: 176191 - DNA, 20 bp, Artificial Sequence
  Description of Artificial Sequence: Synthetic oligonucleotide
  Target: LAMA2; (+) strand; PAM type: NRG; PAM sequence: CAG
ctatagtacttaaaaatgta

SEQ ID NO: 176192 - DNA, 20 bp, Artificial Sequence
  Description of Artificial Sequence: Synthetic oligonucleotide
  Target: LAMA2; (+) strand; PAM type: NRG; PAM sequence: AAG
aaaatgtacagtactatata

SEQ ID NO: 176193 - DNA, 20 bp, Artificial Sequence
  Description of Artificial Sequence: Synthetic oligonucleotide
  Target: LAMA2; (+) strand; PAM type: NRG; PAM sequence: TGG
gcaccttaaaaattgatgca

SEQ ID NO: 176194 - DNA, 20 bp, Artificial Sequence
  Description of Artificial Sequence: Synthetic oligonucleotide
  Target: LAMA2; (+) strand; PAM type: NRG; PAM sequence: AAG
gattttttaaattattataa

SEQ ID NO: 176195 - DNA, 20 bp, Artificial Sequence
  Description of Artificial Sequence: Synthetic oligonucleotide
  Target: LAMA2; (+) strand; PAM type: NRG; PAM sequence: CAG
tttttaaattattataaaag

SEQ ID NO: 176196 - DNA, 20 bp, Artificial Sequence
  Description of Artificial Sequence: Synthetic oligonucleotide
  Target: LAMA2; (+) strand; PAM type: NRG; PAM sequence: TAG
aaagcagcttatgtctatta

SEQ ID NO: 176197 - DNA, 20 bp, Artificial Sequence
  Description of Artificial Sequence: Synthetic oligonucleotide
  Target: LAMA2; (+) strand; PAM type: NRG; PAM sequence: TAG
cttatgtctattatagaaaa

SEQ ID NO: 176198 - DNA, 20 bp, Artificial Sequence
  Description of Artificial Sequence: Synthetic oligonucleotide
  Target: LAMA2; (+) strand; PAM type: NRG; PAM sequence: AGG
ttatgtctattatagaaaat

SEQ ID NO: 176199 - DNA, 20 bp, Artificial Sequence
  Description of Artificial Sequence: Synthetic oligonucleotide
  Target: LAMA2; (+) strand; PAM type: NRG; PAM sequence: CAG
attatagaaaataggaaata

SEQ ID NO: 176200 - DNA, 20 bp, Artificial Sequence
  Description of Artificial Sequence: Synthetic oligonucleotide
  Target: LAMA2; (+) strand; PAM type: NRG; PAM sequence: AAG
agaaaataggaaatacagaa

SEQ ID NO: 176201 - DNA, 20 bp, Artificial Sequence
  Description of Artificial Sequence: Synthetic oligonucleotide
  Target: LAMA2; (+) strand; PAM type: NRG; PAM sequence: AAG
aataggaaatacagaaaagc

SEQ ID NO: 176202 - DNA, 20 bp, Artificial Sequence
  Description of Artificial Sequence: Synthetic oligonucleotide
  Target: LAMA2; (+) strand; PAM type: NRG; PAM sequence: AAG
aggaaatacagaaaagcaag

SEQ ID NO: 176203 - DNA, 20 bp, Artificial Sequence
  Description of Artificial Sequence: Synthetic oligonucleotide
  Target: LAMA2; (+) strand; PAM type: NRG; PAM sequence: AAG
aaatacagaaaagcaagaag

SEQ ID NO: 176204 - DNA, 20 bp, Artificial Sequence
  Description of Artificial Sequence: Synthetic oligonucleotide
  Target: LAMA2; (+) strand; PAM type: NRG; PAM sequence: GAG
aaaatataaaatgtgcatac

SEQ ID NO: 176205 - DNA, 20 bp, Artificial Sequence
  Description of Artificial Sequence: Synthetic oligonucleotide
  Target: LAMA2; (+) strand; PAM type: NRG; PAM sequence: TAG
catatcttttcctatgcaaa

SEQ ID NO: 176206 - DNA, 20 bp, Artificial Sequence
  Description of Artificial Sequence: Synthetic oligonucleotide
  Target: LAMA2; (+) strand; PAM type: NRG; PAM sequence: TGG
gcaaatagtttttctacaaa

SEQ ID NO: 176207 - DNA, 20 bp, Artificial Sequence
  Description of Artificial Sequence: Synthetic oligonucleotide
  Target: LAMA2; (+) strand; PAM type: NRG; PAM sequence: GGG
caaatagtttttctacaaat

SEQ ID NO: 176208 - DNA, 20 bp, Artificial Sequence
  Description of Artificial Sequence: Synthetic oligonucleotide
  Target: LAMA2; (+) strand; PAM type: NRG; PAM sequence: TGG
aactgtttcataacttacta

SEQ ID NO: 176209 - DNA, 20 bp, Artificial Sequence
  Description of Artificial Sequence: Synthetic oligonucleotide
  Target: LAMA2; (+) strand; PAM type: NRG; PAM sequence: GGG
actgtttcataacttactat

SEQ ID NO: 176210 - DNA, 20 bp, Artificial Sequence
  Description of Artificial Sequence: Synthetic oligonucleotide
  Target: LAMA2; (+) strand; PAM type: NRG; PAM sequence: TAG
ttttaaaatgtatattgaac

SEQ ID NO: 176211 - DNA, 20 bp, Artificial Sequence
  Description of Artificial Sequence: Synthetic oligonucleotide
  Target: LAMA2; (+) strand; PAM type: NRG; PAM sequence: GAG
tgtatattgaactagattct

SEQ ID NO: 176212 - DNA, 20 bp, Artificial Sequence
  Description of Artificial Sequence: Synthetic oligonucleotide
  Target: LAMA2; (+) strand; PAM type: NRG; PAM sequence: TAG
gagaatttacatcattatta

SEQ ID NO: 176213 - DNA, 20 bp, Artificial Sequence
  Description of Artificial Sequence: Synthetic oligonucleotide
  Target: LAMA2; (+) strand; PAM type: NRG; PAM sequence: AAG
atttacatcattattatagt

SEQ ID NO: 176214 - DNA, 20 bp, Artificial Sequence
  Description of Artificial Sequence: Synthetic oligonucleotide
  Target: LAMA2; (+) strand; PAM type: NRG; PAM sequence: TAG
ttatccttgattttgattca

SEQ ID NO: 176215 - DNA, 20 bp, Artificial Sequence
  Description of Artificial Sequence: Synthetic oligonucleotide
  Target: LAMA2; (+) strand; PAM type: NRG; PAM sequence: CAG
cactttacataaacacattg

SEQ ID NO: 176216 - DNA, 20 bp, Artificial Sequence
  Description of Artificial Sequence: Synthetic oligonucleotide
  Target: LAMA2; (+) strand; PAM type: NRG; PAM sequence: CAG
ttacataaacacattgcagc

SEQ ID NO: 176217 - DNA, 20 bp, Artificial Sequence
  Description of Artificial Sequence: Synthetic oligonucleotide
  Target: LAMA2; (+) strand; PAM type: NRG; PAM sequence: CAG
cccttacatatatccctgca

SEQ ID NO: 176218 - DNA, 20 bp, Artificial Sequence
  Description of Artificial Sequence: Synthetic oligonucleotide
  Target: LAMA2; (+) strand; PAM type: NRG; PAM sequence: GAG
catatatccctgcacagttt

SEQ ID NO: 176219 - DNA, 20 bp, Artificial Sequence
  Description of Artificial Sequence: Synthetic oligonucleotide
  Target: LAMA2; (+) strand; PAM type: NRG; PAM sequence: CAG
atatccctgcacagtttgag

SEQ ID NO: 176220 - DNA, 20 bp, Artificial Sequence
  Description of Artificial Sequence: Synthetic oligonucleotide
  Target: LAMA2; (+) strand; PAM type: NRG; PAM sequence: AAG
ttttaatttaaaatcatttt

SEQ ID NO: 176221 - DNA, 20 bp, Artificial Sequence
  Description of Artificial Sequence: Synthetic oligonucleotide
  Target: LAMA2; (+) strand; PAM type: NRG; PAM sequence: TGG
ttttaagttttatattatct

SEQ ID NO: 176222 - DNA, 20 bp, Artificial Sequence
  Description of Artificial Sequence: Synthetic oligonucleotide
  Target: LAMA2; (+) strand; PAM type: NRG; PAM sequence: TGG
tcttggcacattaacccctg

SEQ ID NO: 176223 - DNA, 20 bp, Artificial Sequence
  Description of Artificial Sequence: Synthetic oligonucleotide
  Target: LAMA2; (+) strand; PAM type: NRG; PAM sequence: AAG
taacccctgtggaaatgtgt

SEQ ID NO: 176224 - DNA, 20 bp, Artificial Sequence
  Description of Artificial Sequence: Synthetic oligonucleotide
  Target: LAMA2; (+) strand; PAM type: NRG; PAM sequence: AAG
ctaaaataaattatttcata

SEQ ID NO: 176225 - DNA, 20 bp, Artificial Sequence
  Description of Artificial Sequence: Synthetic oligonucleotide
  Target: LAMA2; (+) strand; PAM type: NRG; PAM sequence: GAG
aaaataaattatttcataaa

SEQ ID NO: 176226 - DNA, 20 bp, Artificial Sequence
  Description of Artificial Sequence: Synthetic oligonucleotide
  Target: LAMA2; (+) strand; PAM type: NRG; PAM sequence: GAG
aataaattatttcataaaga

SEQ ID NO: 176227 - DNA, 20 bp, Artificial Sequence
  Description of Artificial Sequence: Synthetic oligonucleotide
  Target: LAMA2; (+) strand; PAM type: NRG; PAM sequence: GAG
taaattatttcataaagaga

SEQ ID NO: 176228 - DNA, 20 bp, Artificial Sequence
  Description of Artificial Sequence: Synthetic oligonucleotide
  Target: LAMA2; (+) strand; PAM type: NRG; PAM sequence: GAG
aattatttcataaagagaga

SEQ ID NO: 176229 - DNA, 20 bp, Artificial Sequence
  Description of Artificial Sequence: Synthetic oligonucleotide
  Target: LAMA2; (+) strand; PAM type: NRG; PAM sequence: TAG
ttcataaagagagagagtaa

SEQ ID NO: 176230 - DNA, 20 bp, Artificial Sequence
  Description of Artificial Sequence: Synthetic oligonucleotide
  Target: LAMA2; (+) strand; PAM type: NRG; PAM sequence: AAG
aagagagagagtaatagaat

SEQ ID NO: 176231 - DNA, 20 bp, Artificial Sequence
  Description of Artificial Sequence: Synthetic oligonucleotide
  Target: LAMA2; (+) strand; PAM type: NRG; PAM sequence: TAG
aaaccatgctgatgaatttt

SEQ ID NO: 176232 - DNA, 20 bp, Artificial Sequence
  Description of Artificial Sequence: Synthetic oligonucleotide
  Target: LAMA2; (+) strand; PAM type: NRG; PAM sequence: AAG
tagttactactgtctttaaa

SEQ ID NO: 176233 - DNA, 20 bp, Artificial Sequence
  Description of Artificial Sequence: Synthetic oligonucleotide
  Target: LAMA2; (+) strand; PAM type: NRG; PAM sequence: CAG
ttaaaaagtaaacaaaaaaa

SEQ ID NO: 176234 - DNA, 20 bp, Artificial Sequence
  Description of Artificial Sequence: Synthetic oligonucleotide
  Target: LAMA2; (+) strand; PAM type: NRG; PAM sequence: CAG
taaatattttacatctttta

SEQ ID NO: 176235 - DNA, 20 bp, Artificial Sequence
  Description of Artificial Sequence: Synthetic oligonucleotide
  Target: LAMA2; (+) strand; PAM type: NRG; PAM sequence: GAG
ttacagccaactctttcaat

SEQ ID NO: 176236 - DNA, 20 bp, Artificial Sequence
  Description of Artificial Sequence: Synthetic oligonucleotide
  Target: LAMA2; (+) strand; PAM type: NRG; PAM sequence: AAG
aaatttcatctctaataaaa

SEQ ID NO: 176237 - DNA, 20 bp, Artificial Sequence
  Description of Artificial Sequence: Synthetic oligonucleotide
  Target: LAMA2; (+) strand; PAM type: NRG; PAM sequence: TGG
tctctaataaaaaagtaatt

SEQ ID NO: 176238 - DNA, 20 bp, Artificial Sequence
  Description of Artificial Sequence: Synthetic oligonucleotide
  Target: LAMA2; (+) strand; PAM type: NRG; PAM sequence: GGG
ctctaataaaaaagtaattt

SEQ ID NO: 176239 - DNA, 20 bp, Artificial Sequence
  Description of Artificial Sequence: Synthetic oligonucleotide
  Target: LAMA2; (+) strand; PAM type: NRG; PAM sequence: GGG
tctaataaaaaagtaatttg

SEQ ID NO: 176240 - DNA, 20 bp, Artificial Sequence
  Description of Artificial Sequence: Synthetic oligonucleotide
  Target: LAMA2; (+) strand; PAM type: NRG; PAM sequence: TAG
aaagtaatttggggaacatt

SEQ ID NO: 176241 - DNA, 20 bp, Artificial Sequence
  Description of Artificial Sequence: Synthetic oligonucleotide
  Target: LAMA2; (+) strand; PAM type: NRG; PAM sequence: AGG
aagtaatttggggaacattt

SEQ ID NO: 176242 - DNA, 20 bp, Artificial Sequence
  Description of Artificial Sequence: Synthetic oligonucleotide
  Target: LAMA2; (+) strand; PAM type: NRG; PAM sequence: AAG
ttggggaacatttaggaaaa

SEQ ID NO: 176243 - DNA, 20 bp, Artificial Sequence
  Description of Artificial Sequence: Synthetic oligonucleotide
  Target: LAMA2; (+) strand; PAM type: NRG; PAM sequence: AAG
ggaaaaaagcaaaatatata

SEQ ID NO: 176244 - DNA, 20 bp, Artificial Sequence
  Description of Artificial Sequence: Synthetic oligonucleotide
  Target: LAMA2; (+) strand; PAM type: NRG; PAM sequence: TAG
aacttttaaacttgcttgtt

SEQ ID NO: 176245 - DNA, 20 bp, Artificial Sequence
  Description of Artificial Sequence: Synthetic oligonucleotide
  Target: LAMA2; (+) strand; PAM type: NRG; PAM sequence: TGG
ttgcttgtttagaaaatcac

SEQ ID NO: 176246 - DNA, 20 bp, Artificial Sequence
  Description of Artificial Sequence: Synthetic oligonucleotide
  Target: LAMA2; (+) strand; PAM type: NRG; PAM sequence: GGG
tgcttgtttagaaaatcact

SEQ ID NO: 176247 - DNA, 20 bp, Artificial Sequence
  Description of Artificial Sequence: Synthetic oligonucleotide
  Target: LAMA2; (+) strand; PAM type: NRG; PAM sequence: GGG
gcttgtttagaaaatcactg

SEQ ID NO: 176248 - DNA, 20 bp, Artificial Sequence
  Description of Artificial Sequence: Synthetic oligonucleotide
  Target: LAMA2; (+) strand; PAM type: NRG; PAM sequence: CAG
tttagaaaatcactggggta

SEQ ID NO: 176249 - DNA, 20 bp, Artificial Sequence
  Description of Artificial Sequence: Synthetic oligonucleotide
  Target: LAMA2; (+) strand; PAM type: NRG; PAM sequence: AGG
ttagaaaatcactggggtac

SEQ ID NO: 176250 - DNA, 20 bp, Artificial Sequence
  Description of Artificial Sequence: Synthetic oligonucleotide
  Target: LAMA2; (+) strand; PAM type: NRG; PAM sequence: TAG
aaaatcactggggtacaggt

SEQ ID NO: 176251 - DNA, 20 bp, Artificial Sequence
  Description of Artificial Sequence: Synthetic oligonucleotide
  Target: LAMA2; (+) strand; PAM type: NRG; PAM sequence: CAG
tcactggggtacaggttagt

SEQ ID NO: 176252 - DNA, 20 bp, Artificial Sequence
  Description of Artificial Sequence: Synthetic oligonucleotide
  Target: LAMA2; (+) strand; PAM type: NRG; PAM sequence: CAG
gccttcacacctccctcctc

SEQ ID NO: 176253 - DNA, 20 bp, Artificial Sequence
  Description of Artificial Sequence: Synthetic oligonucleotide
  Target: LAMA2; (+) strand; PAM type: NRG; PAM sequence: CAG
ttcacacctccctcctccag

SEQ ID NO: 176254 - DNA, 20 bp, Artificial Sequence
  Description of Artificial Sequence: Synthetic oligonucleotide
  Target: LAMA2; (+) strand; PAM type: NRG; PAM sequence: GAG
cacacctccctcctccagca

SEQ ID NO: 176255 - DNA, 20 bp, Artificial Sequence
  Description of Artificial Sequence: Synthetic oligonucleotide
  Target: LAMA2; (+) strand; PAM type: NRG; PAM sequence: CAG
tccagcagagcctcctctga

SEQ ID NO: 176256 - DNA, 20 bp, Artificial Sequence
  Description of Artificial Sequence: Synthetic oligonucleotide
  Target: LAMA2; (+) strand; PAM type: NRG; PAM sequence: TAG
tcctctgacagccaaacatc

SEQ ID NO: 176257 - DNA, 20 bp, Artificial Sequence
  Description of Artificial Sequence: Synthetic oligonucleotide
  Target: LAMA2; (+) strand; PAM type: NRG; PAM sequence: AGG
cctctgacagccaaacatct

SEQ ID NO: 176258 - DNA, 20 bp, Artificial Sequence
  Description of Artificial Sequence: Synthetic oligonucleotide
  Target: LAMA2; (+) strand; PAM type: NRG; PAM sequence: TGG
ggcatttctgtgttccatta

SEQ ID NO: 176259 - DNA, 20 bp, Artificial Sequence
  Description of Artificial Sequence: Synthetic oligonucleotide
  Target: LAMA2; (+) strand; PAM type: NRG; PAM sequence: AAG
taatgattgtctttttttat

SEQ ID NO: 176260 - DNA, 20 bp, Artificial Sequence
  Description of Artificial Sequence: Synthetic oligonucleotide
  Target: LAMA2; (+) strand; PAM type: NRG; PAM sequence: CAG
ctttcctcttccctccactc

SEQ ID NO: 176261 - DNA, 20 bp, Artificial Sequence
  Description of Artificial Sequence: Synthetic oligonucleotide
  Target: LAMA2; (+) strand; PAM type: NRG; PAM sequence: TAG
tccctccactccagttccat

SEQ ID NO: 176262 - DNA, 20 bp, Artificial Sequence
  Description of Artificial Sequence: Synthetic oligonucleotide
  Target: LAMA2; (+) strand; PAM type: NRG; PAM sequence: AGG
ccctccactccagttccatt

SEQ ID NO: 176263 - DNA, 20 bp, Artificial Sequence
  Description of Artificial Sequence: Synthetic oligonucleotide
  Target: LAMA2; (+) strand; PAM type: NRG; PAM sequence: GGG
cctccactccagttccatta

SEQ ID NO: 176264 - DNA, 20 bp, Artificial Sequence
  Description of Artificial Sequence: Synthetic oligonucleotide
  Target: LAMA2; (+) strand; PAM type: NRG; PAM sequence: AAG
ccactccagttccattaggg

SEQ ID NO: 176265 - DNA, 20 bp, Artificial Sequence
  Description of Artificial Sequence: Synthetic oligonucleotide
  Target: LAMA2; (+) strand; PAM type: NRG; PAM sequence: AGG
cactccagttccattaggga

SEQ ID NO: 176266 - DNA, 20 bp, Artificial Sequence
  Description of Artificial Sequence: Synthetic oligonucleotide
  Target: LAMA2; (+) strand; PAM type: NRG; PAM sequence: TAG
cagttccattagggaaggca

SEQ ID NO: 176267 - DNA, 20 bp, Artificial Sequence
  Description of Artificial Sequence: Synthetic oligonucleotide
  Target: LAMA2; (+) strand; PAM type: NRG; PAM sequence: TGG
gtctttccattttgaatatt

SEQ ID NO: 176268 - DNA, 20 bp, Artificial Sequence
  Description of Artificial Sequence: Synthetic oligonucleotide
  Target: LAMA2; (+) strand; PAM type: NRG; PAM sequence: GAG
attttgaatatttggtgctt

SEQ ID NO: 176269 - DNA, 20 bp, Artificial Sequence
  Description of Artificial Sequence: Synthetic oligonucleotide
  Target: LAMA2; (+) strand; PAM type: NRG; PAM sequence: AAG
tggtgcttgagataaataaa

SEQ ID NO: 176270 - DNA, 20 bp, Artificial Sequence
  Description of Artificial Sequence: Synthetic oligonucleotide
  Target: LAMA2; (+) strand; PAM type: NRG; PAM sequence: TGG
agataaataaaaagttttgt

SEQ ID NO: 176271 - DNA, 20 bp, Artificial Sequence
  Description of Artificial Sequence: Synthetic oligonucleotide
  Target: LAMA2; (+) strand; PAM type: NRG; PAM sequence: GGG
gataaataaaaagttttgtt

SEQ ID NO: 176272 - DNA, 20 bp, Artificial Sequence
  Description of Artificial Sequence: Synthetic oligonucleotide
  Target: LAMA2; (+) strand; PAM type: NRG; PAM sequence: TGG
ttcacttatctattaatcaa

SEQ ID NO: 176273 - DNA, 20 bp, Artificial Sequence
  Description of Artificial Sequence: Synthetic oligonucleotide
  Target: LAMA2; (+) strand; PAM type: NRG; PAM sequence: CAG
acttatctattaatcaatgg

SEQ ID NO: 176274 - DNA, 20 bp, Artificial Sequence
  Description of Artificial Sequence: Synthetic oligonucleotide
  Target: LAMA2; (+) strand; PAM type: NRG; PAM sequence: TAG
taatcaatggcagtatgctt

SEQ ID NO: 176275 - DNA, 20 bp, Artificial Sequence
  Description of Artificial Sequence: Synthetic oligonucleotide
  Target: LAMA2; (+) strand; PAM type: NRG; PAM sequence: AAG
caatggcagtatgctttagc

SEQ ID NO: 176276 - DNA, 20 bp, Artificial Sequence
  Description of Artificial Sequence: Synthetic oligonucleotide
  Target: LAMA2; (+) strand; PAM type: NRG; PAM sequence: GAG
atggcagtatgctttagcaa

SEQ ID NO: 176277 - DNA, 20 bp, Artificial Sequence
  Description of Artificial Sequence: Synthetic oligonucleotide
  Target: LAMA2; (+) strand; PAM type: NRG; PAM sequence: AAG
agtaattatgaatatctaat

SEQ ID NO: 176278 - DNA, 20 bp, Artificial Sequence
  Description of Artificial Sequence: Synthetic oligonucleotide
  Target: LAMA2; (+) strand; PAM type: NRG; PAM sequence: TAG
aattatgaatatctaataag

SEQ ID NO: 176279 - DNA, 20 bp, Artificial Sequence
  Description of Artificial Sequence: Synthetic oligonucleotide
  Target: LAMA2; (+) strand; PAM type: NRG; PAM sequence: TAG
tatgaatatctaataagtag

SEQ ID NO: 176280 - DNA, 20 bp, Artificial Sequence
  Description of Artificial Sequence: Synthetic oligonucleotide
  Target: LAMA2; (+) strand; PAM type: NRG; PAM sequence: AGG
atgaatatctaataagtagt

SEQ ID NO: 176281 - DNA, 20 bp, Artificial Sequence
  Description of Artificial Sequence: Synthetic oligonucleotide
  Target: LAMA2; (+) strand; PAM type: NRG; PAM sequence: AAG
aatatctaataagtagtagg

SEQ ID NO: 176282 - DNA, 20 bp, Artificial Sequence
  Description of Artificial Sequence: Synthetic oligonucleotide
  Target: LAMA2; (+) strand; PAM type: NRG; PAM sequence: GAG
tatctaataagtagtaggaa

SEQ ID NO: 176283 - DNA, 20 bp, Artificial Sequence
  Description of Artificial Sequence: Synthetic oligonucleotide
  Target: LAMA2; (+) strand; PAM type: NRG; PAM sequence: AGG
atctaataagtagtaggaag

SEQ ID NO: 176284 - DNA, 20 bp, Artificial Sequence
  Description of Artificial Sequence: Synthetic oligonucleotide
  Target: LAMA2; (+) strand; PAM type: NRG; PAM sequence: AAG
ttaaaatgcaattacatgcc

SEQ ID NO: 176285 - DNA, 20 bp, Artificial Sequence
  Description of Artificial Sequence: Synthetic oligonucleotide
  Target: LAMA2; (+) strand; PAM type: NRG; PAM sequence: CAG
agtcatctgttgaatcctaa

SEQ ID NO: 176286 - DNA, 20 bp, Artificial Sequence
  Description of Artificial Sequence: Synthetic oligonucleotide
  Target: LAMA2; (+) strand; PAM type: NRG; PAM sequence: CAG
tattaactaataaaaacata

SEQ ID NO: 176287 - DNA, 20 bp, Artificial Sequence
  Description of Artificial Sequence: Synthetic oligonucleotide
  Target: LAMA2; (+) strand; PAM type: NRG; PAM sequence: TAG
tacagcaacttacataaaaa

SEQ ID NO: 176288 - DNA, 20 bp, Artificial Sequence
  Description of Artificial Sequence: Synthetic oligonucleotide
  Target: LAMA2; (+) strand; PAM type: NRG; PAM sequence: TAG
agactctgttttgcatgata

SEQ ID NO: 176289 - DNA, 20 bp, Artificial Sequence
  Description of Artificial Sequence: Synthetic oligonucleotide
  Target: LAMA2; (+) strand; PAM type: NRG; PAM sequence: CAG
tgaatatatatatatgtaca

SEQ ID NO: 176290 - DNA, 20 bp, Artificial Sequence
  Description of Artificial Sequence: Synthetic oligonucleotide
  Target: LAMA2; (+) strand; PAM type: NRG; PAM sequence: CAG
tatatatatgtacacagact

SEQ ID NO: 176291 - DNA, 20 bp, Artificial Sequence
  Description of Artificial Sequence: Synthetic oligonucleotide
  Target: LAMA2; (+) strand; PAM type: NRG; PAM sequence: AAG
tatatgtacacagactcaga

SEQ ID NO: 176292 - DNA, 20 bp, Artificial Sequence
  Description of Artificial Sequence: Synthetic oligonucleotide
  Target: LAMA2; (+) strand; PAM type: NRG; PAM sequence: GAG
tatgtacacagactcagaaa

SEQ ID NO: 176293 - DNA, 20 bp, Artificial Sequence
  Description of Artificial Sequence: Synthetic oligonucleotide
  Target: LAMA2; (+) strand; PAM type: NRG; PAM sequence: AAG
agactcagaaagagaatacc

SEQ ID NO: 176294 - DNA, 20 bp, Artificial Sequence
  Description of Artificial Sequence: Synthetic oligonucleotide
  Target: LAMA2; (+) strand; PAM type: NRG; PAM sequence: AAG
taaaaaaaaaaacctctaaa

SEQ ID NO: 176295 - DNA, 20 bp, Artificial Sequence
  Description of Artificial Sequence: Synthetic oligonucleotide
  Target: LAMA2; (+) strand; PAM type: NRG; PAM sequence: AAG
aaaaaaaacctctaaaaagc

SEQ ID NO: 176296 - DNA, 20 bp, Artificial Sequence
  Description of Artificial Sequence: Synthetic oligonucleotide
  Target: LAMA2; (+) strand; PAM type: NRG; PAM sequence: AAG
acaaaatatcttgcaactca

SEQ ID NO: 176297 - DNA, 20 bp, Artificial Sequence
  Description of Artificial Sequence: Synthetic oligonucleotide
  Target: LAMA2; (+) strand; PAM type: NRG; PAM sequence: TAG
tttatatttcacatatgctg

SEQ ID NO: 176298 - DNA, 20 bp, Artificial Sequence
  Description of Artificial Sequence: Synthetic oligonucleotide
  Target: LAMA2; (+) strand; PAM type: NRG; PAM sequence: CAG
tttcacatatgctgtagaca

SEQ ID NO: 176299 - DNA, 20 bp, Artificial Sequence
  Description of Artificial Sequence: Synthetic oligonucleotide
  Target: LAMA2; (+) strand; PAM type: NRG; PAM sequence: CAG
catatgctgtagacacagct

SEQ ID NO: 176300 - DNA, 20 bp, Artificial Sequence
  Description of Artificial Sequence: Synthetic oligonucleotide
  Target: LAMA2; (+) strand; PAM type: NRG; PAM sequence: AGG
atatgctgtagacacagctc

SEQ ID NO: 176301 - DNA, 20 bp, Artificial Sequence
  Description of Artificial Sequence: Synthetic oligonucleotide
  Target: LAMA2; (+) strand; PAM type: NRG; PAM sequence: CAG
gtagacacagctcaggaact

SEQ ID NO: 176302 - DNA, 20 bp, Artificial Sequence
  Description of Artificial Sequence: Synthetic oligonucleotide
  Target: LAMA2; (+) strand; PAM type: NRG; PAM sequence: AAG
gatgcttatgaatatgtata

SEQ ID NO: 176303 - DNA, 20 bp, Artificial Sequence
  Description of Artificial Sequence: Synthetic oligonucleotide
  Target: LAMA2; (+) strand; PAM type: NRG; PAM sequence: TAG
gaatatgtataaagtataat

SEQ ID NO: 176304 - DNA, 20 bp, Artificial Sequence
  Description of Artificial Sequence: Synthetic oligonucleotide
  Target: LAMA2; (+) strand; PAM type: NRG; PAM sequence: TAG
tgtataaagtataattagct

SEQ ID NO: 176305 - DNA, 20 bp, Artificial Sequence
  Description of Artificial Sequence: Synthetic oligonucleotide
  Target: LAMA2; (+) strand; PAM type: NRG; PAM sequence: AAG
atgtgcttcaataacttacc

SEQ ID NO: 176306 - DNA, 20 bp, Artificial Sequence
  Description of Artificial Sequence: Synthetic oligonucleotide
  Target: LAMA2; (+) strand; PAM type: NRG; PAM sequence: TGG
aataacttaccaagcaatgc

SEQ ID NO: 176307 - DNA, 20 bp, Artificial Sequence
  Description of Artificial Sequence: Synthetic oligonucleotide
  Target: LAMA2; (+) strand; PAM type: NRG; PAM sequence: AAG
cttaccaagcaatgctggaa

SEQ ID NO: 176308 - DNA, 20 bp, Artificial Sequence
  Description of Artificial Sequence: Synthetic oligonucleotide
  Target: LAMA2; (+) strand; PAM type: NRG; PAM sequence: AGG
ttaccaagcaatgctggaaa

SEQ ID NO: 176309 - DNA, 20 bp, Artificial Sequence
  Description of Artificial Sequence: Synthetic oligonucleotide
  Target: LAMA2; (+) strand; PAM type: NRG; PAM sequence: CAG
aaaaggttctctccaaattc

SEQ ID NO: 176310 - DNA, 20 bp, Artificial Sequence
  Description of Artificial Sequence: Synthetic oligonucleotide
  Target: LAMA2; (+) strand; PAM type: NRG; PAM sequence: GAG
ggttctctccaaattccagt

SEQ ID NO: 176311 - DNA, 20 bp, Artificial Sequence
  Description of Artificial Sequence: Synthetic oligonucleotide
  Target: LAMA2; (+) strand; PAM type: NRG; PAM sequence: CGG
caaattccagtgagttgaaa

SEQ ID NO: 176312 - DNA, 20 bp, Artificial Sequence
  Description of Artificial Sequence: Synthetic oligonucleotide
  Target: LAMA2; (+) strand; PAM type: NRG; PAM sequence: TAG
gcttttcacccataacatgt

SEQ ID NO: 176313 - DNA, 20 bp, Artificial Sequence
  Description of Artificial Sequence: Synthetic oligonucleotide
  Target: LAMA2; (+) strand; PAM type: NRG; PAM sequence: AAG
ccattcccttatcatgtgaa

SEQ ID NO: 176314 - DNA, 20 bp, Artificial Sequence
  Description of Artificial Sequence: Synthetic oligonucleotide
  Target: LAMA2; (+) strand; PAM type: NRG; PAM sequence: CAG
aaaagcctgtcctttaaacc

SEQ ID NO: 176315 - DNA, 20 bp, Artificial Sequence
  Description of Artificial Sequence: Synthetic oligonucleotide
  Target: LAMA2; (+) strand; PAM type: NRG; PAM sequence: TGG
gtcctttaaacccagattgc

SEQ ID NO: 176316 - DNA, 20 bp, Artificial Sequence
  Description of Artificial Sequence: Synthetic oligonucleotide
  Target: LAMA2; (+) strand; PAM type: NRG; PAM sequence: CAG
ctttaaacccagattgctgg

SEQ ID NO: 176317 - DNA, 20 bp, Artificial Sequence
  Description of Artificial Sequence: Synthetic oligonucleotide
  Target: LAMA2; (+) strand; PAM type: NRG; PAM sequence: CAG
ggcagactgcttgtaactga

SEQ ID NO: 176318 - DNA, 20 bp, Artificial Sequence
  Description of Artificial Sequence: Synthetic oligonucleotide
  Target: LAMA2; (+) strand; PAM type: NRG; PAM sequence: AAG
aactgacagttgtatgccat

SEQ ID NO: 176319 - DNA, 20 bp, Artificial Sequence
  Description of Artificial Sequence: Synthetic oligonucleotide
  Target: LAMA2; (+) strand; PAM type: NRG; PAM sequence: TAG
agctctttactttaatattt

SEQ ID NO: 176320 - DNA, 20 bp, Artificial Sequence
  Description of Artificial Sequence: Synthetic oligonucleotide
  Target: LAMA2; (+) strand; PAM type: NRG; PAM sequence: GAG
ctctttactttaatatttta

SEQ ID NO: 176321 - DNA, 20 bp, Artificial Sequence
  Description of Artificial Sequence: Synthetic oligonucleotide
  Target: LAMA2; (+) strand; PAM type: NRG; PAM sequence: GAG
ctttactttaatattttaga

SEQ ID NO: 176322 - DNA, 20 bp, Artificial Sequence
  Description of Artificial Sequence: Synthetic oligonucleotide
  Target: LAMA2; (+) strand; PAM type: NRG; PAM sequence: GAG
agagagcttcttgaaacatt

SEQ ID NO: 176323 - DNA, 20 bp, Artificial Sequence
  Description of Artificial Sequence: Synthetic oligonucleotide
  Target: LAMA2; (+) strand; PAM type: NRG; PAM sequence: AGG
gagagcttcttgaaacattg

SEQ ID NO: 176324 - DNA, 20 bp, Artificial Sequence
  Description of Artificial Sequence: Synthetic oligonucleotide
  Target: LAMA2; (+) strand; PAM type: NRG; PAM sequence: CGG
tttttaacctctcaattcca

SEQ ID NO: 176325 - DNA, 20 bp, Artificial Sequence
  Description of Artificial Sequence: Synthetic oligonucleotide
  Target: LAMA2; (+) strand; PAM type: NRG; PAM sequence: GAG
caattccacggtgcttgcat

SEQ ID NO: 176326 - DNA, 20 bp, Artificial Sequence
  Description of Artificial Sequence: Synthetic oligonucleotide
  Target: LAMA2; (+) strand; PAM type: NRG; PAM sequence: AGG
aattccacggtgcttgcatg

SEQ ID NO: 176327 - DNA, 20 bp, Artificial Sequence
  Description of Artificial Sequence: Synthetic oligonucleotide
  Target: LAMA2; (+) strand; PAM type: NRG; PAM sequence: TGG
ggtgactattctcttttctc

SEQ ID NO: 176328 - DNA, 20 bp, Artificial Sequence
  Description of Artificial Sequence: Synthetic oligonucleotide
  Target: LAMA2; (+) strand; PAM type: NRG; PAM sequence: TGG
ctattacaataaccaattga

SEQ ID NO: 176329 - DNA, 20 bp, Artificial Sequence
  Description of Artificial Sequence: Synthetic oligonucleotide
  Target: LAMA2; (+) strand; PAM type: NRG; PAM sequence: CAG
atggctccttttttcccaca

SEQ ID NO: 176330 - DNA, 20 bp, Artificial Sequence
  Description of Artificial Sequence: Synthetic oligonucleotide
  Target: LAMA2; (+) strand; PAM type: NRG; PAM sequence: TGG
agctgcccaattcatcttct

SEQ ID NO: 176331 - DNA, 20 bp, Artificial Sequence
  Description of Artificial Sequence: Synthetic oligonucleotide
  Target: LAMA2; (+) strand; PAM type: NRG; PAM sequence: CAG
caattcatcttcttggacta

SEQ ID NO: 176332 - DNA, 20 bp, Artificial Sequence
  Description of Artificial Sequence: Synthetic oligonucleotide
  Target: LAMA2; (+) strand; PAM type: NRG; PAM sequence: CAG
tctgatcacactctcctact

SEQ ID NO: 176333 - DNA, 20 bp, Artificial Sequence
  Description of Artificial Sequence: Synthetic oligonucleotide
  Target: LAMA2; (+) strand; PAM type: NRG; PAM sequence: AAG
tctcctactcagaaactttc

SEQ ID NO: 176334 - DNA, 20 bp, Artificial Sequence
  Description of Artificial Sequence: Synthetic oligonucleotide
  Target: LAMA2; (+) strand; PAM type: NRG; PAM sequence: AGG
ctcctactcagaaactttca

SEQ ID NO: 176335 - DNA, 20 bp, Artificial Sequence
  Description of Artificial Sequence: Synthetic oligonucleotide
  Target: LAMA2; (+) strand; PAM type: NRG; PAM sequence: CAG
cctccaaattgctcattgcc

SEQ ID NO: 176336 - DNA, 20 bp, Artificial Sequence
  Description of Artificial Sequence: Synthetic oligonucleotide
  Target: LAMA2; (+) strand; PAM type: NRG; PAM sequence: CAG
actcgcacattcaaaccttc

SEQ ID NO: 176337 - DNA, 20 bp, Artificial Sequence
  Description of Artificial Sequence: Synthetic oligonucleotide
  Target: LAMA2; (+) strand; PAM type: NRG; PAM sequence: TAG
attgactctgacctgtctaa

SEQ ID NO: 176338 - DNA, 20 bp, Artificial Sequence
  Description of Artificial Sequence: Synthetic oligonucleotide
  Target: LAMA2; (+) strand; PAM type: NRG; PAM sequence: TAG
cttgacgaaccctacaaact

SEQ ID NO: 176339 - DNA, 20 bp, Artificial Sequence
  Description of Artificial Sequence: Synthetic oligonucleotide
  Target: LAMA2; (+) strand; PAM type: NRG; PAM sequence: AGG
ttgacgaaccctacaaactt

SEQ ID NO: 176340 - DNA, 20 bp, Artificial Sequence
  Description of Artificial Sequence: Synthetic oligonucleotide
  Target: LAMA2; (+) strand; PAM type: NRG; PAM sequence: GGG
tgacgaaccctacaaactta

SEQ ID NO: 176341 - DNA, 20 bp, Artificial Sequence
  Description of Artificial Sequence: Synthetic oligonucleotide
  Target: LAMA2; (+) strand; PAM type: NRG; PAM sequence: GAG
acgaaccctacaaacttagg

SEQ ID NO: 176342 - DNA, 20 bp, Artificial Sequence
  Description of Artificial Sequence: Synthetic oligonucleotide
  Target: LAMA2; (+) strand; PAM type: NRG; PAM sequence: AAG
ctctcacatccacacatcaa

SEQ ID NO: 176343 - DNA, 20 bp, Artificial Sequence
  Description of Artificial Sequence: Synthetic oligonucleotide
  Target: LAMA2; (+) strand; PAM type: NRG; PAM sequence: GAG
ctacctgtctcctttcatct

SEQ ID NO: 176344 - DNA, 20 bp, Artificial Sequence
  Description of Artificial Sequence: Synthetic oligonucleotide
  Target: LAMA2; (+) strand; PAM type: NRG; PAM sequence: AAG
ctgtctcctttcatctgagc

SEQ ID NO: 176345 - DNA, 20 bp, Artificial Sequence
  Description of Artificial Sequence: Synthetic oligonucleotide
  Target: LAMA2; (+) strand; PAM type: NRG; PAM sequence: AGG
tgtctcctttcatctgagca

SEQ ID NO: 176346 - DNA, 20 bp, Artificial Sequence
  Description of Artificial Sequence: Synthetic oligonucleotide
  Target: LAMA2; (+) strand; PAM type: NRG; PAM sequence: TGG
cctttcatctgagcaaggaa

SEQ ID NO: 176347 - DNA, 20 bp, Artificial Sequence
  Description of Artificial Sequence: Synthetic oligonucleotide
  Target: LAMA2; (+) strand; PAM type: NRG; PAM sequence: AAG
tgagcaaggaatggttgact

SEQ ID NO: 176348 - DNA, 20 bp, Artificial Sequence
  Description of Artificial Sequence: Synthetic oligonucleotide
  Target: LAMA2; (+) strand; PAM type: NRG; PAM sequence: AGG
gagcaaggaatggttgacta

SEQ ID NO: 176349 - DNA, 20 bp, Artificial Sequence
  Description of Artificial Sequence: Synthetic oligonucleotide
  Target: LAMA2; (+) strand; PAM type: NRG; PAM sequence: CAG
ggaatggttgactaaggatc

SEQ ID NO: 176350 - DNA, 20 bp, Artificial Sequence
  Description of Artificial Sequence: Synthetic oligonucleotide
  Target: LAMA2; (+) strand; PAM type: NRG; PAM sequence: AGG
gaatggttgactaaggatcc

SEQ ID NO: 176351 - DNA, 20 bp, Artificial Sequence
  Description of Artificial Sequence: Synthetic oligonucleotide
  Target: LAMA2; (+) strand; PAM type: NRG; PAM sequence: AAG
tggttgactaaggatccagg

SEQ ID NO: 176352 - DNA, 20 bp, Artificial Sequence
  Description of Artificial Sequence: Synthetic oligonucleotide
  Target: LAMA2; (+) strand; PAM type: NRG; PAM sequence: AAG
gaaatcactgacttcctaaa

SEQ ID NO: 176353 - DNA, 20 bp, Artificial Sequence
  Description of Artificial Sequence: Synthetic oligonucleotide
  Target: LAMA2; (+) strand; PAM type: NRG; PAM sequence: CAG
atcactgacttcctaaaaag

SEQ ID NO: 176354 - DNA, 20 bp, Artificial Sequence
  Description of Artificial Sequence: Synthetic oligonucleotide
  Target: LAMA2; (+) strand; PAM type: NRG; PAM sequence: AGG
tcactgacttcctaaaaagc

SEQ ID NO: 176355 - DNA, 20 bp, Artificial Sequence
  Description of Artificial Sequence: Synthetic oligonucleotide
  Target: LAMA2; (+) strand; PAM type: NRG; PAM sequence: GGG
cactgacttcctaaaaagca

SEQ ID NO: 176356 - DNA, 20 bp, Artificial Sequence
  Description of Artificial Sequence: Synthetic oligonucleotide
  Target: LAMA2; (+) strand; PAM type: NRG; PAM sequence: TGG
gcagggaaaaaaaaattgcc

SEQ ID NO: 176357 - DNA, 20 bp, Artificial Sequence
  Description of Artificial Sequence: Synthetic oligonucleotide
  Target: LAMA2; (+) strand; PAM type: NRG; PAM sequence: AAG
gggaaaaaaaaattgcctgg

SEQ ID NO: 176358 - DNA, 20 bp, Artificial Sequence
  Description of Artificial Sequence: Synthetic oligonucleotide
  Target: LAMA2; (+) strand; PAM type: NRG; PAM sequence: AAG
aaaaaaattgcctggaagca

SEQ ID NO: 176359 - DNA, 20 bp, Artificial Sequence
  Description of Artificial Sequence: Synthetic oligonucleotide
  Target: LAMA2; (+) strand; PAM type: NRG; PAM sequence: GAG
aaaaattgcctggaagcaaa

SEQ ID NO: 176360 - DNA, 20 bp, Artificial Sequence
  Description of Artificial Sequence: Synthetic oligonucleotide
  Target: LAMA2; (+) strand; PAM type: NRG; PAM sequence: CAG
aattgcctggaagcaaagag

SEQ ID NO: 176361 - DNA, 20 bp, Artificial Sequence
  Description of Artificial Sequence: Synthetic oligonucleotide
  Target: LAMA2; (+) strand; PAM type: NRG; PAM sequence: AGG
attgcctggaagcaaagagc

SEQ ID NO: 176362 - DNA, 20 bp, Artificial Sequence
  Description of Artificial Sequence: Synthetic oligonucleotide
  Target: LAMA2; (+) strand; PAM type: NRG; PAM sequence: CAG
agcaaagagcaggtgatatt

SEQ ID NO: 176363 - DNA, 20 bp, Artificial Sequence
  Description of Artificial Sequence: Synthetic oligonucleotide
  Target: LAMA2; (+) strand; PAM type: NRG; PAM sequence: AAG
caggtgatattcagaaatgc

SEQ ID NO: 176364 - DNA, 20 bp, Artificial Sequence
  Description of Artificial Sequence: Synthetic oligonucleotide
  Target: LAMA2; (+) strand; PAM type: NRG; PAM sequence: AAG
gtgatattcagaaatgcaag

SEQ ID NO: 176365 - DNA, 20 bp, Artificial Sequence
  Description of Artificial Sequence: Synthetic oligonucleotide
  Target: LAMA2; (+) strand; PAM type: NRG; PAM sequence: TAG
tattcagaaatgcaagaaga

SEQ ID NO: 176366 - DNA, 20 bp, Artificial Sequence
  Description of Artificial Sequence: Synthetic oligonucleotide
  Target: LAMA2; (+) strand; PAM type: NRG; PAM sequence: TAG
aatgcaagaagatagaaaat

SEQ ID NO: 176367 - DNA, 20 bp, Artificial Sequence
  Description of Artificial Sequence: Synthetic oligonucleotide
  Target: LAMA2; (+) strand; PAM type: NRG; PAM sequence: CGG
aagatagaaaattagcaaca

SEQ ID NO: 176368 - DNA, 20 bp, Artificial Sequence
  Description of Artificial Sequence: Synthetic oligonucleotide
  Target: LAMA2; (+) strand; PAM type: NRG; PAM sequence: GAG
gatagaaaattagcaacacg

SEQ ID NO: 176369 - DNA, 20 bp, Artificial Sequence
  Description of Artificial Sequence: Synthetic oligonucleotide
  Target: LAMA2; (+) strand; PAM type: NRG; PAM sequence: AGG
atagaaaattagcaacacgg

SEQ ID NO: 176370 - DNA, 20 bp, Artificial Sequence
  Description of Artificial Sequence: Synthetic oligonucleotide
  Target: LAMA2; (+) strand; PAM type: NRG; PAM sequence: CAG
agcaacacggaggtctgtat

SEQ ID NO: 176371 - DNA, 20 bp, Artificial Sequence
  Description of Artificial Sequence: Synthetic oligonucleotide
  Target: LAMA2; (+) strand; PAM type: NRG; PAM sequence: TAG
cggaggtctgtatcagtaca

SEQ ID NO: 176372 - DNA, 20 bp, Artificial Sequence
  Description of Artificial Sequence: Synthetic oligonucleotide
  Target: LAMA2; (+) strand; PAM type: NRG; PAM sequence: CAG
ctgtatcagtacatagcctt

SEQ ID NO: 176373 - DNA, 20 bp, Artificial Sequence
  Description of Artificial Sequence: Synthetic oligonucleotide
  Target: LAMA2; (+) strand; PAM type: NRG; PAM sequence: CAG
atcagtacatagccttcagt

SEQ ID NO: 176374 - DNA, 20 bp, Artificial Sequence
  Description of Artificial Sequence: Synthetic oligonucleotide
  Target: LAMA2; (+) strand; PAM type: NRG; PAM sequence: AGG
tcagtacatagccttcagtc

SEQ ID NO: 176375 - DNA, 20 bp, Artificial Sequence
  Description of Artificial Sequence: Synthetic oligonucleotide
  Target: LAMA2; (+) strand; PAM type: NRG; PAM sequence: GGG
cagtacatagccttcagtca

SEQ ID NO: 176376 - DNA, 20 bp, Artificial Sequence
  Description of Artificial Sequence: Synthetic oligonucleotide
  Target: LAMA2; (+) strand; PAM type: NRG; PAM sequence: TGG
agtcagggctgtcatgtttc

SEQ ID NO: 176377 - DNA, 20 bp, Artificial Sequence
  Description of Artificial Sequence: Synthetic oligonucleotide
  Target: LAMA2; (+) strand; PAM type: NRG; PAM sequence: AAG
ggctgtcatgtttctggatg

SEQ ID NO: 176378 - DNA, 20 bp, Artificial Sequence
  Description of Artificial Sequence: Synthetic oligonucleotide
  Target: LAMA2; (+) strand; PAM type: NRG; PAM sequence: AGG
gctgtcatgtttctggatga

SEQ ID NO: 176379 - DNA, 20 bp, Artificial Sequence
  Description of Artificial Sequence: Synthetic oligonucleotide
  Target: LAMA2; (+) strand; PAM type: NRG; PAM sequence: AAG
atgtttctggatgaaggtgc

SEQ ID NO: 176380 - DNA, 20 bp, Artificial Sequence
  Description of Artificial Sequence: Synthetic oligonucleotide
  Target: LAMA2; (+) strand; PAM type: NRG; PAM sequence: GAG
gtttctggatgaaggtgcaa

SEQ ID NO: 176381 - DNA, 20 bp, Artificial Sequence
  Description of Artificial Sequence: Synthetic oligonucleotide
  Target: LAMA2; (+) strand; PAM type: NRG; PAM sequence: CAG
ctggatgaaggtgcaagagc

SEQ ID NO: 176382 - DNA, 20 bp, Artificial Sequence
  Description of Artificial Sequence: Synthetic oligonucleotide
  Target: LAMA2; (+) strand; PAM type: NRG; PAM sequence: TGG
gatgaaggtgcaagagccag

SEQ ID NO: 176383 - DNA, 20 bp, Artificial Sequence
  Description of Artificial Sequence: Synthetic oligonucleotide
  Target: LAMA2; (+) strand; PAM type: NRG; PAM sequence: CAG
tcaatacattgataatcatc

SEQ ID NO: 176384 - DNA, 20 bp, Artificial Sequence
  Description of Artificial Sequence: Synthetic oligonucleotide
  Target: LAMA2; (+) strand; PAM type: NRG; PAM sequence: CAG
tacattgataatcatccagc

SEQ ID NO: 176385 - DNA, 20 bp, Artificial Sequence
  Description of Artificial Sequence: Synthetic oligonucleotide
  Target: LAMA2; (+) strand; PAM type: NRG; PAM sequence: CAG
aatcatccagccagactaat

SEQ ID NO: 176386 - DNA, 20 bp, Artificial Sequence
  Description of Artificial Sequence: Synthetic oligonucleotide
  Target: LAMA2; (+) strand; PAM type: NRG; PAM sequence: CAG
cagactaatcagaaaaaaat

SEQ ID NO: 176387 - DNA, 20 bp, Artificial Sequence
  Description of Artificial Sequence: Synthetic oligonucleotide
  Target: LAMA2; (+) strand; PAM type: NRG; PAM sequence: AAG
taatcagaaaaaaatcagaa

SEQ ID NO: 176388 - DNA, 20 bp, Artificial Sequence
  Description of Artificial Sequence: Synthetic oligonucleotide
  Target: LAMA2; (+) strand; PAM type: NRG; PAM sequence: CAG
aagtcaccaactaccaatat

SEQ ID NO: 176389 - DNA, 20 bp, Artificial Sequence
  Description of Artificial Sequence: Synthetic oligonucleotide
  Target: LAMA2; (+) strand; PAM type: NRG; PAM sequence: AGG
agtcaccaactaccaatatc

SEQ ID NO: 176390 - DNA, 20 bp, Artificial Sequence
  Description of Artificial Sequence: Synthetic oligonucleotide
  Target: LAMA2; (+) strand; PAM type: NRG; PAM sequence: AAG
actaccaatatcaggaatac

SEQ ID NO: 176391 - DNA, 20 bp, Artificial Sequence
  Description of Artificial Sequence: Synthetic oligonucleotide
  Target: LAMA2; (+) strand; PAM type: NRG; PAM sequence: GAG
taccaatatcaggaatacaa

SEQ ID NO: 176392 - DNA, 20 bp, Artificial Sequence
  Description of Artificial Sequence: Synthetic oligonucleotide
  Target: LAMA2; (+) strand; PAM type: NRG; PAM sequence: AGG
accaatatcaggaatacaag

SEQ ID NO: 176393 - DNA, 20 bp, Artificial Sequence
  Description of Artificial Sequence: Synthetic oligonucleotide
  Target: LAMA2; (+) strand; PAM type: NRG; PAM sequence: CAG
tgaaatcactacaacttctg

SEQ ID NO: 176394 - DNA, 20 bp, Artificial Sequence
  Description of Artificial Sequence: Synthetic oligonucleotide
  Target: LAMA2; (+) strand; PAM type: NRG; PAM sequence: TAG
atcactacaacttctgcaga

SEQ ID NO: 176395 - DNA, 20 bp, Artificial Sequence
  Description of Artificial Sequence: Synthetic oligonucleotide
  Target: LAMA2; (+) strand; PAM type: NRG; PAM sequence: AAG
tacaacttctgcagatagta

SEQ ID NO: 176396 - DNA, 20 bp, Artificial Sequence
  Description of Artificial Sequence: Synthetic oligonucleotide
  Target: LAMA2; (+) strand; PAM type: NRG; PAM sequence: AGG
acaacttctgcagatagtaa

SEQ ID NO: 176397 - DNA, 20 bp, Artificial Sequence
  Description of Artificial Sequence: Synthetic oligonucleotide
  Target: LAMA2; (+) strand; PAM type: NRG; PAM sequence: AAG
tgcagatagtaaaggatgtt

SEQ ID NO: 176398 - DNA, 20 bp, Artificial Sequence
  Description of Artificial Sequence: Synthetic oligonucleotide
  Target: LAMA2; (+) strand; PAM type: NRG; PAM sequence: GAG
cagatagtaaaggatgttaa

SEQ ID NO: 176399 - DNA, 20 bp, Artificial Sequence
  Description of Artificial Sequence: Synthetic oligonucleotide
  Target: LAMA2; (+) strand; PAM type: NRG; PAM sequence: AGG
agatagtaaaggatgttaag

SEQ ID NO: 176400 - DNA, 20 bp, Artificial Sequence
  Description of Artificial Sequence: Synthetic oligonucleotide
  Target: LAMA2; (+) strand; PAM type: NRG; PAM sequence: TGG
ggatattatgaacaatttta

SEQ ID NO: 176401 - DNA, 20 bp, Artificial Sequence
  Description of Artificial Sequence: Synthetic oligonucleotide
  Target: LAMA2; (+) strand; PAM type: NRG; PAM sequence: TGG
atggcaataattcaacaatt

SEQ ID NO: 176402 - DNA, 20 bp, Artificial Sequence
  Description of Artificial Sequence: Synthetic oligonucleotide
  Target: LAMA2; (+) strand; PAM type: NRG; PAM sequence: AAG
aattcaacaatttggataaa

SEQ ID NO: 176403 - DNA, 20 bp, Artificial Sequence
  Description of Artificial Sequence: Synthetic oligonucleotide
  Target: LAMA2; (+) strand; PAM type: NRG; PAM sequence: AGG
attcaacaatttggataaaa

SEQ ID NO: 176404 - DNA, 20 bp, Artificial Sequence
  Description of Artificial Sequence: Synthetic oligonucleotide
  Target: LAMA2; (+) strand; PAM type: NRG; PAM sequence: GGG
ttcaacaatttggataaaaa

SEQ ID NO: 176405 - DNA, 20 bp, Artificial Sequence
  Description of Artificial Sequence: Synthetic oligonucleotide
  Target: LAMA2; (+) strand; PAM type: NRG; PAM sequence: CAG
tcacaaactaccaaaactca

SEQ ID NO: 176406 - DNA, 20 bp, Artificial Sequence
  Description of Artificial Sequence: Synthetic oligonucleotide
  Target: LAMA2; (+) strand; PAM type: NRG; PAM sequence: TAG
tcacagataaataatctgaa

SEQ ID NO: 176407 - DNA, 20 bp, Artificial Sequence
  Description of Artificial Sequence: Synthetic oligonucleotide
  Target: LAMA2; (+) strand; PAM type: NRG; PAM sequence: TAG
ctgaatagttctatattcat

SEQ ID NO: 176408 - DNA, 20 bp, Artificial Sequence
  Description of Artificial Sequence: Synthetic oligonucleotide
  Target: LAMA2; (+) strand; PAM type: NRG; PAM sequence: GAG
gaatagttctatattcatta

SEQ ID NO: 176409 - DNA, 20 bp, Artificial Sequence
  Description of Artificial Sequence: Synthetic oligonucleotide
  Target: LAMA2; (+) strand; PAM type: NRG; PAM sequence: TAG
tcattagagaatttaatttg

SEQ ID NO: 176410 - DNA, 20 bp, Artificial Sequence
  Description of Artificial Sequence: Synthetic oligonucleotide
  Target: LAMA2; (+) strand; PAM type: NRG; PAM sequence: CAG
aaccttcacacacacaaatt

SEQ ID NO: 176411 - DNA, 20 bp, Artificial Sequence
  Description of Artificial Sequence: Synthetic oligonucleotide
  Target: LAMA2; (+) strand; PAM type: NRG; PAM sequence: CAG
cacacacacaaattcagttc

SEQ ID NO: 176412 - DNA, 20 bp, Artificial Sequence
  Description of Artificial Sequence: Synthetic oligonucleotide
  Target: LAMA2; (+) strand; PAM type: NRG; PAM sequence: AAG
attccaccaaatatttaatg

SEQ ID NO: 176413 - DNA, 20 bp, Artificial Sequence
  Description of Artificial Sequence: Synthetic oligonucleotide
  Target: LAMA2; (+) strand; PAM type: NRG; PAM sequence: CAG
gaagaaataataaactcttt

SEQ ID NO: 176414 - DNA, 20 bp, Artificial Sequence
  Description of Artificial Sequence: Synthetic oligonucleotide
  Target: LAMA2; (+) strand; PAM type: NRG; PAM sequence: AAG
taaactctttcagaaaattg

SEQ ID NO: 176415 - DNA, 20 bp, Artificial Sequence
  Description of Artificial Sequence: Synthetic oligonucleotide
  Target: LAMA2; (+) strand; PAM type: NRG; PAM sequence: GAG
aactctttcagaaaattgaa

SEQ ID NO: 176416 - DNA, 20 bp, Artificial Sequence
  Description of Artificial Sequence: Synthetic oligonucleotide
  Target: LAMA2; (+) strand; PAM type: NRG; PAM sequence: AGG
actctttcagaaaattgaag

SEQ ID NO: 176417 - DNA, 20 bp, Artificial Sequence
  Description of Artificial Sequence: Synthetic oligonucleotide
  Target: LAMA2; (+) strand; PAM type: NRG; PAM sequence: GAG
tctttcagaaaattgaagag

SEQ ID NO: 176418 - DNA, 20 bp, Artificial Sequence
  Description of Artificial Sequence: Synthetic oligonucleotide
  Target: LAMA2; (+) strand; PAM type: NRG; PAM sequence: GAG
tacatccaacctcattctac

SEQ ID NO: 176419 - DNA, 20 bp, Artificial Sequence
  Description of Artificial Sequence: Synthetic oligonucleotide
  Target: LAMA2; (+) strand; PAM type: NRG; PAM sequence: AGG
acatccaacctcattctacg

SEQ ID NO: 176420 - DNA, 20 bp, Artificial Sequence
  Description of Artificial Sequence: Synthetic oligonucleotide
  Target: LAMA2; (+) strand; PAM type: NRG; PAM sequence: CAG
ccaacctcattctacgaggc

SEQ ID NO: 176421 - DNA, 20 bp, Artificial Sequence
  Description of Artificial Sequence: Synthetic oligonucleotide
  Target: LAMA2; (+) strand; PAM type: NRG; PAM sequence: TGG
cagtattactctgataccaa

SEQ ID NO: 176422 - DNA, 20 bp, Artificial Sequence
  Description of Artificial Sequence: Synthetic oligonucleotide
  Target: LAMA2; (+) strand; PAM type: NRG; PAM sequence: CAG
tattactctgataccaatgg

SEQ ID NO: 176423 - DNA, 20 bp, Artificial Sequence
  Description of Artificial Sequence: Synthetic oligonucleotide
  Target: LAMA2; (+) strand; PAM type: NRG; PAM sequence: AAG
tctgataccaatggcagaca

SEQ ID NO: 176424 - DNA, 20 bp, Artificial Sequence
  Description of Artificial Sequence: Synthetic oligonucleotide
  Target: LAMA2; (+) strand; PAM type: NRG; PAM sequence: TAG
ataccaatggcagacaaaga

SEQ ID NO: 176425 - DNA, 20 bp, Artificial Sequence
  Description of Artificial Sequence: Synthetic oligonucleotide
  Target: LAMA2; (+) strand; PAM type: NRG; PAM sequence: AAG
gacaaagatagtttttaaaa

SEQ ID NO: 176426 - DNA, 20 bp, Artificial Sequence
  Description of Artificial Sequence: Synthetic oligonucleotide
  Target: LAMA2; (+) strand; PAM type: NRG; PAM sequence: TAG
acaatatccctccatgaaca

SEQ ID NO: 176427 - DNA, 20 bp, Artificial Sequence
  Description of Artificial Sequence: Synthetic oligonucleotide
  Target: LAMA2; (+) strand; PAM type: NRG; PAM sequence: AAG
ctccatgaacatagatgtaa

SEQ ID NO: 176428 - DNA, 20 bp, Artificial Sequence
  Description of Artificial Sequence: Synthetic oligonucleotide
  Target: LAMA2; (+) strand; PAM type: NRG; PAM sequence: TGG
aacatagatgtaaaagttca

SEQ ID NO: 176429 - DNA, 20 bp, Artificial Sequence
  Description of Artificial Sequence: Synthetic oligonucleotide
  Target: LAMA2; (+) strand; PAM type: NRG; PAM sequence: AAG
agatgtaaaagttcatggca

SEQ ID NO: 176430 - DNA, 20 bp, Artificial Sequence
  Description of Artificial Sequence: Synthetic oligonucleotide
  Target: LAMA2; (+) strand; PAM type: NRG; PAM sequence: AAG
caaatctaatgatttactca

SEQ ID NO: 176431 - DNA, 20 bp, Artificial Sequence
  Description of Artificial Sequence: Synthetic oligonucleotide
  Target: LAMA2; (+) strand; PAM type: NRG; PAM sequence: AGG
aaatctaatgatttactcaa

SEQ ID NO: 176432 - DNA, 20 bp, Artificial Sequence
  Description of Artificial Sequence: Synthetic oligonucleotide
  Target: LAMA2; (+) strand; PAM type: NRG; PAM sequence: CAG
tcactaaatgatattaatgc

SEQ ID NO: 176433 - DNA, 20 bp, Artificial Sequence
  Description of Artificial Sequence: Synthetic oligonucleotide
  Target: LAMA2; (+) strand; PAM type: NRG; PAM sequence: AGG
cactaaatgatattaatgcc

SEQ ID NO: 176434 - DNA, 20 bp, Artificial Sequence
  Description of Artificial Sequence: Synthetic oligonucleotide
  Target: LAMA2; (+) strand; PAM type: NRG; PAM sequence: AAG
tgatattaatgccaggatgt

SEQ ID NO: 176435 - DNA, 20 bp, Artificial Sequence
  Description of Artificial Sequence: Synthetic oligonucleotide
  Target: LAMA2; (+) strand; PAM type: NRG; PAM sequence: TGG
ttaatgccaggatgtaagat

SEQ ID NO: 176436 - DNA, 20 bp, Artificial Sequence
  Description of Artificial Sequence: Synthetic oligonucleotide
  Target: LAMA2; (+) strand; PAM type: NRG; PAM sequence: TAG
attggtttaatatttgaaat

SEQ ID NO: 176437 - DNA, 20 bp, Artificial Sequence
  Description of Artificial Sequence: Synthetic oligonucleotide
  Target: LAMA2; (+) strand; PAM type: NRG; PAM sequence: CAG
gtttaatatttgaaattagt

SEQ ID NO: 176438 - DNA, 20 bp, Artificial Sequence
  Description of Artificial Sequence: Synthetic oligonucleotide
  Target: LAMA2; (+) strand; PAM type: NRG; PAM sequence: TAG
agtcagtgtaatttaccata

SEQ ID NO: 176439 - DNA, 20 bp, Artificial Sequence
  Description of Artificial Sequence: Synthetic oligonucleotide
  Target: LAMA2; (+) strand; PAM type: NRG; PAM sequence: AAG
ttaccatatagcaaactaaa

SEQ ID NO: 176440 - DNA, 20 bp, Artificial Sequence
  Description of Artificial Sequence: Synthetic oligonucleotide
  Target: LAMA2; (+) strand; PAM type: NRG; PAM sequence: CAG
tataatcacctcaattgata

SEQ ID NO: 176441 - DNA, 20 bp, Artificial Sequence
  Description of Artificial Sequence: Synthetic oligonucleotide
  Target: LAMA2; (+) strand; PAM type: NRG; PAM sequence: AAG
tcacctcaattgatacagca

SEQ ID NO: 176442 - DNA, 20 bp, Artificial Sequence
  Description of Artificial Sequence: Synthetic oligonucleotide
  Target: LAMA2; (+) strand; PAM type: NRG; PAM sequence: AGG
cacctcaattgatacagcaa

SEQ ID NO: 176443 - DNA, 20 bp, Artificial Sequence
  Description of Artificial Sequence: Synthetic oligonucleotide
  Target: LAMA2; (+) strand; PAM type: NRG; PAM sequence: AAG
ttttttaaaaactgcctact

SEQ ID NO: 176444 - DNA, 20 bp, Artificial Sequence
  Description of Artificial Sequence: Synthetic oligonucleotide
  Target: LAMA2; (+) strand; PAM type: NRG; PAM sequence: GAG
ttttaaaaactgcctactaa

SEQ ID NO: 176445 - DNA, 20 bp, Artificial Sequence
  Description of Artificial Sequence: Synthetic oligonucleotide
  Target: LAMA2; (+) strand; PAM type: NRG; PAM sequence: TAG
taaaaactgcctactaagag

SEQ ID NO: 176446 - DNA, 20 bp, Artificial Sequence
  Description of Artificial Sequence: Synthetic oligonucleotide
  Target: LAMA2; (+) strand; PAM type: NRG; PAM sequence: AGG
aaaaactgcctactaagagt

SEQ ID NO: 176447 - DNA, 20 bp, Artificial Sequence
  Description of Artificial Sequence: Synthetic oligonucleotide
  Target: LAMA2; (+) strand; PAM type: NRG; PAM sequence: GGG
aaaactgcctactaagagta

SEQ ID NO: 176448 - DNA, 20 bp, Artificial Sequence
  Description of Artificial Sequence: Synthetic oligonucleotide
  Target: LAMA2; (+) strand; PAM type: NRG; PAM sequence: GGG
aaactgcctactaagagtag

SEQ ID NO: 176449 - DNA, 20 bp, Artificial Sequence
  Description of Artificial Sequence: Synthetic oligonucleotide
  Target: LAMA2; (+) strand; PAM type: NRG; PAM sequence: CAG
tattttttaaaaaaacctaa

SEQ ID NO: 176450 - DNA, 20 bp, Artificial Sequence
  Description of Artificial Sequence: Synthetic oligonucleotide
  Target: LAMA2; (+) strand; PAM type: NRG; PAM sequence: TAG
ctaacagctaaaatcatact

SEQ ID NO: 176451 - DNA, 20 bp, Artificial Sequence
  Description of Artificial Sequence: Synthetic oligonucleotide
  Target: LAMA2; (+) strand; PAM type: NRG; PAM sequence: AAG
gctaaaatcatacttagcac

SEQ ID NO: 176452 - DNA, 20 bp, Artificial Sequence
  Description of Artificial Sequence: Synthetic oligonucleotide
  Target: LAMA2; (+) strand; PAM type: NRG; PAM sequence: AAG
atcatacttagcacaagact

SEQ ID NO: 176453 - DNA, 20 bp, Artificial Sequence
  Description of Artificial Sequence: Synthetic oligonucleotide
  Target: LAMA2; (+) strand; PAM type: NRG; PAM sequence: TAG
acttagcacaagactaagat

SEQ ID NO: 176454 - DNA, 20 bp, Artificial Sequence
  Description of Artificial Sequence: Synthetic oligonucleotide
  Target: LAMA2; (+) strand; PAM type: NRG; PAM sequence: AGG
cttagcacaagactaagatt

SEQ ID NO: 176455 - DNA, 20 bp, Artificial Sequence
  Description of Artificial Sequence: Synthetic oligonucleotide
  Target: LAMA2; (+) strand; PAM type: NRG; PAM sequence: AAG
agcacaagactaagattagg

SEQ ID NO: 176456 - DNA, 20 bp, Artificial Sequence
  Description of Artificial Sequence: Synthetic oligonucleotide
  Target: LAMA2; (+) strand; PAM type: NRG; PAM sequence: AAG
acaagactaagattaggaag

SEQ ID NO: 176457 - DNA, 20 bp, Artificial Sequence
  Description of Artificial Sequence: Synthetic oligonucleotide
  Target: LAMA2; (+) strand; PAM type: NRG; PAM sequence: AGG
caagactaagattaggaaga

SEQ ID NO: 176458 - DNA, 20 bp, Artificial Sequence
  Description of Artificial Sequence: Synthetic oligonucleotide
  Target: LAMA2; (+) strand; PAM type: NRG; PAM sequence: AAG
actaagattaggaagaaggc

SEQ ID NO: 176459 - DNA, 20 bp, Artificial Sequence
  Description of Artificial Sequence: Synthetic oligonucleotide
  Target: LAMA2; (+) strand; PAM type: NRG; PAM sequence: AGG
ctaagattaggaagaaggca

SEQ ID NO: 176460 - DNA, 20 bp, Artificial Sequence
  Description of Artificial Sequence: Synthetic oligonucleotide
  Target: LAMA2; (+) strand; PAM type: NRG; PAM sequence: TAG
acttccatttaacattgtac

SEQ ID NO: 176461 - DNA, 20 bp, Artificial Sequence
  Description of Artificial Sequence: Synthetic oligonucleotide
  Target: LAMA2; (+) strand; PAM type: NRG; PAM sequence: GAG
ttccatttaacattgtacta

SEQ ID NO: 176462 - DNA, 20 bp, Artificial Sequence
  Description of Artificial Sequence: Synthetic oligonucleotide
  Target: LAMA2; (+) strand; PAM type: NRG; PAM sequence: GAG
ccatttaacattgtactaga

SEQ ID NO: 176463 - DNA, 20 bp, Artificial Sequence
  Description of Artificial Sequence: Synthetic oligonucleotide
  Target: LAMA2; (+) strand; PAM type: NRG; PAM sequence: CAG
attgtactagagagactaac

SEQ ID NO: 176464 - DNA, 20 bp, Artificial Sequence
  Description of Artificial Sequence: Synthetic oligonucleotide
  Target: LAMA2; (+) strand; PAM type: NRG; PAM sequence: AAG
ctagagagactaaccagtac

SEQ ID NO: 176465 - DNA, 20 bp, Artificial Sequence
  Description of Artificial Sequence: Synthetic oligonucleotide
  Target: LAMA2; (+) strand; PAM type: NRG; PAM sequence: AGG
tagagagactaaccagtaca

SEQ ID NO: 176466 - DNA, 20 bp, Artificial Sequence
  Description of Artificial Sequence: Synthetic oligonucleotide
  Target: LAMA2; (+) strand; PAM type: NRG; PAM sequence: GGG
agagagactaaccagtacaa

SEQ ID NO: 176467 - DNA, 20 bp, Artificial Sequence
  Description of Artificial Sequence: Synthetic oligonucleotide
  Target: LAMA2; (+) strand; PAM type: NRG; PAM sequence: GGG
gagagactaaccagtacaag

SEQ ID NO: 176468 - DNA, 20 bp, Artificial Sequence
  Description of Artificial Sequence: Synthetic oligonucleotide
  Target: LAMA2; (+) strand; PAM type: NRG; PAM sequence: AAG
gactaaccagtacaaggggc

SEQ ID NO: 176469 - DNA, 20 bp, Artificial Sequence
  Description of Artificial Sequence: Synthetic oligonucleotide
  Target: LAMA2; (+) strand; PAM type: NRG; PAM sequence: AAG
ccagtacaaggggcaagaaa

SEQ ID NO: 176470 - DNA, 20 bp, Artificial Sequence
  Description of Artificial Sequence: Synthetic oligonucleotide
  Target: LAMA2; (+) strand; PAM type: NRG; PAM sequence: AGG
cagtacaaggggcaagaaaa

SEQ ID NO: 176471 - DNA, 20 bp, Artificial Sequence
  Description of Artificial Sequence: Synthetic oligonucleotide
  Target: LAMA2; (+) strand; PAM type: NRG; PAM sequence: TGG
ggcaagaaaaaggaaataaa

SEQ ID NO: 176472 - DNA, 20 bp, Artificial Sequence
  Description of Artificial Sequence: Synthetic oligonucleotide
  Target: LAMA2; (+) strand; PAM type: NRG; PAM sequence: CAG
aaaaggaaataaatggcatc

SEQ ID NO: 176473 - DNA, 20 bp, Artificial Sequence
  Description of Artificial Sequence: Synthetic oligonucleotide
  Target: LAMA2; (+) strand; PAM type: NRG; PAM sequence: AAG
tggcatccagattgaaaaat

SEQ ID NO: 176474 - DNA, 20 bp, Artificial Sequence
  Description of Artificial Sequence: Synthetic oligonucleotide
  Target: LAMA2; (+) strand; PAM type: NRG; PAM sequence: CAG
agtacaaatgtttttattca

SEQ ID NO: 176475 - DNA, 20 bp, Artificial Sequence
  Description of Artificial Sequence: Synthetic oligonucleotide
  Target: LAMA2; (+) strand; PAM type: NRG; PAM sequence: TAG
gtttttattcacagatacta

SEQ ID NO: 176476 - DNA, 20 bp, Artificial Sequence
  Description of Artificial Sequence: Synthetic oligonucleotide
  Target: LAMA2; (+) strand; PAM type: NRG; PAM sequence: AAG
tttattcacagatactatag

SEQ ID NO: 176477 - DNA, 20 bp, Artificial Sequence
  Description of Artificial Sequence: Synthetic oligonucleotide
  Target: LAMA2; (+) strand; PAM type: NRG; PAM sequence: AAG
cacagatactatagaagtct

SEQ ID NO: 176478 - DNA, 20 bp, Artificial Sequence
  Description of Artificial Sequence: Synthetic oligonucleotide
  Target: LAMA2; (+) strand; PAM type: NRG; PAM sequence: TGG
gaagtctaagcataaaatcc

SEQ ID NO: 176479 - DNA, 20 bp, Artificial Sequence
  Description of Artificial Sequence: Synthetic oligonucleotide
  Target: LAMA2; (+) strand; PAM type: NRG; PAM sequence: TGG
gtctaagcataaaatcctgg

SEQ ID NO: 176480 - DNA, 20 bp, Artificial Sequence
  Description of Artificial Sequence: Synthetic oligonucleotide
  Target: LAMA2; (+) strand; PAM type: NRG; PAM sequence: TAG
gtggttcatgcctgtaaccc

SEQ ID NO: 176481 - DNA, 20 bp, Artificial Sequence
  Description of Artificial Sequence: Synthetic oligonucleotide
  Target: LAMA2; (+) strand; PAM type: NRG; PAM sequence: TAG
tgcctgtaaccctagtgctt

SEQ ID NO: 176482 - DNA, 20 bp, Artificial Sequence
  Description of Artificial Sequence: Synthetic oligonucleotide
  Target: LAMA2; (+) strand; PAM type: NRG; PAM sequence: AGG
gcctgtaaccctagtgcttt

SEQ ID NO: 176483 - DNA, 20 bp, Artificial Sequence
  Description of Artificial Sequence: Synthetic oligonucleotide
  Target: LAMA2; (+) strand; PAM type: NRG; PAM sequence: GAG
ctgtaaccctagtgctttag

SEQ ID NO: 176484 - DNA, 20 bp, Artificial Sequence
  Description of Artificial Sequence: Synthetic oligonucleotide
  Target: LAMA2; (+) strand; PAM type: NRG; PAM sequence: AGG
tgtaaccctagtgctttagg

SEQ ID NO: 176485 - DNA, 20 bp, Artificial Sequence
  Description of Artificial Sequence: Synthetic oligonucleotide
  Target: LAMA2; (+) strand; PAM type: NRG; PAM sequence: GAG
ccctagtgctttaggaggct

SEQ ID NO: 176486 - DNA, 20 bp, Artificial Sequence
  Description of Artificial Sequence: Synthetic oligonucleotide
  Target: LAMA2; (+) strand; PAM type: NRG; PAM sequence: AGG
cctagtgctttaggaggctg

SEQ ID NO: 176487 - DNA, 20 bp, Artificial Sequence
  Description of Artificial Sequence: Synthetic oligonucleotide
  Target: LAMA2; (+) strand; PAM type: NRG; PAM sequence: CAG
agtgctttaggaggctgagg

SEQ ID NO: 176488 - DNA, 20 bp, Artificial Sequence
  Description of Artificial Sequence: Synthetic oligonucleotide
  Target: LAMA2; (+) strand; PAM type: NRG; PAM sequence: AGG
gtgctttaggaggctgaggc

SEQ ID NO: 176489 - DNA, 20 bp, Artificial Sequence
  Description of Artificial Sequence: Synthetic oligonucleotide
  Target: LAMA2; (+) strand; PAM type: NRG; PAM sequence: TGG
ctttaggaggctgaggcagg

SEQ ID NO: 176490 - DNA, 20 bp, Artificial Sequence
  Description of Artificial Sequence: Synthetic oligonucleotide
  Target: LAMA2; (+) strand; PAM type: NRG; PAM sequence: GAG
ctgaggcaggtggattgctt

SEQ ID NO: 176491 - DNA, 20 bp, Artificial Sequence
  Description of Artificial Sequence: Synthetic oligonucleotide
  Target: LAMA2; (+) strand; PAM type: NRG; PAM sequence: AGG
tgaggcaggtggattgcttg

SEQ ID NO: 176492 - DNA, 20 bp, Artificial Sequence
  Description of Artificial Sequence: Synthetic oligonucleotide
  Target: LAMA2; (+) strand; PAM type: NRG; PAM sequence: AAG
caggtggattgcttgaggcc

SEQ ID NO: 176493 - DNA, 20 bp, Artificial Sequence
  Description of Artificial Sequence: Synthetic oligonucleotide
  Target: LAMA2; (+) strand; PAM type: NRG; PAM sequence: GAG
ggtggattgcttgaggccaa

SEQ ID NO: 176494 - DNA, 20 bp, Artificial Sequence
  Description of Artificial Sequence: Synthetic oligonucleotide
  Target: LAMA2; (+) strand; PAM type: NRG; PAM sequence: GAG
ttgcttgaggccaagagttt

SEQ ID NO: 176495 - DNA, 20 bp, Artificial Sequence
  Description of Artificial Sequence: Synthetic oligonucleotide
  Target: LAMA2; (+) strand; PAM type: NRG; PAM sequence: TAG
tgaggccaagagtttgagac

SEQ ID NO: 176496 - DNA, 20 bp, Artificial Sequence
  Description of Artificial Sequence: Synthetic oligonucleotide
  Target: LAMA2; (+) strand; PAM type: NRG; PAM sequence: TGG
gccaagagtttgagactagc

SEQ ID NO: 176497 - DNA, 20 bp, Artificial Sequence
  Description of Artificial Sequence: Synthetic oligonucleotide
  Target: LAMA2; (+) strand; PAM type: NRG; PAM sequence: GGG
ccaagagtttgagactagct

SEQ ID NO: 176498 - DNA, 20 bp, Artificial Sequence
  Description of Artificial Sequence: Synthetic oligonucleotide
  Target: LAMA2; (+) strand; PAM type: NRG; PAM sequence: TAG
ttgagactagctgggcaaca

SEQ ID NO: 176499 - DNA, 20 bp, Artificial Sequence
  Description of Artificial Sequence: Synthetic oligonucleotide
  Target: LAMA2; (+) strand; PAM type: NRG; PAM sequence: AAG
gactagctgggcaacatagc

SEQ ID NO: 176500 - DNA, 20 bp, Artificial Sequence
  Description of Artificial Sequence: Synthetic oligonucleotide
  Target: LAMA2; (+) strand; PAM type: NRG; PAM sequence: AAG
catctctacaaccaaaaaaa

SEQ ID NO: 176501 - DNA, 20 bp, Artificial Sequence
  Description of Artificial Sequence: Synthetic oligonucleotide
  Target: LAMA2; (+) strand; PAM type: NRG; PAM sequence: AAG
aaccaaaaaaaaagtttaaa

SEQ ID NO: 176502 - DNA, 20 bp, Artificial Sequence
  Description of Artificial Sequence: Synthetic oligonucleotide
  Target: LAMA2; (+) strand; PAM type: NRG; PAM sequence: AAG
aaatgctatctattaaaaaa

SEQ ID NO: 176503 - DNA, 20 bp, Artificial Sequence
  Description of Artificial Sequence: Synthetic oligonucleotide
  Target: LAMA2; (+) strand; PAM type: NRG; PAM sequence: TAG
atctattaaaaaaaagttac

SEQ ID NO: 176504 - DNA, 20 bp, Artificial Sequence
  Description of Artificial Sequence: Synthetic oligonucleotide
  Target: LAMA2; (+) strand; PAM type: NRG; PAM sequence: AAG
aaaaagttactagaactaat

SEQ ID NO: 176505 - DNA, 20 bp, Artificial Sequence
  Description of Artificial Sequence: Synthetic oligonucleotide
  Target: LAMA2; (+) strand; PAM type: NRG; PAM sequence: GAG
agttactagaactaataagt

SEQ ID NO: 176506 - DNA, 20 bp, Artificial Sequence
  Description of Artificial Sequence: Synthetic oligonucleotide
  Target: LAMA2; (+) strand; PAM type: NRG; PAM sequence: AAG
agtgagcttaccaatgttat

SEQ ID NO: 176507 - DNA, 20 bp, Artificial Sequence
  Description of Artificial Sequence: Synthetic oligonucleotide
  Target: LAMA2; (+) strand; PAM type: NRG; PAM sequence: AGG
gtgagcttaccaatgttata

SEQ ID NO: 176508 - DNA, 20 bp, Artificial Sequence
  Description of Artificial Sequence: Synthetic oligonucleotide
  Target: LAMA2; (+) strand; PAM type: NRG; PAM sequence: CAG
caacatctatatgtgaaaat

SEQ ID NO: 176509 - DNA, 20 bp, Artificial Sequence
  Description of Artificial Sequence: Synthetic oligonucleotide
  Target: LAMA2; (+) strand; PAM type: NRG; PAM sequence: AAG
tgtgaaaatcagtcatttca

SEQ ID NO: 176510 - DNA, 20 bp, Artificial Sequence
  Description of Artificial Sequence: Synthetic oligonucleotide
  Target: LAMA2; (+) strand; PAM type: NRG; PAM sequence: TGG
aaatcagtcatttcaaagac

SEQ ID NO: 176511 - DNA, 20 bp, Artificial Sequence
  Description of Artificial Sequence: Synthetic oligonucleotide
  Target: LAMA2; (+) strand; PAM type: NRG; PAM sequence: AAG
cagtcatttcaaagactggc

SEQ ID NO: 176512 - DNA, 20 bp, Artificial Sequence
  Description of Artificial Sequence: Synthetic oligonucleotide
  Target: LAMA2; (+) strand; PAM type: NRG; PAM sequence: AGG
agtcatttcaaagactggca

SEQ ID NO: 176513 - DNA, 20 bp, Artificial Sequence
  Description of Artificial Sequence: Synthetic oligonucleotide
  Target: LAMA2; (+) strand; PAM type: NRG; PAM sequence: TGG
aaagactggcaaggatacgt

SEQ ID NO: 176514 - DNA, 20 bp, Artificial Sequence
  Description of Artificial Sequence: Synthetic oligonucleotide
  Target: LAMA2; (+) strand; PAM type: NRG; PAM sequence: AAG
gactggcaaggatacgttgg

SEQ ID NO: 176515 - DNA, 20 bp, Artificial Sequence
  Description of Artificial Sequence: Synthetic oligonucleotide
  Target: LAMA2; (+) strand; PAM type: NRG; PAM sequence: AAG
acgttggaagttgaaattaa

SEQ ID NO: 176516 - DNA, 20 bp, Artificial Sequence
  Description of Artificial Sequence: Synthetic oligonucleotide
  Target: LAMA2; (+) strand; PAM type: NRG; PAM sequence: AGG
cgttggaagttgaaattaaa

SEQ ID NO: 176517 - DNA, 20 bp, Artificial Sequence
  Description of Artificial Sequence: Synthetic oligonucleotide
  Target: LAMA2; (+) strand; PAM type: NRG; PAM sequence: CAG
aagttgaaattaaaaggtta

SEQ ID NO: 176518 - DNA, 20 bp, Artificial Sequence
  Description of Artificial Sequence: Synthetic oligonucleotide
  Target: LAMA2; (+) strand; PAM type: NRG; PAM sequence: TAG
taaaaggttacagtttacaa

SEQ ID NO: 176519 - DNA, 20 bp, Artificial Sequence
  Description of Artificial Sequence: Synthetic oligonucleotide
  Target: LAMA2; (+) strand; PAM type: NRG; PAM sequence: AAG
caatagcattaaaaatgtaa

SEQ ID NO: 176520 - DNA, 20 bp, Artificial Sequence
  Description of Artificial Sequence: Synthetic oligonucleotide
  Target: LAMA2; (+) strand; PAM type: NRG; PAM sequence: TGG
accccctacactgaatactc

SEQ ID NO: 176521 - DNA, 20 bp, Artificial Sequence
  Description of Artificial Sequence: Synthetic oligonucleotide
  Target: LAMA2; (+) strand; PAM type: NRG; PAM sequence: GAG
cccctacactgaatactctg

SEQ ID NO: 176522 - DNA, 20 bp, Artificial Sequence
  Description of Artificial Sequence: Synthetic oligonucleotide
  Target: LAMA2; (+) strand; PAM type: NRG; PAM sequence: AAG
aatactctggagataaataa

SEQ ID NO: 176523 - DNA, 20 bp, Artificial Sequence
  Description of Artificial Sequence: Synthetic oligonucleotide
  Target: LAMA2; (+) strand; PAM type: NRG; PAM sequence: AAG
aaagaaaatctaaataaatc

SEQ ID NO: 176524 - DNA, 20 bp, Artificial Sequence
  Description of Artificial Sequence: Synthetic oligonucleotide
  Target: LAMA2; (+) strand; PAM type: NRG; PAM sequence: GAG
agaaaatctaaataaatcaa

SEQ ID NO: 176525 - DNA, 20 bp, Artificial Sequence
  Description of Artificial Sequence: Synthetic oligonucleotide
  Target: LAMA2; (+) strand; PAM type: NRG; PAM sequence: TAG
caagagatataccatgttca

SEQ ID NO: 176526 - DNA, 20 bp, Artificial Sequence
  Description of Artificial Sequence: Synthetic oligonucleotide
  Target: LAMA2; (+) strand; PAM type: NRG; PAM sequence: CAG
gatataccatgttcatagat

SEQ ID NO: 176527 - DNA, 20 bp, Artificial Sequence
  Description of Artificial Sequence: Synthetic oligonucleotide
  Target: LAMA2; (+) strand; PAM type: NRG; PAM sequence: AAG
ataccatgttcatagatcag

SEQ ID NO: 176528 - DNA, 20 bp, Artificial Sequence
  Description of Artificial Sequence: Synthetic oligonucleotide
  Target: LAMA2; (+) strand; PAM type: NRG; PAM sequence: TAG
attcaatattcctataatcc

SEQ ID NO: 176529 - DNA, 20 bp, Artificial Sequence
  Description of Artificial Sequence: Synthetic oligonucleotide
  Target: LAMA2; (+) strand; PAM type: NRG; PAM sequence: CAG
ctacacattcaatgcaatcc

SEQ ID NO: 176530 - DNA, 20 bp, Artificial Sequence
  Description of Artificial Sequence: Synthetic oligonucleotide
  Target: LAMA2; (+) strand; PAM type: NRG; PAM sequence: TAG
tgcaatcccagtaaaaatcc

SEQ ID NO: 176531 - DNA, 20 bp, Artificial Sequence
  Description of Artificial Sequence: Synthetic oligonucleotide
  Target: LAMA2; (+) strand; PAM type: NRG; PAM sequence: AAG
atcccagtaaaaatcctagc

SEQ ID NO: 176532 - DNA, 20 bp, Artificial Sequence
  Description of Artificial Sequence: Synthetic oligonucleotide
  Target: LAMA2; (+) strand; PAM type: NRG; PAM sequence: AGG
tcccagtaaaaatcctagca

SEQ ID NO: 176533 - DNA, 20 bp, Artificial Sequence
  Description of Artificial Sequence: Synthetic oligonucleotide
  Target: LAMA2; (+) strand; PAM type: NRG; PAM sequence: CAG
ggttttttcctaaaaattta

SEQ ID NO: 176534 - DNA, 20 bp, Artificial Sequence
  Description of Artificial Sequence: Synthetic oligonucleotide
  Target: LAMA2; (+) strand; PAM type: NRG; PAM sequence: TGG
gatatgttttacaattcata

SEQ ID NO: 176535 - DNA, 20 bp, Artificial Sequence
  Description of Artificial Sequence: Synthetic oligonucleotide
  Target: LAMA2; (+) strand; PAM type: NRG; PAM sequence: TGG
ttttacaattcatatggaat

SEQ ID NO: 176536 - DNA, 20 bp, Artificial Sequence
  Description of Artificial Sequence: Synthetic oligonucleotide
  Target: LAMA2; (+) strand; PAM type: NRG; PAM sequence: AAG
acaattcatatggaattgga

SEQ ID NO: 176537 - DNA, 20 bp, Artificial Sequence
  Description of Artificial Sequence: Synthetic oligonucleotide
  Target: LAMA2; (+) strand; PAM type: NRG; PAM sequence: AGG
caattcatatggaattggaa

SEQ ID NO: 176538 - DNA, 20 bp, Artificial Sequence
  Description of Artificial Sequence: Synthetic oligonucleotide
  Target: LAMA2; (+) strand; PAM type: NRG; PAM sequence: GAG
attcatatggaattggaaag

SEQ ID NO: 176539 - DNA, 20 bp, Artificial Sequence
  Description of Artificial Sequence: Synthetic oligonucleotide
  Target: LAMA2; (+) strand; PAM type: NRG; PAM sequence: TGG
attggaaaggagaaaaatgt

SEQ ID NO: 176540 - DNA, 20 bp, Artificial Sequence
  Description of Artificial Sequence: Synthetic oligonucleotide
  Target: LAMA2; (+) strand; PAM type: NRG; PAM sequence: AAG
gaaaggagaaaaatgttgga

SEQ ID NO: 176541 - DNA, 20 bp, Artificial Sequence
  Description of Artificial Sequence: Synthetic oligonucleotide
  Target: LAMA2; (+) strand; PAM type: NRG; PAM sequence: AGG
aaaggagaaaaatgttggaa

SEQ ID NO: 176542 - DNA, 20 bp, Artificial Sequence
  Description of Artificial Sequence: Synthetic oligonucleotide
  Target: LAMA2; (+) strand; PAM type: NRG; PAM sequence: AAG
tgacttcaatacttactacc

SEQ ID NO: 176543 - DNA, 20 bp, Artificial Sequence
  Description of Artificial Sequence: Synthetic oligonucleotide
  Target: LAMA2; (+) strand; PAM type: NRG; PAM sequence: TGG
caatacttactaccaagcta

SEQ ID NO: 176544 - DNA, 20 bp, Artificial Sequence
  Description of Artificial Sequence: Synthetic oligonucleotide
  Target: LAMA2; (+) strand; PAM type: NRG; PAM sequence: CAG
tactaccaagctatggtaat

SEQ ID NO: 176545 - DNA, 20 bp, Artificial Sequence
  Description of Artificial Sequence: Synthetic oligonucleotide
  Target: LAMA2; (+) strand; PAM type: NRG; PAM sequence: GAG
ctaccaagctatggtaatca

SEQ ID NO: 176546 - DNA, 20 bp, Artificial Sequence
  Description of Artificial Sequence: Synthetic oligonucleotide
  Target: LAMA2; (+) strand; PAM type: NRG; PAM sequence: TGG
gctatggtaatcagagaatg

SEQ ID NO: 176547 - DNA, 20 bp, Artificial Sequence
  Description of Artificial Sequence: Synthetic oligonucleotide
  Target: LAMA2; (+) strand; PAM type: NRG; PAM sequence: TGG
gtaatcagagaatgtggtgt

SEQ ID NO: 176548 - DNA, 20 bp, Artificial Sequence
  Description of Artificial Sequence: Synthetic oligonucleotide
  Target: LAMA2; (+) strand; PAM type: NRG; PAM sequence: TAG
ttggtatcaatattgacaaa

SEQ ID NO: 176549 - DNA, 20 bp, Artificial Sequence
  Description of Artificial Sequence: Synthetic oligonucleotide
  Target: LAMA2; (+) strand; PAM type: NRG; PAM sequence: TAG
aatattgacaaatagattat

SEQ ID NO: 176550 - DNA, 20 bp, Artificial Sequence
  Description of Artificial Sequence: Synthetic oligonucleotide
  Target: LAMA2; (+) strand; PAM type: NRG; PAM sequence: TAG
tgacaaatagattattagaa

SEQ ID NO: 176551 - DNA, 20 bp, Artificial Sequence
  Description of Artificial Sequence: Synthetic oligonucleotide
  Target: LAMA2; (+) strand; PAM type: NRG; PAM sequence: AAG
tagattattagaatagatta

SEQ ID NO: 176552 - DNA, 20 bp, Artificial Sequence
  Description of Artificial Sequence: Synthetic oligonucleotide
  Target: LAMA2; (+) strand; PAM type: NRG; PAM sequence: GAG
gattattagaatagattaaa

SEQ ID NO: 176553 - DNA, 20 bp, Artificial Sequence
  Description of Artificial Sequence: Synthetic oligonucleotide
  Target: LAMA2; (+) strand; PAM type: NRG; PAM sequence: CAG
ttagaatagattaaagagtc

SEQ ID NO: 176554 - DNA, 20 bp, Artificial Sequence
  Description of Artificial Sequence: Synthetic oligonucleotide
  Target: LAMA2; (+) strand; PAM type: NRG; PAM sequence: TAG
tagattaaagagtccagata

SEQ ID NO: 176555 - DNA, 20 bp, Artificial Sequence
  Description of Artificial Sequence: Synthetic oligonucleotide
  Target: LAMA2; (+) strand; PAM type: NRG; PAM sequence: CAG
aaagagtccagatatagatc

SEQ ID NO: 176556 - DNA, 20 bp, Artificial Sequence
  Description of Artificial Sequence: Synthetic oligonucleotide
  Target: LAMA2; (+) strand; PAM type: NRG; PAM sequence: TGG
gatatagatccagacatgta

SEQ ID NO: 176557 - DNA, 20 bp, Artificial Sequence
  Description of Artificial Sequence: Synthetic oligonucleotide
  Target: LAMA2; (+) strand; PAM type: NRG; PAM sequence: AAG
gatttatgacaaaaatacaa

SEQ ID NO: 176558 - DNA, 20 bp, Artificial Sequence
  Description of Artificial Sequence: Synthetic oligonucleotide
  Target: LAMA2; (+) strand; PAM type: NRG; PAM sequence: AAG
caaaaatacaaaagcaatac

SEQ ID NO: 176559 - DNA, 20 bp, Artificial Sequence
  Description of Artificial Sequence: Synthetic oligonucleotide
  Target: LAMA2; (+) strand; PAM type: NRG; PAM sequence: AGG
aaaaatacaaaagcaataca

SEQ ID NO: 176560 - DNA, 20 bp, Artificial Sequence
  Description of Artificial Sequence: Synthetic oligonucleotide
  Target: LAMA2; (+) strand; PAM type: NRG; PAM sequence: TAG
gtatatttaacaaattctac

SEQ ID NO: 176561 - DNA, 20 bp, Artificial Sequence
  Description of Artificial Sequence: Synthetic oligonucleotide
  Target: LAMA2; (+) strand; PAM type: NRG; PAM sequence: GAG
atatttaacaaattctacta

SEQ ID NO: 176562 - DNA, 20 bp, Artificial Sequence
  Description of Artificial Sequence: Synthetic oligonucleotide
  Target: LAMA2; (+) strand; PAM type: NRG; PAM sequence: AGG
tatttaacaaattctactag

SEQ ID NO: 176563 - DNA, 20 bp, Artificial Sequence
  Description of Artificial Sequence: Synthetic oligonucleotide
  Target: LAMA2; (+) strand; PAM type: NRG; PAM sequence: CAG
acaacaaaaaaaatgaactt

SEQ ID NO: 176564 - DNA, 20 bp, Artificial Sequence
  Description of Artificial Sequence: Synthetic oligonucleotide
  Target: LAMA2; (+) strand; PAM type: NRG; PAM sequence: AAG
atattccaaaattaactcaa

SEQ ID NO: 176565 - DNA, 20 bp, Artificial Sequence
  Description of Artificial Sequence: Synthetic oligonucleotide
  Target: LAMA2; (+) strand; PAM type: NRG; PAM sequence: GAG
attccaaaattaactcaaaa

SEQ ID NO: 176566 - DNA, 20 bp, Artificial Sequence
  Description of Artificial Sequence: Synthetic oligonucleotide
  Target: LAMA2; (+) strand; PAM type: NRG; PAM sequence: TAG
aattaactcaaaagagatgc

SEQ ID NO: 176567 - DNA, 20 bp, Artificial Sequence
  Description of Artificial Sequence: Synthetic oligonucleotide
  Target: LAMA2; (+) strand; PAM type: NRG; PAM sequence: AAG
taaaacatctaaaaatatat

SEQ ID NO: 176568 - DNA, 20 bp, Artificial Sequence
  Description of Artificial Sequence: Synthetic oligonucleotide
  Target: LAMA2; (+) strand; PAM type: NRG; PAM sequence: TGG
aagaaaaatctttgtgatct

SEQ ID NO: 176569 - DNA, 20 bp, Artificial Sequence
  Description of Artificial Sequence: Synthetic oligonucleotide
  Target: LAMA2; (+) strand; PAM type: NRG; PAM sequence: GGG
agaaaaatctttgtgatctt

SEQ ID NO: 176570 - DNA, 20 bp, Artificial Sequence
  Description of Artificial Sequence: Synthetic oligonucleotide
  Target: LAMA2; (+) strand; PAM type: NRG; PAM sequence: AAG
aatctttgtgatcttgggta

SEQ ID NO: 176571 - DNA, 20 bp, Artificial Sequence
  Description of Artificial Sequence: Synthetic oligonucleotide
  Target: LAMA2; (+) strand; PAM type: NRG; PAM sequence: AAG
ttgtgatcttgggtaaagca

SEQ ID NO: 176572 - DNA, 20 bp, Artificial Sequence
  Description of Artificial Sequence: Synthetic oligonucleotide
  Target: LAMA2; (+) strand; PAM type: NRG; PAM sequence: TAG
ttgggtaaagcaaagattct

SEQ ID NO: 176573 - DNA, 20 bp, Artificial Sequence
  Description of Artificial Sequence: Synthetic oligonucleotide
  Target: LAMA2; (+) strand; PAM type: NRG; PAM sequence: AAG
attcttagatacaccaccaa

SEQ ID NO: 176574 - DNA, 20 bp, Artificial Sequence
  Description of Artificial Sequence: Synthetic oligonucleotide
  Target: LAMA2; (+) strand; PAM type: NRG; PAM sequence: AAG
caccaaaagcatatcctcaa

SEQ ID NO: 176575 - DNA, 20 bp, Artificial Sequence
  Description of Artificial Sequence: Synthetic oligonucleotide
  Target: LAMA2; (+) strand; PAM type: NRG; PAM sequence: AGG
accaaaagcatatcctcaaa

SEQ ID NO: 176576 - DNA, 20 bp, Artificial Sequence
  Description of Artificial Sequence: Synthetic oligonucleotide
  Target: LAMA2; (+) strand; PAM type: NRG; PAM sequence: GAG
acttaaatttcatcaaaatt

SEQ ID NO: 176577 - DNA, 20 bp, Artificial Sequence
  Description of Artificial Sequence: Synthetic oligonucleotide
  Target: LAMA2; (+) strand; PAM type: NRG; PAM sequence: AAG
tcttcccttcaaaaaaaaaa

SEQ ID NO: 176578 - DNA, 20 bp, Artificial Sequence
  Description of Artificial Sequence: Synthetic oligonucleotide
  Target: LAMA2; (+) strand; PAM type: NRG; PAM sequence: AAG
aaaaaaaaaaaagcactttt

SEQ ID NO: 176579 - DNA, 20 bp, Artificial Sequence
  Description of Artificial Sequence: Synthetic oligonucleotide
  Target: LAMA2; (+) strand; PAM type: NRG; PAM sequence: AAG
agcacttttaagaaaatgaa

SEQ ID NO: 176580 - DNA, 20 bp, Artificial Sequence
  Description of Artificial Sequence: Synthetic oligonucleotide
  Target: LAMA2; (+) strand; PAM type: NRG; PAM sequence: TAG
atgaaaagataactacaaac

SEQ ID NO: 176581 - DNA, 20 bp, Artificial Sequence
  Description of Artificial Sequence: Synthetic oligonucleotide
  Target: LAMA2; (+) strand; PAM type: NRG; PAM sequence: TAG
aaaagataactacaaactag

SEQ ID NO: 176582 - DNA, 20 bp, Artificial Sequence
  Description of Artificial Sequence: Synthetic oligonucleotide
  Target: LAMA2; (+) strand; PAM type: NRG; PAM sequence: AAG
tccaaattacatatctgata

SEQ ID NO: 176583 - DNA, 20 bp, Artificial Sequence
  Description of Artificial Sequence: Synthetic oligonucleotide
  Target: LAMA2; (+) strand; PAM type: NRG; PAM sequence: AGG
ccaaattacatatctgataa

SEQ ID NO: 176584 - DNA, 20 bp, Artificial Sequence
  Description of Artificial Sequence: Synthetic oligonucleotide
  Target: LAMA2; (+) strand; PAM type: NRG; PAM sequence: CAG
tctgataaaggacccatatc

SEQ ID NO: 176585 - DNA, 20 bp, Artificial Sequence
  Description of Artificial Sequence: Synthetic oligonucleotide
  Target: LAMA2; (+) strand; PAM type: NRG; PAM sequence: AAG
atcattcaaaactcaaaaat

SEQ ID NO: 176586 - DNA, 20 bp, Artificial Sequence
  Description of Artificial Sequence: Synthetic oligonucleotide
  Target: LAMA2; (+) strand; PAM type: NRG; PAM sequence: GAG
cattcaaaactcaaaaataa

SEQ ID NO: 176587 - DNA, 20 bp, Artificial Sequence
  Description of Artificial Sequence: Synthetic oligonucleotide
  Target: LAMA2; (+) strand; PAM type: NRG; PAM sequence: AAG
aaaataagagcaaataaccc

SEQ ID NO: 176588 - DNA, 20 bp, Artificial Sequence
  Description of Artificial Sequence: Synthetic oligonucleotide
  Target: LAMA2; (+) strand; PAM type: NRG; PAM sequence: AAG
acccaagaaaatttgaacaa

SEQ ID NO: 176589 - DNA, 20 bp, Artificial Sequence
  Description of Artificial Sequence: Synthetic oligonucleotide
  Target: LAMA2; (+) strand; PAM type: NRG; PAM sequence: CAG
atttgaacaaaagatttaaa

SEQ ID NO: 176590 - DNA, 20 bp, Artificial Sequence
  Description of Artificial Sequence: Synthetic oligonucleotide
  Target: LAMA2; (+) strand; PAM type: NRG; PAM sequence: AGG
tttgaacaaaagatttaaac

SEQ ID NO: 176591 - DNA, 20 bp, Artificial Sequence
  Description of Artificial Sequence: Synthetic oligonucleotide
  Target: LAMA2; (+) strand; PAM type: NRG; PAM sequence: AAG
aagatttaaacaggtcacca

SEQ ID NO: 176592 - DNA, 20 bp, Artificial Sequence
  Description of Artificial Sequence: Synthetic oligonucleotide
  Target: LAMA2; (+) strand; PAM type: NRG; PAM sequence: AAG
atttaaacaggtcaccaaag

SEQ ID NO: 176593 - DNA, 20 bp, Artificial Sequence
  Description of Artificial Sequence: Synthetic oligonucleotide
  Target: LAMA2; (+) strand; PAM type: NRG; PAM sequence: AGG
tttaaacaggtcaccaaaga

SEQ ID NO: 176594 - DNA, 20 bp, Artificial Sequence
  Description of Artificial Sequence: Synthetic oligonucleotide
  Target: LAMA2; (+) strand; PAM type: NRG; PAM sequence: TGG
aaacaggtcaccaaagaagg

SEQ ID NO: 176595 - DNA, 20 bp, Artificial Sequence
  Description of Artificial Sequence: Synthetic oligonucleotide
  Target: LAMA2; (+) strand; PAM type: NRG; PAM sequence: AAG
caccaaagaaggtggaaaat

SEQ ID NO: 176596 - DNA, 20 bp, Artificial Sequence
  Description of Artificial Sequence: Synthetic oligonucleotide
  Target: LAMA2; (+) strand; PAM type: NRG; PAM sequence: AAG
gtggaaaataagcatgtgaa

SEQ ID NO: 176597 - DNA, 20 bp, Artificial Sequence
  Description of Artificial Sequence: Synthetic oligonucleotide
  Target: LAMA2; (+) strand; PAM type: NRG; PAM sequence: TAG
gaaaagatgctcaatgttat

SEQ ID NO: 176598 - DNA, 20 bp, Artificial Sequence
  Description of Artificial Sequence: Synthetic oligonucleotide
  Target: LAMA2; (+) strand; PAM type: NRG; PAM sequence: AAG
tgctcaatgttattagtcat

SEQ ID NO: 176599 - DNA, 20 bp, Artificial Sequence
  Description of Artificial Sequence: Synthetic oligonucleotide
  Target: LAMA2; (+) strand; PAM type: NRG; PAM sequence: AGG
gctcaatgttattagtcata

SEQ ID NO: 176600 - DNA, 20 bp, Artificial Sequence
  Description of Artificial Sequence: Synthetic oligonucleotide
  Target: LAMA2; (+) strand; PAM type: NRG; PAM sequence: AAG
ttagtcataaggaaaacaca

SEQ ID NO: 176601 - DNA, 20 bp, Artificial Sequence
  Description of Artificial Sequence: Synthetic oligonucleotide
  Target: LAMA2; (+) strand; PAM type: NRG; PAM sequence: CAG
agcaaaaccaaaatgatgac

SEQ ID NO: 176602 - DNA, 20 bp, Artificial Sequence
  Description of Artificial Sequence: Synthetic oligonucleotide
  Target: LAMA2; (+) strand; PAM type: NRG; PAM sequence: TAG
aaaccaaaatgatgaccagt

SEQ ID NO: 176603 - DNA, 20 bp, Artificial Sequence
  Description of Artificial Sequence: Synthetic oligonucleotide
  Target: LAMA2; (+) strand; PAM type: NRG; PAM sequence: AAG
tagaatgtctaaaattttaa

SEQ ID NO: 176604 - DNA, 20 bp, Artificial Sequence
  Description of Artificial Sequence: Synthetic oligonucleotide
  Target: LAMA2; (+) strand; PAM type: NRG; PAM sequence: CAG
atgtctaaaattttaaaaga

SEQ ID NO: 176605 - DNA, 20 bp, Artificial Sequence
  Description of Artificial Sequence: Synthetic oligonucleotide
  Target: LAMA2; (+) strand; PAM type: NRG; PAM sequence: AGG
tgtctaaaattttaaaagac

SEQ ID NO: 176606 - DNA, 20 bp, Artificial Sequence
  Description of Artificial Sequence: Synthetic oligonucleotide
  Target: LAMA2; (+) strand; PAM type: NRG; PAM sequence: AAG
tttaaaagacaggttatacc

SEQ ID NO: 176607 - DNA, 20 bp, Artificial Sequence
  Description of Artificial Sequence: Synthetic oligonucleotide
  Target: LAMA2; (+) strand; PAM type: NRG; PAM sequence: AAG
ggttataccaagtatcaaca

SEQ ID NO: 176608 - DNA, 20 bp, Artificial Sequence
  Description of Artificial Sequence: Synthetic oligonucleotide
  Target: LAMA2; (+) strand; PAM type: NRG; PAM sequence: TAG
accaagtatcaacaaagatg

SEQ ID NO: 176609 - DNA, 20 bp, Artificial Sequence
  Description of Artificial Sequence: Synthetic oligonucleotide
  Target: LAMA2; (+) strand; PAM type: NRG; PAM sequence: AGG
ccaagtatcaacaaagatgt

SEQ ID NO: 176610 - DNA, 20 bp, Artificial Sequence
  Description of Artificial Sequence: Synthetic oligonucleotide
  Target: LAMA2; (+) strand; PAM type: NRG; PAM sequence: CAG
aacaaagatgtaggcacatg

SEQ ID NO: 176611 - DNA, 20 bp, Artificial Sequence
  Description of Artificial Sequence: Synthetic oligonucleotide
  Target: LAMA2; (+) strand; PAM type: NRG; PAM sequence: TGG
cacatgcagctctcatacac

SEQ ID NO: 176612 - DNA, 20 bp, Artificial Sequence
  Description of Artificial Sequence: Synthetic oligonucleotide
  Target: LAMA2; (+) strand; PAM type: NRG; PAM sequence: TGG
cagctctcatacactggtga

SEQ ID NO: 176613 - DNA, 20 bp, Artificial Sequence
  Description of Artificial Sequence: Synthetic oligonucleotide
  Target: LAMA2; (+) strand; PAM type: NRG; PAM sequence: GGG
agctctcatacactggtgat

SEQ ID NO: 176614 - DNA, 20 bp, Artificial Sequence
  Description of Artificial Sequence: Synthetic oligonucleotide
  Target: LAMA2; (+) strand; PAM type: NRG; PAM sequence: TAG
actggtgatgggaatataaa

SEQ ID NO: 176615 - DNA, 20 bp, Artificial Sequence
  Description of Artificial Sequence: Synthetic oligonucleotide
  Target: LAMA2; (+) strand; PAM type: NRG; PAM sequence: CAG
tgatgggaatataaatagtt

SEQ ID NO: 176616 - DNA, 20 bp, Artificial Sequence
  Description of Artificial Sequence: Synthetic oligonucleotide
  Target: LAMA2; (+) strand; PAM type: NRG; PAM sequence: TAG
tataaatagttcagatactt

SEQ ID NO: 176617 - DNA, 20 bp, Artificial Sequence
  Description of Artificial Sequence: Synthetic oligonucleotide
  Target: LAMA2; (+) strand; PAM type: NRG; PAM sequence: CAG
agttcagatactttagaaaa

SEQ ID NO: 176618 - DNA, 20 bp, Artificial Sequence
  Description of Artificial Sequence: Synthetic oligonucleotide
  Target: LAMA2; (+) strand; PAM type: NRG; PAM sequence: AGG
gttcagatactttagaaaac

SEQ ID NO: 176619 - DNA, 20 bp, Artificial Sequence
  Description of Artificial Sequence: Synthetic oligonucleotide
  Target: LAMA2; (+) strand; PAM type: NRG; PAM sequence: CAG
acataaattaccatatgatc

SEQ ID NO: 176620 - DNA, 20 bp, Artificial Sequence
  Description of Artificial Sequence: Synthetic oligonucleotide
  Target: LAMA2; (+) strand; PAM type: NRG; PAM sequence: AAG
tgcttctgtgtatttactcc

SEQ ID NO: 176621 - DNA, 20 bp, Artificial Sequence
  Description of Artificial Sequence: Synthetic oligonucleotide
  Target: LAMA2; (+) strand; PAM type: NRG; PAM sequence: TGG
atttactccaagataaatga

SEQ ID NO: 176622 - DNA, 20 bp, Artificial Sequence
  Description of Artificial Sequence: Synthetic oligonucleotide
  Target: LAMA2; (+) strand; PAM type: NRG; PAM sequence: CAG
ttcacccaaaaatttgtaca

SEQ ID NO: 176623 - DNA, 20 bp, Artificial Sequence
  Description of Artificial Sequence: Synthetic oligonucleotide
  Target: LAMA2; (+) strand; PAM type: NRG; PAM sequence: AAG
atgaaataattaccaataaa

SEQ ID NO: 176624 - DNA, 20 bp, Artificial Sequence
  Description of Artificial Sequence: Synthetic oligonucleotide
  Target: LAMA2; (+) strand; PAM type: NRG; PAM sequence: AGG
tgaaataattaccaataaaa

SEQ ID NO: 176625 - DNA, 20 bp, Artificial Sequence
  Description of Artificial Sequence: Synthetic oligonucleotide
  Target: LAMA2; (+) strand; PAM type: NRG; PAM sequence: TGG
ccaataaaaaggatcaaata

SEQ ID NO: 176626 - DNA, 20 bp, Artificial Sequence
  Description of Artificial Sequence: Synthetic oligonucleotide
  Target: LAMA2; (+) strand; PAM type: NRG; PAM sequence: TAG
atatggatacacacacaaca

SEQ ID NO: 176627 - DNA, 20 bp, Artificial Sequence
  Description of Artificial Sequence: Synthetic oligonucleotide
  Target: LAMA2; (+) strand; PAM type: NRG; PAM sequence: GAG
ataaatgttgaaactatgtt

SEQ ID NO: 176628 - DNA, 20 bp, Artificial Sequence
  Description of Artificial Sequence: Synthetic oligonucleotide
  Target: LAMA2; (+) strand; PAM type: NRG; PAM sequence: AAG
gttgaaactatgttgagtga

SEQ ID NO: 176629 - DNA, 20 bp, Artificial Sequence
  Description of Artificial Sequence: Synthetic oligonucleotide
  Target: LAMA2; (+) strand; PAM type: NRG; PAM sequence: AAG
gaaactatgttgagtgaaag

SEQ ID NO: 176630 - DNA, 20 bp, Artificial Sequence
  Description of Artificial Sequence: Synthetic oligonucleotide
  Target: LAMA2; (+) strand; PAM type: NRG; PAM sequence: CAG
ctatgttgagtgaaagaagc

SEQ ID NO: 176631 - DNA, 20 bp, Artificial Sequence
  Description of Artificial Sequence: Synthetic oligonucleotide
  Target: LAMA2; (+) strand; PAM type: NRG; PAM sequence: AAG
agtgaaagaagccagacaaa

SEQ ID NO: 176632 - DNA, 20 bp, Artificial Sequence
  Description of Artificial Sequence: Synthetic oligonucleotide
  Target: LAMA2; (+) strand; PAM type: NRG; PAM sequence: GAG
tgaaagaagccagacaaaaa

SEQ ID NO: 176633 - DNA, 20 bp, Artificial Sequence
  Description of Artificial Sequence: Synthetic oligonucleotide
  Target: LAMA2; (+) strand; PAM type: NRG; PAM sequence: GAG
aaagaagccagacaaaaaga

SEQ ID NO: 176634 - DNA, 20 bp, Artificial Sequence
  Description of Artificial Sequence: Synthetic oligonucleotide
  Target: LAMA2; (+) strand; PAM type: NRG; PAM sequence: CAG
agacaaaaagagagtacatg

SEQ ID NO: 176635 - DNA, 20 bp, Artificial Sequence
  Description of Artificial Sequence: Synthetic oligonucleotide
  Target: LAMA2; (+) strand; PAM type: NRG; PAM sequence: CAG
ttctatgaaatgcaaaccta

SEQ ID NO: 176636 - DNA, 20 bp, Artificial Sequence
  Description of Artificial Sequence: Synthetic oligonucleotide
  Target: LAMA2; (+) strand; PAM type: NRG; PAM sequence: TGG
gaaatgcaaacctacagtga

SEQ ID NO: 176637 - DNA, 20 bp, Artificial Sequence
  Description of Artificial Sequence: Synthetic oligonucleotide
  Target: LAMA2; (+) strand; PAM type: NRG; PAM sequence: AAG
tgcaaacctacagtgatgga

SEQ ID NO: 176638 - DNA, 20 bp, Artificial Sequence
  Description of Artificial Sequence: Synthetic oligonucleotide
  Target: LAMA2; (+) strand; PAM type: NRG; PAM sequence: CAG
aaacctacagtgatggaaag

SEQ ID NO: 176639 - DNA, 20 bp, Artificial Sequence
  Description of Artificial Sequence: Synthetic oligonucleotide
  Target: LAMA2; (+) strand; PAM type: NRG; PAM sequence: CAG
tacagtgatggaaagcagat

SEQ ID NO: 176640 - DNA, 20 bp, Artificial Sequence
  Description of Artificial Sequence: Synthetic oligonucleotide
  Target: LAMA2; (+) strand; PAM type: NRG; PAM sequence: TGG
aaagcagatcagtatttgtc

SEQ ID NO: 176641 - DNA, 20 bp, Artificial Sequence
  Description of Artificial Sequence: Synthetic oligonucleotide
  Target: LAMA2; (+) strand; PAM type: NRG; PAM sequence: GGG
aagcagatcagtatttgtct

SEQ ID NO: 176642 - DNA, 20 bp, Artificial Sequence
  Description of Artificial Sequence: Synthetic oligonucleotide
  Target: LAMA2; (+) strand; PAM type: NRG; PAM sequence: GGG
agcagatcagtatttgtctg

SEQ ID NO: 176643 - DNA, 20 bp, Artificial Sequence
  Description of Artificial Sequence: Synthetic oligonucleotide
  Target: LAMA2; (+) strand; PAM type: NRG; PAM sequence: CAG
gatcagtatttgtctgggga

SEQ ID NO: 176644 - DNA, 20 bp, Artificial Sequence
  Description of Artificial Sequence: Synthetic oligonucleotide
  Target: LAMA2; (+) strand; PAM type: NRG; PAM sequence: GAG
tcagtatttgtctggggaca

SEQ ID NO: 176645 - DNA, 20 bp, Artificial Sequence
  Description of Artificial Sequence: Synthetic oligonucleotide
  Target: LAMA2; (+) strand; PAM type: NRG; PAM sequence: AGG
cagtatttgtctggggacag

SEQ ID NO: 176646 - DNA, 20 bp, Artificial Sequence
  Description of Artificial Sequence: Synthetic oligonucleotide
  Target: LAMA2; (+) strand; PAM type: NRG; PAM sequence: GGG
agtatttgtctggggacaga

SEQ ID NO: 176647 - DNA, 20 bp, Artificial Sequence
  Description of Artificial Sequence: Synthetic oligonucleotide
  Target: LAMA2; (+) strand; PAM type: NRG; PAM sequence: AAG
atttgtctggggacagaggg

SEQ ID NO: 176648 - DNA, 20 bp, Artificial Sequence
  Description of Artificial Sequence: Synthetic oligonucleotide
  Target: LAMA2; (+) strand; PAM type: NRG; PAM sequence: GAG
ttgtctggggacagagggaa

SEQ ID NO: 176649 - DNA, 20 bp, Artificial Sequence
  Description of Artificial Sequence: Synthetic oligonucleotide
  Target: LAMA2; (+) strand; PAM type: NRG; PAM sequence: AAG
tctggggacagagggaagag

SEQ ID NO: 176650 - DNA, 20 bp, Artificial Sequence
  Description of Artificial Sequence: Synthetic oligonucleotide
  Target: LAMA2; (+) strand; PAM type: NRG; PAM sequence: AGG
ctggggacagagggaagaga

SEQ ID NO: 176651 - DNA, 20 bp, Artificial Sequence
  Description of Artificial Sequence: Synthetic oligonucleotide
  Target: LAMA2; (+) strand; PAM type: NRG; PAM sequence: AAG
gggacagagggaagagaagg

SEQ ID NO: 176652 - DNA, 20 bp, Artificial Sequence
  Description of Artificial Sequence: Synthetic oligonucleotide
  Target: LAMA2; (+) strand; PAM type: NRG; PAM sequence: AGG
ggacagagggaagagaagga

SEQ ID NO: 176653 - DNA, 20 bp, Artificial Sequence
  Description of Artificial Sequence: Synthetic oligonucleotide
  Target: LAMA2; (+) strand; PAM type: NRG; PAM sequence: TAG
agagggaagagaaggaagga

SEQ ID NO: 176654 - DNA, 20 bp, Artificial Sequence
  Description of Artificial Sequence: Synthetic oligonucleotide
  Target: LAMA2; (+) strand; PAM type: NRG; PAM sequence: AAG
gggaagagaaggaaggatag

SEQ ID NO: 176655 - DNA, 20 bp, Artificial Sequence
  Description of Artificial Sequence: Synthetic oligonucleotide
  Target: LAMA2; (+) strand; PAM type: NRG; PAM sequence: AAG
agagaaggaaggatagaaga

SEQ ID NO: 176656 - DNA, 20 bp, Artificial Sequence
  Description of Artificial Sequence: Synthetic oligonucleotide
  Target: LAMA2; (+) strand; PAM type: NRG; PAM sequence: GAG
agaaggaaggatagaagaaa

SEQ ID NO: 176657 - DNA, 20 bp, Artificial Sequence
  Description of Artificial Sequence: Synthetic oligonucleotide
  Target: LAMA2; (+) strand; PAM type: NRG; PAM sequence: AAG
gatagaagaaagagattcaa

SEQ ID NO: 176658 - DNA, 20 bp, Artificial Sequence
  Description of Artificial Sequence: Synthetic oligonucleotide
  Target: LAMA2; (+) strand; PAM type: NRG; PAM sequence: TGG
aagagattcaaaagaaatga

SEQ ID NO: 176659 - DNA, 20 bp, Artificial Sequence
  Description of Artificial Sequence: Synthetic oligonucleotide
  Target: LAMA2; (+) strand; PAM type: NRG; PAM sequence: TGG
gatggatatattctctacca

SEQ ID NO: 176660 - DNA, 20 bp, Artificial Sequence
  Description of Artificial Sequence: Synthetic oligonucleotide
  Target: LAMA2; (+) strand; PAM type: NRG; PAM sequence: TGG
tatattctctaccatggttg

SEQ ID NO: 176661 - DNA, 20 bp, Artificial Sequence
  Description of Artificial Sequence: Synthetic oligonucleotide
  Target: LAMA2; (+) strand; PAM type: NRG; PAM sequence: TGG
ctctaccatggttgtggtaa

SEQ ID NO: 176662 - DNA, 20 bp, Artificial Sequence
  Description of Artificial Sequence: Synthetic oligonucleotide
  Target: LAMA2; (+) strand; PAM type: NRG; PAM sequence: TGG
tggttgtggtaatggtctca

SEQ ID NO: 176663 - DNA, 20 bp, Artificial Sequence
  Description of Artificial Sequence: Synthetic oligonucleotide
  Target: LAMA2; (+) strand; PAM type: NRG; PAM sequence: GGG
ggttgtggtaatggtctcat

SEQ ID NO: 176664 - DNA, 20 bp, Artificial Sequence
  Description of Artificial Sequence: Synthetic oligonucleotide
  Target: LAMA2; (+) strand; PAM type: NRG; PAM sequence: TGG
aaacttatccaattgtaaat

SEQ ID NO: 176665 - DNA, 20 bp, Artificial Sequence
  Description of Artificial Sequence: Synthetic oligonucleotide
  Target: LAMA2; (+) strand; PAM type: NRG; PAM sequence: TGG
caattgtaaattggtttgca

SEQ ID NO: 176666 - DNA, 20 bp, Artificial Sequence
  Description of Artificial Sequence: Synthetic oligonucleotide
  Target: LAMA2; (+) strand; PAM type: NRG; PAM sequence: CAG
tttgcatggtttatttatgc

SEQ ID NO: 176667 - DNA, 20 bp, Artificial Sequence
  Description of Artificial Sequence: Synthetic oligonucleotide
  Target: LAMA2; (+) strand; PAM type: NRG; PAM sequence: AAG
tgccagttttaactcaataa

SEQ ID NO: 176668 - DNA, 20 bp, Artificial Sequence
  Description of Artificial Sequence: Synthetic oligonucleotide
  Target: LAMA2; (+) strand; PAM type: NRG; PAM sequence: CAG
aactcaataaaagtattaaa

SEQ ID NO: 176669 - DNA, 20 bp, Artificial Sequence
  Description of Artificial Sequence: Synthetic oligonucleotide
  Target: LAMA2; (+) strand; PAM type: NRG; PAM sequence: TAG
ataaaagtattaaacagtat

SEQ ID NO: 176670 - DNA, 20 bp, Artificial Sequence
  Description of Artificial Sequence: Synthetic oligonucleotide
  Target: LAMA2; (+) strand; PAM type: NRG; PAM sequence: TGG
taaacagtattagtcatctc

SEQ ID NO: 176671 - DNA, 20 bp, Artificial Sequence
  Description of Artificial Sequence: Synthetic oligonucleotide
  Target: LAMA2; (+) strand; PAM type: NRG; PAM sequence: TAG
gtattagtcatctctggtca

SEQ ID NO: 176672 - DNA, 20 bp, Artificial Sequence
  Description of Artificial Sequence: Synthetic oligonucleotide
  Target: LAMA2; (+) strand; PAM type: NRG; PAM sequence: TAG
cctccacaatttccacaact

SEQ ID NO: 176673 - DNA, 20 bp, Artificial Sequence
  Description of Artificial Sequence: Synthetic oligonucleotide
  Target: LAMA2; (+) strand; PAM type: NRG; PAM sequence: TAG
aatttccacaacttagattt

SEQ ID NO: 176674 - DNA, 20 bp, Artificial Sequence
  Description of Artificial Sequence: Synthetic oligonucleotide
  Target: LAMA2; (+) strand; PAM type: NRG; PAM sequence: TGG
tagcctctttcactgttgtt

SEQ ID NO: 176675 - DNA, 20 bp, Artificial Sequence
  Description of Artificial Sequence: Synthetic oligonucleotide
  Target: LAMA2; (+) strand; PAM type: NRG; PAM sequence: GGG
agcctctttcactgttgttt

SEQ ID NO: 176676 - DNA, 20 bp, Artificial Sequence
  Description of Artificial Sequence: Synthetic oligonucleotide
  Target: LAMA2; (+) strand; PAM type: NRG; PAM sequence: TAG
aatttttgaaacttgtattt

SEQ ID NO: 176677 - DNA, 20 bp, Artificial Sequence
  Description of Artificial Sequence: Synthetic oligonucleotide
  Target: LAMA2; (+) strand; PAM type: NRG; PAM sequence: AGG
atttttgaaacttgtatttt

SEQ ID NO: 176678 - DNA, 20 bp, Artificial Sequence
  Description of Artificial Sequence: Synthetic oligonucleotide
  Target: LAMA2; (+) strand; PAM type: NRG; PAM sequence: AAG
aaacttgtattttaggttca

SEQ ID NO: 176679 - DNA, 20 bp, Artificial Sequence
  Description of Artificial Sequence: Synthetic oligonucleotide
  Target: LAMA2; (+) strand; PAM type: NRG; PAM sequence: AGG
aacttgtattttaggttcaa

SEQ ID NO: 176680 - DNA, 20 bp, Artificial Sequence
  Description of Artificial Sequence: Synthetic oligonucleotide
  Target: LAMA2; (+) strand; PAM type: NRG; PAM sequence: CAG
taggttcaaaggtacatgtg

SEQ ID NO: 176681 - DNA, 20 bp, Artificial Sequence
  Description of Artificial Sequence: Synthetic oligonucleotide
  Target: LAMA2; (+) strand; PAM type: NRG; PAM sequence: AGG
aggttcaaaggtacatgtgc

SEQ ID NO: 176682 - DNA, 20 bp, Artificial Sequence
  Description of Artificial Sequence: Synthetic oligonucleotide
  Target: LAMA2; (+) strand; PAM type: NRG; PAM sequence: TAG
acatgtgcaggttttttata

SEQ ID NO: 176683 - DNA, 20 bp, Artificial Sequence
  Description of Artificial Sequence: Synthetic oligonucleotide
  Target: LAMA2; (+) strand; PAM type: NRG; PAM sequence: AGG
catgtgcaggttttttatat

SEQ ID NO: 176684 - DNA, 20 bp, Artificial Sequence
  Description of Artificial Sequence: Synthetic oligonucleotide
  Target: LAMA2; (+) strand; PAM type: NRG; PAM sequence: TGG
atataggtaaactcttgtca

SEQ ID NO: 176685 - DNA, 20 bp, Artificial Sequence
  Description of Artificial Sequence: Synthetic oligonucleotide
  Target: LAMA2; (+) strand; PAM type: NRG; PAM sequence: GAG
ataggtaaactcttgtcatg

SEQ ID NO: 176686 - DNA, 20 bp, Artificial Sequence
  Description of Artificial Sequence: Synthetic oligonucleotide
  Target: LAMA2; (+) strand; PAM type: NRG; PAM sequence: AGG
taggtaaactcttgtcatgg

SEQ ID NO: 176687 - DNA, 20 bp, Artificial Sequence
  Description of Artificial Sequence: Synthetic oligonucleotide
  Target: LAMA2; (+) strand; PAM type: NRG; PAM sequence: TAG
tgtcatggaggtttgttgta

SEQ ID NO: 176688 - DNA, 20 bp, Artificial Sequence
  Description of Artificial Sequence: Synthetic oligonucleotide
  Target: LAMA2; (+) strand; PAM type: NRG; PAM sequence: CAG
gttgtatagatttcatcacg

SEQ ID NO: 176689 - DNA, 20 bp, Artificial Sequence
  Description of Artificial Sequence: Synthetic oligonucleotide
  Target: LAMA2; (+) strand; PAM type: NRG; PAM sequence: AGG
ttgtatagatttcatcacgc

SEQ ID NO: 176690 - DNA, 20 bp, Artificial Sequence
  Description of Artificial Sequence: Synthetic oligonucleotide
  Target: LAMA2; (+) strand; PAM type: NRG; PAM sequence: AAG
gatttcatcacgcaggaact

SEQ ID NO: 176691 - DNA, 20 bp, Artificial Sequence
  Description of Artificial Sequence: Synthetic oligonucleotide
  Target: LAMA2; (+) strand; PAM type: NRG; PAM sequence: TAG
gaactaagtctactacccaa

SEQ ID NO: 176692 - DNA, 20 bp, Artificial Sequence
  Description of Artificial Sequence: Synthetic oligonucleotide
  Target: LAMA2; (+) strand; PAM type: NRG; PAM sequence: TAG
gtttctctccctcctcccac

SEQ ID NO: 176693 - DNA, 20 bp, Artificial Sequence
  Description of Artificial Sequence: Synthetic oligonucleotide
  Target: LAMA2; (+) strand; PAM type: NRG; PAM sequence: AAG
tcctcccactagctaccctc

SEQ ID NO: 176694 - DNA, 20 bp, Artificial Sequence
  Description of Artificial Sequence: Synthetic oligonucleotide
  Target: LAMA2; (+) strand; PAM type: NRG; PAM sequence: TAG
tcccactagctaccctcaag

SEQ ID NO: 176695 - DNA, 20 bp, Artificial Sequence
  Description of Artificial Sequence: Synthetic oligonucleotide
  Target: LAMA2; (+) strand; PAM type: NRG; PAM sequence: AGG
cccactagctaccctcaagt

SEQ ID NO: 176696 - DNA, 20 bp, Artificial Sequence
  Description of Artificial Sequence: Synthetic oligonucleotide
  Target: LAMA2; (+) strand; PAM type: NRG; PAM sequence: CGG
agctaccctcaagtaggcct

SEQ ID NO: 176697 - DNA, 20 bp, Artificial Sequence
  Description of Artificial Sequence: Synthetic oligonucleotide
  Target: LAMA2; (+) strand; PAM type: NRG; PAM sequence: TAG
gtccatatgttctcatcatt

SEQ ID NO: 176698 - DNA, 20 bp, Artificial Sequence
  Description of Artificial Sequence: Synthetic oligonucleotide
  Target: LAMA2; (+) strand; PAM type: NRG; PAM sequence: GAG
tttagctcccacttataaat

SEQ ID NO: 176699 - DNA, 20 bp, Artificial Sequence
  Description of Artificial Sequence: Synthetic oligonucleotide
  Target: LAMA2; (+) strand; PAM type: NRG; PAM sequence: TAG
ttgattttctgttcctgcat

SEQ ID NO: 176700 - DNA, 20 bp, Artificial Sequence
  Description of Artificial Sequence: Synthetic oligonucleotide
  Target: LAMA2; (+) strand; PAM type: NRG; PAM sequence: AAG
tgttcctgcattagtttgct

SEQ ID NO: 176701 - DNA, 20 bp, Artificial Sequence
  Description of Artificial Sequence: Synthetic oligonucleotide
  Target: LAMA2; (+) strand; PAM type: NRG; PAM sequence: TGG
cattagtttgctaagaataa

SEQ ID NO: 176702 - DNA, 20 bp, Artificial Sequence
  Description of Artificial Sequence: Synthetic oligonucleotide
  Target: LAMA2; (+) strand; PAM type: NRG; PAM sequence: AAG
actccatccatgttcctgca

SEQ ID NO: 176703 - DNA, 20 bp, Artificial Sequence
  Description of Artificial Sequence: Synthetic oligonucleotide
  Target: LAMA2; (+) strand; PAM type: NRG; PAM sequence: AGG
ctccatccatgttcctgcaa

SEQ ID NO: 176704 - DNA, 20 bp, Artificial Sequence
  Description of Artificial Sequence: Synthetic oligonucleotide
  Target: LAMA2; (+) strand; PAM type: NRG; PAM sequence: TAG
gcattcgttttatgactgca

SEQ ID NO: 176705 - DNA, 20 bp, Artificial Sequence
  Description of Artificial Sequence: Synthetic oligonucleotide
  Target: LAMA2; (+) strand; PAM type: NRG; PAM sequence: TGG
tatgactgcatagtattcca

SEQ ID NO: 176706 - DNA, 20 bp, Artificial Sequence
  Description of Artificial Sequence: Synthetic oligonucleotide
  Target: LAMA2; (+) strand; PAM type: NRG; PAM sequence: CAG
tgtaccacattttatttatc

SEQ ID NO: 176707 - DNA, 20 bp, Artificial Sequence
  Description of Artificial Sequence: Synthetic oligonucleotide
  Target: LAMA2; (+) strand; PAM type: NRG; PAM sequence: CAG
attccttattttcttatgct

SEQ ID NO: 176708 - DNA, 20 bp, Artificial Sequence
  Description of Artificial Sequence: Synthetic oligonucleotide
  Target: LAMA2; (+) strand; PAM type: NRG; PAM sequence: AAG
tgcctcactttgcacacctg

SEQ ID NO: 176709 - DNA, 20 bp, Artificial Sequence
  Description of Artificial Sequence: Synthetic oligonucleotide
  Target: LAMA2; (+) strand; PAM type: NRG; PAM sequence: TAG
tcactttgcacacctgaagt

SEQ ID NO: 176710 - DNA, 20 bp, Artificial Sequence
  Description of Artificial Sequence: Synthetic oligonucleotide
  Target: LAMA2; (+) strand; PAM type: NRG; PAM sequence: CAG
tatgacttttaaatgcttgt

SEQ ID NO: 176711 - DNA, 20 bp, Artificial Sequence
  Description of Artificial Sequence: Synthetic oligonucleotide
  Target: LAMA2; (+) strand; PAM type: NRG; PAM sequence: AAG
tcagattacattcttacaaa

SEQ ID NO: 176712 - DNA, 20 bp, Artificial Sequence
  Description of Artificial Sequence: Synthetic oligonucleotide
  Target: LAMA2; (+) strand; PAM type: NRG; PAM sequence: AGG
cagattacattcttacaaaa

SEQ ID NO: 176713 - DNA, 20 bp, Artificial Sequence
  Description of Artificial Sequence: Synthetic oligonucleotide
  Target: LAMA2; (+) strand; PAM type: NRG; PAM sequence: AAG
caaaaaggtattcacactcc

SEQ ID NO: 176714 - DNA, 20 bp, Artificial Sequence
  Description of Artificial Sequence: Synthetic oligonucleotide
  Target: LAMA2; (+) strand; PAM type: NRG; PAM sequence: AGG
aaaaaggtattcacactcca

SEQ ID NO: 176715 - DNA, 20 bp, Artificial Sequence
  Description of Artificial Sequence: Synthetic oligonucleotide
  Target: LAMA2; (+) strand; PAM type: NRG; PAM sequence: TGG
gtattcacactccaaggcac

SEQ ID NO: 176716 - DNA, 20 bp, Artificial Sequence
  Description of Artificial Sequence: Synthetic oligonucleotide
  Target: LAMA2; (+) strand; PAM type: NRG; PAM sequence: GGG
tattcacactccaaggcact

SEQ ID NO: 176717 - DNA, 20 bp, Artificial Sequence
  Description of Artificial Sequence: Synthetic oligonucleotide
  Target: LAMA2; (+) strand; PAM type: NRG; PAM sequence: GGG
attcacactccaaggcactg

SEQ ID NO: 176718 - DNA, 20 bp, Artificial Sequence
  Description of Artificial Sequence: Synthetic oligonucleotide
  Target: LAMA2; (+) strand; PAM type: NRG; PAM sequence: AAG
acactccaaggcactgggga

SEQ ID NO: 176719 - DNA, 20 bp, Artificial Sequence
  Description of Artificial Sequence: Synthetic oligonucleotide
  Target: LAMA2; (+) strand; PAM type: NRG; PAM sequence: TAG
agctgttttctttttttgtc

SEQ ID NO: 176720 - DNA, 20 bp, Artificial Sequence
  Description of Artificial Sequence: Synthetic oligonucleotide
  Target: LAMA2; (+) strand; PAM type: NRG; PAM sequence: TAG
tttttttgtctagtttcatc

SEQ ID NO: 176721 - DNA, 20 bp, Artificial Sequence
  Description of Artificial Sequence: Synthetic oligonucleotide
  Target: LAMA2; (+) strand; PAM type: NRG; PAM sequence: TGG
gtttcatctagtactataaa

SEQ ID NO: 176722 - DNA, 20 bp, Artificial Sequence
  Description of Artificial Sequence: Synthetic oligonucleotide
  Target: LAMA2; (+) strand; PAM type: NRG; PAM sequence: CAG
cctatattatcttgacaatt

SEQ ID NO: 176723 - DNA, 20 bp, Artificial Sequence
  Description of Artificial Sequence: Synthetic oligonucleotide
  Target: LAMA2; (+) strand; PAM type: NRG; PAM sequence: AGG
ctatattatcttgacaattc

SEQ ID NO: 176724 - DNA, 20 bp, Artificial Sequence
  Description of Artificial Sequence: Synthetic oligonucleotide
  Target: LAMA2; (+) strand; PAM type: NRG; PAM sequence: TGG
caggattgtattatcatcct

SEQ ID NO: 176725 - DNA, 20 bp, Artificial Sequence
  Description of Artificial Sequence: Synthetic oligonucleotide
  Target: LAMA2; (+) strand; PAM type: NRG; PAM sequence: AAG
cttggttattttaccacaat

SEQ ID NO: 176726 - DNA, 20 bp, Artificial Sequence
  Description of Artificial Sequence: Synthetic oligonucleotide
  Target: LAMA2; (+) strand; PAM type: NRG; PAM sequence: AGG
ttggttattttaccacaata

SEQ ID NO: 176727 - DNA, 20 bp, Artificial Sequence
  Description of Artificial Sequence: Synthetic oligonucleotide
  Target: LAMA2; (+) strand; PAM type: NRG; PAM sequence: TGG
ttattttaccacaataaggt

SEQ ID NO: 176728 - DNA, 20 bp, Artificial Sequence
  Description of Artificial Sequence: Synthetic oligonucleotide
  Target: LAMA2; (+) strand; PAM type: NRG; PAM sequence: GAG
caataaggttggcatctact

SEQ ID NO: 176729 - DNA, 20 bp, Artificial Sequence
  Description of Artificial Sequence: Synthetic oligonucleotide
  Target: LAMA2; (+) strand; PAM type: NRG; PAM sequence: CAG
tatccctttccaaattgact

SEQ ID NO: 176730 - DNA, 20 bp, Artificial Sequence
  Description of Artificial Sequence: Synthetic oligonucleotide
  Target: LAMA2; (+) strand; PAM type: NRG; PAM sequence: GAG
ccaaattgactcagactcct

SEQ ID NO: 176731 - DNA, 20 bp, Artificial Sequence
  Description of Artificial Sequence: Synthetic oligonucleotide
  Target: LAMA2; (+) strand; PAM type: NRG; PAM sequence: TAG
aaattcctctctccactttt

SEQ ID NO: 176732 - DNA, 20 bp, Artificial Sequence
  Description of Artificial Sequence: Synthetic oligonucleotide
  Target: LAMA2; (+) strand; PAM type: NRG; PAM sequence: GAG
attcctctctccacttttta

SEQ ID NO: 176733 - DNA, 20 bp, Artificial Sequence
  Description of Artificial Sequence: Synthetic oligonucleotide
  Target: LAMA2; (+) strand; PAM type: NRG; PAM sequence: CGG
ctcttctctttgctcattgt

SEQ ID NO: 176734 - DNA, 20 bp, Artificial Sequence
  Description of Artificial Sequence: Synthetic oligonucleotide
  Target: LAMA2; (+) strand; PAM type: NRG; PAM sequence: CAG
tctctttgctcattgtcgga

SEQ ID NO: 176735 - DNA, 20 bp, Artificial Sequence
  Description of Artificial Sequence: Synthetic oligonucleotide
  Target: LAMA2; (+) strand; PAM type: NRG; PAM sequence: CAG
ctcattgtcggacagattgt

SEQ ID NO: 176736 - DNA, 20 bp, Artificial Sequence
  Description of Artificial Sequence: Synthetic oligonucleotide
  Target: LAMA2; (+) strand; PAM type: NRG; PAM sequence: TAG
gctgttttcatgtgtttgtt

SEQ ID NO: 176737 - DNA, 20 bp, Artificial Sequence
  Description of Artificial Sequence: Synthetic oligonucleotide
  Target: LAMA2; (+) strand; PAM type: NRG; PAM sequence: GAG
tgttttcatgtgtttgttta

SEQ ID NO: 176738 - DNA, 20 bp, Artificial Sequence
  Description of Artificial Sequence: Synthetic oligonucleotide
  Target: LAMA2; (+) strand; PAM type: NRG; PAM sequence: CAG
gtctctaaattgttttgatt

SEQ ID NO: 176739 - DNA, 20 bp, Artificial Sequence
  Description of Artificial Sequence: Synthetic oligonucleotide
  Target: LAMA2; (+) strand; PAM type: NRG; PAM sequence: AAG
gattcagaaaacctataacc

SEQ ID NO: 176740 - DNA, 20 bp, Artificial Sequence
  Description of Artificial Sequence: Synthetic oligonucleotide
  Target: LAMA2; (+) strand; PAM type: NRG; PAM sequence: AGG
attcagaaaacctataacca

SEQ ID NO: 176741 - DNA, 20 bp, Artificial Sequence
  Description of Artificial Sequence: Synthetic oligonucleotide
  Target: LAMA2; (+) strand; PAM type: NRG; PAM sequence: GGG
ttcagaaaacctataaccaa

SEQ ID NO: 176742 - DNA, 20 bp, Artificial Sequence
  Description of Artificial Sequence: Synthetic oligonucleotide
  Target: LAMA2; (+) strand; PAM type: NRG; PAM sequence: GAG
cagaaaacctataaccaagg

SEQ ID NO: 176743 - DNA, 20 bp, Artificial Sequence
  Description of Artificial Sequence: Synthetic oligonucleotide
  Target: LAMA2; (+) strand; PAM type: NRG; PAM sequence: TGG
gtaaaaatgacgtgtaaatt

SEQ ID NO: 176744 - DNA, 20 bp, Artificial Sequence
  Description of Artificial Sequence: Synthetic oligonucleotide
  Target: LAMA2; (+) strand; PAM type: NRG; PAM sequence: TAG
gtgtaaatttggaacaaata

SEQ ID NO: 176745 - DNA, 20 bp, Artificial Sequence
  Description of Artificial Sequence: Synthetic oligonucleotide
  Target: LAMA2; (+) strand; PAM type: NRG; PAM sequence: GAG
ttggaacaaatatagaatct

SEQ ID NO: 176746 - DNA, 20 bp, Artificial Sequence
  Description of Artificial Sequence: Synthetic oligonucleotide
  Target: LAMA2; (+) strand; PAM type: NRG; PAM sequence: TGG
gaacaaatatagaatctgag

SEQ ID NO: 176747 - DNA, 20 bp, Artificial Sequence
  Description of Artificial Sequence: Synthetic oligonucleotide
  Target: LAMA2; (+) strand; PAM type: NRG; PAM sequence: GGG
aacaaatatagaatctgagt

SEQ ID NO: 176748 - DNA, 20 bp, Artificial Sequence
  Description of Artificial Sequence: Synthetic oligonucleotide
  Target: LAMA2; (+) strand; PAM type: NRG; PAM sequence: GAG
agaatctgagtgggtaacct

SEQ ID NO: 176749 - DNA, 20 bp, Artificial Sequence
  Description of Artificial Sequence: Synthetic oligonucleotide
  Target: LAMA2; (+) strand; PAM type: NRG; PAM sequence: AGG
gaatctgagtgggtaacctg

SEQ ID NO: 176750 - DNA, 20 bp, Artificial Sequence
  Description of Artificial Sequence: Synthetic oligonucleotide
  Target: LAMA2; (+) strand; PAM type: NRG; PAM sequence: GAG
taacctgaggcttacttcgt

SEQ ID NO: 176751 - DNA, 20 bp, Artificial Sequence
  Description of Artificial Sequence: Synthetic oligonucleotide
  Target: LAMA2; (+) strand; PAM type: NRG; PAM sequence: AAG
gaggcttacttcgtgagtta

SEQ ID NO: 176752 - DNA, 20 bp, Artificial Sequence
  Description of Artificial Sequence: Synthetic oligonucleotide
  Target: LAMA2; (+) strand; PAM type: NRG; PAM sequence: AAG
acactcttttttttttttcc

SEQ ID NO: 176753 - DNA, 20 bp, Artificial Sequence
  Description of Artificial Sequence: Synthetic oligonucleotide
  Target: LAMA2; (+) strand; PAM type: NRG; PAM sequence: AAG
tgttactgtatctaattccc

SEQ ID NO: 176754 - DNA, 20 bp, Artificial Sequence
  Description of Artificial Sequence: Synthetic oligonucleotide
  Target: LAMA2; (+) strand; PAM type: NRG; PAM sequence: GAG
ttactgtatctaattcccaa

SEQ ID NO: 176755 - DNA, 20 bp, Artificial Sequence
  Description of Artificial Sequence: Synthetic oligonucleotide
  Target: LAMA2; (+) strand; PAM type: NRG; PAM sequence: TAG
tctaattcccaagagaactg

SEQ ID NO: 176756 - DNA, 20 bp, Artificial Sequence
  Description of Artificial Sequence: Synthetic oligonucleotide
  Target: LAMA2; (+) strand; PAM type: NRG; PAM sequence: GAG
cccaagagaactgtagcaat

SEQ ID NO: 176757 - DNA, 20 bp, Artificial Sequence
  Description of Artificial Sequence: Synthetic oligonucleotide
  Target: LAMA2; (+) strand; PAM type: NRG; PAM sequence: CAG
atgagaattcctgtttttcc

SEQ ID NO: 176758 - DNA, 20 bp, Artificial Sequence
  Description of Artificial Sequence: Synthetic oligonucleotide
  Target: LAMA2; (+) strand; PAM type: NRG; PAM sequence: CAG
agaattcctgtttttcccag

SEQ ID NO: 176759 - DNA, 20 bp, Artificial Sequence
  Description of Artificial Sequence: Synthetic oligonucleotide
  Target: LAMA2; (+) strand; PAM type: NRG; PAM sequence: CAG
ttcccagcagaaaacatcat

SEQ ID NO: 176760 - DNA, 20 bp, Artificial Sequence
  Description of Artificial Sequence: Synthetic oligonucleotide
  Target: LAMA2; (+) strand; PAM type: NRG; PAM sequence: TGG
agaaaacatcatcagttttc

SEQ ID NO: 176761 - DNA, 20 bp, Artificial Sequence
  Description of Artificial Sequence: Synthetic oligonucleotide
  Target: LAMA2; (+) strand; PAM type: NRG; PAM sequence: GAG
aaaacatcatcagttttctg

SEQ ID NO: 176762 - DNA, 20 bp, Artificial Sequence
  Description of Artificial Sequence: Synthetic oligonucleotide
  Target: LAMA2; (+) strand; PAM type: NRG; PAM sequence: AAG
tttctggagaataatttgcc

SEQ ID NO: 176763 - DNA, 20 bp, Artificial Sequence
  Description of Artificial Sequence: Synthetic oligonucleotide
  Target: LAMA2; (+) strand; PAM type: NRG; PAM sequence: AGG
ttctggagaataatttgcca

SEQ ID NO: 176764 - DNA, 20 bp, Artificial Sequence
  Description of Artificial Sequence: Synthetic oligonucleotide
  Target: LAMA2; (+) strand; PAM type: NRG; PAM sequence: AAG
ttgccaaggttgtcttttgc

SEQ ID NO: 176765 - DNA, 20 bp, Artificial Sequence
  Description of Artificial Sequence: Synthetic oligonucleotide
  Target: LAMA2; (+) strand; PAM type: NRG; PAM sequence: CAG
tcttttgcaagaactatgtt

SEQ ID NO: 176766 - DNA, 20 bp, Artificial Sequence
  Description of Artificial Sequence: Synthetic oligonucleotide
  Target: LAMA2; (+) strand; PAM type: NRG; PAM sequence: TAG
agtgttcttttttatttatg

SEQ ID NO: 176767 - DNA, 20 bp, Artificial Sequence
  Description of Artificial Sequence: Synthetic oligonucleotide
  Target: LAMA2; (+) strand; PAM type: NRG; PAM sequence: TAG
gtttccaatatatctttttg

SEQ ID NO: 176768 - DNA, 20 bp, Artificial Sequence
  Description of Artificial Sequence: Synthetic oligonucleotide
  Target: LAMA2; (+) strand; PAM type: NRG; PAM sequence: TAG
atatctttttgtagatatga

SEQ ID NO: 176769 - DNA, 20 bp, Artificial Sequence
  Description of Artificial Sequence: Synthetic oligonucleotide
  Target: LAMA2; (+) strand; PAM type: NRG; PAM sequence: GAG
gtacaatcaatctgttctat

SEQ ID NO: 176770 - DNA, 20 bp, Artificial Sequence
  Description of Artificial Sequence: Synthetic oligonucleotide
  Target: LAMA2; (+) strand; PAM type: NRG; PAM sequence: AAG
gcaatcaattatttacctga

SEQ ID NO: 176771 - DNA, 20 bp, Artificial Sequence
  Description of Artificial Sequence: Synthetic oligonucleotide
  Target: LAMA2; (+) strand; PAM type: NRG; PAM sequence: TAG
attatttacctgaaagctgt

SEQ ID NO: 176772 - DNA, 20 bp, Artificial Sequence
  Description of Artificial Sequence: Synthetic oligonucleotide
  Target: LAMA2; (+) strand; PAM type: NRG; PAM sequence: CAG
cattaaaataaatttgacca

SEQ ID NO: 176773 - DNA, 20 bp, Artificial Sequence
  Description of Artificial Sequence: Synthetic oligonucleotide
  Target: LAMA2; (+) strand; PAM type: NRG; PAM sequence: AAG
aatttgaccacagccatacc

SEQ ID NO: 176774 - DNA, 20 bp, Artificial Sequence
  Description of Artificial Sequence: Synthetic oligonucleotide
  Target: LAMA2; (+) strand; PAM type: NRG; PAM sequence: TAG
ccaagttctgtaatcttttc

SEQ ID NO: 176775 - DNA, 20 bp, Artificial Sequence
  Description of Artificial Sequence: Synthetic oligonucleotide
  Target: LAMA2; (+) strand; PAM type: NRG; PAM sequence: AAG
ctgataaaaataatgtaact

SEQ ID NO: 176776 - DNA, 20 bp, Artificial Sequence
  Description of Artificial Sequence: Synthetic oligonucleotide
  Target: LAMA2; (+) strand; PAM type: NRG; PAM sequence: AGG
tgataaaaataatgtaacta

SEQ ID NO: 176777 - DNA, 20 bp, Artificial Sequence
  Description of Artificial Sequence: Synthetic oligonucleotide
  Target: LAMA2; (+) strand; PAM type: NRG; PAM sequence: CAG
taaaaataatgtaactaagg

SEQ ID NO: 176778 - DNA, 20 bp, Artificial Sequence
  Description of Artificial Sequence: Synthetic oligonucleotide
  Target: LAMA2; (+) strand; PAM type: NRG; PAM sequence: CAG
ataatgtaactaaggcagtc

SEQ ID NO: 176779 - DNA, 20 bp, Artificial Sequence
  Description of Artificial Sequence: Synthetic oligonucleotide
  Target: LAMA2; (+) strand; PAM type: NRG; PAM sequence: GAG
gcagtccagatgcctttaac

SEQ ID NO: 176780 - DNA, 20 bp, Artificial Sequence
  Description of Artificial Sequence: Synthetic oligonucleotide
  Target: LAMA2; (+) strand; PAM type: NRG; PAM sequence: GAG
tgttatgtctgtgataatct

SEQ ID NO: 176781 - DNA, 20 bp, Artificial Sequence
  Description of Artificial Sequence: Synthetic oligonucleotide
  Target: LAMA2; (+) strand; PAM type: NRG; PAM sequence: CAG
tgtctgtgataatctgagtt

SEQ ID NO: 176782 - DNA, 20 bp, Artificial Sequence
  Description of Artificial Sequence: Synthetic oligonucleotide
  Target: LAMA2; (+) strand; PAM type: NRG; PAM sequence: CAG
gttcagatttatatcttcaa

SEQ ID NO: 176783 - DNA, 20 bp, Artificial Sequence
  Description of Artificial Sequence: Synthetic oligonucleotide
  Target: LAMA2; (+) strand; PAM type: NRG; PAM sequence: AAG
agatttatatcttcaacagt

SEQ ID NO: 176784 - DNA, 20 bp, Artificial Sequence
  Description of Artificial Sequence: Synthetic oligonucleotide
  Target: LAMA2; (+) strand; PAM type: NRG; PAM sequence: TAG
tatcttcaacagtaagtatt

SEQ ID NO: 176785 - DNA, 20 bp, Artificial Sequence
  Description of Artificial Sequence: Synthetic oligonucleotide
  Target: LAMA2; (+) strand; PAM type: NRG; PAM sequence: AAG
ccaatttaaaatttacacat

SEQ ID NO: 176786 - DNA, 20 bp, Artificial Sequence
  Description of Artificial Sequence: Synthetic oligonucleotide
  Target: LAMA2; (+) strand; PAM type: NRG; PAM sequence: TGG
atcctgtttgatttatctct

SEQ ID NO: 176787 - DNA, 20 bp, Artificial Sequence
  Description of Artificial Sequence: Synthetic oligonucleotide
  Target: LAMA2; (+) strand; PAM type: NRG; PAM sequence: GAG
tgaattatgtaatgattgct

SEQ ID NO: 176788 - DNA, 20 bp, Artificial Sequence
  Description of Artificial Sequence: Synthetic oligonucleotide
  Target: LAMA2; (+) strand; PAM type: NRG; PAM sequence: AGG
gaattatgtaatgattgctg

SEQ ID NO: 176789 - DNA, 20 bp, Artificial Sequence
  Description of Artificial Sequence: Synthetic oligonucleotide
  Target: LAMA2; (+) strand; PAM type: NRG; PAM sequence: GAG
attatgtaatgattgctgag

SEQ ID NO: 176790 - DNA, 20 bp, Artificial Sequence
  Description of Artificial Sequence: Synthetic oligonucleotide
  Target: LAMA2; (+) strand; PAM type: NRG; PAM sequence: TGG
aggagcaaacactattaaaa

SEQ ID NO: 176791 - DNA, 20 bp, Artificial Sequence
  Description of Artificial Sequence: Synthetic oligonucleotide
  Target: LAMA2; (+) strand; PAM type: NRG; PAM sequence: GGG
ggagcaaacactattaaaat

SEQ ID NO: 176792 - DNA, 20 bp, Artificial Sequence
  Description of Artificial Sequence: Synthetic oligonucleotide
  Target: LAMA2; (+) strand; PAM type: NRG; PAM sequence: TAG
acactattaaaatgggtaac

SEQ ID NO: 176793 - DNA, 20 bp, Artificial Sequence
  Description of Artificial Sequence: Synthetic oligonucleotide
  Target: LAMA2; (+) strand; PAM type: NRG; PAM sequence: AAG
aaatgggtaactagacattc

SEQ ID NO: 176794 - DNA, 20 bp, Artificial Sequence
  Description of Artificial Sequence: Synthetic oligonucleotide
  Target: LAMA2; (+) strand; PAM type: NRG; PAM sequence: GAG
tgtgtcaccttttttaatct

SEQ ID NO: 176795 - DNA, 20 bp, Artificial Sequence
  Description of Artificial Sequence: Synthetic oligonucleotide
  Target: LAMA2; (+) strand; PAM type: NRG; PAM sequence: TGG
taaacaaatatatctttgct

SEQ ID NO: 176796 - DNA, 20 bp, Artificial Sequence
  Description of Artificial Sequence: Synthetic oligonucleotide
  Target: LAMA2; (+) strand; PAM type: NRG; PAM sequence: GAG
aacaaatatatctttgcttg

SEQ ID NO: 176797 - DNA, 20 bp, Artificial Sequence
  Description of Artificial Sequence: Synthetic oligonucleotide
  Target: LAMA2; (+) strand; PAM type: NRG; PAM sequence: TGG
tctttgcttggagataattg

SEQ ID NO: 176798 - DNA, 20 bp, Artificial Sequence
  Description of Artificial Sequence: Synthetic oligonucleotide
  Target: LAMA2; (+) strand; PAM type: NRG; PAM sequence: CAG
gcttggagataattgtggct

SEQ ID NO: 176799 - DNA, 20 bp, Artificial Sequence
  Description of Artificial Sequence: Synthetic oligonucleotide
  Target: LAMA2; (+) strand; PAM type: NRG; PAM sequence: GAG
ttggagataattgtggctca

SEQ ID NO: 176800 - DNA, 20 bp, Artificial Sequence
  Description of Artificial Sequence: Synthetic oligonucleotide
  Target: LAMA2; (+) strand; PAM type: NRG; PAM sequence: TAG
gtggctcagagattgtcatt

SEQ ID NO: 176801 - DNA, 20 bp, Artificial Sequence
  Description of Artificial Sequence: Synthetic oligonucleotide
  Target: LAMA2; (+) strand; PAM type: NRG; PAM sequence: AAG
gctcagagattgtcatttag

SEQ ID NO: 176802 - DNA, 20 bp, Artificial Sequence
  Description of Artificial Sequence: Synthetic oligonucleotide
  Target: LAMA2; (+) strand; PAM type: NRG; PAM sequence: AAG
gtgttttgccataccgcttt

SEQ ID NO: 176803 - DNA, 20 bp, Artificial Sequence
  Description of Artificial Sequence: Synthetic oligonucleotide
  Target: LAMA2; (+) strand; PAM type: NRG; PAM sequence: AAG
ctttaagatgcattttttaa

SEQ ID NO: 176804 - DNA, 20 bp, Artificial Sequence
  Description of Artificial Sequence: Synthetic oligonucleotide
  Target: LAMA2; (+) strand; PAM type: NRG; PAM sequence: AAG
taagatgcattttttaaaag

SEQ ID NO: 176805 - DNA, 20 bp, Artificial Sequence
  Description of Artificial Sequence: Synthetic oligonucleotide
  Target: LAMA2; (+) strand; PAM type: NRG; PAM sequence: CAG
gatgcattttttaaaagaag

SEQ ID NO: 176806 - DNA, 20 bp, Artificial Sequence
  Description of Artificial Sequence: Synthetic oligonucleotide
  Target: LAMA2; (+) strand; PAM type: NRG; PAM sequence: CAG
agcagtgttctttctcattt

SEQ ID NO: 176807 - DNA, 20 bp, Artificial Sequence
  Description of Artificial Sequence: Synthetic oligonucleotide
  Target: LAMA2; (+) strand; PAM type: NRG; PAM sequence: TGG
ttctttctcatttcagcact

SEQ ID NO: 176808 - DNA, 20 bp, Artificial Sequence
  Description of Artificial Sequence: Synthetic oligonucleotide
  Target: LAMA2; (+) strand; PAM type: NRG; PAM sequence: GGG
tctttctcatttcagcactt

SEQ ID NO: 176809 - DNA, 20 bp, Artificial Sequence
  Description of Artificial Sequence: Synthetic oligonucleotide
  Target: LAMA2; (+) strand; PAM type: NRG; PAM sequence: GAG
tttctcatttcagcacttgg

SEQ ID NO: 176810 - DNA, 20 bp, Artificial Sequence
  Description of Artificial Sequence: Synthetic oligonucleotide
  Target: LAMA2; (+) strand; PAM type: NRG; PAM sequence: CAG
atttcagcacttgggagata

SEQ ID NO: 176811 - DNA, 20 bp, Artificial Sequence
  Description of Artificial Sequence: Synthetic oligonucleotide
  Target: LAMA2; (+) strand; PAM type: NRG; PAM sequence: AGG
tttcagcacttgggagatac

SEQ ID NO: 176812 - DNA, 20 bp, Artificial Sequence
  Description of Artificial Sequence: Synthetic oligonucleotide
  Target: LAMA2; (+) strand; PAM type: NRG; PAM sequence: CAG
tacaggaaatgctcccctct

SEQ ID NO: 176813 - DNA, 20 bp, Artificial Sequence
  Description of Artificial Sequence: Synthetic oligonucleotide
  Target: LAMA2; (+) strand; PAM type: NRG; PAM sequence: TAG
ctcccctctcagtccacaac

SEQ ID NO: 176814 - DNA, 20 bp, Artificial Sequence
  Description of Artificial Sequence: Synthetic oligonucleotide
  Target: LAMA2; (+) strand; PAM type: NRG; PAM sequence: GAG
cccctctcagtccacaacta

SEQ ID NO: 176815 - DNA, 20 bp, Artificial Sequence
  Description of Artificial Sequence: Synthetic oligonucleotide
  Target: LAMA2; (+) strand; PAM type: NRG; PAM sequence: AAG
aactagagtgaaatttgctt

SEQ ID NO: 176816 - DNA, 20 bp, Artificial Sequence
  Description of Artificial Sequence: Synthetic oligonucleotide
  Target: LAMA2; (+) strand; PAM type: NRG; PAM sequence: AGG
actagagtgaaatttgctta

SEQ ID NO: 176817 - DNA, 20 bp, Artificial Sequence
  Description of Artificial Sequence: Synthetic oligonucleotide
  Target: LAMA2; (+) strand; PAM type: NRG; PAM sequence: AAG
gtgaaatttgcttaaggata

SEQ ID NO: 176818 - DNA, 20 bp, Artificial Sequence
  Description of Artificial Sequence: Synthetic oligonucleotide
  Target: LAMA2; (+) strand; PAM type: NRG; PAM sequence: CAG
aatttgcttaaggataaagt

SEQ ID NO: 176819 - DNA, 20 bp, Artificial Sequence
  Description of Artificial Sequence: Synthetic oligonucleotide
  Target: LAMA2; (+) strand; PAM type: NRG; PAM sequence: AGG
atttgcttaaggataaagtc

SEQ ID NO: 176820 - DNA, 20 bp, Artificial Sequence
  Description of Artificial Sequence: Synthetic oligonucleotide
  Target: LAMA2; (+) strand; PAM type: NRG; PAM sequence: GGG
tttgcttaaggataaagtca

SEQ ID NO: 176821 - DNA, 20 bp, Artificial Sequence
  Description of Artificial Sequence: Synthetic oligonucleotide
  Target: LAMA2; (+) strand; PAM type: NRG; PAM sequence: GGG
ttgcttaaggataaagtcag

SEQ ID NO: 176822 - DNA, 20 bp, Artificial Sequence
  Description of Artificial Sequence: Synthetic oligonucleotide
  Target: LAMA2; (+) strand; PAM type: NRG; PAM sequence: TAG
ataaagtcaggggatgtgtt

SEQ ID NO: 176823 - DNA, 20 bp, Artificial Sequence
  Description of Artificial Sequence: Synthetic oligonucleotide
  Target: LAMA2; (+) strand; PAM type: NRG; PAM sequence: TAG
cttaatttgcttgacttctg

SEQ ID NO: 176824 - DNA, 20 bp, Artificial Sequence
  Description of Artificial Sequence: Synthetic oligonucleotide
  Target: LAMA2; (+) strand; PAM type: NRG; PAM sequence: CAG
tagcacgtcataatgctgct

SEQ ID NO: 176825 - DNA, 20 bp, Artificial Sequence
  Description of Artificial Sequence: Synthetic oligonucleotide
  Target: LAMA2; (+) strand; PAM type: NRG; PAM sequence: CAG
ttatgtccttacaacaccgc

SEQ ID NO: 176826 - DNA, 20 bp, Artificial Sequence
  Description of Artificial Sequence: Synthetic oligonucleotide
  Target: LAMA2; (+) strand; PAM type: NRG; PAM sequence: GAG
accgccagttatcatgcatc

SEQ ID NO: 176827 - DNA, 20 bp, Artificial Sequence
  Description of Artificial Sequence: Synthetic oligonucleotide
  Target: LAMA2; (+) strand; PAM type: NRG; PAM sequence: TAG
tctgcatctcttaatttcca

SEQ ID NO: 176828 - DNA, 20 bp, Artificial Sequence
  Description of Artificial Sequence: Synthetic oligonucleotide
  Target: LAMA2; (+) strand; PAM type: NRG; PAM sequence: TGG
taatttctccttttcctctg

SEQ ID NO: 176829 - DNA, 20 bp, Artificial Sequence
  Description of Artificial Sequence: Synthetic oligonucleotide
  Target: LAMA2; (+) strand; PAM type: NRG; PAM sequence: CAG
ccttttcctctgtggaatgc

SEQ ID NO: 176830 - DNA, 20 bp, Artificial Sequence
  Description of Artificial Sequence: Synthetic oligonucleotide
  Target: LAMA2; (+) strand; PAM type: NRG; PAM sequence: CAG
tggaatgccagtcaccttgc

SEQ ID NO: 176831 - DNA, 20 bp, Artificial Sequence
  Description of Artificial Sequence: Synthetic oligonucleotide
  Target: LAMA2; (+) strand; PAM type: NRG; PAM sequence: AAG
tgcctactccctaaacattg

SEQ ID NO: 176832 - DNA, 20 bp, Artificial Sequence
  Description of Artificial Sequence: Synthetic oligonucleotide
  Target: LAMA2; (+) strand; PAM type: NRG; PAM sequence: AAG
ccctaaacattgaagttcct

SEQ ID NO: 176833 - DNA, 20 bp, Artificial Sequence
  Description of Artificial Sequence: Synthetic oligonucleotide
  Target: LAMA2; (+) strand; PAM type: NRG; PAM sequence: TAG
agttcctaagaactctgttc

SEQ ID NO: 176834 - DNA, 20 bp, Artificial Sequence
  Description of Artificial Sequence: Synthetic oligonucleotide
  Target: LAMA2; (+) strand; PAM type: NRG; PAM sequence: CAG
tcttctcataccgtaataaa

SEQ ID NO: 176835 - DNA, 20 bp, Artificial Sequence
  Description of Artificial Sequence: Synthetic oligonucleotide
  Target: LAMA2; (+) strand; PAM type: NRG; PAM sequence: CAG
aatttacaattctatatctg

SEQ ID NO: 176836 - DNA, 20 bp, Artificial Sequence
  Description of Artificial Sequence: Synthetic oligonucleotide
  Target: LAMA2; (+) strand; PAM type: NRG; PAM sequence: CAG
acaattctatatctgcagcc

SEQ ID NO: 176837 - DNA, 20 bp, Artificial Sequence
  Description of Artificial Sequence: Synthetic oligonucleotide
  Target: LAMA2; (+) strand; PAM type: NRG; PAM sequence: GAG
aattctatatctgcagccca

SEQ ID NO: 176838 - DNA, 20 bp, Artificial Sequence
  Description of Artificial Sequence: Synthetic oligonucleotide
  Target: LAMA2; (+) strand; PAM type: NRG; PAM sequence: AAG
cagcccagagctctttccta

SEQ ID NO: 176839 - DNA, 20 bp, Artificial Sequence
  Description of Artificial Sequence: Synthetic oligonucleotide
  Target: LAMA2; (+) strand; PAM type: NRG; PAM sequence: AGG
agcccagagctctttcctaa

SEQ ID NO: 176840 - DNA, 20 bp, Artificial Sequence
  Description of Artificial Sequence: Synthetic oligonucleotide
  Target: LAMA2; (+) strand; PAM type: NRG; PAM sequence: TGG
tctgtgtaccaactgccttc

SEQ ID NO: 176841 - DNA, 20 bp, Artificial Sequence
  Description of Artificial Sequence: Synthetic oligonucleotide
  Target: LAMA2; (+) strand; PAM type: NRG; PAM sequence: TGG
ccctccactccattattcta

SEQ ID NO: 176842 - DNA, 20 bp, Artificial Sequence
  Description of Artificial Sequence: Synthetic oligonucleotide
  Target: LAMA2; (+) strand; PAM type: NRG; PAM sequence: TAG
actccattattctatggttt

SEQ ID NO: 176843 - DNA, 20 bp, Artificial Sequence
  Description of Artificial Sequence: Synthetic oligonucleotide
  Target: LAMA2; (+) strand; PAM type: NRG; PAM sequence: CAG
gacatttgtttttctgtcca

SEQ ID NO: 176844 - DNA, 20 bp, Artificial Sequence
  Description of Artificial Sequence: Synthetic oligonucleotide
  Target: LAMA2; (+) strand; PAM type: NRG; PAM sequence: AGG
acatttgtttttctgtccac

SEQ ID NO: 176845 - DNA, 20 bp, Artificial Sequence
  Description of Artificial Sequence: Synthetic oligonucleotide
  Target: LAMA2; (+) strand; PAM type: NRG; PAM sequence: CAG
gtttttctgtccacaggcaa

SEQ ID NO: 176846 - DNA, 20 bp, Artificial Sequence
  Description of Artificial Sequence: Synthetic oligonucleotide
  Target: LAMA2; (+) strand; PAM type: NRG; PAM sequence: AGG
tttttctgtccacaggcaac

SEQ ID NO: 176847 - DNA, 20 bp, Artificial Sequence
  Description of Artificial Sequence: Synthetic oligonucleotide
  Target: LAMA2; (+) strand; PAM type: NRG; PAM sequence: CGG
gtccacaggcaacaggtcct

SEQ ID NO: 176848 - DNA, 20 bp, Artificial Sequence
  Description of Artificial Sequence: Synthetic oligonucleotide
  Target: LAMA2; (+) strand; PAM type: NRG; PAM sequence: GGG
tccacaggcaacaggtcctc

SEQ ID NO: 176849 - DNA, 20 bp, Artificial Sequence
  Description of Artificial Sequence: Synthetic oligonucleotide
  Target: LAMA2; (+) strand; PAM type: NRG; PAM sequence: GGG
ccacaggcaacaggtcctcg

SEQ ID NO: 176850 - DNA, 20 bp, Artificial Sequence
  Description of Artificial Sequence: Synthetic oligonucleotide
  Target: LAMA2; (+) strand; PAM type: NRG; PAM sequence: AAG
caggtcctcggggtttatta

SEQ ID NO: 176851 - DNA, 20 bp, Artificial Sequence
  Description of Artificial Sequence: Synthetic oligonucleotide
  Target: LAMA2; (+) strand; PAM type: NRG; PAM sequence: AGG
aggtcctcggggtttattaa

SEQ ID NO: 176852 - DNA, 20 bp, Artificial Sequence
  Description of Artificial Sequence: Synthetic oligonucleotide
  Target: LAMA2; (+) strand; PAM type: NRG; PAM sequence: AAG
tcctcggggtttattaaagg

SEQ ID NO: 176853 - DNA, 20 bp, Artificial Sequence
  Description of Artificial Sequence: Synthetic oligonucleotide
  Target: LAMA2; (+) strand; PAM type: NRG; PAM sequence: AAG
tttattaaaggaagatgcca

SEQ ID NO: 176854 - DNA, 20 bp, Artificial Sequence
  Description of Artificial Sequence: Synthetic oligonucleotide
  Target: LAMA2; (+) strand; PAM type: NRG; PAM sequence: AGG
ttattaaaggaagatgccaa

SEQ ID NO: 176855 - DNA, 20 bp, Artificial Sequence
  Description of Artificial Sequence: Synthetic oligonucleotide
  Target: LAMA2; (+) strand; PAM type: NRG; PAM sequence: CAG
aagatgccaaaggctgtctt

SEQ ID NO: 176856 - DNA, 20 bp, Artificial Sequence
  Description of Artificial Sequence: Synthetic oligonucleotide
  Target: LAMA2; (+) strand; PAM type: NRG; PAM sequence: AAG
gccaaaggctgtcttcagaa

SEQ ID NO: 176857 - DNA, 20 bp, Artificial Sequence
  Description of Artificial Sequence: Synthetic oligonucleotide
  Target: LAMA2; (+) strand; PAM type: NRG; PAM sequence: CAG
ggctgtcttcagaaaagctt

SEQ ID NO: 176858 - DNA, 20 bp, Artificial Sequence
  Description of Artificial Sequence: Synthetic oligonucleotide
  Target: LAMA2; (+) strand; PAM type: NRG; PAM sequence: AGG
gctgtcttcagaaaagcttc

SEQ ID NO: 176859 - DNA, 20 bp, Artificial Sequence
  Description of Artificial Sequence: Synthetic oligonucleotide
  Target: LAMA2; (+) strand; PAM type: NRG; PAM sequence: AAG
aagcttcaggattcttaacg

SEQ ID NO: 176860 - DNA, 20 bp, Artificial Sequence
  Description of Artificial Sequence: Synthetic oligonucleotide
  Target: LAMA2; (+) strand; PAM type: NRG; PAM sequence: AAG
tcaggattcttaacgaagcc

SEQ ID NO: 176861 - DNA, 20 bp, Artificial Sequence
  Description of Artificial Sequence: Synthetic oligonucleotide
  Target: LAMA2; (+) strand; PAM type: NRG; PAM sequence: AAG
ggattcttaacgaagccaag

SEQ ID NO: 176862 - DNA, 20 bp, Artificial Sequence
  Description of Artificial Sequence: Synthetic oligonucleotide
  Target: LAMA2; (+) strand; PAM type: NRG; PAM sequence: TAG
tcttaacgaagccaagaagt

SEQ ID NO: 176863 - DNA, 20 bp, Artificial Sequence
  Description of Artificial Sequence: Synthetic oligonucleotide
  Target: LAMA2; (+) strand; PAM type: NRG; PAM sequence: AAG
gaagttagcaaatgatgtaa

SEQ ID NO: 176864 - DNA, 20 bp, Artificial Sequence
  Description of Artificial Sequence: Synthetic oligonucleotide
  Target: LAMA2; (+) strand; PAM type: NRG; PAM sequence: AGG
aagttagcaaatgatgtaaa

SEQ ID NO: 176865 - DNA, 20 bp, Artificial Sequence
  Description of Artificial Sequence: Synthetic oligonucleotide
  Target: LAMA2; (+) strand; PAM type: NRG; PAM sequence: CAG
tagcaaatgatgtaaaaggt

SEQ ID NO: 176866 - DNA, 20 bp, Artificial Sequence
  Description of Artificial Sequence: Synthetic oligonucleotide
  Target: LAMA2; (+) strand; PAM type: NRG; PAM sequence: TGG
aatgatgtaaaaggtcagtg

SEQ ID NO: 176867 - DNA, 20 bp, Artificial Sequence
  Description of Artificial Sequence: Synthetic oligonucleotide
  Target: LAMA2; (+) strand; PAM type: NRG; PAM sequence: TAG
gtaaaaggtcagtgtggcca

SEQ ID NO: 176868 - DNA, 20 bp, Artificial Sequence
  Description of Artificial Sequence: Synthetic oligonucleotide
  Target: LAMA2; (+) strand; PAM type: NRG; PAM sequence: CAG
ccatagtttttattatattc

SEQ ID NO: 176869 - DNA, 20 bp, Artificial Sequence
  Description of Artificial Sequence: Synthetic oligonucleotide
  Target: LAMA2; (+) strand; PAM type: NRG; PAM sequence: CGG
tttattatattccagttaat

SEQ ID NO: 176870 - DNA, 20 bp, Artificial Sequence
  Description of Artificial Sequence: Synthetic oligonucleotide
  Target: LAMA2; (+) strand; PAM type: NRG; PAM sequence: GGG
ttattatattccagttaatc

SEQ ID NO: 176871 - DNA, 20 bp, Artificial Sequence
  Description of Artificial Sequence: Synthetic oligonucleotide
  Target: LAMA2; (+) strand; PAM type: NRG; PAM sequence: AAG
ttaatcgggttgttactgat

SEQ ID NO: 176872 - DNA, 20 bp, Artificial Sequence
  Description of Artificial Sequence: Synthetic oligonucleotide
  Target: LAMA2; (+) strand; PAM type: NRG; PAM sequence: TGG
aagatattctatcacactat

SEQ ID NO: 176873 - DNA, 20 bp, Artificial Sequence
  Description of Artificial Sequence: Synthetic oligonucleotide
  Target: LAMA2; (+) strand; PAM type: NRG; PAM sequence: GAG
gatattctatcacactattg

SEQ ID NO: 176874 - DNA, 20 bp, Artificial Sequence
  Description of Artificial Sequence: Synthetic oligonucleotide
  Target: LAMA2; (+) strand; PAM type: NRG; PAM sequence: TAG
attggagaatgtaatttctt

SEQ ID NO: 176875 - DNA, 20 bp, Artificial Sequence
  Description of Artificial Sequence: Synthetic oligonucleotide
  Target: LAMA2; (+) strand; PAM type: NRG; PAM sequence: AAG
ttctataatctatttaatgc

SEQ ID NO: 176876 - DNA, 20 bp, Artificial Sequence
  Description of Artificial Sequence: Synthetic oligonucleotide
  Target: LAMA2; (+) strand; PAM type: NRG; PAM sequence: TAG
atgcaagtaaactttctcac

SEQ ID NO: 176877 - DNA, 20 bp, Artificial Sequence
  Description of Artificial Sequence: Synthetic oligonucleotide
  Target: LAMA2; (+) strand; PAM type: NRG; PAM sequence: AAG
ttgtctacctatctcacttc

SEQ ID NO: 176878 - DNA, 20 bp, Artificial Sequence
  Description of Artificial Sequence: Synthetic oligonucleotide
  Target: LAMA2; (+) strand; PAM type: NRG; PAM sequence: TAG
tctacctatctcacttcaag

SEQ ID NO: 176879 - DNA, 20 bp, Artificial Sequence
  Description of Artificial Sequence: Synthetic oligonucleotide
  Target: LAMA2; (+) strand; PAM type: NRG; PAM sequence: AGG
ctacctatctcacttcaagt

SEQ ID NO: 176880 - DNA, 20 bp, Artificial Sequence
  Description of Artificial Sequence: Synthetic oligonucleotide
  Target: LAMA2; (+) strand; PAM type: NRG; PAM sequence: GGG
tacctatctcacttcaagta

SEQ ID NO: 176881 - DNA, 20 bp, Artificial Sequence
  Description of Artificial Sequence: Synthetic oligonucleotide
  Target: LAMA2; (+) strand; PAM type: NRG; PAM sequence: AAG
ggtaatatctcataatttgt

SEQ ID NO: 176882 - DNA, 20 bp, Artificial Sequence
  Description of Artificial Sequence: Synthetic oligonucleotide
  Target: LAMA2; (+) strand; PAM type: NRG; PAM sequence: TAG
atttgtaagtcttatttcta

SEQ ID NO: 176883 - DNA, 20 bp, Artificial Sequence
  Description of Artificial Sequence: Synthetic oligonucleotide
  Target: LAMA2; (+) strand; PAM type: NRG; PAM sequence: TAG
cttcacctatatctaatgta

SEQ ID NO: 176884 - DNA, 20 bp, Artificial Sequence
  Description of Artificial Sequence: Synthetic oligonucleotide
  Target: LAMA2; (+) strand; PAM type: NRG; PAM sequence: TAG
atctaatgtatagtaacttt

SEQ ID NO: 176885 - DNA, 20 bp, Artificial Sequence
  Description of Artificial Sequence: Synthetic oligonucleotide
  Target: LAMA2; (+) strand; PAM type: NRG; PAM sequence: AAG
atagtaacttttagtgtaat

SEQ ID NO: 176886 - DNA, 20 bp, Artificial Sequence
  Description of Artificial Sequence: Synthetic oligonucleotide
  Target: LAMA2; (+) strand; PAM type: NRG; PAM sequence: AAG
ttttagtgtaataagttttt

SEQ ID NO: 176887 - DNA, 20 bp, Artificial Sequence
  Description of Artificial Sequence: Synthetic oligonucleotide
  Target: LAMA2; (+) strand; PAM type: NRG; PAM sequence: GAG
ttagtgtaataagtttttaa

SEQ ID NO: 176888 - DNA, 20 bp, Artificial Sequence
  Description of Artificial Sequence: Synthetic oligonucleotide
  Target: LAMA2; (+) strand; PAM type: NRG; PAM sequence: CAG
gtttttaagagtatcaaacc

SEQ ID NO: 176889 - DNA, 20 bp, Artificial Sequence
  Description of Artificial Sequence: Synthetic oligonucleotide
  Target: LAMA2; (+) strand; PAM type: NRG; PAM sequence: AGG
tttttaagagtatcaaaccc

SEQ ID NO: 176890 - DNA, 20 bp, Artificial Sequence
  Description of Artificial Sequence: Synthetic oligonucleotide
  Target: LAMA2; (+) strand; PAM type: NRG; PAM sequence: CAG
taagagtatcaaacccaggc

SEQ ID NO: 176891 - DNA, 20 bp, Artificial Sequence
  Description of Artificial Sequence: Synthetic oligonucleotide
  Target: LAMA2; (+) strand; PAM type: NRG; PAM sequence: TAG
tatcaaacccaggccagcca

SEQ ID NO: 176892 - DNA, 20 bp, Artificial Sequence
  Description of Artificial Sequence: Synthetic oligonucleotide
  Target: LAMA2; (+) strand; PAM type: NRG; PAM sequence: TGG
caaacccaggccagccatag

SEQ ID NO: 176893 - DNA, 20 bp, Artificial Sequence
  Description of Artificial Sequence: Synthetic oligonucleotide
  Target: LAMA2; (+) strand; PAM type: NRG; PAM sequence: TAG
gtggctcacacctgtgattc

SEQ ID NO: 176894 - DNA, 20 bp, Artificial Sequence
  Description of Artificial Sequence: Synthetic oligonucleotide
  Target: LAMA2; (+) strand; PAM type: NRG; PAM sequence: TAG
acacctgtgattctagtgct

SEQ ID NO: 176895 - DNA, 20 bp, Artificial Sequence
  Description of Artificial Sequence: Synthetic oligonucleotide
  Target: LAMA2; (+) strand; PAM type: NRG; PAM sequence: AGG
cacctgtgattctagtgctt

SEQ ID NO: 176896 - DNA, 20 bp, Artificial Sequence
  Description of Artificial Sequence: Synthetic oligonucleotide
  Target: LAMA2; (+) strand; PAM type: NRG; PAM sequence: GGG
acctgtgattctagtgctta

SEQ ID NO: 176897 - DNA, 20 bp, Artificial Sequence
  Description of Artificial Sequence: Synthetic oligonucleotide
  Target: LAMA2; (+) strand; PAM type: NRG; PAM sequence: GAG
ctgtgattctagtgcttagg

SEQ ID NO: 176898 - DNA, 20 bp, Artificial Sequence
  Description of Artificial Sequence: Synthetic oligonucleotide
  Target: LAMA2; (+) strand; PAM type: NRG; PAM sequence: AGG
tgtgattctagtgcttaggg

SEQ ID NO: 176899 - DNA, 20 bp, Artificial Sequence
  Description of Artificial Sequence: Synthetic oligonucleotide
  Target: LAMA2; (+) strand; PAM type: NRG; PAM sequence: GAG
ttctagtgcttagggaggcc

SEQ ID NO: 176900 - DNA, 20 bp, Artificial Sequence
  Description of Artificial Sequence: Synthetic oligonucleotide
  Target: LAMA2; (+) strand; PAM type: NRG; PAM sequence: AGG
tctagtgcttagggaggccg

SEQ ID NO: 176901 - DNA, 20 bp, Artificial Sequence
  Description of Artificial Sequence: Synthetic oligonucleotide
  Target: LAMA2; (+) strand; PAM type: NRG; PAM sequence: CAG
agtgcttagggaggccgagg

SEQ ID NO: 176902 - DNA, 20 bp, Artificial Sequence
  Description of Artificial Sequence: Synthetic oligonucleotide
  Target: LAMA2; (+) strand; PAM type: NRG; PAM sequence: AGG
gtgcttagggaggccgaggc

SEQ ID NO: 176903 - DNA, 20 bp, Artificial Sequence
  Description of Artificial Sequence: Synthetic oligonucleotide
  Target: LAMA2; (+) strand; PAM type: NRG; PAM sequence: GAG
gcttagggaggccgaggcag

SEQ ID NO: 176904 - DNA, 20 bp, Artificial Sequence
  Description of Artificial Sequence: Synthetic oligonucleotide
  Target: LAMA2; (+) strand; PAM type: NRG; PAM sequence: AGG
cttagggaggccgaggcagg

SEQ ID NO: 176905 - DNA, 20 bp, Artificial Sequence
  Description of Artificial Sequence: Synthetic oligonucleotide
  Target: LAMA2; (+) strand; PAM type: NRG; PAM sequence: TGG
gccgaggcaggaggatccct

SEQ ID NO: 176906 - DNA, 20 bp, Artificial Sequence
  Description of Artificial Sequence: Synthetic oligonucleotide
  Target: LAMA2; (+) strand; PAM type: NRG; PAM sequence: AAG
caggaggatcccttggtgcc

SEQ ID NO: 176907 - DNA, 20 bp, Artificial Sequence
  Description of Artificial Sequence: Synthetic oligonucleotide
  Target: LAMA2; (+) strand; PAM type: NRG; PAM sequence: GAG
tcccttggtgccaagaattt

SEQ ID NO: 176908 - DNA, 20 bp, Artificial Sequence
  Description of Artificial Sequence: Synthetic oligonucleotide
  Target: LAMA2; (+) strand; PAM type: NRG; PAM sequence: CAG
tggtgccaagaatttgagac

SEQ ID NO: 176909 - DNA, 20 bp, Artificial Sequence
  Description of Artificial Sequence: Synthetic oligonucleotide
  Target: LAMA2; (+) strand; PAM type: NRG; PAM sequence: CGG
gccaagaatttgagaccagc

SEQ ID NO: 176910 - DNA, 20 bp, Artificial Sequence
  Description of Artificial Sequence: Synthetic oligonucleotide
  Target: LAMA2; (+) strand; PAM type: NRG; PAM sequence: GGG
ccaagaatttgagaccagcc

SEQ ID NO: 176911 - DNA, 20 bp, Artificial Sequence
  Description of Artificial Sequence: Synthetic oligonucleotide
  Target: LAMA2; (+) strand; PAM type: NRG; PAM sequence: GGG
caagaatttgagaccagccg

SEQ ID NO: 176912 - DNA, 20 bp, Artificial Sequence
  Description of Artificial Sequence: Synthetic oligonucleotide
  Target: LAMA2; (+) strand; PAM type: NRG; PAM sequence: TAG
tgagaccagccggggaaaca

SEQ ID NO: 176913 - DNA, 20 bp, Artificial Sequence
  Description of Artificial Sequence: Synthetic oligonucleotide
  Target: LAMA2; (+) strand; PAM type: NRG; PAM sequence: AAG
accagccggggaaacatagc

SEQ ID NO: 176914 - DNA, 20 bp, Artificial Sequence
  Description of Artificial Sequence: Synthetic oligonucleotide
  Target: LAMA2; (+) strand; PAM type: NRG; PAM sequence: TAG
caaaacattttttaaaaatt

SEQ ID NO: 176915 - DNA, 20 bp, Artificial Sequence
  Description of Artificial Sequence: Synthetic oligonucleotide
  Target: LAMA2; (+) strand; PAM type: NRG; PAM sequence: CAG
acattttttaaaaatttagt

SEQ ID NO: 176916 - DNA, 20 bp, Artificial Sequence
  Description of Artificial Sequence: Synthetic oligonucleotide
  Target: LAMA2; (+) strand; PAM type: NRG; PAM sequence: AGG
cattttttaaaaatttagtc

SEQ ID NO: 176917 - DNA, 20 bp, Artificial Sequence
  Description of Artificial Sequence: Synthetic oligonucleotide
  Target: LAMA2; (+) strand; PAM type: NRG; PAM sequence: TAG
tttaaaaatttagtcaggtg

SEQ ID NO: 176918 - DNA, 20 bp, Artificial Sequence
  Description of Artificial Sequence: Synthetic oligonucleotide
  Target: LAMA2; (+) strand; PAM type: NRG; PAM sequence: CAG
aaaaatttagtcaggtgtag

SEQ ID NO: 176919 - DNA, 20 bp, Artificial Sequence
  Description of Artificial Sequence: Synthetic oligonucleotide
  Target: LAMA2; (+) strand; PAM type: NRG; PAM sequence: GAG
ttagtcaggtgtagcagcgt

SEQ ID NO: 176920 - DNA, 20 bp, Artificial Sequence
  Description of Artificial Sequence: Synthetic oligonucleotide
  Target: LAMA2; (+) strand; PAM type: NRG; PAM sequence: TAG
ggtgtagcagcgtgagcaca

SEQ ID NO: 176921 - DNA, 20 bp, Artificial Sequence
  Description of Artificial Sequence: Synthetic oligonucleotide
  Target: LAMA2; (+) strand; PAM type: NRG; PAM sequence: AGG
gtgtagcagcgtgagcacat

SEQ ID NO: 176922 - DNA, 20 bp, Artificial Sequence
  Description of Artificial Sequence: Synthetic oligonucleotide
  Target: LAMA2; (+) strand; PAM type: NRG; PAM sequence: TAG
gcagcgtgagcacataggca

SEQ ID NO: 176923 - DNA, 20 bp, Artificial Sequence
  Description of Artificial Sequence: Synthetic oligonucleotide
  Target: LAMA2; (+) strand; PAM type: NRG; PAM sequence: TGG
agcacataggcatagctact

SEQ ID NO: 176924 - DNA, 20 bp, Artificial Sequence
  Description of Artificial Sequence: Synthetic oligonucleotide
  Target: LAMA2; (+) strand; PAM type: NRG; PAM sequence: AAG
acataggcatagctacttgg

SEQ ID NO: 176925 - DNA, 20 bp, Artificial Sequence
  Description of Artificial Sequence: Synthetic oligonucleotide
  Target: LAMA2; (+) strand; PAM type: NRG; PAM sequence: AGG
cataggcatagctacttgga

SEQ ID NO: 176926 - DNA, 20 bp, Artificial Sequence
  Description of Artificial Sequence: Synthetic oligonucleotide
  Target: LAMA2; (+) strand; PAM type: NRG; PAM sequence: GAG
gcatagctacttggaaggct

SEQ ID NO: 176927 - DNA, 20 bp, Artificial Sequence
  Description of Artificial Sequence: Synthetic oligonucleotide
  Target: LAMA2; (+) strand; PAM type: NRG; PAM sequence: CAG
agctacttggaaggctgagc

SEQ ID NO: 176928 - DNA, 20 bp, Artificial Sequence
  Description of Artificial Sequence: Synthetic oligonucleotide
  Target: LAMA2; (+) strand; PAM type: NRG; PAM sequence: AGG
gctacttggaaggctgagcc

SEQ ID NO: 176929 - DNA, 20 bp, Artificial Sequence
  Description of Artificial Sequence: Synthetic oligonucleotide
  Target: LAMA2; (+) strand; PAM type: NRG; PAM sequence: GAG
tacttggaaggctgagccag

SEQ ID NO: 176930 - DNA, 20 bp, Artificial Sequence
  Description of Artificial Sequence: Synthetic oligonucleotide
  Target: LAMA2; (+) strand; PAM type: NRG; PAM sequence: AGG
acttggaaggctgagccagg

SEQ ID NO: 176931 - DNA, 20 bp, Artificial Sequence
  Description of Artificial Sequence: Synthetic oligonucleotide
  Target: LAMA2; (+) strand; PAM type: NRG; PAM sequence: TAG
ctgagccaggaggatcgctt

SEQ ID NO: 176932 - DNA, 20 bp, Artificial Sequence
  Description of Artificial Sequence: Synthetic oligonucleotide
  Target: LAMA2; (+) strand; PAM type: NRG; PAM sequence: CAG
ccaggaggatcgctttagcc

SEQ ID NO: 176933 - DNA, 20 bp, Artificial Sequence
  Description of Artificial Sequence: Synthetic oligonucleotide
  Target: LAMA2; (+) strand; PAM type: NRG; PAM sequence: AGG
caggaggatcgctttagccc

SEQ ID NO: 176934 - DNA, 20 bp, Artificial Sequence
  Description of Artificial Sequence: Synthetic oligonucleotide
  Target: LAMA2; (+) strand; PAM type: NRG; PAM sequence: GGG
aggaggatcgctttagccca

SEQ ID NO: 176935 - DNA, 20 bp, Artificial Sequence
  Description of Artificial Sequence: Synthetic oligonucleotide
  Target: LAMA2; (+) strand; PAM type: NRG; PAM sequence: GGG
ggaggatcgctttagcccag

SEQ ID NO: 176936 - DNA, 20 bp, Artificial Sequence
  Description of Artificial Sequence: Synthetic oligonucleotide
  Target: LAMA2; (+) strand; PAM type: NRG; PAM sequence: AAG
cgctttagcccaggggcgtg

SEQ ID NO: 176937 - DNA, 20 bp, Artificial Sequence
  Description of Artificial Sequence: Synthetic oligonucleotide
  Target: LAMA2; (+) strand; PAM type: NRG; PAM sequence: GAG
caggggcgtgaagttaccgt

SEQ ID NO: 176938 - DNA, 20 bp, Artificial Sequence
  Description of Artificial Sequence: Synthetic oligonucleotide
  Target: LAMA2; (+) strand; PAM type: NRG; PAM sequence: CAG
gtgatcacactactgtacac

SEQ ID NO: 176939 - DNA, 20 bp, Artificial Sequence
  Description of Artificial Sequence: Synthetic oligonucleotide
  Target: LAMA2; (+) strand; PAM type: NRG; PAM sequence: TGG
cacactactgtacaccagcc

SEQ ID NO: 176940 - DNA, 20 bp, Artificial Sequence
  Description of Artificial Sequence: Synthetic oligonucleotide
  Target: LAMA2; (+) strand; PAM type: NRG; PAM sequence: GGG
acactactgtacaccagcct

SEQ ID NO: 176941 - DNA, 20 bp, Artificial Sequence
  Description of Artificial Sequence: Synthetic oligonucleotide
  Target: LAMA2; (+) strand; PAM type: NRG; PAM sequence: CAG
ctgtacaccagcctgggtaa

SEQ ID NO: 176942 - DNA, 20 bp, Artificial Sequence
  Description of Artificial Sequence: Synthetic oligonucleotide
  Target: LAMA2; (+) strand; PAM type: NRG; PAM sequence: GAG
gtacaccagcctgggtaaca

SEQ ID NO: 176943 - DNA, 20 bp, Artificial Sequence
  Description of Artificial Sequence: Synthetic oligonucleotide
  Target: LAMA2; (+) strand; PAM type: NRG; PAM sequence: AAG
accagcctgggtaacagagt

SEQ ID NO: 176944 - DNA, 20 bp, Artificial Sequence
  Description of Artificial Sequence: Synthetic oligonucleotide
  Target: LAMA2; (+) strand; PAM type: NRG; PAM sequence: AAG
agtaagatcctgtctctaaa

SEQ ID NO: 176945 - DNA, 20 bp, Artificial Sequence
  Description of Artificial Sequence: Synthetic oligonucleotide
  Target: LAMA2; (+) strand; PAM type: NRG; PAM sequence: GAG
aaatacatttttctttttct

SEQ ID NO: 176946 - DNA, 20 bp, Artificial Sequence
  Description of Artificial Sequence: Synthetic oligonucleotide
  Target: LAMA2; (+) strand; PAM type: NRG; PAM sequence: AAG
atttttctttttctgagatg

SEQ ID NO: 176947 - DNA, 20 bp, Artificial Sequence
  Description of Artificial Sequence: Synthetic oligonucleotide
  Target: LAMA2; (+) strand; PAM type: NRG; PAM sequence: CAG
tgaagtctcgctctgtcaac

SEQ ID NO: 176948 - DNA, 20 bp, Artificial Sequence
  Description of Artificial Sequence: Synthetic oligonucleotide
  Target: LAMA2; (+) strand; PAM type: NRG; PAM sequence: AGG
gaagtctcgctctgtcaacc

SEQ ID NO: 176949 - DNA, 20 bp, Artificial Sequence
  Description of Artificial Sequence: Synthetic oligonucleotide
  Target: LAMA2; (+) strand; PAM type: NRG; PAM sequence: TGG
tctcgctctgtcaaccaggc

SEQ ID NO: 176950 - DNA, 20 bp, Artificial Sequence
  Description of Artificial Sequence: Synthetic oligonucleotide
  Target: LAMA2; (+) strand; PAM type: NRG; PAM sequence: GAG
tcgctctgtcaaccaggctg

SEQ ID NO: 176951 - DNA, 20 bp, Artificial Sequence
  Description of Artificial Sequence: Synthetic oligonucleotide
  Target: LAMA2; (+) strand; PAM type: NRG; PAM sequence: CAG
ctgtcaaccaggctggagtg

SEQ ID NO: 176952 - DNA, 20 bp, Artificial Sequence
  Description of Artificial Sequence: Synthetic oligonucleotide
  Target: LAMA2; (+) strand; PAM type: NRG; PAM sequence: TGG
tcaaccaggctggagtgcag

SEQ ID NO: 176953 - DNA, 20 bp, Artificial Sequence
  Description of Artificial Sequence: Synthetic oligonucleotide
  Target: LAMA2; (+) strand; PAM type: NRG; PAM sequence: TGG
ggagtgcagtggtgcgatct

SEQ ID NO: 176954 - DNA, 20 bp, Artificial Sequence
  Description of Artificial Sequence: Synthetic oligonucleotide
  Target: LAMA2; (+) strand; PAM type: NRG; PAM sequence: CAG
ggtgcgatcttggctcactg

SEQ ID NO: 176955 - DNA, 20 bp, Artificial Sequence
  Description of Artificial Sequence: Synthetic oligonucleotide
  Target: LAMA2; (+) strand; PAM type: NRG; PAM sequence: CAG
tcactgcagcctctgtctcc

SEQ ID NO: 176956 - DNA, 20 bp, Artificial Sequence
  Description of Artificial Sequence: Synthetic oligonucleotide
  Target: LAMA2; (+) strand; PAM type: NRG; PAM sequence: AGG
cactgcagcctctgtctccc

SEQ ID NO: 176957 - DNA, 20 bp, Artificial Sequence
  Description of Artificial Sequence: Synthetic oligonucleotide
  Target: LAMA2; (+) strand; PAM type: NRG; PAM sequence: AAG
agcctctgtctcccaggttc

SEQ ID NO: 176958 - DNA, 20 bp, Artificial Sequence
  Description of Artificial Sequence: Synthetic oligonucleotide
  Target: LAMA2; (+) strand; PAM type: NRG; PAM sequence: TGG
tgattgtcctgcctcatatc

SEQ ID NO: 176959 - DNA, 20 bp, Artificial Sequence
  Description of Artificial Sequence: Synthetic oligonucleotide
  Target: LAMA2; (+) strand; PAM type: NRG; PAM sequence: GGG
gattgtcctgcctcatatct

SEQ ID NO: 176960 - DNA, 20 bp, Artificial Sequence
  Description of Artificial Sequence: Synthetic oligonucleotide
  Target: LAMA2; (+) strand; PAM type: NRG; PAM sequence: CAG
ctgcctcatatctgggatta

SEQ ID NO: 176961 - DNA, 20 bp, Artificial Sequence
  Description of Artificial Sequence: Synthetic oligonucleotide
  Target: LAMA2; (+) strand; PAM type: NRG; PAM sequence: AGG
tgcctcatatctgggattac

SEQ ID NO: 176962 - DNA, 20 bp, Artificial Sequence
  Description of Artificial Sequence: Synthetic oligonucleotide
  Target: LAMA2; (+) strand; PAM type: NRG; PAM sequence: TGG
caggtgcatgccaccacacc

SEQ ID NO: 176963 - DNA, 20 bp, Artificial Sequence
  Description of Artificial Sequence: Synthetic oligonucleotide
  Target: LAMA2; (+) strand; PAM type: NRG; PAM sequence: GAG
ctggctaatctttgcatttt

SEQ ID NO: 176964 - DNA, 20 bp, Artificial Sequence
  Description of Artificial Sequence: Synthetic oligonucleotide
  Target: LAMA2; (+) strand; PAM type: NRG; PAM sequence: TAG
gctaatctttgcattttgag

SEQ ID NO: 176965 - DNA, 20 bp, Artificial Sequence
  Description of Artificial Sequence: Synthetic oligonucleotide
  Target: LAMA2; (+) strand; PAM type: NRG; PAM sequence: GAG
taatctttgcattttgagta

SEQ ID NO: 176966 - DNA, 20 bp, Artificial Sequence
  Description of Artificial Sequence: Synthetic oligonucleotide
  Target: LAMA2; (+) strand; PAM type: NRG; PAM sequence: CAG
ctttgcattttgagtagaga

SEQ ID NO: 176967 - DNA, 20 bp, Artificial Sequence
  Description of Artificial Sequence: Synthetic oligonucleotide
  Target: LAMA2; (+) strand; PAM type: NRG; PAM sequence: AGG
tttgcattttgagtagagac

SEQ ID NO: 176968 - DNA, 20 bp, Artificial Sequence
  Description of Artificial Sequence: Synthetic oligonucleotide
  Target: LAMA2; (+) strand; PAM type: NRG; PAM sequence: GGG
ttgcattttgagtagagaca

SEQ ID NO: 176969 - DNA, 20 bp, Artificial Sequence
  Description of Artificial Sequence: Synthetic oligonucleotide
  Target: LAMA2; (+) strand; PAM type: NRG; PAM sequence: CAG
cagggtttcaccatgttgac

SEQ ID NO: 176970 - DNA, 20 bp, Artificial Sequence
  Description of Artificial Sequence: Synthetic oligonucleotide
  Target: LAMA2; (+) strand; PAM type: NRG; PAM sequence: AGG
agggtttcaccatgttgacc

SEQ ID NO: 176971 - DNA, 20 bp, Artificial Sequence
  Description of Artificial Sequence: Synthetic oligonucleotide
  Target: LAMA2; (+) strand; PAM type: NRG; PAM sequence: TGG
tttcaccatgttgaccaggc

SEQ ID NO: 176972 - DNA, 20 bp, Artificial Sequence
  Description of Artificial Sequence: Synthetic oligonucleotide
  Target: LAMA2; (+) strand; PAM type: NRG; PAM sequence: AAG
ggtcttgaactcctgacctc

SEQ ID NO: 176973 - DNA, 20 bp, Artificial Sequence
  Description of Artificial Sequence: Synthetic oligonucleotide
  Target: LAMA2; (+) strand; PAM type: NRG; PAM sequence: CGG
ctcaagtgatcctcccgcct

SEQ ID NO: 176974 - DNA, 20 bp, Artificial Sequence
  Description of Artificial Sequence: Synthetic oligonucleotide
  Target: LAMA2; (+) strand; PAM type: NRG; PAM sequence: AAG
cctcccgcctcggcctccca

SEQ ID NO: 176975 - DNA, 20 bp, Artificial Sequence
  Description of Artificial Sequence: Synthetic oligonucleotide
  Target: LAMA2; (+) strand; PAM type: NRG; PAM sequence: GAG
cctcggcctcccaaagtgct

SEQ ID NO: 176976 - DNA, 20 bp, Artificial Sequence
  Description of Artificial Sequence: Synthetic oligonucleotide
  Target: LAMA2; (+) strand; PAM type: NRG; PAM sequence: CAG
ctcccaaagtgctgagatta

SEQ ID NO: 176977 - DNA, 20 bp, Artificial Sequence
  Description of Artificial Sequence: Synthetic oligonucleotide
  Target: LAMA2; (+) strand; PAM type: NRG; PAM sequence: GAG
agtgctgagattacagatgt

SEQ ID NO: 176978 - DNA, 20 bp, Artificial Sequence
  Description of Artificial Sequence: Synthetic oligonucleotide
  Target: LAMA2; (+) strand; PAM type: NRG; PAM sequence: CGG
cagatgtgagccaccgtgcc

SEQ ID NO: 176979 - DNA, 20 bp, Artificial Sequence
  Description of Artificial Sequence: Synthetic oligonucleotide
  Target: LAMA2; (+) strand; PAM type: NRG; PAM sequence: CAG
cttgtattttatttctgatt

SEQ ID NO: 176980 - DNA, 20 bp, Artificial Sequence
  Description of Artificial Sequence: Synthetic oligonucleotide
  Target: LAMA2; (+) strand; PAM type: NRG; PAM sequence: AGG
ttgtattttatttctgattc

SEQ ID NO: 176981 - DNA, 20 bp, Artificial Sequence
  Description of Artificial Sequence: Synthetic oligonucleotide
  Target: LAMA2; (+) strand; PAM type: NRG; PAM sequence: TGG
aaatatctactgccatatta

SEQ ID NO: 176982 - DNA, 20 bp, Artificial Sequence
  Description of Artificial Sequence: Synthetic oligonucleotide
  Target: LAMA2; (+) strand; PAM type: NRG; PAM sequence: GGG
aatatctactgccatattat

SEQ ID NO: 176983 - DNA, 20 bp, Artificial Sequence
  Description of Artificial Sequence: Synthetic oligonucleotide
  Target: LAMA2; (+) strand; PAM type: NRG; PAM sequence: AAG
catattatgggttttatgtt

SEQ ID NO: 176984 - DNA, 20 bp, Artificial Sequence
  Description of Artificial Sequence: Synthetic oligonucleotide
  Target: LAMA2; (+) strand; PAM type: NRG; PAM sequence: TGG
taagaatatatcattaaaca

SEQ ID NO: 176985 - DNA, 20 bp, Artificial Sequence
  Description of Artificial Sequence: Synthetic oligonucleotide
  Target: LAMA2; (+) strand; PAM type: NRG; PAM sequence: GAG
aacatggctgctctctatat

SEQ ID NO: 176986 - DNA, 20 bp, Artificial Sequence
  Description of Artificial Sequence: Synthetic oligonucleotide
  Target: LAMA2; (+) strand; PAM type: NRG; PAM sequence: CAG
ttgccacctgtttctctctt

SEQ ID NO: 176987 - DNA, 20 bp, Artificial Sequence
  Description of Artificial Sequence: Synthetic oligonucleotide
  Target: LAMA2; (+) strand; PAM type: NRG; PAM sequence: AAG
ctgtctccctacccttacct

SEQ ID NO: 176988 - DNA, 20 bp, Artificial Sequence
  Description of Artificial Sequence: Synthetic oligonucleotide
  Target: LAMA2; (+) strand; PAM type: NRG; PAM sequence: AAG
cccaaacatgctactattcc

SEQ ID NO: 176989 - DNA, 20 bp, Artificial Sequence
  Description of Artificial Sequence: Synthetic oligonucleotide
  Target: LAMA2; (+) strand; PAM type: NRG; PAM sequence: CAG
attccaagccttcatgtttt

SEQ ID NO: 176990 - DNA, 20 bp, Artificial Sequence
  Description of Artificial Sequence: Synthetic oligonucleotide
  Target: LAMA2; (+) strand; PAM type: NRG; PAM sequence: TGG
tcagtattatttcttcccct

SEQ ID NO: 176991 - DNA, 20 bp, Artificial Sequence
  Description of Artificial Sequence: Synthetic oligonucleotide
  Target: LAMA2; (+) strand; PAM type: NRG; PAM sequence: CAG
tttgcctaactgctttcttc

SEQ ID NO: 176992 - DNA, 20 bp, Artificial Sequence
  Description of Artificial Sequence: Synthetic oligonucleotide
  Target: LAMA2; (+) strand; PAM type: NRG; PAM sequence: CAG
actgctttcttccagacctt

SEQ ID NO: 176993 - DNA, 20 bp, Artificial Sequence
  Description of Artificial Sequence: Synthetic oligonucleotide
  Target: LAMA2; (+) strand; PAM type: NRG; PAM sequence: AGG
ctgctttcttccagaccttc

SEQ ID NO: 176994 - DNA, 20 bp, Artificial Sequence
  Description of Artificial Sequence: Synthetic oligonucleotide
  Target: LAMA2; (+) strand; PAM type: NRG; PAM sequence: TAG
tcttccagaccttcaggatt

SEQ ID NO: 176995 - DNA, 20 bp, Artificial Sequence
  Description of Artificial Sequence: Synthetic oligonucleotide
  Target: LAMA2; (+) strand; PAM type: NRG; PAM sequence: CAG
agttcaaatgccatcatttc

SEQ ID NO: 176996 - DNA, 20 bp, Artificial Sequence
  Description of Artificial Sequence: Synthetic oligonucleotide
  Target: LAMA2; (+) strand; PAM type: NRG; PAM sequence: AGG
gttcaaatgccatcatttcc

SEQ ID NO: 176997 - DNA, 20 bp, Artificial Sequence
  Description of Artificial Sequence: Synthetic oligonucleotide
  Target: LAMA2; (+) strand; PAM type: NRG; PAM sequence: TGG
tgatttacatgccccctctc

SEQ ID NO: 176998 - DNA, 20 bp, Artificial Sequence
  Description of Artificial Sequence: Synthetic oligonucleotide
  Target: LAMA2; (+) strand; PAM type: NRG; PAM sequence: TAG
tacatgccccctctctggta

SEQ ID NO: 176999 - DNA, 20 bp, Artificial Sequence
  Description of Artificial Sequence: Synthetic oligonucleotide
  Target: LAMA2; (+) strand; PAM type: NRG; PAM sequence: TAG
tctctggtatagttttctca

SEQ ID NO: 177000 - DNA, 20 bp, Artificial Sequence
  Description of Artificial Sequence: Synthetic oligonucleotide
  Target: LAMA2; (+) strand; PAM type: NRG; PAM sequence: AGG
ctctggtatagttttctcat

SEQ ID NO: 177001 - DNA, 20 bp, Artificial Sequence
  Description of Artificial Sequence: Synthetic oligonucleotide
  Target: LAMA2; (+) strand; PAM type: NRG; PAM sequence: TGG
ttgtcaaaccaccacaatca

SEQ ID NO: 177002 - DNA, 20 bp, Artificial Sequence
  Description of Artificial Sequence: Synthetic oligonucleotide
  Target: LAMA2; (+) strand; PAM type: NRG; PAM sequence: CAG
acttttttattgatgcataa

SEQ ID NO: 177003 - DNA, 20 bp, Artificial Sequence
  Description of Artificial Sequence: Synthetic oligonucleotide
  Target: LAMA2; (+) strand; PAM type: NRG; PAM sequence: TGG
ataacagatgtataaatttt

SEQ ID NO: 177004 - DNA, 20 bp, Artificial Sequence
  Description of Artificial Sequence: Synthetic oligonucleotide
  Target: LAMA2; (+) strand; PAM type: NRG; PAM sequence: GAG
ttttggcattccatcttctt

SEQ ID NO: 177005 - DNA, 20 bp, Artificial Sequence
  Description of Artificial Sequence: Synthetic oligonucleotide
  Target: LAMA2; (+) strand; PAM type: NRG; PAM sequence: AGG
tttggcattccatcttcttg

SEQ ID NO: 177006 - DNA, 20 bp, Artificial Sequence
  Description of Artificial Sequence: Synthetic oligonucleotide
  Target: LAMA2; (+) strand; PAM type: NRG; PAM sequence: AAG
gcattccatcttcttgagga

SEQ ID NO: 177007 - DNA, 20 bp, Artificial Sequence
  Description of Artificial Sequence: Synthetic oligonucleotide
  Target: LAMA2; (+) strand; PAM type: NRG; PAM sequence: TGG
catcttcttgaggaaagaca

SEQ ID NO: 177008 - DNA, 20 bp, Artificial Sequence
  Description of Artificial Sequence: Synthetic oligonucleotide
  Target: LAMA2; (+) strand; PAM type: NRG; PAM sequence: GGG
atcttcttgaggaaagacat

SEQ ID NO: 177009 - DNA, 20 bp, Artificial Sequence
  Description of Artificial Sequence: Synthetic oligonucleotide
  Target: LAMA2; (+) strand; PAM type: NRG; PAM sequence: GGG
tcttcttgaggaaagacatg

SEQ ID NO: 177010 - DNA, 20 bp, Artificial Sequence
  Description of Artificial Sequence: Synthetic oligonucleotide
  Target: LAMA2; (+) strand; PAM type: NRG; PAM sequence: TAG
ttttgctaactgtgtatttc

SEQ ID NO: 177011 - DNA, 20 bp, Artificial Sequence
  Description of Artificial Sequence: Synthetic oligonucleotide
  Target: LAMA2; (+) strand; PAM type: NRG; PAM sequence: TAG
tgtatttctagtatgcataa

SEQ ID NO: 177012 - DNA, 20 bp, Artificial Sequence
  Description of Artificial Sequence: Synthetic oligonucleotide
  Target: LAMA2; (+) strand; PAM type: NRG; PAM sequence: TAG
ctagtatgcataatagtgac

SEQ ID NO: 177013 - DNA, 20 bp, Artificial Sequence
  Description of Artificial Sequence: Synthetic oligonucleotide
  Target: LAMA2; (+) strand; PAM type: NRG; PAM sequence: GAG
taatagtgactagctcaaat

SEQ ID NO: 177014 - DNA, 20 bp, Artificial Sequence
  Description of Artificial Sequence: Synthetic oligonucleotide
  Target: LAMA2; (+) strand; PAM type: NRG; PAM sequence: AGG
aatagtgactagctcaaatg

SEQ ID NO: 177015 - DNA, 20 bp, Artificial Sequence
  Description of Artificial Sequence: Synthetic oligonucleotide
  Target: LAMA2; (+) strand; PAM type: NRG; PAM sequence: TGG
tacttattttttacaataaa

SEQ ID NO: 177016 - DNA, 20 bp, Artificial Sequence
  Description of Artificial Sequence: Synthetic oligonucleotide
  Target: LAMA2; (+) strand; PAM type: NRG; PAM sequence: TGG
ttttttacaataaatggtgt

SEQ ID NO: 177017 - DNA, 20 bp, Artificial Sequence
  Description of Artificial Sequence: Synthetic oligonucleotide
  Target: LAMA2; (+) strand; PAM type: NRG; PAM sequence: TAG
ttggcttatcttacttatct

SEQ ID NO: 177018 - DNA, 20 bp, Artificial Sequence
  Description of Artificial Sequence: Synthetic oligonucleotide
  Target: LAMA2; (+) strand; PAM type: NRG; PAM sequence: AAG
cttatcttacttatcttaga

SEQ ID NO: 177019 - DNA, 20 bp, Artificial Sequence
  Description of Artificial Sequence: Synthetic oligonucleotide
  Target: LAMA2; (+) strand; PAM type: NRG; PAM sequence: GAG
tatcttacttatcttagaaa

SEQ ID NO: 177020 - DNA, 20 bp, Artificial Sequence
  Description of Artificial Sequence: Synthetic oligonucleotide
  Target: LAMA2; (+) strand; PAM type: NRG; PAM sequence: AAG
cttacttatcttagaaagag

SEQ ID NO: 177021 - DNA, 20 bp, Artificial Sequence
  Description of Artificial Sequence: Synthetic oligonucleotide
  Target: LAMA2; (+) strand; PAM type: NRG; PAM sequence: GAG
tacttatcttagaaagagaa

SEQ ID NO: 177022 - DNA, 20 bp, Artificial Sequence
  Description of Artificial Sequence: Synthetic oligonucleotide
  Target: LAMA2; (+) strand; PAM type: NRG; PAM sequence: AGG
acttatcttagaaagagaag

SEQ ID NO: 177023 - DNA, 20 bp, Artificial Sequence
  Description of Artificial Sequence: Synthetic oligonucleotide
  Target: LAMA2; (+) strand; PAM type: NRG; PAM sequence: TGG
gttttaaaatcatttatatt

SEQ ID NO: 177024 - DNA, 20 bp, Artificial Sequence
  Description of Artificial Sequence: Synthetic oligonucleotide
  Target: LAMA2; (+) strand; PAM type: NRG; PAM sequence: TGG
catttatatttggcatgttt

SEQ ID NO: 177025 - DNA, 20 bp, Artificial Sequence
  Description of Artificial Sequence: Synthetic oligonucleotide
  Target: LAMA2; (+) strand; PAM type: NRG; PAM sequence: CAG
tatttggcatgttttggtct

SEQ ID NO: 177026 - DNA, 20 bp, Artificial Sequence
  Description of Artificial Sequence: Synthetic oligonucleotide
  Target: LAMA2; (+) strand; PAM type: NRG; PAM sequence: TAG
ttggcatgttttggtctcag

SEQ ID NO: 177027 - DNA, 20 bp, Artificial Sequence
  Description of Artificial Sequence: Synthetic oligonucleotide
  Target: LAMA2; (+) strand; PAM type: NRG; PAM sequence: AAG
gcatgttttggtctcagtag

SEQ ID NO: 177028 - DNA, 20 bp, Artificial Sequence
  Description of Artificial Sequence: Synthetic oligonucleotide
  Target: LAMA2; (+) strand; PAM type: NRG; PAM sequence: AAG
agaagctgatatgaaattac

SEQ ID NO: 177029 - DNA, 20 bp, Artificial Sequence
  Description of Artificial Sequence: Synthetic oligonucleotide
  Target: LAMA2; (+) strand; PAM type: NRG; PAM sequence: AAG
acaagttctatctcgattat

SEQ ID NO: 177030 - DNA, 20 bp, Artificial Sequence
  Description of Artificial Sequence: Synthetic oligonucleotide
  Target: LAMA2; (+) strand; PAM type: NRG; PAM sequence: TAG
gattataagtaaaattttaa

SEQ ID NO: 177031 - DNA, 20 bp, Artificial Sequence
  Description of Artificial Sequence: Synthetic oligonucleotide
  Target: LAMA2; (+) strand; PAM type: NRG; PAM sequence: CAG
attttaatagtacaattctt

SEQ ID NO: 177032 - DNA, 20 bp, Artificial Sequence
  Description of Artificial Sequence: Synthetic oligonucleotide
  Target: LAMA2; (+) strand; PAM type: NRG; PAM sequence: AGG
ttttaatagtacaattcttc

SEQ ID NO: 177033 - DNA, 20 bp, Artificial Sequence
  Description of Artificial Sequence: Synthetic oligonucleotide
  Target: LAMA2; (+) strand; PAM type: NRG; PAM sequence: CAG
attcttcaggctgtgtatta

SEQ ID NO: 177034 - DNA, 20 bp, Artificial Sequence
  Description of Artificial Sequence: Synthetic oligonucleotide
  Target: LAMA2; (+) strand; PAM type: NRG; PAM sequence: AGG
ttcttcaggctgtgtattac

SEQ ID NO: 177035 - DNA, 20 bp, Artificial Sequence
  Description of Artificial Sequence: Synthetic oligonucleotide
  Target: LAMA2; (+) strand; PAM type: NRG; PAM sequence: CAG
cctacacacataattctgct

SEQ ID NO: 177036 - DNA, 20 bp, Artificial Sequence
  Description of Artificial Sequence: Synthetic oligonucleotide
  Target: LAMA2; (+) strand; PAM type: NRG; PAM sequence: CAG
acacacataattctgctcag

SEQ ID NO: 177037 - DNA, 20 bp, Artificial Sequence
  Description of Artificial Sequence: Synthetic oligonucleotide
  Target: LAMA2; (+) strand; PAM type: NRG; PAM sequence: AGG
cacacataattctgctcagc

SEQ ID NO: 177038 - DNA, 20 bp, Artificial Sequence
  Description of Artificial Sequence: Synthetic oligonucleotide
  Target: LAMA2; (+) strand; PAM type: NRG; PAM sequence: AAG
gtacctcttattacaatctg

SEQ ID NO: 177039 - DNA, 20 bp, Artificial Sequence
  Description of Artificial Sequence: Synthetic oligonucleotide
  Target: LAMA2; (+) strand; PAM type: NRG; PAM sequence: AAG
acaatctgaagaatgactgt

SEQ ID NO: 177040 - DNA, 20 bp, Artificial Sequence
  Description of Artificial Sequence: Synthetic oligonucleotide
  Target: LAMA2; (+) strand; PAM type: NRG; PAM sequence: AAG
atctgaagaatgactgtaag

SEQ ID NO: 177041 - DNA, 20 bp, Artificial Sequence
  Description of Artificial Sequence: Synthetic oligonucleotide
  Target: LAMA2; (+) strand; PAM type: NRG; PAM sequence: TGG
gccaaaacctgtgttcctat

SEQ ID NO: 177042 - DNA, 20 bp, Artificial Sequence
  Description of Artificial Sequence: Synthetic oligonucleotide
  Target: LAMA2; (+) strand; PAM type: NRG; PAM sequence: TGG
ctgtgttcctattggacaaa

SEQ ID NO: 177043 - DNA, 20 bp, Artificial Sequence
  Description of Artificial Sequence: Synthetic oligonucleotide
  Target: LAMA2; (+) strand; PAM type: NRG; PAM sequence: CGG
gactcaatcccgtgactttg

SEQ ID NO: 177044 - DNA, 20 bp, Artificial Sequence
  Description of Artificial Sequence: Synthetic oligonucleotide
  Target: LAMA2; (+) strand; PAM type: NRG; PAM sequence: CAG
tcctatctcatacccttgcc

SEQ ID NO: 177045 - DNA, 20 bp, Artificial Sequence
  Description of Artificial Sequence: Synthetic oligonucleotide
  Target: LAMA2; (+) strand; PAM type: NRG; PAM sequence: AGG
cctatctcatacccttgccc

SEQ ID NO: 177046 - DNA, 20 bp, Artificial Sequence
  Description of Artificial Sequence: Synthetic oligonucleotide
  Target: LAMA2; (+) strand; PAM type: NRG; PAM sequence: GGG
ctatctcatacccttgccca

SEQ ID NO: 177047 - DNA, 20 bp, Artificial Sequence
  Description of Artificial Sequence: Synthetic oligonucleotide
  Target: LAMA2; (+) strand; PAM type: NRG; PAM sequence: TGG
ctcatacccttgcccagggc

SEQ ID NO: 177048 - DNA, 20 bp, Artificial Sequence
  Description of Artificial Sequence: Synthetic oligonucleotide
  Target: LAMA2; (+) strand; PAM type: NRG; PAM sequence: GGG
tcatacccttgcccagggct

SEQ ID NO: 177049 - DNA, 20 bp, Artificial Sequence
  Description of Artificial Sequence: Synthetic oligonucleotide
  Target: LAMA2; (+) strand; PAM type: NRG; PAM sequence: TAG
cccttgcccagggctgggaa

SEQ ID NO: 177050 - DNA, 20 bp, Artificial Sequence
  Description of Artificial Sequence: Synthetic oligonucleotide
  Target: LAMA2; (+) strand; PAM type: NRG; PAM sequence: AGG
ccttgcccagggctgggaat

SEQ ID NO: 177051 - DNA, 20 bp, Artificial Sequence
  Description of Artificial Sequence: Synthetic oligonucleotide
  Target: LAMA2; (+) strand; PAM type: NRG; PAM sequence: GGG
cttgcccagggctgggaata

SEQ ID NO: 177052 - DNA, 20 bp, Artificial Sequence
  Description of Artificial Sequence: Synthetic oligonucleotide
  Target: LAMA2; (+) strand; PAM type: NRG; PAM sequence: GAG
tgcccagggctgggaatagg

SEQ ID NO: 177053 - DNA, 20 bp, Artificial Sequence
  Description of Artificial Sequence: Synthetic oligonucleotide
  Target: LAMA2; (+) strand; PAM type: NRG; PAM sequence: AGG
gcccagggctgggaataggg

SEQ ID NO: 177054 - DNA, 20 bp, Artificial Sequence
  Description of Artificial Sequence: Synthetic oligonucleotide
  Target: LAMA2; (+) strand; PAM type: NRG; PAM sequence: AAG
cagggctgggaatagggagg

SEQ ID NO: 177055 - DNA, 20 bp, Artificial Sequence
  Description of Artificial Sequence: Synthetic oligonucleotide
  Target: LAMA2; (+) strand; PAM type: NRG; PAM sequence: AGG
agggctgggaatagggagga

SEQ ID NO: 177056 - DNA, 20 bp, Artificial Sequence
  Description of Artificial Sequence: Synthetic oligonucleotide
  Target: LAMA2; (+) strand; PAM type: NRG; PAM sequence: GGG
gggctgggaatagggaggaa

SEQ ID NO: 177057 - DNA, 20 bp, Artificial Sequence
  Description of Artificial Sequence: Synthetic oligonucleotide
  Target: LAMA2; (+) strand; PAM type: NRG; PAM sequence: GAG
gctgggaatagggaggaagg

SEQ ID NO: 177058 - DNA, 20 bp, Artificial Sequence
  Description of Artificial Sequence: Synthetic oligonucleotide
  Target: LAMA2; (+) strand; PAM type: NRG; PAM sequence: GAG
ggaatagggaggaagggagc

SEQ ID NO: 177059 - DNA, 20 bp, Artificial Sequence
  Description of Artificial Sequence: Synthetic oligonucleotide
  Target: LAMA2; (+) strand; PAM type: NRG; PAM sequence: AGG
gaatagggaggaagggagcg

SEQ ID NO: 177060 - DNA, 20 bp, Artificial Sequence
  Description of Artificial Sequence: Synthetic oligonucleotide
  Target: LAMA2; (+) strand; PAM type: NRG; PAM sequence: AAG
gggagcgaggtgattcatgc

SEQ ID NO: 177061 - DNA, 20 bp, Artificial Sequence
  Description of Artificial Sequence: Synthetic oligonucleotide
  Target: LAMA2; (+) strand; PAM type: NRG; PAM sequence: AAG
gaggtgattcatgcaagtgc

SEQ ID NO: 177062 - DNA, 20 bp, Artificial Sequence
  Description of Artificial Sequence: Synthetic oligonucleotide
  Target: LAMA2; (+) strand; PAM type: NRG; PAM sequence: AAG
caagaaccaatcctgtcttt

SEQ ID NO: 177063 - DNA, 20 bp, Artificial Sequence
  Description of Artificial Sequence: Synthetic oligonucleotide
  Target: LAMA2; (+) strand; PAM type: NRG; PAM sequence: CAG
ctttaagattttaataatac

SEQ ID NO: 177064 - DNA, 20 bp, Artificial Sequence
  Description of Artificial Sequence: Synthetic oligonucleotide
  Target: LAMA2; (+) strand; PAM type: NRG; PAM sequence: AGG
tttaagattttaataatacc

SEQ ID NO: 177065 - DNA, 20 bp, Artificial Sequence
  Description of Artificial Sequence: Synthetic oligonucleotide
  Target: LAMA2; (+) strand; PAM type: NRG; PAM sequence: GGG
ttaagattttaataatacca

SEQ ID NO: 177066 - DNA, 20 bp, Artificial Sequence
  Description of Artificial Sequence: Synthetic oligonucleotide
  Target: LAMA2; (+) strand; PAM type: NRG; PAM sequence: TGG
ctctatttccccacaaacac

SEQ ID NO: 177067 - DNA, 20 bp, Artificial Sequence
  Description of Artificial Sequence: Synthetic oligonucleotide
  Target: LAMA2; (+) strand; PAM type: NRG; PAM sequence: AAG
acactggtattataaaaatg

SEQ ID NO: 177068 - DNA, 20 bp, Artificial Sequence
  Description of Artificial Sequence: Synthetic oligonucleotide
  Target: LAMA2; (+) strand; PAM type: NRG; PAM sequence: AAG
tggtattataaaaatgaaga

SEQ ID NO: 177069 - DNA, 20 bp, Artificial Sequence
  Description of Artificial Sequence: Synthetic oligonucleotide
  Target: LAMA2; (+) strand; PAM type: NRG; PAM sequence: CAG
tgaagaaagaattttatttt

SEQ ID NO: 177070 - DNA, 20 bp, Artificial Sequence
  Description of Artificial Sequence: Synthetic oligonucleotide
  Target: LAMA2; (+) strand; PAM type: NRG; PAM sequence: AAG
ttttcagccattttttttcc

SEQ ID NO: 177071 - DNA, 20 bp, Artificial Sequence
  Description of Artificial Sequence: Synthetic oligonucleotide
  Target: LAMA2; (+) strand; PAM type: NRG; PAM sequence: GAG
ttcagccattttttttccaa

SEQ ID NO: 177072 - DNA, 20 bp, Artificial Sequence
  Description of Artificial Sequence: Synthetic oligonucleotide
  Target: LAMA2; (+) strand; PAM type: NRG; PAM sequence: AAG
cattttttttccaagagaaa

SEQ ID NO: 177073 - DNA, 20 bp, Artificial Sequence
  Description of Artificial Sequence: Synthetic oligonucleotide
  Target: LAMA2; (+) strand; PAM type: NRG; PAM sequence: AAG
ccaagagaaaaagaaatcta

SEQ ID NO: 177074 - DNA, 20 bp, Artificial Sequence
  Description of Artificial Sequence: Synthetic oligonucleotide
  Target: LAMA2; (+) strand; PAM type: NRG; PAM sequence: AAG
agaaaaagaaatctaaagac

SEQ ID NO: 177075 - DNA, 20 bp, Artificial Sequence
  Description of Artificial Sequence: Synthetic oligonucleotide
  Target: LAMA2; (+) strand; PAM type: NRG; PAM sequence: TAG
aaatctaaagacaagcattg

SEQ ID NO: 177076 - DNA, 20 bp, Artificial Sequence
  Description of Artificial Sequence: Synthetic oligonucleotide
  Target: LAMA2; (+) strand; PAM type: NRG; PAM sequence: AGG
aatctaaagacaagcattgt

SEQ ID NO: 177077 - DNA, 20 bp, Artificial Sequence
  Description of Artificial Sequence: Synthetic oligonucleotide
  Target: LAMA2; (+) strand; PAM type: NRG; PAM sequence: AAG
ctaaagacaagcattgtagg

SEQ ID NO: 177078 - DNA, 20 bp, Artificial Sequence
  Description of Artificial Sequence: Synthetic oligonucleotide
  Target: LAMA2; (+) strand; PAM type: NRG; PAM sequence: AGG
taaagacaagcattgtagga

SEQ ID NO: 177079 - DNA, 20 bp, Artificial Sequence
  Description of Artificial Sequence: Synthetic oligonucleotide
  Target: LAMA2; (+) strand; PAM type: NRG; PAM sequence: GGG
aaagacaagcattgtaggaa

SEQ ID NO: 177080 - DNA, 20 bp, Artificial Sequence
  Description of Artificial Sequence: Synthetic oligonucleotide
  Target: LAMA2; (+) strand; PAM type: NRG; PAM sequence: TAG
acaagcattgtaggaagggt

SEQ ID NO: 177081 - DNA, 20 bp, Artificial Sequence
  Description of Artificial Sequence: Synthetic oligonucleotide
  Target: LAMA2; (+) strand; PAM type: NRG; PAM sequence: AGG
caagcattgtaggaagggtt

SEQ ID NO: 177082 - DNA, 20 bp, Artificial Sequence
  Description of Artificial Sequence: Synthetic oligonucleotide
  Target: LAMA2; (+) strand; PAM type: NRG; PAM sequence: GAG
agcattgtaggaagggttag

SEQ ID NO: 177083 - DNA, 20 bp, Artificial Sequence
  Description of Artificial Sequence: Synthetic oligonucleotide
  Target: LAMA2; (+) strand; PAM type: NRG; PAM sequence: CAG
ttgtaggaagggttaggaga

SEQ ID NO: 177084 - DNA, 20 bp, Artificial Sequence
  Description of Artificial Sequence: Synthetic oligonucleotide
  Target: LAMA2; (+) strand; PAM type: NRG; PAM sequence: TAG
taggagacagaaatgttcat

SEQ ID NO: 177085 - DNA, 20 bp, Artificial Sequence
  Description of Artificial Sequence: Synthetic oligonucleotide
  Target: LAMA2; (+) strand; PAM type: NRG; PAM sequence: TAG
gtttaaatttattttttttg

SEQ ID NO: 177086 - DNA, 20 bp, Artificial Sequence
  Description of Artificial Sequence: Synthetic oligonucleotide
  Target: LAMA2; (+) strand; PAM type: NRG; PAM sequence: CAG
aatttattttttttgtagtt

SEQ ID NO: 177087 - DNA, 20 bp, Artificial Sequence
  Description of Artificial Sequence: Synthetic oligonucleotide
  Target: LAMA2; (+) strand; PAM type: NRG; PAM sequence: AGG
atttattttttttgtagttc

SEQ ID NO: 177088 - DNA, 20 bp, Artificial Sequence
  Description of Artificial Sequence: Synthetic oligonucleotide
  Target: LAMA2; (+) strand; PAM type: NRG; PAM sequence: TAG
tattttttttgtagttcagg

SEQ ID NO: 177089 - DNA, 20 bp, Artificial Sequence
  Description of Artificial Sequence: Synthetic oligonucleotide
  Target: LAMA2; (+) strand; PAM type: NRG; PAM sequence: AAG
ttcaggtagtacattattta

SEQ ID NO: 177090 - DNA, 20 bp, Artificial Sequence
  Description of Artificial Sequence: Synthetic oligonucleotide
  Target: LAMA2; (+) strand; PAM type: NRG; PAM sequence: AAG
tgaaaacccacaaactactc

SEQ ID NO: 177091 - DNA, 20 bp, Artificial Sequence
  Description of Artificial Sequence: Synthetic oligonucleotide
  Target: LAMA2; (+) strand; PAM type: NRG; PAM sequence: TAG
tactcaagtaataattcctc

SEQ ID NO: 177092 - DNA, 20 bp, Artificial Sequence
  Description of Artificial Sequence: Synthetic oligonucleotide
  Target: LAMA2; (+) strand; PAM type: NRG; PAM sequence: AAG
aataattcctctagaaaacc

SEQ ID NO: 177093 - DNA, 20 bp, Artificial Sequence
  Description of Artificial Sequence: Synthetic oligonucleotide
  Target: LAMA2; (+) strand; PAM type: NRG; PAM sequence: AAG
ttcctctagaaaaccaagcc

SEQ ID NO: 177094 - DNA, 20 bp, Artificial Sequence
  Description of Artificial Sequence: Synthetic oligonucleotide
  Target: LAMA2; (+) strand; PAM type: NRG; PAM sequence: AGG
tcctctagaaaaccaagcca

SEQ ID NO: 177095 - DNA, 20 bp, Artificial Sequence
  Description of Artificial Sequence: Synthetic oligonucleotide
  Target: LAMA2; (+) strand; PAM type: NRG; PAM sequence: CGG
aaaccaagccaaggctatga

SEQ ID NO: 177096 - DNA, 20 bp, Artificial Sequence
  Description of Artificial Sequence: Synthetic oligonucleotide
  Target: LAMA2; (+) strand; PAM type: NRG; PAM sequence: GAG
accaagccaaggctatgacg

SEQ ID NO: 177097 - DNA, 20 bp, Artificial Sequence
  Description of Artificial Sequence: Synthetic oligonucleotide
  Target: LAMA2; (+) strand; PAM type: NRG; PAM sequence: TGG
agccaaggctatgacggaga

SEQ ID NO: 177098 - DNA, 20 bp, Artificial Sequence
  Description of Artificial Sequence: Synthetic oligonucleotide
  Target: LAMA2; (+) strand; PAM type: NRG; PAM sequence: GGG
gccaaggctatgacggagat

SEQ ID NO: 177099 - DNA, 20 bp, Artificial Sequence
  Description of Artificial Sequence: Synthetic oligonucleotide
  Target: LAMA2; (+) strand; PAM type: NRG; PAM sequence: TGG
tatgacatttctctgatttg

SEQ ID NO: 177100 - DNA, 20 bp, Artificial Sequence
  Description of Artificial Sequence: Synthetic oligonucleotide
  Target: LAMA2; (+) strand; PAM type: NRG; PAM sequence: CGG
ctctgatttgtggccaatta

SEQ ID NO: 177101 - DNA, 20 bp, Artificial Sequence
  Description of Artificial Sequence: Synthetic oligonucleotide
  Target: LAMA2; (+) strand; PAM type: NRG; PAM sequence: GAG
ctgatttgtggccaattacg

SEQ ID NO: 177102 - DNA, 20 bp, Artificial Sequence
  Description of Artificial Sequence: Synthetic oligonucleotide
  Target: LAMA2; (+) strand; PAM type: NRG; PAM sequence: AGG
tgatttgtggccaattacgg

SEQ ID NO: 177103 - DNA, 20 bp, Artificial Sequence
  Description of Artificial Sequence: Synthetic oligonucleotide
  Target: LAMA2; (+) strand; PAM type: NRG; PAM sequence: TGG
caattacggaggttataaaa

SEQ ID NO: 177104 - DNA, 20 bp, Artificial Sequence
  Description of Artificial Sequence: Synthetic oligonucleotide
  Target: LAMA2; (+) strand; PAM type: NRG; PAM sequence: CAG
gttataaaatggctgttaat

SEQ ID NO: 177105 - DNA, 20 bp, Artificial Sequence
  Description of Artificial Sequence: Synthetic oligonucleotide
  Target: LAMA2; (+) strand; PAM type: NRG; PAM sequence: AGG
ttataaaatggctgttaatc

SEQ ID NO: 177106 - DNA, 20 bp, Artificial Sequence
  Description of Artificial Sequence: Synthetic oligonucleotide
  Target: LAMA2; (+) strand; PAM type: NRG; PAM sequence: GGG
tataaaatggctgttaatca

SEQ ID NO: 177107 - DNA, 20 bp, Artificial Sequence
  Description of Artificial Sequence: Synthetic oligonucleotide
  Target: LAMA2; (+) strand; PAM type: NRG; PAM sequence: CAG
gaaatgccatatattactac

SEQ ID NO: 177108 - DNA, 20 bp, Artificial Sequence
  Description of Artificial Sequence: Synthetic oligonucleotide
  Target: LAMA2; (+) strand; PAM type: NRG; PAM sequence: AGG
aaatgccatatattactacc

SEQ ID NO: 177109 - DNA, 20 bp, Artificial Sequence
  Description of Artificial Sequence: Synthetic oligonucleotide
  Target: LAMA2; (+) strand; PAM type: NRG; PAM sequence: TAG
actaccaggaactgctgaaa

SEQ ID NO: 177110 - DNA, 20 bp, Artificial Sequence
  Description of Artificial Sequence: Synthetic oligonucleotide
  Target: LAMA2; (+) strand; PAM type: NRG; PAM sequence: AGG
ctaccaggaactgctgaaat

SEQ ID NO: 177111 - DNA, 20 bp, Artificial Sequence
  Description of Artificial Sequence: Synthetic oligonucleotide
  Target: LAMA2; (+) strand; PAM type: NRG; PAM sequence: CAG
aactgctgaaataggcccta

SEQ ID NO: 177112 - DNA, 20 bp, Artificial Sequence
  Description of Artificial Sequence: Synthetic oligonucleotide
  Target: LAMA2; (+) strand; PAM type: NRG; PAM sequence: GAG
ctgctgaaataggccctaca

SEQ ID NO: 177113 - DNA, 20 bp, Artificial Sequence
  Description of Artificial Sequence: Synthetic oligonucleotide
  Target: LAMA2; (+) strand; PAM type: NRG; PAM sequence: CAG
ctacagagcaaaactcttga

SEQ ID NO: 177114 - DNA, 20 bp, Artificial Sequence
  Description of Artificial Sequence: Synthetic oligonucleotide
  Target: LAMA2; (+) strand; PAM type: NRG; PAM sequence: CAG
cagagcaaaactcttgacag

SEQ ID NO: 177115 - DNA, 20 bp, Artificial Sequence
  Description of Artificial Sequence: Synthetic oligonucleotide
  Target: LAMA2; (+) strand; PAM type: NRG; PAM sequence: TAG
cttgacagcagctattaaaa

SEQ ID NO: 177116 - DNA, 20 bp, Artificial Sequence
  Description of Artificial Sequence: Synthetic oligonucleotide
  Target: LAMA2; (+) strand; PAM type: NRG; PAM sequence: GAG
tgacagcagctattaaaata

SEQ ID NO: 177117 - DNA, 20 bp, Artificial Sequence
  Description of Artificial Sequence: Synthetic oligonucleotide
  Target: LAMA2; (+) strand; PAM type: NRG; PAM sequence: TAG
cagctattaaaatagagatt

SEQ ID NO: 177118 - DNA, 20 bp, Artificial Sequence
  Description of Artificial Sequence: Synthetic oligonucleotide
  Target: LAMA2; (+) strand; PAM type: NRG; PAM sequence: TGG
tttagtcatttctctctcta

SEQ ID NO: 177119 - DNA, 20 bp, Artificial Sequence
  Description of Artificial Sequence: Synthetic oligonucleotide
  Target: LAMA2; (+) strand; PAM type: NRG; PAM sequence: TGG
atttctctctctatggtgcc

SEQ ID NO: 177120 - DNA, 20 bp, Artificial Sequence
  Description of Artificial Sequence: Synthetic oligonucleotide
  Target: LAMA2; (+) strand; PAM type: NRG; PAM sequence: GAG
ttctctctctatggtgcctg

SEQ ID NO: 177121 - DNA, 20 bp, Artificial Sequence
  Description of Artificial Sequence: Synthetic oligonucleotide
  Target: LAMA2; (+) strand; PAM type: NRG; PAM sequence: TAG
ctctctatggtgcctggagt

SEQ ID NO: 177122 - DNA, 20 bp, Artificial Sequence
  Description of Artificial Sequence: Synthetic oligonucleotide
  Target: LAMA2; (+) strand; PAM type: NRG; PAM sequence: AAG
tctatggtgcctggagttag

SEQ ID NO: 177123 - DNA, 20 bp, Artificial Sequence
  Description of Artificial Sequence: Synthetic oligonucleotide
  Target: LAMA2; (+) strand; PAM type: NRG; PAM sequence: AGG
ctatggtgcctggagttaga

SEQ ID NO: 177124 - DNA, 20 bp, Artificial Sequence
  Description of Artificial Sequence: Synthetic oligonucleotide
  Target: LAMA2; (+) strand; PAM type: NRG; PAM sequence: TGG
ggagttagaaggaataaaaa

SEQ ID NO: 177125 - DNA, 20 bp, Artificial Sequence
  Description of Artificial Sequence: Synthetic oligonucleotide
  Target: LAMA2; (+) strand; PAM type: NRG; PAM sequence: GAG
ttagaaggaataaaaatggt

SEQ ID NO: 177126 - DNA, 20 bp, Artificial Sequence
  Description of Artificial Sequence: Synthetic oligonucleotide
  Target: LAMA2; (+) strand; PAM type: NRG; PAM sequence: AGG
tagaaggaataaaaatggtg

SEQ ID NO: 177127 - DNA, 20 bp, Artificial Sequence
  Description of Artificial Sequence: Synthetic oligonucleotide
  Target: LAMA2; (+) strand; PAM type: NRG; PAM sequence: CAG
aggaataaaaatggtgaggc

SEQ ID NO: 177128 - DNA, 20 bp, Artificial Sequence
  Description of Artificial Sequence: Synthetic oligonucleotide
  Target: LAMA2; (+) strand; PAM type: NRG; PAM sequence: TGG
catatttctaatttgttgct

SEQ ID NO: 177129 - DNA, 20 bp, Artificial Sequence
  Description of Artificial Sequence: Synthetic oligonucleotide
  Target: LAMA2; (+) strand; PAM type: NRG; PAM sequence: CAG
atttgttgcttggttcaatt

SEQ ID NO: 177130 - DNA, 20 bp, Artificial Sequence
  Description of Artificial Sequence: Synthetic oligonucleotide
  Target: LAMA2; (+) strand; PAM type: NRG; PAM sequence: CAG
ttgcttggttcaattcagta

SEQ ID NO: 177131 - DNA, 20 bp, Artificial Sequence
  Description of Artificial Sequence: Synthetic oligonucleotide
  Target: LAMA2; (+) strand; PAM type: NRG; PAM sequence: CAG
tggttcaattcagtacagtt

SEQ ID NO: 177132 - DNA, 20 bp, Artificial Sequence
  Description of Artificial Sequence: Synthetic oligonucleotide
  Target: LAMA2; (+) strand; PAM type: NRG; PAM sequence: TAG
tcaattcagtacagttcagt

SEQ ID NO: 177133 - DNA, 20 bp, Artificial Sequence
  Description of Artificial Sequence: Synthetic oligonucleotide
  Target: LAMA2; (+) strand; PAM type: NRG; PAM sequence: GAG
gtacagttcagttagtttgt

SEQ ID NO: 177134 - DNA, 20 bp, Artificial Sequence
  Description of Artificial Sequence: Synthetic oligonucleotide
  Target: LAMA2; (+) strand; PAM type: NRG; PAM sequence: CAG
ttcagttagtttgtgagctt

SEQ ID NO: 177135 - DNA, 20 bp, Artificial Sequence
  Description of Artificial Sequence: Synthetic oligonucleotide
  Target: LAMA2; (+) strand; PAM type: NRG; PAM sequence: TAG
agcttcagtcatgaatgact

SEQ ID NO: 177136 - DNA, 20 bp, Artificial Sequence
  Description of Artificial Sequence: Synthetic oligonucleotide
  Target: LAMA2; (+) strand; PAM type: NRG; PAM sequence: GAG
ttttatgctgtccttgcctt

SEQ ID NO: 177137 - DNA, 20 bp, Artificial Sequence
  Description of Artificial Sequence: Synthetic oligonucleotide
  Target: LAMA2; (+) strand; PAM type: NRG; PAM sequence: AGG
tttatgctgtccttgccttg

SEQ ID NO: 177138 - DNA, 20 bp, Artificial Sequence
  Description of Artificial Sequence: Synthetic oligonucleotide
  Target: LAMA2; (+) strand; PAM type: NRG; PAM sequence: GGG
ttatgctgtccttgccttga

SEQ ID NO: 177139 - DNA, 20 bp, Artificial Sequence
  Description of Artificial Sequence: Synthetic oligonucleotide
  Target: LAMA2; (+) strand; PAM type: NRG; PAM sequence: CGG
ttgagggaatctgaacttgc

SEQ ID NO: 177140 - DNA, 20 bp, Artificial Sequence
  Description of Artificial Sequence: Synthetic oligonucleotide
  Target: LAMA2; (+) strand; PAM type: NRG; PAM sequence: GGG
tgagggaatctgaacttgcc

SEQ ID NO: 177141 - DNA, 20 bp, Artificial Sequence
  Description of Artificial Sequence: Synthetic oligonucleotide
  Target: LAMA2; (+) strand; PAM type: NRG; PAM sequence: GAG
agggaatctgaacttgccgg

SEQ ID NO: 177142 - DNA, 20 bp, Artificial Sequence
  Description of Artificial Sequence: Synthetic oligonucleotide
  Target: LAMA2; (+) strand; PAM type: NRG; PAM sequence: AAG
tttgaatatacatctgttaa

SEQ ID NO: 177143 - DNA, 20 bp, Artificial Sequence
  Description of Artificial Sequence: Synthetic oligonucleotide
  Target: LAMA2; (+) strand; PAM type: NRG; PAM sequence: GAG
aagtaaatttgcccttgtgt

SEQ ID NO: 177144 - DNA, 20 bp, Artificial Sequence
  Description of Artificial Sequence: Synthetic oligonucleotide
  Target: LAMA2; (+) strand; PAM type: NRG; PAM sequence: GAG
atttgcccttgtgtgagttt

SEQ ID NO: 177145 - DNA, 20 bp, Artificial Sequence
  Description of Artificial Sequence: Synthetic oligonucleotide
  Target: LAMA2; (+) strand; PAM type: NRG; PAM sequence: AAG
ttgtgtgagtttgagatttg

SEQ ID NO: 177146 - DNA, 20 bp, Artificial Sequence
  Description of Artificial Sequence: Synthetic oligonucleotide
  Target: LAMA2; (+) strand; PAM type: NRG; PAM sequence: TGG
ttgcactgatcgaatgtttg

SEQ ID NO: 177147 - DNA, 20 bp, Artificial Sequence
  Description of Artificial Sequence: Synthetic oligonucleotide
  Target: LAMA2; (+) strand; PAM type: NRG; PAM sequence: GAG
gcactgatcgaatgtttgtg

SEQ ID NO: 177148 - DNA, 20 bp, Artificial Sequence
  Description of Artificial Sequence: Synthetic oligonucleotide
  Target: LAMA2; (+) strand; PAM type: NRG; PAM sequence: AAG
cgaatgtttgtggagataaa

SEQ ID NO: 177149 - DNA, 20 bp, Artificial Sequence
  Description of Artificial Sequence: Synthetic oligonucleotide
  Target: LAMA2; (+) strand; PAM type: NRG; PAM sequence: TGG
gataaaaagtattttgttga

SEQ ID NO: 177150 - DNA, 20 bp, Artificial Sequence
  Description of Artificial Sequence: Synthetic oligonucleotide
  Target: LAMA2; (+) strand; PAM type: NRG; PAM sequence: GAG
agtattttgttgatggatat

SEQ ID NO: 177151 - DNA, 20 bp, Artificial Sequence
  Description of Artificial Sequence: Synthetic oligonucleotide
  Target: LAMA2; (+) strand; PAM type: NRG; PAM sequence: AGG
gtattttgttgatggatatg

SEQ ID NO: 177152 - DNA, 20 bp, Artificial Sequence
  Description of Artificial Sequence: Synthetic oligonucleotide
  Target: LAMA2; (+) strand; PAM type: NRG; PAM sequence: TGG
ttgttgatggatatgaggct

SEQ ID NO: 177153 - DNA, 20 bp, Artificial Sequence
  Description of Artificial Sequence: Synthetic oligonucleotide
  Target: LAMA2; (+) strand; PAM type: NRG; PAM sequence: AAG
tggtacaaattgatgactga

SEQ ID NO: 177154 - DNA, 20 bp, Artificial Sequence
  Description of Artificial Sequence: Synthetic oligonucleotide
  Target: LAMA2; (+) strand; PAM type: NRG; PAM sequence: GAG
gtacaaattgatgactgaaa

SEQ ID NO: 177155 - DNA, 20 bp, Artificial Sequence
  Description of Artificial Sequence: Synthetic oligonucleotide
  Target: LAMA2; (+) strand; PAM type: NRG; PAM sequence: AAG
ttgatgactgaaagagtgaa

SEQ ID NO: 177156 - DNA, 20 bp, Artificial Sequence
  Description of Artificial Sequence: Synthetic oligonucleotide
  Target: LAMA2; (+) strand; PAM type: NRG; PAM sequence: TAG
gaaagagtgaaaagatgaat

SEQ ID NO: 177157 - DNA, 20 bp, Artificial Sequence
  Description of Artificial Sequence: Synthetic oligonucleotide
  Target: LAMA2; (+) strand; PAM type: NRG; PAM sequence: CAG
aaaagatgaattagtaccac

SEQ ID NO: 177158 - DNA, 20 bp, Artificial Sequence
  Description of Artificial Sequence: Synthetic oligonucleotide
  Target: LAMA2; (+) strand; PAM type: NRG; PAM sequence: AGG
aaagatgaattagtaccacc

SEQ ID NO: 177159 - DNA, 20 bp, Artificial Sequence
  Description of Artificial Sequence: Synthetic oligonucleotide
  Target: LAMA2; (+) strand; PAM type: NRG; PAM sequence: CAG
ggtgaatgaacactgctttg

SEQ ID NO: 177160 - DNA, 20 bp, Artificial Sequence
  Description of Artificial Sequence: Synthetic oligonucleotide
  Target: LAMA2; (+) strand; PAM type: NRG; PAM sequence: TAG
aatgaacactgctttgcaga

SEQ ID NO: 177161 - DNA, 20 bp, Artificial Sequence
  Description of Artificial Sequence: Synthetic oligonucleotide
  Target: LAMA2; (+) strand; PAM type: NRG; PAM sequence: AAG
acactgctttgcagatagac

SEQ ID NO: 177162 - DNA, 20 bp, Artificial Sequence
  Description of Artificial Sequence: Synthetic oligonucleotide
  Target: LAMA2; (+) strand; PAM type: NRG; PAM sequence: AAG
agatagacaagaaatttttt

SEQ ID NO: 177163 - DNA, 20 bp, Artificial Sequence
  Description of Artificial Sequence: Synthetic oligonucleotide
  Target: LAMA2; (+) strand; PAM type: NRG; PAM sequence: AGG
gatagacaagaaatttttta

SEQ ID NO: 177164 - DNA, 20 bp, Artificial Sequence
  Description of Artificial Sequence: Synthetic oligonucleotide
  Target: LAMA2; (+) strand; PAM type: NRG; PAM sequence: CGG
gacaagaaattttttaaggc

SEQ ID NO: 177165 - DNA, 20 bp, Artificial Sequence
  Description of Artificial Sequence: Synthetic oligonucleotide
  Target: LAMA2; (+) strand; PAM type: NRG; PAM sequence: GGG
acaagaaattttttaaggcc

SEQ ID NO: 177166 - DNA, 20 bp, Artificial Sequence
  Description of Artificial Sequence: Synthetic oligonucleotide
  Target: LAMA2; (+) strand; PAM type: NRG; PAM sequence: CAG
aaattttttaaggccgggcg

SEQ ID NO: 177167 - DNA, 20 bp, Artificial Sequence
  Description of Artificial Sequence: Synthetic oligonucleotide
  Target: LAMA2; (+) strand; PAM type: NRG; PAM sequence: TGG
ttttttaaggccgggcgcag

SEQ ID NO: 177168 - DNA, 20 bp, Artificial Sequence
  Description of Artificial Sequence: Synthetic oligonucleotide
  Target: LAMA2; (+) strand; PAM type: NRG; PAM sequence: CAG
tggctcatgccctgtaattc

SEQ ID NO: 177169 - DNA, 20 bp, Artificial Sequence
  Description of Artificial Sequence: Synthetic oligonucleotide
  Target: LAMA2; (+) strand; PAM type: NRG; PAM sequence: TGG
gccctgtaattccagcattt

SEQ ID NO: 177170 - DNA, 20 bp, Artificial Sequence
  Description of Artificial Sequence: Synthetic oligonucleotide
  Target: LAMA2; (+) strand; PAM type: NRG; PAM sequence: GGG
ccctgtaattccagcatttt

SEQ ID NO: 177171 - DNA, 20 bp, Artificial Sequence
  Description of Artificial Sequence: Synthetic oligonucleotide
  Target: LAMA2; (+) strand; PAM type: NRG; PAM sequence: GAG
ctgtaattccagcattttgg

SEQ ID NO: 177172 - DNA, 20 bp, Artificial Sequence
  Description of Artificial Sequence: Synthetic oligonucleotide
  Target: LAMA2; (+) strand; PAM type: NRG; PAM sequence: AGG
tgtaattccagcattttggg

SEQ ID NO: 177173 - DNA, 20 bp, Artificial Sequence
  Description of Artificial Sequence: Synthetic oligonucleotide
  Target: LAMA2; (+) strand; PAM type: NRG; PAM sequence: GAG
ttccagcattttgggaggcc

SEQ ID NO: 177174 - DNA, 20 bp, Artificial Sequence
  Description of Artificial Sequence: Synthetic oligonucleotide
  Target: LAMA2; (+) strand; PAM type: NRG; PAM sequence: AGG
tccagcattttgggaggccg

SEQ ID NO: 177175 - DNA, 20 bp, Artificial Sequence
  Description of Artificial Sequence: Synthetic oligonucleotide
  Target: LAMA2; (+) strand; PAM type: NRG; PAM sequence: CAG
agcattttgggaggccgagg

SEQ ID NO: 177176 - DNA, 20 bp, Artificial Sequence
  Description of Artificial Sequence: Synthetic oligonucleotide
  Target: LAMA2; (+) strand; PAM type: NRG; PAM sequence: AGG
gcattttgggaggccgaggc

SEQ ID NO: 177177 - DNA, 20 bp, Artificial Sequence
  Description of Artificial Sequence: Synthetic oligonucleotide
  Target: LAMA2; (+) strand; PAM type: NRG; PAM sequence: CAG
ttttgggaggccgaggcagg

SEQ ID NO: 177178 - DNA, 20 bp, Artificial Sequence
  Description of Artificial Sequence: Synthetic oligonucleotide
  Target: LAMA2; (+) strand; PAM type: NRG; PAM sequence: GAG
ttgggaggccgaggcaggca

SEQ ID NO: 177179 - DNA, 20 bp, Artificial Sequence
  Description of Artificial Sequence: Synthetic oligonucleotide
  Target: LAMA2; (+) strand; PAM type: NRG; PAM sequence: AAG
ggaggccgaggcaggcagag

SEQ ID NO: 177180 - DNA, 20 bp, Artificial Sequence
  Description of Artificial Sequence: Synthetic oligonucleotide
  Target: LAMA2; (+) strand; PAM type: NRG; PAM sequence: TGG
ggccgaggcaggcagagaag

SEQ ID NO: 177181 - DNA, 20 bp, Artificial Sequence
  Description of Artificial Sequence: Synthetic oligonucleotide
  Target: LAMA2; (+) strand; PAM type: NRG; PAM sequence: GGG
gccgaggcaggcagagaagt

SEQ ID NO: 177182 - DNA, 20 bp, Artificial Sequence
  Description of Artificial Sequence: Synthetic oligonucleotide
  Target: LAMA2; (+) strand; PAM type: NRG; PAM sequence: GAG
cgaggcaggcagagaagtgg

SEQ ID NO: 177183 - DNA, 20 bp, Artificial Sequence
  Description of Artificial Sequence: Synthetic oligonucleotide
  Target: LAMA2; (+) strand; PAM type: NRG; PAM sequence: GAG
gagaagtgggagaataactt

SEQ ID NO: 177184 - DNA, 20 bp, Artificial Sequence
  Description of Artificial Sequence: Synthetic oligonucleotide
  Target: LAMA2; (+) strand; PAM type: NRG; PAM sequence: CAG
gtgggagaataacttgagcc

SEQ ID NO: 177185 - DNA, 20 bp, Artificial Sequence
  Description of Artificial Sequence: Synthetic oligonucleotide
  Target: LAMA2; (+) strand; PAM type: NRG; PAM sequence: AGG
tgggagaataacttgagccc

SEQ ID NO: 177186 - DNA, 20 bp, Artificial Sequence
  Description of Artificial Sequence: Synthetic oligonucleotide
  Target: LAMA2; (+) strand; PAM type: NRG; PAM sequence: GAG
ggagaataacttgagcccag

SEQ ID NO: 177187 - DNA, 20 bp, Artificial Sequence
  Description of Artificial Sequence: Synthetic oligonucleotide
  Target: LAMA2; (+) strand; PAM type: NRG; PAM sequence: AGG
gagaataacttgagcccagg

SEQ ID NO: 177188 - DNA, 20 bp, Artificial Sequence
  Description of Artificial Sequence: Synthetic oligonucleotide
  Target: LAMA2; (+) strand; PAM type: NRG; PAM sequence: CAG
aataacttgagcccaggagg

SEQ ID NO: 177189 - DNA, 20 bp, Artificial Sequence
  Description of Artificial Sequence: Synthetic oligonucleotide
  Target: LAMA2; (+) strand; PAM type: NRG; PAM sequence: GAG
taacttgagcccaggaggca

SEQ ID NO: 177190 - DNA, 20 bp, Artificial Sequence
  Description of Artificial Sequence: Synthetic oligonucleotide
  Target: LAMA2; (+) strand; PAM type: NRG; PAM sequence: AGG
aacttgagcccaggaggcag

SEQ ID NO: 177191 - DNA, 20 bp, Artificial Sequence
  Description of Artificial Sequence: Synthetic oligonucleotide
  Target: LAMA2; (+) strand; PAM type: NRG; PAM sequence: CAG
agcccaggaggcagaggttg

SEQ ID NO: 177192 - DNA, 20 bp, Artificial Sequence
  Description of Artificial Sequence: Synthetic oligonucleotide
  Target: LAMA2; (+) strand; PAM type: NRG; PAM sequence: GAG
caggaggcagaggttgcagt

SEQ ID NO: 177193 - DNA, 20 bp, Artificial Sequence
  Description of Artificial Sequence: Synthetic oligonucleotide
  Target: LAMA2; (+) strand; PAM type: NRG; PAM sequence: AAG
ggcagaggttgcagtgagcc

SEQ ID NO: 177194 - DNA, 20 bp, Artificial Sequence
  Description of Artificial Sequence: Synthetic oligonucleotide
  Target: LAMA2; (+) strand; PAM type: NRG; PAM sequence: TAG
aagatcgctccattgcactc

SEQ ID NO: 177195 - DNA, 20 bp, Artificial Sequence
  Description of Artificial Sequence: Synthetic oligonucleotide
  Target: LAMA2; (+) strand; PAM type: NRG; PAM sequence: TGG
cgctccattgcactctagcc

SEQ ID NO: 177196 - DNA, 20 bp, Artificial Sequence
  Description of Artificial Sequence: Synthetic oligonucleotide
  Target: LAMA2; (+) strand; PAM type: NRG; PAM sequence: GGG
gctccattgcactctagcct

SEQ ID NO: 177197 - DNA, 20 bp, Artificial Sequence
  Description of Artificial Sequence: Synthetic oligonucleotide
  Target: LAMA2; (+) strand; PAM type: NRG; PAM sequence: CAG
ttgcactctagcctgggtga

SEQ ID NO: 177198 - DNA, 20 bp, Artificial Sequence
  Description of Artificial Sequence: Synthetic oligonucleotide
  Target: LAMA2; (+) strand; PAM type: NRG; PAM sequence: GAG
gcactctagcctgggtgaca

SEQ ID NO: 177199 - DNA, 20 bp, Artificial Sequence
  Description of Artificial Sequence: Synthetic oligonucleotide
  Target: LAMA2; (+) strand; PAM type: NRG; PAM sequence: GAG
tctagcctgggtgacagagt

SEQ ID NO: 177200 - DNA, 20 bp, Artificial Sequence
  Description of Artificial Sequence: Synthetic oligonucleotide
  Target: LAMA2; (+) strand; PAM type: NRG; PAM sequence: GAG
tagcctgggtgacagagtga

SEQ ID NO: 177201 - DNA, 20 bp, Artificial Sequence
  Description of Artificial Sequence: Synthetic oligonucleotide
  Target: LAMA2; (+) strand; PAM type: NRG; PAM sequence: CAG
aaatttaaaataattttttt

SEQ ID NO: 177202 - DNA, 20 bp, Artificial Sequence
  Description of Artificial Sequence: Synthetic oligonucleotide
  Target: LAMA2; (+) strand; PAM type: NRG; PAM sequence: TGG
atgccaacttcattttctca

SEQ ID NO: 177203 - DNA, 20 bp, Artificial Sequence
  Description of Artificial Sequence: Synthetic oligonucleotide
  Target: LAMA2; (+) strand; PAM type: NRG; PAM sequence: GAG
ttttctcatggaatgtgtac

SEQ ID NO: 177204 - DNA, 20 bp, Artificial Sequence
  Description of Artificial Sequence: Synthetic oligonucleotide
  Target: LAMA2; (+) strand; PAM type: NRG; PAM sequence: AGG
tttctcatggaatgtgtacg

SEQ ID NO: 177205 - DNA, 20 bp, Artificial Sequence
  Description of Artificial Sequence: Synthetic oligonucleotide
  Target: LAMA2; (+) strand; PAM type: NRG; PAM sequence: AAG
tcatggaatgtgtacgaggc

SEQ ID NO: 177206 - DNA, 20 bp, Artificial Sequence
  Description of Artificial Sequence: Synthetic oligonucleotide
  Target: LAMA2; (+) strand; PAM type: NRG; PAM sequence: AGG
catggaatgtgtacgaggca

SEQ ID NO: 177207 - DNA, 20 bp, Artificial Sequence
  Description of Artificial Sequence: Synthetic oligonucleotide
  Target: LAMA2; (+) strand; PAM type: NRG; PAM sequence: AAG
ggaatgtgtacgaggcaagg

SEQ ID NO: 177208 - DNA, 20 bp, Artificial Sequence
  Description of Artificial Sequence: Synthetic oligonucleotide
  Target: LAMA2; (+) strand; PAM type: NRG; PAM sequence: AAG
atgtgtacgaggcaaggaag

SEQ ID NO: 177209 - DNA, 20 bp, Artificial Sequence
  Description of Artificial Sequence: Synthetic oligonucleotide
  Target: LAMA2; (+) strand; PAM type: NRG; PAM sequence: TAG
tgtacgaggcaaggaagaag

SEQ ID NO: 177210 - DNA, 20 bp, Artificial Sequence
  Description of Artificial Sequence: Synthetic oligonucleotide
  Target: LAMA2; (+) strand; PAM type: NRG; PAM sequence: TGG
ggcaaggaagaagtagacct

SEQ ID NO: 177211 - DNA, 20 bp, Artificial Sequence
  Description of Artificial Sequence: Synthetic oligonucleotide
  Target: LAMA2; (+) strand; PAM type: NRG; PAM sequence: AAG
agtagaccttggtttattaa

SEQ ID NO: 177212 - DNA, 20 bp, Artificial Sequence
  Description of Artificial Sequence: Synthetic oligonucleotide
  Target: LAMA2; (+) strand; PAM type: NRG; PAM sequence: GAG
ccttggtttattaaaagttt

SEQ ID NO: 177213 - DNA, 20 bp, Artificial Sequence
  Description of Artificial Sequence: Synthetic oligonucleotide
  Target: LAMA2; (+) strand; PAM type: NRG; PAM sequence: AAG
attaaaagtttgagaatatt

SEQ ID NO: 177214 - DNA, 20 bp, Artificial Sequence
  Description of Artificial Sequence: Synthetic oligonucleotide
  Target: LAMA2; (+) strand; PAM type: NRG; PAM sequence: CAG
ccttatattgactaactttt

SEQ ID NO: 177215 - DNA, 20 bp, Artificial Sequence
  Description of Artificial Sequence: Synthetic oligonucleotide
  Target: LAMA2; (+) strand; PAM type: NRG; PAM sequence: AAG
cccaatttttgtctttgccc

SEQ ID NO: 177216 - DNA, 20 bp, Artificial Sequence
  Description of Artificial Sequence: Synthetic oligonucleotide
  Target: LAMA2; (+) strand; PAM type: NRG; PAM sequence: TAG
aatgaaattatttaattact

SEQ ID NO: 177217 - DNA, 20 bp, Artificial Sequence
  Description of Artificial Sequence: Synthetic oligonucleotide
  Target: LAMA2; (+) strand; PAM type: NRG; PAM sequence: TAG
ttaattacttagaaaaataa

SEQ ID NO: 177218 - DNA, 20 bp, Artificial Sequence
  Description of Artificial Sequence: Synthetic oligonucleotide
  Target: LAMA2; (+) strand; PAM type: NRG; PAM sequence: AGG
taattacttagaaaaataat

SEQ ID NO: 177219 - DNA, 20 bp, Artificial Sequence
  Description of Artificial Sequence: Synthetic oligonucleotide
  Target: LAMA2; (+) strand; PAM type: NRG; PAM sequence: TGG
aaaaataataggtaacatgt

SEQ ID NO: 177220 - DNA, 20 bp, Artificial Sequence
  Description of Artificial Sequence: Synthetic oligonucleotide
  Target: LAMA2; (+) strand; PAM type: NRG; PAM sequence: CAG
ataataggtaacatgttggc

SEQ ID NO: 177221 - DNA, 20 bp, Artificial Sequence
  Description of Artificial Sequence: Synthetic oligonucleotide
  Target: LAMA2; (+) strand; PAM type: NRG; PAM sequence: AGG
taataggtaacatgttggcc

SEQ ID NO: 177222 - DNA, 20 bp, Artificial Sequence
  Description of Artificial Sequence: Synthetic oligonucleotide
  Target: LAMA2; (+) strand; PAM type: NRG; PAM sequence: CGG
ggtaacatgttggccaggtg

SEQ ID NO: 177223 - DNA, 20 bp, Artificial Sequence
  Description of Artificial Sequence: Synthetic oligonucleotide
  Target: LAMA2; (+) strand; PAM type: NRG; PAM sequence: TGG
aacatgttggccaggtgcgg

SEQ ID NO: 177224 - DNA, 20 bp, Artificial Sequence
  Description of Artificial Sequence: Synthetic oligonucleotide
  Target: LAMA2; (+) strand; PAM type: NRG; PAM sequence: CGG
cacctgtaatcctaacactt

SEQ ID NO: 177225 - DNA, 20 bp, Artificial Sequence
  Description of Artificial Sequence: Synthetic oligonucleotide
  Target: LAMA2; (+) strand; PAM type: NRG; PAM sequence: GGG
acctgtaatcctaacacttc

SEQ ID NO: 177226 - DNA, 20 bp, Artificial Sequence
  Description of Artificial Sequence: Synthetic oligonucleotide
  Target: LAMA2; (+) strand; PAM type: NRG; PAM sequence: GAG
ctgtaatcctaacacttcgg

SEQ ID NO: 177227 - DNA, 20 bp, Artificial Sequence
  Description of Artificial Sequence: Synthetic oligonucleotide
  Target: LAMA2; (+) strand; PAM type: NRG; PAM sequence: GAG
tcctaacacttcgggagacc

SEQ ID NO: 177228 - DNA, 20 bp, Artificial Sequence
  Description of Artificial Sequence: Synthetic oligonucleotide
  Target: LAMA2; (+) strand; PAM type: NRG; PAM sequence: AGG
cctaacacttcgggagaccg

SEQ ID NO: 177229 - DNA, 20 bp, Artificial Sequence
  Description of Artificial Sequence: Synthetic oligonucleotide
  Target: LAMA2; (+) strand; PAM type: NRG; PAM sequence: TGG
aacacttcgggagaccgagg

SEQ ID NO: 177230 - DNA, 20 bp, Artificial Sequence
  Description of Artificial Sequence: Synthetic oligonucleotide
  Target: LAMA2; (+) strand; PAM type: NRG; PAM sequence: GGG
acacttcgggagaccgaggt

SEQ ID NO: 177231 - DNA, 20 bp, Artificial Sequence
  Description of Artificial Sequence: Synthetic oligonucleotide
  Target: LAMA2; (+) strand; PAM type: NRG; PAM sequence: CAG
cttcgggagaccgaggtggg

SEQ ID NO: 177232 - DNA, 20 bp, Artificial Sequence
  Description of Artificial Sequence: Synthetic oligonucleotide
  Target: LAMA2; (+) strand; PAM type: NRG; PAM sequence: GAG
ccgaggtgggcagatcacct

SEQ ID NO: 177233 - DNA, 20 bp, Artificial Sequence
  Description of Artificial Sequence: Synthetic oligonucleotide
  Target: LAMA2; (+) strand; PAM type: NRG; PAM sequence: AGG
cgaggtgggcagatcacctg

SEQ ID NO: 177234 - DNA, 20 bp, Artificial Sequence
  Description of Artificial Sequence: Synthetic oligonucleotide
  Target: LAMA2; (+) strand; PAM type: NRG; PAM sequence: AAG
gtgggcagatcacctgaggt

SEQ ID NO: 177235 - DNA, 20 bp, Artificial Sequence
  Description of Artificial Sequence: Synthetic oligonucleotide
  Target: LAMA2; (+) strand; PAM type: NRG; PAM sequence: AGG
tgggcagatcacctgaggta

SEQ ID NO: 177236 - DNA, 20 bp, Artificial Sequence
  Description of Artificial Sequence: Synthetic oligonucleotide
  Target: LAMA2; (+) strand; PAM type: NRG; PAM sequence: GAG
ggcagatcacctgaggtaag

SEQ ID NO: 177237 - DNA, 20 bp, Artificial Sequence
  Description of Artificial Sequence: Synthetic oligonucleotide
  Target: LAMA2; (+) strand; PAM type: NRG; PAM sequence: GAG
tcacctgaggtaaggagttt

SEQ ID NO: 177238 - DNA, 20 bp, Artificial Sequence
  Description of Artificial Sequence: Synthetic oligonucleotide
  Target: LAMA2; (+) strand; PAM type: NRG; PAM sequence: CAG
tgaggtaaggagtttgagac

SEQ ID NO: 177239 - DNA, 20 bp, Artificial Sequence
  Description of Artificial Sequence: Synthetic oligonucleotide
  Target: LAMA2; (+) strand; PAM type: NRG; PAM sequence: TGG
taaggagtttgagaccagca

SEQ ID NO: 177240 - DNA, 20 bp, Artificial Sequence
  Description of Artificial Sequence: Synthetic oligonucleotide
  Target: LAMA2; (+) strand; PAM type: NRG; PAM sequence: CAG
gagtttgagaccagcatggc

SEQ ID NO: 177241 - DNA, 20 bp, Artificial Sequence
  Description of Artificial Sequence: Synthetic oligonucleotide
  Target: LAMA2; (+) strand; PAM type: NRG; PAM sequence: TGG
tgagaccagcatggccagcg

SEQ ID NO: 177242 - DNA, 20 bp, Artificial Sequence
  Description of Artificial Sequence: Synthetic oligonucleotide
  Target: LAMA2; (+) strand; PAM type: NRG; PAM sequence: TAG
tctactaaaaacgcaaaaat

SEQ ID NO: 177243 - DNA, 20 bp, Artificial Sequence
  Description of Artificial Sequence: Synthetic oligonucleotide
  Target: LAMA2; (+) strand; PAM type: NRG; PAM sequence: TGG
ctaaaaacgcaaaaattagc

SEQ ID NO: 177244 - DNA, 20 bp, Artificial Sequence
  Description of Artificial Sequence: Synthetic oligonucleotide
  Target: LAMA2; (+) strand; PAM type: NRG; PAM sequence: GGG
taaaaacgcaaaaattagct

SEQ ID NO: 177245 - DNA, 20 bp, Artificial Sequence
  Description of Artificial Sequence: Synthetic oligonucleotide
  Target: LAMA2; (+) strand; PAM type: NRG; PAM sequence: TGG
acgcaaaaattagctgggca

SEQ ID NO: 177246 - DNA, 20 bp, Artificial Sequence
  Description of Artificial Sequence: Synthetic oligonucleotide
  Target: LAMA2; (+) strand; PAM type: NRG; PAM sequence: TGG
caaaaattagctgggcatgg

SEQ ID NO: 177247 - DNA, 20 bp, Artificial Sequence
  Description of Artificial Sequence: Synthetic oligonucleotide
  Target: LAMA2; (+) strand; PAM type: NRG; PAM sequence: TGG
aaattagctgggcatggtgg

SEQ ID NO: 177248 - DNA, 20 bp, Artificial Sequence
  Description of Artificial Sequence: Synthetic oligonucleotide
  Target: LAMA2; (+) strand; PAM type: NRG; PAM sequence: GGG
aattagctgggcatggtggt

SEQ ID NO: 177249 - DNA, 20 bp, Artificial Sequence
  Description of Artificial Sequence: Synthetic oligonucleotide
  Target: LAMA2; (+) strand; PAM type: NRG; PAM sequence: CAG
gtggtgggtgcctgtaatcc

SEQ ID NO: 177250 - DNA, 20 bp, Artificial Sequence
  Description of Artificial Sequence: Synthetic oligonucleotide
  Target: LAMA2; (+) strand; PAM type: NRG; PAM sequence: CAG
tgcctgtaatcccagctact

SEQ ID NO: 177251 - DNA, 20 bp, Artificial Sequence
  Description of Artificial Sequence: Synthetic oligonucleotide
  Target: LAMA2; (+) strand; PAM type: NRG; PAM sequence: AGG
gcctgtaatcccagctactc

SEQ ID NO: 177252 - DNA, 20 bp, Artificial Sequence
  Description of Artificial Sequence: Synthetic oligonucleotide
  Target: LAMA2; (+) strand; PAM type: NRG; PAM sequence: GAG
ctgtaatcccagctactcag

SEQ ID NO: 177253 - DNA, 20 bp, Artificial Sequence
  Description of Artificial Sequence: Synthetic oligonucleotide
  Target: LAMA2; (+) strand; PAM type: NRG; PAM sequence: AGG
tgtaatcccagctactcagg

SEQ ID NO: 177254 - DNA, 20 bp, Artificial Sequence
  Description of Artificial Sequence: Synthetic oligonucleotide
  Target: LAMA2; (+) strand; PAM type: NRG; PAM sequence: GAG
tcccagctactcaggaggct

SEQ ID NO: 177255 - DNA, 20 bp, Artificial Sequence
  Description of Artificial Sequence: Synthetic oligonucleotide
  Target: LAMA2; (+) strand; PAM type: NRG; PAM sequence: AGG
cccagctactcaggaggctg

SEQ ID NO: 177256 - DNA, 20 bp, Artificial Sequence
  Description of Artificial Sequence: Synthetic oligonucleotide
  Target: LAMA2; (+) strand; PAM type: NRG; PAM sequence: TAG
agctactcaggaggctgagg

SEQ ID NO: 177257 - DNA, 20 bp, Artificial Sequence
  Description of Artificial Sequence: Synthetic oligonucleotide
  Target: LAMA2; (+) strand; PAM type: NRG; PAM sequence: AGG
gctactcaggaggctgaggt

SEQ ID NO: 177258 - DNA, 20 bp, Artificial Sequence
  Description of Artificial Sequence: Synthetic oligonucleotide
  Target: LAMA2; (+) strand; PAM type: NRG; PAM sequence: GAG
tactcaggaggctgaggtag

SEQ ID NO: 177259 - DNA, 20 bp, Artificial Sequence
  Description of Artificial Sequence: Synthetic oligonucleotide
  Target: LAMA2; (+) strand; PAM type: NRG; PAM sequence: TGG
ggctgaggtaggagaattgc

SEQ ID NO: 177260 - DNA, 20 bp, Artificial Sequence
  Description of Artificial Sequence: Synthetic oligonucleotide
  Target: LAMA2; (+) strand; PAM type: NRG; PAM sequence: CAG
gtaggagaattgctggaacc

SEQ ID NO: 177261 - DNA, 20 bp, Artificial Sequence
  Description of Artificial Sequence: Synthetic oligonucleotide
  Target: LAMA2; (+) strand; PAM type: NRG; PAM sequence: AGG
taggagaattgctggaaccc

SEQ ID NO: 177262 - DNA, 20 bp, Artificial Sequence
  Description of Artificial Sequence: Synthetic oligonucleotide
  Target: LAMA2; (+) strand; PAM type: NRG; PAM sequence: CGG
aattgctggaacccaggata

SEQ ID NO: 177263 - DNA, 20 bp, Artificial Sequence
  Description of Artificial Sequence: Synthetic oligonucleotide
  Target: LAMA2; (+) strand; PAM type: NRG; PAM sequence: GAG
ttgctggaacccaggatacg

SEQ ID NO: 177264 - DNA, 20 bp, Artificial Sequence
  Description of Artificial Sequence: Synthetic oligonucleotide
  Target: LAMA2; (+) strand; PAM type: NRG; PAM sequence: AGG
tgctggaacccaggatacgg

SEQ ID NO: 177265 - DNA, 20 bp, Artificial Sequence
  Description of Artificial Sequence: Synthetic oligonucleotide
  Target: LAMA2; (+) strand; PAM type: NRG; PAM sequence: CAG
aacccaggatacggaggtta

SEQ ID NO: 177266 - DNA, 20 bp, Artificial Sequence
  Description of Artificial Sequence: Synthetic oligonucleotide
  Target: LAMA2; (+) strand; PAM type: NRG; PAM sequence: GAG
caggatacggaggttacagt

SEQ ID NO: 177267 - DNA, 20 bp, Artificial Sequence
  Description of Artificial Sequence: Synthetic oligonucleotide
  Target: LAMA2; (+) strand; PAM type: NRG; PAM sequence: GAG
tacggaggttacagtgagct

SEQ ID NO: 177268 - DNA, 20 bp, Artificial Sequence
  Description of Artificial Sequence: Synthetic oligonucleotide
  Target: LAMA2; (+) strand; PAM type: NRG; PAM sequence: CAG
gagattgcgccactgcactt

SEQ ID NO: 177269 - DNA, 20 bp, Artificial Sequence
  Description of Artificial Sequence: Synthetic oligonucleotide
  Target: LAMA2; (+) strand; PAM type: NRG; PAM sequence: TGG
tgcgccactgcacttcagcc

SEQ ID NO: 177270 - DNA, 20 bp, Artificial Sequence
  Description of Artificial Sequence: Synthetic oligonucleotide
  Target: LAMA2; (+) strand; PAM type: NRG; PAM sequence: GGG
gcgccactgcacttcagcct

SEQ ID NO: 177271 - DNA, 20 bp, Artificial Sequence
  Description of Artificial Sequence: Synthetic oligonucleotide
  Target: LAMA2; (+) strand; PAM type: NRG; PAM sequence: CAG
ctgcacttcagcctgggcaa

SEQ ID NO: 177272 - DNA, 20 bp, Artificial Sequence
  Description of Artificial Sequence: Synthetic oligonucleotide
  Target: LAMA2; (+) strand; PAM type: NRG; PAM sequence: GAG
gcacttcagcctgggcaaca

SEQ ID NO: 177273 - DNA, 20 bp, Artificial Sequence
  Description of Artificial Sequence: Synthetic oligonucleotide
  Target: LAMA2; (+) strand; PAM type: NRG; PAM sequence: GAG
ttcagcctgggcaacagagt

SEQ ID NO: 177274 - DNA, 20 bp, Artificial Sequence
  Description of Artificial Sequence: Synthetic oligonucleotide
  Target: LAMA2; (+) strand; PAM type: NRG; PAM sequence: TAG
taaaaaaaaaaaaaaaaaac

SEQ ID NO: 177275 - DNA, 20 bp, Artificial Sequence
  Description of Artificial Sequence: Synthetic oligonucleotide
  Target: LAMA2; (+) strand; PAM type: NRG; PAM sequence: AGG
aaaaaaaaaaaaaaaaaact

SEQ ID NO: 177276 - DNA, 20 bp, Artificial Sequence
  Description of Artificial Sequence: Synthetic oligonucleotide
  Target: LAMA2; (+) strand; PAM type: NRG; PAM sequence: TAG
taggtaacatacctataaaa

SEQ ID NO: 177277 - DNA, 20 bp, Artificial Sequence
  Description of Artificial Sequence: Synthetic oligonucleotide
  Target: LAMA2; (+) strand; PAM type: NRG; PAM sequence: CAG
tacctataaaatagataaca

SEQ ID NO: 177278 - DNA, 20 bp, Artificial Sequence
  Description of Artificial Sequence: Synthetic oligonucleotide
  Target: LAMA2; (+) strand; PAM type: NRG; PAM sequence: AGG
acctataaaatagataacac

SEQ ID NO: 177279 - DNA, 20 bp, Artificial Sequence
  Description of Artificial Sequence: Synthetic oligonucleotide
  Target: LAMA2; (+) strand; PAM type: NRG; PAM sequence: AAG
tagataacacaggaaataaa

SEQ ID NO: 177280 - DNA, 20 bp, Artificial Sequence
  Description of Artificial Sequence: Synthetic oligonucleotide
  Target: LAMA2; (+) strand; PAM type: NRG; PAM sequence: TGG
aaataaaaagacctattccc

SEQ ID NO: 177281 - DNA, 20 bp, Artificial Sequence
  Description of Artificial Sequence: Synthetic oligonucleotide
  Target: LAMA2; (+) strand; PAM type: NRG; PAM sequence: GAG
ataaaaagacctattccctg

SEQ ID NO: 177282 - DNA, 20 bp, Artificial Sequence
  Description of Artificial Sequence: Synthetic oligonucleotide
  Target: LAMA2; (+) strand; PAM type: NRG; PAM sequence: CAG
tattccctggagatctatga

SEQ ID NO: 177283 - DNA, 20 bp, Artificial Sequence
  Description of Artificial Sequence: Synthetic oligonucleotide
  Target: LAMA2; (+) strand; PAM type: NRG; PAM sequence: AAG
atctatgacagctcatttta

SEQ ID NO: 177284 - DNA, 20 bp, Artificial Sequence
  Description of Artificial Sequence: Synthetic oligonucleotide
  Target: LAMA2; (+) strand; PAM type: NRG; PAM sequence: AGG
tctatgacagctcattttaa

SEQ ID NO: 177285 - DNA, 20 bp, Artificial Sequence
  Description of Artificial Sequence: Synthetic oligonucleotide
  Target: LAMA2; (+) strand; PAM type: NRG; PAM sequence: GAG
tatgacagctcattttaaag

SEQ ID NO: 177286 - DNA, 20 bp, Artificial Sequence
  Description of Artificial Sequence: Synthetic oligonucleotide
  Target: LAMA2; (+) strand; PAM type: NRG; PAM sequence: AGG
atgacagctcattttaaagg

SEQ ID NO: 177287 - DNA, 20 bp, Artificial Sequence
  Description of Artificial Sequence: Synthetic oligonucleotide
  Target: LAMA2; (+) strand; PAM type: NRG; PAM sequence: CGG
acagctcattttaaaggagg

SEQ ID NO: 177288 - DNA, 20 bp, Artificial Sequence
  Description of Artificial Sequence: Synthetic oligonucleotide
  Target: LAMA2; (+) strand; PAM type: NRG; PAM sequence: TAG
aaaggaggcggtttgtctca

SEQ ID NO: 177289 - DNA, 20 bp, Artificial Sequence
  Description of Artificial Sequence: Synthetic oligonucleotide
  Target: LAMA2; (+) strand; PAM type: NRG; PAM sequence: TAG
cggtttgtctcatagcactg

SEQ ID NO: 177290 - DNA, 20 bp, Artificial Sequence
  Description of Artificial Sequence: Synthetic oligonucleotide
  Target: LAMA2; (+) strand; PAM type: NRG; PAM sequence: TGG
tctcatagcactgtagcctg

SEQ ID NO: 177291 - DNA, 20 bp, Artificial Sequence
  Description of Artificial Sequence: Synthetic oligonucleotide
  Target: LAMA2; (+) strand; PAM type: NRG; PAM sequence: CAG
tagcctgtggtatataatta

SEQ ID NO: 177292 - DNA, 20 bp, Artificial Sequence
  Description of Artificial Sequence: Synthetic oligonucleotide
  Target: LAMA2; (+) strand; PAM type: NRG; PAM sequence: CAG
cagttaacccttgaccaatg

SEQ ID NO: 177293 - DNA, 20 bp, Artificial Sequence
  Description of Artificial Sequence: Synthetic oligonucleotide
  Target: LAMA2; (+) strand; PAM type: NRG; PAM sequence: AGG
agttaacccttgaccaatgc

SEQ ID NO: 177294 - DNA, 20 bp, Artificial Sequence
  Description of Artificial Sequence: Synthetic oligonucleotide
  Target: LAMA2; (+) strand; PAM type: NRG; PAM sequence: GGG
gttaacccttgaccaatgca

SEQ ID NO: 177295 - DNA, 20 bp, Artificial Sequence
  Description of Artificial Sequence: Synthetic oligonucleotide
  Target: LAMA2; (+) strand; PAM type: NRG; PAM sequence: GGG
ttaacccttgaccaatgcag

SEQ ID NO: 177296 - DNA, 20 bp, Artificial Sequence
  Description of Artificial Sequence: Synthetic oligonucleotide
  Target: LAMA2; (+) strand; PAM type: NRG; PAM sequence: TGG
cccttgaccaatgcaggggt

SEQ ID NO: 177297 - DNA, 20 bp, Artificial Sequence
  Description of Artificial Sequence: Synthetic oligonucleotide
  Target: LAMA2; (+) strand; PAM type: NRG; PAM sequence: GAG
cttgaccaatgcaggggttg

SEQ ID NO: 177298 - DNA, 20 bp, Artificial Sequence
  Description of Artificial Sequence: Synthetic oligonucleotide
  Target: LAMA2; (+) strand; PAM type: NRG; PAM sequence: GAG
tgaccaatgcaggggttgga

SEQ ID NO: 177299 - DNA, 20 bp, Artificial Sequence
  Description of Artificial Sequence: Synthetic oligonucleotide
  Target: LAMA2; (+) strand; PAM type: NRG; PAM sequence: TGG
aatgcaggggttggagagca

SEQ ID NO: 177300 - DNA, 20 bp, Artificial Sequence
  Description of Artificial Sequence: Synthetic oligonucleotide
  Target: LAMA2; (+) strand; PAM type: NRG; PAM sequence: CAG
ggagagcatggacccctgca

SEQ ID NO: 177301 - DNA, 20 bp, Artificial Sequence
  Description of Artificial Sequence: Synthetic oligonucleotide
  Target: LAMA2; (+) strand; PAM type: NRG; PAM sequence: TAG
tgaaaatccatgtataacat

SEQ ID NO: 177302 - DNA, 20 bp, Artificial Sequence
  Description of Artificial Sequence: Synthetic oligonucleotide
  Target: LAMA2; (+) strand; PAM type: NRG; PAM sequence: AAG
taaactttataaactaaaaa

SEQ ID NO: 177303 - DNA, 20 bp, Artificial Sequence
  Description of Artificial Sequence: Synthetic oligonucleotide
  Target: LAMA2; (+) strand; PAM type: NRG; PAM sequence: AAG
taaaaaaagaatctattccc

SEQ ID NO: 177304 - DNA, 20 bp, Artificial Sequence
  Description of Artificial Sequence: Synthetic oligonucleotide
  Target: LAMA2; (+) strand; PAM type: NRG; PAM sequence: CAG
cccaagcccaaataatgaat

SEQ ID NO: 177305 - DNA, 20 bp, Artificial Sequence
  Description of Artificial Sequence: Synthetic oligonucleotide
  Target: LAMA2; (+) strand; PAM type: NRG; PAM sequence: TGG
tcagtgcattgcttgacata

SEQ ID NO: 177306 - DNA, 20 bp, Artificial Sequence
  Description of Artificial Sequence: Synthetic oligonucleotide
  Target: LAMA2; (+) strand; PAM type: NRG; PAM sequence: CAG
acatatggtgctgtcccaca

SEQ ID NO: 177307 - DNA, 20 bp, Artificial Sequence
  Description of Artificial Sequence: Synthetic oligonucleotide
  Target: LAMA2; (+) strand; PAM type: NRG; PAM sequence: GAG
atatggtgctgtcccacaca

SEQ ID NO: 177308 - DNA, 20 bp, Artificial Sequence
  Description of Artificial Sequence: Synthetic oligonucleotide
  Target: LAMA2; (+) strand; PAM type: NRG; PAM sequence: CAG
gtgctgtcccacacagagaa

SEQ ID NO: 177309 - DNA, 20 bp, Artificial Sequence
  Description of Artificial Sequence: Synthetic oligonucleotide
  Target: LAMA2; (+) strand; PAM type: NRG; PAM sequence: AAG
gaaacattattccaatcatt

SEQ ID NO: 177310 - DNA, 20 bp, Artificial Sequence
  Description of Artificial Sequence: Synthetic oligonucleotide
  Target: LAMA2; (+) strand; PAM type: NRG; PAM sequence: CAG
atcattaagttttatcaaac

SEQ ID NO: 177311 - DNA, 20 bp, Artificial Sequence
  Description of Artificial Sequence: Synthetic oligonucleotide
  Target: LAMA2; (+) strand; PAM type: NRG; PAM sequence: AAG
aagttttatcaaaccagttg

SEQ ID NO: 177312 - DNA, 20 bp, Artificial Sequence
  Description of Artificial Sequence: Synthetic oligonucleotide
  Target: LAMA2; (+) strand; PAM type: NRG; PAM sequence: CAG
gttgaagccttccttctata

SEQ ID NO: 177313 - DNA, 20 bp, Artificial Sequence
  Description of Artificial Sequence: Synthetic oligonucleotide
  Target: LAMA2; (+) strand; PAM type: NRG; PAM sequence: TGG
gaagccttccttctatacag

SEQ ID NO: 177314 - DNA, 20 bp, Artificial Sequence
  Description of Artificial Sequence: Synthetic oligonucleotide
  Target: LAMA2; (+) strand; PAM type: NRG; PAM sequence: CAG
acagtggtcctccaaacact

SEQ ID NO: 177315 - DNA, 20 bp, Artificial Sequence
  Description of Artificial Sequence: Synthetic oligonucleotide
  Target: LAMA2; (+) strand; PAM type: NRG; PAM sequence: CAG
aaacactcagtcattccgtt

SEQ ID NO: 177316 - DNA, 20 bp, Artificial Sequence
  Description of Artificial Sequence: Synthetic oligonucleotide
  Target: LAMA2; (+) strand; PAM type: NRG; PAM sequence: AAG
ctcagtcattccgttcagac

SEQ ID NO: 177317 - DNA, 20 bp, Artificial Sequence
  Description of Artificial Sequence: Synthetic oligonucleotide
  Target: LAMA2; (+) strand; PAM type: NRG; PAM sequence: TGG
agtcattccgttcagacaag

SEQ ID NO: 177318 - DNA, 20 bp, Artificial Sequence
  Description of Artificial Sequence: Synthetic oligonucleotide
  Target: LAMA2; (+) strand; PAM type: NRG; PAM sequence: GGG
gtcattccgttcagacaagt

SEQ ID NO: 177319 - DNA, 20 bp, Artificial Sequence
  Description of Artificial Sequence: Synthetic oligonucleotide
  Target: LAMA2; (+) strand; PAM type: NRG; PAM sequence: AAG
gttcagacaagtgggtcttg

SEQ ID NO: 177320 - DNA, 20 bp, Artificial Sequence
  Description of Artificial Sequence: Synthetic oligonucleotide
  Target: LAMA2; (+) strand; PAM type: NRG; PAM sequence: GAG
aagtgggtcttgaagattct

SEQ ID NO: 177321 - DNA, 20 bp, Artificial Sequence
  Description of Artificial Sequence: Synthetic oligonucleotide
  Target: LAMA2; (+) strand; PAM type: NRG; PAM sequence: TGG
tcttgaagattctgagatca

SEQ ID NO: 177322 - DNA, 20 bp, Artificial Sequence
  Description of Artificial Sequence: Synthetic oligonucleotide
  Target: LAMA2; (+) strand; PAM type: NRG; PAM sequence: GAG
cttgcaaacgctaacctgtt

SEQ ID NO: 177323 - DNA, 20 bp, Artificial Sequence
  Description of Artificial Sequence: Synthetic oligonucleotide
  Target: LAMA2; (+) strand; PAM type: NRG; PAM sequence: AAG
ttattttatattttaaaaat

SEQ ID NO: 177324 - DNA, 20 bp, Artificial Sequence
  Description of Artificial Sequence: Synthetic oligonucleotide
  Target: LAMA2; (+) strand; PAM type: NRG; PAM sequence: GAG
attttatattttaaaaataa

SEQ ID NO: 177325 - DNA, 20 bp, Artificial Sequence
  Description of Artificial Sequence: Synthetic oligonucleotide
  Target: LAMA2; (+) strand; PAM type: NRG; PAM sequence: TGG
ttaaaaataagagaataaac

SEQ ID NO: 177326 - DNA, 20 bp, Artificial Sequence
  Description of Artificial Sequence: Synthetic oligonucleotide
  Target: LAMA2; (+) strand; PAM type: NRG; PAM sequence: CAG
gagaataaactggaatactg

SEQ ID NO: 177327 - DNA, 20 bp, Artificial Sequence
  Description of Artificial Sequence: Synthetic oligonucleotide
  Target: LAMA2; (+) strand; PAM type: NRG; PAM sequence: AAG
actgcagtgctgctaaacca

SEQ ID NO: 177328 - DNA, 20 bp, Artificial Sequence
  Description of Artificial Sequence: Synthetic oligonucleotide
  Target: LAMA2; (+) strand; PAM type: NRG; PAM sequence: TAG
tgctaaaccaaagtatgata

SEQ ID NO: 177329 - DNA, 20 bp, Artificial Sequence
  Description of Artificial Sequence: Synthetic oligonucleotide
  Target: LAMA2; (+) strand; PAM type: NRG; PAM sequence: AGG
gctaaaccaaagtatgatat

SEQ ID NO: 177330 - DNA, 20 bp, Artificial Sequence
  Description of Artificial Sequence: Synthetic oligonucleotide
  Target: LAMA2; (+) strand; PAM type: NRG; PAM sequence: GAG
taaaccaaagtatgatatag

SEQ ID NO: 177331 - DNA, 20 bp, Artificial Sequence
  Description of Artificial Sequence: Synthetic oligonucleotide
  Target: LAMA2; (+) strand; PAM type: NRG; PAM sequence: AAG
ataggagtgcaattgtgact

SEQ ID NO: 177332 - DNA, 20 bp, Artificial Sequence
  Description of Artificial Sequence: Synthetic oligonucleotide
  Target: LAMA2; (+) strand; PAM type: NRG; PAM sequence: AGG
taggagtgcaattgtgacta

SEQ ID NO: 177333 - DNA, 20 bp, Artificial Sequence
  Description of Artificial Sequence: Synthetic oligonucleotide
  Target: LAMA2; (+) strand; PAM type: NRG; PAM sequence: GGG
aggagtgcaattgtgactaa

SEQ ID NO: 177334 - DNA, 20 bp, Artificial Sequence
  Description of Artificial Sequence: Synthetic oligonucleotide
  Target: LAMA2; (+) strand; PAM type: NRG; PAM sequence: AAG
aagggatccttttattatta

SEQ ID NO: 177335 - DNA, 20 bp, Artificial Sequence
  Description of Artificial Sequence: Synthetic oligonucleotide
  Target: LAMA2; (+) strand; PAM type: NRG; PAM sequence: CAG
atattaccctttgcctgaat

SEQ ID NO: 177336 - DNA, 20 bp, Artificial Sequence
  Description of Artificial Sequence: Synthetic oligonucleotide
  Target: LAMA2; (+) strand; PAM type: NRG; PAM sequence: TAG
tgcctgaatcagcctttcca

SEQ ID NO: 177337 - DNA, 20 bp, Artificial Sequence
  Description of Artificial Sequence: Synthetic oligonucleotide
  Target: LAMA2; (+) strand; PAM type: NRG; PAM sequence: CAG
ctgaatcagcctttccatag

SEQ ID NO: 177338 - DNA, 20 bp, Artificial Sequence
  Description of Artificial Sequence: Synthetic oligonucleotide
  Target: LAMA2; (+) strand; PAM type: NRG; PAM sequence: AGG
tgaatcagcctttccatagc

SEQ ID NO: 177339 - DNA, 20 bp, Artificial Sequence
  Description of Artificial Sequence: Synthetic oligonucleotide
  Target: LAMA2; (+) strand; PAM type: NRG; PAM sequence: AAG
tttccatagcaggcatgcaa

SEQ ID NO: 177340 - DNA, 20 bp, Artificial Sequence
  Description of Artificial Sequence: Synthetic oligonucleotide
  Target: LAMA2; (+) strand; PAM type: NRG; PAM sequence: AAG
atagcaggcatgcaaaagac

SEQ ID NO: 177341 - DNA, 20 bp, Artificial Sequence
  Description of Artificial Sequence: Synthetic oligonucleotide
  Target: LAMA2; (+) strand; PAM type: NRG; PAM sequence: TAG
tgctctattgaccacaattt

SEQ ID NO: 177342 - DNA, 20 bp, Artificial Sequence
  Description of Artificial Sequence: Synthetic oligonucleotide
  Target: LAMA2; (+) strand; PAM type: NRG; PAM sequence: AAG
tgaccacaattttagactaa

SEQ ID NO: 177343 - DNA, 20 bp, Artificial Sequence
  Description of Artificial Sequence: Synthetic oligonucleotide
  Target: LAMA2; (+) strand; PAM type: NRG; PAM sequence: AGG
gaccacaattttagactaaa

SEQ ID NO: 177344 - DNA, 20 bp, Artificial Sequence
  Description of Artificial Sequence: Synthetic oligonucleotide
  Target: LAMA2; (+) strand; PAM type: NRG; PAM sequence: AAG
tagactaaaaggatgaaatt

SEQ ID NO: 177345 - DNA, 20 bp, Artificial Sequence
  Description of Artificial Sequence: Synthetic oligonucleotide
  Target: LAMA2; (+) strand; PAM type: NRG; PAM sequence: TGG
taaaaggatgaaattaagcc

SEQ ID NO: 177346 - DNA, 20 bp, Artificial Sequence
  Description of Artificial Sequence: Synthetic oligonucleotide
  Target: LAMA2; (+) strand; PAM type: NRG; PAM sequence: GGG
aaaaggatgaaattaagcct

SEQ ID NO: 177347 - DNA, 20 bp, Artificial Sequence
  Description of Artificial Sequence: Synthetic oligonucleotide
  Target: LAMA2; (+) strand; PAM type: NRG; PAM sequence: TGG
gaaattaagcctgggtcccc

SEQ ID NO: 177348 - DNA, 20 bp, Artificial Sequence
  Description of Artificial Sequence: Synthetic oligonucleotide
  Target: LAMA2; (+) strand; PAM type: NRG; PAM sequence: TGG
ctgggtcccctggcctactg

SEQ ID NO: 177349 - DNA, 20 bp, Artificial Sequence
  Description of Artificial Sequence: Synthetic oligonucleotide
  Target: LAMA2; (+) strand; PAM type: NRG; PAM sequence: TGG
tcccctggcctactgtggtc

SEQ ID NO: 177350 - DNA, 20 bp, Artificial Sequence
  Description of Artificial Sequence: Synthetic oligonucleotide
  Target: LAMA2; (+) strand; PAM type: NRG; PAM sequence: GAG
ccctggcctactgtggtctg

SEQ ID NO: 177351 - DNA, 20 bp, Artificial Sequence
  Description of Artificial Sequence: Synthetic oligonucleotide
  Target: LAMA2; (+) strand; PAM type: NRG; PAM sequence: AAG
ctactgtggtctggagaaca

SEQ ID NO: 177352 - DNA, 20 bp, Artificial Sequence
  Description of Artificial Sequence: Synthetic oligonucleotide
  Target: LAMA2; (+) strand; PAM type: NRG; PAM sequence: CAG
ctgtggtctggagaacaaag

SEQ ID NO: 177353 - DNA, 20 bp, Artificial Sequence
  Description of Artificial Sequence: Synthetic oligonucleotide
  Target: LAMA2; (+) strand; PAM type: NRG; PAM sequence: CAG
gagaacaaagcagtcttttc

SEQ ID NO: 177354 - DNA, 20 bp, Artificial Sequence
  Description of Artificial Sequence: Synthetic oligonucleotide
  Target: LAMA2; (+) strand; PAM type: NRG; PAM sequence: AGG
agaacaaagcagtcttttcc

SEQ ID NO: 177355 - DNA, 20 bp, Artificial Sequence
  Description of Artificial Sequence: Synthetic oligonucleotide
  Target: LAMA2; (+) strand; PAM type: NRG; PAM sequence: AAG
aattgctgatccctcataca

SEQ ID NO: 177356 - DNA, 20 bp, Artificial Sequence
  Description of Artificial Sequence: Synthetic oligonucleotide
  Target: LAMA2; (+) strand; PAM type: NRG; PAM sequence: TAG
caaagttttgattcctcctt

SEQ ID NO: 177357 - DNA, 20 bp, Artificial Sequence
  Description of Artificial Sequence: Synthetic oligonucleotide
  Target: LAMA2; (+) strand; PAM type: NRG; PAM sequence: GAG
aagttttgattcctccttta

SEQ ID NO: 177358 - DNA, 20 bp, Artificial Sequence
  Description of Artificial Sequence: Synthetic oligonucleotide
  Target: LAMA2; (+) strand; PAM type: NRG; PAM sequence: TGG
ttcctcctttagagtgtgaa

SEQ ID NO: 177359 - DNA, 20 bp, Artificial Sequence
  Description of Artificial Sequence: Synthetic oligonucleotide
  Target: LAMA2; (+) strand; PAM type: NRG; PAM sequence: TGG
ctcctttagagtgtgaatgg

SEQ ID NO: 177360 - DNA, 20 bp, Artificial Sequence
  Description of Artificial Sequence: Synthetic oligonucleotide
  Target: LAMA2; (+) strand; PAM type: NRG; PAM sequence: CAG
tggaaataaaaaaataaaac

SEQ ID NO: 177361 - DNA, 20 bp, Artificial Sequence
  Description of Artificial Sequence: Synthetic oligonucleotide
  Target: LAMA2; (+) strand; PAM type: NRG; PAM sequence: AGG
ggaaataaaaaaataaaacc

SEQ ID NO: 177362 - DNA, 20 bp, Artificial Sequence
  Description of Artificial Sequence: Synthetic oligonucleotide
  Target: LAMA2; (+) strand; PAM type: NRG; PAM sequence: GGG
gaaataaaaaaataaaacca

SEQ ID NO: 177363 - DNA, 20 bp, Artificial Sequence
  Description of Artificial Sequence: Synthetic oligonucleotide
  Target: LAMA2; (+) strand; PAM type: NRG; PAM sequence: TGG
ataaaaaaataaaaccaggg

SEQ ID NO: 177364 - DNA, 20 bp, Artificial Sequence
  Description of Artificial Sequence: Synthetic oligonucleotide
  Target: LAMA2; (+) strand; PAM type: NRG; PAM sequence: TAG
aaaccagggtggacttccat

SEQ ID NO: 177365 - DNA, 20 bp, Artificial Sequence
  Description of Artificial Sequence: Synthetic oligonucleotide
  Target: LAMA2; (+) strand; PAM type: NRG; PAM sequence: GAG
accagggtggacttccatta

SEQ ID NO: 177366 - DNA, 20 bp, Artificial Sequence
  Description of Artificial Sequence: Synthetic oligonucleotide
  Target: LAMA2; (+) strand; PAM type: NRG; PAM sequence: AAG
tccattagagaaaaaacaat

SEQ ID NO: 177367 - DNA, 20 bp, Artificial Sequence
  Description of Artificial Sequence: Synthetic oligonucleotide
  Target: LAMA2; (+) strand; PAM type: NRG; PAM sequence: TGG
attagagaaaaaacaataag

SEQ ID NO: 177368 - DNA, 20 bp, Artificial Sequence
  Description of Artificial Sequence: Synthetic oligonucleotide
  Target: LAMA2; (+) strand; PAM type: NRG; PAM sequence: TAG
aaaaacaataagtggcaaaa

SEQ ID NO: 177369 - DNA, 20 bp, Artificial Sequence
  Description of Artificial Sequence: Synthetic oligonucleotide
  Target: LAMA2; (+) strand; PAM type: NRG; PAM sequence: TGG
aacaataagtggcaaaatag

SEQ ID NO: 177370 - DNA, 20 bp, Artificial Sequence
  Description of Artificial Sequence: Synthetic oligonucleotide
  Target: LAMA2; (+) strand; PAM type: NRG; PAM sequence: TAG
tggcaaaatagtggcaaata

SEQ ID NO: 177371 - DNA, 20 bp, Artificial Sequence
  Description of Artificial Sequence: Synthetic oligonucleotide
  Target: LAMA2; (+) strand; PAM type: NRG; PAM sequence: GAG
gcaaaatagtggcaaatata

SEQ ID NO: 177372 - DNA, 20 bp, Artificial Sequence
  Description of Artificial Sequence: Synthetic oligonucleotide
  Target: LAMA2; (+) strand; PAM type: NRG; PAM sequence: AGG
caaaatagtggcaaatatag

SEQ ID NO: 177373 - DNA, 20 bp, Artificial Sequence
  Description of Artificial Sequence: Synthetic oligonucleotide
  Target: LAMA2; (+) strand; PAM type: NRG; PAM sequence: GGG
aaaatagtggcaaatataga

SEQ ID NO: 177374 - DNA, 20 bp, Artificial Sequence
  Description of Artificial Sequence: Synthetic oligonucleotide
  Target: LAMA2; (+) strand; PAM type: NRG; PAM sequence: GGG
aaatagtggcaaatatagag

SEQ ID NO: 177375 - DNA, 20 bp, Artificial Sequence
  Description of Artificial Sequence: Synthetic oligonucleotide
  Target: LAMA2; (+) strand; PAM type: NRG; PAM sequence: CAG
tagtggcaaatatagagggg

SEQ ID NO: 177376 - DNA, 20 bp, Artificial Sequence
  Description of Artificial Sequence: Synthetic oligonucleotide
  Target: LAMA2; (+) strand; PAM type: NRG; PAM sequence: AGG
agtggcaaatatagaggggc

SEQ ID NO: 177377 - DNA, 20 bp, Artificial Sequence
  Description of Artificial Sequence: Synthetic oligonucleotide
  Target: LAMA2; (+) strand; PAM type: NRG; PAM sequence: TGG
tatagaggggcaggttctat

SEQ ID NO: 177378 - DNA, 20 bp, Artificial Sequence
  Description of Artificial Sequence: Synthetic oligonucleotide
  Target: LAMA2; (+) strand; PAM type: NRG; PAM sequence: AAG
gaggggcaggttctattgga

SEQ ID NO: 177379 - DNA, 20 bp, Artificial Sequence
  Description of Artificial Sequence: Synthetic oligonucleotide
  Target: LAMA2; (+) strand; PAM type: NRG; PAM sequence: AAG
ctattggaaagattatccct

SEQ ID NO: 177380 - DNA, 20 bp, Artificial Sequence
  Description of Artificial Sequence: Synthetic oligonucleotide
  Target: LAMA2; (+) strand; PAM type: NRG; PAM sequence: GAG
attggaaagattatccctaa

SEQ ID NO: 177381 - DNA, 20 bp, Artificial Sequence
  Description of Artificial Sequence: Synthetic oligonucleotide
  Target: LAMA2; (+) strand; PAM type: NRG; PAM sequence: GAG
gaaagattatccctaagagc

SEQ ID NO: 177382 - DNA, 20 bp, Artificial Sequence
  Description of Artificial Sequence: Synthetic oligonucleotide
  Target: LAMA2; (+) strand; PAM type: NRG; PAM sequence: TAG
ttatccctaagagcgagacg

SEQ ID NO: 177383 - DNA, 20 bp, Artificial Sequence
  Description of Artificial Sequence: Synthetic oligonucleotide
  Target: LAMA2; (+) strand; PAM type: NRG; PAM sequence: GAG
catatccaaccccaccatgt

SEQ ID NO: 177384 - DNA, 20 bp, Artificial Sequence
  Description of Artificial Sequence: Synthetic oligonucleotide
  Target: LAMA2; (+) strand; PAM type: NRG; PAM sequence: TAG
atccaaccccaccatgtgag

SEQ ID NO: 177385 - DNA, 20 bp, Artificial Sequence
  Description of Artificial Sequence: Synthetic oligonucleotide
  Target: LAMA2; (+) strand; PAM type: NRG; PAM sequence: GAG
ccaaccccaccatgtgagta

SEQ ID NO: 177386 - DNA, 20 bp, Artificial Sequence
  Description of Artificial Sequence: Synthetic oligonucleotide
  Target: LAMA2; (+) strand; PAM type: NRG; PAM sequence: AGG
caaccccaccatgtgagtag

SEQ ID NO: 177387 - DNA, 20 bp, Artificial Sequence
  Description of Artificial Sequence: Synthetic oligonucleotide
  Target: LAMA2; (+) strand; PAM type: NRG; PAM sequence: AAG
ccaccatgtgagtagaggac

SEQ ID NO: 177388 - DNA, 20 bp, Artificial Sequence
  Description of Artificial Sequence: Synthetic oligonucleotide
  Target: LAMA2; (+) strand; PAM type: NRG; PAM sequence: CAG
gaggacaagaaacaaacatt

SEQ ID NO: 177389 - DNA, 20 bp, Artificial Sequence
  Description of Artificial Sequence: Synthetic oligonucleotide
  Target: LAMA2; (+) strand; PAM type: NRG; PAM sequence: CAG
aacactcctgtatatcatct

SEQ ID NO: 177390 - DNA, 20 bp, Artificial Sequence
  Description of Artificial Sequence: Synthetic oligonucleotide
  Target: LAMA2; (+) strand; PAM type: NRG; PAM sequence: AAG
ctcctgtatatcatctcagc

SEQ ID NO: 177391 - DNA, 20 bp, Artificial Sequence
  Description of Artificial Sequence: Synthetic oligonucleotide
  Target: LAMA2; (+) strand; PAM type: NRG; PAM sequence: GAG
cctgtatatcatctcagcaa

SEQ ID NO: 177392 - DNA, 20 bp, Artificial Sequence
  Description of Artificial Sequence: Synthetic oligonucleotide
  Target: LAMA2; (+) strand; PAM type: NRG; PAM sequence: AAG
tatcatctcagcaagagaca

SEQ ID NO: 177393 - DNA, 20 bp, Artificial Sequence
  Description of Artificial Sequence: Synthetic oligonucleotide
  Target: LAMA2; (+) strand; PAM type: NRG; PAM sequence: AGG
atcatctcagcaagagacaa

SEQ ID NO: 177394 - DNA, 20 bp, Artificial Sequence
  Description of Artificial Sequence: Synthetic oligonucleotide
  Target: LAMA2; (+) strand; PAM type: NRG; PAM sequence: TGG
aaaggcctgtgcaataaaaa

SEQ ID NO: 177395 - DNA, 20 bp, Artificial Sequence
  Description of Artificial Sequence: Synthetic oligonucleotide
  Target: LAMA2; (+) strand; PAM type: NRG; PAM sequence: GGG
aaggcctgtgcaataaaaat

SEQ ID NO: 177396 - DNA, 20 bp, Artificial Sequence
  Description of Artificial Sequence: Synthetic oligonucleotide
  Target: LAMA2; (+) strand; PAM type: NRG; PAM sequence: GGG
aggcctgtgcaataaaaatg

SEQ ID NO: 177397 - DNA, 20 bp, Artificial Sequence
  Description of Artificial Sequence: Synthetic oligonucleotide
  Target: LAMA2; (+) strand; PAM type: NRG; PAM sequence: TAG
tgtgcaataaaaatggggct

SEQ ID NO: 177398 - DNA, 20 bp, Artificial Sequence
  Description of Artificial Sequence: Synthetic oligonucleotide
  Target: LAMA2; (+) strand; PAM type: NRG; PAM sequence: GAG
tgcaataaaaatggggctta

SEQ ID NO: 177399 - DNA, 20 bp, Artificial Sequence
  Description of Artificial Sequence: Synthetic oligonucleotide
  Target: LAMA2; (+) strand; PAM type: NRG; PAM sequence: TGG
cttagagctaaaaacttatc

SEQ ID NO: 177400 - DNA, 20 bp, Artificial Sequence
  Description of Artificial Sequence: Synthetic oligonucleotide
  Target: LAMA2; (+) strand; PAM type: NRG; PAM sequence: GGG
ttagagctaaaaacttatct

SEQ ID NO: 177401 - DNA, 20 bp, Artificial Sequence
  Description of Artificial Sequence: Synthetic oligonucleotide
  Target: LAMA2; (+) strand; PAM type: NRG; PAM sequence: CAG
tctgggctttgttgtgtgtt

SEQ ID NO: 177402 - DNA, 20 bp, Artificial Sequence
  Description of Artificial Sequence: Synthetic oligonucleotide
  Target: LAMA2; (+) strand; PAM type: NRG; PAM sequence: CAG
ctttgttgtgtgttcagaat

SEQ ID NO: 177403 - DNA, 20 bp, Artificial Sequence
  Description of Artificial Sequence: Synthetic oligonucleotide
  Target: LAMA2; (+) strand; PAM type: NRG; PAM sequence: GAG
ttgttgtgtgttcagaatca

SEQ ID NO: 177404 - DNA, 20 bp, Artificial Sequence
  Description of Artificial Sequence: Synthetic oligonucleotide
  Target: LAMA2; (+) strand; PAM type: NRG; PAM sequence: GAG
tgtgttcagaatcagagtct

SEQ ID NO: 177405 - DNA, 20 bp, Artificial Sequence
  Description of Artificial Sequence: Synthetic oligonucleotide
  Target: LAMA2; (+) strand; PAM type: NRG; PAM sequence: TGG
aatcagagtctgagattcta

SEQ ID NO: 177406 - DNA, 20 bp, Artificial Sequence
  Description of Artificial Sequence: Synthetic oligonucleotide
  Target: LAMA2; (+) strand; PAM type: NRG; PAM sequence: AAG
gattctatggcgttttttgc

SEQ ID NO: 177407 - DNA, 20 bp, Artificial Sequence
  Description of Artificial Sequence: Synthetic oligonucleotide
  Target: LAMA2; (+) strand; PAM type: NRG; PAM sequence: AAG
ctatggcgttttttgcaagt

SEQ ID NO: 177408 - DNA, 20 bp, Artificial Sequence
  Description of Artificial Sequence: Synthetic oligonucleotide
  Target: LAMA2; (+) strand; PAM type: NRG; PAM sequence: TAG
tttttgcaagtaagttaatt

SEQ ID NO: 177409 - DNA, 20 bp, Artificial Sequence
  Description of Artificial Sequence: Synthetic oligonucleotide
  Target: LAMA2; (+) strand; PAM type: NRG; PAM sequence: CAG
gcaagtaagttaatttagac

SEQ ID NO: 177410 - DNA, 20 bp, Artificial Sequence
  Description of Artificial Sequence: Synthetic oligonucleotide
  Target: LAMA2; (+) strand; PAM type: NRG; PAM sequence: CAG
taatttagaccagaaataaa

SEQ ID NO: 177411 - DNA, 20 bp, Artificial Sequence
  Description of Artificial Sequence: Synthetic oligonucleotide
  Target: LAMA2; (+) strand; PAM type: NRG; PAM sequence: AAG
aaataaacagaaatgccttc

SEQ ID NO: 177412 - DNA, 20 bp, Artificial Sequence
  Description of Artificial Sequence: Synthetic oligonucleotide
  Target: LAMA2; (+) strand; PAM type: NRG; PAM sequence: GAG
ataaacagaaatgccttcaa

SEQ ID NO: 177413 - DNA, 20 bp, Artificial Sequence
  Description of Artificial Sequence: Synthetic oligonucleotide
  Target: LAMA2; (+) strand; PAM type: NRG; PAM sequence: CAG
aaatgccttcaagagactta

SEQ ID NO: 177414 - DNA, 20 bp, Artificial Sequence
  Description of Artificial Sequence: Synthetic oligonucleotide
  Target: LAMA2; (+) strand; PAM type: NRG; PAM sequence: AAG
agagacttacagataacata

SEQ ID NO: 177415 - DNA, 20 bp, Artificial Sequence
  Description of Artificial Sequence: Synthetic oligonucleotide
  Target: LAMA2; (+) strand; PAM type: NRG; PAM sequence: AGG
gagacttacagataacataa

SEQ ID NO: 177416 - DNA, 20 bp, Artificial Sequence
  Description of Artificial Sequence: Synthetic oligonucleotide
  Target: LAMA2; (+) strand; PAM type: NRG; PAM sequence: GGG
agacttacagataacataaa

SEQ ID NO: 177417 - DNA, 20 bp, Artificial Sequence
  Description of Artificial Sequence: Synthetic oligonucleotide
  Target: LAMA2; (+) strand; PAM type: NRG; PAM sequence: TGG
ttacagataacataaaggga

SEQ ID NO: 177418 - DNA, 20 bp, Artificial Sequence
  Description of Artificial Sequence: Synthetic oligonucleotide
  Target: LAMA2; (+) strand; PAM type: NRG; PAM sequence: TGG
cagataacataaagggatgg

SEQ ID NO: 177419 - DNA, 20 bp, Artificial Sequence
  Description of Artificial Sequence: Synthetic oligonucleotide
  Target: LAMA2; (+) strand; PAM type: NRG; PAM sequence: GGG
agataacataaagggatggt

SEQ ID NO: 177420 - DNA, 20 bp, Artificial Sequence
  Description of Artificial Sequence: Synthetic oligonucleotide
  Target: LAMA2; (+) strand; PAM type: NRG; PAM sequence: GGG
gataacataaagggatggtg

SEQ ID NO: 177421 - DNA, 20 bp, Artificial Sequence
  Description of Artificial Sequence: Synthetic oligonucleotide
  Target: LAMA2; (+) strand; PAM type: NRG; PAM sequence: AAG
gtggggcctgtgttaaacca

SEQ ID NO: 177422 - DNA, 20 bp, Artificial Sequence
  Description of Artificial Sequence: Synthetic oligonucleotide
  Target: LAMA2; (+) strand; PAM type: NRG; PAM sequence: AAG
aagactatttgtcttattta

SEQ ID NO: 177423 - DNA, 20 bp, Artificial Sequence
  Description of Artificial Sequence: Synthetic oligonucleotide
  Target: LAMA2; (+) strand; PAM type: NRG; PAM sequence: AGG
agactatttgtcttatttaa

SEQ ID NO: 177424 - DNA, 20 bp, Artificial Sequence
  Description of Artificial Sequence: Synthetic oligonucleotide
  Target: LAMA2; (+) strand; PAM type: NRG; PAM sequence: TGG
ttcaaactcaattttcttgc

SEQ ID NO: 177425 - DNA, 20 bp, Artificial Sequence
  Description of Artificial Sequence: Synthetic oligonucleotide
  Target: LAMA2; (+) strand; PAM type: NRG; PAM sequence: GGG
tcaaactcaattttcttgct

SEQ ID NO: 177426 - DNA, 20 bp, Artificial Sequence
  Description of Artificial Sequence: Synthetic oligonucleotide
  Target: LAMA2; (+) strand; PAM type: NRG; PAM sequence: AAG
tcaattttcttgctgggcaa

SEQ ID NO: 177427 - DNA, 20 bp, Artificial Sequence
  Description of Artificial Sequence: Synthetic oligonucleotide
  Target: LAMA2; (+) strand; PAM type: NRG; PAM sequence: AAG
cttgctgggcaaaagaaaac

SEQ ID NO: 177428 - DNA, 20 bp, Artificial Sequence
  Description of Artificial Sequence: Synthetic oligonucleotide
  Target: LAMA2; (+) strand; PAM type: NRG; PAM sequence: AAG
gcaaaagaaaacaagcctgc

SEQ ID NO: 177429 - DNA, 20 bp, Artificial Sequence
  Description of Artificial Sequence: Synthetic oligonucleotide
  Target: LAMA2; (+) strand; PAM type: NRG; PAM sequence: CAG
aaaacaagcctgcaagccca

SEQ ID NO: 177430 - DNA, 20 bp, Artificial Sequence
  Description of Artificial Sequence: Synthetic oligonucleotide
  Target: LAMA2; (+) strand; PAM type: NRG; PAM sequence: TAG
agcccacagtcaccatgtcc

SEQ ID NO: 177431 - DNA, 20 bp, Artificial Sequence
  Description of Artificial Sequence: Synthetic oligonucleotide
  Target: LAMA2; (+) strand; PAM type: NRG; PAM sequence: GAG
cccacagtcaccatgtccta

SEQ ID NO: 177432 - DNA, 20 bp, Artificial Sequence
  Description of Artificial Sequence: Synthetic oligonucleotide
  Target: LAMA2; (+) strand; PAM type: NRG; PAM sequence: AGG
ccacagtcaccatgtcctag

SEQ ID NO: 177433 - DNA, 20 bp, Artificial Sequence
  Description of Artificial Sequence: Synthetic oligonucleotide
  Target: LAMA2; (+) strand; PAM type: NRG; PAM sequence: GAG
acagtcaccatgtcctagag

SEQ ID NO: 177434 - DNA, 20 bp, Artificial Sequence
  Description of Artificial Sequence: Synthetic oligonucleotide
  Target: LAMA2; (+) strand; PAM type: NRG; PAM sequence: CAG
tgtcctagaggagccaaatg

SEQ ID NO: 177435 - DNA, 20 bp, Artificial Sequence
  Description of Artificial Sequence: Synthetic oligonucleotide
  Target: LAMA2; (+) strand; PAM type: NRG; PAM sequence: AGG
gtcctagaggagccaaatgc

SEQ ID NO: 177436 - DNA, 20 bp, Artificial Sequence
  Description of Artificial Sequence: Synthetic oligonucleotide
  Target: LAMA2; (+) strand; PAM type: NRG; PAM sequence: TGG
caaatgcaggtgttgatgtc

SEQ ID NO: 177437 - DNA, 20 bp, Artificial Sequence
  Description of Artificial Sequence: Synthetic oligonucleotide
  Target: LAMA2; (+) strand; PAM type: NRG; PAM sequence: TGG
atgcaggtgttgatgtctgg

SEQ ID NO: 177438 - DNA, 20 bp, Artificial Sequence
  Description of Artificial Sequence: Synthetic oligonucleotide
  Target: LAMA2; (+) strand; PAM type: NRG; PAM sequence: TAG
gtgttgatgtctggtggttt

SEQ ID NO: 177439 - DNA, 20 bp, Artificial Sequence
  Description of Artificial Sequence: Synthetic oligonucleotide
  Target: LAMA2; (+) strand; PAM type: NRG; PAM sequence: TGG
gttttagtttttcattccac

SEQ ID NO: 177440 - DNA, 20 bp, Artificial Sequence
  Description of Artificial Sequence: Synthetic oligonucleotide
  Target: LAMA2; (+) strand; PAM type: NRG; PAM sequence: CAG
gtttttcattccactggctg

SEQ ID NO: 177441 - DNA, 20 bp, Artificial Sequence
  Description of Artificial Sequence: Synthetic oligonucleotide
  Target: LAMA2; (+) strand; PAM type: NRG; PAM sequence: GAG
ttttcattccactggctgca

SEQ ID NO: 177442 - DNA, 20 bp, Artificial Sequence
  Description of Artificial Sequence: Synthetic oligonucleotide
  Target: LAMA2; (+) strand; PAM type: NRG; PAM sequence: AGG
tttcattccactggctgcag

SEQ ID NO: 177443 - DNA, 20 bp, Artificial Sequence
  Description of Artificial Sequence: Synthetic oligonucleotide
  Target: LAMA2; (+) strand; PAM type: NRG; PAM sequence: GGG
ttcattccactggctgcaga

SEQ ID NO: 177444 - DNA, 20 bp, Artificial Sequence
  Description of Artificial Sequence: Synthetic oligonucleotide
  Target: LAMA2; (+) strand; PAM type: NRG; PAM sequence: GGG
tcattccactggctgcagag

SEQ ID NO: 177445 - DNA, 20 bp, Artificial Sequence
  Description of Artificial Sequence: Synthetic oligonucleotide
  Target: LAMA2; (+) strand; PAM type: NRG; PAM sequence: CAG
cccaatatcctgaatctttg

SEQ ID NO: 177446 - DNA, 20 bp, Artificial Sequence
  Description of Artificial Sequence: Synthetic oligonucleotide
  Target: LAMA2; (+) strand; PAM type: NRG; PAM sequence: CAG
atctttgcagaacctgctac

SEQ ID NO: 177447 - DNA, 20 bp, Artificial Sequence
  Description of Artificial Sequence: Synthetic oligonucleotide
  Target: LAMA2; (+) strand; PAM type: NRG; PAM sequence: AAG
tgcagaacctgctaccagac

SEQ ID NO: 177448 - DNA, 20 bp, Artificial Sequence
  Description of Artificial Sequence: Synthetic oligonucleotide
  Target: LAMA2; (+) strand; PAM type: NRG; PAM sequence: AAG
acaccttccctcctttcctg

SEQ ID NO: 177449 - DNA, 20 bp, Artificial Sequence
  Description of Artificial Sequence: Synthetic oligonucleotide
  Target: LAMA2; (+) strand; PAM type: NRG; PAM sequence: TAG
aagctcctactatgaccccc

SEQ ID NO: 177450 - DNA, 20 bp, Artificial Sequence
  Description of Artificial Sequence: Synthetic oligonucleotide
  Target: LAMA2; (+) strand; PAM type: NRG; PAM sequence: TGG
ctcctactatgaccccctag

SEQ ID NO: 177451 - DNA, 20 bp, Artificial Sequence
  Description of Artificial Sequence: Synthetic oligonucleotide
  Target: LAMA2; (+) strand; PAM type: NRG; PAM sequence: GGG
tcctactatgaccccctagt

SEQ ID NO: 177452 - DNA, 20 bp, Artificial Sequence
  Description of Artificial Sequence: Synthetic oligonucleotide
  Target: LAMA2; (+) strand; PAM type: NRG; PAM sequence: GAG
ctactatgaccccctagtgg

SEQ ID NO: 177453 - DNA, 20 bp, Artificial Sequence
  Description of Artificial Sequence: Synthetic oligonucleotide
  Target: LAMA2; (+) strand; PAM type: NRG; PAM sequence: AGG
tactatgaccccctagtggg

SEQ ID NO: 177454 - DNA, 20 bp, Artificial Sequence
  Description of Artificial Sequence: Synthetic oligonucleotide
  Target: LAMA2; (+) strand; PAM type: NRG; PAM sequence: AAG
tatgaccccctagtgggagg

SEQ ID NO: 177455 - DNA, 20 bp, Artificial Sequence
  Description of Artificial Sequence: Synthetic oligonucleotide
  Target: LAMA2; (+) strand; PAM type: NRG; PAM sequence: GAG
tgaccccctagtgggaggaa

SEQ ID NO: 177456 - DNA, 20 bp, Artificial Sequence
  Description of Artificial Sequence: Synthetic oligonucleotide
  Target: LAMA2; (+) strand; PAM type: NRG; PAM sequence: AAG
gtgggaggaagagcatatgc

SEQ ID NO: 177457 - DNA, 20 bp, Artificial Sequence
  Description of Artificial Sequence: Synthetic oligonucleotide
  Target: LAMA2; (+) strand; PAM type: NRG; PAM sequence: TGG
aggaagagcatatgcaagca

SEQ ID NO: 177458 - DNA, 20 bp, Artificial Sequence
  Description of Artificial Sequence: Synthetic oligonucleotide
  Target: LAMA2; (+) strand; PAM type: NRG; PAM sequence: AAG
gcatggtgcttattgcgaac

SEQ ID NO: 177459 - DNA, 20 bp, Artificial Sequence
  Description of Artificial Sequence: Synthetic oligonucleotide
  Target: LAMA2; (+) strand; PAM type: NRG; PAM sequence: CAG
aagatctaatttcttacttt

SEQ ID NO: 177460 - DNA, 20 bp, Artificial Sequence
  Description of Artificial Sequence: Synthetic oligonucleotide
  Target: LAMA2; (+) strand; PAM type: NRG; PAM sequence: CAG
ctaatttcttactttcagat

SEQ ID NO: 177461 - DNA, 20 bp, Artificial Sequence
  Description of Artificial Sequence: Synthetic oligonucleotide
  Target: LAMA2; (+) strand; PAM type: NRG; PAM sequence: AAG
atttcttactttcagatcag

SEQ ID NO: 177462 - DNA, 20 bp, Artificial Sequence
  Description of Artificial Sequence: Synthetic oligonucleotide
  Target: LAMA2; (+) strand; PAM type: NRG; PAM sequence: GAG
ttcttactttcagatcagaa

SEQ ID NO: 177463 - DNA, 20 bp, Artificial Sequence
  Description of Artificial Sequence: Synthetic oligonucleotide
  Target: LAMA2; (+) strand; PAM type: NRG; PAM sequence: AGG
tcttactttcagatcagaag

SEQ ID NO: 177464 - DNA, 20 bp, Artificial Sequence
  Description of Artificial Sequence: Synthetic oligonucleotide
  Target: LAMA2; (+) strand; PAM type: NRG; PAM sequence: GGG
cttactttcagatcagaaga

SEQ ID NO: 177465 - DNA, 20 bp, Artificial Sequence
  Description of Artificial Sequence: Synthetic oligonucleotide
  Target: LAMA2; (+) strand; PAM type: NRG; PAM sequence: CAG
taacctgactccctgtgaaa

SEQ ID NO: 177466 - DNA, 20 bp, Artificial Sequence
  Description of Artificial Sequence: Synthetic oligonucleotide
  Target: LAMA2; (+) strand; PAM type: NRG; PAM sequence: GAG
cctgtgaaacagtcatctct

SEQ ID NO: 177467 - DNA, 20 bp, Artificial Sequence
  Description of Artificial Sequence: Synthetic oligonucleotide
  Target: LAMA2; (+) strand; PAM type: NRG; PAM sequence: AGG
ctgtgaaacagtcatctctg

SEQ ID NO: 177468 - DNA, 20 bp, Artificial Sequence
  Description of Artificial Sequence: Synthetic oligonucleotide
  Target: LAMA2; (+) strand; PAM type: NRG; PAM sequence: TGG
atctctgaggttcccatatg

SEQ ID NO: 177469 - DNA, 20 bp, Artificial Sequence
  Description of Artificial Sequence: Synthetic oligonucleotide
  Target: LAMA2; (+) strand; PAM type: NRG; PAM sequence: TAG
gttcccatatgtggtcactc

SEQ ID NO: 177470 - DNA, 20 bp, Artificial Sequence
  Description of Artificial Sequence: Synthetic oligonucleotide
  Target: LAMA2; (+) strand; PAM type: NRG; PAM sequence: CAG
agtatgtatgtctgtctgtg

SEQ ID NO: 177471 - DNA, 20 bp, Artificial Sequence
  Description of Artificial Sequence: Synthetic oligonucleotide
  Target: LAMA2; (+) strand; PAM type: NRG; PAM sequence: AAG
tatgtctgtctgtgcagaat

SEQ ID NO: 177472 - DNA, 20 bp, Artificial Sequence
  Description of Artificial Sequence: Synthetic oligonucleotide
  Target: LAMA2; (+) strand; PAM type: NRG; PAM sequence: CAG
gtctgtgcagaataagtaat

SEQ ID NO: 177473 - DNA, 20 bp, Artificial Sequence
  Description of Artificial Sequence: Synthetic oligonucleotide
  Target: LAMA2; (+) strand; PAM type: NRG; PAM sequence: CAG
agaataagtaatcagatata

SEQ ID NO: 177474 - DNA, 20 bp, Artificial Sequence
  Description of Artificial Sequence: Synthetic oligonucleotide
  Target: LAMA2; (+) strand; PAM type: NRG; PAM sequence: CAG
agcacatcccaaacttgtga

SEQ ID NO: 177475 - DNA, 20 bp, Artificial Sequence
  Description of Artificial Sequence: Synthetic oligonucleotide
  Target: LAMA2; (+) strand; PAM type: NRG; PAM sequence: TAG
cccaaacttgtgacagctac

SEQ ID NO: 177476 - DNA, 20 bp, Artificial Sequence
  Description of Artificial Sequence: Synthetic oligonucleotide
  Target: LAMA2; (+) strand; PAM type: NRG; PAM sequence: AGG
ccaaacttgtgacagctact

SEQ ID NO: 177477 - DNA, 20 bp, Artificial Sequence
  Description of Artificial Sequence: Synthetic oligonucleotide
  Target: LAMA2; (+) strand; PAM type: NRG; PAM sequence: GGG
caaacttgtgacagctacta

SEQ ID NO: 177478 - DNA, 20 bp, Artificial Sequence
  Description of Artificial Sequence: Synthetic oligonucleotide
  Target: LAMA2; (+) strand; PAM type: NRG; PAM sequence: AAG
cttgtgacagctactaggga

SEQ ID NO: 177479 - DNA, 20 bp, Artificial Sequence
  Description of Artificial Sequence: Synthetic oligonucleotide
  Target: LAMA2; (+) strand; PAM type: NRG; PAM sequence: AGG
ttgtgacagctactagggaa

SEQ ID NO: 177480 - DNA, 20 bp, Artificial Sequence
  Description of Artificial Sequence: Synthetic oligonucleotide
  Target: LAMA2; (+) strand; PAM type: NRG; PAM sequence: GGG
tgtgacagctactagggaaa

SEQ ID NO: 177481 - DNA, 20 bp, Artificial Sequence
  Description of Artificial Sequence: Synthetic oligonucleotide
  Target: LAMA2; (+) strand; PAM type: NRG; PAM sequence: AAG
gacagctactagggaaaggg

SEQ ID NO: 177482 - DNA, 20 bp, Artificial Sequence
  Description of Artificial Sequence: Synthetic oligonucleotide
  Target: LAMA2; (+) strand; PAM type: NRG; PAM sequence: CAG
ctactagggaaagggaagca

SEQ ID NO: 177483 - DNA, 20 bp, Artificial Sequence
  Description of Artificial Sequence: Synthetic oligonucleotide
  Target: LAMA2; (+) strand; PAM type: NRG; PAM sequence: AGG
tactagggaaagggaagcac

SEQ ID NO: 177484 - DNA, 20 bp, Artificial Sequence
  Description of Artificial Sequence: Synthetic oligonucleotide
  Target: LAMA2; (+) strand; PAM type: NRG; PAM sequence: GAG
ctagggaaagggaagcacag

SEQ ID NO: 177485 - DNA, 20 bp, Artificial Sequence
  Description of Artificial Sequence: Synthetic oligonucleotide
  Target: LAMA2; (+) strand; PAM type: NRG; PAM sequence: AAG
cacaggagtaacaatcatga

SEQ ID NO: 177486 - DNA, 20 bp, Artificial Sequence
  Description of Artificial Sequence: Synthetic oligonucleotide
  Target: LAMA2; (+) strand; PAM type: NRG; PAM sequence: AAG
aggagtaacaatcatgaaag

SEQ ID NO: 177487 - DNA, 20 bp, Artificial Sequence
  Description of Artificial Sequence: Synthetic oligonucleotide
  Target: LAMA2; (+) strand; PAM type: NRG; PAM sequence: AGG
ggagtaacaatcatgaaaga

SEQ ID NO: 177488 - DNA, 20 bp, Artificial Sequence
  Description of Artificial Sequence: Synthetic oligonucleotide
  Target: LAMA2; (+) strand; PAM type: NRG; PAM sequence: TAG
taacaatcatgaaagaaggc

SEQ ID NO: 177489 - DNA, 20 bp, Artificial Sequence
  Description of Artificial Sequence: Synthetic oligonucleotide
  Target: LAMA2; (+) strand; PAM type: NRG; PAM sequence: AAG
gaaagaaggctagaaatata

SEQ ID NO: 177490 - DNA, 20 bp, Artificial Sequence
  Description of Artificial Sequence: Synthetic oligonucleotide
  Target: LAMA2; (+) strand; PAM type: NRG; PAM sequence: AGG
aaagaaggctagaaatataa

SEQ ID NO: 177491 - DNA, 20 bp, Artificial Sequence
  Description of Artificial Sequence: Synthetic oligonucleotide
  Target: LAMA2; (+) strand; PAM type: NRG; PAM sequence: CAG
aggctagaaatataaaggtt

SEQ ID NO: 177492 - DNA, 20 bp, Artificial Sequence
  Description of Artificial Sequence: Synthetic oligonucleotide
  Target: LAMA2; (+) strand; PAM type: NRG; PAM sequence: AGG
ggctagaaatataaaggttc

SEQ ID NO: 177493 - DNA, 20 bp, Artificial Sequence
  Description of Artificial Sequence: Synthetic oligonucleotide
  Target: LAMA2; (+) strand; PAM type: NRG; PAM sequence: CAG
caatgattgcctgcataatg

SEQ ID NO: 177494 - DNA, 20 bp, Artificial Sequence
  Description of Artificial Sequence: Synthetic oligonucleotide
  Target: LAMA2; (+) strand; PAM type: NRG; PAM sequence: TGG
gcctgcataatgcagaaaat

SEQ ID NO: 177495 - DNA, 20 bp, Artificial Sequence
  Description of Artificial Sequence: Synthetic oligonucleotide
  Target: LAMA2; (+) strand; PAM type: NRG; PAM sequence: GAG
ctgcataatgcagaaaattg

SEQ ID NO: 177496 - DNA, 20 bp, Artificial Sequence
  Description of Artificial Sequence: Synthetic oligonucleotide
  Target: LAMA2; (+) strand; PAM type: NRG; PAM sequence: AGG
tgcataatgcagaaaattgg

SEQ ID NO: 177497 - DNA, 20 bp, Artificial Sequence
  Description of Artificial Sequence: Synthetic oligonucleotide
  Target: LAMA2; (+) strand; PAM type: NRG; PAM sequence: GGG
gcataatgcagaaaattgga

SEQ ID NO: 177498 - DNA, 20 bp, Artificial Sequence
  Description of Artificial Sequence: Synthetic oligonucleotide
  Target: LAMA2; (+) strand; PAM type: NRG; PAM sequence: AAG
aaattggagggattttttct

SEQ ID NO: 177499 - DNA, 20 bp, Artificial Sequence
  Description of Artificial Sequence: Synthetic oligonucleotide
  Target: LAMA2; (+) strand; PAM type: NRG; PAM sequence: AAG
ttggagggattttttctaag

SEQ ID NO: 177500 - DNA, 20 bp, Artificial Sequence
  Description of Artificial Sequence: Synthetic oligonucleotide
  Target: LAMA2; (+) strand; PAM type: NRG; PAM sequence: AAG
gattttttctaagaagtaca

SEQ ID NO: 177501 - DNA, 20 bp, Artificial Sequence
  Description of Artificial Sequence: Synthetic oligonucleotide
  Target: LAMA2; (+) strand; PAM type: NRG; PAM sequence: TGG
tttctaagaagtacaaagat

SEQ ID NO: 177502 - DNA, 20 bp, Artificial Sequence
  Description of Artificial Sequence: Synthetic oligonucleotide
  Target: LAMA2; (+) strand; PAM type: NRG; PAM sequence: GGG
ttctaagaagtacaaagatt

SEQ ID NO: 177503 - DNA, 20 bp, Artificial Sequence
  Description of Artificial Sequence: Synthetic oligonucleotide
  Target: LAMA2; (+) strand; PAM type: NRG; PAM sequence: TAG
agaagtacaaagattgggtg

SEQ ID NO: 177504 - DNA, 20 bp, Artificial Sequence
  Description of Artificial Sequence: Synthetic oligonucleotide
  Target: LAMA2; (+) strand; PAM type: NRG; PAM sequence: TGG
accttatcaaatcaatttgc

SEQ ID NO: 177505 - DNA, 20 bp, Artificial Sequence
  Description of Artificial Sequence: Synthetic oligonucleotide
  Target: LAMA2; (+) strand; PAM type: NRG; PAM sequence: GAG
cttatcaaatcaatttgctg

SEQ ID NO: 177506 - DNA, 20 bp, Artificial Sequence
  Description of Artificial Sequence: Synthetic oligonucleotide
  Target: LAMA2; (+) strand; PAM type: NRG; PAM sequence: TAG
aaatcaatttgctggagacc

SEQ ID NO: 177507 - DNA, 20 bp, Artificial Sequence
  Description of Artificial Sequence: Synthetic oligonucleotide
  Target: LAMA2; (+) strand; PAM type: NRG; PAM sequence: AGG
aatcaatttgctggagacct

SEQ ID NO: 177508 - DNA, 20 bp, Artificial Sequence
  Description of Artificial Sequence: Synthetic oligonucleotide
  Target: LAMA2; (+) strand; PAM type: NRG; PAM sequence: GAG
tcaatttgctggagacctag

SEQ ID NO: 177509 - DNA, 20 bp, Artificial Sequence
  Description of Artificial Sequence: Synthetic oligonucleotide
  Target: LAMA2; (+) strand; PAM type: NRG; PAM sequence: GAG
aatttgctggagacctagga

SEQ ID NO: 177510 - DNA, 20 bp, Artificial Sequence
  Description of Artificial Sequence: Synthetic oligonucleotide
  Target: LAMA2; (+) strand; PAM type: NRG; PAM sequence: CAG
ggagacctaggagagaaata

SEQ ID NO: 177511 - DNA, 20 bp, Artificial Sequence
  Description of Artificial Sequence: Synthetic oligonucleotide
  Target: LAMA2; (+) strand; PAM type: NRG; PAM sequence: TAG
ctaggagagaaatacagttg

SEQ ID NO: 177512 - DNA, 20 bp, Artificial Sequence
  Description of Artificial Sequence: Synthetic oligonucleotide
  Target: LAMA2; (+) strand; PAM type: NRG; PAM sequence: CGG
aacttctattcttcctcact

SEQ ID NO: 177513 - DNA, 20 bp, Artificial Sequence
  Description of Artificial Sequence: Synthetic oligonucleotide
  Target: LAMA2; (+) strand; PAM type: NRG; PAM sequence: GGG
acttctattcttcctcactc

SEQ ID NO: 177514 - DNA, 20 bp, Artificial Sequence
  Description of Artificial Sequence: Synthetic oligonucleotide
  Target: LAMA2; (+) strand; PAM type: NRG; PAM sequence: CAG
gggtgctcttctttcctacc

SEQ ID NO: 177515 - DNA, 20 bp, Artificial Sequence
  Description of Artificial Sequence: Synthetic oligonucleotide
  Target: LAMA2; (+) strand; PAM type: NRG; PAM sequence: AGG
ggtgctcttctttcctaccc

SEQ ID NO: 177516 - DNA, 20 bp, Artificial Sequence
  Description of Artificial Sequence: Synthetic oligonucleotide
  Target: LAMA2; (+) strand; PAM type: NRG; PAM sequence: AAG
ttctttcctacccaggtctc

SEQ ID NO: 177517 - DNA, 20 bp, Artificial Sequence
  Description of Artificial Sequence: Synthetic oligonucleotide
  Target: LAMA2; (+) strand; PAM type: NRG; PAM sequence: TGG
caggtctcaagatcctgcac

SEQ ID NO: 177518 - DNA, 20 bp, Artificial Sequence
  Description of Artificial Sequence: Synthetic oligonucleotide
  Target: LAMA2; (+) strand; PAM type: NRG; PAM sequence: GGG
aggtctcaagatcctgcact

SEQ ID NO: 177519 - DNA, 20 bp, Artificial Sequence
  Description of Artificial Sequence: Synthetic oligonucleotide
  Target: LAMA2; (+) strand; PAM type: NRG; PAM sequence: TAG
aagatcctgcactgggtatt

SEQ ID NO: 177520 - DNA, 20 bp, Artificial Sequence
  Description of Artificial Sequence: Synthetic oligonucleotide
  Target: LAMA2; (+) strand; PAM type: NRG; PAM sequence: AGG
agatcctgcactgggtattt

SEQ ID NO: 177521 - DNA, 20 bp, Artificial Sequence
  Description of Artificial Sequence: Synthetic oligonucleotide
  Target: LAMA2; (+) strand; PAM type: NRG; PAM sequence: TAG
actgggtatttaggttgact

SEQ ID NO: 177522 - DNA, 20 bp, Artificial Sequence
  Description of Artificial Sequence: Synthetic oligonucleotide
  Target: LAMA2; (+) strand; PAM type: NRG; PAM sequence: AGG
ctgggtatttaggttgactt

SEQ ID NO: 177523 - DNA, 20 bp, Artificial Sequence
  Description of Artificial Sequence: Synthetic oligonucleotide
  Target: LAMA2; (+) strand; PAM type: NRG; PAM sequence: GGG
tgggtatttaggttgactta

SEQ ID NO: 177524 - DNA, 20 bp, Artificial Sequence
  Description of Artificial Sequence: Synthetic oligonucleotide
  Target: LAMA2; (+) strand; PAM type: NRG; PAM sequence: GGG
gggtatttaggttgacttag

SEQ ID NO: 177525 - DNA, 20 bp, Artificial Sequence
  Description of Artificial Sequence: Synthetic oligonucleotide
  Target: LAMA2; (+) strand; PAM type: NRG; PAM sequence: CAG
atttaggttgacttagggga

SEQ ID NO: 177526 - DNA, 20 bp, Artificial Sequence
  Description of Artificial Sequence: Synthetic oligonucleotide
  Target: LAMA2; (+) strand; PAM type: NRG; PAM sequence: AGG
tttaggttgacttaggggac

SEQ ID NO: 177527 - DNA, 20 bp, Artificial Sequence
  Description of Artificial Sequence: Synthetic oligonucleotide
  Target: LAMA2; (+) strand; PAM type: NRG; PAM sequence: GGG
ttaggttgacttaggggaca

SEQ ID NO: 177528 - DNA, 20 bp, Artificial Sequence
  Description of Artificial Sequence: Synthetic oligonucleotide
  Target: LAMA2; (+) strand; PAM type: NRG; PAM sequence: TAG
gacttaggggacagggtctt

SEQ ID NO: 177529 - DNA, 20 bp, Artificial Sequence
  Description of Artificial Sequence: Synthetic oligonucleotide
  Target: LAMA2; (+) strand; PAM type: NRG; PAM sequence: AAG
acagggtctttagaaatctc

SEQ ID NO: 177530 - DNA, 20 bp, Artificial Sequence
  Description of Artificial Sequence: Synthetic oligonucleotide
  Target: LAMA2; (+) strand; PAM type: NRG; PAM sequence: AAG
gggtctttagaaatctcaag

SEQ ID NO: 177531 - DNA, 20 bp, Artificial Sequence
  Description of Artificial Sequence: Synthetic oligonucleotide
  Target: LAMA2; (+) strand; PAM type: NRG; PAM sequence: CAG
aagaagccaaaatctgaaca

SEQ ID NO: 177532 - DNA, 20 bp, Artificial Sequence
  Description of Artificial Sequence: Synthetic oligonucleotide
  Target: LAMA2; (+) strand; PAM type: NRG; PAM sequence: CAG
gtcacttatgcctgtaatcc

SEQ ID NO: 177533 - DNA, 20 bp, Artificial Sequence
  Description of Artificial Sequence: Synthetic oligonucleotide
  Target: LAMA2; (+) strand; PAM type: NRG; PAM sequence: AGG
tcacttatgcctgtaatccc

SEQ ID NO: 177534 - DNA, 20 bp, Artificial Sequence
  Description of Artificial Sequence: Synthetic oligonucleotide
  Target: LAMA2; (+) strand; PAM type: NRG; PAM sequence: AAG
gtaatcccaggtcctttcaa

SEQ ID NO: 177535 - DNA, 20 bp, Artificial Sequence
  Description of Artificial Sequence: Synthetic oligonucleotide
  Target: LAMA2; (+) strand; PAM type: NRG; PAM sequence: TGG
atgaatttcacccttgtgaa

SEQ ID NO: 177536 - DNA, 20 bp, Artificial Sequence
  Description of Artificial Sequence: Synthetic oligonucleotide
  Target: LAMA2; (+) strand; PAM type: NRG; PAM sequence: GGG
tgaatttcacccttgtgaat

SEQ ID NO: 177537 - DNA, 20 bp, Artificial Sequence
  Description of Artificial Sequence: Synthetic oligonucleotide
  Target: LAMA2; (+) strand; PAM type: NRG; PAM sequence: GGG
gaatttcacccttgtgaatg

SEQ ID NO: 177538 - DNA, 20 bp, Artificial Sequence
  Description of Artificial Sequence: Synthetic oligonucleotide
  Target: LAMA2; (+) strand; PAM type: NRG; PAM sequence: CAG
ttgtgaatggggcattcttt

SEQ ID NO: 177539 - DNA, 20 bp, Artificial Sequence
  Description of Artificial Sequence: Synthetic oligonucleotide
  Target: LAMA2; (+) strand; PAM type: NRG; PAM sequence: AGG
tgtgaatggggcattctttc

SEQ ID NO: 177540 - DNA, 20 bp, Artificial Sequence
  Description of Artificial Sequence: Synthetic oligonucleotide
  Target: LAMA2; (+) strand; PAM type: NRG; PAM sequence: GGG
gtgaatggggcattctttca

SEQ ID NO: 177541 - DNA, 20 bp, Artificial Sequence
  Description of Artificial Sequence: Synthetic oligonucleotide
  Target: LAMA2; (+) strand; PAM type: NRG; PAM sequence: GAG
aaaaaataaaaattccattt

SEQ ID NO: 177542 - DNA, 20 bp, Artificial Sequence
  Description of Artificial Sequence: Synthetic oligonucleotide
  Target: LAMA2; (+) strand; PAM type: NRG; PAM sequence: TGG
ttccatttgagaaactcaac

SEQ ID NO: 177543 - DNA, 20 bp, Artificial Sequence
  Description of Artificial Sequence: Synthetic oligonucleotide
  Target: LAMA2; (+) strand; PAM type: NRG; PAM sequence: TGG
atttgagaaactcaactgga

SEQ ID NO: 177544 - DNA, 20 bp, Artificial Sequence
  Description of Artificial Sequence: Synthetic oligonucleotide
  Target: LAMA2; (+) strand; PAM type: NRG; PAM sequence: TAG
tcaactggatggaatttgaa

SEQ ID NO: 177545 - DNA, 20 bp, Artificial Sequence
  Description of Artificial Sequence: Synthetic oligonucleotide
  Target: LAMA2; (+) strand; PAM type: NRG; PAM sequence: TAG
ataaaaatcgtcccgatatt

SEQ ID NO: 177546 - DNA, 20 bp, Artificial Sequence
  Description of Artificial Sequence: Synthetic oligonucleotide
  Target: LAMA2; (+) strand; PAM type: NRG; PAM sequence: AAG
cgtcccgatatttagttgaa

SEQ ID NO: 177547 - DNA, 20 bp, Artificial Sequence
  Description of Artificial Sequence: Synthetic oligonucleotide
  Target: LAMA2; (+) strand; PAM type: NRG; PAM sequence: GAG
ccgatatttagttgaaaagt

SEQ ID NO: 177548 - DNA, 20 bp, Artificial Sequence
  Description of Artificial Sequence: Synthetic oligonucleotide
  Target: LAMA2; (+) strand; PAM type: NRG; PAM sequence: AGG
cgatatttagttgaaaagtg

SEQ ID NO: 177549 - DNA, 20 bp, Artificial Sequence
  Description of Artificial Sequence: Synthetic oligonucleotide
  Target: LAMA2; (+) strand; PAM type: NRG; PAM sequence: TAG
aaaagtgaggaatatataca

SEQ ID NO: 177550 - DNA, 20 bp, Artificial Sequence
  Description of Artificial Sequence: Synthetic oligonucleotide
  Target: LAMA2; (+) strand; PAM type: NRG; PAM sequence: AGG
aaagtgaggaatatatacat

SEQ ID NO: 177551 - DNA, 20 bp, Artificial Sequence
  Description of Artificial Sequence: Synthetic oligonucleotide
  Target: LAMA2; (+) strand; PAM type: NRG; PAM sequence: TAG
tacataggtatacatatgtt

SEQ ID NO: 177552 - DNA, 20 bp, Artificial Sequence
  Description of Artificial Sequence: Synthetic oligonucleotide
  Target: LAMA2; (+) strand; PAM type: NRG; PAM sequence: AGG
acataggtatacatatgttt

SEQ ID NO: 177553 - DNA, 20 bp, Artificial Sequence
  Description of Artificial Sequence: Synthetic oligonucleotide
  Target: LAMA2; (+) strand; PAM type: NRG; PAM sequence: TAG
atataaaaacgaaataaact

SEQ ID NO: 177554 - DNA, 20 bp, Artificial Sequence
  Description of Artificial Sequence: Synthetic oligonucleotide
  Target: LAMA2; (+) strand; PAM type: NRG; PAM sequence: AGG
tataaaaacgaaataaactt

SEQ ID NO: 177555 - DNA, 20 bp, Artificial Sequence
  Description of Artificial Sequence: Synthetic oligonucleotide
  Target: LAMA2; (+) strand; PAM type: NRG; PAM sequence: TGG
aacgaaataaacttaggttc

SEQ ID NO: 177556 - DNA, 20 bp, Artificial Sequence
  Description of Artificial Sequence: Synthetic oligonucleotide
  Target: LAMA2; (+) strand; PAM type: NRG; PAM sequence: AAG
ataaacttaggttctggacc

SEQ ID NO: 177557 - DNA, 20 bp, Artificial Sequence
  Description of Artificial Sequence: Synthetic oligonucleotide
  Target: LAMA2; (+) strand; PAM type: NRG; PAM sequence: AAG
accaagtaatttaaataaaa

SEQ ID NO: 177558 - DNA, 20 bp, Artificial Sequence
  Description of Artificial Sequence: Synthetic oligonucleotide
  Target: LAMA2; (+) strand; PAM type: NRG; PAM sequence: AGG
ccaagtaatttaaataaaaa

SEQ ID NO: 177559 - DNA, 20 bp, Artificial Sequence
  Description of Artificial Sequence: Synthetic oligonucleotide
  Target: LAMA2; (+) strand; PAM type: NRG; PAM sequence: AAG
atttaaataaaaaaggaata

SEQ ID NO: 177560 - DNA, 20 bp, Artificial Sequence
  Description of Artificial Sequence: Synthetic oligonucleotide
  Target: LAMA2; (+) strand; PAM type: NRG; PAM sequence: TAG
aaaaggaataaagtcataaa

SEQ ID NO: 177561 - DNA, 20 bp, Artificial Sequence
  Description of Artificial Sequence: Synthetic oligonucleotide
  Target: LAMA2; (+) strand; PAM type: NRG; PAM sequence: TGG
agcattattataataaaaac

SEQ ID NO: 177562 - DNA, 20 bp, Artificial Sequence
  Description of Artificial Sequence: Synthetic oligonucleotide
  Target: LAMA2; (+) strand; PAM type: NRG; PAM sequence: CAG
taaaaactggtaaaacacac

SEQ ID NO: 177563 - DNA, 20 bp, Artificial Sequence
  Description of Artificial Sequence: Synthetic oligonucleotide
  Target: LAMA2; (+) strand; PAM type: NRG; PAM sequence: AGG
aaaaactggtaaaacacacc

SEQ ID NO: 177564 - DNA, 20 bp, Artificial Sequence
  Description of Artificial Sequence: Synthetic oligonucleotide
  Target: LAMA2; (+) strand; PAM type: NRG; PAM sequence: CAG
gacaattttcaaaccaatgt

SEQ ID NO: 177565 - DNA, 20 bp, Artificial Sequence
  Description of Artificial Sequence: Synthetic oligonucleotide
  Target: LAMA2; (+) strand; PAM type: NRG; PAM sequence: TGG
taccttttacttactgccta

SEQ ID NO: 177566 - DNA, 20 bp, Artificial Sequence
  Description of Artificial Sequence: Synthetic oligonucleotide
  Target: LAMA2; (+) strand; PAM type: NRG; PAM sequence: CAG
cttactgcctatggtaaatc

SEQ ID NO: 177567 - DNA, 20 bp, Artificial Sequence
  Description of Artificial Sequence: Synthetic oligonucleotide
  Target: LAMA2; (+) strand; PAM type: NRG; PAM sequence: CAG
gcactttctcatacatctcc

SEQ ID NO: 177568 - DNA, 20 bp, Artificial Sequence
  Description of Artificial Sequence: Synthetic oligonucleotide
  Target: LAMA2; (+) strand; PAM type: NRG; PAM sequence: CAG
tcccagtttatttctcatat

SEQ ID NO: 177569 - DNA, 20 bp, Artificial Sequence
  Description of Artificial Sequence: Synthetic oligonucleotide
  Target: LAMA2; (+) strand; PAM type: NRG; PAM sequence: AAG
tttctcatatcagtcacatg

SEQ ID NO: 177570 - DNA, 20 bp, Artificial Sequence
  Description of Artificial Sequence: Synthetic oligonucleotide
  Target: LAMA2; (+) strand; PAM type: NRG; PAM sequence: AGG
ttctcatatcagtcacatga

SEQ ID NO: 177571 - DNA, 20 bp, Artificial Sequence
  Description of Artificial Sequence: Synthetic oligonucleotide
  Target: LAMA2; (+) strand; PAM type: NRG; PAM sequence: AAG
tcatatcagtcacatgaagg

SEQ ID NO: 177572 - DNA, 20 bp, Artificial Sequence
  Description of Artificial Sequence: Synthetic oligonucleotide
  Target: LAMA2; (+) strand; PAM type: NRG; PAM sequence: AAG
ctttatttgccatatgtaaa

SEQ ID NO: 177573 - DNA, 20 bp, Artificial Sequence
  Description of Artificial Sequence: Synthetic oligonucleotide
  Target: LAMA2; (+) strand; PAM type: NRG; PAM sequence: AGG
tttatttgccatatgtaaaa

SEQ ID NO: 177574 - DNA, 20 bp, Artificial Sequence
  Description of Artificial Sequence: Synthetic oligonucleotide
  Target: LAMA2; (+) strand; PAM type: NRG; PAM sequence: GGG
ttatttgccatatgtaaaaa

SEQ ID NO: 177575 - DNA, 20 bp, Artificial Sequence
  Description of Artificial Sequence: Synthetic oligonucleotide
  Target: LAMA2; (+) strand; PAM type: NRG; PAM sequence: CAG
ttgccatatgtaaaaaggga

SEQ ID NO: 177576 - DNA, 20 bp, Artificial Sequence
  Description of Artificial Sequence: Synthetic oligonucleotide
  Target: LAMA2; (+) strand; PAM type: NRG; PAM sequence: TAG
tcttccaactctgtgtccta

SEQ ID NO: 177577 - DNA, 20 bp, Artificial Sequence
  Description of Artificial Sequence: Synthetic oligonucleotide
  Target: LAMA2; (+) strand; PAM type: NRG; PAM sequence: CAG
ctatagtgatttcattgtac

SEQ ID NO: 177578 - DNA, 20 bp, Artificial Sequence
  Description of Artificial Sequence: Synthetic oligonucleotide
  Target: LAMA2; (+) strand; PAM type: NRG; PAM sequence: TAG
gtgatttcattgtaccagac

SEQ ID NO: 177579 - DNA, 20 bp, Artificial Sequence
  Description of Artificial Sequence: Synthetic oligonucleotide
  Target: LAMA2; (+) strand; PAM type: NRG; PAM sequence: CAG
cattgtaccagactagattt

SEQ ID NO: 177580 - DNA, 20 bp, Artificial Sequence
  Description of Artificial Sequence: Synthetic oligonucleotide
  Target: LAMA2; (+) strand; PAM type: NRG; PAM sequence: GAG
ttgtaccagactagatttca

SEQ ID NO: 177581 - DNA, 20 bp, Artificial Sequence
  Description of Artificial Sequence: Synthetic oligonucleotide
  Target: LAMA2; (+) strand; PAM type: NRG; PAM sequence: TAG
gatttcagagaaatactgtg

SEQ ID NO: 177582 - DNA, 20 bp, Artificial Sequence
  Description of Artificial Sequence: Synthetic oligonucleotide
  Target: LAMA2; (+) strand; PAM type: NRG; PAM sequence: CAG
ttcagagaaatactgtgtag

SEQ ID NO: 177583 - DNA, 20 bp, Artificial Sequence
  Description of Artificial Sequence: Synthetic oligonucleotide
  Target: LAMA2; (+) strand; PAM type: NRG; PAM sequence: GAG
ctgtgtagcagttttatttt

SEQ ID NO: 177584 - DNA, 20 bp, Artificial Sequence
  Description of Artificial Sequence: Synthetic oligonucleotide
  Target: LAMA2; (+) strand; PAM type: NRG; PAM sequence: TAG
ttttattttgagatcgtaca

SEQ ID NO: 177585 - DNA, 20 bp, Artificial Sequence
  Description of Artificial Sequence: Synthetic oligonucleotide
  Target: LAMA2; (+) strand; PAM type: NRG; PAM sequence: TAG
attttgagatcgtacatagt

SEQ ID NO: 177586 - DNA, 20 bp, Artificial Sequence
  Description of Artificial Sequence: Synthetic oligonucleotide
  Target: LAMA2; (+) strand; PAM type: NRG; PAM sequence: AAG
tagttagttctaatataact

SEQ ID NO: 177587 - DNA, 20 bp, Artificial Sequence
  Description of Artificial Sequence: Synthetic oligonucleotide
  Target: LAMA2; (+) strand; PAM type: NRG; PAM sequence: TAG
actaagccctaatttatatt

SEQ ID NO: 177588 - DNA, 20 bp, Artificial Sequence
  Description of Artificial Sequence: Synthetic oligonucleotide
  Target: LAMA2; (+) strand; PAM type: NRG; PAM sequence: CAG
atttatatttagcatcatgt

SEQ ID NO: 177589 - DNA, 20 bp, Artificial Sequence
  Description of Artificial Sequence: Synthetic oligonucleotide
  Target: LAMA2; (+) strand; PAM type: NRG; PAM sequence: AAG
atgtcagaaacatgataaac

SEQ ID NO: 177590 - DNA, 20 bp, Artificial Sequence
  Description of Artificial Sequence: Synthetic oligonucleotide
  Target: LAMA2; (+) strand; PAM type: NRG; PAM sequence: GAG
gtcagaaacatgataaacaa

SEQ ID NO: 177591 - DNA, 20 bp, Artificial Sequence
  Description of Artificial Sequence: Synthetic oligonucleotide
  Target: LAMA2; (+) strand; PAM type: NRG; PAM sequence: AAG
taactgctcattattaatgc

SEQ ID NO: 177592 - DNA, 20 bp, Artificial Sequence
  Description of Artificial Sequence: Synthetic oligonucleotide
  Target: LAMA2; (+) strand; PAM type: NRG; PAM sequence: TGG
ctgccctgcgatttttattc

SEQ ID NO: 177593 - DNA, 20 bp, Artificial Sequence
  Description of Artificial Sequence: Synthetic oligonucleotide
  Target: LAMA2; (+) strand; PAM type: NRG; PAM sequence: TGG
tctatcttgtgccatttcaa

SEQ ID NO: 177594 - DNA, 20 bp, Artificial Sequence
  Description of Artificial Sequence: Synthetic oligonucleotide
  Target: LAMA2; (+) strand; PAM type: NRG; PAM sequence: GGG
ctatcttgtgccatttcaat

SEQ ID NO: 177595 - DNA, 20 bp, Artificial Sequence
  Description of Artificial Sequence: Synthetic oligonucleotide
  Target: LAMA2; (+) strand; PAM type: NRG; PAM sequence: AAG
atttcaatgggcatgtgaca

SEQ ID NO: 177596 - DNA, 20 bp, Artificial Sequence
  Description of Artificial Sequence: Synthetic oligonucleotide
  Target: LAMA2; (+) strand; PAM type: NRG; PAM sequence: AGG
tttcaatgggcatgtgacaa

SEQ ID NO: 177597 - DNA, 20 bp, Artificial Sequence
  Description of Artificial Sequence: Synthetic oligonucleotide
  Target: LAMA2; (+) strand; PAM type: NRG; PAM sequence: CAG
ttacactgtcattgtgttcc

SEQ ID NO: 177598 - DNA, 20 bp, Artificial Sequence
  Description of Artificial Sequence: Synthetic oligonucleotide
  Target: LAMA2; (+) strand; PAM type: NRG; PAM sequence: GAG
tgcttccattccctcattgt

SEQ ID NO: 177599 - DNA, 20 bp, Artificial Sequence
  Description of Artificial Sequence: Synthetic oligonucleotide
  Target: LAMA2; (+) strand; PAM type: NRG; PAM sequence: TAG
tgcttttgccaaactaattc

SEQ ID NO: 177600 - DNA, 20 bp, Artificial Sequence
  Description of Artificial Sequence: Synthetic oligonucleotide
  Target: LAMA2; (+) strand; PAM type: NRG; PAM sequence: GAG
acatttttcttctactctat

SEQ ID NO: 177601 - DNA, 20 bp, Artificial Sequence
  Description of Artificial Sequence: Synthetic oligonucleotide
  Target: LAMA2; (+) strand; PAM type: NRG; PAM sequence: AGG
catttttcttctactctatg

SEQ ID NO: 177602 - DNA, 20 bp, Artificial Sequence
  Description of Artificial Sequence: Synthetic oligonucleotide
  Target: LAMA2; (+) strand; PAM type: NRG; PAM sequence: GAG
tttttcttctactctatgag

SEQ ID NO: 177603 - DNA, 20 bp, Artificial Sequence
  Description of Artificial Sequence: Synthetic oligonucleotide
  Target: LAMA2; (+) strand; PAM type: NRG; PAM sequence: AGG
ttttcttctactctatgagg

SEQ ID NO: 177604 - DNA, 20 bp, Artificial Sequence
  Description of Artificial Sequence: Synthetic oligonucleotide
  Target: LAMA2; (+) strand; PAM type: NRG; PAM sequence: GAG
ttcttctactctatgaggag

SEQ ID NO: 177605 - DNA, 20 bp, Artificial Sequence
  Description of Artificial Sequence: Synthetic oligonucleotide
  Target: LAMA2; (+) strand; PAM type: NRG; PAM sequence: GAG
ctactctatgaggaggagat

SEQ ID NO: 177606 - DNA, 20 bp, Artificial Sequence
  Description of Artificial Sequence: Synthetic oligonucleotide
  Target: LAMA2; (+) strand; PAM type: NRG; PAM sequence: AAG
tctatgaggaggagatgaga

SEQ ID NO: 177607 - DNA, 20 bp, Artificial Sequence
  Description of Artificial Sequence: Synthetic oligonucleotide
  Target: LAMA2; (+) strand; PAM type: NRG; PAM sequence: AGG
ctatgaggaggagatgagaa

SEQ ID NO: 177608 - DNA, 20 bp, Artificial Sequence
  Description of Artificial Sequence: Synthetic oligonucleotide
  Target: LAMA2; (+) strand; PAM type: NRG; PAM sequence: GGG
tatgaggaggagatgagaaa

SEQ ID NO: 177609 - DNA, 20 bp, Artificial Sequence
  Description of Artificial Sequence: Synthetic oligonucleotide
  Target: LAMA2; (+) strand; PAM type: NRG; PAM sequence: GAG
tgaggaggagatgagaaagg

SEQ ID NO: 177610 - DNA, 20 bp, Artificial Sequence
  Description of Artificial Sequence: Synthetic oligonucleotide
  Target: LAMA2; (+) strand; PAM type: NRG; PAM sequence: GAG
aggaggagatgagaaaggga

SEQ ID NO: 177611 - DNA, 20 bp, Artificial Sequence
  Description of Artificial Sequence: Synthetic oligonucleotide
  Target: LAMA2; (+) strand; PAM type: NRG; PAM sequence: CAG
ggagatgagaaagggagagc

SEQ ID NO: 177612 - DNA, 20 bp, Artificial Sequence
  Description of Artificial Sequence: Synthetic oligonucleotide
  Target: LAMA2; (+) strand; PAM type: NRG; PAM sequence: AAG
gaaagggagagccagactta

SEQ ID NO: 177613 - DNA, 20 bp, Artificial Sequence
  Description of Artificial Sequence: Synthetic oligonucleotide
  Target: LAMA2; (+) strand; PAM type: NRG; PAM sequence: TAG
cttaaagacgtatgtgtgtg

SEQ ID NO: 177614 - DNA, 20 bp, Artificial Sequence
  Description of Artificial Sequence: Synthetic oligonucleotide
  Target: LAMA2; (+) strand; PAM type: NRG; PAM sequence: GAG
cgtatgtgtgtgtagccttt

SEQ ID NO: 177615 - DNA, 20 bp, Artificial Sequence
  Description of Artificial Sequence: Synthetic oligonucleotide
  Target: LAMA2; (+) strand; PAM type: NRG; PAM sequence: TGG
tgtgtgtagcctttgagttt

SEQ ID NO: 177616 - DNA, 20 bp, Artificial Sequence
  Description of Artificial Sequence: Synthetic oligonucleotide
  Target: LAMA2; (+) strand; PAM type: NRG; PAM sequence: TGG
gtgtagcctttgagttttgg

SEQ ID NO: 177617 - DNA, 20 bp, Artificial Sequence
  Description of Artificial Sequence: Synthetic oligonucleotide
  Target: LAMA2; (+) strand; PAM type: NRG; PAM sequence: TAG
gttttggtggatgtgatctt

SEQ ID NO: 177618 - DNA, 20 bp, Artificial Sequence
  Description of Artificial Sequence: Synthetic oligonucleotide
  Target: LAMA2; (+) strand; PAM type: NRG; PAM sequence: GAG
tttggtggatgtgatcttta

SEQ ID NO: 177619 - DNA, 20 bp, Artificial Sequence
  Description of Artificial Sequence: Synthetic oligonucleotide
  Target: LAMA2; (+) strand; PAM type: NRG; PAM sequence: GAG
tggtggatgtgatctttaga

SEQ ID NO: 177620 - DNA, 20 bp, Artificial Sequence
  Description of Artificial Sequence: Synthetic oligonucleotide
  Target: LAMA2; (+) strand; PAM type: NRG; PAM sequence: AAG
ggatgtgatctttagagaga

SEQ ID NO: 177621 - DNA, 20 bp, Artificial Sequence
  Description of Artificial Sequence: Synthetic oligonucleotide
  Target: LAMA2; (+) strand; PAM type: NRG; PAM sequence: TAG
tgtgatctttagagagaaag

SEQ ID NO: 177622 - DNA, 20 bp, Artificial Sequence
  Description of Artificial Sequence: Synthetic oligonucleotide
  Target: LAMA2; (+) strand; PAM type: NRG; PAM sequence: TAG
tagagagaaagtagaatgac

SEQ ID NO: 177623 - DNA, 20 bp, Artificial Sequence
  Description of Artificial Sequence: Synthetic oligonucleotide
  Target: LAMA2; (+) strand; PAM type: NRG; PAM sequence: AGG
agagagaaagtagaatgact

SEQ ID NO: 177624 - DNA, 20 bp, Artificial Sequence
  Description of Artificial Sequence: Synthetic oligonucleotide
  Target: LAMA2; (+) strand; PAM type: NRG; PAM sequence: TGG
aatgactaggcttctgttat

SEQ ID NO: 177625 - DNA, 20 bp, Artificial Sequence
  Description of Artificial Sequence: Synthetic oligonucleotide
  Target: LAMA2; (+) strand; PAM type: NRG; PAM sequence: GGG
atgactaggcttctgttatt

SEQ ID NO: 177626 - DNA, 20 bp, Artificial Sequence
  Description of Artificial Sequence: Synthetic oligonucleotide
  Target: LAMA2; (+) strand; PAM type: NRG; PAM sequence: GAG
aggcttctgttattgggttt

SEQ ID NO: 177627 - DNA, 20 bp, Artificial Sequence
  Description of Artificial Sequence: Synthetic oligonucleotide
  Target: LAMA2; (+) strand; PAM type: NRG; PAM sequence: GAG
gcttctgttattgggtttga

SEQ ID NO: 177628 - DNA, 20 bp, Artificial Sequence
  Description of Artificial Sequence: Synthetic oligonucleotide
  Target: LAMA2; (+) strand; PAM type: NRG; PAM sequence: AAG
gttattgggtttgagagctg

SEQ ID NO: 177629 - DNA, 20 bp, Artificial Sequence
  Description of Artificial Sequence: Synthetic oligonucleotide
  Target: LAMA2; (+) strand; PAM type: NRG; PAM sequence: AGG
ttattgggtttgagagctga

SEQ ID NO: 177630 - DNA, 20 bp, Artificial Sequence
  Description of Artificial Sequence: Synthetic oligonucleotide
  Target: LAMA2; (+) strand; PAM type: NRG; PAM sequence: AAG
ggtttgagagctgaaggaat

SEQ ID NO: 177631 - DNA, 20 bp, Artificial Sequence
  Description of Artificial Sequence: Synthetic oligonucleotide
  Target: LAMA2; (+) strand; PAM type: NRG; PAM sequence: AGG
gtttgagagctgaaggaata

SEQ ID NO: 177632 - DNA, 20 bp, Artificial Sequence
  Description of Artificial Sequence: Synthetic oligonucleotide
  Target: LAMA2; (+) strand; PAM type: NRG; PAM sequence: GAG
ttgagagctgaaggaataag

SEQ ID NO: 177633 - DNA, 20 bp, Artificial Sequence
  Description of Artificial Sequence: Synthetic oligonucleotide
  Target: LAMA2; (+) strand; PAM type: NRG; PAM sequence: GAG
gagagctgaaggaataagga

SEQ ID NO: 177634 - DNA, 20 bp, Artificial Sequence
  Description of Artificial Sequence: Synthetic oligonucleotide
  Target: LAMA2; (+) strand; PAM type: NRG; PAM sequence: AGG
agagctgaaggaataaggag

SEQ ID NO: 177635 - DNA, 20 bp, Artificial Sequence
  Description of Artificial Sequence: Synthetic oligonucleotide
  Target: LAMA2; (+) strand; PAM type: NRG; PAM sequence: GGG
gagctgaaggaataaggaga

SEQ ID NO: 177636 - DNA, 20 bp, Artificial Sequence
  Description of Artificial Sequence: Synthetic oligonucleotide
  Target: LAMA2; (+) strand; PAM type: NRG; PAM sequence: TAG
aggaataaggagagggaatc

SEQ ID NO: 177637 - DNA, 20 bp, Artificial Sequence
  Description of Artificial Sequence: Synthetic oligonucleotide
  Target: LAMA2; (+) strand; PAM type: NRG; PAM sequence: TGG
gaatctagaaaataaaacta

SEQ ID NO: 177638 - DNA, 20 bp, Artificial Sequence
  Description of Artificial Sequence: Synthetic oligonucleotide
  Target: LAMA2; (+) strand; PAM type: NRG; PAM sequence: CAG
taaatcttcttcttattctc

SEQ ID NO: 177639 - DNA, 20 bp, Artificial Sequence
  Description of Artificial Sequence: Synthetic oligonucleotide
  Target: LAMA2; (+) strand; PAM type: NRG; PAM sequence: AAG
tcttattctccagaaatcac

SEQ ID NO: 177640 - DNA, 20 bp, Artificial Sequence
  Description of Artificial Sequence: Synthetic oligonucleotide
  Target: LAMA2; (+) strand; PAM type: NRG; PAM sequence: CAG
aaatcacaagtaaaaaaatt

SEQ ID NO: 177641 - DNA, 20 bp, Artificial Sequence
  Description of Artificial Sequence: Synthetic oligonucleotide
  Target: LAMA2; (+) strand; PAM type: NRG; PAM sequence: TGG
cacaagtaaaaaaattcagt

SEQ ID NO: 177642 - DNA, 20 bp, Artificial Sequence
  Description of Artificial Sequence: Synthetic oligonucleotide
  Target: LAMA2; (+) strand; PAM type: NRG; PAM sequence: AAG
tacaattcaaactgaatcac

SEQ ID NO: 177643 - DNA, 20 bp, Artificial Sequence
  Description of Artificial Sequence: Synthetic oligonucleotide
  Target: LAMA2; (+) strand; PAM type: NRG; PAM sequence: GAG
caattcaaactgaatcacaa

SEQ ID NO: 177644 - DNA, 20 bp, Artificial Sequence
  Description of Artificial Sequence: Synthetic oligonucleotide
  Target: LAMA2; (+) strand; PAM type: NRG; PAM sequence: TAG
caagagttctttcttacttt

SEQ ID NO: 177645 - DNA, 20 bp, Artificial Sequence
  Description of Artificial Sequence: Synthetic oligonucleotide
  Target: LAMA2; (+) strand; PAM type: NRG; PAM sequence: TGG
ttctttcttacttttagtta

SEQ ID NO: 177646 - DNA, 20 bp, Artificial Sequence
  Description of Artificial Sequence: Synthetic oligonucleotide
  Target: LAMA2; (+) strand; PAM type: NRG; PAM sequence: CAG
ctctgtcttttatttaaaat

SEQ ID NO: 177647 - DNA, 20 bp, Artificial Sequence
  Description of Artificial Sequence: Synthetic oligonucleotide
  Target: LAMA2; (+) strand; PAM type: NRG; PAM sequence: CAG
tcttttatttaaaatcagcc

SEQ ID NO: 177648 - DNA, 20 bp, Artificial Sequence
  Description of Artificial Sequence: Synthetic oligonucleotide
  Target: LAMA2; (+) strand; PAM type: NRG; PAM sequence: AGG
cttttatttaaaatcagccc

SEQ ID NO: 177649 - DNA, 20 bp, Artificial Sequence
  Description of Artificial Sequence: Synthetic oligonucleotide
  Target: LAMA2; (+) strand; PAM type: NRG; PAM sequence: GAG
tttatttaaaatcagcccag

SEQ ID NO: 177650 - DNA, 20 bp, Artificial Sequence
  Description of Artificial Sequence: Synthetic oligonucleotide
  Target: LAMA2; (+) strand; PAM type: NRG; PAM sequence: TAG
cccaggagtgcttatttttc

SEQ ID NO: 177651 - DNA, 20 bp, Artificial Sequence
  Description of Artificial Sequence: Synthetic oligonucleotide
  Target: LAMA2; (+) strand; PAM type: NRG; PAM sequence: AGG
ccaggagtgcttatttttct

SEQ ID NO: 177652 - DNA, 20 bp, Artificial Sequence
  Description of Artificial Sequence: Synthetic oligonucleotide
  Target: LAMA2; (+) strand; PAM type: NRG; PAM sequence: AAG
tttcctcgctattattttgt

SEQ ID NO: 177653 - DNA, 20 bp, Artificial Sequence
  Description of Artificial Sequence: Synthetic oligonucleotide
  Target: LAMA2; (+) strand; PAM type: NRG; PAM sequence: TAG
atctgcaattcttctctgaa

SEQ ID NO: 177654 - DNA, 20 bp, Artificial Sequence
  Description of Artificial Sequence: Synthetic oligonucleotide
  Target: LAMA2; (+) strand; PAM type: NRG; PAM sequence: AAG
ctcatctaattctatcacca

SEQ ID NO: 177655 - DNA, 20 bp, Artificial Sequence
  Description of Artificial Sequence: Synthetic oligonucleotide
  Target: LAMA2; (+) strand; PAM type: NRG; PAM sequence: TAG
caccaaagctacaaaatgtt

SEQ ID NO: 177656 - DNA, 20 bp, Artificial Sequence
  Description of Artificial Sequence: Synthetic oligonucleotide
  Target: LAMA2; (+) strand; PAM type: NRG; PAM sequence: TAG
agctacaaaatgtttagatg

SEQ ID NO: 177657 - DNA, 20 bp, Artificial Sequence
  Description of Artificial Sequence: Synthetic oligonucleotide
  Target: LAMA2; (+) strand; PAM type: NRG; PAM sequence: AAG
aaaatgtttagatgtagttc

SEQ ID NO: 177658 - DNA, 20 bp, Artificial Sequence
  Description of Artificial Sequence: Synthetic oligonucleotide
  Target: LAMA2; (+) strand; PAM type: NRG; PAM sequence: CAG
agatgtagttcaagaaattc

SEQ ID NO: 177659 - DNA, 20 bp, Artificial Sequence
  Description of Artificial Sequence: Synthetic oligonucleotide
  Target: LAMA2; (+) strand; PAM type: NRG; PAM sequence: TAG
agaaattccagaaactactt

SEQ ID NO: 177660 - DNA, 20 bp, Artificial Sequence
  Description of Artificial Sequence: Synthetic oligonucleotide
  Target: LAMA2; (+) strand; PAM type: NRG; PAM sequence: AAG
tccagaaactactttagaaa

SEQ ID NO: 177661 - DNA, 20 bp, Artificial Sequence
  Description of Artificial Sequence: Synthetic oligonucleotide
  Target: LAMA2; (+) strand; PAM type: NRG; PAM sequence: AGG
ccagaaactactttagaaaa

SEQ ID NO: 177662 - DNA, 20 bp, Artificial Sequence
  Description of Artificial Sequence: Synthetic oligonucleotide
  Target: LAMA2; (+) strand; PAM type: NRG; PAM sequence: CAG
ctactttagaaaaaggtgat

SEQ ID NO: 177663 - DNA, 20 bp, Artificial Sequence
  Description of Artificial Sequence: Synthetic oligonucleotide
  Target: LAMA2; (+) strand; PAM type: NRG; PAM sequence: AAG
tagaaaaaggtgatcagcgt

SEQ ID NO: 177664 - DNA, 20 bp, Artificial Sequence
  Description of Artificial Sequence: Synthetic oligonucleotide
  Target: LAMA2; (+) strand; PAM type: NRG; PAM sequence: AAG
aaaaggtgatcagcgtaaga

SEQ ID NO: 177665 - DNA, 20 bp, Artificial Sequence
  Description of Artificial Sequence: Synthetic oligonucleotide
  Target: LAMA2; (+) strand; PAM type: NRG; PAM sequence: AGG
aaaggtgatcagcgtaagaa

SEQ ID NO: 177666 - DNA, 20 bp, Artificial Sequence
  Description of Artificial Sequence: Synthetic oligonucleotide
  Target: LAMA2; (+) strand; PAM type: NRG; PAM sequence: GGG
aaggtgatcagcgtaagaaa

SEQ ID NO: 177667 - DNA, 20 bp, Artificial Sequence
  Description of Artificial Sequence: Synthetic oligonucleotide
  Target: LAMA2; (+) strand; PAM type: NRG; PAM sequence: AAG
gtaagaaagggcaaattaat

SEQ ID NO: 177668 - DNA, 20 bp, Artificial Sequence
  Description of Artificial Sequence: Synthetic oligonucleotide
  Target: LAMA2; (+) strand; PAM type: NRG; PAM sequence: AGG
taagaaagggcaaattaata

SEQ ID NO: 177669 - DNA, 20 bp, Artificial Sequence
  Description of Artificial Sequence: Synthetic oligonucleotide
  Target: LAMA2; (+) strand; PAM type: NRG; PAM sequence: CAG
aagggcaaattaataaggat

SEQ ID NO: 177670 - DNA, 20 bp, Artificial Sequence
  Description of Artificial Sequence: Synthetic oligonucleotide
  Target: LAMA2; (+) strand; PAM type: NRG; PAM sequence: GAG
gggcaaattaataaggatca

SEQ ID NO: 177671 - DNA, 20 bp, Artificial Sequence
  Description of Artificial Sequence: Synthetic oligonucleotide
  Target: LAMA2; (+) strand; PAM type: NRG; PAM sequence: AAG
aattaataaggatcagagtc

SEQ ID NO: 177672 - DNA, 20 bp, Artificial Sequence
  Description of Artificial Sequence: Synthetic oligonucleotide
  Target: LAMA2; (+) strand; PAM type: NRG; PAM sequence: CAG
taataaggatcagagtcaag

SEQ ID NO: 177673 - DNA, 20 bp, Artificial Sequence
  Description of Artificial Sequence: Synthetic oligonucleotide
  Target: LAMA2; (+) strand; PAM type: NRG; PAM sequence: CAG
ctgaaacattaaaaaaaaat

SEQ ID NO: 177674 - DNA, 20 bp, Artificial Sequence
  Description of Artificial Sequence: Synthetic oligonucleotide
  Target: LAMA2; (+) strand; PAM type: NRG; PAM sequence: CAG
acattaaaaaaaaatcagaa

SEQ ID NO: 177675 - DNA, 20 bp, Artificial Sequence
  Description of Artificial Sequence: Synthetic oligonucleotide
  Target: LAMA2; (+) strand; PAM type: NRG; PAM sequence: AGG
cattaaaaaaaaatcagaac

SEQ ID NO: 177676 - DNA, 20 bp, Artificial Sequence
  Description of Artificial Sequence: Synthetic oligonucleotide
  Target: LAMA2; (+) strand; PAM type: NRG; PAM sequence: GGG
attaaaaaaaaatcagaaca

SEQ ID NO: 177677 - DNA, 20 bp, Artificial Sequence
  Description of Artificial Sequence: Synthetic oligonucleotide
  Target: LAMA2; (+) strand; PAM type: NRG; PAM sequence: TGG
aaaaaaaatcagaacagggt

SEQ ID NO: 177678 - DNA, 20 bp, Artificial Sequence
  Description of Artificial Sequence: Synthetic oligonucleotide
  Target: LAMA2; (+) strand; PAM type: NRG; PAM sequence: TAG
atatacacattgtaacttgc

SEQ ID NO: 177679 - DNA, 20 bp, Artificial Sequence
  Description of Artificial Sequence: Synthetic oligonucleotide
  Target: LAMA2; (+) strand; PAM type: NRG; PAM sequence: CAG
gctagtacaaaaaaaaaatg

SEQ ID NO: 177680 - DNA, 20 bp, Artificial Sequence
  Description of Artificial Sequence: Synthetic oligonucleotide
  Target: LAMA2; (+) strand; PAM type: NRG; PAM sequence: GAG
tagtacaaaaaaaaaatgca

SEQ ID NO: 177681 - DNA, 20 bp, Artificial Sequence
  Description of Artificial Sequence: Synthetic oligonucleotide
  Target: LAMA2; (+) strand; PAM type: NRG; PAM sequence: TAG
aaaatgcagagaatcaaaat

SEQ ID NO: 177682 - DNA, 20 bp, Artificial Sequence
  Description of Artificial Sequence: Synthetic oligonucleotide
  Target: LAMA2; (+) strand; PAM type: NRG; PAM sequence: TGG
gagaatcaaaattagcgctt

SEQ ID NO: 177683 - DNA, 20 bp, Artificial Sequence
  Description of Artificial Sequence: Synthetic oligonucleotide
  Target: LAMA2; (+) strand; PAM type: NRG; PAM sequence: GAG
aaattagcgctttggaactt

SEQ ID NO: 177684 - DNA, 20 bp, Artificial Sequence
  Description of Artificial Sequence: Synthetic oligonucleotide
  Target: LAMA2; (+) strand; PAM type: NRG; PAM sequence: GAG
attagcgctttggaacttga

SEQ ID NO: 177685 - DNA, 20 bp, Artificial Sequence
  Description of Artificial Sequence: Synthetic oligonucleotide
  Target: LAMA2; (+) strand; PAM type: NRG; PAM sequence: AGG
ttagcgctttggaacttgag

SEQ ID NO: 177686 - DNA, 20 bp, Artificial Sequence
  Description of Artificial Sequence: Synthetic oligonucleotide
  Target: LAMA2; (+) strand; PAM type: NRG; PAM sequence: CAG
gcgctttggaacttgagagg

SEQ ID NO: 177687 - DNA, 20 bp, Artificial Sequence
  Description of Artificial Sequence: Synthetic oligonucleotide
  Target: LAMA2; (+) strand; PAM type: NRG; PAM sequence: CAG
ctttggaacttgagaggcag

SEQ ID NO: 177688 - DNA, 20 bp, Artificial Sequence
  Description of Artificial Sequence: Synthetic oligonucleotide
  Target: LAMA2; (+) strand; PAM type: NRG; PAM sequence: CAG
gcagcagtaaaaatattctt

SEQ ID NO: 177689 - DNA, 20 bp, Artificial Sequence
  Description of Artificial Sequence: Synthetic oligonucleotide
  Target: LAMA2; (+) strand; PAM type: NRG; PAM sequence: AGG
cagcagtaaaaatattcttc

SEQ ID NO: 177690 - DNA, 20 bp, Artificial Sequence
  Description of Artificial Sequence: Synthetic oligonucleotide
  Target: LAMA2; (+) strand; PAM type: NRG; PAM sequence: CAG
agtaaaaatattcttcaggt

SEQ ID NO: 177691 - DNA, 20 bp, Artificial Sequence
  Description of Artificial Sequence: Synthetic oligonucleotide
  Target: LAMA2; (+) strand; PAM type: NRG; PAM sequence: TGG
aggtcagtcttctgaataat

SEQ ID NO: 177692 - DNA, 20 bp, Artificial Sequence
  Description of Artificial Sequence: Synthetic oligonucleotide
  Target: LAMA2; (+) strand; PAM type: NRG; PAM sequence: CAG
agtcttctgaataattggcc

SEQ ID NO: 177693 - DNA, 20 bp, Artificial Sequence
  Description of Artificial Sequence: Synthetic oligonucleotide
  Target: LAMA2; (+) strand; PAM type: NRG; PAM sequence: CAG
gaataattggcccagttgtt

SEQ ID NO: 177694 - DNA, 20 bp, Artificial Sequence
  Description of Artificial Sequence: Synthetic oligonucleotide
  Target: LAMA2; (+) strand; PAM type: NRG; PAM sequence: CAG
aattggcccagttgttcagc

SEQ ID NO: 177695 - DNA, 20 bp, Artificial Sequence
  Description of Artificial Sequence: Synthetic oligonucleotide
  Target: LAMA2; (+) strand; PAM type: NRG; PAM sequence: CAG
ttcagccagcattttgctat

SEQ ID NO: 177696 - DNA, 20 bp, Artificial Sequence
  Description of Artificial Sequence: Synthetic oligonucleotide
  Target: LAMA2; (+) strand; PAM type: NRG; PAM sequence: CAG
agcattttgctatcagaatg

SEQ ID NO: 177697 - DNA, 20 bp, Artificial Sequence
  Description of Artificial Sequence: Synthetic oligonucleotide
  Target: LAMA2; (+) strand; PAM type: NRG; PAM sequence: AAG
ttttgctatcagaatgcaga

SEQ ID NO: 177698 - DNA, 20 bp, Artificial Sequence
  Description of Artificial Sequence: Synthetic oligonucleotide
  Target: LAMA2; (+) strand; PAM type: NRG; PAM sequence: TGG
tgctatcagaatgcagaaag

SEQ ID NO: 177699 - DNA, 20 bp, Artificial Sequence
  Description of Artificial Sequence: Synthetic oligonucleotide
  Target: LAMA2; (+) strand; PAM type: NRG; PAM sequence: CAG
tgcagaaagtggtataaacc

SEQ ID NO: 177700 - DNA, 20 bp, Artificial Sequence
  Description of Artificial Sequence: Synthetic oligonucleotide
  Target: LAMA2; (+) strand; PAM type: NRG; PAM sequence: AGG
gcagaaagtggtataaaccc

SEQ ID NO: 177701 - DNA, 20 bp, Artificial Sequence
  Description of Artificial Sequence: Synthetic oligonucleotide
  Target: LAMA2; (+) strand; PAM type: NRG; PAM sequence: GGG
cagaaagtggtataaaccca

SEQ ID NO: 177702 - DNA, 20 bp, Artificial Sequence
  Description of Artificial Sequence: Synthetic oligonucleotide
  Target: LAMA2; (+) strand; PAM type: NRG; PAM sequence: CAG
tacatgaatatcttgcttgc

SEQ ID NO: 177703 - DNA, 20 bp, Artificial Sequence
  Description of Artificial Sequence: Synthetic oligonucleotide
  Target: LAMA2; (+) strand; PAM type: NRG; PAM sequence: AAG
tttaaaaactaaatccaatc

SEQ ID NO: 177704 - DNA, 20 bp, Artificial Sequence
  Description of Artificial Sequence: Synthetic oligonucleotide
  Target: LAMA2; (+) strand; PAM type: NRG; PAM sequence: AAG
aaaaactaaatccaatcaag

SEQ ID NO: 177705 - DNA, 20 bp, Artificial Sequence
  Description of Artificial Sequence: Synthetic oligonucleotide
  Target: LAMA2; (+) strand; PAM type: NRG; PAM sequence: AAG
ctaaatccaatcaagaagct

SEQ ID NO: 177706 - DNA, 20 bp, Artificial Sequence
  Description of Artificial Sequence: Synthetic oligonucleotide
  Target: LAMA2; (+) strand; PAM type: NRG; PAM sequence: CAG
gctaagaaatgaaatttcta

SEQ ID NO: 177707 - DNA, 20 bp, Artificial Sequence
  Description of Artificial Sequence: Synthetic oligonucleotide
  Target: LAMA2; (+) strand; PAM type: NRG; PAM sequence: AAG
ttctacagttccattttctt

SEQ ID NO: 177708 - DNA, 20 bp, Artificial Sequence
  Description of Artificial Sequence: Synthetic oligonucleotide
  Target: LAMA2; (+) strand; PAM type: NRG; PAM sequence: AAG
ttccattttcttaagtgttg

SEQ ID NO: 177709 - DNA, 20 bp, Artificial Sequence
  Description of Artificial Sequence: Synthetic oligonucleotide
  Target: LAMA2; (+) strand; PAM type: NRG; PAM sequence: AAG
cttaagtgttgaagactttc

SEQ ID NO: 177710 - DNA, 20 bp, Artificial Sequence
  Description of Artificial Sequence: Synthetic oligonucleotide
  Target: LAMA2; (+) strand; PAM type: NRG; PAM sequence: AAG
gactttcaagctaatatcaa

SEQ ID NO: 177711 - DNA, 20 bp, Artificial Sequence
  Description of Artificial Sequence: Synthetic oligonucleotide
  Target: LAMA2; (+) strand; PAM type: NRG; PAM sequence: GAG
ctttcaagctaatatcaaaa

SEQ ID NO: 177712 - DNA, 20 bp, Artificial Sequence
  Description of Artificial Sequence: Synthetic oligonucleotide
  Target: LAMA2; (+) strand; PAM type: NRG; PAM sequence: CAG
tcaagctaatatcaaaagag

SEQ ID NO: 177713 - DNA, 20 bp, Artificial Sequence
  Description of Artificial Sequence: Synthetic oligonucleotide
  Target: LAMA2; (+) strand; PAM type: NRG; PAM sequence: AAG
agagcagccctttattctca

SEQ ID NO: 177714 - DNA, 20 bp, Artificial Sequence
  Description of Artificial Sequence: Synthetic oligonucleotide
  Target: LAMA2; (+) strand; PAM type: NRG; PAM sequence: TAG
ttattctcaaagaatttgta

SEQ ID NO: 177715 - DNA, 20 bp, Artificial Sequence
  Description of Artificial Sequence: Synthetic oligonucleotide
  Target: LAMA2; (+) strand; PAM type: NRG; PAM sequence: CAG
aagaatttgtatagatatca

SEQ ID NO: 177716 - DNA, 20 bp, Artificial Sequence
  Description of Artificial Sequence: Synthetic oligonucleotide
  Target: LAMA2; (+) strand; PAM type: NRG; PAM sequence: CAG
atagatatcacagtcataat

SEQ ID NO: 177717 - DNA, 20 bp, Artificial Sequence
  Description of Artificial Sequence: Synthetic oligonucleotide
  Target: LAMA2; (+) strand; PAM type: NRG; PAM sequence: TGG
tatcacagtcataatcagac

SEQ ID NO: 177718 - DNA, 20 bp, Artificial Sequence
  Description of Artificial Sequence: Synthetic oligonucleotide
  Target: LAMA2; (+) strand; PAM type: NRG; PAM sequence: CAG
taatcagactggctttattt

SEQ ID NO: 177719 - DNA, 20 bp, Artificial Sequence
  Description of Artificial Sequence: Synthetic oligonucleotide
  Target: LAMA2; (+) strand; PAM type: NRG; PAM sequence: GAG
atcagactggctttatttca

SEQ ID NO: 177720 - DNA, 20 bp, Artificial Sequence
  Description of Artificial Sequence: Synthetic oligonucleotide
  Target: LAMA2; (+) strand; PAM type: NRG; PAM sequence: GAG
cagactggctttatttcaga

SEQ ID NO: 177721 - DNA, 20 bp, Artificial Sequence
  Description of Artificial Sequence: Synthetic oligonucleotide
  Target: LAMA2; (+) strand; PAM type: NRG; PAM sequence: TGG
tatttcagagagtatgcttt

SEQ ID NO: 177722 - DNA, 20 bp, Artificial Sequence
  Description of Artificial Sequence: Synthetic oligonucleotide
  Target: LAMA2; (+) strand; PAM type: NRG; PAM sequence: TAG
ttcagagagtatgcttttgg

SEQ ID NO: 177723 - DNA, 20 bp, Artificial Sequence
  Description of Artificial Sequence: Synthetic oligonucleotide
  Target: LAMA2; (+) strand; PAM type: NRG; PAM sequence: AAG
tgcttttggtagcctatcca

SEQ ID NO: 177724 - DNA, 20 bp, Artificial Sequence
  Description of Artificial Sequence: Synthetic oligonucleotide
  Target: LAMA2; (+) strand; PAM type: NRG; PAM sequence: TAG
cctatccaaagattttattt

SEQ ID NO: 177725 - DNA, 20 bp, Artificial Sequence
  Description of Artificial Sequence: Synthetic oligonucleotide
  Target: LAMA2; (+) strand; PAM type: NRG; PAM sequence: CAG
agattttattttagtataaa

SEQ ID NO: 177726 - DNA, 20 bp, Artificial Sequence
  Description of Artificial Sequence: Synthetic oligonucleotide
  Target: LAMA2; (+) strand; PAM type: NRG; PAM sequence: CAG
agtataaacagtaaaaataa

SEQ ID NO: 177727 - DNA, 20 bp, Artificial Sequence
  Description of Artificial Sequence: Synthetic oligonucleotide
  Target: LAMA2; (+) strand; PAM type: NRG; PAM sequence: AAG
ataaacagtaaaaataacag

SEQ ID NO: 177728 - DNA, 20 bp, Artificial Sequence
  Description of Artificial Sequence: Synthetic oligonucleotide
  Target: LAMA2; (+) strand; PAM type: NRG; PAM sequence: AAG
aaaaataacagaagtattat

SEQ ID NO: 177729 - DNA, 20 bp, Artificial Sequence
  Description of Artificial Sequence: Synthetic oligonucleotide
  Target: LAMA2; (+) strand; PAM type: NRG; PAM sequence: AAG
ataacagaagtattataaga

SEQ ID NO: 177730 - DNA, 20 bp, Artificial Sequence
  Description of Artificial Sequence: Synthetic oligonucleotide
  Target: LAMA2; (+) strand; PAM type: NRG; PAM sequence: CAG
gaaagatgaattgtgattga

SEQ ID NO: 177731 - DNA, 20 bp, Artificial Sequence
  Description of Artificial Sequence: Synthetic oligonucleotide
  Target: LAMA2; (+) strand; PAM type: NRG; PAM sequence: GAG
aagatgaattgtgattgaca

SEQ ID NO: 177732 - DNA, 20 bp, Artificial Sequence
  Description of Artificial Sequence: Synthetic oligonucleotide
  Target: LAMA2; (+) strand; PAM type: NRG; PAM sequence: AGG
agatgaattgtgattgacag

SEQ ID NO: 177733 - DNA, 20 bp, Artificial Sequence
  Description of Artificial Sequence: Synthetic oligonucleotide
  Target: LAMA2; (+) strand; PAM type: NRG; PAM sequence: GAG
atgaattgtgattgacagag

SEQ ID NO: 177734 - DNA, 20 bp, Artificial Sequence
  Description of Artificial Sequence: Synthetic oligonucleotide
  Target: LAMA2; (+) strand; PAM type: NRG; PAM sequence: TGG
gaggagaaaatccaattact

SEQ ID NO: 177735 - DNA, 20 bp, Artificial Sequence
  Description of Artificial Sequence: Synthetic oligonucleotide
  Target: LAMA2; (+) strand; PAM type: NRG; PAM sequence: AAG
agaaaatccaattacttgga

SEQ ID NO: 177736 - DNA, 20 bp, Artificial Sequence
  Description of Artificial Sequence: Synthetic oligonucleotide
  Target: LAMA2; (+) strand; PAM type: NRG; PAM sequence: TGG
tacttggaaagtatattttg

SEQ ID NO: 177737 - DNA, 20 bp, Artificial Sequence
  Description of Artificial Sequence: Synthetic oligonucleotide
  Target: LAMA2; (+) strand; PAM type: NRG; PAM sequence: GGG
acttggaaagtatattttgt

SEQ ID NO: 177738 - DNA, 20 bp, Artificial Sequence
  Description of Artificial Sequence: Synthetic oligonucleotide
  Target: LAMA2; (+) strand; PAM type: NRG; PAM sequence: TAG
gaaagtatattttgtgggct

SEQ ID NO: 177739 - DNA, 20 bp, Artificial Sequence
  Description of Artificial Sequence: Synthetic oligonucleotide
  Target: LAMA2; (+) strand; PAM type: NRG; PAM sequence: TAG
aattgaaaataataatatat

SEQ ID NO: 177740 - DNA, 20 bp, Artificial Sequence
  Description of Artificial Sequence: Synthetic oligonucleotide
  Target: LAMA2; (+) strand; PAM type: NRG; PAM sequence: TAG
taatatattagtgactgaac

SEQ ID NO: 177741 - DNA, 20 bp, Artificial Sequence
  Description of Artificial Sequence: Synthetic oligonucleotide
  Target: LAMA2; (+) strand; PAM type: NRG; PAM sequence: TAG
aactagacatattgatgttt

SEQ ID NO: 177742 - DNA, 20 bp, Artificial Sequence
  Description of Artificial Sequence: Synthetic oligonucleotide
  Target: LAMA2; (+) strand; PAM type: NRG; PAM sequence: GAG
ctagacatattgatgtttta

SEQ ID NO: 177743 - DNA, 20 bp, Artificial Sequence
  Description of Artificial Sequence: Synthetic oligonucleotide
  Target: LAMA2; (+) strand; PAM type: NRG; PAM sequence: TGG
gttttagagccgtgctttgc

SEQ ID NO: 177744 - DNA, 20 bp, Artificial Sequence
  Description of Artificial Sequence: Synthetic oligonucleotide
  Target: LAMA2; (+) strand; PAM type: NRG; PAM sequence: CAG
atattttatgctttgttttt

SEQ ID NO: 177745 - DNA, 20 bp, Artificial Sequence
  Description of Artificial Sequence: Synthetic oligonucleotide
  Target: LAMA2; (+) strand; PAM type: NRG; PAM sequence: CAG
gctttgtttttcagtgatgt

SEQ ID NO: 177746 - DNA, 20 bp, Artificial Sequence
  Description of Artificial Sequence: Synthetic oligonucleotide
  Target: LAMA2; (+) strand; PAM type: NRG; PAM sequence: AGG
ctttgtttttcagtgatgtc

SEQ ID NO: 177747 - DNA, 20 bp, Artificial Sequence
  Description of Artificial Sequence: Synthetic oligonucleotide
  Target: LAMA2; (+) strand; PAM type: NRG; PAM sequence: TGG
tttcagtgatgtcaggtctt

SEQ ID NO: 177748 - DNA, 20 bp, Artificial Sequence
  Description of Artificial Sequence: Synthetic oligonucleotide
  Target: LAMA2; (+) strand; PAM type: NRG; PAM sequence: TGG
gtgatgtcaggtctttggct

SEQ ID NO: 177749 - DNA, 20 bp, Artificial Sequence
  Description of Artificial Sequence: Synthetic oligonucleotide
  Target: LAMA2; (+) strand; PAM type: NRG; PAM sequence: CAG
tttggcttggaatttaacaa

SEQ ID NO: 177750 - DNA, 20 bp, Artificial Sequence
  Description of Artificial Sequence: Synthetic oligonucleotide
  Target: LAMA2; (+) strand; PAM type: NRG; PAM sequence: TAG
acaatgttatgtgcttatat

SEQ ID NO: 177751 - DNA, 20 bp, Artificial Sequence
  Description of Artificial Sequence: Synthetic oligonucleotide
  Target: LAMA2; (+) strand; PAM type: NRG; PAM sequence: TAG
gcttatattagtataatctg

SEQ ID NO: 177752 - DNA, 20 bp, Artificial Sequence
  Description of Artificial Sequence: Synthetic oligonucleotide
  Target: LAMA2; (+) strand; PAM type: NRG; PAM sequence: CAG
tagtataatctgtagtataa

SEQ ID NO: 177753 - DNA, 20 bp, Artificial Sequence
  Description of Artificial Sequence: Synthetic oligonucleotide
  Target: LAMA2; (+) strand; PAM type: NRG; PAM sequence: AAG
tataatctgtagtataacag

SEQ ID NO: 177754 - DNA, 20 bp, Artificial Sequence
  Description of Artificial Sequence: Synthetic oligonucleotide
  Target: LAMA2; (+) strand; PAM type: NRG; PAM sequence: AAG
ctgtagtataacagaagttt

SEQ ID NO: 177755 - DNA, 20 bp, Artificial Sequence
  Description of Artificial Sequence: Synthetic oligonucleotide
  Target: LAMA2; (+) strand; PAM type: NRG; PAM sequence: AGG
tgtagtataacagaagttta

SEQ ID NO: 177756 - DNA, 20 bp, Artificial Sequence
  Description of Artificial Sequence: Synthetic oligonucleotide
  Target: LAMA2; (+) strand; PAM type: NRG; PAM sequence: AAG
cctataaaaccctttatatg

SEQ ID NO: 177757 - DNA, 20 bp, Artificial Sequence
  Description of Artificial Sequence: Synthetic oligonucleotide
  Target: LAMA2; (+) strand; PAM type: NRG; PAM sequence: TGG
ataaaaccctttatatgaag

SEQ ID NO: 177758 - DNA, 20 bp, Artificial Sequence
  Description of Artificial Sequence: Synthetic oligonucleotide
  Target: LAMA2; (+) strand; PAM type: NRG; PAM sequence: GAG
aaaaccctttatatgaagtg

SEQ ID NO: 177759 - DNA, 20 bp, Artificial Sequence
  Description of Artificial Sequence: Synthetic oligonucleotide
  Target: LAMA2; (+) strand; PAM type: NRG; PAM sequence: CAG
cccgtactcttcttcacatc

SEQ ID NO: 177760 - DNA, 20 bp, Artificial Sequence
  Description of Artificial Sequence: Synthetic oligonucleotide
  Target: LAMA2; (+) strand; PAM type: NRG; PAM sequence: TAG
tcttcacatccagacaccga

SEQ ID NO: 177761 - DNA, 20 bp, Artificial Sequence
  Description of Artificial Sequence: Synthetic oligonucleotide
  Target: LAMA2; (+) strand; PAM type: NRG; PAM sequence: CAG
acatccagacaccgatagtt

SEQ ID NO: 177762 - DNA, 20 bp, Artificial Sequence
  Description of Artificial Sequence: Synthetic oligonucleotide
  Target: LAMA2; (+) strand; PAM type: NRG; PAM sequence: CAG
tttccctttgctattcttca

SEQ ID NO: 177763 - DNA, 20 bp, Artificial Sequence
  Description of Artificial Sequence: Synthetic oligonucleotide
  Target: LAMA2; (+) strand; PAM type: NRG; PAM sequence: CAG
tttgctattcttcacagatg

SEQ ID NO: 177764 - DNA, 20 bp, Artificial Sequence
  Description of Artificial Sequence: Synthetic oligonucleotide
  Target: LAMA2; (+) strand; PAM type: NRG; PAM sequence: AGG
ttgctattcttcacagatgc

SEQ ID NO: 177765 - DNA, 20 bp, Artificial Sequence
  Description of Artificial Sequence: Synthetic oligonucleotide
  Target: LAMA2; (+) strand; PAM type: NRG; PAM sequence: AAG
ttcacagatgcaggccaaca

SEQ ID NO: 177766 - DNA, 20 bp, Artificial Sequence
  Description of Artificial Sequence: Synthetic oligonucleotide
  Target: LAMA2; (+) strand; PAM type: NRG; PAM sequence: GAG
agatgcaggccaacaaagat

SEQ ID NO: 177767 - DNA, 20 bp, Artificial Sequence
  Description of Artificial Sequence: Synthetic oligonucleotide
  Target: LAMA2; (+) strand; PAM type: NRG; PAM sequence: AGG
gatgcaggccaacaaagatg

SEQ ID NO: 177768 - DNA, 20 bp, Artificial Sequence
  Description of Artificial Sequence: Synthetic oligonucleotide
  Target: LAMA2; (+) strand; PAM type: NRG; PAM sequence: TAG
caggccaacaaagatgagga

SEQ ID NO: 177769 - DNA, 20 bp, Artificial Sequence
  Description of Artificial Sequence: Synthetic oligonucleotide
  Target: LAMA2; (+) strand; PAM type: NRG; PAM sequence: CAG
caaagatgaggatagttctc

SEQ ID NO: 177770 - DNA, 20 bp, Artificial Sequence
  Description of Artificial Sequence: Synthetic oligonucleotide
  Target: LAMA2; (+) strand; PAM type: NRG; PAM sequence: TGG
gatagttctccagctgccca

SEQ ID NO: 177771 - DNA, 20 bp, Artificial Sequence
  Description of Artificial Sequence: Synthetic oligonucleotide
  Target: LAMA2; (+) strand; PAM type: NRG; PAM sequence: CAG
ccagctgcccatggcctgca

SEQ ID NO: 177772 - DNA, 20 bp, Artificial Sequence
  Description of Artificial Sequence: Synthetic oligonucleotide
  Target: LAMA2; (+) strand; PAM type: NRG; PAM sequence: GAG
gcctgcacagttcctctaat

SEQ ID NO: 177773 - DNA, 20 bp, Artificial Sequence
  Description of Artificial Sequence: Synthetic oligonucleotide
  Target: LAMA2; (+) strand; PAM type: NRG; PAM sequence: GAG
gagccacatgcacaacctct

SEQ ID NO: 177774 - DNA, 20 bp, Artificial Sequence
  Description of Artificial Sequence: Synthetic oligonucleotide
  Target: LAMA2; (+) strand; PAM type: NRG; PAM sequence: GAG
gccacatgcacaacctctga

SEQ ID NO: 177775 - DNA, 20 bp, Artificial Sequence
  Description of Artificial Sequence: Synthetic oligonucleotide
  Target: LAMA2; (+) strand; PAM type: NRG; PAM sequence: AGG
ccacatgcacaacctctgag

SEQ ID NO: 177776 - DNA, 20 bp, Artificial Sequence
  Description of Artificial Sequence: Synthetic oligonucleotide
  Target: LAMA2; (+) strand; PAM type: NRG; PAM sequence: GGG
cacatgcacaacctctgaga

SEQ ID NO: 177777 - DNA, 20 bp, Artificial Sequence
  Description of Artificial Sequence: Synthetic oligonucleotide
  Target: LAMA2; (+) strand; PAM type: NRG; PAM sequence: GGG
acatgcacaacctctgagag

SEQ ID NO: 177778 - DNA, 20 bp, Artificial Sequence
  Description of Artificial Sequence: Synthetic oligonucleotide
  Target: LAMA2; (+) strand; PAM type: NRG; PAM sequence: CAG
ctctgagaggggtgtgcaca

SEQ ID NO: 177779 - DNA, 20 bp, Artificial Sequence
  Description of Artificial Sequence: Synthetic oligonucleotide
  Target: LAMA2; (+) strand; PAM type: NRG; PAM sequence: AAG
ggtgtgcacacagtcaaatc

SEQ ID NO: 177780 - DNA, 20 bp, Artificial Sequence
  Description of Artificial Sequence: Synthetic oligonucleotide
  Target: LAMA2; (+) strand; PAM type: NRG; PAM sequence: TAG
cagtcaaatcaagactgctg

SEQ ID NO: 177781 - DNA, 20 bp, Artificial Sequence
  Description of Artificial Sequence: Synthetic oligonucleotide
  Target: LAMA2; (+) strand; PAM type: NRG; PAM sequence: TGG
actgctgtagctctattctt

SEQ ID NO: 177782 - DNA, 20 bp, Artificial Sequence
  Description of Artificial Sequence: Synthetic oligonucleotide
  Target: LAMA2; (+) strand; PAM type: NRG; PAM sequence: GGG
ctgctgtagctctattcttt

SEQ ID NO: 177783 - DNA, 20 bp, Artificial Sequence
  Description of Artificial Sequence: Synthetic oligonucleotide
  Target: LAMA2; (+) strand; PAM type: NRG; PAM sequence: GGG
tgctgtagctctattctttg

SEQ ID NO: 177784 - DNA, 20 bp, Artificial Sequence
  Description of Artificial Sequence: Synthetic oligonucleotide
  Target: LAMA2; (+) strand; PAM type: NRG; PAM sequence: TGG
tctctcccacctgccttctc

SEQ ID NO: 177785 - DNA, 20 bp, Artificial Sequence
  Description of Artificial Sequence: Synthetic oligonucleotide
  Target: LAMA2; (+) strand; PAM type: NRG; PAM sequence: GGG
ctctcccacctgccttctct

SEQ ID NO: 177786 - DNA, 20 bp, Artificial Sequence
  Description of Artificial Sequence: Synthetic oligonucleotide
  Target: LAMA2; (+) strand; PAM type: NRG; PAM sequence: CAG
cacctgccttctctgggtac

SEQ ID NO: 177787 - DNA, 20 bp, Artificial Sequence
  Description of Artificial Sequence: Synthetic oligonucleotide
  Target: LAMA2; (+) strand; PAM type: NRG; PAM sequence: AGG
acctgccttctctgggtacc

SEQ ID NO: 177788 - DNA, 20 bp, Artificial Sequence
  Description of Artificial Sequence: Synthetic oligonucleotide
  Target: LAMA2; (+) strand; PAM type: NRG; PAM sequence: AAG
gccttctctgggtaccagga

SEQ ID NO: 177789 - DNA, 20 bp, Artificial Sequence
  Description of Artificial Sequence: Synthetic oligonucleotide
  Target: LAMA2; (+) strand; PAM type: NRG; PAM sequence: CAG
accaggaaagtgatgaaaat

SEQ ID NO: 177790 - DNA, 20 bp, Artificial Sequence
  Description of Artificial Sequence: Synthetic oligonucleotide
  Target: LAMA2; (+) strand; PAM type: NRG; PAM sequence: TGG
aaagtgatgaaaatcagtct

SEQ ID NO: 177791 - DNA, 20 bp, Artificial Sequence
  Description of Artificial Sequence: Synthetic oligonucleotide
  Target: LAMA2; (+) strand; PAM type: NRG; PAM sequence: AAG
tggtgttgacaaataacatg

SEQ ID NO: 177792 - DNA, 20 bp, Artificial Sequence
  Description of Artificial Sequence: Synthetic oligonucleotide
  Target: LAMA2; (+) strand; PAM type: NRG; PAM sequence: TAG
gttgacaaataacatgaaga

SEQ ID NO: 177793 - DNA, 20 bp, Artificial Sequence
  Description of Artificial Sequence: Synthetic oligonucleotide
  Target: LAMA2; (+) strand; PAM type: NRG; PAM sequence: CAG
tagcaaataacattcttccc

SEQ ID NO: 177794 - DNA, 20 bp, Artificial Sequence
  Description of Artificial Sequence: Synthetic oligonucleotide
  Target: LAMA2; (+) strand; PAM type: NRG; PAM sequence: TAG
aaataacattcttccccagt

SEQ ID NO: 177795 - DNA, 20 bp, Artificial Sequence
  Description of Artificial Sequence: Synthetic oligonucleotide
  Target: LAMA2; (+) strand; PAM type: NRG; PAM sequence: AGG
aataacattcttccccagtt

SEQ ID NO: 177796 - DNA, 20 bp, Artificial Sequence
  Description of Artificial Sequence: Synthetic oligonucleotide
  Target: LAMA2; (+) strand; PAM type: NRG; PAM sequence: TGG
aacattcttccccagttagg

SEQ ID NO: 177797 - DNA, 20 bp, Artificial Sequence
  Description of Artificial Sequence: Synthetic oligonucleotide
  Target: LAMA2; (+) strand; PAM type: NRG; PAM sequence: AAG
cttccccagttaggtggttt

SEQ ID NO: 177798 - DNA, 20 bp, Artificial Sequence
  Description of Artificial Sequence: Synthetic oligonucleotide
  Target: LAMA2; (+) strand; PAM type: NRG; PAM sequence: CAG
ttttttaaaacattgaaaaa

SEQ ID NO: 177799 - DNA, 20 bp, Artificial Sequence
  Description of Artificial Sequence: Synthetic oligonucleotide
  Target: LAMA2; (+) strand; PAM type: NRG; PAM sequence: CAG
aaaacagaaatatatgcaca

SEQ ID NO: 177800 - DNA, 20 bp, Artificial Sequence
  Description of Artificial Sequence: Synthetic oligonucleotide
  Target: LAMA2; (+) strand; PAM type: NRG; PAM sequence: AAG
cagaaatatatgcacacaga

SEQ ID NO: 177801 - DNA, 20 bp, Artificial Sequence
  Description of Artificial Sequence: Synthetic oligonucleotide
  Target: LAMA2; (+) strand; PAM type: NRG; PAM sequence: TAG
tatgcacacagaaagcaatt

SEQ ID NO: 177802 - DNA, 20 bp, Artificial Sequence
  Description of Artificial Sequence: Synthetic oligonucleotide
  Target: LAMA2; (+) strand; PAM type: NRG; PAM sequence: CAG
cacacagaaagcaatttagc

SEQ ID NO: 177803 - DNA, 20 bp, Artificial Sequence
  Description of Artificial Sequence: Synthetic oligonucleotide
  Target: LAMA2; (+) strand; PAM type: NRG; PAM sequence: CGG
agcaatttagccagcacaac

SEQ ID NO: 177804 - DNA, 20 bp, Artificial Sequence
  Description of Artificial Sequence: Synthetic oligonucleotide
  Target: LAMA2; (+) strand; PAM type: NRG; PAM sequence: GGG
gcaatttagccagcacaacc

SEQ ID NO: 177805 - DNA, 20 bp, Artificial Sequence
  Description of Artificial Sequence: Synthetic oligonucleotide
  Target: LAMA2; (+) strand; PAM type: NRG; PAM sequence: GAG
agcacaaccgggtataaaat

SEQ ID NO: 177806 - DNA, 20 bp, Artificial Sequence
  Description of Artificial Sequence: Synthetic oligonucleotide
  Target: LAMA2; (+) strand; PAM type: NRG; PAM sequence: AAG
acaaccgggtataaaatgag

SEQ ID NO: 177807 - DNA, 20 bp, Artificial Sequence
  Description of Artificial Sequence: Synthetic oligonucleotide
  Target: LAMA2; (+) strand; PAM type: NRG; PAM sequence: TAG
gggtataaaatgagaagttt

SEQ ID NO: 177808 - DNA, 20 bp, Artificial Sequence
  Description of Artificial Sequence: Synthetic oligonucleotide
  Target: LAMA2; (+) strand; PAM type: NRG; PAM sequence: CGG
ttttagtacattgtccctca

SEQ ID NO: 177809 - DNA, 20 bp, Artificial Sequence
  Description of Artificial Sequence: Synthetic oligonucleotide
  Target: LAMA2; (+) strand; PAM type: NRG; PAM sequence: CAG
ttaactgcctcattcattcc

SEQ ID NO: 177810 - DNA, 20 bp, Artificial Sequence
  Description of Artificial Sequence: Synthetic oligonucleotide
  Target: LAMA2; (+) strand; PAM type: NRG; PAM sequence: AAG
acccactattaattactgta

SEQ ID NO: 177811 - DNA, 20 bp, Artificial Sequence
  Description of Artificial Sequence: Synthetic oligonucleotide
  Target: LAMA2; (+) strand; PAM type: NRG; PAM sequence: AGG
cccactattaattactgtaa

SEQ ID NO: 177812 - DNA, 20 bp, Artificial Sequence
  Description of Artificial Sequence: Synthetic oligonucleotide
  Target: LAMA2; (+) strand; PAM type: NRG; PAM sequence: TGG
ttaattactgtaaaggtttt

SEQ ID NO: 177813 - DNA, 20 bp, Artificial Sequence
  Description of Artificial Sequence: Synthetic oligonucleotide
  Target: LAMA2; (+) strand; PAM type: NRG; PAM sequence: CAG
ttggcatgttcttctctacc

SEQ ID NO: 177814 - DNA, 20 bp, Artificial Sequence
  Description of Artificial Sequence: Synthetic oligonucleotide
  Target: LAMA2; (+) strand; PAM type: NRG; PAM sequence: CAG
cttctctacccagctcccac

SEQ ID NO: 177815 - DNA, 20 bp, Artificial Sequence
  Description of Artificial Sequence: Synthetic oligonucleotide
  Target: LAMA2; (+) strand; PAM type: NRG; PAM sequence: CAG
ccaaatgcttgtatatgtgt

SEQ ID NO: 177816 - DNA, 20 bp, Artificial Sequence
  Description of Artificial Sequence: Synthetic oligonucleotide
  Target: LAMA2; (+) strand; PAM type: NRG; PAM sequence: TGG
tatatgtgtcagcatatata

SEQ ID NO: 177817 - DNA, 20 bp, Artificial Sequence
  Description of Artificial Sequence: Synthetic oligonucleotide
  Target: LAMA2; (+) strand; PAM type: NRG; PAM sequence: TGG
gtgcatcttgcttattttca

SEQ ID NO: 177818 - DNA, 20 bp, Artificial Sequence
  Description of Artificial Sequence: Synthetic oligonucleotide
  Target: LAMA2; (+) strand; PAM type: NRG; PAM sequence: AAG
atcttgcttattttcatgga

SEQ ID NO: 177819 - DNA, 20 bp, Artificial Sequence
  Description of Artificial Sequence: Synthetic oligonucleotide
  Target: LAMA2; (+) strand; PAM type: NRG; PAM sequence: AGG
tcttgcttattttcatggaa

SEQ ID NO: 177820 - DNA, 20 bp, Artificial Sequence
  Description of Artificial Sequence: Synthetic oligonucleotide
  Target: LAMA2; (+) strand; PAM type: NRG; PAM sequence: AAG
tattttcatggaaaggtctt

SEQ ID NO: 177821 - DNA, 20 bp, Artificial Sequence
  Description of Artificial Sequence: Synthetic oligonucleotide
  Target: LAMA2; (+) strand; PAM type: NRG; PAM sequence: AGG
attttcatggaaaggtctta

SEQ ID NO: 177822 - DNA, 20 bp, Artificial Sequence
  Description of Artificial Sequence: Synthetic oligonucleotide
  Target: LAMA2; (+) strand; PAM type: NRG; PAM sequence: TAG
cgctcatctacttcttttta

SEQ ID NO: 177823 - DNA, 20 bp, Artificial Sequence
  Description of Artificial Sequence: Synthetic oligonucleotide
  Target: LAMA2; (+) strand; PAM type: NRG; PAM sequence: TGG
cattgtatgaacatgctgtg

SEQ ID NO: 177824 - DNA, 20 bp, Artificial Sequence
  Description of Artificial Sequence: Synthetic oligonucleotide
  Target: LAMA2; (+) strand; PAM type: NRG; PAM sequence: CAG
acatgctgtgtggatataaa

SEQ ID NO: 177825 - DNA, 20 bp, Artificial Sequence
  Description of Artificial Sequence: Synthetic oligonucleotide
  Target: LAMA2; (+) strand; PAM type: NRG; PAM sequence: TAG
aaacagcactttaatcttat

SEQ ID NO: 177826 - DNA, 20 bp, Artificial Sequence
  Description of Artificial Sequence: Synthetic oligonucleotide
  Target: LAMA2; (+) strand; PAM type: NRG; PAM sequence: AGG
aacagcactttaatcttatt

SEQ ID NO: 177827 - DNA, 20 bp, Artificial Sequence
  Description of Artificial Sequence: Synthetic oligonucleotide
  Target: LAMA2; (+) strand; PAM type: NRG; PAM sequence: GGG
acagcactttaatcttatta

SEQ ID NO: 177828 - DNA, 20 bp, Artificial Sequence
  Description of Artificial Sequence: Synthetic oligonucleotide
  Target: LAMA2; (+) strand; PAM type: NRG; PAM sequence: AAG
ccttttttttattacaaatg

SEQ ID NO: 177829 - DNA, 20 bp, Artificial Sequence
  Description of Artificial Sequence: Synthetic oligonucleotide
  Target: LAMA2; (+) strand; PAM type: NRG; PAM sequence: GAG
ttttttttattacaaatgaa

SEQ ID NO: 177830 - DNA, 20 bp, Artificial Sequence
  Description of Artificial Sequence: Synthetic oligonucleotide
  Target: LAMA2; (+) strand; PAM type: NRG; PAM sequence: GAG
attacaaatgaagagctaat

SEQ ID NO: 177831 - DNA, 20 bp, Artificial Sequence
  Description of Artificial Sequence: Synthetic oligonucleotide
  Target: LAMA2; (+) strand; PAM type: NRG; PAM sequence: AAG
agagctaatgagtatcccca

SEQ ID NO: 177832 - DNA, 20 bp, Artificial Sequence
  Description of Artificial Sequence: Synthetic oligonucleotide
  Target: LAMA2; (+) strand; PAM type: NRG; PAM sequence: CAG
ccccaaagataaatctttta

SEQ ID NO: 177833 - DNA, 20 bp, Artificial Sequence
  Description of Artificial Sequence: Synthetic oligonucleotide
  Target: LAMA2; (+) strand; PAM type: NRG; PAM sequence: AGG
cccaaagataaatcttttac

SEQ ID NO: 177834 - DNA, 20 bp, Artificial Sequence
  Description of Artificial Sequence: Synthetic oligonucleotide
  Target: LAMA2; (+) strand; PAM type: NRG; PAM sequence: AAG
aatcttttacaggtatattg

SEQ ID NO: 177835 - DNA, 20 bp, Artificial Sequence
  Description of Artificial Sequence: Synthetic oligonucleotide
  Target: LAMA2; (+) strand; PAM type: NRG; PAM sequence: AGG
atcttttacaggtatattga

SEQ ID NO: 177836 - DNA, 20 bp, Artificial Sequence
  Description of Artificial Sequence: Synthetic oligonucleotide
  Target: LAMA2; (+) strand; PAM type: NRG; PAM sequence: GGG
tcttttacaggtatattgaa

SEQ ID NO: 177837 - DNA, 20 bp, Artificial Sequence
  Description of Artificial Sequence: Synthetic oligonucleotide
  Target: LAMA2; (+) strand; PAM type: NRG; PAM sequence: CAG
attgaagggtaaatttctat

SEQ ID NO: 177838 - DNA, 20 bp, Artificial Sequence
  Description of Artificial Sequence: Synthetic oligonucleotide
  Target: LAMA2; (+) strand; PAM type: NRG; PAM sequence: TAG
gaagggtaaatttctatcag

SEQ ID NO: 177839 - DNA, 20 bp, Artificial Sequence
  Description of Artificial Sequence: Synthetic oligonucleotide
  Target: LAMA2; (+) strand; PAM type: NRG; PAM sequence: TGG
ttaacttgctcttcaaacaa

SEQ ID NO: 177840 - DNA, 20 bp, Artificial Sequence
  Description of Artificial Sequence: Synthetic oligonucleotide
  Target: LAMA2; (+) strand; PAM type: NRG; PAM sequence: TAG
gaatcaatctgcacgtccac

SEQ ID NO: 177841 - DNA, 20 bp, Artificial Sequence
  Description of Artificial Sequence: Synthetic oligonucleotide
  Target: LAMA2; (+) strand; PAM type: NRG; PAM sequence: TGG
ctagcactcttgtgaacact

SEQ ID NO: 177842 - DNA, 20 bp, Artificial Sequence
  Description of Artificial Sequence: Synthetic oligonucleotide
  Target: LAMA2; (+) strand; PAM type: NRG; PAM sequence: AAG
ttttccccaatctcaaaaat

SEQ ID NO: 177843 - DNA, 20 bp, Artificial Sequence
  Description of Artificial Sequence: Synthetic oligonucleotide
  Target: LAMA2; (+) strand; PAM type: NRG; PAM sequence: TAG
aatgacatcttactgttgct

SEQ ID NO: 177844 - DNA, 20 bp, Artificial Sequence
  Description of Artificial Sequence: Synthetic oligonucleotide
  Target: LAMA2; (+) strand; PAM type: NRG; PAM sequence: CAG
cttactgttgcttagtttta

SEQ ID NO: 177845 - DNA, 20 bp, Artificial Sequence
  Description of Artificial Sequence: Synthetic oligonucleotide
  Target: LAMA2; (+) strand; PAM type: NRG; PAM sequence: GAG
cagttctttatgataatctt

SEQ ID NO: 177846 - DNA, 20 bp, Artificial Sequence
  Description of Artificial Sequence: Synthetic oligonucleotide
  Target: LAMA2; (+) strand; PAM type: NRG; PAM sequence: TGG
cctcattatccttaaaaata

SEQ ID NO: 177847 - DNA, 20 bp, Artificial Sequence
  Description of Artificial Sequence: Synthetic oligonucleotide
  Target: LAMA2; (+) strand; PAM type: NRG; PAM sequence: CAG
cactttgcatatttgcctgc

SEQ ID NO: 177848 - DNA, 20 bp, Artificial Sequence
  Description of Artificial Sequence: Synthetic oligonucleotide
  Target: LAMA2; (+) strand; PAM type: NRG; PAM sequence: TAG
ttgcctgccagttttgcaca

SEQ ID NO: 177849 - DNA, 20 bp, Artificial Sequence
  Description of Artificial Sequence: Synthetic oligonucleotide
  Target: LAMA2; (+) strand; PAM type: NRG; PAM sequence: TGG
tactctgaataattacaact

SEQ ID NO: 177850 - DNA, 20 bp, Artificial Sequence
  Description of Artificial Sequence: Synthetic oligonucleotide
  Target: LAMA2; (+) strand; PAM type: NRG; PAM sequence: TAG
acttggttatatatgttgct

SEQ ID NO: 177851 - DNA, 20 bp, Artificial Sequence
  Description of Artificial Sequence: Synthetic oligonucleotide
  Target: LAMA2; (+) strand; PAM type: NRG; PAM sequence: AGG
cttggttatatatgttgctt

SEQ ID NO: 177852 - DNA, 20 bp, Artificial Sequence
  Description of Artificial Sequence: Synthetic oligonucleotide
  Target: LAMA2; (+) strand; PAM type: NRG; PAM sequence: GAG
gttatatatgttgcttaggt

SEQ ID NO: 177853 - DNA, 20 bp, Artificial Sequence
  Description of Artificial Sequence: Synthetic oligonucleotide
  Target: LAMA2; (+) strand; PAM type: NRG; PAM sequence: AGG
ttatatatgttgcttaggtg

SEQ ID NO: 177854 - DNA, 20 bp, Artificial Sequence
  Description of Artificial Sequence: Synthetic oligonucleotide
  Target: LAMA2; (+) strand; PAM type: NRG; PAM sequence: AAG
taactgtgaccaatttcttt

SEQ ID NO: 177855 - DNA, 20 bp, Artificial Sequence
  Description of Artificial Sequence: Synthetic oligonucleotide
  Target: LAMA2; (+) strand; PAM type: NRG; PAM sequence: AAG
ccaatttctttaagacaaca

SEQ ID NO: 177856 - DNA, 20 bp, Artificial Sequence
  Description of Artificial Sequence: Synthetic oligonucleotide
  Target: LAMA2; (+) strand; PAM type: NRG; PAM sequence: AGG
caatttctttaagacaacaa

SEQ ID NO: 177857 - DNA, 20 bp, Artificial Sequence
  Description of Artificial Sequence: Synthetic oligonucleotide
  Target: LAMA2; (+) strand; PAM type: NRG; PAM sequence: GAG
atttctttaagacaacaaag

SEQ ID NO: 177858 - DNA, 20 bp, Artificial Sequence
  Description of Artificial Sequence: Synthetic oligonucleotide
  Target: LAMA2; (+) strand; PAM type: NRG; PAM sequence: GAG
aagacaacaaaggagaaaat

SEQ ID NO: 177859 - DNA, 20 bp, Artificial Sequence
  Description of Artificial Sequence: Synthetic oligonucleotide
  Target: LAMA2; (+) strand; PAM type: NRG; PAM sequence: GAG
gacaacaaaggagaaaatga

SEQ ID NO: 177860 - DNA, 20 bp, Artificial Sequence
  Description of Artificial Sequence: Synthetic oligonucleotide
  Target: LAMA2; (+) strand; PAM type: NRG; PAM sequence: AGG
acaacaaaggagaaaatgag

SEQ ID NO: 177861 - DNA, 20 bp, Artificial Sequence
  Description of Artificial Sequence: Synthetic oligonucleotide
  Target: LAMA2; (+) strand; PAM type: NRG; PAM sequence: AAG
acaaaggagaaaatgagagg

SEQ ID NO: 177862 - DNA, 20 bp, Artificial Sequence
  Description of Artificial Sequence: Synthetic oligonucleotide
  Target: LAMA2; (+) strand; PAM type: NRG; PAM sequence: AAG
gagaaaatgagaggaagaca

SEQ ID NO: 177863 - DNA, 20 bp, Artificial Sequence
  Description of Artificial Sequence: Synthetic oligonucleotide
  Target: LAMA2; (+) strand; PAM type: NRG; PAM sequence: AGG
agaaaatgagaggaagacaa

SEQ ID NO: 177864 - DNA, 20 bp, Artificial Sequence
  Description of Artificial Sequence: Synthetic oligonucleotide
  Target: LAMA2; (+) strand; PAM type: NRG; PAM sequence: AAG
aatgagaggaagacaaagga

SEQ ID NO: 177865 - DNA, 20 bp, Artificial Sequence
  Description of Artificial Sequence: Synthetic oligonucleotide
  Target: LAMA2; (+) strand; PAM type: NRG; PAM sequence: AGG
atgagaggaagacaaaggaa

SEQ ID NO: 177866 - DNA, 20 bp, Artificial Sequence
  Description of Artificial Sequence: Synthetic oligonucleotide
  Target: LAMA2; (+) strand; PAM type: NRG; PAM sequence: GAG
gagaggaagacaaaggaaag

SEQ ID NO: 177867 - DNA, 20 bp, Artificial Sequence
  Description of Artificial Sequence: Synthetic oligonucleotide
  Target: LAMA2; (+) strand; PAM type: NRG; PAM sequence: AGG
agaggaagacaaaggaaagg

SEQ ID NO: 177868 - DNA, 20 bp, Artificial Sequence
  Description of Artificial Sequence: Synthetic oligonucleotide
  Target: LAMA2; (+) strand; PAM type: NRG; PAM sequence: GAG
aggaagacaaaggaaaggag

SEQ ID NO: 177869 - DNA, 20 bp, Artificial Sequence
  Description of Artificial Sequence: Synthetic oligonucleotide
  Target: LAMA2; (+) strand; PAM type: NRG; PAM sequence: AGG
ggaagacaaaggaaaggagg

SEQ ID NO: 177870 - DNA, 20 bp, Artificial Sequence
  Description of Artificial Sequence: Synthetic oligonucleotide
  Target: LAMA2; (+) strand; PAM type: NRG; PAM sequence: CAG
gacaaaggaaaggaggagga

SEQ ID NO: 177871 - DNA, 20 bp, Artificial Sequence
  Description of Artificial Sequence: Synthetic oligonucleotide
  Target: LAMA2; (+) strand; PAM type: NRG; PAM sequence: AGG
acaaaggaaaggaggaggac

SEQ ID NO: 177872 - DNA, 20 bp, Artificial Sequence
  Description of Artificial Sequence: Synthetic oligonucleotide
  Target: LAMA2; (+) strand; PAM type: NRG; PAM sequence: AAG
aaggaaaggaggaggacagg

SEQ ID NO: 177873 - DNA, 20 bp, Artificial Sequence
  Description of Artificial Sequence: Synthetic oligonucleotide
  Target: LAMA2; (+) strand; PAM type: NRG; PAM sequence: AAG
aaggaggaggacaggaagaa

SEQ ID NO: 177874 - DNA, 20 bp, Artificial Sequence
  Description of Artificial Sequence: Synthetic oligonucleotide
  Target: LAMA2; (+) strand; PAM type: NRG; PAM sequence: AGG
aggaggaggacaggaagaaa

SEQ ID NO: 177875 - DNA, 20 bp, Artificial Sequence
  Description of Artificial Sequence: Synthetic oligonucleotide
  Target: LAMA2; (+) strand; PAM type: NRG; PAM sequence: GAG
gaggacaggaagaaaaggtt

SEQ ID NO: 177876 - DNA, 20 bp, Artificial Sequence
  Description of Artificial Sequence: Synthetic oligonucleotide
  Target: LAMA2; (+) strand; PAM type: NRG; PAM sequence: AGG
aggacaggaagaaaaggttg

SEQ ID NO: 177877 - DNA, 20 bp, Artificial Sequence
  Description of Artificial Sequence: Synthetic oligonucleotide
  Target: LAMA2; (+) strand; PAM type: NRG; PAM sequence: GGG
ggacaggaagaaaaggttga

SEQ ID NO: 177878 - DNA, 20 bp, Artificial Sequence
  Description of Artificial Sequence: Synthetic oligonucleotide
  Target: LAMA2; (+) strand; PAM type: NRG; PAM sequence: TGG
gaagaaaaggttgagggtga

SEQ ID NO: 177879 - DNA, 20 bp, Artificial Sequence
  Description of Artificial Sequence: Synthetic oligonucleotide
  Target: LAMA2; (+) strand; PAM type: NRG; PAM sequence: TGG
gaaaaggttgagggtgatgg

SEQ ID NO: 177880 - DNA, 20 bp, Artificial Sequence
  Description of Artificial Sequence: Synthetic oligonucleotide
  Target: LAMA2; (+) strand; PAM type: NRG; PAM sequence: GGG
aaaaggttgagggtgatggt

SEQ ID NO: 177881 - DNA, 20 bp, Artificial Sequence
  Description of Artificial Sequence: Synthetic oligonucleotide
  Target: LAMA2; (+) strand; PAM type: NRG; PAM sequence: GAG
aaggttgagggtgatggtgg

SEQ ID NO: 177882 - DNA, 20 bp, Artificial Sequence
  Description of Artificial Sequence: Synthetic oligonucleotide
  Target: LAMA2; (+) strand; PAM type: NRG; PAM sequence: AGG
aggttgagggtgatggtggg

SEQ ID NO: 177883 - DNA, 20 bp, Artificial Sequence
  Description of Artificial Sequence: Synthetic oligonucleotide
  Target: LAMA2; (+) strand; PAM type: NRG; PAM sequence: GAG
gttgagggtgatggtgggag

SEQ ID NO: 177884 - DNA, 20 bp, Artificial Sequence
  Description of Artificial Sequence: Synthetic oligonucleotide
  Target: LAMA2; (+) strand; PAM type: NRG; PAM sequence: TAG
caaaatgctctactaatccc

SEQ ID NO: 177885 - DNA, 20 bp, Artificial Sequence
  Description of Artificial Sequence: Synthetic oligonucleotide
  Target: LAMA2; (+) strand; PAM type: NRG; PAM sequence: TGG
tagttttgactatcaatcct

SEQ ID NO: 177886 - DNA, 20 bp, Artificial Sequence
  Description of Artificial Sequence: Synthetic oligonucleotide
  Target: LAMA2; (+) strand; PAM type: NRG; PAM sequence: TAG
ttttgactatcaatccttgg

SEQ ID NO: 177887 - DNA, 20 bp, Artificial Sequence
  Description of Artificial Sequence: Synthetic oligonucleotide
  Target: LAMA2; (+) strand; PAM type: NRG; PAM sequence: CAG
tatcaatccttggtagaatg

SEQ ID NO: 177888 - DNA, 20 bp, Artificial Sequence
  Description of Artificial Sequence: Synthetic oligonucleotide
  Target: LAMA2; (+) strand; PAM type: NRG; PAM sequence: TAG
caatccttggtagaatgcag

SEQ ID NO: 177889 - DNA, 20 bp, Artificial Sequence
  Description of Artificial Sequence: Synthetic oligonucleotide
  Target: LAMA2; (+) strand; PAM type: NRG; PAM sequence: TAG
ccttggtagaatgcagtagt

SEQ ID NO: 177890 - DNA, 20 bp, Artificial Sequence
  Description of Artificial Sequence: Synthetic oligonucleotide
  Target: LAMA2; (+) strand; PAM type: NRG; PAM sequence: TGG
gcagtagttagcattgttta

SEQ ID NO: 177891 - DNA, 20 bp, Artificial Sequence
  Description of Artificial Sequence: Synthetic oligonucleotide
  Target: LAMA2; (+) strand; PAM type: NRG; PAM sequence: TGG
agttagcattgtttatggaa

SEQ ID NO: 177892 - DNA, 20 bp, Artificial Sequence
  Description of Artificial Sequence: Synthetic oligonucleotide
  Target: LAMA2; (+) strand; PAM type: NRG; PAM sequence: GGG
gttagcattgtttatggaat

SEQ ID NO: 177893 - DNA, 20 bp, Artificial Sequence
  Description of Artificial Sequence: Synthetic oligonucleotide
  Target: LAMA2; (+) strand; PAM type: NRG; PAM sequence: TGG
gtttatggaatgggactatg

SEQ ID NO: 177894 - DNA, 20 bp, Artificial Sequence
  Description of Artificial Sequence: Synthetic oligonucleotide
  Target: LAMA2; (+) strand; PAM type: NRG; PAM sequence: AAG
ctgccatttattaaccatgc

SEQ ID NO: 177895 - DNA, 20 bp, Artificial Sequence
  Description of Artificial Sequence: Synthetic oligonucleotide
  Target: LAMA2; (+) strand; PAM type: NRG; PAM sequence: TAG
atttattaaccatgcaagct

SEQ ID NO: 177896 - DNA, 20 bp, Artificial Sequence
  Description of Artificial Sequence: Synthetic oligonucleotide
  Target: LAMA2; (+) strand; PAM type: NRG; PAM sequence: AGG
tttattaaccatgcaagctt

SEQ ID NO: 177897 - DNA, 20 bp, Artificial Sequence
  Description of Artificial Sequence: Synthetic oligonucleotide
  Target: LAMA2; (+) strand; PAM type: NRG; PAM sequence: AAG
gaaatttactcaacttctct

SEQ ID NO: 177898 - DNA, 20 bp, Artificial Sequence
  Description of Artificial Sequence: Synthetic oligonucleotide
  Target: LAMA2; (+) strand; PAM type: NRG; PAM sequence: TGG
caatttcctcatttgtaaat

SEQ ID NO: 177899 - DNA, 20 bp, Artificial Sequence
  Description of Artificial Sequence: Synthetic oligonucleotide
  Target: LAMA2; (+) strand; PAM type: NRG; PAM sequence: GAG
atttcctcatttgtaaattg

SEQ ID NO: 177900 - DNA, 20 bp, Artificial Sequence
  Description of Artificial Sequence: Synthetic oligonucleotide
  Target: LAMA2; (+) strand; PAM type: NRG; PAM sequence: TAG
catttgtaaattggagataa

SEQ ID NO: 177901 - DNA, 20 bp, Artificial Sequence
  Description of Artificial Sequence: Synthetic oligonucleotide
  Target: LAMA2; (+) strand; PAM type: NRG; PAM sequence: TAG
ttgtaaattggagataatag

SEQ ID NO: 177902 - DNA, 20 bp, Artificial Sequence
  Description of Artificial Sequence: Synthetic oligonucleotide
  Target: LAMA2; (+) strand; PAM type: NRG; PAM sequence: AAG
tcatacatcaatgttattgt

SEQ ID NO: 177903 - DNA, 20 bp, Artificial Sequence
  Description of Artificial Sequence: Synthetic oligonucleotide
  Target: LAMA2; (+) strand; PAM type: NRG; PAM sequence: AGG
catacatcaatgttattgta

SEQ ID NO: 177904 - DNA, 20 bp, Artificial Sequence
  Description of Artificial Sequence: Synthetic oligonucleotide
  Target: LAMA2; (+) strand; PAM type: NRG; PAM sequence: AAG
tcaatgttattgtaaggatt

SEQ ID NO: 177905 - DNA, 20 bp, Artificial Sequence
  Description of Artificial Sequence: Synthetic oligonucleotide
  Target: LAMA2; (+) strand; PAM type: NRG; PAM sequence: AAG
aaaacaacccactgaaactg

SEQ ID NO: 177906 - DNA, 20 bp, Artificial Sequence
  Description of Artificial Sequence: Synthetic oligonucleotide
  Target: LAMA2; (+) strand; PAM type: NRG; PAM sequence: CAG
catacacattcaatgcttgt

SEQ ID NO: 177907 - DNA, 20 bp, Artificial Sequence
  Description of Artificial Sequence: Synthetic oligonucleotide
  Target: LAMA2; (+) strand; PAM type: NRG; PAM sequence: AGG
atacacattcaatgcttgtc

SEQ ID NO: 177908 - DNA, 20 bp, Artificial Sequence
  Description of Artificial Sequence: Synthetic oligonucleotide
  Target: LAMA2; (+) strand; PAM type: NRG; PAM sequence: CAG
aaatacttgtccatcctatc

SEQ ID NO: 177909 - DNA, 20 bp, Artificial Sequence
  Description of Artificial Sequence: Synthetic oligonucleotide
  Target: LAMA2; (+) strand; PAM type: NRG; PAM sequence: AGG
aatacttgtccatcctatcc

SEQ ID NO: 177910 - DNA, 20 bp, Artificial Sequence
  Description of Artificial Sequence: Synthetic oligonucleotide
  Target: LAMA2; (+) strand; PAM type: NRG; PAM sequence: GAG
tacttgtccatcctatccag

SEQ ID NO: 177911 - DNA, 20 bp, Artificial Sequence
  Description of Artificial Sequence: Synthetic oligonucleotide
  Target: LAMA2; (+) strand; PAM type: NRG; PAM sequence: AGG
acttgtccatcctatccagg

SEQ ID NO: 177912 - DNA, 20 bp, Artificial Sequence
  Description of Artificial Sequence: Synthetic oligonucleotide
  Target: LAMA2; (+) strand; PAM type: NRG; PAM sequence: GGG
cttgtccatcctatccagga

SEQ ID NO: 177913 - DNA, 20 bp, Artificial Sequence
  Description of Artificial Sequence: Synthetic oligonucleotide
  Target: LAMA2; (+) strand; PAM type: NRG; PAM sequence: TAG
ccatcctatccaggagggac

SEQ ID NO: 177914 - DNA, 20 bp, Artificial Sequence
  Description of Artificial Sequence: Synthetic oligonucleotide
  Target: LAMA2; (+) strand; PAM type: NRG; PAM sequence: TGG
ctagaacaacttctctttct

SEQ ID NO: 177915 - DNA, 20 bp, Artificial Sequence
  Description of Artificial Sequence: Synthetic oligonucleotide
  Target: LAMA2; (+) strand; PAM type: NRG; PAM sequence: CAG
tctctttcttggtcctttct

SEQ ID NO: 177916 - DNA, 20 bp, Artificial Sequence
  Description of Artificial Sequence: Synthetic oligonucleotide
  Target: LAMA2; (+) strand; PAM type: NRG; PAM sequence: TGG
ctttcttggtcctttctcag

SEQ ID NO: 177917 - DNA, 20 bp, Artificial Sequence
  Description of Artificial Sequence: Synthetic oligonucleotide
  Target: LAMA2; (+) strand; PAM type: NRG; PAM sequence: TGG
tctcagtggtcctcctcact

SEQ ID NO: 177918 - DNA, 20 bp, Artificial Sequence
  Description of Artificial Sequence: Synthetic oligonucleotide
  Target: LAMA2; (+) strand; PAM type: NRG; PAM sequence: GGG
ctcagtggtcctcctcactt

SEQ ID NO: 177919 - DNA, 20 bp, Artificial Sequence
  Description of Artificial Sequence: Synthetic oligonucleotide
  Target: LAMA2; (+) strand; PAM type: NRG; PAM sequence: GGG
tcagtggtcctcctcacttg

SEQ ID NO: 177920 - DNA, 20 bp, Artificial Sequence
  Description of Artificial Sequence: Synthetic oligonucleotide
  Target: LAMA2; (+) strand; PAM type: NRG; PAM sequence: TGG
atttacatgttgcatttctg

SEQ ID NO: 177921 - DNA, 20 bp, Artificial Sequence
  Description of Artificial Sequence: Synthetic oligonucleotide
  Target: LAMA2; (+) strand; PAM type: NRG; PAM sequence: GAG
ttacatgttgcatttctgtg

SEQ ID NO: 177922 - DNA, 20 bp, Artificial Sequence
  Description of Artificial Sequence: Synthetic oligonucleotide
  Target: LAMA2; (+) strand; PAM type: NRG; PAM sequence: TAG
gtggagctaatttaaacaat

SEQ ID NO: 177923 - DNA, 20 bp, Artificial Sequence
  Description of Artificial Sequence: Synthetic oligonucleotide
  Target: LAMA2; (+) strand; PAM type: NRG; PAM sequence: TGG
atgtcccaaaacaattttta

SEQ ID NO: 177924 - DNA, 20 bp, Artificial Sequence
  Description of Artificial Sequence: Synthetic oligonucleotide
  Target: LAMA2; (+) strand; PAM type: NRG; PAM sequence: AAG
caaaacaatttttatggcat

SEQ ID NO: 177925 - DNA, 20 bp, Artificial Sequence
  Description of Artificial Sequence: Synthetic oligonucleotide
  Target: LAMA2; (+) strand; PAM type: NRG; PAM sequence: GAG
taaaaatttacctaaaaaat

SEQ ID NO: 177926 - DNA, 20 bp, Artificial Sequence
  Description of Artificial Sequence: Synthetic oligonucleotide
  Target: LAMA2; (+) strand; PAM type: NRG; PAM sequence: CAG
aaaaaatgagctgttgtatc

SEQ ID NO: 177927 - DNA, 20 bp, Artificial Sequence
  Description of Artificial Sequence: Synthetic oligonucleotide
  Target: LAMA2; (+) strand; PAM type: NRG; PAM sequence: AAG
atgagctgttgtatccagtc

SEQ ID NO: 177928 - DNA, 20 bp, Artificial Sequence
  Description of Artificial Sequence: Synthetic oligonucleotide
  Target: LAMA2; (+) strand; PAM type: NRG; PAM sequence: GAG
gagctgttgtatccagtcaa

SEQ ID NO: 177929 - DNA, 20 bp, Artificial Sequence
  Description of Artificial Sequence: Synthetic oligonucleotide
  Target: LAMA2; (+) strand; PAM type: NRG; PAM sequence: GAG
gctgttgtatccagtcaaga

SEQ ID NO: 177930 - DNA, 20 bp, Artificial Sequence
  Description of Artificial Sequence: Synthetic oligonucleotide
  Target: LAMA2; (+) strand; PAM type: NRG; PAM sequence: AGG
ctgttgtatccagtcaagag

SEQ ID NO: 177931 - DNA, 20 bp, Artificial Sequence
  Description of Artificial Sequence: Synthetic oligonucleotide
  Target: LAMA2; (+) strand; PAM type: NRG; PAM sequence: TGG
aagagaggtaaataatattg

SEQ ID NO: 177932 - DNA, 20 bp, Artificial Sequence
  Description of Artificial Sequence: Synthetic oligonucleotide
  Target: LAMA2; (+) strand; PAM type: NRG; PAM sequence: GGG
agagaggtaaataatattgt

SEQ ID NO: 177933 - DNA, 20 bp, Artificial Sequence
  Description of Artificial Sequence: Synthetic oligonucleotide
  Target: LAMA2; (+) strand; PAM type: NRG; PAM sequence: AAG
gaggtaaataatattgtggg

SEQ ID NO: 177934 - DNA, 20 bp, Artificial Sequence
  Description of Artificial Sequence: Synthetic oligonucleotide
  Target: LAMA2; (+) strand; PAM type: NRG; PAM sequence: TAG
aaataatattgtgggaagta

SEQ ID NO: 177935 - DNA, 20 bp, Artificial Sequence
  Description of Artificial Sequence: Synthetic oligonucleotide
  Target: LAMA2; (+) strand; PAM type: NRG; PAM sequence: AGG
aataatattgtgggaagtat

SEQ ID NO: 177936 - DNA, 20 bp, Artificial Sequence
  Description of Artificial Sequence: Synthetic oligonucleotide
  Target: LAMA2; (+) strand; PAM type: NRG; PAM sequence: AAG
ttttcactaataaatgatgt

SEQ ID NO: 177937 - DNA, 20 bp, Artificial Sequence
  Description of Artificial Sequence: Synthetic oligonucleotide
  Target: LAMA2; (+) strand; PAM type: NRG; PAM sequence: AAG
ctaataaatgatgtaagaaa

SEQ ID NO: 177938 - DNA, 20 bp, Artificial Sequence
  Description of Artificial Sequence: Synthetic oligonucleotide
  Target: LAMA2; (+) strand; PAM type: NRG; PAM sequence: AAG
ataaatgatgtaagaaaaag

SEQ ID NO: 177939 - DNA, 20 bp, Artificial Sequence
  Description of Artificial Sequence: Synthetic oligonucleotide
  Target: LAMA2; (+) strand; PAM type: NRG; PAM sequence: CAG
atgatgtaagaaaaagaaga

SEQ ID NO: 177940 - DNA, 20 bp, Artificial Sequence
  Description of Artificial Sequence: Synthetic oligonucleotide
  Target: LAMA2; (+) strand; PAM type: NRG; PAM sequence: CAG
aagacagatgaactccattt

SEQ ID NO: 177941 - DNA, 20 bp, Artificial Sequence
  Description of Artificial Sequence: Synthetic oligonucleotide
  Target: LAMA2; (+) strand; PAM type: NRG; PAM sequence: AAG
atgaactccatttcagtctt

SEQ ID NO: 177942 - DNA, 20 bp, Artificial Sequence
  Description of Artificial Sequence: Synthetic oligonucleotide
  Target: LAMA2; (+) strand; PAM type: NRG; PAM sequence: CAG
tcagtcttaagatatatttg

SEQ ID NO: 177943 - DNA, 20 bp, Artificial Sequence
  Description of Artificial Sequence: Synthetic oligonucleotide
  Target: LAMA2; (+) strand; PAM type: NRG; PAM sequence: GAG
ttgcagtttaatgcatacct

SEQ ID NO: 177944 - DNA, 20 bp, Artificial Sequence
  Description of Artificial Sequence: Synthetic oligonucleotide
  Target: LAMA2; (+) strand; PAM type: NRG; PAM sequence: AAG
agtttaatgcatacctgagt

SEQ ID NO: 177945 - DNA, 20 bp, Artificial Sequence
  Description of Artificial Sequence: Synthetic oligonucleotide
  Target: LAMA2; (+) strand; PAM type: NRG; PAM sequence: CAG
gatttctaaacttatatcaa

SEQ ID NO: 177946 - DNA, 20 bp, Artificial Sequence
  Description of Artificial Sequence: Synthetic oligonucleotide
  Target: LAMA2; (+) strand; PAM type: NRG; PAM sequence: TGG
ctaaacttatatcaacagat

SEQ ID NO: 177947 - DNA, 20 bp, Artificial Sequence
  Description of Artificial Sequence: Synthetic oligonucleotide
  Target: LAMA2; (+) strand; PAM type: NRG; PAM sequence: TAG
gtactcgaatttaaactgct

SEQ ID NO: 177948 - DNA, 20 bp, Artificial Sequence
  Description of Artificial Sequence: Synthetic oligonucleotide
  Target: LAMA2; (+) strand; PAM type: NRG; PAM sequence: AAG
ttacaatataaattaatcta

SEQ ID NO: 177949 - DNA, 20 bp, Artificial Sequence
  Description of Artificial Sequence: Synthetic oligonucleotide
  Target: LAMA2; (+) strand; PAM type: NRG; PAM sequence: TAG
atataaattaatctaaagtt

SEQ ID NO: 177950 - DNA, 20 bp, Artificial Sequence
  Description of Artificial Sequence: Synthetic oligonucleotide
  Target: LAMA2; (+) strand; PAM type: NRG; PAM sequence: GAG
ataaattaatctaaagttta

SEQ ID NO: 177951 - DNA, 20 bp, Artificial Sequence
  Description of Artificial Sequence: Synthetic oligonucleotide
  Target: LAMA2; (+) strand; PAM type: NRG; PAM sequence: TAG
gtttagagaatattaaaaac

SEQ ID NO: 177952 - DNA, 20 bp, Artificial Sequence
  Description of Artificial Sequence: Synthetic oligonucleotide
  Target: LAMA2; (+) strand; PAM type: NRG; PAM sequence: TGG
tagagaatattaaaaactag

SEQ ID NO: 177953 - DNA, 20 bp, Artificial Sequence
  Description of Artificial Sequence: Synthetic oligonucleotide
  Target: LAMA2; (+) strand; PAM type: NRG; PAM sequence: AAG
gaatattaaaaactagtgga

SEQ ID NO: 177954 - DNA, 20 bp, Artificial Sequence
  Description of Artificial Sequence: Synthetic oligonucleotide
  Target: LAMA2; (+) strand; PAM type: NRG; PAM sequence: CAG
tattaaaaactagtggaaag

SEQ ID NO: 177955 - DNA, 20 bp, Artificial Sequence
  Description of Artificial Sequence: Synthetic oligonucleotide
  Target: LAMA2; (+) strand; PAM type: NRG; PAM sequence: TAG
aaaaactagtggaaagcagc

SEQ ID NO: 177956 - DNA, 20 bp, Artificial Sequence
  Description of Artificial Sequence: Synthetic oligonucleotide
  Target: LAMA2; (+) strand; PAM type: NRG; PAM sequence: TAG
atgtaatattaaattatctc

SEQ ID NO: 177957 - DNA, 20 bp, Artificial Sequence
  Description of Artificial Sequence: Synthetic oligonucleotide
  Target: LAMA2; (+) strand; PAM type: NRG; PAM sequence: TGG
attaaattatctctagcaaa

SEQ ID NO: 177958 - DNA, 20 bp, Artificial Sequence
  Description of Artificial Sequence: Synthetic oligonucleotide
  Target: LAMA2; (+) strand; PAM type: NRG; PAM sequence: AAG
aatggcatttttgaatatta

SEQ ID NO: 177959 - DNA, 20 bp, Artificial Sequence
  Description of Artificial Sequence: Synthetic oligonucleotide
  Target: LAMA2; (+) strand; PAM type: NRG; PAM sequence: AAG
tattaaagataacattgcta

SEQ ID NO: 177960 - DNA, 20 bp, Artificial Sequence
  Description of Artificial Sequence: Synthetic oligonucleotide
  Target: LAMA2; (+) strand; PAM type: NRG; PAM sequence: AAG
gataacattgctaaagtatc

SEQ ID NO: 177961 - DNA, 20 bp, Artificial Sequence
  Description of Artificial Sequence: Synthetic oligonucleotide
  Target: LAMA2; (+) strand; PAM type: NRG; PAM sequence: GAG
taacattgctaaagtatcaa

SEQ ID NO: 177962 - DNA, 20 bp, Artificial Sequence
  Description of Artificial Sequence: Synthetic oligonucleotide
  Target: LAMA2; (+) strand; PAM type: NRG; PAM sequence: TGG
aaaaactatataaaatttat

SEQ ID NO: 177963 - DNA, 20 bp, Artificial Sequence
  Description of Artificial Sequence: Synthetic oligonucleotide
  Target: LAMA2; (+) strand; PAM type: NRG; PAM sequence: GAG
aaaaatattgttttctttat

SEQ ID NO: 177964 - DNA, 20 bp, Artificial Sequence
  Description of Artificial Sequence: Synthetic oligonucleotide
  Target: LAMA2; (+) strand; PAM type: NRG; PAM sequence: CAG
atgagaaaaatgactattat

SEQ ID NO: 177965 - DNA, 20 bp, Artificial Sequence
  Description of Artificial Sequence: Synthetic oligonucleotide
  Target: LAMA2; (+) strand; PAM type: NRG; PAM sequence: AAG
taacaaatattattatactg

SEQ ID NO: 177966 - DNA, 20 bp, Artificial Sequence
  Description of Artificial Sequence: Synthetic oligonucleotide
  Target: LAMA2; (+) strand; PAM type: NRG; PAM sequence: TGG
aaatattattatactgaagt

SEQ ID NO: 177967 - DNA, 20 bp, Artificial Sequence
  Description of Artificial Sequence: Synthetic oligonucleotide
  Target: LAMA2; (+) strand; PAM type: NRG; PAM sequence: GAG
atattattatactgaagttg

SEQ ID NO: 177968 - DNA, 20 bp, Artificial Sequence
  Description of Artificial Sequence: Synthetic oligonucleotide
  Target: LAMA2; (+) strand; PAM type: NRG; PAM sequence: AGG
tattattatactgaagttgg

SEQ ID NO: 177969 - DNA, 20 bp, Artificial Sequence
  Description of Artificial Sequence: Synthetic oligonucleotide
  Target: LAMA2; (+) strand; PAM type: NRG; PAM sequence: GAG
tctgctaaacaatcatatct

SEQ ID NO: 177970 - DNA, 20 bp, Artificial Sequence
  Description of Artificial Sequence: Synthetic oligonucleotide
  Target: LAMA2; (+) strand; PAM type: NRG; PAM sequence: TGG
tctaatccaatgattcattt

SEQ ID NO: 177971 - DNA, 20 bp, Artificial Sequence
  Description of Artificial Sequence: Synthetic oligonucleotide
  Target: LAMA2; (+) strand; PAM type: NRG; PAM sequence: AAG
atgattcattttggtaataa

SEQ ID NO: 177972 - DNA, 20 bp, Artificial Sequence
  Description of Artificial Sequence: Synthetic oligonucleotide
  Target: LAMA2; (+) strand; PAM type: NRG; PAM sequence: AAG
ggtaataaaagtttttaaat

SEQ ID NO: 177973 - DNA, 20 bp, Artificial Sequence
  Description of Artificial Sequence: Synthetic oligonucleotide
  Target: LAMA2; (+) strand; PAM type: NRG; PAM sequence: TGG
aataaaagtttttaaataag

SEQ ID NO: 177974 - DNA, 20 bp, Artificial Sequence
  Description of Artificial Sequence: Synthetic oligonucleotide
  Target: LAMA2; (+) strand; PAM type: NRG; PAM sequence: TGG
ttttaaataagtggaatcaa

SEQ ID NO: 177975 - DNA, 20 bp, Artificial Sequence
  Description of Artificial Sequence: Synthetic oligonucleotide
  Target: LAMA2; (+) strand; PAM type: NRG; PAM sequence: GGG
tttaaataagtggaatcaat

SEQ ID NO: 177976 - DNA, 20 bp, Artificial Sequence
  Description of Artificial Sequence: Synthetic oligonucleotide
  Target: LAMA2; (+) strand; PAM type: NRG; PAM sequence: GAG
taaataagtggaatcaatgg

SEQ ID NO: 177977 - DNA, 20 bp, Artificial Sequence
  Description of Artificial Sequence: Synthetic oligonucleotide
  Target: LAMA2; (+) strand; PAM type: NRG; PAM sequence: AAG
gaatcaatgggagtgataac

SEQ ID NO: 177978 - DNA, 20 bp, Artificial Sequence
  Description of Artificial Sequence: Synthetic oligonucleotide
  Target: LAMA2; (+) strand; PAM type: NRG; PAM sequence: GAG
atcaatgggagtgataacaa

SEQ ID NO: 177979 - DNA, 20 bp, Artificial Sequence
  Description of Artificial Sequence: Synthetic oligonucleotide
  Target: LAMA2; (+) strand; PAM type: NRG; PAM sequence: AGG
tcaatgggagtgataacaag

SEQ ID NO: 177980 - DNA, 20 bp, Artificial Sequence
  Description of Artificial Sequence: Synthetic oligonucleotide
  Target: LAMA2; (+) strand; PAM type: NRG; PAM sequence: GGG
caatgggagtgataacaaga

SEQ ID NO: 177981 - DNA, 20 bp, Artificial Sequence
  Description of Artificial Sequence: Synthetic oligonucleotide
  Target: LAMA2; (+) strand; PAM type: NRG; PAM sequence: TGG
caagagggcataattacaaa

SEQ ID NO: 177982 - DNA, 20 bp, Artificial Sequence
  Description of Artificial Sequence: Synthetic oligonucleotide
  Target: LAMA2; (+) strand; PAM type: NRG; PAM sequence: AAG
cataattacaaatggaataa

SEQ ID NO: 177983 - DNA, 20 bp, Artificial Sequence
  Description of Artificial Sequence: Synthetic oligonucleotide
  Target: LAMA2; (+) strand; PAM type: NRG; PAM sequence: TGG
ggaataaaagactaattctt

SEQ ID NO: 177984 - DNA, 20 bp, Artificial Sequence
  Description of Artificial Sequence: Synthetic oligonucleotide
  Target: LAMA2; (+) strand; PAM type: NRG; PAM sequence: GAG
aataaaagactaattctttg

SEQ ID NO: 177985 - DNA, 20 bp, Artificial Sequence
  Description of Artificial Sequence: Synthetic oligonucleotide
  Target: LAMA2; (+) strand; PAM type: NRG; PAM sequence: AGG
ataaaagactaattctttgg

SEQ ID NO: 177986 - DNA, 20 bp, Artificial Sequence
  Description of Artificial Sequence: Synthetic oligonucleotide
  Target: LAMA2; (+) strand; PAM type: NRG; PAM sequence: TAG
ctttggaggtttcttctcta

SEQ ID NO: 177987 - DNA, 20 bp, Artificial Sequence
  Description of Artificial Sequence: Synthetic oligonucleotide
  Target: LAMA2; (+) strand; PAM type: NRG; PAM sequence: AGG
tttggaggtttcttctctat

SEQ ID NO: 177988 - DNA, 20 bp, Artificial Sequence
  Description of Artificial Sequence: Synthetic oligonucleotide
  Target: LAMA2; (+) strand; PAM type: NRG; PAM sequence: AAG
ggaggtttcttctctatagg

SEQ ID NO: 177989 - DNA, 20 bp, Artificial Sequence
  Description of Artificial Sequence: Synthetic oligonucleotide
  Target: LAMA2; (+) strand; PAM type: NRG; PAM sequence: AAG
ctataggaagatatcaaatt

SEQ ID NO: 177990 - DNA, 20 bp, Artificial Sequence
  Description of Artificial Sequence: Synthetic oligonucleotide
  Target: LAMA2; (+) strand; PAM type: NRG; PAM sequence: CAG
aggaagatatcaaattaagt

SEQ ID NO: 177991 - DNA, 20 bp, Artificial Sequence
  Description of Artificial Sequence: Synthetic oligonucleotide
  Target: LAMA2; (+) strand; PAM type: NRG; PAM sequence: AAG
atatcaaattaagtcagata

SEQ ID NO: 177992 - DNA, 20 bp, Artificial Sequence
  Description of Artificial Sequence: Synthetic oligonucleotide
  Target: LAMA2; (+) strand; PAM type: NRG; PAM sequence: CAG
aaattaagtcagataaagat

SEQ ID NO: 177993 - DNA, 20 bp, Artificial Sequence
  Description of Artificial Sequence: Synthetic oligonucleotide
  Target: LAMA2; (+) strand; PAM type: NRG; PAM sequence: AAG
tcagataaagatcagatacc

SEQ ID NO: 177994 - DNA, 20 bp, Artificial Sequence
  Description of Artificial Sequence: Synthetic oligonucleotide
  Target: LAMA2; (+) strand; PAM type: NRG; PAM sequence: AAG
gataaagatcagataccaag

SEQ ID NO: 177995 - DNA, 20 bp, Artificial Sequence
  Description of Artificial Sequence: Synthetic oligonucleotide
  Target: LAMA2; (+) strand; PAM type: NRG; PAM sequence: TAG
aaatgtcattgttcaacatg

SEQ ID NO: 177996 - DNA, 20 bp, Artificial Sequence
  Description of Artificial Sequence: Synthetic oligonucleotide
  Target: LAMA2; (+) strand; PAM type: NRG; PAM sequence: AAG
tgtcattgttcaacatgtag

SEQ ID NO: 177997 - DNA, 20 bp, Artificial Sequence
  Description of Artificial Sequence: Synthetic oligonucleotide
  Target: LAMA2; (+) strand; PAM type: NRG; PAM sequence: TGG
acatatttttaaaatatgat

SEQ ID NO: 177998 - DNA, 20 bp, Artificial Sequence
  Description of Artificial Sequence: Synthetic oligonucleotide
  Target: LAMA2; (+) strand; PAM type: NRG; PAM sequence: TAG
attggaaatatatttatgta

SEQ ID NO: 177999 - DNA, 20 bp, Artificial Sequence
  Description of Artificial Sequence: Synthetic oligonucleotide
  Target: LAMA2; (+) strand; PAM type: NRG; PAM sequence: AAG
taacctgaaattgcacatcc

SEQ ID NO: 178000 - DNA, 20 bp, Artificial Sequence
  Description of Artificial Sequence: Synthetic oligonucleotide
  Target: LAMA2; (+) strand; PAM type: NRG; PAM sequence: AAG
gaaattgcacatccaagtat

SEQ ID NO: 178001 - DNA, 20 bp, Artificial Sequence
  Description of Artificial Sequence: Synthetic oligonucleotide
  Target: LAMA2; (+) strand; PAM type: NRG; PAM sequence: CAG
tgcacatccaagtataagct

SEQ ID NO: 178002 - DNA, 20 bp, Artificial Sequence
  Description of Artificial Sequence: Synthetic oligonucleotide
  Target: LAMA2; (+) strand; PAM type: NRG; PAM sequence: AGG
gcacatccaagtataagctc

SEQ ID NO: 178003 - DNA, 20 bp, Artificial Sequence
  Description of Artificial Sequence: Synthetic oligonucleotide
  Target: LAMA2; (+) strand; PAM type: NRG; PAM sequence: GGG
cacatccaagtataagctca

SEQ ID NO: 178004 - DNA, 20 bp, Artificial Sequence
  Description of Artificial Sequence: Synthetic oligonucleotide
  Target: LAMA2; (+) strand; PAM type: NRG; PAM sequence: CAG
ttttttttgttttttattcg

SEQ ID NO: 178005 - DNA, 20 bp, Artificial Sequence
  Description of Artificial Sequence: Synthetic oligonucleotide
  Target: LAMA2; (+) strand; PAM type: NRG; PAM sequence: AAG
ttttttattcgcagaaaatg

SEQ ID NO: 178006 - DNA, 20 bp, Artificial Sequence
  Description of Artificial Sequence: Synthetic oligonucleotide
  Target: LAMA2; (+) strand; PAM type: NRG; PAM sequence: TGG
gaaaatgaagaccatctaaa

SEQ ID NO: 178007 - DNA, 20 bp, Artificial Sequence
  Description of Artificial Sequence: Synthetic oligonucleotide
  Target: LAMA2; (+) strand; PAM type: NRG; PAM sequence: CAG
catctaaatggcttaaaaac

SEQ ID NO: 178008 - DNA, 20 bp, Artificial Sequence
  Description of Artificial Sequence: Synthetic oligonucleotide
  Target: LAMA2; (+) strand; PAM type: NRG; PAM sequence: AGG
atctaaatggcttaaaaacc

SEQ ID NO: 178009 - DNA, 20 bp, Artificial Sequence
  Description of Artificial Sequence: Synthetic oligonucleotide
  Target: LAMA2; (+) strand; PAM type: NRG; PAM sequence: TAG
aaatggcttaaaaaccagga

SEQ ID NO: 178010 - DNA, 20 bp, Artificial Sequence
  Description of Artificial Sequence: Synthetic oligonucleotide
  Target: LAMA2; (+) strand; PAM type: NRG; PAM sequence: TAG
aggatagaaaatgctgatgc

SEQ ID NO: 178011 - DNA, 20 bp, Artificial Sequence
  Description of Artificial Sequence: Synthetic oligonucleotide
  Target: LAMA2; (+) strand; PAM type: NRG; PAM sequence: TGG
gaaaatgctgatgctagaaa

SEQ ID NO: 178012 - DNA, 20 bp, Artificial Sequence
  Description of Artificial Sequence: Synthetic oligonucleotide
  Target: LAMA2; (+) strand; PAM type: NRG; PAM sequence: GGG
aaaatgctgatgctagaaat

SEQ ID NO: 178013 - DNA, 20 bp, Artificial Sequence
  Description of Artificial Sequence: Synthetic oligonucleotide
  Target: LAMA2; (+) strand; PAM type: NRG; PAM sequence: GGG
aaatgctgatgctagaaatg

SEQ ID NO: 178014 - DNA, 20 bp, Artificial Sequence
  Description of Artificial Sequence: Synthetic oligonucleotide
  Target: LAMA2; (+) strand; PAM type: NRG; PAM sequence: GAG
gctagaaatggggatctctt

SEQ ID NO: 178015 - DNA, 20 bp, Artificial Sequence
  Description of Artificial Sequence: Synthetic oligonucleotide
  Target: LAMA2; (+) strand; PAM type: NRG; PAM sequence: TGG
gagaactttgaatgacactt

SEQ ID NO: 178016 - DNA, 20 bp, Artificial Sequence
  Description of Artificial Sequence: Synthetic oligonucleotide
  Target: LAMA2; (+) strand; PAM type: NRG; PAM sequence: GGG
agaactttgaatgacacttt

SEQ ID NO: 178017 - DNA, 20 bp, Artificial Sequence
  Description of Artificial Sequence: Synthetic oligonucleotide
  Target: LAMA2; (+) strand; PAM type: NRG; PAM sequence: AAG
ctttgaatgacactttggga

SEQ ID NO: 178018 - DNA, 20 bp, Artificial Sequence
  Description of Artificial Sequence: Synthetic oligonucleotide
  Target: LAMA2; (+) strand; PAM type: NRG; PAM sequence: CAG
tgacactttgggaaagttat

SEQ ID NO: 178019 - DNA, 20 bp, Artificial Sequence
  Description of Artificial Sequence: Synthetic oligonucleotide
  Target: LAMA2; (+) strand; PAM type: NRG; PAM sequence: TGG
aagttatcagctattccaaa

SEQ ID NO: 178020 - DNA, 20 bp, Artificial Sequence
  Description of Artificial Sequence: Synthetic oligonucleotide
  Target: LAMA2; (+) strand; PAM type: NRG; PAM sequence: AAG
tatcagctattccaaatggt

SEQ ID NO: 178021 - DNA, 20 bp, Artificial Sequence
  Description of Artificial Sequence: Synthetic oligonucleotide
  Target: LAMA2; (+) strand; PAM type: NRG; PAM sequence: CAG
tattccaaatggtaagcatt

SEQ ID NO: 178022 - DNA, 20 bp, Artificial Sequence
  Description of Artificial Sequence: Synthetic oligonucleotide
  Target: LAMA2; (+) strand; PAM type: NRG; PAM sequence: AGG
attccaaatggtaagcattc

SEQ ID NO: 178023 - DNA, 20 bp, Artificial Sequence
  Description of Artificial Sequence: Synthetic oligonucleotide
  Target: LAMA2; (+) strand; PAM type: NRG; PAM sequence: CAG
caggacactaccaactgtgt

SEQ ID NO: 178024 - DNA, 20 bp, Artificial Sequence
  Description of Artificial Sequence: Synthetic oligonucleotide
  Target: LAMA2; (+) strand; PAM type: NRG; PAM sequence: AAG
caactgtgtcagttgacctg

SEQ ID NO: 178025 - DNA, 20 bp, Artificial Sequence
  Description of Artificial Sequence: Synthetic oligonucleotide
  Target: LAMA2; (+) strand; PAM type: NRG; PAM sequence: AAG
tcagttgacctgaagttttg

SEQ ID NO: 178026 - DNA, 20 bp, Artificial Sequence
  Description of Artificial Sequence: Synthetic oligonucleotide
  Target: LAMA2; (+) strand; PAM type: NRG; PAM sequence: AAG
aacttttaccatttttttct

SEQ ID NO: 178027 - DNA, 20 bp, Artificial Sequence
  Description of Artificial Sequence: Synthetic oligonucleotide
  Target: LAMA2; (+) strand; PAM type: NRG; PAM sequence: TGG
atttttttctaagattattc

SEQ ID NO: 178028 - DNA, 20 bp, Artificial Sequence
  Description of Artificial Sequence: Synthetic oligonucleotide
  Target: LAMA2; (+) strand; PAM type: NRG; PAM sequence: TGG
attattctggtactattatc

SEQ ID NO: 178029 - DNA, 20 bp, Artificial Sequence
  Description of Artificial Sequence: Synthetic oligonucleotide
  Target: LAMA2; (+) strand; PAM type: NRG; PAM sequence: TAG
tggtactattatctggaaat

SEQ ID NO: 178030 - DNA, 20 bp, Artificial Sequence
  Description of Artificial Sequence: Synthetic oligonucleotide
  Target: LAMA2; (+) strand; PAM type: NRG; PAM sequence: GAG
actcatgaattcttctttgt

SEQ ID NO: 178031 - DNA, 20 bp, Artificial Sequence
  Description of Artificial Sequence: Synthetic oligonucleotide
  Target: LAMA2; (+) strand; PAM type: NRG; PAM sequence: GAG
gaattcttctttgtgagaat

SEQ ID NO: 178032 - DNA, 20 bp, Artificial Sequence
  Description of Artificial Sequence: Synthetic oligonucleotide
  Target: LAMA2; (+) strand; PAM type: NRG; PAM sequence: TGG
ctaaaccatactttgcatta

SEQ ID NO: 178033 - DNA, 20 bp, Artificial Sequence
  Description of Artificial Sequence: Synthetic oligonucleotide
  Target: LAMA2; (+) strand; PAM type: NRG; PAM sequence: TAG
tttttatcttttattgcctt

SEQ ID NO: 178034 - DNA, 20 bp, Artificial Sequence
  Description of Artificial Sequence: Synthetic oligonucleotide
  Target: LAMA2; (+) strand; PAM type: NRG; PAM sequence: CAG
tatcttttattgcctttagc

SEQ ID NO: 178035 - DNA, 20 bp, Artificial Sequence
  Description of Artificial Sequence: Synthetic oligonucleotide
  Target: LAMA2; (+) strand; PAM type: NRG; PAM sequence: TAG
ttgcctttagccagtatcct

SEQ ID NO: 178036 - DNA, 20 bp, Artificial Sequence
  Description of Artificial Sequence: Synthetic oligonucleotide
  Target: LAMA2; (+) strand; PAM type: NRG; PAM sequence: AGG
tgcctttagccagtatcctt

SEQ ID NO: 178037 - DNA, 20 bp, Artificial Sequence
  Description of Artificial Sequence: Synthetic oligonucleotide
  Target: LAMA2; (+) strand; PAM type: NRG; PAM sequence: CAG
gtatccttaggaatgtgtta

SEQ ID NO: 178038 - DNA, 20 bp, Artificial Sequence
  Description of Artificial Sequence: Synthetic oligonucleotide
  Target: LAMA2; (+) strand; PAM type: NRG; PAM sequence: AAG
ccttaggaatgtgttacaga

SEQ ID NO: 178039 - DNA, 20 bp, Artificial Sequence
  Description of Artificial Sequence: Synthetic oligonucleotide
  Target: LAMA2; (+) strand; PAM type: NRG; PAM sequence: AGG
cttaggaatgtgttacagaa

SEQ ID NO: 178040 - DNA, 20 bp, Artificial Sequence
  Description of Artificial Sequence: Synthetic oligonucleotide
  Target: LAMA2; (+) strand; PAM type: NRG; PAM sequence: AAG
aggaatgtgttacagaaagg

SEQ ID NO: 178041 - DNA, 20 bp, Artificial Sequence
  Description of Artificial Sequence: Synthetic oligonucleotide
  Target: LAMA2; (+) strand; PAM type: NRG; PAM sequence: TAG
gtgttacagaaaggaagata

SEQ ID NO: 178042 - DNA, 20 bp, Artificial Sequence
  Description of Artificial Sequence: Synthetic oligonucleotide
  Target: LAMA2; (+) strand; PAM type: NRG; PAM sequence: CAG
ttattataaaactcatcctt

SEQ ID NO: 178043 - DNA, 20 bp, Artificial Sequence
  Description of Artificial Sequence: Synthetic oligonucleotide
  Target: LAMA2; (+) strand; PAM type: NRG; PAM sequence: TGG
taaaactcatccttcagtat

SEQ ID NO: 178044 - DNA, 20 bp, Artificial Sequence
  Description of Artificial Sequence: Synthetic oligonucleotide
  Target: LAMA2; (+) strand; PAM type: NRG; PAM sequence: CAG
aactcatccttcagtattgg

SEQ ID NO: 178045 - DNA, 20 bp, Artificial Sequence
  Description of Artificial Sequence: Synthetic oligonucleotide
  Target: LAMA2; (+) strand; PAM type: NRG; PAM sequence: AGG
actcatccttcagtattggc

SEQ ID NO: 178046 - DNA, 20 bp, Artificial Sequence
  Description of Artificial Sequence: Synthetic oligonucleotide
  Target: LAMA2; (+) strand; PAM type: NRG; PAM sequence: GGG
ctcatccttcagtattggca

SEQ ID NO: 178047 - DNA, 20 bp, Artificial Sequence
  Description of Artificial Sequence: Synthetic oligonucleotide
  Target: LAMA2; (+) strand; PAM type: NRG; PAM sequence: GGG
tcatccttcagtattggcag

SEQ ID NO: 178048 - DNA, 20 bp, Artificial Sequence
  Description of Artificial Sequence: Synthetic oligonucleotide
  Target: LAMA2; (+) strand; PAM type: NRG; PAM sequence: TGG
cttcagtattggcaggggat

SEQ ID NO: 178049 - DNA, 20 bp, Artificial Sequence
  Description of Artificial Sequence: Synthetic oligonucleotide
  Target: LAMA2; (+) strand; PAM type: NRG; PAM sequence: CAG
tattggcaggggattggttc

SEQ ID NO: 178050 - DNA, 20 bp, Artificial Sequence
  Description of Artificial Sequence: Synthetic oligonucleotide
  Target: LAMA2; (+) strand; PAM type: NRG; PAM sequence: AGG
attggcaggggattggttcc

SEQ ID NO: 178051 - DNA, 20 bp, Artificial Sequence
  Description of Artificial Sequence: Synthetic oligonucleotide
  Target: LAMA2; (+) strand; PAM type: NRG; PAM sequence: CAG
ggttccaggaccccccccca

SEQ ID NO: 178052 - DNA, 20 bp, Artificial Sequence
  Description of Artificial Sequence: Synthetic oligonucleotide
  Target: LAMA2; (+) strand; PAM type: NRG; PAM sequence: AAG
atcaaaattcttgaatactc

SEQ ID NO: 178053 - DNA, 20 bp, Artificial Sequence
  Description of Artificial Sequence: Synthetic oligonucleotide
  Target: LAMA2; (+) strand; PAM type: NRG; PAM sequence: TGG
ctcaagtcccttttataaaa

SEQ ID NO: 178054 - DNA, 20 bp, Artificial Sequence
  Description of Artificial Sequence: Synthetic oligonucleotide
  Target: LAMA2; (+) strand; PAM type: NRG; PAM sequence: TAG
gtcccttttataaaatggca

SEQ ID NO: 178055 - DNA, 20 bp, Artificial Sequence
  Description of Artificial Sequence: Synthetic oligonucleotide
  Target: LAMA2; (+) strand; PAM type: NRG; PAM sequence: TAG
atttgcatataacctatgca

SEQ ID NO: 178056 - DNA, 20 bp, Artificial Sequence
  Description of Artificial Sequence: Synthetic oligonucleotide
  Target: LAMA2; (+) strand; PAM type: NRG; PAM sequence: TAG
ctcccatatactttaatccc

SEQ ID NO: 178057 - DNA, 20 bp, Artificial Sequence
  Description of Artificial Sequence: Synthetic oligonucleotide
  Target: LAMA2; (+) strand; PAM type: NRG; PAM sequence: CAG
aaatgctatgtaaattctta

SEQ ID NO: 178058 - DNA, 20 bp, Artificial Sequence
  Description of Artificial Sequence: Synthetic oligonucleotide
  Target: LAMA2; (+) strand; PAM type: NRG; PAM sequence: AAG
attgtttatgaaataatgac

SEQ ID NO: 178059 - DNA, 20 bp, Artificial Sequence
  Description of Artificial Sequence: Synthetic oligonucleotide
  Target: LAMA2; (+) strand; PAM type: NRG; PAM sequence: AAG
atgaaataatgacaagaaaa

SEQ ID NO: 178060 - DNA, 20 bp, Artificial Sequence
  Description of Artificial Sequence: Synthetic oligonucleotide
  Target: LAMA2; (+) strand; PAM type: NRG; PAM sequence: CAG
gaaaaaagtttgtccatgtt

SEQ ID NO: 178061 - DNA, 20 bp, Artificial Sequence
  Description of Artificial Sequence: Synthetic oligonucleotide
  Target: LAMA2; (+) strand; PAM type: NRG; PAM sequence: CAG
aagtttgtccatgttcagta

SEQ ID NO: 178062 - DNA, 20 bp, Artificial Sequence
  Description of Artificial Sequence: Synthetic oligonucleotide
  Target: LAMA2; (+) strand; PAM type: NRG; PAM sequence: AAG
atccaaatatccaactctcc

SEQ ID NO: 178063 - DNA, 20 bp, Artificial Sequence
  Description of Artificial Sequence: Synthetic oligonucleotide
  Target: LAMA2; (+) strand; PAM type: NRG; PAM sequence: AGG
tccaaatatccaactctcca

SEQ ID NO: 178064 - DNA, 20 bp, Artificial Sequence
  Description of Artificial Sequence: Synthetic oligonucleotide
  Target: LAMA2; (+) strand; PAM type: NRG; PAM sequence: TGG
aatatccaactctccaaggt

SEQ ID NO: 178065 - DNA, 20 bp, Artificial Sequence
  Description of Artificial Sequence: Synthetic oligonucleotide
  Target: LAMA2; (+) strand; PAM type: NRG; PAM sequence: CAG
tccaaggttggttgaattta

SEQ ID NO: 178066 - DNA, 20 bp, Artificial Sequence
  Description of Artificial Sequence: Synthetic oligonucleotide
  Target: LAMA2; (+) strand; PAM type: NRG; PAM sequence: CAG
gttggttgaatttacagata

SEQ ID NO: 178067 - DNA, 20 bp, Artificial Sequence
  Description of Artificial Sequence: Synthetic oligonucleotide
  Target: LAMA2; (+) strand; PAM type: NRG; PAM sequence: GAG
tggttgaatttacagataca

SEQ ID NO: 178068 - DNA, 20 bp, Artificial Sequence
  Description of Artificial Sequence: Synthetic oligonucleotide
  Target: LAMA2; (+) strand; PAM type: NRG; PAM sequence: CAG
agatacagagcccactgaca

SEQ ID NO: 178069 - DNA, 20 bp, Artificial Sequence
  Description of Artificial Sequence: Synthetic oligonucleotide
  Target: LAMA2; (+) strand; PAM type: NRG; PAM sequence: GAG
atacagagcccactgacaca

SEQ ID NO: 178070 - DNA, 20 bp, Artificial Sequence
  Description of Artificial Sequence: Synthetic oligonucleotide
  Target: LAMA2; (+) strand; PAM type: NRG; PAM sequence: AGG
tacagagcccactgacacag

SEQ ID NO: 178071 - DNA, 20 bp, Artificial Sequence
  Description of Artificial Sequence: Synthetic oligonucleotide
  Target: LAMA2; (+) strand; PAM type: NRG; PAM sequence: GGG
acagagcccactgacacaga

SEQ ID NO: 178072 - DNA, 20 bp, Artificial Sequence
  Description of Artificial Sequence: Synthetic oligonucleotide
  Target: LAMA2; (+) strand; PAM type: NRG; PAM sequence: CAG
ctgtattgtcttctgtgttt

SEQ ID NO: 178073 - DNA, 20 bp, Artificial Sequence
  Description of Artificial Sequence: Synthetic oligonucleotide
  Target: LAMA2; (+) strand; PAM type: NRG; PAM sequence: AAG
tgtcttctgtgtttcagccc

SEQ ID NO: 178074 - DNA, 20 bp, Artificial Sequence
  Description of Artificial Sequence: Synthetic oligonucleotide
  Target: LAMA2; (+) strand; PAM type: NRG; PAM sequence: TAG
cagcccaagaaatcgtgtat

SEQ ID NO: 178075 - DNA, 20 bp, Artificial Sequence
  Description of Artificial Sequence: Synthetic oligonucleotide
  Target: LAMA2; (+) strand; PAM type: NRG; PAM sequence: TAG
gaaatcgtgtattagtgaaa

SEQ ID NO: 178076 - DNA, 20 bp, Artificial Sequence
  Description of Artificial Sequence: Synthetic oligonucleotide
  Target: LAMA2; (+) strand; PAM type: NRG; PAM sequence: TAG
gtgaaatagaataaatcaca

SEQ ID NO: 178077 - DNA, 20 bp, Artificial Sequence
  Description of Artificial Sequence: Synthetic oligonucleotide
  Target: LAMA2; (+) strand; PAM type: NRG; PAM sequence: AAG
aatactgatgtaccaccaca

SEQ ID NO: 178078 - DNA, 20 bp, Artificial Sequence
  Description of Artificial Sequence: Synthetic oligonucleotide
  Target: LAMA2; (+) strand; PAM type: NRG; PAM sequence: CAG
gatgtaccaccacaaagaca

SEQ ID NO: 178079 - DNA, 20 bp, Artificial Sequence
  Description of Artificial Sequence: Synthetic oligonucleotide
  Target: LAMA2; (+) strand; PAM type: NRG; PAM sequence: AAG
cacaaagacacagtttatta

SEQ ID NO: 178080 - DNA, 20 bp, Artificial Sequence
  Description of Artificial Sequence: Synthetic oligonucleotide
  Target: LAMA2; (+) strand; PAM type: NRG; PAM sequence: CAG
acagtttattaaagtacctg

SEQ ID NO: 178081 - DNA, 20 bp, Artificial Sequence
  Description of Artificial Sequence: Synthetic oligonucleotide
  Target: LAMA2; (+) strand; PAM type: NRG; PAM sequence: TAG
tattaaagtacctgcagtaa

SEQ ID NO: 178082 - DNA, 20 bp, Artificial Sequence
  Description of Artificial Sequence: Synthetic oligonucleotide
  Target: LAMA2; (+) strand; PAM type: NRG; PAM sequence: AGG
attaaagtacctgcagtaat

SEQ ID NO: 178083 - DNA, 20 bp, Artificial Sequence
  Description of Artificial Sequence: Synthetic oligonucleotide
  Target: LAMA2; (+) strand; PAM type: NRG; PAM sequence: TAG
gtacctgcagtaataggtga

SEQ ID NO: 178084 - DNA, 20 bp, Artificial Sequence
  Description of Artificial Sequence: Synthetic oligonucleotide
  Target: LAMA2; (+) strand; PAM type: NRG; PAM sequence: TAG
attccaactttcaaaaacat

SEQ ID NO: 178085 - DNA, 20 bp, Artificial Sequence
  Description of Artificial Sequence: Synthetic oligonucleotide
  Target: LAMA2; (+) strand; PAM type: NRG; PAM sequence: TGG
ccaactttcaaaaacattag

SEQ ID NO: 178086 - DNA, 20 bp, Artificial Sequence
  Description of Artificial Sequence: Synthetic oligonucleotide
  Target: LAMA2; (+) strand; PAM type: NRG; PAM sequence: TAG
tgtaatatctttctacctat

SEQ ID NO: 178087 - DNA, 20 bp, Artificial Sequence
  Description of Artificial Sequence: Synthetic oligonucleotide
  Target: LAMA2; (+) strand; PAM type: NRG; PAM sequence: TGG
tttctacctattagaactgc

SEQ ID NO: 178088 - DNA, 20 bp, Artificial Sequence
  Description of Artificial Sequence: Synthetic oligonucleotide
  Target: LAMA2; (+) strand; PAM type: NRG; PAM sequence: TGG
aactgctggaaatttttgca

SEQ ID NO: 178089 - DNA, 20 bp, Artificial Sequence
  Description of Artificial Sequence: Synthetic oligonucleotide
  Target: LAMA2; (+) strand; PAM type: NRG; PAM sequence: TAG
tggaaatttttgcatggtat

SEQ ID NO: 178090 - DNA, 20 bp, Artificial Sequence
  Description of Artificial Sequence: Synthetic oligonucleotide
  Target: LAMA2; (+) strand; PAM type: NRG; PAM sequence: AAG
tgcatggtattagttcctga

SEQ ID NO: 178091 - DNA, 20 bp, Artificial Sequence
  Description of Artificial Sequence: Synthetic oligonucleotide
  Target: LAMA2; (+) strand; PAM type: NRG; PAM sequence: AAG
tgaaagcacacgttatttta

SEQ ID NO: 178092 - DNA, 20 bp, Artificial Sequence
  Description of Artificial Sequence: Synthetic oligonucleotide
  Target: LAMA2; (+) strand; PAM type: NRG; PAM sequence: AAG
ttactatttttatattgtta

SEQ ID NO: 178093 - DNA, 20 bp, Artificial Sequence
  Description of Artificial Sequence: Synthetic oligonucleotide
  Target: LAMA2; (+) strand; PAM type: NRG; PAM sequence: AAG
agcatgatataataacaaca

SEQ ID NO: 178094 - DNA, 20 bp, Artificial Sequence
  Description of Artificial Sequence: Synthetic oligonucleotide
  Target: LAMA2; (+) strand; PAM type: NRG; PAM sequence: GAG
aaagattataaacacttatt

SEQ ID NO: 178095 - DNA, 20 bp, Artificial Sequence
  Description of Artificial Sequence: Synthetic oligonucleotide
  Target: LAMA2; (+) strand; PAM type: NRG; PAM sequence: AAG
gtacttaatatacttatgtt

SEQ ID NO: 178096 - DNA, 20 bp, Artificial Sequence
  Description of Artificial Sequence: Synthetic oligonucleotide
  Target: LAMA2; (+) strand; PAM type: NRG; PAM sequence: TGG
tatgtaatcctcataccaat

SEQ ID NO: 178097 - DNA, 20 bp, Artificial Sequence
  Description of Artificial Sequence: Synthetic oligonucleotide
  Target: LAMA2; (+) strand; PAM type: NRG; PAM sequence: GAG
tgtaatcctcataccaattg

SEQ ID NO: 178098 - DNA, 20 bp, Artificial Sequence
  Description of Artificial Sequence: Synthetic oligonucleotide
  Target: LAMA2; (+) strand; PAM type: NRG; PAM sequence: TGG
cttcatttgcttgcatcaat

SEQ ID NO: 178099 - DNA, 20 bp, Artificial Sequence
  Description of Artificial Sequence: Synthetic oligonucleotide
  Target: LAMA2; (+) strand; PAM type: NRG; PAM sequence: TGG
atatatatatctatctcaat

SEQ ID NO: 178100 - DNA, 20 bp, Artificial Sequence
  Description of Artificial Sequence: Synthetic oligonucleotide
  Target: LAMA2; (+) strand; PAM type: NRG; PAM sequence: TAG
atctatctcaattggttata

SEQ ID NO: 178101 - DNA, 20 bp, Artificial Sequence
  Description of Artificial Sequence: Synthetic oligonucleotide
  Target: LAMA2; (+) strand; PAM type: NRG; PAM sequence: AAG
attggttatatagataacat

SEQ ID NO: 178102 - DNA, 20 bp, Artificial Sequence
  Description of Artificial Sequence: Synthetic oligonucleotide
  Target: LAMA2; (+) strand; PAM type: NRG; PAM sequence: TAG
ttatatagataacataagta

SEQ ID NO: 178103 - DNA, 20 bp, Artificial Sequence
  Description of Artificial Sequence: Synthetic oligonucleotide
  Target: LAMA2; (+) strand; PAM type: NRG; PAM sequence: TAG
taacataagtatagataaca

SEQ ID NO: 178104 - DNA, 20 bp, Artificial Sequence
  Description of Artificial Sequence: Synthetic oligonucleotide
  Target: LAMA2; (+) strand; PAM type: NRG; PAM sequence: AGG
aacataagtatagataacat

SEQ ID NO: 178105 - DNA, 20 bp, Artificial Sequence
  Description of Artificial Sequence: Synthetic oligonucleotide
  Target: LAMA2; (+) strand; PAM type: NRG; PAM sequence: CAG
tagataacataggtaacatt

SEQ ID NO: 178106 - DNA, 20 bp, Artificial Sequence
  Description of Artificial Sequence: Synthetic oligonucleotide
  Target: LAMA2; (+) strand; PAM type: NRG; PAM sequence: TAG
aacataggtaacattcagaa

SEQ ID NO: 178107 - DNA, 20 bp, Artificial Sequence
  Description of Artificial Sequence: Synthetic oligonucleotide
  Target: LAMA2; (+) strand; PAM type: NRG; PAM sequence: AAG
aatagtcacttcactacttt

SEQ ID NO: 178108 - DNA, 20 bp, Artificial Sequence
  Description of Artificial Sequence: Synthetic oligonucleotide
  Target: LAMA2; (+) strand; PAM type: NRG; PAM sequence: GAG
tagtcacttcactactttaa

SEQ ID NO: 178109 - DNA, 20 bp, Artificial Sequence
  Description of Artificial Sequence: Synthetic oligonucleotide
  Target: LAMA2; (+) strand; PAM type: NRG; PAM sequence: TAG
tcactactttaagagctaat

SEQ ID NO: 178110 - DNA, 20 bp, Artificial Sequence
  Description of Artificial Sequence: Synthetic oligonucleotide
  Target: LAMA2; (+) strand; PAM type: NRG; PAM sequence: AGG
cactactttaagagctaatt

SEQ ID NO: 178111 - DNA, 20 bp, Artificial Sequence
  Description of Artificial Sequence: Synthetic oligonucleotide
  Target: LAMA2; (+) strand; PAM type: NRG; PAM sequence: CAG
gagctaattaggtattcata

SEQ ID NO: 178112 - DNA, 20 bp, Artificial Sequence
  Description of Artificial Sequence: Synthetic oligonucleotide
  Target: LAMA2; (+) strand; PAM type: NRG; PAM sequence: CAG
attaggtattcatacagata

SEQ ID NO: 178113 - DNA, 20 bp, Artificial Sequence
  Description of Artificial Sequence: Synthetic oligonucleotide
  Target: LAMA2; (+) strand; PAM type: NRG; PAM sequence: CAG
agatacagaacctactgaca

SEQ ID NO: 178114 - DNA, 20 bp, Artificial Sequence
  Description of Artificial Sequence: Synthetic oligonucleotide
  Target: LAMA2; (+) strand; PAM type: NRG; PAM sequence: AAG
tacagaacctactgacacag

SEQ ID NO: 178115 - DNA, 20 bp, Artificial Sequence
  Description of Artificial Sequence: Synthetic oligonucleotide
  Target: LAMA2; (+) strand; PAM type: NRG; PAM sequence: AGG
acagaacctactgacacaga

SEQ ID NO: 178116 - DNA, 20 bp, Artificial Sequence
  Description of Artificial Sequence: Synthetic oligonucleotide
  Target: LAMA2; (+) strand; PAM type: NRG; PAM sequence: AAG
ttgtcttctgtgtataacat

SEQ ID NO: 178117 - DNA, 20 bp, Artificial Sequence
  Description of Artificial Sequence: Synthetic oligonucleotide
  Target: LAMA2; (+) strand; PAM type: NRG; PAM sequence: TAG
cttctgtgtataacataagt

SEQ ID NO: 178118 - DNA, 20 bp, Artificial Sequence
  Description of Artificial Sequence: Synthetic oligonucleotide
  Target: LAMA2; (+) strand; PAM type: NRG; PAM sequence: CAG
ttagcactaacacttaacat

SEQ ID NO: 178119 - DNA, 20 bp, Artificial Sequence
  Description of Artificial Sequence: Synthetic oligonucleotide
  Target: LAMA2; (+) strand; PAM type: NRG; PAM sequence: AAG
actaacacttaacatcagtt

SEQ ID NO: 178120 - DNA, 20 bp, Artificial Sequence
  Description of Artificial Sequence: Synthetic oligonucleotide
  Target: LAMA2; (+) strand; PAM type: NRG; PAM sequence: CAG
ctgttattatccccacttta

SEQ ID NO: 178121 - DNA, 20 bp, Artificial Sequence
  Description of Artificial Sequence: Synthetic oligonucleotide
  Target: LAMA2; (+) strand; PAM type: NRG; PAM sequence: AGG
tgttattatccccactttac

SEQ ID NO: 178122 - DNA, 20 bp, Artificial Sequence
  Description of Artificial Sequence: Synthetic oligonucleotide
  Target: LAMA2; (+) strand; PAM type: NRG; PAM sequence: GAG
attatccccactttacaggt

SEQ ID NO: 178123 - DNA, 20 bp, Artificial Sequence
  Description of Artificial Sequence: Synthetic oligonucleotide
  Target: LAMA2; (+) strand; PAM type: NRG; PAM sequence: CAG
cccactttacaggtgagaaa

SEQ ID NO: 178124 - DNA, 20 bp, Artificial Sequence
  Description of Artificial Sequence: Synthetic oligonucleotide
  Target: LAMA2; (+) strand; PAM type: NRG; PAM sequence: CAG
ctttacaggtgagaaacaga

SEQ ID NO: 178125 - DNA, 20 bp, Artificial Sequence
  Description of Artificial Sequence: Synthetic oligonucleotide
  Target: LAMA2; (+) strand; PAM type: NRG; PAM sequence: GAG
ttacaggtgagaaacagaca

SEQ ID NO: 178126 - DNA, 20 bp, Artificial Sequence
  Description of Artificial Sequence: Synthetic oligonucleotide
  Target: LAMA2; (+) strand; PAM type: NRG; PAM sequence: AGG
tacaggtgagaaacagacag

SEQ ID NO: 178127 - DNA, 20 bp, Artificial Sequence
  Description of Artificial Sequence: Synthetic oligonucleotide
  Target: LAMA2; (+) strand; PAM type: NRG; PAM sequence: AAG
gaaacagacagaggatactg

SEQ ID NO: 178128 - DNA, 20 bp, Artificial Sequence
  Description of Artificial Sequence: Synthetic oligonucleotide
  Target: LAMA2; (+) strand; PAM type: NRG; PAM sequence: AGG
aaacagacagaggatactga

SEQ ID NO: 178129 - DNA, 20 bp, Artificial Sequence
  Description of Artificial Sequence: Synthetic oligonucleotide
  Target: LAMA2; (+) strand; PAM type: NRG; PAM sequence: AAG
atactgaaggccattgttaa

SEQ ID NO: 178130 - DNA, 20 bp, Artificial Sequence
  Description of Artificial Sequence: Synthetic oligonucleotide
  Target: LAMA2; (+) strand; PAM type: NRG; PAM sequence: TGG
ctgaaggccattgttaaaag

SEQ ID NO: 178131 - DNA, 20 bp, Artificial Sequence
  Description of Artificial Sequence: Synthetic oligonucleotide
  Target: LAMA2; (+) strand; PAM type: NRG; PAM sequence: CAG
ggccattgttaaaagtggca

SEQ ID NO: 178132 - DNA, 20 bp, Artificial Sequence
  Description of Artificial Sequence: Synthetic oligonucleotide
  Target: LAMA2; (+) strand; PAM type: NRG; PAM sequence: GAG
ccattgttaaaagtggcaca

SEQ ID NO: 178133 - DNA, 20 bp, Artificial Sequence
  Description of Artificial Sequence: Synthetic oligonucleotide
  Target: LAMA2; (+) strand; PAM type: NRG; PAM sequence: AGG
cattgttaaaagtggcacag

SEQ ID NO: 178134 - DNA, 20 bp, Artificial Sequence
  Description of Artificial Sequence: Synthetic oligonucleotide
  Target: LAMA2; (+) strand; PAM type: NRG; PAM sequence: CAG
cagaggaaacttaaacccca

SEQ ID NO: 178135 - DNA, 20 bp, Artificial Sequence
  Description of Artificial Sequence: Synthetic oligonucleotide
  Target: LAMA2; (+) strand; PAM type: NRG; PAM sequence: CAG
taaaccccacagtttgattt

SEQ ID NO: 178136 - DNA, 20 bp, Artificial Sequence
  Description of Artificial Sequence: Synthetic oligonucleotide
  Target: LAMA2; (+) strand; PAM type: NRG; PAM sequence: GAG
aaccccacagtttgatttca

SEQ ID NO: 178137 - DNA, 20 bp, Artificial Sequence
  Description of Artificial Sequence: Synthetic oligonucleotide
  Target: LAMA2; (+) strand; PAM type: NRG; PAM sequence: TAG
aaccactaacctatacacac

SEQ ID NO: 178138 - DNA, 20 bp, Artificial Sequence
  Description of Artificial Sequence: Synthetic oligonucleotide
  Target: LAMA2; (+) strand; PAM type: NRG; PAM sequence: TAG
cactaacctatacacactag

SEQ ID NO: 178139 - DNA, 20 bp, Artificial Sequence
  Description of Artificial Sequence: Synthetic oligonucleotide
  Target: LAMA2; (+) strand; PAM type: NRG; PAM sequence: TAG
tacacactagtagtcatcta

SEQ ID NO: 178140 - DNA, 20 bp, Artificial Sequence
  Description of Artificial Sequence: Synthetic oligonucleotide
  Target: LAMA2; (+) strand; PAM type: NRG; PAM sequence: AGG
acacactagtagtcatctat

SEQ ID NO: 178141 - DNA, 20 bp, Artificial Sequence
  Description of Artificial Sequence: Synthetic oligonucleotide
  Target: LAMA2; (+) strand; PAM type: NRG; PAM sequence: TAG
tataggtacaatatacaaat

SEQ ID NO: 178142 - DNA, 20 bp, Artificial Sequence
  Description of Artificial Sequence: Synthetic oligonucleotide
  Target: LAMA2; (+) strand; PAM type: NRG; PAM sequence: AGG
ataggtacaatatacaaatt

SEQ ID NO: 178143 - DNA, 20 bp, Artificial Sequence
  Description of Artificial Sequence: Synthetic oligonucleotide
  Target: LAMA2; (+) strand; PAM type: NRG; PAM sequence: CAG
tacaatatacaaattaggat

SEQ ID NO: 178144 - DNA, 20 bp, Artificial Sequence
  Description of Artificial Sequence: Synthetic oligonucleotide
  Target: LAMA2; (+) strand; PAM type: NRG; PAM sequence: AGG
acaatatacaaattaggatc

SEQ ID NO: 178145 - DNA, 20 bp, Artificial Sequence
  Description of Artificial Sequence: Synthetic oligonucleotide
  Target: LAMA2; (+) strand; PAM type: NRG; PAM sequence: GAG
aatatacaaattaggatcag

SEQ ID NO: 178146 - DNA, 20 bp, Artificial Sequence
  Description of Artificial Sequence: Synthetic oligonucleotide
  Target: LAMA2; (+) strand; PAM type: NRG; PAM sequence: CAG
atgcacatatttatacaaca

SEQ ID NO: 178147 - DNA, 20 bp, Artificial Sequence
  Description of Artificial Sequence: Synthetic oligonucleotide
  Target: LAMA2; (+) strand; PAM type: NRG; PAM sequence: CGG
cacagttaatattaaaatct

SEQ ID NO: 178148 - DNA, 20 bp, Artificial Sequence
  Description of Artificial Sequence: Synthetic oligonucleotide
  Target: LAMA2; (+) strand; PAM type: NRG; PAM sequence: TGG
agttaatattaaaatctcgg

SEQ ID NO: 178149 - DNA, 20 bp, Artificial Sequence
  Description of Artificial Sequence: Synthetic oligonucleotide
  Target: LAMA2; (+) strand; PAM type: NRG; PAM sequence: GAG
tttttaacgtttaaaaacct

SEQ ID NO: 178150 - DNA, 20 bp, Artificial Sequence
  Description of Artificial Sequence: Synthetic oligonucleotide
  Target: LAMA2; (+) strand; PAM type: NRG; PAM sequence: CAG
taaaaacctgagtaactttt

SEQ ID NO: 178151 - DNA, 20 bp, Artificial Sequence
  Description of Artificial Sequence: Synthetic oligonucleotide
  Target: LAMA2; (+) strand; PAM type: NRG; PAM sequence: CAG
agattttcatgtcccttttt

SEQ ID NO: 178152 - DNA, 20 bp, Artificial Sequence
  Description of Artificial Sequence: Synthetic oligonucleotide
  Target: LAMA2; (+) strand; PAM type: NRG; PAM sequence: TAG
ttttcatgtccctttttcag

SEQ ID NO: 178153 - DNA, 20 bp, Artificial Sequence
  Description of Artificial Sequence: Synthetic oligonucleotide
  Target: LAMA2; (+) strand; PAM type: NRG; PAM sequence: AAG
catgtccctttttcagtagt

SEQ ID NO: 178154 - DNA, 20 bp, Artificial Sequence
  Description of Artificial Sequence: Synthetic oligonucleotide
  Target: LAMA2; (+) strand; PAM type: NRG; PAM sequence: TAG
ctttttcagtagtaagtata

SEQ ID NO: 178155 - DNA, 20 bp, Artificial Sequence
  Description of Artificial Sequence: Synthetic oligonucleotide
  Target: LAMA2; (+) strand; PAM type: NRG; PAM sequence: AAG
aaatttccaatgctgaaaac

SEQ ID NO: 178156 - DNA, 20 bp, Artificial Sequence
  Description of Artificial Sequence: Synthetic oligonucleotide
  Target: LAMA2; (+) strand; PAM type: NRG; PAM sequence: TGG
tgaaaacaagtataaatgca

SEQ ID NO: 178157 - DNA, 20 bp, Artificial Sequence
  Description of Artificial Sequence: Synthetic oligonucleotide
  Target: LAMA2; (+) strand; PAM type: NRG; PAM sequence: TAG
atcctaaaatgaaaatacgt

SEQ ID NO: 178158 - DNA, 20 bp, Artificial Sequence
  Description of Artificial Sequence: Synthetic oligonucleotide
  Target: LAMA2; (+) strand; PAM type: NRG; PAM sequence: TGG
ccccaacccctgccctgctt

SEQ ID NO: 178159 - DNA, 20 bp, Artificial Sequence
  Description of Artificial Sequence: Synthetic oligonucleotide
  Target: LAMA2; (+) strand; PAM type: NRG; PAM sequence: CAG
cctgccctgctttggaaatg

SEQ ID NO: 178160 - DNA, 20 bp, Artificial Sequence
  Description of Artificial Sequence: Synthetic oligonucleotide
  Target: LAMA2; (+) strand; PAM type: NRG; PAM sequence: AAG
ggaaatgcagattaaatctt

SEQ ID NO: 178161 - DNA, 20 bp, Artificial Sequence
  Description of Artificial Sequence: Synthetic oligonucleotide
  Target: LAMA2; (+) strand; PAM type: NRG; PAM sequence: AAG
tcttaagcctcgttttcatg

SEQ ID NO: 178162 - DNA, 20 bp, Artificial Sequence
  Description of Artificial Sequence: Synthetic oligonucleotide
  Target: LAMA2; (+) strand; PAM type: NRG; PAM sequence: TGG
tcgttttcatgaagctcatg

SEQ ID NO: 178163 - DNA, 20 bp, Artificial Sequence
  Description of Artificial Sequence: Synthetic oligonucleotide
  Target: LAMA2; (+) strand; PAM type: NRG; PAM sequence: AAG
gataaatttatctcgtgaat

SEQ ID NO: 178164 - DNA, 20 bp, Artificial Sequence
  Description of Artificial Sequence: Synthetic oligonucleotide
  Target: LAMA2; (+) strand; PAM type: NRG; PAM sequence: CAG
atttatctcgtgaataagtt

SEQ ID NO: 178165 - DNA, 20 bp, Artificial Sequence
  Description of Artificial Sequence: Synthetic oligonucleotide
  Target: LAMA2; (+) strand; PAM type: NRG; PAM sequence: CAG
tatctcgtgaataagttcag

SEQ ID NO: 178166 - DNA, 20 bp, Artificial Sequence
  Description of Artificial Sequence: Synthetic oligonucleotide
  Target: LAMA2; (+) strand; PAM type: NRG; PAM sequence: TAG
gatcttatacaatgaacatt

SEQ ID NO: 178167 - DNA, 20 bp, Artificial Sequence
  Description of Artificial Sequence: Synthetic oligonucleotide
  Target: LAMA2; (+) strand; PAM type: NRG; PAM sequence: TAG
tatacaatgaacatttagaa

SEQ ID NO: 178168 - DNA, 20 bp, Artificial Sequence
  Description of Artificial Sequence: Synthetic oligonucleotide
  Target: LAMA2; (+) strand; PAM type: NRG; PAM sequence: AAG
aatagtcacgtcactacttt

SEQ ID NO: 178169 - DNA, 20 bp, Artificial Sequence
  Description of Artificial Sequence: Synthetic oligonucleotide
  Target: LAMA2; (+) strand; PAM type: NRG; PAM sequence: GAG
tagtcacgtcactactttaa

SEQ ID NO: 178170 - DNA, 20 bp, Artificial Sequence
  Description of Artificial Sequence: Synthetic oligonucleotide
  Target: LAMA2; (+) strand; PAM type: NRG; PAM sequence: CAG
tcactactttaagagctaat

SEQ ID NO: 178171 - DNA, 20 bp, Artificial Sequence
  Description of Artificial Sequence: Synthetic oligonucleotide
  Target: LAMA2; (+) strand; PAM type: NRG; PAM sequence: AGG
cactactttaagagctaatc

SEQ ID NO: 178172 - DNA, 20 bp, Artificial Sequence
  Description of Artificial Sequence: Synthetic oligonucleotide
  Target: LAMA2; (+) strand; PAM type: NRG; PAM sequence: TAG
aagagctaatcaggtattca

SEQ ID NO: 178173 - DNA, 20 bp, Artificial Sequence
  Description of Artificial Sequence: Synthetic oligonucleotide
  Target: LAMA2; (+) strand; PAM type: NRG; PAM sequence: AAG
taatcaggtattcatagcaa

SEQ ID NO: 178174 - DNA, 20 bp, Artificial Sequence
  Description of Artificial Sequence: Synthetic oligonucleotide
  Target: LAMA2; (+) strand; PAM type: NRG; PAM sequence: GAG
tattcatagcaaaagtccct

SEQ ID NO: 178175 - DNA, 20 bp, Artificial Sequence
  Description of Artificial Sequence: Synthetic oligonucleotide
  Target: LAMA2; (+) strand; PAM type: NRG; PAM sequence: GAG
ttcatttgctacacctgaat

SEQ ID NO: 178176 - DNA, 20 bp, Artificial Sequence
  Description of Artificial Sequence: Synthetic oligonucleotide
  Target: LAMA2; (+) strand; PAM type: NRG; PAM sequence: AAG
tgctacacctgaatgagaca

SEQ ID NO: 178177 - DNA, 20 bp, Artificial Sequence
  Description of Artificial Sequence: Synthetic oligonucleotide
  Target: LAMA2; (+) strand; PAM type: NRG; PAM sequence: CAG
cacctgaatgagacaaagtt

SEQ ID NO: 178178 - DNA, 20 bp, Artificial Sequence
  Description of Artificial Sequence: Synthetic oligonucleotide
  Target: LAMA2; (+) strand; PAM type: NRG; PAM sequence: GAG
ttccctttgtaaatgtgtcc

SEQ ID NO: 178179 - DNA, 20 bp, Artificial Sequence
  Description of Artificial Sequence: Synthetic oligonucleotide
  Target: LAMA2; (+) strand; PAM type: NRG; PAM sequence: AGG
tccctttgtaaatgtgtccg

SEQ ID NO: 178180 - DNA, 20 bp, Artificial Sequence
  Description of Artificial Sequence: Synthetic oligonucleotide
  Target: LAMA2; (+) strand; PAM type: NRG; PAM sequence: CAG
tttgtaaatgtgtccgaggt

SEQ ID NO: 178181 - DNA, 20 bp, Artificial Sequence
  Description of Artificial Sequence: Synthetic oligonucleotide
  Target: LAMA2; (+) strand; PAM type: NRG; PAM sequence: CAG
taaatgtgtccgaggtcagc

SEQ ID NO: 178182 - DNA, 20 bp, Artificial Sequence
  Description of Artificial Sequence: Synthetic oligonucleotide
  Target: LAMA2; (+) strand; PAM type: NRG; PAM sequence: CAG
tgtccgaggtcagccagcca

SEQ ID NO: 178183 - DNA, 20 bp, Artificial Sequence
  Description of Artificial Sequence: Synthetic oligonucleotide
  Target: LAMA2; (+) strand; PAM type: NRG; PAM sequence: AAG
agccacagcctcgctttgtc

SEQ ID NO: 178184 - DNA, 20 bp, Artificial Sequence
  Description of Artificial Sequence: Synthetic oligonucleotide
  Target: LAMA2; (+) strand; PAM type: NRG; PAM sequence: TGG
cagcctcgctttgtcaagca

SEQ ID NO: 178185 - DNA, 20 bp, Artificial Sequence
  Description of Artificial Sequence: Synthetic oligonucleotide
  Target: LAMA2; (+) strand; PAM type: NRG; PAM sequence: AAG
cgctttgtcaagcatggatt

SEQ ID NO: 178186 - DNA, 20 bp, Artificial Sequence
  Description of Artificial Sequence: Synthetic oligonucleotide
  Target: LAMA2; (+) strand; PAM type: NRG; PAM sequence: CAG
ttcataccctcatctgctga

SEQ ID NO: 178187 - DNA, 20 bp, Artificial Sequence
  Description of Artificial Sequence: Synthetic oligonucleotide
  Target: LAMA2; (+) strand; PAM type: NRG; PAM sequence: CAG
ccctcatctgctgacagata

SEQ ID NO: 178188 - DNA, 20 bp, Artificial Sequence
  Description of Artificial Sequence: Synthetic oligonucleotide
  Target: LAMA2; (+) strand; PAM type: NRG; PAM sequence: AAG
agatacagctgctaaactgc

SEQ ID NO: 178189 - DNA, 20 bp, Artificial Sequence
  Description of Artificial Sequence: Synthetic oligonucleotide
  Target: LAMA2; (+) strand; PAM type: NRG; PAM sequence: AAG
ctgctaaactgcaagctgtt

SEQ ID NO: 178190 - DNA, 20 bp, Artificial Sequence
  Description of Artificial Sequence: Synthetic oligonucleotide
  Target: LAMA2; (+) strand; PAM type: NRG; PAM sequence: AGG
tgctaaactgcaagctgtta

SEQ ID NO: 178191 - DNA, 20 bp, Artificial Sequence
  Description of Artificial Sequence: Synthetic oligonucleotide
  Target: LAMA2; (+) strand; PAM type: NRG; PAM sequence: AAG
actgcaagctgttaaggaca

SEQ ID NO: 178192 - DNA, 20 bp, Artificial Sequence
  Description of Artificial Sequence: Synthetic oligonucleotide
  Target: LAMA2; (+) strand; PAM type: NRG; PAM sequence: CAG
caagctgttaaggacaaagc

SEQ ID NO: 178193 - DNA, 20 bp, Artificial Sequence
  Description of Artificial Sequence: Synthetic oligonucleotide
  Target: LAMA2; (+) strand; PAM type: NRG; PAM sequence: AAG
tgttaaggacaaagccagac

SEQ ID NO: 178194 - DNA, 20 bp, Artificial Sequence
  Description of Artificial Sequence: Synthetic oligonucleotide
  Target: LAMA2; (+) strand; PAM type: NRG; PAM sequence: CAG
agccagacaagccaacgaca

SEQ ID NO: 178195 - DNA, 20 bp, Artificial Sequence
  Description of Artificial Sequence: Synthetic oligonucleotide
  Target: LAMA2; (+) strand; PAM type: NRG; PAM sequence: AAG
acaagccaacgacacagcta

SEQ ID NO: 178196 - DNA, 20 bp, Artificial Sequence
  Description of Artificial Sequence: Synthetic oligonucleotide
  Target: LAMA2; (+) strand; PAM type: NRG; PAM sequence: TGG
cgacacagctaaagatgtac

SEQ ID NO: 178197 - DNA, 20 bp, Artificial Sequence
  Description of Artificial Sequence: Synthetic oligonucleotide
  Target: LAMA2; (+) strand; PAM type: NRG; PAM sequence: CAG
cagctaaagatgtactggca

SEQ ID NO: 178198 - DNA, 20 bp, Artificial Sequence
  Description of Artificial Sequence: Synthetic oligonucleotide
  Target: LAMA2; (+) strand; PAM type: NRG; PAM sequence: CAG
agatgtactggcacagatta

SEQ ID NO: 178199 - DNA, 20 bp, Artificial Sequence
  Description of Artificial Sequence: Synthetic oligonucleotide
  Target: LAMA2; (+) strand; PAM type: NRG; PAM sequence: GAG
atgtactggcacagattaca

SEQ ID NO: 178200 - DNA, 20 bp, Artificial Sequence
  Description of Artificial Sequence: Synthetic oligonucleotide
  Target: LAMA2; (+) strand; PAM type: NRG; PAM sequence: CAG
cacagattacagagctccac

SEQ ID NO: 178201 - DNA, 20 bp, Artificial Sequence
  Description of Artificial Sequence: Synthetic oligonucleotide
  Target: LAMA2; (+) strand; PAM type: NRG; PAM sequence: TGG
gagctccaccagaacctcga

SEQ ID NO: 178202 - DNA, 20 bp, Artificial Sequence
  Description of Artificial Sequence: Synthetic oligonucleotide
  Target: LAMA2; (+) strand; PAM type: NRG; PAM sequence: AAG
accagaacctcgatggcctg

SEQ ID NO: 178203 - DNA, 20 bp, Artificial Sequence
  Description of Artificial Sequence: Synthetic oligonucleotide
  Target: LAMA2; (+) strand; PAM type: NRG; PAM sequence: AAG
agaacctcgatggcctgaag

SEQ ID NO: 178204 - DNA, 20 bp, Artificial Sequence
  Description of Artificial Sequence: Synthetic oligonucleotide
  Target: LAMA2; (+) strand; PAM type: NRG; PAM sequence: TAG
gaagaagaattacaataaac

SEQ ID NO: 178205 - DNA, 20 bp, Artificial Sequence
  Description of Artificial Sequence: Synthetic oligonucleotide
  Target: LAMA2; (+) strand; PAM type: NRG; PAM sequence: CAG
gaagaattacaataaactag

SEQ ID NO: 178206 - DNA, 20 bp, Artificial Sequence
  Description of Artificial Sequence: Synthetic oligonucleotide
  Target: LAMA2; (+) strand; PAM type: NRG; PAM sequence: CAG
aattacaataaactagcaga

SEQ ID NO: 178207 - DNA, 20 bp, Artificial Sequence
  Description of Artificial Sequence: Synthetic oligonucleotide
  Target: LAMA2; (+) strand; PAM type: NRG; PAM sequence: TGG
cgtcgccaaaacgaatgctg

SEQ ID NO: 178208 - DNA, 20 bp, Artificial Sequence
  Description of Artificial Sequence: Synthetic oligonucleotide
  Target: LAMA2; (+) strand; PAM type: NRG; PAM sequence: AAG
caaaacgaatgctgtggtta

SEQ ID NO: 178209 - DNA, 20 bp, Artificial Sequence
  Description of Artificial Sequence: Synthetic oligonucleotide
  Target: LAMA2; (+) strand; PAM type: NRG; PAM sequence: AAG
ctgtggttaaagatccttcc

SEQ ID NO: 178210 - DNA, 20 bp, Artificial Sequence
  Description of Artificial Sequence: Synthetic oligonucleotide
  Target: LAMA2; (+) strand; PAM type: NRG; PAM sequence: CAG
gttaaagatccttccaagaa

SEQ ID NO: 178211 - DNA, 20 bp, Artificial Sequence
  Description of Artificial Sequence: Synthetic oligonucleotide
  Target: LAMA2; (+) strand; PAM type: NRG; PAM sequence: AAG
aagatccttccaagaacagt

SEQ ID NO: 178212 - DNA, 20 bp, Artificial Sequence
  Description of Artificial Sequence: Synthetic oligonucleotide
  Target: LAMA2; (+) strand; PAM type: NRG; PAM sequence: AAG
tttatttcctctcactgtaa

SEQ ID NO: 178213 - DNA, 20 bp, Artificial Sequence
  Description of Artificial Sequence: Synthetic oligonucleotide
  Target: LAMA2; (+) strand; PAM type: NRG; PAM sequence: CAG
ctctcactgtaaaagtatcc

SEQ ID NO: 178214 - DNA, 20 bp, Artificial Sequence
  Description of Artificial Sequence: Synthetic oligonucleotide
  Target: LAMA2; (+) strand; PAM type: NRG; PAM sequence: GAG
tcccagacctgtaaatgctc

SEQ ID NO: 178215 - DNA, 20 bp, Artificial Sequence
  Description of Artificial Sequence: Synthetic oligonucleotide
  Target: LAMA2; (+) strand; PAM type: NRG; PAM sequence: TGG
agacctgtaaatgctcgagt

SEQ ID NO: 178216 - DNA, 20 bp, Artificial Sequence
  Description of Artificial Sequence: Synthetic oligonucleotide
  Target: LAMA2; (+) strand; PAM type: NRG; PAM sequence: AAG
ctgtaaatgctcgagttgga

SEQ ID NO: 178217 - DNA, 20 bp, Artificial Sequence
  Description of Artificial Sequence: Synthetic oligonucleotide
  Target: LAMA2; (+) strand; PAM type: NRG; PAM sequence: TGG
tcgagttggaaagaccctca

SEQ ID NO: 178218 - DNA, 20 bp, Artificial Sequence
  Description of Artificial Sequence: Synthetic oligonucleotide
  Target: LAMA2; (+) strand; PAM type: NRG; PAM sequence: TGG
agttggaaagaccctcatgg

SEQ ID NO: 178219 - DNA, 20 bp, Artificial Sequence
  Description of Artificial Sequence: Synthetic oligonucleotide
  Target: LAMA2; (+) strand; PAM type: NRG; PAM sequence: TAG
gaaagaccctcatggtggtg

SEQ ID NO: 178220 - DNA, 20 bp, Artificial Sequence
  Description of Artificial Sequence: Synthetic oligonucleotide
  Target: LAMA2; (+) strand; PAM type: NRG; PAM sequence: TAG
agtctgccttccttctttca

SEQ ID NO: 178221 - DNA, 20 bp, Artificial Sequence
  Description of Artificial Sequence: Synthetic oligonucleotide
  Target: LAMA2; (+) strand; PAM type: NRG; PAM sequence: TGG
gccttccttctttcatagat

SEQ ID NO: 178222 - DNA, 20 bp, Artificial Sequence
  Description of Artificial Sequence: Synthetic oligonucleotide
  Target: LAMA2; (+) strand; PAM type: NRG; PAM sequence: CAG
cttctttcatagattggcct

SEQ ID NO: 178223 - DNA, 20 bp, Artificial Sequence
  Description of Artificial Sequence: Synthetic oligonucleotide
  Target: LAMA2; (+) strand; PAM type: NRG; PAM sequence: GAG
atagattggcctcagaaatt

SEQ ID NO: 178224 - DNA, 20 bp, Artificial Sequence
  Description of Artificial Sequence: Synthetic oligonucleotide
  Target: LAMA2; (+) strand; PAM type: NRG; PAM sequence: CAG
ctcagaaattgagtgtcatg

SEQ ID NO: 178225 - DNA, 20 bp, Artificial Sequence
  Description of Artificial Sequence: Synthetic oligonucleotide
  Target: LAMA2; (+) strand; PAM type: NRG; PAM sequence: AAG
ttgagtgtcatgcagttcca

SEQ ID NO: 178226 - DNA, 20 bp, Artificial Sequence
  Description of Artificial Sequence: Synthetic oligonucleotide
  Target: LAMA2; (+) strand; PAM type: NRG; PAM sequence: TGG
gtgtcatgcagttccaaagc

SEQ ID NO: 178227 - DNA, 20 bp, Artificial Sequence
  Description of Artificial Sequence: Synthetic oligonucleotide
  Target: LAMA2; (+) strand; PAM type: NRG; PAM sequence: AAG
cagttccaaagctggaatcc

SEQ ID NO: 178228 - DNA, 20 bp, Artificial Sequence
  Description of Artificial Sequence: Synthetic oligonucleotide
  Target: LAMA2; (+) strand; PAM type: NRG; PAM sequence: TAG
aagctggaatccaagtcttc

SEQ ID NO: 178229 - DNA, 20 bp, Artificial Sequence
  Description of Artificial Sequence: Synthetic oligonucleotide
  Target: LAMA2; (+) strand; PAM type: NRG; PAM sequence: CGG
caagtcttctagctctgccc

SEQ ID NO: 178230 - DNA, 20 bp, Artificial Sequence
  Description of Artificial Sequence: Synthetic oligonucleotide
  Target: LAMA2; (+) strand; PAM type: NRG; PAM sequence: CAG
tttttcctctgaaatttttc

SEQ ID NO: 178231 - DNA, 20 bp, Artificial Sequence
  Description of Artificial Sequence: Synthetic oligonucleotide
  Target: LAMA2; (+) strand; PAM type: NRG; PAM sequence: GAG
cctctgaaatttttccagtt

SEQ ID NO: 178232 - DNA, 20 bp, Artificial Sequence
  Description of Artificial Sequence: Synthetic oligonucleotide
  Target: LAMA2; (+) strand; PAM type: NRG; PAM sequence: AAG
ctgaaatttttccagttgag

SEQ ID NO: 178233 - DNA, 20 bp, Artificial Sequence
  Description of Artificial Sequence: Synthetic oligonucleotide
  Target: LAMA2; (+) strand; PAM type: NRG; PAM sequence: GAG
gaaatttttccagttgagaa

SEQ ID NO: 178234 - DNA, 20 bp, Artificial Sequence
  Description of Artificial Sequence: Synthetic oligonucleotide
  Target: LAMA2; (+) strand; PAM type: NRG; PAM sequence: TAG
ttttccagttgagaagagat

SEQ ID NO: 178235 - DNA, 20 bp, Artificial Sequence
  Description of Artificial Sequence: Synthetic oligonucleotide
  Target: LAMA2; (+) strand; PAM type: NRG; PAM sequence: AGG
tttccagttgagaagagatt

SEQ ID NO: 178236 - DNA, 20 bp, Artificial Sequence
  Description of Artificial Sequence: Synthetic oligonucleotide
  Target: LAMA2; (+) strand; PAM type: NRG; PAM sequence: AAG
agaagagattaggaattctc

SEQ ID NO: 178237 - DNA, 20 bp, Artificial Sequence
  Description of Artificial Sequence: Synthetic oligonucleotide
  Target: LAMA2; (+) strand; PAM type: NRG; PAM sequence: AGG
gaagagattaggaattctca

SEQ ID NO: 178238 - DNA, 20 bp, Artificial Sequence
  Description of Artificial Sequence: Synthetic oligonucleotide
  Target: LAMA2; (+) strand; PAM type: NRG; PAM sequence: CAG
ctcaaggtgtgcctaacatt

SEQ ID NO: 178239 - DNA, 20 bp, Artificial Sequence
  Description of Artificial Sequence: Synthetic oligonucleotide
  Target: LAMA2; (+) strand; PAM type: NRG; PAM sequence: CAG
aaggtgtgcctaacattcag

SEQ ID NO: 178240 - DNA, 20 bp, Artificial Sequence
  Description of Artificial Sequence: Synthetic oligonucleotide
  Target: LAMA2; (+) strand; PAM type: NRG; PAM sequence: GAG
ggtgtgcctaacattcagca

SEQ ID NO: 178241 - DNA, 20 bp, Artificial Sequence
  Description of Artificial Sequence: Synthetic oligonucleotide
  Target: LAMA2; (+) strand; PAM type: NRG; PAM sequence: GAG
tgtgcctaacattcagcaga

SEQ ID NO: 178242 - DNA, 20 bp, Artificial Sequence
  Description of Artificial Sequence: Synthetic oligonucleotide
  Target: LAMA2; (+) strand; PAM type: NRG; PAM sequence: CAG
cgtgtgtgtaattaaaaaca

SEQ ID NO: 178243 - DNA, 20 bp, Artificial Sequence
  Description of Artificial Sequence: Synthetic oligonucleotide
  Target: LAMA2; (+) strand; PAM type: NRG; PAM sequence: TGG
attaaaaacacagttgtact

SEQ ID NO: 178244 - DNA, 20 bp, Artificial Sequence
  Description of Artificial Sequence: Synthetic oligonucleotide
  Target: LAMA2; (+) strand; PAM type: NRG; PAM sequence: GGG
ttaaaaacacagttgtactt

SEQ ID NO: 178245 - DNA, 20 bp, Artificial Sequence
  Description of Artificial Sequence: Synthetic oligonucleotide
  Target: LAMA2; (+) strand; PAM type: NRG; PAM sequence: CAG
tacttgggtaattatatcct

SEQ ID NO: 178246 - DNA, 20 bp, Artificial Sequence
  Description of Artificial Sequence: Synthetic oligonucleotide
  Target: LAMA2; (+) strand; PAM type: NRG; PAM sequence: TGG
ggtaattatatcctcagaac

SEQ ID NO: 178247 - DNA, 20 bp, Artificial Sequence
  Description of Artificial Sequence: Synthetic oligonucleotide
  Target: LAMA2; (+) strand; PAM type: NRG; PAM sequence: AAG
ttatatcctcagaactggcg

SEQ ID NO: 178248 - DNA, 20 bp, Artificial Sequence
  Description of Artificial Sequence: Synthetic oligonucleotide
  Target: LAMA2; (+) strand; PAM type: NRG; PAM sequence: TGG
tcagaactggcgaagtgtca

SEQ ID NO: 178249 - DNA, 20 bp, Artificial Sequence
  Description of Artificial Sequence: Synthetic oligonucleotide
  Target: LAMA2; (+) strand; PAM type: NRG; PAM sequence: TAG
tggcgaagtgtcatggaaca

SEQ ID NO: 178250 - DNA, 20 bp, Artificial Sequence
  Description of Artificial Sequence: Synthetic oligonucleotide
  Target: LAMA2; (+) strand; PAM type: NRG; PAM sequence: GAG
gcgaagtgtcatggaacata

SEQ ID NO: 178251 - DNA, 20 bp, Artificial Sequence
  Description of Artificial Sequence: Synthetic oligonucleotide
  Target: LAMA2; (+) strand; PAM type: NRG; PAM sequence: AGG
cgaagtgtcatggaacatag

SEQ ID NO: 178252 - DNA, 20 bp, Artificial Sequence
  Description of Artificial Sequence: Synthetic oligonucleotide
  Target: LAMA2; (+) strand; PAM type: NRG; PAM sequence: AAG
tgtcatggaacatagaggtt

SEQ ID NO: 178253 - DNA, 20 bp, Artificial Sequence
  Description of Artificial Sequence: Synthetic oligonucleotide
  Target: LAMA2; (+) strand; PAM type: NRG; PAM sequence: AGG
gtcatggaacatagaggtta

SEQ ID NO: 178254 - DNA, 20 bp, Artificial Sequence
  Description of Artificial Sequence: Synthetic oligonucleotide
  Target: LAMA2; (+) strand; PAM type: NRG; PAM sequence: GGG
tcatggaacatagaggttaa

SEQ ID NO: 178255 - DNA, 20 bp, Artificial Sequence
  Description of Artificial Sequence: Synthetic oligonucleotide
  Target: LAMA2; (+) strand; PAM type: NRG; PAM sequence: GGG
catggaacatagaggttaag

SEQ ID NO: 178256 - DNA, 20 bp, Artificial Sequence
  Description of Artificial Sequence: Synthetic oligonucleotide
  Target: LAMA2; (+) strand; PAM type: NRG; PAM sequence: CAG
ttaaggggcacgttcatgaa

SEQ ID NO: 178257 - DNA, 20 bp, Artificial Sequence
  Description of Artificial Sequence: Synthetic oligonucleotide
  Target: LAMA2; (+) strand; PAM type: NRG; PAM sequence: TAG
acgttcatgaacagacttgt

SEQ ID NO: 178258 - DNA, 20 bp, Artificial Sequence
  Description of Artificial Sequence: Synthetic oligonucleotide
  Target: LAMA2; (+) strand; PAM type: NRG; PAM sequence: CAG
catgaacagacttgttagaa

SEQ ID NO: 178259 - DNA, 20 bp, Artificial Sequence
  Description of Artificial Sequence: Synthetic oligonucleotide
  Target: LAMA2; (+) strand; PAM type: NRG; PAM sequence: AGG
atgaacagacttgttagaac

SEQ ID NO: 178260 - DNA, 20 bp, Artificial Sequence
  Description of Artificial Sequence: Synthetic oligonucleotide
  Target: LAMA2; (+) strand; PAM type: NRG; PAM sequence: TAG
aatcttgatattttattatt

SEQ ID NO: 178261 - DNA, 20 bp, Artificial Sequence
  Description of Artificial Sequence: Synthetic oligonucleotide
  Target: LAMA2; (+) strand; PAM type: NRG; PAM sequence: CAG
atattttattatttagattc

SEQ ID NO: 178262 - DNA, 20 bp, Artificial Sequence
  Description of Artificial Sequence: Synthetic oligonucleotide
  Target: LAMA2; (+) strand; PAM type: NRG; PAM sequence: TGG
ttccagttacatcacatttc

SEQ ID NO: 178263 - DNA, 20 bp, Artificial Sequence
  Description of Artificial Sequence: Synthetic oligonucleotide
  Target: LAMA2; (+) strand; PAM type: NRG; PAM sequence: GGG
tccagttacatcacatttct

SEQ ID NO: 178264 - DNA, 20 bp, Artificial Sequence
  Description of Artificial Sequence: Synthetic oligonucleotide
  Target: LAMA2; (+) strand; PAM type: NRG; PAM sequence: AAG
atttctgggaaataaaaata

SEQ ID NO: 178265 - DNA, 20 bp, Artificial Sequence
  Description of Artificial Sequence: Synthetic oligonucleotide
  Target: LAMA2; (+) strand; PAM type: NRG; PAM sequence: TAG
ataaaaataaagcatttatc

SEQ ID NO: 178266 - DNA, 20 bp, Artificial Sequence
  Description of Artificial Sequence: Synthetic oligonucleotide
  Target: LAMA2; (+) strand; PAM type: NRG; PAM sequence: AAG
aagcatttatctagtttcta

SEQ ID NO: 178267 - DNA, 20 bp, Artificial Sequence
  Description of Artificial Sequence: Synthetic oligonucleotide
  Target: LAMA2; (+) strand; PAM type: NRG; PAM sequence: AAG
atataaaattatattgactt

SEQ ID NO: 178268 - DNA, 20 bp, Artificial Sequence
  Description of Artificial Sequence: Synthetic oligonucleotide
  Target: LAMA2; (+) strand; PAM type: NRG; PAM sequence: AGG
tataaaattatattgactta

SEQ ID NO: 178269 - DNA, 20 bp, Artificial Sequence
  Description of Artificial Sequence: Synthetic oligonucleotide
  Target: LAMA2; (+) strand; PAM type: NRG; PAM sequence: GAG
tattgacttaaggatttact

SEQ ID NO: 178270 - DNA, 20 bp, Artificial Sequence
  Description of Artificial Sequence: Synthetic oligonucleotide
  Target: LAMA2; (+) strand; PAM type: NRG; PAM sequence: GAG
aggatttactgagaaaacct

SEQ ID NO: 178271 - DNA, 20 bp, Artificial Sequence
  Description of Artificial Sequence: Synthetic oligonucleotide
  Target: LAMA2; (+) strand; PAM type: NRG; PAM sequence: GAG
gatttactgagaaaacctga

SEQ ID NO: 178272 - DNA, 20 bp, Artificial Sequence
  Description of Artificial Sequence: Synthetic oligonucleotide
  Target: LAMA2; (+) strand; PAM type: NRG; PAM sequence: TAG
aatatcataacttatattat

SEQ ID NO: 178273 - DNA, 20 bp, Artificial Sequence
  Description of Artificial Sequence: Synthetic oligonucleotide
  Target: LAMA2; (+) strand; PAM type: NRG; PAM sequence: TAG
cttatattattagttaaata

SEQ ID NO: 178274 - DNA, 20 bp, Artificial Sequence
  Description of Artificial Sequence: Synthetic oligonucleotide
  Target: LAMA2; (+) strand; PAM type: NRG; PAM sequence: AAG
ttaaatatagtcaaaatatt

SEQ ID NO: 178275 - DNA, 20 bp, Artificial Sequence
  Description of Artificial Sequence: Synthetic oligonucleotide
  Target: LAMA2; (+) strand; PAM type: NRG; PAM sequence: AAG
ccttttccgtcaaatgatac

SEQ ID NO: 178276 - DNA, 20 bp, Artificial Sequence
  Description of Artificial Sequence: Synthetic oligonucleotide
  Target: LAMA2; (+) strand; PAM type: NRG; PAM sequence: AGG
cttttccgtcaaatgataca

SEQ ID NO: 178277 - DNA, 20 bp, Artificial Sequence
  Description of Artificial Sequence: Synthetic oligonucleotide
  Target: LAMA2; (+) strand; PAM type: NRG; PAM sequence: TGG
caaatgatacaaggctatat

SEQ ID NO: 178278 - DNA, 20 bp, Artificial Sequence
  Description of Artificial Sequence: Synthetic oligonucleotide
  Target: LAMA2; (+) strand; PAM type: NRG; PAM sequence: GGG
aaatgatacaaggctatatt

SEQ ID NO: 178279 - DNA, 20 bp, Artificial Sequence
  Description of Artificial Sequence: Synthetic oligonucleotide
  Target: LAMA2; (+) strand; PAM type: NRG; PAM sequence: CAG
gatacaaggctatattgggc

SEQ ID NO: 178280 - DNA, 20 bp, Artificial Sequence
  Description of Artificial Sequence: Synthetic oligonucleotide
  Target: LAMA2; (+) strand; PAM type: NRG; PAM sequence: AGG
atacaaggctatattgggcc

SEQ ID NO: 178281 - DNA, 20 bp, Artificial Sequence
  Description of Artificial Sequence: Synthetic oligonucleotide
  Target: LAMA2; (+) strand; PAM type: NRG; PAM sequence: CAG
aggctatattgggccaggta

SEQ ID NO: 178282 - DNA, 20 bp, Artificial Sequence
  Description of Artificial Sequence: Synthetic oligonucleotide
  Target: LAMA2; (+) strand; PAM type: NRG; PAM sequence: TGG
ctatattgggccaggtacag

SEQ ID NO: 178283 - DNA, 20 bp, Artificial Sequence
  Description of Artificial Sequence: Synthetic oligonucleotide
  Target: LAMA2; (+) strand; PAM type: NRG; PAM sequence: TGG
cacctgtaatctttgcactt

SEQ ID NO: 178284 - DNA, 20 bp, Artificial Sequence
  Description of Artificial Sequence: Synthetic oligonucleotide
  Target: LAMA2; (+) strand; PAM type: NRG; PAM sequence: GGG
acctgtaatctttgcacttt

SEQ ID NO: 178285 - DNA, 20 bp, Artificial Sequence
  Description of Artificial Sequence: Synthetic oligonucleotide
  Target: LAMA2; (+) strand; PAM type: NRG; PAM sequence: GAG
ctgtaatctttgcactttgg

SEQ ID NO: 178286 - DNA, 20 bp, Artificial Sequence
  Description of Artificial Sequence: Synthetic oligonucleotide
  Target: LAMA2; (+) strand; PAM type: NRG; PAM sequence: GAG
tctttgcactttgggagcct

SEQ ID NO: 178287 - DNA, 20 bp, Artificial Sequence
  Description of Artificial Sequence: Synthetic oligonucleotide
  Target: LAMA2; (+) strand; PAM type: NRG; PAM sequence: AGG
ctttgcactttgggagcctg

SEQ ID NO: 178288 - DNA, 20 bp, Artificial Sequence
  Description of Artificial Sequence: Synthetic oligonucleotide
  Target: LAMA2; (+) strand; PAM type: NRG; PAM sequence: GAG
gcactttgggagcctgaggc

SEQ ID NO: 178289 - DNA, 20 bp, Artificial Sequence
  Description of Artificial Sequence: Synthetic oligonucleotide
  Target: LAMA2; (+) strand; PAM type: NRG; PAM sequence: GAG
actttgggagcctgaggcga

SEQ ID NO: 178290 - DNA, 20 bp, Artificial Sequence
  Description of Artificial Sequence: Synthetic oligonucleotide
  Target: LAMA2; (+) strand; PAM type: NRG; PAM sequence: AGG
ctttgggagcctgaggcgag

SEQ ID NO: 178291 - DNA, 20 bp, Artificial Sequence
  Description of Artificial Sequence: Synthetic oligonucleotide
  Target: LAMA2; (+) strand; PAM type: NRG; PAM sequence: GAG
ctgaggcgagaggatcactt

SEQ ID NO: 178292 - DNA, 20 bp, Artificial Sequence
  Description of Artificial Sequence: Synthetic oligonucleotide
  Target: LAMA2; (+) strand; PAM type: NRG; PAM sequence: TAG
gcgagaggatcacttgagcc

SEQ ID NO: 178293 - DNA, 20 bp, Artificial Sequence
  Description of Artificial Sequence: Synthetic oligonucleotide
  Target: LAMA2; (+) strand; PAM type: NRG; PAM sequence: AGG
cgagaggatcacttgagcct

SEQ ID NO: 178294 - DNA, 20 bp, Artificial Sequence
  Description of Artificial Sequence: Synthetic oligonucleotide
  Target: LAMA2; (+) strand; PAM type: NRG; PAM sequence: GAG
tcacttgagcctaggaattc

SEQ ID NO: 178295 - DNA, 20 bp, Artificial Sequence
  Description of Artificial Sequence: Synthetic oligonucleotide
  Target: LAMA2; (+) strand; PAM type: NRG; PAM sequence: CAG
tgagcctaggaattcgagac

SEQ ID NO: 178296 - DNA, 20 bp, Artificial Sequence
  Description of Artificial Sequence: Synthetic oligonucleotide
  Target: LAMA2; (+) strand; PAM type: NRG; PAM sequence: TGG
ctaggaattcgagaccagcc

SEQ ID NO: 178297 - DNA, 20 bp, Artificial Sequence
  Description of Artificial Sequence: Synthetic oligonucleotide
  Target: LAMA2; (+) strand; PAM type: NRG; PAM sequence: GGG
taggaattcgagaccagcct

SEQ ID NO: 178298 - DNA, 20 bp, Artificial Sequence
  Description of Artificial Sequence: Synthetic oligonucleotide
  Target: LAMA2; (+) strand; PAM type: NRG; PAM sequence: TAG
cgagaccagcctgggcacca

SEQ ID NO: 178299 - DNA, 20 bp, Artificial Sequence
  Description of Artificial Sequence: Synthetic oligonucleotide
  Target: LAMA2; (+) strand; PAM type: NRG; PAM sequence: AAG
accagcctgggcaccatagc

SEQ ID NO: 178300 - DNA, 20 bp, Artificial Sequence
  Description of Artificial Sequence: Synthetic oligonucleotide
  Target: LAMA2; (+) strand; PAM type: NRG; PAM sequence: TAG
tttacaaaaaatttaaaaaa

SEQ ID NO: 178301 - DNA, 20 bp, Artificial Sequence
  Description of Artificial Sequence: Synthetic oligonucleotide
  Target: LAMA2; (+) strand; PAM type: NRG; PAM sequence: CAG
caaaaaatttaaaaaatagc

SEQ ID NO: 178302 - DNA, 20 bp, Artificial Sequence
  Description of Artificial Sequence: Synthetic oligonucleotide
  Target: LAMA2; (+) strand; PAM type: NRG; PAM sequence: AGG
aaaaaatttaaaaaatagcc

SEQ ID NO: 178303 - DNA, 20 bp, Artificial Sequence
  Description of Artificial Sequence: Synthetic oligonucleotide
  Target: LAMA2; (+) strand; PAM type: NRG; PAM sequence: TGG
atttaaaaaatagccaggca

SEQ ID NO: 178304 - DNA, 20 bp, Artificial Sequence
  Description of Artificial Sequence: Synthetic oligonucleotide
  Target: LAMA2; (+) strand; PAM type: NRG; PAM sequence: TAG
taaaaaatagccaggcatgg

SEQ ID NO: 178305 - DNA, 20 bp, Artificial Sequence
  Description of Artificial Sequence: Synthetic oligonucleotide
  Target: LAMA2; (+) strand; PAM type: NRG; PAM sequence: CAG
tgacattgcacctgtgttcc

SEQ ID NO: 178306 - DNA, 20 bp, Artificial Sequence
  Description of Artificial Sequence: Synthetic oligonucleotide
  Target: LAMA2; (+) strand; PAM type: NRG; PAM sequence: TGG
cacctgtgttcccagccact

SEQ ID NO: 178307 - DNA, 20 bp, Artificial Sequence
  Description of Artificial Sequence: Synthetic oligonucleotide
  Target: LAMA2; (+) strand; PAM type: NRG; PAM sequence: GGG
acctgtgttcccagccactt

SEQ ID NO: 178308 - DNA, 20 bp, Artificial Sequence
  Description of Artificial Sequence: Synthetic oligonucleotide
  Target: LAMA2; (+) strand; PAM type: NRG; PAM sequence: GAG
ctgtgttcccagccacttgg

SEQ ID NO: 178309 - DNA, 20 bp, Artificial Sequence
  Description of Artificial Sequence: Synthetic oligonucleotide
  Target: LAMA2; (+) strand; PAM type: NRG; PAM sequence: GAG
tcccagccacttgggagtct

SEQ ID NO: 178310 - DNA, 20 bp, Artificial Sequence
  Description of Artificial Sequence: Synthetic oligonucleotide
  Target: LAMA2; (+) strand; PAM type: NRG; PAM sequence: AGG
cccagccacttgggagtctg

SEQ ID NO: 178311 - DNA, 20 bp, Artificial Sequence
  Description of Artificial Sequence: Synthetic oligonucleotide
  Target: LAMA2; (+) strand; PAM type: NRG; PAM sequence: TGG
gccacttgggagtctgaggc

SEQ ID NO: 178312 - DNA, 20 bp, Artificial Sequence
  Description of Artificial Sequence: Synthetic oligonucleotide
  Target: LAMA2; (+) strand; PAM type: NRG; PAM sequence: GAG
cacttgggagtctgaggctg

SEQ ID NO: 178313 - DNA, 20 bp, Artificial Sequence
  Description of Artificial Sequence: Synthetic oligonucleotide
  Target: LAMA2; (+) strand; PAM type: NRG; PAM sequence: AGG
acttgggagtctgaggctgg

SEQ ID NO: 178314 - DNA, 20 bp, Artificial Sequence
  Description of Artificial Sequence: Synthetic oligonucleotide
  Target: LAMA2; (+) strand; PAM type: NRG; PAM sequence: CAG
gctggaggatcccttgaacc

SEQ ID NO: 178315 - DNA, 20 bp, Artificial Sequence
  Description of Artificial Sequence: Synthetic oligonucleotide
  Target: LAMA2; (+) strand; PAM type: NRG; PAM sequence: AAG
ggaggatcccttgaacccag

SEQ ID NO: 178316 - DNA, 20 bp, Artificial Sequence
  Description of Artificial Sequence: Synthetic oligonucleotide
  Target: LAMA2; (+) strand; PAM type: NRG; PAM sequence: AGG
gaggatcccttgaacccaga

SEQ ID NO: 178317 - DNA, 20 bp, Artificial Sequence
  Description of Artificial Sequence: Synthetic oligonucleotide
  Target: LAMA2; (+) strand; PAM type: NRG; PAM sequence: GGG
aggatcccttgaacccagaa

SEQ ID NO: 178318 - DNA, 20 bp, Artificial Sequence
  Description of Artificial Sequence: Synthetic oligonucleotide
  Target: LAMA2; (+) strand; PAM type: NRG; PAM sequence: GAG
tcccttgaacccagaagggt

SEQ ID NO: 178319 - DNA, 20 bp, Artificial Sequence
  Description of Artificial Sequence: Synthetic oligonucleotide
  Target: LAMA2; (+) strand; PAM type: NRG; PAM sequence: AGG
cccttgaacccagaagggtg

SEQ ID NO: 178320 - DNA, 20 bp, Artificial Sequence
  Description of Artificial Sequence: Synthetic oligonucleotide
  Target: LAMA2; (+) strand; PAM type: NRG; PAM sequence: CAG
aacccagaagggtgaggctg

SEQ ID NO: 178321 - DNA, 20 bp, Artificial Sequence
  Description of Artificial Sequence: Synthetic oligonucleotide
  Target: LAMA2; (+) strand; PAM type: NRG; PAM sequence: GAG
cagaagggtgaggctgcagt

SEQ ID NO: 178322 - DNA, 20 bp, Artificial Sequence
  Description of Artificial Sequence: Synthetic oligonucleotide
  Target: LAMA2; (+) strand; PAM type: NRG; PAM sequence: CAG
gtgatcacgccactgcactc

SEQ ID NO: 178323 - DNA, 20 bp, Artificial Sequence
  Description of Artificial Sequence: Synthetic oligonucleotide
  Target: LAMA2; (+) strand; PAM type: NRG; PAM sequence: TGG
cacgccactgcactccagcc

SEQ ID NO: 178324 - DNA, 20 bp, Artificial Sequence
  Description of Artificial Sequence: Synthetic oligonucleotide
  Target: LAMA2; (+) strand; PAM type: NRG; PAM sequence: GGG
acgccactgcactccagcct

SEQ ID NO: 178325 - DNA, 20 bp, Artificial Sequence
  Description of Artificial Sequence: Synthetic oligonucleotide
  Target: LAMA2; (+) strand; PAM type: NRG; PAM sequence: TGG
ccactgcactccagcctggg

SEQ ID NO: 178326 - DNA, 20 bp, Artificial Sequence
  Description of Artificial Sequence: Synthetic oligonucleotide
  Target: LAMA2; (+) strand; PAM type: NRG; PAM sequence: CAG
ctgcactccagcctgggtgg

SEQ ID NO: 178327 - DNA, 20 bp, Artificial Sequence
  Description of Artificial Sequence: Synthetic oligonucleotide
  Target: LAMA2; (+) strand; PAM type: NRG; PAM sequence: GAG
tccagcctgggtggcagatt

SEQ ID NO: 178328 - DNA, 20 bp, Artificial Sequence
  Description of Artificial Sequence: Synthetic oligonucleotide
  Target: LAMA2; (+) strand; PAM type: NRG; PAM sequence: AAG
atgctgtctcaaaaaaaaaa

SEQ ID NO: 178329 - DNA, 20 bp, Artificial Sequence
  Description of Artificial Sequence: Synthetic oligonucleotide
  Target: LAMA2; (+) strand; PAM type: NRG; PAM sequence: AGG
tgctgtctcaaaaaaaaaaa

SEQ ID NO: 178330 - DNA, 20 bp, Artificial Sequence
  Description of Artificial Sequence: Synthetic oligonucleotide
  Target: LAMA2; (+) strand; PAM type: NRG; PAM sequence: GGG
gctgtctcaaaaaaaaaaaa

SEQ ID NO: 178331 - DNA, 20 bp, Artificial Sequence
  Description of Artificial Sequence: Synthetic oligonucleotide
  Target: LAMA2; (+) strand; PAM type: NRG; PAM sequence: GGG
ctgtctcaaaaaaaaaaaag

SEQ ID NO: 178332 - DNA, 20 bp, Artificial Sequence
  Description of Artificial Sequence: Synthetic oligonucleotide
  Target: LAMA2; (+) strand; PAM type: NRG; PAM sequence: GGG
tgtctcaaaaaaaaaaaagg

SEQ ID NO: 178333 - DNA, 20 bp, Artificial Sequence
  Description of Artificial Sequence: Synthetic oligonucleotide
  Target: LAMA2; (+) strand; PAM type: NRG; PAM sequence: TGG
aaaaaaaaagggggttatct

SEQ ID NO: 178334 - DNA, 20 bp, Artificial Sequence
  Description of Artificial Sequence: Synthetic oligonucleotide
  Target: LAMA2; (+) strand; PAM type: NRG; PAM sequence: TGG
atcttggtatccttgttaca

SEQ ID NO: 178335 - DNA, 20 bp, Artificial Sequence
  Description of Artificial Sequence: Synthetic oligonucleotide
  Target: LAMA2; (+) strand; PAM type: NRG; PAM sequence: AAG
cttgttacatggtttcacca

SEQ ID NO: 178336 - DNA, 20 bp, Artificial Sequence
  Description of Artificial Sequence: Synthetic oligonucleotide
  Target: LAMA2; (+) strand; PAM type: NRG; PAM sequence: AGG
ttgttacatggtttcaccaa

SEQ ID NO: 178337 - DNA, 20 bp, Artificial Sequence
  Description of Artificial Sequence: Synthetic oligonucleotide
  Target: LAMA2; (+) strand; PAM type: NRG; PAM sequence: GAG
gttacatggtttcaccaaag

SEQ ID NO: 178338 - DNA, 20 bp, Artificial Sequence
  Description of Artificial Sequence: Synthetic oligonucleotide
  Target: LAMA2; (+) strand; PAM type: NRG; PAM sequence: TGG
gtttcaccaaaggagatgct

SEQ ID NO: 178339 - DNA, 20 bp, Artificial Sequence
  Description of Artificial Sequence: Synthetic oligonucleotide
  Target: LAMA2; (+) strand; PAM type: NRG; PAM sequence: GGG
tttcaccaaaggagatgctt

SEQ ID NO: 178340 - DNA, 20 bp, Artificial Sequence
  Description of Artificial Sequence: Synthetic oligonucleotide
  Target: LAMA2; (+) strand; PAM type: NRG; PAM sequence: AAG
aatctgtgcttttcactttc

SEQ ID NO: 178341 - DNA, 20 bp, Artificial Sequence
  Description of Artificial Sequence: Synthetic oligonucleotide
  Target: LAMA2; (+) strand; PAM type: NRG; PAM sequence: GAG
tctgtgcttttcactttcaa

SEQ ID NO: 178342 - DNA, 20 bp, Artificial Sequence
  Description of Artificial Sequence: Synthetic oligonucleotide
  Target: LAMA2; (+) strand; PAM type: NRG; PAM sequence: TAG
gcttttcactttcaagagac

SEQ ID NO: 178343 - DNA, 20 bp, Artificial Sequence
  Description of Artificial Sequence: Synthetic oligonucleotide
  Target: LAMA2; (+) strand; PAM type: NRG; PAM sequence: TGG
tctttatatgccaacatttt

SEQ ID NO: 178344 - DNA, 20 bp, Artificial Sequence
  Description of Artificial Sequence: Synthetic oligonucleotide
  Target: LAMA2; (+) strand; PAM type: NRG; PAM sequence: GGG
ctttatatgccaacattttt

SEQ ID NO: 178345 - DNA, 20 bp, Artificial Sequence
  Description of Artificial Sequence: Synthetic oligonucleotide
  Target: LAMA2; (+) strand; PAM type: NRG; PAM sequence: GGG
tttatatgccaacatttttg

SEQ ID NO: 178346 - DNA, 20 bp, Artificial Sequence
  Description of Artificial Sequence: Synthetic oligonucleotide
  Target: LAMA2; (+) strand; PAM type: NRG; PAM sequence: GGG
ttatatgccaacatttttgg

SEQ ID NO: 178347 - DNA, 20 bp, Artificial Sequence
  Description of Artificial Sequence: Synthetic oligonucleotide
  Target: LAMA2; (+) strand; PAM type: NRG; PAM sequence: GGG
tatatgccaacatttttggg

SEQ ID NO: 178348 - DNA, 20 bp, Artificial Sequence
  Description of Artificial Sequence: Synthetic oligonucleotide
  Target: LAMA2; (+) strand; PAM type: NRG; PAM sequence: GGG
atatgccaacatttttgggg

SEQ ID NO: 178349 - DNA, 20 bp, Artificial Sequence
  Description of Artificial Sequence: Synthetic oligonucleotide
  Target: LAMA2; (+) strand; PAM type: NRG; PAM sequence: TGG
tgggggggtatcaaaatatt

SEQ ID NO: 178350 - DNA, 20 bp, Artificial Sequence
  Description of Artificial Sequence: Synthetic oligonucleotide
  Target: LAMA2; (+) strand; PAM type: NRG; PAM sequence: GAG
ggggggtatcaaaatatttg

SEQ ID NO: 178351 - DNA, 20 bp, Artificial Sequence
  Description of Artificial Sequence: Synthetic oligonucleotide
  Target: LAMA2; (+) strand; PAM type: NRG; PAM sequence: AAG
tatttggagtataaaaacaa

SEQ ID NO: 178352 - DNA, 20 bp, Artificial Sequence
  Description of Artificial Sequence: Synthetic oligonucleotide
  Target: LAMA2; (+) strand; PAM type: NRG; PAM sequence: TGG
aaaaacaaaagcactgtaat

SEQ ID NO: 178353 - DNA, 20 bp, Artificial Sequence
  Description of Artificial Sequence: Synthetic oligonucleotide
  Target: LAMA2; (+) strand; PAM type: NRG; PAM sequence: GAG
ataaaattcaaatgctgttt

SEQ ID NO: 178354 - DNA, 20 bp, Artificial Sequence
  Description of Artificial Sequence: Synthetic oligonucleotide
  Target: LAMA2; (+) strand; PAM type: NRG; PAM sequence: TGG
aaattcaaatgctgtttgag

SEQ ID NO: 178355 - DNA, 20 bp, Artificial Sequence
  Description of Artificial Sequence: Synthetic oligonucleotide
  Target: LAMA2; (+) strand; PAM type: NRG; PAM sequence: GGG
aattcaaatgctgtttgagt

SEQ ID NO: 178356 - DNA, 20 bp, Artificial Sequence
  Description of Artificial Sequence: Synthetic oligonucleotide
  Target: LAMA2; (+) strand; PAM type: NRG; PAM sequence: GGG
attcaaatgctgtttgagtg

SEQ ID NO: 178357 - DNA, 20 bp, Artificial Sequence
  Description of Artificial Sequence: Synthetic oligonucleotide
  Target: LAMA2; (+) strand; PAM type: NRG; PAM sequence: TGG
aatgctgtttgagtggggaa

SEQ ID NO: 178358 - DNA, 20 bp, Artificial Sequence
  Description of Artificial Sequence: Synthetic oligonucleotide
  Target: LAMA2; (+) strand; PAM type: NRG; PAM sequence: GAG
tgctgtttgagtggggaatg

SEQ ID NO: 178359 - DNA, 20 bp, Artificial Sequence
  Description of Artificial Sequence: Synthetic oligonucleotide
  Target: LAMA2; (+) strand; PAM type: NRG; PAM sequence: CAG
tggggaatggagcctgattt

SEQ ID NO: 178360 - DNA, 20 bp, Artificial Sequence
  Description of Artificial Sequence: Synthetic oligonucleotide
  Target: LAMA2; (+) strand; PAM type: NRG; PAM sequence: TAG
ggagcctgatttcagcatcc

SEQ ID NO: 178361 - DNA, 20 bp, Artificial Sequence
  Description of Artificial Sequence: Synthetic oligonucleotide
  Target: LAMA2; (+) strand; PAM type: NRG; PAM sequence: TGG
tagcctcaaatcaaatccta

SEQ ID NO: 178362 - DNA, 20 bp, Artificial Sequence
  Description of Artificial Sequence: Synthetic oligonucleotide
  Target: LAMA2; (+) strand; PAM type: NRG; PAM sequence: TAG
ctatggatgctatgatataa

SEQ ID NO: 178363 - DNA, 20 bp, Artificial Sequence
  Description of Artificial Sequence: Synthetic oligonucleotide
  Target: LAMA2; (+) strand; PAM type: NRG; PAM sequence: GAG
tattaatacgactccttcat

SEQ ID NO: 178364 - DNA, 20 bp, Artificial Sequence
  Description of Artificial Sequence: Synthetic oligonucleotide
  Target: LAMA2; (+) strand; PAM type: NRG; PAM sequence: AAG
aatacgactccttcatgagc

SEQ ID NO: 178365 - DNA, 20 bp, Artificial Sequence
  Description of Artificial Sequence: Synthetic oligonucleotide
  Target: LAMA2; (+) strand; PAM type: NRG; PAM sequence: AGG
atacgactccttcatgagca

SEQ ID NO: 178366 - DNA, 20 bp, Artificial Sequence
  Description of Artificial Sequence: Synthetic oligonucleotide
  Target: LAMA2; (+) strand; PAM type: NRG; PAM sequence: AAG
cgactccttcatgagcaagg

SEQ ID NO: 178367 - DNA, 20 bp, Artificial Sequence
  Description of Artificial Sequence: Synthetic oligonucleotide
  Target: LAMA2; (+) strand; PAM type: NRG; PAM sequence: GAG
actccttcatgagcaaggaa

SEQ ID NO: 178368 - DNA, 20 bp, Artificial Sequence
  Description of Artificial Sequence: Synthetic oligonucleotide
  Target: LAMA2; (+) strand; PAM type: NRG; PAM sequence: CAG
aacacatataacataaactt

SEQ ID NO: 178369 - DNA, 20 bp, Artificial Sequence
  Description of Artificial Sequence: Synthetic oligonucleotide
  Target: LAMA2; (+) strand; PAM type: NRG; PAM sequence: GAG
cacatataacataaacttca

SEQ ID NO: 178370 - DNA, 20 bp, Artificial Sequence
  Description of Artificial Sequence: Synthetic oligonucleotide
  Target: LAMA2; (+) strand; PAM type: NRG; PAM sequence: CAG
tataacataaacttcagagc

SEQ ID NO: 178371 - DNA, 20 bp, Artificial Sequence
  Description of Artificial Sequence: Synthetic oligonucleotide
  Target: LAMA2; (+) strand; PAM type: NRG; PAM sequence: AGG
ataacataaacttcagagcc

SEQ ID NO: 178372 - DNA, 20 bp, Artificial Sequence
  Description of Artificial Sequence: Synthetic oligonucleotide
  Target: LAMA2; (+) strand; PAM type: NRG; PAM sequence: GGG
taacataaacttcagagcca

SEQ ID NO: 178373 - DNA, 20 bp, Artificial Sequence
  Description of Artificial Sequence: Synthetic oligonucleotide
  Target: LAMA2; (+) strand; PAM type: NRG; PAM sequence: AAG
acttcagagccagggtgaaa

SEQ ID NO: 178374 - DNA, 20 bp, Artificial Sequence
  Description of Artificial Sequence: Synthetic oligonucleotide
  Target: LAMA2; (+) strand; PAM type: NRG; PAM sequence: AGG
cttcagagccagggtgaaaa

SEQ ID NO: 178375 - DNA, 20 bp, Artificial Sequence
  Description of Artificial Sequence: Synthetic oligonucleotide
  Target: LAMA2; (+) strand; PAM type: NRG; PAM sequence: GGG
ttcagagccagggtgaaaaa

SEQ ID NO: 178376 - DNA, 20 bp, Artificial Sequence
  Description of Artificial Sequence: Synthetic oligonucleotide
  Target: LAMA2; (+) strand; PAM type: NRG; PAM sequence: GGG
tcagagccagggtgaaaaag

SEQ ID NO: 178377 - DNA, 20 bp, Artificial Sequence
  Description of Artificial Sequence: Synthetic oligonucleotide
  Target: LAMA2; (+) strand; PAM type: NRG; PAM sequence: GAG
agagccagggtgaaaaaggg

SEQ ID NO: 178378 - DNA, 20 bp, Artificial Sequence
  Description of Artificial Sequence: Synthetic oligonucleotide
  Target: LAMA2; (+) strand; PAM type: NRG; PAM sequence: AAG
tttttaaaattttttaatgt

SEQ ID NO: 178379 - DNA, 20 bp, Artificial Sequence
  Description of Artificial Sequence: Synthetic oligonucleotide
  Target: LAMA2; (+) strand; PAM type: NRG; PAM sequence: CAG
aaaattttttaatgtaagcc

SEQ ID NO: 178380 - DNA, 20 bp, Artificial Sequence
  Description of Artificial Sequence: Synthetic oligonucleotide
  Target: LAMA2; (+) strand; PAM type: NRG; PAM sequence: TGG
ttttaatgtaagcccagaaa

SEQ ID NO: 178381 - DNA, 20 bp, Artificial Sequence
  Description of Artificial Sequence: Synthetic oligonucleotide
  Target: LAMA2; (+) strand; PAM type: NRG; PAM sequence: TAG
cccagaaatggcttctcttg

SEQ ID NO: 178382 - DNA, 20 bp, Artificial Sequence
  Description of Artificial Sequence: Synthetic oligonucleotide
  Target: LAMA2; (+) strand; PAM type: NRG; PAM sequence: AAG
atggcttctcttgtagctca

SEQ ID NO: 178383 - DNA, 20 bp, Artificial Sequence
  Description of Artificial Sequence: Synthetic oligonucleotide
  Target: LAMA2; (+) strand; PAM type: NRG; PAM sequence: AAG
tgctgcttacttcataattt

SEQ ID NO: 178384 - DNA, 20 bp, Artificial Sequence
  Description of Artificial Sequence: Synthetic oligonucleotide
  Target: LAMA2; (+) strand; PAM type: NRG; PAM sequence: AAG
atatttttaacttttatttt

SEQ ID NO: 178385 - DNA, 20 bp, Artificial Sequence
  Description of Artificial Sequence: Synthetic oligonucleotide
  Target: LAMA2; (+) strand; PAM type: NRG; PAM sequence: CAG
tttaacttttattttaagtt

SEQ ID NO: 178386 - DNA, 20 bp, Artificial Sequence
  Description of Artificial Sequence: Synthetic oligonucleotide
  Target: LAMA2; (+) strand; PAM type: NRG; PAM sequence: AGG
ttaacttttattttaagttc

SEQ ID NO: 178387 - DNA, 20 bp, Artificial Sequence
  Description of Artificial Sequence: Synthetic oligonucleotide
  Target: LAMA2; (+) strand; PAM type: NRG; PAM sequence: AAG
tattttaagttcaggcgtat

SEQ ID NO: 178388 - DNA, 20 bp, Artificial Sequence
  Description of Artificial Sequence: Synthetic oligonucleotide
  Target: LAMA2; (+) strand; PAM type: NRG; PAM sequence: CAG
taagttcaggcgtataagtg

SEQ ID NO: 178389 - DNA, 20 bp, Artificial Sequence
  Description of Artificial Sequence: Synthetic oligonucleotide
  Target: LAMA2; (+) strand; PAM type: NRG; PAM sequence: AGG
aagttcaggcgtataagtgc

SEQ ID NO: 178390 - DNA, 20 bp, Artificial Sequence
  Description of Artificial Sequence: Synthetic oligonucleotide
  Target: LAMA2; (+) strand; PAM type: NRG; PAM sequence: TAG
ataagtgcaggtttgttaca

SEQ ID NO: 178391 - DNA, 20 bp, Artificial Sequence
  Description of Artificial Sequence: Synthetic oligonucleotide
  Target: LAMA2; (+) strand; PAM type: NRG; PAM sequence: AGG
taagtgcaggtttgttacat

SEQ ID NO: 178392 - DNA, 20 bp, Artificial Sequence
  Description of Artificial Sequence: Synthetic oligonucleotide
  Target: LAMA2; (+) strand; PAM type: NRG; PAM sequence: TGG
acataggtaaacctgtgtca

SEQ ID NO: 178393 - DNA, 20 bp, Artificial Sequence
  Description of Artificial Sequence: Synthetic oligonucleotide
  Target: LAMA2; (+) strand; PAM type: NRG; PAM sequence: GGG
cataggtaaacctgtgtcat

SEQ ID NO: 178394 - DNA, 20 bp, Artificial Sequence
  Description of Artificial Sequence: Synthetic oligonucleotide
  Target: LAMA2; (+) strand; PAM type: NRG; PAM sequence: GGG
ataggtaaacctgtgtcatg

SEQ ID NO: 178395 - DNA, 20 bp, Artificial Sequence
  Description of Artificial Sequence: Synthetic oligonucleotide
  Target: LAMA2; (+) strand; PAM type: NRG; PAM sequence: GGG
taggtaaacctgtgtcatgg

SEQ ID NO: 178396 - DNA, 20 bp, Artificial Sequence
  Description of Artificial Sequence: Synthetic oligonucleotide
  Target: LAMA2; (+) strand; PAM type: NRG; PAM sequence: AAG
tatttcatcacgcatgtatt

SEQ ID NO: 178397 - DNA, 20 bp, Artificial Sequence
  Description of Artificial Sequence: Synthetic oligonucleotide
  Target: LAMA2; (+) strand; PAM type: NRG; PAM sequence: TAG
catcacgcatgtattaagcc

SEQ ID NO: 178398 - DNA, 20 bp, Artificial Sequence
  Description of Artificial Sequence: Synthetic oligonucleotide
  Target: LAMA2; (+) strand; PAM type: NRG; PAM sequence: TAG
gtattaagcctagtacccat

SEQ ID NO: 178399 - DNA, 20 bp, Artificial Sequence
  Description of Artificial Sequence: Synthetic oligonucleotide
  Target: LAMA2; (+) strand; PAM type: NRG; PAM sequence: AAG
tcctgctctccaccctccaa

SEQ ID NO: 178400 - DNA, 20 bp, Artificial Sequence
  Description of Artificial Sequence: Synthetic oligonucleotide
  Target: LAMA2; (+) strand; PAM type: NRG; PAM sequence: TAG
aaaagaattccattctattt

SEQ ID NO: 178401 - DNA, 20 bp, Artificial Sequence
  Description of Artificial Sequence: Synthetic oligonucleotide
  Target: LAMA2; (+) strand; PAM type: NRG; PAM sequence: TGG
attttagattgattctcaac

SEQ ID NO: 178402 - DNA, 20 bp, Artificial Sequence
  Description of Artificial Sequence: Synthetic oligonucleotide
  Target: LAMA2; (+) strand; PAM type: NRG; PAM sequence: TAG
ttagattgattctcaactgg

SEQ ID NO: 178403 - DNA, 20 bp, Artificial Sequence
  Description of Artificial Sequence: Synthetic oligonucleotide
  Target: LAMA2; (+) strand; PAM type: NRG; PAM sequence: TGG
gattgattctcaactggtag

SEQ ID NO: 178404 - DNA, 20 bp, Artificial Sequence
  Description of Artificial Sequence: Synthetic oligonucleotide
  Target: LAMA2; (+) strand; PAM type: NRG; PAM sequence: GAG
ttaatcctatcctctattat

SEQ ID NO: 178405 - DNA, 20 bp, Artificial Sequence
  Description of Artificial Sequence: Synthetic oligonucleotide
  Target: LAMA2; (+) strand; PAM type: NRG; PAM sequence: TAG
ctatcctctattatgagaaa

SEQ ID NO: 178406 - DNA, 20 bp, Artificial Sequence
  Description of Artificial Sequence: Synthetic oligonucleotide
  Target: LAMA2; (+) strand; PAM type: NRG; PAM sequence: TGG
tctataaatattaattaaat

SEQ ID NO: 178407 - DNA, 20 bp, Artificial Sequence
  Description of Artificial Sequence: Synthetic oligonucleotide
  Target: LAMA2; (+) strand; PAM type: NRG; PAM sequence: GGG
ctataaatattaattaaatt

SEQ ID NO: 178408 - DNA, 20 bp, Artificial Sequence
  Description of Artificial Sequence: Synthetic oligonucleotide
  Target: LAMA2; (+) strand; PAM type: NRG; PAM sequence: TAG
ttttctatcttactaaaaca

SEQ ID NO: 178409 - DNA, 20 bp, Artificial Sequence
  Description of Artificial Sequence: Synthetic oligonucleotide
  Target: LAMA2; (+) strand; PAM type: NRG; PAM sequence: TAG
aataatttttaaaatacaaa

SEQ ID NO: 178410 - DNA, 20 bp, Artificial Sequence
  Description of Artificial Sequence: Synthetic oligonucleotide
  Target: LAMA2; (+) strand; PAM type: NRG; PAM sequence: TGG
aatttttaaaatacaaatag

SEQ ID NO: 178411 - DNA, 20 bp, Artificial Sequence
  Description of Artificial Sequence: Synthetic oligonucleotide
  Target: LAMA2; (+) strand; PAM type: NRG; PAM sequence: CAG
ttatttgataacaattgctt

SEQ ID NO: 178412 - DNA, 20 bp, Artificial Sequence
  Description of Artificial Sequence: Synthetic oligonucleotide
  Target: LAMA2; (+) strand; PAM type: NRG; PAM sequence: TGG
aacaattgcttcagttaaaa

SEQ ID NO: 178413 - DNA, 20 bp, Artificial Sequence
  Description of Artificial Sequence: Synthetic oligonucleotide
  Target: LAMA2; (+) strand; PAM type: NRG; PAM sequence: GGG
acaattgcttcagttaaaat

SEQ ID NO: 178414 - DNA, 20 bp, Artificial Sequence
  Description of Artificial Sequence: Synthetic oligonucleotide
  Target: LAMA2; (+) strand; PAM type: NRG; PAM sequence: GGG
caattgcttcagttaaaatg

SEQ ID NO: 178415 - DNA, 20 bp, Artificial Sequence
  Description of Artificial Sequence: Synthetic oligonucleotide
  Target: LAMA2; (+) strand; PAM type: NRG; PAM sequence: TAG
aaatggggtgcatttataat

SEQ ID NO: 178416 - DNA, 20 bp, Artificial Sequence
  Description of Artificial Sequence: Synthetic oligonucleotide
  Target: LAMA2; (+) strand; PAM type: NRG; PAM sequence: TAG
gttatgaaaaataccatttt

SEQ ID NO: 178417 - DNA, 20 bp, Artificial Sequence
  Description of Artificial Sequence: Synthetic oligonucleotide
  Target: LAMA2; (+) strand; PAM type: NRG; PAM sequence: TAG
tcactactttataatattta

SEQ ID NO: 178418 - DNA, 20 bp, Artificial Sequence
  Description of Artificial Sequence: Synthetic oligonucleotide
  Target: LAMA2; (+) strand; PAM type: NRG; PAM sequence: CAG
cttccatgtgaaattgcctg

SEQ ID NO: 178419 - DNA, 20 bp, Artificial Sequence
  Description of Artificial Sequence: Synthetic oligonucleotide
  Target: LAMA2; (+) strand; PAM type: NRG; PAM sequence: CAG
gtgaaattgcctgcagaaat

SEQ ID NO: 178420 - DNA, 20 bp, Artificial Sequence
  Description of Artificial Sequence: Synthetic oligonucleotide
  Target: LAMA2; (+) strand; PAM type: NRG; PAM sequence: TAG
atgtttacttatataccttt

SEQ ID NO: 178421 - DNA, 20 bp, Artificial Sequence
  Description of Artificial Sequence: Synthetic oligonucleotide
  Target: LAMA2; (+) strand; PAM type: NRG; PAM sequence: AAG
gcttcattgcctattgcaaa

SEQ ID NO: 178422 - DNA, 20 bp, Artificial Sequence
  Description of Artificial Sequence: Synthetic oligonucleotide
  Target: LAMA2; (+) strand; PAM type: NRG; PAM sequence: CAG
ttgcctattgcaaaaagttt

SEQ ID NO: 178423 - DNA, 20 bp, Artificial Sequence
  Description of Artificial Sequence: Synthetic oligonucleotide
  Target: LAMA2; (+) strand; PAM type: NRG; PAM sequence: TGG
gctttgcatgtactatattt

SEQ ID NO: 178424 - DNA, 20 bp, Artificial Sequence
  Description of Artificial Sequence: Synthetic oligonucleotide
  Target: LAMA2; (+) strand; PAM type: NRG; PAM sequence: TAG
gttttgctttaaacattgcg

SEQ ID NO: 178425 - DNA, 20 bp, Artificial Sequence
  Description of Artificial Sequence: Synthetic oligonucleotide
  Target: LAMA2; (+) strand; PAM type: NRG; PAM sequence: CAG
agctattctttccactgtta

SEQ ID NO: 178426 - DNA, 20 bp, Artificial Sequence
  Description of Artificial Sequence: Synthetic oligonucleotide
  Target: LAMA2; (+) strand; PAM type: NRG; PAM sequence: TGG
ttccactgttacagtattaa

SEQ ID NO: 178427 - DNA, 20 bp, Artificial Sequence
  Description of Artificial Sequence: Synthetic oligonucleotide
  Target: LAMA2; (+) strand; PAM type: NRG; PAM sequence: TAG
cactgttacagtattaatgg

SEQ ID NO: 178428 - DNA, 20 bp, Artificial Sequence
  Description of Artificial Sequence: Synthetic oligonucleotide
  Target: LAMA2; (+) strand; PAM type: NRG; PAM sequence: AAG
tattaatggtagatgcgtaa

SEQ ID NO: 178429 - DNA, 20 bp, Artificial Sequence
  Description of Artificial Sequence: Synthetic oligonucleotide
  Target: LAMA2; (+) strand; PAM type: NRG; PAM sequence: AGG
attaatggtagatgcgtaaa

SEQ ID NO: 178430 - DNA, 20 bp, Artificial Sequence
  Description of Artificial Sequence: Synthetic oligonucleotide
  Target: LAMA2; (+) strand; PAM type: NRG; PAM sequence: AAG
aaggaatcttcctttataaa

SEQ ID NO: 178431 - DNA, 20 bp, Artificial Sequence
  Description of Artificial Sequence: Synthetic oligonucleotide
  Target: LAMA2; (+) strand; PAM type: NRG; PAM sequence: AGG
aggaatcttcctttataaaa

SEQ ID NO: 178432 - DNA, 20 bp, Artificial Sequence
  Description of Artificial Sequence: Synthetic oligonucleotide
  Target: LAMA2; (+) strand; PAM type: NRG; PAM sequence: TGG
ctttataaaaaggtcatatg

SEQ ID NO: 178433 - DNA, 20 bp, Artificial Sequence
  Description of Artificial Sequence: Synthetic oligonucleotide
  Target: LAMA2; (+) strand; PAM type: NRG; PAM sequence: AAG
aaaaaggtcatatgtggata

SEQ ID NO: 178434 - DNA, 20 bp, Artificial Sequence
  Description of Artificial Sequence: Synthetic oligonucleotide
  Target: LAMA2; (+) strand; PAM type: NRG; PAM sequence: AGG
aaaaggtcatatgtggataa

SEQ ID NO: 178435 - DNA, 20 bp, Artificial Sequence
  Description of Artificial Sequence: Synthetic oligonucleotide
  Target: LAMA2; (+) strand; PAM type: NRG; PAM sequence: TAG
gtgatataaaatgtttttaa

SEQ ID NO: 178436 - DNA, 20 bp, Artificial Sequence
  Description of Artificial Sequence: Synthetic oligonucleotide
  Target: LAMA2; (+) strand; PAM type: NRG; PAM sequence: AAG
gtttttaatagtgttataaa

SEQ ID NO: 178437 - DNA, 20 bp, Artificial Sequence
  Description of Artificial Sequence: Synthetic oligonucleotide
  Target: LAMA2; (+) strand; PAM type: NRG; PAM sequence: TGG
taatagtgttataaaaagtt

SEQ ID NO: 178438 - DNA, 20 bp, Artificial Sequence
  Description of Artificial Sequence: Synthetic oligonucleotide
  Target: LAMA2; (+) strand; PAM type: NRG; PAM sequence: CAG
agtgttataaaaagtttggt

SEQ ID NO: 178439 - DNA, 20 bp, Artificial Sequence
  Description of Artificial Sequence: Synthetic oligonucleotide
  Target: LAMA2; (+) strand; PAM type: NRG; PAM sequence: AGG
gtgttataaaaagtttggtc

SEQ ID NO: 178440 - DNA, 20 bp, Artificial Sequence
  Description of Artificial Sequence: Synthetic oligonucleotide
  Target: LAMA2; (+) strand; PAM type: NRG; PAM sequence: AAG
ataaaaagtttggtcaggcg

SEQ ID NO: 178441 - DNA, 20 bp, Artificial Sequence
  Description of Artificial Sequence: Synthetic oligonucleotide
  Target: LAMA2; (+) strand; PAM type: NRG; PAM sequence: TGG
aaaagtttggtcaggcgaag

SEQ ID NO: 178442 - DNA, 20 bp, Artificial Sequence
  Description of Artificial Sequence: Synthetic oligonucleotide
  Target: LAMA2; (+) strand; PAM type: NRG; PAM sequence: CAG
agtggctcatactctaaccc

SEQ ID NO: 178443 - DNA, 20 bp, Artificial Sequence
  Description of Artificial Sequence: Synthetic oligonucleotide
  Target: LAMA2; (+) strand; PAM type: NRG; PAM sequence: TGG
atactctaaccccagaaatt

SEQ ID NO: 178444 - DNA, 20 bp, Artificial Sequence
  Description of Artificial Sequence: Synthetic oligonucleotide
  Target: LAMA2; (+) strand; PAM type: NRG; PAM sequence: GGG
tactctaaccccagaaattt

SEQ ID NO: 178445 - DNA, 20 bp, Artificial Sequence
  Description of Artificial Sequence: Synthetic oligonucleotide
  Target: LAMA2; (+) strand; PAM type: NRG; PAM sequence: GAG
ctctaaccccagaaatttgg

SEQ ID NO: 178446 - DNA, 20 bp, Artificial Sequence
  Description of Artificial Sequence: Synthetic oligonucleotide
  Target: LAMA2; (+) strand; PAM type: NRG; PAM sequence: AGG
tctaaccccagaaatttggg

SEQ ID NO: 178447 - DNA, 20 bp, Artificial Sequence
  Description of Artificial Sequence: Synthetic oligonucleotide
  Target: LAMA2; (+) strand; PAM type: NRG; PAM sequence: AAG
ccccagaaatttgggaggtc

SEQ ID NO: 178448 - DNA, 20 bp, Artificial Sequence
  Description of Artificial Sequence: Synthetic oligonucleotide
  Target: LAMA2; (+) strand; PAM type: NRG; PAM sequence: AGG
cccagaaatttgggaggtca

SEQ ID NO: 178449 - DNA, 20 bp, Artificial Sequence
  Description of Artificial Sequence: Synthetic oligonucleotide
  Target: LAMA2; (+) strand; PAM type: NRG; PAM sequence: TGG
agaaatttgggaggtcaagg

SEQ ID NO: 178450 - DNA, 20 bp, Artificial Sequence
  Description of Artificial Sequence: Synthetic oligonucleotide
  Target: LAMA2; (+) strand; PAM type: NRG; PAM sequence: GGG
gaaatttgggaggtcaaggt

SEQ ID NO: 178451 - DNA, 20 bp, Artificial Sequence
  Description of Artificial Sequence: Synthetic oligonucleotide
  Target: LAMA2; (+) strand; PAM type: NRG; PAM sequence: GAG
aatttgggaggtcaaggtgg

SEQ ID NO: 178452 - DNA, 20 bp, Artificial Sequence
  Description of Artificial Sequence: Synthetic oligonucleotide
  Target: LAMA2; (+) strand; PAM type: NRG; PAM sequence: AGG
atttgggaggtcaaggtggg

SEQ ID NO: 178453 - DNA, 20 bp, Artificial Sequence
  Description of Artificial Sequence: Synthetic oligonucleotide
  Target: LAMA2; (+) strand; PAM type: NRG; PAM sequence: GAG
tcaaggtgggaggatcactt

SEQ ID NO: 178454 - DNA, 20 bp, Artificial Sequence
  Description of Artificial Sequence: Synthetic oligonucleotide
  Target: LAMA2; (+) strand; PAM type: NRG; PAM sequence: AGG
caaggtgggaggatcacttg

SEQ ID NO: 178455 - DNA, 20 bp, Artificial Sequence
  Description of Artificial Sequence: Synthetic oligonucleotide
  Target: LAMA2; (+) strand; PAM type: NRG; PAM sequence: CAG
gtgggaggatcacttgaggc

SEQ ID NO: 178456 - DNA, 20 bp, Artificial Sequence
  Description of Artificial Sequence: Synthetic oligonucleotide
  Target: LAMA2; (+) strand; PAM type: NRG; PAM sequence: AAG
ggaggatcacttgaggccag

SEQ ID NO: 178457 - DNA, 20 bp, Artificial Sequence
  Description of Artificial Sequence: Synthetic oligonucleotide
  Target: LAMA2; (+) strand; PAM type: NRG; PAM sequence: GAG
tcacttgaggccagaagttt

SEQ ID NO: 178458 - DNA, 20 bp, Artificial Sequence
  Description of Artificial Sequence: Synthetic oligonucleotide
  Target: LAMA2; (+) strand; PAM type: NRG; PAM sequence: CAG
tgaggccagaagtttgagat

SEQ ID NO: 178459 - DNA, 20 bp, Artificial Sequence
  Description of Artificial Sequence: Synthetic oligonucleotide
  Target: LAMA2; (+) strand; PAM type: NRG; PAM sequence: TGG
ccagaagtttgagatcagcc

SEQ ID NO: 178460 - DNA, 20 bp, Artificial Sequence
  Description of Artificial Sequence: Synthetic oligonucleotide
  Target: LAMA2; (+) strand; PAM type: NRG; PAM sequence: GGG
cagaagtttgagatcagcct

SEQ ID NO: 178461 - DNA, 20 bp, Artificial Sequence
  Description of Artificial Sequence: Synthetic oligonucleotide
  Target: LAMA2; (+) strand; PAM type: NRG; PAM sequence: TAG
tgagatcagcctgggaaaca

SEQ ID NO: 178462 - DNA, 20 bp, Artificial Sequence
  Description of Artificial Sequence: Synthetic oligonucleotide
  Target: LAMA2; (+) strand; PAM type: NRG; PAM sequence: AAG
atcagcctgggaaacatagc

SEQ ID NO: 178463 - DNA, 20 bp, Artificial Sequence
  Description of Artificial Sequence: Synthetic oligonucleotide
  Target: LAMA2; (+) strand; PAM type: NRG; PAM sequence: AAG
caagactctatctctacaaa

SEQ ID NO: 178464 - DNA, 20 bp, Artificial Sequence
  Description of Artificial Sequence: Synthetic oligonucleotide
  Target: LAMA2; (+) strand; PAM type: NRG; PAM sequence: AGG
aagactctatctctacaaaa

SEQ ID NO: 178465 - DNA, 20 bp, Artificial Sequence
  Description of Artificial Sequence: Synthetic oligonucleotide
  Target: LAMA2; (+) strand; PAM type: NRG; PAM sequence: GAG
tctctacaaaaaggaaaaat

SEQ ID NO: 178466 - DNA, 20 bp, Artificial Sequence
  Description of Artificial Sequence: Synthetic oligonucleotide
  Target: LAMA2; (+) strand; PAM type: NRG; PAM sequence: TAG
tgagtgaaatatctgtatga

SEQ ID NO: 178467 - DNA, 20 bp, Artificial Sequence
  Description of Artificial Sequence: Synthetic oligonucleotide
  Target: LAMA2; (+) strand; PAM type: NRG; PAM sequence: AAG
tctgtatgatagccacataa

SEQ ID NO: 178468 - DNA, 20 bp, Artificial Sequence
  Description of Artificial Sequence: Synthetic oligonucleotide
  Target: LAMA2; (+) strand; PAM type: NRG; PAM sequence: TGG
gtatgatagccacataaaag

SEQ ID NO: 178469 - DNA, 20 bp, Artificial Sequence
  Description of Artificial Sequence: Synthetic oligonucleotide
  Target: LAMA2; (+) strand; PAM type: NRG; PAM sequence: TAG
tggaaaactgaatttctcta

SEQ ID NO: 178470 - DNA, 20 bp, Artificial Sequence
  Description of Artificial Sequence: Synthetic oligonucleotide
  Target: LAMA2; (+) strand; PAM type: NRG; PAM sequence: TAG
aatttctctatagaattaac

SEQ ID NO: 178471 - DNA, 20 bp, Artificial Sequence
  Description of Artificial Sequence: Synthetic oligonucleotide
  Target: LAMA2; (+) strand; PAM type: NRG; PAM sequence: AAG
cacacgaatgacttaattgc

SEQ ID NO: 178472 - DNA, 20 bp, Artificial Sequence
  Description of Artificial Sequence: Synthetic oligonucleotide
  Target: LAMA2; (+) strand; PAM type: NRG; PAM sequence: GAG
cacgaatgacttaattgcaa

SEQ ID NO: 178473 - DNA, 20 bp, Artificial Sequence
  Description of Artificial Sequence: Synthetic oligonucleotide
  Target: LAMA2; (+) strand; PAM type: NRG; PAM sequence: AGG
acgaatgacttaattgcaag

SEQ ID NO: 178474 - DNA, 20 bp, Artificial Sequence
  Description of Artificial Sequence: Synthetic oligonucleotide
  Target: LAMA2; (+) strand; PAM type: NRG; PAM sequence: TAG
taattgcaagaggattaaaa

SEQ ID NO: 178475 - DNA, 20 bp, Artificial Sequence
  Description of Artificial Sequence: Synthetic oligonucleotide
  Target: LAMA2; (+) strand; PAM type: NRG; PAM sequence: AAG
gcaagaggattaaaatagat

SEQ ID NO: 178476 - DNA, 20 bp, Artificial Sequence
  Description of Artificial Sequence: Synthetic oligonucleotide
  Target: LAMA2; (+) strand; PAM type: NRG; PAM sequence: AGG
caagaggattaaaatagata

SEQ ID NO: 178477 - DNA, 20 bp, Artificial Sequence
  Description of Artificial Sequence: Synthetic oligonucleotide
  Target: LAMA2; (+) strand; PAM type: NRG; PAM sequence: AAG
gttgttgtttttacccactg

SEQ ID NO: 178478 - DNA, 20 bp, Artificial Sequence
  Description of Artificial Sequence: Synthetic oligonucleotide
  Target: LAMA2; (+) strand; PAM type: NRG; PAM sequence: TAG
gtaattattctcaacttctg

SEQ ID NO: 178479 - DNA, 20 bp, Artificial Sequence
  Description of Artificial Sequence: Synthetic oligonucleotide
  Target: LAMA2; (+) strand; PAM type: NRG; PAM sequence: TGG
aacttctgtagaattatatt

SEQ ID NO: 178480 - DNA, 20 bp, Artificial Sequence
  Description of Artificial Sequence: Synthetic oligonucleotide
  Target: LAMA2; (+) strand; PAM type: NRG; PAM sequence: GAG
cttctgtagaattatatttg

SEQ ID NO: 178481 - DNA, 20 bp, Artificial Sequence
  Description of Artificial Sequence: Synthetic oligonucleotide
  Target: LAMA2; (+) strand; PAM type: NRG; PAM sequence: TAG
ggagaaacacataataaaac

SEQ ID NO: 178482 - DNA, 20 bp, Artificial Sequence
  Description of Artificial Sequence: Synthetic oligonucleotide
  Target: LAMA2; (+) strand; PAM type: NRG; PAM sequence: AGG
gagaaacacataataaaact

SEQ ID NO: 178483 - DNA, 20 bp, Artificial Sequence
  Description of Artificial Sequence: Synthetic oligonucleotide
  Target: LAMA2; (+) strand; PAM type: NRG; PAM sequence: TGG
cttaacaaatgaacaactac

SEQ ID NO: 178484 - DNA, 20 bp, Artificial Sequence
  Description of Artificial Sequence: Synthetic oligonucleotide
  Target: LAMA2; (+) strand; PAM type: NRG; PAM sequence: GGG
ttaacaaatgaacaactact

SEQ ID NO: 178485 - DNA, 20 bp, Artificial Sequence
  Description of Artificial Sequence: Synthetic oligonucleotide
  Target: LAMA2; (+) strand; PAM type: NRG; PAM sequence: CAG
gttctctcttaaacatccca

SEQ ID NO: 178486 - DNA, 20 bp, Artificial Sequence
  Description of Artificial Sequence: Synthetic oligonucleotide
  Target: LAMA2; (+) strand; PAM type: NRG; PAM sequence: AAG
catcccacagtttaaattga

SEQ ID NO: 178487 - DNA, 20 bp, Artificial Sequence
  Description of Artificial Sequence: Synthetic oligonucleotide
  Target: LAMA2; (+) strand; PAM type: NRG; PAM sequence: AAG
cacagtttaaattgaaagtc

SEQ ID NO: 178488 - DNA, 20 bp, Artificial Sequence
  Description of Artificial Sequence: Synthetic oligonucleotide
  Target: LAMA2; (+) strand; PAM type: NRG; PAM sequence: TAG
gtcaagaaaaactaaaaaaa

SEQ ID NO: 178489 - DNA, 20 bp, Artificial Sequence
  Description of Artificial Sequence: Synthetic oligonucleotide
  Target: LAMA2; (+) strand; PAM type: NRG; PAM sequence: AAG
tagctacaaaaaataataac

SEQ ID NO: 178490 - DNA, 20 bp, Artificial Sequence
  Description of Artificial Sequence: Synthetic oligonucleotide
  Target: LAMA2; (+) strand; PAM type: NRG; PAM sequence: AAG
actatttgaaaaatatgacc

SEQ ID NO: 178491 - DNA, 20 bp, Artificial Sequence
  Description of Artificial Sequence: Synthetic oligonucleotide
  Target: LAMA2; (+) strand; PAM type: NRG; PAM sequence: GAG
tatttgaaaaatatgaccaa

SEQ ID NO: 178492 - DNA, 20 bp, Artificial Sequence
  Description of Artificial Sequence: Synthetic oligonucleotide
  Target: LAMA2; (+) strand; PAM type: NRG; PAM sequence: CAG
aatatgaccaagagtgtcct

SEQ ID NO: 178493 - DNA, 20 bp, Artificial Sequence
  Description of Artificial Sequence: Synthetic oligonucleotide
  Target: LAMA2; (+) strand; PAM type: NRG; PAM sequence: CGG
atgaccaagagtgtcctcag

SEQ ID NO: 178494 - DNA, 20 bp, Artificial Sequence
  Description of Artificial Sequence: Synthetic oligonucleotide
  Target: LAMA2; (+) strand; PAM type: NRG; PAM sequence: GAG
gagtgtcctcagcggaaaat

SEQ ID NO: 178495 - DNA, 20 bp, Artificial Sequence
  Description of Artificial Sequence: Synthetic oligonucleotide
  Target: LAMA2; (+) strand; PAM type: NRG; PAM sequence: GAG
gtgtcctcagcggaaaatga

SEQ ID NO: 178496 - DNA, 20 bp, Artificial Sequence
  Description of Artificial Sequence: Synthetic oligonucleotide
  Target: LAMA2; (+) strand; PAM type: NRG; PAM sequence: TAG
acaatcaactttgctgactt

SEQ ID NO: 178497 - DNA, 20 bp, Artificial Sequence
  Description of Artificial Sequence: Synthetic oligonucleotide
  Target: LAMA2; (+) strand; PAM type: NRG; PAM sequence: AAG
aactttgctgactttagaaa

SEQ ID NO: 178498 - DNA, 20 bp, Artificial Sequence
  Description of Artificial Sequence: Synthetic oligonucleotide
  Target: LAMA2; (+) strand; PAM type: NRG; PAM sequence: CAG
tttgctgactttagaaaaag

SEQ ID NO: 178499 - DNA, 20 bp, Artificial Sequence
  Description of Artificial Sequence: Synthetic oligonucleotide
  Target: LAMA2; (+) strand; PAM type: NRG; PAM sequence: GAG
tgctgactttagaaaaagca

SEQ ID NO: 178500 - DNA, 20 bp, Artificial Sequence
  Description of Artificial Sequence: Synthetic oligonucleotide
  Target: LAMA2; (+) strand; PAM type: NRG; PAM sequence: AAG
gaaaaagcagagttaactta

SEQ ID NO: 178501 - DNA, 20 bp, Artificial Sequence
  Description of Artificial Sequence: Synthetic oligonucleotide
  Target: LAMA2; (+) strand; PAM type: NRG; PAM sequence: AAG
agttaacttaaagaatgaaa

SEQ ID NO: 178502 - DNA, 20 bp, Artificial Sequence
  Description of Artificial Sequence: Synthetic oligonucleotide
  Target: LAMA2; (+) strand; PAM type: NRG; PAM sequence: TGG
aacttaaagaatgaaaaaga

SEQ ID NO: 178503 - DNA, 20 bp, Artificial Sequence
  Description of Artificial Sequence: Synthetic oligonucleotide
  Target: LAMA2; (+) strand; PAM type: NRG; PAM sequence: AAG
tggaaaaattaatgaatttg

SEQ ID NO: 178504 - DNA, 20 bp, Artificial Sequence
  Description of Artificial Sequence: Synthetic oligonucleotide
  Target: LAMA2; (+) strand; PAM type: NRG; PAM sequence: CAG
aaaattaatgaatttgaaga

SEQ ID NO: 178505 - DNA, 20 bp, Artificial Sequence
  Description of Artificial Sequence: Synthetic oligonucleotide
  Target: LAMA2; (+) strand; PAM type: NRG; PAM sequence: TAG
aatttgaagacagaaaatat

SEQ ID NO: 178506 - DNA, 20 bp, Artificial Sequence
  Description of Artificial Sequence: Synthetic oligonucleotide
  Target: LAMA2; (+) strand; PAM type: NRG; PAM sequence: AAG
attagacctgataaatcaaa

SEQ ID NO: 178507 - DNA, 20 bp, Artificial Sequence
  Description of Artificial Sequence: Synthetic oligonucleotide
  Target: LAMA2; (+) strand; PAM type: NRG; PAM sequence: AGG
ttagacctgataaatcaaaa

SEQ ID NO: 178508 - DNA, 20 bp, Artificial Sequence
  Description of Artificial Sequence: Synthetic oligonucleotide
  Target: LAMA2; (+) strand; PAM type: NRG; PAM sequence: TAG
aaatcaaaaaggtgactcct

SEQ ID NO: 178509 - DNA, 20 bp, Artificial Sequence
  Description of Artificial Sequence: Synthetic oligonucleotide
  Target: LAMA2; (+) strand; PAM type: NRG; PAM sequence: AGG
aatcaaaaaggtgactcctt

SEQ ID NO: 178510 - DNA, 20 bp, Artificial Sequence
  Description of Artificial Sequence: Synthetic oligonucleotide
  Target: LAMA2; (+) strand; PAM type: NRG; PAM sequence: TAG
aaggtgactccttaggaata

SEQ ID NO: 178511 - DNA, 20 bp, Artificial Sequence
  Description of Artificial Sequence: Synthetic oligonucleotide
  Target: LAMA2; (+) strand; PAM type: NRG; PAM sequence: AAG
aggaatatagattaaaaatt

SEQ ID NO: 178512 - DNA, 20 bp, Artificial Sequence
  Description of Artificial Sequence: Synthetic oligonucleotide
  Target: LAMA2; (+) strand; PAM type: NRG; PAM sequence: AAG
ttaaaaattaagtgattgtc

SEQ ID NO: 178513 - DNA, 20 bp, Artificial Sequence
  Description of Artificial Sequence: Synthetic oligonucleotide
  Target: LAMA2; (+) strand; PAM type: NRG; PAM sequence: AAG
agtgattgtcaagtttcatc

SEQ ID NO: 178514 - DNA, 20 bp, Artificial Sequence
  Description of Artificial Sequence: Synthetic oligonucleotide
  Target: LAMA2; (+) strand; PAM type: NRG; PAM sequence: AAG
aagtttcatcaagaaaaata

SEQ ID NO: 178515 - DNA, 20 bp, Artificial Sequence
  Description of Artificial Sequence: Synthetic oligonucleotide
  Target: LAMA2; (+) strand; PAM type: NRG; PAM sequence: AGG
agtttcatcaagaaaaataa

SEQ ID NO: 178516 - DNA, 20 bp, Artificial Sequence
  Description of Artificial Sequence: Synthetic oligonucleotide
  Target: LAMA2; (+) strand; PAM type: NRG; PAM sequence: TAG
caagaaaaataaaggacaaa

SEQ ID NO: 178517 - DNA, 20 bp, Artificial Sequence
  Description of Artificial Sequence: Synthetic oligonucleotide
  Target: LAMA2; (+) strand; PAM type: NRG; PAM sequence: AGG
aagaaaaataaaggacaaat

SEQ ID NO: 178518 - DNA, 20 bp, Artificial Sequence
  Description of Artificial Sequence: Synthetic oligonucleotide
  Target: LAMA2; (+) strand; PAM type: NRG; PAM sequence: AAG
aaataaaggacaaataggca

SEQ ID NO: 178519 - DNA, 20 bp, Artificial Sequence
  Description of Artificial Sequence: Synthetic oligonucleotide
  Target: LAMA2; (+) strand; PAM type: NRG; PAM sequence: AAG
acaaataggcaaagctctaa

SEQ ID NO: 178520 - DNA, 20 bp, Artificial Sequence
  Description of Artificial Sequence: Synthetic oligonucleotide
  Target: LAMA2; (+) strand; PAM type: NRG; PAM sequence: GAG
aaataggcaaagctctaaaa

SEQ ID NO: 178521 - DNA, 20 bp, Artificial Sequence
  Description of Artificial Sequence: Synthetic oligonucleotide
  Target: LAMA2; (+) strand; PAM type: NRG; PAM sequence: AGG
aataggcaaagctctaaaag

SEQ ID NO: 178522 - DNA, 20 bp, Artificial Sequence
  Description of Artificial Sequence: Synthetic oligonucleotide
  Target: LAMA2; (+) strand; PAM type: NRG; PAM sequence: TAG
agctctaaaagaggtatcac

SEQ ID NO: 178523 - DNA, 20 bp, Artificial Sequence
  Description of Artificial Sequence: Synthetic oligonucleotide
  Target: LAMA2; (+) strand; PAM type: NRG; PAM sequence: AAG
taaaagaggtatcactagac

SEQ ID NO: 178524 - DNA, 20 bp, Artificial Sequence
  Description of Artificial Sequence: Synthetic oligonucleotide
  Target: LAMA2; (+) strand; PAM type: NRG; PAM sequence: AGG
aaaagaggtatcactagaca

SEQ ID NO: 178525 - DNA, 20 bp, Artificial Sequence
  Description of Artificial Sequence: Synthetic oligonucleotide
  Target: LAMA2; (+) strand; PAM type: NRG; PAM sequence: GGG
aaagaggtatcactagacaa

SEQ ID NO: 178526 - DNA, 20 bp, Artificial Sequence
  Description of Artificial Sequence: Synthetic oligonucleotide
  Target: LAMA2; (+) strand; PAM type: NRG; PAM sequence: GAG
agaggtatcactagacaagg

SEQ ID NO: 178527 - DNA, 20 bp, Artificial Sequence
  Description of Artificial Sequence: Synthetic oligonucleotide
  Target: LAMA2; (+) strand; PAM type: NRG; PAM sequence: AGG
gaggtatcactagacaaggg

SEQ ID NO: 178528 - DNA, 20 bp, Artificial Sequence
  Description of Artificial Sequence: Synthetic oligonucleotide
  Target: LAMA2; (+) strand; PAM type: NRG; PAM sequence: AAG
agggaggaaatttaacacat

SEQ ID NO: 178529 - DNA, 20 bp, Artificial Sequence
  Description of Artificial Sequence: Synthetic oligonucleotide
  Target: LAMA2; (+) strand; PAM type: NRG; PAM sequence: GAG
ggaggaaatttaacacataa

SEQ ID NO: 178530 - DNA, 20 bp, Artificial Sequence
  Description of Artificial Sequence: Synthetic oligonucleotide
  Target: LAMA2; (+) strand; PAM type: NRG; PAM sequence: TGG
ttaacacataagagatcact

SEQ ID NO: 178531 - DNA, 20 bp, Artificial Sequence
  Description of Artificial Sequence: Synthetic oligonucleotide
  Target: LAMA2; (+) strand; PAM type: NRG; PAM sequence: CGG
tggaaaaacttcaactgctc

SEQ ID NO: 178532 - DNA, 20 bp, Artificial Sequence
  Description of Artificial Sequence: Synthetic oligonucleotide
  Target: LAMA2; (+) strand; PAM type: NRG; PAM sequence: GAG
gaaaaacttcaactgctccg

SEQ ID NO: 178533 - DNA, 20 bp, Artificial Sequence
  Description of Artificial Sequence: Synthetic oligonucleotide
  Target: LAMA2; (+) strand; PAM type: NRG; PAM sequence: TAG
acttcaactgctccggagaa

SEQ ID NO: 178534 - DNA, 20 bp, Artificial Sequence
  Description of Artificial Sequence: Synthetic oligonucleotide
  Target: LAMA2; (+) strand; PAM type: NRG; PAM sequence: GAG
ttcaactgctccggagaata

SEQ ID NO: 178535 - DNA, 20 bp, Artificial Sequence
  Description of Artificial Sequence: Synthetic oligonucleotide
  Target: LAMA2; (+) strand; PAM type: NRG; PAM sequence: AGG
tcaactgctccggagaatag

SEQ ID NO: 178536 - DNA, 20 bp, Artificial Sequence
  Description of Artificial Sequence: Synthetic oligonucleotide
  Target: LAMA2; (+) strand; PAM type: NRG; PAM sequence: AAG
gctccggagaatagaggaaa

SEQ ID NO: 178537 - DNA, 20 bp, Artificial Sequence
  Description of Artificial Sequence: Synthetic oligonucleotide
  Target: LAMA2; (+) strand; PAM type: NRG; PAM sequence: GAG
tccggagaatagaggaaaaa

SEQ ID NO: 178538 - DNA, 20 bp, Artificial Sequence
  Description of Artificial Sequence: Synthetic oligonucleotide
  Target: LAMA2; (+) strand; PAM type: NRG; PAM sequence: AGG
ccggagaatagaggaaaaag

SEQ ID NO: 178539 - DNA, 20 bp, Artificial Sequence
  Description of Artificial Sequence: Synthetic oligonucleotide
  Target: LAMA2; (+) strand; PAM type: NRG; PAM sequence: GGG
cggagaatagaggaaaaaga

SEQ ID NO: 178540 - DNA, 20 bp, Artificial Sequence
  Description of Artificial Sequence: Synthetic oligonucleotide
  Target: LAMA2; (+) strand; PAM type: NRG; PAM sequence: GGG
ggagaatagaggaaaaagag

SEQ ID NO: 178541 - DNA, 20 bp, Artificial Sequence
  Description of Artificial Sequence: Synthetic oligonucleotide
  Target: LAMA2; (+) strand; PAM type: NRG; PAM sequence: GAG
agaatagaggaaaaagaggg

SEQ ID NO: 178542 - DNA, 20 bp, Artificial Sequence
  Description of Artificial Sequence: Synthetic oligonucleotide
  Target: LAMA2; (+) strand; PAM type: NRG; PAM sequence: AAG
atagaggaaaaagaggggag

SEQ ID NO: 178543 - DNA, 20 bp, Artificial Sequence
  Description of Artificial Sequence: Synthetic oligonucleotide
  Target: LAMA2; (+) strand; PAM type: NRG; PAM sequence: GAG
agaggaaaaagaggggagaa

SEQ ID NO: 178544 - DNA, 20 bp, Artificial Sequence
  Description of Artificial Sequence: Synthetic oligonucleotide
  Target: LAMA2; (+) strand; PAM type: NRG; PAM sequence: AGG
gaggaaaaagaggggagaag

SEQ ID NO: 178545 - DNA, 20 bp, Artificial Sequence
  Description of Artificial Sequence: Synthetic oligonucleotide
  Target: LAMA2; (+) strand; PAM type: NRG; PAM sequence: AAG
aggggagaagaggaacttcc

SEQ ID NO: 178546 - DNA, 20 bp, Artificial Sequence
  Description of Artificial Sequence: Synthetic oligonucleotide
  Target: LAMA2; (+) strand; PAM type: NRG; PAM sequence: TGG
aagttccattttgaaacatt

SEQ ID NO: 178547 - DNA, 20 bp, Artificial Sequence
  Description of Artificial Sequence: Synthetic oligonucleotide
  Target: LAMA2; (+) strand; PAM type: NRG; PAM sequence: GAG
aacatttggcaaaaacttct

SEQ ID NO: 178548 - DNA, 20 bp, Artificial Sequence
  Description of Artificial Sequence: Synthetic oligonucleotide
  Target: LAMA2; (+) strand; PAM type: NRG; PAM sequence: AAG
ttctgagaacttgtgaataa

SEQ ID NO: 178549 - DNA, 20 bp, Artificial Sequence
  Description of Artificial Sequence: Synthetic oligonucleotide
  Target: LAMA2; (+) strand; PAM type: NRG; PAM sequence: AGG
tctgagaacttgtgaataaa

SEQ ID NO: 178550 - DNA, 20 bp, Artificial Sequence
  Description of Artificial Sequence: Synthetic oligonucleotide
  Target: LAMA2; (+) strand; PAM type: NRG; PAM sequence: GGG
ctgagaacttgtgaataaaa

SEQ ID NO: 178551 - DNA, 20 bp, Artificial Sequence
  Description of Artificial Sequence: Synthetic oligonucleotide
  Target: LAMA2; (+) strand; PAM type: NRG; PAM sequence: AAG
aaagggtctgtaatttgcct

SEQ ID NO: 178552 - DNA, 20 bp, Artificial Sequence
  Description of Artificial Sequence: Synthetic oligonucleotide
  Target: LAMA2; (+) strand; PAM type: NRG; PAM sequence: AAG
tctgtaatttgcctaagtct

SEQ ID NO: 178553 - DNA, 20 bp, Artificial Sequence
  Description of Artificial Sequence: Synthetic oligonucleotide
  Target: LAMA2; (+) strand; PAM type: NRG; PAM sequence: TAG
gtaatttgcctaagtctaag

SEQ ID NO: 178554 - DNA, 20 bp, Artificial Sequence
  Description of Artificial Sequence: Synthetic oligonucleotide
  Target: LAMA2; (+) strand; PAM type: NRG; PAM sequence: CAG
aaatctaaatcattttgcct

SEQ ID NO: 178555 - DNA, 20 bp, Artificial Sequence
  Description of Artificial Sequence: Synthetic oligonucleotide
  Target: LAMA2; (+) strand; PAM type: NRG; PAM sequence: TAG
aaatcattttgcctcagttt

SEQ ID NO: 178556 - DNA, 20 bp, Artificial Sequence
  Description of Artificial Sequence: Synthetic oligonucleotide
  Target: LAMA2; (+) strand; PAM type: NRG; PAM sequence: TAG
ctcagttttagaataatttg

SEQ ID NO: 178557 - DNA, 20 bp, Artificial Sequence
  Description of Artificial Sequence: Synthetic oligonucleotide
  Target: LAMA2; (+) strand; PAM type: NRG; PAM sequence: CAG
tagaataatttgtagaatgt

SEQ ID NO: 178558 - DNA, 20 bp, Artificial Sequence
  Description of Artificial Sequence: Synthetic oligonucleotide
  Target: LAMA2; (+) strand; PAM type: NRG; PAM sequence: TGG
gtagaatgtcagaataacaa

SEQ ID NO: 178559 - DNA, 20 bp, Artificial Sequence
  Description of Artificial Sequence: Synthetic oligonucleotide
  Target: LAMA2; (+) strand; PAM type: NRG; PAM sequence: GAG
agaatgtcagaataacaatg

SEQ ID NO: 178560 - DNA, 20 bp, Artificial Sequence
  Description of Artificial Sequence: Synthetic oligonucleotide
  Target: LAMA2; (+) strand; PAM type: NRG; PAM sequence: AAG
agaataacaatggagaatta

SEQ ID NO: 178561 - DNA, 20 bp, Artificial Sequence
  Description of Artificial Sequence: Synthetic oligonucleotide
  Target: LAMA2; (+) strand; PAM type: NRG; PAM sequence: AGG
gaataacaatggagaattaa

SEQ ID NO: 178562 - DNA, 20 bp, Artificial Sequence
  Description of Artificial Sequence: Synthetic oligonucleotide
  Target: LAMA2; (+) strand; PAM type: NRG; PAM sequence: AAG
taacaatggagaattaaagg

SEQ ID NO: 178563 - DNA, 20 bp, Artificial Sequence
  Description of Artificial Sequence: Synthetic oligonucleotide
  Target: LAMA2; (+) strand; PAM type: NRG; PAM sequence: AGG
aacaatggagaattaaagga

SEQ ID NO: 178564 - DNA, 20 bp, Artificial Sequence
  Description of Artificial Sequence: Synthetic oligonucleotide
  Target: LAMA2; (+) strand; PAM type: NRG; PAM sequence: GGG
acaatggagaattaaaggaa

SEQ ID NO: 178565 - DNA, 20 bp, Artificial Sequence
  Description of Artificial Sequence: Synthetic oligonucleotide
  Target: LAMA2; (+) strand; PAM type: NRG; PAM sequence: CGG
ggaagggaaaaatgaacaaa

SEQ ID NO: 178566 - DNA, 20 bp, Artificial Sequence
  Description of Artificial Sequence: Synthetic oligonucleotide
  Target: LAMA2; (+) strand; PAM type: NRG; PAM sequence: AAG
atgaacaaacggtttattaa

SEQ ID NO: 178567 - DNA, 20 bp, Artificial Sequence
  Description of Artificial Sequence: Synthetic oligonucleotide
  Target: LAMA2; (+) strand; PAM type: NRG; PAM sequence: AAG
tattaaaagcatacaaaata

SEQ ID NO: 178568 - DNA, 20 bp, Artificial Sequence
  Description of Artificial Sequence: Synthetic oligonucleotide
  Target: LAMA2; (+) strand; PAM type: NRG; PAM sequence: AGG
attaaaagcatacaaaataa

SEQ ID NO: 178569 - DNA, 20 bp, Artificial Sequence
  Description of Artificial Sequence: Synthetic oligonucleotide
  Target: LAMA2; (+) strand; PAM type: NRG; PAM sequence: GGG
ttaaaagcatacaaaataaa

SEQ ID NO: 178570 - DNA, 20 bp, Artificial Sequence
  Description of Artificial Sequence: Synthetic oligonucleotide
  Target: LAMA2; (+) strand; PAM type: NRG; PAM sequence: CAG
atataacaaacatttctatc

SEQ ID NO: 178571 - DNA, 20 bp, Artificial Sequence
  Description of Artificial Sequence: Synthetic oligonucleotide
  Target: LAMA2; (+) strand; PAM type: NRG; PAM sequence: CAG
tatccagataacatgcattt

SEQ ID NO: 178572 - DNA, 20 bp, Artificial Sequence
  Description of Artificial Sequence: Synthetic oligonucleotide
  Target: LAMA2; (+) strand; PAM type: NRG; PAM sequence: AGG
atccagataacatgcatttc

SEQ ID NO: 178573 - DNA, 20 bp, Artificial Sequence
  Description of Artificial Sequence: Synthetic oligonucleotide
  Target: LAMA2; (+) strand; PAM type: NRG; PAM sequence: AAG
cagataacatgcatttcagg

SEQ ID NO: 178574 - DNA, 20 bp, Artificial Sequence
  Description of Artificial Sequence: Synthetic oligonucleotide
  Target: LAMA2; (+) strand; PAM type: NRG; PAM sequence: CAG
caggaagaaaatactgcact

SEQ ID NO: 178575 - DNA, 20 bp, Artificial Sequence
  Description of Artificial Sequence: Synthetic oligonucleotide
  Target: LAMA2; (+) strand; PAM type: NRG; PAM sequence: TAG
actgcactcagttcttgata

SEQ ID NO: 178576 - DNA, 20 bp, Artificial Sequence
  Description of Artificial Sequence: Synthetic oligonucleotide
  Target: LAMA2; (+) strand; PAM type: NRG; PAM sequence: TAG
tcttgatatagcaaatctat

SEQ ID NO: 178577 - DNA, 20 bp, Artificial Sequence
  Description of Artificial Sequence: Synthetic oligonucleotide
  Target: LAMA2; (+) strand; PAM type: NRG; PAM sequence: TAG
ctattagttaaatttaataa

SEQ ID NO: 178578 - DNA, 20 bp, Artificial Sequence
  Description of Artificial Sequence: Synthetic oligonucleotide
  Target: LAMA2; (+) strand; PAM type: NRG; PAM sequence: CAG
ttctttttaaatgccgctaa

SEQ ID NO: 178579 - DNA, 20 bp, Artificial Sequence
  Description of Artificial Sequence: Synthetic oligonucleotide
  Target: LAMA2; (+) strand; PAM type: NRG; PAM sequence: AAG
ttaaatgccgctaacagcat

SEQ ID NO: 178580 - DNA, 20 bp, Artificial Sequence
  Description of Artificial Sequence: Synthetic oligonucleotide
  Target: LAMA2; (+) strand; PAM type: NRG; PAM sequence: GAG
acagcataagtcatacttat

SEQ ID NO: 178581 - DNA, 20 bp, Artificial Sequence
  Description of Artificial Sequence: Synthetic oligonucleotide
  Target: LAMA2; (+) strand; PAM type: NRG; PAM sequence: GAG
atgataatttacttcccttt

SEQ ID NO: 178582 - DNA, 20 bp, Artificial Sequence
  Description of Artificial Sequence: Synthetic oligonucleotide
  Target: LAMA2; (+) strand; PAM type: NRG; PAM sequence: GAG
agcacatgtgattcgttcct

SEQ ID NO: 178583 - DNA, 20 bp, Artificial Sequence
  Description of Artificial Sequence: Synthetic oligonucleotide
  Target: LAMA2; (+) strand; PAM type: NRG; PAM sequence: AGG
gcacatgtgattcgttcctg

SEQ ID NO: 178584 - DNA, 20 bp, Artificial Sequence
  Description of Artificial Sequence: Synthetic oligonucleotide
  Target: LAMA2; (+) strand; PAM type: NRG; PAM sequence: GGG
cacatgtgattcgttcctga

SEQ ID NO: 178585 - DNA, 20 bp, Artificial Sequence
  Description of Artificial Sequence: Synthetic oligonucleotide
  Target: LAMA2; (+) strand; PAM type: NRG; PAM sequence: TAG
tgtgattcgttcctgagggt

SEQ ID NO: 178586 - DNA, 20 bp, Artificial Sequence
  Description of Artificial Sequence: Synthetic oligonucleotide
  Target: LAMA2; (+) strand; PAM type: NRG; PAM sequence: CAG
cgttcctgagggttagttct

SEQ ID NO: 178587 - DNA, 20 bp, Artificial Sequence
  Description of Artificial Sequence: Synthetic oligonucleotide
  Target: LAMA2; (+) strand; PAM type: NRG; PAM sequence: TGG
tcctgagggttagttctcag

SEQ ID NO: 178588 - DNA, 20 bp, Artificial Sequence
  Description of Artificial Sequence: Synthetic oligonucleotide
  Target: LAMA2; (+) strand; PAM type: NRG; PAM sequence: CAG
agttctcagtggttgtatgt

SEQ ID NO: 178589 - DNA, 20 bp, Artificial Sequence
  Description of Artificial Sequence: Synthetic oligonucleotide
  Target: LAMA2; (+) strand; PAM type: NRG; PAM sequence: AAG
gtggttgtatgtcagccgca

SEQ ID NO: 178590 - DNA, 20 bp, Artificial Sequence
  Description of Artificial Sequence: Synthetic oligonucleotide
  Target: LAMA2; (+) strand; PAM type: NRG; PAM sequence: CAG
gttgtatgtcagccgcaaag

SEQ ID NO: 178591 - DNA, 20 bp, Artificial Sequence
  Description of Artificial Sequence: Synthetic oligonucleotide
  Target: LAMA2; (+) strand; PAM type: NRG; PAM sequence: CAG
cagccgcaaagcagatcatt

SEQ ID NO: 178592 - DNA, 20 bp, Artificial Sequence
  Description of Artificial Sequence: Synthetic oligonucleotide
  Target: LAMA2; (+) strand; PAM type: NRG; PAM sequence: GAG
gccgcaaagcagatcattca

SEQ ID NO: 178593 - DNA, 20 bp, Artificial Sequence
  Description of Artificial Sequence: Synthetic oligonucleotide
  Target: LAMA2; (+) strand; PAM type: NRG; PAM sequence: CAG
agatcattcagagtctaaca

SEQ ID NO: 178594 - DNA, 20 bp, Artificial Sequence
  Description of Artificial Sequence: Synthetic oligonucleotide
  Target: LAMA2; (+) strand; PAM type: NRG; PAM sequence: TAG
tcagagtctaacacagcatg

SEQ ID NO: 178595 - DNA, 20 bp, Artificial Sequence
  Description of Artificial Sequence: Synthetic oligonucleotide
  Target: LAMA2; (+) strand; PAM type: NRG; PAM sequence: AAG
agcatgtagccttgaacctt

SEQ ID NO: 178596 - DNA, 20 bp, Artificial Sequence
  Description of Artificial Sequence: Synthetic oligonucleotide
  Target: LAMA2; (+) strand; PAM type: NRG; PAM sequence: CAG
atgtagccttgaaccttaag

SEQ ID NO: 178597 - DNA, 20 bp, Artificial Sequence
  Description of Artificial Sequence: Synthetic oligonucleotide
  Target: LAMA2; (+) strand; PAM type: NRG; PAM sequence: CAG
aagcagtttaactttttcat

SEQ ID NO: 178598 - DNA, 20 bp, Artificial Sequence
  Description of Artificial Sequence: Synthetic oligonucleotide
  Target: LAMA2; (+) strand; PAM type: NRG; PAM sequence: GAG
gcagtttaactttttcatca

SEQ ID NO: 178599 - DNA, 20 bp, Artificial Sequence
  Description of Artificial Sequence: Synthetic oligonucleotide
  Target: LAMA2; (+) strand; PAM type: NRG; PAM sequence: CAG
taactttttcatcagagtca

SEQ ID NO: 178600 - DNA, 20 bp, Artificial Sequence
  Description of Artificial Sequence: Synthetic oligonucleotide
  Target: LAMA2; (+) strand; PAM type: NRG; PAM sequence: CAG
tttcatcagagtcacagtga

SEQ ID NO: 178601 - DNA, 20 bp, Artificial Sequence
  Description of Artificial Sequence: Synthetic oligonucleotide
  Target: LAMA2; (+) strand; PAM type: NRG; PAM sequence: AAG
atcagagtcacagtgacaga

SEQ ID NO: 178602 - DNA, 20 bp, Artificial Sequence
  Description of Artificial Sequence: Synthetic oligonucleotide
  Target: LAMA2; (+) strand; PAM type: NRG; PAM sequence: CAG
ttgaacaatacacacttaat

SEQ ID NO: 178603 - DNA, 20 bp, Artificial Sequence
  Description of Artificial Sequence: Synthetic oligonucleotide
  Target: LAMA2; (+) strand; PAM type: NRG; PAM sequence: TAG
taatcagataataaatgaca

SEQ ID NO: 178604 - DNA, 20 bp, Artificial Sequence
  Description of Artificial Sequence: Synthetic oligonucleotide
  Target: LAMA2; (+) strand; PAM type: NRG; PAM sequence: TGG
agataataaatgacatagtg

SEQ ID NO: 178605 - DNA, 20 bp, Artificial Sequence
  Description of Artificial Sequence: Synthetic oligonucleotide
  Target: LAMA2; (+) strand; PAM type: NRG; PAM sequence: GAG
ataaatgacatagtgtggat

SEQ ID NO: 178606 - DNA, 20 bp, Artificial Sequence
  Description of Artificial Sequence: Synthetic oligonucleotide
  Target: LAMA2; (+) strand; PAM type: NRG; PAM sequence: CAG
catagtgtggatgagactgc

SEQ ID NO: 178607 - DNA, 20 bp, Artificial Sequence
  Description of Artificial Sequence: Synthetic oligonucleotide
  Target: LAMA2; (+) strand; PAM type: NRG; PAM sequence: CAG
ggatgagactgccagcatcc

SEQ ID NO: 178608 - DNA, 20 bp, Artificial Sequence
  Description of Artificial Sequence: Synthetic oligonucleotide
  Target: LAMA2; (+) strand; PAM type: NRG; PAM sequence: TAG
gactgccagcatcccagcaa

SEQ ID NO: 178609 - DNA, 20 bp, Artificial Sequence
  Description of Artificial Sequence: Synthetic oligonucleotide
  Target: LAMA2; (+) strand; PAM type: NRG; PAM sequence: AAG
cagcatcccagcaatagaat

SEQ ID NO: 178610 - DNA, 20 bp, Artificial Sequence
  Description of Artificial Sequence: Synthetic oligonucleotide
  Target: LAMA2; (+) strand; PAM type: NRG; PAM sequence: TGG
catcccagcaatagaataag

SEQ ID NO: 178611 - DNA, 20 bp, Artificial Sequence
  Description of Artificial Sequence: Synthetic oligonucleotide
  Target: LAMA2; (+) strand; PAM type: NRG; PAM sequence: TGG
agaataagtggtttaccacg

SEQ ID NO: 178612 - DNA, 20 bp, Artificial Sequence
  Description of Artificial Sequence: Synthetic oligonucleotide
  Target: LAMA2; (+) strand; PAM type: NRG; PAM sequence: TAG
aagtggtttaccacgtggca

SEQ ID NO: 178613 - DNA, 20 bp, Artificial Sequence
  Description of Artificial Sequence: Synthetic oligonucleotide
  Target: LAMA2; (+) strand; PAM type: NRG; PAM sequence: AGG
agtggtttaccacgtggcat

SEQ ID NO: 178614 - DNA, 20 bp, Artificial Sequence
  Description of Artificial Sequence: Synthetic oligonucleotide
  Target: LAMA2; (+) strand; PAM type: NRG; PAM sequence: AAG
ggcataggccctcccttgaa

SEQ ID NO: 178615 - DNA, 20 bp, Artificial Sequence
  Description of Artificial Sequence: Synthetic oligonucleotide
  Target: LAMA2; (+) strand; PAM type: NRG; PAM sequence: AAG
ccttgaaaagcacatactga

SEQ ID NO: 178616 - DNA, 20 bp, Artificial Sequence
  Description of Artificial Sequence: Synthetic oligonucleotide
  Target: LAMA2; (+) strand; PAM type: NRG; PAM sequence: TGG
aagcacatactgaaagtcta

SEQ ID NO: 178617 - DNA, 20 bp, Artificial Sequence
  Description of Artificial Sequence: Synthetic oligonucleotide
  Target: LAMA2; (+) strand; PAM type: NRG; PAM sequence: CAG
catactgaaagtctatggat

SEQ ID NO: 178618 - DNA, 20 bp, Artificial Sequence
  Description of Artificial Sequence: Synthetic oligonucleotide
  Target: LAMA2; (+) strand; PAM type: NRG; PAM sequence: TAG
gtgatgaccttcaactattt

SEQ ID NO: 178619 - DNA, 20 bp, Artificial Sequence
  Description of Artificial Sequence: Synthetic oligonucleotide
  Target: LAMA2; (+) strand; PAM type: NRG; PAM sequence: AGG
tgatgaccttcaactatttt

SEQ ID NO: 178620 - DNA, 20 bp, Artificial Sequence
  Description of Artificial Sequence: Synthetic oligonucleotide
  Target: LAMA2; (+) strand; PAM type: NRG; PAM sequence: GGG
gatgaccttcaactatttta

SEQ ID NO: 178621 - DNA, 20 bp, Artificial Sequence
  Description of Artificial Sequence: Synthetic oligonucleotide
  Target: LAMA2; (+) strand; PAM type: NRG; PAM sequence: CAG
ttttttttaacctacaaaaa

SEQ ID NO: 178622 - DNA, 20 bp, Artificial Sequence
  Description of Artificial Sequence: Synthetic oligonucleotide
  Target: LAMA2; (+) strand; PAM type: NRG; PAM sequence: TAG
acaaaaacagctgtttaata

SEQ ID NO: 178623 - DNA, 20 bp, Artificial Sequence
  Description of Artificial Sequence: Synthetic oligonucleotide
  Target: LAMA2; (+) strand; PAM type: NRG; PAM sequence: AGG
caaaaacagctgtttaatat

SEQ ID NO: 178624 - DNA, 20 bp, Artificial Sequence
  Description of Artificial Sequence: Synthetic oligonucleotide
  Target: LAMA2; (+) strand; PAM type: NRG; PAM sequence: CAG
ggtcaacctaatatgtaaca

SEQ ID NO: 178625 - DNA, 20 bp, Artificial Sequence
  Description of Artificial Sequence: Synthetic oligonucleotide
  Target: LAMA2; (+) strand; PAM type: NRG; PAM sequence: AGG
gtcaacctaatatgtaacac

SEQ ID NO: 178626 - DNA, 20 bp, Artificial Sequence
  Description of Artificial Sequence: Synthetic oligonucleotide
  Target: LAMA2; (+) strand; PAM type: NRG; PAM sequence: GGG
tcaacctaatatgtaacaca

SEQ ID NO: 178627 - DNA, 20 bp, Artificial Sequence
  Description of Artificial Sequence: Synthetic oligonucleotide
  Target: LAMA2; (+) strand; PAM type: NRG; PAM sequence: AAG
gaaattgaactgcaccatga

SEQ ID NO: 178628 - DNA, 20 bp, Artificial Sequence
  Description of Artificial Sequence: Synthetic oligonucleotide
  Target: LAMA2; (+) strand; PAM type: NRG; PAM sequence: TAG
atgaaagatttaattaaatg

SEQ ID NO: 178629 - DNA, 20 bp, Artificial Sequence
  Description of Artificial Sequence: Synthetic oligonucleotide
  Target: LAMA2; (+) strand; PAM type: NRG; PAM sequence: AGG
tgaaagatttaattaaatgt

SEQ ID NO: 178630 - DNA, 20 bp, Artificial Sequence
  Description of Artificial Sequence: Synthetic oligonucleotide
  Target: LAMA2; (+) strand; PAM type: NRG; PAM sequence: TAG
tttaattaaatgtaggcctt

SEQ ID NO: 178631 - DNA, 20 bp, Artificial Sequence
  Description of Artificial Sequence: Synthetic oligonucleotide
  Target: LAMA2; (+) strand; PAM type: NRG; PAM sequence: AAG
taaatgtaggcctttagtct

SEQ ID NO: 178632 - DNA, 20 bp, Artificial Sequence
  Description of Artificial Sequence: Synthetic oligonucleotide
  Target: LAMA2; (+) strand; PAM type: NRG; PAM sequence: AGG
aaatgtaggcctttagtcta

SEQ ID NO: 178633 - DNA, 20 bp, Artificial Sequence
  Description of Artificial Sequence: Synthetic oligonucleotide
  Target: LAMA2; (+) strand; PAM type: NRG; PAM sequence: GGG
aatgtaggcctttagtctaa

SEQ ID NO: 178634 - DNA, 20 bp, Artificial Sequence
  Description of Artificial Sequence: Synthetic oligonucleotide
  Target: LAMA2; (+) strand; PAM type: NRG; PAM sequence: AAG
aacatcaaaatgttcttcaa

SEQ ID NO: 178635 - DNA, 20 bp, Artificial Sequence
  Description of Artificial Sequence: Synthetic oligonucleotide
  Target: LAMA2; (+) strand; PAM type: NRG; PAM sequence: TAG
ttcttcaaaagacattttga

SEQ ID NO: 178636 - DNA, 20 bp, Artificial Sequence
  Description of Artificial Sequence: Synthetic oligonucleotide
  Target: LAMA2; (+) strand; PAM type: NRG; PAM sequence: AAG
ttttgatagcttctctcttt

SEQ ID NO: 178637 - DNA, 20 bp, Artificial Sequence
  Description of Artificial Sequence: Synthetic oligonucleotide
  Target: LAMA2; (+) strand; PAM type: NRG; PAM sequence: AAG
ctctttaagatgtgcaaaaa

SEQ ID NO: 178638 - DNA, 20 bp, Artificial Sequence
  Description of Artificial Sequence: Synthetic oligonucleotide
  Target: LAMA2; (+) strand; PAM type: NRG; PAM sequence: CGG
ttaagatgtgcaaaaaaaga

SEQ ID NO: 178639 - DNA, 20 bp, Artificial Sequence
  Description of Artificial Sequence: Synthetic oligonucleotide
  Target: LAMA2; (+) strand; PAM type: NRG; PAM sequence: GAG
gatgtgcaaaaaaagacggt

SEQ ID NO: 178640 - DNA, 20 bp, Artificial Sequence
  Description of Artificial Sequence: Synthetic oligonucleotide
  Target: LAMA2; (+) strand; PAM type: NRG; PAM sequence: AAG
caaaaaaagacggtgagaaa

SEQ ID NO: 178641 - DNA, 20 bp, Artificial Sequence
  Description of Artificial Sequence: Synthetic oligonucleotide
  Target: LAMA2; (+) strand; PAM type: NRG; PAM sequence: AAG
aaaagacggtgagaaaaaga

SEQ ID NO: 178642 - DNA, 20 bp, Artificial Sequence
  Description of Artificial Sequence: Synthetic oligonucleotide
  Target: LAMA2; (+) strand; PAM type: NRG; PAM sequence: CAG
taaaaaccctgatttaaata

SEQ ID NO: 178643 - DNA, 20 bp, Artificial Sequence
  Description of Artificial Sequence: Synthetic oligonucleotide
  Target: LAMA2; (+) strand; PAM type: NRG; PAM sequence: TGG
ccctgatttaaatacagttc

SEQ ID NO: 178644 - DNA, 20 bp, Artificial Sequence
  Description of Artificial Sequence: Synthetic oligonucleotide
  Target: LAMA2; (+) strand; PAM type: NRG; PAM sequence: TGG
atttaaatacagttctggct

SEQ ID NO: 178645 - DNA, 20 bp, Artificial Sequence
  Description of Artificial Sequence: Synthetic oligonucleotide
  Target: LAMA2; (+) strand; PAM type: NRG; PAM sequence: CAG
aaatacagttctggcttgga

SEQ ID NO: 178646 - DNA, 20 bp, Artificial Sequence
  Description of Artificial Sequence: Synthetic oligonucleotide
  Target: LAMA2; (+) strand; PAM type: NRG; PAM sequence: TAG
cagttctggcttggacagac

SEQ ID NO: 178647 - DNA, 20 bp, Artificial Sequence
  Description of Artificial Sequence: Synthetic oligonucleotide
  Target: LAMA2; (+) strand; PAM type: NRG; PAM sequence: AGG
agttctggcttggacagact

SEQ ID NO: 178648 - DNA, 20 bp, Artificial Sequence
  Description of Artificial Sequence: Synthetic oligonucleotide
  Target: LAMA2; (+) strand; PAM type: NRG; PAM sequence: AAG
acagactaggtgacatttta

SEQ ID NO: 178649 - DNA, 20 bp, Artificial Sequence
  Description of Artificial Sequence: Synthetic oligonucleotide
  Target: LAMA2; (+) strand; PAM type: NRG; PAM sequence: AAG
tttccttgcttctgtgacta

SEQ ID NO: 178650 - DNA, 20 bp, Artificial Sequence
  Description of Artificial Sequence: Synthetic oligonucleotide
  Target: LAMA2; (+) strand; PAM type: NRG; PAM sequence: AAG
gactaaagttctattctgta

SEQ ID NO: 178651 - DNA, 20 bp, Artificial Sequence
  Description of Artificial Sequence: Synthetic oligonucleotide
  Target: LAMA2; (+) strand; PAM type: NRG; PAM sequence: AGG
actaaagttctattctgtaa

SEQ ID NO: 178652 - DNA, 20 bp, Artificial Sequence
  Description of Artificial Sequence: Synthetic oligonucleotide
  Target: LAMA2; (+) strand; PAM type: NRG; PAM sequence: TGG
ttctgtaaaggttaactttt

SEQ ID NO: 178653 - DNA, 20 bp, Artificial Sequence
  Description of Artificial Sequence: Synthetic oligonucleotide
  Target: LAMA2; (+) strand; PAM type: NRG; PAM sequence: AAG
aaaggttaactttttggctg

SEQ ID NO: 178654 - DNA, 20 bp, Artificial Sequence
  Description of Artificial Sequence: Synthetic oligonucleotide
  Target: LAMA2; (+) strand; PAM type: NRG; PAM sequence: TAG
gttaactttttggctgaagt

SEQ ID NO: 178655 - DNA, 20 bp, Artificial Sequence
  Description of Artificial Sequence: Synthetic oligonucleotide
  Target: LAMA2; (+) strand; PAM type: NRG; PAM sequence: AAG
tttggctgaagttagaaatt

SEQ ID NO: 178656 - DNA, 20 bp, Artificial Sequence
  Description of Artificial Sequence: Synthetic oligonucleotide
  Target: LAMA2; (+) strand; PAM type: NRG; PAM sequence: AAG
tagaaattaagcattgaatt

SEQ ID NO: 178657 - DNA, 20 bp, Artificial Sequence
  Description of Artificial Sequence: Synthetic oligonucleotide
  Target: LAMA2; (+) strand; PAM type: NRG; PAM sequence: AAG
taatttttaccttaatcaaa

SEQ ID NO: 178658 - DNA, 20 bp, Artificial Sequence
  Description of Artificial Sequence: Synthetic oligonucleotide
  Target: LAMA2; (+) strand; PAM type: NRG; PAM sequence: AAG
ttaccttaatcaaaaagaaa

SEQ ID NO: 178659 - DNA, 20 bp, Artificial Sequence
  Description of Artificial Sequence: Synthetic oligonucleotide
  Target: LAMA2; (+) strand; PAM type: NRG; PAM sequence: TGG
ccttaatcaaaaagaaaaag

SEQ ID NO: 178660 - DNA, 20 bp, Artificial Sequence
  Description of Artificial Sequence: Synthetic oligonucleotide
  Target: LAMA2; (+) strand; PAM type: NRG; PAM sequence: TGG
taatcaaaaagaaaaagtgg

SEQ ID NO: 178661 - DNA, 20 bp, Artificial Sequence
  Description of Artificial Sequence: Synthetic oligonucleotide
  Target: LAMA2; (+) strand; PAM type: NRG; PAM sequence: TGG
tgtcctaacatctactcccc

SEQ ID NO: 178662 - DNA, 20 bp, Artificial Sequence
  Description of Artificial Sequence: Synthetic oligonucleotide
  Target: LAMA2; (+) strand; PAM type: NRG; PAM sequence: GAG
tctactcccctggcctgctt

SEQ ID NO: 178663 - DNA, 20 bp, Artificial Sequence
  Description of Artificial Sequence: Synthetic oligonucleotide
  Target: LAMA2; (+) strand; PAM type: NRG; PAM sequence: TAG
tgccatcacacattttgctt

SEQ ID NO: 178664 - DNA, 20 bp, Artificial Sequence
  Description of Artificial Sequence: Synthetic oligonucleotide
  Target: LAMA2; (+) strand; PAM type: NRG; PAM sequence: TGG
acattttgctttagctgtta

SEQ ID NO: 178665 - DNA, 20 bp, Artificial Sequence
  Description of Artificial Sequence: Synthetic oligonucleotide
  Target: LAMA2; (+) strand; PAM type: NRG; PAM sequence: AAG
ccatgctttgtcacattaat

SEQ ID NO: 178666 - DNA, 20 bp, Artificial Sequence
  Description of Artificial Sequence: Synthetic oligonucleotide
  Target: LAMA2; (+) strand; PAM type: NRG; PAM sequence: TGG
attaataagatgaaattgtt

SEQ ID NO: 178667 - DNA, 20 bp, Artificial Sequence
  Description of Artificial Sequence: Synthetic oligonucleotide
  Target: LAMA2; (+) strand; PAM type: NRG; PAM sequence: AAG
taagatgaaattgtttggtt

SEQ ID NO: 178668 - DNA, 20 bp, Artificial Sequence
  Description of Artificial Sequence: Synthetic oligonucleotide
  Target: LAMA2; (+) strand; PAM type: NRG; PAM sequence: CAG
cacactaattttgttctatg

SEQ ID NO: 178669 - DNA, 20 bp, Artificial Sequence
  Description of Artificial Sequence: Synthetic oligonucleotide
  Target: LAMA2; (+) strand; PAM type: NRG; PAM sequence: CAG
gttctatgcagttgccgatg

SEQ ID NO: 178670 - DNA, 20 bp, Artificial Sequence
  Description of Artificial Sequence: Synthetic oligonucleotide
  Target: LAMA2; (+) strand; PAM type: NRG; PAM sequence: TAG
agatgccactgtcaaaaatt

SEQ ID NO: 178671 - DNA, 20 bp, Artificial Sequence
  Description of Artificial Sequence: Synthetic oligonucleotide
  Target: LAMA2; (+) strand; PAM type: NRG; PAM sequence: CAG
ccactgtcaaaaatttagaa

SEQ ID NO: 178672 - DNA, 20 bp, Artificial Sequence
  Description of Artificial Sequence: Synthetic oligonucleotide
  Target: LAMA2; (+) strand; PAM type: NRG; PAM sequence: AGG
cactgtcaaaaatttagaac

SEQ ID NO: 178673 - DNA, 20 bp, Artificial Sequence
  Description of Artificial Sequence: Synthetic oligonucleotide
  Target: LAMA2; (+) strand; PAM type: NRG; PAM sequence: AAG
tgtcaaaaatttagaacagg

SEQ ID NO: 178674 - DNA, 20 bp, Artificial Sequence
  Description of Artificial Sequence: Synthetic oligonucleotide
  Target: LAMA2; (+) strand; PAM type: NRG; PAM sequence: CGG
atttagaacaggaagctgac

SEQ ID NO: 178675 - DNA, 20 bp, Artificial Sequence
  Description of Artificial Sequence: Synthetic oligonucleotide
  Target: LAMA2; (+) strand; PAM type: NRG; PAM sequence: TAG
acaggaagctgaccggctaa

SEQ ID NO: 178676 - DNA, 20 bp, Artificial Sequence
  Description of Artificial Sequence: Synthetic oligonucleotide
  Target: LAMA2; (+) strand; PAM type: NRG; PAM sequence: AAG
tagataaactcaaacccatc

SEQ ID NO: 178677 - DNA, 20 bp, Artificial Sequence
  Description of Artificial Sequence: Synthetic oligonucleotide
  Target: LAMA2; (+) strand; PAM type: NRG; PAM sequence: AGG
agataaactcaaacccatca

SEQ ID NO: 178678 - DNA, 20 bp, Artificial Sequence
  Description of Artificial Sequence: Synthetic oligonucleotide
  Target: LAMA2; (+) strand; PAM type: NRG; PAM sequence: GAG
tcaaacccatcaaggaactt

SEQ ID NO: 178679 - DNA, 20 bp, Artificial Sequence
  Description of Artificial Sequence: Synthetic oligonucleotide
  Target: LAMA2; (+) strand; PAM type: NRG; PAM sequence: AGG
caaacccatcaaggaacttg

SEQ ID NO: 178680 - DNA, 20 bp, Artificial Sequence
  Description of Artificial Sequence: Synthetic oligonucleotide
  Target: LAMA2; (+) strand; PAM type: NRG; PAM sequence: AAG
aggaacttgaggataaccta

SEQ ID NO: 178681 - DNA, 20 bp, Artificial Sequence
  Description of Artificial Sequence: Synthetic oligonucleotide
  Target: LAMA2; (+) strand; PAM type: NRG; PAM sequence: GAG
acctaaagaaaaacatctct

SEQ ID NO: 178682 - DNA, 20 bp, Artificial Sequence
  Description of Artificial Sequence: Synthetic oligonucleotide
  Target: LAMA2; (+) strand; PAM type: NRG; PAM sequence: AAG
agaaaaacatctctgagata

SEQ ID NO: 178683 - DNA, 20 bp, Artificial Sequence
  Description of Artificial Sequence: Synthetic oligonucleotide
  Target: LAMA2; (+) strand; PAM type: NRG; PAM sequence: AGG
gaaaaacatctctgagataa

SEQ ID NO: 178684 - DNA, 20 bp, Artificial Sequence
  Description of Artificial Sequence: Synthetic oligonucleotide
  Target: LAMA2; (+) strand; PAM type: NRG; PAM sequence: AAG
gataaaggaattgataaacc

SEQ ID NO: 178685 - DNA, 20 bp, Artificial Sequence
  Description of Artificial Sequence: Synthetic oligonucleotide
  Target: LAMA2; (+) strand; PAM type: NRG; PAM sequence: CGG
aggaattgataaaccaagct

SEQ ID NO: 178686 - DNA, 20 bp, Artificial Sequence
  Description of Artificial Sequence: Synthetic oligonucleotide
  Target: LAMA2; (+) strand; PAM type: NRG; PAM sequence: AAG
gataaaccaagctcggaaac

SEQ ID NO: 178687 - DNA, 20 bp, Artificial Sequence
  Description of Artificial Sequence: Synthetic oligonucleotide
  Target: LAMA2; (+) strand; PAM type: NRG; PAM sequence: AAG
cggaaacaagccaattctgt

SEQ ID NO: 178688 - DNA, 20 bp, Artificial Sequence
  Description of Artificial Sequence: Synthetic oligonucleotide
  Target: LAMA2; (+) strand; PAM type: NRG; PAM sequence: CAG
ctgtaagttctttttatcgt

SEQ ID NO: 178689 - DNA, 20 bp, Artificial Sequence
  Description of Artificial Sequence: Synthetic oligonucleotide
  Target: LAMA2; (+) strand; PAM type: NRG; PAM sequence: CAG
gttctttttatcgtcagtat

SEQ ID NO: 178690 - DNA, 20 bp, Artificial Sequence
  Description of Artificial Sequence: Synthetic oligonucleotide
  Target: LAMA2; (+) strand; PAM type: NRG; PAM sequence: TGG
cagtaactgattgtaattgt

SEQ ID NO: 178691 - DNA, 20 bp, Artificial Sequence
  Description of Artificial Sequence: Synthetic oligonucleotide
  Target: LAMA2; (+) strand; PAM type: NRG; PAM sequence: TAG
tgtaattgttggattattca

SEQ ID NO: 178692 - DNA, 20 bp, Artificial Sequence
  Description of Artificial Sequence: Synthetic oligonucleotide
  Target: LAMA2; (+) strand; PAM type: NRG; PAM sequence: GAG
taattgttggattattcata

SEQ ID NO: 178693 - DNA, 20 bp, Artificial Sequence
  Description of Artificial Sequence: Synthetic oligonucleotide
  Target: LAMA2; (+) strand; PAM type: NRG; PAM sequence: AGG
aattgttggattattcatag

SEQ ID NO: 178694 - DNA, 20 bp, Artificial Sequence
  Description of Artificial Sequence: Synthetic oligonucleotide
  Target: LAMA2; (+) strand; PAM type: NRG; PAM sequence: GGG
attgttggattattcataga

SEQ ID NO: 178695 - DNA, 20 bp, Artificial Sequence
  Description of Artificial Sequence: Synthetic oligonucleotide
  Target: LAMA2; (+) strand; PAM type: NRG; PAM sequence: CAG
atagagggaatgtctttccc

SEQ ID NO: 178696 - DNA, 20 bp, Artificial Sequence
  Description of Artificial Sequence: Synthetic oligonucleotide
  Target: LAMA2; (+) strand; PAM type: NRG; PAM sequence: AGG
tagagggaatgtctttcccc

SEQ ID NO: 178697 - DNA, 20 bp, Artificial Sequence
  Description of Artificial Sequence: Synthetic oligonucleotide
  Target: LAMA2; (+) strand; PAM type: NRG; PAM sequence: TGG
gattccccgttgaatgatct

SEQ ID NO: 178698 - DNA, 20 bp, Artificial Sequence
  Description of Artificial Sequence: Synthetic oligonucleotide
  Target: LAMA2; (+) strand; PAM type: NRG; PAM sequence: GGG
attccccgttgaatgatctt

SEQ ID NO: 178699 - DNA, 20 bp, Artificial Sequence
  Description of Artificial Sequence: Synthetic oligonucleotide
  Target: LAMA2; (+) strand; PAM type: NRG; PAM sequence: AAG
ggtccttttcctttaactcg

SEQ ID NO: 178700 - DNA, 20 bp, Artificial Sequence
  Description of Artificial Sequence: Synthetic oligonucleotide
  Target: LAMA2; (+) strand; PAM type: NRG; PAM sequence: TGG
tcctttaactcgaagcgatt

SEQ ID NO: 178701 - DNA, 20 bp, Artificial Sequence
  Description of Artificial Sequence: Synthetic oligonucleotide
  Target: LAMA2; (+) strand; PAM type: NRG; PAM sequence: GGG
cctttaactcgaagcgattt

SEQ ID NO: 178702 - DNA, 20 bp, Artificial Sequence
  Description of Artificial Sequence: Synthetic oligonucleotide
  Target: LAMA2; (+) strand; PAM type: NRG; PAM sequence: GGG
ctttaactcgaagcgatttg

SEQ ID NO: 178703 - DNA, 20 bp, Artificial Sequence
  Description of Artificial Sequence: Synthetic oligonucleotide
  Target: LAMA2; (+) strand; PAM type: NRG; PAM sequence: TAG
taactcgaagcgatttgggg

SEQ ID NO: 178704 - DNA, 20 bp, Artificial Sequence
  Description of Artificial Sequence: Synthetic oligonucleotide
  Target: LAMA2; (+) strand; PAM type: NRG; PAM sequence: AGG
aactcgaagcgatttggggt

SEQ ID NO: 178705 - DNA, 20 bp, Artificial Sequence
  Description of Artificial Sequence: Synthetic oligonucleotide
  Target: LAMA2; (+) strand; PAM type: NRG; PAM sequence: GAG
ctcgaagcgatttggggtag

SEQ ID NO: 178706 - DNA, 20 bp, Artificial Sequence
  Description of Artificial Sequence: Synthetic oligonucleotide
  Target: LAMA2; (+) strand; PAM type: NRG; PAM sequence: AGG
tcgaagcgatttggggtagg

SEQ ID NO: 178707 - DNA, 20 bp, Artificial Sequence
  Description of Artificial Sequence: Synthetic oligonucleotide
  Target: LAMA2; (+) strand; PAM type: NRG; PAM sequence: GGG
cgaagcgatttggggtagga

SEQ ID NO: 178708 - DNA, 20 bp, Artificial Sequence
  Description of Artificial Sequence: Synthetic oligonucleotide
  Target: LAMA2; (+) strand; PAM type: NRG; PAM sequence: GGG
gaagcgatttggggtaggag

SEQ ID NO: 178709 - DNA, 20 bp, Artificial Sequence
  Description of Artificial Sequence: Synthetic oligonucleotide
  Target: LAMA2; (+) strand; PAM type: NRG; PAM sequence: TGG
cgatttggggtaggaggggt

SEQ ID NO: 178710 - DNA, 20 bp, Artificial Sequence
  Description of Artificial Sequence: Synthetic oligonucleotide
  Target: LAMA2; (+) strand; PAM type: NRG; PAM sequence: GAG
atttggggtaggaggggttg

SEQ ID NO: 178711 - DNA, 20 bp, Artificial Sequence
  Description of Artificial Sequence: Synthetic oligonucleotide
  Target: LAMA2; (+) strand; PAM type: NRG; PAM sequence: TGG
tggggtaggaggggttggag

SEQ ID NO: 178712 - DNA, 20 bp, Artificial Sequence
  Description of Artificial Sequence: Synthetic oligonucleotide
  Target: LAMA2; (+) strand; PAM type: NRG; PAM sequence: GGG
ggggtaggaggggttggagt

SEQ ID NO: 178713 - DNA, 20 bp, Artificial Sequence
  Description of Artificial Sequence: Synthetic oligonucleotide
  Target: LAMA2; (+) strand; PAM type: NRG; PAM sequence: GGG
gggtaggaggggttggagtg

SEQ ID NO: 178714 - DNA, 20 bp, Artificial Sequence
  Description of Artificial Sequence: Synthetic oligonucleotide
  Target: LAMA2; (+) strand; PAM type: NRG; PAM sequence: GGG
ggtaggaggggttggagtgg

SEQ ID NO: 178715 - DNA, 20 bp, Artificial Sequence
  Description of Artificial Sequence: Synthetic oligonucleotide
  Target: LAMA2; (+) strand; PAM type: NRG; PAM sequence: GAG
taggaggggttggagtgggg

SEQ ID NO: 178716 - DNA, 20 bp, Artificial Sequence
  Description of Artificial Sequence: Synthetic oligonucleotide
  Target: LAMA2; (+) strand; PAM type: NRG; PAM sequence: GAG
ggaggggttggagtggggga

SEQ ID NO: 178717 - DNA, 20 bp, Artificial Sequence
  Description of Artificial Sequence: Synthetic oligonucleotide
  Target: LAMA2; (+) strand; PAM type: NRG; PAM sequence: AGG
gaggggttggagtgggggag

SEQ ID NO: 178718 - DNA, 20 bp, Artificial Sequence
  Description of Artificial Sequence: Synthetic oligonucleotide
  Target: LAMA2; (+) strand; PAM type: NRG; PAM sequence: TAG
ggttggagtgggggagaggt

SEQ ID NO: 178719 - DNA, 20 bp, Artificial Sequence
  Description of Artificial Sequence: Synthetic oligonucleotide
  Target: LAMA2; (+) strand; PAM type: NRG; PAM sequence: AAG
gttttgtttgtaaatttcaa

SEQ ID NO: 178720 - DNA, 20 bp, Artificial Sequence
  Description of Artificial Sequence: Synthetic oligonucleotide
  Target: LAMA2; (+) strand; PAM type: NRG; PAM sequence: GAG
aatttcaaaagacatttcat

SEQ ID NO: 178721 - DNA, 20 bp, Artificial Sequence
  Description of Artificial Sequence: Synthetic oligonucleotide
  Target: LAMA2; (+) strand; PAM type: NRG; PAM sequence: TGG
accacttattgttttaaaac

SEQ ID NO: 178722 - DNA, 20 bp, Artificial Sequence
  Description of Artificial Sequence: Synthetic oligonucleotide
  Target: LAMA2; (+) strand; PAM type: NRG; PAM sequence: GGG
ccacttattgttttaaaact

SEQ ID NO: 178723 - DNA, 20 bp, Artificial Sequence
  Description of Artificial Sequence: Synthetic oligonucleotide
  Target: LAMA2; (+) strand; PAM type: NRG; PAM sequence: TGG
tgttttaaaactgggaattc

SEQ ID NO: 178724 - DNA, 20 bp, Artificial Sequence
  Description of Artificial Sequence: Synthetic oligonucleotide
  Target: LAMA2; (+) strand; PAM type: NRG; PAM sequence: TAG
atattctattactatttgca

SEQ ID NO: 178725 - DNA, 20 bp, Artificial Sequence
  Description of Artificial Sequence: Synthetic oligonucleotide
  Target: LAMA2; (+) strand; PAM type: NRG; PAM sequence: TAG
tttgcatagaataatacaaa

SEQ ID NO: 178726 - DNA, 20 bp, Artificial Sequence
  Description of Artificial Sequence: Synthetic oligonucleotide
  Target: LAMA2; (+) strand; PAM type: NRG; PAM sequence: AAG
catagaataatacaaatagc

SEQ ID NO: 178727 - DNA, 20 bp, Artificial Sequence
  Description of Artificial Sequence: Synthetic oligonucleotide
  Target: LAMA2; (+) strand; PAM type: NRG; PAM sequence: AAG
gaataatacaaatagcaaga

SEQ ID NO: 178728 - DNA, 20 bp, Artificial Sequence
  Description of Artificial Sequence: Synthetic oligonucleotide
  Target: LAMA2; (+) strand; PAM type: NRG; PAM sequence: AAG
ccttattattgtatactaaa

SEQ ID NO: 178729 - DNA, 20 bp, Artificial Sequence
  Description of Artificial Sequence: Synthetic oligonucleotide
  Target: LAMA2; (+) strand; PAM type: NRG; PAM sequence: TGG
tattgtatactaaaaagcca

SEQ ID NO: 178730 - DNA, 20 bp, Artificial Sequence
  Description of Artificial Sequence: Synthetic oligonucleotide
  Target: LAMA2; (+) strand; PAM type: NRG; PAM sequence: GAG
tatactaaaaagccatggat

SEQ ID NO: 178731 - DNA, 20 bp, Artificial Sequence
  Description of Artificial Sequence: Synthetic oligonucleotide
  Target: LAMA2; (+) strand; PAM type: NRG; PAM sequence: GAG
tactaaaaagccatggatga

SEQ ID NO: 178732 - DNA, 20 bp, Artificial Sequence
  Description of Artificial Sequence: Synthetic oligonucleotide
  Target: LAMA2; (+) strand; PAM type: NRG; PAM sequence: AAG
ctaaaaacaaaccaaaaaaa

SEQ ID NO: 178733 - DNA, 20 bp, Artificial Sequence
  Description of Artificial Sequence: Synthetic oligonucleotide
  Target: LAMA2; (+) strand; PAM type: NRG; PAM sequence: AGG
taaaaacaaaccaaaaaaaa

SEQ ID NO: 178734 - DNA, 20 bp, Artificial Sequence
  Description of Artificial Sequence: Synthetic oligonucleotide
  Target: LAMA2; (+) strand; PAM type: NRG; PAM sequence: TGG
caaaaaaaaaggccaactaa

SEQ ID NO: 178735 - DNA, 20 bp, Artificial Sequence
  Description of Artificial Sequence: Synthetic oligonucleotide
  Target: LAMA2; (+) strand; PAM type: NRG; PAM sequence: GGG
aaaaaaaaaggccaactaat

SEQ ID NO: 178736 - DNA, 20 bp, Artificial Sequence
  Description of Artificial Sequence: Synthetic oligonucleotide
  Target: LAMA2; (+) strand; PAM type: NRG; PAM sequence: GGG
aaaaaaaaggccaactaatg

SEQ ID NO: 178737 - DNA, 20 bp, Artificial Sequence
  Description of Artificial Sequence: Synthetic oligonucleotide
  Target: LAMA2; (+) strand; PAM type: NRG; PAM sequence: TGG
aaggccaactaatggggtta

SEQ ID NO: 178738 - DNA, 20 bp, Artificial Sequence
  Description of Artificial Sequence: Synthetic oligonucleotide
  Target: LAMA2; (+) strand; PAM type: NRG; PAM sequence: CAG
gccaactaatggggttatgg

SEQ ID NO: 178739 - DNA, 20 bp, Artificial Sequence
  Description of Artificial Sequence: Synthetic oligonucleotide
  Target: LAMA2; (+) strand; PAM type: NRG; PAM sequence: AGG
ccaactaatggggttatggc

SEQ ID NO: 178740 - DNA, 20 bp, Artificial Sequence
  Description of Artificial Sequence: Synthetic oligonucleotide
  Target: LAMA2; (+) strand; PAM type: NRG; PAM sequence: AAG
atggggttatggcaggaatg

SEQ ID NO: 178741 - DNA, 20 bp, Artificial Sequence
  Description of Artificial Sequence: Synthetic oligonucleotide
  Target: LAMA2; (+) strand; PAM type: NRG; PAM sequence: AGG
tggggttatggcaggaatga

SEQ ID NO: 178742 - DNA, 20 bp, Artificial Sequence
  Description of Artificial Sequence: Synthetic oligonucleotide
  Target: LAMA2; (+) strand; PAM type: NRG; PAM sequence: CAG
aggaatgaaggaacaatata

SEQ ID NO: 178743 - DNA, 20 bp, Artificial Sequence
  Description of Artificial Sequence: Synthetic oligonucleotide
  Target: LAMA2; (+) strand; PAM type: NRG; PAM sequence: AAG
gaaggaacaatatacagaat

SEQ ID NO: 178744 - DNA, 20 bp, Artificial Sequence
  Description of Artificial Sequence: Synthetic oligonucleotide
  Target: LAMA2; (+) strand; PAM type: NRG; PAM sequence: GAG
aggaacaatatacagaataa

SEQ ID NO: 178745 - DNA, 20 bp, Artificial Sequence
  Description of Artificial Sequence: Synthetic oligonucleotide
  Target: LAMA2; (+) strand; PAM type: NRG; PAM sequence: AAG
caatatacagaataagagca

SEQ ID NO: 178746 - DNA, 20 bp, Artificial Sequence
  Description of Artificial Sequence: Synthetic oligonucleotide
  Target: LAMA2; (+) strand; PAM type: NRG; PAM sequence: GAG
atatacagaataagagcaaa

SEQ ID NO: 178747 - DNA, 20 bp, Artificial Sequence
  Description of Artificial Sequence: Synthetic oligonucleotide
  Target: LAMA2; (+) strand; PAM type: NRG; PAM sequence: TGG
tacatatatattcttttgtc

SEQ ID NO: 178748 - DNA, 20 bp, Artificial Sequence
  Description of Artificial Sequence: Synthetic oligonucleotide
  Target: LAMA2; (+) strand; PAM type: NRG; PAM sequence: TGG
ggtataaacaacaataaaaa

SEQ ID NO: 178749 - DNA, 20 bp, Artificial Sequence
  Description of Artificial Sequence: Synthetic oligonucleotide
  Target: LAMA2; (+) strand; PAM type: NRG; PAM sequence: TGG
aacaacaataaaaatggctt

SEQ ID NO: 178750 - DNA, 20 bp, Artificial Sequence
  Description of Artificial Sequence: Synthetic oligonucleotide
  Target: LAMA2; (+) strand; PAM type: NRG; PAM sequence: TGG
tttacatttattttttgttt

SEQ ID NO: 178751 - DNA, 20 bp, Artificial Sequence
  Description of Artificial Sequence: Synthetic oligonucleotide
  Target: LAMA2; (+) strand; PAM type: NRG; PAM sequence: GAG
tacatttattttttgttttg

SEQ ID NO: 178752 - DNA, 20 bp, Artificial Sequence
  Description of Artificial Sequence: Synthetic oligonucleotide
  Target: LAMA2; (+) strand; PAM type: NRG; PAM sequence: TAG
atttattttttgttttggag

SEQ ID NO: 178753 - DNA, 20 bp, Artificial Sequence
  Description of Artificial Sequence: Synthetic oligonucleotide
  Target: LAMA2; (+) strand; PAM type: NRG; PAM sequence: TAG
attttttgttttggagtaga

SEQ ID NO: 178754 - DNA, 20 bp, Artificial Sequence
  Description of Artificial Sequence: Synthetic oligonucleotide
  Target: LAMA2; (+) strand; PAM type: NRG; PAM sequence: AGG
ttttttgttttggagtagat

SEQ ID NO: 178755 - DNA, 20 bp, Artificial Sequence
  Description of Artificial Sequence: Synthetic oligonucleotide
  Target: LAMA2; (+) strand; PAM type: NRG; PAM sequence: TAG
gttttggagtagataggaaa

SEQ ID NO: 178756 - DNA, 20 bp, Artificial Sequence
  Description of Artificial Sequence: Synthetic oligonucleotide
  Target: LAMA2; (+) strand; PAM type: NRG; PAM sequence: TAG
ttgctctttacttacccaat

SEQ ID NO: 178757 - DNA, 20 bp, Artificial Sequence
  Description of Artificial Sequence: Synthetic oligonucleotide
  Target: LAMA2; (+) strand; PAM type: NRG; PAM sequence: AAG
ctctttacttacccaattag

SEQ ID NO: 178758 - DNA, 20 bp, Artificial Sequence
  Description of Artificial Sequence: Synthetic oligonucleotide
  Target: LAMA2; (+) strand; PAM type: NRG; PAM sequence: TAG
ttacccaattagaagtttac

SEQ ID NO: 178759 - DNA, 20 bp, Artificial Sequence
  Description of Artificial Sequence: Synthetic oligonucleotide
  Target: LAMA2; (+) strand; PAM type: NRG; PAM sequence: AGG
tacccaattagaagtttact

SEQ ID NO: 178760 - DNA, 20 bp, Artificial Sequence
  Description of Artificial Sequence: Synthetic oligonucleotide
  Target: LAMA2; (+) strand; PAM type: NRG; PAM sequence: TAG
caattagaagtttactagga

SEQ ID NO: 178761 - DNA, 20 bp, Artificial Sequence
  Description of Artificial Sequence: Synthetic oligonucleotide
  Target: LAMA2; (+) strand; PAM type: NRG; PAM sequence: CAG
gaagtttactaggatagaaa

SEQ ID NO: 178762 - DNA, 20 bp, Artificial Sequence
  Description of Artificial Sequence: Synthetic oligonucleotide
  Target: LAMA2; (+) strand; PAM type: NRG; PAM sequence: GAG
agtttactaggatagaaaca

SEQ ID NO: 178763 - DNA, 20 bp, Artificial Sequence
  Description of Artificial Sequence: Synthetic oligonucleotide
  Target: LAMA2; (+) strand; PAM type: NRG; PAM sequence: TAG
aggatagaaacagagctttc

SEQ ID NO: 178764 - DNA, 20 bp, Artificial Sequence
  Description of Artificial Sequence: Synthetic oligonucleotide
  Target: LAMA2; (+) strand; PAM type: NRG; PAM sequence: AAG
atagaaacagagctttctag

SEQ ID NO: 178765 - DNA, 20 bp, Artificial Sequence
  Description of Artificial Sequence: Synthetic oligonucleotide
  Target: LAMA2; (+) strand; PAM type: NRG; PAM sequence: AGG
tagaaacagagctttctaga

SEQ ID NO: 178766 - DNA, 20 bp, Artificial Sequence
  Description of Artificial Sequence: Synthetic oligonucleotide
  Target: LAMA2; (+) strand; PAM type: NRG; PAM sequence: TAG
aaacagagctttctagaagg

SEQ ID NO: 178767 - DNA, 20 bp, Artificial Sequence
  Description of Artificial Sequence: Synthetic oligonucleotide
  Target: LAMA2; (+) strand; PAM type: NRG; PAM sequence: GAG
ctagaaggtagcatgctaat

SEQ ID NO: 178768 - DNA, 20 bp, Artificial Sequence
  Description of Artificial Sequence: Synthetic oligonucleotide
  Target: LAMA2; (+) strand; PAM type: NRG; PAM sequence: CAG
aaggtagcatgctaatgagc

SEQ ID NO: 178769 - DNA, 20 bp, Artificial Sequence
  Description of Artificial Sequence: Synthetic oligonucleotide
  Target: LAMA2; (+) strand; PAM type: NRG; PAM sequence: AGG
aggtagcatgctaatgagcc

SEQ ID NO: 178770 - DNA, 20 bp, Artificial Sequence
  Description of Artificial Sequence: Synthetic oligonucleotide
  Target: LAMA2; (+) strand; PAM type: NRG; PAM sequence: GGG
ggtagcatgctaatgagcca

SEQ ID NO: 178771 - DNA, 20 bp, Artificial Sequence
  Description of Artificial Sequence: Synthetic oligonucleotide
  Target: LAMA2; (+) strand; PAM type: NRG; PAM sequence: CAG
agcatgctaatgagccaggg

SEQ ID NO: 178772 - DNA, 20 bp, Artificial Sequence
  Description of Artificial Sequence: Synthetic oligonucleotide
  Target: LAMA2; (+) strand; PAM type: NRG; PAM sequence: GAG
catgctaatgagccagggca

SEQ ID NO: 178773 - DNA, 20 bp, Artificial Sequence
  Description of Artificial Sequence: Synthetic oligonucleotide
  Target: LAMA2; (+) strand; PAM type: NRG; PAM sequence: AAG
tgagccagggcagagttgct

SEQ ID NO: 178774 - DNA, 20 bp, Artificial Sequence
  Description of Artificial Sequence: Synthetic oligonucleotide
  Target: LAMA2; (+) strand; PAM type: NRG; PAM sequence: TGG
gccagggcagagttgctaag

SEQ ID NO: 178775 - DNA, 20 bp, Artificial Sequence
  Description of Artificial Sequence: Synthetic oligonucleotide
  Target: LAMA2; (+) strand; PAM type: NRG; PAM sequence: TAG
taagtggcaacgtgaaactt

SEQ ID NO: 178776 - DNA, 20 bp, Artificial Sequence
  Description of Artificial Sequence: Synthetic oligonucleotide
  Target: LAMA2; (+) strand; PAM type: NRG; PAM sequence: AAG
gcaacgtgaaactttagtca

SEQ ID NO: 178777 - DNA, 20 bp, Artificial Sequence
  Description of Artificial Sequence: Synthetic oligonucleotide
  Target: LAMA2; (+) strand; PAM type: NRG; PAM sequence: AGG
caacgtgaaactttagtcaa

SEQ ID NO: 178778 - DNA, 20 bp, Artificial Sequence
  Description of Artificial Sequence: Synthetic oligonucleotide
  Target: LAMA2; (+) strand; PAM type: NRG; PAM sequence: AAG
cgtgaaactttagtcaaagg

SEQ ID NO: 178779 - DNA, 20 bp, Artificial Sequence
  Description of Artificial Sequence: Synthetic oligonucleotide
  Target: LAMA2; (+) strand; PAM type: NRG; PAM sequence: AGG
gtgaaactttagtcaaagga

SEQ ID NO: 178780 - DNA, 20 bp, Artificial Sequence
  Description of Artificial Sequence: Synthetic oligonucleotide
  Target: LAMA2; (+) strand; PAM type: NRG; PAM sequence: AAG
aaactttagtcaaaggaagg

SEQ ID NO: 178781 - DNA, 20 bp, Artificial Sequence
  Description of Artificial Sequence: Synthetic oligonucleotide
  Target: LAMA2; (+) strand; PAM type: NRG; PAM sequence: AAG
tttagtcaaaggaaggaagt

SEQ ID NO: 178782 - DNA, 20 bp, Artificial Sequence
  Description of Artificial Sequence: Synthetic oligonucleotide
  Target: LAMA2; (+) strand; PAM type: NRG; PAM sequence: AGG
ttagtcaaaggaaggaagta

SEQ ID NO: 178783 - DNA, 20 bp, Artificial Sequence
  Description of Artificial Sequence: Synthetic oligonucleotide
  Target: LAMA2; (+) strand; PAM type: NRG; PAM sequence: GGG
tagtcaaaggaaggaagtaa

SEQ ID NO: 178784 - DNA, 20 bp, Artificial Sequence
  Description of Artificial Sequence: Synthetic oligonucleotide
  Target: LAMA2; (+) strand; PAM type: NRG; PAM sequence: AAG
tcaaaggaaggaagtaaggg

SEQ ID NO: 178785 - DNA, 20 bp, Artificial Sequence
  Description of Artificial Sequence: Synthetic oligonucleotide
  Target: LAMA2; (+) strand; PAM type: NRG; PAM sequence: AGG
caaaggaaggaagtaaggga

SEQ ID NO: 178786 - DNA, 20 bp, Artificial Sequence
  Description of Artificial Sequence: Synthetic oligonucleotide
  Target: LAMA2; (+) strand; PAM type: NRG; PAM sequence: GGG
aaaggaaggaagtaagggaa

SEQ ID NO: 178787 - DNA, 20 bp, Artificial Sequence
  Description of Artificial Sequence: Synthetic oligonucleotide
  Target: LAMA2; (+) strand; PAM type: NRG; PAM sequence: GGG
aaggaaggaagtaagggaag

SEQ ID NO: 178788 - DNA, 20 bp, Artificial Sequence
  Description of Artificial Sequence: Synthetic oligonucleotide
  Target: LAMA2; (+) strand; PAM type: NRG; PAM sequence: GAG
ggaaggaagtaagggaaggg

SEQ ID NO: 178789 - DNA, 20 bp, Artificial Sequence
  Description of Artificial Sequence: Synthetic oligonucleotide
  Target: LAMA2; (+) strand; PAM type: NRG; PAM sequence: AGG
gaaggaagtaagggaagggg

SEQ ID NO: 178790 - DNA, 20 bp, Artificial Sequence
  Description of Artificial Sequence: Synthetic oligonucleotide
  Target: LAMA2; (+) strand; PAM type: NRG; PAM sequence: GAG
aggaagtaagggaaggggag

SEQ ID NO: 178791 - DNA, 20 bp, Artificial Sequence
  Description of Artificial Sequence: Synthetic oligonucleotide
  Target: LAMA2; (+) strand; PAM type: NRG; PAM sequence: GAG
gaagtaagggaaggggagga

SEQ ID NO: 178792 - DNA, 20 bp, Artificial Sequence
  Description of Artificial Sequence: Synthetic oligonucleotide
  Target: LAMA2; (+) strand; PAM type: NRG; PAM sequence: AGG
aagtaagggaaggggaggag

SEQ ID NO: 178793 - DNA, 20 bp, Artificial Sequence
  Description of Artificial Sequence: Synthetic oligonucleotide
  Target: LAMA2; (+) strand; PAM type: NRG; PAM sequence: GGG
agtaagggaaggggaggaga

SEQ ID NO: 178794 - DNA, 20 bp, Artificial Sequence
  Description of Artificial Sequence: Synthetic oligonucleotide
  Target: LAMA2; (+) strand; PAM type: NRG; PAM sequence: GGG
gtaagggaaggggaggagag

SEQ ID NO: 178795 - DNA, 20 bp, Artificial Sequence
  Description of Artificial Sequence: Synthetic oligonucleotide
  Target: LAMA2; (+) strand; PAM type: NRG; PAM sequence: GAG
aagggaaggggaggagaggg

SEQ ID NO: 178796 - DNA, 20 bp, Artificial Sequence
  Description of Artificial Sequence: Synthetic oligonucleotide
  Target: LAMA2; (+) strand; PAM type: NRG; PAM sequence: AGG
agggaaggggaggagagggg

SEQ ID NO: 178797 - DNA, 20 bp, Artificial Sequence
  Description of Artificial Sequence: Synthetic oligonucleotide
  Target: LAMA2; (+) strand; PAM type: NRG; PAM sequence: GGG
gggaaggggaggagagggga

SEQ ID NO: 178798 - DNA, 20 bp, Artificial Sequence
  Description of Artificial Sequence: Synthetic oligonucleotide
  Target: LAMA2; (+) strand; PAM type: NRG; PAM sequence: GGG
ggaaggggaggagaggggag

SEQ ID NO: 178799 - DNA, 20 bp, Artificial Sequence
  Description of Artificial Sequence: Synthetic oligonucleotide
  Target: LAMA2; (+) strand; PAM type: NRG; PAM sequence: GAG
aaggggaggagaggggaggg

SEQ ID NO: 178800 - DNA, 20 bp, Artificial Sequence
  Description of Artificial Sequence: Synthetic oligonucleotide
  Target: LAMA2; (+) strand; PAM type: NRG; PAM sequence: AGG
aggggaggagaggggagggg

SEQ ID NO: 178801 - DNA, 20 bp, Artificial Sequence
  Description of Artificial Sequence: Synthetic oligonucleotide
  Target: LAMA2; (+) strand; PAM type: NRG; PAM sequence: GGG
ggggaggagaggggagggga

SEQ ID NO: 178802 - DNA, 20 bp, Artificial Sequence
  Description of Artificial Sequence: Synthetic oligonucleotide
  Target: LAMA2; (+) strand; PAM type: NRG; PAM sequence: GGG
gggaggagaggggaggggag

SEQ ID NO: 178803 - DNA, 20 bp, Artificial Sequence
  Description of Artificial Sequence: Synthetic oligonucleotide
  Target: LAMA2; (+) strand; PAM type: NRG; PAM sequence: GAG
gaggagaggggaggggaggg

SEQ ID NO: 178804 - DNA, 20 bp, Artificial Sequence
  Description of Artificial Sequence: Synthetic oligonucleotide
  Target: LAMA2; (+) strand; PAM type: NRG; PAM sequence: AGG
aggagaggggaggggagggg

SEQ ID NO: 178805 - DNA, 20 bp, Artificial Sequence
  Description of Artificial Sequence: Synthetic oligonucleotide
  Target: LAMA2; (+) strand; PAM type: NRG; PAM sequence: GGG
ggagaggggaggggagggga

SEQ ID NO: 178806 - DNA, 20 bp, Artificial Sequence
  Description of Artificial Sequence: Synthetic oligonucleotide
  Target: LAMA2; (+) strand; PAM type: NRG; PAM sequence: GGG
gagaggggaggggaggggag

SEQ ID NO: 178807 - DNA, 20 bp, Artificial Sequence
  Description of Artificial Sequence: Synthetic oligonucleotide
  Target: LAMA2; (+) strand; PAM type: NRG; PAM sequence: GAG
gaggggaggggaggggaggg

SEQ ID NO: 178808 - DNA, 20 bp, Artificial Sequence
  Description of Artificial Sequence: Synthetic oligonucleotide
  Target: LAMA2; (+) strand; PAM type: NRG; PAM sequence: AGG
aggggaggggaggggagggg

SEQ ID NO: 178809 - DNA, 20 bp, Artificial Sequence
  Description of Artificial Sequence: Synthetic oligonucleotide
  Target: LAMA2; (+) strand; PAM type: NRG; PAM sequence: GAG
gaggggaggggaggggaggc

SEQ ID NO: 178810 - DNA, 20 bp, Artificial Sequence
  Description of Artificial Sequence: Synthetic oligonucleotide
  Target: LAMA2; (+) strand; PAM type: NRG; PAM sequence: AGG
aggggaggggaggggaggcg

SEQ ID NO: 178811 - DNA, 20 bp, Artificial Sequence
  Description of Artificial Sequence: Synthetic oligonucleotide
  Target: LAMA2; (+) strand; PAM type: NRG; PAM sequence: GGG
ggggaggggaggggaggcga

SEQ ID NO: 178812 - DNA, 20 bp, Artificial Sequence
  Description of Artificial Sequence: Synthetic oligonucleotide
  Target: LAMA2; (+) strand; PAM type: NRG; PAM sequence: GGG
gggaggggaggggaggcgag

SEQ ID NO: 178813 - DNA, 20 bp, Artificial Sequence
  Description of Artificial Sequence: Synthetic oligonucleotide
  Target: LAMA2; (+) strand; PAM type: NRG; PAM sequence: GAG
gaggggaggggaggcgaggg

SEQ ID NO: 178814 - DNA, 20 bp, Artificial Sequence
  Description of Artificial Sequence: Synthetic oligonucleotide
  Target: LAMA2; (+) strand; PAM type: NRG; PAM sequence: AGG
aggggaggggaggcgagggg

SEQ ID NO: 178815 - DNA, 20 bp, Artificial Sequence
  Description of Artificial Sequence: Synthetic oligonucleotide
  Target: LAMA2; (+) strand; PAM type: NRG; PAM sequence: GGG
ggggaggggaggcgagggga

SEQ ID NO: 178816 - DNA, 20 bp, Artificial Sequence
  Description of Artificial Sequence: Synthetic oligonucleotide
  Target: LAMA2; (+) strand; PAM type: NRG; PAM sequence: GGG
gggaggggaggcgaggggag

SEQ ID NO: 178817 - DNA, 20 bp, Artificial Sequence
  Description of Artificial Sequence: Synthetic oligonucleotide
  Target: LAMA2; (+) strand; PAM type: NRG; PAM sequence: GAG
gaggggaggcgaggggaggg

SEQ ID NO: 178818 - DNA, 20 bp, Artificial Sequence
  Description of Artificial Sequence: Synthetic oligonucleotide
  Target: LAMA2; (+) strand; PAM type: NRG; PAM sequence: AGG
aggggaggcgaggggagggg

SEQ ID NO: 178819 - DNA, 20 bp, Artificial Sequence
  Description of Artificial Sequence: Synthetic oligonucleotide
  Target: LAMA2; (+) strand; PAM type: NRG; PAM sequence: GGG
ggggaggcgaggggagggga

SEQ ID NO: 178820 - DNA, 20 bp, Artificial Sequence
  Description of Artificial Sequence: Synthetic oligonucleotide
  Target: LAMA2; (+) strand; PAM type: NRG; PAM sequence: GGG
gggaggcgaggggaggggag

SEQ ID NO: 178821 - DNA, 20 bp, Artificial Sequence
  Description of Artificial Sequence: Synthetic oligonucleotide
  Target: LAMA2; (+) strand; PAM type: NRG; PAM sequence: GAG
gaggcgaggggaggggaggg

SEQ ID NO: 178822 - DNA, 20 bp, Artificial Sequence
  Description of Artificial Sequence: Synthetic oligonucleotide
  Target: LAMA2; (+) strand; PAM type: NRG; PAM sequence: AGG
aggcgaggggaggggagggg

SEQ ID NO: 178823 - DNA, 20 bp, Artificial Sequence
  Description of Artificial Sequence: Synthetic oligonucleotide
  Target: LAMA2; (+) strand; PAM type: NRG; PAM sequence: GGG
ggcgaggggaggggagggga

SEQ ID NO: 178824 - DNA, 20 bp, Artificial Sequence
  Description of Artificial Sequence: Synthetic oligonucleotide
  Target: LAMA2; (+) strand; PAM type: NRG; PAM sequence: GGG
gcgaggggaggggaggggag

SEQ ID NO: 178825 - DNA, 20 bp, Artificial Sequence
  Description of Artificial Sequence: Synthetic oligonucleotide
  Target: LAMA2; (+) strand; PAM type: NRG; PAM sequence: GAG
gaggggaggggaggggaggg

SEQ ID NO: 178826 - DNA, 20 bp, Artificial Sequence
  Description of Artificial Sequence: Synthetic oligonucleotide
  Target: LAMA2; (+) strand; PAM type: NRG; PAM sequence: AGG
aggggaggggaggggagggg

SEQ ID NO: 178827 - DNA, 20 bp, Artificial Sequence
  Description of Artificial Sequence: Synthetic oligonucleotide
  Target: LAMA2; (+) strand; PAM type: NRG; PAM sequence: GGG
ggggaggggaggggagggga

SEQ ID NO: 178828 - DNA, 20 bp, Artificial Sequence
  Description of Artificial Sequence: Synthetic oligonucleotide
  Target: LAMA2; (+) strand; PAM type: NRG; PAM sequence: GGG
gggaggggaggggaggggag

SEQ ID NO: 178829 - DNA, 20 bp, Artificial Sequence
  Description of Artificial Sequence: Synthetic oligonucleotide
  Target: LAMA2; (+) strand; PAM type: NRG; PAM sequence: GAG
gaggggaggggaggggaggg

SEQ ID NO: 178830 - DNA, 20 bp, Artificial Sequence
  Description of Artificial Sequence: Synthetic oligonucleotide
  Target: LAMA2; (+) strand; PAM type: NRG; PAM sequence: AGG
aggggaggggaggggagggg

SEQ ID NO: 178831 - DNA, 20 bp, Artificial Sequence
  Description of Artificial Sequence: Synthetic oligonucleotide
  Target: LAMA2; (+) strand; PAM type: NRG; PAM sequence: GGG
ggggaggggaggggagggga

SEQ ID NO: 178832 - DNA, 20 bp, Artificial Sequence
  Description of Artificial Sequence: Synthetic oligonucleotide
  Target: LAMA2; (+) strand; PAM type: NRG; PAM sequence: GGG
gggaggggaggggaggggag

SEQ ID NO: 178833 - DNA, 20 bp, Artificial Sequence
  Description of Artificial Sequence: Synthetic oligonucleotide
  Target: LAMA2; (+) strand; PAM type: NRG; PAM sequence: GAG
gaggggaggggaggggaggg

SEQ ID NO: 178834 - DNA, 20 bp, Artificial Sequence
  Description of Artificial Sequence: Synthetic oligonucleotide
  Target: LAMA2; (+) strand; PAM type: NRG; PAM sequence: AGG
aggggaggggaggggagggg

SEQ ID NO: 178835 - DNA, 20 bp, Artificial Sequence
  Description of Artificial Sequence: Synthetic oligonucleotide
  Target: LAMA2; (+) strand; PAM type: NRG; PAM sequence: GGG
ggggaggggaggggagggga

SEQ ID NO: 178836 - DNA, 20 bp, Artificial Sequence
  Description of Artificial Sequence: Synthetic oligonucleotide
  Target: LAMA2; (+) strand; PAM type: NRG; PAM sequence: GGG
gggaggggaggggaggggag

SEQ ID NO: 178837 - DNA, 20 bp, Artificial Sequence
  Description of Artificial Sequence: Synthetic oligonucleotide
  Target: LAMA2; (+) strand; PAM type: NRG; PAM sequence: GAG
gaggggaggggaggggaggg

SEQ ID NO: 178838 - DNA, 20 bp, Artificial Sequence
  Description of Artificial Sequence: Synthetic oligonucleotide
  Target: LAMA2; (+) strand; PAM type: NRG; PAM sequence: AGG
aggggaggggaggggagggg

SEQ ID NO: 178839 - DNA, 20 bp, Artificial Sequence
  Description of Artificial Sequence: Synthetic oligonucleotide
  Target: LAMA2; (+) strand; PAM type: NRG; PAM sequence: GGG
ggggaggggaggggagggga

SEQ ID NO: 178840 - DNA, 20 bp, Artificial Sequence
  Description of Artificial Sequence: Synthetic oligonucleotide
  Target: LAMA2; (+) strand; PAM type: NRG; PAM sequence: GGG
gggaggggaggggaggggag

SEQ ID NO: 178841 - DNA, 20 bp, Artificial Sequence
  Description of Artificial Sequence: Synthetic oligonucleotide
  Target: LAMA2; (+) strand; PAM type: NRG; PAM sequence: TGG
aggggaggggaggggagggg

SEQ ID NO: 178842 - DNA, 20 bp, Artificial Sequence
  Description of Artificial Sequence: Synthetic oligonucleotide
  Target: LAMA2; (+) strand; PAM type: NRG; PAM sequence: TAG
ggaggggaggggaggggtgg

SEQ ID NO: 178843 - DNA, 20 bp, Artificial Sequence
  Description of Artificial Sequence: Synthetic oligonucleotide
  Target: LAMA2; (+) strand; PAM type: NRG; PAM sequence: AAG
gggaggggaggggtggtaga

SEQ ID NO: 178844 - DNA, 20 bp, Artificial Sequence
  Description of Artificial Sequence: Synthetic oligonucleotide
  Target: LAMA2; (+) strand; PAM type: NRG; PAM sequence: AAG
ggggaggggtggtagaaaga

SEQ ID NO: 178845 - DNA, 20 bp, Artificial Sequence
  Description of Artificial Sequence: Synthetic oligonucleotide
  Target: LAMA2; (+) strand; PAM type: NRG; PAM sequence: AAG
gaggggtggtagaaagaaag

SEQ ID NO: 178846 - DNA, 20 bp, Artificial Sequence
  Description of Artificial Sequence: Synthetic oligonucleotide
  Target: LAMA2; (+) strand; PAM type: NRG; PAM sequence: AGG
aggggtggtagaaagaaaga

SEQ ID NO: 178847 - DNA, 20 bp, Artificial Sequence
  Description of Artificial Sequence: Synthetic oligonucleotide
  Target: LAMA2; (+) strand; PAM type: NRG; PAM sequence: AAG
ggtggtagaaagaaagaagg

SEQ ID NO: 178848 - DNA, 20 bp, Artificial Sequence
  Description of Artificial Sequence: Synthetic oligonucleotide
  Target: LAMA2; (+) strand; PAM type: NRG; PAM sequence: AGG
gtggtagaaagaaagaagga

SEQ ID NO: 178849 - DNA, 20 bp, Artificial Sequence
  Description of Artificial Sequence: Synthetic oligonucleotide
  Target: LAMA2; (+) strand; PAM type: NRG; PAM sequence: GGG
tggtagaaagaaagaaggaa

SEQ ID NO: 178850 - DNA, 20 bp, Artificial Sequence
  Description of Artificial Sequence: Synthetic oligonucleotide
  Target: LAMA2; (+) strand; PAM type: NRG; PAM sequence: CAG
tagaaagaaagaaggaaggg

SEQ ID NO: 178851 - DNA, 20 bp, Artificial Sequence
  Description of Artificial Sequence: Synthetic oligonucleotide
  Target: LAMA2; (+) strand; PAM type: NRG; PAM sequence: AAG
ggcagttttcttgtttgaac

SEQ ID NO: 178852 - DNA, 20 bp, Artificial Sequence
  Description of Artificial Sequence: Synthetic oligonucleotide
  Target: LAMA2; (+) strand; PAM type: NRG; PAM sequence: AAG
gttttcttgtttgaacaaga

SEQ ID NO: 178853 - DNA, 20 bp, Artificial Sequence
  Description of Artificial Sequence: Synthetic oligonucleotide
  Target: LAMA2; (+) strand; PAM type: NRG; PAM sequence: AGG
ttttcttgtttgaacaagaa

SEQ ID NO: 178854 - DNA, 20 bp, Artificial Sequence
  Description of Artificial Sequence: Synthetic oligonucleotide
  Target: LAMA2; (+) strand; PAM type: NRG; PAM sequence: TAG
ggcttgaactcaaacctttt

SEQ ID NO: 178855 - DNA, 20 bp, Artificial Sequence
  Description of Artificial Sequence: Synthetic oligonucleotide
  Target: LAMA2; (+) strand; PAM type: NRG; PAM sequence: CAG
tcaaacctttttagatacct

SEQ ID NO: 178856 - DNA, 20 bp, Artificial Sequence
  Description of Artificial Sequence: Synthetic oligonucleotide
  Target: LAMA2; (+) strand; PAM type: NRG; PAM sequence: TGG
ttctgttttttgaacaactt

SEQ ID NO: 178857 - DNA, 20 bp, Artificial Sequence
  Description of Artificial Sequence: Synthetic oligonucleotide
  Target: LAMA2; (+) strand; PAM type: NRG; PAM sequence: TAG
tttttgaacaactttggaac

SEQ ID NO: 178858 - DNA, 20 bp, Artificial Sequence
  Description of Artificial Sequence: Synthetic oligonucleotide
  Target: LAMA2; (+) strand; PAM type: NRG; PAM sequence: AGG
ttttgaacaactttggaact

SEQ ID NO: 178859 - DNA, 20 bp, Artificial Sequence
  Description of Artificial Sequence: Synthetic oligonucleotide
  Target: LAMA2; (+) strand; PAM type: NRG; PAM sequence: CAG
aactttggaactaggatgat

SEQ ID NO: 178860 - DNA, 20 bp, Artificial Sequence
  Description of Artificial Sequence: Synthetic oligonucleotide
  Target: LAMA2; (+) strand; PAM type: NRG; PAM sequence: AAG
tggaactaggatgatcagaa

SEQ ID NO: 178861 - DNA, 20 bp, Artificial Sequence
  Description of Artificial Sequence: Synthetic oligonucleotide
  Target: LAMA2; (+) strand; PAM type: NRG; PAM sequence: TAG
tgatcagaaaagccctttct

SEQ ID NO: 178862 - DNA, 20 bp, Artificial Sequence
  Description of Artificial Sequence: Synthetic oligonucleotide
  Target: LAMA2; (+) strand; PAM type: NRG; PAM sequence: CAG
aaagccctttcttagttcat

SEQ ID NO: 178863 - DNA, 20 bp, Artificial Sequence
  Description of Artificial Sequence: Synthetic oligonucleotide
  Target: LAMA2; (+) strand; PAM type: NRG; PAM sequence: TAG
agttcatcagtttatatttt

SEQ ID NO: 178864 - DNA, 20 bp, Artificial Sequence
  Description of Artificial Sequence: Synthetic oligonucleotide
  Target: LAMA2; (+) strand; PAM type: NRG; PAM sequence: TAG
tcatcagtttatatttttag

SEQ ID NO: 178865 - DNA, 20 bp, Artificial Sequence
  Description of Artificial Sequence: Synthetic oligonucleotide
  Target: LAMA2; (+) strand; PAM type: NRG; PAM sequence: AAG
ttatatttttagtagtattt

SEQ ID NO: 178866 - DNA, 20 bp, Artificial Sequence
  Description of Artificial Sequence: Synthetic oligonucleotide
  Target: LAMA2; (+) strand; PAM type: NRG; PAM sequence: CAG
tatttaagaatacgatgctc

SEQ ID NO: 178867 - DNA, 20 bp, Artificial Sequence
  Description of Artificial Sequence: Synthetic oligonucleotide
  Target: LAMA2; (+) strand; PAM type: NRG; PAM sequence: CAG
agaatacgatgctccagtaa

SEQ ID NO: 178868 - DNA, 20 bp, Artificial Sequence
  Description of Artificial Sequence: Synthetic oligonucleotide
  Target: LAMA2; (+) strand; PAM type: NRG; PAM sequence: AAG
taacacttctaaacaactcc

SEQ ID NO: 178869 - DNA, 20 bp, Artificial Sequence
  Description of Artificial Sequence: Synthetic oligonucleotide
  Target: LAMA2; (+) strand; PAM type: NRG; PAM sequence: CAG
acttctaaacaactccaaga

SEQ ID NO: 178870 - DNA, 20 bp, Artificial Sequence
  Description of Artificial Sequence: Synthetic oligonucleotide
  Target: LAMA2; (+) strand; PAM type: NRG; PAM sequence: AAG
ctaaacaactccaagacagt

SEQ ID NO: 178871 - DNA, 20 bp, Artificial Sequence
  Description of Artificial Sequence: Synthetic oligonucleotide
  Target: LAMA2; (+) strand; PAM type: NRG; PAM sequence: AAG
aactccaagacagtaagttc

SEQ ID NO: 178872 - DNA, 20 bp, Artificial Sequence
  Description of Artificial Sequence: Synthetic oligonucleotide
  Target: LAMA2; (+) strand; PAM type: NRG; PAM sequence: AGG
actccaagacagtaagttca

SEQ ID NO: 178873 - DNA, 20 bp, Artificial Sequence
  Description of Artificial Sequence: Synthetic oligonucleotide
  Target: LAMA2; (+) strand; PAM type: NRG; PAM sequence: AAG
agttcaaggtgaacattgaa

SEQ ID NO: 178874 - DNA, 20 bp, Artificial Sequence
  Description of Artificial Sequence: Synthetic oligonucleotide
  Target: LAMA2; (+) strand; PAM type: NRG; PAM sequence: AGG
gttcaaggtgaacattgaaa

SEQ ID NO: 178875 - DNA, 20 bp, Artificial Sequence
  Description of Artificial Sequence: Synthetic oligonucleotide
  Target: LAMA2; (+) strand; PAM type: NRG; PAM sequence: TAG
cgactgactgaaaaaaaacc

SEQ ID NO: 178876 - DNA, 20 bp, Artificial Sequence
  Description of Artificial Sequence: Synthetic oligonucleotide
  Target: LAMA2; (+) strand; PAM type: NRG; PAM sequence: AAG
aaaacctagaaaacaacaaa

SEQ ID NO: 178877 - DNA, 20 bp, Artificial Sequence
  Description of Artificial Sequence: Synthetic oligonucleotide
  Target: LAMA2; (+) strand; PAM type: NRG; PAM sequence: TAG
ctagaaaacaacaaaaagat

SEQ ID NO: 178878 - DNA, 20 bp, Artificial Sequence
  Description of Artificial Sequence: Synthetic oligonucleotide
  Target: LAMA2; (+) strand; PAM type: NRG; PAM sequence: AAG
aaacaacaaaaagattagtg

SEQ ID NO: 178879 - DNA, 20 bp, Artificial Sequence
  Description of Artificial Sequence: Synthetic oligonucleotide
  Target: LAMA2; (+) strand; PAM type: NRG; PAM sequence: AAG
tagtgaagatgatgttacat

SEQ ID NO: 178880 - DNA, 20 bp, Artificial Sequence
  Description of Artificial Sequence: Synthetic oligonucleotide
  Target: LAMA2; (+) strand; PAM type: NRG; PAM sequence: CAG
aagatgatgttacataagat

SEQ ID NO: 178881 - DNA, 20 bp, Artificial Sequence
  Description of Artificial Sequence: Synthetic oligonucleotide
  Target: LAMA2; (+) strand; PAM type: NRG; PAM sequence: GAG
gatgatgttacataagatca

SEQ ID NO: 178882 - DNA, 20 bp, Artificial Sequence
  Description of Artificial Sequence: Synthetic oligonucleotide
  Target: LAMA2; (+) strand; PAM type: NRG; PAM sequence: TAG
gatgttacataagatcagag

SEQ ID NO: 178883 - DNA, 20 bp, Artificial Sequence
  Description of Artificial Sequence: Synthetic oligonucleotide
  Target: LAMA2; (+) strand; PAM type: NRG; PAM sequence: CAG
ataagatcagagtagtaaat

SEQ ID NO: 178884 - DNA, 20 bp, Artificial Sequence
  Description of Artificial Sequence: Synthetic oligonucleotide
  Target: LAMA2; (+) strand; PAM type: NRG; PAM sequence: AAG
cagagtagtaaatcagtgaa

SEQ ID NO: 178885 - DNA, 20 bp, Artificial Sequence
  Description of Artificial Sequence: Synthetic oligonucleotide
  Target: LAMA2; (+) strand; PAM type: NRG; PAM sequence: GAG
gtaaatcagtgaaaagatct

SEQ ID NO: 178886 - DNA, 20 bp, Artificial Sequence
  Description of Artificial Sequence: Synthetic oligonucleotide
  Target: LAMA2; (+) strand; PAM type: NRG; PAM sequence: CAG
gatctgagaaaacatatatt

SEQ ID NO: 178887 - DNA, 20 bp, Artificial Sequence
  Description of Artificial Sequence: Synthetic oligonucleotide
  Target: LAMA2; (+) strand; PAM type: NRG; PAM sequence: TAG
tgagaaaacatatattcagc

SEQ ID NO: 178888 - DNA, 20 bp, Artificial Sequence
  Description of Artificial Sequence: Synthetic oligonucleotide
  Target: LAMA2; (+) strand; PAM type: NRG; PAM sequence: AAG
tatattcagctagaatatga

SEQ ID NO: 178889 - DNA, 20 bp, Artificial Sequence
  Description of Artificial Sequence: Synthetic oligonucleotide
  Target: LAMA2; (+) strand; PAM type: NRG; PAM sequence: CAG
ttcagctagaatatgaaagc

SEQ ID NO: 178890 - DNA, 20 bp, Artificial Sequence
  Description of Artificial Sequence: Synthetic oligonucleotide
  Target: LAMA2; (+) strand; PAM type: NRG; PAM sequence: AGG
tcagctagaatatgaaagcc

SEQ ID NO: 178891 - DNA, 20 bp, Artificial Sequence
  Description of Artificial Sequence: Synthetic oligonucleotide
  Target: LAMA2; (+) strand; PAM type: NRG; PAM sequence: CAG
gctagaatatgaaagccagg

SEQ ID NO: 178892 - DNA, 20 bp, Artificial Sequence
  Description of Artificial Sequence: Synthetic oligonucleotide
  Target: LAMA2; (+) strand; PAM type: NRG; PAM sequence: AAG
atgtgatcattatgtatgta

SEQ ID NO: 178893 - DNA, 20 bp, Artificial Sequence
  Description of Artificial Sequence: Synthetic oligonucleotide
  Target: LAMA2; (+) strand; PAM type: NRG; PAM sequence: AAG
tcattatgtatgtaaagcac

SEQ ID NO: 178894 - DNA, 20 bp, Artificial Sequence
  Description of Artificial Sequence: Synthetic oligonucleotide
  Target: LAMA2; (+) strand; PAM type: NRG; PAM sequence: AAG
tatgtaaagcacaagattaa

SEQ ID NO: 178895 - DNA, 20 bp, Artificial Sequence
  Description of Artificial Sequence: Synthetic oligonucleotide
  Target: LAMA2; (+) strand; PAM type: NRG; PAM sequence: CAG
agcacaagattaaaagaaac

SEQ ID NO: 178896 - DNA, 20 bp, Artificial Sequence
  Description of Artificial Sequence: Synthetic oligonucleotide
  Target: LAMA2; (+) strand; PAM type: NRG; PAM sequence: AAG
aagaaaccagatgttacttc

SEQ ID NO: 178897 - DNA, 20 bp, Artificial Sequence
  Description of Artificial Sequence: Synthetic oligonucleotide
  Target: LAMA2; (+) strand; PAM type: NRG; PAM sequence: AGG
agaaaccagatgttacttca

SEQ ID NO: 178898 - DNA, 20 bp, Artificial Sequence
  Description of Artificial Sequence: Synthetic oligonucleotide
  Target: LAMA2; (+) strand; PAM type: NRG; PAM sequence: AAG
agatgttacttcaaggtttg

SEQ ID NO: 178899 - DNA, 20 bp, Artificial Sequence
  Description of Artificial Sequence: Synthetic oligonucleotide
  Target: LAMA2; (+) strand; PAM type: NRG; PAM sequence: AAG
caaggtttgaagttttatgt

SEQ ID NO: 178900 - DNA, 20 bp, Artificial Sequence
  Description of Artificial Sequence: Synthetic oligonucleotide
  Target: LAMA2; (+) strand; PAM type: NRG; PAM sequence: TAG
ttgaagttttatgtaagatt

SEQ ID NO: 178901 - DNA, 20 bp, Artificial Sequence
  Description of Artificial Sequence: Synthetic oligonucleotide
  Target: LAMA2; (+) strand; PAM type: NRG; PAM sequence: TGG
tatgtaagatttagccaaca

SEQ ID NO: 178902 - DNA, 20 bp, Artificial Sequence
  Description of Artificial Sequence: Synthetic oligonucleotide
  Target: LAMA2; (+) strand; PAM type: NRG; PAM sequence: AAG
agatttagccaacatggaaa

SEQ ID NO: 178903 - DNA, 20 bp, Artificial Sequence
  Description of Artificial Sequence: Synthetic oligonucleotide
  Target: LAMA2; (+) strand; PAM type: NRG; PAM sequence: CAG
gaaaaagcctctactatgtt

SEQ ID NO: 178904 - DNA, 20 bp, Artificial Sequence
  Description of Artificial Sequence: Synthetic oligonucleotide
  Target: LAMA2; (+) strand; PAM type: NRG; PAM sequence: AAG
tgttcagtgttactttccgt

SEQ ID NO: 178905 - DNA, 20 bp, Artificial Sequence
  Description of Artificial Sequence: Synthetic oligonucleotide
  Target: LAMA2; (+) strand; PAM type: NRG; PAM sequence: AGG
gttcagtgttactttccgta

SEQ ID NO: 178906 - DNA, 20 bp, Artificial Sequence
  Description of Artificial Sequence: Synthetic oligonucleotide
  Target: LAMA2; (+) strand; PAM type: NRG; PAM sequence: AAG
tactttccgtaaggtacaca

SEQ ID NO: 178907 - DNA, 20 bp, Artificial Sequence
  Description of Artificial Sequence: Synthetic oligonucleotide
  Target: LAMA2; (+) strand; PAM type: NRG; PAM sequence: AAG
aaggtacacaaagacgaata

SEQ ID NO: 178908 - DNA, 20 bp, Artificial Sequence
  Description of Artificial Sequence: Synthetic oligonucleotide
  Target: LAMA2; (+) strand; PAM type: NRG; PAM sequence: AGG
aggtacacaaagacgaataa

SEQ ID NO: 178909 - DNA, 20 bp, Artificial Sequence
  Description of Artificial Sequence: Synthetic oligonucleotide
  Target: LAMA2; (+) strand; PAM type: NRG; PAM sequence: GAG
gtacacaaagacgaataaag

SEQ ID NO: 178910 - DNA, 20 bp, Artificial Sequence
  Description of Artificial Sequence: Synthetic oligonucleotide
  Target: LAMA2; (+) strand; PAM type: NRG; PAM sequence: AAG
aaggagttctttcactcaca

SEQ ID NO: 178911 - DNA, 20 bp, Artificial Sequence
  Description of Artificial Sequence: Synthetic oligonucleotide
  Target: LAMA2; (+) strand; PAM type: NRG; PAM sequence: TAG
cactcacaaagtttataaaa

SEQ ID NO: 178912 - DNA, 20 bp, Artificial Sequence
  Description of Artificial Sequence: Synthetic oligonucleotide
  Target: LAMA2; (+) strand; PAM type: NRG; PAM sequence: TAG
tcacaaagtttataaaatag

SEQ ID NO: 178913 - DNA, 20 bp, Artificial Sequence
  Description of Artificial Sequence: Synthetic oligonucleotide
  Target: LAMA2; (+) strand; PAM type: NRG; PAM sequence: AGG
cacaaagtttataaaatagt

SEQ ID NO: 178914 - DNA, 20 bp, Artificial Sequence
  Description of Artificial Sequence: Synthetic oligonucleotide
  Target: LAMA2; (+) strand; PAM type: NRG; PAM sequence: GGG
acaaagtttataaaatagta

SEQ ID NO: 178915 - DNA, 20 bp, Artificial Sequence
  Description of Artificial Sequence: Synthetic oligonucleotide
  Target: LAMA2; (+) strand; PAM type: NRG; PAM sequence: CAG
acgtaccttgtcacacaatg

SEQ ID NO: 178916 - DNA, 20 bp, Artificial Sequence
  Description of Artificial Sequence: Synthetic oligonucleotide
  Target: LAMA2; (+) strand; PAM type: NRG; PAM sequence: TAG
cagaatgttatgccacatta

SEQ ID NO: 178917 - DNA, 20 bp, Artificial Sequence
  Description of Artificial Sequence: Synthetic oligonucleotide
  Target: LAMA2; (+) strand; PAM type: NRG; PAM sequence: AAG
aatgttatgccacattatag

SEQ ID NO: 178918 - DNA, 20 bp, Artificial Sequence
  Description of Artificial Sequence: Synthetic oligonucleotide
  Target: LAMA2; (+) strand; PAM type: NRG; PAM sequence: GAG
tgccacattatagaagccgt

SEQ ID NO: 178919 - DNA, 20 bp, Artificial Sequence
  Description of Artificial Sequence: Synthetic oligonucleotide
  Target: LAMA2; (+) strand; PAM type: NRG; PAM sequence: AAG
cacattatagaagccgtgag

SEQ ID NO: 178920 - DNA, 20 bp, Artificial Sequence
  Description of Artificial Sequence: Synthetic oligonucleotide
  Target: LAMA2; (+) strand; PAM type: NRG; PAM sequence: AAG
agccgtgagaagtgacataa

SEQ ID NO: 178921 - DNA, 20 bp, Artificial Sequence
  Description of Artificial Sequence: Synthetic oligonucleotide
  Target: LAMA2; (+) strand; PAM type: NRG; PAM sequence: TAG
gagaagtgacataaaagttc

SEQ ID NO: 178922 - DNA, 20 bp, Artificial Sequence
  Description of Artificial Sequence: Synthetic oligonucleotide
  Target: LAMA2; (+) strand; PAM type: NRG; PAM sequence: AAG
agtgacataaaagttctaga

SEQ ID NO: 178923 - DNA, 20 bp, Artificial Sequence
  Description of Artificial Sequence: Synthetic oligonucleotide
  Target: LAMA2; (+) strand; PAM type: NRG; PAM sequence: TAG
ctagaaagaacaatcacctc

SEQ ID NO: 178924 - DNA, 20 bp, Artificial Sequence
  Description of Artificial Sequence: Synthetic oligonucleotide
  Target: LAMA2; (+) strand; PAM type: NRG; PAM sequence: TAG
gaaagaacaatcacctctag

SEQ ID NO: 178925 - DNA, 20 bp, Artificial Sequence
  Description of Artificial Sequence: Synthetic oligonucleotide
  Target: LAMA2; (+) strand; PAM type: NRG; PAM sequence: AGG
aaagaacaatcacctctagt

SEQ ID NO: 178926 - DNA, 20 bp, Artificial Sequence
  Description of Artificial Sequence: Synthetic oligonucleotide
  Target: LAMA2; (+) strand; PAM type: NRG; PAM sequence: GGG
aagaacaatcacctctagta

SEQ ID NO: 178927 - DNA, 20 bp, Artificial Sequence
  Description of Artificial Sequence: Synthetic oligonucleotide
  Target: LAMA2; (+) strand; PAM type: NRG; PAM sequence: AAG
atcacctctagtagggcctg

SEQ ID NO: 178928 - DNA, 20 bp, Artificial Sequence
  Description of Artificial Sequence: Synthetic oligonucleotide
  Target: LAMA2; (+) strand; PAM type: NRG; PAM sequence: AAG
tagggcctgaagatttcctg

SEQ ID NO: 178929 - DNA, 20 bp, Artificial Sequence
  Description of Artificial Sequence: Synthetic oligonucleotide
  Target: LAMA2; (+) strand; PAM type: NRG; PAM sequence: AGG
agggcctgaagatttcctga

SEQ ID NO: 178930 - DNA, 20 bp, Artificial Sequence
  Description of Artificial Sequence: Synthetic oligonucleotide
  Target: LAMA2; (+) strand; PAM type: NRG; PAM sequence: GGG
gggcctgaagatttcctgaa

SEQ ID NO: 178931 - DNA, 20 bp, Artificial Sequence
  Description of Artificial Sequence: Synthetic oligonucleotide
  Target: LAMA2; (+) strand; PAM type: NRG; PAM sequence: AAG
cctgaagatttcctgaaggg

SEQ ID NO: 178932 - DNA, 20 bp, Artificial Sequence
  Description of Artificial Sequence: Synthetic oligonucleotide
  Target: LAMA2; (+) strand; PAM type: NRG; PAM sequence: AGG
ctgaagatttcctgaaggga

SEQ ID NO: 178933 - DNA, 20 bp, Artificial Sequence
  Description of Artificial Sequence: Synthetic oligonucleotide
  Target: LAMA2; (+) strand; PAM type: NRG; PAM sequence: GAG
tttcctgaagggaaggattt

SEQ ID NO: 178934 - DNA, 20 bp, Artificial Sequence
  Description of Artificial Sequence: Synthetic oligonucleotide
  Target: LAMA2; (+) strand; PAM type: NRG; PAM sequence: CAG
ctgaagggaaggatttgagc

SEQ ID NO: 178935 - DNA, 20 bp, Artificial Sequence
  Description of Artificial Sequence: Synthetic oligonucleotide
  Target: LAMA2; (+) strand; PAM type: NRG; PAM sequence: AGG
tgaagggaaggatttgagcc

SEQ ID NO: 178936 - DNA, 20 bp, Artificial Sequence
  Description of Artificial Sequence: Synthetic oligonucleotide
  Target: LAMA2; (+) strand; PAM type: NRG; PAM sequence: GAG
aaggatttgagccaggcatt

SEQ ID NO: 178937 - DNA, 20 bp, Artificial Sequence
  Description of Artificial Sequence: Synthetic oligonucleotide
  Target: LAMA2; (+) strand; PAM type: NRG; PAM sequence: AGG
aggatttgagccaggcattg

SEQ ID NO: 178938 - DNA, 20 bp, Artificial Sequence
  Description of Artificial Sequence: Synthetic oligonucleotide
  Target: LAMA2; (+) strand; PAM type: NRG; PAM sequence: TGG
atttgagccaggcattgagg

SEQ ID NO: 178939 - DNA, 20 bp, Artificial Sequence
  Description of Artificial Sequence: Synthetic oligonucleotide
  Target: LAMA2; (+) strand; PAM type: NRG; PAM sequence: GGG
tttgagccaggcattgaggt

SEQ ID NO: 178940 - DNA, 20 bp, Artificial Sequence
  Description of Artificial Sequence: Synthetic oligonucleotide
  Target: LAMA2; (+) strand; PAM type: NRG; PAM sequence: TAG
agccaggcattgaggtggga

SEQ ID NO: 178941 - DNA, 20 bp, Artificial Sequence
  Description of Artificial Sequence: Synthetic oligonucleotide
  Target: LAMA2; (+) strand; PAM type: NRG; PAM sequence: TGG
gcattgaggtgggatagtgc

SEQ ID NO: 178942 - DNA, 20 bp, Artificial Sequence
  Description of Artificial Sequence: Synthetic oligonucleotide
  Target: LAMA2; (+) strand; PAM type: NRG; PAM sequence: GGG
cattgaggtgggatagtgct

SEQ ID NO: 178943 - DNA, 20 bp, Artificial Sequence
  Description of Artificial Sequence: Synthetic oligonucleotide
  Target: LAMA2; (+) strand; PAM type: NRG; PAM sequence: GGG
attgaggtgggatagtgctg

SEQ ID NO: 178944 - DNA, 20 bp, Artificial Sequence
  Description of Artificial Sequence: Synthetic oligonucleotide
  Target: LAMA2; (+) strand; PAM type: NRG; PAM sequence: GAG
tgaggtgggatagtgctggg

SEQ ID NO: 178945 - DNA, 20 bp, Artificial Sequence
  Description of Artificial Sequence: Synthetic oligonucleotide
  Target: LAMA2; (+) strand; PAM type: NRG; PAM sequence: TGG
gtgggatagtgctggggagt

SEQ ID NO: 178946 - DNA, 20 bp, Artificial Sequence
  Description of Artificial Sequence: Synthetic oligonucleotide
  Target: LAMA2; (+) strand; PAM type: NRG; PAM sequence: GGG
tgggatagtgctggggagtt

SEQ ID NO: 178947 - DNA, 20 bp, Artificial Sequence
  Description of Artificial Sequence: Synthetic oligonucleotide
  Target: LAMA2; (+) strand; PAM type: NRG; PAM sequence: GGG
gggatagtgctggggagttg

SEQ ID NO: 178948 - DNA, 20 bp, Artificial Sequence
  Description of Artificial Sequence: Synthetic oligonucleotide
  Target: LAMA2; (+) strand; PAM type: NRG; PAM sequence: GGG
ggatagtgctggggagttgg

SEQ ID NO: 178949 - DNA, 20 bp, Artificial Sequence
  Description of Artificial Sequence: Synthetic oligonucleotide
  Target: LAMA2; (+) strand; PAM type: NRG; PAM sequence: TGG
tagtgctggggagttggggg

SEQ ID NO: 178950 - DNA, 20 bp, Artificial Sequence
  Description of Artificial Sequence: Synthetic oligonucleotide
  Target: LAMA2; (+) strand; PAM type: NRG; PAM sequence: GAG
gtgctggggagttgggggtg

SEQ ID NO: 178951 - DNA, 20 bp, Artificial Sequence
  Description of Artificial Sequence: Synthetic oligonucleotide
  Target: LAMA2; (+) strand; PAM type: NRG; PAM sequence: CAG
tggggagttgggggtggagt

SEQ ID NO: 178952 - DNA, 20 bp, Artificial Sequence
  Description of Artificial Sequence: Synthetic oligonucleotide
  Target: LAMA2; (+) strand; PAM type: NRG; PAM sequence: AGG
ggggagttgggggtggagtc

SEQ ID NO: 178953 - DNA, 20 bp, Artificial Sequence
  Description of Artificial Sequence: Synthetic oligonucleotide
  Target: LAMA2; (+) strand; PAM type: NRG; PAM sequence: CAG
ttgggggtggagtcaggtaa

SEQ ID NO: 178954 - DNA, 20 bp, Artificial Sequence
  Description of Artificial Sequence: Synthetic oligonucleotide
  Target: LAMA2; (+) strand; PAM type: NRG; PAM sequence: AGG
tgggggtggagtcaggtaac

SEQ ID NO: 178955 - DNA, 20 bp, Artificial Sequence
  Description of Artificial Sequence: Synthetic oligonucleotide
  Target: LAMA2; (+) strand; PAM type: NRG; PAM sequence: GGG
gggggtggagtcaggtaaca

SEQ ID NO: 178956 - DNA, 20 bp, Artificial Sequence
  Description of Artificial Sequence: Synthetic oligonucleotide
  Target: LAMA2; (+) strand; PAM type: NRG; PAM sequence: GAG
gggtggagtcaggtaacagg

SEQ ID NO: 178957 - DNA, 20 bp, Artificial Sequence
  Description of Artificial Sequence: Synthetic oligonucleotide
  Target: LAMA2; (+) strand; PAM type: NRG; PAM sequence: GAG
gtggagtcaggtaacaggga

SEQ ID NO: 178958 - DNA, 20 bp, Artificial Sequence
  Description of Artificial Sequence: Synthetic oligonucleotide
  Target: LAMA2; (+) strand; PAM type: NRG; PAM sequence: GAG
ggtaacagggagagtattct

SEQ ID NO: 178959 - DNA, 20 bp, Artificial Sequence
  Description of Artificial Sequence: Synthetic oligonucleotide
  Target: LAMA2; (+) strand; PAM type: NRG; PAM sequence: AAG
aacagggagagtattctgag

SEQ ID NO: 178960 - DNA, 20 bp, Artificial Sequence
  Description of Artificial Sequence: Synthetic oligonucleotide
  Target: LAMA2; (+) strand; PAM type: NRG; PAM sequence: GAG
cagggagagtattctgagaa

SEQ ID NO: 178961 - DNA, 20 bp, Artificial Sequence
  Description of Artificial Sequence: Synthetic oligonucleotide
  Target: LAMA2; (+) strand; PAM type: NRG; PAM sequence: AGG
agggagagtattctgagaag

SEQ ID NO: 178962 - DNA, 20 bp, Artificial Sequence
  Description of Artificial Sequence: Synthetic oligonucleotide
  Target: LAMA2; (+) strand; PAM type: NRG; PAM sequence: GGG
gggagagtattctgagaaga

SEQ ID NO: 178963 - DNA, 20 bp, Artificial Sequence
  Description of Artificial Sequence: Synthetic oligonucleotide
  Target: LAMA2; (+) strand; PAM type: NRG; PAM sequence: AAG
aagagggaatgacttaaacc

SEQ ID NO: 178964 - DNA, 20 bp, Artificial Sequence
  Description of Artificial Sequence: Synthetic oligonucleotide
  Target: LAMA2; (+) strand; PAM type: NRG; PAM sequence: AGG
agagggaatgacttaaacca

SEQ ID NO: 178965 - DNA, 20 bp, Artificial Sequence
  Description of Artificial Sequence: Synthetic oligonucleotide
  Target: LAMA2; (+) strand; PAM type: NRG; PAM sequence: CAG
gggaatgacttaaaccaagg

SEQ ID NO: 178966 - DNA, 20 bp, Artificial Sequence
  Description of Artificial Sequence: Synthetic oligonucleotide
  Target: LAMA2; (+) strand; PAM type: NRG; PAM sequence: TGG
aatgacttaaaccaaggcag

SEQ ID NO: 178967 - DNA, 20 bp, Artificial Sequence
  Description of Artificial Sequence: Synthetic oligonucleotide
  Target: LAMA2; (+) strand; PAM type: NRG; PAM sequence: GGG
atgacttaaaccaaggcagt

SEQ ID NO: 178968 - DNA, 20 bp, Artificial Sequence
  Description of Artificial Sequence: Synthetic oligonucleotide
  Target: LAMA2; (+) strand; PAM type: NRG; PAM sequence: GAG
gacttaaaccaaggcagtgg

SEQ ID NO: 178969 - DNA, 20 bp, Artificial Sequence
  Description of Artificial Sequence: Synthetic oligonucleotide
  Target: LAMA2; (+) strand; PAM type: NRG; PAM sequence: AAG
ttaaaccaaggcagtgggag

SEQ ID NO: 178970 - DNA, 20 bp, Artificial Sequence
  Description of Artificial Sequence: Synthetic oligonucleotide
  Target: LAMA2; (+) strand; PAM type: NRG; PAM sequence: AGG
taaaccaaggcagtgggaga

SEQ ID NO: 178971 - DNA, 20 bp, Artificial Sequence
  Description of Artificial Sequence: Synthetic oligonucleotide
  Target: LAMA2; (+) strand; PAM type: NRG; PAM sequence: AAG
accaaggcagtgggagaagg

SEQ ID NO: 178972 - DNA, 20 bp, Artificial Sequence
  Description of Artificial Sequence: Synthetic oligonucleotide
  Target: LAMA2; (+) strand; PAM type: NRG; PAM sequence: TAG
gcagtgggagaaggaagttt

SEQ ID NO: 178973 - DNA, 20 bp, Artificial Sequence
  Description of Artificial Sequence: Synthetic oligonucleotide
  Target: LAMA2; (+) strand; PAM type: NRG; PAM sequence: AGG
cagtgggagaaggaagtttt

SEQ ID NO: 178974 - DNA, 20 bp, Artificial Sequence
  Description of Artificial Sequence: Synthetic oligonucleotide
  Target: LAMA2; (+) strand; PAM type: NRG; PAM sequence: GGG
agtgggagaaggaagtttta

SEQ ID NO: 178975 - DNA, 20 bp, Artificial Sequence
  Description of Artificial Sequence: Synthetic oligonucleotide
  Target: LAMA2; (+) strand; PAM type: NRG; PAM sequence: TAG
aggaagttttagggtccatt

SEQ ID NO: 178976 - DNA, 20 bp, Artificial Sequence
  Description of Artificial Sequence: Synthetic oligonucleotide
  Target: LAMA2; (+) strand; PAM type: NRG; PAM sequence: AGG
ggaagttttagggtccattt

SEQ ID NO: 178977 - DNA, 20 bp, Artificial Sequence
  Description of Artificial Sequence: Synthetic oligonucleotide
  Target: LAMA2; (+) strand; PAM type: NRG; PAM sequence: AAG
tttagggtccatttaggaaa

SEQ ID NO: 178978 - DNA, 20 bp, Artificial Sequence
  Description of Artificial Sequence: Synthetic oligonucleotide
  Target: LAMA2; (+) strand; PAM type: NRG; PAM sequence: AAG
agggtccatttaggaaaaag

SEQ ID NO: 178979 - DNA, 20 bp, Artificial Sequence
  Description of Artificial Sequence: Synthetic oligonucleotide
  Target: LAMA2; (+) strand; PAM type: NRG; PAM sequence: CAG
ccatttaggaaaaagaagtc

SEQ ID NO: 178980 - DNA, 20 bp, Artificial Sequence
  Description of Artificial Sequence: Synthetic oligonucleotide
  Target: LAMA2; (+) strand; PAM type: NRG; PAM sequence: CAG
aaaaagaagtccagtttgcc

SEQ ID NO: 178981 - DNA, 20 bp, Artificial Sequence
  Description of Artificial Sequence: Synthetic oligonucleotide
  Target: LAMA2; (+) strand; PAM type: NRG; PAM sequence: GAG
aaagaagtccagtttgccca

SEQ ID NO: 178982 - DNA, 20 bp, Artificial Sequence
  Description of Artificial Sequence: Synthetic oligonucleotide
  Target: LAMA2; (+) strand; PAM type: NRG; PAM sequence: AAG
tttgcccagagtaattgata

SEQ ID NO: 178983 - DNA, 20 bp, Artificial Sequence
  Description of Artificial Sequence: Synthetic oligonucleotide
  Target: LAMA2; (+) strand; PAM type: NRG; PAM sequence: AGG
ttgcccagagtaattgataa

SEQ ID NO: 178984 - DNA, 20 bp, Artificial Sequence
  Description of Artificial Sequence: Synthetic oligonucleotide
  Target: LAMA2; (+) strand; PAM type: NRG; PAM sequence: CAG
tgataaaggaaacacataac

SEQ ID NO: 178985 - DNA, 20 bp, Artificial Sequence
  Description of Artificial Sequence: Synthetic oligonucleotide
  Target: LAMA2; (+) strand; PAM type: NRG; PAM sequence: AAG
aaaggaaacacataaccaga

SEQ ID NO: 178986 - DNA, 20 bp, Artificial Sequence
  Description of Artificial Sequence: Synthetic oligonucleotide
  Target: LAMA2; (+) strand; PAM type: NRG; PAM sequence: CAG
cacataaccagaaagatcaa

SEQ ID NO: 178987 - DNA, 20 bp, Artificial Sequence
  Description of Artificial Sequence: Synthetic oligonucleotide
  Target: LAMA2; (+) strand; PAM type: NRG; PAM sequence: GAG
cataaccagaaagatcaaca

SEQ ID NO: 178988 - DNA, 20 bp, Artificial Sequence
  Description of Artificial Sequence: Synthetic oligonucleotide
  Target: LAMA2; (+) strand; PAM type: NRG; PAM sequence: AGG
ataaccagaaagatcaacag

SEQ ID NO: 178989 - DNA, 20 bp, Artificial Sequence
  Description of Artificial Sequence: Synthetic oligonucleotide
  Target: LAMA2; (+) strand; PAM type: NRG; PAM sequence: CAG
ccagaaagatcaacagaggc

SEQ ID NO: 178990 - DNA, 20 bp, Artificial Sequence
  Description of Artificial Sequence: Synthetic oligonucleotide
  Target: LAMA2; (+) strand; PAM type: NRG; PAM sequence: AGG
cagaaagatcaacagaggcc

SEQ ID NO: 178991 - DNA, 20 bp, Artificial Sequence
  Description of Artificial Sequence: Synthetic oligonucleotide
  Target: LAMA2; (+) strand; PAM type: NRG; PAM sequence: CAG
caacagaggccaggtctcgt

SEQ ID NO: 178992 - DNA, 20 bp, Artificial Sequence
  Description of Artificial Sequence: Synthetic oligonucleotide
  Target: LAMA2; (+) strand; PAM type: NRG; PAM sequence: AGG
aacagaggccaggtctcgtc

SEQ ID NO: 178993 - DNA, 20 bp, Artificial Sequence
  Description of Artificial Sequence: Synthetic oligonucleotide
  Target: LAMA2; (+) strand; PAM type: NRG; PAM sequence: CAG
ctcgtcaggccttcaataat

SEQ ID NO: 178994 - DNA, 20 bp, Artificial Sequence
  Description of Artificial Sequence: Synthetic oligonucleotide
  Target: LAMA2; (+) strand; PAM type: NRG; PAM sequence: AAG
caggccttcaataatcagtt

SEQ ID NO: 178995 - DNA, 20 bp, Artificial Sequence
  Description of Artificial Sequence: Synthetic oligonucleotide
  Target: LAMA2; (+) strand; PAM type: NRG; PAM sequence: TGG
gcaatttcatttaacaacac

SEQ ID NO: 178996 - DNA, 20 bp, Artificial Sequence
  Description of Artificial Sequence: Synthetic oligonucleotide
  Target: LAMA2; (+) strand; PAM type: NRG; PAM sequence: TGG
catttaacaacactggtact

SEQ ID NO: 178997 - DNA, 20 bp, Artificial Sequence
  Description of Artificial Sequence: Synthetic oligonucleotide
  Target: LAMA2; (+) strand; PAM type: NRG; PAM sequence: GGG
atttaacaacactggtactt

SEQ ID NO: 178998 - DNA, 20 bp, Artificial Sequence
  Description of Artificial Sequence: Synthetic oligonucleotide
  Target: LAMA2; (+) strand; PAM type: NRG; PAM sequence: AAG
acaacactggtacttgggat

SEQ ID NO: 178999 - DNA, 20 bp, Artificial Sequence
  Description of Artificial Sequence: Synthetic oligonucleotide
  Target: LAMA2; (+) strand; PAM type: NRG; PAM sequence: TGG
gtacttgggataagcctcac

SEQ ID NO: 179000 - DNA, 20 bp, Artificial Sequence
  Description of Artificial Sequence: Synthetic oligonucleotide
  Target: LAMA2; (+) strand; PAM type: NRG; PAM sequence: TAG
ttgggataagcctcactggt

SEQ ID NO: 179001 - DNA, 20 bp, Artificial Sequence
  Description of Artificial Sequence: Synthetic oligonucleotide
  Target: LAMA2; (+) strand; PAM type: NRG; PAM sequence: AGG
tgggataagcctcactggtt

SEQ ID NO: 179002 - DNA, 20 bp, Artificial Sequence
  Description of Artificial Sequence: Synthetic oligonucleotide
  Target: LAMA2; (+) strand; PAM type: NRG; PAM sequence: AAG
taagcctcactggttaggat

SEQ ID NO: 179003 - DNA, 20 bp, Artificial Sequence
  Description of Artificial Sequence: Synthetic oligonucleotide
  Target: LAMA2; (+) strand; PAM type: NRG; PAM sequence: AAG
cactggttaggataagctga

SEQ ID NO: 179004 - DNA, 20 bp, Artificial Sequence
  Description of Artificial Sequence: Synthetic oligonucleotide
  Target: LAMA2; (+) strand; PAM type: NRG; PAM sequence: GAG
taggataagctgaaagcttt

SEQ ID NO: 179005 - DNA, 20 bp, Artificial Sequence
  Description of Artificial Sequence: Synthetic oligonucleotide
  Target: LAMA2; (+) strand; PAM type: NRG; PAM sequence: TGG
taagctgaaagctttgagca

SEQ ID NO: 179006 - DNA, 20 bp, Artificial Sequence
  Description of Artificial Sequence: Synthetic oligonucleotide
  Target: LAMA2; (+) strand; PAM type: NRG; PAM sequence: CAG
aaagctttgagcatggaaca

SEQ ID NO: 179007 - DNA, 20 bp, Artificial Sequence
  Description of Artificial Sequence: Synthetic oligonucleotide
  Target: LAMA2; (+) strand; PAM type: NRG; PAM sequence: CAG
agcatggaacacagtataat

SEQ ID NO: 179008 - DNA, 20 bp, Artificial Sequence
  Description of Artificial Sequence: Synthetic oligonucleotide
  Target: LAMA2; (+) strand; PAM type: NRG; PAM sequence: GAG
catggaacacagtataatca

SEQ ID NO: 179009 - DNA, 20 bp, Artificial Sequence
  Description of Artificial Sequence: Synthetic oligonucleotide
  Target: LAMA2; (+) strand; PAM type: NRG; PAM sequence: CAG
gtgctttttaaatataaatc

SEQ ID NO: 179010 - DNA, 20 bp, Artificial Sequence
  Description of Artificial Sequence: Synthetic oligonucleotide
  Target: LAMA2; (+) strand; PAM type: NRG; PAM sequence: AAG
ctttttaaatataaatccag

SEQ ID NO: 179011 - DNA, 20 bp, Artificial Sequence
  Description of Artificial Sequence: Synthetic oligonucleotide
  Target: LAMA2; (+) strand; PAM type: NRG; PAM sequence: CAG
tttaaatataaatccagaag

SEQ ID NO: 179012 - DNA, 20 bp, Artificial Sequence
  Description of Artificial Sequence: Synthetic oligonucleotide
  Target: LAMA2; (+) strand; PAM type: NRG; PAM sequence: TGG
ataaatccagaagcagtgta

SEQ ID NO: 179013 - DNA, 20 bp, Artificial Sequence
  Description of Artificial Sequence: Synthetic oligonucleotide
  Target: LAMA2; (+) strand; PAM type: NRG; PAM sequence: GGG
taaatccagaagcagtgtat

SEQ ID NO: 179014 - DNA, 20 bp, Artificial Sequence
  Description of Artificial Sequence: Synthetic oligonucleotide
  Target: LAMA2; (+) strand; PAM type: NRG; PAM sequence: GGG
aaatccagaagcagtgtatg

SEQ ID NO: 179015 - DNA, 20 bp, Artificial Sequence
  Description of Artificial Sequence: Synthetic oligonucleotide
  Target: LAMA2; (+) strand; PAM type: NRG; PAM sequence: TAG
tccagaagcagtgtatgggg

SEQ ID NO: 179016 - DNA, 20 bp, Artificial Sequence
  Description of Artificial Sequence: Synthetic oligonucleotide
  Target: LAMA2; (+) strand; PAM type: NRG; PAM sequence: AAG
gcagtgtatggggtagatga

SEQ ID NO: 179017 - DNA, 20 bp, Artificial Sequence
  Description of Artificial Sequence: Synthetic oligonucleotide
  Target: LAMA2; (+) strand; PAM type: NRG; PAM sequence: AAG
tgtatggggtagatgaaaga

SEQ ID NO: 179018 - DNA, 20 bp, Artificial Sequence
  Description of Artificial Sequence: Synthetic oligonucleotide
  Target: LAMA2; (+) strand; PAM type: NRG; PAM sequence: AAG
atggggtagatgaaagaaag

SEQ ID NO: 179019 - DNA, 20 bp, Artificial Sequence
  Description of Artificial Sequence: Synthetic oligonucleotide
  Target: LAMA2; (+) strand; PAM type: NRG; PAM sequence: AAG
agatgaaagaaagaagaatg

SEQ ID NO: 179020 - DNA, 20 bp, Artificial Sequence
  Description of Artificial Sequence: Synthetic oligonucleotide
  Target: LAMA2; (+) strand; PAM type: NRG; PAM sequence: AGG
gatgaaagaaagaagaatga

SEQ ID NO: 179021 - DNA, 20 bp, Artificial Sequence
  Description of Artificial Sequence: Synthetic oligonucleotide
  Target: LAMA2; (+) strand; PAM type: NRG; PAM sequence: TAG
aagaatgaaggacccaacta

SEQ ID NO: 179022 - DNA, 20 bp, Artificial Sequence
  Description of Artificial Sequence: Synthetic oligonucleotide
  Target: LAMA2; (+) strand; PAM type: NRG; PAM sequence: TGG
gaaggacccaactatagctg

SEQ ID NO: 179023 - DNA, 20 bp, Artificial Sequence
  Description of Artificial Sequence: Synthetic oligonucleotide
  Target: LAMA2; (+) strand; PAM type: NRG; PAM sequence: AAG
gacccaactatagctgtggc

SEQ ID NO: 179024 - DNA, 20 bp, Artificial Sequence
  Description of Artificial Sequence: Synthetic oligonucleotide
  Target: LAMA2; (+) strand; PAM type: NRG; PAM sequence: GAG
cccaactatagctgtggcaa

SEQ ID NO: 179025 - DNA, 20 bp, Artificial Sequence
  Description of Artificial Sequence: Synthetic oligonucleotide
  Target: LAMA2; (+) strand; PAM type: NRG; PAM sequence: AAG
ctatagctgtggcaagagaa

SEQ ID NO: 179026 - DNA, 20 bp, Artificial Sequence
  Description of Artificial Sequence: Synthetic oligonucleotide
  Target: LAMA2; (+) strand; PAM type: NRG; PAM sequence: AAG
tagctgtggcaagagaaaag

SEQ ID NO: 179027 - DNA, 20 bp, Artificial Sequence
  Description of Artificial Sequence: Synthetic oligonucleotide
  Target: LAMA2; (+) strand; PAM type: NRG; PAM sequence: TGG
tatattttgcaatgttaact

SEQ ID NO: 179028 - DNA, 20 bp, Artificial Sequence
  Description of Artificial Sequence: Synthetic oligonucleotide
  Target: LAMA2; (+) strand; PAM type: NRG; PAM sequence: AAG
attttgcaatgttaacttgg

SEQ ID NO: 179029 - DNA, 20 bp, Artificial Sequence
  Description of Artificial Sequence: Synthetic oligonucleotide
  Target: LAMA2; (+) strand; PAM type: NRG; PAM sequence: AAG
ttgcaatgttaacttggaag

SEQ ID NO: 179030 - DNA, 20 bp, Artificial Sequence
  Description of Artificial Sequence: Synthetic oligonucleotide
  Target: LAMA2; (+) strand; PAM type: NRG; PAM sequence: AAG
gttaacttggaagaagcaat

SEQ ID NO: 179031 - DNA, 20 bp, Artificial Sequence
  Description of Artificial Sequence: Synthetic oligonucleotide
  Target: LAMA2; (+) strand; PAM type: NRG; PAM sequence: GAG
taacttggaagaagcaataa

SEQ ID NO: 179032 - DNA, 20 bp, Artificial Sequence
  Description of Artificial Sequence: Synthetic oligonucleotide
  Target: LAMA2; (+) strand; PAM type: NRG; PAM sequence: TAG
tattttgtgaatctcacatt

SEQ ID NO: 179033 - DNA, 20 bp, Artificial Sequence
  Description of Artificial Sequence: Synthetic oligonucleotide
  Target: LAMA2; (+) strand; PAM type: NRG; PAM sequence: TAG
tttagccacattttctgact

SEQ ID NO: 179034 - DNA, 20 bp, Artificial Sequence
  Description of Artificial Sequence: Synthetic oligonucleotide
  Target: LAMA2; (+) strand; PAM type: NRG; PAM sequence: AAG
cattttctgacttagtcatc

SEQ ID NO: 179035 - DNA, 20 bp, Artificial Sequence
  Description of Artificial Sequence: Synthetic oligonucleotide
  Target: LAMA2; (+) strand; PAM type: NRG; PAM sequence: TGG
tttctgacttagtcatcaag

SEQ ID NO: 179036 - DNA, 20 bp, Artificial Sequence
  Description of Artificial Sequence: Synthetic oligonucleotide
  Target: LAMA2; (+) strand; PAM type: NRG; PAM sequence: GAG
tctgacttagtcatcaagtg

SEQ ID NO: 179037 - DNA, 20 bp, Artificial Sequence
  Description of Artificial Sequence: Synthetic oligonucleotide
  Target: LAMA2; (+) strand; PAM type: NRG; PAM sequence: TAG
agtcatcaagtggagaaatc

SEQ ID NO: 179038 - DNA, 20 bp, Artificial Sequence
  Description of Artificial Sequence: Synthetic oligonucleotide
  Target: LAMA2; (+) strand; PAM type: NRG; PAM sequence: AAG
tttattatttcttcattgta

SEQ ID NO: 179039 - DNA, 20 bp, Artificial Sequence
  Description of Artificial Sequence: Synthetic oligonucleotide
  Target: LAMA2; (+) strand; PAM type: NRG; PAM sequence: GAG
tcttcattgtaaagatttct

SEQ ID NO: 179040 - DNA, 20 bp, Artificial Sequence
  Description of Artificial Sequence: Synthetic oligonucleotide
  Target: LAMA2; (+) strand; PAM type: NRG; PAM sequence: CGG
cttttcccctcctcacaaaa

SEQ ID NO: 179041 - DNA, 20 bp, Artificial Sequence
  Description of Artificial Sequence: Synthetic oligonucleotide
  Target: LAMA2; (+) strand; PAM type: NRG; PAM sequence: CAG
cctcacaaaacggtgaaatt

SEQ ID NO: 179042 - DNA, 20 bp, Artificial Sequence
  Description of Artificial Sequence: Synthetic oligonucleotide
  Target: LAMA2; (+) strand; PAM type: NRG; PAM sequence: AAG
acggtgaaattcagacatgt

SEQ ID NO: 179043 - DNA, 20 bp, Artificial Sequence
  Description of Artificial Sequence: Synthetic oligonucleotide
  Target: LAMA2; (+) strand; PAM type: NRG; PAM sequence: AAG
agcatataaaacctgtctta

SEQ ID NO: 179044 - DNA, 20 bp, Artificial Sequence
  Description of Artificial Sequence: Synthetic oligonucleotide
  Target: LAMA2; (+) strand; PAM type: NRG; PAM sequence: AAG
tgtcttaaagtacaaaataa

SEQ ID NO: 179045 - DNA, 20 bp, Artificial Sequence
  Description of Artificial Sequence: Synthetic oligonucleotide
  Target: LAMA2; (+) strand; PAM type: NRG; PAM sequence: AAG
taaagtacaaaataaaagaa

SEQ ID NO: 179046 - DNA, 20 bp, Artificial Sequence
  Description of Artificial Sequence: Synthetic oligonucleotide
  Target: LAMA2; (+) strand; PAM type: NRG; PAM sequence: TAG
tacaaaataaaagaaaagta

SEQ ID NO: 179047 - DNA, 20 bp, Artificial Sequence
  Description of Artificial Sequence: Synthetic oligonucleotide
  Target: LAMA2; (+) strand; PAM type: NRG; PAM sequence: AGG
acaaaataaaagaaaagtat

SEQ ID NO: 179048 - DNA, 20 bp, Artificial Sequence
  Description of Artificial Sequence: Synthetic oligonucleotide
  Target: LAMA2; (+) strand; PAM type: NRG; PAM sequence: TGG
aataaaagaaaagtataggc

SEQ ID NO: 179049 - DNA, 20 bp, Artificial Sequence
  Description of Artificial Sequence: Synthetic oligonucleotide
  Target: LAMA2; (+) strand; PAM type: NRG; PAM sequence: GGG
ataaaagaaaagtataggct

SEQ ID NO: 179050 - DNA, 20 bp, Artificial Sequence
  Description of Artificial Sequence: Synthetic oligonucleotide
  Target: LAMA2; (+) strand; PAM type: NRG; PAM sequence: TGG
agaaaagtataggctgggca

SEQ ID NO: 179051 - DNA, 20 bp, Artificial Sequence
  Description of Artificial Sequence: Synthetic oligonucleotide
  Target: LAMA2; (+) strand; PAM type: NRG; PAM sequence: TGG
aaagtataggctgggcatgg

SEQ ID NO: 179052 - DNA, 20 bp, Artificial Sequence
  Description of Artificial Sequence: Synthetic oligonucleotide
  Target: LAMA2; (+) strand; PAM type: NRG; PAM sequence: AAG
taggctgggcatggtggctc

SEQ ID NO: 179053 - DNA, 20 bp, Artificial Sequence
  Description of Artificial Sequence: Synthetic oligonucleotide
  Target: LAMA2; (+) strand; PAM type: NRG; PAM sequence: TGG
agcctgtcatcccaacactt

SEQ ID NO: 179054 - DNA, 20 bp, Artificial Sequence
  Description of Artificial Sequence: Synthetic oligonucleotide
  Target: LAMA2; (+) strand; PAM type: NRG; PAM sequence: GGG
gcctgtcatcccaacacttt

SEQ ID NO: 179055 - DNA, 20 bp, Artificial Sequence
  Description of Artificial Sequence: Synthetic oligonucleotide
  Target: LAMA2; (+) strand; PAM type: NRG; PAM sequence: GAG
ctgtcatcccaacactttgg

SEQ ID NO: 179056 - DNA, 20 bp, Artificial Sequence
  Description of Artificial Sequence: Synthetic oligonucleotide
  Target: LAMA2; (+) strand; PAM type: NRG; PAM sequence: AGG
tgtcatcccaacactttggg

SEQ ID NO: 179057 - DNA, 20 bp, Artificial Sequence
  Description of Artificial Sequence: Synthetic oligonucleotide
  Target: LAMA2; (+) strand; PAM type: NRG; PAM sequence: GAG
tcccaacactttgggaggct

SEQ ID NO: 179058 - DNA, 20 bp, Artificial Sequence
  Description of Artificial Sequence: Synthetic oligonucleotide
  Target: LAMA2; (+) strand; PAM type: NRG; PAM sequence: AGG
cccaacactttgggaggctg

SEQ ID NO: 179059 - DNA, 20 bp, Artificial Sequence
  Description of Artificial Sequence: Synthetic oligonucleotide
  Target: LAMA2; (+) strand; PAM type: NRG; PAM sequence: CAG
aacactttgggaggctgagg

SEQ ID NO: 179060 - DNA, 20 bp, Artificial Sequence
  Description of Artificial Sequence: Synthetic oligonucleotide
  Target: LAMA2; (+) strand; PAM type: NRG; PAM sequence: AGG
acactttgggaggctgaggc

SEQ ID NO: 179061 - DNA, 20 bp, Artificial Sequence
  Description of Artificial Sequence: Synthetic oligonucleotide
  Target: LAMA2; (+) strand; PAM type: NRG; PAM sequence: CAG
ctttgggaggctgaggcagg

SEQ ID NO: 179062 - DNA, 20 bp, Artificial Sequence
  Description of Artificial Sequence: Synthetic oligonucleotide
  Target: LAMA2; (+) strand; PAM type: NRG; PAM sequence: CAG
gcaggcagattgcatgaact

SEQ ID NO: 179063 - DNA, 20 bp, Artificial Sequence
  Description of Artificial Sequence: Synthetic oligonucleotide
  Target: LAMA2; (+) strand; PAM type: NRG; PAM sequence: AGG
caggcagattgcatgaactc

SEQ ID NO: 179064 - DNA, 20 bp, Artificial Sequence
  Description of Artificial Sequence: Synthetic oligonucleotide
  Target: LAMA2; (+) strand; PAM type: NRG; PAM sequence: GAG
ggcagattgcatgaactcag

SEQ ID NO: 179065 - DNA, 20 bp, Artificial Sequence
  Description of Artificial Sequence: Synthetic oligonucleotide
  Target: LAMA2; (+) strand; PAM type: NRG; PAM sequence: GAG
ttgcatgaactcaggagttt

SEQ ID NO: 179066 - DNA, 20 bp, Artificial Sequence
  Description of Artificial Sequence: Synthetic oligonucleotide
  Target: LAMA2; (+) strand; PAM type: NRG; PAM sequence: CAG
tgaactcaggagtttgagac

SEQ ID NO: 179067 - DNA, 20 bp, Artificial Sequence
  Description of Artificial Sequence: Synthetic oligonucleotide
  Target: LAMA2; (+) strand; PAM type: NRG; PAM sequence: TGG
tcaggagtttgagaccagcc

SEQ ID NO: 179068 - DNA, 20 bp, Artificial Sequence
  Description of Artificial Sequence: Synthetic oligonucleotide
  Target: LAMA2; (+) strand; PAM type: NRG; PAM sequence: GGG
caggagtttgagaccagcct

SEQ ID NO: 179069 - DNA, 20 bp, Artificial Sequence
  Description of Artificial Sequence: Synthetic oligonucleotide
  Target: LAMA2; (+) strand; PAM type: NRG; PAM sequence: TGG
caaaaaattgaaaaattacc

SEQ ID NO: 179070 - DNA, 20 bp, Artificial Sequence
  Description of Artificial Sequence: Synthetic oligonucleotide
  Target: LAMA2; (+) strand; PAM type: NRG; PAM sequence: GGG
aaaaaattgaaaaattacct

SEQ ID NO: 179071 - DNA, 20 bp, Artificial Sequence
  Description of Artificial Sequence: Synthetic oligonucleotide
  Target: LAMA2; (+) strand; PAM type: NRG; PAM sequence: TGG
attgaaaaattacctgggca

SEQ ID NO: 179072 - DNA, 20 bp, Artificial Sequence
  Description of Artificial Sequence: Synthetic oligonucleotide
  Target: LAMA2; (+) strand; PAM type: NRG; PAM sequence: TAG
ctgggcatggtacatgccta

SEQ ID NO: 179073 - DNA, 20 bp, Artificial Sequence
  Description of Artificial Sequence: Synthetic oligonucleotide
  Target: LAMA2; (+) strand; PAM type: NRG; PAM sequence: CAG
atggtacatgcctatagtcc

SEQ ID NO: 179074 - DNA, 20 bp, Artificial Sequence
  Description of Artificial Sequence: Synthetic oligonucleotide
  Target: LAMA2; (+) strand; PAM type: NRG; PAM sequence: TGG
tgcctatagtcccagctact

SEQ ID NO: 179075 - DNA, 20 bp, Artificial Sequence
  Description of Artificial Sequence: Synthetic oligonucleotide
  Target: LAMA2; (+) strand; PAM type: NRG; PAM sequence: GGG
gcctatagtcccagctactt

SEQ ID NO: 179076 - DNA, 20 bp, Artificial Sequence
  Description of Artificial Sequence: Synthetic oligonucleotide
  Target: LAMA2; (+) strand; PAM type: NRG; PAM sequence: GGG
cctatagtcccagctacttg

SEQ ID NO: 179077 - DNA, 20 bp, Artificial Sequence
  Description of Artificial Sequence: Synthetic oligonucleotide
  Target: LAMA2; (+) strand; PAM type: NRG; PAM sequence: GAG
tatagtcccagctacttggg

SEQ ID NO: 179078 - DNA, 20 bp, Artificial Sequence
  Description of Artificial Sequence: Synthetic oligonucleotide
  Target: LAMA2; (+) strand; PAM type: NRG; PAM sequence: GAG
tcccagctacttggggagat

SEQ ID NO: 179079 - DNA, 20 bp, Artificial Sequence
  Description of Artificial Sequence: Synthetic oligonucleotide
  Target: LAMA2; (+) strand; PAM type: NRG; PAM sequence: AGG
cccagctacttggggagatg

SEQ ID NO: 179080 - DNA, 20 bp, Artificial Sequence
  Description of Artificial Sequence: Synthetic oligonucleotide
  Target: LAMA2; (+) strand; PAM type: NRG; PAM sequence: TGG
agctacttggggagatgagg

SEQ ID NO: 179081 - DNA, 20 bp, Artificial Sequence
  Description of Artificial Sequence: Synthetic oligonucleotide
  Target: LAMA2; (+) strand; PAM type: NRG; PAM sequence: GGG
gctacttggggagatgaggt

SEQ ID NO: 179082 - DNA, 20 bp, Artificial Sequence
  Description of Artificial Sequence: Synthetic oligonucleotide
  Target: LAMA2; (+) strand; PAM type: NRG; PAM sequence: GAG
tacttggggagatgaggtgg

SEQ ID NO: 179083 - DNA, 20 bp, Artificial Sequence
  Description of Artificial Sequence: Synthetic oligonucleotide
  Target: LAMA2; (+) strand; PAM type: NRG; PAM sequence: AGG
acttggggagatgaggtggg

SEQ ID NO: 179084 - DNA, 20 bp, Artificial Sequence
  Description of Artificial Sequence: Synthetic oligonucleotide
  Target: LAMA2; (+) strand; PAM type: NRG; PAM sequence: TGG
ggtgggaggatcacttgctc

SEQ ID NO: 179085 - DNA, 20 bp, Artificial Sequence
  Description of Artificial Sequence: Synthetic oligonucleotide
  Target: LAMA2; (+) strand; PAM type: NRG; PAM sequence: GAG
tgggaggatcacttgctctg

SEQ ID NO: 179086 - DNA, 20 bp, Artificial Sequence
  Description of Artificial Sequence: Synthetic oligonucleotide
  Target: LAMA2; (+) strand; PAM type: NRG; PAM sequence: AGG
gggaggatcacttgctctgg

SEQ ID NO: 179087 - DNA, 20 bp, Artificial Sequence
  Description of Artificial Sequence: Synthetic oligonucleotide
  Target: LAMA2; (+) strand; PAM type: NRG; PAM sequence: GAG
gatcacttgctctggaggat

SEQ ID NO: 179088 - DNA, 20 bp, Artificial Sequence
  Description of Artificial Sequence: Synthetic oligonucleotide
  Target: LAMA2; (+) strand; PAM type: NRG; PAM sequence: AGG
atcacttgctctggaggatg

SEQ ID NO: 179089 - DNA, 20 bp, Artificial Sequence
  Description of Artificial Sequence: Synthetic oligonucleotide
  Target: LAMA2; (+) strand; PAM type: NRG; PAM sequence: CAG
tgctctggaggatgaggctg

SEQ ID NO: 179090 - DNA, 20 bp, Artificial Sequence
  Description of Artificial Sequence: Synthetic oligonucleotide
  Target: LAMA2; (+) strand; PAM type: NRG; PAM sequence: GAG
ctggaggatgaggctgcagt

SEQ ID NO: 179091 - DNA, 20 bp, Artificial Sequence
  Description of Artificial Sequence: Synthetic oligonucleotide
  Target: LAMA2; (+) strand; PAM type: NRG; PAM sequence: TGG
agtgagccatgtttgcacca

SEQ ID NO: 179092 - DNA, 20 bp, Artificial Sequence
  Description of Artificial Sequence: Synthetic oligonucleotide
  Target: LAMA2; (+) strand; PAM type: NRG; PAM sequence: CAG
atgtttgcaccatggcactc

SEQ ID NO: 179093 - DNA, 20 bp, Artificial Sequence
  Description of Artificial Sequence: Synthetic oligonucleotide
  Target: LAMA2; (+) strand; PAM type: NRG; PAM sequence: TGG
tgcaccatggcactccagcc

SEQ ID NO: 179094 - DNA, 20 bp, Artificial Sequence
  Description of Artificial Sequence: Synthetic oligonucleotide
  Target: LAMA2; (+) strand; PAM type: NRG; PAM sequence: GGG
gcaccatggcactccagcct

SEQ ID NO: 179095 - DNA, 20 bp, Artificial Sequence
  Description of Artificial Sequence: Synthetic oligonucleotide
  Target: LAMA2; (+) strand; PAM type: NRG; PAM sequence: TGG
ccatggcactccagcctggg

SEQ ID NO: 179096 - DNA, 20 bp, Artificial Sequence
  Description of Artificial Sequence: Synthetic oligonucleotide
  Target: LAMA2; (+) strand; PAM type: NRG; PAM sequence: TAG
actccagcctgggtggcaaa

SEQ ID NO: 179097 - DNA, 20 bp, Artificial Sequence
  Description of Artificial Sequence: Synthetic oligonucleotide
  Target: LAMA2; (+) strand; PAM type: NRG; PAM sequence: AAG
cctgtccccccccaaaaaaa

SEQ ID NO: 179098 - DNA, 20 bp, Artificial Sequence
  Description of Artificial Sequence: Synthetic oligonucleotide
  Target: LAMA2; (+) strand; PAM type: NRG; PAM sequence: GAG
tgtccccccccaaaaaaaaa

SEQ ID NO: 179099 - DNA, 20 bp, Artificial Sequence
  Description of Artificial Sequence: Synthetic oligonucleotide
  Target: LAMA2; (+) strand; PAM type: NRG; PAM sequence: AAG
ccccccccaaaaaaaaagag

SEQ ID NO: 179100 - DNA, 20 bp, Artificial Sequence
  Description of Artificial Sequence: Synthetic oligonucleotide
  Target: LAMA2; (+) strand; PAM type: NRG; PAM sequence: AAG
aaaaaaaaagagaagaaaaa

SEQ ID NO: 179101 - DNA, 20 bp, Artificial Sequence
  Description of Artificial Sequence: Synthetic oligonucleotide
  Target: LAMA2; (+) strand; PAM type: NRG; PAM sequence: AAG
aaaaagagaagaaaaaaaga

SEQ ID NO: 179102 - DNA, 20 bp, Artificial Sequence
  Description of Artificial Sequence: Synthetic oligonucleotide
  Target: LAMA2; (+) strand; PAM type: NRG; PAM sequence: AGG
aaaagagaagaaaaaaagaa

SEQ ID NO: 179103 - DNA, 20 bp, Artificial Sequence
  Description of Artificial Sequence: Synthetic oligonucleotide
  Target: LAMA2; (+) strand; PAM type: NRG; PAM sequence: AAG
agaaaaaaagaaaggtacaa

SEQ ID NO: 179104 - DNA, 20 bp, Artificial Sequence
  Description of Artificial Sequence: Synthetic oligonucleotide
  Target: LAMA2; (+) strand; PAM type: NRG; PAM sequence: AAG
aaaggtacaaaagtaacgtt

SEQ ID NO: 179105 - DNA, 20 bp, Artificial Sequence
  Description of Artificial Sequence: Synthetic oligonucleotide
  Target: LAMA2; (+) strand; PAM type: NRG; PAM sequence: AAG
acaaaagtaacgttaagaaa

SEQ ID NO: 179106 - DNA, 20 bp, Artificial Sequence
  Description of Artificial Sequence: Synthetic oligonucleotide
  Target: LAMA2; (+) strand; PAM type: NRG; PAM sequence: AAG
atcattgtccatgcatttca

SEQ ID NO: 179107 - DNA, 20 bp, Artificial Sequence
  Description of Artificial Sequence: Synthetic oligonucleotide
  Target: LAMA2; (+) strand; PAM type: NRG; PAM sequence: CAG
atttcaaagaaattcccaat

SEQ ID NO: 179108 - DNA, 20 bp, Artificial Sequence
  Description of Artificial Sequence: Synthetic oligonucleotide
  Target: LAMA2; (+) strand; PAM type: NRG; PAM sequence: TGG
aagaaattcccaatcagttt

SEQ ID NO: 179109 - DNA, 20 bp, Artificial Sequence
  Description of Artificial Sequence: Synthetic oligonucleotide
  Target: LAMA2; (+) strand; PAM type: NRG; PAM sequence: TGG
ttcccaatcagttttggaaa

SEQ ID NO: 179110 - DNA, 20 bp, Artificial Sequence
  Description of Artificial Sequence: Synthetic oligonucleotide
  Target: LAMA2; (+) strand; PAM type: NRG; PAM sequence: AAG
cacaatgccttattttttgt

SEQ ID NO: 179111 - DNA, 20 bp, Artificial Sequence
  Description of Artificial Sequence: Synthetic oligonucleotide
  Target: LAMA2; (+) strand; PAM type: NRG; PAM sequence: TAG
ccttattttttgtaagacgt

SEQ ID NO: 179112 - DNA, 20 bp, Artificial Sequence
  Description of Artificial Sequence: Synthetic oligonucleotide
  Target: LAMA2; (+) strand; PAM type: NRG; PAM sequence: AAG
gtaagacgttagaaatatgc

SEQ ID NO: 179113 - DNA, 20 bp, Artificial Sequence
  Description of Artificial Sequence: Synthetic oligonucleotide
  Target: LAMA2; (+) strand; PAM type: NRG; PAM sequence: TAG
agacgttagaaatatgcaag

SEQ ID NO: 179114 - DNA, 20 bp, Artificial Sequence
  Description of Artificial Sequence: Synthetic oligonucleotide
  Target: LAMA2; (+) strand; PAM type: NRG; PAM sequence: GAG
tagccaatttttttccaaat

SEQ ID NO: 179115 - DNA, 20 bp, Artificial Sequence
  Description of Artificial Sequence: Synthetic oligonucleotide
  Target: LAMA2; (+) strand; PAM type: NRG; PAM sequence: TGG
cattttctgatttgtaaata

SEQ ID NO: 179116 - DNA, 20 bp, Artificial Sequence
  Description of Artificial Sequence: Synthetic oligonucleotide
  Target: LAMA2; (+) strand; PAM type: NRG; PAM sequence: TGG
gatttgtaaatatggatatc

SEQ ID NO: 179117 - DNA, 20 bp, Artificial Sequence
  Description of Artificial Sequence: Synthetic oligonucleotide
  Target: LAMA2; (+) strand; PAM type: NRG; PAM sequence: AAG
ttgacatgaccaaaacatta

SEQ ID NO: 179118 - DNA, 20 bp, Artificial Sequence
  Description of Artificial Sequence: Synthetic oligonucleotide
  Target: LAMA2; (+) strand; PAM type: NRG; PAM sequence: AAG
cattaaagacatttatttta

SEQ ID NO: 179119 - DNA, 20 bp, Artificial Sequence
  Description of Artificial Sequence: Synthetic oligonucleotide
  Target: LAMA2; (+) strand; PAM type: NRG; PAM sequence: TAG
taaagacatttattttaaag

SEQ ID NO: 179120 - DNA, 20 bp, Artificial Sequence
  Description of Artificial Sequence: Synthetic oligonucleotide
  Target: LAMA2; (+) strand; PAM type: NRG; PAM sequence: TGG
tattttaaagtagctttctc

SEQ ID NO: 179121 - DNA, 20 bp, Artificial Sequence
  Description of Artificial Sequence: Synthetic oligonucleotide
  Target: LAMA2; (+) strand; PAM type: NRG; PAM sequence: GGG
attttaaagtagctttctct

SEQ ID NO: 179122 - DNA, 20 bp, Artificial Sequence
  Description of Artificial Sequence: Synthetic oligonucleotide
  Target: LAMA2; (+) strand; PAM type: NRG; PAM sequence: GAG
ggtttgttgattctgaaatt

SEQ ID NO: 179123 - DNA, 20 bp, Artificial Sequence
  Description of Artificial Sequence: Synthetic oligonucleotide
  Target: LAMA2; (+) strand; PAM type: NRG; PAM sequence: TGG
ttgttgattctgaaattgag

SEQ ID NO: 179124 - DNA, 20 bp, Artificial Sequence
  Description of Artificial Sequence: Synthetic oligonucleotide
  Target: LAMA2; (+) strand; PAM type: NRG; PAM sequence: TGG
taaatgaatgacctacttac

SEQ ID NO: 179125 - DNA, 20 bp, Artificial Sequence
  Description of Artificial Sequence: Synthetic oligonucleotide
  Target: LAMA2; (+) strand; PAM type: NRG; PAM sequence: CAG
tacttactggatgaaaaatg

SEQ ID NO: 179126 - DNA, 20 bp, Artificial Sequence
  Description of Artificial Sequence: Synthetic oligonucleotide
  Target: LAMA2; (+) strand; PAM type: NRG; PAM sequence: TAG
aaaatgcagtgaaaatccaa

SEQ ID NO: 179127 - DNA, 20 bp, Artificial Sequence
  Description of Artificial Sequence: Synthetic oligonucleotide
  Target: LAMA2; (+) strand; PAM type: NRG; PAM sequence: TGG
aaatccaatagatataataa

SEQ ID NO: 179128 - DNA, 20 bp, Artificial Sequence
  Description of Artificial Sequence: Synthetic oligonucleotide
  Target: LAMA2; (+) strand; PAM type: NRG; PAM sequence: GGG
aatccaatagatataataat

SEQ ID NO: 179129 - DNA, 20 bp, Artificial Sequence
  Description of Artificial Sequence: Synthetic oligonucleotide
  Target: LAMA2; (+) strand; PAM type: NRG; PAM sequence: GAG
tgggatactcaataatgttt

SEQ ID NO: 179130 - DNA, 20 bp, Artificial Sequence
  Description of Artificial Sequence: Synthetic oligonucleotide
  Target: LAMA2; (+) strand; PAM type: NRG; PAM sequence: TGG
ttgagttcatcatgattaac

SEQ ID NO: 179131 - DNA, 20 bp, Artificial Sequence
  Description of Artificial Sequence: Synthetic oligonucleotide
  Target: LAMA2; (+) strand; PAM type: NRG; PAM sequence: CAG
ttaactggtaaataatgttg

SEQ ID NO: 179132 - DNA, 20 bp, Artificial Sequence
  Description of Artificial Sequence: Synthetic oligonucleotide
  Target: LAMA2; (+) strand; PAM type: NRG; PAM sequence: AAG
tgcagtattgaaatgcctta

SEQ ID NO: 179133 - DNA, 20 bp, Artificial Sequence
  Description of Artificial Sequence: Synthetic oligonucleotide
  Target: LAMA2; (+) strand; PAM type: NRG; PAM sequence: TAG
ccttaaagatacttaatgct

SEQ ID NO: 179134 - DNA, 20 bp, Artificial Sequence
  Description of Artificial Sequence: Synthetic oligonucleotide
  Target: LAMA2; (+) strand; PAM type: NRG; PAM sequence: TAG
aatgcttagtgatttttctt

SEQ ID NO: 179135 - DNA, 20 bp, Artificial Sequence
  Description of Artificial Sequence: Synthetic oligonucleotide
  Target: LAMA2; (+) strand; PAM type: NRG; PAM sequence: AAG
ttttctttagatgtcttact

SEQ ID NO: 179136 - DNA, 20 bp, Artificial Sequence
  Description of Artificial Sequence: Synthetic oligonucleotide
  Target: LAMA2; (+) strand; PAM type: NRG; PAM sequence: AGG
tttctttagatgtcttacta

SEQ ID NO: 179137 - DNA, 20 bp, Artificial Sequence
  Description of Artificial Sequence: Synthetic oligonucleotide
  Target: LAMA2; (+) strand; PAM type: NRG; PAM sequence: TAG
gtcttactaaggatctgcat

SEQ ID NO: 179138 - DNA, 20 bp, Artificial Sequence
  Description of Artificial Sequence: Synthetic oligonucleotide
  Target: LAMA2; (+) strand; PAM type: NRG; PAM sequence: TAG
ttagaaataacaataattga

SEQ ID NO: 179139 - DNA, 20 bp, Artificial Sequence
  Description of Artificial Sequence: Synthetic oligonucleotide
  Target: LAMA2; (+) strand; PAM type: NRG; PAM sequence: GAG
agaaataacaataattgata

SEQ ID NO: 179140 - DNA, 20 bp, Artificial Sequence
  Description of Artificial Sequence: Synthetic oligonucleotide
  Target: LAMA2; (+) strand; PAM type: NRG; PAM sequence: AAG
gatagagccaaacattctaa

SEQ ID NO: 179141 - DNA, 20 bp, Artificial Sequence
  Description of Artificial Sequence: Synthetic oligonucleotide
  Target: LAMA2; (+) strand; PAM type: NRG; PAM sequence: AGG
atagagccaaacattctaaa

SEQ ID NO: 179142 - DNA, 20 bp, Artificial Sequence
  Description of Artificial Sequence: Synthetic oligonucleotide
  Target: LAMA2; (+) strand; PAM type: NRG; PAM sequence: CAG
ctaaaaggatgtttgaattt

SEQ ID NO: 179143 - DNA, 20 bp, Artificial Sequence
  Description of Artificial Sequence: Synthetic oligonucleotide
  Target: LAMA2; (+) strand; PAM type: NRG; PAM sequence: AAG
agaaatttctttcctcttac

SEQ ID NO: 179144 - DNA, 20 bp, Artificial Sequence
  Description of Artificial Sequence: Synthetic oligonucleotide
  Target: LAMA2; (+) strand; PAM type: NRG; PAM sequence: GAG
aaatttctttcctcttacaa

SEQ ID NO: 179145 - DNA, 20 bp, Artificial Sequence
  Description of Artificial Sequence: Synthetic oligonucleotide
  Target: LAMA2; (+) strand; PAM type: NRG; PAM sequence: AAG
tacaagagtgacatatccta

SEQ ID NO: 179146 - DNA, 20 bp, Artificial Sequence
  Description of Artificial Sequence: Synthetic oligonucleotide
  Target: LAMA2; (+) strand; PAM type: NRG; PAM sequence: TAG
catatcctaaagatttcttc

SEQ ID NO: 179147 - DNA, 20 bp, Artificial Sequence
  Description of Artificial Sequence: Synthetic oligonucleotide
  Target: LAMA2; (+) strand; PAM type: NRG; PAM sequence: GAG
tatcctaaagatttcttcta

SEQ ID NO: 179148 - DNA, 20 bp, Artificial Sequence
  Description of Artificial Sequence: Synthetic oligonucleotide
  Target: LAMA2; (+) strand; PAM type: NRG; PAM sequence: CAG
aaagatttcttctagagata

SEQ ID NO: 179149 - DNA, 20 bp, Artificial Sequence
  Description of Artificial Sequence: Synthetic oligonucleotide
  Target: LAMA2; (+) strand; PAM type: NRG; PAM sequence: TAG
ttgatttacctgatttcttc

SEQ ID NO: 179150 - DNA, 20 bp, Artificial Sequence
  Description of Artificial Sequence: Synthetic oligonucleotide
  Target: LAMA2; (+) strand; PAM type: NRG; PAM sequence: GAG
gatttacctgatttcttcta

SEQ ID NO: 179151 - DNA, 20 bp, Artificial Sequence
  Description of Artificial Sequence: Synthetic oligonucleotide
  Target: LAMA2; (+) strand; PAM type: NRG; PAM sequence: TAG
cctgatttcttctagagata

SEQ ID NO: 179152 - DNA, 20 bp, Artificial Sequence
  Description of Artificial Sequence: Synthetic oligonucleotide
  Target: LAMA2; (+) strand; PAM type: NRG; PAM sequence: TAG
ttgatttacctgatttcttc

SEQ ID NO: 179153 - DNA, 20 bp, Artificial Sequence
  Description of Artificial Sequence: Synthetic oligonucleotide
  Target: LAMA2; (+) strand; PAM type: NRG; PAM sequence: GAG
gatttacctgatttcttcta

SEQ ID NO: 179154 - DNA, 20 bp, Artificial Sequence
  Description of Artificial Sequence: Synthetic oligonucleotide
  Target: LAMA2; (+) strand; PAM type: NRG; PAM sequence: CAG
cctgatttcttctagagata

SEQ ID NO: 179155 - DNA, 20 bp, Artificial Sequence
  Description of Artificial Sequence: Synthetic oligonucleotide
  Target: LAMA2; (+) strand; PAM type: NRG; PAM sequence: AAG
tattttgatttacctgtttt

SEQ ID NO: 179156 - DNA, 20 bp, Artificial Sequence
  Description of Artificial Sequence: Synthetic oligonucleotide
  Target: LAMA2; (+) strand; PAM type: NRG; PAM sequence: AAG
acctgttttaagttgtttaa

SEQ ID NO: 179157 - DNA, 20 bp, Artificial Sequence
  Description of Artificial Sequence: Synthetic oligonucleotide
  Target: LAMA2; (+) strand; PAM type: NRG; PAM sequence: CAG
cctataactgaaaatcaaaa

SEQ ID NO: 179158 - DNA, 20 bp, Artificial Sequence
  Description of Artificial Sequence: Synthetic oligonucleotide
  Target: LAMA2; (+) strand; PAM type: NRG; PAM sequence: AAG
taactgaaaatcaaaacaga

SEQ ID NO: 179159 - DNA, 20 bp, Artificial Sequence
  Description of Artificial Sequence: Synthetic oligonucleotide
  Target: LAMA2; (+) strand; PAM type: NRG; PAM sequence: AAG
tcaaaacagaaagtattcaa

SEQ ID NO: 179160 - DNA, 20 bp, Artificial Sequence
  Description of Artificial Sequence: Synthetic oligonucleotide
  Target: LAMA2; (+) strand; PAM type: NRG; PAM sequence: AGG
caaaacagaaagtattcaaa

SEQ ID NO: 179161 - DNA, 20 bp, Artificial Sequence
  Description of Artificial Sequence: Synthetic oligonucleotide
  Target: LAMA2; (+) strand; PAM type: NRG; PAM sequence: AAG
cagaaagtattcaaaaggaa

SEQ ID NO: 179162 - DNA, 20 bp, Artificial Sequence
  Description of Artificial Sequence: Synthetic oligonucleotide
  Target: LAMA2; (+) strand; PAM type: NRG; PAM sequence: TGG
aaagactactgattatgtac

SEQ ID NO: 179163 - DNA, 20 bp, Artificial Sequence
  Description of Artificial Sequence: Synthetic oligonucleotide
  Target: LAMA2; (+) strand; PAM type: NRG; PAM sequence: CAG
gattatgtactggctgtcaa

SEQ ID NO: 179164 - DNA, 20 bp, Artificial Sequence
  Description of Artificial Sequence: Synthetic oligonucleotide
  Target: LAMA2; (+) strand; PAM type: NRG; PAM sequence: TGG
tgtactggctgtcaacagtt

SEQ ID NO: 179165 - DNA, 20 bp, Artificial Sequence
  Description of Artificial Sequence: Synthetic oligonucleotide
  Target: LAMA2; (+) strand; PAM type: NRG; PAM sequence: GGG
gtactggctgtcaacagttt

SEQ ID NO: 179166 - DNA, 20 bp, Artificial Sequence
  Description of Artificial Sequence: Synthetic oligonucleotide
  Target: LAMA2; (+) strand; PAM type: NRG; PAM sequence: AAG
ggctgtcaacagtttgggct

SEQ ID NO: 179167 - DNA, 20 bp, Artificial Sequence
  Description of Artificial Sequence: Synthetic oligonucleotide
  Target: LAMA2; (+) strand; PAM type: NRG; PAM sequence: CAG
tttgggctaagtgaatgttt

SEQ ID NO: 179168 - DNA, 20 bp, Artificial Sequence
  Description of Artificial Sequence: Synthetic oligonucleotide
  Target: LAMA2; (+) strand; PAM type: NRG; PAM sequence: GAG
aagtgaatgtttcagtttct

SEQ ID NO: 179169 - DNA, 20 bp, Artificial Sequence
  Description of Artificial Sequence: Synthetic oligonucleotide
  Target: LAMA2; (+) strand; PAM type: NRG; PAM sequence: GAG
gtgaatgtttcagtttctga

SEQ ID NO: 179170 - DNA, 20 bp, Artificial Sequence
  Description of Artificial Sequence: Synthetic oligonucleotide
  Target: LAMA2; (+) strand; PAM type: NRG; PAM sequence: CAG
tctgagagtatattcaaaac

SEQ ID NO: 179171 - DNA, 20 bp, Artificial Sequence
  Description of Artificial Sequence: Synthetic oligonucleotide
  Target: LAMA2; (+) strand; PAM type: NRG; PAM sequence: CAG
gtatattcaaaaccagaaaa

SEQ ID NO: 179172 - DNA, 20 bp, Artificial Sequence
  Description of Artificial Sequence: Synthetic oligonucleotide
  Target: LAMA2; (+) strand; PAM type: NRG; PAM sequence: AAG
attcaaaaccagaaaacaga

SEQ ID NO: 179173 - DNA, 20 bp, Artificial Sequence
  Description of Artificial Sequence: Synthetic oligonucleotide
  Target: LAMA2; (+) strand; PAM type: NRG; PAM sequence: CAG
caaaaccagaaaacagaaag

SEQ ID NO: 179174 - DNA, 20 bp, Artificial Sequence
  Description of Artificial Sequence: Synthetic oligonucleotide
  Target: LAMA2; (+) strand; PAM type: NRG; PAM sequence: AGG
aaaaccagaaaacagaaagc

SEQ ID NO: 179175 - DNA, 20 bp, Artificial Sequence
  Description of Artificial Sequence: Synthetic oligonucleotide
  Target: LAMA2; (+) strand; PAM type: NRG; PAM sequence: AAG
aaacagaaagcaggtaatcc

SEQ ID NO: 179176 - DNA, 20 bp, Artificial Sequence
  Description of Artificial Sequence: Synthetic oligonucleotide
  Target: LAMA2; (+) strand; PAM type: NRG; PAM sequence: GAG
acagaaagcaggtaatccaa

SEQ ID NO: 179177 - DNA, 20 bp, Artificial Sequence
  Description of Artificial Sequence: Synthetic oligonucleotide
  Target: LAMA2; (+) strand; PAM type: NRG; PAM sequence: GAG
tattttctatatgaatgtgt

SEQ ID NO: 179178 - DNA, 20 bp, Artificial Sequence
  Description of Artificial Sequence: Synthetic oligonucleotide
  Target: LAMA2; (+) strand; PAM type: NRG; PAM sequence: GAG
ttttctatatgaatgtgtga

SEQ ID NO: 179179 - DNA, 20 bp, Artificial Sequence
  Description of Artificial Sequence: Synthetic oligonucleotide
  Target: LAMA2; (+) strand; PAM type: NRG; PAM sequence: TGG
ctatatgaatgtgtgagagc

SEQ ID NO: 179180 - DNA, 20 bp, Artificial Sequence
  Description of Artificial Sequence: Synthetic oligonucleotide
  Target: LAMA2; (+) strand; PAM type: NRG; PAM sequence: GGG
tatatgaatgtgtgagagct

SEQ ID NO: 179181 - DNA, 20 bp, Artificial Sequence
  Description of Artificial Sequence: Synthetic oligonucleotide
  Target: LAMA2; (+) strand; PAM type: NRG; PAM sequence: TAG
aatgtgtgagagctgggcaa

SEQ ID NO: 179182 - DNA, 20 bp, Artificial Sequence
  Description of Artificial Sequence: Synthetic oligonucleotide
  Target: LAMA2; (+) strand; PAM type: NRG; PAM sequence: TAG
ctgggcaatagattactgtc

SEQ ID NO: 179183 - DNA, 20 bp, Artificial Sequence
  Description of Artificial Sequence: Synthetic oligonucleotide
  Target: LAMA2; (+) strand; PAM type: NRG; PAM sequence: CAG
tccacttcatgctgctgtga

SEQ ID NO: 179184 - DNA, 20 bp, Artificial Sequence
  Description of Artificial Sequence: Synthetic oligonucleotide
  Target: LAMA2; (+) strand; PAM type: NRG; PAM sequence: GAG
cacttcatgctgctgtgaca

SEQ ID NO: 179185 - DNA, 20 bp, Artificial Sequence
  Description of Artificial Sequence: Synthetic oligonucleotide
  Target: LAMA2; (+) strand; PAM type: NRG; PAM sequence: CAG
gctgctgtgacagagtatta

SEQ ID NO: 179186 - DNA, 20 bp, Artificial Sequence
  Description of Artificial Sequence: Synthetic oligonucleotide
  Target: LAMA2; (+) strand; PAM type: NRG; PAM sequence: TGG
tgtgacagagtattacagac

SEQ ID NO: 179187 - DNA, 20 bp, Artificial Sequence
  Description of Artificial Sequence: Synthetic oligonucleotide
  Target: LAMA2; (+) strand; PAM type: NRG; PAM sequence: GGG
gtgacagagtattacagact

SEQ ID NO: 179188 - DNA, 20 bp, Artificial Sequence
  Description of Artificial Sequence: Synthetic oligonucleotide
  Target: LAMA2; (+) strand; PAM type: NRG; PAM sequence: AAG
tacagactgggtaatttata

SEQ ID NO: 179189 - DNA, 20 bp, Artificial Sequence
  Description of Artificial Sequence: Synthetic oligonucleotide
  Target: LAMA2; (+) strand; PAM type: NRG; PAM sequence: CAG
agaaaataaatttattctca

SEQ ID NO: 179190 - DNA, 20 bp, Artificial Sequence
  Description of Artificial Sequence: Synthetic oligonucleotide
  Target: LAMA2; (+) strand; PAM type: NRG; PAM sequence: TGG
taaatttattctcacagttc

SEQ ID NO: 179191 - DNA, 20 bp, Artificial Sequence
  Description of Artificial Sequence: Synthetic oligonucleotide
  Target: LAMA2; (+) strand; PAM type: NRG; PAM sequence: GAG
aatttattctcacagttctg

SEQ ID NO: 179192 - DNA, 20 bp, Artificial Sequence
  Description of Artificial Sequence: Synthetic oligonucleotide
  Target: LAMA2; (+) strand; PAM type: NRG; PAM sequence: TGG
attctcacagttctggagac

SEQ ID NO: 179193 - DNA, 20 bp, Artificial Sequence
  Description of Artificial Sequence: Synthetic oligonucleotide
  Target: LAMA2; (+) strand; PAM type: NRG; PAM sequence: GGG
ttctcacagttctggagact

SEQ ID NO: 179194 - DNA, 20 bp, Artificial Sequence
  Description of Artificial Sequence: Synthetic oligonucleotide
  Target: LAMA2; (+) strand; PAM type: NRG; PAM sequence: AAG
tcacagttctggagactggg

SEQ ID NO: 179195 - DNA, 20 bp, Artificial Sequence
  Description of Artificial Sequence: Synthetic oligonucleotide
  Target: LAMA2; (+) strand; PAM type: NRG; PAM sequence: AAG
ttctggagactgggaagtcc

SEQ ID NO: 179196 - DNA, 20 bp, Artificial Sequence
  Description of Artificial Sequence: Synthetic oligonucleotide
  Target: LAMA2; (+) strand; PAM type: NRG; PAM sequence: AAG
agactgggaagtccaagatc

SEQ ID NO: 179197 - DNA, 20 bp, Artificial Sequence
  Description of Artificial Sequence: Synthetic oligonucleotide
  Target: LAMA2; (+) strand; PAM type: NRG; PAM sequence: TGG
gaagtccaagatcaagatgc

SEQ ID NO: 179198 - DNA, 20 bp, Artificial Sequence
  Description of Artificial Sequence: Synthetic oligonucleotide
  Target: LAMA2; (+) strand; PAM type: NRG; PAM sequence: CAG
gtccaagatcaagatgctgg

SEQ ID NO: 179199 - DNA, 20 bp, Artificial Sequence
  Description of Artificial Sequence: Synthetic oligonucleotide
  Target: LAMA2; (+) strand; PAM type: NRG; PAM sequence: AGG
tccaagatcaagatgctggc

SEQ ID NO: 179200 - DNA, 20 bp, Artificial Sequence
  Description of Artificial Sequence: Synthetic oligonucleotide
  Target: LAMA2; (+) strand; PAM type: NRG; PAM sequence: TAG
agatcaagatgctggcaggt

SEQ ID NO: 179201 - DNA, 20 bp, Artificial Sequence
  Description of Artificial Sequence: Synthetic oligonucleotide
  Target: LAMA2; (+) strand; PAM type: NRG; PAM sequence: AGG
gatcaagatgctggcaggtt

SEQ ID NO: 179202 - DNA, 20 bp, Artificial Sequence
  Description of Artificial Sequence: Synthetic oligonucleotide
  Target: LAMA2; (+) strand; PAM type: NRG; PAM sequence: GGG
atcaagatgctggcaggtta

SEQ ID NO: 179203 - DNA, 20 bp, Artificial Sequence
  Description of Artificial Sequence: Synthetic oligonucleotide
  Target: LAMA2; (+) strand; PAM type: NRG; PAM sequence: AAG
ggacctgtttttatgcttcc

SEQ ID NO: 179204 - DNA, 20 bp, Artificial Sequence
  Description of Artificial Sequence: Synthetic oligonucleotide
  Target: LAMA2; (+) strand; PAM type: NRG; PAM sequence: TGG
ctgtttttatgcttccaaga

SEQ ID NO: 179205 - DNA, 20 bp, Artificial Sequence
  Description of Artificial Sequence: Synthetic oligonucleotide
  Target: LAMA2; (+) strand; PAM type: NRG; PAM sequence: CAG
aagatggcactttgaatgct

SEQ ID NO: 179206 - DNA, 20 bp, Artificial Sequence
  Description of Artificial Sequence: Synthetic oligonucleotide
  Target: LAMA2; (+) strand; PAM type: NRG; PAM sequence: AGG
agatggcactttgaatgctc

SEQ ID NO: 179207 - DNA, 20 bp, Artificial Sequence
  Description of Artificial Sequence: Synthetic oligonucleotide
  Target: LAMA2; (+) strand; PAM type: NRG; PAM sequence: GAG
atggcactttgaatgctcag

SEQ ID NO: 179208 - DNA, 20 bp, Artificial Sequence
  Description of Artificial Sequence: Synthetic oligonucleotide
  Target: LAMA2; (+) strand; PAM type: NRG; PAM sequence: GAG
ggcactttgaatgctcagga

SEQ ID NO: 179209 - DNA, 20 bp, Artificial Sequence
  Description of Artificial Sequence: Synthetic oligonucleotide
  Target: LAMA2; (+) strand; PAM type: NRG; PAM sequence: AGG
gcactttgaatgctcaggag

SEQ ID NO: 179210 - DNA, 20 bp, Artificial Sequence
  Description of Artificial Sequence: Synthetic oligonucleotide
  Target: LAMA2; (+) strand; PAM type: NRG; PAM sequence: GAG
actttgaatgctcaggagag

SEQ ID NO: 179211 - DNA, 20 bp, Artificial Sequence
  Description of Artificial Sequence: Synthetic oligonucleotide
  Target: LAMA2; (+) strand; PAM type: NRG; PAM sequence: AGG
ctttgaatgctcaggagagg

SEQ ID NO: 179212 - DNA, 20 bp, Artificial Sequence
  Description of Artificial Sequence: Synthetic oligonucleotide
  Target: LAMA2; (+) strand; PAM type: NRG; PAM sequence: TGG
aggaacattgtgccctcaca

SEQ ID NO: 179213 - DNA, 20 bp, Artificial Sequence
  Description of Artificial Sequence: Synthetic oligonucleotide
  Target: LAMA2; (+) strand; PAM type: NRG; PAM sequence: CAG
aacattgtgccctcacatgg

SEQ ID NO: 179214 - DNA, 20 bp, Artificial Sequence
  Description of Artificial Sequence: Synthetic oligonucleotide
  Target: LAMA2; (+) strand; PAM type: NRG; PAM sequence: AAG
attgtgccctcacatggcag

SEQ ID NO: 179215 - DNA, 20 bp, Artificial Sequence
  Description of Artificial Sequence: Synthetic oligonucleotide
  Target: LAMA2; (+) strand; PAM type: NRG; PAM sequence: GAG
tgtgccctcacatggcagaa

SEQ ID NO: 179216 - DNA, 20 bp, Artificial Sequence
  Description of Artificial Sequence: Synthetic oligonucleotide
  Target: LAMA2; (+) strand; PAM type: NRG; PAM sequence: AAG
ccctcacatggcagaagagc

SEQ ID NO: 179217 - DNA, 20 bp, Artificial Sequence
  Description of Artificial Sequence: Synthetic oligonucleotide
  Target: LAMA2; (+) strand; PAM type: NRG; PAM sequence: GAG
ctcacatggcagaagagcaa

SEQ ID NO: 179218 - DNA, 20 bp, Artificial Sequence
  Description of Artificial Sequence: Synthetic oligonucleotide
  Target: LAMA2; (+) strand; PAM type: NRG; PAM sequence: GAG
cacatggcagaagagcaaga

SEQ ID NO: 179219 - DNA, 20 bp, Artificial Sequence
  Description of Artificial Sequence: Synthetic oligonucleotide
  Target: LAMA2; (+) strand; PAM type: NRG; PAM sequence: GAG
catggcagaagagcaagaga

SEQ ID NO: 179220 - DNA, 20 bp, Artificial Sequence
  Description of Artificial Sequence: Synthetic oligonucleotide
  Target: LAMA2; (+) strand; PAM type: NRG; PAM sequence: GAG
tggcagaagagcaagagaga

SEQ ID NO: 179221 - DNA, 20 bp, Artificial Sequence
  Description of Artificial Sequence: Synthetic oligonucleotide
  Target: LAMA2; (+) strand; PAM type: NRG; PAM sequence: GAG
gcagaagagcaagagagaga

SEQ ID NO: 179222 - DNA, 20 bp, Artificial Sequence
  Description of Artificial Sequence: Synthetic oligonucleotide
  Target: LAMA2; (+) strand; PAM type: NRG; PAM sequence: AAG
gagagagctctcacccctgt

SEQ ID NO: 179223 - DNA, 20 bp, Artificial Sequence
  Description of Artificial Sequence: Synthetic oligonucleotide
  Target: LAMA2; (+) strand; PAM type: NRG; PAM sequence: TAG
acccctgtaagcctttttaa

SEQ ID NO: 179224 - DNA, 20 bp, Artificial Sequence
  Description of Artificial Sequence: Synthetic oligonucleotide
  Target: LAMA2; (+) strand; PAM type: NRG; PAM sequence: TGG
cctgtaagcctttttaatag

SEQ ID NO: 179225 - DNA, 20 bp, Artificial Sequence
  Description of Artificial Sequence: Synthetic oligonucleotide
  Target: LAMA2; (+) strand; PAM type: NRG; PAM sequence: GAG
agtggcatcaattcattcat

SEQ ID NO: 179226 - DNA, 20 bp, Artificial Sequence
  Description of Artificial Sequence: Synthetic oligonucleotide
  Target: LAMA2; (+) strand; PAM type: NRG; PAM sequence: AGG
gtggcatcaattcattcatg

SEQ ID NO: 179227 - DNA, 20 bp, Artificial Sequence
  Description of Artificial Sequence: Synthetic oligonucleotide
  Target: LAMA2; (+) strand; PAM type: NRG; PAM sequence: CAG
catcaattcattcatgagga

SEQ ID NO: 179228 - DNA, 20 bp, Artificial Sequence
  Description of Artificial Sequence: Synthetic oligonucleotide
  Target: LAMA2; (+) strand; PAM type: NRG; PAM sequence: GAG
tcaattcattcatgaggaca

SEQ ID NO: 179229 - DNA, 20 bp, Artificial Sequence
  Description of Artificial Sequence: Synthetic oligonucleotide
  Target: LAMA2; (+) strand; PAM type: NRG; PAM sequence: AAG
atgaccgaaacacttcccaa

SEQ ID NO: 179230 - DNA, 20 bp, Artificial Sequence
  Description of Artificial Sequence: Synthetic oligonucleotide
  Target: LAMA2; (+) strand; PAM type: NRG; PAM sequence: AGG
tgaccgaaacacttcccaaa

SEQ ID NO: 179231 - DNA, 20 bp, Artificial Sequence
  Description of Artificial Sequence: Synthetic oligonucleotide
  Target: LAMA2; (+) strand; PAM type: NRG; PAM sequence: GAG
cctcccaacactgttgcact

SEQ ID NO: 179232 - DNA, 20 bp, Artificial Sequence
  Description of Artificial Sequence: Synthetic oligonucleotide
  Target: LAMA2; (+) strand; PAM type: NRG; PAM sequence: AGG
ctcccaacactgttgcactg

SEQ ID NO: 179233 - DNA, 20 bp, Artificial Sequence
  Description of Artificial Sequence: Synthetic oligonucleotide
  Target: LAMA2; (+) strand; PAM type: NRG; PAM sequence: AAG
tgcactgaggattaaatttc

SEQ ID NO: 179234 - DNA, 20 bp, Artificial Sequence
  Description of Artificial Sequence: Synthetic oligonucleotide
  Target: LAMA2; (+) strand; PAM type: NRG; PAM sequence: TGG
ttcaagcaaatgaattttgt

SEQ ID NO: 179235 - DNA, 20 bp, Artificial Sequence
  Description of Artificial Sequence: Synthetic oligonucleotide
  Target: LAMA2; (+) strand; PAM type: NRG; PAM sequence: AAG
gaattttgttggacacattc

SEQ ID NO: 179236 - DNA, 20 bp, Artificial Sequence
  Description of Artificial Sequence: Synthetic oligonucleotide
  Target: LAMA2; (+) strand; PAM type: NRG; PAM sequence: TAG
tgttggacacattcaagcca

SEQ ID NO: 179237 - DNA, 20 bp, Artificial Sequence
  Description of Artificial Sequence: Synthetic oligonucleotide
  Target: LAMA2; (+) strand; PAM type: NRG; PAM sequence: CAG
tggacacattcaagccatag

SEQ ID NO: 179238 - DNA, 20 bp, Artificial Sequence
  Description of Artificial Sequence: Synthetic oligonucleotide
  Target: LAMA2; (+) strand; PAM type: NRG; PAM sequence: TAG
aagccatagcagttactctg

SEQ ID NO: 179239 - DNA, 20 bp, Artificial Sequence
  Description of Artificial Sequence: Synthetic oligonucleotide
  Target: LAMA2; (+) strand; PAM type: NRG; PAM sequence: AGG
agccatagcagttactctgt

SEQ ID NO: 179240 - DNA, 20 bp, Artificial Sequence
  Description of Artificial Sequence: Synthetic oligonucleotide
  Target: LAMA2; (+) strand; PAM type: NRG; PAM sequence: CGG
tactctgtaggattaattgc

SEQ ID NO: 179241 - DNA, 20 bp, Artificial Sequence
  Description of Artificial Sequence: Synthetic oligonucleotide
  Target: LAMA2; (+) strand; PAM type: NRG; PAM sequence: TGG
aggattaattgccggcatat

SEQ ID NO: 179242 - DNA, 20 bp, Artificial Sequence
  Description of Artificial Sequence: Synthetic oligonucleotide
  Target: LAMA2; (+) strand; PAM type: NRG; PAM sequence: GGG
ggattaattgccggcatatt

SEQ ID NO: 179243 - DNA, 20 bp, Artificial Sequence
  Description of Artificial Sequence: Synthetic oligonucleotide
  Target: LAMA2; (+) strand; PAM type: NRG; PAM sequence: AAG
taacaacatcattttgcttc

SEQ ID NO: 179244 - DNA, 20 bp, Artificial Sequence
  Description of Artificial Sequence: Synthetic oligonucleotide
  Target: LAMA2; (+) strand; PAM type: NRG; PAM sequence: TAG
gcttcaagaatcatatttgt

SEQ ID NO: 179245 - DNA, 20 bp, Artificial Sequence
  Description of Artificial Sequence: Synthetic oligonucleotide
  Target: LAMA2; (+) strand; PAM type: NRG; PAM sequence: TAG
tagatatgtattctatacaa

SEQ ID NO: 179246 - DNA, 20 bp, Artificial Sequence
  Description of Artificial Sequence: Synthetic oligonucleotide
  Target: LAMA2; (+) strand; PAM type: NRG; PAM sequence: TGG
atgtattctatacaatagat

SEQ ID NO: 179247 - DNA, 20 bp, Artificial Sequence
  Description of Artificial Sequence: Synthetic oligonucleotide
  Target: LAMA2; (+) strand; PAM type: NRG; PAM sequence: TAG
aatagattggttgtaacctc

SEQ ID NO: 179248 - DNA, 20 bp, Artificial Sequence
  Description of Artificial Sequence: Synthetic oligonucleotide
  Target: LAMA2; (+) strand; PAM type: NRG; PAM sequence: TAG
gttgtaacctctagtgacat

SEQ ID NO: 179249 - DNA, 20 bp, Artificial Sequence
  Description of Artificial Sequence: Synthetic oligonucleotide
  Target: LAMA2; (+) strand; PAM type: NRG; PAM sequence: CAG
ctctagtgacattagatact

SEQ ID NO: 179250 - DNA, 20 bp, Artificial Sequence
  Description of Artificial Sequence: Synthetic oligonucleotide
  Target: LAMA2; (+) strand; PAM type: NRG; PAM sequence: TGG
ttagatactcagttttaaaa

SEQ ID NO: 179251 - DNA, 20 bp, Artificial Sequence
  Description of Artificial Sequence: Synthetic oligonucleotide
  Target: LAMA2; (+) strand; PAM type: NRG; PAM sequence: TAG
ttttaaaatggcttctctct

SEQ ID NO: 179252 - DNA, 20 bp, Artificial Sequence
  Description of Artificial Sequence: Synthetic oligonucleotide
  Target: LAMA2; (+) strand; PAM type: NRG; PAM sequence: TGG
aatggcttctctcttagact

SEQ ID NO: 179253 - DNA, 20 bp, Artificial Sequence
  Description of Artificial Sequence: Synthetic oligonucleotide
  Target: LAMA2; (+) strand; PAM type: NRG; PAM sequence: GAG
tggcttctctcttagacttg

SEQ ID NO: 179254 - DNA, 20 bp, Artificial Sequence
  Description of Artificial Sequence: Synthetic oligonucleotide
  Target: LAMA2; (+) strand; PAM type: NRG; PAM sequence: CAG
tctcttagacttggagttct

SEQ ID NO: 179255 - DNA, 20 bp, Artificial Sequence
  Description of Artificial Sequence: Synthetic oligonucleotide
  Target: LAMA2; (+) strand; PAM type: NRG; PAM sequence: GAG
tcttagacttggagttctca

SEQ ID NO: 179256 - DNA, 20 bp, Artificial Sequence
  Description of Artificial Sequence: Synthetic oligonucleotide
  Target: LAMA2; (+) strand; PAM type: NRG; PAM sequence: CAG
tagacttggagttctcagag

SEQ ID NO: 179257 - DNA, 20 bp, Artificial Sequence
  Description of Artificial Sequence: Synthetic oligonucleotide
  Target: LAMA2; (+) strand; PAM type: NRG; PAM sequence: TAG
cttggagttctcagagcagt

SEQ ID NO: 179258 - DNA, 20 bp, Artificial Sequence
  Description of Artificial Sequence: Synthetic oligonucleotide
  Target: LAMA2; (+) strand; PAM type: NRG; PAM sequence: TAG
ttctcagagcagttagattt

SEQ ID NO: 179259 - DNA, 20 bp, Artificial Sequence
  Description of Artificial Sequence: Synthetic oligonucleotide
  Target: LAMA2; (+) strand; PAM type: NRG; PAM sequence: GAG
tttttttttttttttttttt

SEQ ID NO: 179260 - DNA, 20 bp, Artificial Sequence
  Description of Artificial Sequence: Synthetic oligonucleotide
  Target: LAMA2; (+) strand; PAM type: NRG; PAM sequence: TGG
ttttttttttttttttgaga

SEQ ID NO: 179261 - DNA, 20 bp, Artificial Sequence
  Description of Artificial Sequence: Synthetic oligonucleotide
  Target: LAMA2; (+) strand; PAM type: NRG; PAM sequence: TGG
tgagatggaatctcactctg

SEQ ID NO: 179262 - DNA, 20 bp, Artificial Sequence
  Description of Artificial Sequence: Synthetic oligonucleotide
  Target: LAMA2; (+) strand; PAM type: NRG; PAM sequence: CAG
atggaatctcactctgtggc

SEQ ID NO: 179263 - DNA, 20 bp, Artificial Sequence
  Description of Artificial Sequence: Synthetic oligonucleotide
  Target: LAMA2; (+) strand; PAM type: NRG; PAM sequence: AGG
tggaatctcactctgtggcc

SEQ ID NO: 179264 - DNA, 20 bp, Artificial Sequence
  Description of Artificial Sequence: Synthetic oligonucleotide
  Target: LAMA2; (+) strand; PAM type: NRG; PAM sequence: TGG
atctcactctgtggccaggc

SEQ ID NO: 179265 - DNA, 20 bp, Artificial Sequence
  Description of Artificial Sequence: Synthetic oligonucleotide
  Target: LAMA2; (+) strand; PAM type: NRG; PAM sequence: GAG
ctcactctgtggccaggctg

SEQ ID NO: 179266 - DNA, 20 bp, Artificial Sequence
  Description of Artificial Sequence: Synthetic oligonucleotide
  Target: LAMA2; (+) strand; PAM type: NRG; PAM sequence: CAG
tctgtggccaggctggagtg

SEQ ID NO: 179267 - DNA, 20 bp, Artificial Sequence
  Description of Artificial Sequence: Synthetic oligonucleotide
  Target: LAMA2; (+) strand; PAM type: NRG; PAM sequence: TGG
gtggccaggctggagtgcag

SEQ ID NO: 179268 - DNA, 20 bp, Artificial Sequence
  Description of Artificial Sequence: Synthetic oligonucleotide
  Target: LAMA2; (+) strand; PAM type: NRG; PAM sequence: GAG
ggccaggctggagtgcagtg

SEQ ID NO: 179269 - DNA, 20 bp, Artificial Sequence
  Description of Artificial Sequence: Synthetic oligonucleotide
  Target: LAMA2; (+) strand; PAM type: NRG; PAM sequence: CAG
ggagtgcagtggagcaatct

SEQ ID NO: 179270 - DNA, 20 bp, Artificial Sequence
  Description of Artificial Sequence: Synthetic oligonucleotide
  Target: LAMA2; (+) strand; PAM type: NRG; PAM sequence: CAG
ggagcaatctcagctcactg

SEQ ID NO: 179271 - DNA, 20 bp, Artificial Sequence
  Description of Artificial Sequence: Synthetic oligonucleotide
  Target: LAMA2; (+) strand; PAM type: NRG; PAM sequence: CAG
tcactgcagcctccgcctcc

SEQ ID NO: 179272 - DNA, 20 bp, Artificial Sequence
  Description of Artificial Sequence: Synthetic oligonucleotide
  Target: LAMA2; (+) strand; PAM type: NRG; PAM sequence: AGG
cactgcagcctccgcctccc

SEQ ID NO: 179273 - DNA, 20 bp, Artificial Sequence
  Description of Artificial Sequence: Synthetic oligonucleotide
  Target: LAMA2; (+) strand; PAM type: NRG; PAM sequence: AAG
agcctccgcctcccaggttc

SEQ ID NO: 179274 - DNA, 20 bp, Artificial Sequence
  Description of Artificial Sequence: Synthetic oligonucleotide
  Target: LAMA2; (+) strand; PAM type: NRG; PAM sequence: CAG
ttcaagcaattctcctgcct

SEQ ID NO: 179275 - DNA, 20 bp, Artificial Sequence
  Description of Artificial Sequence: Synthetic oligonucleotide
  Target: LAMA2; (+) strand; PAM type: NRG; PAM sequence: GAG
ttctcctgcctcagcctcct

SEQ ID NO: 179276 - DNA, 20 bp, Artificial Sequence
  Description of Artificial Sequence: Synthetic oligonucleotide
  Target: LAMA2; (+) strand; PAM type: NRG; PAM sequence: TAG
tcctgcctcagcctcctgag

SEQ ID NO: 179277 - DNA, 20 bp, Artificial Sequence
  Description of Artificial Sequence: Synthetic oligonucleotide
  Target: LAMA2; (+) strand; PAM type: NRG; PAM sequence: TGG
gcctcagcctcctgagtagc

SEQ ID NO: 179278 - DNA, 20 bp, Artificial Sequence
  Description of Artificial Sequence: Synthetic oligonucleotide
  Target: LAMA2; (+) strand; PAM type: NRG; PAM sequence: GGG
cctcagcctcctgagtagct

SEQ ID NO: 179279 - DNA, 20 bp, Artificial Sequence
  Description of Artificial Sequence: Synthetic oligonucleotide
  Target: LAMA2; (+) strand; PAM type: NRG; PAM sequence: CAG
ctcctgagtagctgggacta

SEQ ID NO: 179280 - DNA, 20 bp, Artificial Sequence
  Description of Artificial Sequence: Synthetic oligonucleotide
  Target: LAMA2; (+) strand; PAM type: NRG; PAM sequence: AGG
tcctgagtagctgggactac

SEQ ID NO: 179281 - DNA, 20 bp, Artificial Sequence
  Description of Artificial Sequence: Synthetic oligonucleotide
  Target: LAMA2; (+) strand; PAM type: NRG; PAM sequence: CAG
caggcacatgtcaccacgcc

SEQ ID NO: 179282 - DNA, 20 bp, Artificial Sequence
  Description of Artificial Sequence: Synthetic oligonucleotide
  Target: LAMA2; (+) strand; PAM type: NRG; PAM sequence: TAG
gctaattgtttttgtatttt

SEQ ID NO: 179283 - DNA, 20 bp, Artificial Sequence
  Description of Artificial Sequence: Synthetic oligonucleotide
  Target: LAMA2; (+) strand; PAM type: NRG; PAM sequence: CAG
ttttgtatttttagttgata

SEQ ID NO: 179284 - DNA, 20 bp, Artificial Sequence
  Description of Artificial Sequence: Synthetic oligonucleotide
  Target: LAMA2; (+) strand; PAM type: NRG; PAM sequence: AGG
tttgtatttttagttgatac

SEQ ID NO: 179285 - DNA, 20 bp, Artificial Sequence
  Description of Artificial Sequence: Synthetic oligonucleotide
  Target: LAMA2; (+) strand; PAM type: NRG; PAM sequence: GGG
ttgtatttttagttgataca

SEQ ID NO: 179286 - DNA, 20 bp, Artificial Sequence
  Description of Artificial Sequence: Synthetic oligonucleotide
  Target: LAMA2; (+) strand; PAM type: NRG; PAM sequence: TGG
gatacagggcttcaccatgt

SEQ ID NO: 179287 - DNA, 20 bp, Artificial Sequence
  Description of Artificial Sequence: Synthetic oligonucleotide
  Target: LAMA2; (+) strand; PAM type: NRG; PAM sequence: CAG
cagggcttcaccatgttggc

SEQ ID NO: 179288 - DNA, 20 bp, Artificial Sequence
  Description of Artificial Sequence: Synthetic oligonucleotide
  Target: LAMA2; (+) strand; PAM type: NRG; PAM sequence: AGG
agggcttcaccatgttggcc

SEQ ID NO: 179289 - DNA, 20 bp, Artificial Sequence
  Description of Artificial Sequence: Synthetic oligonucleotide
  Target: LAMA2; (+) strand; PAM type: NRG; PAM sequence: TGG
acctcgtgatccgcctgcct

SEQ ID NO: 179290 - DNA, 20 bp, Artificial Sequence
  Description of Artificial Sequence: Synthetic oligonucleotide
  Target: LAMA2; (+) strand; PAM type: NRG; PAM sequence: AAG
ccgcctgccttggcctccca

SEQ ID NO: 179291 - DNA, 20 bp, Artificial Sequence
  Description of Artificial Sequence: Synthetic oligonucleotide
  Target: LAMA2; (+) strand; PAM type: NRG; PAM sequence: TGG
gccttggcctcccaaagttc

SEQ ID NO: 179292 - DNA, 20 bp, Artificial Sequence
  Description of Artificial Sequence: Synthetic oligonucleotide
  Target: LAMA2; (+) strand; PAM type: NRG; PAM sequence: GGG
ccttggcctcccaaagttct

SEQ ID NO: 179293 - DNA, 20 bp, Artificial Sequence
  Description of Artificial Sequence: Synthetic oligonucleotide
  Target: LAMA2; (+) strand; PAM type: NRG; PAM sequence: CAG
ctcccaaagttctgggatta

SEQ ID NO: 179294 - DNA, 20 bp, Artificial Sequence
  Description of Artificial Sequence: Synthetic oligonucleotide
  Target: LAMA2; (+) strand; PAM type: NRG; PAM sequence: AGG
tcccaaagttctgggattac

SEQ ID NO: 179295 - DNA, 20 bp, Artificial Sequence
  Description of Artificial Sequence: Synthetic oligonucleotide
  Target: LAMA2; (+) strand; PAM type: NRG; PAM sequence: GAG
agttctgggattacaggcgt

SEQ ID NO: 179296 - DNA, 20 bp, Artificial Sequence
  Description of Artificial Sequence: Synthetic oligonucleotide
  Target: LAMA2; (+) strand; PAM type: NRG; PAM sequence: CGG
caggcgtgagccactgcacc

SEQ ID NO: 179297 - DNA, 20 bp, Artificial Sequence
  Description of Artificial Sequence: Synthetic oligonucleotide
  Target: LAMA2; (+) strand; PAM type: NRG; PAM sequence: TGG
cggctctgtctgttacactt

SEQ ID NO: 179298 - DNA, 20 bp, Artificial Sequence
  Description of Artificial Sequence: Synthetic oligonucleotide
  Target: LAMA2; (+) strand; PAM type: NRG; PAM sequence: TGG
ccttttcaacacactaatca

SEQ ID NO: 179299 - DNA, 20 bp, Artificial Sequence
  Description of Artificial Sequence: Synthetic oligonucleotide
  Target: LAMA2; (+) strand; PAM type: NRG; PAM sequence: CAG
tcccgtttttttttttttac

SEQ ID NO: 179300 - DNA, 20 bp, Artificial Sequence
  Description of Artificial Sequence: Synthetic oligonucleotide
  Target: LAMA2; (+) strand; PAM type: NRG; PAM sequence: AGG
cccgtttttttttttttacc

SEQ ID NO: 179301 - DNA, 20 bp, Artificial Sequence
  Description of Artificial Sequence: Synthetic oligonucleotide
  Target: LAMA2; (+) strand; PAM type: NRG; PAM sequence: AAG
tttttttaccaggcttacct

SEQ ID NO: 179302 - DNA, 20 bp, Artificial Sequence
  Description of Artificial Sequence: Synthetic oligonucleotide
  Target: LAMA2; (+) strand; PAM type: NRG; PAM sequence: GAG
tcacatattacatttatatt

SEQ ID NO: 179303 - DNA, 20 bp, Artificial Sequence
  Description of Artificial Sequence: Synthetic oligonucleotide
  Target: LAMA2; (+) strand; PAM type: NRG; PAM sequence: GAG
ctcttctctaaataataact

SEQ ID NO: 179304 - DNA, 20 bp, Artificial Sequence
  Description of Artificial Sequence: Synthetic oligonucleotide
  Target: LAMA2; (+) strand; PAM type: NRG; PAM sequence: AGG
tcttctctaaataataactg

SEQ ID NO: 179305 - DNA, 20 bp, Artificial Sequence
  Description of Artificial Sequence: Synthetic oligonucleotide
  Target: LAMA2; (+) strand; PAM type: NRG; PAM sequence: GGG
cttctctaaataataactga

SEQ ID NO: 179306 - DNA, 20 bp, Artificial Sequence
  Description of Artificial Sequence: Synthetic oligonucleotide
  Target: LAMA2; (+) strand; PAM type: NRG; PAM sequence: TGG
tgttttgttttgttttgaca

SEQ ID NO: 179307 - DNA, 20 bp, Artificial Sequence
  Description of Artificial Sequence: Synthetic oligonucleotide
  Target: LAMA2; (+) strand; PAM type: NRG; PAM sequence: GAG
ttttgttttgttttgacatg

SEQ ID NO: 179308 - DNA, 20 bp, Artificial Sequence
  Description of Artificial Sequence: Synthetic oligonucleotide
  Target: LAMA2; (+) strand; PAM type: NRG; PAM sequence: CAG
tggagtctcactttgtcacc

SEQ ID NO: 179309 - DNA, 20 bp, Artificial Sequence
  Description of Artificial Sequence: Synthetic oligonucleotide
  Target: LAMA2; (+) strand; PAM type: NRG; PAM sequence: AGG
ggagtctcactttgtcaccc

SEQ ID NO: 179310 - DNA, 20 bp, Artificial Sequence
  Description of Artificial Sequence: Synthetic oligonucleotide
  Target: LAMA2; (+) strand; PAM type: NRG; PAM sequence: TGG
tctcactttgtcacccaggc

SEQ ID NO: 179311 - DNA, 20 bp, Artificial Sequence
  Description of Artificial Sequence: Synthetic oligonucleotide
  Target: LAMA2; (+) strand; PAM type: NRG; PAM sequence: GAG
tcactttgtcacccaggctg

SEQ ID NO: 179312 - DNA, 20 bp, Artificial Sequence
  Description of Artificial Sequence: Synthetic oligonucleotide
  Target: LAMA2; (+) strand; PAM type: NRG; PAM sequence: CAG
ttgtcacccaggctggagta

SEQ ID NO: 179313 - DNA, 20 bp, Artificial Sequence
  Description of Artificial Sequence: Synthetic oligonucleotide
  Target: LAMA2; (+) strand; PAM type: NRG; PAM sequence: TGG
tcacccaggctggagtacag

SEQ ID NO: 179314 - DNA, 20 bp, Artificial Sequence
  Description of Artificial Sequence: Synthetic oligonucleotide
  Target: LAMA2; (+) strand; PAM type: NRG; PAM sequence: CAG
ggagtacagtggcacgatct

SEQ ID NO: 179315 - DNA, 20 bp, Artificial Sequence
  Description of Artificial Sequence: Synthetic oligonucleotide
  Target: LAMA2; (+) strand; PAM type: NRG; PAM sequence: TGG
tcactgcaacctctgcctct

SEQ ID NO: 179316 - DNA, 20 bp, Artificial Sequence
  Description of Artificial Sequence: Synthetic oligonucleotide
  Target: LAMA2; (+) strand; PAM type: NRG; PAM sequence: GGG
cactgcaacctctgcctctt

SEQ ID NO: 179317 - DNA, 20 bp, Artificial Sequence
  Description of Artificial Sequence: Synthetic oligonucleotide
  Target: LAMA2; (+) strand; PAM type: NRG; PAM sequence: AAG
aacctctgcctcttgggttc

SEQ ID NO: 179318 - DNA, 20 bp, Artificial Sequence
  Description of Artificial Sequence: Synthetic oligonucleotide
  Target: LAMA2; (+) strand; PAM type: NRG; PAM sequence: CAG
ttcaagcaattctcctgact

SEQ ID NO: 179319 - DNA, 20 bp, Artificial Sequence
  Description of Artificial Sequence: Synthetic oligonucleotide
  Target: LAMA2; (+) strand; PAM type: NRG; PAM sequence: GAG
ttctcctgactcagcctcct

SEQ ID NO: 179320 - DNA, 20 bp, Artificial Sequence
  Description of Artificial Sequence: Synthetic oligonucleotide
  Target: LAMA2; (+) strand; PAM type: NRG; PAM sequence: TAG
tcctgactcagcctcctgag

SEQ ID NO: 179321 - DNA, 20 bp, Artificial Sequence
  Description of Artificial Sequence: Synthetic oligonucleotide
  Target: LAMA2; (+) strand; PAM type: NRG; PAM sequence: TGG
gactcagcctcctgagtagc

SEQ ID NO: 179322 - DNA, 20 bp, Artificial Sequence
  Description of Artificial Sequence: Synthetic oligonucleotide
  Target: LAMA2; (+) strand; PAM type: NRG; PAM sequence: GGG
actcagcctcctgagtagct

SEQ ID NO: 179323 - DNA, 20 bp, Artificial Sequence
  Description of Artificial Sequence: Synthetic oligonucleotide
  Target: LAMA2; (+) strand; PAM type: NRG; PAM sequence: CAG
ctcctgagtagctgggacta

SEQ ID NO: 179324 - DNA, 20 bp, Artificial Sequence
  Description of Artificial Sequence: Synthetic oligonucleotide
  Target: LAMA2; (+) strand; PAM type: NRG; PAM sequence: AGG
tcctgagtagctgggactac

SEQ ID NO: 179325 - DNA, 20 bp, Artificial Sequence
  Description of Artificial Sequence: Synthetic oligonucleotide
  Target: LAMA2; (+) strand; PAM type: NRG; PAM sequence: TGG
acaggcacatgccaccacca

SEQ ID NO: 179326 - DNA, 20 bp, Artificial Sequence
  Description of Artificial Sequence: Synthetic oligonucleotide
  Target: LAMA2; (+) strand; PAM type: NRG; PAM sequence: CGG
gcacatgccaccaccatggc

SEQ ID NO: 179327 - DNA, 20 bp, Artificial Sequence
  Description of Artificial Sequence: Synthetic oligonucleotide
  Target: LAMA2; (+) strand; PAM type: NRG; PAM sequence: TAG
ccggctaatttttgtatttt

SEQ ID NO: 179328 - DNA, 20 bp, Artificial Sequence
  Description of Artificial Sequence: Synthetic oligonucleotide
  Target: LAMA2; (+) strand; PAM type: NRG; PAM sequence: TAG
gctaatttttgtatttttag

SEQ ID NO: 179329 - DNA, 20 bp, Artificial Sequence
  Description of Artificial Sequence: Synthetic oligonucleotide
  Target: LAMA2; (+) strand; PAM type: NRG; PAM sequence: GAG
taatttttgtatttttagta

SEQ ID NO: 179330 - DNA, 20 bp, Artificial Sequence
  Description of Artificial Sequence: Synthetic oligonucleotide
  Target: LAMA2; (+) strand; PAM type: NRG; PAM sequence: CAG
ttttgtatttttagtagaga

SEQ ID NO: 179331 - DNA, 20 bp, Artificial Sequence
  Description of Artificial Sequence: Synthetic oligonucleotide
  Target: LAMA2; (+) strand; PAM type: NRG; PAM sequence: AGG
tttgtatttttagtagagac

SEQ ID NO: 179332 - DNA, 20 bp, Artificial Sequence
  Description of Artificial Sequence: Synthetic oligonucleotide
  Target: LAMA2; (+) strand; PAM type: NRG; PAM sequence: GGG
ttgtatttttagtagagaca

SEQ ID NO: 179333 - DNA, 20 bp, Artificial Sequence
  Description of Artificial Sequence: Synthetic oligonucleotide
  Target: LAMA2; (+) strand; PAM type: NRG; PAM sequence: TGG
gagacagggtttcaccatgt

SEQ ID NO: 179334 - DNA, 20 bp, Artificial Sequence
  Description of Artificial Sequence: Synthetic oligonucleotide
  Target: LAMA2; (+) strand; PAM type: NRG; PAM sequence: CAG
cagggtttcaccatgttggc

SEQ ID NO: 179335 - DNA, 20 bp, Artificial Sequence
  Description of Artificial Sequence: Synthetic oligonucleotide
  Target: LAMA2; (+) strand; PAM type: NRG; PAM sequence: AGG
agggtttcaccatgttggcc

SEQ ID NO: 179336 - DNA, 20 bp, Artificial Sequence
  Description of Artificial Sequence: Synthetic oligonucleotide
  Target: LAMA2; (+) strand; PAM type: NRG; PAM sequence: TGG
tttcaccatgttggccagga

SEQ ID NO: 179337 - DNA, 20 bp, Artificial Sequence
  Description of Artificial Sequence: Synthetic oligonucleotide
  Target: LAMA2; (+) strand; PAM type: NRG; PAM sequence: TGG
ccatgttggccaggatggtc

SEQ ID NO: 179338 - DNA, 20 bp, Artificial Sequence
  Description of Artificial Sequence: Synthetic oligonucleotide
  Target: LAMA2; (+) strand; PAM type: NRG; PAM sequence: CAG
acctcatgatccgcccatct

SEQ ID NO: 179339 - DNA, 20 bp, Artificial Sequence
  Description of Artificial Sequence: Synthetic oligonucleotide
  Target: LAMA2; (+) strand; PAM type: NRG; PAM sequence: AAG
ccgcccatctcagcctccca

SEQ ID NO: 179340 - DNA, 20 bp, Artificial Sequence
  Description of Artificial Sequence: Synthetic oligonucleotide
  Target: LAMA2; (+) strand; PAM type: NRG; PAM sequence: TGG
atctcagcctcccaaagtgc

SEQ ID NO: 179341 - DNA, 20 bp, Artificial Sequence
  Description of Artificial Sequence: Synthetic oligonucleotide
  Target: LAMA2; (+) strand; PAM type: NRG; PAM sequence: GGG
tctcagcctcccaaagtgct

SEQ ID NO: 179342 - DNA, 20 bp, Artificial Sequence
  Description of Artificial Sequence: Synthetic oligonucleotide
  Target: LAMA2; (+) strand; PAM type: NRG; PAM sequence: CAG
ctcccaaagtgctgggatta

SEQ ID NO: 179343 - DNA, 20 bp, Artificial Sequence
  Description of Artificial Sequence: Synthetic oligonucleotide
  Target: LAMA2; (+) strand; PAM type: NRG; PAM sequence: GAG
agtgctgggattacagatgt

SEQ ID NO: 179344 - DNA, 20 bp, Artificial Sequence
  Description of Artificial Sequence: Synthetic oligonucleotide
  Target: LAMA2; (+) strand; PAM type: NRG; PAM sequence: CAG
cagatgtgagccatcacacc

SEQ ID NO: 179345 - DNA, 20 bp, Artificial Sequence
  Description of Artificial Sequence: Synthetic oligonucleotide
  Target: LAMA2; (+) strand; PAM type: NRG; PAM sequence: TAG
tttaaacaaaactgatttat

SEQ ID NO: 179346 - DNA, 20 bp, Artificial Sequence
  Description of Artificial Sequence: Synthetic oligonucleotide
  Target: LAMA2; (+) strand; PAM type: NRG; PAM sequence: AGG
ttaaacaaaactgatttatt

SEQ ID NO: 179347 - DNA, 20 bp, Artificial Sequence
  Description of Artificial Sequence: Synthetic oligonucleotide
  Target: LAMA2; (+) strand; PAM type: NRG; PAM sequence: TAG
tgatttattaggaattaaac

SEQ ID NO: 179348 - DNA, 20 bp, Artificial Sequence
  Description of Artificial Sequence: Synthetic oligonucleotide
  Target: LAMA2; (+) strand; PAM type: NRG; PAM sequence: CAG
gaattaaactagccataata

SEQ ID NO: 179349 - DNA, 20 bp, Artificial Sequence
  Description of Artificial Sequence: Synthetic oligonucleotide
  Target: LAMA2; (+) strand; PAM type: NRG; PAM sequence: TAG
aactagccataatacagcca

SEQ ID NO: 179350 - DNA, 20 bp, Artificial Sequence
  Description of Artificial Sequence: Synthetic oligonucleotide
  Target: LAMA2; (+) strand; PAM type: NRG; PAM sequence: AGG
actagccataatacagccat

SEQ ID NO: 179351 - DNA, 20 bp, Artificial Sequence
  Description of Artificial Sequence: Synthetic oligonucleotide
  Target: LAMA2; (+) strand; PAM type: NRG; PAM sequence: GGG
ctagccataatacagccata

SEQ ID NO: 179352 - DNA, 20 bp, Artificial Sequence
  Description of Artificial Sequence: Synthetic oligonucleotide
  Target: LAMA2; (+) strand; PAM type: NRG; PAM sequence: AAG
cataatacagccatagggcc

SEQ ID NO: 179353 - DNA, 20 bp, Artificial Sequence
  Description of Artificial Sequence: Synthetic oligonucleotide
  Target: LAMA2; (+) strand; PAM type: NRG; PAM sequence: AAG
agccatagggccaagctata

SEQ ID NO: 179354 - DNA, 20 bp, Artificial Sequence
  Description of Artificial Sequence: Synthetic oligonucleotide
  Target: LAMA2; (+) strand; PAM type: NRG; PAM sequence: AAG
gcatttattaaataaaaatg

SEQ ID NO: 179355 - DNA, 20 bp, Artificial Sequence
  Description of Artificial Sequence: Synthetic oligonucleotide
  Target: LAMA2; (+) strand; PAM type: NRG; PAM sequence: CAG
aaaatgaagtaaactacata

SEQ ID NO: 179356 - DNA, 20 bp, Artificial Sequence
  Description of Artificial Sequence: Synthetic oligonucleotide
  Target: LAMA2; (+) strand; PAM type: NRG; PAM sequence: CAG
agtcgctttgactactaatt

SEQ ID NO: 179357 - DNA, 20 bp, Artificial Sequence
  Description of Artificial Sequence: Synthetic oligonucleotide
  Target: LAMA2; (+) strand; PAM type: NRG; PAM sequence: CAG
actactaattcagccccatt

SEQ ID NO: 179358 - DNA, 20 bp, Artificial Sequence
  Description of Artificial Sequence: Synthetic oligonucleotide
  Target: LAMA2; (+) strand; PAM type: NRG; PAM sequence: TGG
aattcagccccattcagaat

SEQ ID NO: 179359 - DNA, 20 bp, Artificial Sequence
  Description of Artificial Sequence: Synthetic oligonucleotide
  Target: LAMA2; (+) strand; PAM type: NRG; PAM sequence: CAG
aattggatatgattgtctgc

SEQ ID NO: 179360 - DNA, 20 bp, Artificial Sequence
  Description of Artificial Sequence: Synthetic oligonucleotide
  Target: LAMA2; (+) strand; PAM type: NRG; PAM sequence: AGG
attggatatgattgtctgcc

SEQ ID NO: 179361 - DNA, 20 bp, Artificial Sequence
  Description of Artificial Sequence: Synthetic oligonucleotide
  Target: LAMA2; (+) strand; PAM type: NRG; PAM sequence: GGG
ttggatatgattgtctgcca

SEQ ID NO: 179362 - DNA, 20 bp, Artificial Sequence
  Description of Artificial Sequence: Synthetic oligonucleotide
  Target: LAMA2; (+) strand; PAM type: NRG; PAM sequence: CAG
ggataacgcactatgctatt

SEQ ID NO: 179363 - DNA, 20 bp, Artificial Sequence
  Description of Artificial Sequence: Synthetic oligonucleotide
  Target: LAMA2; (+) strand; PAM type: NRG; PAM sequence: CAG
tcagttctactcatgaattc

SEQ ID NO: 179364 - DNA, 20 bp, Artificial Sequence
  Description of Artificial Sequence: Synthetic oligonucleotide
  Target: LAMA2; (+) strand; PAM type: NRG; PAM sequence: CAG
ttctactcatgaattccagt

SEQ ID NO: 179365 - DNA, 20 bp, Artificial Sequence
  Description of Artificial Sequence: Synthetic oligonucleotide
  Target: LAMA2; (+) strand; PAM type: NRG; PAM sequence: TGG
tgatcctcttatgatgtcaa

SEQ ID NO: 179366 - DNA, 20 bp, Artificial Sequence
  Description of Artificial Sequence: Synthetic oligonucleotide
  Target: LAMA2; (+) strand; PAM type: NRG; PAM sequence: TAG
tatgatgtcaatggtacgta

SEQ ID NO: 179367 - DNA, 20 bp, Artificial Sequence
  Description of Artificial Sequence: Synthetic oligonucleotide
  Target: LAMA2; (+) strand; PAM type: NRG; PAM sequence: CAG
atggtacgtatagcctgcct

SEQ ID NO: 179368 - DNA, 20 bp, Artificial Sequence
  Description of Artificial Sequence: Synthetic oligonucleotide
  Target: LAMA2; (+) strand; PAM type: NRG; PAM sequence: AAG
tattaaattttctcaatgcc

SEQ ID NO: 179369 - DNA, 20 bp, Artificial Sequence
  Description of Artificial Sequence: Synthetic oligonucleotide
  Target: LAMA2; (+) strand; PAM type: NRG; PAM sequence: AGG
attaaattttctcaatgcca

SEQ ID NO: 179370 - DNA, 20 bp, Artificial Sequence
  Description of Artificial Sequence: Synthetic oligonucleotide
  Target: LAMA2; (+) strand; PAM type: NRG; PAM sequence: TGG
gtcttctctgataatgattt

SEQ ID NO: 179371 - DNA, 20 bp, Artificial Sequence
  Description of Artificial Sequence: Synthetic oligonucleotide
  Target: LAMA2; (+) strand; PAM type: NRG; PAM sequence: CAG
taatgattttggttcacttt

SEQ ID NO: 179372 - DNA, 20 bp, Artificial Sequence
  Description of Artificial Sequence: Synthetic oligonucleotide
  Target: LAMA2; (+) strand; PAM type: NRG; PAM sequence: CAG
tgattttggttcactttcag

SEQ ID NO: 179373 - DNA, 20 bp, Artificial Sequence
  Description of Artificial Sequence: Synthetic oligonucleotide
  Target: LAMA2; (+) strand; PAM type: NRG; PAM sequence: AAG
ctgaacattaaaaatatctg

SEQ ID NO: 179374 - DNA, 20 bp, Artificial Sequence
  Description of Artificial Sequence: Synthetic oligonucleotide
  Target: LAMA2; (+) strand; PAM type: NRG; PAM sequence: TGG
tctttttatctctaatccct

SEQ ID NO: 179375 - DNA, 20 bp, Artificial Sequence
  Description of Artificial Sequence: Synthetic oligonucleotide
  Target: LAMA2; (+) strand; PAM type: NRG; PAM sequence: TGG
ctaatcccttggatgaccct

SEQ ID NO: 179376 - DNA, 20 bp, Artificial Sequence
  Description of Artificial Sequence: Synthetic oligonucleotide
  Target: LAMA2; (+) strand; PAM type: NRG; PAM sequence: TAG
cccttggatgacccttggta

SEQ ID NO: 179377 - DNA, 20 bp, Artificial Sequence
  Description of Artificial Sequence: Synthetic oligonucleotide
  Target: LAMA2; (+) strand; PAM type: NRG; PAM sequence: CAG
gtatagctgccattgtatca

SEQ ID NO: 179378 - DNA, 20 bp, Artificial Sequence
  Description of Artificial Sequence: Synthetic oligonucleotide
  Target: LAMA2; (+) strand; PAM type: NRG; PAM sequence: AAG
atcacagaacaccctttgcc

SEQ ID NO: 179379 - DNA, 20 bp, Artificial Sequence
  Description of Artificial Sequence: Synthetic oligonucleotide
  Target: LAMA2; (+) strand; PAM type: NRG; PAM sequence: AAG
gctttgccatattaacatcc

SEQ ID NO: 179380 - DNA, 20 bp, Artificial Sequence
  Description of Artificial Sequence: Synthetic oligonucleotide
  Target: LAMA2; (+) strand; PAM type: NRG; PAM sequence: TAG
cctactctcaacactgtatg

SEQ ID NO: 179381 - DNA, 20 bp, Artificial Sequence
  Description of Artificial Sequence: Synthetic oligonucleotide
  Target: LAMA2; (+) strand; PAM type: NRG; PAM sequence: AAG
actctcaacactgtatgtag

SEQ ID NO: 179382 - DNA, 20 bp, Artificial Sequence
  Description of Artificial Sequence: Synthetic oligonucleotide
  Target: LAMA2; (+) strand; PAM type: NRG; PAM sequence: AGG
ctctcaacactgtatgtaga

SEQ ID NO: 179383 - DNA, 20 bp, Artificial Sequence
  Description of Artificial Sequence: Synthetic oligonucleotide
  Target: LAMA2; (+) strand; PAM type: NRG; PAM sequence: GGG
tctcaacactgtatgtagaa

SEQ ID NO: 179384 - DNA, 20 bp, Artificial Sequence
  Description of Artificial Sequence: Synthetic oligonucleotide
  Target: LAMA2; (+) strand; PAM type: NRG; PAM sequence: AAG
gggaaattccatgatttgtg

SEQ ID NO: 179385 - DNA, 20 bp, Artificial Sequence
  Description of Artificial Sequence: Synthetic oligonucleotide
  Target: LAMA2; (+) strand; PAM type: NRG; PAM sequence: CAG
aaattccatgatttgtgaag

SEQ ID NO: 179386 - DNA, 20 bp, Artificial Sequence
  Description of Artificial Sequence: Synthetic oligonucleotide
  Target: LAMA2; (+) strand; PAM type: NRG; PAM sequence: AGG
aattccatgatttgtgaagc

SEQ ID NO: 179387 - DNA, 20 bp, Artificial Sequence
  Description of Artificial Sequence: Synthetic oligonucleotide
  Target: LAMA2; (+) strand; PAM type: NRG; PAM sequence: CAG
caactgaaaaccaccctatc

SEQ ID NO: 179388 - DNA, 20 bp, Artificial Sequence
  Description of Artificial Sequence: Synthetic oligonucleotide
  Target: LAMA2; (+) strand; PAM type: NRG; PAM sequence: AAG
ctgaaaaccaccctatccag

SEQ ID NO: 179389 - DNA, 20 bp, Artificial Sequence
  Description of Artificial Sequence: Synthetic oligonucleotide
  Target: LAMA2; (+) strand; PAM type: NRG; PAM sequence: TAG
tatccagaagactgtctccc

SEQ ID NO: 179390 - DNA, 20 bp, Artificial Sequence
  Description of Artificial Sequence: Synthetic oligonucleotide
  Target: LAMA2; (+) strand; PAM type: NRG; PAM sequence: AGG
atccagaagactgtctccct

SEQ ID NO: 179391 - DNA, 20 bp, Artificial Sequence
  Description of Artificial Sequence: Synthetic oligonucleotide
  Target: LAMA2; (+) strand; PAM type: NRG; PAM sequence: CAG
aagactgtctccctaggaca

SEQ ID NO: 179392 - DNA, 20 bp, Artificial Sequence
  Description of Artificial Sequence: Synthetic oligonucleotide
  Target: LAMA2; (+) strand; PAM type: NRG; PAM sequence: GAG
ggacacagaacaaacactct

SEQ ID NO: 179393 - DNA, 20 bp, Artificial Sequence
  Description of Artificial Sequence: Synthetic oligonucleotide
  Target: LAMA2; (+) strand; PAM type: NRG; PAM sequence: AGG
gacacagaacaaacactctg

SEQ ID NO: 179394 - DNA, 20 bp, Artificial Sequence
  Description of Artificial Sequence: Synthetic oligonucleotide
  Target: LAMA2; (+) strand; PAM type: NRG; PAM sequence: TAG
aacaaacactctgaggacca

SEQ ID NO: 179395 - DNA, 20 bp, Artificial Sequence
  Description of Artificial Sequence: Synthetic oligonucleotide
  Target: LAMA2; (+) strand; PAM type: NRG; PAM sequence: TGG
aacactctgaggaccatagt

SEQ ID NO: 179396 - DNA, 20 bp, Artificial Sequence
  Description of Artificial Sequence: Synthetic oligonucleotide
  Target: LAMA2; (+) strand; PAM type: NRG; PAM sequence: GAG
tgaggaccatagttggccct

SEQ ID NO: 179397 - DNA, 20 bp, Artificial Sequence
  Description of Artificial Sequence: Synthetic oligonucleotide
  Target: LAMA2; (+) strand; PAM type: NRG; PAM sequence: CAG
ttggccctgagtcctgcacc

SEQ ID NO: 179398 - DNA, 20 bp, Artificial Sequence
  Description of Artificial Sequence: Synthetic oligonucleotide
  Target: LAMA2; (+) strand; PAM type: NRG; PAM sequence: CAG
gccctgagtcctgcacccag

SEQ ID NO: 179399 - DNA, 20 bp, Artificial Sequence
  Description of Artificial Sequence: Synthetic oligonucleotide
  Target: LAMA2; (+) strand; PAM type: NRG; PAM sequence: TGG
tgagtcctgcacccagcagt

SEQ ID NO: 179400 - DNA, 20 bp, Artificial Sequence
  Description of Artificial Sequence: Synthetic oligonucleotide
  Target: LAMA2; (+) strand; PAM type: NRG; PAM sequence: CAG
gtcctgcacccagcagttgg

SEQ ID NO: 179401 - DNA, 20 bp, Artificial Sequence
  Description of Artificial Sequence: Synthetic oligonucleotide
  Target: LAMA2; (+) strand; PAM type: NRG; PAM sequence: AGG
tcctgcacccagcagttggc

SEQ ID NO: 179402 - DNA, 20 bp, Artificial Sequence
  Description of Artificial Sequence: Synthetic oligonucleotide
  Target: LAMA2; (+) strand; PAM type: NRG; PAM sequence: TGG
gcacccagcagttggcaggc

SEQ ID NO: 179403 - DNA, 20 bp, Artificial Sequence
  Description of Artificial Sequence: Synthetic oligonucleotide
  Target: LAMA2; (+) strand; PAM type: NRG; PAM sequence: TGG
gcaggctggccccacctttt

SEQ ID NO: 179404 - DNA, 20 bp, Artificial Sequence
  Description of Artificial Sequence: Synthetic oligonucleotide
  Target: LAMA2; (+) strand; PAM type: NRG; PAM sequence: GGG
caggctggccccaccttttt

SEQ ID NO: 179405 - DNA, 20 bp, Artificial Sequence
  Description of Artificial Sequence: Synthetic oligonucleotide
  Target: LAMA2; (+) strand; PAM type: NRG; PAM sequence: GGG
aggctggccccacctttttg

SEQ ID NO: 179406 - DNA, 20 bp, Artificial Sequence
  Description of Artificial Sequence: Synthetic oligonucleotide
  Target: LAMA2; (+) strand; PAM type: NRG; PAM sequence: AAG
ctggccccacctttttgggg

SEQ ID NO: 179407 - DNA, 20 bp, Artificial Sequence
  Description of Artificial Sequence: Synthetic oligonucleotide
  Target: LAMA2; (+) strand; PAM type: NRG; PAM sequence: AGG
tggccccacctttttgggga

SEQ ID NO: 179408 - DNA, 20 bp, Artificial Sequence
  Description of Artificial Sequence: Synthetic oligonucleotide
  Target: LAMA2; (+) strand; PAM type: NRG; PAM sequence: AAG
cccacctttttggggaaggc

SEQ ID NO: 179409 - DNA, 20 bp, Artificial Sequence
  Description of Artificial Sequence: Synthetic oligonucleotide
  Target: LAMA2; (+) strand; PAM type: NRG; PAM sequence: AAG
tttttggggaaggcaagaat

SEQ ID NO: 179410 - DNA, 20 bp, Artificial Sequence
  Description of Artificial Sequence: Synthetic oligonucleotide
  Target: LAMA2; (+) strand; PAM type: NRG; PAM sequence: AAG
tggggaaggcaagaataaga

SEQ ID NO: 179411 - DNA, 20 bp, Artificial Sequence
  Description of Artificial Sequence: Synthetic oligonucleotide
  Target: LAMA2; (+) strand; PAM type: NRG; PAM sequence: TGG
ggaaggcaagaataagaaag

SEQ ID NO: 179412 - DNA, 20 bp, Artificial Sequence
  Description of Artificial Sequence: Synthetic oligonucleotide
  Target: LAMA2; (+) strand; PAM type: NRG; PAM sequence: AAG
caagaataagaaagtggttt

SEQ ID NO: 179413 - DNA, 20 bp, Artificial Sequence
  Description of Artificial Sequence: Synthetic oligonucleotide
  Target: LAMA2; (+) strand; PAM type: NRG; PAM sequence: CAG
gaataagaaagtggtttaag

SEQ ID NO: 179414 - DNA, 20 bp, Artificial Sequence
  Description of Artificial Sequence: Synthetic oligonucleotide
  Target: LAMA2; (+) strand; PAM type: NRG; PAM sequence: TAG
taagaaagtggtttaagcag

SEQ ID NO: 179415 - DNA, 20 bp, Artificial Sequence
  Description of Artificial Sequence: Synthetic oligonucleotide
  Target: LAMA2; (+) strand; PAM type: NRG; PAM sequence: AGG
aagaaagtggtttaagcagt

SEQ ID NO: 179416 - DNA, 20 bp, Artificial Sequence
  Description of Artificial Sequence: Synthetic oligonucleotide
  Target: LAMA2; (+) strand; PAM type: NRG; PAM sequence: TGG
ggtttaagcagtaggcttcc

SEQ ID NO: 179417 - DNA, 20 bp, Artificial Sequence
  Description of Artificial Sequence: Synthetic oligonucleotide
  Target: LAMA2; (+) strand; PAM type: NRG; PAM sequence: CAG
agtaggcttcctggaatgtc

SEQ ID NO: 179418 - DNA, 20 bp, Artificial Sequence
  Description of Artificial Sequence: Synthetic oligonucleotide
  Target: LAMA2; (+) strand; PAM type: NRG; PAM sequence: CAG
cttcctggaatgtccagccc

SEQ ID NO: 179419 - DNA, 20 bp, Artificial Sequence
  Description of Artificial Sequence: Synthetic oligonucleotide
  Target: LAMA2; (+) strand; PAM type: NRG; PAM sequence: AGG
ttcctggaatgtccagcccc

SEQ ID NO: 179420 - DNA, 20 bp, Artificial Sequence
  Description of Artificial Sequence: Synthetic oligonucleotide
  Target: LAMA2; (+) strand; PAM type: NRG; PAM sequence: CAG
cagccccaggccaccacact

SEQ ID NO: 179421 - DNA, 20 bp, Artificial Sequence
  Description of Artificial Sequence: Synthetic oligonucleotide
  Target: LAMA2; (+) strand; PAM type: NRG; PAM sequence: AGG
agccccaggccaccacactc

SEQ ID NO: 179422 - DNA, 20 bp, Artificial Sequence
  Description of Artificial Sequence: Synthetic oligonucleotide
  Target: LAMA2; (+) strand; PAM type: NRG; PAM sequence: CAG
ggccaccacactcaggcctc

SEQ ID NO: 179423 - DNA, 20 bp, Artificial Sequence
  Description of Artificial Sequence: Synthetic oligonucleotide
  Target: LAMA2; (+) strand; PAM type: NRG; PAM sequence: CAG
caccacactcaggcctccag

SEQ ID NO: 179424 - DNA, 20 bp, Artificial Sequence
  Description of Artificial Sequence: Synthetic oligonucleotide
  Target: LAMA2; (+) strand; PAM type: NRG; PAM sequence: TGG
ctccagcagtcaccctcctc

SEQ ID NO: 179425 - DNA, 20 bp, Artificial Sequence
  Description of Artificial Sequence: Synthetic oligonucleotide
  Target: LAMA2; (+) strand; PAM type: NRG; PAM sequence: GGG
tccagcagtcaccctcctct

SEQ ID NO: 179426 - DNA, 20 bp, Artificial Sequence
  Description of Artificial Sequence: Synthetic oligonucleotide
  Target: LAMA2; (+) strand; PAM type: NRG; PAM sequence: TGG
agcagtcaccctcctctggg

SEQ ID NO: 179427 - DNA, 20 bp, Artificial Sequence
  Description of Artificial Sequence: Synthetic oligonucleotide
  Target: LAMA2; (+) strand; PAM type: NRG; PAM sequence: TGG
agtcaccctcctctgggtgg

SEQ ID NO: 179428 - DNA, 20 bp, Artificial Sequence
  Description of Artificial Sequence: Synthetic oligonucleotide
  Target: LAMA2; (+) strand; PAM type: NRG; PAM sequence: GAG
tcaccctcctctgggtggtg

SEQ ID NO: 179429 - DNA, 20 bp, Artificial Sequence
  Description of Artificial Sequence: Synthetic oligonucleotide
  Target: LAMA2; (+) strand; PAM type: NRG; PAM sequence: AGG
caccctcctctgggtggtgg

SEQ ID NO: 179430 - DNA, 20 bp, Artificial Sequence
  Description of Artificial Sequence: Synthetic oligonucleotide
  Target: LAMA2; (+) strand; PAM type: NRG; PAM sequence: CAG
cctctgggtggtggaggaaa

SEQ ID NO: 179431 - DNA, 20 bp, Artificial Sequence
  Description of Artificial Sequence: Synthetic oligonucleotide
  Target: LAMA2; (+) strand; PAM type: NRG; PAM sequence: CAG
aaacagcccctgtttctctc

SEQ ID NO: 179432 - DNA, 20 bp, Artificial Sequence
  Description of Artificial Sequence: Synthetic oligonucleotide
  Target: LAMA2; (+) strand; PAM type: NRG; PAM sequence: CAG
ccctgtttctctccagaaca

SEQ ID NO: 179433 - DNA, 20 bp, Artificial Sequence
  Description of Artificial Sequence: Synthetic oligonucleotide
  Target: LAMA2; (+) strand; PAM type: NRG; PAM sequence: TGG
agaacacagtgtcctcttca

SEQ ID NO: 179434 - DNA, 20 bp, Artificial Sequence
  Description of Artificial Sequence: Synthetic oligonucleotide
  Target: LAMA2; (+) strand; PAM type: NRG; PAM sequence: GAG
aacacagtgtcctcttcatg

SEQ ID NO: 179435 - DNA, 20 bp, Artificial Sequence
  Description of Artificial Sequence: Synthetic oligonucleotide
  Target: LAMA2; (+) strand; PAM type: NRG; PAM sequence: TAG
tcatggagatacaatttgat

SEQ ID NO: 179436 - DNA, 20 bp, Artificial Sequence
  Description of Artificial Sequence: Synthetic oligonucleotide
  Target: LAMA2; (+) strand; PAM type: NRG; PAM sequence: CAG
tggagatacaatttgattag

SEQ ID NO: 179437 - DNA, 20 bp, Artificial Sequence
  Description of Artificial Sequence: Synthetic oligonucleotide
  Target: LAMA2; (+) strand; PAM type: NRG; PAM sequence: CAG
atacaatttgattagcagat

SEQ ID NO: 179438 - DNA, 20 bp, Artificial Sequence
  Description of Artificial Sequence: Synthetic oligonucleotide
  Target: LAMA2; (+) strand; PAM type: NRG; PAM sequence: AGG
tacaatttgattagcagatc

SEQ ID NO: 179439 - DNA, 20 bp, Artificial Sequence
  Description of Artificial Sequence: Synthetic oligonucleotide
  Target: LAMA2; (+) strand; PAM type: NRG; PAM sequence: GAG
atttgattagcagatcaggt

SEQ ID NO: 179440 - DNA, 20 bp, Artificial Sequence
  Description of Artificial Sequence: Synthetic oligonucleotide
  Target: LAMA2; (+) strand; PAM type: NRG; PAM sequence: AGG
tttgattagcagatcaggtg

SEQ ID NO: 179441 - DNA, 20 bp, Artificial Sequence
  Description of Artificial Sequence: Synthetic oligonucleotide
  Target: LAMA2; (+) strand; PAM type: NRG; PAM sequence: CGG
aaacaaataaatgacttatg

SEQ ID NO: 179442 - DNA, 20 bp, Artificial Sequence
  Description of Artificial Sequence: Synthetic oligonucleotide
  Target: LAMA2; (+) strand; PAM type: NRG; PAM sequence: TGG
taaatgacttatgcggtctg

SEQ ID NO: 179443 - DNA, 20 bp, Artificial Sequence
  Description of Artificial Sequence: Synthetic oligonucleotide
  Target: LAMA2; (+) strand; PAM type: NRG; PAM sequence: GGG
aaatgacttatgcggtctgt

SEQ ID NO: 179444 - DNA, 20 bp, Artificial Sequence
  Description of Artificial Sequence: Synthetic oligonucleotide
  Target: LAMA2; (+) strand; PAM type: NRG; PAM sequence: GAG
atgacttatgcggtctgtgg

SEQ ID NO: 179445 - DNA, 20 bp, Artificial Sequence
  Description of Artificial Sequence: Synthetic oligonucleotide
  Target: LAMA2; (+) strand; PAM type: NRG; PAM sequence: CAG
gcggtctgtgggagacgtaa

SEQ ID NO: 179446 - DNA, 20 bp, Artificial Sequence
  Description of Artificial Sequence: Synthetic oligonucleotide
  Target: LAMA2; (+) strand; PAM type: NRG; PAM sequence: CAG
taacagatcttctgtatccc

SEQ ID NO: 179447 - DNA, 20 bp, Artificial Sequence
  Description of Artificial Sequence: Synthetic oligonucleotide
  Target: LAMA2; (+) strand; PAM type: NRG; PAM sequence: AAG
cagatcttctgtatccccag

SEQ ID NO: 179448 - DNA, 20 bp, Artificial Sequence
  Description of Artificial Sequence: Synthetic oligonucleotide
  Target: LAMA2; (+) strand; PAM type: NRG; PAM sequence: AGG
agatcttctgtatccccaga

SEQ ID NO: 179449 - DNA, 20 bp, Artificial Sequence
  Description of Artificial Sequence: Synthetic oligonucleotide
  Target: LAMA2; (+) strand; PAM type: NRG; PAM sequence: TAG
ctattgcaaaaatccctctt

SEQ ID NO: 179450 - DNA, 20 bp, Artificial Sequence
  Description of Artificial Sequence: Synthetic oligonucleotide
  Target: LAMA2; (+) strand; PAM type: NRG; PAM sequence: TGG
tcttttgaatccaaccaatt

SEQ ID NO: 179451 - DNA, 20 bp, Artificial Sequence
  Description of Artificial Sequence: Synthetic oligonucleotide
  Target: LAMA2; (+) strand; PAM type: NRG; PAM sequence: CAG
aatttggcacccaacctttg

SEQ ID NO: 179452 - DNA, 20 bp, Artificial Sequence
  Description of Artificial Sequence: Synthetic oligonucleotide
  Target: LAMA2; (+) strand; PAM type: NRG; PAM sequence: TGG
cagtatacttgcatgaccct

SEQ ID NO: 179453 - DNA, 20 bp, Artificial Sequence
  Description of Artificial Sequence: Synthetic oligonucleotide
  Target: LAMA2; (+) strand; PAM type: NRG; PAM sequence: GAG
gtatacttgcatgacccttg

SEQ ID NO: 179454 - DNA, 20 bp, Artificial Sequence
  Description of Artificial Sequence: Synthetic oligonucleotide
  Target: LAMA2; (+) strand; PAM type: NRG; PAM sequence: AAG
tacttgcatgacccttggag

SEQ ID NO: 179455 - DNA, 20 bp, Artificial Sequence
  Description of Artificial Sequence: Synthetic oligonucleotide
  Target: LAMA2; (+) strand; PAM type: NRG; PAM sequence: AGG
acttgcatgacccttggaga

SEQ ID NO: 179456 - DNA, 20 bp, Artificial Sequence
  Description of Artificial Sequence: Synthetic oligonucleotide
  Target: LAMA2; (+) strand; PAM type: NRG; PAM sequence: GGG
cttgcatgacccttggagaa

SEQ ID NO: 179457 - DNA, 20 bp, Artificial Sequence
  Description of Artificial Sequence: Synthetic oligonucleotide
  Target: LAMA2; (+) strand; PAM type: NRG; PAM sequence: CAG
tgacccttggagaagggcca

SEQ ID NO: 179458 - DNA, 20 bp, Artificial Sequence
  Description of Artificial Sequence: Synthetic oligonucleotide
  Target: LAMA2; (+) strand; PAM type: NRG; PAM sequence: GAG
gcccatactcaaacacaaat

SEQ ID NO: 179459 - DNA, 20 bp, Artificial Sequence
  Description of Artificial Sequence: Synthetic oligonucleotide
  Target: LAMA2; (+) strand; PAM type: NRG; PAM sequence: AGG
cccatactcaaacacaaatg

SEQ ID NO: 179460 - DNA, 20 bp, Artificial Sequence
  Description of Artificial Sequence: Synthetic oligonucleotide
  Target: LAMA2; (+) strand; PAM type: NRG; PAM sequence: TGG
tcaaacacaaatgaggctct

SEQ ID NO: 179461 - DNA, 20 bp, Artificial Sequence
  Description of Artificial Sequence: Synthetic oligonucleotide
  Target: LAMA2; (+) strand; PAM type: NRG; PAM sequence: GAG
aaacacaaatgaggctcttg

SEQ ID NO: 179462 - DNA, 20 bp, Artificial Sequence
  Description of Artificial Sequence: Synthetic oligonucleotide
  Target: LAMA2; (+) strand; PAM type: NRG; PAM sequence: TGG
aggctcttggagacacctcc

SEQ ID NO: 179463 - DNA, 20 bp, Artificial Sequence
  Description of Artificial Sequence: Synthetic oligonucleotide
  Target: LAMA2; (+) strand; PAM type: NRG; PAM sequence: TGG
ctcctggtgtcatgatcata

SEQ ID NO: 179464 - DNA, 20 bp, Artificial Sequence
  Description of Artificial Sequence: Synthetic oligonucleotide
  Target: LAMA2; (+) strand; PAM type: NRG; PAM sequence: GAG
cctggtgtcatgatcatatg

SEQ ID NO: 179465 - DNA, 20 bp, Artificial Sequence
  Description of Artificial Sequence: Synthetic oligonucleotide
  Target: LAMA2; (+) strand; PAM type: NRG; PAM sequence: AGG
ctggtgtcatgatcatatgg

SEQ ID NO: 179466 - DNA, 20 bp, Artificial Sequence
  Description of Artificial Sequence: Synthetic oligonucleotide
  Target: LAMA2; (+) strand; PAM type: NRG; PAM sequence: TGG
tgatcatatggaggctgttt

SEQ ID NO: 179467 - DNA, 20 bp, Artificial Sequence
  Description of Artificial Sequence: Synthetic oligonucleotide
  Target: LAMA2; (+) strand; PAM type: NRG; PAM sequence: TAG
atggaggctgttttggtttc

SEQ ID NO: 179468 - DNA, 20 bp, Artificial Sequence
  Description of Artificial Sequence: Synthetic oligonucleotide
  Target: LAMA2; (+) strand; PAM type: NRG; PAM sequence: AGG
tggaggctgttttggtttct

SEQ ID NO: 179469 - DNA, 20 bp, Artificial Sequence
  Description of Artificial Sequence: Synthetic oligonucleotide
  Target: LAMA2; (+) strand; PAM type: NRG; PAM sequence: TGG
tggtttctaggctatcttgt

SEQ ID NO: 179470 - DNA, 20 bp, Artificial Sequence
  Description of Artificial Sequence: Synthetic oligonucleotide
  Target: LAMA2; (+) strand; PAM type: NRG; PAM sequence: GGG
ggtttctaggctatcttgtt

SEQ ID NO: 179471 - DNA, 20 bp, Artificial Sequence
  Description of Artificial Sequence: Synthetic oligonucleotide
  Target: LAMA2; (+) strand; PAM type: NRG; PAM sequence: GAG
tttctaggctatcttgttgg

SEQ ID NO: 179472 - DNA, 20 bp, Artificial Sequence
  Description of Artificial Sequence: Synthetic oligonucleotide
  Target: LAMA2; (+) strand; PAM type: NRG; PAM sequence: CAG
tatcttgttgggagtctgca

SEQ ID NO: 179473 - DNA, 20 bp, Artificial Sequence
  Description of Artificial Sequence: Synthetic oligonucleotide
  Target: LAMA2; (+) strand; PAM type: NRG; PAM sequence: TGG
gagtctgcacagccctttca

SEQ ID NO: 179474 - DNA, 20 bp, Artificial Sequence
  Description of Artificial Sequence: Synthetic oligonucleotide
  Target: LAMA2; (+) strand; PAM type: NRG; PAM sequence: GAG
gtctgcacagccctttcatg

SEQ ID NO: 179475 - DNA, 20 bp, Artificial Sequence
  Description of Artificial Sequence: Synthetic oligonucleotide
  Target: LAMA2; (+) strand; PAM type: NRG; PAM sequence: AGG
tctgcacagccctttcatgg

SEQ ID NO: 179476 - DNA, 20 bp, Artificial Sequence
  Description of Artificial Sequence: Synthetic oligonucleotide
  Target: LAMA2; (+) strand; PAM type: NRG; PAM sequence: TAG
catggaggtaatgatgatgc

SEQ ID NO: 179477 - DNA, 20 bp, Artificial Sequence
  Description of Artificial Sequence: Synthetic oligonucleotide
  Target: LAMA2; (+) strand; PAM type: NRG; PAM sequence: TGG
gaggtaatgatgatgctagt

SEQ ID NO: 179478 - DNA, 20 bp, Artificial Sequence
  Description of Artificial Sequence: Synthetic oligonucleotide
  Target: LAMA2; (+) strand; PAM type: NRG; PAM sequence: GAG
tccaaatgtgcaaattacat

SEQ ID NO: 179479 - DNA, 20 bp, Artificial Sequence
  Description of Artificial Sequence: Synthetic oligonucleotide
  Target: LAMA2; (+) strand; PAM type: NRG; PAM sequence: TAG
aaatgtgcaaattacatgag

SEQ ID NO: 179480 - DNA, 20 bp, Artificial Sequence
  Description of Artificial Sequence: Synthetic oligonucleotide
  Target: LAMA2; (+) strand; PAM type: NRG; PAM sequence: TAG
acatgagtagcacaaaatgc

SEQ ID NO: 179481 - DNA, 20 bp, Artificial Sequence
  Description of Artificial Sequence: Synthetic oligonucleotide
  Target: LAMA2; (+) strand; PAM type: NRG; PAM sequence: AAG
tgagtagcacaaaatgctag

SEQ ID NO: 179482 - DNA, 20 bp, Artificial Sequence
  Description of Artificial Sequence: Synthetic oligonucleotide
  Target: LAMA2; (+) strand; PAM type: NRG; PAM sequence: TGG
tgctagaagaaatgaaaaaa

SEQ ID NO: 179483 - DNA, 20 bp, Artificial Sequence
  Description of Artificial Sequence: Synthetic oligonucleotide
  Target: LAMA2; (+) strand; PAM type: NRG; PAM sequence: TAG
aaaaaatggaaattcactgc

SEQ ID NO: 179484 - DNA, 20 bp, Artificial Sequence
  Description of Artificial Sequence: Synthetic oligonucleotide
  Target: LAMA2; (+) strand; PAM type: NRG; PAM sequence: AAG
atggaaattcactgctagtg

SEQ ID NO: 179485 - DNA, 20 bp, Artificial Sequence
  Description of Artificial Sequence: Synthetic oligonucleotide
  Target: LAMA2; (+) strand; PAM type: NRG; PAM sequence: AGG
tggaaattcactgctagtga

SEQ ID NO: 179486 - DNA, 20 bp, Artificial Sequence
  Description of Artificial Sequence: Synthetic oligonucleotide
  Target: LAMA2; (+) strand; PAM type: NRG; PAM sequence: AAG
attcactgctagtgaaggcc

SEQ ID NO: 179487 - DNA, 20 bp, Artificial Sequence
  Description of Artificial Sequence: Synthetic oligonucleotide
  Target: LAMA2; (+) strand; PAM type: NRG; PAM sequence: GAG
tcactgctagtgaaggccaa

SEQ ID NO: 179488 - DNA, 20 bp, Artificial Sequence
  Description of Artificial Sequence: Synthetic oligonucleotide
  Target: LAMA2; (+) strand; PAM type: NRG; PAM sequence: AGG
cactgctagtgaaggccaag

SEQ ID NO: 179489 - DNA, 20 bp, Artificial Sequence
  Description of Artificial Sequence: Synthetic oligonucleotide
  Target: LAMA2; (+) strand; PAM type: NRG; PAM sequence: GGG
actgctagtgaaggccaaga

SEQ ID NO: 179490 - DNA, 20 bp, Artificial Sequence
  Description of Artificial Sequence: Synthetic oligonucleotide
  Target: LAMA2; (+) strand; PAM type: NRG; PAM sequence: TGG
caagagggcatttgaacaaa

SEQ ID NO: 179491 - DNA, 20 bp, Artificial Sequence
  Description of Artificial Sequence: Synthetic oligonucleotide
  Target: LAMA2; (+) strand; PAM type: NRG; PAM sequence: AAG
gggcatttgaacaaatggca

SEQ ID NO: 179492 - DNA, 20 bp, Artificial Sequence
  Description of Artificial Sequence: Synthetic oligonucleotide
  Target: LAMA2; (+) strand; PAM type: NRG; PAM sequence: GAG
gcatttgaacaaatggcaaa

SEQ ID NO: 179493 - DNA, 20 bp, Artificial Sequence
  Description of Artificial Sequence: Synthetic oligonucleotide
  Target: LAMA2; (+) strand; PAM type: NRG; PAM sequence: GAG
atttgaacaaatggcaaaga

SEQ ID NO: 179494 - DNA, 20 bp, Artificial Sequence
  Description of Artificial Sequence: Synthetic oligonucleotide
  Target: LAMA2; (+) strand; PAM type: NRG; PAM sequence: TGG
cccctctctctgcctccttc

SEQ ID NO: 179495 - DNA, 20 bp, Artificial Sequence
  Description of Artificial Sequence: Synthetic oligonucleotide
  Target: LAMA2; (+) strand; PAM type: NRG; PAM sequence: GAG
cctctctctgcctccttctg

SEQ ID NO: 179496 - DNA, 20 bp, Artificial Sequence
  Description of Artificial Sequence: Synthetic oligonucleotide
  Target: LAMA2; (+) strand; PAM type: NRG; PAM sequence: AAG
tggagcgctatcaatgaaca

SEQ ID NO: 179497 - DNA, 20 bp, Artificial Sequence
  Description of Artificial Sequence: Synthetic oligonucleotide
  Target: LAMA2; (+) strand; PAM type: NRG; PAM sequence: CAG
gctatcaatgaacaaagtta

SEQ ID NO: 179498 - DNA, 20 bp, Artificial Sequence
  Description of Artificial Sequence: Synthetic oligonucleotide
  Target: LAMA2; (+) strand; PAM type: NRG; PAM sequence: GAG
caaagttacagattctctct

SEQ ID NO: 179499 - DNA, 20 bp, Artificial Sequence
  Description of Artificial Sequence: Synthetic oligonucleotide
  Target: LAMA2; (+) strand; PAM type: NRG; PAM sequence: AAG
tacagattctctctgagtcc

SEQ ID NO: 179500 - DNA, 20 bp, Artificial Sequence
  Description of Artificial Sequence: Synthetic oligonucleotide
  Target: LAMA2; (+) strand; PAM type: NRG; PAM sequence: AAG
caactattttgctatcctga

SEQ ID NO: 179501 - DNA, 20 bp, Artificial Sequence
  Description of Artificial Sequence: Synthetic oligonucleotide
  Target: LAMA2; (+) strand; PAM type: NRG; PAM sequence: TGG
tcctgaaagtaaccctttga

SEQ ID NO: 179502 - DNA, 20 bp, Artificial Sequence
  Description of Artificial Sequence: Synthetic oligonucleotide
  Target: LAMA2; (+) strand; PAM type: NRG; PAM sequence: CAG
tgattttccatctgacccta

SEQ ID NO: 179503 - DNA, 20 bp, Artificial Sequence
  Description of Artificial Sequence: Synthetic oligonucleotide
  Target: LAMA2; (+) strand; PAM type: NRG; PAM sequence: TAG
aattaaatcaaataatcaac

SEQ ID NO: 179504 - DNA, 20 bp, Artificial Sequence
  Description of Artificial Sequence: Synthetic oligonucleotide
  Target: LAMA2; (+) strand; PAM type: NRG; PAM sequence: AAG
actagtgttatttatgattg

SEQ ID NO: 179505 - DNA, 20 bp, Artificial Sequence
  Description of Artificial Sequence: Synthetic oligonucleotide
  Target: LAMA2; (+) strand; PAM type: NRG; PAM sequence: AGG
ctagtgttatttatgattga

SEQ ID NO: 179506 - DNA, 20 bp, Artificial Sequence
  Description of Artificial Sequence: Synthetic oligonucleotide
  Target: LAMA2; (+) strand; PAM type: NRG; PAM sequence: AAG
gtgttatttatgattgaagg

SEQ ID NO: 179507 - DNA, 20 bp, Artificial Sequence
  Description of Artificial Sequence: Synthetic oligonucleotide
  Target: LAMA2; (+) strand; PAM type: NRG; PAM sequence: AGG
tgttatttatgattgaagga

SEQ ID NO: 179508 - DNA, 20 bp, Artificial Sequence
  Description of Artificial Sequence: Synthetic oligonucleotide
  Target: LAMA2; (+) strand; PAM type: NRG; PAM sequence: AAG
aaggaaggctctctaaatat

SEQ ID NO: 179509 - DNA, 20 bp, Artificial Sequence
  Description of Artificial Sequence: Synthetic oligonucleotide
  Target: LAMA2; (+) strand; PAM type: NRG; PAM sequence: TGG
ctctaaatataagtaaaaat

SEQ ID NO: 179510 - DNA, 20 bp, Artificial Sequence
  Description of Artificial Sequence: Synthetic oligonucleotide
  Target: LAMA2; (+) strand; PAM type: NRG; PAM sequence: CAG
taagtaaaaattggtatgaa

SEQ ID NO: 179511 - DNA, 20 bp, Artificial Sequence
  Description of Artificial Sequence: Synthetic oligonucleotide
  Target: LAMA2; (+) strand; PAM type: NRG; PAM sequence: TAG
acagtattactctattcata

SEQ ID NO: 179512 - DNA, 20 bp, Artificial Sequence
  Description of Artificial Sequence: Synthetic oligonucleotide
  Target: LAMA2; (+) strand; PAM type: NRG; PAM sequence: AGG
cagtattactctattcatat

SEQ ID NO: 179513 - DNA, 20 bp, Artificial Sequence
  Description of Artificial Sequence: Synthetic oligonucleotide
  Target: LAMA2; (+) strand; PAM type: NRG; PAM sequence: TAG
tcatataggcattccttttt

SEQ ID NO: 179514 - DNA, 20 bp, Artificial Sequence
  Description of Artificial Sequence: Synthetic oligonucleotide
  Target: LAMA2; (+) strand; PAM type: NRG; PAM sequence: TAG
attccttttttagcaattta

SEQ ID NO: 179515 - DNA, 20 bp, Artificial Sequence
  Description of Artificial Sequence: Synthetic oligonucleotide
  Target: LAMA2; (+) strand; PAM type: NRG; PAM sequence: AAG
agcaatttatagtaattttt

SEQ ID NO: 179516 - DNA, 20 bp, Artificial Sequence
  Description of Artificial Sequence: Synthetic oligonucleotide
  Target: LAMA2; (+) strand; PAM type: NRG; PAM sequence: AGG
gcaatttatagtaattttta

SEQ ID NO: 179517 - DNA, 20 bp, Artificial Sequence
  Description of Artificial Sequence: Synthetic oligonucleotide
  Target: LAMA2; (+) strand; PAM type: NRG; PAM sequence: AAG
atttttaaggtattattcaa

SEQ ID NO: 179518 - DNA, 20 bp, Artificial Sequence
  Description of Artificial Sequence: Synthetic oligonucleotide
  Target: LAMA2; (+) strand; PAM type: NRG; PAM sequence: AAG
taaggtattattcaaaagaa

SEQ ID NO: 179519 - DNA, 20 bp, Artificial Sequence
  Description of Artificial Sequence: Synthetic oligonucleotide
  Target: LAMA2; (+) strand; PAM type: NRG; PAM sequence: AGG
aaggtattattcaaaagaaa

SEQ ID NO: 179520 - DNA, 20 bp, Artificial Sequence
  Description of Artificial Sequence: Synthetic oligonucleotide
  Target: LAMA2; (+) strand; PAM type: NRG; PAM sequence: GGG
aggtattattcaaaagaaaa

SEQ ID NO: 179521 - DNA, 20 bp, Artificial Sequence
  Description of Artificial Sequence: Synthetic oligonucleotide
  Target: LAMA2; (+) strand; PAM type: NRG; PAM sequence: GAG
gtattattcaaaagaaaagg

SEQ ID NO: 179522 - DNA, 20 bp, Artificial Sequence
  Description of Artificial Sequence: Synthetic oligonucleotide
  Target: LAMA2; (+) strand; PAM type: NRG; PAM sequence: TAG
ggagctgttaaatacattaa

SEQ ID NO: 179523 - DNA, 20 bp, Artificial Sequence
  Description of Artificial Sequence: Synthetic oligonucleotide
  Target: LAMA2; (+) strand; PAM type: NRG; PAM sequence: TAG
gttaaatacattaatagtga

SEQ ID NO: 179524 - DNA, 20 bp, Artificial Sequence
  Description of Artificial Sequence: Synthetic oligonucleotide
  Target: LAMA2; (+) strand; PAM type: NRG; PAM sequence: TGG
acattaatagtgatagccat

SEQ ID NO: 179525 - DNA, 20 bp, Artificial Sequence
  Description of Artificial Sequence: Synthetic oligonucleotide
  Target: LAMA2; (+) strand; PAM type: NRG; PAM sequence: AAG
tttcctgacaacttcatgaa

SEQ ID NO: 179526 - DNA, 20 bp, Artificial Sequence
  Description of Artificial Sequence: Synthetic oligonucleotide
  Target: LAMA2; (+) strand; PAM type: NRG; PAM sequence: AGG
ttcctgacaacttcatgaaa

SEQ ID NO: 179527 - DNA, 20 bp, Artificial Sequence
  Description of Artificial Sequence: Synthetic oligonucleotide
  Target: LAMA2; (+) strand; PAM type: NRG; PAM sequence: GAG
tattctgaaatgtatgttct

SEQ ID NO: 179528 - DNA, 20 bp, Artificial Sequence
  Description of Artificial Sequence: Synthetic oligonucleotide
  Target: LAMA2; (+) strand; PAM type: NRG; PAM sequence: TAG
tctgaaatgtatgttctgag

SEQ ID NO: 179529 - DNA, 20 bp, Artificial Sequence
  Description of Artificial Sequence: Synthetic oligonucleotide
  Target: LAMA2; (+) strand; PAM type: NRG; PAM sequence: TAG
attaatattcttcttattgt

SEQ ID NO: 179530 - DNA, 20 bp, Artificial Sequence
  Description of Artificial Sequence: Synthetic oligonucleotide
  Target: LAMA2; (+) strand; PAM type: NRG; PAM sequence: TAG
cttcttattgttagaacatc

SEQ ID NO: 179531 - DNA, 20 bp, Artificial Sequence
  Description of Artificial Sequence: Synthetic oligonucleotide
  Target: LAMA2; (+) strand; PAM type: NRG; PAM sequence: AAG
atttgtcctctttcaactgt

SEQ ID NO: 179532 - DNA, 20 bp, Artificial Sequence
  Description of Artificial Sequence: Synthetic oligonucleotide
  Target: LAMA2; (+) strand; PAM type: NRG; PAM sequence: GAG
ttgtcctctttcaactgtaa

SEQ ID NO: 179533 - DNA, 20 bp, Artificial Sequence
  Description of Artificial Sequence: Synthetic oligonucleotide
  Target: LAMA2; (+) strand; PAM type: NRG; PAM sequence: TAG
ctctttcaactgtaagagta

SEQ ID NO: 179534 - DNA, 20 bp, Artificial Sequence
  Description of Artificial Sequence: Synthetic oligonucleotide
  Target: LAMA2; (+) strand; PAM type: NRG; PAM sequence: AGG
tctttcaactgtaagagtat

SEQ ID NO: 179535 - DNA, 20 bp, Artificial Sequence
  Description of Artificial Sequence: Synthetic oligonucleotide
  Target: LAMA2; (+) strand; PAM type: NRG; PAM sequence: GAG
tttcaactgtaagagtatag

SEQ ID NO: 179536 - DNA, 20 bp, Artificial Sequence
  Description of Artificial Sequence: Synthetic oligonucleotide
  Target: LAMA2; (+) strand; PAM type: NRG; PAM sequence: AGG
ttcaactgtaagagtatagg

SEQ ID NO: 179537 - DNA, 20 bp, Artificial Sequence
  Description of Artificial Sequence: Synthetic oligonucleotide
  Target: LAMA2; (+) strand; PAM type: NRG; PAM sequence: GGG
tcaactgtaagagtatagga

SEQ ID NO: 179538 - DNA, 20 bp, Artificial Sequence
  Description of Artificial Sequence: Synthetic oligonucleotide
  Target: LAMA2; (+) strand; PAM type: NRG; PAM sequence: TGG
ctgtaagagtataggagggt

SEQ ID NO: 179539 - DNA, 20 bp, Artificial Sequence
  Description of Artificial Sequence: Synthetic oligonucleotide
  Target: LAMA2; (+) strand; PAM type: NRG; PAM sequence: AAG
aatttcctcttgaaaactaa

SEQ ID NO: 179540 - DNA, 20 bp, Artificial Sequence
  Description of Artificial Sequence: Synthetic oligonucleotide
  Target: LAMA2; (+) strand; PAM type: NRG; PAM sequence: TAG
cttgaaaactaaaagaaaaa

SEQ ID NO: 179541 - DNA, 20 bp, Artificial Sequence
  Description of Artificial Sequence: Synthetic oligonucleotide
  Target: LAMA2; (+) strand; PAM type: NRG; PAM sequence: TAG
ctaaaagaaaaatagtttct

SEQ ID NO: 179542 - DNA, 20 bp, Artificial Sequence
  Description of Artificial Sequence: Synthetic oligonucleotide
  Target: LAMA2; (+) strand; PAM type: NRG; PAM sequence: AAG
gaaaaatagtttcttagttt

SEQ ID NO: 179543 - DNA, 20 bp, Artificial Sequence
  Description of Artificial Sequence: Synthetic oligonucleotide
  Target: LAMA2; (+) strand; PAM type: NRG; PAM sequence: AAG
ttcattaaacaaccttaatg

SEQ ID NO: 179544 - DNA, 20 bp, Artificial Sequence
  Description of Artificial Sequence: Synthetic oligonucleotide
  Target: LAMA2; (+) strand; PAM type: NRG; PAM sequence: AGG
tcattaaacaaccttaatga

SEQ ID NO: 179545 - DNA, 20 bp, Artificial Sequence
  Description of Artificial Sequence: Synthetic oligonucleotide
  Target: LAMA2; (+) strand; PAM type: NRG; PAM sequence: TAG
ttaatgaaggtcattctcat

SEQ ID NO: 179546 - DNA, 20 bp, Artificial Sequence
  Description of Artificial Sequence: Synthetic oligonucleotide
  Target: LAMA2; (+) strand; PAM type: NRG; PAM sequence: TGG
aaacgttcccatattgataa

SEQ ID NO: 179547 - DNA, 20 bp, Artificial Sequence
  Description of Artificial Sequence: Synthetic oligonucleotide
  Target: LAMA2; (+) strand; PAM type: NRG; PAM sequence: GAG
acgttcccatattgataatg

SEQ ID NO: 179548 - DNA, 20 bp, Artificial Sequence
  Description of Artificial Sequence: Synthetic oligonucleotide
  Target: LAMA2; (+) strand; PAM type: NRG; PAM sequence: TAG
aatggagaaatgtatgacgt

SEQ ID NO: 179549 - DNA, 20 bp, Artificial Sequence
  Description of Artificial Sequence: Synthetic oligonucleotide
  Target: LAMA2; (+) strand; PAM type: NRG; PAM sequence: AAG
ggagaaatgtatgacgttag

SEQ ID NO: 179550 - DNA, 20 bp, Artificial Sequence
  Description of Artificial Sequence: Synthetic oligonucleotide
  Target: LAMA2; (+) strand; PAM type: NRG; PAM sequence: TAG
gtatgacgttagaagtttgt

SEQ ID NO: 179551 - DNA, 20 bp, Artificial Sequence
  Description of Artificial Sequence: Synthetic oligonucleotide
  Target: LAMA2; (+) strand; PAM type: NRG; PAM sequence: TAG
tagttgcatgcttcaaaaaa

SEQ ID NO: 179552 - DNA, 20 bp, Artificial Sequence
  Description of Artificial Sequence: Synthetic oligonucleotide
  Target: LAMA2; (+) strand; PAM type: NRG; PAM sequence: AAG
tcaaaaaatagtatgctaac

SEQ ID NO: 179553 - DNA, 20 bp, Artificial Sequence
  Description of Artificial Sequence: Synthetic oligonucleotide
  Target: LAMA2; (+) strand; PAM type: NRG; PAM sequence: TGG
aatagtatgctaacaagaca

SEQ ID NO: 179554 - DNA, 20 bp, Artificial Sequence
  Description of Artificial Sequence: Synthetic oligonucleotide
  Target: LAMA2; (+) strand; PAM type: NRG; PAM sequence: CAG
acaagacatggaactgtgaa

SEQ ID NO: 179555 - DNA, 20 bp, Artificial Sequence
  Description of Artificial Sequence: Synthetic oligonucleotide
  Target: LAMA2; (+) strand; PAM type: NRG; PAM sequence: TAG
atggaactgtgaacagctca

SEQ ID NO: 179556 - DNA, 20 bp, Artificial Sequence
  Description of Artificial Sequence: Synthetic oligonucleotide
  Target: LAMA2; (+) strand; PAM type: NRG; PAM sequence: TAG
acagctcatagtcaaaattc

SEQ ID NO: 179557 - DNA, 20 bp, Artificial Sequence
  Description of Artificial Sequence: Synthetic oligonucleotide
  Target: LAMA2; (+) strand; PAM type: NRG; PAM sequence: TGG
gctcatagtcaaaattctag

SEQ ID NO: 179558 - DNA, 20 bp, Artificial Sequence
  Description of Artificial Sequence: Synthetic oligonucleotide
  Target: LAMA2; (+) strand; PAM type: NRG; PAM sequence: GAG
tcttctgtgccctcattaat

SEQ ID NO: 179559 - DNA, 20 bp, Artificial Sequence
  Description of Artificial Sequence: Synthetic oligonucleotide
  Target: LAMA2; (+) strand; PAM type: NRG; PAM sequence: TGG
gccctcattaatgagtataa

SEQ ID NO: 179560 - DNA, 20 bp, Artificial Sequence
  Description of Artificial Sequence: Synthetic oligonucleotide
  Target: LAMA2; (+) strand; PAM type: NRG; PAM sequence: TGG
agtataatggtgtctgcata

SEQ ID NO: 179561 - DNA, 20 bp, Artificial Sequence
  Description of Artificial Sequence: Synthetic oligonucleotide
  Target: LAMA2; (+) strand; PAM type: NRG; PAM sequence: GGG
gtataatggtgtctgcatat

SEQ ID NO: 179562 - DNA, 20 bp, Artificial Sequence
  Description of Artificial Sequence: Synthetic oligonucleotide
  Target: LAMA2; (+) strand; PAM type: NRG; PAM sequence: TAG
tgcatatgggtgtttaatga

SEQ ID NO: 179563 - DNA, 20 bp, Artificial Sequence
  Description of Artificial Sequence: Synthetic oligonucleotide
  Target: LAMA2; (+) strand; PAM type: NRG; PAM sequence: TAG
ttaatgatagtatttgatga

SEQ ID NO: 179564 - DNA, 20 bp, Artificial Sequence
  Description of Artificial Sequence: Synthetic oligonucleotide
  Target: LAMA2; (+) strand; PAM type: NRG; PAM sequence: AAG
gatgatagaaaataacttca

SEQ ID NO: 179565 - DNA, 20 bp, Artificial Sequence
  Description of Artificial Sequence: Synthetic oligonucleotide
  Target: LAMA2; (+) strand; PAM type: NRG; PAM sequence: AAG
gatagaaaataacttcaaag

SEQ ID NO: 179566 - DNA, 20 bp, Artificial Sequence
  Description of Artificial Sequence: Synthetic oligonucleotide
  Target: LAMA2; (+) strand; PAM type: NRG; PAM sequence: TGG
cttcaaagaagaaacgatga

SEQ ID NO: 179567 - DNA, 20 bp, Artificial Sequence
  Description of Artificial Sequence: Synthetic oligonucleotide
  Target: LAMA2; (+) strand; PAM type: NRG; PAM sequence: TGG
aagaaacgatgatggctttg

SEQ ID NO: 179568 - DNA, 20 bp, Artificial Sequence
  Description of Artificial Sequence: Synthetic oligonucleotide
  Target: LAMA2; (+) strand; PAM type: NRG; PAM sequence: TGG
atgatggctttgtggttgta

SEQ ID NO: 179569 - DNA, 20 bp, Artificial Sequence
  Description of Artificial Sequence: Synthetic oligonucleotide
  Target: LAMA2; (+) strand; PAM type: NRG; PAM sequence: AAG
atggctttgtggttgtatgg

SEQ ID NO: 179570 - DNA, 20 bp, Artificial Sequence
  Description of Artificial Sequence: Synthetic oligonucleotide
  Target: LAMA2; (+) strand; PAM type: NRG; PAM sequence: GAG
gaagctacttcaaactttct

SEQ ID NO: 179571 - DNA, 20 bp, Artificial Sequence
  Description of Artificial Sequence: Synthetic oligonucleotide
  Target: LAMA2; (+) strand; PAM type: NRG; PAM sequence: GAG
agctacttcaaactttctga

SEQ ID NO: 179572 - DNA, 20 bp, Artificial Sequence
  Description of Artificial Sequence: Synthetic oligonucleotide
  Target: LAMA2; (+) strand; PAM type: NRG; PAM sequence: TGG
ctttctgagagatttactct

SEQ ID NO: 179573 - DNA, 20 bp, Artificial Sequence
  Description of Artificial Sequence: Synthetic oligonucleotide
  Target: LAMA2; (+) strand; PAM type: NRG; PAM sequence: AAG
tttgtatcttgtttttttta

SEQ ID NO: 179574 - DNA, 20 bp, Artificial Sequence
  Description of Artificial Sequence: Synthetic oligonucleotide
  Target: LAMA2; (+) strand; PAM type: NRG; PAM sequence: AAG
cttgttttttttaaagatca

SEQ ID NO: 179575 - DNA, 20 bp, Artificial Sequence
  Description of Artificial Sequence: Synthetic oligonucleotide
  Target: LAMA2; (+) strand; PAM type: NRG; PAM sequence: CAG
gatcaaagtatctgtgtctt

SEQ ID NO: 179576 - DNA, 20 bp, Artificial Sequence
  Description of Artificial Sequence: Synthetic oligonucleotide
  Target: LAMA2; (+) strand; PAM type: NRG; PAM sequence: AGG
atcaaagtatctgtgtcttc

SEQ ID NO: 179577 - DNA, 20 bp, Artificial Sequence
  Description of Artificial Sequence: Synthetic oligonucleotide
  Target: LAMA2; (+) strand; PAM type: NRG; PAM sequence: GAG
caaagtatctgtgtcttcag

SEQ ID NO: 179578 - DNA, 20 bp, Artificial Sequence
  Description of Artificial Sequence: Synthetic oligonucleotide
  Target: LAMA2; (+) strand; PAM type: NRG; PAM sequence: AGG
aaagtatctgtgtcttcagg

SEQ ID NO: 179579 - DNA, 20 bp, Artificial Sequence
  Description of Artificial Sequence: Synthetic oligonucleotide
  Target: LAMA2; (+) strand; PAM type: NRG; PAM sequence: CAG
ctgcattcgaacatacaaac

SEQ ID NO: 179580 - DNA, 20 bp, Artificial Sequence
  Description of Artificial Sequence: Synthetic oligonucleotide
  Target: LAMA2; (+) strand; PAM type: NRG; PAM sequence: AAG
gaacatacaaaccagaaatc

SEQ ID NO: 179581 - DNA, 20 bp, Artificial Sequence
  Description of Artificial Sequence: Synthetic oligonucleotide
  Target: LAMA2; (+) strand; PAM type: NRG; PAM sequence: AAG
atacaaaccagaaatcaaga

SEQ ID NO: 179582 - DNA, 20 bp, Artificial Sequence
  Description of Artificial Sequence: Synthetic oligonucleotide
  Target: LAMA2; (+) strand; PAM type: NRG; PAM sequence: AGG
tacaaaccagaaatcaagaa

SEQ ID NO: 179583 - DNA, 20 bp, Artificial Sequence
  Description of Artificial Sequence: Synthetic oligonucleotide
  Target: LAMA2; (+) strand; PAM type: NRG; PAM sequence: AAG
aaaccagaaatcaagaaagg

SEQ ID NO: 179584 - DNA, 20 bp, Artificial Sequence
  Description of Artificial Sequence: Synthetic oligonucleotide
  Target: LAMA2; (+) strand; PAM type: NRG; PAM sequence: AAG
ataatattgttgtcaacgta

SEQ ID NO: 179585 - DNA, 20 bp, Artificial Sequence
  Description of Artificial Sequence: Synthetic oligonucleotide
  Target: LAMA2; (+) strand; PAM type: NRG; PAM sequence: CAG
tattgttgtcaacgtaaaga

SEQ ID NO: 179586 - DNA, 20 bp, Artificial Sequence
  Description of Artificial Sequence: Synthetic oligonucleotide
  Target: LAMA2; (+) strand; PAM type: NRG; PAM sequence: TGG
gataacctcctcttttatct

SEQ ID NO: 179587 - DNA, 20 bp, Artificial Sequence
  Description of Artificial Sequence: Synthetic oligonucleotide
  Target: LAMA2; (+) strand; PAM type: NRG; PAM sequence: AAG
aacctcctcttttatcttgg

SEQ ID NO: 179588 - DNA, 20 bp, Artificial Sequence
  Description of Artificial Sequence: Synthetic oligonucleotide
  Target: LAMA2; (+) strand; PAM type: NRG; PAM sequence: AAG
cttggaagtgccaaatttgt

SEQ ID NO: 179589 - DNA, 20 bp, Artificial Sequence
  Description of Artificial Sequence: Synthetic oligonucleotide
  Target: LAMA2; (+) strand; PAM type: NRG; PAM sequence: TAG
tctaatattcaacttttcat

SEQ ID NO: 179590 - DNA, 20 bp, Artificial Sequence
  Description of Artificial Sequence: Synthetic oligonucleotide
  Target: LAMA2; (+) strand; PAM type: NRG; PAM sequence: AGG
ctaatattcaacttttcatt

SEQ ID NO: 179591 - DNA, 20 bp, Artificial Sequence
  Description of Artificial Sequence: Synthetic oligonucleotide
  Target: LAMA2; (+) strand; PAM type: NRG; PAM sequence: TAG
attaggctgctgtatgtgta

SEQ ID NO: 179592 - DNA, 20 bp, Artificial Sequence
  Description of Artificial Sequence: Synthetic oligonucleotide
  Target: LAMA2; (+) strand; PAM type: NRG; PAM sequence: TAG
ggctgctgtatgtgtatagc

SEQ ID NO: 179593 - DNA, 20 bp, Artificial Sequence
  Description of Artificial Sequence: Synthetic oligonucleotide
  Target: LAMA2; (+) strand; PAM type: NRG; PAM sequence: GAG
ctgctgtatgtgtatagcta

SEQ ID NO: 179594 - DNA, 20 bp, Artificial Sequence
  Description of Artificial Sequence: Synthetic oligonucleotide
  Target: LAMA2; (+) strand; PAM type: NRG; PAM sequence: AGG
tgctgtatgtgtatagctag

SEQ ID NO: 179595 - DNA, 20 bp, Artificial Sequence
  Description of Artificial Sequence: Synthetic oligonucleotide
  Target: LAMA2; (+) strand; PAM type: NRG; PAM sequence: TAG
gaggttaatctgaaaatgta

SEQ ID NO: 179596 - DNA, 20 bp, Artificial Sequence
  Description of Artificial Sequence: Synthetic oligonucleotide
  Target: LAMA2; (+) strand; PAM type: NRG; PAM sequence: TGG
atagaatccccaaatgtata

SEQ ID NO: 179597 - DNA, 20 bp, Artificial Sequence
  Description of Artificial Sequence: Synthetic oligonucleotide
  Target: LAMA2; (+) strand; PAM type: NRG; PAM sequence: TGG
aaatgtatatggtccccaaa

SEQ ID NO: 179598 - DNA, 20 bp, Artificial Sequence
  Description of Artificial Sequence: Synthetic oligonucleotide
  Target: LAMA2; (+) strand; PAM type: NRG; PAM sequence: TAG
ggtccccaaatggtctaacg

SEQ ID NO: 179599 - DNA, 20 bp, Artificial Sequence
  Description of Artificial Sequence: Synthetic oligonucleotide
  Target: LAMA2; (+) strand; PAM type: NRG; PAM sequence: AGG
gtccccaaatggtctaacgt

SEQ ID NO: 179600 - DNA, 20 bp, Artificial Sequence
  Description of Artificial Sequence: Synthetic oligonucleotide
  Target: LAMA2; (+) strand; PAM type: NRG; PAM sequence: CAG
aatggtctaacgtaggcttt

SEQ ID NO: 179601 - DNA, 20 bp, Artificial Sequence
  Description of Artificial Sequence: Synthetic oligonucleotide
  Target: LAMA2; (+) strand; PAM type: NRG; PAM sequence: AAG
tcttaccttacaaaattctg

SEQ ID NO: 179602 - DNA, 20 bp, Artificial Sequence
  Description of Artificial Sequence: Synthetic oligonucleotide
  Target: LAMA2; (+) strand; PAM type: NRG; PAM sequence: GAG
ttaccttacaaaattctgaa

SEQ ID NO: 179603 - DNA, 20 bp, Artificial Sequence
  Description of Artificial Sequence: Synthetic oligonucleotide
  Target: LAMA2; (+) strand; PAM type: NRG; PAM sequence: AAG
aaattctgaagagtcaaatt

SEQ ID NO: 179604 - DNA, 20 bp, Artificial Sequence
  Description of Artificial Sequence: Synthetic oligonucleotide
  Target: LAMA2; (+) strand; PAM type: NRG; PAM sequence: TAG
tctgaagagtcaaattaagt

SEQ ID NO: 179605 - DNA, 20 bp, Artificial Sequence
  Description of Artificial Sequence: Synthetic oligonucleotide
  Target: LAMA2; (+) strand; PAM type: NRG; PAM sequence: AAG
gaagagtcaaattaagttag

SEQ ID NO: 179606 - DNA, 20 bp, Artificial Sequence
  Description of Artificial Sequence: Synthetic oligonucleotide
  Target: LAMA2; (+) strand; PAM type: NRG; PAM sequence: AGG
aagagtcaaattaagttaga

SEQ ID NO: 179607 - DNA, 20 bp, Artificial Sequence
  Description of Artificial Sequence: Synthetic oligonucleotide
  Target: LAMA2; (+) strand; PAM type: NRG; PAM sequence: AAG
ttaagttagaaggcaaatga

SEQ ID NO: 179608 - DNA, 20 bp, Artificial Sequence
  Description of Artificial Sequence: Synthetic oligonucleotide
  Target: LAMA2; (+) strand; PAM type: NRG; PAM sequence: AGG
taagttagaaggcaaatgaa

SEQ ID NO: 179609 - DNA, 20 bp, Artificial Sequence
  Description of Artificial Sequence: Synthetic oligonucleotide
  Target: LAMA2; (+) strand; PAM type: NRG; PAM sequence: AAG
gttagaaggcaaatgaaagg

SEQ ID NO: 179610 - DNA, 20 bp, Artificial Sequence
  Description of Artificial Sequence: Synthetic oligonucleotide
  Target: LAMA2; (+) strand; PAM type: NRG; PAM sequence: CAG
aaatgaaaggaagaaaacta

SEQ ID NO: 179611 - DNA, 20 bp, Artificial Sequence
  Description of Artificial Sequence: Synthetic oligonucleotide
  Target: LAMA2; (+) strand; PAM type: NRG; PAM sequence: TAG
aggaagaaaactacagtgtt

SEQ ID NO: 179612 - DNA, 20 bp, Artificial Sequence
  Description of Artificial Sequence: Synthetic oligonucleotide
  Target: LAMA2; (+) strand; PAM type: NRG; PAM sequence: CAG
tcacatttactttcatttgt

SEQ ID NO: 179613 - DNA, 20 bp, Artificial Sequence
  Description of Artificial Sequence: Synthetic oligonucleotide
  Target: LAMA2; (+) strand; PAM type: NRG; PAM sequence: CAG
tttctgttaaattatacttt

SEQ ID NO: 179614 - DNA, 20 bp, Artificial Sequence
  Description of Artificial Sequence: Synthetic oligonucleotide
  Target: LAMA2; (+) strand; PAM type: NRG; PAM sequence: CAG
ttaaattatactttcagatc

SEQ ID NO: 179615 - DNA, 20 bp, Artificial Sequence
  Description of Artificial Sequence: Synthetic oligonucleotide
  Target: LAMA2; (+) strand; PAM type: NRG; PAM sequence: AAG
actttcagatccagtgattt

SEQ ID NO: 179616 - DNA, 20 bp, Artificial Sequence
  Description of Artificial Sequence: Synthetic oligonucleotide
  Target: LAMA2; (+) strand; PAM type: NRG; PAM sequence: GAG
agtgatttaagaatgctaat

SEQ ID NO: 179617 - DNA, 20 bp, Artificial Sequence
  Description of Artificial Sequence: Synthetic oligonucleotide
  Target: LAMA2; (+) strand; PAM type: NRG; PAM sequence: AAG
taagaatgctaatgagaata

SEQ ID NO: 179618 - DNA, 20 bp, Artificial Sequence
  Description of Artificial Sequence: Synthetic oligonucleotide
  Target: LAMA2; (+) strand; PAM type: NRG; PAM sequence: TAG
ttccgttaatgaaatgaaaa

SEQ ID NO: 179619 - DNA, 20 bp, Artificial Sequence
  Description of Artificial Sequence: Synthetic oligonucleotide
  Target: LAMA2; (+) strand; PAM type: NRG; PAM sequence: AAG
ttaatgaaatgaaaatagca

SEQ ID NO: 179620 - DNA, 20 bp, Artificial Sequence
  Description of Artificial Sequence: Synthetic oligonucleotide
  Target: LAMA2; (+) strand; PAM type: NRG; PAM sequence: TGG
tgtactattttttttaccaa

SEQ ID NO: 179621 - DNA, 20 bp, Artificial Sequence
  Description of Artificial Sequence: Synthetic oligonucleotide
  Target: LAMA2; (+) strand; PAM type: NRG; PAM sequence: CAG
tgacctgaactgaaataaca

SEQ ID NO: 179622 - DNA, 20 bp, Artificial Sequence
  Description of Artificial Sequence: Synthetic oligonucleotide
  Target: LAMA2; (+) strand; PAM type: NRG; PAM sequence: AAG
aacacagattatatctacaa

SEQ ID NO: 179623 - DNA, 20 bp, Artificial Sequence
  Description of Artificial Sequence: Synthetic oligonucleotide
  Target: LAMA2; (+) strand; PAM type: NRG; PAM sequence: AAG
tctacaaaagcccacccata

SEQ ID NO: 179624 - DNA, 20 bp, Artificial Sequence
  Description of Artificial Sequence: Synthetic oligonucleotide
  Target: LAMA2; (+) strand; PAM type: NRG; PAM sequence: TGG
actatttgactttgcatgca

SEQ ID NO: 179625 - DNA, 20 bp, Artificial Sequence
  Description of Artificial Sequence: Synthetic oligonucleotide
  Target: LAMA2; (+) strand; PAM type: NRG; PAM sequence: GGG
ctatttgactttgcatgcat

SEQ ID NO: 179626 - DNA, 20 bp, Artificial Sequence
  Description of Artificial Sequence: Synthetic oligonucleotide
  Target: LAMA2; (+) strand; PAM type: NRG; PAM sequence: GGG
tatttgactttgcatgcatg

SEQ ID NO: 179627 - DNA, 20 bp, Artificial Sequence
  Description of Artificial Sequence: Synthetic oligonucleotide
  Target: LAMA2; (+) strand; PAM type: NRG; PAM sequence: TGG
acttcttaacaaatcattca

SEQ ID NO: 179628 - DNA, 20 bp, Artificial Sequence
  Description of Artificial Sequence: Synthetic oligonucleotide
  Target: LAMA2; (+) strand; PAM type: NRG; PAM sequence: AAG
taacaaatcattcatggcat

SEQ ID NO: 179629 - DNA, 20 bp, Artificial Sequence
  Description of Artificial Sequence: Synthetic oligonucleotide
  Target: LAMA2; (+) strand; PAM type: NRG; PAM sequence: TGG
ataagtcaatatttgccatt

SEQ ID NO: 179630 - DNA, 20 bp, Artificial Sequence
  Description of Artificial Sequence: Synthetic oligonucleotide
  Target: LAMA2; (+) strand; PAM type: NRG; PAM sequence: GGG
taagtcaatatttgccattt

SEQ ID NO: 179631 - DNA, 20 bp, Artificial Sequence
  Description of Artificial Sequence: Synthetic oligonucleotide
  Target: LAMA2; (+) strand; PAM type: NRG; PAM sequence: AAG
tcaatatttgccatttgggt

SEQ ID NO: 179632 - DNA, 20 bp, Artificial Sequence
  Description of Artificial Sequence: Synthetic oligonucleotide
  Target: LAMA2; (+) strand; PAM type: NRG; PAM sequence: AGG
caatatttgccatttgggta

SEQ ID NO: 179633 - DNA, 20 bp, Artificial Sequence
  Description of Artificial Sequence: Synthetic oligonucleotide
  Target: LAMA2; (+) strand; PAM type: NRG; PAM sequence: TGG
gccatttgggtaaggaattc

SEQ ID NO: 179634 - DNA, 20 bp, Artificial Sequence
  Description of Artificial Sequence: Synthetic oligonucleotide
  Target: LAMA2; (+) strand; PAM type: NRG; PAM sequence: GGG
ccatttgggtaaggaattct

SEQ ID NO: 179635 - DNA, 20 bp, Artificial Sequence
  Description of Artificial Sequence: Synthetic oligonucleotide
  Target: LAMA2; (+) strand; PAM type: NRG; PAM sequence: TGG
taaggaattctgggtcaatt

SEQ ID NO: 179636 - DNA, 20 bp, Artificial Sequence
  Description of Artificial Sequence: Synthetic oligonucleotide
  Target: LAMA2; (+) strand; PAM type: NRG; PAM sequence: GGG
aaggaattctgggtcaattt

SEQ ID NO: 179637 - DNA, 20 bp, Artificial Sequence
  Description of Artificial Sequence: Synthetic oligonucleotide
  Target: LAMA2; (+) strand; PAM type: NRG; PAM sequence: TAG
caatttgggaaataaaatca

SEQ ID NO: 179638 - DNA, 20 bp, Artificial Sequence
  Description of Artificial Sequence: Synthetic oligonucleotide
  Target: LAMA2; (+) strand; PAM type: NRG; PAM sequence: CAG
agctgccccctcaaaaatgt

SEQ ID NO: 179639 - DNA, 20 bp, Artificial Sequence
  Description of Artificial Sequence: Synthetic oligonucleotide
  Target: LAMA2; (+) strand; PAM type: NRG; PAM sequence: TGG
ctcaaaaatgtcagtgtcct

SEQ ID NO: 179640 - DNA, 20 bp, Artificial Sequence
  Description of Artificial Sequence: Synthetic oligonucleotide
  Target: LAMA2; (+) strand; PAM type: NRG; PAM sequence: TGG
gtccttggtgaaaataataa

SEQ ID NO: 179641 - DNA, 20 bp, Artificial Sequence
  Description of Artificial Sequence: Synthetic oligonucleotide
  Target: LAMA2; (+) strand; PAM type: NRG; PAM sequence: AAG
tttgtttttatctttaccac

SEQ ID NO: 179642 - DNA, 20 bp, Artificial Sequence
  Description of Artificial Sequence: Synthetic oligonucleotide
  Target: LAMA2; (+) strand; PAM type: NRG; PAM sequence: CAG
tttatctttaccacaagtat

SEQ ID NO: 179643 - DNA, 20 bp, Artificial Sequence
  Description of Artificial Sequence: Synthetic oligonucleotide
  Target: LAMA2; (+) strand; PAM type: NRG; PAM sequence: GAG
tatctttaccacaagtatca

SEQ ID NO: 179644 - DNA, 20 bp, Artificial Sequence
  Description of Artificial Sequence: Synthetic oligonucleotide
  Target: LAMA2; (+) strand; PAM type: NRG; PAM sequence: GAG
tttaccacaagtatcagagt

SEQ ID NO: 179645 - DNA, 20 bp, Artificial Sequence
  Description of Artificial Sequence: Synthetic oligonucleotide
  Target: LAMA2; (+) strand; PAM type: NRG; PAM sequence: AAG
ccacaagtatcagagtgaga

SEQ ID NO: 179646 - DNA, 20 bp, Artificial Sequence
  Description of Artificial Sequence: Synthetic oligonucleotide
  Target: LAMA2; (+) strand; PAM type: NRG; PAM sequence: AGG
cacaagtatcagagtgagaa

SEQ ID NO: 179647 - DNA, 20 bp, Artificial Sequence
  Description of Artificial Sequence: Synthetic oligonucleotide
  Target: LAMA2; (+) strand; PAM type: NRG; PAM sequence: TGG
tatcagagtgagaaaggctt

SEQ ID NO: 179648 - DNA, 20 bp, Artificial Sequence
  Description of Artificial Sequence: Synthetic oligonucleotide
  Target: LAMA2; (+) strand; PAM type: NRG; PAM sequence: TAG
aaaggctttggtctcaaaat

SEQ ID NO: 179649 - DNA, 20 bp, Artificial Sequence
  Description of Artificial Sequence: Synthetic oligonucleotide
  Target: LAMA2; (+) strand; PAM type: NRG; PAM sequence: TGG
aaattagacttaatttgaat

SEQ ID NO: 179650 - DNA, 20 bp, Artificial Sequence
  Description of Artificial Sequence: Synthetic oligonucleotide
  Target: LAMA2; (+) strand; PAM type: NRG; PAM sequence: GAG
taaaattaacaaacatgcct

SEQ ID NO: 179651 - DNA, 20 bp, Artificial Sequence
  Description of Artificial Sequence: Synthetic oligonucleotide
  Target: LAMA2; (+) strand; PAM type: NRG; PAM sequence: TGG
acaaacatgcctgagcatta

SEQ ID NO: 179652 - DNA, 20 bp, Artificial Sequence
  Description of Artificial Sequence: Synthetic oligonucleotide
  Target: LAMA2; (+) strand; PAM type: NRG; PAM sequence: AAG
actttttttttttttgcttt

SEQ ID NO: 179653 - DNA, 20 bp, Artificial Sequence
  Description of Artificial Sequence: Synthetic oligonucleotide
  Target: LAMA2; (+) strand; PAM type: NRG; PAM sequence: AGG
ctttttttttttttgcttta

SEQ ID NO: 179654 - DNA, 20 bp, Artificial Sequence
  Description of Artificial Sequence: Synthetic oligonucleotide
  Target: LAMA2; (+) strand; PAM type: NRG; PAM sequence: AAG
aataaataatattatttgac

SEQ ID NO: 179655 - DNA, 20 bp, Artificial Sequence
  Description of Artificial Sequence: Synthetic oligonucleotide
  Target: LAMA2; (+) strand; PAM type: NRG; PAM sequence: AAG
atttgacaagtattatcatg

SEQ ID NO: 179656 - DNA, 20 bp, Artificial Sequence
  Description of Artificial Sequence: Synthetic oligonucleotide
  Target: LAMA2; (+) strand; PAM type: NRG; PAM sequence: TGG
tcatttcacatgtctgcaaa

SEQ ID NO: 179657 - DNA, 20 bp, Artificial Sequence
  Description of Artificial Sequence: Synthetic oligonucleotide
  Target: LAMA2; (+) strand; PAM type: NRG; PAM sequence: TGG
cttattgaaaaacactctgc

SEQ ID NO: 179658 - DNA, 20 bp, Artificial Sequence
  Description of Artificial Sequence: Synthetic oligonucleotide
  Target: LAMA2; (+) strand; PAM type: NRG; PAM sequence: AAG
ctctgctggtctcctcttta

SEQ ID NO: 179659 - DNA, 20 bp, Artificial Sequence
  Description of Artificial Sequence: Synthetic oligonucleotide
  Target: LAMA2; (+) strand; PAM type: NRG; PAM sequence: AGG
tctgctggtctcctctttaa

SEQ ID NO: 179660 - DNA, 20 bp, Artificial Sequence
  Description of Artificial Sequence: Synthetic oligonucleotide
  Target: LAMA2; (+) strand; PAM type: NRG; PAM sequence: TAG
gtttttgtatttctctgaac

SEQ ID NO: 179661 - DNA, 20 bp, Artificial Sequence
  Description of Artificial Sequence: Synthetic oligonucleotide
  Target: LAMA2; (+) strand; PAM type: NRG; PAM sequence: TGG
tctgaactagattgactttc

SEQ ID NO: 179662 - DNA, 20 bp, Artificial Sequence
  Description of Artificial Sequence: Synthetic oligonucleotide
  Target: LAMA2; (+) strand; PAM type: NRG; PAM sequence: TAG
ctagattgactttctggcta

SEQ ID NO: 179663 - DNA, 20 bp, Artificial Sequence
  Description of Artificial Sequence: Synthetic oligonucleotide
  Target: LAMA2; (+) strand; PAM type: NRG; PAM sequence: AAG
tctggctatagaaatgcgta

SEQ ID NO: 179664 - DNA, 20 bp, Artificial Sequence
  Description of Artificial Sequence: Synthetic oligonucleotide
  Target: LAMA2; (+) strand; PAM type: NRG; PAM sequence: AGG
ctggctatagaaatgcgtaa

SEQ ID NO: 179665 - DNA, 20 bp, Artificial Sequence
  Description of Artificial Sequence: Synthetic oligonucleotide
  Target: LAMA2; (+) strand; PAM type: NRG; PAM sequence: AAG
tatagaaatgcgtaaaggca

SEQ ID NO: 179666 - DNA, 20 bp, Artificial Sequence
  Description of Artificial Sequence: Synthetic oligonucleotide
  Target: LAMA2; (+) strand; PAM type: NRG; PAM sequence: CAG
gaaatgcgtaaaggcaaagt

SEQ ID NO: 179667 - DNA, 20 bp, Artificial Sequence
  Description of Artificial Sequence: Synthetic oligonucleotide
  Target: LAMA2; (+) strand; PAM type: NRG; PAM sequence: TGG
aaggcaaagtcagcttcctc

SEQ ID NO: 179668 - DNA, 20 bp, Artificial Sequence
  Description of Artificial Sequence: Synthetic oligonucleotide
  Target: LAMA2; (+) strand; PAM type: NRG; PAM sequence: GGG
aggcaaagtcagcttcctct

SEQ ID NO: 179669 - DNA, 20 bp, Artificial Sequence
  Description of Artificial Sequence: Synthetic oligonucleotide
  Target: LAMA2; (+) strand; PAM type: NRG; PAM sequence: TGG
gtcagcttcctctgggatgt

SEQ ID NO: 179670 - DNA, 20 bp, Artificial Sequence
  Description of Artificial Sequence: Synthetic oligonucleotide
  Target: LAMA2; (+) strand; PAM type: NRG; PAM sequence: TGG
ttcctctgggatgttggatc

SEQ ID NO: 179671 - DNA, 20 bp, Artificial Sequence
  Description of Artificial Sequence: Synthetic oligonucleotide
  Target: LAMA2; (+) strand; PAM type: NRG; PAM sequence: GAG
cctctgggatgttggatctg

SEQ ID NO: 179672 - DNA, 20 bp, Artificial Sequence
  Description of Artificial Sequence: Synthetic oligonucleotide
  Target: LAMA2; (+) strand; PAM type: NRG; PAM sequence: TGG
tgggatgttggatctggagt

SEQ ID NO: 179673 - DNA, 20 bp, Artificial Sequence
  Description of Artificial Sequence: Synthetic oligonucleotide
  Target: LAMA2; (+) strand; PAM type: NRG; PAM sequence: TAG
tggatctggagttggacgtg

SEQ ID NO: 179674 - DNA, 20 bp, Artificial Sequence
  Description of Artificial Sequence: Synthetic oligonucleotide
  Target: LAMA2; (+) strand; PAM type: NRG; PAM sequence: GAG
gatctggagttggacgtgta

SEQ ID NO: 179675 - DNA, 20 bp, Artificial Sequence
  Description of Artificial Sequence: Synthetic oligonucleotide
  Target: LAMA2; (+) strand; PAM type: NRG; PAM sequence: CAG
agttggacgtgtagagtacc

SEQ ID NO: 179676 - DNA, 20 bp, Artificial Sequence
  Description of Artificial Sequence: Synthetic oligonucleotide
  Target: LAMA2; (+) strand; PAM type: NRG; PAM sequence: TGG
tgactattgatgactcatat

SEQ ID NO: 179677 - DNA, 20 bp, Artificial Sequence
  Description of Artificial Sequence: Synthetic oligonucleotide
  Target: LAMA2; (+) strand; PAM type: NRG; PAM sequence: TAG
ctcatattggtaccgtatcg

SEQ ID NO: 179678 - DNA, 20 bp, Artificial Sequence
  Description of Artificial Sequence: Synthetic oligonucleotide
  Target: LAMA2; (+) strand; PAM type: NRG; PAM sequence: AAG
tggtaccgtatcgtagcatc

SEQ ID NO: 179679 - DNA, 20 bp, Artificial Sequence
  Description of Artificial Sequence: Synthetic oligonucleotide
  Target: LAMA2; (+) strand; PAM type: NRG; PAM sequence: AGG
ggtaccgtatcgtagcatca

SEQ ID NO: 179680 - DNA, 20 bp, Artificial Sequence
  Description of Artificial Sequence: Synthetic oligonucleotide
  Target: LAMA2; (+) strand; PAM type: NRG; PAM sequence: AAG
tcaaggtaaccaacttaata

SEQ ID NO: 179681 - DNA, 20 bp, Artificial Sequence
  Description of Artificial Sequence: Synthetic oligonucleotide
  Target: LAMA2; (+) strand; PAM type: NRG; PAM sequence: AAG
taaccaacttaataaagatt

SEQ ID NO: 179682 - DNA, 20 bp, Artificial Sequence
  Description of Artificial Sequence: Synthetic oligonucleotide
  Target: LAMA2; (+) strand; PAM type: NRG; PAM sequence: TAG
agattaagataattaaatga

SEQ ID NO: 179683 - DNA, 20 bp, Artificial Sequence
  Description of Artificial Sequence: Synthetic oligonucleotide
  Target: LAMA2; (+) strand; PAM type: NRG; PAM sequence: AAG
aattaaatgatagaattttg

SEQ ID NO: 179684 - DNA, 20 bp, Artificial Sequence
  Description of Artificial Sequence: Synthetic oligonucleotide
  Target: LAMA2; (+) strand; PAM type: NRG; PAM sequence: TAG
taaatgatagaattttgaag

SEQ ID NO: 179685 - DNA, 20 bp, Artificial Sequence
  Description of Artificial Sequence: Synthetic oligonucleotide
  Target: LAMA2; (+) strand; PAM type: NRG; PAM sequence: CAG
agaattttgaagtagtttcc

SEQ ID NO: 179686 - DNA, 20 bp, Artificial Sequence
  Description of Artificial Sequence: Synthetic oligonucleotide
  Target: LAMA2; (+) strand; PAM type: NRG; PAM sequence: AAG
gaagtagtttcccagtttat

SEQ ID NO: 179687 - DNA, 20 bp, Artificial Sequence
  Description of Artificial Sequence: Synthetic oligonucleotide
  Target: LAMA2; (+) strand; PAM type: NRG; PAM sequence: AAG
actcctatttccatttcaat

SEQ ID NO: 179688 - DNA, 20 bp, Artificial Sequence
  Description of Artificial Sequence: Synthetic oligonucleotide
  Target: LAMA2; (+) strand; PAM type: NRG; PAM sequence: AGG
ctcctatttccatttcaata

SEQ ID NO: 179689 - DNA, 20 bp, Artificial Sequence
  Description of Artificial Sequence: Synthetic oligonucleotide
  Target: LAMA2; (+) strand; PAM type: NRG; PAM sequence: TGG
gtatgaattttatacatgtc

SEQ ID NO: 179690 - DNA, 20 bp, Artificial Sequence
  Description of Artificial Sequence: Synthetic oligonucleotide
  Target: LAMA2; (+) strand; PAM type: NRG; PAM sequence: GGG
tatgaattttatacatgtct

SEQ ID NO: 179691 - DNA, 20 bp, Artificial Sequence
  Description of Artificial Sequence: Synthetic oligonucleotide
  Target: LAMA2; (+) strand; PAM type: NRG; PAM sequence: GAG
tgaattttatacatgtctgg

SEQ ID NO: 179692 - DNA, 20 bp, Artificial Sequence
  Description of Artificial Sequence: Synthetic oligonucleotide
  Target: LAMA2; (+) strand; PAM type: NRG; PAM sequence: TGG
attttatacatgtctgggag

SEQ ID NO: 179693 - DNA, 20 bp, Artificial Sequence
  Description of Artificial Sequence: Synthetic oligonucleotide
  Target: LAMA2; (+) strand; PAM type: NRG; PAM sequence: GGG
ttttatacatgtctgggagt

SEQ ID NO: 179694 - DNA, 20 bp, Artificial Sequence
  Description of Artificial Sequence: Synthetic oligonucleotide
  Target: LAMA2; (+) strand; PAM type: NRG; PAM sequence: TAG
ggtatgtttgtcatacttct

SEQ ID NO: 179695 - DNA, 20 bp, Artificial Sequence
  Description of Artificial Sequence: Synthetic oligonucleotide
  Target: LAMA2; (+) strand; PAM type: NRG; PAM sequence: AGG
gtatgtttgtcatacttctt

SEQ ID NO: 179696 - DNA, 20 bp, Artificial Sequence
  Description of Artificial Sequence: Synthetic oligonucleotide
  Target: LAMA2; (+) strand; PAM type: NRG; PAM sequence: CAG
ttaggaactgacaaaccttc

SEQ ID NO: 179697 - DNA, 20 bp, Artificial Sequence
  Description of Artificial Sequence: Synthetic oligonucleotide
  Target: LAMA2; (+) strand; PAM type: NRG; PAM sequence: AGG
taggaactgacaaaccttcc

SEQ ID NO: 179698 - DNA, 20 bp, Artificial Sequence
  Description of Artificial Sequence: Synthetic oligonucleotide
  Target: LAMA2; (+) strand; PAM type: NRG; PAM sequence: CAG
caaaccttccaggtattgac

SEQ ID NO: 179699 - DNA, 20 bp, Artificial Sequence
  Description of Artificial Sequence: Synthetic oligonucleotide
  Target: LAMA2; (+) strand; PAM type: NRG; PAM sequence: GAG
aaccttccaggtattgacca

SEQ ID NO: 179700 - DNA, 20 bp, Artificial Sequence
  Description of Artificial Sequence: Synthetic oligonucleotide
  Target: LAMA2; (+) strand; PAM type: NRG; PAM sequence: AGG
accttccaggtattgaccag

SEQ ID NO: 179701 - DNA, 20 bp, Artificial Sequence
  Description of Artificial Sequence: Synthetic oligonucleotide
  Target: LAMA2; (+) strand; PAM type: NRG; PAM sequence: TGG
tgaccccttcatcttgtgtc

SEQ ID NO: 179702 - DNA, 20 bp, Artificial Sequence
  Description of Artificial Sequence: Synthetic oligonucleotide
  Target: LAMA2; (+) strand; PAM type: NRG; PAM sequence: TAG
ccccttcatcttgtgtctgg

SEQ ID NO: 179703 - DNA, 20 bp, Artificial Sequence
  Description of Artificial Sequence: Synthetic oligonucleotide
  Target: LAMA2; (+) strand; PAM type: NRG; PAM sequence: AGG
cccttcatcttgtgtctggt

SEQ ID NO: 179704 - DNA, 20 bp, Artificial Sequence
  Description of Artificial Sequence: Synthetic oligonucleotide
  Target: LAMA2; (+) strand; PAM type: NRG; PAM sequence: TGG
tcttgtgtctggtaggaatt

SEQ ID NO: 179705 - DNA, 20 bp, Artificial Sequence
  Description of Artificial Sequence: Synthetic oligonucleotide
  Target: LAMA2; (+) strand; PAM type: NRG; PAM sequence: GGG
cttgtgtctggtaggaattt

SEQ ID NO: 179706 - DNA, 20 bp, Artificial Sequence
  Description of Artificial Sequence: Synthetic oligonucleotide
  Target: LAMA2; (+) strand; PAM type: NRG; PAM sequence: GGG
ttgtgtctggtaggaatttg

SEQ ID NO: 179707 - DNA, 20 bp, Artificial Sequence
  Description of Artificial Sequence: Synthetic oligonucleotide
  Target: LAMA2; (+) strand; PAM type: NRG; PAM sequence: GGG
tgtgtctggtaggaatttgg

SEQ ID NO: 179708 - DNA, 20 bp, Artificial Sequence
  Description of Artificial Sequence: Synthetic oligonucleotide
  Target: LAMA2; (+) strand; PAM type: NRG; PAM sequence: CAG
atttgggggtgtcgctgttt

SEQ ID NO: 179709 - DNA, 20 bp, Artificial Sequence
  Description of Artificial Sequence: Synthetic oligonucleotide
  Target: LAMA2; (+) strand; PAM type: NRG; PAM sequence: AGG
tttgggggtgtcgctgtttc

SEQ ID NO: 179710 - DNA, 20 bp, Artificial Sequence
  Description of Artificial Sequence: Synthetic oligonucleotide
  Target: LAMA2; (+) strand; PAM type: NRG; PAM sequence: AAG
caggcttcctattttgcctg

SEQ ID NO: 179711 - DNA, 20 bp, Artificial Sequence
  Description of Artificial Sequence: Synthetic oligonucleotide
  Target: LAMA2; (+) strand; PAM type: NRG; PAM sequence: AAG
cttcctattttgcctgaaga

SEQ ID NO: 179712 - DNA, 20 bp, Artificial Sequence
  Description of Artificial Sequence: Synthetic oligonucleotide
  Target: LAMA2; (+) strand; PAM type: NRG; PAM sequence: AAG
cacttattcttatgcaatac

SEQ ID NO: 179713 - DNA, 20 bp, Artificial Sequence
  Description of Artificial Sequence: Synthetic oligonucleotide
  Target: LAMA2; (+) strand; PAM type: NRG; PAM sequence: AAG
ttcttatgcaatacaagcca

SEQ ID NO: 179714 - DNA, 20 bp, Artificial Sequence
  Description of Artificial Sequence: Synthetic oligonucleotide
  Target: LAMA2; (+) strand; PAM type: NRG; PAM sequence: AAG
tgcaatacaagccaaagcat

SEQ ID NO: 179715 - DNA, 20 bp, Artificial Sequence
  Description of Artificial Sequence: Synthetic oligonucleotide
  Target: LAMA2; (+) strand; PAM type: NRG; PAM sequence: GAG
caatacaagccaaagcataa

SEQ ID NO: 179716 - DNA, 20 bp, Artificial Sequence
  Description of Artificial Sequence: Synthetic oligonucleotide
  Target: LAMA2; (+) strand; PAM type: NRG; PAM sequence: CAG
ttgcttgtctttgttgtaca

SEQ ID NO: 179717 - DNA, 20 bp, Artificial Sequence
  Description of Artificial Sequence: Synthetic oligonucleotide
  Target: LAMA2; (+) strand; PAM type: NRG; PAM sequence: TAG
gttgtacacagctcctcctt

SEQ ID NO: 179718 - DNA, 20 bp, Artificial Sequence
  Description of Artificial Sequence: Synthetic oligonucleotide
  Target: LAMA2; (+) strand; PAM type: NRG; PAM sequence: TAG
agctcctcctttagtctaca

SEQ ID NO: 179719 - DNA, 20 bp, Artificial Sequence
  Description of Artificial Sequence: Synthetic oligonucleotide
  Target: LAMA2; (+) strand; PAM type: NRG; PAM sequence: TAG
tttagtctacatagccacca

SEQ ID NO: 179720 - DNA, 20 bp, Artificial Sequence
  Description of Artificial Sequence: Synthetic oligonucleotide
  Target: LAMA2; (+) strand; PAM type: NRG; PAM sequence: CAG
atagccaccatagaaaaatg

SEQ ID NO: 179721 - DNA, 20 bp, Artificial Sequence
  Description of Artificial Sequence: Synthetic oligonucleotide
  Target: LAMA2; (+) strand; PAM type: NRG; PAM sequence: CAG
gaaattcttatgtaacatac

SEQ ID NO: 179722 - DNA, 20 bp, Artificial Sequence
  Description of Artificial Sequence: Synthetic oligonucleotide
  Target: LAMA2; (+) strand; PAM type: NRG; PAM sequence: AGG
aaattcttatgtaacatacc

SEQ ID NO: 179723 - DNA, 20 bp, Artificial Sequence
  Description of Artificial Sequence: Synthetic oligonucleotide
  Target: LAMA2; (+) strand; PAM type: NRG; PAM sequence: TGG
caggtccaccctacttaaaa

SEQ ID NO: 179724 - DNA, 20 bp, Artificial Sequence
  Description of Artificial Sequence: Synthetic oligonucleotide
  Target: LAMA2; (+) strand; PAM type: NRG; PAM sequence: GGG
aggtccaccctacttaaaat

SEQ ID NO: 179725 - DNA, 20 bp, Artificial Sequence
  Description of Artificial Sequence: Synthetic oligonucleotide
  Target: LAMA2; (+) strand; PAM type: NRG; PAM sequence: AAG
tccaccctacttaaaatggg

SEQ ID NO: 179726 - DNA, 20 bp, Artificial Sequence
  Description of Artificial Sequence: Synthetic oligonucleotide
  Target: LAMA2; (+) strand; PAM type: NRG; PAM sequence: GAG
acttaaaatgggaagtaact

SEQ ID NO: 179727 - DNA, 20 bp, Artificial Sequence
  Description of Artificial Sequence: Synthetic oligonucleotide
  Target: LAMA2; (+) strand; PAM type: NRG; PAM sequence: CAG
gaagtaactgagaactgatt

SEQ ID NO: 179728 - DNA, 20 bp, Artificial Sequence
  Description of Artificial Sequence: Synthetic oligonucleotide
  Target: LAMA2; (+) strand; PAM type: NRG; PAM sequence: TGG
tgattcagttattctatctt

SEQ ID NO: 179729 - DNA, 20 bp, Artificial Sequence
  Description of Artificial Sequence: Synthetic oligonucleotide
  Target: LAMA2; (+) strand; PAM type: NRG; PAM sequence: GAG
attcagttattctatctttg

SEQ ID NO: 179730 - DNA, 20 bp, Artificial Sequence
  Description of Artificial Sequence: Synthetic oligonucleotide
  Target: LAMA2; (+) strand; PAM type: NRG; PAM sequence: TAG
ttaatgcaattatcaacatc

SEQ ID NO: 179731 - DNA, 20 bp, Artificial Sequence
  Description of Artificial Sequence: Synthetic oligonucleotide
  Target: LAMA2; (+) strand; PAM type: NRG; PAM sequence: TAG
tatcaacatctagtaccata

SEQ ID NO: 179732 - DNA, 20 bp, Artificial Sequence
  Description of Artificial Sequence: Synthetic oligonucleotide
  Target: LAMA2; (+) strand; PAM type: NRG; PAM sequence: TAG
agtaccatatagattactta

SEQ ID NO: 179733 - DNA, 20 bp, Artificial Sequence
  Description of Artificial Sequence: Synthetic oligonucleotide
  Target: LAMA2; (+) strand; PAM type: NRG; PAM sequence: CAG
tatagaactatccctgtctt

SEQ ID NO: 179734 - DNA, 20 bp, Artificial Sequence
  Description of Artificial Sequence: Synthetic oligonucleotide
  Target: LAMA2; (+) strand; PAM type: NRG; PAM sequence: AAG
tcaactccctgttaaaccca

SEQ ID NO: 179735 - DNA, 20 bp, Artificial Sequence
  Description of Artificial Sequence: Synthetic oligonucleotide
  Target: LAMA2; (+) strand; PAM type: NRG; PAM sequence: CAG
actccctgttaaacccaaag

SEQ ID NO: 179736 - DNA, 20 bp, Artificial Sequence
  Description of Artificial Sequence: Synthetic oligonucleotide
  Target: LAMA2; (+) strand; PAM type: NRG; PAM sequence: CAG
gttaaacccaaagcagctaa

SEQ ID NO: 179737 - DNA, 20 bp, Artificial Sequence
  Description of Artificial Sequence: Synthetic oligonucleotide
  Target: LAMA2; (+) strand; PAM type: NRG; PAM sequence: AAG
ccaaagcagctaacagttga

SEQ ID NO: 179738 - DNA, 20 bp, Artificial Sequence
  Description of Artificial Sequence: Synthetic oligonucleotide
  Target: LAMA2; (+) strand; PAM type: NRG; PAM sequence: AGG
caaagcagctaacagttgaa

SEQ ID NO: 179739 - DNA, 20 bp, Artificial Sequence
  Description of Artificial Sequence: Synthetic oligonucleotide
  Target: LAMA2; (+) strand; PAM type: NRG; PAM sequence: TGG
cagctaacagttgaaaggta

SEQ ID NO: 179740 - DNA, 20 bp, Artificial Sequence
  Description of Artificial Sequence: Synthetic oligonucleotide
  Target: LAMA2; (+) strand; PAM type: NRG; PAM sequence: AAG
aacagttgaaaggtatggtt

SEQ ID NO: 179741 - DNA, 20 bp, Artificial Sequence
  Description of Artificial Sequence: Synthetic oligonucleotide
  Target: LAMA2; (+) strand; PAM type: NRG; PAM sequence: AGG
acagttgaaaggtatggtta

SEQ ID NO: 179742 - DNA, 20 bp, Artificial Sequence
  Description of Artificial Sequence: Synthetic oligonucleotide
  Target: LAMA2; (+) strand; PAM type: NRG; PAM sequence: GGG
cagttgaaaggtatggttaa

SEQ ID NO: 179743 - DNA, 20 bp, Artificial Sequence
  Description of Artificial Sequence: Synthetic oligonucleotide
  Target: LAMA2; (+) strand; PAM type: NRG; PAM sequence: TAG
gaaaggtatggttaagggcc

SEQ ID NO: 179744 - DNA, 20 bp, Artificial Sequence
  Description of Artificial Sequence: Synthetic oligonucleotide
  Target: LAMA2; (+) strand; PAM type: NRG; PAM sequence: AGG
aaaggtatggttaagggcct

SEQ ID NO: 179745 - DNA, 20 bp, Artificial Sequence
  Description of Artificial Sequence: Synthetic oligonucleotide
  Target: LAMA2; (+) strand; PAM type: NRG; PAM sequence: GGG
aaggtatggttaagggccta

SEQ ID NO: 179746 - DNA, 20 bp, Artificial Sequence
  Description of Artificial Sequence: Synthetic oligonucleotide
  Target: LAMA2; (+) strand; PAM type: NRG; PAM sequence: TAG
tatggttaagggcctagggc

SEQ ID NO: 179747 - DNA, 20 bp, Artificial Sequence
  Description of Artificial Sequence: Synthetic oligonucleotide
  Target: LAMA2; (+) strand; PAM type: NRG; PAM sequence: AAG
agggcctagggctagacatg

SEQ ID NO: 179748 - DNA, 20 bp, Artificial Sequence
  Description of Artificial Sequence: Synthetic oligonucleotide
  Target: LAMA2; (+) strand; PAM type: NRG; PAM sequence: CAG
gggctagacatgaagctgat

SEQ ID NO: 179749 - DNA, 20 bp, Artificial Sequence
  Description of Artificial Sequence: Synthetic oligonucleotide
  Target: LAMA2; (+) strand; PAM type: NRG; PAM sequence: GAG
gctagacatgaagctgatca

SEQ ID NO: 179750 - DNA, 20 bp, Artificial Sequence
  Description of Artificial Sequence: Synthetic oligonucleotide
  Target: LAMA2; (+) strand; PAM type: NRG; PAM sequence: CAG
gacatgaagctgatcagaga

SEQ ID NO: 179751 - DNA, 20 bp, Artificial Sequence
  Description of Artificial Sequence: Synthetic oligonucleotide
  Target: LAMA2; (+) strand; PAM type: NRG; PAM sequence: GAG
catgaagctgatcagagaca

SEQ ID NO: 179752 - DNA, 20 bp, Artificial Sequence
  Description of Artificial Sequence: Synthetic oligonucleotide
  Target: LAMA2; (+) strand; PAM type: NRG; PAM sequence: AAG
gaagctgatcagagacagag

SEQ ID NO: 179753 - DNA, 20 bp, Artificial Sequence
  Description of Artificial Sequence: Synthetic oligonucleotide
  Target: LAMA2; (+) strand; PAM type: NRG; PAM sequence: AAG
tcagagacagagaagactta

SEQ ID NO: 179754 - DNA, 20 bp, Artificial Sequence
  Description of Artificial Sequence: Synthetic oligonucleotide
  Target: LAMA2; (+) strand; PAM type: NRG; PAM sequence: TGG
acagagaagacttaaagaac

SEQ ID NO: 179755 - DNA, 20 bp, Artificial Sequence
  Description of Artificial Sequence: Synthetic oligonucleotide
  Target: LAMA2; (+) strand; PAM type: NRG; PAM sequence: TGG
aactggttaattgttgactc

SEQ ID NO: 179756 - DNA, 20 bp, Artificial Sequence
  Description of Artificial Sequence: Synthetic oligonucleotide
  Target: LAMA2; (+) strand; PAM type: NRG; PAM sequence: GGG
actggttaattgttgactct

SEQ ID NO: 179757 - DNA, 20 bp, Artificial Sequence
  Description of Artificial Sequence: Synthetic oligonucleotide
  Target: LAMA2; (+) strand; PAM type: NRG; PAM sequence: TAG
tgttgactctgggtgataca

SEQ ID NO: 179758 - DNA, 20 bp, Artificial Sequence
  Description of Artificial Sequence: Synthetic oligonucleotide
  Target: LAMA2; (+) strand; PAM type: NRG; PAM sequence: GAG
ttgactctgggtgatacata

SEQ ID NO: 179759 - DNA, 20 bp, Artificial Sequence
  Description of Artificial Sequence: Synthetic oligonucleotide
  Target: LAMA2; (+) strand; PAM type: NRG; PAM sequence: TAG
atagagtttcatgctgtttg

SEQ ID NO: 179760 - DNA, 20 bp, Artificial Sequence
  Description of Artificial Sequence: Synthetic oligonucleotide
  Target: LAMA2; (+) strand; PAM type: NRG; PAM sequence: AAG
ttaattttttccataataaa

SEQ ID NO: 179761 - DNA, 20 bp, Artificial Sequence
  Description of Artificial Sequence: Synthetic oligonucleotide
  Target: LAMA2; (+) strand; PAM type: NRG; PAM sequence: AAG
ttccataataaaaagtttaa

SEQ ID NO: 179762 - DNA, 20 bp, Artificial Sequence
  Description of Artificial Sequence: Synthetic oligonucleotide
  Target: LAMA2; (+) strand; PAM type: NRG; PAM sequence: AAG
ataataaaaagtttaaaaga

SEQ ID NO: 179763 - DNA, 20 bp, Artificial Sequence
  Description of Artificial Sequence: Synthetic oligonucleotide
  Target: LAMA2; (+) strand; PAM type: NRG; PAM sequence: GAG
aataaaaagtttaaaagaaa

SEQ ID NO: 179764 - DNA, 20 bp, Artificial Sequence
  Description of Artificial Sequence: Synthetic oligonucleotide
  Target: LAMA2; (+) strand; PAM type: NRG; PAM sequence: TGG
aaagaaagagccatgtgcaa

SEQ ID NO: 179765 - DNA, 20 bp, Artificial Sequence
  Description of Artificial Sequence: Synthetic oligonucleotide
  Target: LAMA2; (+) strand; PAM type: NRG; PAM sequence: TAG
atgtgcaatggcatgtgctg

SEQ ID NO: 179766 - DNA, 20 bp, Artificial Sequence
  Description of Artificial Sequence: Synthetic oligonucleotide
  Target: LAMA2; (+) strand; PAM type: NRG; PAM sequence: CAG
aatggcatgtgctgtagtcc

SEQ ID NO: 179767 - DNA, 20 bp, Artificial Sequence
  Description of Artificial Sequence: Synthetic oligonucleotide
  Target: LAMA2; (+) strand; PAM type: NRG; PAM sequence: TGG
gtgctgtagtcccagctact

SEQ ID NO: 179768 - DNA, 20 bp, Artificial Sequence
  Description of Artificial Sequence: Synthetic oligonucleotide
  Target: LAMA2; (+) strand; PAM type: NRG; PAM sequence: GGG
tgctgtagtcccagctactt

SEQ ID NO: 179769 - DNA, 20 bp, Artificial Sequence
  Description of Artificial Sequence: Synthetic oligonucleotide
  Target: LAMA2; (+) strand; PAM type: NRG; PAM sequence: GAG
ctgtagtcccagctacttgg

SEQ ID NO: 179770 - DNA, 20 bp, Artificial Sequence
  Description of Artificial Sequence: Synthetic oligonucleotide
  Target: LAMA2; (+) strand; PAM type: NRG; PAM sequence: AGG
tgtagtcccagctacttggg

SEQ ID NO: 179771 - DNA, 20 bp, Artificial Sequence
  Description of Artificial Sequence: Synthetic oligonucleotide
  Target: LAMA2; (+) strand; PAM type: NRG; PAM sequence: GAG
tcccagctacttgggaggct

SEQ ID NO: 179772 - DNA, 20 bp, Artificial Sequence
  Description of Artificial Sequence: Synthetic oligonucleotide
  Target: LAMA2; (+) strand; PAM type: NRG; PAM sequence: AGG
cccagctacttgggaggctg

SEQ ID NO: 179773 - DNA, 20 bp, Artificial Sequence
  Description of Artificial Sequence: Synthetic oligonucleotide
  Target: LAMA2; (+) strand; PAM type: NRG; PAM sequence: CAG
agctacttgggaggctgagg

SEQ ID NO: 179774 - DNA, 20 bp, Artificial Sequence
  Description of Artificial Sequence: Synthetic oligonucleotide
  Target: LAMA2; (+) strand; PAM type: NRG; PAM sequence: AGG
gctacttgggaggctgaggc

SEQ ID NO: 179775 - DNA, 20 bp, Artificial Sequence
  Description of Artificial Sequence: Synthetic oligonucleotide
  Target: LAMA2; (+) strand; PAM type: NRG; PAM sequence: GAG
tacttgggaggctgaggcag

SEQ ID NO: 179776 - DNA, 20 bp, Artificial Sequence
  Description of Artificial Sequence: Synthetic oligonucleotide
  Target: LAMA2; (+) strand; PAM type: NRG; PAM sequence: AGG
acttgggaggctgaggcagg

SEQ ID NO: 179777 - DNA, 20 bp, Artificial Sequence
  Description of Artificial Sequence: Synthetic oligonucleotide
  Target: LAMA2; (+) strand; PAM type: NRG; PAM sequence: CAG
ctgaggcaggaggatcactt

SEQ ID NO: 179778 - DNA, 20 bp, Artificial Sequence
  Description of Artificial Sequence: Synthetic oligonucleotide
  Target: LAMA2; (+) strand; PAM type: NRG; PAM sequence: CAG
gcaggaggatcacttcagcc

SEQ ID NO: 179779 - DNA, 20 bp, Artificial Sequence
  Description of Artificial Sequence: Synthetic oligonucleotide
  Target: LAMA2; (+) strand; PAM type: NRG; PAM sequence: AGG
caggaggatcacttcagccc

SEQ ID NO: 179780 - DNA, 20 bp, Artificial Sequence
  Description of Artificial Sequence: Synthetic oligonucleotide
  Target: LAMA2; (+) strand; PAM type: NRG; PAM sequence: AAG
tcacttcagcccaggaattc

SEQ ID NO: 179781 - DNA, 20 bp, Artificial Sequence
  Description of Artificial Sequence: Synthetic oligonucleotide
  Target: LAMA2; (+) strand; PAM type: NRG; PAM sequence: AGG
cacttcagcccaggaattca

SEQ ID NO: 179782 - DNA, 20 bp, Artificial Sequence
  Description of Artificial Sequence: Synthetic oligonucleotide
  Target: LAMA2; (+) strand; PAM type: NRG; PAM sequence: TGG
agcccaggaattcaaggctg

SEQ ID NO: 179783 - DNA, 20 bp, Artificial Sequence
  Description of Artificial Sequence: Synthetic oligonucleotide
  Target: LAMA2; (+) strand; PAM type: NRG; PAM sequence: CAG
atgcctgtgaataaccactg

SEQ ID NO: 179784 - DNA, 20 bp, Artificial Sequence
  Description of Artificial Sequence: Synthetic oligonucleotide
  Target: LAMA2; (+) strand; PAM type: NRG; PAM sequence: CAG
tgtgaataaccactgcagtc

SEQ ID NO: 179785 - DNA, 20 bp, Artificial Sequence
  Description of Artificial Sequence: Synthetic oligonucleotide
  Target: LAMA2; (+) strand; PAM type: NRG; PAM sequence: TGG
ataaccactgcagtccagcc

SEQ ID NO: 179786 - DNA, 20 bp, Artificial Sequence
  Description of Artificial Sequence: Synthetic oligonucleotide
  Target: LAMA2; (+) strand; PAM type: NRG; PAM sequence: GGG
taaccactgcagtccagcct

SEQ ID NO: 179787 - DNA, 20 bp, Artificial Sequence
  Description of Artificial Sequence: Synthetic oligonucleotide
  Target: LAMA2; (+) strand; PAM type: NRG; PAM sequence: TAG
gcagtccagcctgggcaaca

SEQ ID NO: 179788 - DNA, 20 bp, Artificial Sequence
  Description of Artificial Sequence: Synthetic oligonucleotide
  Target: LAMA2; (+) strand; PAM type: NRG; PAM sequence: AAG
tccagcctgggcaacatagc

SEQ ID NO: 179789 - DNA, 20 bp, Artificial Sequence
  Description of Artificial Sequence: Synthetic oligonucleotide
  Target: LAMA2; (+) strand; PAM type: NRG; PAM sequence: AAG
acttcatctcttaaaaaaaa

SEQ ID NO: 179790 - DNA, 20 bp, Artificial Sequence
  Description of Artificial Sequence: Synthetic oligonucleotide
  Target: LAMA2; (+) strand; PAM type: NRG; PAM sequence: GAG
aaaaagttataaaaaaaaat

SEQ ID NO: 179791 - DNA, 20 bp, Artificial Sequence
  Description of Artificial Sequence: Synthetic oligonucleotide
  Target: LAMA2; (+) strand; PAM type: NRG; PAM sequence: AAG
aagttataaaaaaaaatgag

SEQ ID NO: 179792 - DNA, 20 bp, Artificial Sequence
  Description of Artificial Sequence: Synthetic oligonucleotide
  Target: LAMA2; (+) strand; PAM type: NRG; PAM sequence: TAG
aaaatgagaagcaatatttt

SEQ ID NO: 179793 - DNA, 20 bp, Artificial Sequence
  Description of Artificial Sequence: Synthetic oligonucleotide
  Target: LAMA2; (+) strand; PAM type: NRG; PAM sequence: AAG
caatatttttagttcttttt

SEQ ID NO: 179794 - DNA, 20 bp, Artificial Sequence
  Description of Artificial Sequence: Synthetic oligonucleotide
  Target: LAMA2; (+) strand; PAM type: NRG; PAM sequence: AGG
aatatttttagttcttttta

SEQ ID NO: 179795 - DNA, 20 bp, Artificial Sequence
  Description of Artificial Sequence: Synthetic oligonucleotide
  Target: LAMA2; (+) strand; PAM type: NRG; PAM sequence: AAG
atttttagttctttttaagg

SEQ ID NO: 179796 - DNA, 20 bp, Artificial Sequence
  Description of Artificial Sequence: Synthetic oligonucleotide
  Target: LAMA2; (+) strand; PAM type: NRG; PAM sequence: CAG
ttctttttaaggaagttttt

SEQ ID NO: 179797 - DNA, 20 bp, Artificial Sequence
  Description of Artificial Sequence: Synthetic oligonucleotide
  Target: LAMA2; (+) strand; PAM type: NRG; PAM sequence: AAG
ttaaggaagtttttcagcaa

SEQ ID NO: 179798 - DNA, 20 bp, Artificial Sequence
  Description of Artificial Sequence: Synthetic oligonucleotide
  Target: LAMA2; (+) strand; PAM type: NRG; PAM sequence: GAG
aaaagtgtgtgtgcatgtgt

SEQ ID NO: 179799 - DNA, 20 bp, Artificial Sequence
  Description of Artificial Sequence: Synthetic oligonucleotide
  Target: LAMA2; (+) strand; PAM type: NRG; PAM sequence: GAG
aagtgtgtgtgcatgtgtga

SEQ ID NO: 179800 - DNA, 20 bp, Artificial Sequence
  Description of Artificial Sequence: Synthetic oligonucleotide
  Target: LAMA2; (+) strand; PAM type: NRG; PAM sequence: GAG
gtgtgtgtgcatgtgtgaga

SEQ ID NO: 179801 - DNA, 20 bp, Artificial Sequence
  Description of Artificial Sequence: Synthetic oligonucleotide
  Target: LAMA2; (+) strand; PAM type: NRG; PAM sequence: GAG
gtgtgtgcatgtgtgagaga

SEQ ID NO: 179802 - DNA, 20 bp, Artificial Sequence
  Description of Artificial Sequence: Synthetic oligonucleotide
  Target: LAMA2; (+) strand; PAM type: NRG; PAM sequence: CAG
gcatgtgtgagagagagtga

SEQ ID NO: 179803 - DNA, 20 bp, Artificial Sequence
  Description of Artificial Sequence: Synthetic oligonucleotide
  Target: LAMA2; (+) strand; PAM type: NRG; PAM sequence: GAG
atgtgtgagagagagtgaca

SEQ ID NO: 179804 - DNA, 20 bp, Artificial Sequence
  Description of Artificial Sequence: Synthetic oligonucleotide
  Target: LAMA2; (+) strand; PAM type: NRG; PAM sequence: TGG
tgacagagtgcttgcgtgtt

SEQ ID NO: 179805 - DNA, 20 bp, Artificial Sequence
  Description of Artificial Sequence: Synthetic oligonucleotide
  Target: LAMA2; (+) strand; PAM type: NRG; PAM sequence: TGG
cagagtgcttgcgtgtttgg

SEQ ID NO: 179806 - DNA, 20 bp, Artificial Sequence
  Description of Artificial Sequence: Synthetic oligonucleotide
  Target: LAMA2; (+) strand; PAM type: NRG; PAM sequence: GAG
cttgcgtgtttggtggtgtt

SEQ ID NO: 179807 - DNA, 20 bp, Artificial Sequence
  Description of Artificial Sequence: Synthetic oligonucleotide
  Target: LAMA2; (+) strand; PAM type: NRG; PAM sequence: AGG
ttgcgtgtttggtggtgttg

SEQ ID NO: 179808 - DNA, 20 bp, Artificial Sequence
  Description of Artificial Sequence: Synthetic oligonucleotide
  Target: LAMA2; (+) strand; PAM type: NRG; PAM sequence: GGG
tgcgtgtttggtggtgttga

SEQ ID NO: 179809 - DNA, 20 bp, Artificial Sequence
  Description of Artificial Sequence: Synthetic oligonucleotide
  Target: LAMA2; (+) strand; PAM type: NRG; PAM sequence: AAG
ttggtggtgttgagggaatt

SEQ ID NO: 179810 - DNA, 20 bp, Artificial Sequence
  Description of Artificial Sequence: Synthetic oligonucleotide
  Target: LAMA2; (+) strand; PAM type: NRG; PAM sequence: CGG
gagggaattaagtacttaac

SEQ ID NO: 179811 - DNA, 20 bp, Artificial Sequence
  Description of Artificial Sequence: Synthetic oligonucleotide
  Target: LAMA2; (+) strand; PAM type: NRG; PAM sequence: GGG
agggaattaagtacttaacc

SEQ ID NO: 179812 - DNA, 20 bp, Artificial Sequence
  Description of Artificial Sequence: Synthetic oligonucleotide
  Target: LAMA2; (+) strand; PAM type: NRG; PAM sequence: AAG
ttaagtacttaaccgggttt

SEQ ID NO: 179813 - DNA, 20 bp, Artificial Sequence
  Description of Artificial Sequence: Synthetic oligonucleotide
  Target: LAMA2; (+) strand; PAM type: NRG; PAM sequence: AGG
taagtacttaaccgggttta

SEQ ID NO: 179814 - DNA, 20 bp, Artificial Sequence
  Description of Artificial Sequence: Synthetic oligonucleotide
  Target: LAMA2; (+) strand; PAM type: NRG; PAM sequence: AAG
taaggacatttatactcata

SEQ ID NO: 179815 - DNA, 20 bp, Artificial Sequence
  Description of Artificial Sequence: Synthetic oligonucleotide
  Target: LAMA2; (+) strand; PAM type: NRG; PAM sequence: CAG
acatttatactcataaagtg

SEQ ID NO: 179816 - DNA, 20 bp, Artificial Sequence
  Description of Artificial Sequence: Synthetic oligonucleotide
  Target: LAMA2; (+) strand; PAM type: NRG; PAM sequence: CAG
ataaagtgcagttcttcttt

SEQ ID NO: 179817 - DNA, 20 bp, Artificial Sequence
  Description of Artificial Sequence: Synthetic oligonucleotide
  Target: LAMA2; (+) strand; PAM type: NRG; PAM sequence: AAG
gtgcagttcttctttcagaa

SEQ ID NO: 179818 - DNA, 20 bp, Artificial Sequence
  Description of Artificial Sequence: Synthetic oligonucleotide
  Target: LAMA2; (+) strand; PAM type: NRG; PAM sequence: AAG
agaaaagatacattctgtta

SEQ ID NO: 179819 - DNA, 20 bp, Artificial Sequence
  Description of Artificial Sequence: Synthetic oligonucleotide
  Target: LAMA2; (+) strand; PAM type: NRG; PAM sequence: AAG
aaagatacattctgttaaag

SEQ ID NO: 179820 - DNA, 20 bp, Artificial Sequence
  Description of Artificial Sequence: Synthetic oligonucleotide
  Target: LAMA2; (+) strand; PAM type: NRG; PAM sequence: AGG
aagatacattctgttaaaga

SEQ ID NO: 179821 - DNA, 20 bp, Artificial Sequence
  Description of Artificial Sequence: Synthetic oligonucleotide
  Target: LAMA2; (+) strand; PAM type: NRG; PAM sequence: AAG
cacttaacattgcatcctca

SEQ ID NO: 179822 - DNA, 20 bp, Artificial Sequence
  Description of Artificial Sequence: Synthetic oligonucleotide
  Target: LAMA2; (+) strand; PAM type: NRG; PAM sequence: AAG
cattgcatcctcaaagaaaa

SEQ ID NO: 179823 - DNA, 20 bp, Artificial Sequence
  Description of Artificial Sequence: Synthetic oligonucleotide
  Target: LAMA2; (+) strand; PAM type: NRG; PAM sequence: AAG
tcaaagaaaaaagattacca

SEQ ID NO: 179824 - DNA, 20 bp, Artificial Sequence
  Description of Artificial Sequence: Synthetic oligonucleotide
  Target: LAMA2; (+) strand; PAM type: NRG; PAM sequence: GAG
agaaaaaagattaccaaagt

SEQ ID NO: 179825 - DNA, 20 bp, Artificial Sequence
  Description of Artificial Sequence: Synthetic oligonucleotide
  Target: LAMA2; (+) strand; PAM type: NRG; PAM sequence: CAG
aaaagattaccaaagtgaga

SEQ ID NO: 179826 - DNA, 20 bp, Artificial Sequence
  Description of Artificial Sequence: Synthetic oligonucleotide
  Target: LAMA2; (+) strand; PAM type: NRG; PAM sequence: CAG
agattaccaaagtgagacag

SEQ ID NO: 179827 - DNA, 20 bp, Artificial Sequence
  Description of Artificial Sequence: Synthetic oligonucleotide
  Target: LAMA2; (+) strand; PAM type: NRG; PAM sequence: CAG
taccaaagtgagacagcagt

SEQ ID NO: 179828 - DNA, 20 bp, Artificial Sequence
  Description of Artificial Sequence: Synthetic oligonucleotide
  Target: LAMA2; (+) strand; PAM type: NRG; PAM sequence: AGG
accaaagtgagacagcagtc

SEQ ID NO: 179829 - DNA, 20 bp, Artificial Sequence
  Description of Artificial Sequence: Synthetic oligonucleotide
  Target: LAMA2; (+) strand; PAM type: NRG; PAM sequence: GGG
ccaaagtgagacagcagtca

SEQ ID NO: 179830 - DNA, 20 bp, Artificial Sequence
  Description of Artificial Sequence: Synthetic oligonucleotide
  Target: LAMA2; (+) strand; PAM type: NRG; PAM sequence: AAG
gtcagggaaatatgacatcg

SEQ ID NO: 179831 - DNA, 20 bp, Artificial Sequence
  Description of Artificial Sequence: Synthetic oligonucleotide
  Target: LAMA2; (+) strand; PAM type: NRG; PAM sequence: AAG
gttatgactgcttgtctcaa

SEQ ID NO: 179832 - DNA, 20 bp, Artificial Sequence
  Description of Artificial Sequence: Synthetic oligonucleotide
  Target: LAMA2; (+) strand; PAM type: NRG; PAM sequence: GAG
tatgactgcttgtctcaaaa

SEQ ID NO: 179833 - DNA, 20 bp, Artificial Sequence
  Description of Artificial Sequence: Synthetic oligonucleotide
  Target: LAMA2; (+) strand; PAM type: NRG; PAM sequence: GAG
tgactgcttgtctcaaaaga

SEQ ID NO: 179834 - DNA, 20 bp, Artificial Sequence
  Description of Artificial Sequence: Synthetic oligonucleotide
  Target: LAMA2; (+) strand; PAM type: NRG; PAM sequence: CAG
gcttgtctcaaaagagagac

SEQ ID NO: 179835 - DNA, 20 bp, Artificial Sequence
  Description of Artificial Sequence: Synthetic oligonucleotide
  Target: LAMA2; (+) strand; PAM type: NRG; PAM sequence: CAG
gaccagattttcatatttaa

SEQ ID NO: 179836 - DNA, 20 bp, Artificial Sequence
  Description of Artificial Sequence: Synthetic oligonucleotide
  Target: LAMA2; (+) strand; PAM type: NRG; PAM sequence: TGG
ttttcatatttaacagctca

SEQ ID NO: 179837 - DNA, 20 bp, Artificial Sequence
  Description of Artificial Sequence: Synthetic oligonucleotide
  Target: LAMA2; (+) strand; PAM type: NRG; PAM sequence: AAG
tggaaatcaatcacttaaaa

SEQ ID NO: 179838 - DNA, 20 bp, Artificial Sequence
  Description of Artificial Sequence: Synthetic oligonucleotide
  Target: LAMA2; (+) strand; PAM type: NRG; PAM sequence: TAG
aaaatgaaataaaatgataa

SEQ ID NO: 179839 - DNA, 20 bp, Artificial Sequence
  Description of Artificial Sequence: Synthetic oligonucleotide
  Target: LAMA2; (+) strand; PAM type: NRG; PAM sequence: AAG
aatttgtacactgaaatctg

SEQ ID NO: 179840 - DNA, 20 bp, Artificial Sequence
  Description of Artificial Sequence: Synthetic oligonucleotide
  Target: LAMA2; (+) strand; PAM type: NRG; PAM sequence: AGG
atttgtacactgaaatctga

SEQ ID NO: 179841 - DNA, 20 bp, Artificial Sequence
  Description of Artificial Sequence: Synthetic oligonucleotide
  Target: LAMA2; (+) strand; PAM type: NRG; PAM sequence: GGG
tttgtacactgaaatctgaa

SEQ ID NO: 179842 - DNA, 20 bp, Artificial Sequence
  Description of Artificial Sequence: Synthetic oligonucleotide
  Target: LAMA2; (+) strand; PAM type: NRG; PAM sequence: TGG
gtacactgaaatctgaaggg

SEQ ID NO: 179843 - DNA, 20 bp, Artificial Sequence
  Description of Artificial Sequence: Synthetic oligonucleotide
  Target: LAMA2; (+) strand; PAM type: NRG; PAM sequence: TAG
ggatattgtactgtatacat

SEQ ID NO: 179844 - DNA, 20 bp, Artificial Sequence
  Description of Artificial Sequence: Synthetic oligonucleotide
  Target: LAMA2; (+) strand; PAM type: NRG; PAM sequence: AAG
tatgctgtgccaaacaataa

SEQ ID NO: 179845 - DNA, 20 bp, Artificial Sequence
  Description of Artificial Sequence: Synthetic oligonucleotide
  Target: LAMA2; (+) strand; PAM type: NRG; PAM sequence: TAG
caataaaagatataccattc

SEQ ID NO: 179846 - DNA, 20 bp, Artificial Sequence
  Description of Artificial Sequence: Synthetic oligonucleotide
  Target: LAMA2; (+) strand; PAM type: NRG; PAM sequence: AGG
aataaaagatataccattct

SEQ ID NO: 179847 - DNA, 20 bp, Artificial Sequence
  Description of Artificial Sequence: Synthetic oligonucleotide
  Target: LAMA2; (+) strand; PAM type: NRG; PAM sequence: AAG
aaaagatataccattctagg

SEQ ID NO: 179848 - DNA, 20 bp, Artificial Sequence
  Description of Artificial Sequence: Synthetic oligonucleotide
  Target: LAMA2; (+) strand; PAM type: NRG; PAM sequence: TGG
ggaagactacttcaacaaac

SEQ ID NO: 179849 - DNA, 20 bp, Artificial Sequence
  Description of Artificial Sequence: Synthetic oligonucleotide
  Target: LAMA2; (+) strand; PAM type: NRG; PAM sequence: GGG
gaagactacttcaacaaact

SEQ ID NO: 179850 - DNA, 20 bp, Artificial Sequence
  Description of Artificial Sequence: Synthetic oligonucleotide
  Target: LAMA2; (+) strand; PAM type: NRG; PAM sequence: AAG
acttcaacaaactgggatcc

SEQ ID NO: 179851 - DNA, 20 bp, Artificial Sequence
  Description of Artificial Sequence: Synthetic oligonucleotide
  Target: LAMA2; (+) strand; PAM type: NRG; PAM sequence: AAG
ctgggatccaagatattata

SEQ ID NO: 179852 - DNA, 20 bp, Artificial Sequence
  Description of Artificial Sequence: Synthetic oligonucleotide
  Target: LAMA2; (+) strand; PAM type: NRG; PAM sequence: TAG
caagatattataaagaattt

SEQ ID NO: 179853 - DNA, 20 bp, Artificial Sequence
  Description of Artificial Sequence: Synthetic oligonucleotide
  Target: LAMA2; (+) strand; PAM type: NRG; PAM sequence: AGG
aagatattataaagaatttt

SEQ ID NO: 179854 - DNA, 20 bp, Artificial Sequence
  Description of Artificial Sequence: Synthetic oligonucleotide
  Target: LAMA2; (+) strand; PAM type: NRG; PAM sequence: GAG
gatattataaagaattttag

SEQ ID NO: 179855 - DNA, 20 bp, Artificial Sequence
  Description of Artificial Sequence: Synthetic oligonucleotide
  Target: LAMA2; (+) strand; PAM type: NRG; PAM sequence: CAG
gaattttaggagaaatcatg

SEQ ID NO: 179856 - DNA, 20 bp, Artificial Sequence
  Description of Artificial Sequence: Synthetic oligonucleotide
  Target: LAMA2; (+) strand; PAM type: NRG; PAM sequence: AAG
tcatgcagcttatgatatga

SEQ ID NO: 179857 - DNA, 20 bp, Artificial Sequence
  Description of Artificial Sequence: Synthetic oligonucleotide
  Target: LAMA2; (+) strand; PAM type: NRG; PAM sequence: AGG
catgcagcttatgatatgaa

SEQ ID NO: 179858 - DNA, 20 bp, Artificial Sequence
  Description of Artificial Sequence: Synthetic oligonucleotide
  Target: LAMA2; (+) strand; PAM type: NRG; PAM sequence: GGG
atgcagcttatgatatgaaa

SEQ ID NO: 179859 - DNA, 20 bp, Artificial Sequence
  Description of Artificial Sequence: Synthetic oligonucleotide
  Target: LAMA2; (+) strand; PAM type: NRG; PAM sequence: TGG
cagcttatgatatgaaaggg

SEQ ID NO: 179860 - DNA, 20 bp, Artificial Sequence
  Description of Artificial Sequence: Synthetic oligonucleotide
  Target: LAMA2; (+) strand; PAM type: NRG; PAM sequence: TGG
atatgaaagggtggctcatt

SEQ ID NO: 179861 - DNA, 20 bp, Artificial Sequence
  Description of Artificial Sequence: Synthetic oligonucleotide
  Target: LAMA2; (+) strand; PAM type: NRG; PAM sequence: GGG
tatgaaagggtggctcattt

SEQ ID NO: 179862 - DNA, 20 bp, Artificial Sequence
  Description of Artificial Sequence: Synthetic oligonucleotide
  Target: LAMA2; (+) strand; PAM type: NRG; PAM sequence: GGG
atgaaagggtggctcatttg

SEQ ID NO: 179863 - DNA, 20 bp, Artificial Sequence
  Description of Artificial Sequence: Synthetic oligonucleotide
  Target: LAMA2; (+) strand; PAM type: NRG; PAM sequence: TAG
gtggctcatttggggtccac

SEQ ID NO: 179864 - DNA, 20 bp, Artificial Sequence
  Description of Artificial Sequence: Synthetic oligonucleotide
  Target: LAMA2; (+) strand; PAM type: NRG; PAM sequence: TAG
gtccactagctgaattaaat

SEQ ID NO: 179865 - DNA, 20 bp, Artificial Sequence
  Description of Artificial Sequence: Synthetic oligonucleotide
  Target: LAMA2; (+) strand; PAM type: NRG; PAM sequence: AAG
attagacaaaatgctgaata

SEQ ID NO: 179866 - DNA, 20 bp, Artificial Sequence
  Description of Artificial Sequence: Synthetic oligonucleotide
  Target: LAMA2; (+) strand; PAM type: NRG; PAM sequence: TGG
cttgcataaattgtatgtgt

SEQ ID NO: 179867 - DNA, 20 bp, Artificial Sequence
  Description of Artificial Sequence: Synthetic oligonucleotide
  Target: LAMA2; (+) strand; PAM type: NRG; PAM sequence: TAG
aaattgtatgtgttggtaaa

SEQ ID NO: 179868 - DNA, 20 bp, Artificial Sequence
  Description of Artificial Sequence: Synthetic oligonucleotide
  Target: LAMA2; (+) strand; PAM type: NRG; PAM sequence: AAG
taaatagtaaattattatgt

SEQ ID NO: 179869 - DNA, 20 bp, Artificial Sequence
  Description of Artificial Sequence: Synthetic oligonucleotide
  Target: LAMA2; (+) strand; PAM type: NRG; PAM sequence: TAG
gtaaattattatgtaagcca

SEQ ID NO: 179870 - DNA, 20 bp, Artificial Sequence
  Description of Artificial Sequence: Synthetic oligonucleotide
  Target: LAMA2; (+) strand; PAM type: NRG; PAM sequence: AGG
taaattattatgtaagccat

SEQ ID NO: 179871 - DNA, 20 bp, Artificial Sequence
  Description of Artificial Sequence: Synthetic oligonucleotide
  Target: LAMA2; (+) strand; PAM type: NRG; PAM sequence: AAG
attatgtaagccataggaaa

SEQ ID NO: 179872 - DNA, 20 bp, Artificial Sequence
  Description of Artificial Sequence: Synthetic oligonucleotide
  Target: LAMA2; (+) strand; PAM type: NRG; PAM sequence: AGG
ttatgtaagccataggaaaa

SEQ ID NO: 179873 - DNA, 20 bp, Artificial Sequence
  Description of Artificial Sequence: Synthetic oligonucleotide
  Target: LAMA2; (+) strand; PAM type: NRG; PAM sequence: TAG
aaggctttccacttaaccaa

SEQ ID NO: 179874 - DNA, 20 bp, Artificial Sequence
  Description of Artificial Sequence: Synthetic oligonucleotide
  Target: LAMA2; (+) strand; PAM type: NRG; PAM sequence: CAG
ttaaccaatagcaattccat

SEQ ID NO: 179875 - DNA, 20 bp, Artificial Sequence
  Description of Artificial Sequence: Synthetic oligonucleotide
  Target: LAMA2; (+) strand; PAM type: NRG; PAM sequence: CAG
ttcatgtcaatgaacacaca

SEQ ID NO: 179876 - DNA, 20 bp, Artificial Sequence
  Description of Artificial Sequence: Synthetic oligonucleotide
  Target: LAMA2; (+) strand; PAM type: NRG; PAM sequence: CAG
tcaatgaacacacacagaat

SEQ ID NO: 179877 - DNA, 20 bp, Artificial Sequence
  Description of Artificial Sequence: Synthetic oligonucleotide
  Target: LAMA2; (+) strand; PAM type: NRG; PAM sequence: AGG
caatgaacacacacagaatc

SEQ ID NO: 179878 - DNA, 20 bp, Artificial Sequence
  Description of Artificial Sequence: Synthetic oligonucleotide
  Target: LAMA2; (+) strand; PAM type: NRG; PAM sequence: TGG
acacacacagaatcaggacc

SEQ ID NO: 179879 - DNA, 20 bp, Artificial Sequence
  Description of Artificial Sequence: Synthetic oligonucleotide
  Target: LAMA2; (+) strand; PAM type: NRG; PAM sequence: TGG
aatcaggacctggtgctcac

SEQ ID NO: 179880 - DNA, 20 bp, Artificial Sequence
  Description of Artificial Sequence: Synthetic oligonucleotide
  Target: LAMA2; (+) strand; PAM type: NRG; PAM sequence: TGG
gacctggtgctcactggttc

SEQ ID NO: 179881 - DNA, 20 bp, Artificial Sequence
  Description of Artificial Sequence: Synthetic oligonucleotide
  Target: LAMA2; (+) strand; PAM type: NRG; PAM sequence: AAG
gttctggttgaaactgatgt

SEQ ID NO: 179882 - DNA, 20 bp, Artificial Sequence
  Description of Artificial Sequence: Synthetic oligonucleotide
  Target: LAMA2; (+) strand; PAM type: NRG; PAM sequence: GAG
ttgaaactgatgtaagtgtt

SEQ ID NO: 179883 - DNA, 20 bp, Artificial Sequence
  Description of Artificial Sequence: Synthetic oligonucleotide
  Target: LAMA2; (+) strand; PAM type: NRG; PAM sequence: AAG
actgatgtaagtgttgagcc

SEQ ID NO: 179884 - DNA, 20 bp, Artificial Sequence
  Description of Artificial Sequence: Synthetic oligonucleotide
  Target: LAMA2; (+) strand; PAM type: NRG; PAM sequence: CAG
tgtaagtgttgagccaagat

SEQ ID NO: 179885 - DNA, 20 bp, Artificial Sequence
  Description of Artificial Sequence: Synthetic oligonucleotide
  Target: LAMA2; (+) strand; PAM type: NRG; PAM sequence: GAG
ttgagccaagatcagactct

SEQ ID NO: 179886 - DNA, 20 bp, Artificial Sequence
  Description of Artificial Sequence: Synthetic oligonucleotide
  Target: LAMA2; (+) strand; PAM type: NRG; PAM sequence: GAG
cagactctgagtattgattc

SEQ ID NO: 179887 - DNA, 20 bp, Artificial Sequence
  Description of Artificial Sequence: Synthetic oligonucleotide
  Target: LAMA2; (+) strand; PAM type: NRG; PAM sequence: TGG
gattcgagatctaatgaatt

SEQ ID NO: 179888 - DNA, 20 bp, Artificial Sequence
  Description of Artificial Sequence: Synthetic oligonucleotide
  Target: LAMA2; (+) strand; PAM type: NRG; PAM sequence: TAG
atctaatgaatttggaatgt

SEQ ID NO: 179889 - DNA, 20 bp, Artificial Sequence
  Description of Artificial Sequence: Synthetic oligonucleotide
  Target: LAMA2; (+) strand; PAM type: NRG; PAM sequence: CAG
ttggaatgttagaaactaaa

SEQ ID NO: 179890 - DNA, 20 bp, Artificial Sequence
  Description of Artificial Sequence: Synthetic oligonucleotide
  Target: LAMA2; (+) strand; PAM type: NRG; PAM sequence: CAG
aatgttagaaactaaacagc

SEQ ID NO: 179891 - DNA, 20 bp, Artificial Sequence
  Description of Artificial Sequence: Synthetic oligonucleotide
  Target: LAMA2; (+) strand; PAM type: NRG; PAM sequence: AAG
tctcttaaattcttaaaaac

SEQ ID NO: 179892 - DNA, 20 bp, Artificial Sequence
  Description of Artificial Sequence: Synthetic oligonucleotide
  Target: LAMA2; (+) strand; PAM type: NRG; PAM sequence: TGG
cattttatatcttttaaatc

SEQ ID NO: 179893 - DNA, 20 bp, Artificial Sequence
  Description of Artificial Sequence: Synthetic oligonucleotide
  Target: LAMA2; (+) strand; PAM type: NRG; PAM sequence: CAG
tcttttaaatctggaattac

SEQ ID NO: 179894 - DNA, 20 bp, Artificial Sequence
  Description of Artificial Sequence: Synthetic oligonucleotide
  Target: LAMA2; (+) strand; PAM type: NRG; PAM sequence: AAG
cacttcaacacgtacccttg

SEQ ID NO: 179895 - DNA, 20 bp, Artificial Sequence
  Description of Artificial Sequence: Synthetic oligonucleotide
  Target: LAMA2; (+) strand; PAM type: NRG; PAM sequence: TGG
aacacgtacccttgaagaac

SEQ ID NO: 179896 - DNA, 20 bp, Artificial Sequence
  Description of Artificial Sequence: Synthetic oligonucleotide
  Target: LAMA2; (+) strand; PAM type: NRG; PAM sequence: GGG
acacgtacccttgaagaact

SEQ ID NO: 179897 - DNA, 20 bp, Artificial Sequence
  Description of Artificial Sequence: Synthetic oligonucleotide
  Target: LAMA2; (+) strand; PAM type: NRG; PAM sequence: GAG
acgtacccttgaagaactgg

SEQ ID NO: 179898 - DNA, 20 bp, Artificial Sequence
  Description of Artificial Sequence: Synthetic oligonucleotide
  Target: LAMA2; (+) strand; PAM type: NRG; PAM sequence: TGG
ccttgaagaactgggagaaa

SEQ ID NO: 179899 - DNA, 20 bp, Artificial Sequence
  Description of Artificial Sequence: Synthetic oligonucleotide
  Target: LAMA2; (+) strand; PAM type: NRG; PAM sequence: GAG
agaaatggaactatttctgt

SEQ ID NO: 179900 - DNA, 20 bp, Artificial Sequence
  Description of Artificial Sequence: Synthetic oligonucleotide
  Target: LAMA2; (+) strand; PAM type: NRG; PAM sequence: GAG
aaatggaactatttctgtga

SEQ ID NO: 179901 - DNA, 20 bp, Artificial Sequence
  Description of Artificial Sequence: Synthetic oligonucleotide
  Target: LAMA2; (+) strand; PAM type: NRG; PAM sequence: TGG
aactatttctgtgagagccc

SEQ ID NO: 179902 - DNA, 20 bp, Artificial Sequence
  Description of Artificial Sequence: Synthetic oligonucleotide
  Target: LAMA2; (+) strand; PAM type: NRG; PAM sequence: TGG
atttctgtgagagccctgga

SEQ ID NO: 179903 - DNA, 20 bp, Artificial Sequence
  Description of Artificial Sequence: Synthetic oligonucleotide
  Target: LAMA2; (+) strand; PAM type: NRG; PAM sequence: AAG
gagagccctggatggaccca

SEQ ID NO: 179904 - DNA, 20 bp, Artificial Sequence
  Description of Artificial Sequence: Synthetic oligonucleotide
  Target: LAMA2; (+) strand; PAM type: NRG; PAM sequence: CAG
gccctggatggacccaaagc

SEQ ID NO: 179905 - DNA, 20 bp, Artificial Sequence
  Description of Artificial Sequence: Synthetic oligonucleotide
  Target: LAMA2; (+) strand; PAM type: NRG; PAM sequence: CAG
cccaaagccagcattgtgcc

SEQ ID NO: 179906 - DNA, 20 bp, Artificial Sequence
  Description of Artificial Sequence: Synthetic oligonucleotide
  Target: LAMA2; (+) strand; PAM type: NRG; PAM sequence: CAG
acaccattcgacgtctcctc

SEQ ID NO: 179907 - DNA, 20 bp, Artificial Sequence
  Description of Artificial Sequence: Synthetic oligonucleotide
  Target: LAMA2; (+) strand; PAM type: NRG; PAM sequence: AGG
caccattcgacgtctcctcc

SEQ ID NO: 179908 - DNA, 20 bp, Artificial Sequence
  Description of Artificial Sequence: Synthetic oligonucleotide
  Target: LAMA2; (+) strand; PAM type: NRG; PAM sequence: GGG
accattcgacgtctcctcca

SEQ ID NO: 179909 - DNA, 20 bp, Artificial Sequence
  Description of Artificial Sequence: Synthetic oligonucleotide
  Target: LAMA2; (+) strand; PAM type: NRG; PAM sequence: TAG
tcctccagggtacacgattc

SEQ ID NO: 179910 - DNA, 20 bp, Artificial Sequence
  Description of Artificial Sequence: Synthetic oligonucleotide
  Target: LAMA2; (+) strand; PAM type: NRG; PAM sequence: TGG
agggtacacgattctagatg

SEQ ID NO: 179911 - DNA, 20 bp, Artificial Sequence
  Description of Artificial Sequence: Synthetic oligonucleotide
  Target: LAMA2; (+) strand; PAM type: NRG; PAM sequence: TGG
gcaaatgcaatgctgtttgt

SEQ ID NO: 179912 - DNA, 20 bp, Artificial Sequence
  Description of Artificial Sequence: Synthetic oligonucleotide
  Target: LAMA2; (+) strand; PAM type: NRG; PAM sequence: TGG
aatgcaatgctgtttgttgg

SEQ ID NO: 179913 - DNA, 20 bp, Artificial Sequence
  Description of Artificial Sequence: Synthetic oligonucleotide
  Target: LAMA2; (+) strand; PAM type: NRG; PAM sequence: TGG
ctgtttgttggtggcctgac

SEQ ID NO: 179914 - DNA, 20 bp, Artificial Sequence
  Description of Artificial Sequence: Synthetic oligonucleotide
  Target: LAMA2; (+) strand; PAM type: NRG; PAM sequence: GGG
tgtttgttggtggcctgact

SEQ ID NO: 179915 - DNA, 20 bp, Artificial Sequence
  Description of Artificial Sequence: Synthetic oligonucleotide
  Target: LAMA2; (+) strand; PAM type: NRG; PAM sequence: AAG
gtggcctgactgggaaatta

SEQ ID NO: 179916 - DNA, 20 bp, Artificial Sequence
  Description of Artificial Sequence: Synthetic oligonucleotide
  Target: LAMA2; (+) strand; PAM type: NRG; PAM sequence: AGG
tggcctgactgggaaattaa

SEQ ID NO: 179917 - DNA, 20 bp, Artificial Sequence
  Description of Artificial Sequence: Synthetic oligonucleotide
  Target: LAMA2; (+) strand; PAM type: NRG; PAM sequence: CAG
atctcctgacataattactt

SEQ ID NO: 179918 - DNA, 20 bp, Artificial Sequence
  Description of Artificial Sequence: Synthetic oligonucleotide
  Target: LAMA2; (+) strand; PAM type: NRG; PAM sequence: AGG
tctcctgacataattacttc

SEQ ID NO: 179919 - DNA, 20 bp, Artificial Sequence
  Description of Artificial Sequence: Synthetic oligonucleotide
  Target: LAMA2; (+) strand; PAM type: NRG; PAM sequence: GAG
tcctgacataattacttcag

SEQ ID NO: 179920 - DNA, 20 bp, Artificial Sequence
  Description of Artificial Sequence: Synthetic oligonucleotide
  Target: LAMA2; (+) strand; PAM type: NRG; PAM sequence: AAG
tgacataattacttcaggag

SEQ ID NO: 179921 - DNA, 20 bp, Artificial Sequence
  Description of Artificial Sequence: Synthetic oligonucleotide
  Target: LAMA2; (+) strand; PAM type: NRG; PAM sequence: AGG
gacataattacttcaggaga

SEQ ID NO: 179922 - DNA, 20 bp, Artificial Sequence
  Description of Artificial Sequence: Synthetic oligonucleotide
  Target: LAMA2; (+) strand; PAM type: NRG; PAM sequence: AAG
cttcaggagaaggtatgata

SEQ ID NO: 179923 - DNA, 20 bp, Artificial Sequence
  Description of Artificial Sequence: Synthetic oligonucleotide
  Target: LAMA2; (+) strand; PAM type: NRG; PAM sequence: GAG
tgaaaacatgaatttacttt

SEQ ID NO: 179924 - DNA, 20 bp, Artificial Sequence
  Description of Artificial Sequence: Synthetic oligonucleotide
  Target: LAMA2; (+) strand; PAM type: NRG; PAM sequence: AAG
aacatgaatttactttgagt

SEQ ID NO: 179925 - DNA, 20 bp, Artificial Sequence
  Description of Artificial Sequence: Synthetic oligonucleotide
  Target: LAMA2; (+) strand; PAM type: NRG; PAM sequence: TGG
tcttctttgacgattcaacc

SEQ ID NO: 179926 - DNA, 20 bp, Artificial Sequence
  Description of Artificial Sequence: Synthetic oligonucleotide
  Target: LAMA2; (+) strand; PAM type: NRG; PAM sequence: AAG
cctggaaacacaatattttt

SEQ ID NO: 179927 - DNA, 20 bp, Artificial Sequence
  Description of Artificial Sequence: Synthetic oligonucleotide
  Target: LAMA2; (+) strand; PAM type: NRG; PAM sequence: CAG
cctatgtgtatttatttaaa

SEQ ID NO: 179928 - DNA, 20 bp, Artificial Sequence
  Description of Artificial Sequence: Synthetic oligonucleotide
  Target: LAMA2; (+) strand; PAM type: NRG; PAM sequence: TGG
tgttgttttgtctttatctg

SEQ ID NO: 179929 - DNA, 20 bp, Artificial Sequence
  Description of Artificial Sequence: Synthetic oligonucleotide
  Target: LAMA2; (+) strand; PAM type: NRG; PAM sequence: CAG
tttgtctttatctgtggcat

SEQ ID NO: 179930 - DNA, 20 bp, Artificial Sequence
  Description of Artificial Sequence: Synthetic oligonucleotide
  Target: LAMA2; (+) strand; PAM type: NRG; PAM sequence: TAG
ttttttgtatattcttgttt

SEQ ID NO: 179931 - DNA, 20 bp, Artificial Sequence
  Description of Artificial Sequence: Synthetic oligonucleotide
  Target: LAMA2; (+) strand; PAM type: NRG; PAM sequence: AAG
attcttgttttagttgcctc

SEQ ID NO: 179932 - DNA, 20 bp, Artificial Sequence
  Description of Artificial Sequence: Synthetic oligonucleotide
  Target: LAMA2; (+) strand; PAM type: NRG; PAM sequence: GAG
tcttgttttagttgcctcaa

SEQ ID NO: 179933 - DNA, 20 bp, Artificial Sequence
  Description of Artificial Sequence: Synthetic oligonucleotide
  Target: LAMA2; (+) strand; PAM type: NRG; PAM sequence: AAG
ttttagttgcctcaagagca

SEQ ID NO: 179934 - DNA, 20 bp, Artificial Sequence
  Description of Artificial Sequence: Synthetic oligonucleotide
  Target: LAMA2; (+) strand; PAM type: NRG; PAM sequence: AAG
tcaagagcaaagtgtttttt

SEQ ID NO: 179935 - DNA, 20 bp, Artificial Sequence
  Description of Artificial Sequence: Synthetic oligonucleotide
  Target: LAMA2; (+) strand; PAM type: NRG; PAM sequence: TAG
ctgaatcgatttatgattta

SEQ ID NO: 179936 - DNA, 20 bp, Artificial Sequence
  Description of Artificial Sequence: Synthetic oligonucleotide
  Target: LAMA2; (+) strand; PAM type: NRG; PAM sequence: AAG
atttatgatttatagatatg

SEQ ID NO: 179937 - DNA, 20 bp, Artificial Sequence
  Description of Artificial Sequence: Synthetic oligonucleotide
  Target: LAMA2; (+) strand; PAM type: NRG; PAM sequence: AAG
tatagatatgaagtgctata

SEQ ID NO: 179938 - DNA, 20 bp, Artificial Sequence
  Description of Artificial Sequence: Synthetic oligonucleotide
  Target: LAMA2; (+) strand; PAM type: NRG; PAM sequence: AAG
tcatactcacatctaattaa

SEQ ID NO: 179939 - DNA, 20 bp, Artificial Sequence
  Description of Artificial Sequence: Synthetic oligonucleotide
  Target: LAMA2; (+) strand; PAM type: NRG; PAM sequence: TGG
taaaagatttatgaatactt

SEQ ID NO: 179940 - DNA, 20 bp, Artificial Sequence
  Description of Artificial Sequence: Synthetic oligonucleotide
  Target: LAMA2; (+) strand; PAM type: NRG; PAM sequence: GGG
aaaagatttatgaatacttt

SEQ ID NO: 179941 - DNA, 20 bp, Artificial Sequence
  Description of Artificial Sequence: Synthetic oligonucleotide
  Target: LAMA2; (+) strand; PAM type: NRG; PAM sequence: CAG
gaatactttgggaaatatca

SEQ ID NO: 179942 - DNA, 20 bp, Artificial Sequence
  Description of Artificial Sequence: Synthetic oligonucleotide
  Target: LAMA2; (+) strand; PAM type: NRG; PAM sequence: AGG
aatactttgggaaatatcac

SEQ ID NO: 179943 - DNA, 20 bp, Artificial Sequence
  Description of Artificial Sequence: Synthetic oligonucleotide
  Target: LAMA2; (+) strand; PAM type: NRG; PAM sequence: GAG
tactttgggaaatatcacag

SEQ ID NO: 179944 - DNA, 20 bp, Artificial Sequence
  Description of Artificial Sequence: Synthetic oligonucleotide
  Target: LAMA2; (+) strand; PAM type: NRG; PAM sequence: AAG
ggaaatatcacaggagctat

SEQ ID NO: 179945 - DNA, 20 bp, Artificial Sequence
  Description of Artificial Sequence: Synthetic oligonucleotide
  Target: LAMA2; (+) strand; PAM type: NRG; PAM sequence: TGG
taagctttcaaaacatgatc

SEQ ID NO: 179946 - DNA, 20 bp, Artificial Sequence
  Description of Artificial Sequence: Synthetic oligonucleotide
  Target: LAMA2; (+) strand; PAM type: NRG; PAM sequence: AAG
aaaacatgatctggttttta

SEQ ID NO: 179947 - DNA, 20 bp, Artificial Sequence
  Description of Artificial Sequence: Synthetic oligonucleotide
  Target: LAMA2; (+) strand; PAM type: NRG; PAM sequence: AAG
atctggtttttaaagttctc

SEQ ID NO: 179948 - DNA, 20 bp, Artificial Sequence
  Description of Artificial Sequence: Synthetic oligonucleotide
  Target: LAMA2; (+) strand; PAM type: NRG; PAM sequence: TAG
tcaagttgctcttattctta

SEQ ID NO: 179949 - DNA, 20 bp, Artificial Sequence
  Description of Artificial Sequence: Synthetic oligonucleotide
  Target: LAMA2; (+) strand; PAM type: NRG; PAM sequence: AGG
caagttgctcttattcttat

SEQ ID NO: 179950 - DNA, 20 bp, Artificial Sequence
  Description of Artificial Sequence: Synthetic oligonucleotide
  Target: LAMA2; (+) strand; PAM type: NRG; PAM sequence: CAG
tattcataattgcttcatga

SEQ ID NO: 179951 - DNA, 20 bp, Artificial Sequence
  Description of Artificial Sequence: Synthetic oligonucleotide
  Target: LAMA2; (+) strand; PAM type: NRG; PAM sequence: CAG
tccttgcgcatttcaaattg

SEQ ID NO: 179952 - DNA, 20 bp, Artificial Sequence
  Description of Artificial Sequence: Synthetic oligonucleotide
  Target: LAMA2; (+) strand; PAM type: NRG; PAM sequence: AAG
tgcagaatgcctgcctttta

SEQ ID NO: 179953 - DNA, 20 bp, Artificial Sequence
  Description of Artificial Sequence: Synthetic oligonucleotide
  Target: LAMA2; (+) strand; PAM type: NRG; PAM sequence: AAG
agaatgcctgccttttaaag

SEQ ID NO: 179954 - DNA, 20 bp, Artificial Sequence
  Description of Artificial Sequence: Synthetic oligonucleotide
  Target: LAMA2; (+) strand; PAM type: NRG; PAM sequence: TGG
agaagcttgtgttgattaaa

SEQ ID NO: 179955 - DNA, 20 bp, Artificial Sequence
  Description of Artificial Sequence: Synthetic oligonucleotide
  Target: LAMA2; (+) strand; PAM type: NRG; PAM sequence: TAG
ttgtgttgattaaatggaat

SEQ ID NO: 179956 - DNA, 20 bp, Artificial Sequence
  Description of Artificial Sequence: Synthetic oligonucleotide
  Target: LAMA2; (+) strand; PAM type: NRG; PAM sequence: AGG
tgtgttgattaaatggaatt

SEQ ID NO: 179957 - DNA, 20 bp, Artificial Sequence
  Description of Artificial Sequence: Synthetic oligonucleotide
  Target: LAMA2; (+) strand; PAM type: NRG; PAM sequence: TGG
gattaaatggaattaggtgt

SEQ ID NO: 179958 - DNA, 20 bp, Artificial Sequence
  Description of Artificial Sequence: Synthetic oligonucleotide
  Target: LAMA2; (+) strand; PAM type: NRG; PAM sequence: GGG
attaaatggaattaggtgtt

SEQ ID NO: 179959 - DNA, 20 bp, Artificial Sequence
  Description of Artificial Sequence: Synthetic oligonucleotide
  Target: LAMA2; (+) strand; PAM type: NRG; PAM sequence: TGG
taggtgttgggaaaccacta

SEQ ID NO: 179960 - DNA, 20 bp, Artificial Sequence
  Description of Artificial Sequence: Synthetic oligonucleotide
  Target: LAMA2; (+) strand; PAM type: NRG; PAM sequence: GGG
aggtgttgggaaaccactat

SEQ ID NO: 179961 - DNA, 20 bp, Artificial Sequence
  Description of Artificial Sequence: Synthetic oligonucleotide
  Target: LAMA2; (+) strand; PAM type: NRG; PAM sequence: GAG
gttgggaaaccactatgggt

SEQ ID NO: 179962 - DNA, 20 bp, Artificial Sequence
  Description of Artificial Sequence: Synthetic oligonucleotide
  Target: LAMA2; (+) strand; PAM type: NRG; PAM sequence: CAG
aaaccactatgggtgagatg

SEQ ID NO: 179963 - DNA, 20 bp, Artificial Sequence
  Description of Artificial Sequence: Synthetic oligonucleotide
  Target: LAMA2; (+) strand; PAM type: NRG; PAM sequence: AGG
aaccactatgggtgagatgc

SEQ ID NO: 179964 - DNA, 20 bp, Artificial Sequence
  Description of Artificial Sequence: Synthetic oligonucleotide
  Target: LAMA2; (+) strand; PAM type: NRG; PAM sequence: GAG
ccactatgggtgagatgcag

SEQ ID NO: 179965 - DNA, 20 bp, Artificial Sequence
  Description of Artificial Sequence: Synthetic oligonucleotide
  Target: LAMA2; (+) strand; PAM type: NRG; PAM sequence: TGG
aggagcacaaccaaatataa

SEQ ID NO: 179966 - DNA, 20 bp, Artificial Sequence
  Description of Artificial Sequence: Synthetic oligonucleotide
  Target: LAMA2; (+) strand; PAM type: NRG; PAM sequence: TGG
ccaaatataatggataatcc

SEQ ID NO: 179967 - DNA, 20 bp, Artificial Sequence
  Description of Artificial Sequence: Synthetic oligonucleotide
  Target: LAMA2; (+) strand; PAM type: NRG; PAM sequence: GGG
caaatataatggataatcct

SEQ ID NO: 179968 - DNA, 20 bp, Artificial Sequence
  Description of Artificial Sequence: Synthetic oligonucleotide
  Target: LAMA2; (+) strand; PAM type: NRG; PAM sequence: CAG
atggataatcctgggcttgt

SEQ ID NO: 179969 - DNA, 20 bp, Artificial Sequence
  Description of Artificial Sequence: Synthetic oligonucleotide
  Target: LAMA2; (+) strand; PAM type: NRG; PAM sequence: GAG
gggcttgtcagaatcatcct

SEQ ID NO: 179970 - DNA, 20 bp, Artificial Sequence
  Description of Artificial Sequence: Synthetic oligonucleotide
  Target: LAMA2; (+) strand; PAM type: NRG; PAM sequence: GAG
tgtcagaatcatcctgagtt

SEQ ID NO: 179971 - DNA, 20 bp, Artificial Sequence
  Description of Artificial Sequence: Synthetic oligonucleotide
  Target: LAMA2; (+) strand; PAM type: NRG; PAM sequence: TAG
gaatcatcctgagttgagat

SEQ ID NO: 179972 - DNA, 20 bp, Artificial Sequence
  Description of Artificial Sequence: Synthetic oligonucleotide
  Target: LAMA2; (+) strand; PAM type: NRG; PAM sequence: CAG
catcctgagttgagattagt

SEQ ID NO: 179973 - DNA, 20 bp, Artificial Sequence
  Description of Artificial Sequence: Synthetic oligonucleotide
  Target: LAMA2; (+) strand; PAM type: NRG; PAM sequence: AAG
gattagtcagaaaatgtgaa

SEQ ID NO: 179974 - DNA, 20 bp, Artificial Sequence
  Description of Artificial Sequence: Synthetic oligonucleotide
  Target: LAMA2; (+) strand; PAM type: NRG; PAM sequence: CAG
agtcagaaaatgtgaaaagc

SEQ ID NO: 179975 - DNA, 20 bp, Artificial Sequence
  Description of Artificial Sequence: Synthetic oligonucleotide
  Target: LAMA2; (+) strand; PAM type: NRG; PAM sequence: AGG
gtcagaaaatgtgaaaagcc

SEQ ID NO: 179976 - DNA, 20 bp, Artificial Sequence
  Description of Artificial Sequence: Synthetic oligonucleotide
  Target: LAMA2; (+) strand; PAM type: NRG; PAM sequence: GGG
tcagaaaatgtgaaaagcca

SEQ ID NO: 179977 - DNA, 20 bp, Artificial Sequence
  Description of Artificial Sequence: Synthetic oligonucleotide
  Target: LAMA2; (+) strand; PAM type: NRG; PAM sequence: GAG
cagggtgaccccaaatttat

SEQ ID NO: 179978 - DNA, 20 bp, Artificial Sequence
  Description of Artificial Sequence: Synthetic oligonucleotide
  Target: LAMA2; (+) strand; PAM type: NRG; PAM sequence: AGG
agggtgaccccaaatttatg

SEQ ID NO: 179979 - DNA, 20 bp, Artificial Sequence
  Description of Artificial Sequence: Synthetic oligonucleotide
  Target: LAMA2; (+) strand; PAM type: NRG; PAM sequence: TAG
atgaggactcaaccttcata

SEQ ID NO: 179980 - DNA, 20 bp, Artificial Sequence
  Description of Artificial Sequence: Synthetic oligonucleotide
  Target: LAMA2; (+) strand; PAM type: NRG; PAM sequence: GAG
actcaaccttcatatagaat

SEQ ID NO: 179981 - DNA, 20 bp, Artificial Sequence
  Description of Artificial Sequence: Synthetic oligonucleotide
  Target: LAMA2; (+) strand; PAM type: NRG; PAM sequence: AGG
ctcaaccttcatatagaatg

SEQ ID NO: 179982 - DNA, 20 bp, Artificial Sequence
  Description of Artificial Sequence: Synthetic oligonucleotide
  Target: LAMA2; (+) strand; PAM type: NRG; PAM sequence: GAG
gaggttattttatttacttt

SEQ ID NO: 179983 - DNA, 20 bp, Artificial Sequence
  Description of Artificial Sequence: Synthetic oligonucleotide
  Target: LAMA2; (+) strand; PAM type: NRG; PAM sequence: GAG
attttatttactttgagtac

SEQ ID NO: 179984 - DNA, 20 bp, Artificial Sequence
  Description of Artificial Sequence: Synthetic oligonucleotide
  Target: LAMA2; (+) strand; PAM type: NRG; PAM sequence: AAG
gagtacgagatgtgactcta

SEQ ID NO: 179985 - DNA, 20 bp, Artificial Sequence
  Description of Artificial Sequence: Synthetic oligonucleotide
  Target: LAMA2; (+) strand; PAM type: NRG; PAM sequence: GAG
gagatgtgactctaaagtat

SEQ ID NO: 179986 - DNA, 20 bp, Artificial Sequence
  Description of Artificial Sequence: Synthetic oligonucleotide
  Target: LAMA2; (+) strand; PAM type: NRG; PAM sequence: AAG
tattccaaaaccacacgctg

SEQ ID NO: 179987 - DNA, 20 bp, Artificial Sequence
  Description of Artificial Sequence: Synthetic oligonucleotide
  Target: LAMA2; (+) strand; PAM type: NRG; PAM sequence: TAG
ctgaagttatcctcgtttct

SEQ ID NO: 179988 - DNA, 20 bp, Artificial Sequence
  Description of Artificial Sequence: Synthetic oligonucleotide
  Target: LAMA2; (+) strand; PAM type: NRG; PAM sequence: TGG
gaacttcatataaatgtata

SEQ ID NO: 179989 - DNA, 20 bp, Artificial Sequence
  Description of Artificial Sequence: Synthetic oligonucleotide
  Target: LAMA2; (+) strand; PAM type: NRG; PAM sequence: TAG
atataaatgtatatggtaca

SEQ ID NO: 179990 - DNA, 20 bp, Artificial Sequence
  Description of Artificial Sequence: Synthetic oligonucleotide
  Target: LAMA2; (+) strand; PAM type: NRG; PAM sequence: TAG
atatggtacatagtaatata

SEQ ID NO: 179991 - DNA, 20 bp, Artificial Sequence
  Description of Artificial Sequence: Synthetic oligonucleotide
  Target: LAMA2; (+) strand; PAM type: NRG; PAM sequence: CAG
tatcaactttctctccttca

SEQ ID NO: 179992 - DNA, 20 bp, Artificial Sequence
  Description of Artificial Sequence: Synthetic oligonucleotide
  Target: LAMA2; (+) strand; PAM type: NRG; PAM sequence: TAG
aactttctctccttcacaga

SEQ ID NO: 179993 - DNA, 20 bp, Artificial Sequence
  Description of Artificial Sequence: Synthetic oligonucleotide
  Target: LAMA2; (+) strand; PAM type: NRG; PAM sequence: TAG
ccttcacagatagataaata

SEQ ID NO: 179994 - DNA, 20 bp, Artificial Sequence
  Description of Artificial Sequence: Synthetic oligonucleotide
  Target: LAMA2; (+) strand; PAM type: NRG; PAM sequence: AGG
cttcacagatagataaatat

SEQ ID NO: 179995 - DNA, 20 bp, Artificial Sequence
  Description of Artificial Sequence: Synthetic oligonucleotide
  Target: LAMA2; (+) strand; PAM type: NRG; PAM sequence: GGG
ttcacagatagataaatata

SEQ ID NO: 179996 - DNA, 20 bp, Artificial Sequence
  Description of Artificial Sequence: Synthetic oligonucleotide
  Target: LAMA2; (+) strand; PAM type: NRG; PAM sequence: TAG
cagatagataaatataggga

SEQ ID NO: 179997 - DNA, 20 bp, Artificial Sequence
  Description of Artificial Sequence: Synthetic oligonucleotide
  Target: LAMA2; (+) strand; PAM type: NRG; PAM sequence: CAG
ataaatatagggatagcaca

SEQ ID NO: 179998 - DNA, 20 bp, Artificial Sequence
  Description of Artificial Sequence: Synthetic oligonucleotide
  Target: LAMA2; (+) strand; PAM type: NRG; PAM sequence: TAG
aatatagggatagcacacag

SEQ ID NO: 179999 - DNA, 20 bp, Artificial Sequence
  Description of Artificial Sequence: Synthetic oligonucleotide
  Target: LAMA2; (+) strand; PAM type: NRG; PAM sequence: AAG
gatagcacacagtagtacaa

SEQ ID NO: 180000 - DNA, 20 bp, Artificial Sequence
  Description of Artificial Sequence: Synthetic oligonucleotide
  Target: LAMA2; (+) strand; PAM type: NRG; PAM sequence: CAG
atgaattttgaaatcaaatc

SEQ ID NO: 180001 - DNA, 20 bp, Artificial Sequence
  Description of Artificial Sequence: Synthetic oligonucleotide
  Target: LAMA2; (+) strand; PAM type: NRG; PAM sequence: AGG
tgaattttgaaatcaaatcc

SEQ ID NO: 180002 - DNA, 20 bp, Artificial Sequence
  Description of Artificial Sequence: Synthetic oligonucleotide
  Target: LAMA2; (+) strand; PAM type: NRG; PAM sequence: TGG
ttttgaaatcaaatccaggt

SEQ ID NO: 180003 - DNA, 20 bp, Artificial Sequence
  Description of Artificial Sequence: Synthetic oligonucleotide
  Target: LAMA2; (+) strand; PAM type: NRG; PAM sequence: TAG
cacttgctaaaatataacct

SEQ ID NO: 180004 - DNA, 20 bp, Artificial Sequence
  Description of Artificial Sequence: Synthetic oligonucleotide
  Target: LAMA2; (+) strand; PAM type: NRG; PAM sequence: AAG
gctaaaatataaccttagac

SEQ ID NO: 180005 - DNA, 20 bp, Artificial Sequence
  Description of Artificial Sequence: Synthetic oligonucleotide
  Target: LAMA2; (+) strand; PAM type: NRG; PAM sequence: TGG
agacaagtcacttaacccct

SEQ ID NO: 180006 - DNA, 20 bp, Artificial Sequence
  Description of Artificial Sequence: Synthetic oligonucleotide
  Target: LAMA2; (+) strand; PAM type: NRG; PAM sequence: GGG
gacaagtcacttaacccctt

SEQ ID NO: 180007 - DNA, 20 bp, Artificial Sequence
  Description of Artificial Sequence: Synthetic oligonucleotide
  Target: LAMA2; (+) strand; PAM type: NRG; PAM sequence: TGG
tcacttaaccccttgggctt

SEQ ID NO: 180008 - DNA, 20 bp, Artificial Sequence
  Description of Artificial Sequence: Synthetic oligonucleotide
  Target: LAMA2; (+) strand; PAM type: NRG; PAM sequence: TAG
tgggctttggttatctcaac

SEQ ID NO: 180009 - DNA, 20 bp, Artificial Sequence
  Description of Artificial Sequence: Synthetic oligonucleotide
  Target: LAMA2; (+) strand; PAM type: NRG; PAM sequence: AAG
tttggttatctcaactagaa

SEQ ID NO: 180010 - DNA, 20 bp, Artificial Sequence
  Description of Artificial Sequence: Synthetic oligonucleotide
  Target: LAMA2; (+) strand; PAM type: NRG; PAM sequence: TAG
tctaccttgcttgcatattg

SEQ ID NO: 180011 - DNA, 20 bp, Artificial Sequence
  Description of Artificial Sequence: Synthetic oligonucleotide
  Target: LAMA2; (+) strand; PAM type: NRG; PAM sequence: AGG
ctaccttgcttgcatattgt

SEQ ID NO: 180012 - DNA, 20 bp, Artificial Sequence
  Description of Artificial Sequence: Synthetic oligonucleotide
  Target: LAMA2; (+) strand; PAM type: NRG; PAM sequence: AAG
tataactcttcctatatgct

SEQ ID NO: 180013 - DNA, 20 bp, Artificial Sequence
  Description of Artificial Sequence: Synthetic oligonucleotide
  Target: LAMA2; (+) strand; PAM type: NRG; PAM sequence: CAG
tatatgctaagtaatgttct

SEQ ID NO: 180014 - DNA, 20 bp, Artificial Sequence
  Description of Artificial Sequence: Synthetic oligonucleotide
  Target: LAMA2; (+) strand; PAM type: NRG; PAM sequence: AAG
atttttacaacaaccccaaa

SEQ ID NO: 180015 - DNA, 20 bp, Artificial Sequence
  Description of Artificial Sequence: Synthetic oligonucleotide
  Target: LAMA2; (+) strand; PAM type: NRG; PAM sequence: TAG
caaccccaaaaagtatgtct

SEQ ID NO: 180016 - DNA, 20 bp, Artificial Sequence
  Description of Artificial Sequence: Synthetic oligonucleotide
  Target: LAMA2; (+) strand; PAM type: NRG; PAM sequence: TAG
aaaagtatgtcttagtccat

SEQ ID NO: 180017 - DNA, 20 bp, Artificial Sequence
  Description of Artificial Sequence: Synthetic oligonucleotide
  Target: LAMA2; (+) strand; PAM type: NRG; PAM sequence: AGG
aaagtatgtcttagtccatt

SEQ ID NO: 180018 - DNA, 20 bp, Artificial Sequence
  Description of Artificial Sequence: Synthetic oligonucleotide
  Target: LAMA2; (+) strand; PAM type: NRG; PAM sequence: GGG
aagtatgtcttagtccatta

SEQ ID NO: 180019 - DNA, 20 bp, Artificial Sequence
  Description of Artificial Sequence: Synthetic oligonucleotide
  Target: LAMA2; (+) strand; PAM type: NRG; PAM sequence: AAG
tagtccattagggctgctat

SEQ ID NO: 180020 - DNA, 20 bp, Artificial Sequence
  Description of Artificial Sequence: Synthetic oligonucleotide
  Target: LAMA2; (+) strand; PAM type: NRG; PAM sequence: TGG
taagaaaaataccatgaaac

SEQ ID NO: 180021 - DNA, 20 bp, Artificial Sequence
  Description of Artificial Sequence: Synthetic oligonucleotide
  Target: LAMA2; (+) strand; PAM type: NRG; PAM sequence: GGG
aagaaaaataccatgaaact

SEQ ID NO: 180022 - DNA, 20 bp, Artificial Sequence
  Description of Artificial Sequence: Synthetic oligonucleotide
  Target: LAMA2; (+) strand; PAM type: NRG; PAM sequence: TAG
aaaaataccatgaaactggg

SEQ ID NO: 180023 - DNA, 20 bp, Artificial Sequence
  Description of Artificial Sequence: Synthetic oligonucleotide
  Target: LAMA2; (+) strand; PAM type: NRG; PAM sequence: AAG
tttatttctcacaattcttg

SEQ ID NO: 180024 - DNA, 20 bp, Artificial Sequence
  Description of Artificial Sequence: Synthetic oligonucleotide
  Target: LAMA2; (+) strand; PAM type: NRG; PAM sequence: AAG
ttctcacaattcttgaagct

SEQ ID NO: 180025 - DNA, 20 bp, Artificial Sequence
  Description of Artificial Sequence: Synthetic oligonucleotide
  Target: LAMA2; (+) strand; PAM type: NRG; PAM sequence: AAG
tcacaattcttgaagctaag

SEQ ID NO: 180026 - DNA, 20 bp, Artificial Sequence
  Description of Artificial Sequence: Synthetic oligonucleotide
  Target: LAMA2; (+) strand; PAM type: NRG; PAM sequence: GAG
ttcttgaagctaagaagtct

SEQ ID NO: 180027 - DNA, 20 bp, Artificial Sequence
  Description of Artificial Sequence: Synthetic oligonucleotide
  Target: LAMA2; (+) strand; PAM type: NRG; PAM sequence: AAG
aagctaagaagtctgagatc

SEQ ID NO: 180028 - DNA, 20 bp, Artificial Sequence
  Description of Artificial Sequence: Synthetic oligonucleotide
  Target: LAMA2; (+) strand; PAM type: NRG; PAM sequence: AGG
agctaagaagtctgagatca

SEQ ID NO: 180029 - DNA, 20 bp, Artificial Sequence
  Description of Artificial Sequence: Synthetic oligonucleotide
  Target: LAMA2; (+) strand; PAM type: NRG; PAM sequence: TGG
gaagtctgagatcaaggtac

SEQ ID NO: 180030 - DNA, 20 bp, Artificial Sequence
  Description of Artificial Sequence: Synthetic oligonucleotide
  Target: LAMA2; (+) strand; PAM type: NRG; PAM sequence: CAG
gtctgagatcaaggtactgg

SEQ ID NO: 180031 - DNA, 20 bp, Artificial Sequence
  Description of Artificial Sequence: Synthetic oligonucleotide
  Target: LAMA2; (+) strand; PAM type: NRG; PAM sequence: TGG
gatcaaggtactggcagatt

SEQ ID NO: 180032 - DNA, 20 bp, Artificial Sequence
  Description of Artificial Sequence: Synthetic oligonucleotide
  Target: LAMA2; (+) strand; PAM type: NRG; PAM sequence: TAG
gtactggcagatttggtgtt

SEQ ID NO: 180033 - DNA, 20 bp, Artificial Sequence
  Description of Artificial Sequence: Synthetic oligonucleotide
  Target: LAMA2; (+) strand; PAM type: NRG; PAM sequence: GAG
tggcagatttggtgtttagt

SEQ ID NO: 180034 - DNA, 20 bp, Artificial Sequence
  Description of Artificial Sequence: Synthetic oligonucleotide
  Target: LAMA2; (+) strand; PAM type: NRG; PAM sequence: GAG
gcagatttggtgtttagtga

SEQ ID NO: 180035 - DNA, 20 bp, Artificial Sequence
  Description of Artificial Sequence: Synthetic oligonucleotide
  Target: LAMA2; (+) strand; PAM type: NRG; PAM sequence: CAG
atttggtgtttagtgagagc

SEQ ID NO: 180036 - DNA, 20 bp, Artificial Sequence
  Description of Artificial Sequence: Synthetic oligonucleotide
  Target: LAMA2; (+) strand; PAM type: NRG; PAM sequence: TAG
tagtgagagccagtttttca

SEQ ID NO: 180037 - DNA, 20 bp, Artificial Sequence
  Description of Artificial Sequence: Synthetic oligonucleotide
  Target: LAMA2; (+) strand; PAM type: NRG; PAM sequence: AAG
tgagagccagtttttcatag

SEQ ID NO: 180038 - DNA, 20 bp, Artificial Sequence
  Description of Artificial Sequence: Synthetic oligonucleotide
  Target: LAMA2; (+) strand; PAM type: NRG; PAM sequence: AGG
gagagccagtttttcataga

SEQ ID NO: 180039 - DNA, 20 bp, Artificial Sequence
  Description of Artificial Sequence: Synthetic oligonucleotide
  Target: LAMA2; (+) strand; PAM type: NRG; PAM sequence: GAG
gagccagtttttcatagaag

SEQ ID NO: 180040 - DNA, 20 bp, Artificial Sequence
  Description of Artificial Sequence: Synthetic oligonucleotide
  Target: LAMA2; (+) strand; PAM type: NRG; PAM sequence: AGG
agccagtttttcatagaagg

SEQ ID NO: 180041 - DNA, 20 bp, Artificial Sequence
  Description of Artificial Sequence: Synthetic oligonucleotide
  Target: LAMA2; (+) strand; PAM type: NRG; PAM sequence: TAG
ggcttcttgctgttctcaca

SEQ ID NO: 180042 - DNA, 20 bp, Artificial Sequence
  Description of Artificial Sequence: Synthetic oligonucleotide
  Target: LAMA2; (+) strand; PAM type: NRG; PAM sequence: TAG
ttcttgctgttctcacatag

SEQ ID NO: 180043 - DNA, 20 bp, Artificial Sequence
  Description of Artificial Sequence: Synthetic oligonucleotide
  Target: LAMA2; (+) strand; PAM type: NRG; PAM sequence: AAG
tgctgttctcacatagtaga

SEQ ID NO: 180044 - DNA, 20 bp, Artificial Sequence
  Description of Artificial Sequence: Synthetic oligonucleotide
  Target: LAMA2; (+) strand; PAM type: NRG; PAM sequence: GAG
ctgttctcacatagtagaaa

SEQ ID NO: 180045 - DNA, 20 bp, Artificial Sequence
  Description of Artificial Sequence: Synthetic oligonucleotide
  Target: LAMA2; (+) strand; PAM type: NRG; PAM sequence: AAG
acatagtagaaagagtgaac

SEQ ID NO: 180046 - DNA, 20 bp, Artificial Sequence
  Description of Artificial Sequence: Synthetic oligonucleotide
  Target: LAMA2; (+) strand; PAM type: NRG; PAM sequence: TGG
aaagagtgaacaagctcctt

SEQ ID NO: 180047 - DNA, 20 bp, Artificial Sequence
  Description of Artificial Sequence: Synthetic oligonucleotide
  Target: LAMA2; (+) strand; PAM type: NRG; PAM sequence: AAG
ctcctttggacctattttat

SEQ ID NO: 180048 - DNA, 20 bp, Artificial Sequence
  Description of Artificial Sequence: Synthetic oligonucleotide
  Target: LAMA2; (+) strand; PAM type: NRG; PAM sequence: AGG
tcctttggacctattttata

SEQ ID NO: 180049 - DNA, 20 bp, Artificial Sequence
  Description of Artificial Sequence: Synthetic oligonucleotide
  Target: LAMA2; (+) strand; PAM type: NRG; PAM sequence: GGG
cctttggacctattttataa

SEQ ID NO: 180050 - DNA, 20 bp, Artificial Sequence
  Description of Artificial Sequence: Synthetic oligonucleotide
  Target: LAMA2; (+) strand; PAM type: NRG; PAM sequence: AAG
gggcactaatttcattcatg

SEQ ID NO: 180051 - DNA, 20 bp, Artificial Sequence
  Description of Artificial Sequence: Synthetic oligonucleotide
  Target: LAMA2; (+) strand; PAM type: NRG; PAM sequence: AGG
ggcactaatttcattcatga

SEQ ID NO: 180052 - DNA, 20 bp, Artificial Sequence
  Description of Artificial Sequence: Synthetic oligonucleotide
  Target: LAMA2; (+) strand; PAM type: NRG; PAM sequence: TGG
gcctgctaataccatcactt

SEQ ID NO: 180053 - DNA, 20 bp, Artificial Sequence
  Description of Artificial Sequence: Synthetic oligonucleotide
  Target: LAMA2; (+) strand; PAM type: NRG; PAM sequence: CGG
tgctaataccatcactttgg

SEQ ID NO: 180054 - DNA, 20 bp, Artificial Sequence
  Description of Artificial Sequence: Synthetic oligonucleotide
  Target: LAMA2; (+) strand; PAM type: NRG; PAM sequence: GGG
gctaataccatcactttggc

SEQ ID NO: 180055 - DNA, 20 bp, Artificial Sequence
  Description of Artificial Sequence: Synthetic oligonucleotide
  Target: LAMA2; (+) strand; PAM type: NRG; PAM sequence: TAG
aataccatcactttggcggg

SEQ ID NO: 180056 - DNA, 20 bp, Artificial Sequence
  Description of Artificial Sequence: Synthetic oligonucleotide
  Target: LAMA2; (+) strand; PAM type: NRG; PAM sequence: AGG
ataccatcactttggcgggt

SEQ ID NO: 180057 - DNA, 20 bp, Artificial Sequence
  Description of Artificial Sequence: Synthetic oligonucleotide
  Target: LAMA2; (+) strand; PAM type: NRG; PAM sequence: AAG
ggcgggtaggattttaacat

SEQ ID NO: 180058 - DNA, 20 bp, Artificial Sequence
  Description of Artificial Sequence: Synthetic oligonucleotide
  Target: LAMA2; (+) strand; PAM type: NRG; PAM sequence: GAG
gattttaacataagaatttt

SEQ ID NO: 180059 - DNA, 20 bp, Artificial Sequence
  Description of Artificial Sequence: Synthetic oligonucleotide
  Target: LAMA2; (+) strand; PAM type: NRG; PAM sequence: GAG
ttttaacataagaattttga

SEQ ID NO: 180060 - DNA, 20 bp, Artificial Sequence
  Description of Artificial Sequence: Synthetic oligonucleotide
  Target: LAMA2; (+) strand; PAM type: NRG; PAM sequence: AGG
tttaacataagaattttgag

SEQ ID NO: 180061 - DNA, 20 bp, Artificial Sequence
  Description of Artificial Sequence: Synthetic oligonucleotide
  Target: LAMA2; (+) strand; PAM type: NRG; PAM sequence: GGG
ttaacataagaattttgaga

SEQ ID NO: 180062 - DNA, 20 bp, Artificial Sequence
  Description of Artificial Sequence: Synthetic oligonucleotide
  Target: LAMA2; (+) strand; PAM type: NRG; PAM sequence: CAG
taagaattttgagagggaca

SEQ ID NO: 180063 - DNA, 20 bp, Artificial Sequence
  Description of Artificial Sequence: Synthetic oligonucleotide
  Target: LAMA2; (+) strand; PAM type: NRG; PAM sequence: TAG
ggacacagacattcacacta

SEQ ID NO: 180064 - DNA, 20 bp, Artificial Sequence
  Description of Artificial Sequence: Synthetic oligonucleotide
  Target: LAMA2; (+) strand; PAM type: NRG; PAM sequence: AAG
acagacattcacactatagc

SEQ ID NO: 180065 - DNA, 20 bp, Artificial Sequence
  Description of Artificial Sequence: Synthetic oligonucleotide
  Target: LAMA2; (+) strand; PAM type: NRG; PAM sequence: AGG
cagacattcacactatagca

SEQ ID NO: 180066 - DNA, 20 bp, Artificial Sequence
  Description of Artificial Sequence: Synthetic oligonucleotide
  Target: LAMA2; (+) strand; PAM type: NRG; PAM sequence: CAG
acattcacactatagcaagg

SEQ ID NO: 180067 - DNA, 20 bp, Artificial Sequence
  Description of Artificial Sequence: Synthetic oligonucleotide
  Target: LAMA2; (+) strand; PAM type: NRG; PAM sequence: TAG
atactaatattctcattctg

SEQ ID NO: 180068 - DNA, 20 bp, Artificial Sequence
  Description of Artificial Sequence: Synthetic oligonucleotide
  Target: LAMA2; (+) strand; PAM type: NRG; PAM sequence: AAG
aatattctcattctgtagtt

SEQ ID NO: 180069 - DNA, 20 bp, Artificial Sequence
  Description of Artificial Sequence: Synthetic oligonucleotide
  Target: LAMA2; (+) strand; PAM type: NRG; PAM sequence: AGG
atattctcattctgtagtta

SEQ ID NO: 180070 - DNA, 20 bp, Artificial Sequence
  Description of Artificial Sequence: Synthetic oligonucleotide
  Target: LAMA2; (+) strand; PAM type: NRG; PAM sequence: AAG
ttctgtagttaaggaatctg

SEQ ID NO: 180071 - DNA, 20 bp, Artificial Sequence
  Description of Artificial Sequence: Synthetic oligonucleotide
  Target: LAMA2; (+) strand; PAM type: NRG; PAM sequence: AAG
tgtagttaaggaatctgaag

SEQ ID NO: 180072 - DNA, 20 bp, Artificial Sequence
  Description of Artificial Sequence: Synthetic oligonucleotide
  Target: LAMA2; (+) strand; PAM type: NRG; PAM sequence: GAG
tagttaaggaatctgaagaa

SEQ ID NO: 180073 - DNA, 20 bp, Artificial Sequence
  Description of Artificial Sequence: Synthetic oligonucleotide
  Target: LAMA2; (+) strand; PAM type: NRG; PAM sequence: GAG
gttaaggaatctgaagaaga

SEQ ID NO: 180074 - DNA, 20 bp, Artificial Sequence
  Description of Artificial Sequence: Synthetic oligonucleotide
  Target: LAMA2; (+) strand; PAM type: NRG; PAM sequence: TGG
gatgttaaatgtcttgacca

SEQ ID NO: 180075 - DNA, 20 bp, Artificial Sequence
  Description of Artificial Sequence: Synthetic oligonucleotide
  Target: LAMA2; (+) strand; PAM type: NRG; PAM sequence: CAG
atgtcttgaccatggtcaca

SEQ ID NO: 180076 - DNA, 20 bp, Artificial Sequence
  Description of Artificial Sequence: Synthetic oligonucleotide
  Target: LAMA2; (+) strand; PAM type: NRG; PAM sequence: TAG
gaccatggtcacacagtaat

SEQ ID NO: 180077 - DNA, 20 bp, Artificial Sequence
  Description of Artificial Sequence: Synthetic oligonucleotide
  Target: LAMA2; (+) strand; PAM type: NRG; PAM sequence: CAG
catggtcacacagtaattag

SEQ ID NO: 180078 - DNA, 20 bp, Artificial Sequence
  Description of Artificial Sequence: Synthetic oligonucleotide
  Target: LAMA2; (+) strand; PAM type: NRG; PAM sequence: GAG
tggtcacacagtaattagca

SEQ ID NO: 180079 - DNA, 20 bp, Artificial Sequence
  Description of Artificial Sequence: Synthetic oligonucleotide
  Target: LAMA2; (+) strand; PAM type: NRG; PAM sequence: TGG
cacacagtaattagcagagc

SEQ ID NO: 180080 - DNA, 20 bp, Artificial Sequence
  Description of Artificial Sequence: Synthetic oligonucleotide
  Target: LAMA2; (+) strand; PAM type: NRG; PAM sequence: GGG
acacagtaattagcagagct

SEQ ID NO: 180081 - DNA, 20 bp, Artificial Sequence
  Description of Artificial Sequence: Synthetic oligonucleotide
  Target: LAMA2; (+) strand; PAM type: NRG; PAM sequence: TAG
gcagagctgggatttgaaca

SEQ ID NO: 180082 - DNA, 20 bp, Artificial Sequence
  Description of Artificial Sequence: Synthetic oligonucleotide
  Target: LAMA2; (+) strand; PAM type: NRG; PAM sequence: AGG
cagagctgggatttgaacat

SEQ ID NO: 180083 - DNA, 20 bp, Artificial Sequence
  Description of Artificial Sequence: Synthetic oligonucleotide
  Target: LAMA2; (+) strand; PAM type: NRG; PAM sequence: TAG
gggatttgaacataggttaa

SEQ ID NO: 180084 - DNA, 20 bp, Artificial Sequence
  Description of Artificial Sequence: Synthetic oligonucleotide
  Target: LAMA2; (+) strand; PAM type: NRG; PAM sequence: AGG
ggatttgaacataggttaat

SEQ ID NO: 180085 - DNA, 20 bp, Artificial Sequence
  Description of Artificial Sequence: Synthetic oligonucleotide
  Target: LAMA2; (+) strand; PAM type: NRG; PAM sequence: CAG
tgaacataggttaataggca

SEQ ID NO: 180086 - DNA, 20 bp, Artificial Sequence
  Description of Artificial Sequence: Synthetic oligonucleotide
  Target: LAMA2; (+) strand; PAM type: NRG; PAM sequence: TGG
acataggttaataggcacag

SEQ ID NO: 180087 - DNA, 20 bp, Artificial Sequence
  Description of Artificial Sequence: Synthetic oligonucleotide
  Target: LAMA2; (+) strand; PAM type: NRG; PAM sequence: TAG
tgcttcactgccacaatgaa

SEQ ID NO: 180088 - DNA, 20 bp, Artificial Sequence
  Description of Artificial Sequence: Synthetic oligonucleotide
  Target: LAMA2; (+) strand; PAM type: NRG; PAM sequence: GAG
tcactgccacaatgaatagt

SEQ ID NO: 180089 - DNA, 20 bp, Artificial Sequence
  Description of Artificial Sequence: Synthetic oligonucleotide
  Target: LAMA2; (+) strand; PAM type: NRG; PAM sequence: TAG
tagtgagacacacactacca

SEQ ID NO: 180090 - DNA, 20 bp, Artificial Sequence
  Description of Artificial Sequence: Synthetic oligonucleotide
  Target: LAMA2; (+) strand; PAM type: NRG; PAM sequence: GAG
gtgagacacacactaccata

SEQ ID NO: 180091 - DNA, 20 bp, Artificial Sequence
  Description of Artificial Sequence: Synthetic oligonucleotide
  Target: LAMA2; (+) strand; PAM type: NRG; PAM sequence: TGG
gagtgtgtgtataaaatata

SEQ ID NO: 180092 - DNA, 20 bp, Artificial Sequence
  Description of Artificial Sequence: Synthetic oligonucleotide
  Target: LAMA2; (+) strand; PAM type: NRG; PAM sequence: TAG
tgtataaaatatatggcaaa

SEQ ID NO: 180093 - DNA, 20 bp, Artificial Sequence
  Description of Artificial Sequence: Synthetic oligonucleotide
  Target: LAMA2; (+) strand; PAM type: NRG; PAM sequence: GAG
aaaatatatggcaaatagct

SEQ ID NO: 180094 - DNA, 20 bp, Artificial Sequence
  Description of Artificial Sequence: Synthetic oligonucleotide
  Target: LAMA2; (+) strand; PAM type: NRG; PAM sequence: TGG
tatggcaaatagctgagatg

SEQ ID NO: 180095 - DNA, 20 bp, Artificial Sequence
  Description of Artificial Sequence: Synthetic oligonucleotide
  Target: LAMA2; (+) strand; PAM type: NRG; PAM sequence: TAG
ggcaaatagctgagatgtgg

SEQ ID NO: 180096 - DNA, 20 bp, Artificial Sequence
  Description of Artificial Sequence: Synthetic oligonucleotide
  Target: LAMA2; (+) strand; PAM type: NRG; PAM sequence: TGG
aattattatgcaaatgtaat

SEQ ID NO: 180097 - DNA, 20 bp, Artificial Sequence
  Description of Artificial Sequence: Synthetic oligonucleotide
  Target: LAMA2; (+) strand; PAM type: NRG; PAM sequence: CAG
aaatgtaattggcacaaaaa

SEQ ID NO: 180098 - DNA, 20 bp, Artificial Sequence
  Description of Artificial Sequence: Synthetic oligonucleotide
  Target: LAMA2; (+) strand; PAM type: NRG; PAM sequence: CAG
gcacaaaaacagtattctat

SEQ ID NO: 180099 - DNA, 20 bp, Artificial Sequence
  Description of Artificial Sequence: Synthetic oligonucleotide
  Target: LAMA2; (+) strand; PAM type: NRG; PAM sequence: CAG
aaacagtattctatcagtct

SEQ ID NO: 180100 - DNA, 20 bp, Artificial Sequence
  Description of Artificial Sequence: Synthetic oligonucleotide
  Target: LAMA2; (+) strand; PAM type: NRG; PAM sequence: AAG
tattctatcagtctcagaaa

SEQ ID NO: 180101 - DNA, 20 bp, Artificial Sequence
  Description of Artificial Sequence: Synthetic oligonucleotide
  Target: LAMA2; (+) strand; PAM type: NRG; PAM sequence: AAG
ctatcagtctcagaaaaaga

SEQ ID NO: 180102 - DNA, 20 bp, Artificial Sequence
  Description of Artificial Sequence: Synthetic oligonucleotide
  Target: LAMA2; (+) strand; PAM type: NRG; PAM sequence: TAG
acatgaacaaatgaaatcta

SEQ ID NO: 180103 - DNA, 20 bp, Artificial Sequence
  Description of Artificial Sequence: Synthetic oligonucleotide
  Target: LAMA2; (+) strand; PAM type: NRG; PAM sequence: TAG
atgaaatctatagcaaacct

SEQ ID NO: 180104 - DNA, 20 bp, Artificial Sequence
  Description of Artificial Sequence: Synthetic oligonucleotide
  Target: LAMA2; (+) strand; PAM type: NRG; PAM sequence: AGG
tgaaatctatagcaaacctt

SEQ ID NO: 180105 - DNA, 20 bp, Artificial Sequence
  Description of Artificial Sequence: Synthetic oligonucleotide
  Target: LAMA2; (+) strand; PAM type: NRG; PAM sequence: TGG
caaaccttaggaaatcattt

SEQ ID NO: 180106 - DNA, 20 bp, Artificial Sequence
  Description of Artificial Sequence: Synthetic oligonucleotide
  Target: LAMA2; (+) strand; PAM type: NRG; PAM sequence: AAG
cttaggaaatcattttggcc

SEQ ID NO: 180107 - DNA, 20 bp, Artificial Sequence
  Description of Artificial Sequence: Synthetic oligonucleotide
  Target: LAMA2; (+) strand; PAM type: NRG; PAM sequence: AAG
tcattttggccaagaatttc

SEQ ID NO: 180108 - DNA, 20 bp, Artificial Sequence
  Description of Artificial Sequence: Synthetic oligonucleotide
  Target: LAMA2; (+) strand; PAM type: NRG; PAM sequence: CAG
tttcaagactactgccacac

SEQ ID NO: 180109 - DNA, 20 bp, Artificial Sequence
  Description of Artificial Sequence: Synthetic oligonucleotide
  Target: LAMA2; (+) strand; PAM type: NRG; PAM sequence: AAG
cacaccagaatatgaaccaa

SEQ ID NO: 180110 - DNA, 20 bp, Artificial Sequence
  Description of Artificial Sequence: Synthetic oligonucleotide
  Target: LAMA2; (+) strand; PAM type: NRG; PAM sequence: GAG
aactaaatgaacttgctcat

SEQ ID NO: 180111 - DNA, 20 bp, Artificial Sequence
  Description of Artificial Sequence: Synthetic oligonucleotide
  Target: LAMA2; (+) strand; PAM type: NRG; PAM sequence: GAG
ttgctcatgagaattcaaat

SEQ ID NO: 180112 - DNA, 20 bp, Artificial Sequence
  Description of Artificial Sequence: Synthetic oligonucleotide
  Target: LAMA2; (+) strand; PAM type: NRG; PAM sequence: CAG
ctcatgagaattcaaatgag

SEQ ID NO: 180113 - DNA, 20 bp, Artificial Sequence
  Description of Artificial Sequence: Synthetic oligonucleotide
  Target: LAMA2; (+) strand; PAM type: NRG; PAM sequence: AGG
tcatgagaattcaaatgagc

SEQ ID NO: 180114 - DNA, 20 bp, Artificial Sequence
  Description of Artificial Sequence: Synthetic oligonucleotide
  Target: LAMA2; (+) strand; PAM type: NRG; PAM sequence: TAG
gcaggaaaatctctcaaata

SEQ ID NO: 180115 - DNA, 20 bp, Artificial Sequence
  Description of Artificial Sequence: Synthetic oligonucleotide
  Target: LAMA2; (+) strand; PAM type: NRG; PAM sequence: CAG
atctctcaaatatagctttt

SEQ ID NO: 180116 - DNA, 20 bp, Artificial Sequence
  Description of Artificial Sequence: Synthetic oligonucleotide
  Target: LAMA2; (+) strand; PAM type: NRG; PAM sequence: AGG
tctctcaaatatagcttttc

SEQ ID NO: 180117 - DNA, 20 bp, Artificial Sequence
  Description of Artificial Sequence: Synthetic oligonucleotide
  Target: LAMA2; (+) strand; PAM type: NRG; PAM sequence: AAG
aatatagcttttcaggatgc

SEQ ID NO: 180118 - DNA, 20 bp, Artificial Sequence
  Description of Artificial Sequence: Synthetic oligonucleotide
  Target: LAMA2; (+) strand; PAM type: NRG; PAM sequence: AAG
atagcttttcaggatgcaag

SEQ ID NO: 180119 - DNA, 20 bp, Artificial Sequence
  Description of Artificial Sequence: Synthetic oligonucleotide
  Target: LAMA2; (+) strand; PAM type: NRG; PAM sequence: AAG
gcttttcaggatgcaagaag

SEQ ID NO: 180120 - DNA, 20 bp, Artificial Sequence
  Description of Artificial Sequence: Synthetic oligonucleotide
  Target: LAMA2; (+) strand; PAM type: NRG; PAM sequence: AAG
aggatgcaagaagaagcaaa

SEQ ID NO: 180121 - DNA, 20 bp, Artificial Sequence
  Description of Artificial Sequence: Synthetic oligonucleotide
  Target: LAMA2; (+) strand; PAM type: NRG; PAM sequence: AAG
tgcaagaagaagcaaaaagc

SEQ ID NO: 180122 - DNA, 20 bp, Artificial Sequence
  Description of Artificial Sequence: Synthetic oligonucleotide
  Target: LAMA2; (+) strand; PAM type: NRG; PAM sequence: CAG
aagaagaagcaaaaagcaag

SEQ ID NO: 180123 - DNA, 20 bp, Artificial Sequence
  Description of Artificial Sequence: Synthetic oligonucleotide
  Target: LAMA2; (+) strand; PAM type: NRG; PAM sequence: AAG
aaaaagcaagcagaattcac

SEQ ID NO: 180124 - DNA, 20 bp, Artificial Sequence
  Description of Artificial Sequence: Synthetic oligonucleotide
  Target: LAMA2; (+) strand; PAM type: NRG; PAM sequence: TAG
aagcaagcagaattcacaag

SEQ ID NO: 180125 - DNA, 20 bp, Artificial Sequence
  Description of Artificial Sequence: Synthetic oligonucleotide
  Target: LAMA2; (+) strand; PAM type: NRG; PAM sequence: AGG
agcaagcagaattcacaagt

SEQ ID NO: 180126 - DNA, 20 bp, Artificial Sequence
  Description of Artificial Sequence: Synthetic oligonucleotide
  Target: LAMA2; (+) strand; PAM type: NRG; PAM sequence: TAG
caagtaggataatcaatctc

SEQ ID NO: 180127 - DNA, 20 bp, Artificial Sequence
  Description of Artificial Sequence: Synthetic oligonucleotide
  Target: LAMA2; (+) strand; PAM type: NRG; PAM sequence: AAG
taatcaatctctagaaaatt

SEQ ID NO: 180128 - DNA, 20 bp, Artificial Sequence
  Description of Artificial Sequence: Synthetic oligonucleotide
  Target: LAMA2; (+) strand; PAM type: NRG; PAM sequence: GAG
atcaatctctagaaaattaa

SEQ ID NO: 180129 - DNA, 20 bp, Artificial Sequence
  Description of Artificial Sequence: Synthetic oligonucleotide
  Target: LAMA2; (+) strand; PAM type: NRG; PAM sequence: AGG
tcaatctctagaaaattaag

SEQ ID NO: 180130 - DNA, 20 bp, Artificial Sequence
  Description of Artificial Sequence: Synthetic oligonucleotide
  Target: LAMA2; (+) strand; PAM type: NRG; PAM sequence: CAG
ctctagaaaattaagaggtt

SEQ ID NO: 180131 - DNA, 20 bp, Artificial Sequence
  Description of Artificial Sequence: Synthetic oligonucleotide
  Target: LAMA2; (+) strand; PAM type: NRG; PAM sequence: GAG
ctagaaaattaagaggttca

SEQ ID NO: 180132 - DNA, 20 bp, Artificial Sequence
  Description of Artificial Sequence: Synthetic oligonucleotide
  Target: LAMA2; (+) strand; PAM type: NRG; PAM sequence: CAG
taagaggttcagagtgatga

SEQ ID NO: 180133 - DNA, 20 bp, Artificial Sequence
  Description of Artificial Sequence: Synthetic oligonucleotide
  Target: LAMA2; (+) strand; PAM type: NRG; PAM sequence: GAG
agaggttcagagtgatgaca

SEQ ID NO: 180134 - DNA, 20 bp, Artificial Sequence
  Description of Artificial Sequence: Synthetic oligonucleotide
  Target: LAMA2; (+) strand; PAM type: NRG; PAM sequence: AAG
gagtgatgacagagcattgc

SEQ ID NO: 180135 - DNA, 20 bp, Artificial Sequence
  Description of Artificial Sequence: Synthetic oligonucleotide
  Target: LAMA2; (+) strand; PAM type: NRG; PAM sequence: AGG
agtgatgacagagcattgca

SEQ ID NO: 180136 - DNA, 20 bp, Artificial Sequence
  Description of Artificial Sequence: Synthetic oligonucleotide
  Target: LAMA2; (+) strand; PAM type: NRG; PAM sequence: AAG
caaggacgactccaatgtgc

SEQ ID NO: 180137 - DNA, 20 bp, Artificial Sequence
  Description of Artificial Sequence: Synthetic oligonucleotide
  Target: LAMA2; (+) strand; PAM type: NRG; PAM sequence: CAG
gacgactccaatgtgcaagt

SEQ ID NO: 180138 - DNA, 20 bp, Artificial Sequence
  Description of Artificial Sequence: Synthetic oligonucleotide
  Target: LAMA2; (+) strand; PAM type: NRG; PAM sequence: AGG
acgactccaatgtgcaagtc

SEQ ID NO: 180139 - DNA, 20 bp, Artificial Sequence
  Description of Artificial Sequence: Synthetic oligonucleotide
  Target: LAMA2; (+) strand; PAM type: NRG; PAM sequence: GGG
cgactccaatgtgcaagtca

SEQ ID NO: 180140 - DNA, 20 bp, Artificial Sequence
  Description of Artificial Sequence: Synthetic oligonucleotide
  Target: LAMA2; (+) strand; PAM type: NRG; PAM sequence: GGG
gactccaatgtgcaagtcag

SEQ ID NO: 180141 - DNA, 20 bp, Artificial Sequence
  Description of Artificial Sequence: Synthetic oligonucleotide
  Target: LAMA2; (+) strand; PAM type: NRG; PAM sequence: CGG
cgatcaacaatctttctatg

SEQ ID NO: 180142 - DNA, 20 bp, Artificial Sequence
  Description of Artificial Sequence: Synthetic oligonucleotide
  Target: LAMA2; (+) strand; PAM type: NRG; PAM sequence: TGG
ctatgcggctgtgcaataca

SEQ ID NO: 180143 - DNA, 20 bp, Artificial Sequence
  Description of Artificial Sequence: Synthetic oligonucleotide
  Target: LAMA2; (+) strand; PAM type: NRG; PAM sequence: CAG
ggctgtgcaatacatggtca

SEQ ID NO: 180144 - DNA, 20 bp, Artificial Sequence
  Description of Artificial Sequence: Synthetic oligonucleotide
  Target: LAMA2; (+) strand; PAM type: NRG; PAM sequence: CAG
tgtgcaatacatggtcacag

SEQ ID NO: 180145 - DNA, 20 bp, Artificial Sequence
  Description of Artificial Sequence: Synthetic oligonucleotide
  Target: LAMA2; (+) strand; PAM type: NRG; PAM sequence: TGG
gcaatacatggtcacagcag

SEQ ID NO: 180146 - DNA, 20 bp, Artificial Sequence
  Description of Artificial Sequence: Synthetic oligonucleotide
  Target: LAMA2; (+) strand; PAM type: NRG; PAM sequence: GGG
caatacatggtcacagcagt

SEQ ID NO: 180147 - DNA, 20 bp, Artificial Sequence
  Description of Artificial Sequence: Synthetic oligonucleotide
  Target: LAMA2; (+) strand; PAM type: NRG; PAM sequence: TGG
gtgggaaatgtacatgttga

SEQ ID NO: 180148 - DNA, 20 bp, Artificial Sequence
  Description of Artificial Sequence: Synthetic oligonucleotide
  Target: LAMA2; (+) strand; PAM type: NRG; PAM sequence: GGG
tgggaaatgtacatgttgat

SEQ ID NO: 180149 - DNA, 20 bp, Artificial Sequence
  Description of Artificial Sequence: Synthetic oligonucleotide
  Target: LAMA2; (+) strand; PAM type: NRG; PAM sequence: TAG
atgggtttaacctaaaacca

SEQ ID NO: 180150 - DNA, 20 bp, Artificial Sequence
  Description of Artificial Sequence: Synthetic oligonucleotide
  Target: LAMA2; (+) strand; PAM type: NRG; PAM sequence: CAG
ggtttaacctaaaaccatag

SEQ ID NO: 180151 - DNA, 20 bp, Artificial Sequence
  Description of Artificial Sequence: Synthetic oligonucleotide
  Target: LAMA2; (+) strand; PAM type: NRG; PAM sequence: TAG
ttaacctaaaaccatagcag

SEQ ID NO: 180152 - DNA, 20 bp, Artificial Sequence
  Description of Artificial Sequence: Synthetic oligonucleotide
  Target: LAMA2; (+) strand; PAM type: NRG; PAM sequence: AGG
taacctaaaaccatagcagt

SEQ ID NO: 180153 - DNA, 20 bp, Artificial Sequence
  Description of Artificial Sequence: Synthetic oligonucleotide
  Target: LAMA2; (+) strand; PAM type: NRG; PAM sequence: TAG
catagcagtaggctatacca

SEQ ID NO: 180154 - DNA, 20 bp, Artificial Sequence
  Description of Artificial Sequence: Synthetic oligonucleotide
  Target: LAMA2; (+) strand; PAM type: NRG; PAM sequence: GAG
tagcagtaggctataccata

SEQ ID NO: 180155 - DNA, 20 bp, Artificial Sequence
  Description of Artificial Sequence: Synthetic oligonucleotide
  Target: LAMA2; (+) strand; PAM type: NRG; PAM sequence: TAG
gtaggctataccatagagcc

SEQ ID NO: 180156 - DNA, 20 bp, Artificial Sequence
  Description of Artificial Sequence: Synthetic oligonucleotide
  Target: LAMA2; (+) strand; PAM type: NRG; PAM sequence: AGG
taggctataccatagagcct

SEQ ID NO: 180157 - DNA, 20 bp, Artificial Sequence
  Description of Artificial Sequence: Synthetic oligonucleotide
  Target: LAMA2; (+) strand; PAM type: NRG; PAM sequence: TAG
taccatagagcctaggtgtg

SEQ ID NO: 180158 - DNA, 20 bp, Artificial Sequence
  Description of Artificial Sequence: Synthetic oligonucleotide
  Target: LAMA2; (+) strand; PAM type: NRG; PAM sequence: TAG
catagagcctaggtgtgtag

SEQ ID NO: 180159 - DNA, 20 bp, Artificial Sequence
  Description of Artificial Sequence: Synthetic oligonucleotide
  Target: LAMA2; (+) strand; PAM type: NRG; PAM sequence: AGG
atagagcctaggtgtgtagt

SEQ ID NO: 180160 - DNA, 20 bp, Artificial Sequence
  Description of Artificial Sequence: Synthetic oligonucleotide
  Target: LAMA2; (+) strand; PAM type: NRG; PAM sequence: TAG
gtgtagtaggctataccatc

SEQ ID NO: 180161 - DNA, 20 bp, Artificial Sequence
  Description of Artificial Sequence: Synthetic oligonucleotide
  Target: LAMA2; (+) strand; PAM type: NRG; PAM sequence: AAG
tataccatctagatttgtgc

SEQ ID NO: 180162 - DNA, 20 bp, Artificial Sequence
  Description of Artificial Sequence: Synthetic oligonucleotide
  Target: LAMA2; (+) strand; PAM type: NRG; PAM sequence: CAG
agatttgtgcaagtactgta

SEQ ID NO: 180163 - DNA, 20 bp, Artificial Sequence
  Description of Artificial Sequence: Synthetic oligonucleotide
  Target: LAMA2; (+) strand; PAM type: NRG; PAM sequence: CAG
agtctatgcttttaactatt

SEQ ID NO: 180164 - DNA, 20 bp, Artificial Sequence
  Description of Artificial Sequence: Synthetic oligonucleotide
  Target: LAMA2; (+) strand; PAM type: NRG; PAM sequence: CAG
tatttaaaattttaactatt

SEQ ID NO: 180165 - DNA, 20 bp, Artificial Sequence
  Description of Artificial Sequence: Synthetic oligonucleotide
  Target: LAMA2; (+) strand; PAM type: NRG; PAM sequence: GAG
gtgtgttctaaaaaccaaat

SEQ ID NO: 180166 - DNA, 20 bp, Artificial Sequence
  Description of Artificial Sequence: Synthetic oligonucleotide
  Target: LAMA2; (+) strand; PAM type: NRG; PAM sequence: CAG
gagtcaatgcatgtttttcc

SEQ ID NO: 180167 - DNA, 20 bp, Artificial Sequence
  Description of Artificial Sequence: Synthetic oligonucleotide
  Target: LAMA2; (+) strand; PAM type: NRG; PAM sequence: GAG
atgtttttcccagataatct

SEQ ID NO: 180168 - DNA, 20 bp, Artificial Sequence
  Description of Artificial Sequence: Synthetic oligonucleotide
  Target: LAMA2; (+) strand; PAM type: NRG; PAM sequence: TGG
ccagataatctgagtaaata

SEQ ID NO: 180169 - DNA, 20 bp, Artificial Sequence
  Description of Artificial Sequence: Synthetic oligonucleotide
  Target: LAMA2; (+) strand; PAM type: NRG; PAM sequence: GGG
cagataatctgagtaaatat

SEQ ID NO: 180170 - DNA, 20 bp, Artificial Sequence
  Description of Artificial Sequence: Synthetic oligonucleotide
  Target: LAMA2; (+) strand; PAM type: NRG; PAM sequence: TGG
gagtaaatatgggttcactt

SEQ ID NO: 180171 - DNA, 20 bp, Artificial Sequence
  Description of Artificial Sequence: Synthetic oligonucleotide
  Target: LAMA2; (+) strand; PAM type: NRG; PAM sequence: CAG
aatatgggttcactttggca

SEQ ID NO: 180172 - DNA, 20 bp, Artificial Sequence
  Description of Artificial Sequence: Synthetic oligonucleotide
  Target: LAMA2; (+) strand; PAM type: NRG; PAM sequence: GAG
tatgggttcactttggcaca

SEQ ID NO: 180173 - DNA, 20 bp, Artificial Sequence
  Description of Artificial Sequence: Synthetic oligonucleotide
  Target: LAMA2; (+) strand; PAM type: NRG; PAM sequence: AAG
actttggcacagagttttta

SEQ ID NO: 180174 - DNA, 20 bp, Artificial Sequence
  Description of Artificial Sequence: Synthetic oligonucleotide
  Target: LAMA2; (+) strand; PAM type: NRG; PAM sequence: TAG
gcacagagtttttaaagttg

SEQ ID NO: 180175 - DNA, 20 bp, Artificial Sequence
  Description of Artificial Sequence: Synthetic oligonucleotide
  Target: LAMA2; (+) strand; PAM type: NRG; PAM sequence: AGG
cacagagtttttaaagttgt

SEQ ID NO: 180176 - DNA, 20 bp, Artificial Sequence
  Description of Artificial Sequence: Synthetic oligonucleotide
  Target: LAMA2; (+) strand; PAM type: NRG; PAM sequence: CAG
gtttttaaagttgtaggcac

SEQ ID NO: 180177 - DNA, 20 bp, Artificial Sequence
  Description of Artificial Sequence: Synthetic oligonucleotide
  Target: LAMA2; (+) strand; PAM type: NRG; PAM sequence: CAG
gtaggcaccagaatataata

SEQ ID NO: 180178 - DNA, 20 bp, Artificial Sequence
  Description of Artificial Sequence: Synthetic oligonucleotide
  Target: LAMA2; (+) strand; PAM type: NRG; PAM sequence: AAG
gtcatgtgtcactcaatgac

SEQ ID NO: 180179 - DNA, 20 bp, Artificial Sequence
  Description of Artificial Sequence: Synthetic oligonucleotide
  Target: LAMA2; (+) strand; PAM type: NRG; PAM sequence: GAG
caatgacaagaatacattct

SEQ ID NO: 180180 - DNA, 20 bp, Artificial Sequence
  Description of Artificial Sequence: Synthetic oligonucleotide
  Target: LAMA2; (+) strand; PAM type: NRG; PAM sequence: AAG
gacaagaatacattctgaga

SEQ ID NO: 180181 - DNA, 20 bp, Artificial Sequence
  Description of Artificial Sequence: Synthetic oligonucleotide
  Target: LAMA2; (+) strand; PAM type: NRG; PAM sequence: TGG
agaatacattctgagaaagt

SEQ ID NO: 180182 - DNA, 20 bp, Artificial Sequence
  Description of Artificial Sequence: Synthetic oligonucleotide
  Target: LAMA2; (+) strand; PAM type: NRG; PAM sequence: TAG
cattctgagaaagttggaat

SEQ ID NO: 180183 - DNA, 20 bp, Artificial Sequence
  Description of Artificial Sequence: Synthetic oligonucleotide
  Target: LAMA2; (+) strand; PAM type: NRG; PAM sequence: AGG
attctgagaaagttggaatt

SEQ ID NO: 180184 - DNA, 20 bp, Artificial Sequence
  Description of Artificial Sequence: Synthetic oligonucleotide
  Target: LAMA2; (+) strand; PAM type: NRG; PAM sequence: AAG
ctcaatgtgcaaacatcata

SEQ ID NO: 180185 - DNA, 20 bp, Artificial Sequence
  Description of Artificial Sequence: Synthetic oligonucleotide
  Target: LAMA2; (+) strand; PAM type: NRG; PAM sequence: CAG
tgcaaacatcataaagtgta

SEQ ID NO: 180186 - DNA, 20 bp, Artificial Sequence
  Description of Artificial Sequence: Synthetic oligonucleotide
  Target: LAMA2; (+) strand; PAM type: NRG; PAM sequence: TAG
gtacagtacttgcacaaatc

SEQ ID NO: 180187 - DNA, 20 bp, Artificial Sequence
  Description of Artificial Sequence: Synthetic oligonucleotide
  Target: LAMA2; (+) strand; PAM type: NRG; PAM sequence: TGG
agtacttgcacaaatctaga

SEQ ID NO: 180188 - DNA, 20 bp, Artificial Sequence
  Description of Artificial Sequence: Synthetic oligonucleotide
  Target: LAMA2; (+) strand; PAM type: NRG; PAM sequence: CAG
ttgcacaaatctagatggta

SEQ ID NO: 180189 - DNA, 20 bp, Artificial Sequence
  Description of Artificial Sequence: Synthetic oligonucleotide
  Target: LAMA2; (+) strand; PAM type: NRG; PAM sequence: TAG
ggtacagcctactacacacc

SEQ ID NO: 180190 - DNA, 20 bp, Artificial Sequence
  Description of Artificial Sequence: Synthetic oligonucleotide
  Target: LAMA2; (+) strand; PAM type: NRG; PAM sequence: AGG
gtacagcctactacacacct

SEQ ID NO: 180191 - DNA, 20 bp, Artificial Sequence
  Description of Artificial Sequence: Synthetic oligonucleotide
  Target: LAMA2; (+) strand; PAM type: NRG; PAM sequence: TGG
tactacacacctaggcttta

SEQ ID NO: 180192 - DNA, 20 bp, Artificial Sequence
  Description of Artificial Sequence: Synthetic oligonucleotide
  Target: LAMA2; (+) strand; PAM type: NRG; PAM sequence: TAG
cacacctaggctttatggta

SEQ ID NO: 180193 - DNA, 20 bp, Artificial Sequence
  Description of Artificial Sequence: Synthetic oligonucleotide
  Target: LAMA2; (+) strand; PAM type: NRG; PAM sequence: AAG
atggtatagcctactgctcc

SEQ ID NO: 180194 - DNA, 20 bp, Artificial Sequence
  Description of Artificial Sequence: Synthetic oligonucleotide
  Target: LAMA2; (+) strand; PAM type: NRG; PAM sequence: AGG
tggtatagcctactgctcca

SEQ ID NO: 180195 - DNA, 20 bp, Artificial Sequence
  Description of Artificial Sequence: Synthetic oligonucleotide
  Target: LAMA2; (+) strand; PAM type: NRG; PAM sequence: TAG
atagcctactgctccaaggc

SEQ ID NO: 180196 - DNA, 20 bp, Artificial Sequence
  Description of Artificial Sequence: Synthetic oligonucleotide
  Target: LAMA2; (+) strand; PAM type: NRG; PAM sequence: GAG
agcctactgctccaaggcta

SEQ ID NO: 180197 - DNA, 20 bp, Artificial Sequence
  Description of Artificial Sequence: Synthetic oligonucleotide
  Target: LAMA2; (+) strand; PAM type: NRG; PAM sequence: CAG
ctccaaggctagagcctgta

SEQ ID NO: 180198 - DNA, 20 bp, Artificial Sequence
  Description of Artificial Sequence: Synthetic oligonucleotide
  Target: LAMA2; (+) strand; PAM type: NRG; PAM sequence: TAG
tgttcctccactgaatgctg

SEQ ID NO: 180199 - DNA, 20 bp, Artificial Sequence
  Description of Artificial Sequence: Synthetic oligonucleotide
  Target: LAMA2; (+) strand; PAM type: NRG; PAM sequence: AGG
gttcctccactgaatgctgt

SEQ ID NO: 180200 - DNA, 20 bp, Artificial Sequence
  Description of Artificial Sequence: Synthetic oligonucleotide
  Target: LAMA2; (+) strand; PAM type: NRG; PAM sequence: CAG
cctccactgaatgctgtagg

SEQ ID NO: 180201 - DNA, 20 bp, Artificial Sequence
  Description of Artificial Sequence: Synthetic oligonucleotide
  Target: LAMA2; (+) strand; PAM type: NRG; PAM sequence: TGG
tgtaggcagttgtaactcaa

SEQ ID NO: 180202 - DNA, 20 bp, Artificial Sequence
  Description of Artificial Sequence: Synthetic oligonucleotide
  Target: LAMA2; (+) strand; PAM type: NRG; PAM sequence: AAG
ggcagttgtaactcaatggt

SEQ ID NO: 180203 - DNA, 20 bp, Artificial Sequence
  Description of Artificial Sequence: Synthetic oligonucleotide
  Target: LAMA2; (+) strand; PAM type: NRG; PAM sequence: AAG
ttgtgtacctaaacataaac

SEQ ID NO: 180204 - DNA, 20 bp, Artificial Sequence
  Description of Artificial Sequence: Synthetic oligonucleotide
  Target: LAMA2; (+) strand; PAM type: NRG; PAM sequence: AGG
tgtgtacctaaacataaaca

SEQ ID NO: 180205 - DNA, 20 bp, Artificial Sequence
  Description of Artificial Sequence: Synthetic oligonucleotide
  Target: LAMA2; (+) strand; PAM type: NRG; PAM sequence: CAG
acctaaacataaacaaggta

SEQ ID NO: 180206 - DNA, 20 bp, Artificial Sequence
  Description of Artificial Sequence: Synthetic oligonucleotide
  Target: LAMA2; (+) strand; PAM type: NRG; PAM sequence: CAG
aacaaggtacagtaaaaata

SEQ ID NO: 180207 - DNA, 20 bp, Artificial Sequence
  Description of Artificial Sequence: Synthetic oligonucleotide
  Target: LAMA2; (+) strand; PAM type: NRG; PAM sequence: TGG
aatacagtattataatttta

SEQ ID NO: 180208 - DNA, 20 bp, Artificial Sequence
  Description of Artificial Sequence: Synthetic oligonucleotide
  Target: LAMA2; (+) strand; PAM type: NRG; PAM sequence: AAG
acagtattataattttatgg

SEQ ID NO: 180209 - DNA, 20 bp, Artificial Sequence
  Description of Artificial Sequence: Synthetic oligonucleotide
  Target: LAMA2; (+) strand; PAM type: NRG; PAM sequence: CAG
gtaatgtgtcaatgccaaaa

SEQ ID NO: 180210 - DNA, 20 bp, Artificial Sequence
  Description of Artificial Sequence: Synthetic oligonucleotide
  Target: LAMA2; (+) strand; PAM type: NRG; PAM sequence: TAG
caatttacaacaaacttctc

SEQ ID NO: 180211 - DNA, 20 bp, Artificial Sequence
  Description of Artificial Sequence: Synthetic oligonucleotide
  Target: LAMA2; (+) strand; PAM type: NRG; PAM sequence: AGG
aatttacaacaaacttctct

SEQ ID NO: 180212 - DNA, 20 bp, Artificial Sequence
  Description of Artificial Sequence: Synthetic oligonucleotide
  Target: LAMA2; (+) strand; PAM type: NRG; PAM sequence: GAG
tttacaacaaacttctctag

SEQ ID NO: 180213 - DNA, 20 bp, Artificial Sequence
  Description of Artificial Sequence: Synthetic oligonucleotide
  Target: LAMA2; (+) strand; PAM type: NRG; PAM sequence: AGG
ttacaacaaacttctctagg

SEQ ID NO: 180214 - DNA, 20 bp, Artificial Sequence
  Description of Artificial Sequence: Synthetic oligonucleotide
  Target: LAMA2; (+) strand; PAM type: NRG; PAM sequence: GGG
tacaacaaacttctctagga

SEQ ID NO: 180215 - DNA, 20 bp, Artificial Sequence
  Description of Artificial Sequence: Synthetic oligonucleotide
  Target: LAMA2; (+) strand; PAM type: NRG; PAM sequence: CAG
caaacttctctaggagggac

SEQ ID NO: 180216 - DNA, 20 bp, Artificial Sequence
  Description of Artificial Sequence: Synthetic oligonucleotide
  Target: LAMA2; (+) strand; PAM type: NRG; PAM sequence: AGG
aaacttctctaggagggacc

SEQ ID NO: 180217 - DNA, 20 bp, Artificial Sequence
  Description of Artificial Sequence: Synthetic oligonucleotide
  Target: LAMA2; (+) strand; PAM type: NRG; PAM sequence: AAG
tttcttcatgattgtgtatc

SEQ ID NO: 180218 - DNA, 20 bp, Artificial Sequence
  Description of Artificial Sequence: Synthetic oligonucleotide
  Target: LAMA2; (+) strand; PAM type: NRG; PAM sequence: AAG
catgattgtgtatcaagcct

SEQ ID NO: 180219 - DNA, 20 bp, Artificial Sequence
  Description of Artificial Sequence: Synthetic oligonucleotide
  Target: LAMA2; (+) strand; PAM type: NRG; PAM sequence: CAG
ttttcctgtgaaaatgacac

SEQ ID NO: 180220 - DNA, 20 bp, Artificial Sequence
  Description of Artificial Sequence: Synthetic oligonucleotide
  Target: LAMA2; (+) strand; PAM type: NRG; PAM sequence: AGG
tttcctgtgaaaatgacacc

SEQ ID NO: 180221 - DNA, 20 bp, Artificial Sequence
  Description of Artificial Sequence: Synthetic oligonucleotide
  Target: LAMA2; (+) strand; PAM type: NRG; PAM sequence: CAG
acaccaggattgaatttgat

SEQ ID NO: 180222 - DNA, 20 bp, Artificial Sequence
  Description of Artificial Sequence: Synthetic oligonucleotide
  Target: LAMA2; (+) strand; PAM type: NRG; PAM sequence: CAG
gtcgattctctatttgactc

SEQ ID NO: 180223 - DNA, 20 bp, Artificial Sequence
  Description of Artificial Sequence: Synthetic oligonucleotide
  Target: LAMA2; (+) strand; PAM type: NRG; PAM sequence: AGG
tcgattctctatttgactcc

SEQ ID NO: 180224 - DNA, 20 bp, Artificial Sequence
  Description of Artificial Sequence: Synthetic oligonucleotide
  Target: LAMA2; (+) strand; PAM type: NRG; PAM sequence: AAG
aggccctgtgctgtgtatac

SEQ ID NO: 180225 - DNA, 20 bp, Artificial Sequence
  Description of Artificial Sequence: Synthetic oligonucleotide
  Target: LAMA2; (+) strand; PAM type: NRG; PAM sequence: TGG
acaagcaaacgacaccaatg

SEQ ID NO: 180226 - DNA, 20 bp, Artificial Sequence
  Description of Artificial Sequence: Synthetic oligonucleotide
  Target: LAMA2; (+) strand; PAM type: NRG; PAM sequence: AAG
atgtggtctcatttcctaca

SEQ ID NO: 180227 - DNA, 20 bp, Artificial Sequence
  Description of Artificial Sequence: Synthetic oligonucleotide
  Target: LAMA2; (+) strand; PAM type: NRG; PAM sequence: TGG
ccttgaactcgaaatcttct

SEQ ID NO: 180228 - DNA, 20 bp, Artificial Sequence
  Description of Artificial Sequence: Synthetic oligonucleotide
  Target: LAMA2; (+) strand; PAM type: NRG; PAM sequence: CAG
gaaatcttcttggctgtgaa

SEQ ID NO: 180229 - DNA, 20 bp, Artificial Sequence
  Description of Artificial Sequence: Synthetic oligonucleotide
  Target: LAMA2; (+) strand; PAM type: NRG; PAM sequence: CAG
aacagaaatttaaaaattta

SEQ ID NO: 180230 - DNA, 20 bp, Artificial Sequence
  Description of Artificial Sequence: Synthetic oligonucleotide
  Target: LAMA2; (+) strand; PAM type: NRG; PAM sequence: CAG
agaaatttaaaaatttacag

SEQ ID NO: 180231 - DNA, 20 bp, Artificial Sequence
  Description of Artificial Sequence: Synthetic oligonucleotide
  Target: LAMA2; (+) strand; PAM type: NRG; PAM sequence: TAG
aatttacagcagcactacca

SEQ ID NO: 180232 - DNA, 20 bp, Artificial Sequence
  Description of Artificial Sequence: Synthetic oligonucleotide
  Target: LAMA2; (+) strand; PAM type: NRG; PAM sequence: GAG
tttacagcagcactaccata

SEQ ID NO: 180233 - DNA, 20 bp, Artificial Sequence
  Description of Artificial Sequence: Synthetic oligonucleotide
  Target: LAMA2; (+) strand; PAM type: NRG; PAM sequence: AAG
taccatagagtgatttatac

SEQ ID NO: 180234 - DNA, 20 bp, Artificial Sequence
  Description of Artificial Sequence: Synthetic oligonucleotide
  Target: LAMA2; (+) strand; PAM type: NRG; PAM sequence: CAG
aaaaatctcttctatgtcat

SEQ ID NO: 180235 - DNA, 20 bp, Artificial Sequence
  Description of Artificial Sequence: Synthetic oligonucleotide
  Target: LAMA2; (+) strand; PAM type: NRG; PAM sequence: CAG
tgtcccctttcttctgatct

SEQ ID NO: 180236 - DNA, 20 bp, Artificial Sequence
  Description of Artificial Sequence: Synthetic oligonucleotide
  Target: LAMA2; (+) strand; PAM type: NRG; PAM sequence: AGG
gtcccctttcttctgatctc

SEQ ID NO: 180237 - DNA, 20 bp, Artificial Sequence
  Description of Artificial Sequence: Synthetic oligonucleotide
  Target: LAMA2; (+) strand; PAM type: NRG; PAM sequence: GGG
tcccctttcttctgatctca

SEQ ID NO: 180238 - DNA, 20 bp, Artificial Sequence
  Description of Artificial Sequence: Synthetic oligonucleotide
  Target: LAMA2; (+) strand; PAM type: NRG; PAM sequence: GGG
cccctttcttctgatctcag

SEQ ID NO: 180239 - DNA, 20 bp, Artificial Sequence
  Description of Artificial Sequence: Synthetic oligonucleotide
  Target: LAMA2; (+) strand; PAM type: NRG; PAM sequence: AAG
tcttctgatctcaggggaaa

SEQ ID NO: 180240 - DNA, 20 bp, Artificial Sequence
  Description of Artificial Sequence: Synthetic oligonucleotide
  Target: LAMA2; (+) strand; PAM type: NRG; PAM sequence: TGG
gaaaaagctttgtgtatgca

SEQ ID NO: 180241 - DNA, 20 bp, Artificial Sequence
  Description of Artificial Sequence: Synthetic oligonucleotide
  Target: LAMA2; (+) strand; PAM type: NRG; PAM sequence: AAG
gcatggcccaaatttgccca

SEQ ID NO: 180242 - DNA, 20 bp, Artificial Sequence
  Description of Artificial Sequence: Synthetic oligonucleotide
  Target: LAMA2; (+) strand; PAM type: NRG; PAM sequence: TAG
tttgcccaaagaaaattatg

SEQ ID NO: 180243 - DNA, 20 bp, Artificial Sequence
  Description of Artificial Sequence: Synthetic oligonucleotide
  Target: LAMA2; (+) strand; PAM type: NRG; PAM sequence: AGG
ttgcccaaagaaaattatgt

SEQ ID NO: 180244 - DNA, 20 bp, Artificial Sequence
  Description of Artificial Sequence: Synthetic oligonucleotide
  Target: LAMA2; (+) strand; PAM type: NRG; PAM sequence: GAG
gcccaaagaaaattatgtag

SEQ ID NO: 180245 - DNA, 20 bp, Artificial Sequence
  Description of Artificial Sequence: Synthetic oligonucleotide
  Target: LAMA2; (+) strand; PAM type: NRG; PAM sequence: TAG
agaaaattatgtaggagcac

SEQ ID NO: 180246 - DNA, 20 bp, Artificial Sequence
  Description of Artificial Sequence: Synthetic oligonucleotide
  Target: LAMA2; (+) strand; PAM type: NRG; PAM sequence: CAG
attgaacaccttctgtatat

SEQ ID NO: 180247 - DNA, 20 bp, Artificial Sequence
  Description of Artificial Sequence: Synthetic oligonucleotide
  Target: LAMA2; (+) strand; PAM type: NRG; PAM sequence: AGG
ttgaacaccttctgtatatc

SEQ ID NO: 180248 - DNA, 20 bp, Artificial Sequence
  Description of Artificial Sequence: Synthetic oligonucleotide
  Target: LAMA2; (+) strand; PAM type: NRG; PAM sequence: GAG
ccttctgtatatcaggcact

SEQ ID NO: 180249 - DNA, 20 bp, Artificial Sequence
  Description of Artificial Sequence: Synthetic oligonucleotide
  Target: LAMA2; (+) strand; PAM type: NRG; PAM sequence: TGG
tgtatatcaggcactgagat

SEQ ID NO: 180250 - DNA, 20 bp, Artificial Sequence
  Description of Artificial Sequence: Synthetic oligonucleotide
  Target: LAMA2; (+) strand; PAM type: NRG; PAM sequence: CAG
ctcacaaaaattccacatta

SEQ ID NO: 180251 - DNA, 20 bp, Artificial Sequence
  Description of Artificial Sequence: Synthetic oligonucleotide
  Target: LAMA2; (+) strand; PAM type: NRG; PAM sequence: AAG
aaattccacattacagacaa

SEQ ID NO: 180252 - DNA, 20 bp, Artificial Sequence
  Description of Artificial Sequence: Synthetic oligonucleotide
  Target: LAMA2; (+) strand; PAM type: NRG; PAM sequence: TAG
ccacattacagacaaaagaa

SEQ ID NO: 180253 - DNA, 20 bp, Artificial Sequence
  Description of Artificial Sequence: Synthetic oligonucleotide
  Target: LAMA2; (+) strand; PAM type: NRG; PAM sequence: TGG
cagacaaaagaatagaattg

SEQ ID NO: 180254 - DNA, 20 bp, Artificial Sequence
  Description of Artificial Sequence: Synthetic oligonucleotide
  Target: LAMA2; (+) strand; PAM type: NRG; PAM sequence: GAG
gacaaaagaatagaattgtg

SEQ ID NO: 180255 - DNA, 20 bp, Artificial Sequence
  Description of Artificial Sequence: Synthetic oligonucleotide
  Target: LAMA2; (+) strand; PAM type: NRG; PAM sequence: AAG
aaaagaatagaattgtggag

SEQ ID NO: 180256 - DNA, 20 bp, Artificial Sequence
  Description of Artificial Sequence: Synthetic oligonucleotide
  Target: LAMA2; (+) strand; PAM type: NRG; PAM sequence: AGG
aaagaatagaattgtggaga

SEQ ID NO: 180257 - DNA, 20 bp, Artificial Sequence
  Description of Artificial Sequence: Synthetic oligonucleotide
  Target: LAMA2; (+) strand; PAM type: NRG; PAM sequence: CAG
aatagaattgtggagaaggt

SEQ ID NO: 180258 - DNA, 20 bp, Artificial Sequence
  Description of Artificial Sequence: Synthetic oligonucleotide
  Target: LAMA2; (+) strand; PAM type: NRG; PAM sequence: CAG
agaattgtggagaaggtcag

SEQ ID NO: 180259 - DNA, 20 bp, Artificial Sequence
  Description of Artificial Sequence: Synthetic oligonucleotide
  Target: LAMA2; (+) strand; PAM type: NRG; PAM sequence: AAG
gaaggtcagcagctcaccta

SEQ ID NO: 180260 - DNA, 20 bp, Artificial Sequence
  Description of Artificial Sequence: Synthetic oligonucleotide
  Target: LAMA2; (+) strand; PAM type: NRG; PAM sequence: TAG
gtcagcagctcacctaaagt

SEQ ID NO: 180261 - DNA, 20 bp, Artificial Sequence
  Description of Artificial Sequence: Synthetic oligonucleotide
  Target: LAMA2; (+) strand; PAM type: NRG; PAM sequence: AAG
agcagctcacctaaagttag

SEQ ID NO: 180262 - DNA, 20 bp, Artificial Sequence
  Description of Artificial Sequence: Synthetic oligonucleotide
  Target: LAMA2; (+) strand; PAM type: NRG; PAM sequence: TAG
gctcacctaaagttagaagc

SEQ ID NO: 180263 - DNA, 20 bp, Artificial Sequence
  Description of Artificial Sequence: Synthetic oligonucleotide
  Target: LAMA2; (+) strand; PAM type: NRG; PAM sequence: AGG
ctcacctaaagttagaagct

SEQ ID NO: 180264 - DNA, 20 bp, Artificial Sequence
  Description of Artificial Sequence: Synthetic oligonucleotide
  Target: LAMA2; (+) strand; PAM type: NRG; PAM sequence: AAG
acctaaagttagaagctagg

SEQ ID NO: 180265 - DNA, 20 bp, Artificial Sequence
  Description of Artificial Sequence: Synthetic oligonucleotide
  Target: LAMA2; (+) strand; PAM type: NRG; PAM sequence: TGG
tatttactgatgatgaaaac

SEQ ID NO: 180266 - DNA, 20 bp, Artificial Sequence
  Description of Artificial Sequence: Synthetic oligonucleotide
  Target: LAMA2; (+) strand; PAM type: NRG; PAM sequence: TAG
actgatgatgaaaactggta

SEQ ID NO: 180267 - DNA, 20 bp, Artificial Sequence
  Description of Artificial Sequence: Synthetic oligonucleotide
  Target: LAMA2; (+) strand; PAM type: NRG; PAM sequence: AAG
atgaaaactggtatagcaaa

SEQ ID NO: 180268 - DNA, 20 bp, Artificial Sequence
  Description of Artificial Sequence: Synthetic oligonucleotide
  Target: LAMA2; (+) strand; PAM type: NRG; PAM sequence: CAG
ctggtatagcaaaaagtaat

SEQ ID NO: 180269 - DNA, 20 bp, Artificial Sequence
  Description of Artificial Sequence: Synthetic oligonucleotide
  Target: LAMA2; (+) strand; PAM type: NRG; PAM sequence: TGG
caaaaagtaatcagcattcg

SEQ ID NO: 180270 - DNA, 20 bp, Artificial Sequence
  Description of Artificial Sequence: Synthetic oligonucleotide
  Target: LAMA2; (+) strand; PAM type: NRG; PAM sequence: TAG
atcagcattcgtggattaaa

SEQ ID NO: 180271 - DNA, 20 bp, Artificial Sequence
  Description of Artificial Sequence: Synthetic oligonucleotide
  Target: LAMA2; (+) strand; PAM type: NRG; PAM sequence: GAG
cattcgtggattaaatagtt

SEQ ID NO: 180272 - DNA, 20 bp, Artificial Sequence
  Description of Artificial Sequence: Synthetic oligonucleotide
  Target: LAMA2; (+) strand; PAM type: NRG; PAM sequence: TAG
cctgttgttgactcatcctg

SEQ ID NO: 180273 - DNA, 20 bp, Artificial Sequence
  Description of Artificial Sequence: Synthetic oligonucleotide
  Target: LAMA2; (+) strand; PAM type: NRG; PAM sequence: TAG
gttgttgactcatcctgtag

SEQ ID NO: 180274 - DNA, 20 bp, Artificial Sequence
  Description of Artificial Sequence: Synthetic oligonucleotide
  Target: LAMA2; (+) strand; PAM type: NRG; PAM sequence: AAG
actcatcctgtagtagctct

SEQ ID NO: 180275 - DNA, 20 bp, Artificial Sequence
  Description of Artificial Sequence: Synthetic oligonucleotide
  Target: LAMA2; (+) strand; PAM type: NRG; PAM sequence: AGG
ctcatcctgtagtagctcta

SEQ ID NO: 180276 - DNA, 20 bp, Artificial Sequence
  Description of Artificial Sequence: Synthetic oligonucleotide
  Target: LAMA2; (+) strand; PAM type: NRG; PAM sequence: CGG
ctgtagtagctctaaggata

SEQ ID NO: 180277 - DNA, 20 bp, Artificial Sequence
  Description of Artificial Sequence: Synthetic oligonucleotide
  Target: LAMA2; (+) strand; PAM type: NRG; PAM sequence: CAG
agtagctctaaggatacgga

SEQ ID NO: 180278 - DNA, 20 bp, Artificial Sequence
  Description of Artificial Sequence: Synthetic oligonucleotide
  Target: LAMA2; (+) strand; PAM type: NRG; PAM sequence: AAG
tacggacagactatgatgaa

SEQ ID NO: 180279 - DNA, 20 bp, Artificial Sequence
  Description of Artificial Sequence: Synthetic oligonucleotide
  Target: LAMA2; (+) strand; PAM type: NRG; PAM sequence: CAG
atgtacatatgccaaaatat

SEQ ID NO: 180280 - DNA, 20 bp, Artificial Sequence
  Description of Artificial Sequence: Synthetic oligonucleotide
  Target: LAMA2; (+) strand; PAM type: NRG; PAM sequence: AAG
acatatgccaaaatatcaga

SEQ ID NO: 180281 - DNA, 20 bp, Artificial Sequence
  Description of Artificial Sequence: Synthetic oligonucleotide
  Target: LAMA2; (+) strand; PAM type: NRG; PAM sequence: TGG
tgccaaaatatcagaaagaa

SEQ ID NO: 180282 - DNA, 20 bp, Artificial Sequence
  Description of Artificial Sequence: Synthetic oligonucleotide
  Target: LAMA2; (+) strand; PAM type: NRG; PAM sequence: TAG
agaatggataatgataactt

SEQ ID NO: 180283 - DNA, 20 bp, Artificial Sequence
  Description of Artificial Sequence: Synthetic oligonucleotide
  Target: LAMA2; (+) strand; PAM type: NRG; PAM sequence: TGG
tctgctgataataactctca

SEQ ID NO: 180284 - DNA, 20 bp, Artificial Sequence
  Description of Artificial Sequence: Synthetic oligonucleotide
  Target: LAMA2; (+) strand; PAM type: NRG; PAM sequence: AAG
ataactctcatggataaacc

SEQ ID NO: 180285 - DNA, 20 bp, Artificial Sequence
  Description of Artificial Sequence: Synthetic oligonucleotide
  Target: LAMA2; (+) strand; PAM type: NRG; PAM sequence: TAG
atttgtgaaattccaaattc

SEQ ID NO: 180286 - DNA, 20 bp, Artificial Sequence
  Description of Artificial Sequence: Synthetic oligonucleotide
  Target: LAMA2; (+) strand; PAM type: NRG; PAM sequence: CGG
ttccaaattctagcaaataa

SEQ ID NO: 180287 - DNA, 20 bp, Artificial Sequence
  Description of Artificial Sequence: Synthetic oligonucleotide
  Target: LAMA2; (+) strand; PAM type: NRG; PAM sequence: CAG
aataacggtatttctttctg

SEQ ID NO: 180288 - DNA, 20 bp, Artificial Sequence
  Description of Artificial Sequence: Synthetic oligonucleotide
  Target: LAMA2; (+) strand; PAM type: NRG; PAM sequence: AAG
aacggtatttctttctgcag

SEQ ID NO: 180289 - DNA, 20 bp, Artificial Sequence
  Description of Artificial Sequence: Synthetic oligonucleotide
  Target: LAMA2; (+) strand; PAM type: NRG; PAM sequence: AGG
acggtatttctttctgcaga

SEQ ID NO: 180290 - DNA, 20 bp, Artificial Sequence
  Description of Artificial Sequence: Synthetic oligonucleotide
  Target: LAMA2; (+) strand; PAM type: NRG; PAM sequence: TGG
gtacgtgtgattacattcac

SEQ ID NO: 180291 - DNA, 20 bp, Artificial Sequence
  Description of Artificial Sequence: Synthetic oligonucleotide
  Target: LAMA2; (+) strand; PAM type: NRG; PAM sequence: TGG
gattacattcactggctgca

SEQ ID NO: 180292 - DNA, 20 bp, Artificial Sequence
  Description of Artificial Sequence: Synthetic oligonucleotide
  Target: LAMA2; (+) strand; PAM type: NRG; PAM sequence: GGG
attacattcactggctgcat

SEQ ID NO: 180293 - DNA, 20 bp, Artificial Sequence
  Description of Artificial Sequence: Synthetic oligonucleotide
  Target: LAMA2; (+) strand; PAM type: NRG; PAM sequence: GAG
tacattcactggctgcatgg

SEQ ID NO: 180294 - DNA, 20 bp, Artificial Sequence
  Description of Artificial Sequence: Synthetic oligonucleotide
  Target: LAMA2; (+) strand; PAM type: NRG; PAM sequence: TAG
atactttgacaacaaaccta

SEQ ID NO: 180295 - DNA, 20 bp, Artificial Sequence
  Description of Artificial Sequence: Synthetic oligonucleotide
  Target: LAMA2; (+) strand; PAM type: NRG; PAM sequence: AGG
tactttgacaacaaacctat

SEQ ID NO: 180296 - DNA, 20 bp, Artificial Sequence
  Description of Artificial Sequence: Synthetic oligonucleotide
  Target: LAMA2; (+) strand; PAM type: NRG; PAM sequence: TGG
acaacaaacctataggtttg

SEQ ID NO: 180297 - DNA, 20 bp, Artificial Sequence
  Description of Artificial Sequence: Synthetic oligonucleotide
  Target: LAMA2; (+) strand; PAM type: NRG; PAM sequence: GAG
tataggtttgtggaatttcc

SEQ ID NO: 180298 - DNA, 20 bp, Artificial Sequence
  Description of Artificial Sequence: Synthetic oligonucleotide
  Target: LAMA2; (+) strand; PAM type: NRG; PAM sequence: AAG
tttgtggaatttccgagaaa

SEQ ID NO: 180299 - DNA, 20 bp, Artificial Sequence
  Description of Artificial Sequence: Synthetic oligonucleotide
  Target: LAMA2; (+) strand; PAM type: NRG; PAM sequence: AAG
gtggaatttccgagaaaaag

SEQ ID NO: 180300 - DNA, 20 bp, Artificial Sequence
  Description of Artificial Sequence: Synthetic oligonucleotide
  Target: LAMA2; (+) strand; PAM type: NRG; PAM sequence: AGG
tggaatttccgagaaaaaga

SEQ ID NO: 180301 - DNA, 20 bp, Artificial Sequence
  Description of Artificial Sequence: Synthetic oligonucleotide
  Target: LAMA2; (+) strand; PAM type: NRG; PAM sequence: AAG
agaaaaagaaggtgactgca

SEQ ID NO: 180302 - DNA, 20 bp, Artificial Sequence
  Description of Artificial Sequence: Synthetic oligonucleotide
  Target: LAMA2; (+) strand; PAM type: NRG; PAM sequence: AGG
gaaaaagaaggtgactgcaa

SEQ ID NO: 180303 - DNA, 20 bp, Artificial Sequence
  Description of Artificial Sequence: Synthetic oligonucleotide
  Target: LAMA2; (+) strand; PAM type: NRG; PAM sequence: CAG
gactgcaaaggatgcactgt

SEQ ID NO: 180304 - DNA, 20 bp, Artificial Sequence
  Description of Artificial Sequence: Synthetic oligonucleotide
  Target: LAMA2; (+) strand; PAM type: NRG; PAM sequence: AGG
actgcaaaggatgcactgtc

SEQ ID NO: 180305 - DNA, 20 bp, Artificial Sequence
  Description of Artificial Sequence: Synthetic oligonucleotide
  Target: LAMA2; (+) strand; PAM type: NRG; PAM sequence: TAG
caaaggatgcactgtcaggt

SEQ ID NO: 180306 - DNA, 20 bp, Artificial Sequence
  Description of Artificial Sequence: Synthetic oligonucleotide
  Target: LAMA2; (+) strand; PAM type: NRG; PAM sequence: GAG
gatgcactgtcaggttagtt

SEQ ID NO: 180307 - DNA, 20 bp, Artificial Sequence
  Description of Artificial Sequence: Synthetic oligonucleotide
  Target: LAMA2; (+) strand; PAM type: NRG; PAM sequence: GAG
actgtcaggttagttgagat

SEQ ID NO: 180308 - DNA, 20 bp, Artificial Sequence
  Description of Artificial Sequence: Synthetic oligonucleotide
  Target: LAMA2; (+) strand; PAM type: NRG; PAM sequence: CAG
agttgagatgagaactctcc

SEQ ID NO: 180309 - DNA, 20 bp, Artificial Sequence
  Description of Artificial Sequence: Synthetic oligonucleotide
  Target: LAMA2; (+) strand; PAM type: NRG; PAM sequence: AGG
gttgagatgagaactctccc

SEQ ID NO: 180310 - DNA, 20 bp, Artificial Sequence
  Description of Artificial Sequence: Synthetic oligonucleotide
  Target: LAMA2; (+) strand; PAM type: NRG; PAM sequence: GGG
ttgagatgagaactctccca

SEQ ID NO: 180311 - DNA, 20 bp, Artificial Sequence
  Description of Artificial Sequence: Synthetic oligonucleotide
  Target: LAMA2; (+) strand; PAM type: NRG; PAM sequence: AAG
gtctgtcctgtgcataataa

SEQ ID NO: 180312 - DNA, 20 bp, Artificial Sequence
  Description of Artificial Sequence: Synthetic oligonucleotide
  Target: LAMA2; (+) strand; PAM type: NRG; PAM sequence: TGG
cataatattctattatcatg

SEQ ID NO: 180313 - DNA, 20 bp, Artificial Sequence
  Description of Artificial Sequence: Synthetic oligonucleotide
  Target: LAMA2; (+) strand; PAM type: NRG; PAM sequence: TGG
ctattatcatgtggatgatg

SEQ ID NO: 180314 - DNA, 20 bp, Artificial Sequence
  Description of Artificial Sequence: Synthetic oligonucleotide
  Target: LAMA2; (+) strand; PAM type: NRG; PAM sequence: GAG
attatcatgtggatgatgtg

SEQ ID NO: 180315 - DNA, 20 bp, Artificial Sequence
  Description of Artificial Sequence: Synthetic oligonucleotide
  Target: LAMA2; (+) strand; PAM type: NRG; PAM sequence: CAG
atcatgtggatgatgtggag

SEQ ID NO: 180316 - DNA, 20 bp, Artificial Sequence
  Description of Artificial Sequence: Synthetic oligonucleotide
  Target: LAMA2; (+) strand; PAM type: NRG; PAM sequence: AGG
tcatgtggatgatgtggagc

SEQ ID NO: 180317 - DNA, 20 bp, Artificial Sequence
  Description of Artificial Sequence: Synthetic oligonucleotide
  Target: LAMA2; (+) strand; PAM type: NRG; PAM sequence: AAG
atgatgtggagcaggtttga

SEQ ID NO: 180318 - DNA, 20 bp, Artificial Sequence
  Description of Artificial Sequence: Synthetic oligonucleotide
  Target: LAMA2; (+) strand; PAM type: NRG; PAM sequence: AGG
tgatgtggagcaggtttgaa

SEQ ID NO: 180319 - DNA, 20 bp, Artificial Sequence
  Description of Artificial Sequence: Synthetic oligonucleotide
  Target: LAMA2; (+) strand; PAM type: NRG; PAM sequence: CAG
aggtttgaaaggattatact

SEQ ID NO: 180320 - DNA, 20 bp, Artificial Sequence
  Description of Artificial Sequence: Synthetic oligonucleotide
  Target: LAMA2; (+) strand; PAM type: NRG; PAM sequence: GAG
gtttgaaaggattatactca

SEQ ID NO: 180321 - DNA, 20 bp, Artificial Sequence
  Description of Artificial Sequence: Synthetic oligonucleotide
  Target: LAMA2; (+) strand; PAM type: NRG; PAM sequence: AGG
tttgaaaggattatactcag

SEQ ID NO: 180322 - DNA, 20 bp, Artificial Sequence
  Description of Artificial Sequence: Synthetic oligonucleotide
  Target: LAMA2; (+) strand; PAM type: NRG; PAM sequence: TGG
gaaaggattatactcagagg

SEQ ID NO: 180323 - DNA, 20 bp, Artificial Sequence
  Description of Artificial Sequence: Synthetic oligonucleotide
  Target: LAMA2; (+) strand; PAM type: NRG; PAM sequence: AAG
cacaaaactaatgaatcttc

SEQ ID NO: 180324 - DNA, 20 bp, Artificial Sequence
  Description of Artificial Sequence: Synthetic oligonucleotide
  Target: LAMA2; (+) strand; PAM type: NRG; PAM sequence: CAG
agtccctgcctgcatttgca

SEQ ID NO: 180325 - DNA, 20 bp, Artificial Sequence
  Description of Artificial Sequence: Synthetic oligonucleotide
  Target: LAMA2; (+) strand; PAM type: NRG; PAM sequence: AGG
gtccctgcctgcatttgcac

SEQ ID NO: 180326 - DNA, 20 bp, Artificial Sequence
  Description of Artificial Sequence: Synthetic oligonucleotide
  Target: LAMA2; (+) strand; PAM type: NRG; PAM sequence: AAG
catttgcacaggcatttttc

SEQ ID NO: 180327 - DNA, 20 bp, Artificial Sequence
  Description of Artificial Sequence: Synthetic oligonucleotide
  Target: LAMA2; (+) strand; PAM type: NRG; PAM sequence: AGG
atttgcacaggcatttttca

SEQ ID NO: 180328 - DNA, 20 bp, Artificial Sequence
  Description of Artificial Sequence: Synthetic oligonucleotide
  Target: LAMA2; (+) strand; PAM type: NRG; PAM sequence: TGG
acaggcatttttcaaggccc

SEQ ID NO: 180329 - DNA, 20 bp, Artificial Sequence
  Description of Artificial Sequence: Synthetic oligonucleotide
  Target: LAMA2; (+) strand; PAM type: NRG; PAM sequence: GGG
caggcatttttcaaggccct

SEQ ID NO: 180330 - DNA, 20 bp, Artificial Sequence
  Description of Artificial Sequence: Synthetic oligonucleotide
  Target: LAMA2; (+) strand; PAM type: NRG; PAM sequence: GAG
ggcatttttcaaggccctgg

SEQ ID NO: 180331 - DNA, 20 bp, Artificial Sequence
  Description of Artificial Sequence: Synthetic oligonucleotide
  Target: LAMA2; (+) strand; PAM type: NRG; PAM sequence: AGG
gcatttttcaaggccctggg

SEQ ID NO: 180332 - DNA, 20 bp, Artificial Sequence
  Description of Artificial Sequence: Synthetic oligonucleotide
  Target: LAMA2; (+) strand; PAM type: NRG; PAM sequence: TAG
caaggccctgggaggtatac

SEQ ID NO: 180333 - DNA, 20 bp, Artificial Sequence
  Description of Artificial Sequence: Synthetic oligonucleotide
  Target: LAMA2; (+) strand; PAM type: NRG; PAM sequence: CAG
ggccctgggaggtatactag

SEQ ID NO: 180334 - DNA, 20 bp, Artificial Sequence
  Description of Artificial Sequence: Synthetic oligonucleotide
  Target: LAMA2; (+) strand; PAM type: NRG; PAM sequence: TAG
atactagcagtacatttgca

SEQ ID NO: 180335 - DNA, 20 bp, Artificial Sequence
  Description of Artificial Sequence: Synthetic oligonucleotide
  Target: LAMA2; (+) strand; PAM type: NRG; PAM sequence: AAG
atgtttttataaaatttgca

SEQ ID NO: 180336 - DNA, 20 bp, Artificial Sequence
  Description of Artificial Sequence: Synthetic oligonucleotide
  Target: LAMA2; (+) strand; PAM type: NRG; PAM sequence: AGG
tgtttttataaaatttgcaa

SEQ ID NO: 180337 - DNA, 20 bp, Artificial Sequence
  Description of Artificial Sequence: Synthetic oligonucleotide
  Target: LAMA2; (+) strand; PAM type: NRG; PAM sequence: AAG
tttataaaatttgcaaaggt

SEQ ID NO: 180338 - DNA, 20 bp, Artificial Sequence
  Description of Artificial Sequence: Synthetic oligonucleotide
  Target: LAMA2; (+) strand; PAM type: NRG; PAM sequence: GAG
tataaaatttgcaaaggtaa

SEQ ID NO: 180339 - DNA, 20 bp, Artificial Sequence
  Description of Artificial Sequence: Synthetic oligonucleotide
  Target: LAMA2; (+) strand; PAM type: NRG; PAM sequence: TGG
tttgcaaaggtaagagattt

SEQ ID NO: 180340 - DNA, 20 bp, Artificial Sequence
  Description of Artificial Sequence: Synthetic oligonucleotide
  Target: LAMA2; (+) strand; PAM type: NRG; PAM sequence: CAG
taagagattttggctacaat

SEQ ID NO: 180341 - DNA, 20 bp, Artificial Sequence
  Description of Artificial Sequence: Synthetic oligonucleotide
  Target: LAMA2; (+) strand; PAM type: NRG; PAM sequence: AAG
gattttggctacaatcagtt

SEQ ID NO: 180342 - DNA, 20 bp, Artificial Sequence
  Description of Artificial Sequence: Synthetic oligonucleotide
  Target: LAMA2; (+) strand; PAM type: NRG; PAM sequence: GAG
ctccaatgttctttcatgtc

SEQ ID NO: 180343 - DNA, 20 bp, Artificial Sequence
  Description of Artificial Sequence: Synthetic oligonucleotide
  Target: LAMA2; (+) strand; PAM type: NRG; PAM sequence: AGG
tccaatgttctttcatgtcg

SEQ ID NO: 180344 - DNA, 20 bp, Artificial Sequence
  Description of Artificial Sequence: Synthetic oligonucleotide
  Target: LAMA2; (+) strand; PAM type: NRG; PAM sequence: GGG
ccaatgttctttcatgtcga

SEQ ID NO: 180345 - DNA, 20 bp, Artificial Sequence
  Description of Artificial Sequence: Synthetic oligonucleotide
  Target: LAMA2; (+) strand; PAM type: NRG; PAM sequence: GGG
caatgttctttcatgtcgag

SEQ ID NO: 180346 - DNA, 20 bp, Artificial Sequence
  Description of Artificial Sequence: Synthetic oligonucleotide
  Target: LAMA2; (+) strand; PAM type: NRG; PAM sequence: GAG
aggggtttttttgtgtctgt

SEQ ID NO: 180347 - DNA, 20 bp, Artificial Sequence
  Description of Artificial Sequence: Synthetic oligonucleotide
  Target: LAMA2; (+) strand; PAM type: NRG; PAM sequence: AAG
gttataatttttttttccta

SEQ ID NO: 180348 - DNA, 20 bp, Artificial Sequence
  Description of Artificial Sequence: Synthetic oligonucleotide
  Target: LAMA2; (+) strand; PAM type: NRG; PAM sequence: GAG
tataatttttttttcctaaa

SEQ ID NO: 180349 - DNA, 20 bp, Artificial Sequence
  Description of Artificial Sequence: Synthetic oligonucleotide
  Target: LAMA2; (+) strand; PAM type: NRG; PAM sequence: GAG
taatttttttttcctaaaga

SEQ ID NO: 180350 - DNA, 20 bp, Artificial Sequence
  Description of Artificial Sequence: Synthetic oligonucleotide
  Target: LAMA2; (+) strand; PAM type: NRG; PAM sequence: AAG
gagctttccccaaactgatt

SEQ ID NO: 180351 - DNA, 20 bp, Artificial Sequence
  Description of Artificial Sequence: Synthetic oligonucleotide
  Target: LAMA2; (+) strand; PAM type: NRG; PAM sequence: CAG
tccccaaactgattaagttt

SEQ ID NO: 180352 - DNA, 20 bp, Artificial Sequence
  Description of Artificial Sequence: Synthetic oligonucleotide
  Target: LAMA2; (+) strand; PAM type: NRG; PAM sequence: AGG
ccccaaactgattaagtttc

SEQ ID NO: 180353 - DNA, 20 bp, Artificial Sequence
  Description of Artificial Sequence: Synthetic oligonucleotide
  Target: LAMA2; (+) strand; PAM type: NRG; PAM sequence: GAG
attaagtttcaggtcttgct

SEQ ID NO: 180354 - DNA, 20 bp, Artificial Sequence
  Description of Artificial Sequence: Synthetic oligonucleotide
  Target: LAMA2; (+) strand; PAM type: NRG; PAM sequence: TAG
atttatgtttataacaaaat

SEQ ID NO: 180355 - DNA, 20 bp, Artificial Sequence
  Description of Artificial Sequence: Synthetic oligonucleotide
  Target: LAMA2; (+) strand; PAM type: NRG; PAM sequence: CAG
ttataacaaaattagaaccc

SEQ ID NO: 180356 - DNA, 20 bp, Artificial Sequence
  Description of Artificial Sequence: Synthetic oligonucleotide
  Target: LAMA2; (+) strand; PAM type: NRG; PAM sequence: TAG
acaaaattagaaccccagcc

SEQ ID NO: 180357 - DNA, 20 bp, Artificial Sequence
  Description of Artificial Sequence: Synthetic oligonucleotide
  Target: LAMA2; (+) strand; PAM type: NRG; PAM sequence: AGG
caaaattagaaccccagcct

SEQ ID NO: 180358 - DNA, 20 bp, Artificial Sequence
  Description of Artificial Sequence: Synthetic oligonucleotide
  Target: LAMA2; (+) strand; PAM type: NRG; PAM sequence: CAG
agcctaggttttatctctta

SEQ ID NO: 180359 - DNA, 20 bp, Artificial Sequence
  Description of Artificial Sequence: Synthetic oligonucleotide
  Target: LAMA2; (+) strand; PAM type: NRG; PAM sequence: AGG
gcctaggttttatctcttac

SEQ ID NO: 180360 - DNA, 20 bp, Artificial Sequence
  Description of Artificial Sequence: Synthetic oligonucleotide
  Target: LAMA2; (+) strand; PAM type: NRG; PAM sequence: TAG
atttttttttaattgacaca

SEQ ID NO: 180361 - DNA, 20 bp, Artificial Sequence
  Description of Artificial Sequence: Synthetic oligonucleotide
  Target: LAMA2; (+) strand; PAM type: NRG; PAM sequence: AGG
tttttttttaattgacacat

SEQ ID NO: 180362 - DNA, 20 bp, Artificial Sequence
  Description of Artificial Sequence: Synthetic oligonucleotide
  Target: LAMA2; (+) strand; PAM type: NRG; PAM sequence: AAG
attgacacataggatcctac

SEQ ID NO: 180363 - DNA, 20 bp, Artificial Sequence
  Description of Artificial Sequence: Synthetic oligonucleotide
  Target: LAMA2; (+) strand; PAM type: NRG; PAM sequence: TGG
gatcctacaagtgcttcaac

SEQ ID NO: 180364 - DNA, 20 bp, Artificial Sequence
  Description of Artificial Sequence: Synthetic oligonucleotide
  Target: LAMA2; (+) strand; PAM type: NRG; PAM sequence: TGG
gtgcttcaactggaaaccta

SEQ ID NO: 180365 - DNA, 20 bp, Artificial Sequence
  Description of Artificial Sequence: Synthetic oligonucleotide
  Target: LAMA2; (+) strand; PAM type: NRG; PAM sequence: GGG
tgcttcaactggaaacctat

SEQ ID NO: 180366 - DNA, 20 bp, Artificial Sequence
  Description of Artificial Sequence: Synthetic oligonucleotide
  Target: LAMA2; (+) strand; PAM type: NRG; PAM sequence: AAG
ggatttaatgattctgcttc

SEQ ID NO: 180367 - DNA, 20 bp, Artificial Sequence
  Description of Artificial Sequence: Synthetic oligonucleotide
  Target: LAMA2; (+) strand; PAM type: NRG; PAM sequence: GAG
atttaatgattctgcttcaa

SEQ ID NO: 180368 - DNA, 20 bp, Artificial Sequence
  Description of Artificial Sequence: Synthetic oligonucleotide
  Target: LAMA2; (+) strand; PAM type: NRG; PAM sequence: GAG
ttaatgattctgcttcaaga

SEQ ID NO: 180369 - DNA, 20 bp, Artificial Sequence
  Description of Artificial Sequence: Synthetic oligonucleotide
  Target: LAMA2; (+) strand; PAM type: NRG; PAM sequence: AAG
atgattctgcttcaagagag

SEQ ID NO: 180370 - DNA, 20 bp, Artificial Sequence
  Description of Artificial Sequence: Synthetic oligonucleotide
  Target: LAMA2; (+) strand; PAM type: NRG; PAM sequence: AGG
tgattctgcttcaagagaga

SEQ ID NO: 180371 - DNA, 20 bp, Artificial Sequence
  Description of Artificial Sequence: Synthetic oligonucleotide
  Target: LAMA2; (+) strand; PAM type: NRG; PAM sequence: GAG
attctgcttcaagagagaag

SEQ ID NO: 180372 - DNA, 20 bp, Artificial Sequence
  Description of Artificial Sequence: Synthetic oligonucleotide
  Target: LAMA2; (+) strand; PAM type: NRG; PAM sequence: AAG
cttcaagagagaaggagaac

SEQ ID NO: 180373 - DNA, 20 bp, Artificial Sequence
  Description of Artificial Sequence: Synthetic oligonucleotide
  Target: LAMA2; (+) strand; PAM type: NRG; PAM sequence: AGG
ttcaagagagaaggagaaca

SEQ ID NO: 180374 - DNA, 20 bp, Artificial Sequence
  Description of Artificial Sequence: Synthetic oligonucleotide
  Target: LAMA2; (+) strand; PAM type: NRG; PAM sequence: GGG
tcaagagagaaggagaacaa

SEQ ID NO: 180375 - DNA, 20 bp, Artificial Sequence
  Description of Artificial Sequence: Synthetic oligonucleotide
  Target: LAMA2; (+) strand; PAM type: NRG; PAM sequence: GGG
caagagagaaggagaacaag

SEQ ID NO: 180376 - DNA, 20 bp, Artificial Sequence
  Description of Artificial Sequence: Synthetic oligonucleotide
  Target: LAMA2; (+) strand; PAM type: NRG; PAM sequence: GAG
gagaaggagaacaaggggcc

SEQ ID NO: 180377 - DNA, 20 bp, Artificial Sequence
  Description of Artificial Sequence: Synthetic oligonucleotide
  Target: LAMA2; (+) strand; PAM type: NRG; PAM sequence: TAG
aggagaacaaggggccgaga

SEQ ID NO: 180378 - DNA, 20 bp, Artificial Sequence
  Description of Artificial Sequence: Synthetic oligonucleotide
  Target: LAMA2; (+) strand; PAM type: NRG; PAM sequence: CAG
aacaaggggccgagatagtc

SEQ ID NO: 180379 - DNA, 20 bp, Artificial Sequence
  Description of Artificial Sequence: Synthetic oligonucleotide
  Target: LAMA2; (+) strand; PAM type: NRG; PAM sequence: AGG
acaaggggccgagatagtcc

SEQ ID NO: 180380 - DNA, 20 bp, Artificial Sequence
  Description of Artificial Sequence: Synthetic oligonucleotide
  Target: LAMA2; (+) strand; PAM type: NRG; PAM sequence: GAG
aaggggccgagatagtccag

SEQ ID NO: 180381 - DNA, 20 bp, Artificial Sequence
  Description of Artificial Sequence: Synthetic oligonucleotide
  Target: LAMA2; (+) strand; PAM type: NRG; PAM sequence: AGG
aggggccgagatagtccagg

SEQ ID NO: 180382 - DNA, 20 bp, Artificial Sequence
  Description of Artificial Sequence: Synthetic oligonucleotide
  Target: LAMA2; (+) strand; PAM type: NRG; PAM sequence: AAG
gccgagatagtccaggagga

SEQ ID NO: 180383 - DNA, 20 bp, Artificial Sequence
  Description of Artificial Sequence: Synthetic oligonucleotide
  Target: LAMA2; (+) strand; PAM type: NRG; PAM sequence: AAG
taatacatgacctcaattat

SEQ ID NO: 180384 - DNA, 20 bp, Artificial Sequence
  Description of Artificial Sequence: Synthetic oligonucleotide
  Target: LAMA2; (+) strand; PAM type: NRG; PAM sequence: TAG
acatgacctcaattataaga

SEQ ID NO: 180385 - DNA, 20 bp, Artificial Sequence
  Description of Artificial Sequence: Synthetic oligonucleotide
  Target: LAMA2; (+) strand; PAM type: NRG; PAM sequence: GAG
atgacctcaattataagata

SEQ ID NO: 180386 - DNA, 20 bp, Artificial Sequence
  Description of Artificial Sequence: Synthetic oligonucleotide
  Target: LAMA2; (+) strand; PAM type: NRG; PAM sequence: AGG
tgacctcaattataagatag

SEQ ID NO: 180387 - DNA, 20 bp, Artificial Sequence
  Description of Artificial Sequence: Synthetic oligonucleotide
  Target: LAMA2; (+) strand; PAM type: NRG; PAM sequence: GGG
gacctcaattataagataga

SEQ ID NO: 180388 - DNA, 20 bp, Artificial Sequence
  Description of Artificial Sequence: Synthetic oligonucleotide
  Target: LAMA2; (+) strand; PAM type: NRG; PAM sequence: TAG
ctcaattataagatagaggg

SEQ ID NO: 180389 - DNA, 20 bp, Artificial Sequence
  Description of Artificial Sequence: Synthetic oligonucleotide
  Target: LAMA2; (+) strand; PAM type: NRG; PAM sequence: TAG
aagatagagggtagaatgaa

SEQ ID NO: 180390 - DNA, 20 bp, Artificial Sequence
  Description of Artificial Sequence: Synthetic oligonucleotide
  Target: LAMA2; (+) strand; PAM type: NRG; PAM sequence: AGG
agatagagggtagaatgaat

SEQ ID NO: 180391 - DNA, 20 bp, Artificial Sequence
  Description of Artificial Sequence: Synthetic oligonucleotide
  Target: LAMA2; (+) strand; PAM type: NRG; PAM sequence: AAG
atttaacatcctatcatact

SEQ ID NO: 180392 - DNA, 20 bp, Artificial Sequence
  Description of Artificial Sequence: Synthetic oligonucleotide
  Target: LAMA2; (+) strand; PAM type: NRG; PAM sequence: TAG
cctatcatactaagcatgtg

SEQ ID NO: 180393 - DNA, 20 bp, Artificial Sequence
  Description of Artificial Sequence: Synthetic oligonucleotide
  Target: LAMA2; (+) strand; PAM type: NRG; PAM sequence: GAG
tatcatactaagcatgtgta

SEQ ID NO: 180394 - DNA, 20 bp, Artificial Sequence
  Description of Artificial Sequence: Synthetic oligonucleotide
  Target: LAMA2; (+) strand; PAM type: NRG; PAM sequence: CAG
cttttatataaaaatgaata

SEQ ID NO: 180395 - DNA, 20 bp, Artificial Sequence
  Description of Artificial Sequence: Synthetic oligonucleotide
  Target: LAMA2; (+) strand; PAM type: NRG; PAM sequence: AGG
ttttatataaaaatgaatac

SEQ ID NO: 180396 - DNA, 20 bp, Artificial Sequence
  Description of Artificial Sequence: Synthetic oligonucleotide
  Target: LAMA2; (+) strand; PAM type: NRG; PAM sequence: TAG
aatacaggatataaaatatt

SEQ ID NO: 180397 - DNA, 20 bp, Artificial Sequence
  Description of Artificial Sequence: Synthetic oligonucleotide
  Target: LAMA2; (+) strand; PAM type: NRG; PAM sequence: AAG
gatataaaatatttagctat

SEQ ID NO: 180398 - DNA, 20 bp, Artificial Sequence
  Description of Artificial Sequence: Synthetic oligonucleotide
  Target: LAMA2; (+) strand; PAM type: NRG; PAM sequence: TAG
ataaaatatttagctataag

SEQ ID NO: 180399 - DNA, 20 bp, Artificial Sequence
  Description of Artificial Sequence: Synthetic oligonucleotide
  Target: LAMA2; (+) strand; PAM type: NRG; PAM sequence: GAG
aaaatatttagctataagta

SEQ ID NO: 180400 - DNA, 20 bp, Artificial Sequence
  Description of Artificial Sequence: Synthetic oligonucleotide
  Target: LAMA2; (+) strand; PAM type: NRG; PAM sequence: AGG
aaatatttagctataagtag

SEQ ID NO: 180401 - DNA, 20 bp, Artificial Sequence
  Description of Artificial Sequence: Synthetic oligonucleotide
  Target: LAMA2; (+) strand; PAM type: NRG; PAM sequence: CAG
gctataagtagaggatttct

SEQ ID NO: 180402 - DNA, 20 bp, Artificial Sequence
  Description of Artificial Sequence: Synthetic oligonucleotide
  Target: LAMA2; (+) strand; PAM type: NRG; PAM sequence: TAG
atttctcagcataaaaatct

SEQ ID NO: 180403 - DNA, 20 bp, Artificial Sequence
  Description of Artificial Sequence: Synthetic oligonucleotide
  Target: LAMA2; (+) strand; PAM type: NRG; PAM sequence: GAG
ttctcagcataaaaatctta

SEQ ID NO: 180404 - DNA, 20 bp, Artificial Sequence
  Description of Artificial Sequence: Synthetic oligonucleotide
  Target: LAMA2; (+) strand; PAM type: NRG; PAM sequence: AAG
ttagagcccacttatcaccc

SEQ ID NO: 180405 - DNA, 20 bp, Artificial Sequence
  Description of Artificial Sequence: Synthetic oligonucleotide
  Target: LAMA2; (+) strand; PAM type: NRG; PAM sequence: AAG
ccacttatcacccaagccta

SEQ ID NO: 180406 - DNA, 20 bp, Artificial Sequence
  Description of Artificial Sequence: Synthetic oligonucleotide
  Target: LAMA2; (+) strand; PAM type: NRG; PAM sequence: AAG
acatactttaaatacctgca

SEQ ID NO: 180407 - DNA, 20 bp, Artificial Sequence
  Description of Artificial Sequence: Synthetic oligonucleotide
  Target: LAMA2; (+) strand; PAM type: NRG; PAM sequence: CAG
gcaaagttaacatgtcataa

SEQ ID NO: 180408 - DNA, 20 bp, Artificial Sequence
  Description of Artificial Sequence: Synthetic oligonucleotide
  Target: LAMA2; (+) strand; PAM type: NRG; PAM sequence: AAG
acagcaactcaaaaaccatt

SEQ ID NO: 180409 - DNA, 20 bp, Artificial Sequence
  Description of Artificial Sequence: Synthetic oligonucleotide
  Target: LAMA2; (+) strand; PAM type: NRG; PAM sequence: AAG
ctcaaaaaccattaagtgct

SEQ ID NO: 180410 - DNA, 20 bp, Artificial Sequence
  Description of Artificial Sequence: Synthetic oligonucleotide
  Target: LAMA2; (+) strand; PAM type: NRG; PAM sequence: AGG
tcaaaaaccattaagtgcta

SEQ ID NO: 180411 - DNA, 20 bp, Artificial Sequence
  Description of Artificial Sequence: Synthetic oligonucleotide
  Target: LAMA2; (+) strand; PAM type: NRG; PAM sequence: GAG
aaaaaccattaagtgctaag

SEQ ID NO: 180412 - DNA, 20 bp, Artificial Sequence
  Description of Artificial Sequence: Synthetic oligonucleotide
  Target: LAMA2; (+) strand; PAM type: NRG; PAM sequence: AAG
tttgtgttattttccattta

SEQ ID NO: 180413 - DNA, 20 bp, Artificial Sequence
  Description of Artificial Sequence: Synthetic oligonucleotide
  Target: LAMA2; (+) strand; PAM type: NRG; PAM sequence: AGG
ttgtgttattttccatttaa

SEQ ID NO: 180414 - DNA, 20 bp, Artificial Sequence
  Description of Artificial Sequence: Synthetic oligonucleotide
  Target: LAMA2; (+) strand; PAM type: NRG; PAM sequence: TAG
aaaggatatacatacgtttc

SEQ ID NO: 180415 - DNA, 20 bp, Artificial Sequence
  Description of Artificial Sequence: Synthetic oligonucleotide
  Target: LAMA2; (+) strand; PAM type: NRG; PAM sequence: AGG
aaggatatacatacgtttct

SEQ ID NO: 180416 - DNA, 20 bp, Artificial Sequence
  Description of Artificial Sequence: Synthetic oligonucleotide
  Target: LAMA2; (+) strand; PAM type: NRG; PAM sequence: TAG
cgtttctaggacccaaatcc

SEQ ID NO: 180417 - DNA, 20 bp, Artificial Sequence
  Description of Artificial Sequence: Synthetic oligonucleotide
  Target: LAMA2; (+) strand; PAM type: NRG; PAM sequence: AAG
ctaggacccaaatcctagca

SEQ ID NO: 180418 - DNA, 20 bp, Artificial Sequence
  Description of Artificial Sequence: Synthetic oligonucleotide
  Target: LAMA2; (+) strand; PAM type: NRG; PAM sequence: TAG
catttctttctctacatctc

SEQ ID NO: 180419 - DNA, 20 bp, Artificial Sequence
  Description of Artificial Sequence: Synthetic oligonucleotide
  Target: LAMA2; (+) strand; PAM type: NRG; PAM sequence: GAG
tttctttctctacatctcta

SEQ ID NO: 180420 - DNA, 20 bp, Artificial Sequence
  Description of Artificial Sequence: Synthetic oligonucleotide
  Target: LAMA2; (+) strand; PAM type: NRG; PAM sequence: TAG
tctacatctctagagtttca

SEQ ID NO: 180421 - DNA, 20 bp, Artificial Sequence
  Description of Artificial Sequence: Synthetic oligonucleotide
  Target: LAMA2; (+) strand; PAM type: NRG; PAM sequence: AAG
acatctctagagtttcatag

SEQ ID NO: 180422 - DNA, 20 bp, Artificial Sequence
  Description of Artificial Sequence: Synthetic oligonucleotide
  Target: LAMA2; (+) strand; PAM type: NRG; PAM sequence: AAG
ctctagagtttcatagaaga

SEQ ID NO: 180423 - DNA, 20 bp, Artificial Sequence
  Description of Artificial Sequence: Synthetic oligonucleotide
  Target: LAMA2; (+) strand; PAM type: NRG; PAM sequence: TAG
tagagtttcatagaagaaag

SEQ ID NO: 180424 - DNA, 20 bp, Artificial Sequence
  Description of Artificial Sequence: Synthetic oligonucleotide
  Target: LAMA2; (+) strand; PAM type: NRG; PAM sequence: AAG
ccaaaatgttatccctctaa

SEQ ID NO: 180425 - DNA, 20 bp, Artificial Sequence
  Description of Artificial Sequence: Synthetic oligonucleotide
  Target: LAMA2; (+) strand; PAM type: NRG; PAM sequence: TGG
tttgtttctttttgacatca

SEQ ID NO: 180426 - DNA, 20 bp, Artificial Sequence
  Description of Artificial Sequence: Synthetic oligonucleotide
  Target: LAMA2; (+) strand; PAM type: NRG; PAM sequence: GAG
ggacttgtcaacatgaaatt

SEQ ID NO: 180427 - DNA, 20 bp, Artificial Sequence
  Description of Artificial Sequence: Synthetic oligonucleotide
  Target: LAMA2; (+) strand; PAM type: NRG; PAM sequence: AGG
gacttgtcaacatgaaattg

SEQ ID NO: 180428 - DNA, 20 bp, Artificial Sequence
  Description of Artificial Sequence: Synthetic oligonucleotide
  Target: LAMA2; (+) strand; PAM type: NRG; PAM sequence: TAG
tgtcaacatgaaattgagga

SEQ ID NO: 180429 - DNA, 20 bp, Artificial Sequence
  Description of Artificial Sequence: Synthetic oligonucleotide
  Target: LAMA2; (+) strand; PAM type: NRG; PAM sequence: AAG
tgaaattgaggatagtttga

SEQ ID NO: 180430 - DNA, 20 bp, Artificial Sequence
  Description of Artificial Sequence: Synthetic oligonucleotide
  Target: LAMA2; (+) strand; PAM type: NRG; PAM sequence: TGG
gacccattcattgtttaaaa

SEQ ID NO: 180431 - DNA, 20 bp, Artificial Sequence
  Description of Artificial Sequence: Synthetic oligonucleotide
  Target: LAMA2; (+) strand; PAM type: NRG; PAM sequence: TGG
atcttaaacaaaatttaaca

SEQ ID NO: 180432 - DNA, 20 bp, Artificial Sequence
  Description of Artificial Sequence: Synthetic oligonucleotide
  Target: LAMA2; (+) strand; PAM type: NRG; PAM sequence: AAG
ttaaacaaaatttaacatgg

SEQ ID NO: 180433 - DNA, 20 bp, Artificial Sequence
  Description of Artificial Sequence: Synthetic oligonucleotide
  Target: LAMA2; (+) strand; PAM type: NRG; PAM sequence: AGG
taaacaaaatttaacatgga

SEQ ID NO: 180434 - DNA, 20 bp, Artificial Sequence
  Description of Artificial Sequence: Synthetic oligonucleotide
  Target: LAMA2; (+) strand; PAM type: NRG; PAM sequence: AAG
aaaattctttcaatacatga

SEQ ID NO: 180435 - DNA, 20 bp, Artificial Sequence
  Description of Artificial Sequence: Synthetic oligonucleotide
  Target: LAMA2; (+) strand; PAM type: NRG; PAM sequence: CAG
ttctttcaatacatgaaaga

SEQ ID NO: 180436 - DNA, 20 bp, Artificial Sequence
  Description of Artificial Sequence: Synthetic oligonucleotide
  Target: LAMA2; (+) strand; PAM type: NRG; PAM sequence: AAG
tcaatacatgaaagacagtg

SEQ ID NO: 180437 - DNA, 20 bp, Artificial Sequence
  Description of Artificial Sequence: Synthetic oligonucleotide
  Target: LAMA2; (+) strand; PAM type: NRG; PAM sequence: AAG
accaacaccaacttttccct

SEQ ID NO: 180438 - DNA, 20 bp, Artificial Sequence
  Description of Artificial Sequence: Synthetic oligonucleotide
  Target: LAMA2; (+) strand; PAM type: NRG; PAM sequence: TGG
cttttccctaagcgtttctt

SEQ ID NO: 180439 - DNA, 20 bp, Artificial Sequence
  Description of Artificial Sequence: Synthetic oligonucleotide
  Target: LAMA2; (+) strand; PAM type: NRG; PAM sequence: AAG
cgtttctttggtaaacttct

SEQ ID NO: 180440 - DNA, 20 bp, Artificial Sequence
  Description of Artificial Sequence: Synthetic oligonucleotide
  Target: LAMA2; (+) strand; PAM type: NRG; PAM sequence: TAG
ttctttggtaaacttctaag

SEQ ID NO: 180441 - DNA, 20 bp, Artificial Sequence
  Description of Artificial Sequence: Synthetic oligonucleotide
  Target: LAMA2; (+) strand; PAM type: NRG; PAM sequence: AGG
tctttggtaaacttctaagt

SEQ ID NO: 180442 - DNA, 20 bp, Artificial Sequence
  Description of Artificial Sequence: Synthetic oligonucleotide
  Target: LAMA2; (+) strand; PAM type: NRG; PAM sequence: AAG
cttctaagtaggattttcaa

SEQ ID NO: 180443 - DNA, 20 bp, Artificial Sequence
  Description of Artificial Sequence: Synthetic oligonucleotide
  Target: LAMA2; (+) strand; PAM type: NRG; PAM sequence: AAG
ttatcaacaacaaaacatct

SEQ ID NO: 180444 - DNA, 20 bp, Artificial Sequence
  Description of Artificial Sequence: Synthetic oligonucleotide
  Target: LAMA2; (+) strand; PAM type: NRG; PAM sequence: AGG
tatcaacaacaaaacatcta

SEQ ID NO: 180445 - DNA, 20 bp, Artificial Sequence
  Description of Artificial Sequence: Synthetic oligonucleotide
  Target: LAMA2; (+) strand; PAM type: NRG; PAM sequence: CAG
aaggcatttaaatatccatt

SEQ ID NO: 180446 - DNA, 20 bp, Artificial Sequence
  Description of Artificial Sequence: Synthetic oligonucleotide
  Target: LAMA2; (+) strand; PAM type: NRG; PAM sequence: CAG
gcatttaaatatccattcag

SEQ ID NO: 180447 - DNA, 20 bp, Artificial Sequence
  Description of Artificial Sequence: Synthetic oligonucleotide
  Target: LAMA2; (+) strand; PAM type: NRG; PAM sequence: AAG
cactaattatcaattctgca

SEQ ID NO: 180448 - DNA, 20 bp, Artificial Sequence
  Description of Artificial Sequence: Synthetic oligonucleotide
  Target: LAMA2; (+) strand; PAM type: NRG; PAM sequence: AAG
attttgcacttcaacacata

SEQ ID NO: 180449 - DNA, 20 bp, Artificial Sequence
  Description of Artificial Sequence: Synthetic oligonucleotide
  Target: LAMA2; (+) strand; PAM type: NRG; PAM sequence: AAG
ttatgctaatttatgattat

SEQ ID NO: 180450 - DNA, 20 bp, Artificial Sequence
  Description of Artificial Sequence: Synthetic oligonucleotide
  Target: LAMA2; (+) strand; PAM type: NRG; PAM sequence: GAG
atgctaatttatgattataa

SEQ ID NO: 180451 - DNA, 20 bp, Artificial Sequence
  Description of Artificial Sequence: Synthetic oligonucleotide
  Target: LAMA2; (+) strand; PAM type: NRG; PAM sequence: TAG
agagtattcctatgtatacg

SEQ ID NO: 180452 - DNA, 20 bp, Artificial Sequence
  Description of Artificial Sequence: Synthetic oligonucleotide
  Target: LAMA2; (+) strand; PAM type: NRG; PAM sequence: AGG
gagtattcctatgtatacgt

SEQ ID NO: 180453 - DNA, 20 bp, Artificial Sequence
  Description of Artificial Sequence: Synthetic oligonucleotide
  Target: LAMA2; (+) strand; PAM type: NRG; PAM sequence: GGG
agtattcctatgtatacgta

SEQ ID NO: 180454 - DNA, 20 bp, Artificial Sequence
  Description of Artificial Sequence: Synthetic oligonucleotide
  Target: LAMA2; (+) strand; PAM type: NRG; PAM sequence: TAG
tgtatacgtagggtgttttg

SEQ ID NO: 180455 - DNA, 20 bp, Artificial Sequence
  Description of Artificial Sequence: Synthetic oligonucleotide
  Target: LAMA2; (+) strand; PAM type: NRG; PAM sequence: AGG
gtatacgtagggtgttttgt

SEQ ID NO: 180456 - DNA, 20 bp, Artificial Sequence
  Description of Artificial Sequence: Synthetic oligonucleotide
  Target: LAMA2; (+) strand; PAM type: NRG; PAM sequence: CAG
gtagggtgttttgtaggttg

SEQ ID NO: 180457 - DNA, 20 bp, Artificial Sequence
  Description of Artificial Sequence: Synthetic oligonucleotide
  Target: LAMA2; (+) strand; PAM type: NRG; PAM sequence: GAG
agggtgttttgtaggttgca

SEQ ID NO: 180458 - DNA, 20 bp, Artificial Sequence
  Description of Artificial Sequence: Synthetic oligonucleotide
  Target: LAMA2; (+) strand; PAM type: NRG; PAM sequence: TAG
tttacaacttctcctgatgc

SEQ ID NO: 180459 - DNA, 20 bp, Artificial Sequence
  Description of Artificial Sequence: Synthetic oligonucleotide
  Target: LAMA2; (+) strand; PAM type: NRG; PAM sequence: CAG
tcctgatgctagaatgaata

SEQ ID NO: 180460 - DNA, 20 bp, Artificial Sequence
  Description of Artificial Sequence: Synthetic oligonucleotide
  Target: LAMA2; (+) strand; PAM type: NRG; PAM sequence: TAG
atgctagaatgaatacagcc

SEQ ID NO: 180461 - DNA, 20 bp, Artificial Sequence
  Description of Artificial Sequence: Synthetic oligonucleotide
  Target: LAMA2; (+) strand; PAM type: NRG; PAM sequence: TAG
gaatgaatacagcctagtcc

SEQ ID NO: 180462 - DNA, 20 bp, Artificial Sequence
  Description of Artificial Sequence: Synthetic oligonucleotide
  Target: LAMA2; (+) strand; PAM type: NRG; PAM sequence: AAG
agcctagtcctagccatgaa

SEQ ID NO: 180463 - DNA, 20 bp, Artificial Sequence
  Description of Artificial Sequence: Synthetic oligonucleotide
  Target: LAMA2; (+) strand; PAM type: NRG; PAM sequence: CAG
tagccatgaaaagacatcac

SEQ ID NO: 180464 - DNA, 20 bp, Artificial Sequence
  Description of Artificial Sequence: Synthetic oligonucleotide
  Target: LAMA2; (+) strand; PAM type: NRG; PAM sequence: AGG
agccatgaaaagacatcacc

SEQ ID NO: 180465 - DNA, 20 bp, Artificial Sequence
  Description of Artificial Sequence: Synthetic oligonucleotide
  Target: LAMA2; (+) strand; PAM type: NRG; PAM sequence: AAG
catgaaaagacatcaccagg

SEQ ID NO: 180466 - DNA, 20 bp, Artificial Sequence
  Description of Artificial Sequence: Synthetic oligonucleotide
  Target: LAMA2; (+) strand; PAM type: NRG; PAM sequence: AGG
atgaaaagacatcaccagga

SEQ ID NO: 180467 - DNA, 20 bp, Artificial Sequence
  Description of Artificial Sequence: Synthetic oligonucleotide
  Target: LAMA2; (+) strand; PAM type: NRG; PAM sequence: GGG
tgaaaagacatcaccaggaa

SEQ ID NO: 180468 - DNA, 20 bp, Artificial Sequence
  Description of Artificial Sequence: Synthetic oligonucleotide
  Target: LAMA2; (+) strand; PAM type: NRG; PAM sequence: GAG
aaaagacatcaccaggaagg

SEQ ID NO: 180469 - DNA, 20 bp, Artificial Sequence
  Description of Artificial Sequence: Synthetic oligonucleotide
  Target: LAMA2; (+) strand; PAM type: NRG; PAM sequence: AGG
aaagacatcaccaggaaggg

SEQ ID NO: 180470 - DNA, 20 bp, Artificial Sequence
  Description of Artificial Sequence: Synthetic oligonucleotide
  Target: LAMA2; (+) strand; PAM type: NRG; PAM sequence: TAG
ggaaaaaacaaatactaaaa

SEQ ID NO: 180471 - DNA, 20 bp, Artificial Sequence
  Description of Artificial Sequence: Synthetic oligonucleotide
  Target: LAMA2; (+) strand; PAM type: NRG; PAM sequence: CAG
tactaaaatagttcaaatat

SEQ ID NO: 180472 - DNA, 20 bp, Artificial Sequence
  Description of Artificial Sequence: Synthetic oligonucleotide
  Target: LAMA2; (+) strand; PAM type: NRG; PAM sequence: AGG
actaaaatagttcaaatatc

SEQ ID NO: 180473 - DNA, 20 bp, Artificial Sequence
  Description of Artificial Sequence: Synthetic oligonucleotide
  Target: LAMA2; (+) strand; PAM type: NRG; PAM sequence: AAG
tcaaatatcaggcataataa

SEQ ID NO: 180474 - DNA, 20 bp, Artificial Sequence
  Description of Artificial Sequence: Synthetic oligonucleotide
  Target: LAMA2; (+) strand; PAM type: NRG; PAM sequence: AAG
ataataaaagtccctttaaa

SEQ ID NO: 180475 - DNA, 20 bp, Artificial Sequence
  Description of Artificial Sequence: Synthetic oligonucleotide
  Target: LAMA2; (+) strand; PAM type: NRG; PAM sequence: AGG
taataaaagtccctttaaaa

SEQ ID NO: 180476 - DNA, 20 bp, Artificial Sequence
  Description of Artificial Sequence: Synthetic oligonucleotide
  Target: LAMA2; (+) strand; PAM type: NRG; PAM sequence: TGG
tccctttaaaaaggcacatt

SEQ ID NO: 180477 - DNA, 20 bp, Artificial Sequence
  Description of Artificial Sequence: Synthetic oligonucleotide
  Target: LAMA2; (+) strand; PAM type: NRG; PAM sequence: GAG
cctttaaaaaggcacatttg

SEQ ID NO: 180478 - DNA, 20 bp, Artificial Sequence
  Description of Artificial Sequence: Synthetic oligonucleotide
  Target: LAMA2; (+) strand; PAM type: NRG; PAM sequence: CAG
tatactacaattacccacat

SEQ ID NO: 180479 - DNA, 20 bp, Artificial Sequence
  Description of Artificial Sequence: Synthetic oligonucleotide
  Target: LAMA2; (+) strand; PAM type: NRG; PAM sequence: AAG
acaattacccacatcagatt

SEQ ID NO: 180480 - DNA, 20 bp, Artificial Sequence
  Description of Artificial Sequence: Synthetic oligonucleotide
  Target: LAMA2; (+) strand; PAM type: NRG; PAM sequence: AGG
caattacccacatcagatta

SEQ ID NO: 180481 - DNA, 20 bp, Artificial Sequence
  Description of Artificial Sequence: Synthetic oligonucleotide
  Target: LAMA2; (+) strand; PAM type: NRG; PAM sequence: GGG
aattacccacatcagattaa

SEQ ID NO: 180482 - DNA, 20 bp, Artificial Sequence
  Description of Artificial Sequence: Synthetic oligonucleotide
  Target: LAMA2; (+) strand; PAM type: NRG; PAM sequence: CAG
gggcatcatgatctgcttca

SEQ ID NO: 180483 - DNA, 20 bp, Artificial Sequence
  Description of Artificial Sequence: Synthetic oligonucleotide
  Target: LAMA2; (+) strand; PAM type: NRG; PAM sequence: GAG
gcatcatgatctgcttcaca

SEQ ID NO: 180484 - DNA, 20 bp, Artificial Sequence
  Description of Artificial Sequence: Synthetic oligonucleotide
  Target: LAMA2; (+) strand; PAM type: NRG; PAM sequence: AGG
catcatgatctgcttcacag

SEQ ID NO: 180485 - DNA, 20 bp, Artificial Sequence
  Description of Artificial Sequence: Synthetic oligonucleotide
  Target: LAMA2; (+) strand; PAM type: NRG; PAM sequence: GAG
tcatgatctgcttcacagag

SEQ ID NO: 180486 - DNA, 20 bp, Artificial Sequence
  Description of Artificial Sequence: Synthetic oligonucleotide
  Target: LAMA2; (+) strand; PAM type: NRG; PAM sequence: AGG
catgatctgcttcacagagg

SEQ ID NO: 180487 - DNA, 20 bp, Artificial Sequence
  Description of Artificial Sequence: Synthetic oligonucleotide
  Target: LAMA2; (+) strand; PAM type: NRG; PAM sequence: TGG
agaggaggtgacatttgaaa

SEQ ID NO: 180488 - DNA, 20 bp, Artificial Sequence
  Description of Artificial Sequence: Synthetic oligonucleotide
  Target: LAMA2; (+) strand; PAM type: NRG; PAM sequence: GAG
atttgaaatggtcttgacct

SEQ ID NO: 180489 - DNA, 20 bp, Artificial Sequence
  Description of Artificial Sequence: Synthetic oligonucleotide
  Target: LAMA2; (+) strand; PAM type: NRG; PAM sequence: AGG
tttgaaatggtcttgacctg

SEQ ID NO: 180490 - DNA, 20 bp, Artificial Sequence
  Description of Artificial Sequence: Synthetic oligonucleotide
  Target: LAMA2; (+) strand; PAM type: NRG; PAM sequence: AAG
aaatggtcttgacctgaggt

SEQ ID NO: 180491 - DNA, 20 bp, Artificial Sequence
  Description of Artificial Sequence: Synthetic oligonucleotide
  Target: LAMA2; (+) strand; PAM type: NRG; PAM sequence: GAG
atggtcttgacctgaggtaa

SEQ ID NO: 180492 - DNA, 20 bp, Artificial Sequence
  Description of Artificial Sequence: Synthetic oligonucleotide
  Target: LAMA2; (+) strand; PAM type: NRG; PAM sequence: AAG
acctgaggtaagagtccaaa

SEQ ID NO: 180493 - DNA, 20 bp, Artificial Sequence
  Description of Artificial Sequence: Synthetic oligonucleotide
  Target: LAMA2; (+) strand; PAM type: NRG; PAM sequence: GAG
ctgaggtaagagtccaaaaa

SEQ ID NO: 180494 - DNA, 20 bp, Artificial Sequence
  Description of Artificial Sequence: Synthetic oligonucleotide
  Target: LAMA2; (+) strand; PAM type: NRG; PAM sequence: AGG
tgaggtaagagtccaaaaag

SEQ ID NO: 180495 - DNA, 20 bp, Artificial Sequence
  Description of Artificial Sequence: Synthetic oligonucleotide
  Target: LAMA2; (+) strand; PAM type: NRG; PAM sequence: GAG
aggtaagagtccaaaaagag

SEQ ID NO: 180496 - DNA, 20 bp, Artificial Sequence
  Description of Artificial Sequence: Synthetic oligonucleotide
  Target: LAMA2; (+) strand; PAM type: NRG; PAM sequence: TAG
aagagtccaaaaagaggaga

SEQ ID NO: 180497 - DNA, 20 bp, Artificial Sequence
  Description of Artificial Sequence: Synthetic oligonucleotide
  Target: LAMA2; (+) strand; PAM type: NRG; PAM sequence: CAG
agtccaaaaagaggagatag

SEQ ID NO: 180498 - DNA, 20 bp, Artificial Sequence
  Description of Artificial Sequence: Synthetic oligonucleotide
  Target: LAMA2; (+) strand; PAM type: NRG; PAM sequence: AAG
ccaaaaagaggagatagcag

SEQ ID NO: 180499 - DNA, 20 bp, Artificial Sequence
  Description of Artificial Sequence: Synthetic oligonucleotide
  Target: LAMA2; (+) strand; PAM type: NRG; PAM sequence: AAG
gagatagcagaagaaatgtg

SEQ ID NO: 180500 - DNA, 20 bp, Artificial Sequence
  Description of Artificial Sequence: Synthetic oligonucleotide
  Target: LAMA2; (+) strand; PAM type: NRG; PAM sequence: CAG
aacattctaattcctgaaac

SEQ ID NO: 180501 - DNA, 20 bp, Artificial Sequence
  Description of Artificial Sequence: Synthetic oligonucleotide
  Target: LAMA2; (+) strand; PAM type: NRG; PAM sequence: AAG
ttctaattcctgaaaccagt

SEQ ID NO: 180502 - DNA, 20 bp, Artificial Sequence
  Description of Artificial Sequence: Synthetic oligonucleotide
  Target: LAMA2; (+) strand; PAM type: NRG; PAM sequence: GAG
ctaattcctgaaaccagtaa

SEQ ID NO: 180503 - DNA, 20 bp, Artificial Sequence
  Description of Artificial Sequence: Synthetic oligonucleotide
  Target: LAMA2; (+) strand; PAM type: NRG; PAM sequence: AAG
tcctgaaaccagtaagagca

SEQ ID NO: 180504 - DNA, 20 bp, Artificial Sequence
  Description of Artificial Sequence: Synthetic oligonucleotide
  Target: LAMA2; (+) strand; PAM type: NRG; PAM sequence: AGG
cctgaaaccagtaagagcaa

SEQ ID NO: 180505 - DNA, 20 bp, Artificial Sequence
  Description of Artificial Sequence: Synthetic oligonucleotide
  Target: LAMA2; (+) strand; PAM type: NRG; PAM sequence: GGG
ctgaaaccagtaagagcaaa

SEQ ID NO: 180506 - DNA, 20 bp, Artificial Sequence
  Description of Artificial Sequence: Synthetic oligonucleotide
  Target: LAMA2; (+) strand; PAM type: NRG; PAM sequence: GAG
gaaaccagtaagagcaaagg

SEQ ID NO: 180507 - DNA, 20 bp, Artificial Sequence
  Description of Artificial Sequence: Synthetic oligonucleotide
  Target: LAMA2; (+) strand; PAM type: NRG; PAM sequence: AGG
aaaccagtaagagcaaaggg

SEQ ID NO: 180508 - DNA, 20 bp, Artificial Sequence
  Description of Artificial Sequence: Synthetic oligonucleotide
  Target: LAMA2; (+) strand; PAM type: NRG; PAM sequence: AAG
ccagtaagagcaaagggagg

SEQ ID NO: 180509 - DNA, 20 bp, Artificial Sequence
  Description of Artificial Sequence: Synthetic oligonucleotide
  Target: LAMA2; (+) strand; PAM type: NRG; PAM sequence: GAG
agtaagagcaaagggaggaa

SEQ ID NO: 180510 - DNA, 20 bp, Artificial Sequence
  Description of Artificial Sequence: Synthetic oligonucleotide
  Target: LAMA2; (+) strand; PAM type: NRG; PAM sequence: TGG
aagagcaaagggaggaagag

SEQ ID NO: 180511 - DNA, 20 bp, Artificial Sequence
  Description of Artificial Sequence: Synthetic oligonucleotide
  Target: LAMA2; (+) strand; PAM type: NRG; PAM sequence: GGG
agagcaaagggaggaagagt

SEQ ID NO: 180512 - DNA, 20 bp, Artificial Sequence
  Description of Artificial Sequence: Synthetic oligonucleotide
  Target: LAMA2; (+) strand; PAM type: NRG; PAM sequence: AAG
gcaaagggaggaagagtggg

SEQ ID NO: 180513 - DNA, 20 bp, Artificial Sequence
  Description of Artificial Sequence: Synthetic oligonucleotide
  Target: LAMA2; (+) strand; PAM type: NRG; PAM sequence: CGG
agggaggaagagtgggaagc

SEQ ID NO: 180514 - DNA, 20 bp, Artificial Sequence
  Description of Artificial Sequence: Synthetic oligonucleotide
  Target: LAMA2; (+) strand; PAM type: NRG; PAM sequence: GAG
ggaggaagagtgggaagccg

SEQ ID NO: 180515 - DNA, 20 bp, Artificial Sequence
  Description of Artificial Sequence: Synthetic oligonucleotide
  Target: LAMA2; (+) strand; PAM type: NRG; PAM sequence: TAG
gtgggaagccggagtgtttt

SEQ ID NO: 180516 - DNA, 20 bp, Artificial Sequence
  Description of Artificial Sequence: Synthetic oligonucleotide
  Target: LAMA2; (+) strand; PAM type: NRG; PAM sequence: AAG
aagccggagtgtttttagaa

SEQ ID NO: 180517 - DNA, 20 bp, Artificial Sequence
  Description of Artificial Sequence: Synthetic oligonucleotide
  Target: LAMA2; (+) strand; PAM type: NRG; PAM sequence: AAG
gagtgtttttagaaaagaac

SEQ ID NO: 180518 - DNA, 20 bp, Artificial Sequence
  Description of Artificial Sequence: Synthetic oligonucleotide
  Target: LAMA2; (+) strand; PAM type: NRG; PAM sequence: AAG
aagtgtgaattcactcatac

SEQ ID NO: 180519 - DNA, 20 bp, Artificial Sequence
  Description of Artificial Sequence: Synthetic oligonucleotide
  Target: LAMA2; (+) strand; PAM type: NRG; PAM sequence: TGG
tgaattcactcatacaagat

SEQ ID NO: 180520 - DNA, 20 bp, Artificial Sequence
  Description of Artificial Sequence: Synthetic oligonucleotide
  Target: LAMA2; (+) strand; PAM type: NRG; PAM sequence: TGG
actcatacaagattggcaaa

SEQ ID NO: 180521 - DNA, 20 bp, Artificial Sequence
  Description of Artificial Sequence: Synthetic oligonucleotide
  Target: LAMA2; (+) strand; PAM type: NRG; PAM sequence: GGG
ctcatacaagattggcaaat

SEQ ID NO: 180522 - DNA, 20 bp, Artificial Sequence
  Description of Artificial Sequence: Synthetic oligonucleotide
  Target: LAMA2; (+) strand; PAM type: NRG; PAM sequence: GAG
catacaagattggcaaatgg

SEQ ID NO: 180523 - DNA, 20 bp, Artificial Sequence
  Description of Artificial Sequence: Synthetic oligonucleotide
  Target: LAMA2; (+) strand; PAM type: NRG; PAM sequence: CGG
tggcaaatgggagaatgatt

SEQ ID NO: 180524 - DNA, 20 bp, Artificial Sequence
  Description of Artificial Sequence: Synthetic oligonucleotide
  Target: LAMA2; (+) strand; PAM type: NRG; PAM sequence: GGG
ggcaaatgggagaatgattc

SEQ ID NO: 180525 - DNA, 20 bp, Artificial Sequence
  Description of Artificial Sequence: Synthetic oligonucleotide
  Target: LAMA2; (+) strand; PAM type: NRG; PAM sequence: AAG
aatgggagaatgattcgggt

SEQ ID NO: 180526 - DNA, 20 bp, Artificial Sequence
  Description of Artificial Sequence: Synthetic oligonucleotide
  Target: LAMA2; (+) strand; PAM type: NRG; PAM sequence: CAG
agaatgattcgggtaagatg

SEQ ID NO: 180527 - DNA, 20 bp, Artificial Sequence
  Description of Artificial Sequence: Synthetic oligonucleotide
  Target: LAMA2; (+) strand; PAM type: NRG; PAM sequence: TGG
atgattcgggtaagatgcag

SEQ ID NO: 180528 - DNA, 20 bp, Artificial Sequence
  Description of Artificial Sequence: Synthetic oligonucleotide
  Target: LAMA2; (+) strand; PAM type: NRG; PAM sequence: TAG
ggtaagatgcagtggccaca

SEQ ID NO: 180529 - DNA, 20 bp, Artificial Sequence
  Description of Artificial Sequence: Synthetic oligonucleotide
  Target: LAMA2; (+) strand; PAM type: NRG; PAM sequence: AGG
gtaagatgcagtggccacat

SEQ ID NO: 180530 - DNA, 20 bp, Artificial Sequence
  Description of Artificial Sequence: Synthetic oligonucleotide
  Target: LAMA2; (+) strand; PAM type: NRG; PAM sequence: CAG
ggttcatacacacttcttcc

SEQ ID NO: 180531 - DNA, 20 bp, Artificial Sequence
  Description of Artificial Sequence: Synthetic oligonucleotide
  Target: LAMA2; (+) strand; PAM type: NRG; PAM sequence: CGG
tttttttttctaccctataa

SEQ ID NO: 180532 - DNA, 20 bp, Artificial Sequence
  Description of Artificial Sequence: Synthetic oligonucleotide
  Target: LAMA2; (+) strand; PAM type: NRG; PAM sequence: TAG
ttttttctaccctataacgg

SEQ ID NO: 180533 - DNA, 20 bp, Artificial Sequence
  Description of Artificial Sequence: Synthetic oligonucleotide
  Target: LAMA2; (+) strand; PAM type: NRG; PAM sequence: AAG
tataacggtagctgaatcca

SEQ ID NO: 180534 - DNA, 20 bp, Artificial Sequence
  Description of Artificial Sequence: Synthetic oligonucleotide
  Target: LAMA2; (+) strand; PAM type: NRG; PAM sequence: TAG
gaatccaaagtaaaccaaca

SEQ ID NO: 180535 - DNA, 20 bp, Artificial Sequence
  Description of Artificial Sequence: Synthetic oligonucleotide
  Target: LAMA2; (+) strand; PAM type: NRG; PAM sequence: AAG
aaagtaaaccaacatagctg

SEQ ID NO: 180536 - DNA, 20 bp, Artificial Sequence
  Description of Artificial Sequence: Synthetic oligonucleotide
  Target: LAMA2; (+) strand; PAM type: NRG; PAM sequence: AAG
agctgaagacaccaacctca

SEQ ID NO: 180537 - DNA, 20 bp, Artificial Sequence
  Description of Artificial Sequence: Synthetic oligonucleotide
  Target: LAMA2; (+) strand; PAM type: NRG; PAM sequence: CAG
caaagtactgtgccacaaca

SEQ ID NO: 180538 - DNA, 20 bp, Artificial Sequence
  Description of Artificial Sequence: Synthetic oligonucleotide
  Target: LAMA2; (+) strand; PAM type: NRG; PAM sequence: CAG
gccacaacacagcctgtaca

SEQ ID NO: 180539 - DNA, 20 bp, Artificial Sequence
  Description of Artificial Sequence: Synthetic oligonucleotide
  Target: LAMA2; (+) strand; PAM type: NRG; PAM sequence: CAG
ttcacccatatgcctgcctt

SEQ ID NO: 180540 - DNA, 20 bp, Artificial Sequence
  Description of Artificial Sequence: Synthetic oligonucleotide
  Target: LAMA2; (+) strand; PAM type: NRG; PAM sequence: TAG
tgcctgccttcagcttgatt

SEQ ID NO: 180541 - DNA, 20 bp, Artificial Sequence
  Description of Artificial Sequence: Synthetic oligonucleotide
  Target: LAMA2; (+) strand; PAM type: NRG; PAM sequence: AAG
gccttcagcttgatttagcc

SEQ ID NO: 180542 - DNA, 20 bp, Artificial Sequence
  Description of Artificial Sequence: Synthetic oligonucleotide
  Target: LAMA2; (+) strand; PAM type: NRG; PAM sequence: CGG
tttagccaagcactctatct

SEQ ID NO: 180543 - DNA, 20 bp, Artificial Sequence
  Description of Artificial Sequence: Synthetic oligonucleotide
  Target: LAMA2; (+) strand; PAM type: NRG; PAM sequence: TGG
ctctatctcggaaatgttcg

SEQ ID NO: 180544 - DNA, 20 bp, Artificial Sequence
  Description of Artificial Sequence: Synthetic oligonucleotide
  Target: LAMA2; (+) strand; PAM type: NRG; PAM sequence: TGG
tttgccccatcgctaacact

SEQ ID NO: 180545 - DNA, 20 bp, Artificial Sequence
  Description of Artificial Sequence: Synthetic oligonucleotide
  Target: LAMA2; (+) strand; PAM type: NRG; PAM sequence: CAG
gccccatcgctaacacttgg

SEQ ID NO: 180546 - DNA, 20 bp, Artificial Sequence
  Description of Artificial Sequence: Synthetic oligonucleotide
  Target: LAMA2; (+) strand; PAM type: NRG; PAM sequence: CAG
tcgctaacacttggcagtgt

SEQ ID NO: 180547 - DNA, 20 bp, Artificial Sequence
  Description of Artificial Sequence: Synthetic oligonucleotide
  Target: LAMA2; (+) strand; PAM type: NRG; PAM sequence: AAG
tatattcacattttcctttt

SEQ ID NO: 180548 - DNA, 20 bp, Artificial Sequence
  Description of Artificial Sequence: Synthetic oligonucleotide
  Target: LAMA2; (+) strand; PAM type: NRG; PAM sequence: AGG
atattcacattttcctttta

SEQ ID NO: 180549 - DNA, 20 bp, Artificial Sequence
  Description of Artificial Sequence: Synthetic oligonucleotide
  Target: LAMA2; (+) strand; PAM type: NRG; PAM sequence: AAG
cacattttccttttaaggtg

SEQ ID NO: 180550 - DNA, 20 bp, Artificial Sequence
  Description of Artificial Sequence: Synthetic oligonucleotide
  Target: LAMA2; (+) strand; PAM type: NRG; PAM sequence: TAG
tcctatattttttaatgttt

SEQ ID NO: 180551 - DNA, 20 bp, Artificial Sequence
  Description of Artificial Sequence: Synthetic oligonucleotide
  Target: LAMA2; (+) strand; PAM type: NRG; PAM sequence: GAG
atgttttagtgtatcttttt

SEQ ID NO: 180552 - DNA, 20 bp, Artificial Sequence
  Description of Artificial Sequence: Synthetic oligonucleotide
  Target: LAMA2; (+) strand; PAM type: NRG; PAM sequence: CAG
agctgtgctaatactttgat

SEQ ID NO: 180553 - DNA, 20 bp, Artificial Sequence
  Description of Artificial Sequence: Synthetic oligonucleotide
  Target: LAMA2; (+) strand; PAM type: NRG; PAM sequence: AGG
gctgtgctaatactttgatc

SEQ ID NO: 180554 - DNA, 20 bp, Artificial Sequence
  Description of Artificial Sequence: Synthetic oligonucleotide
  Target: LAMA2; (+) strand; PAM type: NRG; PAM sequence: GAG
caggattgttattgttttgt

SEQ ID NO: 180555 - DNA, 20 bp, Artificial Sequence
  Description of Artificial Sequence: Synthetic oligonucleotide
  Target: LAMA2; (+) strand; PAM type: NRG; PAM sequence: AAG
ctctaattacacacttgtgt

SEQ ID NO: 180556 - DNA, 20 bp, Artificial Sequence
  Description of Artificial Sequence: Synthetic oligonucleotide
  Target: LAMA2; (+) strand; PAM type: NRG; PAM sequence: TAG
tacacacttgtgtaagtttt

SEQ ID NO: 180557 - DNA, 20 bp, Artificial Sequence
  Description of Artificial Sequence: Synthetic oligonucleotide
  Target: LAMA2; (+) strand; PAM type: NRG; PAM sequence: CAG
acacttgtgtaagtttttag

SEQ ID NO: 180558 - DNA, 20 bp, Artificial Sequence
  Description of Artificial Sequence: Synthetic oligonucleotide
  Target: LAMA2; (+) strand; PAM type: NRG; PAM sequence: AGG
cacttgtgtaagtttttagc

SEQ ID NO: 180559 - DNA, 20 bp, Artificial Sequence
  Description of Artificial Sequence: Synthetic oligonucleotide
  Target: LAMA2; (+) strand; PAM type: NRG; PAM sequence: CAG
tgtgtaagtttttagcaggt

SEQ ID NO: 180560 - DNA, 20 bp, Artificial Sequence
  Description of Artificial Sequence: Synthetic oligonucleotide
  Target: LAMA2; (+) strand; PAM type: NRG; PAM sequence: AAG
ccccaaccctattttcccat

SEQ ID NO: 180561 - DNA, 20 bp, Artificial Sequence
  Description of Artificial Sequence: Synthetic oligonucleotide
  Target: LAMA2; (+) strand; PAM type: NRG; PAM sequence: AAG
ccataagccctgttatttgt

SEQ ID NO: 180562 - DNA, 20 bp, Artificial Sequence
  Description of Artificial Sequence: Synthetic oligonucleotide
  Target: LAMA2; (+) strand; PAM type: NRG; PAM sequence: TAG
atttgtaagaataattttta

SEQ ID NO: 180563 - DNA, 20 bp, Artificial Sequence
  Description of Artificial Sequence: Synthetic oligonucleotide
  Target: LAMA2; (+) strand; PAM type: NRG; PAM sequence: TGG
aataatttttatagaactcc

SEQ ID NO: 180564 - DNA, 20 bp, Artificial Sequence
  Description of Artificial Sequence: Synthetic oligonucleotide
  Target: LAMA2; (+) strand; PAM type: NRG; PAM sequence: CAG
gtttgtttatttgttgcttt

SEQ ID NO: 180565 - DNA, 20 bp, Artificial Sequence
  Description of Artificial Sequence: Synthetic oligonucleotide
  Target: LAMA2; (+) strand; PAM type: NRG; PAM sequence: AGG
tttgtttatttgttgctttc

SEQ ID NO: 180566 - DNA, 20 bp, Artificial Sequence
  Description of Artificial Sequence: Synthetic oligonucleotide
  Target: LAMA2; (+) strand; PAM type: NRG; PAM sequence: AAG
acttatcacatttgaacata

SEQ ID NO: 180567 - DNA, 20 bp, Artificial Sequence
  Description of Artificial Sequence: Synthetic oligonucleotide
  Target: LAMA2; (+) strand; PAM type: NRG; PAM sequence: GAG
ttatcacatttgaacataaa

SEQ ID NO: 180568 - DNA, 20 bp, Artificial Sequence
  Description of Artificial Sequence: Synthetic oligonucleotide
  Target: LAMA2; (+) strand; PAM type: NRG; PAM sequence: AAG
aagagcaatcattcctacta

SEQ ID NO: 180569 - DNA, 20 bp, Artificial Sequence
  Description of Artificial Sequence: Synthetic oligonucleotide
  Target: LAMA2; (+) strand; PAM type: NRG; PAM sequence: GAG
gagcaatcattcctactaaa

SEQ ID NO: 180570 - DNA, 20 bp, Artificial Sequence
  Description of Artificial Sequence: Synthetic oligonucleotide
  Target: LAMA2; (+) strand; PAM type: NRG; PAM sequence: CAG
caatcattcctactaaagag

SEQ ID NO: 180571 - DNA, 20 bp, Artificial Sequence
  Description of Artificial Sequence: Synthetic oligonucleotide
  Target: LAMA2; (+) strand; PAM type: NRG; PAM sequence: AGG
aatcattcctactaaagagc

SEQ ID NO: 180572 - DNA, 20 bp, Artificial Sequence
  Description of Artificial Sequence: Synthetic oligonucleotide
  Target: LAMA2; (+) strand; PAM type: NRG; PAM sequence: GAG
tcattcctactaaagagcag

SEQ ID NO: 180573 - DNA, 20 bp, Artificial Sequence
  Description of Artificial Sequence: Synthetic oligonucleotide
  Target: LAMA2; (+) strand; PAM type: NRG; PAM sequence: TGG
aaagagcaggagtgatttca

SEQ ID NO: 180574 - DNA, 20 bp, Artificial Sequence
  Description of Artificial Sequence: Synthetic oligonucleotide
  Target: LAMA2; (+) strand; PAM type: NRG; PAM sequence: GAG
agagcaggagtgatttcatg

SEQ ID NO: 180575 - DNA, 20 bp, Artificial Sequence
  Description of Artificial Sequence: Synthetic oligonucleotide
  Target: LAMA2; (+) strand; PAM type: NRG; PAM sequence: AAG
gcaggagtgatttcatggag

SEQ ID NO: 180576 - DNA, 20 bp, Artificial Sequence
  Description of Artificial Sequence: Synthetic oligonucleotide
  Target: LAMA2; (+) strand; PAM type: NRG; PAM sequence: AAG
atttcatggagaagatgtaa

SEQ ID NO: 180577 - DNA, 20 bp, Artificial Sequence
  Description of Artificial Sequence: Synthetic oligonucleotide
  Target: LAMA2; (+) strand; PAM type: NRG; PAM sequence: GAG
catggagaagatgtaaaagt

SEQ ID NO: 180578 - DNA, 20 bp, Artificial Sequence
  Description of Artificial Sequence: Synthetic oligonucleotide
  Target: LAMA2; (+) strand; PAM type: NRG; PAM sequence: AGG
atggagaagatgtaaaagtg

SEQ ID NO: 180579 - DNA, 20 bp, Artificial Sequence
  Description of Artificial Sequence: Synthetic oligonucleotide
  Target: LAMA2; (+) strand; PAM type: NRG; PAM sequence: AAG
agatgtaaaagtgaggctaa

SEQ ID NO: 180580 - DNA, 20 bp, Artificial Sequence
  Description of Artificial Sequence: Synthetic oligonucleotide
  Target: LAMA2; (+) strand; PAM type: NRG; PAM sequence: GAG
atgtaaaagtgaggctaaaa

SEQ ID NO: 180581 - DNA, 20 bp, Artificial Sequence
  Description of Artificial Sequence: Synthetic oligonucleotide
  Target: LAMA2; (+) strand; PAM type: NRG; PAM sequence: AGG
tgtaaaagtgaggctaaaag

SEQ ID NO: 180582 - DNA, 20 bp, Artificial Sequence
  Description of Artificial Sequence: Synthetic oligonucleotide
  Target: LAMA2; (+) strand; PAM type: NRG; PAM sequence: TAG
aaaagtgaggctaaaagagg

SEQ ID NO: 180583 - DNA, 20 bp, Artificial Sequence
  Description of Artificial Sequence: Synthetic oligonucleotide
  Target: LAMA2; (+) strand; PAM type: NRG; PAM sequence: AAG
gaggctaaaagaggtagact

SEQ ID NO: 180584 - DNA, 20 bp, Artificial Sequence
  Description of Artificial Sequence: Synthetic oligonucleotide
  Target: LAMA2; (+) strand; PAM type: NRG; PAM sequence: AAG
tagactaagaaaatgtcata

SEQ ID NO: 180585 - DNA, 20 bp, Artificial Sequence
  Description of Artificial Sequence: Synthetic oligonucleotide
  Target: LAMA2; (+) strand; PAM type: NRG; PAM sequence: TAG
agaaaatgtcataaagacct

SEQ ID NO: 180586 - DNA, 20 bp, Artificial Sequence
  Description of Artificial Sequence: Synthetic oligonucleotide
  Target: LAMA2; (+) strand; PAM type: NRG; PAM sequence: CAG
tcataaagaccttagaatgt

SEQ ID NO: 180587 - DNA, 20 bp, Artificial Sequence
  Description of Artificial Sequence: Synthetic oligonucleotide
  Target: LAMA2; (+) strand; PAM type: NRG; PAM sequence: TAG
agaccttagaatgtcagttt

SEQ ID NO: 180588 - DNA, 20 bp, Artificial Sequence
  Description of Artificial Sequence: Synthetic oligonucleotide
  Target: LAMA2; (+) strand; PAM type: NRG; PAM sequence: TAG
agaaatttgcatttattcaa

SEQ ID NO: 180589 - DNA, 20 bp, Artificial Sequence
  Description of Artificial Sequence: Synthetic oligonucleotide
  Target: LAMA2; (+) strand; PAM type: NRG; PAM sequence: CAG
atttgcatttattcaatagt

SEQ ID NO: 180590 - DNA, 20 bp, Artificial Sequence
  Description of Artificial Sequence: Synthetic oligonucleotide
  Target: LAMA2; (+) strand; PAM type: NRG; PAM sequence: TAG
tgcatttattcaatagtcag

SEQ ID NO: 180591 - DNA, 20 bp, Artificial Sequence
  Description of Artificial Sequence: Synthetic oligonucleotide
  Target: LAMA2; (+) strand; PAM type: NRG; PAM sequence: AAG
atttattcaatagtcagtag

SEQ ID NO: 180592 - DNA, 20 bp, Artificial Sequence
  Description of Artificial Sequence: Synthetic oligonucleotide
  Target: LAMA2; (+) strand; PAM type: NRG; PAM sequence: GAG
ttattcaatagtcagtagaa

SEQ ID NO: 180593 - DNA, 20 bp, Artificial Sequence
  Description of Artificial Sequence: Synthetic oligonucleotide
  Target: LAMA2; (+) strand; PAM type: NRG; PAM sequence: TAG
ataaaattgttgttatgctt

SEQ ID NO: 180594 - DNA, 20 bp, Artificial Sequence
  Description of Artificial Sequence: Synthetic oligonucleotide
  Target: LAMA2; (+) strand; PAM type: NRG; PAM sequence: AAG
aattgttgttatgctttaga

SEQ ID NO: 180595 - DNA, 20 bp, Artificial Sequence
  Description of Artificial Sequence: Synthetic oligonucleotide
  Target: LAMA2; (+) strand; PAM type: NRG; PAM sequence: GAG
ttgttgttatgctttagaaa

SEQ ID NO: 180596 - DNA, 20 bp, Artificial Sequence
  Description of Artificial Sequence: Synthetic oligonucleotide
  Target: LAMA2; (+) strand; PAM type: NRG; PAM sequence: AAG
ttagaaagagtaatctgtca

SEQ ID NO: 180597 - DNA, 20 bp, Artificial Sequence
  Description of Artificial Sequence: Synthetic oligonucleotide
  Target: LAMA2; (+) strand; PAM type: NRG; PAM sequence: AAG
tctgtcaaagatatttttaa

SEQ ID NO: 180598 - DNA, 20 bp, Artificial Sequence
  Description of Artificial Sequence: Synthetic oligonucleotide
  Target: LAMA2; (+) strand; PAM type: NRG; PAM sequence: AAG
atgcttctaaaattcacatt

SEQ ID NO: 180599 - DNA, 20 bp, Artificial Sequence
  Description of Artificial Sequence: Synthetic oligonucleotide
  Target: LAMA2; (+) strand; PAM type: NRG; PAM sequence: AAG
taaaattcacattaagatta

SEQ ID NO: 180600 - DNA, 20 bp, Artificial Sequence
  Description of Artificial Sequence: Synthetic oligonucleotide
  Target: LAMA2; (+) strand; PAM type: NRG; PAM sequence: AAG
attcacattaagattaaagt

SEQ ID NO: 180601 - DNA, 20 bp, Artificial Sequence
  Description of Artificial Sequence: Synthetic oligonucleotide
  Target: LAMA2; (+) strand; PAM type: NRG; PAM sequence: AGG
ttcacattaagattaaagta

SEQ ID NO: 180602 - DNA, 20 bp, Artificial Sequence
  Description of Artificial Sequence: Synthetic oligonucleotide
  Target: LAMA2; (+) strand; PAM type: NRG; PAM sequence: GGG
tcacattaagattaaagtaa

SEQ ID NO: 180603 - DNA, 20 bp, Artificial Sequence
  Description of Artificial Sequence: Synthetic oligonucleotide
  Target: LAMA2; (+) strand; PAM type: NRG; PAM sequence: GGG
cacattaagattaaagtaag

SEQ ID NO: 180604 - DNA, 20 bp, Artificial Sequence
  Description of Artificial Sequence: Synthetic oligonucleotide
  Target: LAMA2; (+) strand; PAM type: NRG; PAM sequence: AAG
taaggggaaaaatctgctgc

SEQ ID NO: 180605 - DNA, 20 bp, Artificial Sequence
  Description of Artificial Sequence: Synthetic oligonucleotide
  Target: LAMA2; (+) strand; PAM type: NRG; PAM sequence: TAG
aatctgctgcaagtaaaatt

SEQ ID NO: 180606 - DNA, 20 bp, Artificial Sequence
  Description of Artificial Sequence: Synthetic oligonucleotide
  Target: LAMA2; (+) strand; PAM type: NRG; PAM sequence: TAG
tgctgcaagtaaaatttagt

SEQ ID NO: 180607 - DNA, 20 bp, Artificial Sequence
  Description of Artificial Sequence: Synthetic oligonucleotide
  Target: LAMA2; (+) strand; PAM type: NRG; PAM sequence: GAG
caagtaaaatttagttagct

SEQ ID NO: 180608 - DNA, 20 bp, Artificial Sequence
  Description of Artificial Sequence: Synthetic oligonucleotide
  Target: LAMA2; (+) strand; PAM type: NRG; PAM sequence: TGG
tagttagctgagcattgaaa

SEQ ID NO: 180609 - DNA, 20 bp, Artificial Sequence
  Description of Artificial Sequence: Synthetic oligonucleotide
  Target: LAMA2; (+) strand; PAM type: NRG; PAM sequence: TAG
ttgaaatggtgatattttaa

SEQ ID NO: 180610 - DNA, 20 bp, Artificial Sequence
  Description of Artificial Sequence: Synthetic oligonucleotide
  Target: LAMA2; (+) strand; PAM type: NRG; PAM sequence: TAG
tggtgatattttaatagact

SEQ ID NO: 180611 - DNA, 20 bp, Artificial Sequence
  Description of Artificial Sequence: Synthetic oligonucleotide
  Target: LAMA2; (+) strand; PAM type: NRG; PAM sequence: TAG
acttagccccaatattcacc

SEQ ID NO: 180612 - DNA, 20 bp, Artificial Sequence
  Description of Artificial Sequence: Synthetic oligonucleotide
  Target: LAMA2; (+) strand; PAM type: NRG; PAM sequence: TAG
cccaatattcacctagaacg

SEQ ID NO: 180613 - DNA, 20 bp, Artificial Sequence
  Description of Artificial Sequence: Synthetic oligonucleotide
  Target: LAMA2; (+) strand; PAM type: NRG; PAM sequence: TAG
agaacgtagctgctccaaaa

SEQ ID NO: 180614 - DNA, 20 bp, Artificial Sequence
  Description of Artificial Sequence: Synthetic oligonucleotide
  Target: LAMA2; (+) strand; PAM type: NRG; PAM sequence: CAG
ttaatctatactaactttac

SEQ ID NO: 180615 - DNA, 20 bp, Artificial Sequence
  Description of Artificial Sequence: Synthetic oligonucleotide
  Target: LAMA2; (+) strand; PAM type: NRG; PAM sequence: AAG
tactaactttaccagacatc

SEQ ID NO: 180616 - DNA, 20 bp, Artificial Sequence
  Description of Artificial Sequence: Synthetic oligonucleotide
  Target: LAMA2; (+) strand; PAM type: NRG; PAM sequence: AGG
actaactttaccagacatca

SEQ ID NO: 180617 - DNA, 20 bp, Artificial Sequence
  Description of Artificial Sequence: Synthetic oligonucleotide
  Target: LAMA2; (+) strand; PAM type: NRG; PAM sequence: AAG
taccagacatcaaggttcaa

SEQ ID NO: 180618 - DNA, 20 bp, Artificial Sequence
  Description of Artificial Sequence: Synthetic oligonucleotide
  Target: LAMA2; (+) strand; PAM type: NRG; PAM sequence: GAG
ccagacatcaaggttcaaaa

SEQ ID NO: 180619 - DNA, 20 bp, Artificial Sequence
  Description of Artificial Sequence: Synthetic oligonucleotide
  Target: LAMA2; (+) strand; PAM type: NRG; PAM sequence: AAG
aaggttcaaaagagaaacaa

SEQ ID NO: 180620 - DNA, 20 bp, Artificial Sequence
  Description of Artificial Sequence: Synthetic oligonucleotide
  Target: LAMA2; (+) strand; PAM type: NRG; PAM sequence: AGG
aggttcaaaagagaaacaaa

SEQ ID NO: 180621 - DNA, 20 bp, Artificial Sequence
  Description of Artificial Sequence: Synthetic oligonucleotide
  Target: LAMA2; (+) strand; PAM type: NRG; PAM sequence: AAG
agagaaacaaaaggcaaatt

SEQ ID NO: 180622 - DNA, 20 bp, Artificial Sequence
  Description of Artificial Sequence: Synthetic oligonucleotide
  Target: LAMA2; (+) strand; PAM type: NRG; PAM sequence: AAG
gaaacaaaaggcaaattaag

SEQ ID NO: 180623 - DNA, 20 bp, Artificial Sequence
  Description of Artificial Sequence: Synthetic oligonucleotide
  Target: LAMA2; (+) strand; PAM type: NRG; PAM sequence: TAG
aaaaggcaaattaagaagcc

SEQ ID NO: 180624 - DNA, 20 bp, Artificial Sequence
  Description of Artificial Sequence: Synthetic oligonucleotide
  Target: LAMA2; (+) strand; PAM type: NRG; PAM sequence: AAG
ctagcatttattaattatga

SEQ ID NO: 180625 - DNA, 20 bp, Artificial Sequence
  Description of Artificial Sequence: Synthetic oligonucleotide
  Target: LAMA2; (+) strand; PAM type: NRG; PAM sequence: TAG
atttattaattatgaaagaa

SEQ ID NO: 180626 - DNA, 20 bp, Artificial Sequence
  Description of Artificial Sequence: Synthetic oligonucleotide
  Target: LAMA2; (+) strand; PAM type: NRG; PAM sequence: AGG
tttattaattatgaaagaat

SEQ ID NO: 180627 - DNA, 20 bp, Artificial Sequence
  Description of Artificial Sequence: Synthetic oligonucleotide
  Target: LAMA2; (+) strand; PAM type: NRG; PAM sequence: GGG
ttattaattatgaaagaata

SEQ ID NO: 180628 - DNA, 20 bp, Artificial Sequence
  Description of Artificial Sequence: Synthetic oligonucleotide
  Target: LAMA2; (+) strand; PAM type: NRG; PAM sequence: GGG
tattaattatgaaagaatag

SEQ ID NO: 180629 - DNA, 20 bp, Artificial Sequence
  Description of Artificial Sequence: Synthetic oligonucleotide
  Target: LAMA2; (+) strand; PAM type: NRG; PAM sequence: TAG
tgaaagaataggggcttttt

SEQ ID NO: 180630 - DNA, 20 bp, Artificial Sequence
  Description of Artificial Sequence: Synthetic oligonucleotide
  Target: LAMA2; (+) strand; PAM type: NRG; PAM sequence: CAG
gcttttttagtaaatgcatt

SEQ ID NO: 180631 - DNA, 20 bp, Artificial Sequence
  Description of Artificial Sequence: Synthetic oligonucleotide
  Target: LAMA2; (+) strand; PAM type: NRG; PAM sequence: TAG
gtaaatgcattcagaatgaa

SEQ ID NO: 180632 - DNA, 20 bp, Artificial Sequence
  Description of Artificial Sequence: Synthetic oligonucleotide
  Target: LAMA2; (+) strand; PAM type: NRG; PAM sequence: AGG
taaatgcattcagaatgaat

SEQ ID NO: 180633 - DNA, 20 bp, Artificial Sequence
  Description of Artificial Sequence: Synthetic oligonucleotide
  Target: LAMA2; (+) strand; PAM type: NRG; PAM sequence: TAG
tattctatgtcgaaatatta

SEQ ID NO: 180634 - DNA, 20 bp, Artificial Sequence
  Description of Artificial Sequence: Synthetic oligonucleotide
  Target: LAMA2; (+) strand; PAM type: NRG; PAM sequence: GAG
ttctatgtcgaaatattata

SEQ ID NO: 180635 - DNA, 20 bp, Artificial Sequence
  Description of Artificial Sequence: Synthetic oligonucleotide
  Target: LAMA2; (+) strand; PAM type: NRG; PAM sequence: TGG
gaaatattatagagtgtacc

SEQ ID NO: 180636 - DNA, 20 bp, Artificial Sequence
  Description of Artificial Sequence: Synthetic oligonucleotide
  Target: LAMA2; (+) strand; PAM type: NRG; PAM sequence: AAG
atattatagagtgtacctgg

SEQ ID NO: 180637 - DNA, 20 bp, Artificial Sequence
  Description of Artificial Sequence: Synthetic oligonucleotide
  Target: LAMA2; (+) strand; PAM type: NRG; PAM sequence: AGG
tattatagagtgtacctgga

SEQ ID NO: 180638 - DNA, 20 bp, Artificial Sequence
  Description of Artificial Sequence: Synthetic oligonucleotide
  Target: LAMA2; (+) strand; PAM type: NRG; PAM sequence: TAG
tcatattatttctcatccca

SEQ ID NO: 180639 - DNA, 20 bp, Artificial Sequence
  Description of Artificial Sequence: Synthetic oligonucleotide
  Target: LAMA2; (+) strand; PAM type: NRG; PAM sequence: AAG
atcccatagtcaccaattca

SEQ ID NO: 180640 - DNA, 20 bp, Artificial Sequence
  Description of Artificial Sequence: Synthetic oligonucleotide
  Target: LAMA2; (+) strand; PAM type: NRG; PAM sequence: CAG
catagtcaccaattcaaagc

SEQ ID NO: 180641 - DNA, 20 bp, Artificial Sequence
  Description of Artificial Sequence: Synthetic oligonucleotide
  Target: LAMA2; (+) strand; PAM type: NRG; PAM sequence: TAG
cagacttaccttgtttctcc

SEQ ID NO: 180642 - DNA, 20 bp, Artificial Sequence
  Description of Artificial Sequence: Synthetic oligonucleotide
  Target: LAMA2; (+) strand; PAM type: NRG; PAM sequence: TGG
ttctaatgaattaaatgaac

SEQ ID NO: 180643 - DNA, 20 bp, Artificial Sequence
  Description of Artificial Sequence: Synthetic oligonucleotide
  Target: LAMA2; (+) strand; PAM type: NRG; PAM sequence: GGG
tctaatgaattaaatgaact

SEQ ID NO: 180644 - DNA, 20 bp, Artificial Sequence
  Description of Artificial Sequence: Synthetic oligonucleotide
  Target: LAMA2; (+) strand; PAM type: NRG; PAM sequence: GGG
ctaatgaattaaatgaactg

SEQ ID NO: 180645 - DNA, 20 bp, Artificial Sequence
  Description of Artificial Sequence: Synthetic oligonucleotide
  Target: LAMA2; (+) strand; PAM type: NRG; PAM sequence: GGG
taatgaattaaatgaactgg

SEQ ID NO: 180646 - DNA, 20 bp, Artificial Sequence
  Description of Artificial Sequence: Synthetic oligonucleotide
  Target: LAMA2; (+) strand; PAM type: NRG; PAM sequence: GGG
aatgaattaaatgaactggg

SEQ ID NO: 180647 - DNA, 20 bp, Artificial Sequence
  Description of Artificial Sequence: Synthetic oligonucleotide
  Target: LAMA2; (+) strand; PAM type: NRG; PAM sequence: CAG
aaatgaactggggggatcta

SEQ ID NO: 180648 - DNA, 20 bp, Artificial Sequence
  Description of Artificial Sequence: Synthetic oligonucleotide
  Target: LAMA2; (+) strand; PAM type: NRG; PAM sequence: TAG
gggatctacagctctgtgtt

SEQ ID NO: 180649 - DNA, 20 bp, Artificial Sequence
  Description of Artificial Sequence: Synthetic oligonucleotide
  Target: LAMA2; (+) strand; PAM type: NRG; PAM sequence: CAG
gctctgtgtttagccactcc

SEQ ID NO: 180650 - DNA, 20 bp, Artificial Sequence
  Description of Artificial Sequence: Synthetic oligonucleotide
  Target: LAMA2; (+) strand; PAM type: NRG; PAM sequence: CAG
cagtccacaactctttcccg

SEQ ID NO: 180651 - DNA, 20 bp, Artificial Sequence
  Description of Artificial Sequence: Synthetic oligonucleotide
  Target: LAMA2; (+) strand; PAM type: NRG; PAM sequence: AGG
agtccacaactctttcccgc

SEQ ID NO: 180652 - DNA, 20 bp, Artificial Sequence
  Description of Artificial Sequence: Synthetic oligonucleotide
  Target: LAMA2; (+) strand; PAM type: NRG; PAM sequence: CAG
cgcaggtatctccacaatcg

SEQ ID NO: 180653 - DNA, 20 bp, Artificial Sequence
  Description of Artificial Sequence: Synthetic oligonucleotide
  Target: LAMA2; (+) strand; PAM type: NRG; PAM sequence: CAG
ctccacaatcgcagtaacat

SEQ ID NO: 180654 - DNA, 20 bp, Artificial Sequence
  Description of Artificial Sequence: Synthetic oligonucleotide
  Target: LAMA2; (+) strand; PAM type: NRG; PAM sequence: CAG
acaatcgcagtaacatcaga

SEQ ID NO: 180655 - DNA, 20 bp, Artificial Sequence
  Description of Artificial Sequence: Synthetic oligonucleotide
  Target: LAMA2; (+) strand; PAM type: NRG; PAM sequence: TAG
tcgcagtaacatcagacaga

SEQ ID NO: 180656 - DNA, 20 bp, Artificial Sequence
  Description of Artificial Sequence: Synthetic oligonucleotide
  Target: LAMA2; (+) strand; PAM type: NRG; PAM sequence: AGG
cgcagtaacatcagacagat

SEQ ID NO: 180657 - DNA, 20 bp, Artificial Sequence
  Description of Artificial Sequence: Synthetic oligonucleotide
  Target: LAMA2; (+) strand; PAM type: NRG; PAM sequence: TAG
agtaacatcagacagatagg

SEQ ID NO: 180658 - DNA, 20 bp, Artificial Sequence
  Description of Artificial Sequence: Synthetic oligonucleotide
  Target: LAMA2; (+) strand; PAM type: NRG; PAM sequence: AGG
gtaacatcagacagataggt

SEQ ID NO: 180659 - DNA, 20 bp, Artificial Sequence
  Description of Artificial Sequence: Synthetic oligonucleotide
  Target: LAMA2; (+) strand; PAM type: NRG; PAM sequence: TAG
acatcagacagataggtagg

SEQ ID NO: 180660 - DNA, 20 bp, Artificial Sequence
  Description of Artificial Sequence: Synthetic oligonucleotide
  Target: LAMA2; (+) strand; PAM type: NRG; PAM sequence: TAG
cagacagataggtaggtaga

SEQ ID NO: 180661 - DNA, 20 bp, Artificial Sequence
  Description of Artificial Sequence: Synthetic oligonucleotide
  Target: LAMA2; (+) strand; PAM type: NRG; PAM sequence: CAG
cagataggtaggtagataga

SEQ ID NO: 180662 - DNA, 20 bp, Artificial Sequence
  Description of Artificial Sequence: Synthetic oligonucleotide
  Target: LAMA2; (+) strand; PAM type: NRG; PAM sequence: TAG
gatagacagatacataaaaa

SEQ ID NO: 180663 - DNA, 20 bp, Artificial Sequence
  Description of Artificial Sequence: Synthetic oligonucleotide
  Target: LAMA2; (+) strand; PAM type: NRG; PAM sequence: TGG
cataaaaatagcctcatgtt

SEQ ID NO: 180664 - DNA, 20 bp, Artificial Sequence
  Description of Artificial Sequence: Synthetic oligonucleotide
  Target: LAMA2; (+) strand; PAM type: NRG; PAM sequence: AAG
aatattttaaatgtattcac

SEQ ID NO: 180665 - DNA, 20 bp, Artificial Sequence
  Description of Artificial Sequence: Synthetic oligonucleotide
  Target: LAMA2; (+) strand; PAM type: NRG; PAM sequence: TAG
tgtattcacaagacttatct

SEQ ID NO: 180666 - DNA, 20 bp, Artificial Sequence
  Description of Artificial Sequence: Synthetic oligonucleotide
  Target: LAMA2; (+) strand; PAM type: NRG; PAM sequence: GAG
attaaacatatattctctgt

SEQ ID NO: 180667 - DNA, 20 bp, Artificial Sequence
  Description of Artificial Sequence: Synthetic oligonucleotide
  Target: LAMA2; (+) strand; PAM type: NRG; PAM sequence: AGG
ttaaacatatattctctgtg

SEQ ID NO: 180668 - DNA, 20 bp, Artificial Sequence
  Description of Artificial Sequence: Synthetic oligonucleotide
  Target: LAMA2; (+) strand; PAM type: NRG; PAM sequence: TGG
gtcatcctacaaacatcaac

SEQ ID NO: 180669 - DNA, 20 bp, Artificial Sequence
  Description of Artificial Sequence: Synthetic oligonucleotide
  Target: LAMA2; (+) strand; PAM type: NRG; PAM sequence: TAG
tacaaacatcaactggattc

SEQ ID NO: 180670 - DNA, 20 bp, Artificial Sequence
  Description of Artificial Sequence: Synthetic oligonucleotide
  Target: LAMA2; (+) strand; PAM type: NRG; PAM sequence: AGG
acaaacatcaactggattct

SEQ ID NO: 180671 - DNA, 20 bp, Artificial Sequence
  Description of Artificial Sequence: Synthetic oligonucleotide
  Target: LAMA2; (+) strand; PAM type: NRG; PAM sequence: AAG
tcaactggattctaggatcc

SEQ ID NO: 180672 - DNA, 20 bp, Artificial Sequence
  Description of Artificial Sequence: Synthetic oligonucleotide
  Target: LAMA2; (+) strand; PAM type: NRG; PAM sequence: TAG
aagtactgtattgtatgtac

SEQ ID NO: 180673 - DNA, 20 bp, Artificial Sequence
  Description of Artificial Sequence: Synthetic oligonucleotide
  Target: LAMA2; (+) strand; PAM type: NRG; PAM sequence: GAG
ttgtatgtactagatgtttt

SEQ ID NO: 180674 - DNA, 20 bp, Artificial Sequence
  Description of Artificial Sequence: Synthetic oligonucleotide
  Target: LAMA2; (+) strand; PAM type: NRG; PAM sequence: TAG
ttttgagtttgtgcctgaca

SEQ ID NO: 180675 - DNA, 20 bp, Artificial Sequence
  Description of Artificial Sequence: Synthetic oligonucleotide
  Target: LAMA2; (+) strand; PAM type: NRG; PAM sequence: AGG
tttgagtttgtgcctgacat

SEQ ID NO: 180676 - DNA, 20 bp, Artificial Sequence
  Description of Artificial Sequence: Synthetic oligonucleotide
  Target: LAMA2; (+) strand; PAM type: NRG; PAM sequence: TAG
tttgtgcctgacataggacc

SEQ ID NO: 180677 - DNA, 20 bp, Artificial Sequence
  Description of Artificial Sequence: Synthetic oligonucleotide
  Target: LAMA2; (+) strand; PAM type: NRG; PAM sequence: TAG
ggacctagcccataatctct

SEQ ID NO: 180678 - DNA, 20 bp, Artificial Sequence
  Description of Artificial Sequence: Synthetic oligonucleotide
  Target: LAMA2; (+) strand; PAM type: NRG; PAM sequence: TGG
ctagcccataatctcttaga

SEQ ID NO: 180679 - DNA, 20 bp, Artificial Sequence
  Description of Artificial Sequence: Synthetic oligonucleotide
  Target: LAMA2; (+) strand; PAM type: NRG; PAM sequence: TAG
gtctcatgaaatttacattc

SEQ ID NO: 180680 - DNA, 20 bp, Artificial Sequence
  Description of Artificial Sequence: Synthetic oligonucleotide
  Target: LAMA2; (+) strand; PAM type: NRG; PAM sequence: AAG
atgaaatttacattctagtg

SEQ ID NO: 180681 - DNA, 20 bp, Artificial Sequence
  Description of Artificial Sequence: Synthetic oligonucleotide
  Target: LAMA2; (+) strand; PAM type: NRG; PAM sequence: AGG
tgaaatttacattctagtga

SEQ ID NO: 180682 - DNA, 20 bp, Artificial Sequence
  Description of Artificial Sequence: Synthetic oligonucleotide
  Target: LAMA2; (+) strand; PAM type: NRG; PAM sequence: GAG
aaatttacattctagtgaag

SEQ ID NO: 180683 - DNA, 20 bp, Artificial Sequence
  Description of Artificial Sequence: Synthetic oligonucleotide
  Target: LAMA2; (+) strand; PAM type: NRG; PAM sequence: CAG
ttacattctagtgaaggaga

SEQ ID NO: 180684 - DNA, 20 bp, Artificial Sequence
  Description of Artificial Sequence: Synthetic oligonucleotide
  Target: LAMA2; (+) strand; PAM type: NRG; PAM sequence: AAG
cattctagtgaaggagacag

SEQ ID NO: 180685 - DNA, 20 bp, Artificial Sequence
  Description of Artificial Sequence: Synthetic oligonucleotide
  Target: LAMA2; (+) strand; PAM type: NRG; PAM sequence: CAG
agaaaccataaaaataaata

SEQ ID NO: 180686 - DNA, 20 bp, Artificial Sequence
  Description of Artificial Sequence: Synthetic oligonucleotide
  Target: LAMA2; (+) strand; PAM type: NRG; PAM sequence: AGG
gaaaccataaaaataaatac

SEQ ID NO: 180687 - DNA, 20 bp, Artificial Sequence
  Description of Artificial Sequence: Synthetic oligonucleotide
  Target: LAMA2; (+) strand; PAM type: NRG; PAM sequence: CAG
cgtctgaatctaatttgttc

SEQ ID NO: 180688 - DNA, 20 bp, Artificial Sequence
  Description of Artificial Sequence: Synthetic oligonucleotide
  Target: LAMA2; (+) strand; PAM type: NRG; PAM sequence: TGG
tttgttccagaaaaatttgt

SEQ ID NO: 180689 - DNA, 20 bp, Artificial Sequence
  Description of Artificial Sequence: Synthetic oligonucleotide
  Target: LAMA2; (+) strand; PAM type: NRG; PAM sequence: AAG
gttccagaaaaatttgttgg

SEQ ID NO: 180690 - DNA, 20 bp, Artificial Sequence
  Description of Artificial Sequence: Synthetic oligonucleotide
  Target: LAMA2; (+) strand; PAM type: NRG; PAM sequence: AGG
ttccagaaaaatttgttgga

SEQ ID NO: 180691 - DNA, 20 bp, Artificial Sequence
  Description of Artificial Sequence: Synthetic oligonucleotide
  Target: LAMA2; (+) strand; PAM type: NRG; PAM sequence: CAG
tttgttggaaggcaaatatt

SEQ ID NO: 180692 - DNA, 20 bp, Artificial Sequence
  Description of Artificial Sequence: Synthetic oligonucleotide
  Target: LAMA2; (+) strand; PAM type: NRG; PAM sequence: GAG
tgttggaaggcaaatattca

SEQ ID NO: 180693 - DNA, 20 bp, Artificial Sequence
  Description of Artificial Sequence: Synthetic oligonucleotide
  Target: LAMA2; (+) strand; PAM type: NRG; PAM sequence: TAG
tggaaggcaaatattcagag

SEQ ID NO: 180694 - DNA, 20 bp, Artificial Sequence
  Description of Artificial Sequence: Synthetic oligonucleotide
  Target: LAMA2; (+) strand; PAM type: NRG; PAM sequence: AGG
ggaaggcaaatattcagagt

SEQ ID NO: 180695 - DNA, 20 bp, Artificial Sequence
  Description of Artificial Sequence: Synthetic oligonucleotide
  Target: LAMA2; (+) strand; PAM type: NRG; PAM sequence: AAG
cagagtaggatcctatatat

SEQ ID NO: 180696 - DNA, 20 bp, Artificial Sequence
  Description of Artificial Sequence: Synthetic oligonucleotide
  Target: LAMA2; (+) strand; PAM type: NRG; PAM sequence: CAG
gaaatgtaataatgtattct

SEQ ID NO: 180697 - DNA, 20 bp, Artificial Sequence
  Description of Artificial Sequence: Synthetic oligonucleotide
  Target: LAMA2; (+) strand; PAM type: NRG; PAM sequence: CAG
taatgtattctcagcccatc

SEQ ID NO: 180698 - DNA, 20 bp, Artificial Sequence
  Description of Artificial Sequence: Synthetic oligonucleotide
  Target: LAMA2; (+) strand; PAM type: NRG; PAM sequence: AAG
ccctttgcccaaataccact

SEQ ID NO: 180699 - DNA, 20 bp, Artificial Sequence
  Description of Artificial Sequence: Synthetic oligonucleotide
  Target: LAMA2; (+) strand; PAM type: NRG; PAM sequence: AAG
aataccactaagacaccctt

SEQ ID NO: 180700 - DNA, 20 bp, Artificial Sequence
  Description of Artificial Sequence: Synthetic oligonucleotide
  Target: LAMA2; (+) strand; PAM type: NRG; PAM sequence: AAG
caatataactatctactacc

SEQ ID NO: 180701 - DNA, 20 bp, Artificial Sequence
  Description of Artificial Sequence: Synthetic oligonucleotide
  Target: LAMA2; (+) strand; PAM type: NRG; PAM sequence: AAG
aagtgcttttacaaaacata

SEQ ID NO: 180702 - DNA, 20 bp, Artificial Sequence
  Description of Artificial Sequence: Synthetic oligonucleotide
  Target: LAMA2; (+) strand; PAM type: NRG; PAM sequence: TAG
acttaaaaaaactaatgact

SEQ ID NO: 180703 - DNA, 20 bp, Artificial Sequence
  Description of Artificial Sequence: Synthetic oligonucleotide
  Target: LAMA2; (+) strand; PAM type: NRG; PAM sequence: AAG
agttattgcacacctcatga

SEQ ID NO: 180704 - DNA, 20 bp, Artificial Sequence
  Description of Artificial Sequence: Synthetic oligonucleotide
  Target: LAMA2; (+) strand; PAM type: NRG; PAM sequence: AGG
gttattgcacacctcatgaa

SEQ ID NO: 180705 - DNA, 20 bp, Artificial Sequence
  Description of Artificial Sequence: Synthetic oligonucleotide
  Target: LAMA2; (+) strand; PAM type: NRG; PAM sequence: GAG
ttgcacacctcatgaaaggt

SEQ ID NO: 180706 - DNA, 20 bp, Artificial Sequence
  Description of Artificial Sequence: Synthetic oligonucleotide
  Target: LAMA2; (+) strand; PAM type: NRG; PAM sequence: GAG
gcacacctcatgaaaggtga

SEQ ID NO: 180707 - DNA, 20 bp, Artificial Sequence
  Description of Artificial Sequence: Synthetic oligonucleotide
  Target: LAMA2; (+) strand; PAM type: NRG; PAM sequence: AGG
cacacctcatgaaaggtgag

SEQ ID NO: 180708 - DNA, 20 bp, Artificial Sequence
  Description of Artificial Sequence: Synthetic oligonucleotide
  Target: LAMA2; (+) strand; PAM type: NRG; PAM sequence: TGG
acctcatgaaaggtgagagg

SEQ ID NO: 180709 - DNA, 20 bp, Artificial Sequence
  Description of Artificial Sequence: Synthetic oligonucleotide
  Target: LAMA2; (+) strand; PAM type: NRG; PAM sequence: TAG
gaggtggtttttacttattc

SEQ ID NO: 180710 - DNA, 20 bp, Artificial Sequence
  Description of Artificial Sequence: Synthetic oligonucleotide
  Target: LAMA2; (+) strand; PAM type: NRG; PAM sequence: CGG
ggtttttacttattctagca

SEQ ID NO: 180711 - DNA, 20 bp, Artificial Sequence
  Description of Artificial Sequence: Synthetic oligonucleotide
  Target: LAMA2; (+) strand; PAM type: NRG; PAM sequence: TGG
ttttacttattctagcacgg

SEQ ID NO: 180712 - DNA, 20 bp, Artificial Sequence
  Description of Artificial Sequence: Synthetic oligonucleotide
  Target: LAMA2; (+) strand; PAM type: NRG; PAM sequence: CAG
tacttattctagcacggtgg

SEQ ID NO: 180713 - DNA, 20 bp, Artificial Sequence
  Description of Artificial Sequence: Synthetic oligonucleotide
  Target: LAMA2; (+) strand; PAM type: NRG; PAM sequence: TAG
ttattctagcacggtggcag

SEQ ID NO: 180714 - DNA, 20 bp, Artificial Sequence
  Description of Artificial Sequence: Synthetic oligonucleotide
  Target: LAMA2; (+) strand; PAM type: NRG; PAM sequence: GAG
attctagcacggtggcagta

SEQ ID NO: 180715 - DNA, 20 bp, Artificial Sequence
  Description of Artificial Sequence: Synthetic oligonucleotide
  Target: LAMA2; (+) strand; PAM type: NRG; PAM sequence: TGG
tagcacggtggcagtagaga

SEQ ID NO: 180716 - DNA, 20 bp, Artificial Sequence
  Description of Artificial Sequence: Synthetic oligonucleotide
  Target: LAMA2; (+) strand; PAM type: NRG; PAM sequence: GAG
gcacggtggcagtagagatg

SEQ ID NO: 180717 - DNA, 20 bp, Artificial Sequence
  Description of Artificial Sequence: Synthetic oligonucleotide
  Target: LAMA2; (+) strand; PAM type: NRG; PAM sequence: AAG
gtggcagtagagatggagat

SEQ ID NO: 180718 - DNA, 20 bp, Artificial Sequence
  Description of Artificial Sequence: Synthetic oligonucleotide
  Target: LAMA2; (+) strand; PAM type: NRG; PAM sequence: TGG
gcagtagagatggagataag

SEQ ID NO: 180719 - DNA, 20 bp, Artificial Sequence
  Description of Artificial Sequence: Synthetic oligonucleotide
  Target: LAMA2; (+) strand; PAM type: NRG; PAM sequence: AAG
gtagagatggagataagtgg

SEQ ID NO: 180720 - DNA, 20 bp, Artificial Sequence
  Description of Artificial Sequence: Synthetic oligonucleotide
  Target: LAMA2; (+) strand; PAM type: NRG; PAM sequence: AGG
tagagatggagataagtgga

SEQ ID NO: 180721 - DNA, 20 bp, Artificial Sequence
  Description of Artificial Sequence: Synthetic oligonucleotide
  Target: LAMA2; (+) strand; PAM type: NRG; PAM sequence: AAG
ggagataagtggaaggaatg

SEQ ID NO: 180722 - DNA, 20 bp, Artificial Sequence
  Description of Artificial Sequence: Synthetic oligonucleotide
  Target: LAMA2; (+) strand; PAM type: NRG; PAM sequence: TAG
ggaaggaatgaagatgtatt

SEQ ID NO: 180723 - DNA, 20 bp, Artificial Sequence
  Description of Artificial Sequence: Synthetic oligonucleotide
  Target: LAMA2; (+) strand; PAM type: NRG; PAM sequence: AGG
gaaggaatgaagatgtattt

SEQ ID NO: 180724 - DNA, 20 bp, Artificial Sequence
  Description of Artificial Sequence: Synthetic oligonucleotide
  Target: LAMA2; (+) strand; PAM type: NRG; PAM sequence: GGG
aaggaatgaagatgtattta

SEQ ID NO: 180725 - DNA, 20 bp, Artificial Sequence
  Description of Artificial Sequence: Synthetic oligonucleotide
  Target: LAMA2; (+) strand; PAM type: NRG; PAM sequence: CAG
gggtatttcctgccctacaa

SEQ ID NO: 180726 - DNA, 20 bp, Artificial Sequence
  Description of Artificial Sequence: Synthetic oligonucleotide
  Target: LAMA2; (+) strand; PAM type: NRG; PAM sequence: TAG
tcctgccctacaacagccta

SEQ ID NO: 180727 - DNA, 20 bp, Artificial Sequence
  Description of Artificial Sequence: Synthetic oligonucleotide
  Target: LAMA2; (+) strand; PAM type: NRG; PAM sequence: CAG
cctatagtctcattgctatt

SEQ ID NO: 180728 - DNA, 20 bp, Artificial Sequence
  Description of Artificial Sequence: Synthetic oligonucleotide
  Target: LAMA2; (+) strand; PAM type: NRG; PAM sequence: CAG
agtgatgcattgaataatga

SEQ ID NO: 180729 - DNA, 20 bp, Artificial Sequence
  Description of Artificial Sequence: Synthetic oligonucleotide
  Target: LAMA2; (+) strand; PAM type: NRG; PAM sequence: TAG
ttgaataatgacagactgaa

SEQ ID NO: 180730 - DNA, 20 bp, Artificial Sequence
  Description of Artificial Sequence: Synthetic oligonucleotide
  Target: LAMA2; (+) strand; PAM type: NRG; PAM sequence: CAG
atgtgaaatgtctctcttct

SEQ ID NO: 180731 - DNA, 20 bp, Artificial Sequence
  Description of Artificial Sequence: Synthetic oligonucleotide
  Target: LAMA2; (+) strand; PAM type: NRG; PAM sequence: CAG
atgtctctcttctcagtcct

SEQ ID NO: 180732 - DNA, 20 bp, Artificial Sequence
  Description of Artificial Sequence: Synthetic oligonucleotide
  Target: LAMA2; (+) strand; PAM type: NRG; PAM sequence: AGG
tgtctctcttctcagtcctc

SEQ ID NO: 180733 - DNA, 20 bp, Artificial Sequence
  Description of Artificial Sequence: Synthetic oligonucleotide
  Target: LAMA2; (+) strand; PAM type: NRG; PAM sequence: TGG
ctctcttctcagtcctcagg

SEQ ID NO: 180734 - DNA, 20 bp, Artificial Sequence
  Description of Artificial Sequence: Synthetic oligonucleotide
  Target: LAMA2; (+) strand; PAM type: NRG; PAM sequence: AAG
tcttctcagtcctcaggtgg

SEQ ID NO: 180735 - DNA, 20 bp, Artificial Sequence
  Description of Artificial Sequence: Synthetic oligonucleotide
  Target: LAMA2; (+) strand; PAM type: NRG; PAM sequence: TAG
ctcagtcctcaggtggaaga

SEQ ID NO: 180736 - DNA, 20 bp, Artificial Sequence
  Description of Artificial Sequence: Synthetic oligonucleotide
  Target: LAMA2; (+) strand; PAM type: NRG; PAM sequence: GAG
gtcctcaggtggaagatagt

SEQ ID NO: 180737 - DNA, 20 bp, Artificial Sequence
  Description of Artificial Sequence: Synthetic oligonucleotide
  Target: LAMA2; (+) strand; PAM type: NRG; PAM sequence: AGG
tcctcaggtggaagatagtg

SEQ ID NO: 180738 - DNA, 20 bp, Artificial Sequence
  Description of Artificial Sequence: Synthetic oligonucleotide
  Target: LAMA2; (+) strand; PAM type: NRG; PAM sequence: GGG
cctcaggtggaagatagtga

SEQ ID NO: 180739 - DNA, 20 bp, Artificial Sequence
  Description of Artificial Sequence: Synthetic oligonucleotide
  Target: LAMA2; (+) strand; PAM type: NRG; PAM sequence: GGG
ctcaggtggaagatagtgag

SEQ ID NO: 180740 - DNA, 20 bp, Artificial Sequence
  Description of Artificial Sequence: Synthetic oligonucleotide
  Target: LAMA2; (+) strand; PAM type: NRG; PAM sequence: TGG
gaggggactattcaatttga

SEQ ID NO: 180741 - DNA, 20 bp, Artificial Sequence
  Description of Artificial Sequence: Synthetic oligonucleotide
  Target: LAMA2; (+) strand; PAM type: NRG; PAM sequence: GAG
ggggactattcaatttgatg

SEQ ID NO: 180742 - DNA, 20 bp, Artificial Sequence
  Description of Artificial Sequence: Synthetic oligonucleotide
  Target: LAMA2; (+) strand; PAM type: NRG; PAM sequence: AAG
gactattcaatttgatggag

SEQ ID NO: 180743 - DNA, 20 bp, Artificial Sequence
  Description of Artificial Sequence: Synthetic oligonucleotide
  Target: LAMA2; (+) strand; PAM type: NRG; PAM sequence: AGG
actattcaatttgatggaga

SEQ ID NO: 180744 - DNA, 20 bp, Artificial Sequence
  Description of Artificial Sequence: Synthetic oligonucleotide
  Target: LAMA2; (+) strand; PAM type: NRG; PAM sequence: TGG
tgatggagaaggttatgcat

SEQ ID NO: 180745 - DNA, 20 bp, Artificial Sequence
  Description of Artificial Sequence: Synthetic oligonucleotide
  Target: LAMA2; (+) strand; PAM type: NRG; PAM sequence: CAG
ggagaaggttatgcattggt

SEQ ID NO: 180746 - DNA, 20 bp, Artificial Sequence
  Description of Artificial Sequence: Synthetic oligonucleotide
  Target: LAMA2; (+) strand; PAM type: NRG; PAM sequence: TGG
tggtcagccgtcccattcgc

SEQ ID NO: 180747 - DNA, 20 bp, Artificial Sequence
  Description of Artificial Sequence: Synthetic oligonucleotide
  Target: LAMA2; (+) strand; PAM type: NRG; PAM sequence: AAG
acatctccactgtcatgttc

SEQ ID NO: 180748 - DNA, 20 bp, Artificial Sequence
  Description of Artificial Sequence: Synthetic oligonucleotide
  Target: LAMA2; (+) strand; PAM type: NRG; PAM sequence: CAG
tccactgtcatgttcaagtt

SEQ ID NO: 180749 - DNA, 20 bp, Artificial Sequence
  Description of Artificial Sequence: Synthetic oligonucleotide
  Target: LAMA2; (+) strand; PAM type: NRG; PAM sequence: GAG
aagttcagaacattttcttc

SEQ ID NO: 180750 - DNA, 20 bp, Artificial Sequence
  Description of Artificial Sequence: Synthetic oligonucleotide
  Target: LAMA2; (+) strand; PAM type: NRG; PAM sequence: GAG
tctgatgtatcttgccacac

SEQ ID NO: 180751 - DNA, 20 bp, Artificial Sequence
  Description of Artificial Sequence: Synthetic oligonucleotide
  Target: LAMA2; (+) strand; PAM type: NRG; PAM sequence: TGG
gtatcttgccacacgagacc

SEQ ID NO: 180752 - DNA, 20 bp, Artificial Sequence
  Description of Artificial Sequence: Synthetic oligonucleotide
  Target: LAMA2; (+) strand; PAM type: NRG; PAM sequence: AAG
ttgccacacgagacctggta

SEQ ID NO: 180753 - DNA, 20 bp, Artificial Sequence
  Description of Artificial Sequence: Synthetic oligonucleotide
  Target: LAMA2; (+) strand; PAM type: NRG; PAM sequence: TAG
cctggtaaagatcatatgca

SEQ ID NO: 180754 - DNA, 20 bp, Artificial Sequence
  Description of Artificial Sequence: Synthetic oligonucleotide
  Target: LAMA2; (+) strand; PAM type: NRG; PAM sequence: CAG
ggtaaagatcatatgcatag

SEQ ID NO: 180755 - DNA, 20 bp, Artificial Sequence
  Description of Artificial Sequence: Synthetic oligonucleotide
  Target: LAMA2; (+) strand; PAM type: NRG; PAM sequence: GAG
taaagatcatatgcatagca

SEQ ID NO: 180756 - DNA, 20 bp, Artificial Sequence
  Description of Artificial Sequence: Synthetic oligonucleotide
  Target: LAMA2; (+) strand; PAM type: NRG; PAM sequence: CAG
aatgcgtttgcttcttttat

SEQ ID NO: 180757 - DNA, 20 bp, Artificial Sequence
  Description of Artificial Sequence: Synthetic oligonucleotide
  Target: LAMA2; (+) strand; PAM type: NRG; PAM sequence: TGG
ttgcttcttttatcagttat

SEQ ID NO: 180758 - DNA, 20 bp, Artificial Sequence
  Description of Artificial Sequence: Synthetic oligonucleotide
  Target: LAMA2; (+) strand; PAM type: NRG; PAM sequence: CAG
tcagttattggtaaaatcat

SEQ ID NO: 180759 - DNA, 20 bp, Artificial Sequence
  Description of Artificial Sequence: Synthetic oligonucleotide
  Target: LAMA2; (+) strand; PAM type: NRG; PAM sequence: TGG
ttggtaaaatcatcagttat

SEQ ID NO: 180760 - DNA, 20 bp, Artificial Sequence
  Description of Artificial Sequence: Synthetic oligonucleotide
  Target: LAMA2; (+) strand; PAM type: NRG; PAM sequence: CAG
tcagttattggtaaaattat

SEQ ID NO: 180761 - DNA, 20 bp, Artificial Sequence
  Description of Artificial Sequence: Synthetic oligonucleotide
  Target: LAMA2; (+) strand; PAM type: NRG; PAM sequence: AAG
attatcagttattttctaaa

SEQ ID NO: 180762 - DNA, 20 bp, Artificial Sequence
  Description of Artificial Sequence: Synthetic oligonucleotide
  Target: LAMA2; (+) strand; PAM type: NRG; PAM sequence: TGG
cagttattttctaaaaagcc

SEQ ID NO: 180763 - DNA, 20 bp, Artificial Sequence
  Description of Artificial Sequence: Synthetic oligonucleotide
  Target: LAMA2; (+) strand; PAM type: NRG; PAM sequence: GGG
agttattttctaaaaagcct

SEQ ID NO: 180764 - DNA, 20 bp, Artificial Sequence
  Description of Artificial Sequence: Synthetic oligonucleotide
  Target: LAMA2; (+) strand; PAM type: NRG; PAM sequence: TGG
aaaagcctgggatgattgtc

SEQ ID NO: 180765 - DNA, 20 bp, Artificial Sequence
  Description of Artificial Sequence: Synthetic oligonucleotide
  Target: LAMA2; (+) strand; PAM type: NRG; PAM sequence: CAG
agcctgggatgattgtctgg

SEQ ID NO: 180766 - DNA, 20 bp, Artificial Sequence
  Description of Artificial Sequence: Synthetic oligonucleotide
  Target: LAMA2; (+) strand; PAM type: NRG; PAM sequence: AAG
gggatgattgtctggcagcc

SEQ ID NO: 180767 - DNA, 20 bp, Artificial Sequence
  Description of Artificial Sequence: Synthetic oligonucleotide
  Target: LAMA2; (+) strand; PAM type: NRG; PAM sequence: TGG
gattgtctggcagccaagaa

SEQ ID NO: 180768 - DNA, 20 bp, Artificial Sequence
  Description of Artificial Sequence: Synthetic oligonucleotide
  Target: LAMA2; (+) strand; PAM type: NRG; PAM sequence: GGG
attgtctggcagccaagaat

SEQ ID NO: 180769 - DNA, 20 bp, Artificial Sequence
  Description of Artificial Sequence: Synthetic oligonucleotide
  Target: LAMA2; (+) strand; PAM type: NRG; PAM sequence: CAG
gcagccaagaatgggtgata

SEQ ID NO: 180770 - DNA, 20 bp, Artificial Sequence
  Description of Artificial Sequence: Synthetic oligonucleotide
  Target: LAMA2; (+) strand; PAM type: NRG; PAM sequence: TAG
ccaagaatgggtgatacaga

SEQ ID NO: 180771 - DNA, 20 bp, Artificial Sequence
  Description of Artificial Sequence: Synthetic oligonucleotide
  Target: LAMA2; (+) strand; PAM type: NRG; PAM sequence: CAG
ttcaataataactttaatca

SEQ ID NO: 180772 - DNA, 20 bp, Artificial Sequence
  Description of Artificial Sequence: Synthetic oligonucleotide
  Target: LAMA2; (+) strand; PAM type: NRG; PAM sequence: AAG
aactccccacataatccttt

SEQ ID NO: 180773 - DNA, 20 bp, Artificial Sequence
  Description of Artificial Sequence: Synthetic oligonucleotide
  Target: LAMA2; (+) strand; PAM type: NRG; PAM sequence: CGG
aatcctttaagcaatacatc

SEQ ID NO: 180774 - DNA, 20 bp, Artificial Sequence
  Description of Artificial Sequence: Synthetic oligonucleotide
  Target: LAMA2; (+) strand; PAM type: NRG; PAM sequence: CAG
catccggtaataatttttcc

SEQ ID NO: 180775 - DNA, 20 bp, Artificial Sequence
  Description of Artificial Sequence: Synthetic oligonucleotide
  Target: LAMA2; (+) strand; PAM type: NRG; PAM sequence: TGG
ggtaataatttttcccagca

SEQ ID NO: 180776 - DNA, 20 bp, Artificial Sequence
  Description of Artificial Sequence: Synthetic oligonucleotide
  Target: LAMA2; (+) strand; PAM type: NRG; PAM sequence: GAG
taataatttttcccagcatg

SEQ ID NO: 180777 - DNA, 20 bp, Artificial Sequence
  Description of Artificial Sequence: Synthetic oligonucleotide
  Target: LAMA2; (+) strand; PAM type: NRG; PAM sequence: CAG
tttcccagcatggagccata

SEQ ID NO: 180778 - DNA, 20 bp, Artificial Sequence
  Description of Artificial Sequence: Synthetic oligonucleotide
  Target: LAMA2; (+) strand; PAM type: NRG; PAM sequence: CAG
cccagcatggagccatacag

SEQ ID NO: 180779 - DNA, 20 bp, Artificial Sequence
  Description of Artificial Sequence: Synthetic oligonucleotide
  Target: LAMA2; (+) strand; PAM type: NRG; PAM sequence: CAG
atgcttccttaatcttcttt

SEQ ID NO: 180780 - DNA, 20 bp, Artificial Sequence
  Description of Artificial Sequence: Synthetic oligonucleotide
  Target: LAMA2; (+) strand; PAM type: NRG; PAM sequence: GAG
gcttccttaatcttctttca

SEQ ID NO: 180781 - DNA, 20 bp, Artificial Sequence
  Description of Artificial Sequence: Synthetic oligonucleotide
  Target: LAMA2; (+) strand; PAM type: NRG; PAM sequence: GAG
taatcttctttcagagacct

SEQ ID NO: 180782 - DNA, 20 bp, Artificial Sequence
  Description of Artificial Sequence: Synthetic oligonucleotide
  Target: LAMA2; (+) strand; PAM type: NRG; PAM sequence: AAG
tttcagagacctgagttgaa

SEQ ID NO: 180783 - DNA, 20 bp, Artificial Sequence
  Description of Artificial Sequence: Synthetic oligonucleotide
  Target: LAMA2; (+) strand; PAM type: NRG; PAM sequence: AGG
ttcagagacctgagttgaaa

SEQ ID NO: 180784 - DNA, 20 bp, Artificial Sequence
  Description of Artificial Sequence: Synthetic oligonucleotide
  Target: LAMA2; (+) strand; PAM type: NRG; PAM sequence: AAG
tgagttgaaaaggtgattat

SEQ ID NO: 180785 - DNA, 20 bp, Artificial Sequence
  Description of Artificial Sequence: Synthetic oligonucleotide
  Target: LAMA2; (+) strand; PAM type: NRG; PAM sequence: TGG
aggtgattataagtattctt

SEQ ID NO: 180786 - DNA, 20 bp, Artificial Sequence
  Description of Artificial Sequence: Synthetic oligonucleotide
  Target: LAMA2; (+) strand; PAM type: NRG; PAM sequence: TGG
tctttggcctcatttttttc

SEQ ID NO: 180787 - DNA, 20 bp, Artificial Sequence
  Description of Artificial Sequence: Synthetic oligonucleotide
  Target: LAMA2; (+) strand; PAM type: NRG; PAM sequence: CAG
tggcctcatttttttctggt

SEQ ID NO: 180788 - DNA, 20 bp, Artificial Sequence
  Description of Artificial Sequence: Synthetic oligonucleotide
  Target: LAMA2; (+) strand; PAM type: NRG; PAM sequence: TGG
atttcttactgaattctttc

SEQ ID NO: 180789 - DNA, 20 bp, Artificial Sequence
  Description of Artificial Sequence: Synthetic oligonucleotide
  Target: LAMA2; (+) strand; PAM type: NRG; PAM sequence: GGG
tttcttactgaattctttct

SEQ ID NO: 180790 - DNA, 20 bp, Artificial Sequence
  Description of Artificial Sequence: Synthetic oligonucleotide
  Target: LAMA2; (+) strand; PAM type: NRG; PAM sequence: TGG
ctttctgggaacataccttt

SEQ ID NO: 180791 - DNA, 20 bp, Artificial Sequence
  Description of Artificial Sequence: Synthetic oligonucleotide
  Target: LAMA2; (+) strand; PAM type: NRG; PAM sequence: AAG
acattttacgactgtaataa

SEQ ID NO: 180792 - DNA, 20 bp, Artificial Sequence
  Description of Artificial Sequence: Synthetic oligonucleotide
  Target: LAMA2; (+) strand; PAM type: NRG; PAM sequence: AGG
cattttacgactgtaataaa

SEQ ID NO: 180793 - DNA, 20 bp, Artificial Sequence
  Description of Artificial Sequence: Synthetic oligonucleotide
  Target: LAMA2; (+) strand; PAM type: NRG; PAM sequence: TAG
tgtaataaaaggatatgtct

SEQ ID NO: 180794 - DNA, 20 bp, Artificial Sequence
  Description of Artificial Sequence: Synthetic oligonucleotide
  Target: LAMA2; (+) strand; PAM type: NRG; PAM sequence: CAG
ccatgtgcatcataatatca

SEQ ID NO: 180795 - DNA, 20 bp, Artificial Sequence
  Description of Artificial Sequence: Synthetic oligonucleotide
  Target: LAMA2; (+) strand; PAM type: NRG; PAM sequence: CAG
atatcacagccacaaaaatt

SEQ ID NO: 180796 - DNA, 20 bp, Artificial Sequence
  Description of Artificial Sequence: Synthetic oligonucleotide
  Target: LAMA2; (+) strand; PAM type: NRG; PAM sequence: TAG
agccacaaaaattcagaaaa

SEQ ID NO: 180797 - DNA, 20 bp, Artificial Sequence
  Description of Artificial Sequence: Synthetic oligonucleotide
  Target: LAMA2; (+) strand; PAM type: NRG; PAM sequence: TGG
caccaattctattttcaaaa

SEQ ID NO: 180798 - DNA, 20 bp, Artificial Sequence
  Description of Artificial Sequence: Synthetic oligonucleotide
  Target: LAMA2; (+) strand; PAM type: NRG; PAM sequence: CAG
ttcaaaatggatttctgcaa

SEQ ID NO: 180799 - DNA, 20 bp, Artificial Sequence
  Description of Artificial Sequence: Synthetic oligonucleotide
  Target: LAMA2; (+) strand; PAM type: NRG; PAM sequence: GAG
caaaatggatttctgcaaca

SEQ ID NO: 180800 - DNA, 20 bp, Artificial Sequence
  Description of Artificial Sequence: Synthetic oligonucleotide
  Target: LAMA2; (+) strand; PAM type: NRG; PAM sequence: CAG
ctgcaacagagtgacatatt

SEQ ID NO: 180801 - DNA, 20 bp, Artificial Sequence
  Description of Artificial Sequence: Synthetic oligonucleotide
  Target: LAMA2; (+) strand; PAM type: NRG; PAM sequence: TAG
gagtgacatattcagcaatt

SEQ ID NO: 180802 - DNA, 20 bp, Artificial Sequence
  Description of Artificial Sequence: Synthetic oligonucleotide
  Target: LAMA2; (+) strand; PAM type: NRG; PAM sequence: AAG
atattcagcaatttagccac

SEQ ID NO: 180803 - DNA, 20 bp, Artificial Sequence
  Description of Artificial Sequence: Synthetic oligonucleotide
  Target: LAMA2; (+) strand; PAM type: NRG; PAM sequence: AAG
gaccctaacataaaccacac

SEQ ID NO: 180804 - DNA, 20 bp, Artificial Sequence
  Description of Artificial Sequence: Synthetic oligonucleotide
  Target: LAMA2; (+) strand; PAM type: NRG; PAM sequence: AAG
taacataaaccacacaagaa

SEQ ID NO: 180805 - DNA, 20 bp, Artificial Sequence
  Description of Artificial Sequence: Synthetic oligonucleotide
  Target: LAMA2; (+) strand; PAM type: NRG; PAM sequence: TGG
ttctctgtgtatctaaccac

SEQ ID NO: 180806 - DNA, 20 bp, Artificial Sequence
  Description of Artificial Sequence: Synthetic oligonucleotide
  Target: LAMA2; (+) strand; PAM type: NRG; PAM sequence: GGG
tctctgtgtatctaaccact

SEQ ID NO: 180807 - DNA, 20 bp, Artificial Sequence
  Description of Artificial Sequence: Synthetic oligonucleotide
  Target: LAMA2; (+) strand; PAM type: NRG; PAM sequence: GGG
ctctgtgtatctaaccactg

SEQ ID NO: 180808 - DNA, 20 bp, Artificial Sequence
  Description of Artificial Sequence: Synthetic oligonucleotide
  Target: LAMA2; (+) strand; PAM type: NRG; PAM sequence: TAG
gggtatgtttactctattaa

SEQ ID NO: 180809 - DNA, 20 bp, Artificial Sequence
  Description of Artificial Sequence: Synthetic oligonucleotide
  Target: LAMA2; (+) strand; PAM type: NRG; PAM sequence: GAG
gtatgtttactctattaata

SEQ ID NO: 180810 - DNA, 20 bp, Artificial Sequence
  Description of Artificial Sequence: Synthetic oligonucleotide
  Target: LAMA2; (+) strand; PAM type: NRG; PAM sequence: GAG
atgtttactctattaataga

SEQ ID NO: 180811 - DNA, 20 bp, Artificial Sequence
  Description of Artificial Sequence: Synthetic oligonucleotide
  Target: LAMA2; (+) strand; PAM type: NRG; PAM sequence: GAG
tattaatagagagatttcat

SEQ ID NO: 180812 - DNA, 20 bp, Artificial Sequence
  Description of Artificial Sequence: Synthetic oligonucleotide
  Target: LAMA2; (+) strand; PAM type: NRG; PAM sequence: TGG
atagagagatttcatgagtg

SEQ ID NO: 180813 - DNA, 20 bp, Artificial Sequence
  Description of Artificial Sequence: Synthetic oligonucleotide
  Target: LAMA2; (+) strand; PAM type: NRG; PAM sequence: GAG
agagagatttcatgagtgtg

SEQ ID NO: 180814 - DNA, 20 bp, Artificial Sequence
  Description of Artificial Sequence: Synthetic oligonucleotide
  Target: LAMA2; (+) strand; PAM type: NRG; PAM sequence: TGG
atgagtgtggagctcactga

SEQ ID NO: 180815 - DNA, 20 bp, Artificial Sequence
  Description of Artificial Sequence: Synthetic oligonucleotide
  Target: LAMA2; (+) strand; PAM type: NRG; PAM sequence: GGG
tgagtgtggagctcactgat

SEQ ID NO: 180816 - DNA, 20 bp, Artificial Sequence
  Description of Artificial Sequence: Synthetic oligonucleotide
  Target: LAMA2; (+) strand; PAM type: NRG; PAM sequence: AAG
gctcactgatgggcacataa

SEQ ID NO: 180817 - DNA, 20 bp, Artificial Sequence
  Description of Artificial Sequence: Synthetic oligonucleotide
  Target: LAMA2; (+) strand; PAM type: NRG; PAM sequence: CAG
actgatgggcacataaaagt

SEQ ID NO: 180818 - DNA, 20 bp, Artificial Sequence
  Description of Artificial Sequence: Synthetic oligonucleotide
  Target: LAMA2; (+) strand; PAM type: NRG; PAM sequence: TGG
cataaaagtcagttacgatc

SEQ ID NO: 180819 - DNA, 20 bp, Artificial Sequence
  Description of Artificial Sequence: Synthetic oligonucleotide
  Target: LAMA2; (+) strand; PAM type: NRG; PAM sequence: GGG
ataaaagtcagttacgatct

SEQ ID NO: 180820 - DNA, 20 bp, Artificial Sequence
  Description of Artificial Sequence: Synthetic oligonucleotide
  Target: LAMA2; (+) strand; PAM type: NRG; PAM sequence: CAG
agtcagttacgatctgggct

SEQ ID NO: 180821 - DNA, 20 bp, Artificial Sequence
  Description of Artificial Sequence: Synthetic oligonucleotide
  Target: LAMA2; (+) strand; PAM type: NRG; PAM sequence: AGG
gtcagttacgatctgggctc

SEQ ID NO: 180822 - DNA, 20 bp, Artificial Sequence
  Description of Artificial Sequence: Synthetic oligonucleotide
  Target: LAMA2; (+) strand; PAM type: NRG; PAM sequence: TGG
ttacgatctgggctcaggaa

SEQ ID NO: 180823 - DNA, 20 bp, Artificial Sequence
  Description of Artificial Sequence: Synthetic oligonucleotide
  Target: LAMA2; (+) strand; PAM type: NRG; PAM sequence: CAG
tcaggaatggcttccgttgt

SEQ ID NO: 180824 - DNA, 20 bp, Artificial Sequence
  Description of Artificial Sequence: Synthetic oligonucleotide
  Target: LAMA2; (+) strand; PAM type: NRG; PAM sequence: TGG
agcaatcaaaaccataatga

SEQ ID NO: 180825 - DNA, 20 bp, Artificial Sequence
  Description of Artificial Sequence: Synthetic oligonucleotide
  Target: LAMA2; (+) strand; PAM type: NRG; PAM sequence: GGG
gcaatcaaaaccataatgat

SEQ ID NO: 180826 - DNA, 20 bp, Artificial Sequence
  Description of Artificial Sequence: Synthetic oligonucleotide
  Target: LAMA2; (+) strand; PAM type: NRG; PAM sequence: TGG
aaaaccataatgatgggaaa

SEQ ID NO: 180827 - DNA, 20 bp, Artificial Sequence
  Description of Artificial Sequence: Synthetic oligonucleotide
  Target: LAMA2; (+) strand; PAM type: NRG; PAM sequence: AAG
tggaaatcattcactctgtc

SEQ ID NO: 180828 - DNA, 20 bp, Artificial Sequence
  Description of Artificial Sequence: Synthetic oligonucleotide
  Target: LAMA2; (+) strand; PAM type: NRG; PAM sequence: AAG
tctgtcaagaattcaaaaac

SEQ ID NO: 180829 - DNA, 20 bp, Artificial Sequence
  Description of Artificial Sequence: Synthetic oligonucleotide
  Target: LAMA2; (+) strand; PAM type: NRG; PAM sequence: AGG
ctgtcaagaattcaaaaaca

SEQ ID NO: 180830 - DNA, 20 bp, Artificial Sequence
  Description of Artificial Sequence: Synthetic oligonucleotide
  Target: LAMA2; (+) strand; PAM type: NRG; PAM sequence: GAG
caagaattcaaaaacaaggt

SEQ ID NO: 180831 - DNA, 20 bp, Artificial Sequence
  Description of Artificial Sequence: Synthetic oligonucleotide
  Target: LAMA2; (+) strand; PAM type: NRG; PAM sequence: CAG
aaaaacaaggtgagttttta

SEQ ID NO: 180832 - DNA, 20 bp, Artificial Sequence
  Description of Artificial Sequence: Synthetic oligonucleotide
  Target: LAMA2; (+) strand; PAM type: NRG; PAM sequence: TAG
tttacagtaataatgcaata

SEQ ID NO: 180833 - DNA, 20 bp, Artificial Sequence
  Description of Artificial Sequence: Synthetic oligonucleotide
  Target: LAMA2; (+) strand; PAM type: NRG; PAM sequence: AGG
ttacagtaataatgcaatat

SEQ ID NO: 180834 - DNA, 20 bp, Artificial Sequence
  Description of Artificial Sequence: Synthetic oligonucleotide
  Target: LAMA2; (+) strand; PAM type: NRG; PAM sequence: AAG
ggccttaatcatgaaatcca

SEQ ID NO: 180835 - DNA, 20 bp, Artificial Sequence
  Description of Artificial Sequence: Synthetic oligonucleotide
  Target: LAMA2; (+) strand; PAM type: NRG; PAM sequence: AAG
aagtgcacatgtacctgatc

SEQ ID NO: 180836 - DNA, 20 bp, Artificial Sequence
  Description of Artificial Sequence: Synthetic oligonucleotide
  Target: LAMA2; (+) strand; PAM type: NRG; PAM sequence: GAG
gtgcacatgtacctgatcaa

SEQ ID NO: 180837 - DNA, 20 bp, Artificial Sequence
  Description of Artificial Sequence: Synthetic oligonucleotide
  Target: LAMA2; (+) strand; PAM type: NRG; PAM sequence: AGG
tgcacatgtacctgatcaag

SEQ ID NO: 180838 - DNA, 20 bp, Artificial Sequence
  Description of Artificial Sequence: Synthetic oligonucleotide
  Target: LAMA2; (+) strand; PAM type: NRG; PAM sequence: AAG
acatgtacctgatcaagagg

SEQ ID NO: 180839 - DNA, 20 bp, Artificial Sequence
  Description of Artificial Sequence: Synthetic oligonucleotide
  Target: LAMA2; (+) strand; PAM type: NRG; PAM sequence: AGG
catgtacctgatcaagagga

SEQ ID NO: 180840 - DNA, 20 bp, Artificial Sequence
  Description of Artificial Sequence: Synthetic oligonucleotide
  Target: LAMA2; (+) strand; PAM type: NRG; PAM sequence: TAG
gaaggctccgtctataattt

SEQ ID NO: 180841 - DNA, 20 bp, Artificial Sequence
  Description of Artificial Sequence: Synthetic oligonucleotide
  Target: LAMA2; (+) strand; PAM type: NRG; PAM sequence: GAG
ctataattttagctactcac

SEQ ID NO: 180842 - DNA, 20 bp, Artificial Sequence
  Description of Artificial Sequence: Synthetic oligonucleotide
  Target: LAMA2; (+) strand; PAM type: NRG; PAM sequence: CAG
attttagctactcacgagtt

SEQ ID NO: 180843 - DNA, 20 bp, Artificial Sequence
  Description of Artificial Sequence: Synthetic oligonucleotide
  Target: LAMA2; (+) strand; PAM type: NRG; PAM sequence: CAG
agttcagtgaaaaatttata

SEQ ID NO: 180844 - DNA, 20 bp, Artificial Sequence
  Description of Artificial Sequence: Synthetic oligonucleotide
  Target: LAMA2; (+) strand; PAM type: NRG; PAM sequence: TGG
aatttatacagtcatttttt

SEQ ID NO: 180845 - DNA, 20 bp, Artificial Sequence
  Description of Artificial Sequence: Synthetic oligonucleotide
  Target: LAMA2; (+) strand; PAM type: NRG; PAM sequence: TAG
atacagtcatttttttggct

SEQ ID NO: 180846 - DNA, 20 bp, Artificial Sequence
  Description of Artificial Sequence: Synthetic oligonucleotide
  Target: LAMA2; (+) strand; PAM type: NRG; PAM sequence: TAG
catttttttggcttagatta

SEQ ID NO: 180847 - DNA, 20 bp, Artificial Sequence
  Description of Artificial Sequence: Synthetic oligonucleotide
  Target: LAMA2; (+) strand; PAM type: NRG; PAM sequence: AGG
atttttttggcttagattat

SEQ ID NO: 180848 - DNA, 20 bp, Artificial Sequence
  Description of Artificial Sequence: Synthetic oligonucleotide
  Target: LAMA2; (+) strand; PAM type: NRG; PAM sequence: TGG
ggcttagattataggtgatt

SEQ ID NO: 180849 - DNA, 20 bp, Artificial Sequence
  Description of Artificial Sequence: Synthetic oligonucleotide
  Target: LAMA2; (+) strand; PAM type: NRG; PAM sequence: GGG
gcttagattataggtgattt

SEQ ID NO: 180850 - DNA, 20 bp, Artificial Sequence
  Description of Artificial Sequence: Synthetic oligonucleotide
  Target: LAMA2; (+) strand; PAM type: NRG; PAM sequence: TAG
agattataggtgatttgggt

SEQ ID NO: 180851 - DNA, 20 bp, Artificial Sequence
  Description of Artificial Sequence: Synthetic oligonucleotide
  Target: LAMA2; (+) strand; PAM type: NRG; PAM sequence: AAG
gggttagacatgactgattg

SEQ ID NO: 180852 - DNA, 20 bp, Artificial Sequence
  Description of Artificial Sequence: Synthetic oligonucleotide
  Target: LAMA2; (+) strand; PAM type: NRG; PAM sequence: GAG
gttagacatgactgattgaa

SEQ ID NO: 180853 - DNA, 20 bp, Artificial Sequence
  Description of Artificial Sequence: Synthetic oligonucleotide
  Target: LAMA2; (+) strand; PAM type: NRG; PAM sequence: GAG
tatcattttcttttgaaact

SEQ ID NO: 180854 - DNA, 20 bp, Artificial Sequence
  Description of Artificial Sequence: Synthetic oligonucleotide
  Target: LAMA2; (+) strand; PAM type: NRG; PAM sequence: GAG
tcattttcttttgaaactga

SEQ ID NO: 180855 - DNA, 20 bp, Artificial Sequence
  Description of Artificial Sequence: Synthetic oligonucleotide
  Target: LAMA2; (+) strand; PAM type: NRG; PAM sequence: AAG
aaactgagagcttaatttga

SEQ ID NO: 180856 - DNA, 20 bp, Artificial Sequence
  Description of Artificial Sequence: Synthetic oligonucleotide
  Target: LAMA2; (+) strand; PAM type: NRG; PAM sequence: TGG
gtaatatgtttgaaaaatgt

SEQ ID NO: 180857 - DNA, 20 bp, Artificial Sequence
  Description of Artificial Sequence: Synthetic oligonucleotide
  Target: LAMA2; (+) strand; PAM type: NRG; PAM sequence: GGG
taatatgtttgaaaaatgtt

SEQ ID NO: 180858 - DNA, 20 bp, Artificial Sequence
  Description of Artificial Sequence: Synthetic oligonucleotide
  Target: LAMA2; (+) strand; PAM type: NRG; PAM sequence: AAG
tcttttctccctattttgtc

SEQ ID NO: 180859 - DNA, 20 bp, Artificial Sequence
  Description of Artificial Sequence: Synthetic oligonucleotide
  Target: LAMA2; (+) strand; PAM type: NRG; PAM sequence: AAG
ttgtcaagatgtttccttta

SEQ ID NO: 180860 - DNA, 20 bp, Artificial Sequence
  Description of Artificial Sequence: Synthetic oligonucleotide
  Target: LAMA2; (+) strand; PAM type: NRG; PAM sequence: TGG
tcaagatgtttcctttaaag

SEQ ID NO: 180861 - DNA, 20 bp, Artificial Sequence
  Description of Artificial Sequence: Synthetic oligonucleotide
  Target: LAMA2; (+) strand; PAM type: NRG; PAM sequence: CAG
gtttcctttaaagtggccca

SEQ ID NO: 180862 - DNA, 20 bp, Artificial Sequence
  Description of Artificial Sequence: Synthetic oligonucleotide
  Target: LAMA2; (+) strand; PAM type: NRG; PAM sequence: TGG
tcctttaaagtggcccacag

SEQ ID NO: 180863 - DNA, 20 bp, Artificial Sequence
  Description of Artificial Sequence: Synthetic oligonucleotide
  Target: LAMA2; (+) strand; PAM type: NRG; PAM sequence: TAG
gtggcccacagtggaatcta

SEQ ID NO: 180864 - DNA, 20 bp, Artificial Sequence
  Description of Artificial Sequence: Synthetic oligonucleotide
  Target: LAMA2; (+) strand; PAM type: NRG; PAM sequence: AGG
tggcccacagtggaatctat

SEQ ID NO: 180865 - DNA, 20 bp, Artificial Sequence
  Description of Artificial Sequence: Synthetic oligonucleotide
  Target: LAMA2; (+) strand; PAM type: NRG; PAM sequence: GAG
gcccacagtggaatctatag

SEQ ID NO: 180866 - DNA, 20 bp, Artificial Sequence
  Description of Artificial Sequence: Synthetic oligonucleotide
  Target: LAMA2; (+) strand; PAM type: NRG; PAM sequence: TGG
cacagtggaatctataggag

SEQ ID NO: 180867 - DNA, 20 bp, Artificial Sequence
  Description of Artificial Sequence: Synthetic oligonucleotide
  Target: LAMA2; (+) strand; PAM type: NRG; PAM sequence: TAG
agtggaatctataggagtgg

SEQ ID NO: 180868 - DNA, 20 bp, Artificial Sequence
  Description of Artificial Sequence: Synthetic oligonucleotide
  Target: LAMA2; (+) strand; PAM type: NRG; PAM sequence: AGG
gtggaatctataggagtggt

SEQ ID NO: 180869 - DNA, 20 bp, Artificial Sequence
  Description of Artificial Sequence: Synthetic oligonucleotide
  Target: LAMA2; (+) strand; PAM type: NRG; PAM sequence: GGG
tggaatctataggagtggta

SEQ ID NO: 180870 - DNA, 20 bp, Artificial Sequence
  Description of Artificial Sequence: Synthetic oligonucleotide
  Target: LAMA2; (+) strand; PAM type: NRG; PAM sequence: TAG
tctataggagtggtagggca

SEQ ID NO: 180871 - DNA, 20 bp, Artificial Sequence
  Description of Artificial Sequence: Synthetic oligonucleotide
  Target: LAMA2; (+) strand; PAM type: NRG; PAM sequence: CAG
gagtggtagggcatagttat

SEQ ID NO: 180872 - DNA, 20 bp, Artificial Sequence
  Description of Artificial Sequence: Synthetic oligonucleotide
  Target: LAMA2; (+) strand; PAM type: NRG; PAM sequence: AAG
ccaaacatttgtatgcctgc

SEQ ID NO: 180873 - DNA, 20 bp, Artificial Sequence
  Description of Artificial Sequence: Synthetic oligonucleotide
  Target: LAMA2; (+) strand; PAM type: NRG; PAM sequence: TAG
gcaagtaaataattgatcaa

SEQ ID NO: 180874 - DNA, 20 bp, Artificial Sequence
  Description of Artificial Sequence: Synthetic oligonucleotide
  Target: LAMA2; (+) strand; PAM type: NRG; PAM sequence: CGG
aacatgacatgtttatgatt

SEQ ID NO: 180875 - DNA, 20 bp, Artificial Sequence
  Description of Artificial Sequence: Synthetic oligonucleotide
  Target: LAMA2; (+) strand; PAM type: NRG; PAM sequence: GGG
acatgacatgtttatgattc

SEQ ID NO: 180876 - DNA, 20 bp, Artificial Sequence
  Description of Artificial Sequence: Synthetic oligonucleotide
  Target: LAMA2; (+) strand; PAM type: NRG; PAM sequence: GGG
catgacatgtttatgattcg

SEQ ID NO: 180877 - DNA, 20 bp, Artificial Sequence
  Description of Artificial Sequence: Synthetic oligonucleotide
  Target: LAMA2; (+) strand; PAM type: NRG; PAM sequence: AAG
attgttttatctgatcacat

SEQ ID NO: 180878 - DNA, 20 bp, Artificial Sequence
  Description of Artificial Sequence: Synthetic oligonucleotide
  Target: LAMA2; (+) strand; PAM type: NRG; PAM sequence: CAG
gttttatctgatcacataag

SEQ ID NO: 180879 - DNA, 20 bp, Artificial Sequence
  Description of Artificial Sequence: Synthetic oligonucleotide
  Target: LAMA2; (+) strand; PAM type: NRG; PAM sequence: AGG
ttttatctgatcacataagc

SEQ ID NO: 180880 - DNA, 20 bp, Artificial Sequence
  Description of Artificial Sequence: Synthetic oligonucleotide
  Target: LAMA2; (+) strand; PAM type: NRG; PAM sequence: CAG
cataagcaggtattttgttc

SEQ ID NO: 180881 - DNA, 20 bp, Artificial Sequence
  Description of Artificial Sequence: Synthetic oligonucleotide
  Target: LAMA2; (+) strand; PAM type: NRG; PAM sequence: TAG
caggtattttgttccagtgt

SEQ ID NO: 180882 - DNA, 20 bp, Artificial Sequence
  Description of Artificial Sequence: Synthetic oligonucleotide
  Target: LAMA2; (+) strand; PAM type: NRG; PAM sequence: GAG
ggtattttgttccagtgtta

SEQ ID NO: 180883 - DNA, 20 bp, Artificial Sequence
  Description of Artificial Sequence: Synthetic oligonucleotide
  Target: LAMA2; (+) strand; PAM type: NRG; PAM sequence: AAG
ttttgttccagtgttagaga

SEQ ID NO: 180884 - DNA, 20 bp, Artificial Sequence
  Description of Artificial Sequence: Synthetic oligonucleotide
  Target: LAMA2; (+) strand; PAM type: NRG; PAM sequence: TGG
tatacactcaaacttttatg

SEQ ID NO: 180885 - DNA, 20 bp, Artificial Sequence
  Description of Artificial Sequence: Synthetic oligonucleotide
  Target: LAMA2; (+) strand; PAM type: NRG; PAM sequence: CAG
ctcaaacttttatgtggtca

SEQ ID NO: 180886 - DNA, 20 bp, Artificial Sequence
  Description of Artificial Sequence: Synthetic oligonucleotide
  Target: LAMA2; (+) strand; PAM type: NRG; PAM sequence: AAG
ggtcacagacatatatataa

SEQ ID NO: 180887 - DNA, 20 bp, Artificial Sequence
  Description of Artificial Sequence: Synthetic oligonucleotide
  Target: LAMA2; (+) strand; PAM type: NRG; PAM sequence: AAG
atataaaagatctcacaacc

SEQ ID NO: 180888 - DNA, 20 bp, Artificial Sequence
  Description of Artificial Sequence: Synthetic oligonucleotide
  Target: LAMA2; (+) strand; PAM type: NRG; PAM sequence: CAG
aaaagatctcacaaccaaga

SEQ ID NO: 180889 - DNA, 20 bp, Artificial Sequence
  Description of Artificial Sequence: Synthetic oligonucleotide
  Target: LAMA2; (+) strand; PAM type: NRG; PAM sequence: AAG
cacaaccaagacagaaatcc

SEQ ID NO: 180890 - DNA, 20 bp, Artificial Sequence
  Description of Artificial Sequence: Synthetic oligonucleotide
  Target: LAMA2; (+) strand; PAM type: NRG; PAM sequence: GAG
aatccaagtctattaattct

SEQ ID NO: 180891 - DNA, 20 bp, Artificial Sequence
  Description of Artificial Sequence: Synthetic oligonucleotide
  Target: LAMA2; (+) strand; PAM type: NRG; PAM sequence: TAG
aagtctattaattctgagtg

SEQ ID NO: 180892 - DNA, 20 bp, Artificial Sequence
  Description of Artificial Sequence: Synthetic oligonucleotide
  Target: LAMA2; (+) strand; PAM type: NRG; PAM sequence: AAG
gtgtagtgctattgcttttt

SEQ ID NO: 180893 - DNA, 20 bp, Artificial Sequence
  Description of Artificial Sequence: Synthetic oligonucleotide
  Target: LAMA2; (+) strand; PAM type: NRG; PAM sequence: TAG
ataattgctctaattctgtg

SEQ ID NO: 180894 - DNA, 20 bp, Artificial Sequence
  Description of Artificial Sequence: Synthetic oligonucleotide
  Target: LAMA2; (+) strand; PAM type: NRG; PAM sequence: TGG
tgctctaattctgtgtagta

SEQ ID NO: 180895 - DNA, 20 bp, Artificial Sequence
  Description of Artificial Sequence: Synthetic oligonucleotide
  Target: LAMA2; (+) strand; PAM type: NRG; PAM sequence: GAG
cattaccaatatctgcaaat

SEQ ID NO: 180896 - DNA, 20 bp, Artificial Sequence
  Description of Artificial Sequence: Synthetic oligonucleotide
  Target: LAMA2; (+) strand; PAM type: NRG; PAM sequence: TAG
gttacttctgctaatataaa

SEQ ID NO: 180897 - DNA, 20 bp, Artificial Sequence
  Description of Artificial Sequence: Synthetic oligonucleotide
  Target: LAMA2; (+) strand; PAM type: NRG; PAM sequence: CAG
tcaattaatgttgccaatgc

SEQ ID NO: 180898 - DNA, 20 bp, Artificial Sequence
  Description of Artificial Sequence: Synthetic oligonucleotide
  Target: LAMA2; (+) strand; PAM type: NRG; PAM sequence: CAG
tgcatttaatacatatctgc

SEQ ID NO: 180899 - DNA, 20 bp, Artificial Sequence
  Description of Artificial Sequence: Synthetic oligonucleotide
  Target: LAMA2; (+) strand; PAM type: NRG; PAM sequence: AGG
gcatttaatacatatctgcc

SEQ ID NO: 180900 - DNA, 20 bp, Artificial Sequence
  Description of Artificial Sequence: Synthetic oligonucleotide
  Target: LAMA2; (+) strand; PAM type: NRG; PAM sequence: AAG
atatctgccaggcaccttct

SEQ ID NO: 180901 - DNA, 20 bp, Artificial Sequence
  Description of Artificial Sequence: Synthetic oligonucleotide
  Target: LAMA2; (+) strand; PAM type: NRG; PAM sequence: AAG
gcaccttctaagtaccatgt

SEQ ID NO: 180902 - DNA, 20 bp, Artificial Sequence
  Description of Artificial Sequence: Synthetic oligonucleotide
  Target: LAMA2; (+) strand; PAM type: NRG; PAM sequence: AAG
taccatgtaagaactaaatg

SEQ ID NO: 180903 - DNA, 20 bp, Artificial Sequence
  Description of Artificial Sequence: Synthetic oligonucleotide
  Target: LAMA2; (+) strand; PAM type: NRG; PAM sequence: AAG
taagaactaaatgaagttct

SEQ ID NO: 180904 - DNA, 20 bp, Artificial Sequence
  Description of Artificial Sequence: Synthetic oligonucleotide
  Target: LAMA2; (+) strand; PAM type: NRG; PAM sequence: AAG
agttctaagttcttgccttc

SEQ ID NO: 180905 - DNA, 20 bp, Artificial Sequence
  Description of Artificial Sequence: Synthetic oligonucleotide
  Target: LAMA2; (+) strand; PAM type: NRG; PAM sequence: AGG
gttctaagttcttgccttca

SEQ ID NO: 180906 - DNA, 20 bp, Artificial Sequence
  Description of Artificial Sequence: Synthetic oligonucleotide
  Target: LAMA2; (+) strand; PAM type: NRG; PAM sequence: TGG
tcaaggaacttgcatcgaac

SEQ ID NO: 180907 - DNA, 20 bp, Artificial Sequence
  Description of Artificial Sequence: Synthetic oligonucleotide
  Target: LAMA2; (+) strand; PAM type: NRG; PAM sequence: GGG
caaggaacttgcatcgaact

SEQ ID NO: 180908 - DNA, 20 bp, Artificial Sequence
  Description of Artificial Sequence: Synthetic oligonucleotide
  Target: LAMA2; (+) strand; PAM type: NRG; PAM sequence: GGG
aaggaacttgcatcgaactg

SEQ ID NO: 180909 - DNA, 20 bp, Artificial Sequence
  Description of Artificial Sequence: Synthetic oligonucleotide
  Target: LAMA2; (+) strand; PAM type: NRG; PAM sequence: GAG
ggaacttgcatcgaactggg

SEQ ID NO: 180910 - DNA, 20 bp, Artificial Sequence
  Description of Artificial Sequence: Synthetic oligonucleotide
  Target: LAMA2; (+) strand; PAM type: NRG; PAM sequence: TAG
cttgcatcgaactggggaga

SEQ ID NO: 180911 - DNA, 20 bp, Artificial Sequence
  Description of Artificial Sequence: Synthetic oligonucleotide
  Target: LAMA2; (+) strand; PAM type: NRG; PAM sequence: AAG
atcgaactggggagatagac

SEQ ID NO: 180912 - DNA, 20 bp, Artificial Sequence
  Description of Artificial Sequence: Synthetic oligonucleotide
  Target: LAMA2; (+) strand; PAM type: NRG; PAM sequence: TGG
gggagatagacaagtatcaa

SEQ ID NO: 180913 - DNA, 20 bp, Artificial Sequence
  Description of Artificial Sequence: Synthetic oligonucleotide
  Target: LAMA2; (+) strand; PAM type: NRG; PAM sequence: TAG
gatagacaagtatcaatggt

SEQ ID NO: 180914 - DNA, 20 bp, Artificial Sequence
  Description of Artificial Sequence: Synthetic oligonucleotide
  Target: LAMA2; (+) strand; PAM type: NRG; PAM sequence: GAG
tagacaagtatcaatggtta

SEQ ID NO: 180915 - DNA, 20 bp, Artificial Sequence
  Description of Artificial Sequence: Synthetic oligonucleotide
  Target: LAMA2; (+) strand; PAM type: NRG; PAM sequence: AGG
agacaagtatcaatggttag

SEQ ID NO: 180916 - DNA, 20 bp, Artificial Sequence
  Description of Artificial Sequence: Synthetic oligonucleotide
  Target: LAMA2; (+) strand; PAM type: NRG; PAM sequence: TAG
aagtatcaatggttagagga

SEQ ID NO: 180917 - DNA, 20 bp, Artificial Sequence
  Description of Artificial Sequence: Synthetic oligonucleotide
  Target: LAMA2; (+) strand; PAM type: NRG; PAM sequence: GAG
gtatcaatggttagaggata

SEQ ID NO: 180918 - DNA, 20 bp, Artificial Sequence
  Description of Artificial Sequence: Synthetic oligonucleotide
  Target: LAMA2; (+) strand; PAM type: NRG; PAM sequence: GAG
atcaatggttagaggataga

SEQ ID NO: 180919 - DNA, 20 bp, Artificial Sequence
  Description of Artificial Sequence: Synthetic oligonucleotide
  Target: LAMA2; (+) strand; PAM type: NRG; PAM sequence: TAG
tagagagctaattgctgtga

SEQ ID NO: 180920 - DNA, 20 bp, Artificial Sequence
  Description of Artificial Sequence: Synthetic oligonucleotide
  Target: LAMA2; (+) strand; PAM type: NRG; PAM sequence: GAG
gagagctaattgctgtgata

SEQ ID NO: 180921 - DNA, 20 bp, Artificial Sequence
  Description of Artificial Sequence: Synthetic oligonucleotide
  Target: LAMA2; (+) strand; PAM type: NRG; PAM sequence: TAG
tgctgtgatagagatgtatg

SEQ ID NO: 180922 - DNA, 20 bp, Artificial Sequence
  Description of Artificial Sequence: Synthetic oligonucleotide
  Target: LAMA2; (+) strand; PAM type: NRG; PAM sequence: CAG
gtgatagagatgtatgtagc

SEQ ID NO: 180923 - DNA, 20 bp, Artificial Sequence
  Description of Artificial Sequence: Synthetic oligonucleotide
  Target: LAMA2; (+) strand; PAM type: NRG; PAM sequence: GAG
tagagatgtatgtagccagc

SEQ ID NO: 180924 - DNA, 20 bp, Artificial Sequence
  Description of Artificial Sequence: Synthetic oligonucleotide
  Target: LAMA2; (+) strand; PAM type: NRG; PAM sequence: CAG
atgtagccagcgagcaatct

SEQ ID NO: 180925 - DNA, 20 bp, Artificial Sequence
  Description of Artificial Sequence: Synthetic oligonucleotide
  Target: LAMA2; (+) strand; PAM type: NRG; PAM sequence: AAG
tagccagcgagcaatctcag

SEQ ID NO: 180926 - DNA, 20 bp, Artificial Sequence
  Description of Artificial Sequence: Synthetic oligonucleotide
  Target: LAMA2; (+) strand; PAM type: NRG; PAM sequence: GAG
gccagcgagcaatctcagaa

SEQ ID NO: 180927 - DNA, 20 bp, Artificial Sequence
  Description of Artificial Sequence: Synthetic oligonucleotide
  Target: LAMA2; (+) strand; PAM type: NRG; PAM sequence: GAG
cagcgagcaatctcagaaga

SEQ ID NO: 180928 - DNA, 20 bp, Artificial Sequence
  Description of Artificial Sequence: Synthetic oligonucleotide
  Target: LAMA2; (+) strand; PAM type: NRG; PAM sequence: GAG
atctcagaagagagacactt

SEQ ID NO: 180929 - DNA, 20 bp, Artificial Sequence
  Description of Artificial Sequence: Synthetic oligonucleotide
  Target: LAMA2; (+) strand; PAM type: NRG; PAM sequence: CAG
agagagacacttgagtcaaa

SEQ ID NO: 180930 - DNA, 20 bp, Artificial Sequence
  Description of Artificial Sequence: Synthetic oligonucleotide
  Target: LAMA2; (+) strand; PAM type: NRG; PAM sequence: GAG
agagacacttgagtcaaaca

SEQ ID NO: 180931 - DNA, 20 bp, Artificial Sequence
  Description of Artificial Sequence: Synthetic oligonucleotide
  Target: LAMA2; (+) strand; PAM type: NRG; PAM sequence: GAG
agacacttgagtcaaacaga

SEQ ID NO: 180932 - DNA, 20 bp, Artificial Sequence
  Description of Artificial Sequence: Synthetic oligonucleotide
  Target: LAMA2; (+) strand; PAM type: NRG; PAM sequence: AGG
gacacttgagtcaaacagag

SEQ ID NO: 180933 - DNA, 20 bp, Artificial Sequence
  Description of Artificial Sequence: Synthetic oligonucleotide
  Target: LAMA2; (+) strand; PAM type: NRG; PAM sequence: CAG
cttgagtcaaacagagaggt

SEQ ID NO: 180934 - DNA, 20 bp, Artificial Sequence
  Description of Artificial Sequence: Synthetic oligonucleotide
  Target: LAMA2; (+) strand; PAM type: NRG; PAM sequence: TGG
acagagaggtcagtttccac

SEQ ID NO: 180935 - DNA, 20 bp, Artificial Sequence
  Description of Artificial Sequence: Synthetic oligonucleotide
  Target: LAMA2; (+) strand; PAM type: NRG; PAM sequence: GAG
agagaggtcagtttccactg

SEQ ID NO: 180936 - DNA, 20 bp, Artificial Sequence
  Description of Artificial Sequence: Synthetic oligonucleotide
  Target: LAMA2; (+) strand; PAM type: NRG; PAM sequence: GAG
gtttccactggagtgaccct

SEQ ID NO: 180937 - DNA, 20 bp, Artificial Sequence
  Description of Artificial Sequence: Synthetic oligonucleotide
  Target: LAMA2; (+) strand; PAM type: NRG; PAM sequence: AGG
tttccactggagtgaccctg

SEQ ID NO: 180938 - DNA, 20 bp, Artificial Sequence
  Description of Artificial Sequence: Synthetic oligonucleotide
  Target: LAMA2; (+) strand; PAM type: NRG; PAM sequence: AAG
ctggagtgaccctgaggcac

SEQ ID NO: 180939 - DNA, 20 bp, Artificial Sequence
  Description of Artificial Sequence: Synthetic oligonucleotide
  Target: LAMA2; (+) strand; PAM type: NRG; PAM sequence: TGG
agtgaccctgaggcacaagc

SEQ ID NO: 180940 - DNA, 20 bp, Artificial Sequence
  Description of Artificial Sequence: Synthetic oligonucleotide
  Target: LAMA2; (+) strand; PAM type: NRG; PAM sequence: GAG
ccctgaggcacaagctggat

SEQ ID NO: 180941 - DNA, 20 bp, Artificial Sequence
  Description of Artificial Sequence: Synthetic oligonucleotide
  Target: LAMA2; (+) strand; PAM type: NRG; PAM sequence: AGG
cctgaggcacaagctggatg

SEQ ID NO: 180942 - DNA, 20 bp, Artificial Sequence
  Description of Artificial Sequence: Synthetic oligonucleotide
  Target: LAMA2; (+) strand; PAM type: NRG; PAM sequence: GAG
tgaggcacaagctggatgag

SEQ ID NO: 180943 - DNA, 20 bp, Artificial Sequence
  Description of Artificial Sequence: Synthetic oligonucleotide
  Target: LAMA2; (+) strand; PAM type: NRG; PAM sequence: TAG
gcacaagctggatgaggagt

SEQ ID NO: 180944 - DNA, 20 bp, Artificial Sequence
  Description of Artificial Sequence: Synthetic oligonucleotide
  Target: LAMA2; (+) strand; PAM type: NRG; PAM sequence: TGG
aagctggatgaggagttagc

SEQ ID NO: 180945 - DNA, 20 bp, Artificial Sequence
  Description of Artificial Sequence: Synthetic oligonucleotide
  Target: LAMA2; (+) strand; PAM type: NRG; PAM sequence: AAG
tgaggagttagctggatgaa

SEQ ID NO: 180946 - DNA, 20 bp, Artificial Sequence
  Description of Artificial Sequence: Synthetic oligonucleotide
  Target: LAMA2; (+) strand; PAM type: NRG; PAM sequence: TGG
agctggatgaaaagcatgta

SEQ ID NO: 180947 - DNA, 20 bp, Artificial Sequence
  Description of Artificial Sequence: Synthetic oligonucleotide
  Target: LAMA2; (+) strand; PAM type: NRG; PAM sequence: CAG
aaaagcatgtatggacattt

SEQ ID NO: 180948 - DNA, 20 bp, Artificial Sequence
  Description of Artificial Sequence: Synthetic oligonucleotide
  Target: LAMA2; (+) strand; PAM type: NRG; PAM sequence: GAG
aagcatgtatggacatttca

SEQ ID NO: 180949 - DNA, 20 bp, Artificial Sequence
  Description of Artificial Sequence: Synthetic oligonucleotide
  Target: LAMA2; (+) strand; PAM type: NRG; PAM sequence: TAG
catgtatggacatttcagag

SEQ ID NO: 180950 - DNA, 20 bp, Artificial Sequence
  Description of Artificial Sequence: Synthetic oligonucleotide
  Target: LAMA2; (+) strand; PAM type: NRG; PAM sequence: AAG
tggacatttcagagtagtga

SEQ ID NO: 180951 - DNA, 20 bp, Artificial Sequence
  Description of Artificial Sequence: Synthetic oligonucleotide
  Target: LAMA2; (+) strand; PAM type: NRG; PAM sequence: AAG
gagtagtgaaagttgtgtga

SEQ ID NO: 180952 - DNA, 20 bp, Artificial Sequence
  Description of Artificial Sequence: Synthetic oligonucleotide
  Target: LAMA2; (+) strand; PAM type: NRG; PAM sequence: TGG
gtgaaagttgtgtgaaagcc

SEQ ID NO: 180953 - DNA, 20 bp, Artificial Sequence
  Description of Artificial Sequence: Synthetic oligonucleotide
  Target: LAMA2; (+) strand; PAM type: NRG; PAM sequence: GAG
gaaagttgtgtgaaagcctg

SEQ ID NO: 180954 - DNA, 20 bp, Artificial Sequence
  Description of Artificial Sequence: Synthetic oligonucleotide
  Target: LAMA2; (+) strand; PAM type: NRG; PAM sequence: CAG
gtgtgaaagcctggagtcat

SEQ ID NO: 180955 - DNA, 20 bp, Artificial Sequence
  Description of Artificial Sequence: Synthetic oligonucleotide
  Target: LAMA2; (+) strand; PAM type: NRG; PAM sequence: GAG
gtgaaagcctggagtcatca

SEQ ID NO: 180956 - DNA, 20 bp, Artificial Sequence
  Description of Artificial Sequence: Synthetic oligonucleotide
  Target: LAMA2; (+) strand; PAM type: NRG; PAM sequence: GAG
gaaagcctggagtcatcaga

SEQ ID NO: 180957 - DNA, 20 bp, Artificial Sequence
  Description of Artificial Sequence: Synthetic oligonucleotide
  Target: LAMA2; (+) strand; PAM type: NRG; PAM sequence: CAG
gagaataacacatccttttc

SEQ ID NO: 180958 - DNA, 20 bp, Artificial Sequence
  Description of Artificial Sequence: Synthetic oligonucleotide
  Target: LAMA2; (+) strand; PAM type: NRG; PAM sequence: CAG
ttttccagctgcatttccaa

SEQ ID NO: 180959 - DNA, 20 bp, Artificial Sequence
  Description of Artificial Sequence: Synthetic oligonucleotide
  Target: LAMA2; (+) strand; PAM type: NRG; PAM sequence: AGG
tttccagctgcatttccaac

SEQ ID NO: 180960 - DNA, 20 bp, Artificial Sequence
  Description of Artificial Sequence: Synthetic oligonucleotide
  Target: LAMA2; (+) strand; PAM type: NRG; PAM sequence: TAG
gcatttccaacaggaaactc

SEQ ID NO: 180961 - DNA, 20 bp, Artificial Sequence
  Description of Artificial Sequence: Synthetic oligonucleotide
  Target: LAMA2; (+) strand; PAM type: NRG; PAM sequence: GAG
atttccaacaggaaactcta

SEQ ID NO: 180962 - DNA, 20 bp, Artificial Sequence
  Description of Artificial Sequence: Synthetic oligonucleotide
  Target: LAMA2; (+) strand; PAM type: NRG; PAM sequence: TGG
ctctagagaaacctctcata

SEQ ID NO: 180963 - DNA, 20 bp, Artificial Sequence
  Description of Artificial Sequence: Synthetic oligonucleotide
  Target: LAMA2; (+) strand; PAM type: NRG; PAM sequence: GGG
tctagagaaacctctcatat

SEQ ID NO: 180964 - DNA, 20 bp, Artificial Sequence
  Description of Artificial Sequence: Synthetic oligonucleotide
  Target: LAMA2; (+) strand; PAM type: NRG; PAM sequence: TGG
ctctcatatgggacaaaaac

SEQ ID NO: 180965 - DNA, 20 bp, Artificial Sequence
  Description of Artificial Sequence: Synthetic oligonucleotide
  Target: LAMA2; (+) strand; PAM type: NRG; PAM sequence: TGG
ggctttgcaattctttattt

SEQ ID NO: 180966 - DNA, 20 bp, Artificial Sequence
  Description of Artificial Sequence: Synthetic oligonucleotide
  Target: LAMA2; (+) strand; PAM type: NRG; PAM sequence: GAG
ctttgcaattctttattttg

SEQ ID NO: 180967 - DNA, 20 bp, Artificial Sequence
  Description of Artificial Sequence: Synthetic oligonucleotide
  Target: LAMA2; (+) strand; PAM type: NRG; PAM sequence: AAG
tgcatacattgttcctgtgt

SEQ ID NO: 180968 - DNA, 20 bp, Artificial Sequence
  Description of Artificial Sequence: Synthetic oligonucleotide
  Target: LAMA2; (+) strand; PAM type: NRG; PAM sequence: GAG
catacattgttcctgtgtaa

SEQ ID NO: 180969 - DNA, 20 bp, Artificial Sequence
  Description of Artificial Sequence: Synthetic oligonucleotide
  Target: LAMA2; (+) strand; PAM type: NRG; PAM sequence: GAG
tacattgttcctgtgtaaga

SEQ ID NO: 180970 - DNA, 20 bp, Artificial Sequence
  Description of Artificial Sequence: Synthetic oligonucleotide
  Target: LAMA2; (+) strand; PAM type: NRG; PAM sequence: AGG
acattgttcctgtgtaagag

SEQ ID NO: 180971 - DNA, 20 bp, Artificial Sequence
  Description of Artificial Sequence: Synthetic oligonucleotide
  Target: LAMA2; (+) strand; PAM type: NRG; PAM sequence: CAG
cacaatgcacatttgcatgt

SEQ ID NO: 180972 - DNA, 20 bp, Artificial Sequence
  Description of Artificial Sequence: Synthetic oligonucleotide
  Target: LAMA2; (+) strand; PAM type: NRG; PAM sequence: AAG
aatgcacatttgcatgtcag

SEQ ID NO: 180973 - DNA, 20 bp, Artificial Sequence
  Description of Artificial Sequence: Synthetic oligonucleotide
  Target: LAMA2; (+) strand; PAM type: NRG; PAM sequence: TAG
tgcatgtcagaagctctgtg

SEQ ID NO: 180974 - DNA, 20 bp, Artificial Sequence
  Description of Artificial Sequence: Synthetic oligonucleotide
  Target: LAMA2; (+) strand; PAM type: NRG; PAM sequence: TAG
tgtcagaagctctgtgtagt

SEQ ID NO: 180975 - DNA, 20 bp, Artificial Sequence
  Description of Artificial Sequence: Synthetic oligonucleotide
  Target: LAMA2; (+) strand; PAM type: NRG; PAM sequence: CAG
gctctgtgtagttagttgtt

SEQ ID NO: 180976 - DNA, 20 bp, Artificial Sequence
  Description of Artificial Sequence: Synthetic oligonucleotide
  Target: LAMA2; (+) strand; PAM type: NRG; PAM sequence: AAG
tgtgtagttagttgttcagt

SEQ ID NO: 180977 - DNA, 20 bp, Artificial Sequence
  Description of Artificial Sequence: Synthetic oligonucleotide
  Target: LAMA2; (+) strand; PAM type: NRG; PAM sequence: AAG
gtagttagttgttcagtaag

SEQ ID NO: 180978 - DNA, 20 bp, Artificial Sequence
  Description of Artificial Sequence: Synthetic oligonucleotide
  Target: LAMA2; (+) strand; PAM type: NRG; PAM sequence: TAG
tgttcagtaagaagaatgtt

SEQ ID NO: 180979 - DNA, 20 bp, Artificial Sequence
  Description of Artificial Sequence: Synthetic oligonucleotide
  Target: LAMA2; (+) strand; PAM type: NRG; PAM sequence: CAG
gaatgtttagctgtttaacc

SEQ ID NO: 180980 - DNA, 20 bp, Artificial Sequence
  Description of Artificial Sequence: Synthetic oligonucleotide
  Target: LAMA2; (+) strand; PAM type: NRG; PAM sequence: CAG
atttcccaaatttctttaat

SEQ ID NO: 180981 - DNA, 20 bp, Artificial Sequence
  Description of Artificial Sequence: Synthetic oligonucleotide
  Target: LAMA2; (+) strand; PAM type: NRG; PAM sequence: GAG
ttcccaaatttctttaatca

SEQ ID NO: 180982 - DNA, 20 bp, Artificial Sequence
  Description of Artificial Sequence: Synthetic oligonucleotide
  Target: LAMA2; (+) strand; PAM type: NRG; PAM sequence: TAG
tccttccattcctgtaatac

SEQ ID NO: 180983 - DNA, 20 bp, Artificial Sequence
  Description of Artificial Sequence: Synthetic oligonucleotide
  Target: LAMA2; (+) strand; PAM type: NRG; PAM sequence: TGG
gcattctgctgaacacactt

SEQ ID NO: 180984 - DNA, 20 bp, Artificial Sequence
  Description of Artificial Sequence: Synthetic oligonucleotide
  Target: LAMA2; (+) strand; PAM type: NRG; PAM sequence: GGG
cattctgctgaacacacttt

SEQ ID NO: 180985 - DNA, 20 bp, Artificial Sequence
  Description of Artificial Sequence: Synthetic oligonucleotide
  Target: LAMA2; (+) strand; PAM type: NRG; PAM sequence: GGG
attctgctgaacacactttg

SEQ ID NO: 180986 - DNA, 20 bp, Artificial Sequence
  Description of Artificial Sequence: Synthetic oligonucleotide
  Target: LAMA2; (+) strand; PAM type: NRG; PAM sequence: TAG
acacactttggggaatgctt

SEQ ID NO: 180987 - DNA, 20 bp, Artificial Sequence
  Description of Artificial Sequence: Synthetic oligonucleotide
  Target: LAMA2; (+) strand; PAM type: NRG; PAM sequence: AAG
gggaatgctttagtaactac

SEQ ID NO: 180988 - DNA, 20 bp, Artificial Sequence
  Description of Artificial Sequence: Synthetic oligonucleotide
  Target: LAMA2; (+) strand; PAM type: NRG; PAM sequence: TAG
agtaactacaagtgaatcca

SEQ ID NO: 180989 - DNA, 20 bp, Artificial Sequence
  Description of Artificial Sequence: Synthetic oligonucleotide
  Target: LAMA2; (+) strand; PAM type: NRG; PAM sequence: TGG
tagcctacacgaatgaatgt

SEQ ID NO: 180990 - DNA, 20 bp, Artificial Sequence
  Description of Artificial Sequence: Synthetic oligonucleotide
  Target: LAMA2; (+) strand; PAM type: NRG; PAM sequence: CAG
cctacacgaatgaatgttgg

SEQ ID NO: 180991 - DNA, 20 bp, Artificial Sequence
  Description of Artificial Sequence: Synthetic oligonucleotide
  Target: LAMA2; (+) strand; PAM type: NRG; PAM sequence: AGG
ctacacgaatgaatgttggc

SEQ ID NO: 180992 - DNA, 20 bp, Artificial Sequence
  Description of Artificial Sequence: Synthetic oligonucleotide
  Target: LAMA2; (+) strand; PAM type: NRG; PAM sequence: CAG
gaatgttggcaggaaattat

SEQ ID NO: 180993 - DNA, 20 bp, Artificial Sequence
  Description of Artificial Sequence: Synthetic oligonucleotide
  Target: LAMA2; (+) strand; PAM type: NRG; PAM sequence: TAG
tgttggcaggaaattatcag

SEQ ID NO: 180994 - DNA, 20 bp, Artificial Sequence
  Description of Artificial Sequence: Synthetic oligonucleotide
  Target: LAMA2; (+) strand; PAM type: NRG; PAM sequence: AGG
gttggcaggaaattatcagt

SEQ ID NO: 180995 - DNA, 20 bp, Artificial Sequence
  Description of Artificial Sequence: Synthetic oligonucleotide
  Target: LAMA2; (+) strand; PAM type: NRG; PAM sequence: GGG
ttggcaggaaattatcagta

SEQ ID NO: 180996 - DNA, 20 bp, Artificial Sequence
  Description of Artificial Sequence: Synthetic oligonucleotide
  Target: LAMA2; (+) strand; PAM type: NRG; PAM sequence: GGG
tggcaggaaattatcagtag

SEQ ID NO: 180997 - DNA, 20 bp, Artificial Sequence
  Description of Artificial Sequence: Synthetic oligonucleotide
  Target: LAMA2; (+) strand; PAM type: NRG; PAM sequence: AAG
ggaaattatcagtaggggcc

SEQ ID NO: 180998 - DNA, 20 bp, Artificial Sequence
  Description of Artificial Sequence: Synthetic oligonucleotide
  Target: LAMA2; (+) strand; PAM type: NRG; PAM sequence: GAG
aaattatcagtaggggccaa

SEQ ID NO: 180999 - DNA, 20 bp, Artificial Sequence
  Description of Artificial Sequence: Synthetic oligonucleotide
  Target: LAMA2; (+) strand; PAM type: NRG; PAM sequence: CAG
cagtaggggccaagagataa

SEQ ID NO: 181000 - DNA, 20 bp, Artificial Sequence
  Description of Artificial Sequence: Synthetic oligonucleotide
  Target: LAMA2; (+) strand; PAM type: NRG; PAM sequence: CAG
gggccaagagataacagaac

SEQ ID NO: 181001 - DNA, 20 bp, Artificial Sequence
  Description of Artificial Sequence: Synthetic oligonucleotide
  Target: LAMA2; (+) strand; PAM type: NRG; PAM sequence: AAG
agataacagaaccagtgcat

SEQ ID NO: 181002 - DNA, 20 bp, Artificial Sequence
  Description of Artificial Sequence: Synthetic oligonucleotide
  Target: LAMA2; (+) strand; PAM type: NRG; PAM sequence: AGG
gataacagaaccagtgcata

SEQ ID NO: 181003 - DNA, 20 bp, Artificial Sequence
  Description of Artificial Sequence: Synthetic oligonucleotide
  Target: LAMA2; (+) strand; PAM type: NRG; PAM sequence: GGG
ataacagaaccagtgcataa

SEQ ID NO: 181004 - DNA, 20 bp, Artificial Sequence
  Description of Artificial Sequence: Synthetic oligonucleotide
  Target: LAMA2; (+) strand; PAM type: NRG; PAM sequence: GGG
taacagaaccagtgcataag

SEQ ID NO: 181005 - DNA, 20 bp, Artificial Sequence
  Description of Artificial Sequence: Synthetic oligonucleotide
  Target: LAMA2; (+) strand; PAM type: NRG; PAM sequence: GAG
cagtgcataaggggacatat

SEQ ID NO: 181006 - DNA, 20 bp, Artificial Sequence
  Description of Artificial Sequence: Synthetic oligonucleotide
  Target: LAMA2; (+) strand; PAM type: NRG; PAM sequence: AAG
cataaggggacatatgagct

SEQ ID NO: 181007 - DNA, 20 bp, Artificial Sequence
  Description of Artificial Sequence: Synthetic oligonucleotide
  Target: LAMA2; (+) strand; PAM type: NRG; PAM sequence: GAG
aggggacatatgagctaagt

SEQ ID NO: 181008 - DNA, 20 bp, Artificial Sequence
  Description of Artificial Sequence: Synthetic oligonucleotide
  Target: LAMA2; (+) strand; PAM type: NRG; PAM sequence: GAG
gacatatgagctaagtgagt

SEQ ID NO: 181009 - DNA, 20 bp, Artificial Sequence
  Description of Artificial Sequence: Synthetic oligonucleotide
  Target: LAMA2; (+) strand; PAM type: NRG; PAM sequence: CAG
tgagctaagtgagtgagttt

SEQ ID NO: 181010 - DNA, 20 bp, Artificial Sequence
  Description of Artificial Sequence: Synthetic oligonucleotide
  Target: LAMA2; (+) strand; PAM type: NRG; PAM sequence: AAG
gagtttcagctttatcctga

SEQ ID NO: 181011 - DNA, 20 bp, Artificial Sequence
  Description of Artificial Sequence: Synthetic oligonucleotide
  Target: LAMA2; (+) strand; PAM type: NRG; PAM sequence: TAG
cagctttatcctgaaagcca

SEQ ID NO: 181012 - DNA, 20 bp, Artificial Sequence
  Description of Artificial Sequence: Synthetic oligonucleotide
  Target: LAMA2; (+) strand; PAM type: NRG; PAM sequence: AGG
agctttatcctgaaagccat

SEQ ID NO: 181013 - DNA, 20 bp, Artificial Sequence
  Description of Artificial Sequence: Synthetic oligonucleotide
  Target: LAMA2; (+) strand; PAM type: NRG; PAM sequence: GGG
gctttatcctgaaagccata

SEQ ID NO: 181014 - DNA, 20 bp, Artificial Sequence
  Description of Artificial Sequence: Synthetic oligonucleotide
  Target: LAMA2; (+) strand; PAM type: NRG; PAM sequence: GAG
ctgaaagccatagggatacc

SEQ ID NO: 181015 - DNA, 20 bp, Artificial Sequence
  Description of Artificial Sequence: Synthetic oligonucleotide
  Target: LAMA2; (+) strand; PAM type: NRG; PAM sequence: AAG
atagggataccgagaactct

SEQ ID NO: 181016 - DNA, 20 bp, Artificial Sequence
  Description of Artificial Sequence: Synthetic oligonucleotide
  Target: LAMA2; (+) strand; PAM type: NRG; PAM sequence: GAG
agggataccgagaactctaa

SEQ ID NO: 181017 - DNA, 20 bp, Artificial Sequence
  Description of Artificial Sequence: Synthetic oligonucleotide
  Target: LAMA2; (+) strand; PAM type: NRG; PAM sequence: AAG
ccgagaactctaagagtttt

SEQ ID NO: 181018 - DNA, 20 bp, Artificial Sequence
  Description of Artificial Sequence: Synthetic oligonucleotide
  Target: LAMA2; (+) strand; PAM type: NRG; PAM sequence: AAG
gaactctaagagttttaaga

SEQ ID NO: 181019 - DNA, 20 bp, Artificial Sequence
  Description of Artificial Sequence: Synthetic oligonucleotide
  Target: LAMA2; (+) strand; PAM type: NRG; PAM sequence: AGG
aactctaagagttttaagaa

SEQ ID NO: 181020 - DNA, 20 bp, Artificial Sequence
  Description of Artificial Sequence: Synthetic oligonucleotide
  Target: LAMA2; (+) strand; PAM type: NRG; PAM sequence: GGG
actctaagagttttaagaaa

SEQ ID NO: 181021 - DNA, 20 bp, Artificial Sequence
  Description of Artificial Sequence: Synthetic oligonucleotide
  Target: LAMA2; (+) strand; PAM type: NRG; PAM sequence: AAG
aagaaagggtgtgatatcat

SEQ ID NO: 181022 - DNA, 20 bp, Artificial Sequence
  Description of Artificial Sequence: Synthetic oligonucleotide
  Target: LAMA2; (+) strand; PAM type: NRG; PAM sequence: TAG
atatcataagacttgtgctt

SEQ ID NO: 181023 - DNA, 20 bp, Artificial Sequence
  Description of Artificial Sequence: Synthetic oligonucleotide
  Target: LAMA2; (+) strand; PAM type: NRG; PAM sequence: AAG
ataagacttgtgctttagta

SEQ ID NO: 181024 - DNA, 20 bp, Artificial Sequence
  Description of Artificial Sequence: Synthetic oligonucleotide
  Target: LAMA2; (+) strand; PAM type: NRG; PAM sequence: TAG
gtgctttagtaaagtttctt

SEQ ID NO: 181025 - DNA, 20 bp, Artificial Sequence
  Description of Artificial Sequence: Synthetic oligonucleotide
  Target: LAMA2; (+) strand; PAM type: NRG; PAM sequence: CAG
ctttagtaaagtttctttag

SEQ ID NO: 181026 - DNA, 20 bp, Artificial Sequence
  Description of Artificial Sequence: Synthetic oligonucleotide
  Target: LAMA2; (+) strand; PAM type: NRG; PAM sequence: CAG
tagtaaagtttctttagcag

SEQ ID NO: 181027 - DNA, 20 bp, Artificial Sequence
  Description of Artificial Sequence: Synthetic oligonucleotide
  Target: LAMA2; (+) strand; PAM type: NRG; PAM sequence: TGG
aagtttctttagcagcagtt

SEQ ID NO: 181028 - DNA, 20 bp, Artificial Sequence
  Description of Artificial Sequence: Synthetic oligonucleotide
  Target: LAMA2; (+) strand; PAM type: NRG; PAM sequence: GAG
gtttctttagcagcagtttg

SEQ ID NO: 181029 - DNA, 20 bp, Artificial Sequence
  Description of Artificial Sequence: Synthetic oligonucleotide
  Target: LAMA2; (+) strand; PAM type: NRG; PAM sequence: TAG
tttggagatatgtaacaatt

SEQ ID NO: 181030 - DNA, 20 bp, Artificial Sequence
  Description of Artificial Sequence: Synthetic oligonucleotide
  Target: LAMA2; (+) strand; PAM type: NRG; PAM sequence: AGG
ttggagatatgtaacaattt

SEQ ID NO: 181031 - DNA, 20 bp, Artificial Sequence
  Description of Artificial Sequence: Synthetic oligonucleotide
  Target: LAMA2; (+) strand; PAM type: NRG; PAM sequence: CGG
tgtaacaatttaggatgcta

SEQ ID NO: 181032 - DNA, 20 bp, Artificial Sequence
  Description of Artificial Sequence: Synthetic oligonucleotide
  Target: LAMA2; (+) strand; PAM type: NRG; PAM sequence: GAG
taacaatttaggatgctacg

SEQ ID NO: 181033 - DNA, 20 bp, Artificial Sequence
  Description of Artificial Sequence: Synthetic oligonucleotide
  Target: LAMA2; (+) strand; PAM type: NRG; PAM sequence: TGG
atttaggatgctacggagtc

SEQ ID NO: 181034 - DNA, 20 bp, Artificial Sequence
  Description of Artificial Sequence: Synthetic oligonucleotide
  Target: LAMA2; (+) strand; PAM type: NRG; PAM sequence: GAG
aggatgctacggagtctggt

SEQ ID NO: 181035 - DNA, 20 bp, Artificial Sequence
  Description of Artificial Sequence: Synthetic oligonucleotide
  Target: LAMA2; (+) strand; PAM type: NRG; PAM sequence: TAG
gctacggagtctggtgagcc

SEQ ID NO: 181036 - DNA, 20 bp, Artificial Sequence
  Description of Artificial Sequence: Synthetic oligonucleotide
  Target: LAMA2; (+) strand; PAM type: NRG; PAM sequence: TAG
ccccaccaacttctcttcta

SEQ ID NO: 181037 - DNA, 20 bp, Artificial Sequence
  Description of Artificial Sequence: Synthetic oligonucleotide
  Target: LAMA2; (+) strand; PAM type: NRG; PAM sequence: TAG
caccaacttctcttctatag

SEQ ID NO: 181038 - DNA, 20 bp, Artificial Sequence
  Description of Artificial Sequence: Synthetic oligonucleotide
  Target: LAMA2; (+) strand; PAM type: NRG; PAM sequence: TAG
caacttctcttctatagtag

SEQ ID NO: 181039 - DNA, 20 bp, Artificial Sequence
  Description of Artificial Sequence: Synthetic oligonucleotide
  Target: LAMA2; (+) strand; PAM type: NRG; PAM sequence: CAG
cttctatagtagtagaataa

SEQ ID NO: 181040 - DNA, 20 bp, Artificial Sequence
  Description of Artificial Sequence: Synthetic oligonucleotide
  Target: LAMA2; (+) strand; PAM type: NRG; PAM sequence: AAG
gtagtagaataacagatttg

SEQ ID NO: 181041 - DNA, 20 bp, Artificial Sequence
  Description of Artificial Sequence: Synthetic oligonucleotide
  Target: LAMA2; (+) strand; PAM type: NRG; PAM sequence: AAG
tagaataacagatttgaaga

SEQ ID NO: 181042 - DNA, 20 bp, Artificial Sequence
  Description of Artificial Sequence: Synthetic oligonucleotide
  Target: LAMA2; (+) strand; PAM type: NRG; PAM sequence: AAG
aataacagatttgaagaaag

SEQ ID NO: 181043 - DNA, 20 bp, Artificial Sequence
  Description of Artificial Sequence: Synthetic oligonucleotide
  Target: LAMA2; (+) strand; PAM type: NRG; PAM sequence: AGG
ataacagatttgaagaaaga

SEQ ID NO: 181044 - DNA, 20 bp, Artificial Sequence
  Description of Artificial Sequence: Synthetic oligonucleotide
  Target: LAMA2; (+) strand; PAM type: NRG; PAM sequence: GAG
aacagatttgaagaaagaag

SEQ ID NO: 181045 - DNA, 20 bp, Artificial Sequence
  Description of Artificial Sequence: Synthetic oligonucleotide
  Target: LAMA2; (+) strand; PAM type: NRG; PAM sequence: AAG
agatttgaagaaagaaggag

SEQ ID NO: 181046 - DNA, 20 bp, Artificial Sequence
  Description of Artificial Sequence: Synthetic oligonucleotide
  Target: LAMA2; (+) strand; PAM type: NRG; PAM sequence: TGG
ttgaagaaagaaggagaaga

SEQ ID NO: 181047 - DNA, 20 bp, Artificial Sequence
  Description of Artificial Sequence: Synthetic oligonucleotide
  Target: LAMA2; (+) strand; PAM type: NRG; PAM sequence: AAG
aagatggatatgcattataa

SEQ ID NO: 181048 - DNA, 20 bp, Artificial Sequence
  Description of Artificial Sequence: Synthetic oligonucleotide
  Target: LAMA2; (+) strand; PAM type: NRG; PAM sequence: AAG
tatgcattataaaagaaaaa

SEQ ID NO: 181049 - DNA, 20 bp, Artificial Sequence
  Description of Artificial Sequence: Synthetic oligonucleotide
  Target: LAMA2; (+) strand; PAM type: NRG; PAM sequence: CAG
acaacctaaatgtccatcaa

SEQ ID NO: 181050 - DNA, 20 bp, Artificial Sequence
  Description of Artificial Sequence: Synthetic oligonucleotide
  Target: LAMA2; (+) strand; PAM type: NRG; PAM sequence: GAG
atgtccatcaacagatgact

SEQ ID NO: 181051 - DNA, 20 bp, Artificial Sequence
  Description of Artificial Sequence: Synthetic oligonucleotide
  Target: LAMA2; (+) strand; PAM type: NRG; PAM sequence: AAG
catcaacagatgactgagaa

SEQ ID NO: 181052 - DNA, 20 bp, Artificial Sequence
  Description of Artificial Sequence: Synthetic oligonucleotide
  Target: LAMA2; (+) strand; PAM type: NRG; PAM sequence: TGG
atgactgagaaaagaaaatg

SEQ ID NO: 181053 - DNA, 20 bp, Artificial Sequence
  Description of Artificial Sequence: Synthetic oligonucleotide
  Target: LAMA2; (+) strand; PAM type: NRG; PAM sequence: CAG
aatgtggtatatatacacca

SEQ ID NO: 181054 - DNA, 20 bp, Artificial Sequence
  Description of Artificial Sequence: Synthetic oligonucleotide
  Target: LAMA2; (+) strand; PAM type: NRG; PAM sequence: CAG
atacaccacagaatactatg

SEQ ID NO: 181055 - DNA, 20 bp, Artificial Sequence
  Description of Artificial Sequence: Synthetic oligonucleotide
  Target: LAMA2; (+) strand; PAM type: NRG; PAM sequence: AAG
atactatgcagccataaaaa

SEQ ID NO: 181056 - DNA, 20 bp, Artificial Sequence
  Description of Artificial Sequence: Synthetic oligonucleotide
  Target: LAMA2; (+) strand; PAM type: NRG; PAM sequence: AAG
ctatgcagccataaaaaaag

SEQ ID NO: 181057 - DNA, 20 bp, Artificial Sequence
  Description of Artificial Sequence: Synthetic oligonucleotide
  Target: LAMA2; (+) strand; PAM type: NRG; PAM sequence: AGG
tatgcagccataaaaaaaga

SEQ ID NO: 181058 - DNA, 20 bp, Artificial Sequence
  Description of Artificial Sequence: Synthetic oligonucleotide
  Target: LAMA2; (+) strand; PAM type: NRG; PAM sequence: CAG
gaaggaaatcatgtcttttg

SEQ ID NO: 181059 - DNA, 20 bp, Artificial Sequence
  Description of Artificial Sequence: Synthetic oligonucleotide
  Target: LAMA2; (+) strand; PAM type: NRG; PAM sequence: CAG
aatcatgtcttttgcagcaa

SEQ ID NO: 181060 - DNA, 20 bp, Artificial Sequence
  Description of Artificial Sequence: Synthetic oligonucleotide
  Target: LAMA2; (+) strand; PAM type: NRG; PAM sequence: AGG
atcatgtcttttgcagcaac

SEQ ID NO: 181061 - DNA, 20 bp, Artificial Sequence
  Description of Artificial Sequence: Synthetic oligonucleotide
  Target: LAMA2; (+) strand; PAM type: NRG; PAM sequence: TGG
gtcttttgcagcaacaggaa

SEQ ID NO: 181062 - DNA, 20 bp, Artificial Sequence
  Description of Artificial Sequence: Synthetic oligonucleotide
  Target: LAMA2; (+) strand; PAM type: NRG; PAM sequence: TGG
tgcagcaacaggaatggacc

SEQ ID NO: 181063 - DNA, 20 bp, Artificial Sequence
  Description of Artificial Sequence: Synthetic oligonucleotide
  Target: LAMA2; (+) strand; PAM type: NRG; PAM sequence: GAG
cagcaacaggaatggacctg

SEQ ID NO: 181064 - DNA, 20 bp, Artificial Sequence
  Description of Artificial Sequence: Synthetic oligonucleotide
  Target: LAMA2; (+) strand; PAM type: NRG; PAM sequence: AGG
agcaacaggaatggacctgg

SEQ ID NO: 181065 - DNA, 20 bp, Artificial Sequence
  Description of Artificial Sequence: Synthetic oligonucleotide
  Target: LAMA2; (+) strand; PAM type: NRG; PAM sequence: AAG
gacctggaggtcattatcct

SEQ ID NO: 181066 - DNA, 20 bp, Artificial Sequence
  Description of Artificial Sequence: Synthetic oligonucleotide
  Target: LAMA2; (+) strand; PAM type: NRG; PAM sequence: CAG
ttatcctaagtgacataacc

SEQ ID NO: 181067 - DNA, 20 bp, Artificial Sequence
  Description of Artificial Sequence: Synthetic oligonucleotide
  Target: LAMA2; (+) strand; PAM type: NRG; PAM sequence: CAG
taagtgacataacccagaaa

SEQ ID NO: 181068 - DNA, 20 bp, Artificial Sequence
  Description of Artificial Sequence: Synthetic oligonucleotide
  Target: LAMA2; (+) strand; PAM type: NRG; PAM sequence: AAG
taccatatgttctcacttac

SEQ ID NO: 181069 - DNA, 20 bp, Artificial Sequence
  Description of Artificial Sequence: Synthetic oligonucleotide
  Target: LAMA2; (+) strand; PAM type: NRG; PAM sequence: AGG
accatatgttctcacttaca

SEQ ID NO: 181070 - DNA, 20 bp, Artificial Sequence
  Description of Artificial Sequence: Synthetic oligonucleotide
  Target: LAMA2; (+) strand; PAM type: NRG; PAM sequence: GAG
tatgttctcacttacaaggc

SEQ ID NO: 181071 - DNA, 20 bp, Artificial Sequence
  Description of Artificial Sequence: Synthetic oligonucleotide
  Target: LAMA2; (+) strand; PAM type: NRG; PAM sequence: AAG
gttctcacttacaaggcgag

SEQ ID NO: 181072 - DNA, 20 bp, Artificial Sequence
  Description of Artificial Sequence: Synthetic oligonucleotide
  Target: LAMA2; (+) strand; PAM type: NRG; PAM sequence: TGG
caaggcgagaagctaaacaa

SEQ ID NO: 181073 - DNA, 20 bp, Artificial Sequence
  Description of Artificial Sequence: Synthetic oligonucleotide
  Target: LAMA2; (+) strand; PAM type: NRG; PAM sequence: AAG
agctaaacaatggatacacg

SEQ ID NO: 181074 - DNA, 20 bp, Artificial Sequence
  Description of Artificial Sequence: Synthetic oligonucleotide
  Target: LAMA2; (+) strand; PAM type: NRG; PAM sequence: AAG
aatggatacacgaagacgtg

SEQ ID NO: 181075 - DNA, 20 bp, Artificial Sequence
  Description of Artificial Sequence: Synthetic oligonucleotide
  Target: LAMA2; (+) strand; PAM type: NRG; PAM sequence: TGG
gatacacgaagacgtgaaga

SEQ ID NO: 181076 - DNA, 20 bp, Artificial Sequence
  Description of Artificial Sequence: Synthetic oligonucleotide
  Target: LAMA2; (+) strand; PAM type: NRG; PAM sequence: TAG
agacgtgaagatggaaacaa

SEQ ID NO: 181077 - DNA, 20 bp, Artificial Sequence
  Description of Artificial Sequence: Synthetic oligonucleotide
  Target: LAMA2; (+) strand; PAM type: NRG; PAM sequence: TGG
aagatggaaacaatagacac

SEQ ID NO: 181078 - DNA, 20 bp, Artificial Sequence
  Description of Artificial Sequence: Synthetic oligonucleotide
  Target: LAMA2; (+) strand; PAM type: NRG; PAM sequence: GGG
agatggaaacaatagacact

SEQ ID NO: 181079 - DNA, 20 bp, Artificial Sequence
  Description of Artificial Sequence: Synthetic oligonucleotide
  Target: LAMA2; (+) strand; PAM type: NRG; PAM sequence: GGG
gatggaaacaatagacactg

SEQ ID NO: 181080 - DNA, 20 bp, Artificial Sequence
  Description of Artificial Sequence: Synthetic oligonucleotide
  Target: LAMA2; (+) strand; PAM type: NRG; PAM sequence: AAG
atagacactggggactccaa

SEQ ID NO: 181081 - DNA, 20 bp, Artificial Sequence
  Description of Artificial Sequence: Synthetic oligonucleotide
  Target: LAMA2; (+) strand; PAM type: NRG; PAM sequence: AGG
tagacactggggactccaaa

SEQ ID NO: 181082 - DNA, 20 bp, Artificial Sequence
  Description of Artificial Sequence: Synthetic oligonucleotide
  Target: LAMA2; (+) strand; PAM type: NRG; PAM sequence: GGG
agacactggggactccaaaa

SEQ ID NO: 181083 - DNA, 20 bp, Artificial Sequence
  Description of Artificial Sequence: Synthetic oligonucleotide
  Target: LAMA2; (+) strand; PAM type: NRG; PAM sequence: GGG
gacactggggactccaaaag

SEQ ID NO: 181084 - DNA, 20 bp, Artificial Sequence
  Description of Artificial Sequence: Synthetic oligonucleotide
  Target: LAMA2; (+) strand; PAM type: NRG; PAM sequence: GGG
acactggggactccaaaagg

SEQ ID NO: 181085 - DNA, 20 bp, Artificial Sequence
  Description of Artificial Sequence: Synthetic oligonucleotide
  Target: LAMA2; (+) strand; PAM type: NRG; PAM sequence: GGG
cactggggactccaaaaggg

SEQ ID NO: 181086 - DNA, 20 bp, Artificial Sequence
  Description of Artificial Sequence: Synthetic oligonucleotide
  Target: LAMA2; (+) strand; PAM type: NRG; PAM sequence: GAG
ctggggactccaaaaggggg

SEQ ID NO: 181087 - DNA, 20 bp, Artificial Sequence
  Description of Artificial Sequence: Synthetic oligonucleotide
  Target: LAMA2; (+) strand; PAM type: NRG; PAM sequence: AGG
tggggactccaaaagggggg

SEQ ID NO: 181088 - DNA, 20 bp, Artificial Sequence
  Description of Artificial Sequence: Synthetic oligonucleotide
  Target: LAMA2; (+) strand; PAM type: NRG; PAM sequence: GGG
ggggactccaaaagggggga

SEQ ID NO: 181089 - DNA, 20 bp, Artificial Sequence
  Description of Artificial Sequence: Synthetic oligonucleotide
  Target: LAMA2; (+) strand; PAM type: NRG; PAM sequence: GAG
ggactccaaaaggggggagg

SEQ ID NO: 181090 - DNA, 20 bp, Artificial Sequence
  Description of Artificial Sequence: Synthetic oligonucleotide
  Target: LAMA2; (+) strand; PAM type: NRG; PAM sequence: AGG
gactccaaaaggggggaggg

SEQ ID NO: 181091 - DNA, 20 bp, Artificial Sequence
  Description of Artificial Sequence: Synthetic oligonucleotide
  Target: LAMA2; (+) strand; PAM type: NRG; PAM sequence: GAG
ctccaaaaggggggagggag

SEQ ID NO: 181092 - DNA, 20 bp, Artificial Sequence
  Description of Artificial Sequence: Synthetic oligonucleotide
  Target: LAMA2; (+) strand; PAM type: NRG; PAM sequence: AAG
caaaaggggggagggaggag

SEQ ID NO: 181093 - DNA, 20 bp, Artificial Sequence
  Description of Artificial Sequence: Synthetic oligonucleotide
  Target: LAMA2; (+) strand; PAM type: NRG; PAM sequence: AGG
aaaaggggggagggaggaga

SEQ ID NO: 181094 - DNA, 20 bp, Artificial Sequence
  Description of Artificial Sequence: Synthetic oligonucleotide
  Target: LAMA2; (+) strand; PAM type: NRG; PAM sequence: GGG
aaaggggggagggaggagaa

SEQ ID NO: 181095 - DNA, 20 bp, Artificial Sequence
  Description of Artificial Sequence: Synthetic oligonucleotide
  Target: LAMA2; (+) strand; PAM type: NRG; PAM sequence: GGG
aaggggggagggaggagaag

SEQ ID NO: 181096 - DNA, 20 bp, Artificial Sequence
  Description of Artificial Sequence: Synthetic oligonucleotide
  Target: LAMA2; (+) strand; PAM type: NRG; PAM sequence: AAG
gggagggaggagaaggggtg

SEQ ID NO: 181097 - DNA, 20 bp, Artificial Sequence
  Description of Artificial Sequence: Synthetic oligonucleotide
  Target: LAMA2; (+) strand; PAM type: NRG; PAM sequence: TGG
aagatttaaaaatcgcctgt

SEQ ID NO: 181098 - DNA, 20 bp, Artificial Sequence
  Description of Artificial Sequence: Synthetic oligonucleotide
  Target: LAMA2; (+) strand; PAM type: NRG; PAM sequence: GGG
agatttaaaaatcgcctgtt

SEQ ID NO: 181099 - DNA, 20 bp, Artificial Sequence
  Description of Artificial Sequence: Synthetic oligonucleotide
  Target: LAMA2; (+) strand; PAM type: NRG; PAM sequence: CAG
taaaaatcgcctgttgggta

SEQ ID NO: 181100 - DNA, 20 bp, Artificial Sequence
  Description of Artificial Sequence: Synthetic oligonucleotide
  Target: LAMA2; (+) strand; PAM type: NRG; PAM sequence: TGG
tgggtacagtgttcactgtg

SEQ ID NO: 181101 - DNA, 20 bp, Artificial Sequence
  Description of Artificial Sequence: Synthetic oligonucleotide
  Target: LAMA2; (+) strand; PAM type: NRG; PAM sequence: GGG
gggtacagtgttcactgtgt

SEQ ID NO: 181102 - DNA, 20 bp, Artificial Sequence
  Description of Artificial Sequence: Synthetic oligonucleotide
  Target: LAMA2; (+) strand; PAM type: NRG; PAM sequence: TGG
agtgttcactgtgtgggtga

SEQ ID NO: 181103 - DNA, 20 bp, Artificial Sequence
  Description of Artificial Sequence: Synthetic oligonucleotide
  Target: LAMA2; (+) strand; PAM type: NRG; PAM sequence: GGG
gtgttcactgtgtgggtgat

SEQ ID NO: 181104 - DNA, 20 bp, Artificial Sequence
  Description of Artificial Sequence: Synthetic oligonucleotide
  Target: LAMA2; (+) strand; PAM type: NRG; PAM sequence: TAG
tgtgtgggtgatgggtccac

SEQ ID NO: 181105 - DNA, 20 bp, Artificial Sequence
  Description of Artificial Sequence: Synthetic oligonucleotide
  Target: LAMA2; (+) strand; PAM type: NRG; PAM sequence: AAG
gtgggtgatgggtccactag

SEQ ID NO: 181106 - DNA, 20 bp, Artificial Sequence
  Description of Artificial Sequence: Synthetic oligonucleotide
  Target: LAMA2; (+) strand; PAM type: NRG; PAM sequence: TGG
aaaccttcatatgcaccacc

SEQ ID NO: 181107 - DNA, 20 bp, Artificial Sequence
  Description of Artificial Sequence: Synthetic oligonucleotide
  Target: LAMA2; (+) strand; PAM type: NRG; PAM sequence: AAG
aaataataaaaataaaaata

SEQ ID NO: 181108 - DNA, 20 bp, Artificial Sequence
  Description of Artificial Sequence: Synthetic oligonucleotide
  Target: LAMA2; (+) strand; PAM type: NRG; PAM sequence: CGG
aaaataaaaataaagacatt

SEQ ID NO: 181109 - DNA, 20 bp, Artificial Sequence
  Description of Artificial Sequence: Synthetic oligonucleotide
  Target: LAMA2; (+) strand; PAM type: NRG; PAM sequence: AAG
ataaagacattcggaacact

SEQ ID NO: 181110 - DNA, 20 bp, Artificial Sequence
  Description of Artificial Sequence: Synthetic oligonucleotide
  Target: LAMA2; (+) strand; PAM type: NRG; PAM sequence: TGG
ttcggaacactaagctgaat

SEQ ID NO: 181111 - DNA, 20 bp, Artificial Sequence
  Description of Artificial Sequence: Synthetic oligonucleotide
  Target: LAMA2; (+) strand; PAM type: NRG; PAM sequence: AAG
ggctaatgctataaactcta

SEQ ID NO: 181112 - DNA, 20 bp, Artificial Sequence
  Description of Artificial Sequence: Synthetic oligonucleotide
  Target: LAMA2; (+) strand; PAM type: NRG; PAM sequence: TAG
aatgctataaactctaaaga

SEQ ID NO: 181113 - DNA, 20 bp, Artificial Sequence
  Description of Artificial Sequence: Synthetic oligonucleotide
  Target: LAMA2; (+) strand; PAM type: NRG; PAM sequence: TGG
tctaaagatagtaatatgct

SEQ ID NO: 181114 - DNA, 20 bp, Artificial Sequence
  Description of Artificial Sequence: Synthetic oligonucleotide
  Target: LAMA2; (+) strand; PAM type: NRG; PAM sequence: TAG
aaagatagtaatatgcttgg

SEQ ID NO: 181115 - DNA, 20 bp, Artificial Sequence
  Description of Artificial Sequence: Synthetic oligonucleotide
  Target: LAMA2; (+) strand; PAM type: NRG; PAM sequence: CGG
taatatgcttggtagatgta

SEQ ID NO: 181116 - DNA, 20 bp, Artificial Sequence
  Description of Artificial Sequence: Synthetic oligonucleotide
  Target: LAMA2; (+) strand; PAM type: NRG; PAM sequence: CAG
tagatgtacggtataacaaa

SEQ ID NO: 181117 - DNA, 20 bp, Artificial Sequence
  Description of Artificial Sequence: Synthetic oligonucleotide
  Target: LAMA2; (+) strand; PAM type: NRG; PAM sequence: AGG
agatgtacggtataacaaac

SEQ ID NO: 181118 - DNA, 20 bp, Artificial Sequence
  Description of Artificial Sequence: Synthetic oligonucleotide
  Target: LAMA2; (+) strand; PAM type: NRG; PAM sequence: GGG
gatgtacggtataacaaaca

SEQ ID NO: 181119 - DNA, 20 bp, Artificial Sequence
  Description of Artificial Sequence: Synthetic oligonucleotide
  Target: LAMA2; (+) strand; PAM type: NRG; PAM sequence: TAG
gataaaatgattcaacaact

SEQ ID NO: 181120 - DNA, 20 bp, Artificial Sequence
  Description of Artificial Sequence: Synthetic oligonucleotide
  Target: LAMA2; (+) strand; PAM type: NRG; PAM sequence: AGG
ataaaatgattcaacaactt

SEQ ID NO: 181121 - DNA, 20 bp, Artificial Sequence
  Description of Artificial Sequence: Synthetic oligonucleotide
  Target: LAMA2; (+) strand; PAM type: NRG; PAM sequence: GAG
aaaatgattcaacaacttag

SEQ ID NO: 181122 - DNA, 20 bp, Artificial Sequence
  Description of Artificial Sequence: Synthetic oligonucleotide
  Target: LAMA2; (+) strand; PAM type: NRG; PAM sequence: TGG
aggagaacaatttttataaa

SEQ ID NO: 181123 - DNA, 20 bp, Artificial Sequence
  Description of Artificial Sequence: Synthetic oligonucleotide
  Target: LAMA2; (+) strand; PAM type: NRG; PAM sequence: TGG
atttttataaatggtcatct

SEQ ID NO: 181124 - DNA, 20 bp, Artificial Sequence
  Description of Artificial Sequence: Synthetic oligonucleotide
  Target: LAMA2; (+) strand; PAM type: NRG; PAM sequence: CAG
gaaacgctaatttccataat

SEQ ID NO: 181125 - DNA, 20 bp, Artificial Sequence
  Description of Artificial Sequence: Synthetic oligonucleotide
  Target: LAMA2; (+) strand; PAM type: NRG; PAM sequence: AAG
ccattaaaacaaataaacaa

SEQ ID NO: 181126 - DNA, 20 bp, Artificial Sequence
  Description of Artificial Sequence: Synthetic oligonucleotide
  Target: LAMA2; (+) strand; PAM type: NRG; PAM sequence: TAG
tctgtgctctgaatcaatat

SEQ ID NO: 181127 - DNA, 20 bp, Artificial Sequence
  Description of Artificial Sequence: Synthetic oligonucleotide
  Target: LAMA2; (+) strand; PAM type: NRG; PAM sequence: AAG
ctctgaatcaatattagtca

SEQ ID NO: 181128 - DNA, 20 bp, Artificial Sequence
  Description of Artificial Sequence: Synthetic oligonucleotide
  Target: LAMA2; (+) strand; PAM type: NRG; PAM sequence: AGG
tctgaatcaatattagtcaa

SEQ ID NO: 181129 - DNA, 20 bp, Artificial Sequence
  Description of Artificial Sequence: Synthetic oligonucleotide
  Target: LAMA2; (+) strand; PAM type: NRG; PAM sequence: AAG
atcaatattagtcaaaggtc

SEQ ID NO: 181130 - DNA, 20 bp, Artificial Sequence
  Description of Artificial Sequence: Synthetic oligonucleotide
  Target: LAMA2; (+) strand; PAM type: NRG; PAM sequence: CAG
attagtcaaaggtcaagtta

SEQ ID NO: 181131 - DNA, 20 bp, Artificial Sequence
  Description of Artificial Sequence: Synthetic oligonucleotide
  Target: LAMA2; (+) strand; PAM type: NRG; PAM sequence: AAG
acagaatcatataaatgtga

SEQ ID NO: 181132 - DNA, 20 bp, Artificial Sequence
  Description of Artificial Sequence: Synthetic oligonucleotide
  Target: LAMA2; (+) strand; PAM type: NRG; PAM sequence: TAG
gaatcatataaatgtgaaag

SEQ ID NO: 181133 - DNA, 20 bp, Artificial Sequence
  Description of Artificial Sequence: Synthetic oligonucleotide
  Target: LAMA2; (+) strand; PAM type: NRG; PAM sequence: TAG
aagtagttaaaaatatgttt

SEQ ID NO: 181134 - DNA, 20 bp, Artificial Sequence
  Description of Artificial Sequence: Synthetic oligonucleotide
  Target: LAMA2; (+) strand; PAM type: NRG; PAM sequence: AGG
agtagttaaaaatatgtttt

SEQ ID NO: 181135 - DNA, 20 bp, Artificial Sequence
  Description of Artificial Sequence: Synthetic oligonucleotide
  Target: LAMA2; (+) strand; PAM type: NRG; PAM sequence: CAG
ttttaggtttactgtaacta

SEQ ID NO: 181136 - DNA, 20 bp, Artificial Sequence
  Description of Artificial Sequence: Synthetic oligonucleotide
  Target: LAMA2; (+) strand; PAM type: NRG; PAM sequence: CAG
actacagcattccatcaatt

SEQ ID NO: 181137 - DNA, 20 bp, Artificial Sequence
  Description of Artificial Sequence: Synthetic oligonucleotide
  Target: LAMA2; (+) strand; PAM type: NRG; PAM sequence: AAG
cagcattccatcaattcaga

SEQ ID NO: 181138 - DNA, 20 bp, Artificial Sequence
  Description of Artificial Sequence: Synthetic oligonucleotide
  Target: LAMA2; (+) strand; PAM type: NRG; PAM sequence: TAG
tcagaaagttcttcccccaa

SEQ ID NO: 181139 - DNA, 20 bp, Artificial Sequence
  Description of Artificial Sequence: Synthetic oligonucleotide
  Target: LAMA2; (+) strand; PAM type: NRG; PAM sequence: AGG
cagaaagttcttcccccaat

SEQ ID NO: 181140 - DNA, 20 bp, Artificial Sequence
  Description of Artificial Sequence: Synthetic oligonucleotide
  Target: LAMA2; (+) strand; PAM type: NRG; PAM sequence: CAG
cccaataggtctaatttttc

SEQ ID NO: 181141 - DNA, 20 bp, Artificial Sequence
  Description of Artificial Sequence: Synthetic oligonucleotide
  Target: LAMA2; (+) strand; PAM type: NRG; PAM sequence: TAG
ctaatttttccagattttac

SEQ ID NO: 181142 - DNA, 20 bp, Artificial Sequence
  Description of Artificial Sequence: Synthetic oligonucleotide
  Target: LAMA2; (+) strand; PAM type: NRG; PAM sequence: GAG
aatttttccagattttacta

SEQ ID NO: 181143 - DNA, 20 bp, Artificial Sequence
  Description of Artificial Sequence: Synthetic oligonucleotide
  Target: LAMA2; (+) strand; PAM type: NRG; PAM sequence: TGG
ctgttactgttactactctg

SEQ ID NO: 181144 - DNA, 20 bp, Artificial Sequence
  Description of Artificial Sequence: Synthetic oligonucleotide
  Target: LAMA2; (+) strand; PAM type: NRG; PAM sequence: CAG
actgttactactctgtggtc

SEQ ID NO: 181145 - DNA, 20 bp, Artificial Sequence
  Description of Artificial Sequence: Synthetic oligonucleotide
  Target: LAMA2; (+) strand; PAM type: NRG; PAM sequence: CAG
ctactctgtggtccagaaat

SEQ ID NO: 181146 - DNA, 20 bp, Artificial Sequence
  Description of Artificial Sequence: Synthetic oligonucleotide
  Target: LAMA2; (+) strand; PAM type: NRG; PAM sequence: AAG
tctgtggtccagaaatcaga

SEQ ID NO: 181147 - DNA, 20 bp, Artificial Sequence
  Description of Artificial Sequence: Synthetic oligonucleotide
  Target: LAMA2; (+) strand; PAM type: NRG; PAM sequence: CAG
gaaagaattttcctttatcc

SEQ ID NO: 181148 - DNA, 20 bp, Artificial Sequence
  Description of Artificial Sequence: Synthetic oligonucleotide
  Target: LAMA2; (+) strand; PAM type: NRG; PAM sequence: CAG
ttcctttatcccagcctact

SEQ ID NO: 181149 - DNA, 20 bp, Artificial Sequence
  Description of Artificial Sequence: Synthetic oligonucleotide
  Target: LAMA2; (+) strand; PAM type: NRG; PAM sequence: TGG
agtatcttctgtgacatttc

SEQ ID NO: 181150 - DNA, 20 bp, Artificial Sequence
  Description of Artificial Sequence: Synthetic oligonucleotide
  Target: LAMA2; (+) strand; PAM type: NRG; PAM sequence: TAG
tctgtgacatttctggtttc

SEQ ID NO: 181151 - DNA, 20 bp, Artificial Sequence
  Description of Artificial Sequence: Synthetic oligonucleotide
  Target: LAMA2; (+) strand; PAM type: NRG; PAM sequence: CAG
ctagttcaatccctttgaca

SEQ ID NO: 181152 - DNA, 20 bp, Artificial Sequence
  Description of Artificial Sequence: Synthetic oligonucleotide
  Target: LAMA2; (+) strand; PAM type: NRG; PAM sequence: TGG
ttcaatccctttgacacagt

SEQ ID NO: 181153 - DNA, 20 bp, Artificial Sequence
  Description of Artificial Sequence: Synthetic oligonucleotide
  Target: LAMA2; (+) strand; PAM type: NRG; PAM sequence: AAG
gctgataccttctcatttat

SEQ ID NO: 181154 - DNA, 20 bp, Artificial Sequence
  Description of Artificial Sequence: Synthetic oligonucleotide
  Target: LAMA2; (+) strand; PAM type: NRG; PAM sequence: TGG
tcatttataagtcttctcct

SEQ ID NO: 181155 - DNA, 20 bp, Artificial Sequence
  Description of Artificial Sequence: Synthetic oligonucleotide
  Target: LAMA2; (+) strand; PAM type: NRG; PAM sequence: TAG
cttggctttcaaattgactc

SEQ ID NO: 181156 - DNA, 20 bp, Artificial Sequence
  Description of Artificial Sequence: Synthetic oligonucleotide
  Target: LAMA2; (+) strand; PAM type: NRG; PAM sequence: AAG
atactcctgtcaaatgcacc

SEQ ID NO: 181157 - DNA, 20 bp, Artificial Sequence
  Description of Artificial Sequence: Synthetic oligonucleotide
  Target: LAMA2; (+) strand; PAM type: NRG; PAM sequence: CAG
ctcctgtcaaatgcaccaag

SEQ ID NO: 181158 - DNA, 20 bp, Artificial Sequence
  Description of Artificial Sequence: Synthetic oligonucleotide
  Target: LAMA2; (+) strand; PAM type: NRG; PAM sequence: TGG
agtcattctcacttttattt

SEQ ID NO: 181159 - DNA, 20 bp, Artificial Sequence
  Description of Artificial Sequence: Synthetic oligonucleotide
  Target: LAMA2; (+) strand; PAM type: NRG; PAM sequence: GGG
gtcattctcacttttatttt

SEQ ID NO: 181160 - DNA, 20 bp, Artificial Sequence
  Description of Artificial Sequence: Synthetic oligonucleotide
  Target: LAMA2; (+) strand; PAM type: NRG; PAM sequence: TGG
acttctctattgtatctcta

SEQ ID NO: 181161 - DNA, 20 bp, Artificial Sequence
  Description of Artificial Sequence: Synthetic oligonucleotide
  Target: LAMA2; (+) strand; PAM type: NRG; PAM sequence: AAG
tctatggtatcaccgttaaa

SEQ ID NO: 181162 - DNA, 20 bp, Artificial Sequence
  Description of Artificial Sequence: Synthetic oligonucleotide
  Target: LAMA2; (+) strand; PAM type: NRG; PAM sequence: AAG
atcaccgttaaaaagaaatt

SEQ ID NO: 181163 - DNA, 20 bp, Artificial Sequence
  Description of Artificial Sequence: Synthetic oligonucleotide
  Target: LAMA2; (+) strand; PAM type: NRG; PAM sequence: GAG
aaaaagaaattaagccctat

SEQ ID NO: 181164 - DNA, 20 bp, Artificial Sequence
  Description of Artificial Sequence: Synthetic oligonucleotide
  Target: LAMA2; (+) strand; PAM type: NRG; PAM sequence: AGG
aaaagaaattaagccctatg

SEQ ID NO: 181165 - DNA, 20 bp, Artificial Sequence
  Description of Artificial Sequence: Synthetic oligonucleotide
  Target: LAMA2; (+) strand; PAM type: NRG; PAM sequence: TAG
aaattaagccctatgaggtt

SEQ ID NO: 181166 - DNA, 20 bp, Artificial Sequence
  Description of Artificial Sequence: Synthetic oligonucleotide
  Target: LAMA2; (+) strand; PAM type: NRG; PAM sequence: CAG
ccctatgaggtttagttgtt

SEQ ID NO: 181167 - DNA, 20 bp, Artificial Sequence
  Description of Artificial Sequence: Synthetic oligonucleotide
  Target: LAMA2; (+) strand; PAM type: NRG; PAM sequence: TAG
cagaattttgattcttaaat

SEQ ID NO: 181168 - DNA, 20 bp, Artificial Sequence
  Description of Artificial Sequence: Synthetic oligonucleotide
  Target: LAMA2; (+) strand; PAM type: NRG; PAM sequence: TGG
ttttgattcttaaattagac

SEQ ID NO: 181169 - DNA, 20 bp, Artificial Sequence
  Description of Artificial Sequence: Synthetic oligonucleotide
  Target: LAMA2; (+) strand; PAM type: NRG; PAM sequence: GGG
tttgattcttaaattagact

SEQ ID NO: 181170 - DNA, 20 bp, Artificial Sequence
  Description of Artificial Sequence: Synthetic oligonucleotide
  Target: LAMA2; (+) strand; PAM type: NRG; PAM sequence: TGG
gaacttctaccttctgccca

SEQ ID NO: 181171 - DNA, 20 bp, Artificial Sequence
  Description of Artificial Sequence: Synthetic oligonucleotide
  Target: LAMA2; (+) strand; PAM type: NRG; PAM sequence: TGG
tacccattctctattatctc

SEQ ID NO: 181172 - DNA, 20 bp, Artificial Sequence
  Description of Artificial Sequence: Synthetic oligonucleotide
  Target: LAMA2; (+) strand; PAM type: NRG; PAM sequence: AAG
tgtctcaccacaaatttctc

SEQ ID NO: 181173 - DNA, 20 bp, Artificial Sequence
  Description of Artificial Sequence: Synthetic oligonucleotide
  Target: LAMA2; (+) strand; PAM type: NRG; PAM sequence: CAG
cacaaatttctcaagttaaa

SEQ ID NO: 181174 - DNA, 20 bp, Artificial Sequence
  Description of Artificial Sequence: Synthetic oligonucleotide
  Target: LAMA2; (+) strand; PAM type: NRG; PAM sequence: AGG
acaaatttctcaagttaaac

SEQ ID NO: 181175 - DNA, 20 bp, Artificial Sequence
  Description of Artificial Sequence: Synthetic oligonucleotide
  Target: LAMA2; (+) strand; PAM type: NRG; PAM sequence: TAG
tttttattataataaaacta

SEQ ID NO: 181176 - DNA, 20 bp, Artificial Sequence
  Description of Artificial Sequence: Synthetic oligonucleotide
  Target: LAMA2; (+) strand; PAM type: NRG; PAM sequence: AAG
tattttctctaatactttta

SEQ ID NO: 181177 - DNA, 20 bp, Artificial Sequence
  Description of Artificial Sequence: Synthetic oligonucleotide
  Target: LAMA2; (+) strand; PAM type: NRG; PAM sequence: TAG
tttaaagtattttattacta

SEQ ID NO: 181178 - DNA, 20 bp, Artificial Sequence
  Description of Artificial Sequence: Synthetic oligonucleotide
  Target: LAMA2; (+) strand; PAM type: NRG; PAM sequence: CAG
aaagtattttattactatag

SEQ ID NO: 181179 - DNA, 20 bp, Artificial Sequence
  Description of Artificial Sequence: Synthetic oligonucleotide
  Target: LAMA2; (+) strand; PAM type: NRG; PAM sequence: AGG
aagtattttattactatagc

SEQ ID NO: 181180 - DNA, 20 bp, Artificial Sequence
  Description of Artificial Sequence: Synthetic oligonucleotide
  Target: LAMA2; (+) strand; PAM type: NRG; PAM sequence: CAG
attttattactatagcaggt

SEQ ID NO: 181181 - DNA, 20 bp, Artificial Sequence
  Description of Artificial Sequence: Synthetic oligonucleotide
  Target: LAMA2; (+) strand; PAM type: NRG; PAM sequence: AAG
tattaatttttccttataaa

SEQ ID NO: 181182 - DNA, 20 bp, Artificial Sequence
  Description of Artificial Sequence: Synthetic oligonucleotide
  Target: LAMA2; (+) strand; PAM type: NRG; PAM sequence: AAG
atttttccttataaaaagaa

SEQ ID NO: 181183 - DNA, 20 bp, Artificial Sequence
  Description of Artificial Sequence: Synthetic oligonucleotide
  Target: LAMA2; (+) strand; PAM type: NRG; PAM sequence: AAG
ttataaaaagaaaagcatcg

SEQ ID NO: 181184 - DNA, 20 bp, Artificial Sequence
  Description of Artificial Sequence: Synthetic oligonucleotide
  Target: LAMA2; (+) strand; PAM type: NRG; PAM sequence: TGG
gaaaagcatcgaagctgcaa

SEQ ID NO: 181185 - DNA, 20 bp, Artificial Sequence
  Description of Artificial Sequence: Synthetic oligonucleotide
  Target: LAMA2; (+) strand; PAM type: NRG; PAM sequence: AAG
catcgaagctgcaatggaaa

SEQ ID NO: 181186 - DNA, 20 bp, Artificial Sequence
  Description of Artificial Sequence: Synthetic oligonucleotide
  Target: LAMA2; (+) strand; PAM type: NRG; PAM sequence: AAG
tataaacaaataattcacaa

SEQ ID NO: 181187 - DNA, 20 bp, Artificial Sequence
  Description of Artificial Sequence: Synthetic oligonucleotide
  Target: LAMA2; (+) strand; PAM type: NRG; PAM sequence: AAG
aaatgcaaacttcttacata

SEQ ID NO: 181188 - DNA, 20 bp, Artificial Sequence
  Description of Artificial Sequence: Synthetic oligonucleotide
  Target: LAMA2; (+) strand; PAM type: NRG; PAM sequence: TAG
gttgaaaaatgcaatctcaa

SEQ ID NO: 181189 - DNA, 20 bp, Artificial Sequence
  Description of Artificial Sequence: Synthetic oligonucleotide
  Target: LAMA2; (+) strand; PAM type: NRG; PAM sequence: AAG
atgcaatctcaatagatgac

SEQ ID NO: 181190 - DNA, 20 bp, Artificial Sequence
  Description of Artificial Sequence: Synthetic oligonucleotide
  Target: LAMA2; (+) strand; PAM type: NRG; PAM sequence: TGG
ctcaatagatgacaagcata

SEQ ID NO: 181191 - DNA, 20 bp, Artificial Sequence
  Description of Artificial Sequence: Synthetic oligonucleotide
  Target: LAMA2; (+) strand; PAM type: NRG; PAM sequence: CAG
agcatatggtcattgacttg

SEQ ID NO: 181192 - DNA, 20 bp, Artificial Sequence
  Description of Artificial Sequence: Synthetic oligonucleotide
  Target: LAMA2; (+) strand; PAM type: NRG; PAM sequence: TAG
atatggtcattgacttgcag

SEQ ID NO: 181193 - DNA, 20 bp, Artificial Sequence
  Description of Artificial Sequence: Synthetic oligonucleotide
  Target: LAMA2; (+) strand; PAM type: NRG; PAM sequence: AAG
acttgcagtagcaatatcca

SEQ ID NO: 181194 - DNA, 20 bp, Artificial Sequence
  Description of Artificial Sequence: Synthetic oligonucleotide
  Target: LAMA2; (+) strand; PAM type: NRG; PAM sequence: AAG
atatccaaagatcacactta

SEQ ID NO: 181195 - DNA, 20 bp, Artificial Sequence
  Description of Artificial Sequence: Synthetic oligonucleotide
  Target: LAMA2; (+) strand; PAM type: NRG; PAM sequence: CAG
tccaaagatcacacttaaag

SEQ ID NO: 181196 - DNA, 20 bp, Artificial Sequence
  Description of Artificial Sequence: Synthetic oligonucleotide
  Target: LAMA2; (+) strand; PAM type: NRG; PAM sequence: AAG
gcagtaaaatctaaatttaa

SEQ ID NO: 181197 - DNA, 20 bp, Artificial Sequence
  Description of Artificial Sequence: Synthetic oligonucleotide
  Target: LAMA2; (+) strand; PAM type: NRG; PAM sequence: AGG
cagtaaaatctaaatttaaa

SEQ ID NO: 181198 - DNA, 20 bp, Artificial Sequence
  Description of Artificial Sequence: Synthetic oligonucleotide
  Target: LAMA2; (+) strand; PAM type: NRG; PAM sequence: AAG
aaatctaaatttaaaaggaa

SEQ ID NO: 181199 - DNA, 20 bp, Artificial Sequence
  Description of Artificial Sequence: Synthetic oligonucleotide
  Target: LAMA2; (+) strand; PAM type: NRG; PAM sequence: AAG
tctaaatttaaaaggaaaag

SEQ ID NO: 181200 - DNA, 20 bp, Artificial Sequence
  Description of Artificial Sequence: Synthetic oligonucleotide
  Target: LAMA2; (+) strand; PAM type: NRG; PAM sequence: AAG
aatttaaaaggaaaagaaga

SEQ ID NO: 181201 - DNA, 20 bp, Artificial Sequence
  Description of Artificial Sequence: Synthetic oligonucleotide
  Target: LAMA2; (+) strand; PAM type: NRG; PAM sequence: AGG
atttaaaaggaaaagaagaa

SEQ ID NO: 181202 - DNA, 20 bp, Artificial Sequence
  Description of Artificial Sequence: Synthetic oligonucleotide
  Target: LAMA2; (+) strand; PAM type: NRG; PAM sequence: TGG
aaaggaaaagaagaaaggct

SEQ ID NO: 181203 - DNA, 20 bp, Artificial Sequence
  Description of Artificial Sequence: Synthetic oligonucleotide
  Target: LAMA2; (+) strand; PAM type: NRG; PAM sequence: AAG
accttactacctgctttgat

SEQ ID NO: 181204 - DNA, 20 bp, Artificial Sequence
  Description of Artificial Sequence: Synthetic oligonucleotide
  Target: LAMA2; (+) strand; PAM type: NRG; PAM sequence: TAG
actacctgctttgataagat

SEQ ID NO: 181205 - DNA, 20 bp, Artificial Sequence
  Description of Artificial Sequence: Synthetic oligonucleotide
  Target: LAMA2; (+) strand; PAM type: NRG; PAM sequence: CAG
tttgataagattagctctta

SEQ ID NO: 181206 - DNA, 20 bp, Artificial Sequence
  Description of Artificial Sequence: Synthetic oligonucleotide
  Target: LAMA2; (+) strand; PAM type: NRG; PAM sequence: AGG
ttgataagattagctcttac

SEQ ID NO: 181207 - DNA, 20 bp, Artificial Sequence
  Description of Artificial Sequence: Synthetic oligonucleotide
  Target: LAMA2; (+) strand; PAM type: NRG; PAM sequence: CAG
attaaataccaactatgcat

SEQ ID NO: 181208 - DNA, 20 bp, Artificial Sequence
  Description of Artificial Sequence: Synthetic oligonucleotide
  Target: LAMA2; (+) strand; PAM type: NRG; PAM sequence: CAG
catcagatgctgtgctgcat

SEQ ID NO: 181209 - DNA, 20 bp, Artificial Sequence
  Description of Artificial Sequence: Synthetic oligonucleotide
  Target: LAMA2; (+) strand; PAM type: NRG; PAM sequence: AAG
gatgctgtgctgcatcagtg

SEQ ID NO: 181210 - DNA, 20 bp, Artificial Sequence
  Description of Artificial Sequence: Synthetic oligonucleotide
  Target: LAMA2; (+) strand; PAM type: NRG; PAM sequence: CGG
tgcatcagtgaagatgcata

SEQ ID NO: 181211 - DNA, 20 bp, Artificial Sequence
  Description of Artificial Sequence: Synthetic oligonucleotide
  Target: LAMA2; (+) strand; PAM type: NRG; PAM sequence: GAG
tgcatacggttcctaccctt

SEQ ID NO: 181212 - DNA, 20 bp, Artificial Sequence
  Description of Artificial Sequence: Synthetic oligonucleotide
  Target: LAMA2; (+) strand; PAM type: NRG; PAM sequence: AAG
gagtaacttacctgctgcac

SEQ ID NO: 181213 - DNA, 20 bp, Artificial Sequence
  Description of Artificial Sequence: Synthetic oligonucleotide
  Target: LAMA2; (+) strand; PAM type: NRG; PAM sequence: TAG
taacttacctgctgcacaag

SEQ ID NO: 181214 - DNA, 20 bp, Artificial Sequence
  Description of Artificial Sequence: Synthetic oligonucleotide
  Target: LAMA2; (+) strand; PAM type: NRG; PAM sequence: TAG
agcaaattactgtatctgtt

SEQ ID NO: 181215 - DNA, 20 bp, Artificial Sequence
  Description of Artificial Sequence: Synthetic oligonucleotide
  Target: LAMA2; (+) strand; PAM type: NRG; PAM sequence: AGG
gcaaattactgtatctgttt

SEQ ID NO: 181216 - DNA, 20 bp, Artificial Sequence
  Description of Artificial Sequence: Synthetic oligonucleotide
  Target: LAMA2; (+) strand; PAM type: NRG; PAM sequence: CAG
tactgtatctgtttaggata

SEQ ID NO: 181217 - DNA, 20 bp, Artificial Sequence
  Description of Artificial Sequence: Synthetic oligonucleotide
  Target: LAMA2; (+) strand; PAM type: NRG; PAM sequence: AAG
tttaggatacagtaaacacc

SEQ ID NO: 181218 - DNA, 20 bp, Artificial Sequence
  Description of Artificial Sequence: Synthetic oligonucleotide
  Target: LAMA2; (+) strand; PAM type: NRG; PAM sequence: AGG
ttaggatacagtaaacacca

SEQ ID NO: 181219 - DNA, 20 bp, Artificial Sequence
  Description of Artificial Sequence: Synthetic oligonucleotide
  Target: LAMA2; (+) strand; PAM type: NRG; PAM sequence: GGG
taggatacagtaaacaccaa

SEQ ID NO: 181220 - DNA, 20 bp, Artificial Sequence
  Description of Artificial Sequence: Synthetic oligonucleotide
  Target: LAMA2; (+) strand; PAM type: NRG; PAM sequence: GAG
ggatacagtaaacaccaagg

SEQ ID NO: 181221 - DNA, 20 bp, Artificial Sequence
  Description of Artificial Sequence: Synthetic oligonucleotide
  Target: LAMA2; (+) strand; PAM type: NRG; PAM sequence: TGG
taaacaccaagggagacata

SEQ ID NO: 181222 - DNA, 20 bp, Artificial Sequence
  Description of Artificial Sequence: Synthetic oligonucleotide
  Target: LAMA2; (+) strand; PAM type: NRG; PAM sequence: GAG
aacaccaagggagacatatg

SEQ ID NO: 181223 - DNA, 20 bp, Artificial Sequence
  Description of Artificial Sequence: Synthetic oligonucleotide
  Target: LAMA2; (+) strand; PAM type: NRG; PAM sequence: AGG
acaccaagggagacatatgg

SEQ ID NO: 181224 - DNA, 20 bp, Artificial Sequence
  Description of Artificial Sequence: Synthetic oligonucleotide
  Target: LAMA2; (+) strand; PAM type: NRG; PAM sequence: GGG
caccaagggagacatatgga

SEQ ID NO: 181225 - DNA, 20 bp, Artificial Sequence
  Description of Artificial Sequence: Synthetic oligonucleotide
  Target: LAMA2; (+) strand; PAM type: NRG; PAM sequence: GAG
ccaagggagacatatggagg

SEQ ID NO: 181226 - DNA, 20 bp, Artificial Sequence
  Description of Artificial Sequence: Synthetic oligonucleotide
  Target: LAMA2; (+) strand; PAM type: NRG; PAM sequence: GAG
aagggagacatatggaggga

SEQ ID NO: 181227 - DNA, 20 bp, Artificial Sequence
  Description of Artificial Sequence: Synthetic oligonucleotide
  Target: LAMA2; (+) strand; PAM type: NRG; PAM sequence: AAG
acatatggagggagagaaat

SEQ ID NO: 181228 - DNA, 20 bp, Artificial Sequence
  Description of Artificial Sequence: Synthetic oligonucleotide
  Target: LAMA2; (+) strand; PAM type: NRG; PAM sequence: AGG
catatggagggagagaaata

SEQ ID NO: 181229 - DNA, 20 bp, Artificial Sequence
  Description of Artificial Sequence: Synthetic oligonucleotide
  Target: LAMA2; (+) strand; PAM type: NRG; PAM sequence: GAG
agagaaataaggcactaact

SEQ ID NO: 181230 - DNA, 20 bp, Artificial Sequence
  Description of Artificial Sequence: Synthetic oligonucleotide
  Target: LAMA2; (+) strand; PAM type: NRG; PAM sequence: AAG
taaggcactaactgagccct

SEQ ID NO: 181231 - DNA, 20 bp, Artificial Sequence
  Description of Artificial Sequence: Synthetic oligonucleotide
  Target: LAMA2; (+) strand; PAM type: NRG; PAM sequence: TAG
ctgagccctaagtccttttt

SEQ ID NO: 181232 - DNA, 20 bp, Artificial Sequence
  Description of Artificial Sequence: Synthetic oligonucleotide
  Target: LAMA2; (+) strand; PAM type: NRG; PAM sequence: GAG
ccctaagtccttttttagtt

SEQ ID NO: 181233 - DNA, 20 bp, Artificial Sequence
  Description of Artificial Sequence: Synthetic oligonucleotide
  Target: LAMA2; (+) strand; PAM type: NRG; PAM sequence: AGG
cctaagtccttttttagttg

SEQ ID NO: 181234 - DNA, 20 bp, Artificial Sequence
  Description of Artificial Sequence: Synthetic oligonucleotide
  Target: LAMA2; (+) strand; PAM type: NRG; PAM sequence: GGG
ctaagtccttttttagttga

SEQ ID NO: 181235 - DNA, 20 bp, Artificial Sequence
  Description of Artificial Sequence: Synthetic oligonucleotide
  Target: LAMA2; (+) strand; PAM type: NRG; PAM sequence: GGG
taagtccttttttagttgag

SEQ ID NO: 181236 - DNA, 20 bp, Artificial Sequence
  Description of Artificial Sequence: Synthetic oligonucleotide
  Target: LAMA2; (+) strand; PAM type: NRG; PAM sequence: GGG
aagtccttttttagttgagg

SEQ ID NO: 181237 - DNA, 20 bp, Artificial Sequence
  Description of Artificial Sequence: Synthetic oligonucleotide
  Target: LAMA2; (+) strand; PAM type: NRG; PAM sequence: TAG
tccttttttagttgaggggg

SEQ ID NO: 181238 - DNA, 20 bp, Artificial Sequence
  Description of Artificial Sequence: Synthetic oligonucleotide
  Target: LAMA2; (+) strand; PAM type: NRG; PAM sequence: AGG
ccttttttagttgagggggt

SEQ ID NO: 181239 - DNA, 20 bp, Artificial Sequence
  Description of Artificial Sequence: Synthetic oligonucleotide
  Target: LAMA2; (+) strand; PAM type: NRG; PAM sequence: GAG
ttttttagttgagggggtag

SEQ ID NO: 181240 - DNA, 20 bp, Artificial Sequence
  Description of Artificial Sequence: Synthetic oligonucleotide
  Target: LAMA2; (+) strand; PAM type: NRG; PAM sequence: AGG
tttttagttgagggggtagg

SEQ ID NO: 181241 - DNA, 20 bp, Artificial Sequence
  Description of Artificial Sequence: Synthetic oligonucleotide
  Target: LAMA2; (+) strand; PAM type: NRG; PAM sequence: GGG
ttttagttgagggggtagga

SEQ ID NO: 181242 - DNA, 20 bp, Artificial Sequence
  Description of Artificial Sequence: Synthetic oligonucleotide
  Target: LAMA2; (+) strand; PAM type: NRG; PAM sequence: GGG
tttagttgagggggtaggag

SEQ ID NO: 181243 - DNA, 20 bp, Artificial Sequence
  Description of Artificial Sequence: Synthetic oligonucleotide
  Target: LAMA2; (+) strand; PAM type: NRG; PAM sequence: TGG
agttgagggggtaggagggg

SEQ ID NO: 181244 - DNA, 20 bp, Artificial Sequence
  Description of Artificial Sequence: Synthetic oligonucleotide
  Target: LAMA2; (+) strand; PAM type: NRG; PAM sequence: AAG
tgagggggtaggaggggtgg

SEQ ID NO: 181245 - DNA, 20 bp, Artificial Sequence
  Description of Artificial Sequence: Synthetic oligonucleotide
  Target: LAMA2; (+) strand; PAM type: NRG; PAM sequence: CAG
gggggtaggaggggtggaag

SEQ ID NO: 181246 - DNA, 20 bp, Artificial Sequence
  Description of Artificial Sequence: Synthetic oligonucleotide
  Target: LAMA2; (+) strand; PAM type: NRG; PAM sequence: CAG
aggaggggtggaagcagttg

SEQ ID NO: 181247 - DNA, 20 bp, Artificial Sequence
  Description of Artificial Sequence: Synthetic oligonucleotide
  Target: LAMA2; (+) strand; PAM type: NRG; PAM sequence: AGG
ggaggggtggaagcagttgc

SEQ ID NO: 181248 - DNA, 20 bp, Artificial Sequence
  Description of Artificial Sequence: Synthetic oligonucleotide
  Target: LAMA2; (+) strand; PAM type: NRG; PAM sequence: CAG
ggaagcagttgcaggcgatc

SEQ ID NO: 181249 - DNA, 20 bp, Artificial Sequence
  Description of Artificial Sequence: Synthetic oligonucleotide
  Target: LAMA2; (+) strand; PAM type: NRG; PAM sequence: AGG
gaagcagttgcaggcgatcc

SEQ ID NO: 181250 - DNA, 20 bp, Artificial Sequence
  Description of Artificial Sequence: Synthetic oligonucleotide
  Target: LAMA2; (+) strand; PAM type: NRG; PAM sequence: AAG
tgcaggcgatccaggccaaa

SEQ ID NO: 181251 - DNA, 20 bp, Artificial Sequence
  Description of Artificial Sequence: Synthetic oligonucleotide
  Target: LAMA2; (+) strand; PAM type: NRG; PAM sequence: AAG
gccaaaaagcatcatatgaa

SEQ ID NO: 181252 - DNA, 20 bp, Artificial Sequence
  Description of Artificial Sequence: Synthetic oligonucleotide
  Target: LAMA2; (+) strand; PAM type: NRG; PAM sequence: TGG
gtataaaaacatgaattatt

SEQ ID NO: 181253 - DNA, 20 bp, Artificial Sequence
  Description of Artificial Sequence: Synthetic oligonucleotide
  Target: LAMA2; (+) strand; PAM type: NRG; PAM sequence: GGG
tataaaaacatgaattattt

SEQ ID NO: 181254 - DNA, 20 bp, Artificial Sequence
  Description of Artificial Sequence: Synthetic oligonucleotide
  Target: LAMA2; (+) strand; PAM type: NRG; PAM sequence: CAG
aaaaacatgaattatttggg

SEQ ID NO: 181255 - DNA, 20 bp, Artificial Sequence
  Description of Artificial Sequence: Synthetic oligonucleotide
  Target: LAMA2; (+) strand; PAM type: NRG; PAM sequence: CAG
atttgggcagctgttgtaat

SEQ ID NO: 181256 - DNA, 20 bp, Artificial Sequence
  Description of Artificial Sequence: Synthetic oligonucleotide
  Target: LAMA2; (+) strand; PAM type: NRG; PAM sequence: TGG
ttgtaatcagtttgaattat

SEQ ID NO: 181257 - DNA, 20 bp, Artificial Sequence
  Description of Artificial Sequence: Synthetic oligonucleotide
  Target: LAMA2; (+) strand; PAM type: NRG; PAM sequence: GAG
gtaatcagtttgaattattg

SEQ ID NO: 181258 - DNA, 20 bp, Artificial Sequence
  Description of Artificial Sequence: Synthetic oligonucleotide
  Target: LAMA2; (+) strand; PAM type: NRG; PAM sequence: AAG
tattggagtttaaatttcaa

SEQ ID NO: 181259 - DNA, 20 bp, Artificial Sequence
  Description of Artificial Sequence: Synthetic oligonucleotide
  Target: LAMA2; (+) strand; PAM type: NRG; PAM sequence: GAG
ttggagtttaaatttcaaaa

SEQ ID NO: 181260 - DNA, 20 bp, Artificial Sequence
  Description of Artificial Sequence: Synthetic oligonucleotide
  Target: LAMA2; (+) strand; PAM type: NRG; PAM sequence: TAG
tttaaatttcaaaagagtga

SEQ ID NO: 181261 - DNA, 20 bp, Artificial Sequence
  Description of Artificial Sequence: Synthetic oligonucleotide
  Target: LAMA2; (+) strand; PAM type: NRG; PAM sequence: AAG
aaatttcaaaagagtgatag

SEQ ID NO: 181262 - DNA, 20 bp, Artificial Sequence
  Description of Artificial Sequence: Synthetic oligonucleotide
  Target: LAMA2; (+) strand; PAM type: NRG; PAM sequence: TGG
agagtgatagaagataacgc

SEQ ID NO: 181263 - DNA, 20 bp, Artificial Sequence
  Description of Artificial Sequence: Synthetic oligonucleotide
  Target: LAMA2; (+) strand; PAM type: NRG; PAM sequence: GGG
gagtgatagaagataacgct

SEQ ID NO: 181264 - DNA, 20 bp, Artificial Sequence
  Description of Artificial Sequence: Synthetic oligonucleotide
  Target: LAMA2; (+) strand; PAM type: NRG; PAM sequence: TGG
gaagataacgctgggcatgt

SEQ ID NO: 181265 - DNA, 20 bp, Artificial Sequence
  Description of Artificial Sequence: Synthetic oligonucleotide
  Target: LAMA2; (+) strand; PAM type: NRG; PAM sequence: AAG
ataacgctgggcatgttggc

SEQ ID NO: 181266 - DNA, 20 bp, Artificial Sequence
  Description of Artificial Sequence: Synthetic oligonucleotide
  Target: LAMA2; (+) strand; PAM type: NRG; PAM sequence: AGG
taacgctgggcatgttggca

SEQ ID NO: 181267 - DNA, 20 bp, Artificial Sequence
  Description of Artificial Sequence: Synthetic oligonucleotide
  Target: LAMA2; (+) strand; PAM type: NRG; PAM sequence: GGG
aacgctgggcatgttggcaa

SEQ ID NO: 181268 - DNA, 20 bp, Artificial Sequence
  Description of Artificial Sequence: Synthetic oligonucleotide
  Target: LAMA2; (+) strand; PAM type: NRG; PAM sequence: CAG
ctgggcatgttggcaagggc

SEQ ID NO: 181269 - DNA, 20 bp, Artificial Sequence
  Description of Artificial Sequence: Synthetic oligonucleotide
  Target: LAMA2; (+) strand; PAM type: NRG; PAM sequence: CAG
tgttggcaagggccagatca

SEQ ID NO: 181270 - DNA, 20 bp, Artificial Sequence
  Description of Artificial Sequence: Synthetic oligonucleotide
  Target: LAMA2; (+) strand; PAM type: NRG; PAM sequence: AGG
gttggcaagggccagatcac

SEQ ID NO: 181271 - DNA, 20 bp, Artificial Sequence
  Description of Artificial Sequence: Synthetic oligonucleotide
  Target: LAMA2; (+) strand; PAM type: NRG; PAM sequence: AAG
ggcaagggccagatcacagg

SEQ ID NO: 181272 - DNA, 20 bp, Artificial Sequence
  Description of Artificial Sequence: Synthetic oligonucleotide
  Target: LAMA2; (+) strand; PAM type: NRG; PAM sequence: GAG
gaagctgtttaaactgtgtt

SEQ ID NO: 181273 - DNA, 20 bp, Artificial Sequence
  Description of Artificial Sequence: Synthetic oligonucleotide
  Target: LAMA2; (+) strand; PAM type: NRG; PAM sequence: AGG
aagctgtttaaactgtgttg

SEQ ID NO: 181274 - DNA, 20 bp, Artificial Sequence
  Description of Artificial Sequence: Synthetic oligonucleotide
  Target: LAMA2; (+) strand; PAM type: NRG; PAM sequence: GAG
gctgtttaaactgtgttgag

SEQ ID NO: 181275 - DNA, 20 bp, Artificial Sequence
  Description of Artificial Sequence: Synthetic oligonucleotide
  Target: LAMA2; (+) strand; PAM type: NRG; PAM sequence: AAG
atcttgatgaacttgatttt

SEQ ID NO: 181276 - DNA, 20 bp, Artificial Sequence
  Description of Artificial Sequence: Synthetic oligonucleotide
  Target: LAMA2; (+) strand; PAM type: NRG; PAM sequence: TAG
ttgatgaacttgattttaag

SEQ ID NO: 181277 - DNA, 20 bp, Artificial Sequence
  Description of Artificial Sequence: Synthetic oligonucleotide
  Target: LAMA2; (+) strand; PAM type: NRG; PAM sequence: GAG
gatgaacttgattttaagta

SEQ ID NO: 181278 - DNA, 20 bp, Artificial Sequence
  Description of Artificial Sequence: Synthetic oligonucleotide
  Target: LAMA2; (+) strand; PAM type: NRG; PAM sequence: CAG
gattttaagtagagatgtga

SEQ ID NO: 181279 - DNA, 20 bp, Artificial Sequence
  Description of Artificial Sequence: Synthetic oligonucleotide
  Target: LAMA2; (+) strand; PAM type: NRG; PAM sequence: AGG
attttaagtagagatgtgac

SEQ ID NO: 181280 - DNA, 20 bp, Artificial Sequence
  Description of Artificial Sequence: Synthetic oligonucleotide
  Target: LAMA2; (+) strand; PAM type: NRG; PAM sequence: GGG
ttttaagtagagatgtgaca

SEQ ID NO: 181281 - DNA, 20 bp, Artificial Sequence
  Description of Artificial Sequence: Synthetic oligonucleotide
  Target: LAMA2; (+) strand; PAM type: NRG; PAM sequence: AAG
tgacagggtaatttcaattt

SEQ ID NO: 181282 - DNA, 20 bp, Artificial Sequence
  Description of Artificial Sequence: Synthetic oligonucleotide
  Target: LAMA2; (+) strand; PAM type: NRG; PAM sequence: GAG
tcaatttaagtatattactc

SEQ ID NO: 181283 - DNA, 20 bp, Artificial Sequence
  Description of Artificial Sequence: Synthetic oligonucleotide
  Target: LAMA2; (+) strand; PAM type: NRG; PAM sequence: AGG
caatttaagtatattactcg

SEQ ID NO: 181284 - DNA, 20 bp, Artificial Sequence
  Description of Artificial Sequence: Synthetic oligonucleotide
  Target: LAMA2; (+) strand; PAM type: NRG; PAM sequence: CAG
aagtatattactcgaggtgt

SEQ ID NO: 181285 - DNA, 20 bp, Artificial Sequence
  Description of Artificial Sequence: Synthetic oligonucleotide
  Target: LAMA2; (+) strand; PAM type: NRG; PAM sequence: TGG
tattactcgaggtgtcagtg

SEQ ID NO: 181286 - DNA, 20 bp, Artificial Sequence
  Description of Artificial Sequence: Synthetic oligonucleotide
  Target: LAMA2; (+) strand; PAM type: NRG; PAM sequence: AAG
tactcgaggtgtcagtgtgg

SEQ ID NO: 181287 - DNA, 20 bp, Artificial Sequence
  Description of Artificial Sequence: Synthetic oligonucleotide
  Target: LAMA2; (+) strand; PAM type: NRG; PAM sequence: CAG
cagtgtggaagacatattgt

SEQ ID NO: 181288 - DNA, 20 bp, Artificial Sequence
  Description of Artificial Sequence: Synthetic oligonucleotide
  Target: LAMA2; (+) strand; PAM type: NRG; PAM sequence: AAG
tgtggaagacatattgtcag

SEQ ID NO: 181289 - DNA, 20 bp, Artificial Sequence
  Description of Artificial Sequence: Synthetic oligonucleotide
  Target: LAMA2; (+) strand; PAM type: NRG; PAM sequence: AAG
attgtcagaagaccaaactg

SEQ ID NO: 181290 - DNA, 20 bp, Artificial Sequence
  Description of Artificial Sequence: Synthetic oligonucleotide
  Target: LAMA2; (+) strand; PAM type: NRG; PAM sequence: AAG
agaagaccaaactgaagaca

SEQ ID NO: 181291 - DNA, 20 bp, Artificial Sequence
  Description of Artificial Sequence: Synthetic oligonucleotide
  Target: LAMA2; (+) strand; PAM type: NRG; PAM sequence: TGG
ctgaagacaaagcgaacaat

SEQ ID NO: 181292 - DNA, 20 bp, Artificial Sequence
  Description of Artificial Sequence: Synthetic oligonucleotide
  Target: LAMA2; (+) strand; PAM type: NRG; PAM sequence: TAG
cgaacaattggattcaataa

SEQ ID NO: 181293 - DNA, 20 bp, Artificial Sequence
  Description of Artificial Sequence: Synthetic oligonucleotide
  Target: LAMA2; (+) strand; PAM type: NRG; PAM sequence: TAG
aattggattcaataatagtc

SEQ ID NO: 181294 - DNA, 20 bp, Artificial Sequence
  Description of Artificial Sequence: Synthetic oligonucleotide
  Target: LAMA2; (+) strand; PAM type: NRG; PAM sequence: AGG
attggattcaataatagtct

SEQ ID NO: 181295 - DNA, 20 bp, Artificial Sequence
  Description of Artificial Sequence: Synthetic oligonucleotide
  Target: LAMA2; (+) strand; PAM type: NRG; PAM sequence: CAG
ggattcaataatagtctagg

SEQ ID NO: 181296 - DNA, 20 bp, Artificial Sequence
  Description of Artificial Sequence: Synthetic oligonucleotide
  Target: LAMA2; (+) strand; PAM type: NRG; PAM sequence: AGG
gattcaataatagtctaggc

SEQ ID NO: 181297 - DNA, 20 bp, Artificial Sequence
  Description of Artificial Sequence: Synthetic oligonucleotide
  Target: LAMA2; (+) strand; PAM type: NRG; PAM sequence: GAG
ttcaataatagtctaggcag

SEQ ID NO: 181298 - DNA, 20 bp, Artificial Sequence
  Description of Artificial Sequence: Synthetic oligonucleotide
  Target: LAMA2; (+) strand; PAM type: NRG; PAM sequence: AGG
tcaataatagtctaggcagg

SEQ ID NO: 181299 - DNA, 20 bp, Artificial Sequence
  Description of Artificial Sequence: Synthetic oligonucleotide
  Target: LAMA2; (+) strand; PAM type: NRG; PAM sequence: AAG
caggaggtaaattatgcttg

SEQ ID NO: 181300 - DNA, 20 bp, Artificial Sequence
  Description of Artificial Sequence: Synthetic oligonucleotide
  Target: LAMA2; (+) strand; PAM type: NRG; PAM sequence: AAG
aggtaaattatgcttgaagt

SEQ ID NO: 181301 - DNA, 20 bp, Artificial Sequence
  Description of Artificial Sequence: Synthetic oligonucleotide
  Target: LAMA2; (+) strand; PAM type: NRG; PAM sequence: GAG
gtaaattatgcttgaagtaa

SEQ ID NO: 181302 - DNA, 20 bp, Artificial Sequence
  Description of Artificial Sequence: Synthetic oligonucleotide
  Target: LAMA2; (+) strand; PAM type: NRG; PAM sequence: CAG
tatgcttgaagtaagagatg

SEQ ID NO: 181303 - DNA, 20 bp, Artificial Sequence
  Description of Artificial Sequence: Synthetic oligonucleotide
  Target: LAMA2; (+) strand; PAM type: NRG; PAM sequence: TGG
gcttgaagtaagagatgcag

SEQ ID NO: 181304 - DNA, 20 bp, Artificial Sequence
  Description of Artificial Sequence: Synthetic oligonucleotide
  Target: LAMA2; (+) strand; PAM type: NRG; PAM sequence: GGG
cttgaagtaagagatgcagt

SEQ ID NO: 181305 - DNA, 20 bp, Artificial Sequence
  Description of Artificial Sequence: Synthetic oligonucleotide
  Target: LAMA2; (+) strand; PAM type: NRG; PAM sequence: AAG
tgcagtgggaattgacatca

SEQ ID NO: 181306 - DNA, 20 bp, Artificial Sequence
  Description of Artificial Sequence: Synthetic oligonucleotide
  Target: LAMA2; (+) strand; PAM type: NRG; PAM sequence: CAG
gaattgacatcaaagaaatg

SEQ ID NO: 181307 - DNA, 20 bp, Artificial Sequence
  Description of Artificial Sequence: Synthetic oligonucleotide
  Target: LAMA2; (+) strand; PAM type: NRG; PAM sequence: CAG
caccatgtgataccattaca

SEQ ID NO: 181308 - DNA, 20 bp, Artificial Sequence
  Description of Artificial Sequence: Synthetic oligonucleotide
  Target: LAMA2; (+) strand; PAM type: NRG; PAM sequence: TAG
tgataccattacacagctat

SEQ ID NO: 181309 - DNA, 20 bp, Artificial Sequence
  Description of Artificial Sequence: Synthetic oligonucleotide
  Target: LAMA2; (+) strand; PAM type: NRG; PAM sequence: AAG
ttagaatgactaaaattaaa

SEQ ID NO: 181310 - DNA, 20 bp, Artificial Sequence
  Description of Artificial Sequence: Synthetic oligonucleotide
  Target: LAMA2; (+) strand; PAM type: NRG; PAM sequence: CAG
ttaaaaagactgaccatact

SEQ ID NO: 181311 - DNA, 20 bp, Artificial Sequence
  Description of Artificial Sequence: Synthetic oligonucleotide
  Target: LAMA2; (+) strand; PAM type: NRG; PAM sequence: TGG
agactgaccatactcagtac

SEQ ID NO: 181312 - DNA, 20 bp, Artificial Sequence
  Description of Artificial Sequence: Synthetic oligonucleotide
  Target: LAMA2; (+) strand; PAM type: NRG; PAM sequence: CAG
ctgaccatactcagtactgg

SEQ ID NO: 181313 - DNA, 20 bp, Artificial Sequence
  Description of Artificial Sequence: Synthetic oligonucleotide
  Target: LAMA2; (+) strand; PAM type: NRG; PAM sequence: AAG
accatactcagtactggcag

SEQ ID NO: 181314 - DNA, 20 bp, Artificial Sequence
  Description of Artificial Sequence: Synthetic oligonucleotide
  Target: LAMA2; (+) strand; PAM type: NRG; PAM sequence: AGG
ccatactcagtactggcaga

SEQ ID NO: 181315 - DNA, 20 bp, Artificial Sequence
  Description of Artificial Sequence: Synthetic oligonucleotide
  Target: LAMA2; (+) strand; PAM type: NRG; PAM sequence: TGG
tactcagtactggcagaagg

SEQ ID NO: 181316 - DNA, 20 bp, Artificial Sequence
  Description of Artificial Sequence: Synthetic oligonucleotide
  Target: LAMA2; (+) strand; PAM type: NRG; PAM sequence: GAG
ctcagtactggcagaaggtg

SEQ ID NO: 181317 - DNA, 20 bp, Artificial Sequence
  Description of Artificial Sequence: Synthetic oligonucleotide
  Target: LAMA2; (+) strand; PAM type: NRG; PAM sequence: TGG
ctggcagaaggtggagacac

SEQ ID NO: 181318 - DNA, 20 bp, Artificial Sequence
  Description of Artificial Sequence: Synthetic oligonucleotide
  Target: LAMA2; (+) strand; PAM type: NRG; PAM sequence: GAG
ggaactcatacactgctgct

SEQ ID NO: 181319 - DNA, 20 bp, Artificial Sequence
  Description of Artificial Sequence: Synthetic oligonucleotide
  Target: LAMA2; (+) strand; PAM type: NRG; PAM sequence: AGG
gaactcatacactgctgctg

SEQ ID NO: 181320 - DNA, 20 bp, Artificial Sequence
  Description of Artificial Sequence: Synthetic oligonucleotide
  Target: LAMA2; (+) strand; PAM type: NRG; PAM sequence: AAG
acactgctgctgaggatata

SEQ ID NO: 181321 - DNA, 20 bp, Artificial Sequence
  Description of Artificial Sequence: Synthetic oligonucleotide
  Target: LAMA2; (+) strand; PAM type: NRG; PAM sequence: TGG
ctgctgctgaggatataaag

SEQ ID NO: 181322 - DNA, 20 bp, Artificial Sequence
  Description of Artificial Sequence: Synthetic oligonucleotide
  Target: LAMA2; (+) strand; PAM type: NRG; PAM sequence: TGG
gatataaagtggcataacat

SEQ ID NO: 181323 - DNA, 20 bp, Artificial Sequence
  Description of Artificial Sequence: Synthetic oligonucleotide
  Target: LAMA2; (+) strand; PAM type: NRG; PAM sequence: AAG
ataaagtggcataacattgg

SEQ ID NO: 181324 - DNA, 20 bp, Artificial Sequence
  Description of Artificial Sequence: Synthetic oligonucleotide
  Target: LAMA2; (+) strand; PAM type: NRG; PAM sequence: GAG
aaagtggcataacattggaa

SEQ ID NO: 181325 - DNA, 20 bp, Artificial Sequence
  Description of Artificial Sequence: Synthetic oligonucleotide
  Target: LAMA2; (+) strand; PAM type: NRG; PAM sequence: AGG
aagtggcataacattggaag

SEQ ID NO: 181326 - DNA, 20 bp, Artificial Sequence
  Description of Artificial Sequence: Synthetic oligonucleotide
  Target: LAMA2; (+) strand; PAM type: NRG; PAM sequence: TGG
ggcataacattggaagaggt

SEQ ID NO: 181327 - DNA, 20 bp, Artificial Sequence
  Description of Artificial Sequence: Synthetic oligonucleotide
  Target: LAMA2; (+) strand; PAM type: NRG; PAM sequence: AAG
agaggttggccatttcttaa

SEQ ID NO: 181328 - DNA, 20 bp, Artificial Sequence
  Description of Artificial Sequence: Synthetic oligonucleotide
  Target: LAMA2; (+) strand; PAM type: NRG; PAM sequence: CAG
ttcactcctaattattcacc

SEQ ID NO: 181329 - DNA, 20 bp, Artificial Sequence
  Description of Artificial Sequence: Synthetic oligonucleotide
  Target: LAMA2; (+) strand; PAM type: NRG; PAM sequence: AGG
tcactcctaattattcaccc

SEQ ID NO: 181330 - DNA, 20 bp, Artificial Sequence
  Description of Artificial Sequence: Synthetic oligonucleotide
  Target: LAMA2; (+) strand; PAM type: NRG; PAM sequence: AAG
taattattcacccaggacac

SEQ ID NO: 181331 - DNA, 20 bp, Artificial Sequence
  Description of Artificial Sequence: Synthetic oligonucleotide
  Target: LAMA2; (+) strand; PAM type: NRG; PAM sequence: AAG
tattcacccaggacacaaga

SEQ ID NO: 181332 - DNA, 20 bp, Artificial Sequence
  Description of Artificial Sequence: Synthetic oligonucleotide
  Target: LAMA2; (+) strand; PAM type: NRG; PAM sequence: TAG
acaagaaagcatatttttta

SEQ ID NO: 181333 - DNA, 20 bp, Artificial Sequence
  Description of Artificial Sequence: Synthetic oligonucleotide
  Target: LAMA2; (+) strand; PAM type: NRG; PAM sequence: AAG
gaaagcatattttttataga

SEQ ID NO: 181334 - DNA, 20 bp, Artificial Sequence
  Description of Artificial Sequence: Synthetic oligonucleotide
  Target: LAMA2; (+) strand; PAM type: NRG; PAM sequence: CAG
acaaatcacatatccatcga

SEQ ID NO: 181335 - DNA, 20 bp, Artificial Sequence
  Description of Artificial Sequence: Synthetic oligonucleotide
  Target: LAMA2; (+) strand; PAM type: NRG; PAM sequence: AGG
caaatcacatatccatcgac

SEQ ID NO: 181336 - DNA, 20 bp, Artificial Sequence
  Description of Artificial Sequence: Synthetic oligonucleotide
  Target: LAMA2; (+) strand; PAM type: NRG; PAM sequence: TAG
catatccatcgacaggtaaa

SEQ ID NO: 181337 - DNA, 20 bp, Artificial Sequence
  Description of Artificial Sequence: Synthetic oligonucleotide
  Target: LAMA2; (+) strand; PAM type: NRG; PAM sequence: TGG
aaatagatatacataaattg

SEQ ID NO: 181338 - DNA, 20 bp, Artificial Sequence
  Description of Artificial Sequence: Synthetic oligonucleotide
  Target: LAMA2; (+) strand; PAM type: NRG; PAM sequence: TGG
attgtggtatactcatacaa

SEQ ID NO: 181339 - DNA, 20 bp, Artificial Sequence
  Description of Artificial Sequence: Synthetic oligonucleotide
  Target: LAMA2; (+) strand; PAM type: NRG; PAM sequence: TAG
atactcatacaatggaatac

SEQ ID NO: 181340 - DNA, 20 bp, Artificial Sequence
  Description of Artificial Sequence: Synthetic oligonucleotide
  Target: LAMA2; (+) strand; PAM type: NRG; PAM sequence: CAG
aatactagcaataaaatact

SEQ ID NO: 181341 - DNA, 20 bp, Artificial Sequence
  Description of Artificial Sequence: Synthetic oligonucleotide
  Target: LAMA2; (+) strand; PAM type: NRG; PAM sequence: AAG
atactcagcaataaaaaata

SEQ ID NO: 181342 - DNA, 20 bp, Artificial Sequence
  Description of Artificial Sequence: Synthetic oligonucleotide
  Target: LAMA2; (+) strand; PAM type: NRG; PAM sequence: TAG
taaaaaataaagtattaata

SEQ ID NO: 181343 - DNA, 20 bp, Artificial Sequence
  Description of Artificial Sequence: Synthetic oligonucleotide
  Target: LAMA2; (+) strand; PAM type: NRG; PAM sequence: TGG
gtattaatatagatacaaaa

SEQ ID NO: 181344 - DNA, 20 bp, Artificial Sequence
  Description of Artificial Sequence: Synthetic oligonucleotide
  Target: LAMA2; (+) strand; PAM type: NRG; PAM sequence: TAG
aaaatggatgaatatccaaa

SEQ ID NO: 181345 - DNA, 20 bp, Artificial Sequence
  Description of Artificial Sequence: Synthetic oligonucleotide
  Target: LAMA2; (+) strand; PAM type: NRG; PAM sequence: AGG
aaatggatgaatatccaaat

SEQ ID NO: 181346 - DNA, 20 bp, Artificial Sequence
  Description of Artificial Sequence: Synthetic oligonucleotide
  Target: LAMA2; (+) strand; PAM type: NRG; PAM sequence: CAG
tggatgaatatccaaatagg

SEQ ID NO: 181347 - DNA, 20 bp, Artificial Sequence
  Description of Artificial Sequence: Synthetic oligonucleotide
  Target: LAMA2; (+) strand; PAM type: NRG; PAM sequence: AAG
atccaaataggcagacaaaa

SEQ ID NO: 181348 - DNA, 20 bp, Artificial Sequence
  Description of Artificial Sequence: Synthetic oligonucleotide
  Target: LAMA2; (+) strand; PAM type: NRG; PAM sequence: AGG
tccaaataggcagacaaaaa

SEQ ID NO: 181349 - DNA, 20 bp, Artificial Sequence
  Description of Artificial Sequence: Synthetic oligonucleotide
  Target: LAMA2; (+) strand; PAM type: NRG; PAM sequence: TAG
gcagacaaaaaaggcaaatt

SEQ ID NO: 181350 - DNA, 20 bp, Artificial Sequence
  Description of Artificial Sequence: Synthetic oligonucleotide
  Target: LAMA2; (+) strand; PAM type: NRG; PAM sequence: AGG
cagacaaaaaaggcaaattt

SEQ ID NO: 181351 - DNA, 20 bp, Artificial Sequence
  Description of Artificial Sequence: Synthetic oligonucleotide
  Target: LAMA2; (+) strand; PAM type: NRG; PAM sequence: CAG
acaaaaaaggcaaatttagg

SEQ ID NO: 181352 - DNA, 20 bp, Artificial Sequence
  Description of Artificial Sequence: Synthetic oligonucleotide
  Target: LAMA2; (+) strand; PAM type: NRG; PAM sequence: TAG
tacatttgtataaaattaca

SEQ ID NO: 181353 - DNA, 20 bp, Artificial Sequence
  Description of Artificial Sequence: Synthetic oligonucleotide
  Target: LAMA2; (+) strand; PAM type: NRG; PAM sequence: TAG
agaaaatgtaaactaatcta

SEQ ID NO: 181354 - DNA, 20 bp, Artificial Sequence
  Description of Artificial Sequence: Synthetic oligonucleotide
  Target: LAMA2; (+) strand; PAM type: NRG; PAM sequence: CAG
tgtaaactaatctatagtca

SEQ ID NO: 181355 - DNA, 20 bp, Artificial Sequence
  Description of Artificial Sequence: Synthetic oligonucleotide
  Target: LAMA2; (+) strand; PAM type: NRG; PAM sequence: AAG
aactaatctatagtcacaga

SEQ ID NO: 181356 - DNA, 20 bp, Artificial Sequence
  Description of Artificial Sequence: Synthetic oligonucleotide
  Target: LAMA2; (+) strand; PAM type: NRG; PAM sequence: CAG
taatctatagtcacagaaag

SEQ ID NO: 181357 - DNA, 20 bp, Artificial Sequence
  Description of Artificial Sequence: Synthetic oligonucleotide
  Target: LAMA2; (+) strand; PAM type: NRG; PAM sequence: CGG
ctatagtcacagaaagcaga

SEQ ID NO: 181358 - DNA, 20 bp, Artificial Sequence
  Description of Artificial Sequence: Synthetic oligonucleotide
  Target: LAMA2; (+) strand; PAM type: NRG; PAM sequence: TGG
agacggatgctacttgtgaa

SEQ ID NO: 181359 - DNA, 20 bp, Artificial Sequence
  Description of Artificial Sequence: Synthetic oligonucleotide
  Target: LAMA2; (+) strand; PAM type: NRG; PAM sequence: AAG
gtgaatggtatatgtacgaa

SEQ ID NO: 181360 - DNA, 20 bp, Artificial Sequence
  Description of Artificial Sequence: Synthetic oligonucleotide
  Target: LAMA2; (+) strand; PAM type: NRG; PAM sequence: AGG
tgaatggtatatgtacgaaa

SEQ ID NO: 181361 - DNA, 20 bp, Artificial Sequence
  Description of Artificial Sequence: Synthetic oligonucleotide
  Target: LAMA2; (+) strand; PAM type: NRG; PAM sequence: AAG
tatatgtacgaaaaggcaaa

SEQ ID NO: 181362 - DNA, 20 bp, Artificial Sequence
  Description of Artificial Sequence: Synthetic oligonucleotide
  Target: LAMA2; (+) strand; PAM type: NRG; PAM sequence: AGG
atatgtacgaaaaggcaaaa

SEQ ID NO: 181363 - DNA, 20 bp, Artificial Sequence
  Description of Artificial Sequence: Synthetic oligonucleotide
  Target: LAMA2; (+) strand; PAM type: NRG; PAM sequence: GAG
atgtacgaaaaggcaaaaag

SEQ ID NO: 181364 - DNA, 20 bp, Artificial Sequence
  Description of Artificial Sequence: Synthetic oligonucleotide
  Target: LAMA2; (+) strand; PAM type: NRG; PAM sequence: AGG
tgtacgaaaaggcaaaaagg

SEQ ID NO: 181365 - DNA, 20 bp, Artificial Sequence
  Description of Artificial Sequence: Synthetic oligonucleotide
  Target: LAMA2; (+) strand; PAM type: NRG; PAM sequence: GGG
gtacgaaaaggcaaaaagga

SEQ ID NO: 181366 - DNA, 20 bp, Artificial Sequence
  Description of Artificial Sequence: Synthetic oligonucleotide
  Target: LAMA2; (+) strand; PAM type: NRG; PAM sequence: GAG
aaaaaggagggattacaaat

SEQ ID NO: 181367 - DNA, 20 bp, Artificial Sequence
  Description of Artificial Sequence: Synthetic oligonucleotide
  Target: LAMA2; (+) strand; PAM type: NRG; PAM sequence: AAG
agggattacaaatgagcata

SEQ ID NO: 181368 - DNA, 20 bp, Artificial Sequence
  Description of Artificial Sequence: Synthetic oligonucleotide
  Target: LAMA2; (+) strand; PAM type: NRG; PAM sequence: TGG
aatgagcataaagaaacttc

SEQ ID NO: 181369 - DNA, 20 bp, Artificial Sequence
  Description of Artificial Sequence: Synthetic oligonucleotide
  Target: LAMA2; (+) strand; PAM type: NRG; PAM sequence: GGG
atgagcataaagaaacttct

SEQ ID NO: 181370 - DNA, 20 bp, Artificial Sequence
  Description of Artificial Sequence: Synthetic oligonucleotide
  Target: LAMA2; (+) strand; PAM type: NRG; PAM sequence: GGG
tgagcataaagaaacttctg

SEQ ID NO: 181371 - DNA, 20 bp, Artificial Sequence
  Description of Artificial Sequence: Synthetic oligonucleotide
  Target: LAMA2; (+) strand; PAM type: NRG; PAM sequence: TGG
taaagaaacttctggggtga

SEQ ID NO: 181372 - DNA, 20 bp, Artificial Sequence
  Description of Artificial Sequence: Synthetic oligonucleotide
  Target: LAMA2; (+) strand; PAM type: NRG; PAM sequence: GAG
gggtgatggatgtgttcatt

SEQ ID NO: 181373 - DNA, 20 bp, Artificial Sequence
  Description of Artificial Sequence: Synthetic oligonucleotide
  Target: LAMA2; (+) strand; PAM type: NRG; PAM sequence: TGG
atggatgtgttcattgagtg

SEQ ID NO: 181374 - DNA, 20 bp, Artificial Sequence
  Description of Artificial Sequence: Synthetic oligonucleotide
  Target: LAMA2; (+) strand; PAM type: NRG; PAM sequence: TGG
gatgtgttcattgagtgtgg

SEQ ID NO: 181375 - DNA, 20 bp, Artificial Sequence
  Description of Artificial Sequence: Synthetic oligonucleotide
  Target: LAMA2; (+) strand; PAM type: NRG; PAM sequence: TGG
gtgttcattgagtgtggtgg

SEQ ID NO: 181376 - DNA, 20 bp, Artificial Sequence
  Description of Artificial Sequence: Synthetic oligonucleotide
  Target: LAMA2; (+) strand; PAM type: NRG; PAM sequence: CAG
tgagtgtggtggtggttctg

SEQ ID NO: 181377 - DNA, 20 bp, Artificial Sequence
  Description of Artificial Sequence: Synthetic oligonucleotide
  Target: LAMA2; (+) strand; PAM type: NRG; PAM sequence: AGG
gagtgtggtggtggttctgc

SEQ ID NO: 181378 - DNA, 20 bp, Artificial Sequence
  Description of Artificial Sequence: Synthetic oligonucleotide
  Target: LAMA2; (+) strand; PAM type: NRG; PAM sequence: TGG
acaattacatgttacaaaca

SEQ ID NO: 181379 - DNA, 20 bp, Artificial Sequence
  Description of Artificial Sequence: Synthetic oligonucleotide
  Target: LAMA2; (+) strand; PAM type: NRG; PAM sequence: TAG
tacaaacatggtttaaatta

SEQ ID NO: 181380 - DNA, 20 bp, Artificial Sequence
  Description of Artificial Sequence: Synthetic oligonucleotide
  Target: LAMA2; (+) strand; PAM type: NRG; PAM sequence: CAG
atagcatgttaattattcct

SEQ ID NO: 181381 - DNA, 20 bp, Artificial Sequence
  Description of Artificial Sequence: Synthetic oligonucleotide
  Target: LAMA2; (+) strand; PAM type: NRG; PAM sequence: TAG
cagtaaaactgttttaaaaa

SEQ ID NO: 181382 - DNA, 20 bp, Artificial Sequence
  Description of Artificial Sequence: Synthetic oligonucleotide
  Target: LAMA2; (+) strand; PAM type: NRG; PAM sequence: AGG
agtaaaactgttttaaaaat

SEQ ID NO: 181383 - DNA, 20 bp, Artificial Sequence
  Description of Artificial Sequence: Synthetic oligonucleotide
  Target: LAMA2; (+) strand; PAM type: NRG; PAM sequence: CAG
aaactgttttaaaaatagga

SEQ ID NO: 181384 - DNA, 20 bp, Artificial Sequence
  Description of Artificial Sequence: Synthetic oligonucleotide
  Target: LAMA2; (+) strand; PAM type: NRG; PAM sequence: TAG
tttaaaaataggacagatat

SEQ ID NO: 181385 - DNA, 20 bp, Artificial Sequence
  Description of Artificial Sequence: Synthetic oligonucleotide
  Target: LAMA2; (+) strand; PAM type: NRG; PAM sequence: GAG
taaaaataggacagatatta

SEQ ID NO: 181386 - DNA, 20 bp, Artificial Sequence
  Description of Artificial Sequence: Synthetic oligonucleotide
  Target: LAMA2; (+) strand; PAM type: NRG; PAM sequence: AGG
aaaaataggacagatattag

SEQ ID NO: 181387 - DNA, 20 bp, Artificial Sequence
  Description of Artificial Sequence: Synthetic oligonucleotide
  Target: LAMA2; (+) strand; PAM type: NRG; PAM sequence: TAG
ggacagatattagaggtatt

SEQ ID NO: 181388 - DNA, 20 bp, Artificial Sequence
  Description of Artificial Sequence: Synthetic oligonucleotide
  Target: LAMA2; (+) strand; PAM type: NRG; PAM sequence: AGG
gacagatattagaggtattt

SEQ ID NO: 181389 - DNA, 20 bp, Artificial Sequence
  Description of Artificial Sequence: Synthetic oligonucleotide
  Target: LAMA2; (+) strand; PAM type: NRG; PAM sequence: GAG
cagatattagaggtatttag

SEQ ID NO: 181390 - DNA, 20 bp, Artificial Sequence
  Description of Artificial Sequence: Synthetic oligonucleotide
  Target: LAMA2; (+) strand; PAM type: NRG; PAM sequence: AAG
atattagaggtatttaggag

SEQ ID NO: 181391 - DNA, 20 bp, Artificial Sequence
  Description of Artificial Sequence: Synthetic oligonucleotide
  Target: LAMA2; (+) strand; PAM type: NRG; PAM sequence: TAG
aggtatttaggagaagaaat

SEQ ID NO: 181392 - DNA, 20 bp, Artificial Sequence
  Description of Artificial Sequence: Synthetic oligonucleotide
  Target: LAMA2; (+) strand; PAM type: NRG; PAM sequence: AAG
tttaggagaagaaattagtg

SEQ ID NO: 181393 - DNA, 20 bp, Artificial Sequence
  Description of Artificial Sequence: Synthetic oligonucleotide
  Target: LAMA2; (+) strand; PAM type: NRG; PAM sequence: TAG
tagtgaagctgttgattgat

SEQ ID NO: 181394 - DNA, 20 bp, Artificial Sequence
  Description of Artificial Sequence: Synthetic oligonucleotide
  Target: LAMA2; (+) strand; PAM type: NRG; PAM sequence: TGG
agctgttgattgattagatg

SEQ ID NO: 181395 - DNA, 20 bp, Artificial Sequence
  Description of Artificial Sequence: Synthetic oligonucleotide
  Target: LAMA2; (+) strand; PAM type: NRG; PAM sequence: GAG
gttgattgattagatgtggt

SEQ ID NO: 181396 - DNA, 20 bp, Artificial Sequence
  Description of Artificial Sequence: Synthetic oligonucleotide
  Target: LAMA2; (+) strand; PAM type: NRG; PAM sequence: AGG
ttgattgattagatgtggtg

SEQ ID NO: 181397 - DNA, 20 bp, Artificial Sequence
  Description of Artificial Sequence: Synthetic oligonucleotide
  Target: LAMA2; (+) strand; PAM type: NRG; PAM sequence: GAG
gattgattagatgtggtgag

SEQ ID NO: 181398 - DNA, 20 bp, Artificial Sequence
  Description of Artificial Sequence: Synthetic oligonucleotide
  Target: LAMA2; (+) strand; PAM type: NRG; PAM sequence: AAG
gattagatgtggtgaggaga

SEQ ID NO: 181399 - DNA, 20 bp, Artificial Sequence
  Description of Artificial Sequence: Synthetic oligonucleotide
  Target: LAMA2; (+) strand; PAM type: NRG; PAM sequence: CAG
agatgtggtgaggagaaagt

SEQ ID NO: 181400 - DNA, 20 bp, Artificial Sequence
  Description of Artificial Sequence: Synthetic oligonucleotide
  Target: LAMA2; (+) strand; PAM type: NRG; PAM sequence: AGG
gatgtggtgaggagaaagtc

SEQ ID NO: 181401 - DNA, 20 bp, Artificial Sequence
  Description of Artificial Sequence: Synthetic oligonucleotide
  Target: LAMA2; (+) strand; PAM type: NRG; PAM sequence: TAG
agaaagtcaggatgactctc

SEQ ID NO: 181402 - DNA, 20 bp, Artificial Sequence
  Description of Artificial Sequence: Synthetic oligonucleotide
  Target: LAMA2; (+) strand; PAM type: NRG; PAM sequence: TAG
gtcaggatgactctctagtt

SEQ ID NO: 181403 - DNA, 20 bp, Artificial Sequence
  Description of Artificial Sequence: Synthetic oligonucleotide
  Target: LAMA2; (+) strand; PAM type: NRG; PAM sequence: TAG
aggatgactctctagtttag

SEQ ID NO: 181404 - DNA, 20 bp, Artificial Sequence
  Description of Artificial Sequence: Synthetic oligonucleotide
  Target: LAMA2; (+) strand; PAM type: NRG; PAM sequence: TGG
gactctctagtttagtagat

SEQ ID NO: 181405 - DNA, 20 bp, Artificial Sequence
  Description of Artificial Sequence: Synthetic oligonucleotide
  Target: LAMA2; (+) strand; PAM type: NRG; PAM sequence: GGG
actctctagtttagtagatt

SEQ ID NO: 181406 - DNA, 20 bp, Artificial Sequence
  Description of Artificial Sequence: Synthetic oligonucleotide
  Target: LAMA2; (+) strand; PAM type: NRG; PAM sequence: TGG
ctctagtttagtagattggg

SEQ ID NO: 181407 - DNA, 20 bp, Artificial Sequence
  Description of Artificial Sequence: Synthetic oligonucleotide
  Target: LAMA2; (+) strand; PAM type: NRG; PAM sequence: GGG
tctagtttagtagattgggt

SEQ ID NO: 181408 - DNA, 20 bp, Artificial Sequence
  Description of Artificial Sequence: Synthetic oligonucleotide
  Target: LAMA2; (+) strand; PAM type: NRG; PAM sequence: GGG
ctagtttagtagattgggtg

SEQ ID NO: 181409 - DNA, 20 bp, Artificial Sequence
  Description of Artificial Sequence: Synthetic oligonucleotide
  Target: LAMA2; (+) strand; PAM type: NRG; PAM sequence: GGG
tagtttagtagattgggtgg

SEQ ID NO: 181410 - DNA, 20 bp, Artificial Sequence
  Description of Artificial Sequence: Synthetic oligonucleotide
  Target: LAMA2; (+) strand; PAM type: NRG; PAM sequence: GGG
agtttagtagattgggtggg

SEQ ID NO: 181411 - DNA, 20 bp, Artificial Sequence
  Description of Artificial Sequence: Synthetic oligonucleotide
  Target: LAMA2; (+) strand; PAM type: NRG; PAM sequence: GGG
gtttagtagattgggtgggg

SEQ ID NO: 181412 - DNA, 20 bp, Artificial Sequence
  Description of Artificial Sequence: Synthetic oligonucleotide
  Target: LAMA2; (+) strand; PAM type: NRG; PAM sequence: AAG
agattgggtgggggggtcat

SEQ ID NO: 181413 - DNA, 20 bp, Artificial Sequence
  Description of Artificial Sequence: Synthetic oligonucleotide
  Target: LAMA2; (+) strand; PAM type: NRG; PAM sequence: AAG
gtcataagaccaacaaaaaa

SEQ ID NO: 181414 - DNA, 20 bp, Artificial Sequence
  Description of Artificial Sequence: Synthetic oligonucleotide
  Target: LAMA2; (+) strand; PAM type: NRG; PAM sequence: AAG
taagaccaacaaaaaaaagt

SEQ ID NO: 181415 - DNA, 20 bp, Artificial Sequence
  Description of Artificial Sequence: Synthetic oligonucleotide
  Target: LAMA2; (+) strand; PAM type: NRG; PAM sequence: AAG
ccaacaaaaaaaagtaagtt

SEQ ID NO: 181416 - DNA, 20 bp, Artificial Sequence
  Description of Artificial Sequence: Synthetic oligonucleotide
  Target: LAMA2; (+) strand; PAM type: NRG; PAM sequence: CAG
aaaaagtaagttaagtaata

SEQ ID NO: 181417 - DNA, 20 bp, Artificial Sequence
  Description of Artificial Sequence: Synthetic oligonucleotide
  Target: LAMA2; (+) strand; PAM type: NRG; PAM sequence: TGG
taagttaagtaatacagatt

SEQ ID NO: 181418 - DNA, 20 bp, Artificial Sequence
  Description of Artificial Sequence: Synthetic oligonucleotide
  Target: LAMA2; (+) strand; PAM type: NRG; PAM sequence: GGG
aagttaagtaatacagattt

SEQ ID NO: 181419 - DNA, 20 bp, Artificial Sequence
  Description of Artificial Sequence: Synthetic oligonucleotide
  Target: LAMA2; (+) strand; PAM type: NRG; PAM sequence: GAG
gttaagtaatacagatttgg

SEQ ID NO: 181420 - DNA, 20 bp, Artificial Sequence
  Description of Artificial Sequence: Synthetic oligonucleotide
  Target: LAMA2; (+) strand; PAM type: NRG; PAM sequence: TAG
agtaatacagatttgggagt

SEQ ID NO: 181421 - DNA, 20 bp, Artificial Sequence
  Description of Artificial Sequence: Synthetic oligonucleotide
  Target: LAMA2; (+) strand; PAM type: NRG; PAM sequence: TGG
agatgataattattttgatt

SEQ ID NO: 181422 - DNA, 20 bp, Artificial Sequence
  Description of Artificial Sequence: Synthetic oligonucleotide
  Target: LAMA2; (+) strand; PAM type: NRG; PAM sequence: TAG
ttattttgatttggaatgtt

SEQ ID NO: 181423 - DNA, 20 bp, Artificial Sequence
  Description of Artificial Sequence: Synthetic oligonucleotide
  Target: LAMA2; (+) strand; PAM type: NRG; PAM sequence: AAG
gatttggaatgtttagctta

SEQ ID NO: 181424 - DNA, 20 bp, Artificial Sequence
  Description of Artificial Sequence: Synthetic oligonucleotide
  Target: LAMA2; (+) strand; PAM type: NRG; PAM sequence: AAG
atgtttagcttaaagtacgc

SEQ ID NO: 181425 - DNA, 20 bp, Artificial Sequence
  Description of Artificial Sequence: Synthetic oligonucleotide
  Target: LAMA2; (+) strand; PAM type: NRG; PAM sequence: AGG
tgtttagcttaaagtacgca

SEQ ID NO: 181426 - DNA, 20 bp, Artificial Sequence
  Description of Artificial Sequence: Synthetic oligonucleotide
  Target: LAMA2; (+) strand; PAM type: NRG; PAM sequence: TAG
taaagtacgcaaggaaaata

SEQ ID NO: 181427 - DNA, 20 bp, Artificial Sequence
  Description of Artificial Sequence: Synthetic oligonucleotide
  Target: LAMA2; (+) strand; PAM type: NRG; PAM sequence: TGG
cgcaaggaaaatatagatga

SEQ ID NO: 181428 - DNA, 20 bp, Artificial Sequence
  Description of Artificial Sequence: Synthetic oligonucleotide
  Target: LAMA2; (+) strand; PAM type: NRG; PAM sequence: TGG
ggtgtctcacctgttgaatg

SEQ ID NO: 181429 - DNA, 20 bp, Artificial Sequence
  Description of Artificial Sequence: Synthetic oligonucleotide
  Target: LAMA2; (+) strand; PAM type: NRG; PAM sequence: TAG
acctgttgaatgtggacttt

SEQ ID NO: 181430 - DNA, 20 bp, Artificial Sequence
  Description of Artificial Sequence: Synthetic oligonucleotide
  Target: LAMA2; (+) strand; PAM type: NRG; PAM sequence: AGG
cctgttgaatgtggactttt

SEQ ID NO: 181431 - DNA, 20 bp, Artificial Sequence
  Description of Artificial Sequence: Synthetic oligonucleotide
  Target: LAMA2; (+) strand; PAM type: NRG; PAM sequence: CAG
gtggacttttaggcaaaaat

SEQ ID NO: 181432 - DNA, 20 bp, Artificial Sequence
  Description of Artificial Sequence: Synthetic oligonucleotide
  Target: LAMA2; (+) strand; PAM type: NRG; PAM sequence: AGG
tggacttttaggcaaaaatc

SEQ ID NO: 181433 - DNA, 20 bp, Artificial Sequence
  Description of Artificial Sequence: Synthetic oligonucleotide
  Target: LAMA2; (+) strand; PAM type: NRG; PAM sequence: AAG
tttaggcaaaaatcaggtcc

SEQ ID NO: 181434 - DNA, 20 bp, Artificial Sequence
  Description of Artificial Sequence: Synthetic oligonucleotide
  Target: LAMA2; (+) strand; PAM type: NRG; PAM sequence: AAG
gtccaagcatacatacattt

SEQ ID NO: 181435 - DNA, 20 bp, Artificial Sequence
  Description of Artificial Sequence: Synthetic oligonucleotide
  Target: LAMA2; (+) strand; PAM type: NRG; PAM sequence: AAG
ttaagtcatcaatacattgt

SEQ ID NO: 181436 - DNA, 20 bp, Artificial Sequence
  Description of Artificial Sequence: Synthetic oligonucleotide
  Target: LAMA2; (+) strand; PAM type: NRG; PAM sequence: TAG
agtcatcaatacattgtaag

SEQ ID NO: 181437 - DNA, 20 bp, Artificial Sequence
  Description of Artificial Sequence: Synthetic oligonucleotide
  Target: LAMA2; (+) strand; PAM type: NRG; PAM sequence: GAG
ttgtaagtagatataaactt

SEQ ID NO: 181438 - DNA, 20 bp, Artificial Sequence
  Description of Artificial Sequence: Synthetic oligonucleotide
  Target: LAMA2; (+) strand; PAM type: NRG; PAM sequence: CAG
gatataaacttgagtttgcc

SEQ ID NO: 181439 - DNA, 20 bp, Artificial Sequence
  Description of Artificial Sequence: Synthetic oligonucleotide
  Target: LAMA2; (+) strand; PAM type: NRG; PAM sequence: TGG
taaacttgagtttgcccaga

SEQ ID NO: 181440 - DNA, 20 bp, Artificial Sequence
  Description of Artificial Sequence: Synthetic oligonucleotide
  Target: LAMA2; (+) strand; PAM type: NRG; PAM sequence: GAG
tgcccagatggctaaaacct

SEQ ID NO: 181441 - DNA, 20 bp, Artificial Sequence
  Description of Artificial Sequence: Synthetic oligonucleotide
  Target: LAMA2; (+) strand; PAM type: NRG; PAM sequence: TGG
gatggctaaaacctgagatg

SEQ ID NO: 181442 - DNA, 20 bp, Artificial Sequence
  Description of Artificial Sequence: Synthetic oligonucleotide
  Target: LAMA2; (+) strand; PAM type: NRG; PAM sequence: GGG
atggctaaaacctgagatgt

SEQ ID NO: 181443 - DNA, 20 bp, Artificial Sequence
  Description of Artificial Sequence: Synthetic oligonucleotide
  Target: LAMA2; (+) strand; PAM type: NRG; PAM sequence: AAG
taaaacctgagatgtgggca

SEQ ID NO: 181444 - DNA, 20 bp, Artificial Sequence
  Description of Artificial Sequence: Synthetic oligonucleotide
  Target: LAMA2; (+) strand; PAM type: NRG; PAM sequence: AGG
aaaacctgagatgtgggcaa

SEQ ID NO: 181445 - DNA, 20 bp, Artificial Sequence
  Description of Artificial Sequence: Synthetic oligonucleotide
  Target: LAMA2; (+) strand; PAM type: NRG; PAM sequence: AAG
acctgagatgtgggcaaagg

SEQ ID NO: 181446 - DNA, 20 bp, Artificial Sequence
  Description of Artificial Sequence: Synthetic oligonucleotide
  Target: LAMA2; (+) strand; PAM type: NRG; PAM sequence: AGG
cctgagatgtgggcaaagga

SEQ ID NO: 181447 - DNA, 20 bp, Artificial Sequence
  Description of Artificial Sequence: Synthetic oligonucleotide
  Target: LAMA2; (+) strand; PAM type: NRG; PAM sequence: GGG
ctgagatgtgggcaaaggaa

SEQ ID NO: 181448 - DNA, 20 bp, Artificial Sequence
  Description of Artificial Sequence: Synthetic oligonucleotide
  Target: LAMA2; (+) strand; PAM type: NRG; PAM sequence: TAG
attataaaacatcaacattt

SEQ ID NO: 181449 - DNA, 20 bp, Artificial Sequence
  Description of Artificial Sequence: Synthetic oligonucleotide
  Target: LAMA2; (+) strand; PAM type: NRG; PAM sequence: AAG
ataaaacatcaacattttag

SEQ ID NO: 181450 - DNA, 20 bp, Artificial Sequence
  Description of Artificial Sequence: Synthetic oligonucleotide
  Target: LAMA2; (+) strand; PAM type: NRG; PAM sequence: TAG
attttagaagtgttcaaaaa

SEQ ID NO: 181451 - DNA, 20 bp, Artificial Sequence
  Description of Artificial Sequence: Synthetic oligonucleotide
  Target: LAMA2; (+) strand; PAM type: NRG; PAM sequence: CAG
aagtgttcaaaaatagaccc

SEQ ID NO: 181452 - DNA, 20 bp, Artificial Sequence
  Description of Artificial Sequence: Synthetic oligonucleotide
  Target: LAMA2; (+) strand; PAM type: NRG; PAM sequence: AGG
agtgttcaaaaatagacccc

SEQ ID NO: 181453 - DNA, 20 bp, Artificial Sequence
  Description of Artificial Sequence: Synthetic oligonucleotide
  Target: LAMA2; (+) strand; PAM type: NRG; PAM sequence: GGG
gtgttcaaaaatagacccca

SEQ ID NO: 181454 - DNA, 20 bp, Artificial Sequence
  Description of Artificial Sequence: Synthetic oligonucleotide
  Target: LAMA2; (+) strand; PAM type: NRG; PAM sequence: TAG
ttcaaaaatagaccccaggg

SEQ ID NO: 181455 - DNA, 20 bp, Artificial Sequence
  Description of Artificial Sequence: Synthetic oligonucleotide
  Target: LAMA2; (+) strand; PAM type: NRG; PAM sequence: AGG
tcaaaaatagaccccagggt

SEQ ID NO: 181456 - DNA, 20 bp, Artificial Sequence
  Description of Artificial Sequence: Synthetic oligonucleotide
  Target: LAMA2; (+) strand; PAM type: NRG; PAM sequence: GAG
aaaaatagaccccagggtag

SEQ ID NO: 181457 - DNA, 20 bp, Artificial Sequence
  Description of Artificial Sequence: Synthetic oligonucleotide
  Target: LAMA2; (+) strand; PAM type: NRG; PAM sequence: GAG
agaccccagggtaggagatt

SEQ ID NO: 181458 - DNA, 20 bp, Artificial Sequence
  Description of Artificial Sequence: Synthetic oligonucleotide
  Target: LAMA2; (+) strand; PAM type: NRG; PAM sequence: AAG
gggtaggagattgagaatga

SEQ ID NO: 181459 - DNA, 20 bp, Artificial Sequence
  Description of Artificial Sequence: Synthetic oligonucleotide
  Target: LAMA2; (+) strand; PAM type: NRG; PAM sequence: AGG
ggtaggagattgagaatgaa

SEQ ID NO: 181460 - DNA, 20 bp, Artificial Sequence
  Description of Artificial Sequence: Synthetic oligonucleotide
  Target: LAMA2; (+) strand; PAM type: NRG; PAM sequence: AAG
agattgagaatgaaaggtaa

SEQ ID NO: 181461 - DNA, 20 bp, Artificial Sequence
  Description of Artificial Sequence: Synthetic oligonucleotide
  Target: LAMA2; (+) strand; PAM type: NRG; PAM sequence: AAG
ttgagaatgaaaggtaaaag

SEQ ID NO: 181462 - DNA, 20 bp, Artificial Sequence
  Description of Artificial Sequence: Synthetic oligonucleotide
  Target: LAMA2; (+) strand; PAM type: NRG; PAM sequence: CAG
gaatgaaaggtaaaagaagc

SEQ ID NO: 181463 - DNA, 20 bp, Artificial Sequence
  Description of Artificial Sequence: Synthetic oligonucleotide
  Target: LAMA2; (+) strand; PAM type: NRG; PAM sequence: GAG
atgaaaggtaaaagaagcca

SEQ ID NO: 181464 - DNA, 20 bp, Artificial Sequence
  Description of Artificial Sequence: Synthetic oligonucleotide
  Target: LAMA2; (+) strand; PAM type: NRG; PAM sequence: GAG
gaaaggtaaaagaagccaga

SEQ ID NO: 181465 - DNA, 20 bp, Artificial Sequence
  Description of Artificial Sequence: Synthetic oligonucleotide
  Target: LAMA2; (+) strand; PAM type: NRG; PAM sequence: TGG
agccagagagcttgacatta

SEQ ID NO: 181466 - DNA, 20 bp, Artificial Sequence
  Description of Artificial Sequence: Synthetic oligonucleotide
  Target: LAMA2; (+) strand; PAM type: NRG; PAM sequence: AAG
cagagagcttgacattatgg

SEQ ID NO: 181467 - DNA, 20 bp, Artificial Sequence
  Description of Artificial Sequence: Synthetic oligonucleotide
  Target: LAMA2; (+) strand; PAM type: NRG; PAM sequence: CAG
gagcttgacattatggaagc

SEQ ID NO: 181468 - DNA, 20 bp, Artificial Sequence
  Description of Artificial Sequence: Synthetic oligonucleotide
  Target: LAMA2; (+) strand; PAM type: NRG; PAM sequence: AAG
cttgacattatggaagccag

SEQ ID NO: 181469 - DNA, 20 bp, Artificial Sequence
  Description of Artificial Sequence: Synthetic oligonucleotide
  Target: LAMA2; (+) strand; PAM type: NRG; PAM sequence: TAG
aagccagaagaaatttccta

SEQ ID NO: 181470 - DNA, 20 bp, Artificial Sequence
  Description of Artificial Sequence: Synthetic oligonucleotide
  Target: LAMA2; (+) strand; PAM type: NRG; PAM sequence: AGG
agccagaagaaatttcctat

SEQ ID NO: 181471 - DNA, 20 bp, Artificial Sequence
  Description of Artificial Sequence: Synthetic oligonucleotide
  Target: LAMA2; (+) strand; PAM type: NRG; PAM sequence: GGG
gccagaagaaatttcctata

SEQ ID NO: 181472 - DNA, 20 bp, Artificial Sequence
  Description of Artificial Sequence: Synthetic oligonucleotide
  Target: LAMA2; (+) strand; PAM type: NRG; PAM sequence: AAG
agaagaaatttcctataggg

SEQ ID NO: 181473 - DNA, 20 bp, Artificial Sequence
  Description of Artificial Sequence: Synthetic oligonucleotide
  Target: LAMA2; (+) strand; PAM type: NRG; PAM sequence: AGG
gaagaaatttcctataggga

SEQ ID NO: 181474 - DNA, 20 bp, Artificial Sequence
  Description of Artificial Sequence: Synthetic oligonucleotide
  Target: LAMA2; (+) strand; PAM type: NRG; PAM sequence: CAG
tatagggaaggaaatgctaa

SEQ ID NO: 181475 - DNA, 20 bp, Artificial Sequence
  Description of Artificial Sequence: Synthetic oligonucleotide
  Target: LAMA2; (+) strand; PAM type: NRG; PAM sequence: CAG
atattgcacaaacatgaatt

SEQ ID NO: 181476 - DNA, 20 bp, Artificial Sequence
  Description of Artificial Sequence: Synthetic oligonucleotide
  Target: LAMA2; (+) strand; PAM type: NRG; PAM sequence: AAG
cacaaacatgaattcagata

SEQ ID NO: 181477 - DNA, 20 bp, Artificial Sequence
  Description of Artificial Sequence: Synthetic oligonucleotide
  Target: LAMA2; (+) strand; PAM type: NRG; PAM sequence: AAG
tgaattcagataaagtttaa

SEQ ID NO: 181478 - DNA, 20 bp, Artificial Sequence
  Description of Artificial Sequence: Synthetic oligonucleotide
  Target: LAMA2; (+) strand; PAM type: NRG; PAM sequence: GAG
aagtttaaaagaactccact

SEQ ID NO: 181479 - DNA, 20 bp, Artificial Sequence
  Description of Artificial Sequence: Synthetic oligonucleotide
  Target: LAMA2; (+) strand; PAM type: NRG; PAM sequence: TGG
taaaagaactccactgagtt

SEQ ID NO: 181480 - DNA, 20 bp, Artificial Sequence
  Description of Artificial Sequence: Synthetic oligonucleotide
  Target: LAMA2; (+) strand; PAM type: NRG; PAM sequence: GGG
aaaagaactccactgagttt

SEQ ID NO: 181481 - DNA, 20 bp, Artificial Sequence
  Description of Artificial Sequence: Synthetic oligonucleotide
  Target: LAMA2; (+) strand; PAM type: NRG; PAM sequence: TAG
aactccactgagtttgggta

SEQ ID NO: 181482 - DNA, 20 bp, Artificial Sequence
  Description of Artificial Sequence: Synthetic oligonucleotide
  Target: LAMA2; (+) strand; PAM type: NRG; PAM sequence: AGG
actccactgagtttgggtat

SEQ ID NO: 181483 - DNA, 20 bp, Artificial Sequence
  Description of Artificial Sequence: Synthetic oligonucleotide
  Target: LAMA2; (+) strand; PAM type: NRG; PAM sequence: CAG
ccactgagtttgggtatagg

SEQ ID NO: 181484 - DNA, 20 bp, Artificial Sequence
  Description of Artificial Sequence: Synthetic oligonucleotide
  Target: LAMA2; (+) strand; PAM type: NRG; PAM sequence: AGG
cactgagtttgggtataggc

SEQ ID NO: 181485 - DNA, 20 bp, Artificial Sequence
  Description of Artificial Sequence: Synthetic oligonucleotide
  Target: LAMA2; (+) strand; PAM type: NRG; PAM sequence: GAG
ttgggtataggcaggtccct

SEQ ID NO: 181486 - DNA, 20 bp, Artificial Sequence
  Description of Artificial Sequence: Synthetic oligonucleotide
  Target: LAMA2; (+) strand; PAM type: NRG; PAM sequence: AGG
tgggtataggcaggtccctg

SEQ ID NO: 181487 - DNA, 20 bp, Artificial Sequence
  Description of Artificial Sequence: Synthetic oligonucleotide
  Target: LAMA2; (+) strand; PAM type: NRG; PAM sequence: TAG
aggcaggtccctgaggactt

SEQ ID NO: 181488 - DNA, 20 bp, Artificial Sequence
  Description of Artificial Sequence: Synthetic oligonucleotide
  Target: LAMA2; (+) strand; PAM type: NRG; PAM sequence: AAG
aggtccctgaggactttagc

SEQ ID NO: 181489 - DNA, 20 bp, Artificial Sequence
  Description of Artificial Sequence: Synthetic oligonucleotide
  Target: LAMA2; (+) strand; PAM type: NRG; PAM sequence: CAG
cctgaggactttagcaagac

SEQ ID NO: 181490 - DNA, 20 bp, Artificial Sequence
  Description of Artificial Sequence: Synthetic oligonucleotide
  Target: LAMA2; (+) strand; PAM type: NRG; PAM sequence: GAG
tgaggactttagcaagacca

SEQ ID NO: 181491 - DNA, 20 bp, Artificial Sequence
  Description of Artificial Sequence: Synthetic oligonucleotide
  Target: LAMA2; (+) strand; PAM type: NRG; PAM sequence: CAG
tttagcaagaccagagatga

SEQ ID NO: 181492 - DNA, 20 bp, Artificial Sequence
  Description of Artificial Sequence: Synthetic oligonucleotide
  Target: LAMA2; (+) strand; PAM type: NRG; PAM sequence: GAG
tagcaagaccagagatgaca

SEQ ID NO: 181493 - DNA, 20 bp, Artificial Sequence
  Description of Artificial Sequence: Synthetic oligonucleotide
  Target: LAMA2; (+) strand; PAM type: NRG; PAM sequence: TAG
caagaccagagatgacagag

SEQ ID NO: 181494 - DNA, 20 bp, Artificial Sequence
  Description of Artificial Sequence: Synthetic oligonucleotide
  Target: LAMA2; (+) strand; PAM type: NRG; PAM sequence: TGG
gaccagagatgacagagtag

SEQ ID NO: 181495 - DNA, 20 bp, Artificial Sequence
  Description of Artificial Sequence: Synthetic oligonucleotide
  Target: LAMA2; (+) strand; PAM type: NRG; PAM sequence: GGG
accagagatgacagagtagt

SEQ ID NO: 181496 - DNA, 20 bp, Artificial Sequence
  Description of Artificial Sequence: Synthetic oligonucleotide
  Target: LAMA2; (+) strand; PAM type: NRG; PAM sequence: GAG
cagagatgacagagtagtgg

SEQ ID NO: 181497 - DNA, 20 bp, Artificial Sequence
  Description of Artificial Sequence: Synthetic oligonucleotide
  Target: LAMA2; (+) strand; PAM type: NRG; PAM sequence: GAG
gagatgacagagtagtggga

SEQ ID NO: 181498 - DNA, 20 bp, Artificial Sequence
  Description of Artificial Sequence: Synthetic oligonucleotide
  Target: LAMA2; (+) strand; PAM type: NRG; PAM sequence: AGG
agatgacagagtagtgggag

SEQ ID NO: 181499 - DNA, 20 bp, Artificial Sequence
  Description of Artificial Sequence: Synthetic oligonucleotide
  Target: LAMA2; (+) strand; PAM type: NRG; PAM sequence: AAG
agtgggagaggaattgaaat

SEQ ID NO: 181500 - DNA, 20 bp, Artificial Sequence
  Description of Artificial Sequence: Synthetic oligonucleotide
  Target: LAMA2; (+) strand; PAM type: NRG; PAM sequence: AGG
gtgggagaggaattgaaata

SEQ ID NO: 181501 - DNA, 20 bp, Artificial Sequence
  Description of Artificial Sequence: Synthetic oligonucleotide
  Target: LAMA2; (+) strand; PAM type: NRG; PAM sequence: CAG
gaggaattgaaataaggctc

SEQ ID NO: 181502 - DNA, 20 bp, Artificial Sequence
  Description of Artificial Sequence: Synthetic oligonucleotide
  Target: LAMA2; (+) strand; PAM type: NRG; PAM sequence: TGG
gaaataaggctccagcaatg

SEQ ID NO: 181503 - DNA, 20 bp, Artificial Sequence
  Description of Artificial Sequence: Synthetic oligonucleotide
  Target: LAMA2; (+) strand; PAM type: NRG; PAM sequence: CAG
tgtggatgattgctcctttt

SEQ ID NO: 181504 - DNA, 20 bp, Artificial Sequence
  Description of Artificial Sequence: Synthetic oligonucleotide
  Target: LAMA2; (+) strand; PAM type: NRG; PAM sequence: CAG
gattgctccttttcagtgac

SEQ ID NO: 181505 - DNA, 20 bp, Artificial Sequence
  Description of Artificial Sequence: Synthetic oligonucleotide
  Target: LAMA2; (+) strand; PAM type: NRG; PAM sequence: TAG
ttatatgaattattctcaac

SEQ ID NO: 181506 - DNA, 20 bp, Artificial Sequence
  Description of Artificial Sequence: Synthetic oligonucleotide
  Target: LAMA2; (+) strand; PAM type: NRG; PAM sequence: TGG
atgaattattctcaactagt

SEQ ID NO: 181507 - DNA, 20 bp, Artificial Sequence
  Description of Artificial Sequence: Synthetic oligonucleotide
  Target: LAMA2; (+) strand; PAM type: NRG; PAM sequence: AAG
attattctcaactagttggc

SEQ ID NO: 181508 - DNA, 20 bp, Artificial Sequence
  Description of Artificial Sequence: Synthetic oligonucleotide
  Target: LAMA2; (+) strand; PAM type: NRG; PAM sequence: GAG
tattctcaactagttggcaa

SEQ ID NO: 181509 - DNA, 20 bp, Artificial Sequence
  Description of Artificial Sequence: Synthetic oligonucleotide
  Target: LAMA2; (+) strand; PAM type: NRG; PAM sequence: AAG
agcactgtctcttgaaattc

SEQ ID NO: 181510 - DNA, 20 bp, Artificial Sequence
  Description of Artificial Sequence: Synthetic oligonucleotide
  Target: LAMA2; (+) strand; PAM type: NRG; PAM sequence: CAG
tgtctcttgaaattcaagta

SEQ ID NO: 181511 - DNA, 20 bp, Artificial Sequence
  Description of Artificial Sequence: Synthetic oligonucleotide
  Target: LAMA2; (+) strand; PAM type: NRG; PAM sequence: CAG
gaaattcaagtacagtcctt

SEQ ID NO: 181512 - DNA, 20 bp, Artificial Sequence
  Description of Artificial Sequence: Synthetic oligonucleotide
  Target: LAMA2; (+) strand; PAM type: NRG; PAM sequence: AGG
aaattcaagtacagtccttc

SEQ ID NO: 181513 - DNA, 20 bp, Artificial Sequence
  Description of Artificial Sequence: Synthetic oligonucleotide
  Target: LAMA2; (+) strand; PAM type: NRG; PAM sequence: GAG
attcaagtacagtccttcag

SEQ ID NO: 181514 - DNA, 20 bp, Artificial Sequence
  Description of Artificial Sequence: Synthetic oligonucleotide
  Target: LAMA2; (+) strand; PAM type: NRG; PAM sequence: GAG
gagtgttccccatctttctt

SEQ ID NO: 181515 - DNA, 20 bp, Artificial Sequence
  Description of Artificial Sequence: Synthetic oligonucleotide
  Target: LAMA2; (+) strand; PAM type: NRG; PAM sequence: CAG
gttccccatctttcttgagt

SEQ ID NO: 181516 - DNA, 20 bp, Artificial Sequence
  Description of Artificial Sequence: Synthetic oligonucleotide
  Target: LAMA2; (+) strand; PAM type: NRG; PAM sequence: CAG
catctttcttgagtcagtta

SEQ ID NO: 181517 - DNA, 20 bp, Artificial Sequence
  Description of Artificial Sequence: Synthetic oligonucleotide
  Target: LAMA2; (+) strand; PAM type: NRG; PAM sequence: CAG
ttgagtcagttacagaacca

SEQ ID NO: 181518 - DNA, 20 bp, Artificial Sequence
  Description of Artificial Sequence: Synthetic oligonucleotide
  Target: LAMA2; (+) strand; PAM type: NRG; PAM sequence: CAG
tacagaaccacagtccctga

SEQ ID NO: 181519 - DNA, 20 bp, Artificial Sequence
  Description of Artificial Sequence: Synthetic oligonucleotide
  Target: LAMA2; (+) strand; PAM type: NRG; PAM sequence: AAG
agaaccacagtccctgacag

SEQ ID NO: 181520 - DNA, 20 bp, Artificial Sequence
  Description of Artificial Sequence: Synthetic oligonucleotide
  Target: LAMA2; (+) strand; PAM type: NRG; PAM sequence: AAG
ccctatcccctaaatgcatc

SEQ ID NO: 181521 - DNA, 20 bp, Artificial Sequence
  Description of Artificial Sequence: Synthetic oligonucleotide
  Target: LAMA2; (+) strand; PAM type: NRG; PAM sequence: TAG
tatcccctaaatgcatcaag

SEQ ID NO: 181522 - DNA, 20 bp, Artificial Sequence
  Description of Artificial Sequence: Synthetic oligonucleotide
  Target: LAMA2; (+) strand; PAM type: NRG; PAM sequence: AGG
atcccctaaatgcatcaagt

SEQ ID NO: 181523 - DNA, 20 bp, Artificial Sequence
  Description of Artificial Sequence: Synthetic oligonucleotide
  Target: LAMA2; (+) strand; PAM type: NRG; PAM sequence: AAG
aatgcatcaagtaggatgca

SEQ ID NO: 181524 - DNA, 20 bp, Artificial Sequence
  Description of Artificial Sequence: Synthetic oligonucleotide
  Target: LAMA2; (+) strand; PAM type: NRG; PAM sequence: GAG
atcaagtaggatgcaaagtt

SEQ ID NO: 181525 - DNA, 20 bp, Artificial Sequence
  Description of Artificial Sequence: Synthetic oligonucleotide
  Target: LAMA2; (+) strand; PAM type: NRG; PAM sequence: TAG
caaagttgagaacactcaat

SEQ ID NO: 181526 - DNA, 20 bp, Artificial Sequence
  Description of Artificial Sequence: Synthetic oligonucleotide
  Target: LAMA2; (+) strand; PAM type: NRG; PAM sequence: CAG
agaacactcaattagatttt

SEQ ID NO: 181527 - DNA, 20 bp, Artificial Sequence
  Description of Artificial Sequence: Synthetic oligonucleotide
  Target: LAMA2; (+) strand; PAM type: NRG; PAM sequence: TGG
acactcaattagattttcag

SEQ ID NO: 181528 - DNA, 20 bp, Artificial Sequence
  Description of Artificial Sequence: Synthetic oligonucleotide
  Target: LAMA2; (+) strand; PAM type: NRG; PAM sequence: AAG
aattagattttcagtggatc

SEQ ID NO: 181529 - DNA, 20 bp, Artificial Sequence
  Description of Artificial Sequence: Synthetic oligonucleotide
  Target: LAMA2; (+) strand; PAM type: NRG; PAM sequence: AAG
agattttcagtggatcaaga

SEQ ID NO: 181530 - DNA, 20 bp, Artificial Sequence
  Description of Artificial Sequence: Synthetic oligonucleotide
  Target: LAMA2; (+) strand; PAM type: NRG; PAM sequence: GAG
attttcagtggatcaagaaa

SEQ ID NO: 181531 - DNA, 20 bp, Artificial Sequence
  Description of Artificial Sequence: Synthetic oligonucleotide
  Target: LAMA2; (+) strand; PAM type: NRG; PAM sequence: AAG
tggatcaagaaagagaacaa

SEQ ID NO: 181532 - DNA, 20 bp, Artificial Sequence
  Description of Artificial Sequence: Synthetic oligonucleotide
  Target: LAMA2; (+) strand; PAM type: NRG; PAM sequence: TAG
gaaagagaacaaaagaataa

SEQ ID NO: 181533 - DNA, 20 bp, Artificial Sequence
  Description of Artificial Sequence: Synthetic oligonucleotide
  Target: LAMA2; (+) strand; PAM type: NRG; PAM sequence: AAG
gaacaaaagaataatagcca

SEQ ID NO: 181534 - DNA, 20 bp, Artificial Sequence
  Description of Artificial Sequence: Synthetic oligonucleotide
  Target: LAMA2; (+) strand; PAM type: NRG; PAM sequence: TAG
atagccaaagtaaaaacact

SEQ ID NO: 181535 - DNA, 20 bp, Artificial Sequence
  Description of Artificial Sequence: Synthetic oligonucleotide
  Target: LAMA2; (+) strand; PAM type: NRG; PAM sequence: CAG
acacttagcttataacaact

SEQ ID NO: 181536 - DNA, 20 bp, Artificial Sequence
  Description of Artificial Sequence: Synthetic oligonucleotide
  Target: LAMA2; (+) strand; PAM type: NRG; PAM sequence: AAG
ttgattataaaatatttctt

SEQ ID NO: 181537 - DNA, 20 bp, Artificial Sequence
  Description of Artificial Sequence: Synthetic oligonucleotide
  Target: LAMA2; (+) strand; PAM type: NRG; PAM sequence: TAG
actgtgaaattttgtgtcaa

SEQ ID NO: 181538 - DNA, 20 bp, Artificial Sequence
  Description of Artificial Sequence: Synthetic oligonucleotide
  Target: LAMA2; (+) strand; PAM type: NRG; PAM sequence: AAG
gcctacttttctattttgta

SEQ ID NO: 181539 - DNA, 20 bp, Artificial Sequence
  Description of Artificial Sequence: Synthetic oligonucleotide
  Target: LAMA2; (+) strand; PAM type: NRG; PAM sequence: AAG
cttttctattttgtaaagaa

SEQ ID NO: 181540 - DNA, 20 bp, Artificial Sequence
  Description of Artificial Sequence: Synthetic oligonucleotide
  Target: LAMA2; (+) strand; PAM type: NRG; PAM sequence: TAG
tattttgtaaagaaaagaaa

SEQ ID NO: 181541 - DNA, 20 bp, Artificial Sequence
  Description of Artificial Sequence: Synthetic oligonucleotide
  Target: LAMA2; (+) strand; PAM type: NRG; PAM sequence: AGG
attttgtaaagaaaagaaat

SEQ ID NO: 181542 - DNA, 20 bp, Artificial Sequence
  Description of Artificial Sequence: Synthetic oligonucleotide
  Target: LAMA2; (+) strand; PAM type: NRG; PAM sequence: GGG
ttttgtaaagaaaagaaata

SEQ ID NO: 181543 - DNA, 20 bp, Artificial Sequence
  Description of Artificial Sequence: Synthetic oligonucleotide
  Target: LAMA2; (+) strand; PAM type: NRG; PAM sequence: AAG
gtaaagaaaagaaatagggt

SEQ ID NO: 181544 - DNA, 20 bp, Artificial Sequence
  Description of Artificial Sequence: Synthetic oligonucleotide
  Target: LAMA2; (+) strand; PAM type: NRG; PAM sequence: AAG
agaaatagggtaagaaataa

SEQ ID NO: 181545 - DNA, 20 bp, Artificial Sequence
  Description of Artificial Sequence: Synthetic oligonucleotide
  Target: LAMA2; (+) strand; PAM type: NRG; PAM sequence: AAG
atagggtaagaaataaaagc

SEQ ID NO: 181546 - DNA, 20 bp, Artificial Sequence
  Description of Artificial Sequence: Synthetic oligonucleotide
  Target: LAMA2; (+) strand; PAM type: NRG; PAM sequence: TAG
taagaaataaaagcaagcat

SEQ ID NO: 181547 - DNA, 20 bp, Artificial Sequence
  Description of Artificial Sequence: Synthetic oligonucleotide
  Target: LAMA2; (+) strand; PAM type: NRG; PAM sequence: TAG
aagcaagcattagcatttac

SEQ ID NO: 181548 - DNA, 20 bp, Artificial Sequence
  Description of Artificial Sequence: Synthetic oligonucleotide
  Target: LAMA2; (+) strand; PAM type: NRG; PAM sequence: TGG
tagcatttactagcatttcc

SEQ ID NO: 181549 - DNA, 20 bp, Artificial Sequence
  Description of Artificial Sequence: Synthetic oligonucleotide
  Target: LAMA2; (+) strand; PAM type: NRG; PAM sequence: TAG
catttactagcatttcctgg

SEQ ID NO: 181550 - DNA, 20 bp, Artificial Sequence
  Description of Artificial Sequence: Synthetic oligonucleotide
  Target: LAMA2; (+) strand; PAM type: NRG; PAM sequence: AAG
cttcatcgctatcactcatg

SEQ ID NO: 181551 - DNA, 20 bp, Artificial Sequence
  Description of Artificial Sequence: Synthetic oligonucleotide
  Target: LAMA2; (+) strand; PAM type: NRG; PAM sequence: AGG
ttcatcgctatcactcatga

SEQ ID NO: 181552 - DNA, 20 bp, Artificial Sequence
  Description of Artificial Sequence: Synthetic oligonucleotide
  Target: LAMA2; (+) strand; PAM type: NRG; PAM sequence: TAG
tcgctatcactcatgaagga

SEQ ID NO: 181553 - DNA, 20 bp, Artificial Sequence
  Description of Artificial Sequence: Synthetic oligonucleotide
  Target: LAMA2; (+) strand; PAM type: NRG; PAM sequence: GAG
gctatcactcatgaaggata

SEQ ID NO: 181554 - DNA, 20 bp, Artificial Sequence
  Description of Artificial Sequence: Synthetic oligonucleotide
  Target: LAMA2; (+) strand; PAM type: NRG; PAM sequence: AAG
cactcatgaaggatagagta

SEQ ID NO: 181555 - DNA, 20 bp, Artificial Sequence
  Description of Artificial Sequence: Synthetic oligonucleotide
  Target: LAMA2; (+) strand; PAM type: NRG; PAM sequence: AAG
tagagtaaagcactcccttt

SEQ ID NO: 181556 - DNA, 20 bp, Artificial Sequence
  Description of Artificial Sequence: Synthetic oligonucleotide
  Target: LAMA2; (+) strand; PAM type: NRG; PAM sequence: CAG
gtaaagcactccctttaagt

SEQ ID NO: 181557 - DNA, 20 bp, Artificial Sequence
  Description of Artificial Sequence: Synthetic oligonucleotide
  Target: LAMA2; (+) strand; PAM type: NRG; PAM sequence: CAG
atgccatcctgtctctctgc

SEQ ID NO: 181558 - DNA, 20 bp, Artificial Sequence
  Description of Artificial Sequence: Synthetic oligonucleotide
  Target: LAMA2; (+) strand; PAM type: NRG; PAM sequence: TGG
tctctctgccagttaccttt

SEQ ID NO: 181559 - DNA, 20 bp, Artificial Sequence
  Description of Artificial Sequence: Synthetic oligonucleotide
  Target: LAMA2; (+) strand; PAM type: NRG; PAM sequence: GGG
ctctctgccagttacctttt

SEQ ID NO: 181560 - DNA, 20 bp, Artificial Sequence
  Description of Artificial Sequence: Synthetic oligonucleotide
  Target: LAMA2; (+) strand; PAM type: NRG; PAM sequence: CAG
ctgccagttaccttttgggc

SEQ ID NO: 181561 - DNA, 20 bp, Artificial Sequence
  Description of Artificial Sequence: Synthetic oligonucleotide
  Target: LAMA2; (+) strand; PAM type: NRG; PAM sequence: TAG
gctctttaatcatgttttct

SEQ ID NO: 181562 - DNA, 20 bp, Artificial Sequence
  Description of Artificial Sequence: Synthetic oligonucleotide
  Target: LAMA2; (+) strand; PAM type: NRG; PAM sequence: TGG
aaaatgcatatattcattca

SEQ ID NO: 181563 - DNA, 20 bp, Artificial Sequence
  Description of Artificial Sequence: Synthetic oligonucleotide
  Target: LAMA2; (+) strand; PAM type: NRG; PAM sequence: AAG
gcatatattcattcatggat

SEQ ID NO: 181564 - DNA, 20 bp, Artificial Sequence
  Description of Artificial Sequence: Synthetic oligonucleotide
  Target: LAMA2; (+) strand; PAM type: NRG; PAM sequence: AGG
catatattcattcatggata

SEQ ID NO: 181565 - DNA, 20 bp, Artificial Sequence
  Description of Artificial Sequence: Synthetic oligonucleotide
  Target: LAMA2; (+) strand; PAM type: NRG; PAM sequence: GAG
tatattcattcatggataag

SEQ ID NO: 181566 - DNA, 20 bp, Artificial Sequence
  Description of Artificial Sequence: Synthetic oligonucleotide
  Target: LAMA2; (+) strand; PAM type: NRG; PAM sequence: AGG
atattcattcatggataagg

SEQ ID NO: 181567 - DNA, 20 bp, Artificial Sequence
  Description of Artificial Sequence: Synthetic oligonucleotide
  Target: LAMA2; (+) strand; PAM type: NRG; PAM sequence: CAG
ataaggaggaaaaccacctc

SEQ ID NO: 181568 - DNA, 20 bp, Artificial Sequence
  Description of Artificial Sequence: Synthetic oligonucleotide
  Target: LAMA2; (+) strand; PAM type: NRG; PAM sequence: TGG
ggaaaaccacctccagtcac

SEQ ID NO: 181569 - DNA, 20 bp, Artificial Sequence
  Description of Artificial Sequence: Synthetic oligonucleotide
  Target: LAMA2; (+) strand; PAM type: NRG; PAM sequence: TAG
agtcactggcttgcctgtga

SEQ ID NO: 181570 - DNA, 20 bp, Artificial Sequence
  Description of Artificial Sequence: Synthetic oligonucleotide
  Target: LAMA2; (+) strand; PAM type: NRG; PAM sequence: GAG
tcactggcttgcctgtgata

SEQ ID NO: 181571 - DNA, 20 bp, Artificial Sequence
  Description of Artificial Sequence: Synthetic oligonucleotide
  Target: LAMA2; (+) strand; PAM type: NRG; PAM sequence: GAG
actggcttgcctgtgataga

SEQ ID NO: 181572 - DNA, 20 bp, Artificial Sequence
  Description of Artificial Sequence: Synthetic oligonucleotide
  Target: LAMA2; (+) strand; PAM type: NRG; PAM sequence: AGG
ctggcttgcctgtgatagag

SEQ ID NO: 181573 - DNA, 20 bp, Artificial Sequence
  Description of Artificial Sequence: Synthetic oligonucleotide
  Target: LAMA2; (+) strand; PAM type: NRG; PAM sequence: CAG
gcttgcctgtgatagagagg

SEQ ID NO: 181574 - DNA, 20 bp, Artificial Sequence
  Description of Artificial Sequence: Synthetic oligonucleotide
  Target: LAMA2; (+) strand; PAM type: NRG; PAM sequence: CAG
gagaggcagaatctcatttt

SEQ ID NO: 181575 - DNA, 20 bp, Artificial Sequence
  Description of Artificial Sequence: Synthetic oligonucleotide
  Target: LAMA2; (+) strand; PAM type: NRG; PAM sequence: AAG
acaccattaaaatacccacc

SEQ ID NO: 181576 - DNA, 20 bp, Artificial Sequence
  Description of Artificial Sequence: Synthetic oligonucleotide
  Target: LAMA2; (+) strand; PAM type: NRG; PAM sequence: TAG
taaaatacccaccaagtctg

SEQ ID NO: 181577 - DNA, 20 bp, Artificial Sequence
  Description of Artificial Sequence: Synthetic oligonucleotide
  Target: LAMA2; (+) strand; PAM type: NRG; PAM sequence: AAG
atacccaccaagtctgtaga

SEQ ID NO: 181578 - DNA, 20 bp, Artificial Sequence
  Description of Artificial Sequence: Synthetic oligonucleotide
  Target: LAMA2; (+) strand; PAM type: NRG; PAM sequence: GAG
acccaccaagtctgtagaaa

SEQ ID NO: 181579 - DNA, 20 bp, Artificial Sequence
  Description of Artificial Sequence: Synthetic oligonucleotide
  Target: LAMA2; (+) strand; PAM type: NRG; PAM sequence: CAG
aagagactattttcatcttc

SEQ ID NO: 181580 - DNA, 20 bp, Artificial Sequence
  Description of Artificial Sequence: Synthetic oligonucleotide
  Target: LAMA2; (+) strand; PAM type: NRG; PAM sequence: CAG
tattttcatcttccagtcaa

SEQ ID NO: 181581 - DNA, 20 bp, Artificial Sequence
  Description of Artificial Sequence: Synthetic oligonucleotide
  Target: LAMA2; (+) strand; PAM type: NRG; PAM sequence: TAG
tgaaaatacctttgccgatc

SEQ ID NO: 181582 - DNA, 20 bp, Artificial Sequence
  Description of Artificial Sequence: Synthetic oligonucleotide
  Target: LAMA2; (+) strand; PAM type: NRG; PAM sequence: AAG
cctttgccgatctagataaa

SEQ ID NO: 181583 - DNA, 20 bp, Artificial Sequence
  Description of Artificial Sequence: Synthetic oligonucleotide
  Target: LAMA2; (+) strand; PAM type: NRG; PAM sequence: AGG
ctttgccgatctagataaaa

SEQ ID NO: 181584 - DNA, 20 bp, Artificial Sequence
  Description of Artificial Sequence: Synthetic oligonucleotide
  Target: LAMA2; (+) strand; PAM type: NRG; PAM sequence: AAG
aaaaaggaatgtatatgaaa

SEQ ID NO: 181585 - DNA, 20 bp, Artificial Sequence
  Description of Artificial Sequence: Synthetic oligonucleotide
  Target: LAMA2; (+) strand; PAM type: NRG; PAM sequence: CAG
atatgaaaaagtcttgaaaa

SEQ ID NO: 181586 - DNA, 20 bp, Artificial Sequence
  Description of Artificial Sequence: Synthetic oligonucleotide
  Target: LAMA2; (+) strand; PAM type: NRG; PAM sequence: TAG
tttataaatctattttcttt

SEQ ID NO: 181587 - DNA, 20 bp, Artificial Sequence
  Description of Artificial Sequence: Synthetic oligonucleotide
  Target: LAMA2; (+) strand; PAM type: NRG; PAM sequence: CAG
atctattttcttttagcccc

SEQ ID NO: 181588 - DNA, 20 bp, Artificial Sequence
  Description of Artificial Sequence: Synthetic oligonucleotide
  Target: LAMA2; (+) strand; PAM type: NRG; PAM sequence: CAG
ttttcttttagcccccagtc

SEQ ID NO: 181589 - DNA, 20 bp, Artificial Sequence
  Description of Artificial Sequence: Synthetic oligonucleotide
  Target: LAMA2; (+) strand; PAM type: NRG; PAM sequence: AAG
ttttagcccccagtccagtc

SEQ ID NO: 181590 - DNA, 20 bp, Artificial Sequence
  Description of Artificial Sequence: Synthetic oligonucleotide
  Target: LAMA2; (+) strand; PAM type: NRG; PAM sequence: AGG
tttagcccccagtccagtca

SEQ ID NO: 181591 - DNA, 20 bp, Artificial Sequence
  Description of Artificial Sequence: Synthetic oligonucleotide
  Target: LAMA2; (+) strand; PAM type: NRG; PAM sequence: GAG
tagcccccagtccagtcaag

SEQ ID NO: 181592 - DNA, 20 bp, Artificial Sequence
  Description of Artificial Sequence: Synthetic oligonucleotide
  Target: LAMA2; (+) strand; PAM type: NRG; PAM sequence: TAG
tgtatataaaaataataaaa

SEQ ID NO: 181593 - DNA, 20 bp, Artificial Sequence
  Description of Artificial Sequence: Synthetic oligonucleotide
  Target: LAMA2; (+) strand; PAM type: NRG; PAM sequence: AGG
gtatataaaaataataaaat

SEQ ID NO: 181594 - DNA, 20 bp, Artificial Sequence
  Description of Artificial Sequence: Synthetic oligonucleotide
  Target: LAMA2; (+) strand; PAM type: NRG; PAM sequence: AAG
ataataaaataggtgtgtga

SEQ ID NO: 181595 - DNA, 20 bp, Artificial Sequence
  Description of Artificial Sequence: Synthetic oligonucleotide
  Target: LAMA2; (+) strand; PAM type: NRG; PAM sequence: TAG
attttaaaatcttaacttgc

SEQ ID NO: 181596 - DNA, 20 bp, Artificial Sequence
  Description of Artificial Sequence: Synthetic oligonucleotide
  Target: LAMA2; (+) strand; PAM type: NRG; PAM sequence: TAG
aacttgctagctatatttaa

SEQ ID NO: 181597 - DNA, 20 bp, Artificial Sequence
  Description of Artificial Sequence: Synthetic oligonucleotide
  Target: LAMA2; (+) strand; PAM type: NRG; PAM sequence: AGG
acttgctagctatatttaat

SEQ ID NO: 181598 - DNA, 20 bp, Artificial Sequence
  Description of Artificial Sequence: Synthetic oligonucleotide
  Target: LAMA2; (+) strand; PAM type: NRG; PAM sequence: TAG
taataggacaattattcttt

SEQ ID NO: 181599 - DNA, 20 bp, Artificial Sequence
  Description of Artificial Sequence: Synthetic oligonucleotide
  Target: LAMA2; (+) strand; PAM type: NRG; PAM sequence: AGG
aataggacaattattctttt

SEQ ID NO: 181600 - DNA, 20 bp, Artificial Sequence
  Description of Artificial Sequence: Synthetic oligonucleotide
  Target: LAMA2; (+) strand; PAM type: NRG; PAM sequence: AAG
tttcttgtttgtttttacaa

SEQ ID NO: 181601 - DNA, 20 bp, Artificial Sequence
  Description of Artificial Sequence: Synthetic oligonucleotide
  Target: LAMA2; (+) strand; PAM type: NRG; PAM sequence: TGG
tgtttgtttttacaaaagtc

SEQ ID NO: 181602 - DNA, 20 bp, Artificial Sequence
  Description of Artificial Sequence: Synthetic oligonucleotide
  Target: LAMA2; (+) strand; PAM type: NRG; PAM sequence: GAG
tttttacaaaagtctggttt

SEQ ID NO: 181603 - DNA, 20 bp, Artificial Sequence
  Description of Artificial Sequence: Synthetic oligonucleotide
  Target: LAMA2; (+) strand; PAM type: NRG; PAM sequence: AGG
ttttacaaaagtctggtttg

SEQ ID NO: 181604 - DNA, 20 bp, Artificial Sequence
  Description of Artificial Sequence: Synthetic oligonucleotide
  Target: LAMA2; (+) strand; PAM type: NRG; PAM sequence: TGG
gtctggtttgaggtgtccat

SEQ ID NO: 181605 - DNA, 20 bp, Artificial Sequence
  Description of Artificial Sequence: Synthetic oligonucleotide
  Target: LAMA2; (+) strand; PAM type: NRG; PAM sequence: TAG
gtccattggtatgtgtattt

SEQ ID NO: 181606 - DNA, 20 bp, Artificial Sequence
  Description of Artificial Sequence: Synthetic oligonucleotide
  Target: LAMA2; (+) strand; PAM type: NRG; PAM sequence: AAG
tattttagtccttttttaat

SEQ ID NO: 181607 - DNA, 20 bp, Artificial Sequence
  Description of Artificial Sequence: Synthetic oligonucleotide
  Target: LAMA2; (+) strand; PAM type: NRG; PAM sequence: AGG
attttagtccttttttaata

SEQ ID NO: 181608 - DNA, 20 bp, Artificial Sequence
  Description of Artificial Sequence: Synthetic oligonucleotide
  Target: LAMA2; (+) strand; PAM type: NRG; PAM sequence: AAG
aattgtgtttgattttattg

SEQ ID NO: 181609 - DNA, 20 bp, Artificial Sequence
  Description of Artificial Sequence: Synthetic oligonucleotide
  Target: LAMA2; (+) strand; PAM type: NRG; PAM sequence: TAG
gacacatctttttgaaatga

SEQ ID NO: 181610 - DNA, 20 bp, Artificial Sequence
  Description of Artificial Sequence: Synthetic oligonucleotide
  Target: LAMA2; (+) strand; PAM type: NRG; PAM sequence: AGG
acacatctttttgaaatgat

SEQ ID NO: 181611 - DNA, 20 bp, Artificial Sequence
  Description of Artificial Sequence: Synthetic oligonucleotide
  Target: LAMA2; (+) strand; PAM type: NRG; PAM sequence: GGG
cacatctttttgaaatgata

SEQ ID NO: 181612 - DNA, 20 bp, Artificial Sequence
  Description of Artificial Sequence: Synthetic oligonucleotide
  Target: LAMA2; (+) strand; PAM type: NRG; PAM sequence: AAG
atgatagggctataaacttc

SEQ ID NO: 181613 - DNA, 20 bp, Artificial Sequence
  Description of Artificial Sequence: Synthetic oligonucleotide
  Target: LAMA2; (+) strand; PAM type: NRG; PAM sequence: AGG
tgatagggctataaacttca

SEQ ID NO: 181614 - DNA, 20 bp, Artificial Sequence
  Description of Artificial Sequence: Synthetic oligonucleotide
  Target: LAMA2; (+) strand; PAM type: NRG; PAM sequence: GGG
gatagggctataaacttcaa

SEQ ID NO: 181615 - DNA, 20 bp, Artificial Sequence
  Description of Artificial Sequence: Synthetic oligonucleotide
  Target: LAMA2; (+) strand; PAM type: NRG; PAM sequence: TGG
tataaacttcaagggaattt

SEQ ID NO: 181616 - DNA, 20 bp, Artificial Sequence
  Description of Artificial Sequence: Synthetic oligonucleotide
  Target: LAMA2; (+) strand; PAM type: NRG; PAM sequence: AAG
atgtttctctctgttttcca

SEQ ID NO: 181617 - DNA, 20 bp, Artificial Sequence
  Description of Artificial Sequence: Synthetic oligonucleotide
  Target: LAMA2; (+) strand; PAM type: NRG; PAM sequence: AAG
ccaaagaacactgattctga

SEQ ID NO: 181618 - DNA, 20 bp, Artificial Sequence
  Description of Artificial Sequence: Synthetic oligonucleotide
  Target: LAMA2; (+) strand; PAM type: NRG; PAM sequence: GAG
cactgattctgaaagatgat

SEQ ID NO: 181619 - DNA, 20 bp, Artificial Sequence
  Description of Artificial Sequence: Synthetic oligonucleotide
  Target: LAMA2; (+) strand; PAM type: NRG; PAM sequence: GAG
attctgaaagatgatgagtt

SEQ ID NO: 181620 - DNA, 20 bp, Artificial Sequence
  Description of Artificial Sequence: Synthetic oligonucleotide
  Target: LAMA2; (+) strand; PAM type: NRG; PAM sequence: TAG
gatgagttgagtgaaaataa

SEQ ID NO: 181621 - DNA, 20 bp, Artificial Sequence
  Description of Artificial Sequence: Synthetic oligonucleotide
  Target: LAMA2; (+) strand; PAM type: NRG; PAM sequence: TGG
gtgaaaataatagtatttcg

SEQ ID NO: 181622 - DNA, 20 bp, Artificial Sequence
  Description of Artificial Sequence: Synthetic oligonucleotide
  Target: LAMA2; (+) strand; PAM type: NRG; PAM sequence: TGG
atttcgtggtcaaataaatt

SEQ ID NO: 181623 - DNA, 20 bp, Artificial Sequence
  Description of Artificial Sequence: Synthetic oligonucleotide
  Target: LAMA2; (+) strand; PAM type: NRG; PAM sequence: GGG
tttcgtggtcaaataaattt

SEQ ID NO: 181624 - DNA, 20 bp, Artificial Sequence
  Description of Artificial Sequence: Synthetic oligonucleotide
  Target: LAMA2; (+) strand; PAM type: NRG; PAM sequence: TAG
ttttgctctatgtccttctc

SEQ ID NO: 181625 - DNA, 20 bp, Artificial Sequence
  Description of Artificial Sequence: Synthetic oligonucleotide
  Target: LAMA2; (+) strand; PAM type: NRG; PAM sequence: AGG
tttgctctatgtccttctct

SEQ ID NO: 181626 - DNA, 20 bp, Artificial Sequence
  Description of Artificial Sequence: Synthetic oligonucleotide
  Target: LAMA2; (+) strand; PAM type: NRG; PAM sequence: TAG
aggaacattgcattgcatat

SEQ ID NO: 181627 - DNA, 20 bp, Artificial Sequence
  Description of Artificial Sequence: Synthetic oligonucleotide
  Target: LAMA2; (+) strand; PAM type: NRG; PAM sequence: AAG
attgcatattagcatgctga

SEQ ID NO: 181628 - DNA, 20 bp, Artificial Sequence
  Description of Artificial Sequence: Synthetic oligonucleotide
  Target: LAMA2; (+) strand; PAM type: NRG; PAM sequence: TGG
tattagcatgctgaaagatc

SEQ ID NO: 181629 - DNA, 20 bp, Artificial Sequence
  Description of Artificial Sequence: Synthetic oligonucleotide
  Target: LAMA2; (+) strand; PAM type: NRG; PAM sequence: GGG
attagcatgctgaaagatct

SEQ ID NO: 181630 - DNA, 20 bp, Artificial Sequence
  Description of Artificial Sequence: Synthetic oligonucleotide
  Target: LAMA2; (+) strand; PAM type: NRG; PAM sequence: CAG
agcatgctgaaagatctggg

SEQ ID NO: 181631 - DNA, 20 bp, Artificial Sequence
  Description of Artificial Sequence: Synthetic oligonucleotide
  Target: LAMA2; (+) strand; PAM type: NRG; PAM sequence: AAG
atctgggcagctataaaatt

SEQ ID NO: 181632 - DNA, 20 bp, Artificial Sequence
  Description of Artificial Sequence: Synthetic oligonucleotide
  Target: LAMA2; (+) strand; PAM type: NRG; PAM sequence: AAG
tgggcagctataaaattaag

SEQ ID NO: 181633 - DNA, 20 bp, Artificial Sequence
  Description of Artificial Sequence: Synthetic oligonucleotide
  Target: LAMA2; (+) strand; PAM type: NRG; PAM sequence: CAG
atgtttaactttgtataacc

SEQ ID NO: 181634 - DNA, 20 bp, Artificial Sequence
  Description of Artificial Sequence: Synthetic oligonucleotide
  Target: LAMA2; (+) strand; PAM type: NRG; PAM sequence: GAG
agtatttgtcatatttattt

SEQ ID NO: 181635 - DNA, 20 bp, Artificial Sequence
  Description of Artificial Sequence: Synthetic oligonucleotide
  Target: LAMA2; (+) strand; PAM type: NRG; PAM sequence: CAG
tttgtcatatttatttgagc

SEQ ID NO: 181636 - DNA, 20 bp, Artificial Sequence
  Description of Artificial Sequence: Synthetic oligonucleotide
  Target: LAMA2; (+) strand; PAM type: NRG; PAM sequence: AGG
ttgtcatatttatttgagcc

SEQ ID NO: 181637 - DNA, 20 bp, Artificial Sequence
  Description of Artificial Sequence: Synthetic oligonucleotide
  Target: LAMA2; (+) strand; PAM type: NRG; PAM sequence: AAG
tatttgagccaggaacatcc

SEQ ID NO: 181638 - DNA, 20 bp, Artificial Sequence
  Description of Artificial Sequence: Synthetic oligonucleotide
  Target: LAMA2; (+) strand; PAM type: NRG; PAM sequence: TAG
gccaggaacatccaagaaac

SEQ ID NO: 181639 - DNA, 20 bp, Artificial Sequence
  Description of Artificial Sequence: Synthetic oligonucleotide
  Target: LAMA2; (+) strand; PAM type: NRG; PAM sequence: AAG
tccaagaaactagcatccta

SEQ ID NO: 181640 - DNA, 20 bp, Artificial Sequence
  Description of Artificial Sequence: Synthetic oligonucleotide
  Target: LAMA2; (+) strand; PAM type: NRG; PAM sequence: TAG
catcctaaagaataaacatt

SEQ ID NO: 181641 - DNA, 20 bp, Artificial Sequence
  Description of Artificial Sequence: Synthetic oligonucleotide
  Target: LAMA2; (+) strand; PAM type: NRG; PAM sequence: TGG
gaaattcccttataacccac

SEQ ID NO: 181642 - DNA, 20 bp, Artificial Sequence
  Description of Artificial Sequence: Synthetic oligonucleotide
  Target: LAMA2; (+) strand; PAM type: NRG; PAM sequence: CAG
ttttcaaacccttgcttatt

SEQ ID NO: 181643 - DNA, 20 bp, Artificial Sequence
  Description of Artificial Sequence: Synthetic oligonucleotide
  Target: LAMA2; (+) strand; PAM type: NRG; PAM sequence: CAG
tgcttattcagatcctacat

SEQ ID NO: 181644 - DNA, 20 bp, Artificial Sequence
  Description of Artificial Sequence: Synthetic oligonucleotide
  Target: LAMA2; (+) strand; PAM type: NRG; PAM sequence: AAG
ttcagatcctacatcagaca

SEQ ID NO: 181645 - DNA, 20 bp, Artificial Sequence
  Description of Artificial Sequence: Synthetic oligonucleotide
  Target: LAMA2; (+) strand; PAM type: NRG; PAM sequence: AGG
tcagatcctacatcagacaa

SEQ ID NO: 181646 - DNA, 20 bp, Artificial Sequence
  Description of Artificial Sequence: Synthetic oligonucleotide
  Target: LAMA2; (+) strand; PAM type: NRG; PAM sequence: TAG
tcctacatcagacaaaggtt

SEQ ID NO: 181647 - DNA, 20 bp, Artificial Sequence
  Description of Artificial Sequence: Synthetic oligonucleotide
  Target: LAMA2; (+) strand; PAM type: NRG; PAM sequence: GAG
ctacatcagacaaaggttta

SEQ ID NO: 181648 - DNA, 20 bp, Artificial Sequence
  Description of Artificial Sequence: Synthetic oligonucleotide
  Target: LAMA2; (+) strand; PAM type: NRG; PAM sequence: AGG
tacatcagacaaaggtttag

SEQ ID NO: 181649 - DNA, 20 bp, Artificial Sequence
  Description of Artificial Sequence: Synthetic oligonucleotide
  Target: LAMA2; (+) strand; PAM type: NRG; PAM sequence: CGG
aggccaaatctatcatctta

SEQ ID NO: 181650 - DNA, 20 bp, Artificial Sequence
  Description of Artificial Sequence: Synthetic oligonucleotide
  Target: LAMA2; (+) strand; PAM type: NRG; PAM sequence: GGG
ggccaaatctatcatcttac

SEQ ID NO: 181651 - DNA, 20 bp, Artificial Sequence
  Description of Artificial Sequence: Synthetic oligonucleotide
  Target: LAMA2; (+) strand; PAM type: NRG; PAM sequence: AAG
gactgatgtcaatacgcatc

SEQ ID NO: 181652 - DNA, 20 bp, Artificial Sequence
  Description of Artificial Sequence: Synthetic oligonucleotide
  Target: LAMA2; (+) strand; PAM type: NRG; PAM sequence: AGG
actgatgtcaatacgcatca

SEQ ID NO: 181653 - DNA, 20 bp, Artificial Sequence
  Description of Artificial Sequence: Synthetic oligonucleotide
  Target: LAMA2; (+) strand; PAM type: NRG; PAM sequence: AAG
acgcatcaaggatgcatatg

SEQ ID NO: 181654 - DNA, 20 bp, Artificial Sequence
  Description of Artificial Sequence: Synthetic oligonucleotide
  Target: LAMA2; (+) strand; PAM type: NRG; PAM sequence: TAG
catcaaggatgcatatgaag

SEQ ID NO: 181655 - DNA, 20 bp, Artificial Sequence
  Description of Artificial Sequence: Synthetic oligonucleotide
  Target: LAMA2; (+) strand; PAM type: NRG; PAM sequence: AAG
ggatgcatatgaagtagtta

SEQ ID NO: 181656 - DNA, 20 bp, Artificial Sequence
  Description of Artificial Sequence: Synthetic oligonucleotide
  Target: LAMA2; (+) strand; PAM type: NRG; PAM sequence: AGG
gatgcatatgaagtagttaa

SEQ ID NO: 181657 - DNA, 20 bp, Artificial Sequence
  Description of Artificial Sequence: Synthetic oligonucleotide
  Target: LAMA2; (+) strand; PAM type: NRG; PAM sequence: TAG
catatgaagtagttaaaggc

SEQ ID NO: 181658 - DNA, 20 bp, Artificial Sequence
  Description of Artificial Sequence: Synthetic oligonucleotide
  Target: LAMA2; (+) strand; PAM type: NRG; PAM sequence: AAG
agtagttaaaggctagatct

SEQ ID NO: 181659 - DNA, 20 bp, Artificial Sequence
  Description of Artificial Sequence: Synthetic oligonucleotide
  Target: LAMA2; (+) strand; PAM type: NRG; PAM sequence: AGG
gtagttaaaggctagatcta

SEQ ID NO: 181660 - DNA, 20 bp, Artificial Sequence
  Description of Artificial Sequence: Synthetic oligonucleotide
  Target: LAMA2; (+) strand; PAM type: NRG; PAM sequence: TGG
aggctagatctaaggacatg

SEQ ID NO: 181661 - DNA, 20 bp, Artificial Sequence
  Description of Artificial Sequence: Synthetic oligonucleotide
  Target: LAMA2; (+) strand; PAM type: NRG; PAM sequence: TAG
ctagatctaaggacatgtgg

SEQ ID NO: 181662 - DNA, 20 bp, Artificial Sequence
  Description of Artificial Sequence: Synthetic oligonucleotide
  Target: LAMA2; (+) strand; PAM type: NRG; PAM sequence: AAG
tctaaggacatgtggtagaa

SEQ ID NO: 181663 - DNA, 20 bp, Artificial Sequence
  Description of Artificial Sequence: Synthetic oligonucleotide
  Target: LAMA2; (+) strand; PAM type: NRG; PAM sequence: CAG
tggtagaaaagcatgtaatt

SEQ ID NO: 181664 - DNA, 20 bp, Artificial Sequence
  Description of Artificial Sequence: Synthetic oligonucleotide
  Target: LAMA2; (+) strand; PAM type: NRG; PAM sequence: AAG
aaaagcatgtaattcagaaa

SEQ ID NO: 181665 - DNA, 20 bp, Artificial Sequence
  Description of Artificial Sequence: Synthetic oligonucleotide
  Target: LAMA2; (+) strand; PAM type: NRG; PAM sequence: TAG
catgtaattcagaaaaagcc

SEQ ID NO: 181666 - DNA, 20 bp, Artificial Sequence
  Description of Artificial Sequence: Synthetic oligonucleotide
  Target: LAMA2; (+) strand; PAM type: NRG; PAM sequence: AAG
aaaagcctagcttgacccct

SEQ ID NO: 181667 - DNA, 20 bp, Artificial Sequence
  Description of Artificial Sequence: Synthetic oligonucleotide
  Target: LAMA2; (+) strand; PAM type: NRG; PAM sequence: AAG
agcctagcttgacccctaag

SEQ ID NO: 181668 - DNA, 20 bp, Artificial Sequence
  Description of Artificial Sequence: Synthetic oligonucleotide
  Target: LAMA2; (+) strand; PAM type: NRG; PAM sequence: AGG
gcctagcttgacccctaaga

SEQ ID NO: 181669 - DNA, 20 bp, Artificial Sequence
  Description of Artificial Sequence: Synthetic oligonucleotide
  Target: LAMA2; (+) strand; PAM type: NRG; PAM sequence: GGG
cctagcttgacccctaagaa

SEQ ID NO: 181670 - DNA, 20 bp, Artificial Sequence
  Description of Artificial Sequence: Synthetic oligonucleotide
  Target: LAMA2; (+) strand; PAM type: NRG; PAM sequence: GGG
ctagcttgacccctaagaag

SEQ ID NO: 181671 - DNA, 20 bp, Artificial Sequence
  Description of Artificial Sequence: Synthetic oligonucleotide
  Target: LAMA2; (+) strand; PAM type: NRG; PAM sequence: GGG
tagcttgacccctaagaagg

SEQ ID NO: 181672 - DNA, 20 bp, Artificial Sequence
  Description of Artificial Sequence: Synthetic oligonucleotide
  Target: LAMA2; (+) strand; PAM type: NRG; PAM sequence: CGG
cttgacccctaagaaggggg

SEQ ID NO: 181673 - DNA, 20 bp, Artificial Sequence
  Description of Artificial Sequence: Synthetic oligonucleotide
  Target: LAMA2; (+) strand; PAM type: NRG; PAM sequence: TAG
gacccctaagaagggggcgg

SEQ ID NO: 181674 - DNA, 20 bp, Artificial Sequence
  Description of Artificial Sequence: Synthetic oligonucleotide
  Target: LAMA2; (+) strand; PAM type: NRG; PAM sequence: GAG
cctaagaagggggcggtagt

SEQ ID NO: 181675 - DNA, 20 bp, Artificial Sequence
  Description of Artificial Sequence: Synthetic oligonucleotide
  Target: LAMA2; (+) strand; PAM type: NRG; PAM sequence: GAG
taagaagggggcggtagtga

SEQ ID NO: 181676 - DNA, 20 bp, Artificial Sequence
  Description of Artificial Sequence: Synthetic oligonucleotide
  Target: LAMA2; (+) strand; PAM type: NRG; PAM sequence: AGG
aagaagggggcggtagtgag

SEQ ID NO: 181677 - DNA, 20 bp, Artificial Sequence
  Description of Artificial Sequence: Synthetic oligonucleotide
  Target: LAMA2; (+) strand; PAM type: NRG; PAM sequence: GGG
agaagggggcggtagtgaga

SEQ ID NO: 181678 - DNA, 20 bp, Artificial Sequence
  Description of Artificial Sequence: Synthetic oligonucleotide
  Target: LAMA2; (+) strand; PAM type: NRG; PAM sequence: GAG
cggtagtgagagggatcaat

SEQ ID NO: 181679 - DNA, 20 bp, Artificial Sequence
  Description of Artificial Sequence: Synthetic oligonucleotide
  Target: LAMA2; (+) strand; PAM type: NRG; PAM sequence: AAG
gtgagagggatcaatgagat

SEQ ID NO: 181680 - DNA, 20 bp, Artificial Sequence
  Description of Artificial Sequence: Synthetic oligonucleotide
  Target: LAMA2; (+) strand; PAM type: NRG; PAM sequence: AGG
tgagagggatcaatgagata

SEQ ID NO: 181681 - DNA, 20 bp, Artificial Sequence
  Description of Artificial Sequence: Synthetic oligonucleotide
  Target: LAMA2; (+) strand; PAM type: NRG; PAM sequence: GAG
agagggatcaatgagataag

SEQ ID NO: 181682 - DNA, 20 bp, Artificial Sequence
  Description of Artificial Sequence: Synthetic oligonucleotide
  Target: LAMA2; (+) strand; PAM type: NRG; PAM sequence: CAG
tgtctgctttctaaacaatg

SEQ ID NO: 181683 - DNA, 20 bp, Artificial Sequence
  Description of Artificial Sequence: Synthetic oligonucleotide
  Target: LAMA2; (+) strand; PAM type: NRG; PAM sequence: CAG
tctaaacaatgcagtttgaa

SEQ ID NO: 181684 - DNA, 20 bp, Artificial Sequence
  Description of Artificial Sequence: Synthetic oligonucleotide
  Target: LAMA2; (+) strand; PAM type: NRG; PAM sequence: GAG
taaacaatgcagtttgaaca

SEQ ID NO: 181685 - DNA, 20 bp, Artificial Sequence
  Description of Artificial Sequence: Synthetic oligonucleotide
  Target: LAMA2; (+) strand; PAM type: NRG; PAM sequence: AAG
acaatgcagtttgaacagag

SEQ ID NO: 181686 - DNA, 20 bp, Artificial Sequence
  Description of Artificial Sequence: Synthetic oligonucleotide
  Target: LAMA2; (+) strand; PAM type: NRG; PAM sequence: GAG
catcacattaaaaatacctt

SEQ ID NO: 181687 - DNA, 20 bp, Artificial Sequence
  Description of Artificial Sequence: Synthetic oligonucleotide
  Target: LAMA2; (+) strand; PAM type: NRG; PAM sequence: GAG
tcacattaaaaataccttga

SEQ ID NO: 181688 - DNA, 20 bp, Artificial Sequence
  Description of Artificial Sequence: Synthetic oligonucleotide
  Target: LAMA2; (+) strand; PAM type: NRG; PAM sequence: AAG
aaataccttgagagacccaa

SEQ ID NO: 181689 - DNA, 20 bp, Artificial Sequence
  Description of Artificial Sequence: Synthetic oligonucleotide
  Target: LAMA2; (+) strand; PAM type: NRG; PAM sequence: AAG
ccttgagagacccaaaagaa

SEQ ID NO: 181690 - DNA, 20 bp, Artificial Sequence
  Description of Artificial Sequence: Synthetic oligonucleotide
  Target: LAMA2; (+) strand; PAM type: NRG; PAM sequence: AAG
gagagacccaaaagaaaagc

SEQ ID NO: 181691 - DNA, 20 bp, Artificial Sequence
  Description of Artificial Sequence: Synthetic oligonucleotide
  Target: LAMA2; (+) strand; PAM type: NRG; PAM sequence: AAG
agacccaaaagaaaagcaag

SEQ ID NO: 181692 - DNA, 20 bp, Artificial Sequence
  Description of Artificial Sequence: Synthetic oligonucleotide
  Target: LAMA2; (+) strand; PAM type: NRG; PAM sequence: AGG
gacccaaaagaaaagcaaga

SEQ ID NO: 181693 - DNA, 20 bp, Artificial Sequence
  Description of Artificial Sequence: Synthetic oligonucleotide
  Target: LAMA2; (+) strand; PAM type: NRG; PAM sequence: GAG
aaagaaaagcaagaaggcat

SEQ ID NO: 181694 - DNA, 20 bp, Artificial Sequence
  Description of Artificial Sequence: Synthetic oligonucleotide
  Target: LAMA2; (+) strand; PAM type: NRG; PAM sequence: AGG
aagaaaagcaagaaggcatg

SEQ ID NO: 181695 - DNA, 20 bp, Artificial Sequence
  Description of Artificial Sequence: Synthetic oligonucleotide
  Target: LAMA2; (+) strand; PAM type: NRG; PAM sequence: TAG
tgtacctctgtcacaacact

SEQ ID NO: 181696 - DNA, 20 bp, Artificial Sequence
  Description of Artificial Sequence: Synthetic oligonucleotide
  Target: LAMA2; (+) strand; PAM type: NRG; PAM sequence: TGG
tgtcacaacacttagcatcc

SEQ ID NO: 181697 - DNA, 20 bp, Artificial Sequence
  Description of Artificial Sequence: Synthetic oligonucleotide
  Target: LAMA2; (+) strand; PAM type: NRG; PAM sequence: CAG
ctggtctaaaatgtaattta

SEQ ID NO: 181698 - DNA, 20 bp, Artificial Sequence
  Description of Artificial Sequence: Synthetic oligonucleotide
  Target: LAMA2; (+) strand; PAM type: NRG; PAM sequence: TGG
aatgtaatttacagtgtacc

SEQ ID NO: 181699 - DNA, 20 bp, Artificial Sequence
  Description of Artificial Sequence: Synthetic oligonucleotide
  Target: LAMA2; (+) strand; PAM type: NRG; PAM sequence: CAG
tgtacaatcatattttacaa

SEQ ID NO: 181700 - DNA, 20 bp, Artificial Sequence
  Description of Artificial Sequence: Synthetic oligonucleotide
  Target: LAMA2; (+) strand; PAM type: NRG; PAM sequence: CAG
tttacaacagtgacactttg

SEQ ID NO: 181701 - DNA, 20 bp, Artificial Sequence
  Description of Artificial Sequence: Synthetic oligonucleotide
  Target: LAMA2; (+) strand; PAM type: NRG; PAM sequence: GAG
aacagtgacactttgcagat

SEQ ID NO: 181702 - DNA, 20 bp, Artificial Sequence
  Description of Artificial Sequence: Synthetic oligonucleotide
  Target: LAMA2; (+) strand; PAM type: NRG; PAM sequence: CAG
ttgcagatgagtctaaatcc

SEQ ID NO: 181703 - DNA, 20 bp, Artificial Sequence
  Description of Artificial Sequence: Synthetic oligonucleotide
  Target: LAMA2; (+) strand; PAM type: NRG; PAM sequence: TAG
cagatgagtctaaatcccag

SEQ ID NO: 181704 - DNA, 20 bp, Artificial Sequence
  Description of Artificial Sequence: Synthetic oligonucleotide
  Target: LAMA2; (+) strand; PAM type: NRG; PAM sequence: TGG
ctaaatcccagtagttcctg

SEQ ID NO: 181705 - DNA, 20 bp, Artificial Sequence
  Description of Artificial Sequence: Synthetic oligonucleotide
  Target: LAMA2; (+) strand; PAM type: NRG; PAM sequence: TAG
atcccagtagttcctgtgga

SEQ ID NO: 181706 - DNA, 20 bp, Artificial Sequence
  Description of Artificial Sequence: Synthetic oligonucleotide
  Target: LAMA2; (+) strand; PAM type: NRG; PAM sequence: CAG
cctgtggatagtaaaactta

SEQ ID NO: 181707 - DNA, 20 bp, Artificial Sequence
  Description of Artificial Sequence: Synthetic oligonucleotide
  Target: LAMA2; (+) strand; PAM type: NRG; PAM sequence: AAG
tggatagtaaaacttacaga

SEQ ID NO: 181708 - DNA, 20 bp, Artificial Sequence
  Description of Artificial Sequence: Synthetic oligonucleotide
  Target: LAMA2; (+) strand; PAM type: NRG; PAM sequence: GAG
gatagtaaaacttacagaaa

SEQ ID NO: 181709 - DNA, 20 bp, Artificial Sequence
  Description of Artificial Sequence: Synthetic oligonucleotide
  Target: LAMA2; (+) strand; PAM type: NRG; PAM sequence: TAG
aaaacttacagaaagagcca

SEQ ID NO: 181710 - DNA, 20 bp, Artificial Sequence
  Description of Artificial Sequence: Synthetic oligonucleotide
  Target: LAMA2; (+) strand; PAM type: NRG; PAM sequence: TAG
ttacagaaagagccatagat

SEQ ID NO: 181711 - DNA, 20 bp, Artificial Sequence
  Description of Artificial Sequence: Synthetic oligonucleotide
  Target: LAMA2; (+) strand; PAM type: NRG; PAM sequence: AGG
tacagaaagagccatagatt

SEQ ID NO: 181712 - DNA, 20 bp, Artificial Sequence
  Description of Artificial Sequence: Synthetic oligonucleotide
  Target: LAMA2; (+) strand; PAM type: NRG; PAM sequence: TAG
ttaattatctgattcctaat

SEQ ID NO: 181713 - DNA, 20 bp, Artificial Sequence
  Description of Artificial Sequence: Synthetic oligonucleotide
  Target: LAMA2; (+) strand; PAM type: NRG; PAM sequence: TAG
aattagatatctttgttatt

SEQ ID NO: 181714 - DNA, 20 bp, Artificial Sequence
  Description of Artificial Sequence: Synthetic oligonucleotide
  Target: LAMA2; (+) strand; PAM type: NRG; PAM sequence: TAG
ttattttctaactacttatc

SEQ ID NO: 181715 - DNA, 20 bp, Artificial Sequence
  Description of Artificial Sequence: Synthetic oligonucleotide
  Target: LAMA2; (+) strand; PAM type: NRG; PAM sequence: TAG
ctaactacttatctagatta

SEQ ID NO: 181716 - DNA, 20 bp, Artificial Sequence
  Description of Artificial Sequence: Synthetic oligonucleotide
  Target: LAMA2; (+) strand; PAM type: NRG; PAM sequence: TGG
ttatagaaaactacatcaaa

SEQ ID NO: 181717 - DNA, 20 bp, Artificial Sequence
  Description of Artificial Sequence: Synthetic oligonucleotide
  Target: LAMA2; (+) strand; PAM type: NRG; PAM sequence: CAG
tcaaatggatctttgatgtt

SEQ ID NO: 181718 - DNA, 20 bp, Artificial Sequence
  Description of Artificial Sequence: Synthetic oligonucleotide
  Target: LAMA2; (+) strand; PAM type: NRG; PAM sequence: TAG
ggatctttgatgttcagtta

SEQ ID NO: 181719 - DNA, 20 bp, Artificial Sequence
  Description of Artificial Sequence: Synthetic oligonucleotide
  Target: LAMA2; (+) strand; PAM type: NRG; PAM sequence: TGG
gttatctcttttatcttcat

SEQ ID NO: 181720 - DNA, 20 bp, Artificial Sequence
  Description of Artificial Sequence: Synthetic oligonucleotide
  Target: LAMA2; (+) strand; PAM type: NRG; PAM sequence: TGG
cttcattggtttgccttcac

SEQ ID NO: 181721 - DNA, 20 bp, Artificial Sequence
  Description of Artificial Sequence: Synthetic oligonucleotide
  Target: LAMA2; (+) strand; PAM type: NRG; PAM sequence: AAG
gtttgccttcactggtgttc

SEQ ID NO: 181722 - DNA, 20 bp, Artificial Sequence
  Description of Artificial Sequence: Synthetic oligonucleotide
  Target: LAMA2; (+) strand; PAM type: NRG; PAM sequence: TGG
gctattattttcatgctctt

SEQ ID NO: 181723 - DNA, 20 bp, Artificial Sequence
  Description of Artificial Sequence: Synthetic oligonucleotide
  Target: LAMA2; (+) strand; PAM type: NRG; PAM sequence: GGG
ctattattttcatgctcttt

SEQ ID NO: 181724 - DNA, 20 bp, Artificial Sequence
  Description of Artificial Sequence: Synthetic oligonucleotide
  Target: LAMA2; (+) strand; PAM type: NRG; PAM sequence: GGG
tattattttcatgctctttg

SEQ ID NO: 181725 - DNA, 20 bp, Artificial Sequence
  Description of Artificial Sequence: Synthetic oligonucleotide
  Target: LAMA2; (+) strand; PAM type: NRG; PAM sequence: GGG
attattttcatgctctttgg

SEQ ID NO: 181726 - DNA, 20 bp, Artificial Sequence
  Description of Artificial Sequence: Synthetic oligonucleotide
  Target: LAMA2; (+) strand; PAM type: NRG; PAM sequence: TAG
ttttcatgctctttggggga

SEQ ID NO: 181727 - DNA, 20 bp, Artificial Sequence
  Description of Artificial Sequence: Synthetic oligonucleotide
  Target: LAMA2; (+) strand; PAM type: NRG; PAM sequence: TAG
aattattaaattgctaaata

SEQ ID NO: 181728 - DNA, 20 bp, Artificial Sequence
  Description of Artificial Sequence: Synthetic oligonucleotide
  Target: LAMA2; (+) strand; PAM type: NRG; PAM sequence: AAG
taaattgctaaatatagtgc

SEQ ID NO: 181729 - DNA, 20 bp, Artificial Sequence
  Description of Artificial Sequence: Synthetic oligonucleotide
  Target: LAMA2; (+) strand; PAM type: NRG; PAM sequence: GAG
taaatatagtgcaagtgctt

SEQ ID NO: 181730 - DNA, 20 bp, Artificial Sequence
  Description of Artificial Sequence: Synthetic oligonucleotide
  Target: LAMA2; (+) strand; PAM type: NRG; PAM sequence: AAG
tatagtgcaagtgcttgaga

SEQ ID NO: 181731 - DNA, 20 bp, Artificial Sequence
  Description of Artificial Sequence: Synthetic oligonucleotide
  Target: LAMA2; (+) strand; PAM type: NRG; PAM sequence: AAG
attaaaccaaatttgtcttg

SEQ ID NO: 181732 - DNA, 20 bp, Artificial Sequence
  Description of Artificial Sequence: Synthetic oligonucleotide
  Target: LAMA2; (+) strand; PAM type: NRG; PAM sequence: TAG
ttgaagtattaatgatgata

SEQ ID NO: 181733 - DNA, 20 bp, Artificial Sequence
  Description of Artificial Sequence: Synthetic oligonucleotide
  Target: LAMA2; (+) strand; PAM type: NRG; PAM sequence: TGG
tattaatgatgatatagatg

SEQ ID NO: 181734 - DNA, 20 bp, Artificial Sequence
  Description of Artificial Sequence: Synthetic oligonucleotide
  Target: LAMA2; (+) strand; PAM type: NRG; PAM sequence: CAG
taaactttctttctccttta

SEQ ID NO: 181735 - DNA, 20 bp, Artificial Sequence
  Description of Artificial Sequence: Synthetic oligonucleotide
  Target: LAMA2; (+) strand; PAM type: NRG; PAM sequence: TAG
tacagccaatatatcaattg

SEQ ID NO: 181736 - DNA, 20 bp, Artificial Sequence
  Description of Artificial Sequence: Synthetic oligonucleotide
  Target: LAMA2; (+) strand; PAM type: NRG; PAM sequence: TAG
caatatatcaattgtagata

SEQ ID NO: 181737 - DNA, 20 bp, Artificial Sequence
  Description of Artificial Sequence: Synthetic oligonucleotide
  Target: LAMA2; (+) strand; PAM type: NRG; PAM sequence: CAG
ttgtagatatagatactaat

SEQ ID NO: 181738 - DNA, 20 bp, Artificial Sequence
  Description of Artificial Sequence: Synthetic oligonucleotide
  Target: LAMA2; (+) strand; PAM type: NRG; PAM sequence: AGG
tgtagatatagatactaatc

SEQ ID NO: 181739 - DNA, 20 bp, Artificial Sequence
  Description of Artificial Sequence: Synthetic oligonucleotide
  Target: LAMA2; (+) strand; PAM type: NRG; PAM sequence: GAG
tagatatagatactaatcag

SEQ ID NO: 181740 - DNA, 20 bp, Artificial Sequence
  Description of Artificial Sequence: Synthetic oligonucleotide
  Target: LAMA2; (+) strand; PAM type: NRG; PAM sequence: AGG
agatatagatactaatcagg

SEQ ID NO: 181741 - DNA, 20 bp, Artificial Sequence
  Description of Artificial Sequence: Synthetic oligonucleotide
  Target: LAMA2; (+) strand; PAM type: NRG; PAM sequence: GAG
atatagatactaatcaggag

SEQ ID NO: 181742 - DNA, 20 bp, Artificial Sequence
  Description of Artificial Sequence: Synthetic oligonucleotide
  Target: LAMA2; (+) strand; PAM type: NRG; PAM sequence: TAG
tactaatcaggaggagaata

SEQ ID NO: 181743 - DNA, 20 bp, Artificial Sequence
  Description of Artificial Sequence: Synthetic oligonucleotide
  Target: LAMA2; (+) strand; PAM type: NRG; PAM sequence: TGG
aatatagcaacttcgtcttc

SEQ ID NO: 181744 - DNA, 20 bp, Artificial Sequence
  Description of Artificial Sequence: Synthetic oligonucleotide
  Target: LAMA2; (+) strand; PAM type: NRG; PAM sequence: TGG
tcgtcttctggaaacaactt

SEQ ID NO: 181745 - DNA, 20 bp, Artificial Sequence
  Description of Artificial Sequence: Synthetic oligonucleotide
  Target: LAMA2; (+) strand; PAM type: NRG; PAM sequence: AAG
caactttggtcttgacttga

SEQ ID NO: 181746 - DNA, 20 bp, Artificial Sequence
  Description of Artificial Sequence: Synthetic oligonucleotide
  Target: LAMA2; (+) strand; PAM type: NRG; PAM sequence: CAG
ctttggtcttgacttgaaag

SEQ ID NO: 181747 - DNA, 20 bp, Artificial Sequence
  Description of Artificial Sequence: Synthetic oligonucleotide
  Target: LAMA2; (+) strand; PAM type: NRG; PAM sequence: TGG
gcagatgacaaaatatattt

SEQ ID NO: 181748 - DNA, 20 bp, Artificial Sequence
  Description of Artificial Sequence: Synthetic oligonucleotide
  Target: LAMA2; (+) strand; PAM type: NRG; PAM sequence: TGG
gatgacaaaatatattttgg

SEQ ID NO: 181749 - DNA, 20 bp, Artificial Sequence
  Description of Artificial Sequence: Synthetic oligonucleotide
  Target: LAMA2; (+) strand; PAM type: NRG; PAM sequence: GAG
tttggtggcctgccaacgct

SEQ ID NO: 181750 - DNA, 20 bp, Artificial Sequence
  Description of Artificial Sequence: Synthetic oligonucleotide
  Target: LAMA2; (+) strand; PAM type: NRG; PAM sequence: GAG
ctgccaacgctgagaaactt

SEQ ID NO: 181751 - DNA, 20 bp, Artificial Sequence
  Description of Artificial Sequence: Synthetic oligonucleotide
  Target: LAMA2; (+) strand; PAM type: NRG; PAM sequence: AGG
tgccaacgctgagaaacttg

SEQ ID NO: 181752 - DNA, 20 bp, Artificial Sequence
  Description of Artificial Sequence: Synthetic oligonucleotide
  Target: LAMA2; (+) strand; PAM type: NRG; PAM sequence: TAG
ctgagaaacttgaggtaatt

SEQ ID NO: 181753 - DNA, 20 bp, Artificial Sequence
  Description of Artificial Sequence: Synthetic oligonucleotide
  Target: LAMA2; (+) strand; PAM type: NRG; PAM sequence: AAG
ggtaatttagtttatatgta

SEQ ID NO: 181754 - DNA, 20 bp, Artificial Sequence
  Description of Artificial Sequence: Synthetic oligonucleotide
  Target: LAMA2; (+) strand; PAM type: NRG; PAM sequence: AAG
tttagtttatatgtaaagct

SEQ ID NO: 181755 - DNA, 20 bp, Artificial Sequence
  Description of Artificial Sequence: Synthetic oligonucleotide
  Target: LAMA2; (+) strand; PAM type: NRG; PAM sequence: AGG
ttagtttatatgtaaagcta

SEQ ID NO: 181756 - DNA, 20 bp, Artificial Sequence
  Description of Artificial Sequence: Synthetic oligonucleotide
  Target: LAMA2; (+) strand; PAM type: NRG; PAM sequence: AAG
tatatgtaaagctaaggatt

SEQ ID NO: 181757 - DNA, 20 bp, Artificial Sequence
  Description of Artificial Sequence: Synthetic oligonucleotide
  Target: LAMA2; (+) strand; PAM type: NRG; PAM sequence: TAG
taaatgaccactatgctcac

SEQ ID NO: 181758 - DNA, 20 bp, Artificial Sequence
  Description of Artificial Sequence: Synthetic oligonucleotide
  Target: LAMA2; (+) strand; PAM type: NRG; PAM sequence: GAG
aatgaccactatgctcacta

SEQ ID NO: 181759 - DNA, 20 bp, Artificial Sequence
  Description of Artificial Sequence: Synthetic oligonucleotide
  Target: LAMA2; (+) strand; PAM type: NRG; PAM sequence: AAG
ctatgctcactagagttctg

SEQ ID NO: 181760 - DNA, 20 bp, Artificial Sequence
  Description of Artificial Sequence: Synthetic oligonucleotide
  Target: LAMA2; (+) strand; PAM type: NRG; PAM sequence: AAG
ttctgaagtttaattacaat

SEQ ID NO: 181761 - DNA, 20 bp, Artificial Sequence
  Description of Artificial Sequence: Synthetic oligonucleotide
  Target: LAMA2; (+) strand; PAM type: NRG; PAM sequence: TGG
taagaatgtcatataaccct

SEQ ID NO: 181762 - DNA, 20 bp, Artificial Sequence
  Description of Artificial Sequence: Synthetic oligonucleotide
  Target: LAMA2; (+) strand; PAM type: NRG; PAM sequence: CAG
tgtcatataacccttggttg

SEQ ID NO: 181763 - DNA, 20 bp, Artificial Sequence
  Description of Artificial Sequence: Synthetic oligonucleotide
  Target: LAMA2; (+) strand; PAM type: NRG; PAM sequence: AAG
atataacccttggttgcaga

SEQ ID NO: 181764 - DNA, 20 bp, Artificial Sequence
  Description of Artificial Sequence: Synthetic oligonucleotide
  Target: LAMA2; (+) strand; PAM type: NRG; PAM sequence: AGG
tataacccttggttgcagaa

SEQ ID NO: 181765 - DNA, 20 bp, Artificial Sequence
  Description of Artificial Sequence: Synthetic oligonucleotide
  Target: LAMA2; (+) strand; PAM type: NRG; PAM sequence: TAG
aaaaacatcatgttgcatgt

SEQ ID NO: 181766 - DNA, 20 bp, Artificial Sequence
  Description of Artificial Sequence: Synthetic oligonucleotide
  Target: LAMA2; (+) strand; PAM type: NRG; PAM sequence: CAG
gttgcatgttagaacaacac

SEQ ID NO: 181767 - DNA, 20 bp, Artificial Sequence
  Description of Artificial Sequence: Synthetic oligonucleotide
  Target: LAMA2; (+) strand; PAM type: NRG; PAM sequence: AGG
ttgcatgttagaacaacacc

SEQ ID NO: 181768 - DNA, 20 bp, Artificial Sequence
  Description of Artificial Sequence: Synthetic oligonucleotide
  Target: LAMA2; (+) strand; PAM type: NRG; PAM sequence: TAG
gttagaacaacaccaggatt

SEQ ID NO: 181769 - DNA, 20 bp, Artificial Sequence
  Description of Artificial Sequence: Synthetic oligonucleotide
  Target: LAMA2; (+) strand; PAM type: NRG; PAM sequence: AAG
acaccaggatttagaaacca

SEQ ID NO: 181770 - DNA, 20 bp, Artificial Sequence
  Description of Artificial Sequence: Synthetic oligonucleotide
  Target: LAMA2; (+) strand; PAM type: NRG; PAM sequence: AGG
caccaggatttagaaaccaa

SEQ ID NO: 181771 - DNA, 20 bp, Artificial Sequence
  Description of Artificial Sequence: Synthetic oligonucleotide
  Target: LAMA2; (+) strand; PAM type: NRG; PAM sequence: AAG
ctaatttgacatctttgttg

SEQ ID NO: 181772 - DNA, 20 bp, Artificial Sequence
  Description of Artificial Sequence: Synthetic oligonucleotide
  Target: LAMA2; (+) strand; PAM type: NRG; PAM sequence: GAG
aatttgacatctttgttgaa

SEQ ID NO: 181773 - DNA, 20 bp, Artificial Sequence
  Description of Artificial Sequence: Synthetic oligonucleotide
  Target: LAMA2; (+) strand; PAM type: NRG; PAM sequence: TGG
tgacatctttgttgaagaga

SEQ ID NO: 181774 - DNA, 20 bp, Artificial Sequence
  Description of Artificial Sequence: Synthetic oligonucleotide
  Target: LAMA2; (+) strand; PAM type: NRG; PAM sequence: TGG
tctttgttgaagagatggat

SEQ ID NO: 181775 - DNA, 20 bp, Artificial Sequence
  Description of Artificial Sequence: Synthetic oligonucleotide
  Target: LAMA2; (+) strand; PAM type: NRG; PAM sequence: GAG
tttgttgaagagatggattg

SEQ ID NO: 181776 - DNA, 20 bp, Artificial Sequence
  Description of Artificial Sequence: Synthetic oligonucleotide
  Target: LAMA2; (+) strand; PAM type: NRG; PAM sequence: AAG
ctttatatgcacctgctgaa

SEQ ID NO: 181777 - DNA, 20 bp, Artificial Sequence
  Description of Artificial Sequence: Synthetic oligonucleotide
  Target: LAMA2; (+) strand; PAM type: NRG; PAM sequence: AAG
cctgctgaaaagaattatga

SEQ ID NO: 181778 - DNA, 20 bp, Artificial Sequence
  Description of Artificial Sequence: Synthetic oligonucleotide
  Target: LAMA2; (+) strand; PAM type: NRG; PAM sequence: AAG
aagaattatgaaagtaatta

SEQ ID NO: 181779 - DNA, 20 bp, Artificial Sequence
  Description of Artificial Sequence: Synthetic oligonucleotide
  Target: LAMA2; (+) strand; PAM type: NRG; PAM sequence: AGG
agaattatgaaagtaattaa

SEQ ID NO: 181780 - DNA, 20 bp, Artificial Sequence
  Description of Artificial Sequence: Synthetic oligonucleotide
  Target: LAMA2; (+) strand; PAM type: NRG; PAM sequence: TAG
attatgaaagtaattaaagg

SEQ ID NO: 181781 - DNA, 20 bp, Artificial Sequence
  Description of Artificial Sequence: Synthetic oligonucleotide
  Target: LAMA2; (+) strand; PAM type: NRG; PAM sequence: AAG
atgaaagtaattaaaggtag

SEQ ID NO: 181782 - DNA, 20 bp, Artificial Sequence
  Description of Artificial Sequence: Synthetic oligonucleotide
  Target: LAMA2; (+) strand; PAM type: NRG; PAM sequence: CAG
aagtaattaaaggtagaagc

SEQ ID NO: 181783 - DNA, 20 bp, Artificial Sequence
  Description of Artificial Sequence: Synthetic oligonucleotide
  Target: LAMA2; (+) strand; PAM type: NRG; PAM sequence: GAG
gtaattaaaggtagaagcca

SEQ ID NO: 181784 - DNA, 20 bp, Artificial Sequence
  Description of Artificial Sequence: Synthetic oligonucleotide
  Target: LAMA2; (+) strand; PAM type: NRG; PAM sequence: TGG
gtagaagccagagttgaatg

SEQ ID NO: 181785 - DNA, 20 bp, Artificial Sequence
  Description of Artificial Sequence: Synthetic oligonucleotide
  Target: LAMA2; (+) strand; PAM type: NRG; PAM sequence: TGG
tgttctccttctacattcac

SEQ ID NO: 181786 - DNA, 20 bp, Artificial Sequence
  Description of Artificial Sequence: Synthetic oligonucleotide
  Target: LAMA2; (+) strand; PAM type: NRG; PAM sequence: GAG
ttctccttctacattcactg

SEQ ID NO: 181787 - DNA, 20 bp, Artificial Sequence
  Description of Artificial Sequence: Synthetic oligonucleotide
  Target: LAMA2; (+) strand; PAM type: NRG; PAM sequence: TGG
tctacattcactggagataa

SEQ ID NO: 181788 - DNA, 20 bp, Artificial Sequence
  Description of Artificial Sequence: Synthetic oligonucleotide
  Target: LAMA2; (+) strand; PAM type: NRG; PAM sequence: TAG
aatggcactctgacattgct

SEQ ID NO: 181789 - DNA, 20 bp, Artificial Sequence
  Description of Artificial Sequence: Synthetic oligonucleotide
  Target: LAMA2; (+) strand; PAM type: NRG; PAM sequence: TAG
ttgcttagtgttccgaaaat

SEQ ID NO: 181790 - DNA, 20 bp, Artificial Sequence
  Description of Artificial Sequence: Synthetic oligonucleotide
  Target: LAMA2; (+) strand; PAM type: NRG; PAM sequence: CAG
ttagtgttccgaaaattagt

SEQ ID NO: 181791 - DNA, 20 bp, Artificial Sequence
  Description of Artificial Sequence: Synthetic oligonucleotide
  Target: LAMA2; (+) strand; PAM type: NRG; PAM sequence: CAG
ccgaaaattagtcagtgttc

SEQ ID NO: 181792 - DNA, 20 bp, Artificial Sequence
  Description of Artificial Sequence: Synthetic oligonucleotide
  Target: LAMA2; (+) strand; PAM type: NRG; PAM sequence: AGG
cgaaaattagtcagtgttcc

SEQ ID NO: 181793 - DNA, 20 bp, Artificial Sequence
  Description of Artificial Sequence: Synthetic oligonucleotide
  Target: LAMA2; (+) strand; PAM type: NRG; PAM sequence: GAG
tcagtgttccaggatgctat

SEQ ID NO: 181794 - DNA, 20 bp, Artificial Sequence
  Description of Artificial Sequence: Synthetic oligonucleotide
  Target: LAMA2; (+) strand; PAM type: NRG; PAM sequence: AAG
gtataacctattttattgct

SEQ ID NO: 181795 - DNA, 20 bp, Artificial Sequence
  Description of Artificial Sequence: Synthetic oligonucleotide
  Target: LAMA2; (+) strand; PAM type: NRG; PAM sequence: TAG
cctattttattgctaagcat

SEQ ID NO: 181796 - DNA, 20 bp, Artificial Sequence
  Description of Artificial Sequence: Synthetic oligonucleotide
  Target: LAMA2; (+) strand; PAM type: NRG; PAM sequence: TGG
gctaagcattagcatcataa

SEQ ID NO: 181797 - DNA, 20 bp, Artificial Sequence
  Description of Artificial Sequence: Synthetic oligonucleotide
  Target: LAMA2; (+) strand; PAM type: NRG; PAM sequence: TGG
ttagcatcataatggcgtgt

SEQ ID NO: 181798 - DNA, 20 bp, Artificial Sequence
  Description of Artificial Sequence: Synthetic oligonucleotide
  Target: LAMA2; (+) strand; PAM type: NRG; PAM sequence: GAG
agcatcataatggcgtgttg

SEQ ID NO: 181799 - DNA, 20 bp, Artificial Sequence
  Description of Artificial Sequence: Synthetic oligonucleotide
  Target: LAMA2; (+) strand; PAM type: NRG; PAM sequence: AAG
ctttcccatatgcctaatac

SEQ ID NO: 181800 - DNA, 20 bp, Artificial Sequence
  Description of Artificial Sequence: Synthetic oligonucleotide
  Target: LAMA2; (+) strand; PAM type: NRG; PAM sequence: TAG
gcctaatacaagaactatat

SEQ ID NO: 181801 - DNA, 20 bp, Artificial Sequence
  Description of Artificial Sequence: Synthetic oligonucleotide
  Target: LAMA2; (+) strand; PAM type: NRG; PAM sequence: TAG
ttaatttcacatatgctttt

SEQ ID NO: 181802 - DNA, 20 bp, Artificial Sequence
  Description of Artificial Sequence: Synthetic oligonucleotide
  Target: LAMA2; (+) strand; PAM type: NRG; PAM sequence: TAG
tttcacatatgctttttagc

SEQ ID NO: 181803 - DNA, 20 bp, Artificial Sequence
  Description of Artificial Sequence: Synthetic oligonucleotide
  Target: LAMA2; (+) strand; PAM type: NRG; PAM sequence: CAG
cacatatgctttttagctag

SEQ ID NO: 181804 - DNA, 20 bp, Artificial Sequence
  Description of Artificial Sequence: Synthetic oligonucleotide
  Target: LAMA2; (+) strand; PAM type: NRG; PAM sequence: TGG
atgctttttagctagcagta

SEQ ID NO: 181805 - DNA, 20 bp, Artificial Sequence
  Description of Artificial Sequence: Synthetic oligonucleotide
  Target: LAMA2; (+) strand; PAM type: NRG; PAM sequence: GGG
tgctttttagctagcagtat

SEQ ID NO: 181806 - DNA, 20 bp, Artificial Sequence
  Description of Artificial Sequence: Synthetic oligonucleotide
  Target: LAMA2; (+) strand; PAM type: NRG; PAM sequence: GGG
gctttttagctagcagtatg

SEQ ID NO: 181807 - DNA, 20 bp, Artificial Sequence
  Description of Artificial Sequence: Synthetic oligonucleotide
  Target: LAMA2; (+) strand; PAM type: NRG; PAM sequence: GAG
tttttagctagcagtatggg

SEQ ID NO: 181808 - DNA, 20 bp, Artificial Sequence
  Description of Artificial Sequence: Synthetic oligonucleotide
  Target: LAMA2; (+) strand; PAM type: NRG; PAM sequence: TAG
gacacatttgcttcctaatt

SEQ ID NO: 181809 - DNA, 20 bp, Artificial Sequence
  Description of Artificial Sequence: Synthetic oligonucleotide
  Target: LAMA2; (+) strand; PAM type: NRG; PAM sequence: TAG
catttgcttcctaatttagt

SEQ ID NO: 181810 - DNA, 20 bp, Artificial Sequence
  Description of Artificial Sequence: Synthetic oligonucleotide
  Target: LAMA2; (+) strand; PAM type: NRG; PAM sequence: AAG
tttagttagttcaaaaaata

SEQ ID NO: 181811 - DNA, 20 bp, Artificial Sequence
  Description of Artificial Sequence: Synthetic oligonucleotide
  Target: LAMA2; (+) strand; PAM type: NRG; PAM sequence: CAG
ataaagtaactaaaaaatgt

SEQ ID NO: 181812 - DNA, 20 bp, Artificial Sequence
  Description of Artificial Sequence: Synthetic oligonucleotide
  Target: LAMA2; (+) strand; PAM type: NRG; PAM sequence: TAG
gaaaatactcacgtgctgtg

SEQ ID NO: 181813 - DNA, 20 bp, Artificial Sequence
  Description of Artificial Sequence: Synthetic oligonucleotide
  Target: LAMA2; (+) strand; PAM type: NRG; PAM sequence: TAG
gctcattataaaacataaca

SEQ ID NO: 181814 - DNA, 20 bp, Artificial Sequence
  Description of Artificial Sequence: Synthetic oligonucleotide
  Target: LAMA2; (+) strand; PAM type: NRG; PAM sequence: AAG
taaaacataacatagtctat

SEQ ID NO: 181815 - DNA, 20 bp, Artificial Sequence
  Description of Artificial Sequence: Synthetic oligonucleotide
  Target: LAMA2; (+) strand; PAM type: NRG; PAM sequence: AGG
aaaacataacatagtctata

SEQ ID NO: 181816 - DNA, 20 bp, Artificial Sequence
  Description of Artificial Sequence: Synthetic oligonucleotide
  Target: LAMA2; (+) strand; PAM type: NRG; PAM sequence: TGG
cataacatagtctataagga

SEQ ID NO: 181817 - DNA, 20 bp, Artificial Sequence
  Description of Artificial Sequence: Synthetic oligonucleotide
  Target: LAMA2; (+) strand; PAM type: NRG; PAM sequence: TGG
tagtctataaggatggtact

SEQ ID NO: 181818 - DNA, 20 bp, Artificial Sequence
  Description of Artificial Sequence: Synthetic oligonucleotide
  Target: LAMA2; (+) strand; PAM type: NRG; PAM sequence: TAG
aatgttaattacactctaat

SEQ ID NO: 181819 - DNA, 20 bp, Artificial Sequence
  Description of Artificial Sequence: Synthetic oligonucleotide
  Target: LAMA2; (+) strand; PAM type: NRG; PAM sequence: TGG
taattacactctaattagaa

SEQ ID NO: 181820 - DNA, 20 bp, Artificial Sequence
  Description of Artificial Sequence: Synthetic oligonucleotide
  Target: LAMA2; (+) strand; PAM type: NRG; PAM sequence: GGG
aattacactctaattagaat

SEQ ID NO: 181821 - DNA, 20 bp, Artificial Sequence
  Description of Artificial Sequence: Synthetic oligonucleotide
  Target: LAMA2; (+) strand; PAM type: NRG; PAM sequence: TGG
tagaatgggattaattgatt

SEQ ID NO: 181822 - DNA, 20 bp, Artificial Sequence
  Description of Artificial Sequence: Synthetic oligonucleotide
  Target: LAMA2; (+) strand; PAM type: NRG; PAM sequence: AAG
aattgatttggttaaaccgt

SEQ ID NO: 181823 - DNA, 20 bp, Artificial Sequence
  Description of Artificial Sequence: Synthetic oligonucleotide
  Target: LAMA2; (+) strand; PAM type: NRG; PAM sequence: GAG
ttgatttggttaaaccgtaa

SEQ ID NO: 181824 - DNA, 20 bp, Artificial Sequence
  Description of Artificial Sequence: Synthetic oligonucleotide
  Target: LAMA2; (+) strand; PAM type: NRG; PAM sequence: CAG
taaaccgtaagagtttatta

SEQ ID NO: 181825 - DNA, 20 bp, Artificial Sequence
  Description of Artificial Sequence: Synthetic oligonucleotide
  Target: LAMA2; (+) strand; PAM type: NRG; PAM sequence: TAG
aattttttgttttgtttaat

SEQ ID NO: 181826 - DNA, 20 bp, Artificial Sequence
  Description of Artificial Sequence: Synthetic oligonucleotide
  Target: LAMA2; (+) strand; PAM type: NRG; PAM sequence: TGG
tttgttttgtttaattagtt

SEQ ID NO: 181827 - DNA, 20 bp, Artificial Sequence
  Description of Artificial Sequence: Synthetic oligonucleotide
  Target: LAMA2; (+) strand; PAM type: NRG; PAM sequence: AAG
aattagtttggtatttttta

SEQ ID NO: 181828 - DNA, 20 bp, Artificial Sequence
  Description of Artificial Sequence: Synthetic oligonucleotide
  Target: LAMA2; (+) strand; PAM type: NRG; PAM sequence: AGG
attagtttggtattttttaa

SEQ ID NO: 181829 - DNA, 20 bp, Artificial Sequence
  Description of Artificial Sequence: Synthetic oligonucleotide
  Target: LAMA2; (+) strand; PAM type: NRG; PAM sequence: GGG
ttagtttggtattttttaaa

SEQ ID NO: 181830 - DNA, 20 bp, Artificial Sequence
  Description of Artificial Sequence: Synthetic oligonucleotide
  Target: LAMA2; (+) strand; PAM type: NRG; PAM sequence: AAG
gtattttttaaagggtataa

SEQ ID NO: 181831 - DNA, 20 bp, Artificial Sequence
  Description of Artificial Sequence: Synthetic oligonucleotide
  Target: LAMA2; (+) strand; PAM type: NRG; PAM sequence: CAG
aagggtataaaagttctgtc

SEQ ID NO: 181832 - DNA, 20 bp, Artificial Sequence
  Description of Artificial Sequence: Synthetic oligonucleotide
  Target: LAMA2; (+) strand; PAM type: NRG; PAM sequence: AGG
agggtataaaagttctgtcc

SEQ ID NO: 181833 - DNA, 20 bp, Artificial Sequence
  Description of Artificial Sequence: Synthetic oligonucleotide
  Target: LAMA2; (+) strand; PAM type: NRG; PAM sequence: AAG
ccaggtgtttctactccaaa

SEQ ID NO: 181834 - DNA, 20 bp, Artificial Sequence
  Description of Artificial Sequence: Synthetic oligonucleotide
  Target: LAMA2; (+) strand; PAM type: NRG; PAM sequence: CAG
gtgtttctactccaaaaaga

SEQ ID NO: 181835 - DNA, 20 bp, Artificial Sequence
  Description of Artificial Sequence: Synthetic oligonucleotide
  Target: LAMA2; (+) strand; PAM type: NRG; PAM sequence: TGG
ccaaaaagacagattatgtt

SEQ ID NO: 181836 - DNA, 20 bp, Artificial Sequence
  Description of Artificial Sequence: Synthetic oligonucleotide
  Target: LAMA2; (+) strand; PAM type: NRG; PAM sequence: CAG
gattatgtttggaaaaatcc

SEQ ID NO: 181837 - DNA, 20 bp, Artificial Sequence
  Description of Artificial Sequence: Synthetic oligonucleotide
  Target: LAMA2; (+) strand; PAM type: NRG; PAM sequence: TAG
tgtttggaaaaatcccagaa

SEQ ID NO: 181838 - DNA, 20 bp, Artificial Sequence
  Description of Artificial Sequence: Synthetic oligonucleotide
  Target: LAMA2; (+) strand; PAM type: NRG; PAM sequence: AAG
aaaatcccagaatagctgaa

SEQ ID NO: 181839 - DNA, 20 bp, Artificial Sequence
  Description of Artificial Sequence: Synthetic oligonucleotide
  Target: LAMA2; (+) strand; PAM type: NRG; PAM sequence: TGG
agaatagctgaaaagtgtga

SEQ ID NO: 181840 - DNA, 20 bp, Artificial Sequence
  Description of Artificial Sequence: Synthetic oligonucleotide
  Target: LAMA2; (+) strand; PAM type: NRG; PAM sequence: CAG
tagctgaaaagtgtgatggt

SEQ ID NO: 181841 - DNA, 20 bp, Artificial Sequence
  Description of Artificial Sequence: Synthetic oligonucleotide
  Target: LAMA2; (+) strand; PAM type: NRG; PAM sequence: GAG
ttattttcacatttctaaac

SEQ ID NO: 181842 - DNA, 20 bp, Artificial Sequence
  Description of Artificial Sequence: Synthetic oligonucleotide
  Target: LAMA2; (+) strand; PAM type: NRG; PAM sequence: CAG
ttttcacatttctaaacgag

SEQ ID NO: 181843 - DNA, 20 bp, Artificial Sequence
  Description of Artificial Sequence: Synthetic oligonucleotide
  Target: LAMA2; (+) strand; PAM type: NRG; PAM sequence: AAG
catttctaaacgagcagtga

SEQ ID NO: 181844 - DNA, 20 bp, Artificial Sequence
  Description of Artificial Sequence: Synthetic oligonucleotide
  Target: LAMA2; (+) strand; PAM type: NRG; PAM sequence: CAG
ctaaacgagcagtgaaagtt

SEQ ID NO: 181845 - DNA, 20 bp, Artificial Sequence
  Description of Artificial Sequence: Synthetic oligonucleotide
  Target: LAMA2; (+) strand; PAM type: NRG; PAM sequence: CAG
agttcagtctcattctatga

SEQ ID NO: 181846 - DNA, 20 bp, Artificial Sequence
  Description of Artificial Sequence: Synthetic oligonucleotide
  Target: LAMA2; (+) strand; PAM type: NRG; PAM sequence: TAG
cagtctcattctatgacagc

SEQ ID NO: 181847 - DNA, 20 bp, Artificial Sequence
  Description of Artificial Sequence: Synthetic oligonucleotide
  Target: LAMA2; (+) strand; PAM type: NRG; PAM sequence: CAG
attctatgacagctagtgtg

SEQ ID NO: 181848 - DNA, 20 bp, Artificial Sequence
  Description of Artificial Sequence: Synthetic oligonucleotide
  Target: LAMA2; (+) strand; PAM type: NRG; PAM sequence: AGG
ttctatgacagctagtgtgc

SEQ ID NO: 181849 - DNA, 20 bp, Artificial Sequence
  Description of Artificial Sequence: Synthetic oligonucleotide
  Target: LAMA2; (+) strand; PAM type: NRG; PAM sequence: TAG
tctccccaaatctaaactca

SEQ ID NO: 181850 - DNA, 20 bp, Artificial Sequence
  Description of Artificial Sequence: Synthetic oligonucleotide
  Target: LAMA2; (+) strand; PAM type: NRG; PAM sequence: AAG
caaatctaaactcatagatg

SEQ ID NO: 181851 - DNA, 20 bp, Artificial Sequence
  Description of Artificial Sequence: Synthetic oligonucleotide
  Target: LAMA2; (+) strand; PAM type: NRG; PAM sequence: GAG
caactgtctaattatctgat

SEQ ID NO: 181852 - DNA, 20 bp, Artificial Sequence
  Description of Artificial Sequence: Synthetic oligonucleotide
  Target: LAMA2; (+) strand; PAM type: NRG; PAM sequence: TGG
taattatctgatgagcttca

SEQ ID NO: 181853 - DNA, 20 bp, Artificial Sequence
  Description of Artificial Sequence: Synthetic oligonucleotide
  Target: LAMA2; (+) strand; PAM type: NRG; PAM sequence: TGG
gcttcatggtgcaaataaat

SEQ ID NO: 181854 - DNA, 20 bp, Artificial Sequence
  Description of Artificial Sequence: Synthetic oligonucleotide
  Target: LAMA2; (+) strand; PAM type: NRG; PAM sequence: TAG
tcattgtaatgtatttgtgt

SEQ ID NO: 181855 - DNA, 20 bp, Artificial Sequence
  Description of Artificial Sequence: Synthetic oligonucleotide
  Target: LAMA2; (+) strand; PAM type: NRG; PAM sequence: AAG
gtgttagaaaaataaattta

SEQ ID NO: 181856 - DNA, 20 bp, Artificial Sequence
  Description of Artificial Sequence: Synthetic oligonucleotide
  Target: LAMA2; (+) strand; PAM type: NRG; PAM sequence: AAG
aaaaataaatttaaagtgtc

SEQ ID NO: 181857 - DNA, 20 bp, Artificial Sequence
  Description of Artificial Sequence: Synthetic oligonucleotide
  Target: LAMA2; (+) strand; PAM type: NRG; PAM sequence: CAG
ataaatttaaagtgtcaagt

SEQ ID NO: 181858 - DNA, 20 bp, Artificial Sequence
  Description of Artificial Sequence: Synthetic oligonucleotide
  Target: LAMA2; (+) strand; PAM type: NRG; PAM sequence: TAG
cattacaaatcaaatttaaa

SEQ ID NO: 181859 - DNA, 20 bp, Artificial Sequence
  Description of Artificial Sequence: Synthetic oligonucleotide
  Target: LAMA2; (+) strand; PAM type: NRG; PAM sequence: CAG
atcaaatttaaatagtacca

SEQ ID NO: 181860 - DNA, 20 bp, Artificial Sequence
  Description of Artificial Sequence: Synthetic oligonucleotide
  Target: LAMA2; (+) strand; PAM type: NRG; PAM sequence: TAG
atagtaccacagttattacc

SEQ ID NO: 181861 - DNA, 20 bp, Artificial Sequence
  Description of Artificial Sequence: Synthetic oligonucleotide
  Target: LAMA2; (+) strand; PAM type: NRG; PAM sequence: CAG
ttacctagaaattcatttgc

SEQ ID NO: 181862 - DNA, 20 bp, Artificial Sequence
  Description of Artificial Sequence: Synthetic oligonucleotide
  Target: LAMA2; (+) strand; PAM type: NRG; PAM sequence: AAG
atttgccagtcattcaccaa

SEQ ID NO: 181863 - DNA, 20 bp, Artificial Sequence
  Description of Artificial Sequence: Synthetic oligonucleotide
  Target: LAMA2; (+) strand; PAM type: NRG; PAM sequence: GAG
tcattcaccaaaagtttgtt

SEQ ID NO: 181864 - DNA, 20 bp, Artificial Sequence
  Description of Artificial Sequence: Synthetic oligonucleotide
  Target: LAMA2; (+) strand; PAM type: NRG; PAM sequence: CAG
gttgagtatctactatgtga

SEQ ID NO: 181865 - DNA, 20 bp, Artificial Sequence
  Description of Artificial Sequence: Synthetic oligonucleotide
  Target: LAMA2; (+) strand; PAM type: NRG; PAM sequence: AGG
ttgagtatctactatgtgac

SEQ ID NO: 181866 - DNA, 20 bp, Artificial Sequence
  Description of Artificial Sequence: Synthetic oligonucleotide
  Target: LAMA2; (+) strand; PAM type: NRG; PAM sequence: TAG
acaggctccataccaaatac

SEQ ID NO: 181867 - DNA, 20 bp, Artificial Sequence
  Description of Artificial Sequence: Synthetic oligonucleotide
  Target: LAMA2; (+) strand; PAM type: NRG; PAM sequence: AGG
caggctccataccaaatact

SEQ ID NO: 181868 - DNA, 20 bp, Artificial Sequence
  Description of Artificial Sequence: Synthetic oligonucleotide
  Target: LAMA2; (+) strand; PAM type: NRG; PAM sequence: CAG
cataccaaatactaggaatc

SEQ ID NO: 181869 - DNA, 20 bp, Artificial Sequence
  Description of Artificial Sequence: Synthetic oligonucleotide
  Target: LAMA2; (+) strand; PAM type: NRG; PAM sequence: TGG
accaaatactaggaatccag

SEQ ID NO: 181870 - DNA, 20 bp, Artificial Sequence
  Description of Artificial Sequence: Synthetic oligonucleotide
  Target: LAMA2; (+) strand; PAM type: NRG; PAM sequence: AAG
tccagtggttgttcaaatct

SEQ ID NO: 181871 - DNA, 20 bp, Artificial Sequence
  Description of Artificial Sequence: Synthetic oligonucleotide
  Target: LAMA2; (+) strand; PAM type: NRG; PAM sequence: AAG
aaatctaagatttgctttac

SEQ ID NO: 181872 - DNA, 20 bp, Artificial Sequence
  Description of Artificial Sequence: Synthetic oligonucleotide
  Target: LAMA2; (+) strand; PAM type: NRG; PAM sequence: GAG
atcattaaccatatattatt

SEQ ID NO: 181873 - DNA, 20 bp, Artificial Sequence
  Description of Artificial Sequence: Synthetic oligonucleotide
  Target: LAMA2; (+) strand; PAM type: NRG; PAM sequence: CAG
attattgagtgaattaaata

SEQ ID NO: 181874 - DNA, 20 bp, Artificial Sequence
  Description of Artificial Sequence: Synthetic oligonucleotide
  Target: LAMA2; (+) strand; PAM type: NRG; PAM sequence: AAG
aattaaatacagccaaacct

SEQ ID NO: 181875 - DNA, 20 bp, Artificial Sequence
  Description of Artificial Sequence: Synthetic oligonucleotide
  Target: LAMA2; (+) strand; PAM type: NRG; PAM sequence: AGG
attaaatacagccaaaccta

SEQ ID NO: 181876 - DNA, 20 bp, Artificial Sequence
  Description of Artificial Sequence: Synthetic oligonucleotide
  Target: LAMA2; (+) strand; PAM type: NRG; PAM sequence: TAG
aacctaaggttattcaaatc

SEQ ID NO: 181877 - DNA, 20 bp, Artificial Sequence
  Description of Artificial Sequence: Synthetic oligonucleotide
  Target: LAMA2; (+) strand; PAM type: NRG; PAM sequence: TAG
aaatctagcttcatttattc

SEQ ID NO: 181878 - DNA, 20 bp, Artificial Sequence
  Description of Artificial Sequence: Synthetic oligonucleotide
  Target: LAMA2; (+) strand; PAM type: NRG; PAM sequence: TAG
aattatcataaaataatttt

SEQ ID NO: 181879 - DNA, 20 bp, Artificial Sequence
  Description of Artificial Sequence: Synthetic oligonucleotide
  Target: LAMA2; (+) strand; PAM type: NRG; PAM sequence: AGG
attatcataaaataattttt

SEQ ID NO: 181880 - DNA, 20 bp, Artificial Sequence
  Description of Artificial Sequence: Synthetic oligonucleotide
  Target: LAMA2; (+) strand; PAM type: NRG; PAM sequence: AAG
atttttaggaattatctata

SEQ ID NO: 181881 - DNA, 20 bp, Artificial Sequence
  Description of Artificial Sequence: Synthetic oligonucleotide
  Target: LAMA2; (+) strand; PAM type: NRG; PAM sequence: AGG
tttttaggaattatctataa

SEQ ID NO: 181882 - DNA, 20 bp, Artificial Sequence
  Description of Artificial Sequence: Synthetic oligonucleotide
  Target: LAMA2; (+) strand; PAM type: NRG; PAM sequence: CAG
atgtttttactttcatgata

SEQ ID NO: 181883 - DNA, 20 bp, Artificial Sequence
  Description of Artificial Sequence: Synthetic oligonucleotide
  Target: LAMA2; (+) strand; PAM type: NRG; PAM sequence: CAG
gatacagcattgcataatta

SEQ ID NO: 181884 - DNA, 20 bp, Artificial Sequence
  Description of Artificial Sequence: Synthetic oligonucleotide
  Target: LAMA2; (+) strand; PAM type: NRG; PAM sequence: TGG
attacagtatactatttcca

SEQ ID NO: 181885 - DNA, 20 bp, Artificial Sequence
  Description of Artificial Sequence: Synthetic oligonucleotide
  Target: LAMA2; (+) strand; PAM type: NRG; PAM sequence: TGG
agtatactatttccatggtg

SEQ ID NO: 181886 - DNA, 20 bp, Artificial Sequence
  Description of Artificial Sequence: Synthetic oligonucleotide
  Target: LAMA2; (+) strand; PAM type: NRG; PAM sequence: CAG
tgtggcacattatttcaaaa

SEQ ID NO: 181887 - DNA, 20 bp, Artificial Sequence
  Description of Artificial Sequence: Synthetic oligonucleotide
  Target: LAMA2; (+) strand; PAM type: NRG; PAM sequence: TAG
cattatttcaaaacagccat

SEQ ID NO: 181888 - DNA, 20 bp, Artificial Sequence
  Description of Artificial Sequence: Synthetic oligonucleotide
  Target: LAMA2; (+) strand; PAM type: NRG; PAM sequence: GAG
ttatttcaaaacagccatta

SEQ ID NO: 181889 - DNA, 20 bp, Artificial Sequence
  Description of Artificial Sequence: Synthetic oligonucleotide
  Target: LAMA2; (+) strand; PAM type: NRG; PAM sequence: AGG
tatttcaaaacagccattag

SEQ ID NO: 181890 - DNA, 20 bp, Artificial Sequence
  Description of Artificial Sequence: Synthetic oligonucleotide
  Target: LAMA2; (+) strand; PAM type: NRG; PAM sequence: AAG
aggtatatttgtgattgata

SEQ ID NO: 181891 - DNA, 20 bp, Artificial Sequence
  Description of Artificial Sequence: Synthetic oligonucleotide
  Target: LAMA2; (+) strand; PAM type: NRG; PAM sequence: AGG
ggtatatttgtgattgataa

SEQ ID NO: 181892 - DNA, 20 bp, Artificial Sequence
  Description of Artificial Sequence: Synthetic oligonucleotide
  Target: LAMA2; (+) strand; PAM type: NRG; PAM sequence: TAG
ataaaggaaccaaacattca

SEQ ID NO: 181893 - DNA, 20 bp, Artificial Sequence
  Description of Artificial Sequence: Synthetic oligonucleotide
  Target: LAMA2; (+) strand; PAM type: NRG; PAM sequence: CAG
gttacctgttattttgcctg

SEQ ID NO: 181894 - DNA, 20 bp, Artificial Sequence
  Description of Artificial Sequence: Synthetic oligonucleotide
  Target: LAMA2; (+) strand; PAM type: NRG; PAM sequence: CAG
cctgttattttgcctgcaga

SEQ ID NO: 181895 - DNA, 20 bp, Artificial Sequence
  Description of Artificial Sequence: Synthetic oligonucleotide
  Target: LAMA2; (+) strand; PAM type: NRG; PAM sequence: AGG
ctgttattttgcctgcagac

SEQ ID NO: 181896 - DNA, 20 bp, Artificial Sequence
  Description of Artificial Sequence: Synthetic oligonucleotide
  Target: LAMA2; (+) strand; PAM type: NRG; PAM sequence: CAG
tttgcctgcagacaggttct

SEQ ID NO: 181897 - DNA, 20 bp, Artificial Sequence
  Description of Artificial Sequence: Synthetic oligonucleotide
  Target: LAMA2; (+) strand; PAM type: NRG; PAM sequence: AAG
gacaggttctcagtatgaca

SEQ ID NO: 181898 - DNA, 20 bp, Artificial Sequence
  Description of Artificial Sequence: Synthetic oligonucleotide
  Target: LAMA2; (+) strand; PAM type: NRG; PAM sequence: AAG
ctcagtatgacaaagtgcaa

SEQ ID NO: 181899 - DNA, 20 bp, Artificial Sequence
  Description of Artificial Sequence: Synthetic oligonucleotide
  Target: LAMA2; (+) strand; PAM type: NRG; PAM sequence: TGG
atgacaaagtgcaaaagatg

SEQ ID NO: 181900 - DNA, 20 bp, Artificial Sequence
  Description of Artificial Sequence: Synthetic oligonucleotide
  Target: LAMA2; (+) strand; PAM type: NRG; PAM sequence: AAG
ttatttttacatgcattgtt

SEQ ID NO: 181901 - DNA, 20 bp, Artificial Sequence
  Description of Artificial Sequence: Synthetic oligonucleotide
  Target: LAMA2; (+) strand; PAM type: NRG; PAM sequence: AAG
ttacatgcattgttaagctc

SEQ ID NO: 181902 - DNA, 20 bp, Artificial Sequence
  Description of Artificial Sequence: Synthetic oligonucleotide
  Target: LAMA2; (+) strand; PAM type: NRG; PAM sequence: GAG
ttgttaagctcaagctgttt

SEQ ID NO: 181903 - DNA, 20 bp, Artificial Sequence
  Description of Artificial Sequence: Synthetic oligonucleotide
  Target: LAMA2; (+) strand; PAM type: NRG; PAM sequence: GAG
gttaagctcaagctgtttga

SEQ ID NO: 181904 - DNA, 20 bp, Artificial Sequence
  Description of Artificial Sequence: Synthetic oligonucleotide
  Target: LAMA2; (+) strand; PAM type: NRG; PAM sequence: AGG
ttaagctcaagctgtttgag

SEQ ID NO: 181905 - DNA, 20 bp, Artificial Sequence
  Description of Artificial Sequence: Synthetic oligonucleotide
  Target: LAMA2; (+) strand; PAM type: NRG; PAM sequence: AAG
gtttgagaggcaatatttat

SEQ ID NO: 181906 - DNA, 20 bp, Artificial Sequence
  Description of Artificial Sequence: Synthetic oligonucleotide
  Target: LAMA2; (+) strand; PAM type: NRG; PAM sequence: CAG
taagccattcatgaacacta

SEQ ID NO: 181907 - DNA, 20 bp, Artificial Sequence
  Description of Artificial Sequence: Synthetic oligonucleotide
  Target: LAMA2; (+) strand; PAM type: NRG; PAM sequence: TAG
cattcatgaacactacagaa

SEQ ID NO: 181908 - DNA, 20 bp, Artificial Sequence
  Description of Artificial Sequence: Synthetic oligonucleotide
  Target: LAMA2; (+) strand; PAM type: NRG; PAM sequence: TAG
ttgtacattttcccatttat

SEQ ID NO: 181909 - DNA, 20 bp, Artificial Sequence
  Description of Artificial Sequence: Synthetic oligonucleotide
  Target: LAMA2; (+) strand; PAM type: NRG; PAM sequence: AAG
ttcccatttattagattgat

SEQ ID NO: 181910 - DNA, 20 bp, Artificial Sequence
  Description of Artificial Sequence: Synthetic oligonucleotide
  Target: LAMA2; (+) strand; PAM type: NRG; PAM sequence: AAG
tttattagattgataagaac

SEQ ID NO: 181911 - DNA, 20 bp, Artificial Sequence
  Description of Artificial Sequence: Synthetic oligonucleotide
  Target: LAMA2; (+) strand; PAM type: NRG; PAM sequence: AAG
tactttaaattcatatttca

SEQ ID NO: 181912 - DNA, 20 bp, Artificial Sequence
  Description of Artificial Sequence: Synthetic oligonucleotide
  Target: LAMA2; (+) strand; PAM type: NRG; PAM sequence: AAG
tttcaaagtaaaaattttcc

SEQ ID NO: 181913 - DNA, 20 bp, Artificial Sequence
  Description of Artificial Sequence: Synthetic oligonucleotide
  Target: LAMA2; (+) strand; PAM type: NRG; PAM sequence: GAG
attttccaagctgatattgt

SEQ ID NO: 181914 - DNA, 20 bp, Artificial Sequence
  Description of Artificial Sequence: Synthetic oligonucleotide
  Target: LAMA2; (+) strand; PAM type: NRG; PAM sequence: CGG
caagctgatattgtgagcta

SEQ ID NO: 181915 - DNA, 20 bp, Artificial Sequence
  Description of Artificial Sequence: Synthetic oligonucleotide
  Target: LAMA2; (+) strand; PAM type: NRG; PAM sequence: AAG
attctaatttcactgccgtc

SEQ ID NO: 181916 - DNA, 20 bp, Artificial Sequence
  Description of Artificial Sequence: Synthetic oligonucleotide
  Target: LAMA2; (+) strand; PAM type: NRG; PAM sequence: AGG
ttctaatttcactgccgtca

SEQ ID NO: 181917 - DNA, 20 bp, Artificial Sequence
  Description of Artificial Sequence: Synthetic oligonucleotide
  Target: LAMA2; (+) strand; PAM type: NRG; PAM sequence: GGG
tctaatttcactgccgtcaa

SEQ ID NO: 181918 - DNA, 20 bp, Artificial Sequence
  Description of Artificial Sequence: Synthetic oligonucleotide
  Target: LAMA2; (+) strand; PAM type: NRG; PAM sequence: AAG
ttcactgccgtcaagggtat

SEQ ID NO: 181919 - DNA, 20 bp, Artificial Sequence
  Description of Artificial Sequence: Synthetic oligonucleotide
  Target: LAMA2; (+) strand; PAM type: NRG; PAM sequence: TAG
caagggtataagtctatttt

SEQ ID NO: 181920 - DNA, 20 bp, Artificial Sequence
  Description of Artificial Sequence: Synthetic oligonucleotide
  Target: LAMA2; (+) strand; PAM type: NRG; PAM sequence: TGG
aagtctatttttagttctat

SEQ ID NO: 181921 - DNA, 20 bp, Artificial Sequence
  Description of Artificial Sequence: Synthetic oligonucleotide
  Target: LAMA2; (+) strand; PAM type: NRG; PAM sequence: GGG
agtctatttttagttctatt

SEQ ID NO: 181922 - DNA, 20 bp, Artificial Sequence
  Description of Artificial Sequence: Synthetic oligonucleotide
  Target: LAMA2; (+) strand; PAM type: NRG; PAM sequence: GGG
gtctatttttagttctattg

SEQ ID NO: 181923 - DNA, 20 bp, Artificial Sequence
  Description of Artificial Sequence: Synthetic oligonucleotide
  Target: LAMA2; (+) strand; PAM type: NRG; PAM sequence: TAG
ttttgcatttctttcctttg

SEQ ID NO: 181924 - DNA, 20 bp, Artificial Sequence
  Description of Artificial Sequence: Synthetic oligonucleotide
  Target: LAMA2; (+) strand; PAM type: NRG; PAM sequence: AAG
ccctgtgaaatgatttttta

SEQ ID NO: 181925 - DNA, 20 bp, Artificial Sequence
  Description of Artificial Sequence: Synthetic oligonucleotide
  Target: LAMA2; (+) strand; PAM type: NRG; PAM sequence: AAG
tttttaaagatttatgatta

SEQ ID NO: 181926 - DNA, 20 bp, Artificial Sequence
  Description of Artificial Sequence: Synthetic oligonucleotide
  Target: LAMA2; (+) strand; PAM type: NRG; PAM sequence: AAG
ctaaatgaaaatgtaattat

SEQ ID NO: 181927 - DNA, 20 bp, Artificial Sequence
  Description of Artificial Sequence: Synthetic oligonucleotide
  Target: LAMA2; (+) strand; PAM type: NRG; PAM sequence: TAG
ttttcctctttcccgttatc

SEQ ID NO: 181928 - DNA, 20 bp, Artificial Sequence
  Description of Artificial Sequence: Synthetic oligonucleotide
  Target: LAMA2; (+) strand; PAM type: NRG; PAM sequence: AAG
tttcccgttatctagtatga

SEQ ID NO: 181929 - DNA, 20 bp, Artificial Sequence
  Description of Artificial Sequence: Synthetic oligonucleotide
  Target: LAMA2; (+) strand; PAM type: NRG; PAM sequence: AAG
ccgttatctagtatgaaagc

SEQ ID NO: 181930 - DNA, 20 bp, Artificial Sequence
  Description of Artificial Sequence: Synthetic oligonucleotide
  Target: LAMA2; (+) strand; PAM type: NRG; PAM sequence: AGG
cgttatctagtatgaaagca

SEQ ID NO: 181931 - DNA, 20 bp, Artificial Sequence
  Description of Artificial Sequence: Synthetic oligonucleotide
  Target: LAMA2; (+) strand; PAM type: NRG; PAM sequence: GAG
aatttatgcatgccttcttc

SEQ ID NO: 181932 - DNA, 20 bp, Artificial Sequence
  Description of Artificial Sequence: Synthetic oligonucleotide
  Target: LAMA2; (+) strand; PAM type: NRG; PAM sequence: TGG
gcatgccttcttcgagtgca

SEQ ID NO: 181933 - DNA, 20 bp, Artificial Sequence
  Description of Artificial Sequence: Synthetic oligonucleotide
  Target: LAMA2; (+) strand; PAM type: NRG; PAM sequence: GGG
catgccttcttcgagtgcat

SEQ ID NO: 181934 - DNA, 20 bp, Artificial Sequence
  Description of Artificial Sequence: Synthetic oligonucleotide
  Target: LAMA2; (+) strand; PAM type: NRG; PAM sequence: TGG
ccttcttcgagtgcatgggt

SEQ ID NO: 181935 - DNA, 20 bp, Artificial Sequence
  Description of Artificial Sequence: Synthetic oligonucleotide
  Target: LAMA2; (+) strand; PAM type: NRG; PAM sequence: GGG
cttcttcgagtgcatgggtt

SEQ ID NO: 181936 - DNA, 20 bp, Artificial Sequence
  Description of Artificial Sequence: Synthetic oligonucleotide
  Target: LAMA2; (+) strand; PAM type: NRG; PAM sequence: TGG
gtgcatgggttgggtaaatg

SEQ ID NO: 181937 - DNA, 20 bp, Artificial Sequence
  Description of Artificial Sequence: Synthetic oligonucleotide
  Target: LAMA2; (+) strand; PAM type: NRG; PAM sequence: TAG
gttgggtaaatgtggcttct

SEQ ID NO: 181938 - DNA, 20 bp, Artificial Sequence
  Description of Artificial Sequence: Synthetic oligonucleotide
  Target: LAMA2; (+) strand; PAM type: NRG; PAM sequence: AAG
taaatgtggcttcttagata

SEQ ID NO: 181939 - DNA, 20 bp, Artificial Sequence
  Description of Artificial Sequence: Synthetic oligonucleotide
  Target: LAMA2; (+) strand; PAM type: NRG; PAM sequence: CAG
atgtggcttcttagataaag

SEQ ID NO: 181940 - DNA, 20 bp, Artificial Sequence
  Description of Artificial Sequence: Synthetic oligonucleotide
  Target: LAMA2; (+) strand; PAM type: NRG; PAM sequence: CAG
tcttagataaagcagccgtg

SEQ ID NO: 181941 - DNA, 20 bp, Artificial Sequence
  Description of Artificial Sequence: Synthetic oligonucleotide
  Target: LAMA2; (+) strand; PAM type: NRG; PAM sequence: AAG
tagataaagcagccgtgcag

SEQ ID NO: 181942 - DNA, 20 bp, Artificial Sequence
  Description of Artificial Sequence: Synthetic oligonucleotide
  Target: LAMA2; (+) strand; PAM type: NRG; PAM sequence: CAG
ataaagcagccgtgcagaag

SEQ ID NO: 181943 - DNA, 20 bp, Artificial Sequence
  Description of Artificial Sequence: Synthetic oligonucleotide
  Target: LAMA2; (+) strand; PAM type: NRG; PAM sequence: GAG
aaagcagccgtgcagaagca

SEQ ID NO: 181944 - DNA, 20 bp, Artificial Sequence
  Description of Artificial Sequence: Synthetic oligonucleotide
  Target: LAMA2; (+) strand; PAM type: NRG; PAM sequence: CAG
gtgcagaagcagagcaacac

SEQ ID NO: 181945 - DNA, 20 bp, Artificial Sequence
  Description of Artificial Sequence: Synthetic oligonucleotide
  Target: LAMA2; (+) strand; PAM type: NRG; PAM sequence: CAG
gaagcagagcaacaccagta

SEQ ID NO: 181946 - DNA, 20 bp, Artificial Sequence
  Description of Artificial Sequence: Synthetic oligonucleotide
  Target: LAMA2; (+) strand; PAM type: NRG; PAM sequence: TAG
caccagtacagctttgttca

SEQ ID NO: 181947 - DNA, 20 bp, Artificial Sequence
  Description of Artificial Sequence: Synthetic oligonucleotide
  Target: LAMA2; (+) strand; PAM type: NRG; PAM sequence: GAG
ttgttcatagtatgtttcac

SEQ ID NO: 181948 - DNA, 20 bp, Artificial Sequence
  Description of Artificial Sequence: Synthetic oligonucleotide
  Target: LAMA2; (+) strand; PAM type: NRG; PAM sequence: AAG
tcatagtatgtttcacgagc

SEQ ID NO: 181949 - DNA, 20 bp, Artificial Sequence
  Description of Artificial Sequence: Synthetic oligonucleotide
  Target: LAMA2; (+) strand; PAM type: NRG; PAM sequence: GAG
gagcaagccgtgcattctgt

SEQ ID NO: 181950 - DNA, 20 bp, Artificial Sequence
  Description of Artificial Sequence: Synthetic oligonucleotide
  Target: LAMA2; (+) strand; PAM type: NRG; PAM sequence: GAG
gcaagccgtgcattctgtga

SEQ ID NO: 181951 - DNA, 20 bp, Artificial Sequence
  Description of Artificial Sequence: Synthetic oligonucleotide
  Target: LAMA2; (+) strand; PAM type: NRG; PAM sequence: TGG
gttctcctgctgccccttgc

SEQ ID NO: 181952 - DNA, 20 bp, Artificial Sequence
  Description of Artificial Sequence: Synthetic oligonucleotide
  Target: LAMA2; (+) strand; PAM type: NRG; PAM sequence: CAG
ttctgctgcttacccaccat

SEQ ID NO: 181953 - DNA, 20 bp, Artificial Sequence
  Description of Artificial Sequence: Synthetic oligonucleotide
  Target: LAMA2; (+) strand; PAM type: NRG; PAM sequence: TGG
gctgcttacccaccatcagt

SEQ ID NO: 181954 - DNA, 20 bp, Artificial Sequence
  Description of Artificial Sequence: Synthetic oligonucleotide
  Target: LAMA2; (+) strand; PAM type: NRG; PAM sequence: GGG
ctgcttacccaccatcagtt

SEQ ID NO: 181955 - DNA, 20 bp, Artificial Sequence
  Description of Artificial Sequence: Synthetic oligonucleotide
  Target: LAMA2; (+) strand; PAM type: NRG; PAM sequence: GAG
catcagttgggctgcaattt

SEQ ID NO: 181956 - DNA, 20 bp, Artificial Sequence
  Description of Artificial Sequence: Synthetic oligonucleotide
  Target: LAMA2; (+) strand; PAM type: NRG; PAM sequence: CAG
tgcaatttgagttgtctcac

SEQ ID NO: 181957 - DNA, 20 bp, Artificial Sequence
  Description of Artificial Sequence: Synthetic oligonucleotide
  Target: LAMA2; (+) strand; PAM type: NRG; PAM sequence: CAG
aatttgagttgtctcaccag

SEQ ID NO: 181958 - DNA, 20 bp, Artificial Sequence
  Description of Artificial Sequence: Synthetic oligonucleotide
  Target: LAMA2; (+) strand; PAM type: NRG; PAM sequence: GAG
gttgtctcaccagcagtgat

SEQ ID NO: 181959 - DNA, 20 bp, Artificial Sequence
  Description of Artificial Sequence: Synthetic oligonucleotide
  Target: LAMA2; (+) strand; PAM type: NRG; PAM sequence: CAG
cttgttcaaccatctgcaca

SEQ ID NO: 181960 - DNA, 20 bp, Artificial Sequence
  Description of Artificial Sequence: Synthetic oligonucleotide
  Target: LAMA2; (+) strand; PAM type: NRG; PAM sequence: TGG
ccatctgcacacagtgcccc

SEQ ID NO: 181961 - DNA, 20 bp, Artificial Sequence
  Description of Artificial Sequence: Synthetic oligonucleotide
  Target: LAMA2; (+) strand; PAM type: NRG; PAM sequence: CAG
cacacagtgcccctggtgac

SEQ ID NO: 181962 - DNA, 20 bp, Artificial Sequence
  Description of Artificial Sequence: Synthetic oligonucleotide
  Target: LAMA2; (+) strand; PAM type: NRG; PAM sequence: CAG
acagtgcccctggtgaccag

SEQ ID NO: 181963 - DNA, 20 bp, Artificial Sequence
  Description of Artificial Sequence: Synthetic oligonucleotide
  Target: LAMA2; (+) strand; PAM type: NRG; PAM sequence: AAG
gaccagcagcacacactcaa

SEQ ID NO: 181964 - DNA, 20 bp, Artificial Sequence
  Description of Artificial Sequence: Synthetic oligonucleotide
  Target: LAMA2; (+) strand; PAM type: NRG; PAM sequence: AGG
accagcagcacacactcaaa

SEQ ID NO: 181965 - DNA, 20 bp, Artificial Sequence
  Description of Artificial Sequence: Synthetic oligonucleotide
  Target: LAMA2; (+) strand; PAM type: NRG; PAM sequence: CAG
agcagcacacactcaaaagg

SEQ ID NO: 181966 - DNA, 20 bp, Artificial Sequence
  Description of Artificial Sequence: Synthetic oligonucleotide
  Target: LAMA2; (+) strand; PAM type: NRG; PAM sequence: TGG
gcacacactcaaaaggcagc

SEQ ID NO: 181967 - DNA, 20 bp, Artificial Sequence
  Description of Artificial Sequence: Synthetic oligonucleotide
  Target: LAMA2; (+) strand; PAM type: NRG; PAM sequence: TGG
aaaggcagctggtcaatttc

SEQ ID NO: 181968 - DNA, 20 bp, Artificial Sequence
  Description of Artificial Sequence: Synthetic oligonucleotide
  Target: LAMA2; (+) strand; PAM type: NRG; PAM sequence: CAG
gctggtcaatttctggtaca

SEQ ID NO: 181969 - DNA, 20 bp, Artificial Sequence
  Description of Artificial Sequence: Synthetic oligonucleotide
  Target: LAMA2; (+) strand; PAM type: NRG; PAM sequence: TAG
tcaatttctggtacacagtc

SEQ ID NO: 181970 - DNA, 20 bp, Artificial Sequence
  Description of Artificial Sequence: Synthetic oligonucleotide
  Target: LAMA2; (+) strand; PAM type: NRG; PAM sequence: TGG
tctggtacacagtctagttc

SEQ ID NO: 181971 - DNA, 20 bp, Artificial Sequence
  Description of Artificial Sequence: Synthetic oligonucleotide
  Target: LAMA2; (+) strand; PAM type: NRG; PAM sequence: GGG
ctggtacacagtctagttct

SEQ ID NO: 181972 - DNA, 20 bp, Artificial Sequence
  Description of Artificial Sequence: Synthetic oligonucleotide
  Target: LAMA2; (+) strand; PAM type: NRG; PAM sequence: CGG
cagtctagttctgggaaaca

SEQ ID NO: 181973 - DNA, 20 bp, Artificial Sequence
  Description of Artificial Sequence: Synthetic oligonucleotide
  Target: LAMA2; (+) strand; PAM type: NRG; PAM sequence: AAG
tagttctgggaaacacggta

SEQ ID NO: 181974 - DNA, 20 bp, Artificial Sequence
  Description of Artificial Sequence: Synthetic oligonucleotide
  Target: LAMA2; (+) strand; PAM type: NRG; PAM sequence: TGG
ttctgggaaacacggtaaag

SEQ ID NO: 181975 - DNA, 20 bp, Artificial Sequence
  Description of Artificial Sequence: Synthetic oligonucleotide
  Target: LAMA2; (+) strand; PAM type: NRG; PAM sequence: GAG
acacggtaaagtggtctctt

SEQ ID NO: 181976 - DNA, 20 bp, Artificial Sequence
  Description of Artificial Sequence: Synthetic oligonucleotide
  Target: LAMA2; (+) strand; PAM type: NRG; PAM sequence: CGG
tggtctcttgagttgaaccc

SEQ ID NO: 181977 - DNA, 20 bp, Artificial Sequence
  Description of Artificial Sequence: Synthetic oligonucleotide
  Target: LAMA2; (+) strand; PAM type: NRG; PAM sequence: GGG
ggtctcttgagttgaacccc

SEQ ID NO: 181978 - DNA, 20 bp, Artificial Sequence
  Description of Artificial Sequence: Synthetic oligonucleotide
  Target: LAMA2; (+) strand; PAM type: NRG; PAM sequence: TGG
ttgagttgaaccccgggccc

SEQ ID NO: 181979 - DNA, 20 bp, Artificial Sequence
  Description of Artificial Sequence: Synthetic oligonucleotide
  Target: LAMA2; (+) strand; PAM type: NRG; PAM sequence: TAG
accccgggccctggcctccc

SEQ ID NO: 181980 - DNA, 20 bp, Artificial Sequence
  Description of Artificial Sequence: Synthetic oligonucleotide
  Target: LAMA2; (+) strand; PAM type: NRG; PAM sequence: AAG
tagtgccatgctgtctgctg

SEQ ID NO: 181981 - DNA, 20 bp, Artificial Sequence
  Description of Artificial Sequence: Synthetic oligonucleotide
  Target: LAMA2; (+) strand; PAM type: NRG; PAM sequence: CAG
cactgccttcttgctttttg

SEQ ID NO: 181982 - DNA, 20 bp, Artificial Sequence
  Description of Artificial Sequence: Synthetic oligonucleotide
  Target: LAMA2; (+) strand; PAM type: NRG; PAM sequence: AGG
actgccttcttgctttttgc

SEQ ID NO: 181983 - DNA, 20 bp, Artificial Sequence
  Description of Artificial Sequence: Synthetic oligonucleotide
  Target: LAMA2; (+) strand; PAM type: NRG; PAM sequence: CAG
tcttgctttttgcaggcctg

SEQ ID NO: 181984 - DNA, 20 bp, Artificial Sequence
  Description of Artificial Sequence: Synthetic oligonucleotide
  Target: LAMA2; (+) strand; PAM type: NRG; PAM sequence: CAG
cagatatgcaaacatttaca

SEQ ID NO: 181985 - DNA, 20 bp, Artificial Sequence
  Description of Artificial Sequence: Synthetic oligonucleotide
  Target: LAMA2; (+) strand; PAM type: NRG; PAM sequence: AAG
agcctttgcacctcttgtca

SEQ ID NO: 181986 - DNA, 20 bp, Artificial Sequence
  Description of Artificial Sequence: Synthetic oligonucleotide
  Target: LAMA2; (+) strand; PAM type: NRG; PAM sequence: TAG
ttgacatgtttatttaaaac

SEQ ID NO: 181987 - DNA, 20 bp, Artificial Sequence
  Description of Artificial Sequence: Synthetic oligonucleotide
  Target: LAMA2; (+) strand; PAM type: NRG; PAM sequence: TGG
tgtttatttaaaactagcta

SEQ ID NO: 181988 - DNA, 20 bp, Artificial Sequence
  Description of Artificial Sequence: Synthetic oligonucleotide
  Target: LAMA2; (+) strand; PAM type: NRG; PAM sequence: CAG
tttaaaactagctatggtgc

SEQ ID NO: 181989 - DNA, 20 bp, Artificial Sequence
  Description of Artificial Sequence: Synthetic oligonucleotide
  Target: LAMA2; (+) strand; PAM type: NRG; PAM sequence: AAG
actagctatggtgccagatg

SEQ ID NO: 181990 - DNA, 20 bp, Artificial Sequence
  Description of Artificial Sequence: Synthetic oligonucleotide
  Target: LAMA2; (+) strand; PAM type: NRG; PAM sequence: AGG
ctagctatggtgccagatga

SEQ ID NO: 181991 - DNA, 20 bp, Artificial Sequence
  Description of Artificial Sequence: Synthetic oligonucleotide
  Target: LAMA2; (+) strand; PAM type: NRG; PAM sequence: TGG
gtgccagatgaaggaatctc

SEQ ID NO: 181992 - DNA, 20 bp, Artificial Sequence
  Description of Artificial Sequence: Synthetic oligonucleotide
  Target: LAMA2; (+) strand; PAM type: NRG; PAM sequence: AAG
ggaaatactatatttaaaat

SEQ ID NO: 181993 - DNA, 20 bp, Artificial Sequence
  Description of Artificial Sequence: Synthetic oligonucleotide
  Target: LAMA2; (+) strand; PAM type: NRG; PAM sequence: TAG
aaaataagtatttgcgttaa

SEQ ID NO: 181994 - DNA, 20 bp, Artificial Sequence
  Description of Artificial Sequence: Synthetic oligonucleotide
  Target: LAMA2; (+) strand; PAM type: NRG; PAM sequence: AAG
aagtatttgcgttaatagta

SEQ ID NO: 181995 - DNA, 20 bp, Artificial Sequence
  Description of Artificial Sequence: Synthetic oligonucleotide
  Target: LAMA2; (+) strand; PAM type: NRG; PAM sequence: AAG
tatttgcgttaatagtaaag

SEQ ID NO: 181996 - DNA, 20 bp, Artificial Sequence
  Description of Artificial Sequence: Synthetic oligonucleotide
  Target: LAMA2; (+) strand; PAM type: NRG; PAM sequence: GAG
cgttaatagtaaagaagtgt

SEQ ID NO: 181997 - DNA, 20 bp, Artificial Sequence
  Description of Artificial Sequence: Synthetic oligonucleotide
  Target: LAMA2; (+) strand; PAM type: NRG; PAM sequence: TAG
aatagtaaagaagtgtgaga

SEQ ID NO: 181998 - DNA, 20 bp, Artificial Sequence
  Description of Artificial Sequence: Synthetic oligonucleotide
  Target: LAMA2; (+) strand; PAM type: NRG; PAM sequence: TAG
gaagtgtgagatagttctcc

SEQ ID NO: 181999 - DNA, 20 bp, Artificial Sequence
  Description of Artificial Sequence: Synthetic oligonucleotide
  Target: LAMA2; (+) strand; PAM type: NRG; PAM sequence: CAG
agatagttctcctagcttct

SEQ ID NO: 182000 - DNA, 20 bp, Artificial Sequence
  Description of Artificial Sequence: Synthetic oligonucleotide
  Target: LAMA2; (+) strand; PAM type: NRG; PAM sequence: AGG
gatagttctcctagcttctc

SEQ ID NO: 182001 - DNA, 20 bp, Artificial Sequence
  Description of Artificial Sequence: Synthetic oligonucleotide
  Target: LAMA2; (+) strand; PAM type: NRG; PAM sequence: GAG
tagttctcctagcttctcag

SEQ ID NO: 182002 - DNA, 20 bp, Artificial Sequence
  Description of Artificial Sequence: Synthetic oligonucleotide
  Target: LAMA2; (+) strand; PAM type: NRG; PAM sequence: TAG
aggagcattttaattcttac

SEQ ID NO: 182003 - DNA, 20 bp, Artificial Sequence
  Description of Artificial Sequence: Synthetic oligonucleotide
  Target: LAMA2; (+) strand; PAM type: NRG; PAM sequence: TAG
attttaattcttactagcat

SEQ ID NO: 182004 - DNA, 20 bp, Artificial Sequence
  Description of Artificial Sequence: Synthetic oligonucleotide
  Target: LAMA2; (+) strand; PAM type: NRG; PAM sequence: AAG
tcttactagcattagcataa

SEQ ID NO: 182005 - DNA, 20 bp, Artificial Sequence
  Description of Artificial Sequence: Synthetic oligonucleotide
  Target: LAMA2; (+) strand; PAM type: NRG; PAM sequence: GAG
agcattagcataaaagctgt

SEQ ID NO: 182006 - DNA, 20 bp, Artificial Sequence
  Description of Artificial Sequence: Synthetic oligonucleotide
  Target: LAMA2; (+) strand; PAM type: NRG; PAM sequence: TGG
agcataaaagctgtgagcaa

SEQ ID NO: 182007 - DNA, 20 bp, Artificial Sequence
  Description of Artificial Sequence: Synthetic oligonucleotide
  Target: LAMA2; (+) strand; PAM type: NRG; PAM sequence: GGG
gcataaaagctgtgagcaat

SEQ ID NO: 182008 - DNA, 20 bp, Artificial Sequence
  Description of Artificial Sequence: Synthetic oligonucleotide
  Target: LAMA2; (+) strand; PAM type: NRG; PAM sequence: TGG
gagcaatgggcctccataaa

SEQ ID NO: 182009 - DNA, 20 bp, Artificial Sequence
  Description of Artificial Sequence: Synthetic oligonucleotide
  Target: LAMA2; (+) strand; PAM type: NRG; PAM sequence: CAG
ataaatggctgaacaaacct

SEQ ID NO: 182010 - DNA, 20 bp, Artificial Sequence
  Description of Artificial Sequence: Synthetic oligonucleotide
  Target: LAMA2; (+) strand; PAM type: NRG; PAM sequence: GAG
aaatggctgaacaaacctca

SEQ ID NO: 182011 - DNA, 20 bp, Artificial Sequence
  Description of Artificial Sequence: Synthetic oligonucleotide
  Target: LAMA2; (+) strand; PAM type: NRG; PAM sequence: CAG
gaacaaacctcagagatgtg

SEQ ID NO: 182012 - DNA, 20 bp, Artificial Sequence
  Description of Artificial Sequence: Synthetic oligonucleotide
  Target: LAMA2; (+) strand; PAM type: NRG; PAM sequence: AGG
aacaaacctcagagatgtgc

SEQ ID NO: 182013 - DNA, 20 bp, Artificial Sequence
  Description of Artificial Sequence: Synthetic oligonucleotide
  Target: LAMA2; (+) strand; PAM type: NRG; PAM sequence: GGG
acaaacctcagagatgtgca

SEQ ID NO: 182014 - DNA, 20 bp, Artificial Sequence
  Description of Artificial Sequence: Synthetic oligonucleotide
  Target: LAMA2; (+) strand; PAM type: NRG; PAM sequence: TGG
acctcagagatgtgcagggc

SEQ ID NO: 182015 - DNA, 20 bp, Artificial Sequence
  Description of Artificial Sequence: Synthetic oligonucleotide
  Target: LAMA2; (+) strand; PAM type: NRG; PAM sequence: TGG
tgtgcagggctggtatcctc

SEQ ID NO: 182016 - DNA, 20 bp, Artificial Sequence
  Description of Artificial Sequence: Synthetic oligonucleotide
  Target: LAMA2; (+) strand; PAM type: NRG; PAM sequence: TAG
cagggctggtatcctctggc

SEQ ID NO: 182017 - DNA, 20 bp, Artificial Sequence
  Description of Artificial Sequence: Synthetic oligonucleotide
  Target: LAMA2; (+) strand; PAM type: NRG; PAM sequence: GAG
gggctggtatcctctggcta

SEQ ID NO: 182018 - DNA, 20 bp, Artificial Sequence
  Description of Artificial Sequence: Synthetic oligonucleotide
  Target: LAMA2; (+) strand; PAM type: NRG; PAM sequence: AAG
tatcctctggctagagctaa

SEQ ID NO: 182019 - DNA, 20 bp, Artificial Sequence
  Description of Artificial Sequence: Synthetic oligonucleotide
  Target: LAMA2; (+) strand; PAM type: NRG; PAM sequence: TGG
tctggctagagctaaaagcc

SEQ ID NO: 182020 - DNA, 20 bp, Artificial Sequence
  Description of Artificial Sequence: Synthetic oligonucleotide
  Target: LAMA2; (+) strand; PAM type: NRG; PAM sequence: TGG
gagctaaaagcctggtgttt

SEQ ID NO: 182021 - DNA, 20 bp, Artificial Sequence
  Description of Artificial Sequence: Synthetic oligonucleotide
  Target: LAMA2; (+) strand; PAM type: NRG; PAM sequence: CAG
agcctggtgttttggcattt

SEQ ID NO: 182022 - DNA, 20 bp, Artificial Sequence
  Description of Artificial Sequence: Synthetic oligonucleotide
  Target: LAMA2; (+) strand; PAM type: NRG; PAM sequence: GAG
cctggtgttttggcatttca

SEQ ID NO: 182023 - DNA, 20 bp, Artificial Sequence
  Description of Artificial Sequence: Synthetic oligonucleotide
  Target: LAMA2; (+) strand; PAM type: NRG; PAM sequence: CAG
tgttttggcatttcagagcc

SEQ ID NO: 182024 - DNA, 20 bp, Artificial Sequence
  Description of Artificial Sequence: Synthetic oligonucleotide
  Target: LAMA2; (+) strand; PAM type: NRG; PAM sequence: CAG
atttcagagcccagctgtgc

SEQ ID NO: 182025 - DNA, 20 bp, Artificial Sequence
  Description of Artificial Sequence: Synthetic oligonucleotide
  Target: LAMA2; (+) strand; PAM type: NRG; PAM sequence: TGG
gcccagctgtgccagatttc

SEQ ID NO: 182026 - DNA, 20 bp, Artificial Sequence
  Description of Artificial Sequence: Synthetic oligonucleotide
  Target: LAMA2; (+) strand; PAM type: NRG; PAM sequence: AAG
agctgtgccagatttctgga

SEQ ID NO: 182027 - DNA, 20 bp, Artificial Sequence
  Description of Artificial Sequence: Synthetic oligonucleotide
  Target: LAMA2; (+) strand; PAM type: NRG; PAM sequence: AAG
tgtgccagatttctggaaag

SEQ ID NO: 182028 - DNA, 20 bp, Artificial Sequence
  Description of Artificial Sequence: Synthetic oligonucleotide
  Target: LAMA2; (+) strand; PAM type: NRG; PAM sequence: AAG
tttctggaaagaagataata

SEQ ID NO: 182029 - DNA, 20 bp, Artificial Sequence
  Description of Artificial Sequence: Synthetic oligonucleotide
  Target: LAMA2; (+) strand; PAM type: NRG; PAM sequence: AAG
taataaagccgaactgatcc

SEQ ID NO: 182030 - DNA, 20 bp, Artificial Sequence
  Description of Artificial Sequence: Synthetic oligonucleotide
  Target: LAMA2; (+) strand; PAM type: NRG; PAM sequence: GAG
tccaagaaatttttaaaacc

SEQ ID NO: 182031 - DNA, 20 bp, Artificial Sequence
  Description of Artificial Sequence: Synthetic oligonucleotide
  Target: LAMA2; (+) strand; PAM type: NRG; PAM sequence: AGG
ccaagaaatttttaaaaccg

SEQ ID NO: 182032 - DNA, 20 bp, Artificial Sequence
  Description of Artificial Sequence: Synthetic oligonucleotide
  Target: LAMA2; (+) strand; PAM type: NRG; PAM sequence: TAG
gaaatttttaaaaccgaggc

SEQ ID NO: 182033 - DNA, 20 bp, Artificial Sequence
  Description of Artificial Sequence: Synthetic oligonucleotide
  Target: LAMA2; (+) strand; PAM type: NRG; PAM sequence: AAG
accgaggctagatttttaat

SEQ ID NO: 182034 - DNA, 20 bp, Artificial Sequence
  Description of Artificial Sequence: Synthetic oligonucleotide
  Target: LAMA2; (+) strand; PAM type: NRG; PAM sequence: GAG
cgaggctagatttttaataa

SEQ ID NO: 182035 - DNA, 20 bp, Artificial Sequence
  Description of Artificial Sequence: Synthetic oligonucleotide
  Target: LAMA2; (+) strand; PAM type: NRG; PAM sequence: TAG
tagatttttaataagagaaa

SEQ ID NO: 182036 - DNA, 20 bp, Artificial Sequence
  Description of Artificial Sequence: Synthetic oligonucleotide
  Target: LAMA2; (+) strand; PAM type: NRG; PAM sequence: CAG
aataagagaaatagaatata

SEQ ID NO: 182037 - DNA, 20 bp, Artificial Sequence
  Description of Artificial Sequence: Synthetic oligonucleotide
  Target: LAMA2; (+) strand; PAM type: NRG; PAM sequence: AAG
aatagaatatacagaaatga

SEQ ID NO: 182038 - DNA, 20 bp, Artificial Sequence
  Description of Artificial Sequence: Synthetic oligonucleotide
  Target: LAMA2; (+) strand; PAM type: NRG; PAM sequence: TAG
agaatatacagaaatgaaag

SEQ ID NO: 182039 - DNA, 20 bp, Artificial Sequence
  Description of Artificial Sequence: Synthetic oligonucleotide
  Target: LAMA2; (+) strand; PAM type: NRG; PAM sequence: AGG
gaatatacagaaatgaaagt

SEQ ID NO: 182040 - DNA, 20 bp, Artificial Sequence
  Description of Artificial Sequence: Synthetic oligonucleotide
  Target: LAMA2; (+) strand; PAM type: NRG; PAM sequence: GGG
aatatacagaaatgaaagta

SEQ ID NO: 182041 - DNA, 20 bp, Artificial Sequence
  Description of Artificial Sequence: Synthetic oligonucleotide
  Target: LAMA2; (+) strand; PAM type: NRG; PAM sequence: CAG
ccatgcgttttatcatgata

SEQ ID NO: 182042 - DNA, 20 bp, Artificial Sequence
  Description of Artificial Sequence: Synthetic oligonucleotide
  Target: LAMA2; (+) strand; PAM type: NRG; PAM sequence: AAG
ttttatcatgatacagttgt

SEQ ID NO: 182043 - DNA, 20 bp, Artificial Sequence
  Description of Artificial Sequence: Synthetic oligonucleotide
  Target: LAMA2; (+) strand; PAM type: NRG; PAM sequence: TAG
tgatacagttgtaagaccac

SEQ ID NO: 182044 - DNA, 20 bp, Artificial Sequence
  Description of Artificial Sequence: Synthetic oligonucleotide
  Target: LAMA2; (+) strand; PAM type: NRG; PAM sequence: GAG
ctagttgtgctacatttgct

SEQ ID NO: 182045 - DNA, 20 bp, Artificial Sequence
  Description of Artificial Sequence: Synthetic oligonucleotide
  Target: LAMA2; (+) strand; PAM type: NRG; PAM sequence: TGG
ttgtgctacatttgctgaga

SEQ ID NO: 182046 - DNA, 20 bp, Artificial Sequence
  Description of Artificial Sequence: Synthetic oligonucleotide
  Target: LAMA2; (+) strand; PAM type: NRG; PAM sequence: AAG
catttgctgagatggctaaa

SEQ ID NO: 182047 - DNA, 20 bp, Artificial Sequence
  Description of Artificial Sequence: Synthetic oligonucleotide
  Target: LAMA2; (+) strand; PAM type: NRG; PAM sequence: AAG
gctgagatggctaaaaagcg

SEQ ID NO: 182048 - DNA, 20 bp, Artificial Sequence
  Description of Artificial Sequence: Synthetic oligonucleotide
  Target: LAMA2; (+) strand; PAM type: NRG; PAM sequence: AGG
ctgagatggctaaaaagcga

SEQ ID NO: 182049 - DNA, 20 bp, Artificial Sequence
  Description of Artificial Sequence: Synthetic oligonucleotide
  Target: LAMA2; (+) strand; PAM type: NRG; PAM sequence: TGG
gatggctaaaaagcgaaggc

SEQ ID NO: 182050 - DNA, 20 bp, Artificial Sequence
  Description of Artificial Sequence: Synthetic oligonucleotide
  Target: LAMA2; (+) strand; PAM type: NRG; PAM sequence: TGG
aaagcgaaggctggctttca

SEQ ID NO: 182051 - DNA, 20 bp, Artificial Sequence
  Description of Artificial Sequence: Synthetic oligonucleotide
  Target: LAMA2; (+) strand; PAM type: NRG; PAM sequence: TGG
aatatatgttaataaaattc

SEQ ID NO: 182052 - DNA, 20 bp, Artificial Sequence
  Description of Artificial Sequence: Synthetic oligonucleotide
  Target: LAMA2; (+) strand; PAM type: NRG; PAM sequence: GGG
atatatgttaataaaattct

SEQ ID NO: 182053 - DNA, 20 bp, Artificial Sequence
  Description of Artificial Sequence: Synthetic oligonucleotide
  Target: LAMA2; (+) strand; PAM type: NRG; PAM sequence: TGG
atgttaataaaattctggga

SEQ ID NO: 182054 - DNA, 20 bp, Artificial Sequence
  Description of Artificial Sequence: Synthetic oligonucleotide
  Target: LAMA2; (+) strand; PAM type: NRG; PAM sequence: TAG
aattctgggatggcactgtg

SEQ ID NO: 182055 - DNA, 20 bp, Artificial Sequence
  Description of Artificial Sequence: Synthetic oligonucleotide
  Target: LAMA2; (+) strand; PAM type: NRG; PAM sequence: AGG
attctgggatggcactgtgt

SEQ ID NO: 182056 - DNA, 20 bp, Artificial Sequence
  Description of Artificial Sequence: Synthetic oligonucleotide
  Target: LAMA2; (+) strand; PAM type: NRG; PAM sequence: GAG
aggtttgtaattttgccttt

SEQ ID NO: 182057 - DNA, 20 bp, Artificial Sequence
  Description of Artificial Sequence: Synthetic oligonucleotide
  Target: LAMA2; (+) strand; PAM type: NRG; PAM sequence: TGG
tttgtaattttgcctttgag

SEQ ID NO: 182058 - DNA, 20 bp, Artificial Sequence
  Description of Artificial Sequence: Synthetic oligonucleotide
  Target: LAMA2; (+) strand; PAM type: NRG; PAM sequence: AAG
gcctttgagtggtgaccctc

SEQ ID NO: 182059 - DNA, 20 bp, Artificial Sequence
  Description of Artificial Sequence: Synthetic oligonucleotide
  Target: LAMA2; (+) strand; PAM type: NRG; PAM sequence: CAG
gagtggtgaccctcaagaaa

SEQ ID NO: 182060 - DNA, 20 bp, Artificial Sequence
  Description of Artificial Sequence: Synthetic oligonucleotide
  Target: LAMA2; (+) strand; PAM type: NRG; PAM sequence: AGG
agtggtgaccctcaagaaac

SEQ ID NO: 182061 - DNA, 20 bp, Artificial Sequence
  Description of Artificial Sequence: Synthetic oligonucleotide
  Target: LAMA2; (+) strand; PAM type: NRG; PAM sequence: GGG
gtggtgaccctcaagaaaca

SEQ ID NO: 182062 - DNA, 20 bp, Artificial Sequence
  Description of Artificial Sequence: Synthetic oligonucleotide
  Target: LAMA2; (+) strand; PAM type: NRG; PAM sequence: TGG
cctcaagaaacagggacccg

SEQ ID NO: 182063 - DNA, 20 bp, Artificial Sequence
  Description of Artificial Sequence: Synthetic oligonucleotide
  Target: LAMA2; (+) strand; PAM type: NRG; PAM sequence: GAG
agggacccgtggttaccatt

SEQ ID NO: 182064 - DNA, 20 bp, Artificial Sequence
  Description of Artificial Sequence: Synthetic oligonucleotide
  Target: LAMA2; (+) strand; PAM type: NRG; PAM sequence: CAG
cccgtggttaccattgagtc

SEQ ID NO: 182065 - DNA, 20 bp, Artificial Sequence
  Description of Artificial Sequence: Synthetic oligonucleotide
  Target: LAMA2; (+) strand; PAM type: NRG; PAM sequence: GAG
cctgtaattgtcctaatatt

SEQ ID NO: 182066 - DNA, 20 bp, Artificial Sequence
  Description of Artificial Sequence: Synthetic oligonucleotide
  Target: LAMA2; (+) strand; PAM type: NRG; PAM sequence: AGG
ctgtaattgtcctaatattg

SEQ ID NO: 182067 - DNA, 20 bp, Artificial Sequence
  Description of Artificial Sequence: Synthetic oligonucleotide
  Target: LAMA2; (+) strand; PAM type: NRG; PAM sequence: TGG
gaggttgctaaatcatattt

SEQ ID NO: 182068 - DNA, 20 bp, Artificial Sequence
  Description of Artificial Sequence: Synthetic oligonucleotide
  Target: LAMA2; (+) strand; PAM type: NRG; PAM sequence: TGG
tgctaaatcatattttggaa

SEQ ID NO: 182069 - DNA, 20 bp, Artificial Sequence
  Description of Artificial Sequence: Synthetic oligonucleotide
  Target: LAMA2; (+) strand; PAM type: NRG; PAM sequence: TAG
acaataaactatataacttg

SEQ ID NO: 182070 - DNA, 20 bp, Artificial Sequence
  Description of Artificial Sequence: Synthetic oligonucleotide
  Target: LAMA2; (+) strand; PAM type: NRG; PAM sequence: AGG
caataaactatataacttgt

SEQ ID NO: 182071 - DNA, 20 bp, Artificial Sequence
  Description of Artificial Sequence: Synthetic oligonucleotide
  Target: LAMA2; (+) strand; PAM type: NRG; PAM sequence: GAG
ataaactatataacttgtag

SEQ ID NO: 182072 - DNA, 20 bp, Artificial Sequence
  Description of Artificial Sequence: Synthetic oligonucleotide
  Target: LAMA2; (+) strand; PAM type: NRG; PAM sequence: TAG
cttgtaggagtgatttactt

SEQ ID NO: 182073 - DNA, 20 bp, Artificial Sequence
  Description of Artificial Sequence: Synthetic oligonucleotide
  Target: LAMA2; (+) strand; PAM type: NRG; PAM sequence: AAG
gagtgatttactttagtaac

SEQ ID NO: 182074 - DNA, 20 bp, Artificial Sequence
  Description of Artificial Sequence: Synthetic oligonucleotide
  Target: LAMA2; (+) strand; PAM type: NRG; PAM sequence: TGG
aacaagacctctgaaaaaaa

SEQ ID NO: 182075 - DNA, 20 bp, Artificial Sequence
  Description of Artificial Sequence: Synthetic oligonucleotide
  Target: LAMA2; (+) strand; PAM type: NRG; PAM sequence: AAG
cctctgaaaaaaatggtgat

SEQ ID NO: 182076 - DNA, 20 bp, Artificial Sequence
  Description of Artificial Sequence: Synthetic oligonucleotide
  Target: LAMA2; (+) strand; PAM type: NRG; PAM sequence: CAG
tgaaaaaaatggtgataagt

SEQ ID NO: 182077 - DNA, 20 bp, Artificial Sequence
  Description of Artificial Sequence: Synthetic oligonucleotide
  Target: LAMA2; (+) strand; PAM type: NRG; PAM sequence: AAG
gataagtcagtctttccata

SEQ ID NO: 182078 - DNA, 20 bp, Artificial Sequence
  Description of Artificial Sequence: Synthetic oligonucleotide
  Target: LAMA2; (+) strand; PAM type: NRG; PAM sequence: AGG
ataagtcagtctttccataa

SEQ ID NO: 182079 - DNA, 20 bp, Artificial Sequence
  Description of Artificial Sequence: Synthetic oligonucleotide
  Target: LAMA2; (+) strand; PAM type: NRG; PAM sequence: TGG
tctttccataaaggaaaata

SEQ ID NO: 182080 - DNA, 20 bp, Artificial Sequence
  Description of Artificial Sequence: Synthetic oligonucleotide
  Target: LAMA2; (+) strand; PAM type: NRG; PAM sequence: AAG
ttccataaaggaaaatatgg

SEQ ID NO: 182081 - DNA, 20 bp, Artificial Sequence
  Description of Artificial Sequence: Synthetic oligonucleotide
  Target: LAMA2; (+) strand; PAM type: NRG; PAM sequence: AAG
ataaaggaaaatatggaagc

SEQ ID NO: 182082 - DNA, 20 bp, Artificial Sequence
  Description of Artificial Sequence: Synthetic oligonucleotide
  Target: LAMA2; (+) strand; PAM type: NRG; PAM sequence: AAG
accttctctgtgcattatgc

SEQ ID NO: 182083 - DNA, 20 bp, Artificial Sequence
  Description of Artificial Sequence: Synthetic oligonucleotide
  Target: LAMA2; (+) strand; PAM type: NRG; PAM sequence: AAG
gcattatgcaagaaaaatat

SEQ ID NO: 182084 - DNA, 20 bp, Artificial Sequence
  Description of Artificial Sequence: Synthetic oligonucleotide
  Target: LAMA2; (+) strand; PAM type: NRG; PAM sequence: CAG
ttatgcaagaaaaatataag

SEQ ID NO: 182085 - DNA, 20 bp, Artificial Sequence
  Description of Artificial Sequence: Synthetic oligonucleotide
  Target: LAMA2; (+) strand; PAM type: NRG; PAM sequence: CAG
taagcagaattctcacccta

SEQ ID NO: 182086 - DNA, 20 bp, Artificial Sequence
  Description of Artificial Sequence: Synthetic oligonucleotide
  Target: LAMA2; (+) strand; PAM type: NRG; PAM sequence: TGG
cagaattctcaccctacagt

SEQ ID NO: 182087 - DNA, 20 bp, Artificial Sequence
  Description of Artificial Sequence: Synthetic oligonucleotide
  Target: LAMA2; (+) strand; PAM type: NRG; PAM sequence: GGG
agaattctcaccctacagtt

SEQ ID NO: 182088 - DNA, 20 bp, Artificial Sequence
  Description of Artificial Sequence: Synthetic oligonucleotide
  Target: LAMA2; (+) strand; PAM type: NRG; PAM sequence: CAG
ggcatgttctttataacaac

SEQ ID NO: 182089 - DNA, 20 bp, Artificial Sequence
  Description of Artificial Sequence: Synthetic oligonucleotide
  Target: LAMA2; (+) strand; PAM type: NRG; PAM sequence: AAG
cagctgactgactgaacgaa

SEQ ID NO: 182090 - DNA, 20 bp, Artificial Sequence
  Description of Artificial Sequence: Synthetic oligonucleotide
  Target: LAMA2; (+) strand; PAM type: NRG; PAM sequence: TGG
actgaacgaaaagaaaacct

SEQ ID NO: 182091 - DNA, 20 bp, Artificial Sequence
  Description of Artificial Sequence: Synthetic oligonucleotide
  Target: LAMA2; (+) strand; PAM type: NRG; PAM sequence: GGG
ctgaacgaaaagaaaacctt

SEQ ID NO: 182092 - DNA, 20 bp, Artificial Sequence
  Description of Artificial Sequence: Synthetic oligonucleotide
  Target: LAMA2; (+) strand; PAM type: NRG; PAM sequence: AAG
gaaaagaaaaccttgggaac

SEQ ID NO: 182093 - DNA, 20 bp, Artificial Sequence
  Description of Artificial Sequence: Synthetic oligonucleotide
  Target: LAMA2; (+) strand; PAM type: NRG; PAM sequence: AGG
aaaagaaaaccttgggaaca

SEQ ID NO: 182094 - DNA, 20 bp, Artificial Sequence
  Description of Artificial Sequence: Synthetic oligonucleotide
  Target: LAMA2; (+) strand; PAM type: NRG; PAM sequence: AAG
aaaaattatcaatgaaaata

SEQ ID NO: 182095 - DNA, 20 bp, Artificial Sequence
  Description of Artificial Sequence: Synthetic oligonucleotide
  Target: LAMA2; (+) strand; PAM type: NRG; PAM sequence: AAG
aattatcaatgaaaataaag

SEQ ID NO: 182096 - DNA, 20 bp, Artificial Sequence
  Description of Artificial Sequence: Synthetic oligonucleotide
  Target: LAMA2; (+) strand; PAM type: NRG; PAM sequence: CAG
caatgaaaataaagaagttc

SEQ ID NO: 182097 - DNA, 20 bp, Artificial Sequence
  Description of Artificial Sequence: Synthetic oligonucleotide
  Target: LAMA2; (+) strand; PAM type: NRG; PAM sequence: AAG
gaaaataaagaagttccaga

SEQ ID NO: 182098 - DNA, 20 bp, Artificial Sequence
  Description of Artificial Sequence: Synthetic oligonucleotide
  Target: LAMA2; (+) strand; PAM type: NRG; PAM sequence: AGG
aaaataaagaagttccagaa

SEQ ID NO: 182099 - DNA, 20 bp, Artificial Sequence
  Description of Artificial Sequence: Synthetic oligonucleotide
  Target: LAMA2; (+) strand; PAM type: NRG; PAM sequence: GAG
aataaagaagttccagaaag

SEQ ID NO: 182100 - DNA, 20 bp, Artificial Sequence
  Description of Artificial Sequence: Synthetic oligonucleotide
  Target: LAMA2; (+) strand; PAM type: NRG; PAM sequence: CGG
agaagttccagaaaggagtg

SEQ ID NO: 182101 - DNA, 20 bp, Artificial Sequence
  Description of Artificial Sequence: Synthetic oligonucleotide
  Target: LAMA2; (+) strand; PAM type: NRG; PAM sequence: GGG
gaagttccagaaaggagtgc

SEQ ID NO: 182102 - DNA, 20 bp, Artificial Sequence
  Description of Artificial Sequence: Synthetic oligonucleotide
  Target: LAMA2; (+) strand; PAM type: NRG; PAM sequence: GGG
aagttccagaaaggagtgcg

SEQ ID NO: 182103 - DNA, 20 bp, Artificial Sequence
  Description of Artificial Sequence: Synthetic oligonucleotide
  Target: LAMA2; (+) strand; PAM type: NRG; PAM sequence: GGG
agttccagaaaggagtgcgg

SEQ ID NO: 182104 - DNA, 20 bp, Artificial Sequence
  Description of Artificial Sequence: Synthetic oligonucleotide
  Target: LAMA2; (+) strand; PAM type: NRG; PAM sequence: TGG
tccagaaaggagtgcggggg

SEQ ID NO: 182105 - DNA, 20 bp, Artificial Sequence
  Description of Artificial Sequence: Synthetic oligonucleotide
  Target: LAMA2; (+) strand; PAM type: NRG; PAM sequence: CAG
aaggagtgcgggggtggaaa

SEQ ID NO: 182106 - DNA, 20 bp, Artificial Sequence
  Description of Artificial Sequence: Synthetic oligonucleotide
  Target: LAMA2; (+) strand; PAM type: NRG; PAM sequence: CAG
agtgcgggggtggaaacaga

SEQ ID NO: 182107 - DNA, 20 bp, Artificial Sequence
  Description of Artificial Sequence: Synthetic oligonucleotide
  Target: LAMA2; (+) strand; PAM type: NRG; PAM sequence: AAG
atcacctgatatacactgcc

SEQ ID NO: 182108 - DNA, 20 bp, Artificial Sequence
  Description of Artificial Sequence: Synthetic oligonucleotide
  Target: LAMA2; (+) strand; PAM type: NRG; PAM sequence: AGG
tcacctgatatacactgcca

SEQ ID NO: 182109 - DNA, 20 bp, Artificial Sequence
  Description of Artificial Sequence: Synthetic oligonucleotide
  Target: LAMA2; (+) strand; PAM type: NRG; PAM sequence: AAG
catgccatgtgtttttcatt

SEQ ID NO: 182110 - DNA, 20 bp, Artificial Sequence
  Description of Artificial Sequence: Synthetic oligonucleotide
  Target: LAMA2; (+) strand; PAM type: NRG; PAM sequence: AAG
gtttttcattaagataaaaa

SEQ ID NO: 182111 - DNA, 20 bp, Artificial Sequence
  Description of Artificial Sequence: Synthetic oligonucleotide
  Target: LAMA2; (+) strand; PAM type: NRG; PAM sequence: AGG
tttttcattaagataaaaaa

SEQ ID NO: 182112 - DNA, 20 bp, Artificial Sequence
  Description of Artificial Sequence: Synthetic oligonucleotide
  Target: LAMA2; (+) strand; PAM type: NRG; PAM sequence: TGG
ttaagataaaaaaaggaact

SEQ ID NO: 182113 - DNA, 20 bp, Artificial Sequence
  Description of Artificial Sequence: Synthetic oligonucleotide
  Target: LAMA2; (+) strand; PAM type: NRG; PAM sequence: TGG
aaaaaaggaacttggcatca

SEQ ID NO: 182114 - DNA, 20 bp, Artificial Sequence
  Description of Artificial Sequence: Synthetic oligonucleotide
  Target: LAMA2; (+) strand; PAM type: NRG; PAM sequence: GGG
aaaaaggaacttggcatcat

SEQ ID NO: 182115 - DNA, 20 bp, Artificial Sequence
  Description of Artificial Sequence: Synthetic oligonucleotide
  Target: LAMA2; (+) strand; PAM type: NRG; PAM sequence: GAG
acttggcatcatgggacaat

SEQ ID NO: 182116 - DNA, 20 bp, Artificial Sequence
  Description of Artificial Sequence: Synthetic oligonucleotide
  Target: LAMA2; (+) strand; PAM type: NRG; PAM sequence: AGG
cttggcatcatgggacaatg

SEQ ID NO: 182117 - DNA, 20 bp, Artificial Sequence
  Description of Artificial Sequence: Synthetic oligonucleotide
  Target: LAMA2; (+) strand; PAM type: NRG; PAM sequence: GAG
tggcatcatgggacaatgag

SEQ ID NO: 182118 - DNA, 20 bp, Artificial Sequence
  Description of Artificial Sequence: Synthetic oligonucleotide
  Target: LAMA2; (+) strand; PAM type: NRG; PAM sequence: GAG
gcatcatgggacaatgagga

SEQ ID NO: 182119 - DNA, 20 bp, Artificial Sequence
  Description of Artificial Sequence: Synthetic oligonucleotide
  Target: LAMA2; (+) strand; PAM type: NRG; PAM sequence: TGG
tacaatatattgatgccgac

SEQ ID NO: 182120 - DNA, 20 bp, Artificial Sequence
  Description of Artificial Sequence: Synthetic oligonucleotide
  Target: LAMA2; (+) strand; PAM type: NRG; PAM sequence: CAG
atatattgatgccgactgga

SEQ ID NO: 182121 - DNA, 20 bp, Artificial Sequence
  Description of Artificial Sequence: Synthetic oligonucleotide
  Target: LAMA2; (+) strand; PAM type: NRG; PAM sequence: AAG
atgctgattaccaccacata

SEQ ID NO: 182122 - DNA, 20 bp, Artificial Sequence
  Description of Artificial Sequence: Synthetic oligonucleotide
  Target: LAMA2; (+) strand; PAM type: NRG; PAM sequence: TAG
tataccttcactattcaaaa

SEQ ID NO: 182123 - DNA, 20 bp, Artificial Sequence
  Description of Artificial Sequence: Synthetic oligonucleotide
  Target: LAMA2; (+) strand; PAM type: NRG; PAM sequence: TAG
accttcactattcaaaatag

SEQ ID NO: 182124 - DNA, 20 bp, Artificial Sequence
  Description of Artificial Sequence: Synthetic oligonucleotide
  Target: LAMA2; (+) strand; PAM type: NRG; PAM sequence: AAG
ctattcaaaatagtagccac

SEQ ID NO: 182125 - DNA, 20 bp, Artificial Sequence
  Description of Artificial Sequence: Synthetic oligonucleotide
  Target: LAMA2; (+) strand; PAM type: NRG; PAM sequence: CAG
aaaatagtagccacaagtca

SEQ ID NO: 182126 - DNA, 20 bp, Artificial Sequence
  Description of Artificial Sequence: Synthetic oligonucleotide
  Target: LAMA2; (+) strand; PAM type: NRG; PAM sequence: TAG
atagtagccacaagtcacag

SEQ ID NO: 182127 - DNA, 20 bp, Artificial Sequence
  Description of Artificial Sequence: Synthetic oligonucleotide
  Target: LAMA2; (+) strand; PAM type: NRG; PAM sequence: CAG
attaaataacaataaatatt

SEQ ID NO: 182128 - DNA, 20 bp, Artificial Sequence
  Description of Artificial Sequence: Synthetic oligonucleotide
  Target: LAMA2; (+) strand; PAM type: NRG; PAM sequence: GAG
taaatattcagtttctcatt

SEQ ID NO: 182129 - DNA, 20 bp, Artificial Sequence
  Description of Artificial Sequence: Synthetic oligonucleotide
  Target: LAMA2; (+) strand; PAM type: NRG; PAM sequence: AAG
attcagtttctcattgagac

SEQ ID NO: 182130 - DNA, 20 bp, Artificial Sequence
  Description of Artificial Sequence: Synthetic oligonucleotide
  Target: LAMA2; (+) strand; PAM type: NRG; PAM sequence: AAG
attgagacaagctacatttc

SEQ ID NO: 182131 - DNA, 20 bp, Artificial Sequence
  Description of Artificial Sequence: Synthetic oligonucleotide
  Target: LAMA2; (+) strand; PAM type: NRG; PAM sequence: TAG
agctacatttcaagtcctaa

SEQ ID NO: 182132 - DNA, 20 bp, Artificial Sequence
  Description of Artificial Sequence: Synthetic oligonucleotide
  Target: LAMA2; (+) strand; PAM type: NRG; PAM sequence: TGG
caagtcctaatagccacatg

SEQ ID NO: 182133 - DNA, 20 bp, Artificial Sequence
  Description of Artificial Sequence: Synthetic oligonucleotide
  Target: LAMA2; (+) strand; PAM type: NRG; PAM sequence: TAG
tcctaatagccacatgtggc

SEQ ID NO: 182134 - DNA, 20 bp, Artificial Sequence
  Description of Artificial Sequence: Synthetic oligonucleotide
  Target: LAMA2; (+) strand; PAM type: NRG; PAM sequence: TGG
gtggctagtaactactgatt

SEQ ID NO: 182135 - DNA, 20 bp, Artificial Sequence
  Description of Artificial Sequence: Synthetic oligonucleotide
  Target: LAMA2; (+) strand; PAM type: NRG; PAM sequence: CAG
ctagtaactactgatttgga

SEQ ID NO: 182136 - DNA, 20 bp, Artificial Sequence
  Description of Artificial Sequence: Synthetic oligonucleotide
  Target: LAMA2; (+) strand; PAM type: NRG; PAM sequence: CAG
aactactgatttggacagtg

SEQ ID NO: 182137 - DNA, 20 bp, Artificial Sequence
  Description of Artificial Sequence: Synthetic oligonucleotide
  Target: LAMA2; (+) strand; PAM type: NRG; PAM sequence: CAG
gatttggacagtgcagaaaa

SEQ ID NO: 182138 - DNA, 20 bp, Artificial Sequence
  Description of Artificial Sequence: Synthetic oligonucleotide
  Target: LAMA2; (+) strand; PAM type: NRG; PAM sequence: CAG
acagacaatatccatcatca

SEQ ID NO: 182139 - DNA, 20 bp, Artificial Sequence
  Description of Artificial Sequence: Synthetic oligonucleotide
  Target: LAMA2; (+) strand; PAM type: NRG; PAM sequence: AGG
cagacaatatccatcatcac

SEQ ID NO: 182140 - DNA, 20 bp, Artificial Sequence
  Description of Artificial Sequence: Synthetic oligonucleotide
  Target: LAMA2; (+) strand; PAM type: NRG; PAM sequence: AAG
acaatatccatcatcacagg

SEQ ID NO: 182141 - DNA, 20 bp, Artificial Sequence
  Description of Artificial Sequence: Synthetic oligonucleotide
  Target: LAMA2; (+) strand; PAM type: NRG; PAM sequence: TGG
catcatcacaggaagttctg

SEQ ID NO: 182142 - DNA, 20 bp, Artificial Sequence
  Description of Artificial Sequence: Synthetic oligonucleotide
  Target: LAMA2; (+) strand; PAM type: NRG; PAM sequence: TAG
tcacaggaagttctgtggaa

SEQ ID NO: 182143 - DNA, 20 bp, Artificial Sequence
  Description of Artificial Sequence: Synthetic oligonucleotide
  Target: LAMA2; (+) strand; PAM type: NRG; PAM sequence: AAG
gaatagcactgttataatta

SEQ ID NO: 182144 - DNA, 20 bp, Artificial Sequence
  Description of Artificial Sequence: Synthetic oligonucleotide
  Target: LAMA2; (+) strand; PAM type: NRG; PAM sequence: AAG
tagcactgttataattaaag

SEQ ID NO: 182145 - DNA, 20 bp, Artificial Sequence
  Description of Artificial Sequence: Synthetic oligonucleotide
  Target: LAMA2; (+) strand; PAM type: NRG; PAM sequence: TAG
catcatcactgacattctga

SEQ ID NO: 182146 - DNA, 20 bp, Artificial Sequence
  Description of Artificial Sequence: Synthetic oligonucleotide
  Target: LAMA2; (+) strand; PAM type: NRG; PAM sequence: GAG
tctgatagcctttgtttgtt

SEQ ID NO: 182147 - DNA, 20 bp, Artificial Sequence
  Description of Artificial Sequence: Synthetic oligonucleotide
  Target: LAMA2; (+) strand; PAM type: NRG; PAM sequence: CAG
tgttgagcacttactgtgtg

SEQ ID NO: 182148 - DNA, 20 bp, Artificial Sequence
  Description of Artificial Sequence: Synthetic oligonucleotide
  Target: LAMA2; (+) strand; PAM type: NRG; PAM sequence: TAG
acctttgcaatttgattatg

SEQ ID NO: 182149 - DNA, 20 bp, Artificial Sequence
  Description of Artificial Sequence: Synthetic oligonucleotide
  Target: LAMA2; (+) strand; PAM type: NRG; PAM sequence: AGG
cctttgcaatttgattatgt

SEQ ID NO: 182150 - DNA, 20 bp, Artificial Sequence
  Description of Artificial Sequence: Synthetic oligonucleotide
  Target: LAMA2; (+) strand; PAM type: NRG; PAM sequence: AAG
atcatgcccatttcacatat

SEQ ID NO: 182151 - DNA, 20 bp, Artificial Sequence
  Description of Artificial Sequence: Synthetic oligonucleotide
  Target: LAMA2; (+) strand; PAM type: NRG; PAM sequence: GAG
atttcacatataagaacact

SEQ ID NO: 182152 - DNA, 20 bp, Artificial Sequence
  Description of Artificial Sequence: Synthetic oligonucleotide
  Target: LAMA2; (+) strand; PAM type: NRG; PAM sequence: TGG
catataagaacactgagtct

SEQ ID NO: 182153 - DNA, 20 bp, Artificial Sequence
  Description of Artificial Sequence: Synthetic oligonucleotide
  Target: LAMA2; (+) strand; PAM type: NRG; PAM sequence: GAG
tataagaacactgagtcttg

SEQ ID NO: 182154 - DNA, 20 bp, Artificial Sequence
  Description of Artificial Sequence: Synthetic oligonucleotide
  Target: LAMA2; (+) strand; PAM type: NRG; PAM sequence: TAG
acactgagtcttggagaact

SEQ ID NO: 182155 - DNA, 20 bp, Artificial Sequence
  Description of Artificial Sequence: Synthetic oligonucleotide
  Target: LAMA2; (+) strand; PAM type: NRG; PAM sequence: TGG
cttagatcacttgcaacatc

SEQ ID NO: 182156 - DNA, 20 bp, Artificial Sequence
  Description of Artificial Sequence: Synthetic oligonucleotide
  Target: LAMA2; (+) strand; PAM type: NRG; PAM sequence: AAG
cacttgcaacatctggactc

SEQ ID NO: 182157 - DNA, 20 bp, Artificial Sequence
  Description of Artificial Sequence: Synthetic oligonucleotide
  Target: LAMA2; (+) strand; PAM type: NRG; PAM sequence: AGG
acttgcaacatctggactca

SEQ ID NO: 182158 - DNA, 20 bp, Artificial Sequence
  Description of Artificial Sequence: Synthetic oligonucleotide
  Target: LAMA2; (+) strand; PAM type: NRG; PAM sequence: GGG
cttgcaacatctggactcaa

SEQ ID NO: 182159 - DNA, 20 bp, Artificial Sequence
  Description of Artificial Sequence: Synthetic oligonucleotide
  Target: LAMA2; (+) strand; PAM type: NRG; PAM sequence: AAG
caacatctggactcaagggc

SEQ ID NO: 182160 - DNA, 20 bp, Artificial Sequence
  Description of Artificial Sequence: Synthetic oligonucleotide
  Target: LAMA2; (+) strand; PAM type: NRG; PAM sequence: AGG
aacatctggactcaagggca

SEQ ID NO: 182161 - DNA, 20 bp, Artificial Sequence
  Description of Artificial Sequence: Synthetic oligonucleotide
  Target: LAMA2; (+) strand; PAM type: NRG; PAM sequence: TGG
gacttcatttcctaatctgc

SEQ ID NO: 182162 - DNA, 20 bp, Artificial Sequence
  Description of Artificial Sequence: Synthetic oligonucleotide
  Target: LAMA2; (+) strand; PAM type: NRG; PAM sequence: AAG
cacacttgccccattttatg

SEQ ID NO: 182163 - DNA, 20 bp, Artificial Sequence
  Description of Artificial Sequence: Synthetic oligonucleotide
  Target: LAMA2; (+) strand; PAM type: NRG; PAM sequence: TAG
acttgccccattttatgaag

SEQ ID NO: 182164 - DNA, 20 bp, Artificial Sequence
  Description of Artificial Sequence: Synthetic oligonucleotide
  Target: LAMA2; (+) strand; PAM type: NRG; PAM sequence: AAG
ttttatgaagtagtatgcaa

SEQ ID NO: 182165 - DNA, 20 bp, Artificial Sequence
  Description of Artificial Sequence: Synthetic oligonucleotide
  Target: LAMA2; (+) strand; PAM type: NRG; PAM sequence: AAG
gtatgcaaaagtaaacattc

SEQ ID NO: 182166 - DNA, 20 bp, Artificial Sequence
  Description of Artificial Sequence: Synthetic oligonucleotide
  Target: LAMA2; (+) strand; PAM type: NRG; PAM sequence: TAG
caaaagtaaacattcaagtg

SEQ ID NO: 182167 - DNA, 20 bp, Artificial Sequence
  Description of Artificial Sequence: Synthetic oligonucleotide
  Target: LAMA2; (+) strand; PAM type: NRG; PAM sequence: GAG
taaacattcaagtgtagttt

SEQ ID NO: 182168 - DNA, 20 bp, Artificial Sequence
  Description of Artificial Sequence: Synthetic oligonucleotide
  Target: LAMA2; (+) strand; PAM type: NRG; PAM sequence: AAG
caagtgtagtttgagtataa

SEQ ID NO: 182169 - DNA, 20 bp, Artificial Sequence
  Description of Artificial Sequence: Synthetic oligonucleotide
  Target: LAMA2; (+) strand; PAM type: NRG; PAM sequence: TGG
tattgaaaaaataaaatgta

SEQ ID NO: 182170 - DNA, 20 bp, Artificial Sequence
  Description of Artificial Sequence: Synthetic oligonucleotide
  Target: LAMA2; (+) strand; PAM type: NRG; PAM sequence: GGG
attgaaaaaataaaatgtat

SEQ ID NO: 182171 - DNA, 20 bp, Artificial Sequence
  Description of Artificial Sequence: Synthetic oligonucleotide
  Target: LAMA2; (+) strand; PAM type: NRG; PAM sequence: TGG
aatgtatgggtttttgcatt

SEQ ID NO: 182172 - DNA, 20 bp, Artificial Sequence
  Description of Artificial Sequence: Synthetic oligonucleotide
  Target: LAMA2; (+) strand; PAM type: NRG; PAM sequence: TAG
attttgttattgttctaatg

SEQ ID NO: 182173 - DNA, 20 bp, Artificial Sequence
  Description of Artificial Sequence: Synthetic oligonucleotide
  Target: LAMA2; (+) strand; PAM type: NRG; PAM sequence: CAG
tattgttctaatgtagaata

SEQ ID NO: 182174 - DNA, 20 bp, Artificial Sequence
  Description of Artificial Sequence: Synthetic oligonucleotide
  Target: LAMA2; (+) strand; PAM type: NRG; PAM sequence: TGG
ctaatgtagaatacagactt

SEQ ID NO: 182175 - DNA, 20 bp, Artificial Sequence
  Description of Artificial Sequence: Synthetic oligonucleotide
  Target: LAMA2; (+) strand; PAM type: NRG; PAM sequence: GGG
taatgtagaatacagacttt

SEQ ID NO: 182176 - DNA, 20 bp, Artificial Sequence
  Description of Artificial Sequence: Synthetic oligonucleotide
  Target: LAMA2; (+) strand; PAM type: NRG; PAM sequence: GGG
aatgtagaatacagactttg

SEQ ID NO: 182177 - DNA, 20 bp, Artificial Sequence
  Description of Artificial Sequence: Synthetic oligonucleotide
  Target: LAMA2; (+) strand; PAM type: NRG; PAM sequence: GAG
aaaaaacatttttttatttt

SEQ ID NO: 182178 - DNA, 20 bp, Artificial Sequence
  Description of Artificial Sequence: Synthetic oligonucleotide
  Target: LAMA2; (+) strand; PAM type: NRG; PAM sequence: CAG
aacatttttttattttgaga

SEQ ID NO: 182179 - DNA, 20 bp, Artificial Sequence
  Description of Artificial Sequence: Synthetic oligonucleotide
  Target: LAMA2; (+) strand; PAM type: NRG; PAM sequence: AGG
acatttttttattttgagac

SEQ ID NO: 182180 - DNA, 20 bp, Artificial Sequence
  Description of Artificial Sequence: Synthetic oligonucleotide
  Target: LAMA2; (+) strand; PAM type: NRG; PAM sequence: GGG
catttttttattttgagaca

SEQ ID NO: 182181 - DNA, 20 bp, Artificial Sequence
  Description of Artificial Sequence: Synthetic oligonucleotide
  Target: LAMA2; (+) strand; PAM type: NRG; PAM sequence: TAG
gagacagggatctcactctg

SEQ ID NO: 182182 - DNA, 20 bp, Artificial Sequence
  Description of Artificial Sequence: Synthetic oligonucleotide
  Target: LAMA2; (+) strand; PAM type: NRG; PAM sequence: CAG
agggatctcactctgtagcc

SEQ ID NO: 182183 - DNA, 20 bp, Artificial Sequence
  Description of Artificial Sequence: Synthetic oligonucleotide
  Target: LAMA2; (+) strand; PAM type: NRG; PAM sequence: AGG
gggatctcactctgtagccc

SEQ ID NO: 182184 - DNA, 20 bp, Artificial Sequence
  Description of Artificial Sequence: Synthetic oligonucleotide
  Target: LAMA2; (+) strand; PAM type: NRG; PAM sequence: TGG
tctcactctgtagcccaggc

SEQ ID NO: 182185 - DNA, 20 bp, Artificial Sequence
  Description of Artificial Sequence: Synthetic oligonucleotide
  Target: LAMA2; (+) strand; PAM type: NRG; PAM sequence: GAG
tcactctgtagcccaggctg

SEQ ID NO: 182186 - DNA, 20 bp, Artificial Sequence
  Description of Artificial Sequence: Synthetic oligonucleotide
  Target: LAMA2; (+) strand; PAM type: NRG; PAM sequence: CAG
ctgtagcccaggctggagtg

SEQ ID NO: 182187 - DNA, 20 bp, Artificial Sequence
  Description of Artificial Sequence: Synthetic oligonucleotide
  Target: LAMA2; (+) strand; PAM type: NRG; PAM sequence: TGG
tagcccaggctggagtgcag

SEQ ID NO: 182188 - DNA, 20 bp, Artificial Sequence
  Description of Artificial Sequence: Synthetic oligonucleotide
  Target: LAMA2; (+) strand; PAM type: NRG; PAM sequence: CAG
ggcacaaccataattcactg

SEQ ID NO: 182189 - DNA, 20 bp, Artificial Sequence
  Description of Artificial Sequence: Synthetic oligonucleotide
  Target: LAMA2; (+) strand; PAM type: NRG; PAM sequence: TGG
accataattcactgcagcct

SEQ ID NO: 182190 - DNA, 20 bp, Artificial Sequence
  Description of Artificial Sequence: Synthetic oligonucleotide
  Target: LAMA2; (+) strand; PAM type: NRG; PAM sequence: TGG
tcactgcagccttggcctcc

SEQ ID NO: 182191 - DNA, 20 bp, Artificial Sequence
  Description of Artificial Sequence: Synthetic oligonucleotide
  Target: LAMA2; (+) strand; PAM type: NRG; PAM sequence: GGG
cactgcagccttggcctcct

SEQ ID NO: 182192 - DNA, 20 bp, Artificial Sequence
  Description of Artificial Sequence: Synthetic oligonucleotide
  Target: LAMA2; (+) strand; PAM type: NRG; PAM sequence: AAG
ccttggcctcctgggctcaa

SEQ ID NO: 182193 - DNA, 20 bp, Artificial Sequence
  Description of Artificial Sequence: Synthetic oligonucleotide
  Target: LAMA2; (+) strand; PAM type: NRG; PAM sequence: CAG
ctcaaaagatcctctctcct

SEQ ID NO: 182194 - DNA, 20 bp, Artificial Sequence
  Description of Artificial Sequence: Synthetic oligonucleotide
  Target: LAMA2; (+) strand; PAM type: NRG; PAM sequence: AAG
cctctctcctcagcatctcc

SEQ ID NO: 182195 - DNA, 20 bp, Artificial Sequence
  Description of Artificial Sequence: Synthetic oligonucleotide
  Target: LAMA2; (+) strand; PAM type: NRG; PAM sequence: TGG
cctcagcatctccaagtaac

SEQ ID NO: 182196 - DNA, 20 bp, Artificial Sequence
  Description of Artificial Sequence: Synthetic oligonucleotide
  Target: LAMA2; (+) strand; PAM type: NRG; PAM sequence: GGG
ctcagcatctccaagtaact

SEQ ID NO: 182197 - DNA, 20 bp, Artificial Sequence
  Description of Artificial Sequence: Synthetic oligonucleotide
  Target: LAMA2; (+) strand; PAM type: NRG; PAM sequence: CAG
tctccaagtaactgggactc

SEQ ID NO: 182198 - DNA, 20 bp, Artificial Sequence
  Description of Artificial Sequence: Synthetic oligonucleotide
  Target: LAMA2; (+) strand; PAM type: NRG; PAM sequence: AGG
ctccaagtaactgggactcc

SEQ ID NO: 182199 - DNA, 20 bp, Artificial Sequence
  Description of Artificial Sequence: Synthetic oligonucleotide
  Target: LAMA2; (+) strand; PAM type: NRG; PAM sequence: CAG
caggcacacaccaacatgcc

SEQ ID NO: 182200 - DNA, 20 bp, Artificial Sequence
  Description of Artificial Sequence: Synthetic oligonucleotide
  Target: LAMA2; (+) strand; PAM type: NRG; PAM sequence: TGG
acatgcccagctactttttt

SEQ ID NO: 182201 - DNA, 20 bp, Artificial Sequence
  Description of Artificial Sequence: Synthetic oligonucleotide
  Target: LAMA2; (+) strand; PAM type: NRG; PAM sequence: GAG
atgcccagctactttttttg

SEQ ID NO: 182202 - DNA, 20 bp, Artificial Sequence
  Description of Artificial Sequence: Synthetic oligonucleotide
  Target: LAMA2; (+) strand; PAM type: NRG; PAM sequence: AGG
tgcccagctactttttttgg

SEQ ID NO: 182203 - DNA, 20 bp, Artificial Sequence
  Description of Artificial Sequence: Synthetic oligonucleotide
  Target: LAMA2; (+) strand; PAM type: NRG; PAM sequence: GGG
gcccagctactttttttgga

SEQ ID NO: 182204 - DNA, 20 bp, Artificial Sequence
  Description of Artificial Sequence: Synthetic oligonucleotide
  Target: LAMA2; (+) strand; PAM type: NRG; PAM sequence: GGG
cccagctactttttttggag

SEQ ID NO: 182205 - DNA, 20 bp, Artificial Sequence
  Description of Artificial Sequence: Synthetic oligonucleotide
  Target: LAMA2; (+) strand; PAM type: NRG; PAM sequence: GAG
cagctactttttttggaggg

SEQ ID NO: 182206 - DNA, 20 bp, Artificial Sequence
  Description of Artificial Sequence: Synthetic oligonucleotide
  Target: LAMA2; (+) strand; PAM type: NRG; PAM sequence: AGG
agctactttttttggagggg

SEQ ID NO: 182207 - DNA, 20 bp, Artificial Sequence
  Description of Artificial Sequence: Synthetic oligonucleotide
  Target: LAMA2; (+) strand; PAM type: NRG; PAM sequence: GGG
gctactttttttggagggga

SEQ ID NO: 182208 - DNA, 20 bp, Artificial Sequence
  Description of Artificial Sequence: Synthetic oligonucleotide
  Target: LAMA2; (+) strand; PAM type: NRG; PAM sequence: AAG
tttttttggaggggagggca

SEQ ID NO: 182209 - DNA, 20 bp, Artificial Sequence
  Description of Artificial Sequence: Synthetic oligonucleotide
  Target: LAMA2; (+) strand; PAM type: NRG; PAM sequence: CAG
tttggaggggagggcaaaga

SEQ ID NO: 182210 - DNA, 20 bp, Artificial Sequence
  Description of Artificial Sequence: Synthetic oligonucleotide
  Target: LAMA2; (+) strand; PAM type: NRG; PAM sequence: AGG
ttggaggggagggcaaagac

SEQ ID NO: 182211 - DNA, 20 bp, Artificial Sequence
  Description of Artificial Sequence: Synthetic oligonucleotide
  Target: LAMA2; (+) strand; PAM type: NRG; PAM sequence: GGG
tggaggggagggcaaagaca

SEQ ID NO: 182212 - DNA, 20 bp, Artificial Sequence
  Description of Artificial Sequence: Synthetic oligonucleotide
  Target: LAMA2; (+) strand; PAM type: NRG; PAM sequence: CAG
agggtctcactctgttgcct

SEQ ID NO: 182213 - DNA, 20 bp, Artificial Sequence
  Description of Artificial Sequence: Synthetic oligonucleotide
  Target: LAMA2; (+) strand; PAM type: NRG; PAM sequence: AGG
gggtctcactctgttgcctc

SEQ ID NO: 182214 - DNA, 20 bp, Artificial Sequence
  Description of Artificial Sequence: Synthetic oligonucleotide
  Target: LAMA2; (+) strand; PAM type: NRG; PAM sequence: TGG
ctcactctgttgcctcaggc

SEQ ID NO: 182215 - DNA, 20 bp, Artificial Sequence
  Description of Artificial Sequence: Synthetic oligonucleotide
  Target: LAMA2; (+) strand; PAM type: NRG; PAM sequence: TGG
ctggtcttgtcttgaactcg

SEQ ID NO: 182216 - DNA, 20 bp, Artificial Sequence
  Description of Artificial Sequence: Synthetic oligonucleotide
  Target: LAMA2; (+) strand; PAM type: NRG; PAM sequence: AAG
tgtcttgaactcgtggcctc

SEQ ID NO: 182217 - DNA, 20 bp, Artificial Sequence
  Description of Artificial Sequence: Synthetic oligonucleotide
  Target: LAMA2; (+) strand; PAM type: NRG; PAM sequence: CGG
ctcaagcgatcctccctctt

SEQ ID NO: 182218 - DNA, 20 bp, Artificial Sequence
  Description of Artificial Sequence: Synthetic oligonucleotide
  Target: LAMA2; (+) strand; PAM type: NRG; PAM sequence: CAG
ctcttcggcctcccaaaatg

SEQ ID NO: 182219 - DNA, 20 bp, Artificial Sequence
  Description of Artificial Sequence: Synthetic oligonucleotide
  Target: LAMA2; (+) strand; PAM type: NRG; PAM sequence: AGG
tcttcggcctcccaaaatgc

SEQ ID NO: 182220 - DNA, 20 bp, Artificial Sequence
  Description of Artificial Sequence: Synthetic oligonucleotide
  Target: LAMA2; (+) strand; PAM type: NRG; PAM sequence: GGG
cttcggcctcccaaaatgca

SEQ ID NO: 182221 - DNA, 20 bp, Artificial Sequence
  Description of Artificial Sequence: Synthetic oligonucleotide
  Target: LAMA2; (+) strand; PAM type: NRG; PAM sequence: CAG
ctcccaaaatgcagggatta

SEQ ID NO: 182222 - DNA, 20 bp, Artificial Sequence
  Description of Artificial Sequence: Synthetic oligonucleotide
  Target: LAMA2; (+) strand; PAM type: NRG; PAM sequence: AGG
tcccaaaatgcagggattac

SEQ ID NO: 182223 - DNA, 20 bp, Artificial Sequence
  Description of Artificial Sequence: Synthetic oligonucleotide
  Target: LAMA2; (+) strand; PAM type: NRG; PAM sequence: GAG
aatgcagggattacaggaat

SEQ ID NO: 182224 - DNA, 20 bp, Artificial Sequence
  Description of Artificial Sequence: Synthetic oligonucleotide
  Target: LAMA2; (+) strand; PAM type: NRG; PAM sequence: CGG
caggaatgagccactacact

SEQ ID NO: 182225 - DNA, 20 bp, Artificial Sequence
  Description of Artificial Sequence: Synthetic oligonucleotide
  Target: LAMA2; (+) strand; PAM type: NRG; PAM sequence: CAG
aatgagccactacactcggc

SEQ ID NO: 182226 - DNA, 20 bp, Artificial Sequence
  Description of Artificial Sequence: Synthetic oligonucleotide
  Target: LAMA2; (+) strand; PAM type: NRG; PAM sequence: TAG
atttttaaacatctgttttt

SEQ ID NO: 182227 - DNA, 20 bp, Artificial Sequence
  Description of Artificial Sequence: Synthetic oligonucleotide
  Target: LAMA2; (+) strand; PAM type: NRG; PAM sequence: AAG
ttttagactatataatccaa

SEQ ID NO: 182228 - DNA, 20 bp, Artificial Sequence
  Description of Artificial Sequence: Synthetic oligonucleotide
  Target: LAMA2; (+) strand; PAM type: NRG; PAM sequence: TGG
taatccaaaagaatgtttct

SEQ ID NO: 182229 - DNA, 20 bp, Artificial Sequence
  Description of Artificial Sequence: Synthetic oligonucleotide
  Target: LAMA2; (+) strand; PAM type: NRG; PAM sequence: AAG
ttggactttgttttacttaa

SEQ ID NO: 182230 - DNA, 20 bp, Artificial Sequence
  Description of Artificial Sequence: Synthetic oligonucleotide
  Target: LAMA2; (+) strand; PAM type: NRG; PAM sequence: AAG
tgttttacttaaaagcctta

SEQ ID NO: 182231 - DNA, 20 bp, Artificial Sequence
  Description of Artificial Sequence: Synthetic oligonucleotide
  Target: LAMA2; (+) strand; PAM type: NRG; PAM sequence: GAG
ttttacttaaaagccttaaa

SEQ ID NO: 182232 - DNA, 20 bp, Artificial Sequence
  Description of Artificial Sequence: Synthetic oligonucleotide
  Target: LAMA2; (+) strand; PAM type: NRG; PAM sequence: TAG
tgtaatattatcttattttt

SEQ ID NO: 182233 - DNA, 20 bp, Artificial Sequence
  Description of Artificial Sequence: Synthetic oligonucleotide
  Target: LAMA2; (+) strand; PAM type: NRG; PAM sequence: AAG
ttattttttagctatctccc

SEQ ID NO: 182234 - DNA, 20 bp, Artificial Sequence
  Description of Artificial Sequence: Synthetic oligonucleotide
  Target: LAMA2; (+) strand; PAM type: NRG; PAM sequence: AAG
tttagctatctcccaagaaa

SEQ ID NO: 182235 - DNA, 20 bp, Artificial Sequence
  Description of Artificial Sequence: Synthetic oligonucleotide
  Target: LAMA2; (+) strand; PAM type: NRG; PAM sequence: CAG
tcaaaataaataaacgtttt

SEQ ID NO: 182236 - DNA, 20 bp, Artificial Sequence
  Description of Artificial Sequence: Synthetic oligonucleotide
  Target: LAMA2; (+) strand; PAM type: NRG; PAM sequence: GAG
gatttttttttctaactttt

SEQ ID NO: 182237 - DNA, 20 bp, Artificial Sequence
  Description of Artificial Sequence: Synthetic oligonucleotide
  Target: LAMA2; (+) strand; PAM type: NRG; PAM sequence: AAG
tttttttctaacttttgagc

SEQ ID NO: 182238 - DNA, 20 bp, Artificial Sequence
  Description of Artificial Sequence: Synthetic oligonucleotide
  Target: LAMA2; (+) strand; PAM type: NRG; PAM sequence: AGG
ttttttctaacttttgagca

SEQ ID NO: 182239 - DNA, 20 bp, Artificial Sequence
  Description of Artificial Sequence: Synthetic oligonucleotide
  Target: LAMA2; (+) strand; PAM type: NRG; PAM sequence: TGG
caaggtttttaaaaactttt

SEQ ID NO: 182240 - DNA, 20 bp, Artificial Sequence
  Description of Artificial Sequence: Synthetic oligonucleotide
  Target: LAMA2; (+) strand; PAM type: NRG; PAM sequence: TAG
tttaaaaactttttggtata

SEQ ID NO: 182241 - DNA, 20 bp, Artificial Sequence
  Description of Artificial Sequence: Synthetic oligonucleotide
  Target: LAMA2; (+) strand; PAM type: NRG; PAM sequence: TGG
ctatgcaattatcttctctt

SEQ ID NO: 182242 - DNA, 20 bp, Artificial Sequence
  Description of Artificial Sequence: Synthetic oligonucleotide
  Target: LAMA2; (+) strand; PAM type: NRG; PAM sequence: AAG
cttatttcattacacatata

SEQ ID NO: 182243 - DNA, 20 bp, Artificial Sequence
  Description of Artificial Sequence: Synthetic oligonucleotide
  Target: LAMA2; (+) strand; PAM type: NRG; PAM sequence: AAG
tacacatataaagcatcaat

SEQ ID NO: 182244 - DNA, 20 bp, Artificial Sequence
  Description of Artificial Sequence: Synthetic oligonucleotide
  Target: LAMA2; (+) strand; PAM type: NRG; PAM sequence: AAG
acatataaagcatcaataag

SEQ ID NO: 182245 - DNA, 20 bp, Artificial Sequence
  Description of Artificial Sequence: Synthetic oligonucleotide
  Target: LAMA2; (+) strand; PAM type: NRG; PAM sequence: CAG
ataaagcatcaataagaagt

SEQ ID NO: 182246 - DNA, 20 bp, Artificial Sequence
  Description of Artificial Sequence: Synthetic oligonucleotide
  Target: LAMA2; (+) strand; PAM type: NRG; PAM sequence: TGG
tacctcatgtttaaatgctg

SEQ ID NO: 182247 - DNA, 20 bp, Artificial Sequence
  Description of Artificial Sequence: Synthetic oligonucleotide
  Target: LAMA2; (+) strand; PAM type: NRG; PAM sequence: GGG
acctcatgtttaaatgctgt

SEQ ID NO: 182248 - DNA, 20 bp, Artificial Sequence
  Description of Artificial Sequence: Synthetic oligonucleotide
  Target: LAMA2; (+) strand; PAM type: NRG; PAM sequence: GAG
catgtttaaatgctgtgggt

SEQ ID NO: 182249 - DNA, 20 bp, Artificial Sequence
  Description of Artificial Sequence: Synthetic oligonucleotide
  Target: LAMA2; (+) strand; PAM type: NRG; PAM sequence: AAG
tgtgggtgagattattgcta

SEQ ID NO: 182250 - DNA, 20 bp, Artificial Sequence
  Description of Artificial Sequence: Synthetic oligonucleotide
  Target: LAMA2; (+) strand; PAM type: NRG; PAM sequence: AGG
gtgggtgagattattgctaa

SEQ ID NO: 182251 - DNA, 20 bp, Artificial Sequence
  Description of Artificial Sequence: Synthetic oligonucleotide
  Target: LAMA2; (+) strand; PAM type: NRG; PAM sequence: GGG
tgggtgagattattgctaaa

SEQ ID NO: 182252 - DNA, 20 bp, Artificial Sequence
  Description of Artificial Sequence: Synthetic oligonucleotide
  Target: LAMA2; (+) strand; PAM type: NRG; PAM sequence: GGG
gggtgagattattgctaaag

SEQ ID NO: 182253 - DNA, 20 bp, Artificial Sequence
  Description of Artificial Sequence: Synthetic oligonucleotide
  Target: LAMA2; (+) strand; PAM type: NRG; PAM sequence: GAG
gtgagattattgctaaaggg

SEQ ID NO: 182254 - DNA, 20 bp, Artificial Sequence
  Description of Artificial Sequence: Synthetic oligonucleotide
  Target: LAMA2; (+) strand; PAM type: NRG; PAM sequence: AAG
agattattgctaaaggggag

SEQ ID NO: 182255 - DNA, 20 bp, Artificial Sequence
  Description of Artificial Sequence: Synthetic oligonucleotide
  Target: LAMA2; (+) strand; PAM type: NRG; PAM sequence: AGG
gattattgctaaaggggaga

SEQ ID NO: 182256 - DNA, 20 bp, Artificial Sequence
  Description of Artificial Sequence: Synthetic oligonucleotide
  Target: LAMA2; (+) strand; PAM type: NRG; PAM sequence: AAG
aaggggagaaggactacaaa

SEQ ID NO: 182257 - DNA, 20 bp, Artificial Sequence
  Description of Artificial Sequence: Synthetic oligonucleotide
  Target: LAMA2; (+) strand; PAM type: NRG; PAM sequence: CAG
ctacaaaaagactccttctg

SEQ ID NO: 182258 - DNA, 20 bp, Artificial Sequence
  Description of Artificial Sequence: Synthetic oligonucleotide
  Target: LAMA2; (+) strand; PAM type: NRG; PAM sequence: AGG
tacaaaaagactccttctgc

SEQ ID NO: 182259 - DNA, 20 bp, Artificial Sequence
  Description of Artificial Sequence: Synthetic oligonucleotide
  Target: LAMA2; (+) strand; PAM type: NRG; PAM sequence: TAG
ggataacatgaacatccatt

SEQ ID NO: 182260 - DNA, 20 bp, Artificial Sequence
  Description of Artificial Sequence: Synthetic oligonucleotide
  Target: LAMA2; (+) strand; PAM type: NRG; PAM sequence: CAG
gaacatccatttagaccaac

SEQ ID NO: 182261 - DNA, 20 bp, Artificial Sequence
  Description of Artificial Sequence: Synthetic oligonucleotide
  Target: LAMA2; (+) strand; PAM type: NRG; PAM sequence: TAG
catccatttagaccaaccag

SEQ ID NO: 182262 - DNA, 20 bp, Artificial Sequence
  Description of Artificial Sequence: Synthetic oligonucleotide
  Target: LAMA2; (+) strand; PAM type: NRG; PAM sequence: TGG
ttagaccaaccagtagacaa

SEQ ID NO: 182263 - DNA, 20 bp, Artificial Sequence
  Description of Artificial Sequence: Synthetic oligonucleotide
  Target: LAMA2; (+) strand; PAM type: NRG; PAM sequence: CAG
aaccagtagacaatggaaac

SEQ ID NO: 182264 - DNA, 20 bp, Artificial Sequence
  Description of Artificial Sequence: Synthetic oligonucleotide
  Target: LAMA2; (+) strand; PAM type: NRG; PAM sequence: GAG
ccagtagacaatggaaacca

SEQ ID NO: 182265 - DNA, 20 bp, Artificial Sequence
  Description of Artificial Sequence: Synthetic oligonucleotide
  Target: LAMA2; (+) strand; PAM type: NRG; PAM sequence: TGG
caatggaaaccagagtttgc

SEQ ID NO: 182266 - DNA, 20 bp, Artificial Sequence
  Description of Artificial Sequence: Synthetic oligonucleotide
  Target: LAMA2; (+) strand; PAM type: NRG; PAM sequence: GGG
aatggaaaccagagtttgct

SEQ ID NO: 182267 - DNA, 20 bp, Artificial Sequence
  Description of Artificial Sequence: Synthetic oligonucleotide
  Target: LAMA2; (+) strand; PAM type: NRG; PAM sequence: CAG
ttgctgggtacacgtgtgca

SEQ ID NO: 182268 - DNA, 20 bp, Artificial Sequence
  Description of Artificial Sequence: Synthetic oligonucleotide
  Target: LAMA2; (+) strand; PAM type: NRG; PAM sequence: TAG
tacacgtgtgcacagtttga

SEQ ID NO: 182269 - DNA, 20 bp, Artificial Sequence
  Description of Artificial Sequence: Synthetic oligonucleotide
  Target: LAMA2; (+) strand; PAM type: NRG; PAM sequence: AAG
cctgcatgtgtctgctccac

SEQ ID NO: 182270 - DNA, 20 bp, Artificial Sequence
  Description of Artificial Sequence: Synthetic oligonucleotide
  Target: LAMA2; (+) strand; PAM type: NRG; PAM sequence: AGG
ctgcatgtgtctgctccaca

SEQ ID NO: 182271 - DNA, 20 bp, Artificial Sequence
  Description of Artificial Sequence: Synthetic oligonucleotide
  Target: LAMA2; (+) strand; PAM type: NRG; PAM sequence: TAG
tccacaaggcttccttccca

SEQ ID NO: 182272 - DNA, 20 bp, Artificial Sequence
  Description of Artificial Sequence: Synthetic oligonucleotide
  Target: LAMA2; (+) strand; PAM type: NRG; PAM sequence: CAG
caaggcttccttcccatagt

SEQ ID NO: 182273 - DNA, 20 bp, Artificial Sequence
  Description of Artificial Sequence: Synthetic oligonucleotide
  Target: LAMA2; (+) strand; PAM type: NRG; PAM sequence: GAG
aggcttccttcccatagtca

SEQ ID NO: 182274 - DNA, 20 bp, Artificial Sequence
  Description of Artificial Sequence: Synthetic oligonucleotide
  Target: LAMA2; (+) strand; PAM type: NRG; PAM sequence: TAG
cttttcatttgactattcaa

SEQ ID NO: 182275 - DNA, 20 bp, Artificial Sequence
  Description of Artificial Sequence: Synthetic oligonucleotide
  Target: LAMA2; (+) strand; PAM type: NRG; PAM sequence: AGG
ttttcatttgactattcaat

SEQ ID NO: 182276 - DNA, 20 bp, Artificial Sequence
  Description of Artificial Sequence: Synthetic oligonucleotide
  Target: LAMA2; (+) strand; PAM type: NRG; PAM sequence: CAG
catttgactattcaataggc

SEQ ID NO: 182277 - DNA, 20 bp, Artificial Sequence
  Description of Artificial Sequence: Synthetic oligonucleotide
  Target: LAMA2; (+) strand; PAM type: NRG; PAM sequence: AAG
ttgactattcaataggccag

SEQ ID NO: 182278 - DNA, 20 bp, Artificial Sequence
  Description of Artificial Sequence: Synthetic oligonucleotide
  Target: LAMA2; (+) strand; PAM type: NRG; PAM sequence: AAG
ataggccagaagtaaatctg

SEQ ID NO: 182279 - DNA, 20 bp, Artificial Sequence
  Description of Artificial Sequence: Synthetic oligonucleotide
  Target: LAMA2; (+) strand; PAM type: NRG; PAM sequence: CGG
gtaaatctgaagaaatattc

SEQ ID NO: 182280 - DNA, 20 bp, Artificial Sequence
  Description of Artificial Sequence: Synthetic oligonucleotide
  Target: LAMA2; (+) strand; PAM type: NRG; PAM sequence: AAG
gaaatattccggctgcctca

SEQ ID NO: 182281 - DNA, 20 bp, Artificial Sequence
  Description of Artificial Sequence: Synthetic oligonucleotide
  Target: LAMA2; (+) strand; PAM type: NRG; PAM sequence: AAG
ctcaaagatattgaaatttc

SEQ ID NO: 182282 - DNA, 20 bp, Artificial Sequence
  Description of Artificial Sequence: Synthetic oligonucleotide
  Target: LAMA2; (+) strand; PAM type: NRG; PAM sequence: CAG
agaactccgtacaatatact

SEQ ID NO: 182283 - DNA, 20 bp, Artificial Sequence
  Description of Artificial Sequence: Synthetic oligonucleotide
  Target: LAMA2; (+) strand; PAM type: NRG; PAM sequence: TAG
actccgtacaatatactcag

SEQ ID NO: 182284 - DNA, 20 bp, Artificial Sequence
  Description of Artificial Sequence: Synthetic oligonucleotide
  Target: LAMA2; (+) strand; PAM type: NRG; PAM sequence: TGG
ctcagtagtcccgattatgt

SEQ ID NO: 182285 - DNA, 20 bp, Artificial Sequence
  Description of Artificial Sequence: Synthetic oligonucleotide
  Target: LAMA2; (+) strand; PAM type: NRG; PAM sequence: AAG
cgattatgttggtgttacca

SEQ ID NO: 182286 - DNA, 20 bp, Artificial Sequence
  Description of Artificial Sequence: Synthetic oligonucleotide
  Target: LAMA2; (+) strand; PAM type: NRG; PAM sequence: AGG
gattatgttggtgttaccaa

SEQ ID NO: 182287 - DNA, 20 bp, Artificial Sequence
  Description of Artificial Sequence: Synthetic oligonucleotide
  Target: LAMA2; (+) strand; PAM type: NRG; PAM sequence: TGG
tgttaccaaaggatgttccc

SEQ ID NO: 182288 - DNA, 20 bp, Artificial Sequence
  Description of Artificial Sequence: Synthetic oligonucleotide
  Target: LAMA2; (+) strand; PAM type: NRG; PAM sequence: GAG
ttaccaaaggatgttccctg

SEQ ID NO: 182289 - DNA, 20 bp, Artificial Sequence
  Description of Artificial Sequence: Synthetic oligonucleotide
  Target: LAMA2; (+) strand; PAM type: NRG; PAM sequence: AGG
taccaaaggatgttccctgg

SEQ ID NO: 182290 - DNA, 20 bp, Artificial Sequence
  Description of Artificial Sequence: Synthetic oligonucleotide
  Target: LAMA2; (+) strand; PAM type: NRG; PAM sequence: TGG
aaaggatgttccctggaggt

SEQ ID NO: 182291 - DNA, 20 bp, Artificial Sequence
  Description of Artificial Sequence: Synthetic oligonucleotide
  Target: LAMA2; (+) strand; PAM type: NRG; PAM sequence: TAG
ggaggttggtctgtttttga

SEQ ID NO: 182292 - DNA, 20 bp, Artificial Sequence
  Description of Artificial Sequence: Synthetic oligonucleotide
  Target: LAMA2; (+) strand; PAM type: NRG; PAM sequence: CAG
ttctctaaacacatttatat

SEQ ID NO: 182293 - DNA, 20 bp, Artificial Sequence
  Description of Artificial Sequence: Synthetic oligonucleotide
  Target: LAMA2; (+) strand; PAM type: NRG; PAM sequence: TAG
tatatcagatttcacttact

SEQ ID NO: 182294 - DNA, 20 bp, Artificial Sequence
  Description of Artificial Sequence: Synthetic oligonucleotide
  Target: LAMA2; (+) strand; PAM type: NRG; PAM sequence: TGG
cagatttcacttacttagtg

SEQ ID NO: 182295 - DNA, 20 bp, Artificial Sequence
  Description of Artificial Sequence: Synthetic oligonucleotide
  Target: LAMA2; (+) strand; PAM type: NRG; PAM sequence: AAG
cttagtgtggctgctcctac

SEQ ID NO: 182296 - DNA, 20 bp, Artificial Sequence
  Description of Artificial Sequence: Synthetic oligonucleotide
  Target: LAMA2; (+) strand; PAM type: NRG; PAM sequence: AGG
ttagtgtggctgctcctaca

SEQ ID NO: 182297 - DNA, 20 bp, Artificial Sequence
  Description of Artificial Sequence: Synthetic oligonucleotide
  Target: LAMA2; (+) strand; PAM type: NRG; PAM sequence: CAG
gtggctgctcctacaaggat

SEQ ID NO: 182298 - DNA, 20 bp, Artificial Sequence
  Description of Artificial Sequence: Synthetic oligonucleotide
  Target: LAMA2; (+) strand; PAM type: NRG; PAM sequence: AAG
gatcctactcttaaacgata

SEQ ID NO: 182299 - DNA, 20 bp, Artificial Sequence
  Description of Artificial Sequence: Synthetic oligonucleotide
  Target: LAMA2; (+) strand; PAM type: NRG; PAM sequence: AAG
ctactcttaaacgataaagc

SEQ ID NO: 182300 - DNA, 20 bp, Artificial Sequence
  Description of Artificial Sequence: Synthetic oligonucleotide
  Target: LAMA2; (+) strand; PAM type: NRG; PAM sequence: AAG
taaacgataaagcaagatta

SEQ ID NO: 182301 - DNA, 20 bp, Artificial Sequence
  Description of Artificial Sequence: Synthetic oligonucleotide
  Target: LAMA2; (+) strand; PAM type: NRG; PAM sequence: TGG
taaattaccatgataaaaaa

SEQ ID NO: 182302 - DNA, 20 bp, Artificial Sequence
  Description of Artificial Sequence: Synthetic oligonucleotide
  Target: LAMA2; (+) strand; PAM type: NRG; PAM sequence: AAG
tgataaaaaatggtattatg

SEQ ID NO: 182303 - DNA, 20 bp, Artificial Sequence
  Description of Artificial Sequence: Synthetic oligonucleotide
  Target: LAMA2; (+) strand; PAM type: NRG; PAM sequence: TAG
aaaatggtattatgaagtcc

SEQ ID NO: 182304 - DNA, 20 bp, Artificial Sequence
  Description of Artificial Sequence: Synthetic oligonucleotide
  Target: LAMA2; (+) strand; PAM type: NRG; PAM sequence: TAG
gatccaattttccaaatgta

SEQ ID NO: 182305 - DNA, 20 bp, Artificial Sequence
  Description of Artificial Sequence: Synthetic oligonucleotide
  Target: LAMA2; (+) strand; PAM type: NRG; PAM sequence: TAG
tccaaatgtatagctcttta

SEQ ID NO: 182306 - DNA, 20 bp, Artificial Sequence
  Description of Artificial Sequence: Synthetic oligonucleotide
  Target: LAMA2; (+) strand; PAM type: NRG; PAM sequence: TAG
ttacttttatgtgttgtata

SEQ ID NO: 182307 - DNA, 20 bp, Artificial Sequence
  Description of Artificial Sequence: Synthetic oligonucleotide
  Target: LAMA2; (+) strand; PAM type: NRG; PAM sequence: TAG
tgtgttgtatatagctttat

SEQ ID NO: 182308 - DNA, 20 bp, Artificial Sequence
  Description of Artificial Sequence: Synthetic oligonucleotide
  Target: LAMA2; (+) strand; PAM type: NRG; PAM sequence: TGG
tagcaaccttacattttttc

SEQ ID NO: 182309 - DNA, 20 bp, Artificial Sequence
  Description of Artificial Sequence: Synthetic oligonucleotide
  Target: LAMA2; (+) strand; PAM type: NRG; PAM sequence: AAG
cattttttctggaaccattg

SEQ ID NO: 182310 - DNA, 20 bp, Artificial Sequence
  Description of Artificial Sequence: Synthetic oligonucleotide
  Target: LAMA2; (+) strand; PAM type: NRG; PAM sequence: AAG
ggaaccattgaagtttacac

SEQ ID NO: 182311 - DNA, 20 bp, Artificial Sequence
  Description of Artificial Sequence: Synthetic oligonucleotide
  Target: LAMA2; (+) strand; PAM type: NRG; PAM sequence: TAG
accattgaagtttacacaag

SEQ ID NO: 182312 - DNA, 20 bp, Artificial Sequence
  Description of Artificial Sequence: Synthetic oligonucleotide
  Target: LAMA2; (+) strand; PAM type: NRG; PAM sequence: AAG
ttgaagtttacacaagtagc

SEQ ID NO: 182313 - DNA, 20 bp, Artificial Sequence
  Description of Artificial Sequence: Synthetic oligonucleotide
  Target: LAMA2; (+) strand; PAM type: NRG; PAM sequence: TAG
aagtttacacaagtagcaag

SEQ ID NO: 182314 - DNA, 20 bp, Artificial Sequence
  Description of Artificial Sequence: Synthetic oligonucleotide
  Target: LAMA2; (+) strand; PAM type: NRG; PAM sequence: TAG
gcaagtagtaatttacaccg

SEQ ID NO: 182315 - DNA, 20 bp, Artificial Sequence
  Description of Artificial Sequence: Synthetic oligonucleotide
  Target: LAMA2; (+) strand; PAM type: NRG; PAM sequence: TAG
gtaatttacaccgtagccat

SEQ ID NO: 182316 - DNA, 20 bp, Artificial Sequence
  Description of Artificial Sequence: Synthetic oligonucleotide
  Target: LAMA2; (+) strand; PAM type: NRG; PAM sequence: TAG
acaccgtagccattagtgca

SEQ ID NO: 182317 - DNA, 20 bp, Artificial Sequence
  Description of Artificial Sequence: Synthetic oligonucleotide
  Target: LAMA2; (+) strand; PAM type: NRG; PAM sequence: AAG
gtctgttgtctacaaacttg

SEQ ID NO: 182318 - DNA, 20 bp, Artificial Sequence
  Description of Artificial Sequence: Synthetic oligonucleotide
  Target: LAMA2; (+) strand; PAM type: NRG; PAM sequence: TAG
ttgtctacaaacttgaagtc

SEQ ID NO: 182319 - DNA, 20 bp, Artificial Sequence
  Description of Artificial Sequence: Synthetic oligonucleotide
  Target: LAMA2; (+) strand; PAM type: NRG; PAM sequence: TAG
cccttgtctttgaaataaca

SEQ ID NO: 182320 - DNA, 20 bp, Artificial Sequence
  Description of Artificial Sequence: Synthetic oligonucleotide
  Target: LAMA2; (+) strand; PAM type: NRG; PAM sequence: TGG
gtctttgaaataacatagac

SEQ ID NO: 182321 - DNA, 20 bp, Artificial Sequence
  Description of Artificial Sequence: Synthetic oligonucleotide
  Target: LAMA2; (+) strand; PAM type: NRG; PAM sequence: GGG
tctttgaaataacatagact

SEQ ID NO: 182322 - DNA, 20 bp, Artificial Sequence
  Description of Artificial Sequence: Synthetic oligonucleotide
  Target: LAMA2; (+) strand; PAM type: NRG; PAM sequence: TGG
ataacatagactgggacctg

SEQ ID NO: 182323 - DNA, 20 bp, Artificial Sequence
  Description of Artificial Sequence: Synthetic oligonucleotide
  Target: LAMA2; (+) strand; PAM type: NRG; PAM sequence: AAG
ctgtggcaatcaactctgca

SEQ ID NO: 182324 - DNA, 20 bp, Artificial Sequence
  Description of Artificial Sequence: Synthetic oligonucleotide
  Target: LAMA2; (+) strand; PAM type: NRG; PAM sequence: AAG
ttgtgtttgacatgcctgca

SEQ ID NO: 182325 - DNA, 20 bp, Artificial Sequence
  Description of Artificial Sequence: Synthetic oligonucleotide
  Target: LAMA2; (+) strand; PAM type: NRG; PAM sequence: TAG
atgcctgcaaagtcctttgt

SEQ ID NO: 182326 - DNA, 20 bp, Artificial Sequence
  Description of Artificial Sequence: Synthetic oligonucleotide
  Target: LAMA2; (+) strand; PAM type: NRG; PAM sequence: CAG
cctttgttagctgatatcct

SEQ ID NO: 182327 - DNA, 20 bp, Artificial Sequence
  Description of Artificial Sequence: Synthetic oligonucleotide
  Target: LAMA2; (+) strand; PAM type: NRG; PAM sequence: AAG
gtaactcttctttgatgcta

SEQ ID NO: 182328 - DNA, 20 bp, Artificial Sequence
  Description of Artificial Sequence: Synthetic oligonucleotide
  Target: LAMA2; (+) strand; PAM type: NRG; PAM sequence: TAG
tctttgatgctaaagcatcc

SEQ ID NO: 182329 - DNA, 20 bp, Artificial Sequence
  Description of Artificial Sequence: Synthetic oligonucleotide
  Target: LAMA2; (+) strand; PAM type: NRG; PAM sequence: CAG
actattttgcactgtttctt

SEQ ID NO: 182330 - DNA, 20 bp, Artificial Sequence
  Description of Artificial Sequence: Synthetic oligonucleotide
  Target: LAMA2; (+) strand; PAM type: NRG; PAM sequence: GAG
gttgacactgacccatatgt

SEQ ID NO: 182331 - DNA, 20 bp, Artificial Sequence
  Description of Artificial Sequence: Synthetic oligonucleotide
  Target: LAMA2; (+) strand; PAM type: NRG; PAM sequence: AAG
acactgacccatatgtgaga

SEQ ID NO: 182332 - DNA, 20 bp, Artificial Sequence
  Description of Artificial Sequence: Synthetic oligonucleotide
  Target: LAMA2; (+) strand; PAM type: NRG; PAM sequence: CGG
cccatatgtgagaaagaccc

SEQ ID NO: 182333 - DNA, 20 bp, Artificial Sequence
  Description of Artificial Sequence: Synthetic oligonucleotide
  Target: LAMA2; (+) strand; PAM type: NRG; PAM sequence: TAG
tgtgagaaagaccccggcca

SEQ ID NO: 182334 - DNA, 20 bp, Artificial Sequence
  Description of Artificial Sequence: Synthetic oligonucleotide
  Target: LAMA2; (+) strand; PAM type: NRG; PAM sequence: AAG
tactctcttaaaatatccat

SEQ ID NO: 182335 - DNA, 20 bp, Artificial Sequence
  Description of Artificial Sequence: Synthetic oligonucleotide
  Target: LAMA2; (+) strand; PAM type: NRG; PAM sequence: AAG
ctcttaaaatatccataagc

SEQ ID NO: 182336 - DNA, 20 bp, Artificial Sequence
  Description of Artificial Sequence: Synthetic oligonucleotide
  Target: LAMA2; (+) strand; PAM type: NRG; PAM sequence: GAG
cttaaaatatccataagcaa

SEQ ID NO: 182337 - DNA, 20 bp, Artificial Sequence
  Description of Artificial Sequence: Synthetic oligonucleotide
  Target: LAMA2; (+) strand; PAM type: NRG; PAM sequence: TAG
tatccataagcaagagtcaa

SEQ ID NO: 182338 - DNA, 20 bp, Artificial Sequence
  Description of Artificial Sequence: Synthetic oligonucleotide
  Target: LAMA2; (+) strand; PAM type: NRG; PAM sequence: CAG
aagcaagagtcaatagtcaa

SEQ ID NO: 182339 - DNA, 20 bp, Artificial Sequence
  Description of Artificial Sequence: Synthetic oligonucleotide
  Target: LAMA2; (+) strand; PAM type: NRG; PAM sequence: TAG
caatagtcaacagcaaatat

SEQ ID NO: 182340 - DNA, 20 bp, Artificial Sequence
  Description of Artificial Sequence: Synthetic oligonucleotide
  Target: LAMA2; (+) strand; PAM type: NRG; PAM sequence: AAG
agtcaacagcaaatattagc

SEQ ID NO: 182341 - DNA, 20 bp, Artificial Sequence
  Description of Artificial Sequence: Synthetic oligonucleotide
  Target: LAMA2; (+) strand; PAM type: NRG; PAM sequence: TAG
aaatattagcaagaatttta

SEQ ID NO: 182342 - DNA, 20 bp, Artificial Sequence
  Description of Artificial Sequence: Synthetic oligonucleotide
  Target: LAMA2; (+) strand; PAM type: NRG; PAM sequence: TAG
agaattttatagaaactcaa

SEQ ID NO: 182343 - DNA, 20 bp, Artificial Sequence
  Description of Artificial Sequence: Synthetic oligonucleotide
  Target: LAMA2; (+) strand; PAM type: NRG; PAM sequence: CAG
tatagaaactcaatagtgat

SEQ ID NO: 182344 - DNA, 20 bp, Artificial Sequence
  Description of Artificial Sequence: Synthetic oligonucleotide
  Target: LAMA2; (+) strand; PAM type: NRG; PAM sequence: TAG
attatcttaaaccactccaa

SEQ ID NO: 182345 - DNA, 20 bp, Artificial Sequence
  Description of Artificial Sequence: Synthetic oligonucleotide
  Target: LAMA2; (+) strand; PAM type: NRG; PAM sequence: TAG
ttaaaccactccaatagaat

SEQ ID NO: 182346 - DNA, 20 bp, Artificial Sequence
  Description of Artificial Sequence: Synthetic oligonucleotide
  Target: LAMA2; (+) strand; PAM type: NRG; PAM sequence: AGG
taaaccactccaatagaatt

SEQ ID NO: 182347 - DNA, 20 bp, Artificial Sequence
  Description of Artificial Sequence: Synthetic oligonucleotide
  Target: LAMA2; (+) strand; PAM type: NRG; PAM sequence: GGG
aaaccactccaatagaatta

SEQ ID NO: 182348 - DNA, 20 bp, Artificial Sequence
  Description of Artificial Sequence: Synthetic oligonucleotide
  Target: LAMA2; (+) strand; PAM type: NRG; PAM sequence: AAG
ccaatagaattagggaaatg

SEQ ID NO: 182349 - DNA, 20 bp, Artificial Sequence
  Description of Artificial Sequence: Synthetic oligonucleotide
  Target: LAMA2; (+) strand; PAM type: NRG; PAM sequence: AGG
caatagaattagggaaatga

SEQ ID NO: 182350 - DNA, 20 bp, Artificial Sequence
  Description of Artificial Sequence: Synthetic oligonucleotide
  Target: LAMA2; (+) strand; PAM type: NRG; PAM sequence: GGG
aatagaattagggaaatgaa

SEQ ID NO: 182351 - DNA, 20 bp, Artificial Sequence
  Description of Artificial Sequence: Synthetic oligonucleotide
  Target: LAMA2; (+) strand; PAM type: NRG; PAM sequence: TGG
agggaaatgaagggaaaatg

SEQ ID NO: 182352 - DNA, 20 bp, Artificial Sequence
  Description of Artificial Sequence: Synthetic oligonucleotide
  Target: LAMA2; (+) strand; PAM type: NRG; PAM sequence: GGG
gggaaatgaagggaaaatgt

SEQ ID NO: 182353 - DNA, 20 bp, Artificial Sequence
  Description of Artificial Sequence: Synthetic oligonucleotide
  Target: LAMA2; (+) strand; PAM type: NRG; PAM sequence: AAG
atgaagggaaaatgtgggta

SEQ ID NO: 182354 - DNA, 20 bp, Artificial Sequence
  Description of Artificial Sequence: Synthetic oligonucleotide
  Target: LAMA2; (+) strand; PAM type: NRG; PAM sequence: AAG
gaaaatgtgggtaaagaaaa

SEQ ID NO: 182355 - DNA, 20 bp, Artificial Sequence
  Description of Artificial Sequence: Synthetic oligonucleotide
  Target: LAMA2; (+) strand; PAM type: NRG; PAM sequence: GAG
aaatccaccacttgaatgat

SEQ ID NO: 182356 - DNA, 20 bp, Artificial Sequence
  Description of Artificial Sequence: Synthetic oligonucleotide
  Target: LAMA2; (+) strand; PAM type: NRG; PAM sequence: AGG
aatccaccacttgaatgatg

SEQ ID NO: 182357 - DNA, 20 bp, Artificial Sequence
  Description of Artificial Sequence: Synthetic oligonucleotide
  Target: LAMA2; (+) strand; PAM type: NRG; PAM sequence: AAG
cacttgaatgatgaggttta

SEQ ID NO: 182358 - DNA, 20 bp, Artificial Sequence
  Description of Artificial Sequence: Synthetic oligonucleotide
  Target: LAMA2; (+) strand; PAM type: NRG; PAM sequence: TGG
gaatgatgaggtttaaagac

SEQ ID NO: 182359 - DNA, 20 bp, Artificial Sequence
  Description of Artificial Sequence: Synthetic oligonucleotide
  Target: LAMA2; (+) strand; PAM type: NRG; PAM sequence: CAG
atgaggtttaaagactggaa

SEQ ID NO: 182360 - DNA, 20 bp, Artificial Sequence
  Description of Artificial Sequence: Synthetic oligonucleotide
  Target: LAMA2; (+) strand; PAM type: NRG; PAM sequence: CAG
aaagactggaacagaacttt

SEQ ID NO: 182361 - DNA, 20 bp, Artificial Sequence
  Description of Artificial Sequence: Synthetic oligonucleotide
  Target: LAMA2; (+) strand; PAM type: NRG; PAM sequence: AGG
aagactggaacagaactttc

SEQ ID NO: 182362 - DNA, 20 bp, Artificial Sequence
  Description of Artificial Sequence: Synthetic oligonucleotide
  Target: LAMA2; (+) strand; PAM type: NRG; PAM sequence: TAG
ttcaggatcttcattgttca

SEQ ID NO: 182363 - DNA, 20 bp, Artificial Sequence
  Description of Artificial Sequence: Synthetic oligonucleotide
  Target: LAMA2; (+) strand; PAM type: NRG; PAM sequence: CAG
atcttcattgttcatagcta

SEQ ID NO: 182364 - DNA, 20 bp, Artificial Sequence
  Description of Artificial Sequence: Synthetic oligonucleotide
  Target: LAMA2; (+) strand; PAM type: NRG; PAM sequence: AGG
tcttcattgttcatagctac

SEQ ID NO: 182365 - DNA, 20 bp, Artificial Sequence
  Description of Artificial Sequence: Synthetic oligonucleotide
  Target: LAMA2; (+) strand; PAM type: NRG; PAM sequence: TGG
catagctacaggctccaatt

SEQ ID NO: 182366 - DNA, 20 bp, Artificial Sequence
  Description of Artificial Sequence: Synthetic oligonucleotide
  Target: LAMA2; (+) strand; PAM type: NRG; PAM sequence: TGG
tacaggctccaatttggaat

SEQ ID NO: 182367 - DNA, 20 bp, Artificial Sequence
  Description of Artificial Sequence: Synthetic oligonucleotide
  Target: LAMA2; (+) strand; PAM type: NRG; PAM sequence: TAG
ctccaatttggaattggcca

SEQ ID NO: 182368 - DNA, 20 bp, Artificial Sequence
  Description of Artificial Sequence: Synthetic oligonucleotide
  Target: LAMA2; (+) strand; PAM type: NRG; PAM sequence: GAG
tggccatagacacccactct

SEQ ID NO: 182369 - DNA, 20 bp, Artificial Sequence
  Description of Artificial Sequence: Synthetic oligonucleotide
  Target: LAMA2; (+) strand; PAM type: NRG; PAM sequence: AAG
ccatagacacccactctgag

SEQ ID NO: 182370 - DNA, 20 bp, Artificial Sequence
  Description of Artificial Sequence: Synthetic oligonucleotide
  Target: LAMA2; (+) strand; PAM type: NRG; PAM sequence: TGG
gacacccactctgagaagtt

SEQ ID NO: 182371 - DNA, 20 bp, Artificial Sequence
  Description of Artificial Sequence: Synthetic oligonucleotide
  Target: LAMA2; (+) strand; PAM type: NRG; PAM sequence: GGG
acacccactctgagaagttt

SEQ ID NO: 182372 - DNA, 20 bp, Artificial Sequence
  Description of Artificial Sequence: Synthetic oligonucleotide
  Target: LAMA2; (+) strand; PAM type: NRG; PAM sequence: AAG
actctgagaagtttgggaat

SEQ ID NO: 182373 - DNA, 20 bp, Artificial Sequence
  Description of Artificial Sequence: Synthetic oligonucleotide
  Target: LAMA2; (+) strand; PAM type: NRG; PAM sequence: AAG
gagaagtttgggaataagaa

SEQ ID NO: 182374 - DNA, 20 bp, Artificial Sequence
  Description of Artificial Sequence: Synthetic oligonucleotide
  Target: LAMA2; (+) strand; PAM type: NRG; PAM sequence: GAG
gaagtttgggaataagaaaa

SEQ ID NO: 182375 - DNA, 20 bp, Artificial Sequence
  Description of Artificial Sequence: Synthetic oligonucleotide
  Target: LAMA2; (+) strand; PAM type: NRG; PAM sequence: AAG
aagaaaagagaaaacacatt

SEQ ID NO: 182376 - DNA, 20 bp, Artificial Sequence
  Description of Artificial Sequence: Synthetic oligonucleotide
  Target: LAMA2; (+) strand; PAM type: NRG; PAM sequence: AAG
acattaagaactaaaactgt

SEQ ID NO: 182377 - DNA, 20 bp, Artificial Sequence
  Description of Artificial Sequence: Synthetic oligonucleotide
  Target: LAMA2; (+) strand; PAM type: NRG; PAM sequence: AGG
cattaagaactaaaactgta

SEQ ID NO: 182378 - DNA, 20 bp, Artificial Sequence
  Description of Artificial Sequence: Synthetic oligonucleotide
  Target: LAMA2; (+) strand; PAM type: NRG; PAM sequence: TGG
aaaactgtaaggacccatac

SEQ ID NO: 182379 - DNA, 20 bp, Artificial Sequence
  Description of Artificial Sequence: Synthetic oligonucleotide
  Target: LAMA2; (+) strand; PAM type: NRG; PAM sequence: AAG
ggacccatactggcttctta

SEQ ID NO: 182380 - DNA, 20 bp, Artificial Sequence
  Description of Artificial Sequence: Synthetic oligonucleotide
  Target: LAMA2; (+) strand; PAM type: NRG; PAM sequence: AGG
gacccatactggcttcttaa

SEQ ID NO: 182381 - DNA, 20 bp, Artificial Sequence
  Description of Artificial Sequence: Synthetic oligonucleotide
  Target: LAMA2; (+) strand; PAM type: NRG; PAM sequence: AAG
ccatactggcttcttaaagg

SEQ ID NO: 182382 - DNA, 20 bp, Artificial Sequence
  Description of Artificial Sequence: Synthetic oligonucleotide
  Target: LAMA2; (+) strand; PAM type: NRG; PAM sequence: GAG
ttcttaaaggaagttttact

SEQ ID NO: 182383 - DNA, 20 bp, Artificial Sequence
  Description of Artificial Sequence: Synthetic oligonucleotide
  Target: LAMA2; (+) strand; PAM type: NRG; PAM sequence: AAG
actgagaattttaatcttca

SEQ ID NO: 182384 - DNA, 20 bp, Artificial Sequence
  Description of Artificial Sequence: Synthetic oligonucleotide
  Target: LAMA2; (+) strand; PAM type: NRG; PAM sequence: AAG
taactctcattcacattcaa

SEQ ID NO: 182385 - DNA, 20 bp, Artificial Sequence
  Description of Artificial Sequence: Synthetic oligonucleotide
  Target: LAMA2; (+) strand; PAM type: NRG; PAM sequence: GAG
cattcaaaagatatatacat

SEQ ID NO: 182386 - DNA, 20 bp, Artificial Sequence
  Description of Artificial Sequence: Synthetic oligonucleotide
  Target: LAMA2; (+) strand; PAM type: NRG; PAM sequence: AGG
attcaaaagatatatacatg

SEQ ID NO: 182387 - DNA, 20 bp, Artificial Sequence
  Description of Artificial Sequence: Synthetic oligonucleotide
  Target: LAMA2; (+) strand; PAM type: NRG; PAM sequence: TGG
aaaagatatatacatgagga

SEQ ID NO: 182388 - DNA, 20 bp, Artificial Sequence
  Description of Artificial Sequence: Synthetic oligonucleotide
  Target: LAMA2; (+) strand; PAM type: NRG; PAM sequence: CGG
acatgaggatggaaactgtc

SEQ ID NO: 182389 - DNA, 20 bp, Artificial Sequence
  Description of Artificial Sequence: Synthetic oligonucleotide
  Target: LAMA2; (+) strand; PAM type: NRG; PAM sequence: TAG
gaaactgtccggaaaatgaa

SEQ ID NO: 182390 - DNA, 20 bp, Artificial Sequence
  Description of Artificial Sequence: Synthetic oligonucleotide
  Target: LAMA2; (+) strand; PAM type: NRG; PAM sequence: TGG
aaatgaatagcctctgcacg

SEQ ID NO: 182391 - DNA, 20 bp, Artificial Sequence
  Description of Artificial Sequence: Synthetic oligonucleotide
  Target: LAMA2; (+) strand; PAM type: NRG; PAM sequence: AAG
gtggaaattatgattcccta

SEQ ID NO: 182392 - DNA, 20 bp, Artificial Sequence
  Description of Artificial Sequence: Synthetic oligonucleotide
  Target: LAMA2; (+) strand; PAM type: NRG; PAM sequence: AGG
tggaaattatgattccctaa

SEQ ID NO: 182393 - DNA, 20 bp, Artificial Sequence
  Description of Artificial Sequence: Synthetic oligonucleotide
  Target: LAMA2; (+) strand; PAM type: NRG; PAM sequence: CAG
gattccctaaaggcactttg

SEQ ID NO: 182394 - DNA, 20 bp, Artificial Sequence
  Description of Artificial Sequence: Synthetic oligonucleotide
  Target: LAMA2; (+) strand; PAM type: NRG; PAM sequence: CAG
taaaggcactttgcagtaac

SEQ ID NO: 182395 - DNA, 20 bp, Artificial Sequence
  Description of Artificial Sequence: Synthetic oligonucleotide
  Target: LAMA2; (+) strand; PAM type: NRG; PAM sequence: AGG
aaaggcactttgcagtaacc

SEQ ID NO: 182396 - DNA, 20 bp, Artificial Sequence
  Description of Artificial Sequence: Synthetic oligonucleotide
  Target: LAMA2; (+) strand; PAM type: NRG; PAM sequence: GAG
ttattttgcaactaaaatat

SEQ ID NO: 182397 - DNA, 20 bp, Artificial Sequence
  Description of Artificial Sequence: Synthetic oligonucleotide
  Target: LAMA2; (+) strand; PAM type: NRG; PAM sequence: AGG
tattttgcaactaaaatatg

SEQ ID NO: 182398 - DNA, 20 bp, Artificial Sequence
  Description of Artificial Sequence: Synthetic oligonucleotide
  Target: LAMA2; (+) strand; PAM type: NRG; PAM sequence: CAG
tttgcaactaaaatatgagg

SEQ ID NO: 182399 - DNA, 20 bp, Artificial Sequence
  Description of Artificial Sequence: Synthetic oligonucleotide
  Target: LAMA2; (+) strand; PAM type: NRG; PAM sequence: TGG
tatgaggcagaaatttgatg

SEQ ID NO: 182400 - DNA, 20 bp, Artificial Sequence
  Description of Artificial Sequence: Synthetic oligonucleotide
  Target: LAMA2; (+) strand; PAM type: NRG; PAM sequence: AAG
tgatgtggataaatattgaa

SEQ ID NO: 182401 - DNA, 20 bp, Artificial Sequence
  Description of Artificial Sequence: Synthetic oligonucleotide
  Target: LAMA2; (+) strand; PAM type: NRG; PAM sequence: CAG
taaatattgaaaagtctgca

SEQ ID NO: 182402 - DNA, 20 bp, Artificial Sequence
  Description of Artificial Sequence: Synthetic oligonucleotide
  Target: LAMA2; (+) strand; PAM type: NRG; PAM sequence: TAG
atattgaaaagtctgcacag

SEQ ID NO: 182403 - DNA, 20 bp, Artificial Sequence
  Description of Artificial Sequence: Synthetic oligonucleotide
  Target: LAMA2; (+) strand; PAM type: NRG; PAM sequence: TGG
aaactccatgatttgaaaat

SEQ ID NO: 182404 - DNA, 20 bp, Artificial Sequence
  Description of Artificial Sequence: Synthetic oligonucleotide
  Target: LAMA2; (+) strand; PAM type: NRG; PAM sequence: TAG
ccatgatttgaaaattggaa

SEQ ID NO: 182405 - DNA, 20 bp, Artificial Sequence
  Description of Artificial Sequence: Synthetic oligonucleotide
  Target: LAMA2; (+) strand; PAM type: NRG; PAM sequence: CAG
ttgaaaattggaatagaaaa

SEQ ID NO: 182406 - DNA, 20 bp, Artificial Sequence
  Description of Artificial Sequence: Synthetic oligonucleotide
  Target: LAMA2; (+) strand; PAM type: NRG; PAM sequence: CAG
aaacagattatacattttac

SEQ ID NO: 182407 - DNA, 20 bp, Artificial Sequence
  Description of Artificial Sequence: Synthetic oligonucleotide
  Target: LAMA2; (+) strand; PAM type: NRG; PAM sequence: TGG
cagctcttgtgtcatttaac

SEQ ID NO: 182408 - DNA, 20 bp, Artificial Sequence
  Description of Artificial Sequence: Synthetic oligonucleotide
  Target: LAMA2; (+) strand; PAM type: NRG; PAM sequence: TGG
taactggtcttgaaacactg

SEQ ID NO: 182409 - DNA, 20 bp, Artificial Sequence
  Description of Artificial Sequence: Synthetic oligonucleotide
  Target: LAMA2; (+) strand; PAM type: NRG; PAM sequence: GGG
aactggtcttgaaacactgt

SEQ ID NO: 182410 - DNA, 20 bp, Artificial Sequence
  Description of Artificial Sequence: Synthetic oligonucleotide
  Target: LAMA2; (+) strand; PAM type: NRG; PAM sequence: GAG
ctggtcttgaaacactgtgg

SEQ ID NO: 182411 - DNA, 20 bp, Artificial Sequence
  Description of Artificial Sequence: Synthetic oligonucleotide
  Target: LAMA2; (+) strand; PAM type: NRG; PAM sequence: AGG
tggtcttgaaacactgtggg

SEQ ID NO: 182412 - DNA, 20 bp, Artificial Sequence
  Description of Artificial Sequence: Synthetic oligonucleotide
  Target: LAMA2; (+) strand; PAM type: NRG; PAM sequence: TAG
gaaacactgtgggaggaaaa

SEQ ID NO: 182413 - DNA, 20 bp, Artificial Sequence
  Description of Artificial Sequence: Synthetic oligonucleotide
  Target: LAMA2; (+) strand; PAM type: NRG; PAM sequence: AAG
gaggaaaatagcctacatta

SEQ ID NO: 182414 - DNA, 20 bp, Artificial Sequence
  Description of Artificial Sequence: Synthetic oligonucleotide
  Target: LAMA2; (+) strand; PAM type: NRG; PAM sequence: AGG
aggaaaatagcctacattaa

SEQ ID NO: 182415 - DNA, 20 bp, Artificial Sequence
  Description of Artificial Sequence: Synthetic oligonucleotide
  Target: LAMA2; (+) strand; PAM type: NRG; PAM sequence: TAG
gcttttactcctacaaaatc

SEQ ID NO: 182416 - DNA, 20 bp, Artificial Sequence
  Description of Artificial Sequence: Synthetic oligonucleotide
  Target: LAMA2; (+) strand; PAM type: NRG; PAM sequence: AGG
cttttactcctacaaaatct

SEQ ID NO: 182417 - DNA, 20 bp, Artificial Sequence
  Description of Artificial Sequence: Synthetic oligonucleotide
  Target: LAMA2; (+) strand; PAM type: NRG; PAM sequence: AAG
actttaaaaatgaatatttt

SEQ ID NO: 182418 - DNA, 20 bp, Artificial Sequence
  Description of Artificial Sequence: Synthetic oligonucleotide
  Target: LAMA2; (+) strand; PAM type: NRG; PAM sequence: TGG
actttaaattcctaactaca

SEQ ID NO: 182419 - DNA, 20 bp, Artificial Sequence
  Description of Artificial Sequence: Synthetic oligonucleotide
  Target: LAMA2; (+) strand; PAM type: NRG; PAM sequence: GGG
ctttaaattcctaactacat

SEQ ID NO: 182420 - DNA, 20 bp, Artificial Sequence
  Description of Artificial Sequence: Synthetic oligonucleotide
  Target: LAMA2; (+) strand; PAM type: NRG; PAM sequence: TAG
gggcttgcttaaataaatac

SEQ ID NO: 182421 - DNA, 20 bp, Artificial Sequence
  Description of Artificial Sequence: Synthetic oligonucleotide
  Target: LAMA2; (+) strand; PAM type: NRG; PAM sequence: AAG
taaatactagcaaattcata

SEQ ID NO: 182422 - DNA, 20 bp, Artificial Sequence
  Description of Artificial Sequence: Synthetic oligonucleotide
  Target: LAMA2; (+) strand; PAM type: NRG; PAM sequence: TAG
atactagcaaattcataaag

SEQ ID NO: 182423 - DNA, 20 bp, Artificial Sequence
  Description of Artificial Sequence: Synthetic oligonucleotide
  Target: LAMA2; (+) strand; PAM type: NRG; PAM sequence: AAG
tagcaaattcataaagtaga

SEQ ID NO: 182424 - DNA, 20 bp, Artificial Sequence
  Description of Artificial Sequence: Synthetic oligonucleotide
  Target: LAMA2; (+) strand; PAM type: NRG; PAM sequence: AAG
gaaagtcctcctgccattaa

SEQ ID NO: 182425 - DNA, 20 bp, Artificial Sequence
  Description of Artificial Sequence: Synthetic oligonucleotide
  Target: LAMA2; (+) strand; PAM type: NRG; PAM sequence: GAG
agtgactatctacatttact

SEQ ID NO: 182426 - DNA, 20 bp, Artificial Sequence
  Description of Artificial Sequence: Synthetic oligonucleotide
  Target: LAMA2; (+) strand; PAM type: NRG; PAM sequence: GAG
tgactatctacatttactga

SEQ ID NO: 182427 - DNA, 20 bp, Artificial Sequence
  Description of Artificial Sequence: Synthetic oligonucleotide
  Target: LAMA2; (+) strand; PAM type: NRG; PAM sequence: GAG
actatctacatttactgaga

SEQ ID NO: 182428 - DNA, 20 bp, Artificial Sequence
  Description of Artificial Sequence: Synthetic oligonucleotide
  Target: LAMA2; (+) strand; PAM type: NRG; PAM sequence: AAG
gtgatatcttccacatatgt

SEQ ID NO: 182429 - DNA, 20 bp, Artificial Sequence
  Description of Artificial Sequence: Synthetic oligonucleotide
  Target: LAMA2; (+) strand; PAM type: NRG; PAM sequence: AAG
tccacatatgtaagaaaaaa

SEQ ID NO: 182430 - DNA, 20 bp, Artificial Sequence
  Description of Artificial Sequence: Synthetic oligonucleotide
  Target: LAMA2; (+) strand; PAM type: NRG; PAM sequence: TAG
atgtaagaaaaaaaagtcat

SEQ ID NO: 182431 - DNA, 20 bp, Artificial Sequence
  Description of Artificial Sequence: Synthetic oligonucleotide
  Target: LAMA2; (+) strand; PAM type: NRG; PAM sequence: AGG
tgtaagaaaaaaaagtcatt

SEQ ID NO: 182432 - DNA, 20 bp, Artificial Sequence
  Description of Artificial Sequence: Synthetic oligonucleotide
  Target: LAMA2; (+) strand; PAM type: NRG; PAM sequence: AAG
taggaatgaacatgtctatc

SEQ ID NO: 182433 - DNA, 20 bp, Artificial Sequence
  Description of Artificial Sequence: Synthetic oligonucleotide
  Target: LAMA2; (+) strand; PAM type: NRG; PAM sequence: CAG
atcaagattcattttaaata

SEQ ID NO: 182434 - DNA, 20 bp, Artificial Sequence
  Description of Artificial Sequence: Synthetic oligonucleotide
  Target: LAMA2; (+) strand; PAM type: NRG; PAM sequence: AGG
tcaagattcattttaaatac

SEQ ID NO: 182435 - DNA, 20 bp, Artificial Sequence
  Description of Artificial Sequence: Synthetic oligonucleotide
  Target: LAMA2; (+) strand; PAM type: NRG; PAM sequence: GGG
caagattcattttaaataca

SEQ ID NO: 182436 - DNA, 20 bp, Artificial Sequence
  Description of Artificial Sequence: Synthetic oligonucleotide
  Target: LAMA2; (+) strand; PAM type: NRG; PAM sequence: GAG
agattcattttaaatacagg

SEQ ID NO: 182437 - DNA, 20 bp, Artificial Sequence
  Description of Artificial Sequence: Synthetic oligonucleotide
  Target: LAMA2; (+) strand; PAM type: NRG; PAM sequence: AGG
gattcattttaaatacaggg

SEQ ID NO: 182438 - DNA, 20 bp, Artificial Sequence
  Description of Artificial Sequence: Synthetic oligonucleotide
  Target: LAMA2; (+) strand; PAM type: NRG; PAM sequence: GAG
ttcattttaaatacagggag

SEQ ID NO: 182439 - DNA, 20 bp, Artificial Sequence
  Description of Artificial Sequence: Synthetic oligonucleotide
  Target: LAMA2; (+) strand; PAM type: NRG; PAM sequence: AGG
tcattttaaatacagggagg

SEQ ID NO: 182440 - DNA, 20 bp, Artificial Sequence
  Description of Artificial Sequence: Synthetic oligonucleotide
  Target: LAMA2; (+) strand; PAM type: NRG; PAM sequence: GAG
attttaaatacagggaggag

SEQ ID NO: 182441 - DNA, 20 bp, Artificial Sequence
  Description of Artificial Sequence: Synthetic oligonucleotide
  Target: LAMA2; (+) strand; PAM type: NRG; PAM sequence: GAG
tttaaatacagggaggagga

SEQ ID NO: 182442 - DNA, 20 bp, Artificial Sequence
  Description of Artificial Sequence: Synthetic oligonucleotide
  Target: LAMA2; (+) strand; PAM type: NRG; PAM sequence: GAG
taaatacagggaggaggaga

SEQ ID NO: 182443 - DNA, 20 bp, Artificial Sequence
  Description of Artificial Sequence: Synthetic oligonucleotide
  Target: LAMA2; (+) strand; PAM type: NRG; PAM sequence: AGG
aaatacagggaggaggagag

SEQ ID NO: 182444 - DNA, 20 bp, Artificial Sequence
  Description of Artificial Sequence: Synthetic oligonucleotide
  Target: LAMA2; (+) strand; PAM type: NRG; PAM sequence: AAG
tacagggaggaggagagagg

SEQ ID NO: 182445 - DNA, 20 bp, Artificial Sequence
  Description of Artificial Sequence: Synthetic oligonucleotide
  Target: LAMA2; (+) strand; PAM type: NRG; PAM sequence: TGG
gggaggaggagagaggaaga

SEQ ID NO: 182446 - DNA, 20 bp, Artificial Sequence
  Description of Artificial Sequence: Synthetic oligonucleotide
  Target: LAMA2; (+) strand; PAM type: NRG; PAM sequence: AAG
ggaggagagaggaagatggc

SEQ ID NO: 182447 - DNA, 20 bp, Artificial Sequence
  Description of Artificial Sequence: Synthetic oligonucleotide
  Target: LAMA2; (+) strand; PAM type: NRG; PAM sequence: AGG
gaggagagaggaagatggca

SEQ ID NO: 182448 - DNA, 20 bp, Artificial Sequence
  Description of Artificial Sequence: Synthetic oligonucleotide
  Target: LAMA2; (+) strand; PAM type: NRG; PAM sequence: AAG
ggaagatggcaaggttgtga

SEQ ID NO: 182449 - DNA, 20 bp, Artificial Sequence
  Description of Artificial Sequence: Synthetic oligonucleotide
  Target: LAMA2; (+) strand; PAM type: NRG; PAM sequence: GAG
aagatggcaaggttgtgaaa

SEQ ID NO: 182450 - DNA, 20 bp, Artificial Sequence
  Description of Artificial Sequence: Synthetic oligonucleotide
  Target: LAMA2; (+) strand; PAM type: NRG; PAM sequence: TAG
atgaatgaatgaatgaatta

SEQ ID NO: 182451 - DNA, 20 bp, Artificial Sequence
  Description of Artificial Sequence: Synthetic oligonucleotide
  Target: LAMA2; (+) strand; PAM type: NRG; PAM sequence: AAG
atgaatgaatgaattataga

SEQ ID NO: 182452 - DNA, 20 bp, Artificial Sequence
  Description of Artificial Sequence: Synthetic oligonucleotide
  Target: LAMA2; (+) strand; PAM type: NRG; PAM sequence: CAG
gaaagctatatgcttctgca

SEQ ID NO: 182453 - DNA, 20 bp, Artificial Sequence
  Description of Artificial Sequence: Synthetic oligonucleotide
  Target: LAMA2; (+) strand; PAM type: NRG; PAM sequence: GAG
atatgcttctgcacagcttt

SEQ ID NO: 182454 - DNA, 20 bp, Artificial Sequence
  Description of Artificial Sequence: Synthetic oligonucleotide
  Target: LAMA2; (+) strand; PAM type: NRG; PAM sequence: GAG
ttctgcacagctttgagatt

SEQ ID NO: 182455 - DNA, 20 bp, Artificial Sequence
  Description of Artificial Sequence: Synthetic oligonucleotide
  Target: LAMA2; (+) strand; PAM type: NRG; PAM sequence: TGG
gcacagctttgagattgaga

SEQ ID NO: 182456 - DNA, 20 bp, Artificial Sequence
  Description of Artificial Sequence: Synthetic oligonucleotide
  Target: LAMA2; (+) strand; PAM type: NRG; PAM sequence: GGG
cacagctttgagattgagat

SEQ ID NO: 182457 - DNA, 20 bp, Artificial Sequence
  Description of Artificial Sequence: Synthetic oligonucleotide
  Target: LAMA2; (+) strand; PAM type: NRG; PAM sequence: GGG
acagctttgagattgagatg

SEQ ID NO: 182458 - DNA, 20 bp, Artificial Sequence
  Description of Artificial Sequence: Synthetic oligonucleotide
  Target: LAMA2; (+) strand; PAM type: NRG; PAM sequence: GAG
agctttgagattgagatggg

SEQ ID NO: 182459 - DNA, 20 bp, Artificial Sequence
  Description of Artificial Sequence: Synthetic oligonucleotide
  Target: LAMA2; (+) strand; PAM type: NRG; PAM sequence: GAG
aactgttttaattttatact

SEQ ID NO: 182460 - DNA, 20 bp, Artificial Sequence
  Description of Artificial Sequence: Synthetic oligonucleotide
  Target: LAMA2; (+) strand; PAM type: NRG; PAM sequence: AAG
gttttaattttatactgagc

SEQ ID NO: 182461 - DNA, 20 bp, Artificial Sequence
  Description of Artificial Sequence: Synthetic oligonucleotide
  Target: LAMA2; (+) strand; PAM type: NRG; PAM sequence: AGG
ttttaattttatactgagca

SEQ ID NO: 182462 - DNA, 20 bp, Artificial Sequence
  Description of Artificial Sequence: Synthetic oligonucleotide
  Target: LAMA2; (+) strand; PAM type: NRG; PAM sequence: TGG
tttatactgagcaaggacaa

SEQ ID NO: 182463 - DNA, 20 bp, Artificial Sequence
  Description of Artificial Sequence: Synthetic oligonucleotide
  Target: LAMA2; (+) strand; PAM type: NRG; PAM sequence: GAG
aatggtattactttaatatt

SEQ ID NO: 182464 - DNA, 20 bp, Artificial Sequence
  Description of Artificial Sequence: Synthetic oligonucleotide
  Target: LAMA2; (+) strand; PAM type: NRG; PAM sequence: TAG
ctttaatattgagaaaaaac

SEQ ID NO: 182465 - DNA, 20 bp, Artificial Sequence
  Description of Artificial Sequence: Synthetic oligonucleotide
  Target: LAMA2; (+) strand; PAM type: NRG; PAM sequence: AAG
tgtttgttttatttattttt

SEQ ID NO: 182466 - DNA, 20 bp, Artificial Sequence
  Description of Artificial Sequence: Synthetic oligonucleotide
  Target: LAMA2; (+) strand; PAM type: NRG; PAM sequence: AGG
gtttgttttatttattttta

SEQ ID NO: 182467 - DNA, 20 bp, Artificial Sequence
  Description of Artificial Sequence: Synthetic oligonucleotide
  Target: LAMA2; (+) strand; PAM type: NRG; PAM sequence: TGG
ttttatttatttttaaggtt

SEQ ID NO: 182468 - DNA, 20 bp, Artificial Sequence
  Description of Artificial Sequence: Synthetic oligonucleotide
  Target: LAMA2; (+) strand; PAM type: NRG; PAM sequence: TGG
ttaaggtttggtcttatcac

SEQ ID NO: 182469 - DNA, 20 bp, Artificial Sequence
  Description of Artificial Sequence: Synthetic oligonucleotide
  Target: LAMA2; (+) strand; PAM type: NRG; PAM sequence: GGG
taaggtttggtcttatcact

SEQ ID NO: 182470 - DNA, 20 bp, Artificial Sequence
  Description of Artificial Sequence: Synthetic oligonucleotide
  Target: LAMA2; (+) strand; PAM type: NRG; PAM sequence: GGG
aaggtttggtcttatcactg

SEQ ID NO: 182471 - DNA, 20 bp, Artificial Sequence
  Description of Artificial Sequence: Synthetic oligonucleotide
  Target: LAMA2; (+) strand; PAM type: NRG; PAM sequence: CAG
cttatcactggggaaaaatg

SEQ ID NO: 182472 - DNA, 20 bp, Artificial Sequence
  Description of Artificial Sequence: Synthetic oligonucleotide
  Target: LAMA2; (+) strand; PAM type: NRG; PAM sequence: CAG
actggggaaaaatgcagaca

SEQ ID NO: 182473 - DNA, 20 bp, Artificial Sequence
  Description of Artificial Sequence: Synthetic oligonucleotide
  Target: LAMA2; (+) strand; PAM type: NRG; PAM sequence: TGG
aaaaatgcagacacagataa

SEQ ID NO: 182474 - DNA, 20 bp, Artificial Sequence
  Description of Artificial Sequence: Synthetic oligonucleotide
  Target: LAMA2; (+) strand; PAM type: NRG; PAM sequence: AAG
tctgtaaaacataaacaatt

SEQ ID NO: 182475 - DNA, 20 bp, Artificial Sequence
  Description of Artificial Sequence: Synthetic oligonucleotide
  Target: LAMA2; (+) strand; PAM type: NRG; PAM sequence: TAG
aaacataaacaattaagtga

SEQ ID NO: 182476 - DNA, 20 bp, Artificial Sequence
  Description of Artificial Sequence: Synthetic oligonucleotide
  Target: LAMA2; (+) strand; PAM type: NRG; PAM sequence: GAG
acataaacaattaagtgata

SEQ ID NO: 182477 - DNA, 20 bp, Artificial Sequence
  Description of Artificial Sequence: Synthetic oligonucleotide
  Target: LAMA2; (+) strand; PAM type: NRG; PAM sequence: AAG
ttaagtgatagagtttattc

SEQ ID NO: 182478 - DNA, 20 bp, Artificial Sequence
  Description of Artificial Sequence: Synthetic oligonucleotide
  Target: LAMA2; (+) strand; PAM type: NRG; PAM sequence: GAG
aagtgatagagtttattcaa

SEQ ID NO: 182479 - DNA, 20 bp, Artificial Sequence
  Description of Artificial Sequence: Synthetic oligonucleotide
  Target: LAMA2; (+) strand; PAM type: NRG; PAM sequence: CAG
tattcaagagatattcgtta

SEQ ID NO: 182480 - DNA, 20 bp, Artificial Sequence
  Description of Artificial Sequence: Synthetic oligonucleotide
  Target: LAMA2; (+) strand; PAM type: NRG; PAM sequence: AAG
tattcgttacagtgttttca

SEQ ID NO: 182481 - DNA, 20 bp, Artificial Sequence
  Description of Artificial Sequence: Synthetic oligonucleotide
  Target: LAMA2; (+) strand; PAM type: NRG; PAM sequence: AGG
attcgttacagtgttttcaa

SEQ ID NO: 182482 - DNA, 20 bp, Artificial Sequence
  Description of Artificial Sequence: Synthetic oligonucleotide
  Target: LAMA2; (+) strand; PAM type: NRG; PAM sequence: TAG
cagtgttttcaaaggaaact

SEQ ID NO: 182483 - DNA, 20 bp, Artificial Sequence
  Description of Artificial Sequence: Synthetic oligonucleotide
  Target: LAMA2; (+) strand; PAM type: NRG; PAM sequence: AGG
agtgttttcaaaggaaactt

SEQ ID NO: 182484 - DNA, 20 bp, Artificial Sequence
  Description of Artificial Sequence: Synthetic oligonucleotide
  Target: LAMA2; (+) strand; PAM type: NRG; PAM sequence: GGG
gtgttttcaaaggaaactta

SEQ ID NO: 182485 - DNA, 20 bp, Artificial Sequence
  Description of Artificial Sequence: Synthetic oligonucleotide
  Target: LAMA2; (+) strand; PAM type: NRG; PAM sequence: TAG
aaacttagggacaatctccc

SEQ ID NO: 182486 - DNA, 20 bp, Artificial Sequence
  Description of Artificial Sequence: Synthetic oligonucleotide
  Target: LAMA2; (+) strand; PAM type: NRG; PAM sequence: CAG
acatgtacctgcttgtgtgt

SEQ ID NO: 182487 - DNA, 20 bp, Artificial Sequence
  Description of Artificial Sequence: Synthetic oligonucleotide
  Target: LAMA2; (+) strand; PAM type: NRG; PAM sequence: TGG
gtcagtttgacttaaatctt

SEQ ID NO: 182488 - DNA, 20 bp, Artificial Sequence
  Description of Artificial Sequence: Synthetic oligonucleotide
  Target: LAMA2; (+) strand; PAM type: NRG; PAM sequence: AAG
ttaaacaacaacaacaaaaa

SEQ ID NO: 182489 - DNA, 20 bp, Artificial Sequence
  Description of Artificial Sequence: Synthetic oligonucleotide
  Target: LAMA2; (+) strand; PAM type: NRG; PAM sequence: AGG
taaacaacaacaacaaaaaa

SEQ ID NO: 182490 - DNA, 20 bp, Artificial Sequence
  Description of Artificial Sequence: Synthetic oligonucleotide
  Target: LAMA2; (+) strand; PAM type: NRG; PAM sequence: CAG
caacaaaaaaaggtacctaa

SEQ ID NO: 182491 - DNA, 20 bp, Artificial Sequence
  Description of Artificial Sequence: Synthetic oligonucleotide
  Target: LAMA2; (+) strand; PAM type: NRG; PAM sequence: AAG
tcttctatatttaaaatcaa

SEQ ID NO: 182492 - DNA, 20 bp, Artificial Sequence
  Description of Artificial Sequence: Synthetic oligonucleotide
  Target: LAMA2; (+) strand; PAM type: NRG; PAM sequence: TAG
atatttaaaatcaaaagctc

SEQ ID NO: 182493 - DNA, 20 bp, Artificial Sequence
  Description of Artificial Sequence: Synthetic oligonucleotide
  Target: LAMA2; (+) strand; PAM type: NRG; PAM sequence: AAG
aatcaaaagctctagaataa

SEQ ID NO: 182494 - DNA, 20 bp, Artificial Sequence
  Description of Artificial Sequence: Synthetic oligonucleotide
  Target: LAMA2; (+) strand; PAM type: NRG; PAM sequence: TAG
caaaagctctagaataaaag

SEQ ID NO: 182495 - DNA, 20 bp, Artificial Sequence
  Description of Artificial Sequence: Synthetic oligonucleotide
  Target: LAMA2; (+) strand; PAM type: NRG; PAM sequence: GAG
aaagctctagaataaaagta

SEQ ID NO: 182496 - DNA, 20 bp, Artificial Sequence
  Description of Artificial Sequence: Synthetic oligonucleotide
  Target: LAMA2; (+) strand; PAM type: NRG; PAM sequence: AGG
aagctctagaataaaagtag

SEQ ID NO: 182497 - DNA, 20 bp, Artificial Sequence
  Description of Artificial Sequence: Synthetic oligonucleotide
  Target: LAMA2; (+) strand; PAM type: NRG; PAM sequence: CAG
tgattttaacaaaaactgct

SEQ ID NO: 182498 - DNA, 20 bp, Artificial Sequence
  Description of Artificial Sequence: Synthetic oligonucleotide
  Target: LAMA2; (+) strand; PAM type: NRG; PAM sequence: AAG
ttttaacaaaaactgctcag

SEQ ID NO: 182499 - DNA, 20 bp, Artificial Sequence
  Description of Artificial Sequence: Synthetic oligonucleotide
  Target: LAMA2; (+) strand; PAM type: NRG; PAM sequence: AAG
aaaactgctcagaagatttg

SEQ ID NO: 182500 - DNA, 20 bp, Artificial Sequence
  Description of Artificial Sequence: Synthetic oligonucleotide
  Target: LAMA2; (+) strand; PAM type: NRG; PAM sequence: TAG
atttgaagttatcatataac

SEQ ID NO: 182501 - DNA, 20 bp, Artificial Sequence
  Description of Artificial Sequence: Synthetic oligonucleotide
  Target: LAMA2; (+) strand; PAM type: NRG; PAM sequence: GAG
ataatcacattaattgcatc

SEQ ID NO: 182502 - DNA, 20 bp, Artificial Sequence
  Description of Artificial Sequence: Synthetic oligonucleotide
  Target: LAMA2; (+) strand; PAM type: NRG; PAM sequence: AGG
taatcacattaattgcatcg

SEQ ID NO: 182503 - DNA, 20 bp, Artificial Sequence
  Description of Artificial Sequence: Synthetic oligonucleotide
  Target: LAMA2; (+) strand; PAM type: NRG; PAM sequence: GAG
atcacattaattgcatcgag

SEQ ID NO: 182504 - DNA, 20 bp, Artificial Sequence
  Description of Artificial Sequence: Synthetic oligonucleotide
  Target: LAMA2; (+) strand; PAM type: NRG; PAM sequence: AGG
tcacattaattgcatcgagg

SEQ ID NO: 182505 - DNA, 20 bp, Artificial Sequence
  Description of Artificial Sequence: Synthetic oligonucleotide
  Target: LAMA2; (+) strand; PAM type: NRG; PAM sequence: GGG
cacattaattgcatcgagga

SEQ ID NO: 182506 - DNA, 20 bp, Artificial Sequence
  Description of Artificial Sequence: Synthetic oligonucleotide
  Target: LAMA2; (+) strand; PAM type: NRG; PAM sequence: GAG
ttaattgcatcgaggagggt

SEQ ID NO: 182507 - DNA, 20 bp, Artificial Sequence
  Description of Artificial Sequence: Synthetic oligonucleotide
  Target: LAMA2; (+) strand; PAM type: NRG; PAM sequence: GAG
ttgcatcgaggagggtgagt

SEQ ID NO: 182508 - DNA, 20 bp, Artificial Sequence
  Description of Artificial Sequence: Synthetic oligonucleotide
  Target: LAMA2; (+) strand; PAM type: NRG; PAM sequence: TGG
atcgaggagggtgagtgaga

SEQ ID NO: 182509 - DNA, 20 bp, Artificial Sequence
  Description of Artificial Sequence: Synthetic oligonucleotide
  Target: LAMA2; (+) strand; PAM type: NRG; PAM sequence: GAG
cgaggagggtgagtgagatg

SEQ ID NO: 182510 - DNA, 20 bp, Artificial Sequence
  Description of Artificial Sequence: Synthetic oligonucleotide
  Target: LAMA2; (+) strand; PAM type: NRG; PAM sequence: TGG
atttaaattttcatttctaa

SEQ ID NO: 182511 - DNA, 20 bp, Artificial Sequence
  Description of Artificial Sequence: Synthetic oligonucleotide
  Target: LAMA2; (+) strand; PAM type: NRG; PAM sequence: CAG
ctcttcttttcctttactca

SEQ ID NO: 182512 - DNA, 20 bp, Artificial Sequence
  Description of Artificial Sequence: Synthetic oligonucleotide
  Target: LAMA2; (+) strand; PAM type: NRG; PAM sequence: CAG
ttactcacagaatgtttaca

SEQ ID NO: 182513 - DNA, 20 bp, Artificial Sequence
  Description of Artificial Sequence: Synthetic oligonucleotide
  Target: LAMA2; (+) strand; PAM type: NRG; PAM sequence: TAG
tcacagaatgtttacacagt

SEQ ID NO: 182514 - DNA, 20 bp, Artificial Sequence
  Description of Artificial Sequence: Synthetic oligonucleotide
  Target: LAMA2; (+) strand; PAM type: NRG; PAM sequence: AAG
tttacacagttagctttcct

SEQ ID NO: 182515 - DNA, 20 bp, Artificial Sequence
  Description of Artificial Sequence: Synthetic oligonucleotide
  Target: LAMA2; (+) strand; PAM type: NRG; PAM sequence: TGG
acagttagctttcctaagcc

SEQ ID NO: 182516 - DNA, 20 bp, Artificial Sequence
  Description of Artificial Sequence: Synthetic oligonucleotide
  Target: LAMA2; (+) strand; PAM type: NRG; PAM sequence: TGG
ctttcctaagcctggttttg

SEQ ID NO: 182517 - DNA, 20 bp, Artificial Sequence
  Description of Artificial Sequence: Synthetic oligonucleotide
  Target: LAMA2; (+) strand; PAM type: NRG; PAM sequence: GAG
ttcctaagcctggttttgtg

SEQ ID NO: 182518 - DNA, 20 bp, Artificial Sequence
  Description of Artificial Sequence: Synthetic oligonucleotide
  Target: LAMA2; (+) strand; PAM type: NRG; PAM sequence: TAG
ctcccctgtgccaattgatg

SEQ ID NO: 182519 - DNA, 20 bp, Artificial Sequence
  Description of Artificial Sequence: Synthetic oligonucleotide
  Target: LAMA2; (+) strand; PAM type: NRG; PAM sequence: AGG
tcccctgtgccaattgatgt

SEQ ID NO: 182520 - DNA, 20 bp, Artificial Sequence
  Description of Artificial Sequence: Synthetic oligonucleotide
  Target: LAMA2; (+) strand; PAM type: NRG; PAM sequence: CAG
tgtgccaattgatgtaggaa

SEQ ID NO: 182521 - DNA, 20 bp, Artificial Sequence
  Description of Artificial Sequence: Synthetic oligonucleotide
  Target: LAMA2; (+) strand; PAM type: NRG; PAM sequence: CAG
acagaaatcaacctgtcatt

SEQ ID NO: 182522 - DNA, 20 bp, Artificial Sequence
  Description of Artificial Sequence: Synthetic oligonucleotide
  Target: LAMA2; (+) strand; PAM type: NRG; PAM sequence: AAG
tcaacctgtcattcagcacc

SEQ ID NO: 182523 - DNA, 20 bp, Artificial Sequence
  Description of Artificial Sequence: Synthetic oligonucleotide
  Target: LAMA2; (+) strand; PAM type: NRG; PAM sequence: GAG
tgtcattcagcaccaagaat

SEQ ID NO: 182524 - DNA, 20 bp, Artificial Sequence
  Description of Artificial Sequence: Synthetic oligonucleotide
  Target: LAMA2; (+) strand; PAM type: NRG; PAM sequence: CGG
ttcagcaccaagaatgagtc

SEQ ID NO: 182525 - DNA, 20 bp, Artificial Sequence
  Description of Artificial Sequence: Synthetic oligonucleotide
  Target: LAMA2; (+) strand; PAM type: NRG; PAM sequence: TGG
tgagtccggcatcattcttt

SEQ ID NO: 182526 - DNA, 20 bp, Artificial Sequence
  Description of Artificial Sequence: Synthetic oligonucleotide
  Target: LAMA2; (+) strand; PAM type: NRG; PAM sequence: GGG
gagtccggcatcattctttt

SEQ ID NO: 182527 - DNA, 20 bp, Artificial Sequence
  Description of Artificial Sequence: Synthetic oligonucleotide
  Target: LAMA2; (+) strand; PAM type: NRG; PAM sequence: AAG
tccggcatcattcttttggg

SEQ ID NO: 182528 - DNA, 20 bp, Artificial Sequence
  Description of Artificial Sequence: Synthetic oligonucleotide
  Target: LAMA2; (+) strand; PAM type: NRG; PAM sequence: TGG
ggcatcattcttttgggaag

SEQ ID NO: 182529 - DNA, 20 bp, Artificial Sequence
  Description of Artificial Sequence: Synthetic oligonucleotide
  Target: LAMA2; (+) strand; PAM type: NRG; PAM sequence: GAG
catcattcttttgggaagtg

SEQ ID NO: 182530 - DNA, 20 bp, Artificial Sequence
  Description of Artificial Sequence: Synthetic oligonucleotide
  Target: LAMA2; (+) strand; PAM type: NRG; PAM sequence: AGG
atcattcttttgggaagtgg

SEQ ID NO: 182531 - DNA, 20 bp, Artificial Sequence
  Description of Artificial Sequence: Synthetic oligonucleotide
  Target: LAMA2; (+) strand; PAM type: NRG; PAM sequence: GGG
tcattcttttgggaagtgga

SEQ ID NO: 182532 - DNA, 20 bp, Artificial Sequence
  Description of Artificial Sequence: Synthetic oligonucleotide
  Target: LAMA2; (+) strand; PAM type: NRG; PAM sequence: CAG
tttgggaagtggagggacac

SEQ ID NO: 182533 - DNA, 20 bp, Artificial Sequence
  Description of Artificial Sequence: Synthetic oligonucleotide
  Target: LAMA2; (+) strand; PAM type: NRG; PAM sequence: TAG
ggagggacaccagcaccacc

SEQ ID NO: 182534 - DNA, 20 bp, Artificial Sequence
  Description of Artificial Sequence: Synthetic oligonucleotide
  Target: LAMA2; (+) strand; PAM type: NRG; PAM sequence: AGG
gagggacaccagcaccacct

SEQ ID NO: 182535 - DNA, 20 bp, Artificial Sequence
  Description of Artificial Sequence: Synthetic oligonucleotide
  Target: LAMA2; (+) strand; PAM type: NRG; PAM sequence: GAG
gggacaccagcaccacctag

SEQ ID NO: 182536 - DNA, 20 bp, Artificial Sequence
  Description of Artificial Sequence: Synthetic oligonucleotide
  Target: LAMA2; (+) strand; PAM type: NRG; PAM sequence: AAG
gcaccacctaggagaaaacg

SEQ ID NO: 182537 - DNA, 20 bp, Artificial Sequence
  Description of Artificial Sequence: Synthetic oligonucleotide
  Target: LAMA2; (+) strand; PAM type: NRG; PAM sequence: AGG
caccacctaggagaaaacga

SEQ ID NO: 182538 - DNA, 20 bp, Artificial Sequence
  Description of Artificial Sequence: Synthetic oligonucleotide
  Target: LAMA2; (+) strand; PAM type: NRG; PAM sequence: CAG
cacctaggagaaaacgaagg

SEQ ID NO: 182539 - DNA, 20 bp, Artificial Sequence
  Description of Artificial Sequence: Synthetic oligonucleotide
  Target: LAMA2; (+) strand; PAM type: NRG; PAM sequence: TGG
aggagaaaacgaaggcagac

SEQ ID NO: 182540 - DNA, 20 bp, Artificial Sequence
  Description of Artificial Sequence: Synthetic oligonucleotide
  Target: LAMA2; (+) strand; PAM type: NRG; PAM sequence: CAG
gaaaacgaaggcagactgga

SEQ ID NO: 182541 - DNA, 20 bp, Artificial Sequence
  Description of Artificial Sequence: Synthetic oligonucleotide
  Target: LAMA2; (+) strand; PAM type: NRG; PAM sequence: AGG
aaaacgaaggcagactggac

SEQ ID NO: 182542 - DNA, 20 bp, Artificial Sequence
  Description of Artificial Sequence: Synthetic oligonucleotide
  Target: LAMA2; (+) strand; PAM type: NRG; PAM sequence: TAG
tggacaggtaccctcacacc

SEQ ID NO: 182543 - DNA, 20 bp, Artificial Sequence
  Description of Artificial Sequence: Synthetic oligonucleotide
  Target: LAMA2; (+) strand; PAM type: NRG; PAM sequence: AAG
ttttccctaatgcttatata

SEQ ID NO: 182544 - DNA, 20 bp, Artificial Sequence
  Description of Artificial Sequence: Synthetic oligonucleotide
  Target: LAMA2; (+) strand; PAM type: NRG; PAM sequence: CAG
tccctaatgcttatataaag

SEQ ID NO: 182545 - DNA, 20 bp, Artificial Sequence
  Description of Artificial Sequence: Synthetic oligonucleotide
  Target: LAMA2; (+) strand; PAM type: NRG; PAM sequence: TAG
ttaacttacttttgtatttt

SEQ ID NO: 182546 - DNA, 20 bp, Artificial Sequence
  Description of Artificial Sequence: Synthetic oligonucleotide
  Target: LAMA2; (+) strand; PAM type: NRG; PAM sequence: TGG
atttatttctgctctcatct

SEQ ID NO: 182547 - DNA, 20 bp, Artificial Sequence
  Description of Artificial Sequence: Synthetic oligonucleotide
  Target: LAMA2; (+) strand; PAM type: NRG; PAM sequence: TAG
atttctgctctcatcttggc

SEQ ID NO: 182548 - DNA, 20 bp, Artificial Sequence
  Description of Artificial Sequence: Synthetic oligonucleotide
  Target: LAMA2; (+) strand; PAM type: NRG; PAM sequence: AAG
ctgctctcatcttggctagc

SEQ ID NO: 182549 - DNA, 20 bp, Artificial Sequence
  Description of Artificial Sequence: Synthetic oligonucleotide
  Target: LAMA2; (+) strand; PAM type: NRG; PAM sequence: AGG
tgctctcatcttggctagca

SEQ ID NO: 182550 - DNA, 20 bp, Artificial Sequence
  Description of Artificial Sequence: Synthetic oligonucleotide
  Target: LAMA2; (+) strand; PAM type: NRG; PAM sequence: TGG
aacattccatatttccatgc

SEQ ID NO: 182551 - DNA, 20 bp, Artificial Sequence
  Description of Artificial Sequence: Synthetic oligonucleotide
  Target: LAMA2; (+) strand; PAM type: NRG; PAM sequence: CAG
tttcactcacatcatctccc

SEQ ID NO: 182552 - DNA, 20 bp, Artificial Sequence
  Description of Artificial Sequence: Synthetic oligonucleotide
  Target: LAMA2; (+) strand; PAM type: NRG; PAM sequence: AGG
ttcactcacatcatctcccc

SEQ ID NO: 182553 - DNA, 20 bp, Artificial Sequence
  Description of Artificial Sequence: Synthetic oligonucleotide
  Target: LAMA2; (+) strand; PAM type: NRG; PAM sequence: TAG
cccaggacaattgtcttctc

SEQ ID NO: 182554 - DNA, 20 bp, Artificial Sequence
  Description of Artificial Sequence: Synthetic oligonucleotide
  Target: LAMA2; (+) strand; PAM type: NRG; PAM sequence: AGG
ccaggacaattgtcttctct

SEQ ID NO: 182555 - DNA, 20 bp, Artificial Sequence
  Description of Artificial Sequence: Synthetic oligonucleotide
  Target: LAMA2; (+) strand; PAM type: NRG; PAM sequence: TAG
atgttcctgttgatcaattg

SEQ ID NO: 182556 - DNA, 20 bp, Artificial Sequence
  Description of Artificial Sequence: Synthetic oligonucleotide
  Target: LAMA2; (+) strand; PAM type: NRG; PAM sequence: AGG
tgttcctgttgatcaattgt

SEQ ID NO: 182557 - DNA, 20 bp, Artificial Sequence
  Description of Artificial Sequence: Synthetic oligonucleotide
  Target: LAMA2; (+) strand; PAM type: NRG; PAM sequence: AAG
gttgatcaattgtaggtgca

SEQ ID NO: 182558 - DNA, 20 bp, Artificial Sequence
  Description of Artificial Sequence: Synthetic oligonucleotide
  Target: LAMA2; (+) strand; PAM type: NRG; PAM sequence: TGG
atttgcacctatatttccta

SEQ ID NO: 182559 - DNA, 20 bp, Artificial Sequence
  Description of Artificial Sequence: Synthetic oligonucleotide
  Target: LAMA2; (+) strand; PAM type: NRG; PAM sequence: GGG
tttgcacctatatttcctat

SEQ ID NO: 182560 - DNA, 20 bp, Artificial Sequence
  Description of Artificial Sequence: Synthetic oligonucleotide
  Target: LAMA2; (+) strand; PAM type: NRG; PAM sequence: AAG
gtttaacatatgcatatgta

SEQ ID NO: 182561 - DNA, 20 bp, Artificial Sequence
  Description of Artificial Sequence: Synthetic oligonucleotide
  Target: LAMA2; (+) strand; PAM type: NRG; PAM sequence: GAG
ttaacatatgcatatgtaaa

SEQ ID NO: 182562 - DNA, 20 bp, Artificial Sequence
  Description of Artificial Sequence: Synthetic oligonucleotide
  Target: LAMA2; (+) strand; PAM type: NRG; PAM sequence: AGG
taacatatgcatatgtaaag

SEQ ID NO: 182563 - DNA, 20 bp, Artificial Sequence
  Description of Artificial Sequence: Synthetic oligonucleotide
  Target: LAMA2; (+) strand; PAM type: NRG; PAM sequence: CAG
atatgcatatgtaaagagga

SEQ ID NO: 182564 - DNA, 20 bp, Artificial Sequence
  Description of Artificial Sequence: Synthetic oligonucleotide
  Target: LAMA2; (+) strand; PAM type: NRG; PAM sequence: AAG
tcttaatttctactgtctcc

SEQ ID NO: 182565 - DNA, 20 bp, Artificial Sequence
  Description of Artificial Sequence: Synthetic oligonucleotide
  Target: LAMA2; (+) strand; PAM type: NRG; PAM sequence: TAG
ccgactccttaccaaatctg

SEQ ID NO: 182566 - DNA, 20 bp, Artificial Sequence
  Description of Artificial Sequence: Synthetic oligonucleotide
  Target: LAMA2; (+) strand; PAM type: NRG; PAM sequence: CAG
ctccttaccaaatctgtaga

SEQ ID NO: 182567 - DNA, 20 bp, Artificial Sequence
  Description of Artificial Sequence: Synthetic oligonucleotide
  Target: LAMA2; (+) strand; PAM type: NRG; PAM sequence: CAG
ttaccaaatctgtagacagt

SEQ ID NO: 182568 - DNA, 20 bp, Artificial Sequence
  Description of Artificial Sequence: Synthetic oligonucleotide
  Target: LAMA2; (+) strand; PAM type: NRG; PAM sequence: CGG
aatctgtagacagtcagctt

SEQ ID NO: 182569 - DNA, 20 bp, Artificial Sequence
  Description of Artificial Sequence: Synthetic oligonucleotide
  Target: LAMA2; (+) strand; PAM type: NRG; PAM sequence: AAG
atttaaatgtaaattcctct

SEQ ID NO: 182570 - DNA, 20 bp, Artificial Sequence
  Description of Artificial Sequence: Synthetic oligonucleotide
  Target: LAMA2; (+) strand; PAM type: NRG; PAM sequence: CAG
ttcctctaagatcattttcc

SEQ ID NO: 182571 - DNA, 20 bp, Artificial Sequence
  Description of Artificial Sequence: Synthetic oligonucleotide
  Target: LAMA2; (+) strand; PAM type: NRG; PAM sequence: AAG
gatcattttcccagttgcac

SEQ ID NO: 182572 - DNA, 20 bp, Artificial Sequence
  Description of Artificial Sequence: Synthetic oligonucleotide
  Target: LAMA2; (+) strand; PAM type: NRG; PAM sequence: AAG
tttcccagttgcacaagctg

SEQ ID NO: 182573 - DNA, 20 bp, Artificial Sequence
  Description of Artificial Sequence: Synthetic oligonucleotide
  Target: LAMA2; (+) strand; PAM type: NRG; PAM sequence: TAG
agttgcacaagctgaagtaa

SEQ ID NO: 182574 - DNA, 20 bp, Artificial Sequence
  Description of Artificial Sequence: Synthetic oligonucleotide
  Target: LAMA2; (+) strand; PAM type: NRG; PAM sequence: TGG
aagctgaagtaatagtcttt

SEQ ID NO: 182575 - DNA, 20 bp, Artificial Sequence
  Description of Artificial Sequence: Synthetic oligonucleotide
  Target: LAMA2; (+) strand; PAM type: NRG; PAM sequence: GGG
agctgaagtaatagtctttt

SEQ ID NO: 182576 - DNA, 20 bp, Artificial Sequence
  Description of Artificial Sequence: Synthetic oligonucleotide
  Target: LAMA2; (+) strand; PAM type: NRG; PAM sequence: TGG
ctgactcatcccatcctctc

SEQ ID NO: 182577 - DNA, 20 bp, Artificial Sequence
  Description of Artificial Sequence: Synthetic oligonucleotide
  Target: LAMA2; (+) strand; PAM type: NRG; PAM sequence: AAG
tcccatcctctctggacaca

SEQ ID NO: 182578 - DNA, 20 bp, Artificial Sequence
  Description of Artificial Sequence: Synthetic oligonucleotide
  Target: LAMA2; (+) strand; PAM type: NRG; PAM sequence: AAG
catcctctctggacacaaag

SEQ ID NO: 182579 - DNA, 20 bp, Artificial Sequence
  Description of Artificial Sequence: Synthetic oligonucleotide
  Target: LAMA2; (+) strand; PAM type: NRG; PAM sequence: AGG
atcctctctggacacaaaga

SEQ ID NO: 182580 - DNA, 20 bp, Artificial Sequence
  Description of Artificial Sequence: Synthetic oligonucleotide
  Target: LAMA2; (+) strand; PAM type: NRG; PAM sequence: GGG
tcctctctggacacaaagaa

SEQ ID NO: 182581 - DNA, 20 bp, Artificial Sequence
  Description of Artificial Sequence: Synthetic oligonucleotide
  Target: LAMA2; (+) strand; PAM type: NRG; PAM sequence: CAG
tctctggacacaaagaaggg

SEQ ID NO: 182582 - DNA, 20 bp, Artificial Sequence
  Description of Artificial Sequence: Synthetic oligonucleotide
  Target: LAMA2; (+) strand; PAM type: NRG; PAM sequence: TGG
acacaaagaagggcagaaaa

SEQ ID NO: 182583 - DNA, 20 bp, Artificial Sequence
  Description of Artificial Sequence: Synthetic oligonucleotide
  Target: LAMA2; (+) strand; PAM type: NRG; PAM sequence: TGG
agaagggcagaaaatggatc

SEQ ID NO: 182584 - DNA, 20 bp, Artificial Sequence
  Description of Artificial Sequence: Synthetic oligonucleotide
  Target: LAMA2; (+) strand; PAM type: NRG; PAM sequence: GGG
gaagggcagaaaatggatct

SEQ ID NO: 182585 - DNA, 20 bp, Artificial Sequence
  Description of Artificial Sequence: Synthetic oligonucleotide
  Target: LAMA2; (+) strand; PAM type: NRG; PAM sequence: GAG
agggcagaaaatggatctgg

SEQ ID NO: 182586 - DNA, 20 bp, Artificial Sequence
  Description of Artificial Sequence: Synthetic oligonucleotide
  Target: LAMA2; (+) strand; PAM type: NRG; PAM sequence: AAG
cagaaaatggatctgggaga

SEQ ID NO: 182587 - DNA, 20 bp, Artificial Sequence
  Description of Artificial Sequence: Synthetic oligonucleotide
  Target: LAMA2; (+) strand; PAM type: NRG; PAM sequence: AAG
aaatggatctgggagaaagc

SEQ ID NO: 182588 - DNA, 20 bp, Artificial Sequence
  Description of Artificial Sequence: Synthetic oligonucleotide
  Target: LAMA2; (+) strand; PAM type: NRG; PAM sequence: TAG
tggatctgggagaaagcaag

SEQ ID NO: 182589 - DNA, 20 bp, Artificial Sequence
  Description of Artificial Sequence: Synthetic oligonucleotide
  Target: LAMA2; (+) strand; PAM type: NRG; PAM sequence: CAG
caagtagaacacaaccaaca

SEQ ID NO: 182590 - DNA, 20 bp, Artificial Sequence
  Description of Artificial Sequence: Synthetic oligonucleotide
  Target: LAMA2; (+) strand; PAM type: NRG; PAM sequence: CAG
tagaacacaaccaacacaga

SEQ ID NO: 182591 - DNA, 20 bp, Artificial Sequence
  Description of Artificial Sequence: Synthetic oligonucleotide
  Target: LAMA2; (+) strand; PAM type: NRG; PAM sequence: AGG
agaacacaaccaacacagac

SEQ ID NO: 182592 - DNA, 20 bp, Artificial Sequence
  Description of Artificial Sequence: Synthetic oligonucleotide
  Target: LAMA2; (+) strand; PAM type: NRG; PAM sequence: GGG
gaacacaaccaacacagaca

SEQ ID NO: 182593 - DNA, 20 bp, Artificial Sequence
  Description of Artificial Sequence: Synthetic oligonucleotide
  Target: LAMA2; (+) strand; PAM type: NRG; PAM sequence: TAG
cagggacaattttatcccaa

SEQ ID NO: 182594 - DNA, 20 bp, Artificial Sequence
  Description of Artificial Sequence: Synthetic oligonucleotide
  Target: LAMA2; (+) strand; PAM type: NRG; PAM sequence: AAG
attttatcccaatagcattc

SEQ ID NO: 182595 - DNA, 20 bp, Artificial Sequence
  Description of Artificial Sequence: Synthetic oligonucleotide
  Target: LAMA2; (+) strand; PAM type: NRG; PAM sequence: AGG
ttttatcccaatagcattca

SEQ ID NO: 182596 - DNA, 20 bp, Artificial Sequence
  Description of Artificial Sequence: Synthetic oligonucleotide
  Target: LAMA2; (+) strand; PAM type: NRG; PAM sequence: AAG
aatagcattcaaggatgtta

SEQ ID NO: 182597 - DNA, 20 bp, Artificial Sequence
  Description of Artificial Sequence: Synthetic oligonucleotide
  Target: LAMA2; (+) strand; PAM type: NRG; PAM sequence: AAG
ttcaaggatgttaaagccta

SEQ ID NO: 182598 - DNA, 20 bp, Artificial Sequence
  Description of Artificial Sequence: Synthetic oligonucleotide
  Target: LAMA2; (+) strand; PAM type: NRG; PAM sequence: CAG
aaagcctaaagaatgtcaac

SEQ ID NO: 182599 - DNA, 20 bp, Artificial Sequence
  Description of Artificial Sequence: Synthetic oligonucleotide
  Target: LAMA2; (+) strand; PAM type: NRG; PAM sequence: CGG
cctaaagaatgtcaaccagc

SEQ ID NO: 182600 - DNA, 20 bp, Artificial Sequence
  Description of Artificial Sequence: Synthetic oligonucleotide
  Target: LAMA2; (+) strand; PAM type: NRG; PAM sequence: GGG
ctaaagaatgtcaaccagcc

SEQ ID NO: 182601 - DNA, 20 bp, Artificial Sequence
  Description of Artificial Sequence: Synthetic oligonucleotide
  Target: LAMA2; (+) strand; PAM type: NRG; PAM sequence: TAG
gaatgtcaaccagccgggtg

SEQ ID NO: 182602 - DNA, 20 bp, Artificial Sequence
  Description of Artificial Sequence: Synthetic oligonucleotide
  Target: LAMA2; (+) strand; PAM type: NRG; PAM sequence: TGG
tgtcaaccagccgggtgtag

SEQ ID NO: 182603 - DNA, 20 bp, Artificial Sequence
  Description of Artificial Sequence: Synthetic oligonucleotide
  Target: LAMA2; (+) strand; PAM type: NRG; PAM sequence: CAG
gtggcccatgtctgtaatcc

SEQ ID NO: 182604 - DNA, 20 bp, Artificial Sequence
  Description of Artificial Sequence: Synthetic oligonucleotide
  Target: LAMA2; (+) strand; PAM type: NRG; PAM sequence: TGG
tgtctgtaatcccagcactt

SEQ ID NO: 182605 - DNA, 20 bp, Artificial Sequence
  Description of Artificial Sequence: Synthetic oligonucleotide
  Target: LAMA2; (+) strand; PAM type: NRG; PAM sequence: CAG
ctgtaatcccagcactttgg

SEQ ID NO: 182606 - DNA, 20 bp, Artificial Sequence
  Description of Artificial Sequence: Synthetic oligonucleotide
  Target: LAMA2; (+) strand; PAM type: NRG; PAM sequence: AGG
tgtaatcccagcactttggc

SEQ ID NO: 182607 - DNA, 20 bp, Artificial Sequence
  Description of Artificial Sequence: Synthetic oligonucleotide
  Target: LAMA2; (+) strand; PAM type: NRG; PAM sequence: AAG
cccagcactttggcaggtca

SEQ ID NO: 182608 - DNA, 20 bp, Artificial Sequence
  Description of Artificial Sequence: Synthetic oligonucleotide
  Target: LAMA2; (+) strand; PAM type: NRG; PAM sequence: CAG
agcactttggcaggtcaaag

SEQ ID NO: 182609 - DNA, 20 bp, Artificial Sequence
  Description of Artificial Sequence: Synthetic oligonucleotide
  Target: LAMA2; (+) strand; PAM type: NRG; PAM sequence: AGG
gcactttggcaggtcaaagc

SEQ ID NO: 182610 - DNA, 20 bp, Artificial Sequence
  Description of Artificial Sequence: Synthetic oligonucleotide
  Target: LAMA2; (+) strand; PAM type: NRG; PAM sequence: GAG
actttggcaggtcaaagcag

SEQ ID NO: 182611 - DNA, 20 bp, Artificial Sequence
  Description of Artificial Sequence: Synthetic oligonucleotide
  Target: LAMA2; (+) strand; PAM type: NRG; PAM sequence: AGG
ctttggcaggtcaaagcagg

SEQ ID NO: 182612 - DNA, 20 bp, Artificial Sequence
  Description of Artificial Sequence: Synthetic oligonucleotide
  Target: LAMA2; (+) strand; PAM type: NRG; PAM sequence: GAG
tcaaagcaggaggatcgttt

SEQ ID NO: 182613 - DNA, 20 bp, Artificial Sequence
  Description of Artificial Sequence: Synthetic oligonucleotide
  Target: LAMA2; (+) strand; PAM type: NRG; PAM sequence: CAG
gcaggaggatcgtttgagcc

SEQ ID NO: 182614 - DNA, 20 bp, Artificial Sequence
  Description of Artificial Sequence: Synthetic oligonucleotide
  Target: LAMA2; (+) strand; PAM type: NRG; PAM sequence: AGG
caggaggatcgtttgagccc

SEQ ID NO: 182615 - DNA, 20 bp, Artificial Sequence
  Description of Artificial Sequence: Synthetic oligonucleotide
  Target: LAMA2; (+) strand; PAM type: NRG; PAM sequence: GAG
ggaggatcgtttgagcccag

SEQ ID NO: 182616 - DNA, 20 bp, Artificial Sequence
  Description of Artificial Sequence: Synthetic oligonucleotide
  Target: LAMA2; (+) strand; PAM type: NRG; PAM sequence: TAG
tgagcccaggagtttgaaac

SEQ ID NO: 182617 - DNA, 20 bp, Artificial Sequence
  Description of Artificial Sequence: Synthetic oligonucleotide
  Target: LAMA2; (+) strand; PAM type: NRG; PAM sequence: AGG
gagcccaggagtttgaaact

SEQ ID NO: 182618 - DNA, 20 bp, Artificial Sequence
  Description of Artificial Sequence: Synthetic oligonucleotide
  Target: LAMA2; (+) strand; PAM type: NRG; PAM sequence: TAG
ccaggagtttgaaactaggc

SEQ ID NO: 182619 - DNA, 20 bp, Artificial Sequence
  Description of Artificial Sequence: Synthetic oligonucleotide
  Target: LAMA2; (+) strand; PAM type: NRG; PAM sequence: AGG
caggagtttgaaactaggct

SEQ ID NO: 182620 - DNA, 20 bp, Artificial Sequence
  Description of Artificial Sequence: Synthetic oligonucleotide
  Target: LAMA2; (+) strand; PAM type: NRG; PAM sequence: CAG
gagtttgaaactaggctagg

SEQ ID NO: 182621 - DNA, 20 bp, Artificial Sequence
  Description of Artificial Sequence: Synthetic oligonucleotide
  Target: LAMA2; (+) strand; PAM type: NRG; PAM sequence: AAG
actaggctaggcagcatgat

SEQ ID NO: 182622 - DNA, 20 bp, Artificial Sequence
  Description of Artificial Sequence: Synthetic oligonucleotide
  Target: LAMA2; (+) strand; PAM type: NRG; PAM sequence: TGG
aaaaatgtttaaaaattaaa

SEQ ID NO: 182623 - DNA, 20 bp, Artificial Sequence
  Description of Artificial Sequence: Synthetic oligonucleotide
  Target: LAMA2; (+) strand; PAM type: NRG; PAM sequence: GGG
aaaatgtttaaaaattaaat

SEQ ID NO: 182624 - DNA, 20 bp, Artificial Sequence
  Description of Artificial Sequence: Synthetic oligonucleotide
  Target: LAMA2; (+) strand; PAM type: NRG; PAM sequence: TGG
gtttaaaaattaaatgggca

SEQ ID NO: 182625 - DNA, 20 bp, Artificial Sequence
  Description of Artificial Sequence: Synthetic oligonucleotide
  Target: LAMA2; (+) strand; PAM type: NRG; PAM sequence: CAG
gtcgtgcacaactgtgattc

SEQ ID NO: 182626 - DNA, 20 bp, Artificial Sequence
  Description of Artificial Sequence: Synthetic oligonucleotide
  Target: LAMA2; (+) strand; PAM type: NRG; PAM sequence: CAG
caactgtgattccagctatt

SEQ ID NO: 182627 - DNA, 20 bp, Artificial Sequence
  Description of Artificial Sequence: Synthetic oligonucleotide
  Target: LAMA2; (+) strand; PAM type: NRG; PAM sequence: AGG
aactgtgattccagctattc

SEQ ID NO: 182628 - DNA, 20 bp, Artificial Sequence
  Description of Artificial Sequence: Synthetic oligonucleotide
  Target: LAMA2; (+) strand; PAM type: NRG; PAM sequence: CAG
agctattcaggactgctatt

SEQ ID NO: 182629 - DNA, 20 bp, Artificial Sequence
  Description of Artificial Sequence: Synthetic oligonucleotide
  Target: LAMA2; (+) strand; PAM type: NRG; PAM sequence: TAG
ctgttcacgccaccacactc

SEQ ID NO: 182630 - DNA, 20 bp, Artificial Sequence
  Description of Artificial Sequence: Synthetic oligonucleotide
  Target: LAMA2; (+) strand; PAM type: NRG; PAM sequence: TGG
cacgccaccacactctagcc

SEQ ID NO: 182631 - DNA, 20 bp, Artificial Sequence
  Description of Artificial Sequence: Synthetic oligonucleotide
  Target: LAMA2; (+) strand; PAM type: NRG; PAM sequence: CAG
ccacactctagcctggatga

SEQ ID NO: 182632 - DNA, 20 bp, Artificial Sequence
  Description of Artificial Sequence: Synthetic oligonucleotide
  Target: LAMA2; (+) strand; PAM type: NRG; PAM sequence: GAG
acactctagcctggatgaca

SEQ ID NO: 182633 - DNA, 20 bp, Artificial Sequence
  Description of Artificial Sequence: Synthetic oligonucleotide
  Target: LAMA2; (+) strand; PAM type: NRG; PAM sequence: GAG
tctagcctggatgacagagt

SEQ ID NO: 182634 - DNA, 20 bp, Artificial Sequence
  Description of Artificial Sequence: Synthetic oligonucleotide
  Target: LAMA2; (+) strand; PAM type: NRG; PAM sequence: AAG
tctcaaaactttttttaaaa

SEQ ID NO: 182635 - DNA, 20 bp, Artificial Sequence
  Description of Artificial Sequence: Synthetic oligonucleotide
  Target: LAMA2; (+) strand; PAM type: NRG; PAM sequence: GAG
tcaaaactttttttaaaaaa

SEQ ID NO: 182636 - DNA, 20 bp, Artificial Sequence
  Description of Artificial Sequence: Synthetic oligonucleotide
  Target: LAMA2; (+) strand; PAM type: NRG; PAM sequence: AAG
aaaaagagtatcaattttgc

SEQ ID NO: 182637 - DNA, 20 bp, Artificial Sequence
  Description of Artificial Sequence: Synthetic oligonucleotide
  Target: LAMA2; (+) strand; PAM type: NRG; PAM sequence: AGG
aaaagagtatcaattttgca

SEQ ID NO: 182638 - DNA, 20 bp, Artificial Sequence
  Description of Artificial Sequence: Synthetic oligonucleotide
  Target: LAMA2; (+) strand; PAM type: NRG; PAM sequence: TAG
ttttgcaaggacataaactt

SEQ ID NO: 182639 - DNA, 20 bp, Artificial Sequence
  Description of Artificial Sequence: Synthetic oligonucleotide
  Target: LAMA2; (+) strand; PAM type: NRG; PAM sequence: AAG
tgtccatttgattctgttaa

SEQ ID NO: 182640 - DNA, 20 bp, Artificial Sequence
  Description of Artificial Sequence: Synthetic oligonucleotide
  Target: LAMA2; (+) strand; PAM type: NRG; PAM sequence: CAG
aaagcaatccctcaactgcc

SEQ ID NO: 182641 - DNA, 20 bp, Artificial Sequence
  Description of Artificial Sequence: Synthetic oligonucleotide
  Target: LAMA2; (+) strand; PAM type: NRG; PAM sequence: AAG
tccctcaactgcccagattt

SEQ ID NO: 182642 - DNA, 20 bp, Artificial Sequence
  Description of Artificial Sequence: Synthetic oligonucleotide
  Target: LAMA2; (+) strand; PAM type: NRG; PAM sequence: TGG
catcatacctcttattgcct

SEQ ID NO: 182643 - DNA, 20 bp, Artificial Sequence
  Description of Artificial Sequence: Synthetic oligonucleotide
  Target: LAMA2; (+) strand; PAM type: NRG; PAM sequence: TAG
acgtaattttccatttaatc

SEQ ID NO: 182644 - DNA, 20 bp, Artificial Sequence
  Description of Artificial Sequence: Synthetic oligonucleotide
  Target: LAMA2; (+) strand; PAM type: NRG; PAM sequence: AAG
aatctagtttttctcaatga

SEQ ID NO: 182645 - DNA, 20 bp, Artificial Sequence
  Description of Artificial Sequence: Synthetic oligonucleotide
  Target: LAMA2; (+) strand; PAM type: NRG; PAM sequence: AGG
atctagtttttctcaatgaa

SEQ ID NO: 182646 - DNA, 20 bp, Artificial Sequence
  Description of Artificial Sequence: Synthetic oligonucleotide
  Target: LAMA2; (+) strand; PAM type: NRG; PAM sequence: GGG
tctagtttttctcaatgaaa

SEQ ID NO: 182647 - DNA, 20 bp, Artificial Sequence
  Description of Artificial Sequence: Synthetic oligonucleotide
  Target: LAMA2; (+) strand; PAM type: NRG; PAM sequence: TAG
tttctcaatgaaagggttca

SEQ ID NO: 182648 - DNA, 20 bp, Artificial Sequence
  Description of Artificial Sequence: Synthetic oligonucleotide
  Target: LAMA2; (+) strand; PAM type: NRG; PAM sequence: AGG
ttctcaatgaaagggttcat

SEQ ID NO: 182649 - DNA, 20 bp, Artificial Sequence
  Description of Artificial Sequence: Synthetic oligonucleotide
  Target: LAMA2; (+) strand; PAM type: NRG; PAM sequence: AAG
attttgtctgccatgaccaa

SEQ ID NO: 182650 - DNA, 20 bp, Artificial Sequence
  Description of Artificial Sequence: Synthetic oligonucleotide
  Target: LAMA2; (+) strand; PAM type: NRG; PAM sequence: AAG
tgctttacaaatatatcctt

SEQ ID NO: 182651 - DNA, 20 bp, Artificial Sequence
  Description of Artificial Sequence: Synthetic oligonucleotide
  Target: LAMA2; (+) strand; PAM type: NRG; PAM sequence: CAG
atgcacatacccttgtaaac

SEQ ID NO: 182652 - DNA, 20 bp, Artificial Sequence
  Description of Artificial Sequence: Synthetic oligonucleotide
  Target: LAMA2; (+) strand; PAM type: NRG; PAM sequence: TAG
cgtgttttaaaaatcaattt

SEQ ID NO: 182653 - DNA, 20 bp, Artificial Sequence
  Description of Artificial Sequence: Synthetic oligonucleotide
  Target: LAMA2; (+) strand; PAM type: NRG; PAM sequence: TAG
caattttagtatgtaacatt

SEQ ID NO: 182654 - DNA, 20 bp, Artificial Sequence
  Description of Artificial Sequence: Synthetic oligonucleotide
  Target: LAMA2; (+) strand; PAM type: NRG; PAM sequence: AAG
ttatttttctaaaaaataca

SEQ ID NO: 182655 - DNA, 20 bp, Artificial Sequence
  Description of Artificial Sequence: Synthetic oligonucleotide
  Target: LAMA2; (+) strand; PAM type: NRG; PAM sequence: AAG
gcccacacaaaatattcaca

SEQ ID NO: 182656 - DNA, 20 bp, Artificial Sequence
  Description of Artificial Sequence: Synthetic oligonucleotide
  Target: LAMA2; (+) strand; PAM type: NRG; PAM sequence: GAG
ccacacaaaatattcacaaa

SEQ ID NO: 182657 - DNA, 20 bp, Artificial Sequence
  Description of Artificial Sequence: Synthetic oligonucleotide
  Target: LAMA2; (+) strand; PAM type: NRG; PAM sequence: AAG
atattcacaaagagaaccca

SEQ ID NO: 182658 - DNA, 20 bp, Artificial Sequence
  Description of Artificial Sequence: Synthetic oligonucleotide
  Target: LAMA2; (+) strand; PAM type: NRG; PAM sequence: GAG
acccaaagatgtataaccac

SEQ ID NO: 182659 - DNA, 20 bp, Artificial Sequence
  Description of Artificial Sequence: Synthetic oligonucleotide
  Target: LAMA2; (+) strand; PAM type: NRG; PAM sequence: TGG
atgtataaccacgagtaact

SEQ ID NO: 182660 - DNA, 20 bp, Artificial Sequence
  Description of Artificial Sequence: Synthetic oligonucleotide
  Target: LAMA2; (+) strand; PAM type: NRG; PAM sequence: CAG
acgagtaacttggattattt

SEQ ID NO: 182661 - DNA, 20 bp, Artificial Sequence
  Description of Artificial Sequence: Synthetic oligonucleotide
  Target: LAMA2; (+) strand; PAM type: NRG; PAM sequence: AGG
cgagtaacttggattatttc

SEQ ID NO: 182662 - DNA, 20 bp, Artificial Sequence
  Description of Artificial Sequence: Synthetic oligonucleotide
  Target: LAMA2; (+) strand; PAM type: NRG; PAM sequence: CAG
cttggattatttcaggaatg

SEQ ID NO: 182663 - DNA, 20 bp, Artificial Sequence
  Description of Artificial Sequence: Synthetic oligonucleotide
  Target: LAMA2; (+) strand; PAM type: NRG; PAM sequence: AAG
ggattatttcaggaatgcag

SEQ ID NO: 182664 - DNA, 20 bp, Artificial Sequence
  Description of Artificial Sequence: Synthetic oligonucleotide
  Target: LAMA2; (+) strand; PAM type: NRG; PAM sequence: TGG
ttatttcaggaatgcagaag

SEQ ID NO: 182665 - DNA, 20 bp, Artificial Sequence
  Description of Artificial Sequence: Synthetic oligonucleotide
  Target: LAMA2; (+) strand; PAM type: NRG; PAM sequence: TAG
atgcagaagtggtttaatgt

SEQ ID NO: 182666 - DNA, 20 bp, Artificial Sequence
  Description of Artificial Sequence: Synthetic oligonucleotide
  Target: LAMA2; (+) strand; PAM type: NRG; PAM sequence: CAG
atgttagaaaatcaaaatat

SEQ ID NO: 182667 - DNA, 20 bp, Artificial Sequence
  Description of Artificial Sequence: Synthetic oligonucleotide
  Target: LAMA2; (+) strand; PAM type: NRG; PAM sequence: CAG
tagaaaatcaaaatatcagc

SEQ ID NO: 182668 - DNA, 20 bp, Artificial Sequence
  Description of Artificial Sequence: Synthetic oligonucleotide
  Target: LAMA2; (+) strand; PAM type: NRG; PAM sequence: AGG
agaaaatcaaaatatcagcc

SEQ ID NO: 182669 - DNA, 20 bp, Artificial Sequence
  Description of Artificial Sequence: Synthetic oligonucleotide
  Target: LAMA2; (+) strand; PAM type: NRG; PAM sequence: CAG
atcaaaatatcagccaggca

SEQ ID NO: 182670 - DNA, 20 bp, Artificial Sequence
  Description of Artificial Sequence: Synthetic oligonucleotide
  Target: LAMA2; (+) strand; PAM type: NRG; PAM sequence: TGG
aaaatatcagccaggcacag

SEQ ID NO: 182671 - DNA, 20 bp, Artificial Sequence
  Description of Artificial Sequence: Synthetic oligonucleotide
  Target: LAMA2; (+) strand; PAM type: NRG; PAM sequence: CAG
gtggctcacgcctgtaatcc

SEQ ID NO: 182672 - DNA, 20 bp, Artificial Sequence
  Description of Artificial Sequence: Synthetic oligonucleotide
  Target: LAMA2; (+) strand; PAM type: NRG; PAM sequence: TGG
cgcctgtaatcccagcactt

SEQ ID NO: 182673 - DNA, 20 bp, Artificial Sequence
  Description of Artificial Sequence: Synthetic oligonucleotide
  Target: LAMA2; (+) strand; PAM type: NRG; PAM sequence: GGG
gcctgtaatcccagcacttt

SEQ ID NO: 182674 - DNA, 20 bp, Artificial Sequence
  Description of Artificial Sequence: Synthetic oligonucleotide
  Target: LAMA2; (+) strand; PAM type: NRG; PAM sequence: GAG
ctgtaatcccagcactttgg

SEQ ID NO: 182675 - DNA, 20 bp, Artificial Sequence
  Description of Artificial Sequence: Synthetic oligonucleotide
  Target: LAMA2; (+) strand; PAM type: NRG; PAM sequence: AGG
tgtaatcccagcactttggg

SEQ ID NO: 182676 - DNA, 20 bp, Artificial Sequence
  Description of Artificial Sequence: Synthetic oligonucleotide
  Target: LAMA2; (+) strand; PAM type: NRG; PAM sequence: AAG
tcccagcactttgggaggcc

SEQ ID NO: 182677 - DNA, 20 bp, Artificial Sequence
  Description of Artificial Sequence: Synthetic oligonucleotide
  Target: LAMA2; (+) strand; PAM type: NRG; PAM sequence: AGG
cccagcactttgggaggcca

SEQ ID NO: 182678 - DNA, 20 bp, Artificial Sequence
  Description of Artificial Sequence: Synthetic oligonucleotide
  Target: LAMA2; (+) strand; PAM type: NRG; PAM sequence: TGG
agcactttgggaggccaagg

SEQ ID NO: 182679 - DNA, 20 bp, Artificial Sequence
  Description of Artificial Sequence: Synthetic oligonucleotide
  Target: LAMA2; (+) strand; PAM type: NRG; PAM sequence: GGG
gcactttgggaggccaaggt

SEQ ID NO: 182680 - DNA, 20 bp, Artificial Sequence
  Description of Artificial Sequence: Synthetic oligonucleotide
  Target: LAMA2; (+) strand; PAM type: NRG; PAM sequence: TAG
ctttgggaggccaaggtggg

SEQ ID NO: 182681 - DNA, 20 bp, Artificial Sequence
  Description of Artificial Sequence: Synthetic oligonucleotide
  Target: LAMA2; (+) strand; PAM type: NRG; PAM sequence: AAG
ggccaaggtgggtagatcac

SEQ ID NO: 182682 - DNA, 20 bp, Artificial Sequence
  Description of Artificial Sequence: Synthetic oligonucleotide
  Target: LAMA2; (+) strand; PAM type: NRG; PAM sequence: AGG
gccaaggtgggtagatcaca

SEQ ID NO: 182683 - DNA, 20 bp, Artificial Sequence
  Description of Artificial Sequence: Synthetic oligonucleotide
  Target: LAMA2; (+) strand; PAM type: NRG; PAM sequence: CAG
aggtgggtagatcacaaggt

SEQ ID NO: 182684 - DNA, 20 bp, Artificial Sequence
  Description of Artificial Sequence: Synthetic oligonucleotide
  Target: LAMA2; (+) strand; PAM type: NRG; PAM sequence: AGG
ggtgggtagatcacaaggtc

SEQ ID NO: 182685 - DNA, 20 bp, Artificial Sequence
  Description of Artificial Sequence: Synthetic oligonucleotide
  Target: LAMA2; (+) strand; PAM type: NRG; PAM sequence: GAG
gatcacaaggtcaggatttc

SEQ ID NO: 182686 - DNA, 20 bp, Artificial Sequence
  Description of Artificial Sequence: Synthetic oligonucleotide
  Target: LAMA2; (+) strand; PAM type: NRG; PAM sequence: CAG
caaggtcaggatttcgagac

SEQ ID NO: 182687 - DNA, 20 bp, Artificial Sequence
  Description of Artificial Sequence: Synthetic oligonucleotide
  Target: LAMA2; (+) strand; PAM type: NRG; PAM sequence: TGG
tcaggatttcgagaccagcc

SEQ ID NO: 182688 - DNA, 20 bp, Artificial Sequence
  Description of Artificial Sequence: Synthetic oligonucleotide
  Target: LAMA2; (+) strand; PAM type: NRG; PAM sequence: TAG
cgagaccagcctggccaaca

SEQ ID NO: 182689 - DNA, 20 bp, Artificial Sequence
  Description of Artificial Sequence: Synthetic oligonucleotide
  Target: LAMA2; (+) strand; PAM type: NRG; PAM sequence: TAG
atactaaaaatacaaaaaat

SEQ ID NO: 182690 - DNA, 20 bp, Artificial Sequence
  Description of Artificial Sequence: Synthetic oligonucleotide
  Target: LAMA2; (+) strand; PAM type: NRG; PAM sequence: CAG
taaaaatacaaaaaattagc

SEQ ID NO: 182691 - DNA, 20 bp, Artificial Sequence
  Description of Artificial Sequence: Synthetic oligonucleotide
  Target: LAMA2; (+) strand; PAM type: NRG; PAM sequence: AGG
aaaaatacaaaaaattagcc

SEQ ID NO: 182692 - DNA, 20 bp, Artificial Sequence
  Description of Artificial Sequence: Synthetic oligonucleotide
  Target: LAMA2; (+) strand; PAM type: NRG; PAM sequence: TGG
tacaaaaaattagccaggca

SEQ ID NO: 182693 - DNA, 20 bp, Artificial Sequence
  Description of Artificial Sequence: Synthetic oligonucleotide
  Target: LAMA2; (+) strand; PAM type: NRG; PAM sequence: TAG
aaaaaattagccaggcatgg

SEQ ID NO: 182694 - DNA, 20 bp, Artificial Sequence
  Description of Artificial Sequence: Synthetic oligonucleotide
  Target: LAMA2; (+) strand; PAM type: NRG; PAM sequence: CAG
aaattagccaggcatggtag

SEQ ID NO: 182695 - DNA, 20 bp, Artificial Sequence
  Description of Artificial Sequence: Synthetic oligonucleotide
  Target: LAMA2; (+) strand; PAM type: NRG; PAM sequence: AGG
aattagccaggcatggtagc

SEQ ID NO: 182696 - DNA, 20 bp, Artificial Sequence
  Description of Artificial Sequence: Synthetic oligonucleotide
  Target: LAMA2; (+) strand; PAM type: NRG; PAM sequence: CAG
gtagcaggtgcctataatcc

SEQ ID NO: 182697 - DNA, 20 bp, Artificial Sequence
  Description of Artificial Sequence: Synthetic oligonucleotide
  Target: LAMA2; (+) strand; PAM type: NRG; PAM sequence: TGG
tgcctataatcccagttact

SEQ ID NO: 182698 - DNA, 20 bp, Artificial Sequence
  Description of Artificial Sequence: Synthetic oligonucleotide
  Target: LAMA2; (+) strand; PAM type: NRG; PAM sequence: GGG
gcctataatcccagttactt

SEQ ID NO: 182699 - DNA, 20 bp, Artificial Sequence
  Description of Artificial Sequence: Synthetic oligonucleotide
  Target: LAMA2; (+) strand; PAM type: NRG; PAM sequence: GAG
ctataatcccagttacttgg

SEQ ID NO: 182700 - DNA, 20 bp, Artificial Sequence
  Description of Artificial Sequence: Synthetic oligonucleotide
  Target: LAMA2; (+) strand; PAM type: NRG; PAM sequence: AGG
tataatcccagttacttggg

SEQ ID NO: 182701 - DNA, 20 bp, Artificial Sequence
  Description of Artificial Sequence: Synthetic oligonucleotide
  Target: LAMA2; (+) strand; PAM type: NRG; PAM sequence: GAG
tcccagttacttgggaggct

SEQ ID NO: 182702 - DNA, 20 bp, Artificial Sequence
  Description of Artificial Sequence: Synthetic oligonucleotide
  Target: LAMA2; (+) strand; PAM type: NRG; PAM sequence: AGG
cccagttacttgggaggctg

SEQ ID NO: 182703 - DNA, 20 bp, Artificial Sequence
  Description of Artificial Sequence: Synthetic oligonucleotide
  Target: LAMA2; (+) strand; PAM type: NRG; PAM sequence: CAG
agttacttgggaggctgagg

SEQ ID NO: 182704 - DNA, 20 bp, Artificial Sequence
  Description of Artificial Sequence: Synthetic oligonucleotide
  Target: LAMA2; (+) strand; PAM type: NRG; PAM sequence: AGG
gttacttgggaggctgaggc

SEQ ID NO: 182705 - DNA, 20 bp, Artificial Sequence
  Description of Artificial Sequence: Synthetic oligonucleotide
  Target: LAMA2; (+) strand; PAM type: NRG; PAM sequence: GAG
tacttgggaggctgaggcag

SEQ ID NO: 182706 - DNA, 20 bp, Artificial Sequence
  Description of Artificial Sequence: Synthetic oligonucleotide
  Target: LAMA2; (+) strand; PAM type: NRG; PAM sequence: TGG
gcaggagaattgcttgaacc

SEQ ID NO: 182707 - DNA, 20 bp, Artificial Sequence
  Description of Artificial Sequence: Synthetic oligonucleotide
  Target: LAMA2; (+) strand; PAM type: NRG; PAM sequence: GGG
caggagaattgcttgaacct

SEQ ID NO: 182708 - DNA, 20 bp, Artificial Sequence
  Description of Artificial Sequence: Synthetic oligonucleotide
  Target: LAMA2; (+) strand; PAM type: NRG; PAM sequence: GAG
ggagaattgcttgaacctgg

SEQ ID NO: 182709 - DNA, 20 bp, Artificial Sequence
  Description of Artificial Sequence: Synthetic oligonucleotide
  Target: LAMA2; (+) strand; PAM type: NRG; PAM sequence: AGG
gagaattgcttgaacctggg

SEQ ID NO: 182710 - DNA, 20 bp, Artificial Sequence
  Description of Artificial Sequence: Synthetic oligonucleotide
  Target: LAMA2; (+) strand; PAM type: NRG; PAM sequence: GAG
ttgcttgaacctgggaggcc

SEQ ID NO: 182711 - DNA, 20 bp, Artificial Sequence
  Description of Artificial Sequence: Synthetic oligonucleotide
  Target: LAMA2; (+) strand; PAM type: NRG; PAM sequence: AGG
tgcttgaacctgggaggccg

SEQ ID NO: 182712 - DNA, 20 bp, Artificial Sequence
  Description of Artificial Sequence: Synthetic oligonucleotide
  Target: LAMA2; (+) strand; PAM type: NRG; PAM sequence: CAG
aacctgggaggccgaggttg

SEQ ID NO: 182713 - DNA, 20 bp, Artificial Sequence
  Description of Artificial Sequence: Synthetic oligonucleotide
  Target: LAMA2; (+) strand; PAM type: NRG; PAM sequence: GAG
tgggaggccgaggttgcagt

SEQ ID NO: 182714 - DNA, 20 bp, Artificial Sequence
  Description of Artificial Sequence: Synthetic oligonucleotide
  Target: LAMA2; (+) strand; PAM type: NRG; PAM sequence: GAG
ggccgaggttgcagtgagcc

SEQ ID NO: 182715 - DNA, 20 bp, Artificial Sequence
  Description of Artificial Sequence: Synthetic oligonucleotide
  Target: LAMA2; (+) strand; PAM type: NRG; PAM sequence: CAG
gagattgtgccattgcactc

SEQ ID NO: 182716 - DNA, 20 bp, Artificial Sequence
  Description of Artificial Sequence: Synthetic oligonucleotide
  Target: LAMA2; (+) strand; PAM type: NRG; PAM sequence: GAG
tccagcctgcgcgacaatgt

SEQ ID NO: 182717 - DNA, 20 bp, Artificial Sequence
  Description of Artificial Sequence: Synthetic oligonucleotide
  Target: LAMA2; (+) strand; PAM type: NRG; PAM sequence: AAG
cgactcgaaaaaaaaaaaaa

SEQ ID NO: 182718 - DNA, 20 bp, Artificial Sequence
  Description of Artificial Sequence: Synthetic oligonucleotide
  Target: LAMA2; (+) strand; PAM type: NRG; PAM sequence: AAG
gaaaaaaaaaaaaaaagaaa

SEQ ID NO: 182719 - DNA, 20 bp, Artificial Sequence
  Description of Artificial Sequence: Synthetic oligonucleotide
  Target: LAMA2; (+) strand; PAM type: NRG; PAM sequence: AAG
aaaaaaagaaaaagaaaaaa

SEQ ID NO: 182720 - DNA, 20 bp, Artificial Sequence
  Description of Artificial Sequence: Synthetic oligonucleotide
  Target: LAMA2; (+) strand; PAM type: NRG; PAM sequence: TAG
aaataatataatcttgtcaa

SEQ ID NO: 182721 - DNA, 20 bp, Artificial Sequence
  Description of Artificial Sequence: Synthetic oligonucleotide
  Target: LAMA2; (+) strand; PAM type: NRG; PAM sequence: TAG
aatataatcttgtcaataga

SEQ ID NO: 182722 - DNA, 20 bp, Artificial Sequence
  Description of Artificial Sequence: Synthetic oligonucleotide
  Target: LAMA2; (+) strand; PAM type: NRG; PAM sequence: TGG
caatagatagtaaaaacatt

SEQ ID NO: 182723 - DNA, 20 bp, Artificial Sequence
  Description of Artificial Sequence: Synthetic oligonucleotide
  Target: LAMA2; (+) strand; PAM type: NRG; PAM sequence: CAG
aaacatttggtaaaatttaa

SEQ ID NO: 182724 - DNA, 20 bp, Artificial Sequence
  Description of Artificial Sequence: Synthetic oligonucleotide
  Target: LAMA2; (+) strand; PAM type: NRG; PAM sequence: AAG
atgatttttaaaaaatactt

SEQ ID NO: 182725 - DNA, 20 bp, Artificial Sequence
  Description of Artificial Sequence: Synthetic oligonucleotide
  Target: LAMA2; (+) strand; PAM type: NRG; PAM sequence: AAG
aaaaaatacttaagtaaact

SEQ ID NO: 182726 - DNA, 20 bp, Artificial Sequence
  Description of Artificial Sequence: Synthetic oligonucleotide
  Target: LAMA2; (+) strand; PAM type: NRG; PAM sequence: GAG
aaaatacttaagtaaactaa

SEQ ID NO: 182727 - DNA, 20 bp, Artificial Sequence
  Description of Artificial Sequence: Synthetic oligonucleotide
  Target: LAMA2; (+) strand; PAM type: NRG; PAM sequence: AGG
aaatacttaagtaaactaag

SEQ ID NO: 182728 - DNA, 20 bp, Artificial Sequence
  Description of Artificial Sequence: Synthetic oligonucleotide
  Target: LAMA2; (+) strand; PAM type: NRG; PAM sequence: AAG
tacttaagtaaactaagagg

SEQ ID NO: 182729 - DNA, 20 bp, Artificial Sequence
  Description of Artificial Sequence: Synthetic oligonucleotide
  Target: LAMA2; (+) strand; PAM type: NRG; PAM sequence: AGG
acttaagtaaactaagagga

SEQ ID NO: 182730 - DNA, 20 bp, Artificial Sequence
  Description of Artificial Sequence: Synthetic oligonucleotide
  Target: LAMA2; (+) strand; PAM type: NRG; PAM sequence: TAG
ctaagaggaaggaacttcct

SEQ ID NO: 182731 - DNA, 20 bp, Artificial Sequence
  Description of Artificial Sequence: Synthetic oligonucleotide
  Target: LAMA2; (+) strand; PAM type: NRG; PAM sequence: AAG
tataaaaaaaaaactataac

SEQ ID NO: 182732 - DNA, 20 bp, Artificial Sequence
  Description of Artificial Sequence: Synthetic oligonucleotide
  Target: LAMA2; (+) strand; PAM type: NRG; PAM sequence: AAG
agtattcctgatttaaaaaa

SEQ ID NO: 182733 - DNA, 20 bp, Artificial Sequence
  Description of Artificial Sequence: Synthetic oligonucleotide
  Target: LAMA2; (+) strand; PAM type: NRG; PAM sequence: AAG
taaacatttgctataaaatc

SEQ ID NO: 182734 - DNA, 20 bp, Artificial Sequence
  Description of Artificial Sequence: Synthetic oligonucleotide
  Target: LAMA2; (+) strand; PAM type: NRG; PAM sequence: AAG
tttgctataaaatcaagccc

SEQ ID NO: 182735 - DNA, 20 bp, Artificial Sequence
  Description of Artificial Sequence: Synthetic oligonucleotide
  Target: LAMA2; (+) strand; PAM type: NRG; PAM sequence: CAG
ataaaatcaagcccaagaaa

SEQ ID NO: 182736 - DNA, 20 bp, Artificial Sequence
  Description of Artificial Sequence: Synthetic oligonucleotide
  Target: LAMA2; (+) strand; PAM type: NRG; PAM sequence: TAG
tattttgactgcactgatct

SEQ ID NO: 182737 - DNA, 20 bp, Artificial Sequence
  Description of Artificial Sequence: Synthetic oligonucleotide
  Target: LAMA2; (+) strand; PAM type: NRG; PAM sequence: TAG
ttgactgcactgatcttagc

SEQ ID NO: 182738 - DNA, 20 bp, Artificial Sequence
  Description of Artificial Sequence: Synthetic oligonucleotide
  Target: LAMA2; (+) strand; PAM type: NRG; PAM sequence: TAG
tgcactgatcttagctagca

SEQ ID NO: 182739 - DNA, 20 bp, Artificial Sequence
  Description of Artificial Sequence: Synthetic oligonucleotide
  Target: LAMA2; (+) strand; PAM type: NRG; PAM sequence: AAG
ctgatcttagctagcatagt

SEQ ID NO: 182740 - DNA, 20 bp, Artificial Sequence
  Description of Artificial Sequence: Synthetic oligonucleotide
  Target: LAMA2; (+) strand; PAM type: NRG; PAM sequence: AAG
cttagctagcatagtaagaa

SEQ ID NO: 182741 - DNA, 20 bp, Artificial Sequence
  Description of Artificial Sequence: Synthetic oligonucleotide
  Target: LAMA2; (+) strand; PAM type: NRG; PAM sequence: AAG
tagcatagtaagaaaagaac

SEQ ID NO: 182742 - DNA, 20 bp, Artificial Sequence
  Description of Artificial Sequence: Synthetic oligonucleotide
  Target: LAMA2; (+) strand; PAM type: NRG; PAM sequence: TAG
aagaaaagaacaagtaaata

SEQ ID NO: 182743 - DNA, 20 bp, Artificial Sequence
  Description of Artificial Sequence: Synthetic oligonucleotide
  Target: LAMA2; (+) strand; PAM type: NRG; PAM sequence: AAG
agaacaagtaaatatagcac

SEQ ID NO: 182744 - DNA, 20 bp, Artificial Sequence
  Description of Artificial Sequence: Synthetic oligonucleotide
  Target: LAMA2; (+) strand; PAM type: NRG; PAM sequence: AAG
agtaaatatagcacaagaac

SEQ ID NO: 182745 - DNA, 20 bp, Artificial Sequence
  Description of Artificial Sequence: Synthetic oligonucleotide
  Target: LAMA2; (+) strand; PAM type: NRG; PAM sequence: AAG
tatagcacaagaacaagaat

SEQ ID NO: 182746 - DNA, 20 bp, Artificial Sequence
  Description of Artificial Sequence: Synthetic oligonucleotide
  Target: LAMA2; (+) strand; PAM type: NRG; PAM sequence: AAG
taagaacaaatatataattt

SEQ ID NO: 182747 - DNA, 20 bp, Artificial Sequence
  Description of Artificial Sequence: Synthetic oligonucleotide
  Target: LAMA2; (+) strand; PAM type: NRG; PAM sequence: TAG
taagaatcattataacaaaa

SEQ ID NO: 182748 - DNA, 20 bp, Artificial Sequence
  Description of Artificial Sequence: Synthetic oligonucleotide
  Target: LAMA2; (+) strand; PAM type: NRG; PAM sequence: AAG
attataacaaaatagacata

SEQ ID NO: 182749 - DNA, 20 bp, Artificial Sequence
  Description of Artificial Sequence: Synthetic oligonucleotide
  Target: LAMA2; (+) strand; PAM type: NRG; PAM sequence: TGG
aaatagacataaagcccata

SEQ ID NO: 182750 - DNA, 20 bp, Artificial Sequence
  Description of Artificial Sequence: Synthetic oligonucleotide
  Target: LAMA2; (+) strand; PAM type: NRG; PAM sequence: GAG
atagacataaagcccatatg

SEQ ID NO: 182751 - DNA, 20 bp, Artificial Sequence
  Description of Artificial Sequence: Synthetic oligonucleotide
  Target: LAMA2; (+) strand; PAM type: NRG; PAM sequence: AAG
aatttcattgaatgatacca

SEQ ID NO: 182752 - DNA, 20 bp, Artificial Sequence
  Description of Artificial Sequence: Synthetic oligonucleotide
  Target: LAMA2; (+) strand; PAM type: NRG; PAM sequence: TAG
aaagtatttctcaatgatta

SEQ ID NO: 182753 - DNA, 20 bp, Artificial Sequence
  Description of Artificial Sequence: Synthetic oligonucleotide
  Target: LAMA2; (+) strand; PAM type: NRG; PAM sequence: TGG
aatgattatagtcaataaat

SEQ ID NO: 182754 - DNA, 20 bp, Artificial Sequence
  Description of Artificial Sequence: Synthetic oligonucleotide
  Target: LAMA2; (+) strand; PAM type: NRG; PAM sequence: TAG
ttatagtcaataaattggta

SEQ ID NO: 182755 - DNA, 20 bp, Artificial Sequence
  Description of Artificial Sequence: Synthetic oligonucleotide
  Target: LAMA2; (+) strand; PAM type: NRG; PAM sequence: AAG
gtatagtcaacatgttaatg

SEQ ID NO: 182756 - DNA, 20 bp, Artificial Sequence
  Description of Artificial Sequence: Synthetic oligonucleotide
  Target: LAMA2; (+) strand; PAM type: NRG; PAM sequence: AAG
acatgttaatgaagatatta

SEQ ID NO: 182757 - DNA, 20 bp, Artificial Sequence
  Description of Artificial Sequence: Synthetic oligonucleotide
  Target: LAMA2; (+) strand; PAM type: NRG; PAM sequence: TAG
tttctccccaaaatgatatg

SEQ ID NO: 182758 - DNA, 20 bp, Artificial Sequence
  Description of Artificial Sequence: Synthetic oligonucleotide
  Target: LAMA2; (+) strand; PAM type: NRG; PAM sequence: CAG
tatttttctgtgaatcatga

SEQ ID NO: 182759 - DNA, 20 bp, Artificial Sequence
  Description of Artificial Sequence: Synthetic oligonucleotide
  Target: LAMA2; (+) strand; PAM type: NRG; PAM sequence: AAG
ttattctaaaatttatatca

SEQ ID NO: 182760 - DNA, 20 bp, Artificial Sequence
  Description of Artificial Sequence: Synthetic oligonucleotide
  Target: LAMA2; (+) strand; PAM type: NRG; PAM sequence: TAG
tatatcaaagatgaaattcc

SEQ ID NO: 182761 - DNA, 20 bp, Artificial Sequence
  Description of Artificial Sequence: Synthetic oligonucleotide
  Target: LAMA2; (+) strand; PAM type: NRG; PAM sequence: TAG
caaagatgaaattcctagaa

SEQ ID NO: 182762 - DNA, 20 bp, Artificial Sequence
  Description of Artificial Sequence: Synthetic oligonucleotide
  Target: LAMA2; (+) strand; PAM type: NRG; PAM sequence: AAG
agatgaaattcctagaatag

SEQ ID NO: 182763 - DNA, 20 bp, Artificial Sequence
  Description of Artificial Sequence: Synthetic oligonucleotide
  Target: LAMA2; (+) strand; PAM type: NRG; PAM sequence: TAG
aaattcctagaatagaagaa

SEQ ID NO: 182764 - DNA, 20 bp, Artificial Sequence
  Description of Artificial Sequence: Synthetic oligonucleotide
  Target: LAMA2; (+) strand; PAM type: NRG; PAM sequence: TAG
cctagaatagaagaatagcg

SEQ ID NO: 182765 - DNA, 20 bp, Artificial Sequence
  Description of Artificial Sequence: Synthetic oligonucleotide
  Target: LAMA2; (+) strand; PAM type: NRG; PAM sequence: TGG
gaatagaagaatagcgtagt

SEQ ID NO: 182766 - DNA, 20 bp, Artificial Sequence
  Description of Artificial Sequence: Synthetic oligonucleotide
  Target: LAMA2; (+) strand; PAM type: NRG; PAM sequence: GGG
aatagaagaatagcgtagtt

SEQ ID NO: 182767 - DNA, 20 bp, Artificial Sequence
  Description of Artificial Sequence: Synthetic oligonucleotide
  Target: LAMA2; (+) strand; PAM type: NRG; PAM sequence: GGG
atagaagaatagcgtagttg

SEQ ID NO: 182768 - DNA, 20 bp, Artificial Sequence
  Description of Artificial Sequence: Synthetic oligonucleotide
  Target: LAMA2; (+) strand; PAM type: NRG; PAM sequence: CAG
cgtagttggggctgttccac

SEQ ID NO: 182769 - DNA, 20 bp, Artificial Sequence
  Description of Artificial Sequence: Synthetic oligonucleotide
  Target: LAMA2; (+) strand; PAM type: NRG; PAM sequence: CAG
ggggctgttccaccagatat

SEQ ID NO: 182770 - DNA, 20 bp, Artificial Sequence
  Description of Artificial Sequence: Synthetic oligonucleotide
  Target: LAMA2; (+) strand; PAM type: NRG; PAM sequence: TAG
tccaccagatatcagcacat

SEQ ID NO: 182771 - DNA, 20 bp, Artificial Sequence
  Description of Artificial Sequence: Synthetic oligonucleotide
  Target: LAMA2; (+) strand; PAM type: NRG; PAM sequence: AAG
accagatatcagcacattag

SEQ ID NO: 182772 - DNA, 20 bp, Artificial Sequence
  Description of Artificial Sequence: Synthetic oligonucleotide
  Target: LAMA2; (+) strand; PAM type: NRG; PAM sequence: AGG
ccagatatcagcacattaga

SEQ ID NO: 182773 - DNA, 20 bp, Artificial Sequence
  Description of Artificial Sequence: Synthetic oligonucleotide
  Target: LAMA2; (+) strand; PAM type: NRG; PAM sequence: AAG
tatcagcacattagaaggta

SEQ ID NO: 182774 - DNA, 20 bp, Artificial Sequence
  Description of Artificial Sequence: Synthetic oligonucleotide
  Target: LAMA2; (+) strand; PAM type: NRG; PAM sequence: TGG
gaaggtaaagttttgtattg

SEQ ID NO: 182775 - DNA, 20 bp, Artificial Sequence
  Description of Artificial Sequence: Synthetic oligonucleotide
  Target: LAMA2; (+) strand; PAM type: NRG; PAM sequence: GAG
aggtaaagttttgtattgtg

SEQ ID NO: 182776 - DNA, 20 bp, Artificial Sequence
  Description of Artificial Sequence: Synthetic oligonucleotide
  Target: LAMA2; (+) strand; PAM type: NRG; PAM sequence: TAG
ttcatgtataactgtgcaaa

SEQ ID NO: 182777 - DNA, 20 bp, Artificial Sequence
  Description of Artificial Sequence: Synthetic oligonucleotide
  Target: LAMA2; (+) strand; PAM type: NRG; PAM sequence: AGG
tcatgtataactgtgcaaat

SEQ ID NO: 182778 - DNA, 20 bp, Artificial Sequence
  Description of Artificial Sequence: Synthetic oligonucleotide
  Target: LAMA2; (+) strand; PAM type: NRG; PAM sequence: AAG
gtataactgtgcaaatagga

SEQ ID NO: 182779 - DNA, 20 bp, Artificial Sequence
  Description of Artificial Sequence: Synthetic oligonucleotide
  Target: LAMA2; (+) strand; PAM type: NRG; PAM sequence: GAG
tgtgcaaataggaaagaatt

SEQ ID NO: 182780 - DNA, 20 bp, Artificial Sequence
  Description of Artificial Sequence: Synthetic oligonucleotide
  Target: LAMA2; (+) strand; PAM type: NRG; PAM sequence: AAG
tgagaaccctgaaaatacac

SEQ ID NO: 182781 - DNA, 20 bp, Artificial Sequence
  Description of Artificial Sequence: Synthetic oligonucleotide
  Target: LAMA2; (+) strand; PAM type: NRG; PAM sequence: TAG
accctgaaaatacacaagca

SEQ ID NO: 182782 - DNA, 20 bp, Artificial Sequence
  Description of Artificial Sequence: Synthetic oligonucleotide
  Target: LAMA2; (+) strand; PAM type: NRG; PAM sequence: TGG
tgaaaatacacaagcataga

SEQ ID NO: 182783 - DNA, 20 bp, Artificial Sequence
  Description of Artificial Sequence: Synthetic oligonucleotide
  Target: LAMA2; (+) strand; PAM type: NRG; PAM sequence: CAG
tacacaagcatagatggaaa

SEQ ID NO: 182784 - DNA, 20 bp, Artificial Sequence
  Description of Artificial Sequence: Synthetic oligonucleotide
  Target: LAMA2; (+) strand; PAM type: NRG; PAM sequence: AAG
tggaaacagcatttgacaat

SEQ ID NO: 182785 - DNA, 20 bp, Artificial Sequence
  Description of Artificial Sequence: Synthetic oligonucleotide
  Target: LAMA2; (+) strand; PAM type: NRG; PAM sequence: TGG
aaacagcatttgacaataag

SEQ ID NO: 182786 - DNA, 20 bp, Artificial Sequence
  Description of Artificial Sequence: Synthetic oligonucleotide
  Target: LAMA2; (+) strand; PAM type: NRG; PAM sequence: AAG
gcattgcatttcatttaaaa

SEQ ID NO: 182787 - DNA, 20 bp, Artificial Sequence
  Description of Artificial Sequence: Synthetic oligonucleotide
  Target: LAMA2; (+) strand; PAM type: NRG; PAM sequence: CAG
atttcatttaaaaaagacaa

SEQ ID NO: 182788 - DNA, 20 bp, Artificial Sequence
  Description of Artificial Sequence: Synthetic oligonucleotide
  Target: LAMA2; (+) strand; PAM type: NRG; PAM sequence: CAG
aaagacaacagtgaactgtt

SEQ ID NO: 182789 - DNA, 20 bp, Artificial Sequence
  Description of Artificial Sequence: Synthetic oligonucleotide
  Target: LAMA2; (+) strand; PAM type: NRG; PAM sequence: CAG
aactgttcagtgaatgattt

SEQ ID NO: 182790 - DNA, 20 bp, Artificial Sequence
  Description of Artificial Sequence: Synthetic oligonucleotide
  Target: LAMA2; (+) strand; PAM type: NRG; PAM sequence: AGG
actgttcagtgaatgatttc

SEQ ID NO: 182791 - DNA, 20 bp, Artificial Sequence
  Description of Artificial Sequence: Synthetic oligonucleotide
  Target: LAMA2; (+) strand; PAM type: NRG; PAM sequence: GGG
ctgttcagtgaatgatttca

SEQ ID NO: 182792 - DNA, 20 bp, Artificial Sequence
  Description of Artificial Sequence: Synthetic oligonucleotide
  Target: LAMA2; (+) strand; PAM type: NRG; PAM sequence: TGG
gtgaatgatttcagggcaat

SEQ ID NO: 182793 - DNA, 20 bp, Artificial Sequence
  Description of Artificial Sequence: Synthetic oligonucleotide
  Target: LAMA2; (+) strand; PAM type: NRG; PAM sequence: TGG
agggcaattggttattcata

SEQ ID NO: 182794 - DNA, 20 bp, Artificial Sequence
  Description of Artificial Sequence: Synthetic oligonucleotide
  Target: LAMA2; (+) strand; PAM type: NRG; PAM sequence: AAG
aattggttattcatatggaa

SEQ ID NO: 182795 - DNA, 20 bp, Artificial Sequence
  Description of Artificial Sequence: Synthetic oligonucleotide
  Target: LAMA2; (+) strand; PAM type: NRG; PAM sequence: AAG
aataaattcacaataaatta

SEQ ID NO: 182796 - DNA, 20 bp, Artificial Sequence
  Description of Artificial Sequence: Synthetic oligonucleotide
  Target: LAMA2; (+) strand; PAM type: NRG; PAM sequence: TGG
ataaattaaagtcttaaata

SEQ ID NO: 182797 - DNA, 20 bp, Artificial Sequence
  Description of Artificial Sequence: Synthetic oligonucleotide
  Target: LAMA2; (+) strand; PAM type: NRG; PAM sequence: AAG
aattaaagtcttaaatatgg

SEQ ID NO: 182798 - DNA, 20 bp, Artificial Sequence
  Description of Artificial Sequence: Synthetic oligonucleotide
  Target: LAMA2; (+) strand; PAM type: NRG; PAM sequence: AGG
attaaagtcttaaatatgga

SEQ ID NO: 182799 - DNA, 20 bp, Artificial Sequence
  Description of Artificial Sequence: Synthetic oligonucleotide
  Target: LAMA2; (+) strand; PAM type: NRG; PAM sequence: TAG
acaaaaatctttaaaattct

SEQ ID NO: 182800 - DNA, 20 bp, Artificial Sequence
  Description of Artificial Sequence: Synthetic oligonucleotide
  Target: LAMA2; (+) strand; PAM type: NRG; PAM sequence: AAG
aaaatctttaaaattcttag

SEQ ID NO: 182801 - DNA, 20 bp, Artificial Sequence
  Description of Artificial Sequence: Synthetic oligonucleotide
  Target: LAMA2; (+) strand; PAM type: NRG; PAM sequence: CAG
attcttagaagaaaatatac

SEQ ID NO: 182802 - DNA, 20 bp, Artificial Sequence
  Description of Artificial Sequence: Synthetic oligonucleotide
  Target: LAMA2; (+) strand; PAM type: NRG; PAM sequence: AGG
ttcttagaagaaaatatacc

SEQ ID NO: 182803 - DNA, 20 bp, Artificial Sequence
  Description of Artificial Sequence: Synthetic oligonucleotide
  Target: LAMA2; (+) strand; PAM type: NRG; PAM sequence: CGG
caggattaaattttgacctt

SEQ ID NO: 182804 - DNA, 20 bp, Artificial Sequence
  Description of Artificial Sequence: Synthetic oligonucleotide
  Target: LAMA2; (+) strand; PAM type: NRG; PAM sequence: GGG
aggattaaattttgaccttc

SEQ ID NO: 182805 - DNA, 20 bp, Artificial Sequence
  Description of Artificial Sequence: Synthetic oligonucleotide
  Target: LAMA2; (+) strand; PAM type: NRG; PAM sequence: AAG
taaattttgaccttcgggaa

SEQ ID NO: 182806 - DNA, 20 bp, Artificial Sequence
  Description of Artificial Sequence: Synthetic oligonucleotide
  Target: LAMA2; (+) strand; PAM type: NRG; PAM sequence: AAG
aacacttgattgaacaaaac

SEQ ID NO: 182807 - DNA, 20 bp, Artificial Sequence
  Description of Artificial Sequence: Synthetic oligonucleotide
  Target: LAMA2; (+) strand; PAM type: NRG; PAM sequence: GAG
attgaacaaaacaagattat

SEQ ID NO: 182808 - DNA, 20 bp, Artificial Sequence
  Description of Artificial Sequence: Synthetic oligonucleotide
  Target: LAMA2; (+) strand; PAM type: NRG; PAM sequence: TGG
gaacaaaacaagattatgag

SEQ ID NO: 182809 - DNA, 20 bp, Artificial Sequence
  Description of Artificial Sequence: Synthetic oligonucleotide
  Target: LAMA2; (+) strand; PAM type: NRG; PAM sequence: TGG
tgcattaaaattaaactctt

SEQ ID NO: 182810 - DNA, 20 bp, Artificial Sequence
  Description of Artificial Sequence: Synthetic oligonucleotide
  Target: LAMA2; (+) strand; PAM type: NRG; PAM sequence: AAG
catcaaacaacacaaaacac

SEQ ID NO: 182811 - DNA, 20 bp, Artificial Sequence
  Description of Artificial Sequence: Synthetic oligonucleotide
  Target: LAMA2; (+) strand; PAM type: NRG; PAM sequence: CAG
acaacacaaaacacaagcct

SEQ ID NO: 182812 - DNA, 20 bp, Artificial Sequence
  Description of Artificial Sequence: Synthetic oligonucleotide
  Target: LAMA2; (+) strand; PAM type: NRG; PAM sequence: TGG
acaaaacacaagcctcagtc

SEQ ID NO: 182813 - DNA, 20 bp, Artificial Sequence
  Description of Artificial Sequence: Synthetic oligonucleotide
  Target: LAMA2; (+) strand; PAM type: NRG; PAM sequence: CAG
agcctcagtctggaaatgta

SEQ ID NO: 182814 - DNA, 20 bp, Artificial Sequence
  Description of Artificial Sequence: Synthetic oligonucleotide
  Target: LAMA2; (+) strand; PAM type: NRG; PAM sequence: CAG
tgtacagtatatataatcta

SEQ ID NO: 182815 - DNA, 20 bp, Artificial Sequence
  Description of Artificial Sequence: Synthetic oligonucleotide
  Target: LAMA2; (+) strand; PAM type: NRG; PAM sequence: AGG
gtacagtatatataatctac

SEQ ID NO: 182816 - DNA, 20 bp, Artificial Sequence
  Description of Artificial Sequence: Synthetic oligonucleotide
  Target: LAMA2; (+) strand; PAM type: NRG; PAM sequence: GGG
tacagtatatataatctaca

SEQ ID NO: 182817 - DNA, 20 bp, Artificial Sequence
  Description of Artificial Sequence: Synthetic oligonucleotide
  Target: LAMA2; (+) strand; PAM type: NRG; PAM sequence: CAG
tatataatctacagggaata

SEQ ID NO: 182818 - DNA, 20 bp, Artificial Sequence
  Description of Artificial Sequence: Synthetic oligonucleotide
  Target: LAMA2; (+) strand; PAM type: NRG; PAM sequence: AAG
aatacagtccttgtccccaa

SEQ ID NO: 182819 - DNA, 20 bp, Artificial Sequence
  Description of Artificial Sequence: Synthetic oligonucleotide
  Target: LAMA2; (+) strand; PAM type: NRG; PAM sequence: AGG
atacagtccttgtccccaaa

SEQ ID NO: 182820 - DNA, 20 bp, Artificial Sequence
  Description of Artificial Sequence: Synthetic oligonucleotide
  Target: LAMA2; (+) strand; PAM type: NRG; PAM sequence: GGG
tacagtccttgtccccaaaa

SEQ ID NO: 182821 - DNA, 20 bp, Artificial Sequence
  Description of Artificial Sequence: Synthetic oligonucleotide
  Target: LAMA2; (+) strand; PAM type: NRG; PAM sequence: GGG
acagtccttgtccccaaaag

SEQ ID NO: 182822 - DNA, 20 bp, Artificial Sequence
  Description of Artificial Sequence: Synthetic oligonucleotide
  Target: LAMA2; (+) strand; PAM type: NRG; PAM sequence: AAG
ccttgtccccaaaaggggaa

SEQ ID NO: 182823 - DNA, 20 bp, Artificial Sequence
  Description of Artificial Sequence: Synthetic oligonucleotide
  Target: LAMA2; (+) strand; PAM type: NRG; PAM sequence: CAG
aaaaggggaaaagctcactg

SEQ ID NO: 182824 - DNA, 20 bp, Artificial Sequence
  Description of Artificial Sequence: Synthetic oligonucleotide
  Target: LAMA2; (+) strand; PAM type: NRG; PAM sequence: TGG
aagctcactgcagtttataa

SEQ ID NO: 182825 - DNA, 20 bp, Artificial Sequence
  Description of Artificial Sequence: Synthetic oligonucleotide
  Target: LAMA2; (+) strand; PAM type: NRG; PAM sequence: GGG
agctcactgcagtttataat

SEQ ID NO: 182826 - DNA, 20 bp, Artificial Sequence
  Description of Artificial Sequence: Synthetic oligonucleotide
  Target: LAMA2; (+) strand; PAM type: NRG; PAM sequence: TGG
atgggatatcgaaaccatac

SEQ ID NO: 182827 - DNA, 20 bp, Artificial Sequence
  Description of Artificial Sequence: Synthetic oligonucleotide
  Target: LAMA2; (+) strand; PAM type: NRG; PAM sequence: TAG
cgaaaccatactggttgtta

SEQ ID NO: 182828 - DNA, 20 bp, Artificial Sequence
  Description of Artificial Sequence: Synthetic oligonucleotide
  Target: LAMA2; (+) strand; PAM type: NRG; PAM sequence: TAG
catactggttgttatagtat

SEQ ID NO: 182829 - DNA, 20 bp, Artificial Sequence
  Description of Artificial Sequence: Synthetic oligonucleotide
  Target: LAMA2; (+) strand; PAM type: NRG; PAM sequence: AAG
ctggttgttatagtattaga

SEQ ID NO: 182830 - DNA, 20 bp, Artificial Sequence
  Description of Artificial Sequence: Synthetic oligonucleotide
  Target: LAMA2; (+) strand; PAM type: NRG; PAM sequence: CAG
tgttatagtattagaaagaa

SEQ ID NO: 182831 - DNA, 20 bp, Artificial Sequence
  Description of Artificial Sequence: Synthetic oligonucleotide
  Target: LAMA2; (+) strand; PAM type: NRG; PAM sequence: TGG
agtattagaaagaacagtat

SEQ ID NO: 182832 - DNA, 20 bp, Artificial Sequence
  Description of Artificial Sequence: Synthetic oligonucleotide
  Target: LAMA2; (+) strand; PAM type: NRG; PAM sequence: AAG
ttagaaagaacagtattgga

SEQ ID NO: 182833 - DNA, 20 bp, Artificial Sequence
  Description of Artificial Sequence: Synthetic oligonucleotide
  Target: LAMA2; (+) strand; PAM type: NRG; PAM sequence: AAG
tattggaaagatgtgaatca

SEQ ID NO: 182834 - DNA, 20 bp, Artificial Sequence
  Description of Artificial Sequence: Synthetic oligonucleotide
  Target: LAMA2; (+) strand; PAM type: NRG; PAM sequence: GAG
ttggaaagatgtgaatcaaa

SEQ ID NO: 182835 - DNA, 20 bp, Artificial Sequence
  Description of Artificial Sequence: Synthetic oligonucleotide
  Target: LAMA2; (+) strand; PAM type: NRG; PAM sequence: TGG
agagtgcccttgatcactgc

SEQ ID NO: 182836 - DNA, 20 bp, Artificial Sequence
  Description of Artificial Sequence: Synthetic oligonucleotide
  Target: LAMA2; (+) strand; PAM type: NRG; PAM sequence: TAG
gtgcccttgatcactgctgg

SEQ ID NO: 182837 - DNA, 20 bp, Artificial Sequence
  Description of Artificial Sequence: Synthetic oligonucleotide
  Target: LAMA2; (+) strand; PAM type: NRG; PAM sequence: AAG
ttgatcactgctggtagaaa

SEQ ID NO: 182838 - DNA, 20 bp, Artificial Sequence
  Description of Artificial Sequence: Synthetic oligonucleotide
  Target: LAMA2; (+) strand; PAM type: NRG; PAM sequence: AAG
gtagaaaaagtaaatttcta

SEQ ID NO: 182839 - DNA, 20 bp, Artificial Sequence
  Description of Artificial Sequence: Synthetic oligonucleotide
  Target: LAMA2; (+) strand; PAM type: NRG; PAM sequence: TGG
gtaaatttctaaagtcactt

SEQ ID NO: 182840 - DNA, 20 bp, Artificial Sequence
  Description of Artificial Sequence: Synthetic oligonucleotide
  Target: LAMA2; (+) strand; PAM type: NRG; PAM sequence: TGG
agtcactttggaaaacaatt

SEQ ID NO: 182841 - DNA, 20 bp, Artificial Sequence
  Description of Artificial Sequence: Synthetic oligonucleotide
  Target: LAMA2; (+) strand; PAM type: NRG; PAM sequence: AAG
caatttggcactatctcctg

SEQ ID NO: 182842 - DNA, 20 bp, Artificial Sequence
  Description of Artificial Sequence: Synthetic oligonucleotide
  Target: LAMA2; (+) strand; PAM type: NRG; PAM sequence: AAG
aacatgtgcatactctctac

SEQ ID NO: 182843 - DNA, 20 bp, Artificial Sequence
  Description of Artificial Sequence: Synthetic oligonucleotide
  Target: LAMA2; (+) strand; PAM type: NRG; PAM sequence: CAG
tgtgcatactctctacaagc

SEQ ID NO: 182844 - DNA, 20 bp, Artificial Sequence
  Description of Artificial Sequence: Synthetic oligonucleotide
  Target: LAMA2; (+) strand; PAM type: NRG; PAM sequence: TGG
caagccagcaattccactcc

SEQ ID NO: 182845 - DNA, 20 bp, Artificial Sequence
  Description of Artificial Sequence: Synthetic oligonucleotide
  Target: LAMA2; (+) strand; PAM type: NRG; PAM sequence: GGG
aagccagcaattccactcct

SEQ ID NO: 182846 - DNA, 20 bp, Artificial Sequence
  Description of Artificial Sequence: Synthetic oligonucleotide
  Target: LAMA2; (+) strand; PAM type: NRG; PAM sequence: CAG
agcaattccactcctgggta

SEQ ID NO: 182847 - DNA, 20 bp, Artificial Sequence
  Description of Artificial Sequence: Synthetic oligonucleotide
  Target: LAMA2; (+) strand; PAM type: NRG; PAM sequence: CAG
tccactcctgggtacagacc

SEQ ID NO: 182848 - DNA, 20 bp, Artificial Sequence
  Description of Artificial Sequence: Synthetic oligonucleotide
  Target: LAMA2; (+) strand; PAM type: NRG; PAM sequence: TGG
cagacccagatttttgcaca

SEQ ID NO: 182849 - DNA, 20 bp, Artificial Sequence
  Description of Artificial Sequence: Synthetic oligonucleotide
  Target: LAMA2; (+) strand; PAM type: NRG; PAM sequence: GGG
agacccagatttttgcacat

SEQ ID NO: 182850 - DNA, 20 bp, Artificial Sequence
  Description of Artificial Sequence: Synthetic oligonucleotide
  Target: LAMA2; (+) strand; PAM type: NRG; PAM sequence: AAG
tttttgcacatgggcataat

SEQ ID NO: 182851 - DNA, 20 bp, Artificial Sequence
  Description of Artificial Sequence: Synthetic oligonucleotide
  Target: LAMA2; (+) strand; PAM type: NRG; PAM sequence: AAG
gggcataataagacatgtac

SEQ ID NO: 182852 - DNA, 20 bp, Artificial Sequence
  Description of Artificial Sequence: Synthetic oligonucleotide
  Target: LAMA2; (+) strand; PAM type: NRG; PAM sequence: TAG
gacatgtacaagaatgttta

SEQ ID NO: 182853 - DNA, 20 bp, Artificial Sequence
  Description of Artificial Sequence: Synthetic oligonucleotide
  Target: LAMA2; (+) strand; PAM type: NRG; PAM sequence: AAG
atgtacaagaatgtttatag

SEQ ID NO: 182854 - DNA, 20 bp, Artificial Sequence
  Description of Artificial Sequence: Synthetic oligonucleotide
  Target: LAMA2; (+) strand; PAM type: NRG; PAM sequence: TAG
tatagaagtattctttataa

SEQ ID NO: 182855 - DNA, 20 bp, Artificial Sequence
  Description of Artificial Sequence: Synthetic oligonucleotide
  Target: LAMA2; (+) strand; PAM type: NRG; PAM sequence: CAG
agaagtattctttataatag

SEQ ID NO: 182856 - DNA, 20 bp, Artificial Sequence
  Description of Artificial Sequence: Synthetic oligonucleotide
  Target: LAMA2; (+) strand; PAM type: NRG; PAM sequence: GAG
aagtattctttataatagca

SEQ ID NO: 182857 - DNA, 20 bp, Artificial Sequence
  Description of Artificial Sequence: Synthetic oligonucleotide
  Target: LAMA2; (+) strand; PAM type: NRG; PAM sequence: TAG
ctttataatagcagagaaac

SEQ ID NO: 182858 - DNA, 20 bp, Artificial Sequence
  Description of Artificial Sequence: Synthetic oligonucleotide
  Target: LAMA2; (+) strand; PAM type: NRG; PAM sequence: AAG
agagaaactagaaacaaccc

SEQ ID NO: 182859 - DNA, 20 bp, Artificial Sequence
  Description of Artificial Sequence: Synthetic oligonucleotide
  Target: LAMA2; (+) strand; PAM type: NRG; PAM sequence: CAG
gaaacaacccaagtgttcat

SEQ ID NO: 182860 - DNA, 20 bp, Artificial Sequence
  Description of Artificial Sequence: Synthetic oligonucleotide
  Target: LAMA2; (+) strand; PAM type: NRG; PAM sequence: TGG
caacccaagtgttcatcagc

SEQ ID NO: 182861 - DNA, 20 bp, Artificial Sequence
  Description of Artificial Sequence: Synthetic oligonucleotide
  Target: LAMA2; (+) strand; PAM type: NRG; PAM sequence: GAG
acccaagtgttcatcagctg

SEQ ID NO: 182862 - DNA, 20 bp, Artificial Sequence
  Description of Artificial Sequence: Synthetic oligonucleotide
  Target: LAMA2; (+) strand; PAM type: NRG; PAM sequence: CAG
agtgttcatcagctggagaa

SEQ ID NO: 182863 - DNA, 20 bp, Artificial Sequence
  Description of Artificial Sequence: Synthetic oligonucleotide
  Target: LAMA2; (+) strand; PAM type: NRG; PAM sequence: GAG
tgttcatcagctggagaaca

SEQ ID NO: 182864 - DNA, 20 bp, Artificial Sequence
  Description of Artificial Sequence: Synthetic oligonucleotide
  Target: LAMA2; (+) strand; PAM type: NRG; PAM sequence: GAG
ttcatcagctggagaacaga

SEQ ID NO: 182865 - DNA, 20 bp, Artificial Sequence
  Description of Artificial Sequence: Synthetic oligonucleotide
  Target: LAMA2; (+) strand; PAM type: NRG; PAM sequence: AGG
tcatcagctggagaacagag

SEQ ID NO: 182866 - DNA, 20 bp, Artificial Sequence
  Description of Artificial Sequence: Synthetic oligonucleotide
  Target: LAMA2; (+) strand; PAM type: NRG; PAM sequence: TGG
gagaacagagaggcaaactg

SEQ ID NO: 182867 - DNA, 20 bp, Artificial Sequence
  Description of Artificial Sequence: Synthetic oligonucleotide
  Target: LAMA2; (+) strand; PAM type: NRG; PAM sequence: TGG
actgtggcacttttgcataa

SEQ ID NO: 182868 - DNA, 20 bp, Artificial Sequence
  Description of Artificial Sequence: Synthetic oligonucleotide
  Target: LAMA2; (+) strand; PAM type: NRG; PAM sequence: GGG
ctgtggcacttttgcataat

SEQ ID NO: 182869 - DNA, 20 bp, Artificial Sequence
  Description of Artificial Sequence: Synthetic oligonucleotide
  Target: LAMA2; (+) strand; PAM type: NRG; PAM sequence: AAG
cttttgcataatgggatatc

SEQ ID NO: 182870 - DNA, 20 bp, Artificial Sequence
  Description of Artificial Sequence: Synthetic oligonucleotide
  Target: LAMA2; (+) strand; PAM type: NRG; PAM sequence: AGG
ttttgcataatgggatatca

SEQ ID NO: 182871 - DNA, 20 bp, Artificial Sequence
  Description of Artificial Sequence: Synthetic oligonucleotide
  Target: LAMA2; (+) strand; PAM type: NRG; PAM sequence: AAG
ataatgggatatcaaggaat

SEQ ID NO: 182872 - DNA, 20 bp, Artificial Sequence
  Description of Artificial Sequence: Synthetic oligonucleotide
  Target: LAMA2; (+) strand; PAM type: NRG; PAM sequence: AAG
ggatatcaaggaataagaaa

SEQ ID NO: 182873 - DNA, 20 bp, Artificial Sequence
  Description of Artificial Sequence: Synthetic oligonucleotide
  Target: LAMA2; (+) strand; PAM type: NRG; PAM sequence: AGG
gatatcaaggaataagaaaa

SEQ ID NO: 182874 - DNA, 20 bp, Artificial Sequence
  Description of Artificial Sequence: Synthetic oligonucleotide
  Target: LAMA2; (+) strand; PAM type: NRG; PAM sequence: TAG
aaatataacaacataataaa

SEQ ID NO: 182875 - DNA, 20 bp, Artificial Sequence
  Description of Artificial Sequence: Synthetic oligonucleotide
  Target: LAMA2; (+) strand; PAM type: NRG; PAM sequence: TGG
aaaatgaaaaatgtgctata

SEQ ID NO: 182876 - DNA, 20 bp, Artificial Sequence
  Description of Artificial Sequence: Synthetic oligonucleotide
  Target: LAMA2; (+) strand; PAM type: NRG; PAM sequence: TAG
gctatatggtaccatttttg

SEQ ID NO: 182877 - DNA, 20 bp, Artificial Sequence
  Description of Artificial Sequence: Synthetic oligonucleotide
  Target: LAMA2; (+) strand; PAM type: NRG; PAM sequence: AAG
tttttgtagatttctcatac

SEQ ID NO: 182878 - DNA, 20 bp, Artificial Sequence
  Description of Artificial Sequence: Synthetic oligonucleotide
  Target: LAMA2; (+) strand; PAM type: NRG; PAM sequence: TAG
ttgtagatttctcatacaag

SEQ ID NO: 182879 - DNA, 20 bp, Artificial Sequence
  Description of Artificial Sequence: Synthetic oligonucleotide
  Target: LAMA2; (+) strand; PAM type: NRG; PAM sequence: CAG
actaaacaacatattgttta

SEQ ID NO: 182880 - DNA, 20 bp, Artificial Sequence
  Description of Artificial Sequence: Synthetic oligonucleotide
  Target: LAMA2; (+) strand; PAM type: NRG; PAM sequence: AAG
atttcaaaaatattttttaa

SEQ ID NO: 182881 - DNA, 20 bp, Artificial Sequence
  Description of Artificial Sequence: Synthetic oligonucleotide
  Target: LAMA2; (+) strand; PAM type: NRG; PAM sequence: AAG
caaaaatattttttaaaagt

SEQ ID NO: 182882 - DNA, 20 bp, Artificial Sequence
  Description of Artificial Sequence: Synthetic oligonucleotide
  Target: LAMA2; (+) strand; PAM type: NRG; PAM sequence: AGG
aaaaatattttttaaaagta

SEQ ID NO: 182883 - DNA, 20 bp, Artificial Sequence
  Description of Artificial Sequence: Synthetic oligonucleotide
  Target: LAMA2; (+) strand; PAM type: NRG; PAM sequence: TGG
aaacataaaatccacatttg

SEQ ID NO: 182884 - DNA, 20 bp, Artificial Sequence
  Description of Artificial Sequence: Synthetic oligonucleotide
  Target: LAMA2; (+) strand; PAM type: NRG; PAM sequence: GAG
ccacatttgtggttacctct

SEQ ID NO: 182885 - DNA, 20 bp, Artificial Sequence
  Description of Artificial Sequence: Synthetic oligonucleotide
  Target: LAMA2; (+) strand; PAM type: NRG; PAM sequence: TGG
atttgtggttacctctgaga

SEQ ID NO: 182886 - DNA, 20 bp, Artificial Sequence
  Description of Artificial Sequence: Synthetic oligonucleotide
  Target: LAMA2; (+) strand; PAM type: NRG; PAM sequence: GAG
ttgtggttacctctgagatg

SEQ ID NO: 182887 - DNA, 20 bp, Artificial Sequence
  Description of Artificial Sequence: Synthetic oligonucleotide
  Target: LAMA2; (+) strand; PAM type: NRG; PAM sequence: AAG
tggttacctctgagatggag

SEQ ID NO: 182888 - DNA, 20 bp, Artificial Sequence
  Description of Artificial Sequence: Synthetic oligonucleotide
  Target: LAMA2; (+) strand; PAM type: NRG; PAM sequence: AAG
tacctctgagatggagaagc

SEQ ID NO: 182889 - DNA, 20 bp, Artificial Sequence
  Description of Artificial Sequence: Synthetic oligonucleotide
  Target: LAMA2; (+) strand; PAM type: NRG; PAM sequence: AGG
acctctgagatggagaagca

SEQ ID NO: 182890 - DNA, 20 bp, Artificial Sequence
  Description of Artificial Sequence: Synthetic oligonucleotide
  Target: LAMA2; (+) strand; PAM type: NRG; PAM sequence: GAG
ctctgagatggagaagcaag

SEQ ID NO: 182891 - DNA, 20 bp, Artificial Sequence
  Description of Artificial Sequence: Synthetic oligonucleotide
  Target: LAMA2; (+) strand; PAM type: NRG; PAM sequence: TGG
gagatggagaagcaaggaga

SEQ ID NO: 182892 - DNA, 20 bp, Artificial Sequence
  Description of Artificial Sequence: Synthetic oligonucleotide
  Target: LAMA2; (+) strand; PAM type: NRG; PAM sequence: TAG
gagaagcaaggagatggtat

SEQ ID NO: 182893 - DNA, 20 bp, Artificial Sequence
  Description of Artificial Sequence: Synthetic oligonucleotide
  Target: LAMA2; (+) strand; PAM type: NRG; PAM sequence: AAG
agcaaggagatggtattaga

SEQ ID NO: 182894 - DNA, 20 bp, Artificial Sequence
  Description of Artificial Sequence: Synthetic oligonucleotide
  Target: LAMA2; (+) strand; PAM type: NRG; PAM sequence: AAG
ggtattagaaagaaactcat

SEQ ID NO: 182895 - DNA, 20 bp, Artificial Sequence
  Description of Artificial Sequence: Synthetic oligonucleotide
  Target: LAMA2; (+) strand; PAM type: NRG; PAM sequence: GAG
tattagaaagaaactcataa

SEQ ID NO: 182896 - DNA, 20 bp, Artificial Sequence
  Description of Artificial Sequence: Synthetic oligonucleotide
  Target: LAMA2; (+) strand; PAM type: NRG; PAM sequence: TGG
gaaactcataagagatgcaa

SEQ ID NO: 182897 - DNA, 20 bp, Artificial Sequence
  Description of Artificial Sequence: Synthetic oligonucleotide
  Target: LAMA2; (+) strand; PAM type: NRG; PAM sequence: TGG
atggtattgtttctgaaatt

SEQ ID NO: 182898 - DNA, 20 bp, Artificial Sequence
  Description of Artificial Sequence: Synthetic oligonucleotide
  Target: LAMA2; (+) strand; PAM type: NRG; PAM sequence: TGG
gtattgtttctgaaatttgg

SEQ ID NO: 182899 - DNA, 20 bp, Artificial Sequence
  Description of Artificial Sequence: Synthetic oligonucleotide
  Target: LAMA2; (+) strand; PAM type: NRG; PAM sequence: TAG
ttgtttctgaaatttggtgg

SEQ ID NO: 182900 - DNA, 20 bp, Artificial Sequence
  Description of Artificial Sequence: Synthetic oligonucleotide
  Target: LAMA2; (+) strand; PAM type: NRG; PAM sequence: CAG
gaaatttggtggtagattta

SEQ ID NO: 182901 - DNA, 20 bp, Artificial Sequence
  Description of Artificial Sequence: Synthetic oligonucleotide
  Target: LAMA2; (+) strand; PAM type: NRG; PAM sequence: AGG
aaatttggtggtagatttac

SEQ ID NO: 182902 - DNA, 20 bp, Artificial Sequence
  Description of Artificial Sequence: Synthetic oligonucleotide
  Target: LAMA2; (+) strand; PAM type: NRG; PAM sequence: CAG
caggtattcatgttattata

SEQ ID NO: 182903 - DNA, 20 bp, Artificial Sequence
  Description of Artificial Sequence: Synthetic oligonucleotide
  Target: LAMA2; (+) strand; PAM type: NRG; PAM sequence: CAG
gttattatacagtgttaacg

SEQ ID NO: 182904 - DNA, 20 bp, Artificial Sequence
  Description of Artificial Sequence: Synthetic oligonucleotide
  Target: LAMA2; (+) strand; PAM type: NRG; PAM sequence: AAG
tgtatatcactcatattgtg

SEQ ID NO: 182905 - DNA, 20 bp, Artificial Sequence
  Description of Artificial Sequence: Synthetic oligonucleotide
  Target: LAMA2; (+) strand; PAM type: NRG; PAM sequence: TAG
attgtgaagaatatatcaaa

SEQ ID NO: 182906 - DNA, 20 bp, Artificial Sequence
  Description of Artificial Sequence: Synthetic oligonucleotide
  Target: LAMA2; (+) strand; PAM type: NRG; PAM sequence: AAG
tcgtaataaaaatatttttg

SEQ ID NO: 182907 - DNA, 20 bp, Artificial Sequence
  Description of Artificial Sequence: Synthetic oligonucleotide
  Target: LAMA2; (+) strand; PAM type: NRG; PAM sequence: GAG
gtaataaaaatatttttgaa

SEQ ID NO: 182908 - DNA, 20 bp, Artificial Sequence
  Description of Artificial Sequence: Synthetic oligonucleotide
  Target: LAMA2; (+) strand; PAM type: NRG; PAM sequence: TAG
ataaaaatatttttgaagag

SEQ ID NO: 182909 - DNA, 20 bp, Artificial Sequence
  Description of Artificial Sequence: Synthetic oligonucleotide
  Target: LAMA2; (+) strand; PAM type: NRG; PAM sequence: GAG
aaaaatatttttgaagagta

SEQ ID NO: 182910 - DNA, 20 bp, Artificial Sequence
  Description of Artificial Sequence: Synthetic oligonucleotide
  Target: LAMA2; (+) strand; PAM type: NRG; PAM sequence: AGG
aaaatatttttgaagagtag

SEQ ID NO: 182911 - DNA, 20 bp, Artificial Sequence
  Description of Artificial Sequence: Synthetic oligonucleotide
  Target: LAMA2; (+) strand; PAM type: NRG; PAM sequence: GGG
aaatatttttgaagagtaga

SEQ ID NO: 182912 - DNA, 20 bp, Artificial Sequence
  Description of Artificial Sequence: Synthetic oligonucleotide
  Target: LAMA2; (+) strand; PAM type: NRG; PAM sequence: GAG
atatttttgaagagtagagg

SEQ ID NO: 182913 - DNA, 20 bp, Artificial Sequence
  Description of Artificial Sequence: Synthetic oligonucleotide
  Target: LAMA2; (+) strand; PAM type: NRG; PAM sequence: AAG
tttgaagagtagagggagaa

SEQ ID NO: 182914 - DNA, 20 bp, Artificial Sequence
  Description of Artificial Sequence: Synthetic oligonucleotide
  Target: LAMA2; (+) strand; PAM type: NRG; PAM sequence: AAG
catttcttactacacataat

SEQ ID NO: 182915 - DNA, 20 bp, Artificial Sequence
  Description of Artificial Sequence: Synthetic oligonucleotide
  Target: LAMA2; (+) strand; PAM type: NRG; PAM sequence: AAG
tttctcatattgcaaatgat

SEQ ID NO: 182916 - DNA, 20 bp, Artificial Sequence
  Description of Artificial Sequence: Synthetic oligonucleotide
  Target: LAMA2; (+) strand; PAM type: NRG; PAM sequence: TAG
tcatattgcaaatgataagc

SEQ ID NO: 182917 - DNA, 20 bp, Artificial Sequence
  Description of Artificial Sequence: Synthetic oligonucleotide
  Target: LAMA2; (+) strand; PAM type: NRG; PAM sequence: AAG
aatgataagctagttataat

SEQ ID NO: 182918 - DNA, 20 bp, Artificial Sequence
  Description of Artificial Sequence: Synthetic oligonucleotide
  Target: LAMA2; (+) strand; PAM type: NRG; PAM sequence: CAG
gctagttataataagaatac

SEQ ID NO: 182919 - DNA, 20 bp, Artificial Sequence
  Description of Artificial Sequence: Synthetic oligonucleotide
  Target: LAMA2; (+) strand; PAM type: NRG; PAM sequence: TAG
ccagatcaaatattctgaaa

SEQ ID NO: 182920 - DNA, 20 bp, Artificial Sequence
  Description of Artificial Sequence: Synthetic oligonucleotide
  Target: LAMA2; (+) strand; PAM type: NRG; PAM sequence: AAG
tctgaaatagatttccacta

SEQ ID NO: 182921 - DNA, 20 bp, Artificial Sequence
  Description of Artificial Sequence: Synthetic oligonucleotide
  Target: LAMA2; (+) strand; PAM type: NRG; PAM sequence: AGG
ctgaaatagatttccactaa

SEQ ID NO: 182922 - DNA, 20 bp, Artificial Sequence
  Description of Artificial Sequence: Synthetic oligonucleotide
  Target: LAMA2; (+) strand; PAM type: NRG; PAM sequence: CAG
cttgattccttcatcattgc

SEQ ID NO: 182923 - DNA, 20 bp, Artificial Sequence
  Description of Artificial Sequence: Synthetic oligonucleotide
  Target: LAMA2; (+) strand; PAM type: NRG; PAM sequence: TGG
gatatttaaacactacctac

SEQ ID NO: 182924 - DNA, 20 bp, Artificial Sequence
  Description of Artificial Sequence: Synthetic oligonucleotide
  Target: LAMA2; (+) strand; PAM type: NRG; PAM sequence: AAG
gctccaaatttctcctcttc

SEQ ID NO: 182925 - DNA, 20 bp, Artificial Sequence
  Description of Artificial Sequence: Synthetic oligonucleotide
  Target: LAMA2; (+) strand; PAM type: NRG; PAM sequence: AAG
atttctcctcttcaagataa

SEQ ID NO: 182926 - DNA, 20 bp, Artificial Sequence
  Description of Artificial Sequence: Synthetic oligonucleotide
  Target: LAMA2; (+) strand; PAM type: NRG; PAM sequence: CAG
aagaaatgaatgtgaatcac

SEQ ID NO: 182927 - DNA, 20 bp, Artificial Sequence
  Description of Artificial Sequence: Synthetic oligonucleotide
  Target: LAMA2; (+) strand; PAM type: NRG; PAM sequence: CAG
gaatgtgaatcaccagcttt

SEQ ID NO: 182928 - DNA, 20 bp, Artificial Sequence
  Description of Artificial Sequence: Synthetic oligonucleotide
  Target: LAMA2; (+) strand; PAM type: NRG; PAM sequence: AGG
aatgtgaatcaccagctttc

SEQ ID NO: 182929 - DNA, 20 bp, Artificial Sequence
  Description of Artificial Sequence: Synthetic oligonucleotide
  Target: LAMA2; (+) strand; PAM type: NRG; PAM sequence: TAG
tgaatcaccagctttcagga

SEQ ID NO: 182930 - DNA, 20 bp, Artificial Sequence
  Description of Artificial Sequence: Synthetic oligonucleotide
  Target: LAMA2; (+) strand; PAM type: NRG; PAM sequence: CAG
ggatagtgcttaaaataaaa

SEQ ID NO: 182931 - DNA, 20 bp, Artificial Sequence
  Description of Artificial Sequence: Synthetic oligonucleotide
  Target: LAMA2; (+) strand; PAM type: NRG; PAM sequence: AAG
cctattaaaacaattacaat

SEQ ID NO: 182932 - DNA, 20 bp, Artificial Sequence
  Description of Artificial Sequence: Synthetic oligonucleotide
  Target: LAMA2; (+) strand; PAM type: NRG; PAM sequence: TAG
tacaataagaaaacactatg

SEQ ID NO: 182933 - DNA, 20 bp, Artificial Sequence
  Description of Artificial Sequence: Synthetic oligonucleotide
  Target: LAMA2; (+) strand; PAM type: NRG; PAM sequence: TAG
taagaaaacactatgtagta

SEQ ID NO: 182934 - DNA, 20 bp, Artificial Sequence
  Description of Artificial Sequence: Synthetic oligonucleotide
  Target: LAMA2; (+) strand; PAM type: NRG; PAM sequence: AAG
acactatgtagtatagtata

SEQ ID NO: 182935 - DNA, 20 bp, Artificial Sequence
  Description of Artificial Sequence: Synthetic oligonucleotide
  Target: LAMA2; (+) strand; PAM type: NRG; PAM sequence: AAG
tatgtagtatagtataaagt

SEQ ID NO: 182936 - DNA, 20 bp, Artificial Sequence
  Description of Artificial Sequence: Synthetic oligonucleotide
  Target: LAMA2; (+) strand; PAM type: NRG; PAM sequence: TAG
atctactttataaaatatca

SEQ ID NO: 182937 - DNA, 20 bp, Artificial Sequence
  Description of Artificial Sequence: Synthetic oligonucleotide
  Target: LAMA2; (+) strand; PAM type: NRG; PAM sequence: AAG
atcatagtatatgctatctg

SEQ ID NO: 182938 - DNA, 20 bp, Artificial Sequence
  Description of Artificial Sequence: Synthetic oligonucleotide
  Target: LAMA2; (+) strand; PAM type: NRG; PAM sequence: AGG
tcatagtatatgctatctga

SEQ ID NO: 182939 - DNA, 20 bp, Artificial Sequence
  Description of Artificial Sequence: Synthetic oligonucleotide
  Target: LAMA2; (+) strand; PAM type: NRG; PAM sequence: GAG
atagtatatgctatctgaag

SEQ ID NO: 182940 - DNA, 20 bp, Artificial Sequence
  Description of Artificial Sequence: Synthetic oligonucleotide
  Target: LAMA2; (+) strand; PAM type: NRG; PAM sequence: AGG
tagtatatgctatctgaagg

SEQ ID NO: 182941 - DNA, 20 bp, Artificial Sequence
  Description of Artificial Sequence: Synthetic oligonucleotide
  Target: LAMA2; (+) strand; PAM type: NRG; PAM sequence: TAG
aaggaggaaccaatgttaaa

SEQ ID NO: 182942 - DNA, 20 bp, Artificial Sequence
  Description of Artificial Sequence: Synthetic oligonucleotide
  Target: LAMA2; (+) strand; PAM type: NRG; PAM sequence: AAG
gaaccaatgttaaatagtat

SEQ ID NO: 182943 - DNA, 20 bp, Artificial Sequence
  Description of Artificial Sequence: Synthetic oligonucleotide
  Target: LAMA2; (+) strand; PAM type: NRG; PAM sequence: TAG
gttaaatagtataagtctgt

SEQ ID NO: 182944 - DNA, 20 bp, Artificial Sequence
  Description of Artificial Sequence: Synthetic oligonucleotide
  Target: LAMA2; (+) strand; PAM type: NRG; PAM sequence: TAG
ataagtctgttagacataat

SEQ ID NO: 182945 - DNA, 20 bp, Artificial Sequence
  Description of Artificial Sequence: Synthetic oligonucleotide
  Target: LAMA2; (+) strand; PAM type: NRG; PAM sequence: TAG
ctgttagacataattagatt

SEQ ID NO: 182946 - DNA, 20 bp, Artificial Sequence
  Description of Artificial Sequence: Synthetic oligonucleotide
  Target: LAMA2; (+) strand; PAM type: NRG; PAM sequence: CAG
gacataattagatttagatt

SEQ ID NO: 182947 - DNA, 20 bp, Artificial Sequence
  Description of Artificial Sequence: Synthetic oligonucleotide
  Target: LAMA2; (+) strand; PAM type: NRG; PAM sequence: TGG
attagatttagattcagtgc

SEQ ID NO: 182948 - DNA, 20 bp, Artificial Sequence
  Description of Artificial Sequence: Synthetic oligonucleotide
  Target: LAMA2; (+) strand; PAM type: NRG; PAM sequence: AAG
tcagtgctggttaaattgac

SEQ ID NO: 182949 - DNA, 20 bp, Artificial Sequence
  Description of Artificial Sequence: Synthetic oligonucleotide
  Target: LAMA2; (+) strand; PAM type: NRG; PAM sequence: AAG
ttgacaagttttatatttca

SEQ ID NO: 182950 - DNA, 20 bp, Artificial Sequence
  Description of Artificial Sequence: Synthetic oligonucleotide
  Target: LAMA2; (+) strand; PAM type: NRG; PAM sequence: CGG
gttttatatttcaaagctaa

SEQ ID NO: 182951 - DNA, 20 bp, Artificial Sequence
  Description of Artificial Sequence: Synthetic oligonucleotide
  Target: LAMA2; (+) strand; PAM type: NRG; PAM sequence: TAG
gctaacggttttgataccca

SEQ ID NO: 182952 - DNA, 20 bp, Artificial Sequence
  Description of Artificial Sequence: Synthetic oligonucleotide
  Target: LAMA2; (+) strand; PAM type: NRG; PAM sequence: GAG
taacggttttgatacccata

SEQ ID NO: 182953 - DNA, 20 bp, Artificial Sequence
  Description of Artificial Sequence: Synthetic oligonucleotide
  Target: LAMA2; (+) strand; PAM type: NRG; PAM sequence: TGG
tgtgattcctttctgctaaa

SEQ ID NO: 182954 - DNA, 20 bp, Artificial Sequence
  Description of Artificial Sequence: Synthetic oligonucleotide
  Target: LAMA2; (+) strand; PAM type: NRG; PAM sequence: GGG
gtgattcctttctgctaaat

SEQ ID NO: 182955 - DNA, 20 bp, Artificial Sequence
  Description of Artificial Sequence: Synthetic oligonucleotide
  Target: LAMA2; (+) strand; PAM type: NRG; PAM sequence: TGG
tctgctaaatgggtttgata

SEQ ID NO: 182956 - DNA, 20 bp, Artificial Sequence
  Description of Artificial Sequence: Synthetic oligonucleotide
  Target: LAMA2; (+) strand; PAM type: NRG; PAM sequence: GAG
tgatatggcaaaccatccat

SEQ ID NO: 182957 - DNA, 20 bp, Artificial Sequence
  Description of Artificial Sequence: Synthetic oligonucleotide
  Target: LAMA2; (+) strand; PAM type: NRG; PAM sequence: AAG
tggcaaaccatccatgagct

SEQ ID NO: 182958 - DNA, 20 bp, Artificial Sequence
  Description of Artificial Sequence: Synthetic oligonucleotide
  Target: LAMA2; (+) strand; PAM type: NRG; PAM sequence: AGG
ggcaaaccatccatgagcta

SEQ ID NO: 182959 - DNA, 20 bp, Artificial Sequence
  Description of Artificial Sequence: Synthetic oligonucleotide
  Target: LAMA2; (+) strand; PAM type: NRG; PAM sequence: GAG
gagctaaggaatttttaatt

SEQ ID NO: 182960 - DNA, 20 bp, Artificial Sequence
  Description of Artificial Sequence: Synthetic oligonucleotide
  Target: LAMA2; (+) strand; PAM type: NRG; PAM sequence: TAG
ctaaggaatttttaattgag

SEQ ID NO: 182961 - DNA, 20 bp, Artificial Sequence
  Description of Artificial Sequence: Synthetic oligonucleotide
  Target: LAMA2; (+) strand; PAM type: NRG; PAM sequence: CAG
agtttgtgttttccctttga

SEQ ID NO: 182962 - DNA, 20 bp, Artificial Sequence
  Description of Artificial Sequence: Synthetic oligonucleotide
  Target: LAMA2; (+) strand; PAM type: NRG; PAM sequence: TGG
tgtgttttccctttgacaga

SEQ ID NO: 182963 - DNA, 20 bp, Artificial Sequence
  Description of Artificial Sequence: Synthetic oligonucleotide
  Target: LAMA2; (+) strand; PAM type: NRG; PAM sequence: GAG
ttttccctttgacagatggt

SEQ ID NO: 182964 - DNA, 20 bp, Artificial Sequence
  Description of Artificial Sequence: Synthetic oligonucleotide
  Target: LAMA2; (+) strand; PAM type: NRG; PAM sequence: CAG
acagatggtgagcacttatc

SEQ ID NO: 182965 - DNA, 20 bp, Artificial Sequence
  Description of Artificial Sequence: Synthetic oligonucleotide
  Target: LAMA2; (+) strand; PAM type: NRG; PAM sequence: TGG
cagatcctcaaaatgttctg

SEQ ID NO: 182966 - DNA, 20 bp, Artificial Sequence
  Description of Artificial Sequence: Synthetic oligonucleotide
  Target: LAMA2; (+) strand; PAM type: NRG; PAM sequence: TGG
atcctcaaaatgttctgtgg

SEQ ID NO: 182967 - DNA, 20 bp, Artificial Sequence
  Description of Artificial Sequence: Synthetic oligonucleotide
  Target: LAMA2; (+) strand; PAM type: NRG; PAM sequence: TAG
acgtaactacatacatgatt

SEQ ID NO: 182968 - DNA, 20 bp, Artificial Sequence
  Description of Artificial Sequence: Synthetic oligonucleotide
  Target: LAMA2; (+) strand; PAM type: NRG; PAM sequence: TGG
tacatgatttagtaaattat

SEQ ID NO: 182969 - DNA, 20 bp, Artificial Sequence
  Description of Artificial Sequence: Synthetic oligonucleotide
  Target: LAMA2; (+) strand; PAM type: NRG; PAM sequence: TGG
tggaacatgatgatgtttga

SEQ ID NO: 182970 - DNA, 20 bp, Artificial Sequence
  Description of Artificial Sequence: Synthetic oligonucleotide
  Target: LAMA2; (+) strand; PAM type: NRG; PAM sequence: TAG
ggaatctgtctctaccacca

SEQ ID NO: 182971 - DNA, 20 bp, Artificial Sequence
  Description of Artificial Sequence: Synthetic oligonucleotide
  Target: LAMA2; (+) strand; PAM type: NRG; PAM sequence: TGG
ctaccaccatagatgactca

SEQ ID NO: 182972 - DNA, 20 bp, Artificial Sequence
  Description of Artificial Sequence: Synthetic oligonucleotide
  Target: LAMA2; (+) strand; PAM type: NRG; PAM sequence: GAG
accaccatagatgactcatg

SEQ ID NO: 182973 - DNA, 20 bp, Artificial Sequence
  Description of Artificial Sequence: Synthetic oligonucleotide
  Target: LAMA2; (+) strand; PAM type: NRG; PAM sequence: GAG
tagatgactcatggagaact

SEQ ID NO: 182974 - DNA, 20 bp, Artificial Sequence
  Description of Artificial Sequence: Synthetic oligonucleotide
  Target: LAMA2; (+) strand; PAM type: NRG; PAM sequence: TGG
agaactgagccatcactgtg

SEQ ID NO: 182975 - DNA, 20 bp, Artificial Sequence
  Description of Artificial Sequence: Synthetic oligonucleotide
  Target: LAMA2; (+) strand; PAM type: NRG; PAM sequence: CAG
actgagccatcactgtgtgg

SEQ ID NO: 182976 - DNA, 20 bp, Artificial Sequence
  Description of Artificial Sequence: Synthetic oligonucleotide
  Target: LAMA2; (+) strand; PAM type: NRG; PAM sequence: AGG
ctgagccatcactgtgtggc

SEQ ID NO: 182977 - DNA, 20 bp, Artificial Sequence
  Description of Artificial Sequence: Synthetic oligonucleotide
  Target: LAMA2; (+) strand; PAM type: NRG; PAM sequence: AAG
caggtgcccccatactccac

SEQ ID NO: 182978 - DNA, 20 bp, Artificial Sequence
  Description of Artificial Sequence: Synthetic oligonucleotide
  Target: LAMA2; (+) strand; PAM type: NRG; PAM sequence: AAG
tgcccccatactccacaaga

SEQ ID NO: 182979 - DNA, 20 bp, Artificial Sequence
  Description of Artificial Sequence: Synthetic oligonucleotide
  Target: LAMA2; (+) strand; PAM type: NRG; PAM sequence: AGG
gcccccatactccacaagaa

SEQ ID NO: 182980 - DNA, 20 bp, Artificial Sequence
  Description of Artificial Sequence: Synthetic oligonucleotide
  Target: LAMA2; (+) strand; PAM type: NRG; PAM sequence: GGG
cccccatactccacaagaaa

SEQ ID NO: 182981 - DNA, 20 bp, Artificial Sequence
  Description of Artificial Sequence: Synthetic oligonucleotide
  Target: LAMA2; (+) strand; PAM type: NRG; PAM sequence: GAG
cccatactccacaagaaagg

SEQ ID NO: 182982 - DNA, 20 bp, Artificial Sequence
  Description of Artificial Sequence: Synthetic oligonucleotide
  Target: LAMA2; (+) strand; PAM type: NRG; PAM sequence: GAG
catactccacaagaaaggga

SEQ ID NO: 182983 - DNA, 20 bp, Artificial Sequence
  Description of Artificial Sequence: Synthetic oligonucleotide
  Target: LAMA2; (+) strand; PAM type: NRG; PAM sequence: TGG
cacaagaaagggagagcacg

SEQ ID NO: 182984 - DNA, 20 bp, Artificial Sequence
  Description of Artificial Sequence: Synthetic oligonucleotide
  Target: LAMA2; (+) strand; PAM type: NRG; PAM sequence: CAG
aaagggagagcacgtggcat

SEQ ID NO: 182985 - DNA, 20 bp, Artificial Sequence
  Description of Artificial Sequence: Synthetic oligonucleotide
  Target: LAMA2; (+) strand; PAM type: NRG; PAM sequence: TAG
agagcacgtggcatcagctc

SEQ ID NO: 182986 - DNA, 20 bp, Artificial Sequence
  Description of Artificial Sequence: Synthetic oligonucleotide
  Target: LAMA2; (+) strand; PAM type: NRG; PAM sequence: AGG
gagcacgtggcatcagctct

SEQ ID NO: 182987 - DNA, 20 bp, Artificial Sequence
  Description of Artificial Sequence: Synthetic oligonucleotide
  Target: LAMA2; (+) strand; PAM type: NRG; PAM sequence: GGG
agcacgtggcatcagctcta

SEQ ID NO: 182988 - DNA, 20 bp, Artificial Sequence
  Description of Artificial Sequence: Synthetic oligonucleotide
  Target: LAMA2; (+) strand; PAM type: NRG; PAM sequence: AAG
gtggcatcagctctagggac

SEQ ID NO: 182989 - DNA, 20 bp, Artificial Sequence
  Description of Artificial Sequence: Synthetic oligonucleotide
  Target: LAMA2; (+) strand; PAM type: NRG; PAM sequence: AGG
tggcatcagctctagggaca

SEQ ID NO: 182990 - DNA, 20 bp, Artificial Sequence
  Description of Artificial Sequence: Synthetic oligonucleotide
  Target: LAMA2; (+) strand; PAM type: NRG; PAM sequence: CAG
ctagggacaaggactgcatt

SEQ ID NO: 182991 - DNA, 20 bp, Artificial Sequence
  Description of Artificial Sequence: Synthetic oligonucleotide
  Target: LAMA2; (+) strand; PAM type: NRG; PAM sequence: AGG
tagggacaaggactgcattc

SEQ ID NO: 182992 - DNA, 20 bp, Artificial Sequence
  Description of Artificial Sequence: Synthetic oligonucleotide
  Target: LAMA2; (+) strand; PAM type: NRG; PAM sequence: TGG
aggactgcattcaggctccc

SEQ ID NO: 182993 - DNA, 20 bp, Artificial Sequence
  Description of Artificial Sequence: Synthetic oligonucleotide
  Target: LAMA2; (+) strand; PAM type: NRG; PAM sequence: GGG
ggactgcattcaggctccct

SEQ ID NO: 182994 - DNA, 20 bp, Artificial Sequence
  Description of Artificial Sequence: Synthetic oligonucleotide
  Target: LAMA2; (+) strand; PAM type: NRG; PAM sequence: GGG
gactgcattcaggctccctg

SEQ ID NO: 182995 - DNA, 20 bp, Artificial Sequence
  Description of Artificial Sequence: Synthetic oligonucleotide
  Target: LAMA2; (+) strand; PAM type: NRG; PAM sequence: TGG
aggctccctggggttcatga

SEQ ID NO: 182996 - DNA, 20 bp, Artificial Sequence
  Description of Artificial Sequence: Synthetic oligonucleotide
  Target: LAMA2; (+) strand; PAM type: NRG; PAM sequence: GGG
ggctccctggggttcatgat

SEQ ID NO: 182997 - DNA, 20 bp, Artificial Sequence
  Description of Artificial Sequence: Synthetic oligonucleotide
  Target: LAMA2; (+) strand; PAM type: NRG; PAM sequence: TGG
atgggatatcaaaaccacac

SEQ ID NO: 182998 - DNA, 20 bp, Artificial Sequence
  Description of Artificial Sequence: Synthetic oligonucleotide
  Target: LAMA2; (+) strand; PAM type: NRG; PAM sequence: TAG
caaaaccacactggttgcta

SEQ ID NO: 182999 - DNA, 20 bp, Artificial Sequence
  Description of Artificial Sequence: Synthetic oligonucleotide
  Target: LAMA2; (+) strand; PAM type: NRG; PAM sequence: CAG
cacactggttgctatagtaa

SEQ ID NO: 183000 - DNA, 20 bp, Artificial Sequence
  Description of Artificial Sequence: Synthetic oligonucleotide
  Target: LAMA2; (+) strand; PAM type: NRG; PAM sequence: TAG
actggttgctatagtaacag

SEQ ID NO: 183001 - DNA, 20 bp, Artificial Sequence
  Description of Artificial Sequence: Synthetic oligonucleotide
  Target: LAMA2; (+) strand; PAM type: NRG; PAM sequence: AAG
gttgctatagtaacagtagc

SEQ ID NO: 183002 - DNA, 20 bp, Artificial Sequence
  Description of Artificial Sequence: Synthetic oligonucleotide
  Target: LAMA2; (+) strand; PAM type: NRG; PAM sequence: AAG
gctatagtaacagtagcaag

SEQ ID NO: 183003 - DNA, 20 bp, Artificial Sequence
  Description of Artificial Sequence: Synthetic oligonucleotide
  Target: LAMA2; (+) strand; PAM type: NRG; PAM sequence: AAG
tagtaacagtagcaagaaga

SEQ ID NO: 183004 - DNA, 20 bp, Artificial Sequence
  Description of Artificial Sequence: Synthetic oligonucleotide
  Target: LAMA2; (+) strand; PAM type: NRG; PAM sequence: CAG
taacagtagcaagaagaaag

SEQ ID NO: 183005 - DNA, 20 bp, Artificial Sequence
  Description of Artificial Sequence: Synthetic oligonucleotide
  Target: LAMA2; (+) strand; PAM type: NRG; PAM sequence: AGG
aacagtagcaagaagaaagc

SEQ ID NO: 183006 - DNA, 20 bp, Artificial Sequence
  Description of Artificial Sequence: Synthetic oligonucleotide
  Target: LAMA2; (+) strand; PAM type: NRG; PAM sequence: TGG
gaagaaagcaggcatgcttg

SEQ ID NO: 183007 - DNA, 20 bp, Artificial Sequence
  Description of Artificial Sequence: Synthetic oligonucleotide
  Target: LAMA2; (+) strand; PAM type: NRG; PAM sequence: TGG
atcttccttctttctaaatg

SEQ ID NO: 183008 - DNA, 20 bp, Artificial Sequence
  Description of Artificial Sequence: Synthetic oligonucleotide
  Target: LAMA2; (+) strand; PAM type: NRG; PAM sequence: GGG
tcttccttctttctaaatgt

SEQ ID NO: 183009 - DNA, 20 bp, Artificial Sequence
  Description of Artificial Sequence: Synthetic oligonucleotide
  Target: LAMA2; (+) strand; PAM type: NRG; PAM sequence: GAG
ttccttctttctaaatgtgg

SEQ ID NO: 183010 - DNA, 20 bp, Artificial Sequence
  Description of Artificial Sequence: Synthetic oligonucleotide
  Target: LAMA2; (+) strand; PAM type: NRG; PAM sequence: AGG
tccttctttctaaatgtggg

SEQ ID NO: 183011 - DNA, 20 bp, Artificial Sequence
  Description of Artificial Sequence: Synthetic oligonucleotide
  Target: LAMA2; (+) strand; PAM type: NRG; PAM sequence: CAG
ttctttctaaatgtgggagg

SEQ ID NO: 183012 - DNA, 20 bp, Artificial Sequence
  Description of Artificial Sequence: Synthetic oligonucleotide
  Target: LAMA2; (+) strand; PAM type: NRG; PAM sequence: AGG
tctttctaaatgtgggaggc

SEQ ID NO: 183013 - DNA, 20 bp, Artificial Sequence
  Description of Artificial Sequence: Synthetic oligonucleotide
  Target: LAMA2; (+) strand; PAM type: NRG; PAM sequence: TAG
ggcaggttacatgtttgtga

SEQ ID NO: 183014 - DNA, 20 bp, Artificial Sequence
  Description of Artificial Sequence: Synthetic oligonucleotide
  Target: LAMA2; (+) strand; PAM type: NRG; PAM sequence: CAG
gtgatagcgatctattctac

SEQ ID NO: 183015 - DNA, 20 bp, Artificial Sequence
  Description of Artificial Sequence: Synthetic oligonucleotide
  Target: LAMA2; (+) strand; PAM type: NRG; PAM sequence: CAG
agcgatctattctaccagct

SEQ ID NO: 183016 - DNA, 20 bp, Artificial Sequence
  Description of Artificial Sequence: Synthetic oligonucleotide
  Target: LAMA2; (+) strand; PAM type: NRG; PAM sequence: GAG
cgatctattctaccagctca

SEQ ID NO: 183017 - DNA, 20 bp, Artificial Sequence
  Description of Artificial Sequence: Synthetic oligonucleotide
  Target: LAMA2; (+) strand; PAM type: NRG; PAM sequence: AAG
ccagctcagagaacaaattg

SEQ ID NO: 183018 - DNA, 20 bp, Artificial Sequence
  Description of Artificial Sequence: Synthetic oligonucleotide
  Target: LAMA2; (+) strand; PAM type: NRG; PAM sequence: CAG
caaattgaagtctaaatact

SEQ ID NO: 183019 - DNA, 20 bp, Artificial Sequence
  Description of Artificial Sequence: Synthetic oligonucleotide
  Target: LAMA2; (+) strand; PAM type: NRG; PAM sequence: AAG
ctaaatactcagaatgccac

SEQ ID NO: 183020 - DNA, 20 bp, Artificial Sequence
  Description of Artificial Sequence: Synthetic oligonucleotide
  Target: LAMA2; (+) strand; PAM type: NRG; PAM sequence: AGG
taaatactcagaatgccaca

SEQ ID NO: 183021 - DNA, 20 bp, Artificial Sequence
  Description of Artificial Sequence: Synthetic oligonucleotide
  Target: LAMA2; (+) strand; PAM type: NRG; PAM sequence: TGG
tactcagaatgccacaaggt

SEQ ID NO: 183022 - DNA, 20 bp, Artificial Sequence
  Description of Artificial Sequence: Synthetic oligonucleotide
  Target: LAMA2; (+) strand; PAM type: NRG; PAM sequence: GGG
actcagaatgccacaaggtt

SEQ ID NO: 183023 - DNA, 20 bp, Artificial Sequence
  Description of Artificial Sequence: Synthetic oligonucleotide
  Target: LAMA2; (+) strand; PAM type: NRG; PAM sequence: GAG
tcagaatgccacaaggttgg

SEQ ID NO: 183024 - DNA, 20 bp, Artificial Sequence
  Description of Artificial Sequence: Synthetic oligonucleotide
  Target: LAMA2; (+) strand; PAM type: NRG; PAM sequence: CAG
aatgccacaaggttgggagt

SEQ ID NO: 183025 - DNA, 20 bp, Artificial Sequence
  Description of Artificial Sequence: Synthetic oligonucleotide
  Target: LAMA2; (+) strand; PAM type: NRG; PAM sequence: AGG
atgccacaaggttgggagtc

SEQ ID NO: 183026 - DNA, 20 bp, Artificial Sequence
  Description of Artificial Sequence: Synthetic oligonucleotide
  Target: LAMA2; (+) strand; PAM type: NRG; PAM sequence: CAG
tgggagtcaggcctgattct

SEQ ID NO: 183027 - DNA, 20 bp, Artificial Sequence
  Description of Artificial Sequence: Synthetic oligonucleotide
  Target: LAMA2; (+) strand; PAM type: NRG; PAM sequence: AAG
gagtcaggcctgattctcag

SEQ ID NO: 183028 - DNA, 20 bp, Artificial Sequence
  Description of Artificial Sequence: Synthetic oligonucleotide
  Target: LAMA2; (+) strand; PAM type: NRG; PAM sequence: TAG
caggcctgattctcagaagc

SEQ ID NO: 183029 - DNA, 20 bp, Artificial Sequence
  Description of Artificial Sequence: Synthetic oligonucleotide
  Target: LAMA2; (+) strand; PAM type: NRG; PAM sequence: AAG
agctgtccacttgtgaatat

SEQ ID NO: 183030 - DNA, 20 bp, Artificial Sequence
  Description of Artificial Sequence: Synthetic oligonucleotide
  Target: LAMA2; (+) strand; PAM type: NRG; PAM sequence: AGG
gctgtccacttgtgaatata

SEQ ID NO: 183031 - DNA, 20 bp, Artificial Sequence
  Description of Artificial Sequence: Synthetic oligonucleotide
  Target: LAMA2; (+) strand; PAM type: NRG; PAM sequence: GGG
ctgtccacttgtgaatataa

SEQ ID NO: 183032 - DNA, 20 bp, Artificial Sequence
  Description of Artificial Sequence: Synthetic oligonucleotide
  Target: LAMA2; (+) strand; PAM type: NRG; PAM sequence: GAG
gtccacttgtgaatataagg

SEQ ID NO: 183033 - DNA, 20 bp, Artificial Sequence
  Description of Artificial Sequence: Synthetic oligonucleotide
  Target: LAMA2; (+) strand; PAM type: NRG; PAM sequence: GAG
ccacttgtgaatataaggga

SEQ ID NO: 183034 - DNA, 20 bp, Artificial Sequence
  Description of Artificial Sequence: Synthetic oligonucleotide
  Target: LAMA2; (+) strand; PAM type: NRG; PAM sequence: AGG
cacttgtgaatataagggag

SEQ ID NO: 183035 - DNA, 20 bp, Artificial Sequence
  Description of Artificial Sequence: Synthetic oligonucleotide
  Target: LAMA2; (+) strand; PAM type: NRG; PAM sequence: GGG
acttgtgaatataagggaga

SEQ ID NO: 183036 - DNA, 20 bp, Artificial Sequence
  Description of Artificial Sequence: Synthetic oligonucleotide
  Target: LAMA2; (+) strand; PAM type: NRG; PAM sequence: TGG
tgacaccctttgtctcctga

SEQ ID NO: 183037 - DNA, 20 bp, Artificial Sequence
  Description of Artificial Sequence: Synthetic oligonucleotide
  Target: LAMA2; (+) strand; PAM type: NRG; PAM sequence: GGG
gacaccctttgtctcctgat

SEQ ID NO: 183038 - DNA, 20 bp, Artificial Sequence
  Description of Artificial Sequence: Synthetic oligonucleotide
  Target: LAMA2; (+) strand; PAM type: NRG; PAM sequence: AAG
tgtctcctgatgggttttat

SEQ ID NO: 183039 - DNA, 20 bp, Artificial Sequence
  Description of Artificial Sequence: Synthetic oligonucleotide
  Target: LAMA2; (+) strand; PAM type: NRG; PAM sequence: TAG
tcctgatgggttttataagt

SEQ ID NO: 183040 - DNA, 20 bp, Artificial Sequence
  Description of Artificial Sequence: Synthetic oligonucleotide
  Target: LAMA2; (+) strand; PAM type: NRG; PAM sequence: GAG
ctgatgggttttataagtta

SEQ ID NO: 183041 - DNA, 20 bp, Artificial Sequence
  Description of Artificial Sequence: Synthetic oligonucleotide
  Target: LAMA2; (+) strand; PAM type: NRG; PAM sequence: AGG
tgatgggttttataagttag

SEQ ID NO: 183042 - DNA, 20 bp, Artificial Sequence
  Description of Artificial Sequence: Synthetic oligonucleotide
  Target: LAMA2; (+) strand; PAM type: NRG; PAM sequence: AAG
ataagttagaggaccaacgc

SEQ ID NO: 183043 - DNA, 20 bp, Artificial Sequence
  Description of Artificial Sequence: Synthetic oligonucleotide
  Target: LAMA2; (+) strand; PAM type: NRG; PAM sequence: CAG
ttagaggaccaacgcaagca

SEQ ID NO: 183044 - DNA, 20 bp, Artificial Sequence
  Description of Artificial Sequence: Synthetic oligonucleotide
  Target: LAMA2; (+) strand; PAM type: NRG; PAM sequence: CAG
gcaagcacagctgttacttt

SEQ ID NO: 183045 - DNA, 20 bp, Artificial Sequence
  Description of Artificial Sequence: Synthetic oligonucleotide
  Target: LAMA2; (+) strand; PAM type: NRG; PAM sequence: CAG
agcatcacaaatctgctttg

SEQ ID NO: 183046 - DNA, 20 bp, Artificial Sequence
  Description of Artificial Sequence: Synthetic oligonucleotide
  Target: LAMA2; (+) strand; PAM type: NRG; PAM sequence: GAG
catcacaaatctgctttgca

SEQ ID NO: 183047 - DNA, 20 bp, Artificial Sequence
  Description of Artificial Sequence: Synthetic oligonucleotide
  Target: LAMA2; (+) strand; PAM type: NRG; PAM sequence: CAG
atattaatatatccactttc

SEQ ID NO: 183048 - DNA, 20 bp, Artificial Sequence
  Description of Artificial Sequence: Synthetic oligonucleotide
  Target: LAMA2; (+) strand; PAM type: NRG; PAM sequence: AAG
cactttccagatcatctcac

SEQ ID NO: 183049 - DNA, 20 bp, Artificial Sequence
  Description of Artificial Sequence: Synthetic oligonucleotide
  Target: LAMA2; (+) strand; PAM type: NRG; PAM sequence: TGG
gatcatctcacaagcaaaaa

SEQ ID NO: 183050 - DNA, 20 bp, Artificial Sequence
  Description of Artificial Sequence: Synthetic oligonucleotide
  Target: LAMA2; (+) strand; PAM type: NRG; PAM sequence: TAG
aagcaaaaatggtaaatgat

SEQ ID NO: 183051 - DNA, 20 bp, Artificial Sequence
  Description of Artificial Sequence: Synthetic oligonucleotide
  Target: LAMA2; (+) strand; PAM type: NRG; PAM sequence: AAG
aaaaatggtaaatgattaga

SEQ ID NO: 183052 - DNA, 20 bp, Artificial Sequence
  Description of Artificial Sequence: Synthetic oligonucleotide
  Target: LAMA2; (+) strand; PAM type: NRG; PAM sequence: CAG
aatgattagaaagatatttc

SEQ ID NO: 183053 - DNA, 20 bp, Artificial Sequence
  Description of Artificial Sequence: Synthetic oligonucleotide
  Target: LAMA2; (+) strand; PAM type: NRG; PAM sequence: GAG
agctgttttcaaaaccgttt

SEQ ID NO: 183054 - DNA, 20 bp, Artificial Sequence
  Description of Artificial Sequence: Synthetic oligonucleotide
  Target: LAMA2; (+) strand; PAM type: NRG; PAM sequence: AAG
caaaaccgtttgagaaaata

SEQ ID NO: 183055 - DNA, 20 bp, Artificial Sequence
  Description of Artificial Sequence: Synthetic oligonucleotide
  Target: LAMA2; (+) strand; PAM type: NRG; PAM sequence: CAG
aaaataaagtcttaatttct

SEQ ID NO: 183056 - DNA, 20 bp, Artificial Sequence
  Description of Artificial Sequence: Synthetic oligonucleotide
  Target: LAMA2; (+) strand; PAM type: NRG; PAM sequence: AGG
aaataaagtcttaatttctc

SEQ ID NO: 183057 - DNA, 20 bp, Artificial Sequence
  Description of Artificial Sequence: Synthetic oligonucleotide
  Target: LAMA2; (+) strand; PAM type: NRG; PAM sequence: AAG
aaagtcttaatttctcaggt

SEQ ID NO: 183058 - DNA, 20 bp, Artificial Sequence
  Description of Artificial Sequence: Synthetic oligonucleotide
  Target: LAMA2; (+) strand; PAM type: NRG; PAM sequence: CAG
taatttctcaggtaagatct

SEQ ID NO: 183059 - DNA, 20 bp, Artificial Sequence
  Description of Artificial Sequence: Synthetic oligonucleotide
  Target: LAMA2; (+) strand; PAM type: NRG; PAM sequence: GAG
atttctcaggtaagatctca

SEQ ID NO: 183060 - DNA, 20 bp, Artificial Sequence
  Description of Artificial Sequence: Synthetic oligonucleotide
  Target: LAMA2; (+) strand; PAM type: NRG; PAM sequence: CAG
tctcaggtaagatctcagag

SEQ ID NO: 183061 - DNA, 20 bp, Artificial Sequence
  Description of Artificial Sequence: Synthetic oligonucleotide
  Target: LAMA2; (+) strand; PAM type: NRG; PAM sequence: TGG
tctcagagcagacgaacctg

SEQ ID NO: 183062 - DNA, 20 bp, Artificial Sequence
  Description of Artificial Sequence: Synthetic oligonucleotide
  Target: LAMA2; (+) strand; PAM type: NRG; PAM sequence: CAG
agacgaacctgtggttctgc

SEQ ID NO: 183063 - DNA, 20 bp, Artificial Sequence
  Description of Artificial Sequence: Synthetic oligonucleotide
  Target: LAMA2; (+) strand; PAM type: NRG; PAM sequence: AGG
gacgaacctgtggttctgcc

SEQ ID NO: 183064 - DNA, 20 bp, Artificial Sequence
  Description of Artificial Sequence: Synthetic oligonucleotide
  Target: LAMA2; (+) strand; PAM type: NRG; PAM sequence: GGG
acgaacctgtggttctgcca

SEQ ID NO: 183065 - DNA, 20 bp, Artificial Sequence
  Description of Artificial Sequence: Synthetic oligonucleotide
  Target: LAMA2; (+) strand; PAM type: NRG; PAM sequence: AAG
gttctgccagggaatctcta

SEQ ID NO: 183066 - DNA, 20 bp, Artificial Sequence
  Description of Artificial Sequence: Synthetic oligonucleotide
  Target: LAMA2; (+) strand; PAM type: NRG; PAM sequence: AAG
gccagggaatctctaaagct

SEQ ID NO: 183067 - DNA, 20 bp, Artificial Sequence
  Description of Artificial Sequence: Synthetic oligonucleotide
  Target: LAMA2; (+) strand; PAM type: NRG; PAM sequence: GAG
tctaaagctaagccataaat

SEQ ID NO: 183068 - DNA, 20 bp, Artificial Sequence
  Description of Artificial Sequence: Synthetic oligonucleotide
  Target: LAMA2; (+) strand; PAM type: NRG; PAM sequence: CAG
tcaataaccacttgctgttg

SEQ ID NO: 183069 - DNA, 20 bp, Artificial Sequence
  Description of Artificial Sequence: Synthetic oligonucleotide
  Target: LAMA2; (+) strand; PAM type: NRG; PAM sequence: AGG
caataaccacttgctgttgc

SEQ ID NO: 183070 - DNA, 20 bp, Artificial Sequence
  Description of Artificial Sequence: Synthetic oligonucleotide
  Target: LAMA2; (+) strand; PAM type: NRG; PAM sequence: CAG
tattatgcaatactcctcaa

SEQ ID NO: 183071 - DNA, 20 bp, Artificial Sequence
  Description of Artificial Sequence: Synthetic oligonucleotide
  Target: LAMA2; (+) strand; PAM type: NRG; PAM sequence: AGG
attatgcaatactcctcaac

SEQ ID NO: 183072 - DNA, 20 bp, Artificial Sequence
  Description of Artificial Sequence: Synthetic oligonucleotide
  Target: LAMA2; (+) strand; PAM type: NRG; PAM sequence: GGG
ttatgcaatactcctcaaca

SEQ ID NO: 183073 - DNA, 20 bp, Artificial Sequence
  Description of Artificial Sequence: Synthetic oligonucleotide
  Target: LAMA2; (+) strand; PAM type: NRG; PAM sequence: GGG
tatgcaatactcctcaacag

SEQ ID NO: 183074 - DNA, 20 bp, Artificial Sequence
  Description of Artificial Sequence: Synthetic oligonucleotide
  Target: LAMA2; (+) strand; PAM type: NRG; PAM sequence: TGG
actcctcaacaggggccgtc

SEQ ID NO: 183075 - DNA, 20 bp, Artificial Sequence
  Description of Artificial Sequence: Synthetic oligonucleotide
  Target: LAMA2; (+) strand; PAM type: NRG; PAM sequence: AAG
cctcaacaggggccgtctgg

SEQ ID NO: 183076 - DNA, 20 bp, Artificial Sequence
  Description of Artificial Sequence: Synthetic oligonucleotide
  Target: LAMA2; (+) strand; PAM type: NRG; PAM sequence: CAG
tctggaagtgcatctctcca

SEQ ID NO: 183077 - DNA, 20 bp, Artificial Sequence
  Description of Artificial Sequence: Synthetic oligonucleotide
  Target: LAMA2; (+) strand; PAM type: NRG; PAM sequence: AGG
ctggaagtgcatctctccac

SEQ ID NO: 183078 - DNA, 20 bp, Artificial Sequence
  Description of Artificial Sequence: Synthetic oligonucleotide
  Target: LAMA2; (+) strand; PAM type: NRG; PAM sequence: GGG
tggaagtgcatctctccaca

SEQ ID NO: 183079 - DNA, 20 bp, Artificial Sequence
  Description of Artificial Sequence: Synthetic oligonucleotide
  Target: LAMA2; (+) strand; PAM type: NRG; PAM sequence: GGG
ggaagtgcatctctccacag

SEQ ID NO: 183080 - DNA, 20 bp, Artificial Sequence
  Description of Artificial Sequence: Synthetic oligonucleotide
  Target: LAMA2; (+) strand; PAM type: NRG; PAM sequence: GAG
tccacaggggcacgaacaat

SEQ ID NO: 183081 - DNA, 20 bp, Artificial Sequence
  Description of Artificial Sequence: Synthetic oligonucleotide
  Target: LAMA2; (+) strand; PAM type: NRG; PAM sequence: AGG
ccacaggggcacgaacaatg

SEQ ID NO: 183082 - DNA, 20 bp, Artificial Sequence
  Description of Artificial Sequence: Synthetic oligonucleotide
  Target: LAMA2; (+) strand; PAM type: NRG; PAM sequence: CAG
acaatgaggaaaattgtgat

SEQ ID NO: 183083 - DNA, 20 bp, Artificial Sequence
  Description of Artificial Sequence: Synthetic oligonucleotide
  Target: LAMA2; (+) strand; PAM type: NRG; PAM sequence: CAG
gaggaaaattgtgatcagac

SEQ ID NO: 183084 - DNA, 20 bp, Artificial Sequence
  Description of Artificial Sequence: Synthetic oligonucleotide
  Target: LAMA2; (+) strand; PAM type: NRG; PAM sequence: GAG
ggaaaattgtgatcagacca

SEQ ID NO: 183085 - DNA, 20 bp, Artificial Sequence
  Description of Artificial Sequence: Synthetic oligonucleotide
  Target: LAMA2; (+) strand; PAM type: NRG; PAM sequence: TGG
gagccgaatctgtttcatga

SEQ ID NO: 183086 - DNA, 20 bp, Artificial Sequence
  Description of Artificial Sequence: Synthetic oligonucleotide
  Target: LAMA2; (+) strand; PAM type: NRG; PAM sequence: AAG
ccgaatctgtttcatgatgg

SEQ ID NO: 183087 - DNA, 20 bp, Artificial Sequence
  Description of Artificial Sequence: Synthetic oligonucleotide
  Target: LAMA2; (+) strand; PAM type: NRG; PAM sequence: GAG
gaatctgtttcatgatggaa

SEQ ID NO: 183088 - DNA, 20 bp, Artificial Sequence
  Description of Artificial Sequence: Synthetic oligonucleotide
  Target: LAMA2; (+) strand; PAM type: NRG; PAM sequence: TAG
aagagaacattccgttcatg

SEQ ID NO: 183089 - DNA, 20 bp, Artificial Sequence
  Description of Artificial Sequence: Synthetic oligonucleotide
  Target: LAMA2; (+) strand; PAM type: NRG; PAM sequence: GAG
gagaacattccgttcatgta

SEQ ID NO: 183090 - DNA, 20 bp, Artificial Sequence
  Description of Artificial Sequence: Synthetic oligonucleotide
  Target: LAMA2; (+) strand; PAM type: NRG; PAM sequence: TAG
tccgttcatgtagagcgaac

SEQ ID NO: 183091 - DNA, 20 bp, Artificial Sequence
  Description of Artificial Sequence: Synthetic oligonucleotide
  Target: LAMA2; (+) strand; PAM type: NRG; PAM sequence: GAG
cgttcatgtagagcgaacta

SEQ ID NO: 183092 - DNA, 20 bp, Artificial Sequence
  Description of Artificial Sequence: Synthetic oligonucleotide
  Target: LAMA2; (+) strand; PAM type: NRG; PAM sequence: AGG
gttcatgtagagcgaactag

SEQ ID NO: 183093 - DNA, 20 bp, Artificial Sequence
  Description of Artificial Sequence: Synthetic oligonucleotide
  Target: LAMA2; (+) strand; PAM type: NRG; PAM sequence: GGG
ttcatgtagagcgaactaga

SEQ ID NO: 183094 - DNA, 20 bp, Artificial Sequence
  Description of Artificial Sequence: Synthetic oligonucleotide
  Target: LAMA2; (+) strand; PAM type: NRG; PAM sequence: TAG
agcgaactagagggtaacaa

SEQ ID NO: 183095 - DNA, 20 bp, Artificial Sequence
  Description of Artificial Sequence: Synthetic oligonucleotide
  Target: LAMA2; (+) strand; PAM type: NRG; PAM sequence: CAG
aaatatttattattgtaact

SEQ ID NO: 183096 - DNA, 20 bp, Artificial Sequence
  Description of Artificial Sequence: Synthetic oligonucleotide
  Target: LAMA2; (+) strand; PAM type: NRG; PAM sequence: AGG
aatatttattattgtaactc

SEQ ID NO: 183097 - DNA, 20 bp, Artificial Sequence
  Description of Artificial Sequence: Synthetic oligonucleotide
  Target: LAMA2; (+) strand; PAM type: NRG; PAM sequence: TAG
ctcaggtgaacttcctttgc

SEQ ID NO: 183098 - DNA, 20 bp, Artificial Sequence
  Description of Artificial Sequence: Synthetic oligonucleotide
  Target: LAMA2; (+) strand; PAM type: NRG; PAM sequence: CGG
tgaacttcctttgctagcat

SEQ ID NO: 183099 - DNA, 20 bp, Artificial Sequence
  Description of Artificial Sequence: Synthetic oligonucleotide
  Target: LAMA2; (+) strand; PAM type: NRG; PAM sequence: CAG
ttgctagcatcggtatctat

SEQ ID NO: 183100 - DNA, 20 bp, Artificial Sequence
  Description of Artificial Sequence: Synthetic oligonucleotide
  Target: LAMA2; (+) strand; PAM type: NRG; PAM sequence: TGG
tgcctgaacctctgtgtgtg

SEQ ID NO: 183101 - DNA, 20 bp, Artificial Sequence
  Description of Artificial Sequence: Synthetic oligonucleotide
  Target: LAMA2; (+) strand; PAM type: NRG; PAM sequence: AAG
ggacctactatgcattgcaa

SEQ ID NO: 183102 - DNA, 20 bp, Artificial Sequence
  Description of Artificial Sequence: Synthetic oligonucleotide
  Target: LAMA2; (+) strand; PAM type: NRG; PAM sequence: AGG
gacctactatgcattgcaaa

SEQ ID NO: 183103 - DNA, 20 bp, Artificial Sequence
  Description of Artificial Sequence: Synthetic oligonucleotide
  Target: LAMA2; (+) strand; PAM type: NRG; PAM sequence: TAG
tgcattgcaaaaggataccg

SEQ ID NO: 183104 - DNA, 20 bp, Artificial Sequence
  Description of Artificial Sequence: Synthetic oligonucleotide
  Target: LAMA2; (+) strand; PAM type: NRG; PAM sequence: CGG
cttctttacttttcatactt

SEQ ID NO: 183105 - DNA, 20 bp, Artificial Sequence
  Description of Artificial Sequence: Synthetic oligonucleotide
  Target: LAMA2; (+) strand; PAM type: NRG; PAM sequence: GGG
ttctttacttttcatacttc

SEQ ID NO: 183106 - DNA, 20 bp, Artificial Sequence
  Description of Artificial Sequence: Synthetic oligonucleotide
  Target: LAMA2; (+) strand; PAM type: NRG; PAM sequence: CAG
ttcgggaacctcatttgcct

SEQ ID NO: 183107 - DNA, 20 bp, Artificial Sequence
  Description of Artificial Sequence: Synthetic oligonucleotide
  Target: LAMA2; (+) strand; PAM type: NRG; PAM sequence: TAG
acctcatttgcctcagccct

SEQ ID NO: 183108 - DNA, 20 bp, Artificial Sequence
  Description of Artificial Sequence: Synthetic oligonucleotide
  Target: LAMA2; (+) strand; PAM type: NRG; PAM sequence: AGG
cctcatttgcctcagccctt

SEQ ID NO: 183109 - DNA, 20 bp, Artificial Sequence
  Description of Artificial Sequence: Synthetic oligonucleotide
  Target: LAMA2; (+) strand; PAM type: NRG; PAM sequence: GAG
tcatttgcctcagcccttag

SEQ ID NO: 183110 - DNA, 20 bp, Artificial Sequence
  Description of Artificial Sequence: Synthetic oligonucleotide
  Target: LAMA2; (+) strand; PAM type: NRG; PAM sequence: CAG
ccttaacatttttattcgtg

SEQ ID NO: 183111 - DNA, 20 bp, Artificial Sequence
  Description of Artificial Sequence: Synthetic oligonucleotide
  Target: LAMA2; (+) strand; PAM type: NRG; PAM sequence: TGG
cgtgcagttatctccacctt

SEQ ID NO: 183112 - DNA, 20 bp, Artificial Sequence
  Description of Artificial Sequence: Synthetic oligonucleotide
  Target: LAMA2; (+) strand; PAM type: NRG; PAM sequence: AAG
aaaaccaaatgcattttctg

SEQ ID NO: 183113 - DNA, 20 bp, Artificial Sequence
  Description of Artificial Sequence: Synthetic oligonucleotide
  Target: LAMA2; (+) strand; PAM type: NRG; PAM sequence: AAG
cattttctgaagctataaat

SEQ ID NO: 183114 - DNA, 20 bp, Artificial Sequence
  Description of Artificial Sequence: Synthetic oligonucleotide
  Target: LAMA2; (+) strand; PAM type: NRG; PAM sequence: AAG
taaatattacctcctcaaat

SEQ ID NO: 183115 - DNA, 20 bp, Artificial Sequence
  Description of Artificial Sequence: Synthetic oligonucleotide
  Target: LAMA2; (+) strand; PAM type: NRG; PAM sequence: AGG
aaatattacctcctcaaata

SEQ ID NO: 183116 - DNA, 20 bp, Artificial Sequence
  Description of Artificial Sequence: Synthetic oligonucleotide
  Target: LAMA2; (+) strand; PAM type: NRG; PAM sequence: CAG
cctcaaataaggtatgcaca

SEQ ID NO: 183117 - DNA, 20 bp, Artificial Sequence
  Description of Artificial Sequence: Synthetic oligonucleotide
  Target: LAMA2; (+) strand; PAM type: NRG; PAM sequence: CAG
acacagcaaaactcacaaat

SEQ ID NO: 183118 - DNA, 20 bp, Artificial Sequence
  Description of Artificial Sequence: Synthetic oligonucleotide
  Target: LAMA2; (+) strand; PAM type: NRG; PAM sequence: TGG
aactcacaaatcagctccac

SEQ ID NO: 183119 - DNA, 20 bp, Artificial Sequence
  Description of Artificial Sequence: Synthetic oligonucleotide
  Target: LAMA2; (+) strand; PAM type: NRG; PAM sequence: GAG
ctcacaaatcagctccactg

SEQ ID NO: 183120 - DNA, 20 bp, Artificial Sequence
  Description of Artificial Sequence: Synthetic oligonucleotide
  Target: LAMA2; (+) strand; PAM type: NRG; PAM sequence: CAG
caaatcagctccactggagc

SEQ ID NO: 183121 - DNA, 20 bp, Artificial Sequence
  Description of Artificial Sequence: Synthetic oligonucleotide
  Target: LAMA2; (+) strand; PAM type: NRG; PAM sequence: CAG
atcagctccactggagccag

SEQ ID NO: 183122 - DNA, 20 bp, Artificial Sequence
  Description of Artificial Sequence: Synthetic oligonucleotide
  Target: LAMA2; (+) strand; PAM type: NRG; PAM sequence: AGG
tcagctccactggagccagc

SEQ ID NO: 183123 - DNA, 20 bp, Artificial Sequence
  Description of Artificial Sequence: Synthetic oligonucleotide
  Target: LAMA2; (+) strand; PAM type: NRG; PAM sequence: TGG
ccactggagccagcaggctt

SEQ ID NO: 183124 - DNA, 20 bp, Artificial Sequence
  Description of Artificial Sequence: Synthetic oligonucleotide
  Target: LAMA2; (+) strand; PAM type: NRG; PAM sequence: CGG
ctggagccagcaggctttgg

SEQ ID NO: 183125 - DNA, 20 bp, Artificial Sequence
  Description of Artificial Sequence: Synthetic oligonucleotide
  Target: LAMA2; (+) strand; PAM type: NRG; PAM sequence: CAG
ttggcggtttctatctcatt

SEQ ID NO: 183126 - DNA, 20 bp, Artificial Sequence
  Description of Artificial Sequence: Synthetic oligonucleotide
  Target: LAMA2; (+) strand; PAM type: NRG; PAM sequence: AGG
tggcggtttctatctcattc

SEQ ID NO: 183127 - DNA, 20 bp, Artificial Sequence
  Description of Artificial Sequence: Synthetic oligonucleotide
  Target: LAMA2; (+) strand; PAM type: NRG; PAM sequence: AAG
tctatctcattcaggttcca

SEQ ID NO: 183128 - DNA, 20 bp, Artificial Sequence
  Description of Artificial Sequence: Synthetic oligonucleotide
  Target: LAMA2; (+) strand; PAM type: NRG; PAM sequence: CAG
atctcattcaggttccaaag

SEQ ID NO: 183129 - DNA, 20 bp, Artificial Sequence
  Description of Artificial Sequence: Synthetic oligonucleotide
  Target: LAMA2; (+) strand; PAM type: NRG; PAM sequence: TGG
ttcaggttccaaagcagtta

SEQ ID NO: 183130 - DNA, 20 bp, Artificial Sequence
  Description of Artificial Sequence: Synthetic oligonucleotide
  Target: LAMA2; (+) strand; PAM type: NRG; PAM sequence: CAG
aggttccaaagcagttatgg

SEQ ID NO: 183131 - DNA, 20 bp, Artificial Sequence
  Description of Artificial Sequence: Synthetic oligonucleotide
  Target: LAMA2; (+) strand; PAM type: NRG; PAM sequence: TAG
aagcagttatggcagctgct

SEQ ID NO: 183132 - DNA, 20 bp, Artificial Sequence
  Description of Artificial Sequence: Synthetic oligonucleotide
  Target: LAMA2; (+) strand; PAM type: NRG; PAM sequence: CAG
tggcagctgcttagctgtca

SEQ ID NO: 183133 - DNA, 20 bp, Artificial Sequence
  Description of Artificial Sequence: Synthetic oligonucleotide
  Target: LAMA2; (+) strand; PAM type: NRG; PAM sequence: CAG
ctgcttagctgtcacagata

SEQ ID NO: 183134 - DNA, 20 bp, Artificial Sequence
  Description of Artificial Sequence: Synthetic oligonucleotide
  Target: LAMA2; (+) strand; PAM type: NRG; PAM sequence: GAG
gcttagctgtcacagataca

SEQ ID NO: 183135 - DNA, 20 bp, Artificial Sequence
  Description of Artificial Sequence: Synthetic oligonucleotide
  Target: LAMA2; (+) strand; PAM type: NRG; PAM sequence: TGG
gctgtcacagatacagagtg

SEQ ID NO: 183136 - DNA, 20 bp, Artificial Sequence
  Description of Artificial Sequence: Synthetic oligonucleotide
  Target: LAMA2; (+) strand; PAM type: NRG; PAM sequence: CAG
gtcacagatacagagtgtgg

SEQ ID NO: 183137 - DNA, 20 bp, Artificial Sequence
  Description of Artificial Sequence: Synthetic oligonucleotide
  Target: LAMA2; (+) strand; PAM type: NRG; PAM sequence: CAG
acagatacagagtgtggcag

SEQ ID NO: 183138 - DNA, 20 bp, Artificial Sequence
  Description of Artificial Sequence: Synthetic oligonucleotide
  Target: LAMA2; (+) strand; PAM type: NRG; PAM sequence: CAG
acagagtgtggcagcagctg

SEQ ID NO: 183139 - DNA, 20 bp, Artificial Sequence
  Description of Artificial Sequence: Synthetic oligonucleotide
  Target: LAMA2; (+) strand; PAM type: NRG; PAM sequence: AGG
cagagtgtggcagcagctgc

SEQ ID NO: 183140 - DNA, 20 bp, Artificial Sequence
  Description of Artificial Sequence: Synthetic oligonucleotide
  Target: LAMA2; (+) strand; PAM type: NRG; PAM sequence: GAG
cagcagctgcaggacctatt

SEQ ID NO: 183141 - DNA, 20 bp, Artificial Sequence
  Description of Artificial Sequence: Synthetic oligonucleotide
  Target: LAMA2; (+) strand; PAM type: NRG; PAM sequence: AAG
caggacctattgagcctatt

SEQ ID NO: 183142 - DNA, 20 bp, Artificial Sequence
  Description of Artificial Sequence: Synthetic oligonucleotide
  Target: LAMA2; (+) strand; PAM type: NRG; PAM sequence: AAG
ttgtccctgtcccccttccc

SEQ ID NO: 183143 - DNA, 20 bp, Artificial Sequence
  Description of Artificial Sequence: Synthetic oligonucleotide
  Target: LAMA2; (+) strand; PAM type: NRG; PAM sequence: AGG
tgtccctgtcccccttccca

SEQ ID NO: 183144 - DNA, 20 bp, Artificial Sequence
  Description of Artificial Sequence: Synthetic oligonucleotide
  Target: LAMA2; (+) strand; PAM type: NRG; PAM sequence: CAG
gtcccccttcccaaggtttg

SEQ ID NO: 183145 - DNA, 20 bp, Artificial Sequence
  Description of Artificial Sequence: Synthetic oligonucleotide
  Target: LAMA2; (+) strand; PAM type: NRG; PAM sequence: AGG
tcccccttcccaaggtttgc

SEQ ID NO: 183146 - DNA, 20 bp, Artificial Sequence
  Description of Artificial Sequence: Synthetic oligonucleotide
  Target: LAMA2; (+) strand; PAM type: NRG; PAM sequence: GGG
cccccttcccaaggtttgca

SEQ ID NO: 183147 - DNA, 20 bp, Artificial Sequence
  Description of Artificial Sequence: Synthetic oligonucleotide
  Target: LAMA2; (+) strand; PAM type: NRG; PAM sequence: CAG
caaggtttgcagggtccctg

SEQ ID NO: 183148 - DNA, 20 bp, Artificial Sequence
  Description of Artificial Sequence: Synthetic oligonucleotide
  Target: LAMA2; (+) strand; PAM type: NRG; PAM sequence: GAG
aggtttgcagggtccctgca

SEQ ID NO: 183149 - DNA, 20 bp, Artificial Sequence
  Description of Artificial Sequence: Synthetic oligonucleotide
  Target: LAMA2; (+) strand; PAM type: NRG; PAM sequence: TGG
tttgcagggtccctgcagag

SEQ ID NO: 183150 - DNA, 20 bp, Artificial Sequence
  Description of Artificial Sequence: Synthetic oligonucleotide
  Target: LAMA2; (+) strand; PAM type: NRG; PAM sequence: GAG
tccctgcagagtggctttct

SEQ ID NO: 183151 - DNA, 20 bp, Artificial Sequence
  Description of Artificial Sequence: Synthetic oligonucleotide
  Target: LAMA2; (+) strand; PAM type: NRG; PAM sequence: AGG
ccctgcagagtggctttctg

SEQ ID NO: 183152 - DNA, 20 bp, Artificial Sequence
  Description of Artificial Sequence: Synthetic oligonucleotide
  Target: LAMA2; (+) strand; PAM type: NRG; PAM sequence: GGG
cctgcagagtggctttctga

SEQ ID NO: 183153 - DNA, 20 bp, Artificial Sequence
  Description of Artificial Sequence: Synthetic oligonucleotide
  Target: LAMA2; (+) strand; PAM type: NRG; PAM sequence: CAG
agagtggctttctgagggaa

SEQ ID NO: 183154 - DNA, 20 bp, Artificial Sequence
  Description of Artificial Sequence: Synthetic oligonucleotide
  Target: LAMA2; (+) strand; PAM type: NRG; PAM sequence: AAG
ctttctgagggaacagaatc

SEQ ID NO: 183155 - DNA, 20 bp, Artificial Sequence
  Description of Artificial Sequence: Synthetic oligonucleotide
  Target: LAMA2; (+) strand; PAM type: NRG; PAM sequence: AGG
tttctgagggaacagaatca

SEQ ID NO: 183156 - DNA, 20 bp, Artificial Sequence
  Description of Artificial Sequence: Synthetic oligonucleotide
  Target: LAMA2; (+) strand; PAM type: NRG; PAM sequence: GGG
ttctgagggaacagaatcaa

SEQ ID NO: 183157 - DNA, 20 bp, Artificial Sequence
  Description of Artificial Sequence: Synthetic oligonucleotide
  Target: LAMA2; (+) strand; PAM type: NRG; PAM sequence: GAG
ctgagggaacagaatcaagg

SEQ ID NO: 183158 - DNA, 20 bp, Artificial Sequence
  Description of Artificial Sequence: Synthetic oligonucleotide
  Target: LAMA2; (+) strand; PAM type: NRG; PAM sequence: AGG
tgagggaacagaatcaaggg

SEQ ID NO: 183159 - DNA, 20 bp, Artificial Sequence
  Description of Artificial Sequence: Synthetic oligonucleotide
  Target: LAMA2; (+) strand; PAM type: NRG; PAM sequence: GGG
gagggaacagaatcaaggga

SEQ ID NO: 183160 - DNA, 20 bp, Artificial Sequence
  Description of Artificial Sequence: Synthetic oligonucleotide
  Target: LAMA2; (+) strand; PAM type: NRG; PAM sequence: GGG
agggaacagaatcaagggag

SEQ ID NO: 183161 - DNA, 20 bp, Artificial Sequence
  Description of Artificial Sequence: Synthetic oligonucleotide
  Target: LAMA2; (+) strand; PAM type: NRG; PAM sequence: GAG
ggaacagaatcaagggaggg

SEQ ID NO: 183162 - DNA, 20 bp, Artificial Sequence
  Description of Artificial Sequence: Synthetic oligonucleotide
  Target: LAMA2; (+) strand; PAM type: NRG; PAM sequence: AGG
gaacagaatcaagggagggg

SEQ ID NO: 183163 - DNA, 20 bp, Artificial Sequence
  Description of Artificial Sequence: Synthetic oligonucleotide
  Target: LAMA2; (+) strand; PAM type: NRG; PAM sequence: GAG
aggaaaatgactgctgccct

SEQ ID NO: 183164 - DNA, 20 bp, Artificial Sequence
  Description of Artificial Sequence: Synthetic oligonucleotide
  Target: LAMA2; (+) strand; PAM type: NRG; PAM sequence: TGG
aatgactgctgccctgagcc

SEQ ID NO: 183165 - DNA, 20 bp, Artificial Sequence
  Description of Artificial Sequence: Synthetic oligonucleotide
  Target: LAMA2; (+) strand; PAM type: NRG; PAM sequence: CAG
ccacctttttacaaatctac

SEQ ID NO: 183166 - DNA, 20 bp, Artificial Sequence
  Description of Artificial Sequence: Synthetic oligonucleotide
  Target: LAMA2; (+) strand; PAM type: NRG; PAM sequence: GAG
acctttttacaaatctacca

SEQ ID NO: 183167 - DNA, 20 bp, Artificial Sequence
  Description of Artificial Sequence: Synthetic oligonucleotide
  Target: LAMA2; (+) strand; PAM type: NRG; PAM sequence: CAG
atctaccagagtgcttgccc

SEQ ID NO: 183168 - DNA, 20 bp, Artificial Sequence
  Description of Artificial Sequence: Synthetic oligonucleotide
  Target: LAMA2; (+) strand; PAM type: NRG; PAM sequence: TGG
cagagtgcttgccccagccc

SEQ ID NO: 183169 - DNA, 20 bp, Artificial Sequence
  Description of Artificial Sequence: Synthetic oligonucleotide
  Target: LAMA2; (+) strand; PAM type: NRG; PAM sequence: GGG
agagtgcttgccccagccct

SEQ ID NO: 183170 - DNA, 20 bp, Artificial Sequence
  Description of Artificial Sequence: Synthetic oligonucleotide
  Target: LAMA2; (+) strand; PAM type: NRG; PAM sequence: CAG
tgcttgccccagccctgggc

SEQ ID NO: 183171 - DNA, 20 bp, Artificial Sequence
  Description of Artificial Sequence: Synthetic oligonucleotide
  Target: LAMA2; (+) strand; PAM type: NRG; PAM sequence: AGG
gcttgccccagccctgggcc

SEQ ID NO: 183172 - DNA, 20 bp, Artificial Sequence
  Description of Artificial Sequence: Synthetic oligonucleotide
  Target: LAMA2; (+) strand; PAM type: NRG; PAM sequence: GGG
cttgccccagccctgggcca

SEQ ID NO: 183173 - DNA, 20 bp, Artificial Sequence
  Description of Artificial Sequence: Synthetic oligonucleotide
  Target: LAMA2; (+) strand; PAM type: NRG; PAM sequence: TGG
ccagccctgggccagggaat

SEQ ID NO: 183174 - DNA, 20 bp, Artificial Sequence
  Description of Artificial Sequence: Synthetic oligonucleotide
  Target: LAMA2; (+) strand; PAM type: NRG; PAM sequence: TAG
cacaaactgatgactttctt

SEQ ID NO: 183175 - DNA, 20 bp, Artificial Sequence
  Description of Artificial Sequence: Synthetic oligonucleotide
  Target: LAMA2; (+) strand; PAM type: NRG; PAM sequence: TAG
atactttatacttactttat

SEQ ID NO: 183176 - DNA, 20 bp, Artificial Sequence
  Description of Artificial Sequence: Synthetic oligonucleotide
  Target: LAMA2; (+) strand; PAM type: NRG; PAM sequence: AGG
tactttatacttactttatt

SEQ ID NO: 183177 - DNA, 20 bp, Artificial Sequence
  Description of Artificial Sequence: Synthetic oligonucleotide
  Target: LAMA2; (+) strand; PAM type: NRG; PAM sequence: AAG
ttatacttactttattagga

SEQ ID NO: 183178 - DNA, 20 bp, Artificial Sequence
  Description of Artificial Sequence: Synthetic oligonucleotide
  Target: LAMA2; (+) strand; PAM type: NRG; PAM sequence: CAG
caaaatattgtatgacaact

SEQ ID NO: 183179 - DNA, 20 bp, Artificial Sequence
  Description of Artificial Sequence: Synthetic oligonucleotide
  Target: LAMA2; (+) strand; PAM type: NRG; PAM sequence: GAG
aaatattgtatgacaactca

SEQ ID NO: 183180 - DNA, 20 bp, Artificial Sequence
  Description of Artificial Sequence: Synthetic oligonucleotide
  Target: LAMA2; (+) strand; PAM type: NRG; PAM sequence: GAG
atattgtatgacaactcaga

SEQ ID NO: 183181 - DNA, 20 bp, Artificial Sequence
  Description of Artificial Sequence: Synthetic oligonucleotide
  Target: LAMA2; (+) strand; PAM type: NRG; PAM sequence: TAG
tgacaactcagagagataat

SEQ ID NO: 183182 - DNA, 20 bp, Artificial Sequence
  Description of Artificial Sequence: Synthetic oligonucleotide
  Target: LAMA2; (+) strand; PAM type: NRG; PAM sequence: TAG
actcagagagataattagtt

SEQ ID NO: 183183 - DNA, 20 bp, Artificial Sequence
  Description of Artificial Sequence: Synthetic oligonucleotide
  Target: LAMA2; (+) strand; PAM type: NRG; PAM sequence: AAG
cagagagataattagtttag

SEQ ID NO: 183184 - DNA, 20 bp, Artificial Sequence
  Description of Artificial Sequence: Synthetic oligonucleotide
  Target: LAMA2; (+) strand; PAM type: NRG; PAM sequence: AGG
agagagataattagtttaga

SEQ ID NO: 183185 - DNA, 20 bp, Artificial Sequence
  Description of Artificial Sequence: Synthetic oligonucleotide
  Target: LAMA2; (+) strand; PAM type: NRG; PAM sequence: TAG
aattagtttagaaggacaat

SEQ ID NO: 183186 - DNA, 20 bp, Artificial Sequence
  Description of Artificial Sequence: Synthetic oligonucleotide
  Target: LAMA2; (+) strand; PAM type: NRG; PAM sequence: GAG
ttagtttagaaggacaatta

SEQ ID NO: 183187 - DNA, 20 bp, Artificial Sequence
  Description of Artificial Sequence: Synthetic oligonucleotide
  Target: LAMA2; (+) strand; PAM type: NRG; PAM sequence: AAG
agaaggacaattagagaaaa

SEQ ID NO: 183188 - DNA, 20 bp, Artificial Sequence
  Description of Artificial Sequence: Synthetic oligonucleotide
  Target: LAMA2; (+) strand; PAM type: NRG; PAM sequence: CAG
acaattagagaaaaaagaaa

SEQ ID NO: 183189 - DNA, 20 bp, Artificial Sequence
  Description of Artificial Sequence: Synthetic oligonucleotide
  Target: LAMA2; (+) strand; PAM type: NRG; PAM sequence: AAG
attagagaaaaaagaaacag

SEQ ID NO: 183190 - DNA, 20 bp, Artificial Sequence
  Description of Artificial Sequence: Synthetic oligonucleotide
  Target: LAMA2; (+) strand; PAM type: NRG; PAM sequence: CAG
agaaaaaagaaacagaagcc

SEQ ID NO: 183191 - DNA, 20 bp, Artificial Sequence
  Description of Artificial Sequence: Synthetic oligonucleotide
  Target: LAMA2; (+) strand; PAM type: NRG; PAM sequence: GAG
aaaaaagaaacagaagccca

SEQ ID NO: 183192 - DNA, 20 bp, Artificial Sequence
  Description of Artificial Sequence: Synthetic oligonucleotide
  Target: LAMA2; (+) strand; PAM type: NRG; PAM sequence: CAG
aaacagaagcccagagactt

SEQ ID NO: 183193 - DNA, 20 bp, Artificial Sequence
  Description of Artificial Sequence: Synthetic oligonucleotide
  Target: LAMA2; (+) strand; PAM type: NRG; PAM sequence: AGG
aacagaagcccagagacttc

SEQ ID NO: 183194 - DNA, 20 bp, Artificial Sequence
  Description of Artificial Sequence: Synthetic oligonucleotide
  Target: LAMA2; (+) strand; PAM type: NRG; PAM sequence: GGG
acagaagcccagagacttca

SEQ ID NO: 183195 - DNA, 20 bp, Artificial Sequence
  Description of Artificial Sequence: Synthetic oligonucleotide
  Target: LAMA2; (+) strand; PAM type: NRG; PAM sequence: GGG
cagaagcccagagacttcag

SEQ ID NO: 183196 - DNA, 20 bp, Artificial Sequence
  Description of Artificial Sequence: Synthetic oligonucleotide
  Target: LAMA2; (+) strand; PAM type: NRG; PAM sequence: CAG
gcccagagacttcaggggtt

SEQ ID NO: 183197 - DNA, 20 bp, Artificial Sequence
  Description of Artificial Sequence: Synthetic oligonucleotide
  Target: LAMA2; (+) strand; PAM type: NRG; PAM sequence: AAG
cttcaggggttcagacctcc

SEQ ID NO: 183198 - DNA, 20 bp, Artificial Sequence
  Description of Artificial Sequence: Synthetic oligonucleotide
  Target: LAMA2; (+) strand; PAM type: NRG; PAM sequence: CAG
aggggttcagacctccaagc

SEQ ID NO: 183199 - DNA, 20 bp, Artificial Sequence
  Description of Artificial Sequence: Synthetic oligonucleotide
  Target: LAMA2; (+) strand; PAM type: NRG; PAM sequence: CAG
caagccagcaatccatttat

SEQ ID NO: 183200 - DNA, 20 bp, Artificial Sequence
  Description of Artificial Sequence: Synthetic oligonucleotide
  Target: LAMA2; (+) strand; PAM type: NRG; PAM sequence: AAG
gcaatccatttatcagactg

SEQ ID NO: 183201 - DNA, 20 bp, Artificial Sequence
  Description of Artificial Sequence: Synthetic oligonucleotide
  Target: LAMA2; (+) strand; PAM type: NRG; PAM sequence: TAG
catttatcagactgaagaca

SEQ ID NO: 183202 - DNA, 20 bp, Artificial Sequence
  Description of Artificial Sequence: Synthetic oligonucleotide
  Target: LAMA2; (+) strand; PAM type: NRG; PAM sequence: AAG
atcagactgaagacatagaa

SEQ ID NO: 183203 - DNA, 20 bp, Artificial Sequence
  Description of Artificial Sequence: Synthetic oligonucleotide
  Target: LAMA2; (+) strand; PAM type: NRG; PAM sequence: TGG
ctgaagacatagaaaagaac

SEQ ID NO: 183204 - DNA, 20 bp, Artificial Sequence
  Description of Artificial Sequence: Synthetic oligonucleotide
  Target: LAMA2; (+) strand; PAM type: NRG; PAM sequence: GAG
aactggaaatccaatttgat

SEQ ID NO: 183205 - DNA, 20 bp, Artificial Sequence
  Description of Artificial Sequence: Synthetic oligonucleotide
  Target: LAMA2; (+) strand; PAM type: NRG; PAM sequence: AGG
actggaaatccaatttgatg

SEQ ID NO: 183206 - DNA, 20 bp, Artificial Sequence
  Description of Artificial Sequence: Synthetic oligonucleotide
  Target: LAMA2; (+) strand; PAM type: NRG; PAM sequence: CAG
tttgatgaggcctcaaaaca

SEQ ID NO: 183207 - DNA, 20 bp, Artificial Sequence
  Description of Artificial Sequence: Synthetic oligonucleotide
  Target: LAMA2; (+) strand; PAM type: NRG; PAM sequence: GAG
tgatgaggcctcaaaacaca

SEQ ID NO: 183208 - DNA, 20 bp, Artificial Sequence
  Description of Artificial Sequence: Synthetic oligonucleotide
  Target: LAMA2; (+) strand; PAM type: NRG; PAM sequence: AGG
gatgaggcctcaaaacacag

SEQ ID NO: 183209 - DNA, 20 bp, Artificial Sequence
  Description of Artificial Sequence: Synthetic oligonucleotide
  Target: LAMA2; (+) strand; PAM type: NRG; PAM sequence: GAG
aggatacttttaaatgcaac

SEQ ID NO: 183210 - DNA, 20 bp, Artificial Sequence
  Description of Artificial Sequence: Synthetic oligonucleotide
  Target: LAMA2; (+) strand; PAM type: NRG; PAM sequence: TAG
atgcaacgagtatgaatatg

SEQ ID NO: 183211 - DNA, 20 bp, Artificial Sequence
  Description of Artificial Sequence: Synthetic oligonucleotide
  Target: LAMA2; (+) strand; PAM type: NRG; PAM sequence: CAG
caacgagtatgaatatgtag

SEQ ID NO: 183212 - DNA, 20 bp, Artificial Sequence
  Description of Artificial Sequence: Synthetic oligonucleotide
  Target: LAMA2; (+) strand; PAM type: NRG; PAM sequence: TAG
cgagtatgaatatgtagcag

SEQ ID NO: 183213 - DNA, 20 bp, Artificial Sequence
  Description of Artificial Sequence: Synthetic oligonucleotide
  Target: LAMA2; (+) strand; PAM type: NRG; PAM sequence: CAG
atgaatatgtagcagtagtt

SEQ ID NO: 183214 - DNA, 20 bp, Artificial Sequence
  Description of Artificial Sequence: Synthetic oligonucleotide
  Target: LAMA2; (+) strand; PAM type: NRG; PAM sequence: AAG
tatgtagcagtagttcagcc

SEQ ID NO: 183215 - DNA, 20 bp, Artificial Sequence
  Description of Artificial Sequence: Synthetic oligonucleotide
  Target: LAMA2; (+) strand; PAM type: NRG; PAM sequence: CAG
gccaagccaatactatcctg

SEQ ID NO: 183216 - DNA, 20 bp, Artificial Sequence
  Description of Artificial Sequence: Synthetic oligonucleotide
  Target: LAMA2; (+) strand; PAM type: NRG; PAM sequence: AAG
ccaatactatcctgcagtga

SEQ ID NO: 183217 - DNA, 20 bp, Artificial Sequence
  Description of Artificial Sequence: Synthetic oligonucleotide
  Target: LAMA2; (+) strand; PAM type: NRG; PAM sequence: TGG
acatttactaattatcctct

SEQ ID NO: 183218 - DNA, 20 bp, Artificial Sequence
  Description of Artificial Sequence: Synthetic oligonucleotide
  Target: LAMA2; (+) strand; PAM type: NRG; PAM sequence: GGG
catttactaattatcctctt

SEQ ID NO: 183219 - DNA, 20 bp, Artificial Sequence
  Description of Artificial Sequence: Synthetic oligonucleotide
  Target: LAMA2; (+) strand; PAM type: NRG; PAM sequence: GGG
atttactaattatcctcttg

SEQ ID NO: 183220 - DNA, 20 bp, Artificial Sequence
  Description of Artificial Sequence: Synthetic oligonucleotide
  Target: LAMA2; (+) strand; PAM type: NRG; PAM sequence: TAG
atcctcttggggaaaacatt

SEQ ID NO: 183221 - DNA, 20 bp, Artificial Sequence
  Description of Artificial Sequence: Synthetic oligonucleotide
  Target: LAMA2; (+) strand; PAM type: NRG; PAM sequence: AAG
cttggggaaaacatttagat

SEQ ID NO: 183222 - DNA, 20 bp, Artificial Sequence
  Description of Artificial Sequence: Synthetic oligonucleotide
  Target: LAMA2; (+) strand; PAM type: NRG; PAM sequence: AAG
aaacatttagataagcaata

SEQ ID NO: 183223 - DNA, 20 bp, Artificial Sequence
  Description of Artificial Sequence: Synthetic oligonucleotide
  Target: LAMA2; (+) strand; PAM type: NRG; PAM sequence: AAG
ataaagatttcttaccttct

SEQ ID NO: 183224 - DNA, 20 bp, Artificial Sequence
  Description of Artificial Sequence: Synthetic oligonucleotide
  Target: LAMA2; (+) strand; PAM type: NRG; PAM sequence: AAG
taccttctaagtaaacaaca

SEQ ID NO: 183225 - DNA, 20 bp, Artificial Sequence
  Description of Artificial Sequence: Synthetic oligonucleotide
  Target: LAMA2; (+) strand; PAM type: NRG; PAM sequence: CAG
gtaaacaacaaagctttcct

SEQ ID NO: 183226 - DNA, 20 bp, Artificial Sequence
  Description of Artificial Sequence: Synthetic oligonucleotide
  Target: LAMA2; (+) strand; PAM type: NRG; PAM sequence: TAG
gtttttattattattattat

SEQ ID NO: 183227 - DNA, 20 bp, Artificial Sequence
  Description of Artificial Sequence: Synthetic oligonucleotide
  Target: LAMA2; (+) strand; PAM type: NRG; PAM sequence: AGG
tttttattattattattatt

SEQ ID NO: 183228 - DNA, 20 bp, Artificial Sequence
  Description of Artificial Sequence: Synthetic oligonucleotide
  Target: LAMA2; (+) strand; PAM type: NRG; PAM sequence: TAG
ttattattattattattagg

SEQ ID NO: 183229 - DNA, 20 bp, Artificial Sequence
  Description of Artificial Sequence: Synthetic oligonucleotide
  Target: LAMA2; (+) strand; PAM type: NRG; PAM sequence: GAG
attattattattattaggta

SEQ ID NO: 183230 - DNA, 20 bp, Artificial Sequence
  Description of Artificial Sequence: Synthetic oligonucleotide
  Target: LAMA2; (+) strand; PAM type: NRG; PAM sequence: AGG
ttattattattattaggtag

SEQ ID NO: 183231 - DNA, 20 bp, Artificial Sequence
  Description of Artificial Sequence: Synthetic oligonucleotide
  Target: LAMA2; (+) strand; PAM type: NRG; PAM sequence: TAG
attattattaggtagaggat

SEQ ID NO: 183232 - DNA, 20 bp, Artificial Sequence
  Description of Artificial Sequence: Synthetic oligonucleotide
  Target: LAMA2; (+) strand; PAM type: NRG; PAM sequence: AGG
ttattattaggtagaggatt

SEQ ID NO: 183233 - DNA, 20 bp, Artificial Sequence
  Description of Artificial Sequence: Synthetic oligonucleotide
  Target: LAMA2; (+) strand; PAM type: NRG; PAM sequence: TAG
ttaggtagaggattaggctg

SEQ ID NO: 183234 - DNA, 20 bp, Artificial Sequence
  Description of Artificial Sequence: Synthetic oligonucleotide
  Target: LAMA2; (+) strand; PAM type: NRG; PAM sequence: AGG
taggtagaggattaggctgt

SEQ ID NO: 183235 - DNA, 20 bp, Artificial Sequence
  Description of Artificial Sequence: Synthetic oligonucleotide
  Target: LAMA2; (+) strand; PAM type: NRG; PAM sequence: AAG
ctgtaggatgaattgataca

SEQ ID NO: 183236 - DNA, 20 bp, Artificial Sequence
  Description of Artificial Sequence: Synthetic oligonucleotide
  Target: LAMA2; (+) strand; PAM type: NRG; PAM sequence: CAG
attgatacaaagcgttcatg

SEQ ID NO: 183237 - DNA, 20 bp, Artificial Sequence
  Description of Artificial Sequence: Synthetic oligonucleotide
  Target: LAMA2; (+) strand; PAM type: NRG; PAM sequence: TGG
tacaaagcgttcatgcagaa

SEQ ID NO: 183238 - DNA, 20 bp, Artificial Sequence
  Description of Artificial Sequence: Synthetic oligonucleotide
  Target: LAMA2; (+) strand; PAM type: NRG; PAM sequence: GAG
gttcatgcagaatggctact

SEQ ID NO: 183239 - DNA, 20 bp, Artificial Sequence
  Description of Artificial Sequence: Synthetic oligonucleotide
  Target: LAMA2; (+) strand; PAM type: NRG; PAM sequence: TAG
agaatggctactgagacgtt

SEQ ID NO: 183240 - DNA, 20 bp, Artificial Sequence
  Description of Artificial Sequence: Synthetic oligonucleotide
  Target: LAMA2; (+) strand; PAM type: NRG; PAM sequence: GAG
gacgtttagaaaccatgatc

SEQ ID NO: 183241 - DNA, 20 bp, Artificial Sequence
  Description of Artificial Sequence: Synthetic oligonucleotide
  Target: LAMA2; (+) strand; PAM type: NRG; PAM sequence: GAG
aaaccatgatcgagacaaat

SEQ ID NO: 183242 - DNA, 20 bp, Artificial Sequence
  Description of Artificial Sequence: Synthetic oligonucleotide
  Target: LAMA2; (+) strand; PAM type: NRG; PAM sequence: AGG
aaccatgatcgagacaaatg

SEQ ID NO: 183243 - DNA, 20 bp, Artificial Sequence
  Description of Artificial Sequence: Synthetic oligonucleotide
  Target: LAMA2; (+) strand; PAM type: NRG; PAM sequence: GGG
accatgatcgagacaaatga

SEQ ID NO: 183244 - DNA, 20 bp, Artificial Sequence
  Description of Artificial Sequence: Synthetic oligonucleotide
  Target: LAMA2; (+) strand; PAM type: NRG; PAM sequence: TGG
caaatgagggatcatttatt

SEQ ID NO: 183245 - DNA, 20 bp, Artificial Sequence
  Description of Artificial Sequence: Synthetic oligonucleotide
  Target: LAMA2; (+) strand; PAM type: NRG; PAM sequence: GAG
atcatttatttggacaaact

SEQ ID NO: 183246 - DNA, 20 bp, Artificial Sequence
  Description of Artificial Sequence: Synthetic oligonucleotide
  Target: LAMA2; (+) strand; PAM type: NRG; PAM sequence: CAG
gagaacttttactaatctaa

SEQ ID NO: 183247 - DNA, 20 bp, Artificial Sequence
  Description of Artificial Sequence: Synthetic oligonucleotide
  Target: LAMA2; (+) strand; PAM type: NRG; PAM sequence: CAG
acttttactaatctaacagc

SEQ ID NO: 183248 - DNA, 20 bp, Artificial Sequence
  Description of Artificial Sequence: Synthetic oligonucleotide
  Target: LAMA2; (+) strand; PAM type: NRG; PAM sequence: TAG
aatctaacagccagatattg

SEQ ID NO: 183249 - DNA, 20 bp, Artificial Sequence
  Description of Artificial Sequence: Synthetic oligonucleotide
  Target: LAMA2; (+) strand; PAM type: NRG; PAM sequence: TGG
acagccagatattgtagtca

SEQ ID NO: 183250 - DNA, 20 bp, Artificial Sequence
  Description of Artificial Sequence: Synthetic oligonucleotide
  Target: LAMA2; (+) strand; PAM type: NRG; PAM sequence: GAG
atattgtagtcatggtctct

SEQ ID NO: 183251 - DNA, 20 bp, Artificial Sequence
  Description of Artificial Sequence: Synthetic oligonucleotide
  Target: LAMA2; (+) strand; PAM type: NRG; PAM sequence: AGG
tattgtagtcatggtctctg

SEQ ID NO: 183252 - DNA, 20 bp, Artificial Sequence
  Description of Artificial Sequence: Synthetic oligonucleotide
  Target: LAMA2; (+) strand; PAM type: NRG; PAM sequence: GAG
ttgtagtcatggtctctgag

SEQ ID NO: 183253 - DNA, 20 bp, Artificial Sequence
  Description of Artificial Sequence: Synthetic oligonucleotide
  Target: LAMA2; (+) strand; PAM type: NRG; PAM sequence: TAG
gaatgctctcatttgaatct

SEQ ID NO: 183254 - DNA, 20 bp, Artificial Sequence
  Description of Artificial Sequence: Synthetic oligonucleotide
  Target: LAMA2; (+) strand; PAM type: NRG; PAM sequence: TAG
atttgaatcttagaatgctt

SEQ ID NO: 183255 - DNA, 20 bp, Artificial Sequence
  Description of Artificial Sequence: Synthetic oligonucleotide
  Target: LAMA2; (+) strand; PAM type: NRG; PAM sequence: TGG
cttagaatgctttagaatcc

SEQ ID NO: 183256 - DNA, 20 bp, Artificial Sequence
  Description of Artificial Sequence: Synthetic oligonucleotide
  Target: LAMA2; (+) strand; PAM type: NRG; PAM sequence: TAG
tcctggtttcacatgtcttc

SEQ ID NO: 183257 - DNA, 20 bp, Artificial Sequence
  Description of Artificial Sequence: Synthetic oligonucleotide
  Target: LAMA2; (+) strand; PAM type: NRG; PAM sequence: TAG
gtttcacatgtcttctagat

SEQ ID NO: 183258 - DNA, 20 bp, Artificial Sequence
  Description of Artificial Sequence: Synthetic oligonucleotide
  Target: LAMA2; (+) strand; PAM type: NRG; PAM sequence: TAG
atgtcttctagattagatgt

SEQ ID NO: 183259 - DNA, 20 bp, Artificial Sequence
  Description of Artificial Sequence: Synthetic oligonucleotide
  Target: LAMA2; (+) strand; PAM type: NRG; PAM sequence: AGG
tgtcttctagattagatgtt

SEQ ID NO: 183260 - DNA, 20 bp, Artificial Sequence
  Description of Artificial Sequence: Synthetic oligonucleotide
  Target: LAMA2; (+) strand; PAM type: NRG; PAM sequence: CGG
aactttaatccttttcattg

SEQ ID NO: 183261 - DNA, 20 bp, Artificial Sequence
  Description of Artificial Sequence: Synthetic oligonucleotide
  Target: LAMA2; (+) strand; PAM type: NRG; PAM sequence: AAG
ttaatccttttcattgcgga

SEQ ID NO: 183262 - DNA, 20 bp, Artificial Sequence
  Description of Artificial Sequence: Synthetic oligonucleotide
  Target: LAMA2; (+) strand; PAM type: NRG; PAM sequence: AGG
taatccttttcattgcggaa

SEQ ID NO: 183263 - DNA, 20 bp, Artificial Sequence
  Description of Artificial Sequence: Synthetic oligonucleotide
  Target: LAMA2; (+) strand; PAM type: NRG; PAM sequence: AAG
ttgcggaaaggactttttaa

SEQ ID NO: 183264 - DNA, 20 bp, Artificial Sequence
  Description of Artificial Sequence: Synthetic oligonucleotide
  Target: LAMA2; (+) strand; PAM type: NRG; PAM sequence: TAG
tttttaaaagatttaaactt

SEQ ID NO: 183265 - DNA, 20 bp, Artificial Sequence
  Description of Artificial Sequence: Synthetic oligonucleotide
  Target: LAMA2; (+) strand; PAM type: NRG; PAM sequence: CGG
taaaagatttaaactttagc

SEQ ID NO: 183266 - DNA, 20 bp, Artificial Sequence
  Description of Artificial Sequence: Synthetic oligonucleotide
  Target: LAMA2; (+) strand; PAM type: NRG; PAM sequence: GGG
aaaagatttaaactttagcc

SEQ ID NO: 183267 - DNA, 20 bp, Artificial Sequence
  Description of Artificial Sequence: Synthetic oligonucleotide
  Target: LAMA2; (+) strand; PAM type: NRG; PAM sequence: TGG
atttaaactttagccgggcg

SEQ ID NO: 183268 - DNA, 20 bp, Artificial Sequence
  Description of Artificial Sequence: Synthetic oligonucleotide
  Target: LAMA2; (+) strand; PAM type: NRG; PAM sequence: TGG
taaactttagccgggcgtgg

SEQ ID NO: 183269 - DNA, 20 bp, Artificial Sequence
  Description of Artificial Sequence: Synthetic oligonucleotide
  Target: LAMA2; (+) strand; PAM type: NRG; PAM sequence: CAG
gtggctcacacctgtaatcc

SEQ ID NO: 183270 - DNA, 20 bp, Artificial Sequence
  Description of Artificial Sequence: Synthetic oligonucleotide
  Target: LAMA2; (+) strand; PAM type: NRG; PAM sequence: TGG
cacctgtaatcccagcactt

SEQ ID NO: 183271 - DNA, 20 bp, Artificial Sequence
  Description of Artificial Sequence: Synthetic oligonucleotide
  Target: LAMA2; (+) strand; PAM type: NRG; PAM sequence: GGG
acctgtaatcccagcacttt

SEQ ID NO: 183272 - DNA, 20 bp, Artificial Sequence
  Description of Artificial Sequence: Synthetic oligonucleotide
  Target: LAMA2; (+) strand; PAM type: NRG; PAM sequence: GAG
ctgtaatcccagcactttgg

SEQ ID NO: 183273 - DNA, 20 bp, Artificial Sequence
  Description of Artificial Sequence: Synthetic oligonucleotide
  Target: LAMA2; (+) strand; PAM type: NRG; PAM sequence: AGG
tgtaatcccagcactttggg

SEQ ID NO: 183274 - DNA, 20 bp, Artificial Sequence
  Description of Artificial Sequence: Synthetic oligonucleotide
  Target: LAMA2; (+) strand; PAM type: NRG; PAM sequence: AAG
tcccagcactttgggaggcc

SEQ ID NO: 183275 - DNA, 20 bp, Artificial Sequence
  Description of Artificial Sequence: Synthetic oligonucleotide
  Target: LAMA2; (+) strand; PAM type: NRG; PAM sequence: AGG
cccagcactttgggaggcca

SEQ ID NO: 183276 - DNA, 20 bp, Artificial Sequence
  Description of Artificial Sequence: Synthetic oligonucleotide
  Target: LAMA2; (+) strand; PAM type: NRG; PAM sequence: CAG
agcactttgggaggccaagg

SEQ ID NO: 183277 - DNA, 20 bp, Artificial Sequence
  Description of Artificial Sequence: Synthetic oligonucleotide
  Target: LAMA2; (+) strand; PAM type: NRG; PAM sequence: AGG
gcactttgggaggccaaggc

SEQ ID NO: 183278 - DNA, 20 bp, Artificial Sequence
  Description of Artificial Sequence: Synthetic oligonucleotide
  Target: LAMA2; (+) strand; PAM type: NRG; PAM sequence: TGG
ctttgggaggccaaggcagg

SEQ ID NO: 183279 - DNA, 20 bp, Artificial Sequence
  Description of Artificial Sequence: Synthetic oligonucleotide
  Target: LAMA2; (+) strand; PAM type: NRG; PAM sequence: GAG
ggccaaggcaggtggatcat

SEQ ID NO: 183280 - DNA, 20 bp, Artificial Sequence
  Description of Artificial Sequence: Synthetic oligonucleotide
  Target: LAMA2; (+) strand; PAM type: NRG; PAM sequence: AGG
gccaaggcaggtggatcatg

SEQ ID NO: 183281 - DNA, 20 bp, Artificial Sequence
  Description of Artificial Sequence: Synthetic oligonucleotide
  Target: LAMA2; (+) strand; PAM type: NRG; PAM sequence: CAG
aggcaggtggatcatgaggt

SEQ ID NO: 183282 - DNA, 20 bp, Artificial Sequence
  Description of Artificial Sequence: Synthetic oligonucleotide
  Target: LAMA2; (+) strand; PAM type: NRG; PAM sequence: AGG
ggcaggtggatcatgaggtc

SEQ ID NO: 183283 - DNA, 20 bp, Artificial Sequence
  Description of Artificial Sequence: Synthetic oligonucleotide
  Target: LAMA2; (+) strand; PAM type: NRG; PAM sequence: GAG
caggtggatcatgaggtcag

SEQ ID NO: 183284 - DNA, 20 bp, Artificial Sequence
  Description of Artificial Sequence: Synthetic oligonucleotide
  Target: LAMA2; (+) strand; PAM type: NRG; PAM sequence: GAG
gatcatgaggtcaggagttc

SEQ ID NO: 183285 - DNA, 20 bp, Artificial Sequence
  Description of Artificial Sequence: Synthetic oligonucleotide
  Target: LAMA2; (+) strand; PAM type: NRG; PAM sequence: CAG
tgaggtcaggagttcgagac

SEQ ID NO: 183286 - DNA, 20 bp, Artificial Sequence
  Description of Artificial Sequence: Synthetic oligonucleotide
  Target: LAMA2; (+) strand; PAM type: NRG; PAM sequence: TGG
tcaggagttcgagaccagcc

SEQ ID NO: 183287 - DNA, 20 bp, Artificial Sequence
  Description of Artificial Sequence: Synthetic oligonucleotide
  Target: LAMA2; (+) strand; PAM type: NRG; PAM sequence: TGG
cgagaccagcctggccaata

SEQ ID NO: 183288 - DNA, 20 bp, Artificial Sequence
  Description of Artificial Sequence: Synthetic oligonucleotide
  Target: LAMA2; (+) strand; PAM type: NRG; PAM sequence: TAG
tactaaaaatgcaaaaacat

SEQ ID NO: 183289 - DNA, 20 bp, Artificial Sequence
  Description of Artificial Sequence: Synthetic oligonucleotide
  Target: LAMA2; (+) strand; PAM type: NRG; PAM sequence: CAG
aaaaatgcaaaaacattagc

SEQ ID NO: 183290 - DNA, 20 bp, Artificial Sequence
  Description of Artificial Sequence: Synthetic oligonucleotide
  Target: LAMA2; (+) strand; PAM type: NRG; PAM sequence: TGG
gcaaaaacattagccagaca

SEQ ID NO: 183291 - DNA, 20 bp, Artificial Sequence
  Description of Artificial Sequence: Synthetic oligonucleotide
  Target: LAMA2; (+) strand; PAM type: NRG; PAM sequence: TGG
aaaacattagccagacatgg

SEQ ID NO: 183292 - DNA, 20 bp, Artificial Sequence
  Description of Artificial Sequence: Synthetic oligonucleotide
  Target: LAMA2; (+) strand; PAM type: NRG; PAM sequence: TAG
acattagccagacatggtgg

SEQ ID NO: 183293 - DNA, 20 bp, Artificial Sequence
  Description of Artificial Sequence: Synthetic oligonucleotide
  Target: LAMA2; (+) strand; PAM type: NRG; PAM sequence: AGG
cattagccagacatggtggt

SEQ ID NO: 183294 - DNA, 20 bp, Artificial Sequence
  Description of Artificial Sequence: Synthetic oligonucleotide
  Target: LAMA2; (+) strand; PAM type: NRG; PAM sequence: CAG
gtggtaggcgcctgtaatca

SEQ ID NO: 183295 - DNA, 20 bp, Artificial Sequence
  Description of Artificial Sequence: Synthetic oligonucleotide
  Target: LAMA2; (+) strand; PAM type: NRG; PAM sequence: TGG
gcctgtaatcacagctactc

SEQ ID NO: 183296 - DNA, 20 bp, Artificial Sequence
  Description of Artificial Sequence: Synthetic oligonucleotide
  Target: LAMA2; (+) strand; PAM type: NRG; PAM sequence: GAG
ctgtaatcacagctactctg

SEQ ID NO: 183297 - DNA, 20 bp, Artificial Sequence
  Description of Artificial Sequence: Synthetic oligonucleotide
  Target: LAMA2; (+) strand; PAM type: NRG; PAM sequence: AGG
tgtaatcacagctactctgg

SEQ ID NO: 183298 - DNA, 20 bp, Artificial Sequence
  Description of Artificial Sequence: Synthetic oligonucleotide
  Target: LAMA2; (+) strand; PAM type: NRG; PAM sequence: GAG
tcacagctactctggaggct

SEQ ID NO: 183299 - DNA, 20 bp, Artificial Sequence
  Description of Artificial Sequence: Synthetic oligonucleotide
  Target: LAMA2; (+) strand; PAM type: NRG; PAM sequence: AGG
cacagctactctggaggctg

SEQ ID NO: 183300 - DNA, 20 bp, Artificial Sequence
  Description of Artificial Sequence: Synthetic oligonucleotide
  Target: LAMA2; (+) strand; PAM type: NRG; PAM sequence: CAG
agctactctggaggctgagg

SEQ ID NO: 183301 - DNA, 20 bp, Artificial Sequence
  Description of Artificial Sequence: Synthetic oligonucleotide
  Target: LAMA2; (+) strand; PAM type: NRG; PAM sequence: AGG
gctactctggaggctgaggc

SEQ ID NO: 183302 - DNA, 20 bp, Artificial Sequence
  Description of Artificial Sequence: Synthetic oligonucleotide
  Target: LAMA2; (+) strand; PAM type: NRG; PAM sequence: GAG
tactctggaggctgaggcag

SEQ ID NO: 183303 - DNA, 20 bp, Artificial Sequence
  Description of Artificial Sequence: Synthetic oligonucleotide
  Target: LAMA2; (+) strand; PAM type: NRG; PAM sequence: CAG
ggcaggagaaatgcttaaac

SEQ ID NO: 183304 - DNA, 20 bp, Artificial Sequence
  Description of Artificial Sequence: Synthetic oligonucleotide
  Target: LAMA2; (+) strand; PAM type: NRG; PAM sequence: AGG
gcaggagaaatgcttaaacc

SEQ ID NO: 183305 - DNA, 20 bp, Artificial Sequence
  Description of Artificial Sequence: Synthetic oligonucleotide
  Target: LAMA2; (+) strand; PAM type: NRG; PAM sequence: GGG
caggagaaatgcttaaacca

SEQ ID NO: 183306 - DNA, 20 bp, Artificial Sequence
  Description of Artificial Sequence: Synthetic oligonucleotide
  Target: LAMA2; (+) strand; PAM type: NRG; PAM sequence: GGG
aggagaaatgcttaaaccag

SEQ ID NO: 183307 - DNA, 20 bp, Artificial Sequence
  Description of Artificial Sequence: Synthetic oligonucleotide
  Target: LAMA2; (+) strand; PAM type: NRG; PAM sequence: GGG
ggagaaatgcttaaaccagg

SEQ ID NO: 183308 - DNA, 20 bp, Artificial Sequence
  Description of Artificial Sequence: Synthetic oligonucleotide
  Target: LAMA2; (+) strand; PAM type: NRG; PAM sequence: CAG
aaatgcttaaaccaggggga

SEQ ID NO: 183309 - DNA, 20 bp, Artificial Sequence
  Description of Artificial Sequence: Synthetic oligonucleotide
  Target: LAMA2; (+) strand; PAM type: NRG; PAM sequence: GAG
atgcttaaaccagggggaca

SEQ ID NO: 183310 - DNA, 20 bp, Artificial Sequence
  Description of Artificial Sequence: Synthetic oligonucleotide
  Target: LAMA2; (+) strand; PAM type: NRG; PAM sequence: AGG
tgcttaaaccagggggacag

SEQ ID NO: 183311 - DNA, 20 bp, Artificial Sequence
  Description of Artificial Sequence: Synthetic oligonucleotide
  Target: LAMA2; (+) strand; PAM type: NRG; PAM sequence: CAG
aaccagggggacagaggttt

SEQ ID NO: 183312 - DNA, 20 bp, Artificial Sequence
  Description of Artificial Sequence: Synthetic oligonucleotide
  Target: LAMA2; (+) strand; PAM type: NRG; PAM sequence: GAG
agggggacagaggtttcagt

SEQ ID NO: 183313 - DNA, 20 bp, Artificial Sequence
  Description of Artificial Sequence: Synthetic oligonucleotide
  Target: LAMA2; (+) strand; PAM type: NRG; PAM sequence: GAG
gacagaggtttcagtgagcc

SEQ ID NO: 183314 - DNA, 20 bp, Artificial Sequence
  Description of Artificial Sequence: Synthetic oligonucleotide
  Target: LAMA2; (+) strand; PAM type: NRG; PAM sequence: CAG
gagatcgcaccactgcactc

SEQ ID NO: 183315 - DNA, 20 bp, Artificial Sequence
  Description of Artificial Sequence: Synthetic oligonucleotide
  Target: LAMA2; (+) strand; PAM type: NRG; PAM sequence: TGG
cgcaccactgcactccagcc

SEQ ID NO: 183316 - DNA, 20 bp, Artificial Sequence
  Description of Artificial Sequence: Synthetic oligonucleotide
  Target: LAMA2; (+) strand; PAM type: NRG; PAM sequence: GGG
gcaccactgcactccagcct

SEQ ID NO: 183317 - DNA, 20 bp, Artificial Sequence
  Description of Artificial Sequence: Synthetic oligonucleotide
  Target: LAMA2; (+) strand; PAM type: NRG; PAM sequence: CAG
ctgcactccagcctgggcaa

SEQ ID NO: 183318 - DNA, 20 bp, Artificial Sequence
  Description of Artificial Sequence: Synthetic oligonucleotide
  Target: LAMA2; (+) strand; PAM type: NRG; PAM sequence: GAG
gcactccagcctgggcaaca

SEQ ID NO: 183319 - DNA, 20 bp, Artificial Sequence
  Description of Artificial Sequence: Synthetic oligonucleotide
  Target: LAMA2; (+) strand; PAM type: NRG; PAM sequence: AAG
tccagcctgggcaacagagc

SEQ ID NO: 183320 - DNA, 20 bp, Artificial Sequence
  Description of Artificial Sequence: Synthetic oligonucleotide
  Target: LAMA2; (+) strand; PAM type: NRG; PAM sequence: CGG
aacagagcaagactccaact

SEQ ID NO: 183321 - DNA, 20 bp, Artificial Sequence
  Description of Artificial Sequence: Synthetic oligonucleotide
  Target: LAMA2; (+) strand; PAM type: NRG; PAM sequence: AAG
aacaaaaacatttaaacttt

SEQ ID NO: 183322 - DNA, 20 bp, Artificial Sequence
  Description of Artificial Sequence: Synthetic oligonucleotide
  Target: LAMA2; (+) strand; PAM type: NRG; PAM sequence: AGG
acaaaaacatttaaacttta

SEQ ID NO: 183323 - DNA, 20 bp, Artificial Sequence
  Description of Artificial Sequence: Synthetic oligonucleotide
  Target: LAMA2; (+) strand; PAM type: NRG; PAM sequence: AAG
aaactttaaggaatttcaat

SEQ ID NO: 183324 - DNA, 20 bp, Artificial Sequence
  Description of Artificial Sequence: Synthetic oligonucleotide
  Target: LAMA2; (+) strand; PAM type: NRG; PAM sequence: CAG
ggaatttcaataagtaactg

SEQ ID NO: 183325 - DNA, 20 bp, Artificial Sequence
  Description of Artificial Sequence: Synthetic oligonucleotide
  Target: LAMA2; (+) strand; PAM type: NRG; PAM sequence: GAG
caataagtaactgcagattt

SEQ ID NO: 183326 - DNA, 20 bp, Artificial Sequence
  Description of Artificial Sequence: Synthetic oligonucleotide
  Target: LAMA2; (+) strand; PAM type: NRG; PAM sequence: TAG
taactgcagatttgagaaat

SEQ ID NO: 183327 - DNA, 20 bp, Artificial Sequence
  Description of Artificial Sequence: Synthetic oligonucleotide
  Target: LAMA2; (+) strand; PAM type: NRG; PAM sequence: GAG
tcaaaatgtgttattttgtt

SEQ ID NO: 183328 - DNA, 20 bp, Artificial Sequence
  Description of Artificial Sequence: Synthetic oligonucleotide
  Target: LAMA2; (+) strand; PAM type: NRG; PAM sequence: AAG
aatgtgttattttgttgaga

SEQ ID NO: 183329 - DNA, 20 bp, Artificial Sequence
  Description of Artificial Sequence: Synthetic oligonucleotide
  Target: LAMA2; (+) strand; PAM type: NRG; PAM sequence: TGG
attttgttgagaaagaattc

SEQ ID NO: 183330 - DNA, 20 bp, Artificial Sequence
  Description of Artificial Sequence: Synthetic oligonucleotide
  Target: LAMA2; (+) strand; PAM type: NRG; PAM sequence: CAG
atgccactatgtccttttaa

SEQ ID NO: 183331 - DNA, 20 bp, Artificial Sequence
  Description of Artificial Sequence: Synthetic oligonucleotide
  Target: LAMA2; (+) strand; PAM type: NRG; PAM sequence: AGG
tgccactatgtccttttaac

SEQ ID NO: 183332 - DNA, 20 bp, Artificial Sequence
  Description of Artificial Sequence: Synthetic oligonucleotide
  Target: LAMA2; (+) strand; PAM type: NRG; PAM sequence: AAG
cttttaacaggtgcttcttc

SEQ ID NO: 183333 - DNA, 20 bp, Artificial Sequence
  Description of Artificial Sequence: Synthetic oligonucleotide
  Target: LAMA2; (+) strand; PAM type: NRG; PAM sequence: AAG
ttaacaggtgcttcttcaag

SEQ ID NO: 183334 - DNA, 20 bp, Artificial Sequence
  Description of Artificial Sequence: Synthetic oligonucleotide
  Target: LAMA2; (+) strand; PAM type: NRG; PAM sequence: AGG
taacaggtgcttcttcaaga

SEQ ID NO: 183335 - DNA, 20 bp, Artificial Sequence
  Description of Artificial Sequence: Synthetic oligonucleotide
  Target: LAMA2; (+) strand; PAM type: NRG; PAM sequence: GGG
aacaggtgcttcttcaagaa

SEQ ID NO: 183336 - DNA, 20 bp, Artificial Sequence
  Description of Artificial Sequence: Synthetic oligonucleotide
  Target: LAMA2; (+) strand; PAM type: NRG; PAM sequence: CAG
attttattatgccaacttca

SEQ ID NO: 183337 - DNA, 20 bp, Artificial Sequence
  Description of Artificial Sequence: Synthetic oligonucleotide
  Target: LAMA2; (+) strand; PAM type: NRG; PAM sequence: AAG
aatccaacctttatttgatt

SEQ ID NO: 183338 - DNA, 20 bp, Artificial Sequence
  Description of Artificial Sequence: Synthetic oligonucleotide
  Target: LAMA2; (+) strand; PAM type: NRG; PAM sequence: CAG
aacctttatttgattaagct

SEQ ID NO: 183339 - DNA, 20 bp, Artificial Sequence
  Description of Artificial Sequence: Synthetic oligonucleotide
  Target: LAMA2; (+) strand; PAM type: NRG; PAM sequence: TAG
atttgattaagctcagtata

SEQ ID NO: 183340 - DNA, 20 bp, Artificial Sequence
  Description of Artificial Sequence: Synthetic oligonucleotide
  Target: LAMA2; (+) strand; PAM type: NRG; PAM sequence: TGG
ctcagtatatagtacatcac

SEQ ID NO: 183341 - DNA, 20 bp, Artificial Sequence
  Description of Artificial Sequence: Synthetic oligonucleotide
  Target: LAMA2; (+) strand; PAM type: NRG; PAM sequence: CAG
tatagtacatcactggaaac

SEQ ID NO: 183342 - DNA, 20 bp, Artificial Sequence
  Description of Artificial Sequence: Synthetic oligonucleotide
  Target: LAMA2; (+) strand; PAM type: NRG; PAM sequence: TAG
atcactggaaaccagtcatt

SEQ ID NO: 183343 - DNA, 20 bp, Artificial Sequence
  Description of Artificial Sequence: Synthetic oligonucleotide
  Target: LAMA2; (+) strand; PAM type: NRG; PAM sequence: TGG
aaaccagtcatttagttaat

SEQ ID NO: 183344 - DNA, 20 bp, Artificial Sequence
  Description of Artificial Sequence: Synthetic oligonucleotide
  Target: LAMA2; (+) strand; PAM type: NRG; PAM sequence: CAG
taattggccatataaacgaa

SEQ ID NO: 183345 - DNA, 20 bp, Artificial Sequence
  Description of Artificial Sequence: Synthetic oligonucleotide
  Target: LAMA2; (+) strand; PAM type: NRG; PAM sequence: CAG
ttgccattcattgttaatta

SEQ ID NO: 183346 - DNA, 20 bp, Artificial Sequence
  Description of Artificial Sequence: Synthetic oligonucleotide
  Target: LAMA2; (+) strand; PAM type: NRG; PAM sequence: AGG
tgccattcattgttaattac

SEQ ID NO: 183347 - DNA, 20 bp, Artificial Sequence
  Description of Artificial Sequence: Synthetic oligonucleotide
  Target: LAMA2; (+) strand; PAM type: NRG; PAM sequence: TAG
caggataatatatgacatat

SEQ ID NO: 183348 - DNA, 20 bp, Artificial Sequence
  Description of Artificial Sequence: Synthetic oligonucleotide
  Target: LAMA2; (+) strand; PAM type: NRG; PAM sequence: TAG
atatatgacatattagtgtg

SEQ ID NO: 183349 - DNA, 20 bp, Artificial Sequence
  Description of Artificial Sequence: Synthetic oligonucleotide
  Target: LAMA2; (+) strand; PAM type: NRG; PAM sequence: CAG
cactgaactctgtgccaaaa

SEQ ID NO: 183350 - DNA, 20 bp, Artificial Sequence
  Description of Artificial Sequence: Synthetic oligonucleotide
  Target: LAMA2; (+) strand; PAM type: NRG; PAM sequence: TGG
taatacatttgctaccataa

SEQ ID NO: 183351 - DNA, 20 bp, Artificial Sequence
  Description of Artificial Sequence: Synthetic oligonucleotide
  Target: LAMA2; (+) strand; PAM type: NRG; PAM sequence: CGG
tgctaccataatggctcatt

SEQ ID NO: 183352 - DNA, 20 bp, Artificial Sequence
  Description of Artificial Sequence: Synthetic oligonucleotide
  Target: LAMA2; (+) strand; PAM type: NRG; PAM sequence: AAG
aatggctcattcggcactct

SEQ ID NO: 183353 - DNA, 20 bp, Artificial Sequence
  Description of Artificial Sequence: Synthetic oligonucleotide
  Target: LAMA2; (+) strand; PAM type: NRG; PAM sequence: AGG
atggctcattcggcactcta

SEQ ID NO: 183354 - DNA, 20 bp, Artificial Sequence
  Description of Artificial Sequence: Synthetic oligonucleotide
  Target: LAMA2; (+) strand; PAM type: NRG; PAM sequence: AAG
taaaatgcaatctactctat

SEQ ID NO: 183355 - DNA, 20 bp, Artificial Sequence
  Description of Artificial Sequence: Synthetic oligonucleotide
  Target: LAMA2; (+) strand; PAM type: NRG; PAM sequence: AAG
atgcaatctactctataagc

SEQ ID NO: 183356 - DNA, 20 bp, Artificial Sequence
  Description of Artificial Sequence: Synthetic oligonucleotide
  Target: LAMA2; (+) strand; PAM type: NRG; PAM sequence: CAG
gccacattaaactgattgac

SEQ ID NO: 183357 - DNA, 20 bp, Artificial Sequence
  Description of Artificial Sequence: Synthetic oligonucleotide
  Target: LAMA2; (+) strand; PAM type: NRG; PAM sequence: GAG
cacattaaactgattgacca

SEQ ID NO: 183358 - DNA, 20 bp, Artificial Sequence
  Description of Artificial Sequence: Synthetic oligonucleotide
  Target: LAMA2; (+) strand; PAM type: NRG; PAM sequence: AAG
actgattgaccagagatcgc

SEQ ID NO: 183359 - DNA, 20 bp, Artificial Sequence
  Description of Artificial Sequence: Synthetic oligonucleotide
  Target: LAMA2; (+) strand; PAM type: NRG; PAM sequence: GAG
cagagatcgcaagtgaccat

SEQ ID NO: 183360 - DNA, 20 bp, Artificial Sequence
  Description of Artificial Sequence: Synthetic oligonucleotide
  Target: LAMA2; (+) strand; PAM type: NRG; PAM sequence: CAG
gtgaccatgagaacttcacc

SEQ ID NO: 183361 - DNA, 20 bp, Artificial Sequence
  Description of Artificial Sequence: Synthetic oligonucleotide
  Target: LAMA2; (+) strand; PAM type: NRG; PAM sequence: TGG
tgctttatatgcctattcta

SEQ ID NO: 183362 - DNA, 20 bp, Artificial Sequence
  Description of Artificial Sequence: Synthetic oligonucleotide
  Target: LAMA2; (+) strand; PAM type: NRG; PAM sequence: TAG
gcatgatttgtgtcacatac

SEQ ID NO: 183363 - DNA, 20 bp, Artificial Sequence
  Description of Artificial Sequence: Synthetic oligonucleotide
  Target: LAMA2; (+) strand; PAM type: NRG; PAM sequence: AAG
tttgtgtcacatactagaca

SEQ ID NO: 183364 - DNA, 20 bp, Artificial Sequence
  Description of Artificial Sequence: Synthetic oligonucleotide
  Target: LAMA2; (+) strand; PAM type: NRG; PAM sequence: GAG
tcattgttctgaatgtatgt

SEQ ID NO: 183365 - DNA, 20 bp, Artificial Sequence
  Description of Artificial Sequence: Synthetic oligonucleotide
  Target: LAMA2; (+) strand; PAM type: NRG; PAM sequence: CAG
gtaataacatcctttcatca

SEQ ID NO: 183366 - DNA, 20 bp, Artificial Sequence
  Description of Artificial Sequence: Synthetic oligonucleotide
  Target: LAMA2; (+) strand; PAM type: NRG; PAM sequence: GAG
aacatcctttcatcacagat

SEQ ID NO: 183367 - DNA, 20 bp, Artificial Sequence
  Description of Artificial Sequence: Synthetic oligonucleotide
  Target: LAMA2; (+) strand; PAM type: NRG; PAM sequence: CAG
aaatcatgtactacaaataa

SEQ ID NO: 183368 - DNA, 20 bp, Artificial Sequence
  Description of Artificial Sequence: Synthetic oligonucleotide
  Target: LAMA2; (+) strand; PAM type: NRG; PAM sequence: AGG
aatcatgtactacaaataac

SEQ ID NO: 183369 - DNA, 20 bp, Artificial Sequence
  Description of Artificial Sequence: Synthetic oligonucleotide
  Target: LAMA2; (+) strand; PAM type: NRG; PAM sequence: CAG
tgtactacaaataacaggac

SEQ ID NO: 183370 - DNA, 20 bp, Artificial Sequence
  Description of Artificial Sequence: Synthetic oligonucleotide
  Target: LAMA2; (+) strand; PAM type: NRG; PAM sequence: AGG
gtactacaaataacaggacc

SEQ ID NO: 183371 - DNA, 20 bp, Artificial Sequence
  Description of Artificial Sequence: Synthetic oligonucleotide
  Target: LAMA2; (+) strand; PAM type: NRG; PAM sequence: GAG
aacaggaccaggtattaaat

SEQ ID NO: 183372 - DNA, 20 bp, Artificial Sequence
  Description of Artificial Sequence: Synthetic oligonucleotide
  Target: LAMA2; (+) strand; PAM type: NRG; PAM sequence: CAG
taaatacctccatctatgca

SEQ ID NO: 183373 - DNA, 20 bp, Artificial Sequence
  Description of Artificial Sequence: Synthetic oligonucleotide
  Target: LAMA2; (+) strand; PAM type: NRG; PAM sequence: TAG
ctccatctatgcacagccaa

SEQ ID NO: 183374 - DNA, 20 bp, Artificial Sequence
  Description of Artificial Sequence: Synthetic oligonucleotide
  Target: LAMA2; (+) strand; PAM type: NRG; PAM sequence: AAG
tacatttttgtgtgaccata

SEQ ID NO: 183375 - DNA, 20 bp, Artificial Sequence
  Description of Artificial Sequence: Synthetic oligonucleotide
  Target: LAMA2; (+) strand; PAM type: NRG; PAM sequence: AGG
acatttttgtgtgaccataa

SEQ ID NO: 183376 - DNA, 20 bp, Artificial Sequence
  Description of Artificial Sequence: Synthetic oligonucleotide
  Target: LAMA2; (+) strand; PAM type: NRG; PAM sequence: TGG
atgatgtatgattattaatt

SEQ ID NO: 183377 - DNA, 20 bp, Artificial Sequence
  Description of Artificial Sequence: Synthetic oligonucleotide
  Target: LAMA2; (+) strand; PAM type: NRG; PAM sequence: GAG
gatgtatgattattaatttg

SEQ ID NO: 183378 - DNA, 20 bp, Artificial Sequence
  Description of Artificial Sequence: Synthetic oligonucleotide
  Target: LAMA2; (+) strand; PAM type: NRG; PAM sequence: CAG
tgcattatcccaacactttt

SEQ ID NO: 183379 - DNA, 20 bp, Artificial Sequence
  Description of Artificial Sequence: Synthetic oligonucleotide
  Target: LAMA2; (+) strand; PAM type: NRG; PAM sequence: CAG
cccaacacttttcagatttt

SEQ ID NO: 183380 - DNA, 20 bp, Artificial Sequence
  Description of Artificial Sequence: Synthetic oligonucleotide
  Target: LAMA2; (+) strand; PAM type: NRG; PAM sequence: CAG
gattttcagactatgcatgt

SEQ ID NO: 183381 - DNA, 20 bp, Artificial Sequence
  Description of Artificial Sequence: Synthetic oligonucleotide
  Target: LAMA2; (+) strand; PAM type: NRG; PAM sequence: TGG
catttcttttcctaaaatcc

SEQ ID NO: 183382 - DNA, 20 bp, Artificial Sequence
  Description of Artificial Sequence: Synthetic oligonucleotide
  Target: LAMA2; (+) strand; PAM type: NRG; PAM sequence: TAG
taaaatcctggacaaaatga

SEQ ID NO: 183383 - DNA, 20 bp, Artificial Sequence
  Description of Artificial Sequence: Synthetic oligonucleotide
  Target: LAMA2; (+) strand; PAM type: NRG; PAM sequence: TGG
ataccgcctcacaaaataat

SEQ ID NO: 183384 - DNA, 20 bp, Artificial Sequence
  Description of Artificial Sequence: Synthetic oligonucleotide
  Target: LAMA2; (+) strand; PAM type: NRG; PAM sequence: TGG
taattggattttcaccaaac

SEQ ID NO: 183385 - DNA, 20 bp, Artificial Sequence
  Description of Artificial Sequence: Synthetic oligonucleotide
  Target: LAMA2; (+) strand; PAM type: NRG; PAM sequence: GGG
aattggattttcaccaaact

SEQ ID NO: 183386 - DNA, 20 bp, Artificial Sequence
  Description of Artificial Sequence: Synthetic oligonucleotide
  Target: LAMA2; (+) strand; PAM type: NRG; PAM sequence: GGG
attggattttcaccaaactg

SEQ ID NO: 183387 - DNA, 20 bp, Artificial Sequence
  Description of Artificial Sequence: Synthetic oligonucleotide
  Target: LAMA2; (+) strand; PAM type: NRG; PAM sequence: GGG
ttggattttcaccaaactgg

SEQ ID NO: 183388 - DNA, 20 bp, Artificial Sequence
  Description of Artificial Sequence: Synthetic oligonucleotide
  Target: LAMA2; (+) strand; PAM type: NRG; PAM sequence: AAG
ttttcaccaaactgggggcc

SEQ ID NO: 183389 - DNA, 20 bp, Artificial Sequence
  Description of Artificial Sequence: Synthetic oligonucleotide
  Target: LAMA2; (+) strand; PAM type: NRG; PAM sequence: AAG
aactgggggccaagcttctc

SEQ ID NO: 183390 - DNA, 20 bp, Artificial Sequence
  Description of Artificial Sequence: Synthetic oligonucleotide
  Target: LAMA2; (+) strand; PAM type: NRG; PAM sequence: AAG
tgggggccaagcttctcaag

SEQ ID NO: 183391 - DNA, 20 bp, Artificial Sequence
  Description of Artificial Sequence: Synthetic oligonucleotide
  Target: LAMA2; (+) strand; PAM type: NRG; PAM sequence: TGG
ctcccttccaccccttcatc

SEQ ID NO: 183392 - DNA, 20 bp, Artificial Sequence
  Description of Artificial Sequence: Synthetic oligonucleotide
  Target: LAMA2; (+) strand; PAM type: NRG; PAM sequence: TAG
catctggaaaaatctccctt

SEQ ID NO: 183393 - DNA, 20 bp, Artificial Sequence
  Description of Artificial Sequence: Synthetic oligonucleotide
  Target: LAMA2; (+) strand; PAM type: NRG; PAM sequence: TGG
aaatctccctttagtcactt

SEQ ID NO: 183394 - DNA, 20 bp, Artificial Sequence
  Description of Artificial Sequence: Synthetic oligonucleotide
  Target: LAMA2; (+) strand; PAM type: NRG; PAM sequence: TGG
cactttggtatctaatttct

SEQ ID NO: 183395 - DNA, 20 bp, Artificial Sequence
  Description of Artificial Sequence: Synthetic oligonucleotide
  Target: LAMA2; (+) strand; PAM type: NRG; PAM sequence: CAG
tatctaatttcttggcactc

SEQ ID NO: 183396 - DNA, 20 bp, Artificial Sequence
  Description of Artificial Sequence: Synthetic oligonucleotide
  Target: LAMA2; (+) strand; PAM type: NRG; PAM sequence: TGG
ttgtcctctgatccttctcc

SEQ ID NO: 183397 - DNA, 20 bp, Artificial Sequence
  Description of Artificial Sequence: Synthetic oligonucleotide
  Target: LAMA2; (+) strand; PAM type: NRG; PAM sequence: TGG
ccttctcctggcatccgcct

SEQ ID NO: 183398 - DNA, 20 bp, Artificial Sequence
  Description of Artificial Sequence: Synthetic oligonucleotide
  Target: LAMA2; (+) strand; PAM type: NRG; PAM sequence: TGG
tctcctggcatccgccttgg

SEQ ID NO: 183399 - DNA, 20 bp, Artificial Sequence
  Description of Artificial Sequence: Synthetic oligonucleotide
  Target: LAMA2; (+) strand; PAM type: NRG; PAM sequence: CAG
ctggcatccgccttggtggc

SEQ ID NO: 183400 - DNA, 20 bp, Artificial Sequence
  Description of Artificial Sequence: Synthetic oligonucleotide
  Target: LAMA2; (+) strand; PAM type: NRG; PAM sequence: CAG
gcatccgccttggtggccag

SEQ ID NO: 183401 - DNA, 20 bp, Artificial Sequence
  Description of Artificial Sequence: Synthetic oligonucleotide
  Target: LAMA2; (+) strand; PAM type: NRG; PAM sequence: TGG
tggtggccagcagttcttac

SEQ ID NO: 183402 - DNA, 20 bp, Artificial Sequence
  Description of Artificial Sequence: Synthetic oligonucleotide
  Target: LAMA2; (+) strand; PAM type: NRG; PAM sequence: AAG
ggacaaaaacatcaaaccct

SEQ ID NO: 183403 - DNA, 20 bp, Artificial Sequence
  Description of Artificial Sequence: Synthetic oligonucleotide
  Target: LAMA2; (+) strand; PAM type: NRG; PAM sequence: GAG
acaaaaacatcaaaccctaa

SEQ ID NO: 183404 - DNA, 20 bp, Artificial Sequence
  Description of Artificial Sequence: Synthetic oligonucleotide
  Target: LAMA2; (+) strand; PAM type: NRG; PAM sequence: AAG
catcaaaccctaagagcctg

SEQ ID NO: 183405 - DNA, 20 bp, Artificial Sequence
  Description of Artificial Sequence: Synthetic oligonucleotide
  Target: LAMA2; (+) strand; PAM type: NRG; PAM sequence: TAG
caaaccctaagagcctgaag

SEQ ID NO: 183406 - DNA, 20 bp, Artificial Sequence
  Description of Artificial Sequence: Synthetic oligonucleotide
  Target: LAMA2; (+) strand; PAM type: NRG; PAM sequence: AAG
agagcctgaagtagttactt

SEQ ID NO: 183407 - DNA, 20 bp, Artificial Sequence
  Description of Artificial Sequence: Synthetic oligonucleotide
  Target: LAMA2; (+) strand; PAM type: NRG; PAM sequence: TAG
gaagtagttacttaagcaaa

SEQ ID NO: 183408 - DNA, 20 bp, Artificial Sequence
  Description of Artificial Sequence: Synthetic oligonucleotide
  Target: LAMA2; (+) strand; PAM type: NRG; PAM sequence: AGG
aagtagttacttaagcaaat

SEQ ID NO: 183409 - DNA, 20 bp, Artificial Sequence
  Description of Artificial Sequence: Synthetic oligonucleotide
  Target: LAMA2; (+) strand; PAM type: NRG; PAM sequence: AAG
gttacttaagcaaataggac

SEQ ID NO: 183410 - DNA, 20 bp, Artificial Sequence
  Description of Artificial Sequence: Synthetic oligonucleotide
  Target: LAMA2; (+) strand; PAM type: NRG; PAM sequence: GAG
ataggacaagcaactgaact

SEQ ID NO: 183411 - DNA, 20 bp, Artificial Sequence
  Description of Artificial Sequence: Synthetic oligonucleotide
  Target: LAMA2; (+) strand; PAM type: NRG; PAM sequence: TGG
actgaactgagtttttcttc

SEQ ID NO: 183412 - DNA, 20 bp, Artificial Sequence
  Description of Artificial Sequence: Synthetic oligonucleotide
  Target: LAMA2; (+) strand; PAM type: NRG; PAM sequence: GGG
ctgaactgagtttttcttct

SEQ ID NO: 183413 - DNA, 20 bp, Artificial Sequence
  Description of Artificial Sequence: Synthetic oligonucleotide
  Target: LAMA2; (+) strand; PAM type: NRG; PAM sequence: AAG
actgagtttttcttctggga

SEQ ID NO: 183414 - DNA, 20 bp, Artificial Sequence
  Description of Artificial Sequence: Synthetic oligonucleotide
  Target: LAMA2; (+) strand; PAM type: NRG; PAM sequence: CAG
ctgggaaagctttcttcaca

SEQ ID NO: 183415 - DNA, 20 bp, Artificial Sequence
  Description of Artificial Sequence: Synthetic oligonucleotide
  Target: LAMA2; (+) strand; PAM type: NRG; PAM sequence: AGG
tgggaaagctttcttcacac

SEQ ID NO: 183416 - DNA, 20 bp, Artificial Sequence
  Description of Artificial Sequence: Synthetic oligonucleotide
  Target: LAMA2; (+) strand; PAM type: NRG; PAM sequence: CAG
aagctttcttcacacaggta

SEQ ID NO: 183417 - DNA, 20 bp, Artificial Sequence
  Description of Artificial Sequence: Synthetic oligonucleotide
  Target: LAMA2; (+) strand; PAM type: NRG; PAM sequence: TAG
tcttcacacaggtacagaaa

SEQ ID NO: 183418 - DNA, 20 bp, Artificial Sequence
  Description of Artificial Sequence: Synthetic oligonucleotide
  Target: LAMA2; (+) strand; PAM type: NRG; PAM sequence: AGG
cttcacacaggtacagaaat

SEQ ID NO: 183419 - DNA, 20 bp, Artificial Sequence
  Description of Artificial Sequence: Synthetic oligonucleotide
  Target: LAMA2; (+) strand; PAM type: NRG; PAM sequence: AAG
acaggtacagaaataggcta

SEQ ID NO: 183420 - DNA, 20 bp, Artificial Sequence
  Description of Artificial Sequence: Synthetic oligonucleotide
  Target: LAMA2; (+) strand; PAM type: NRG; PAM sequence: AGG
caggtacagaaataggctaa

SEQ ID NO: 183421 - DNA, 20 bp, Artificial Sequence
  Description of Artificial Sequence: Synthetic oligonucleotide
  Target: LAMA2; (+) strand; PAM type: NRG; PAM sequence: CAG
tacagaaataggctaaaggt

SEQ ID NO: 183422 - DNA, 20 bp, Artificial Sequence
  Description of Artificial Sequence: Synthetic oligonucleotide
  Target: LAMA2; (+) strand; PAM type: NRG; PAM sequence: AGG
acagaaataggctaaaggtc

SEQ ID NO: 183423 - DNA, 20 bp, Artificial Sequence
  Description of Artificial Sequence: Synthetic oligonucleotide
  Target: LAMA2; (+) strand; PAM type: NRG; PAM sequence: AAG
gaaataggctaaaggtcagg

SEQ ID NO: 183424 - DNA, 20 bp, Artificial Sequence
  Description of Artificial Sequence: Synthetic oligonucleotide
  Target: LAMA2; (+) strand; PAM type: NRG; PAM sequence: TAG
ataggctaaaggtcaggaag

SEQ ID NO: 183425 - DNA, 20 bp, Artificial Sequence
  Description of Artificial Sequence: Synthetic oligonucleotide
  Target: LAMA2; (+) strand; PAM type: NRG; PAM sequence: AGG
taggctaaaggtcaggaagt

SEQ ID NO: 183426 - DNA, 20 bp, Artificial Sequence
  Description of Artificial Sequence: Synthetic oligonucleotide
  Target: LAMA2; (+) strand; PAM type: NRG; PAM sequence: GGG
aggctaaaggtcaggaagta

SEQ ID NO: 183427 - DNA, 20 bp, Artificial Sequence
  Description of Artificial Sequence: Synthetic oligonucleotide
  Target: LAMA2; (+) strand; PAM type: NRG; PAM sequence: GAG
taaaggtcaggaagtagggt

SEQ ID NO: 183428 - DNA, 20 bp, Artificial Sequence
  Description of Artificial Sequence: Synthetic oligonucleotide
  Target: LAMA2; (+) strand; PAM type: NRG; PAM sequence: TAG
ggaagtagggtgagatattt

SEQ ID NO: 183429 - DNA, 20 bp, Artificial Sequence
  Description of Artificial Sequence: Synthetic oligonucleotide
  Target: LAMA2; (+) strand; PAM type: NRG; PAM sequence: AGG
gaagtagggtgagatatttt

SEQ ID NO: 183430 - DNA, 20 bp, Artificial Sequence
  Description of Artificial Sequence: Synthetic oligonucleotide
  Target: LAMA2; (+) strand; PAM type: NRG; PAM sequence: GAG
agtagggtgagatattttag

SEQ ID NO: 183431 - DNA, 20 bp, Artificial Sequence
  Description of Artificial Sequence: Synthetic oligonucleotide
  Target: LAMA2; (+) strand; PAM type: NRG; PAM sequence: TGG
gagatattttaggagtcatt

SEQ ID NO: 183432 - DNA, 20 bp, Artificial Sequence
  Description of Artificial Sequence: Synthetic oligonucleotide
  Target: LAMA2; (+) strand; PAM type: NRG; PAM sequence: GGG
agatattttaggagtcattt

SEQ ID NO: 183433 - DNA, 20 bp, Artificial Sequence
  Description of Artificial Sequence: Synthetic oligonucleotide
  Target: LAMA2; (+) strand; PAM type: NRG; PAM sequence: GGG
gatattttaggagtcatttg

SEQ ID NO: 183434 - DNA, 20 bp, Artificial Sequence
  Description of Artificial Sequence: Synthetic oligonucleotide
  Target: LAMA2; (+) strand; PAM type: NRG; PAM sequence: CAG
taggagtcatttggggtttc

SEQ ID NO: 183435 - DNA, 20 bp, Artificial Sequence
  Description of Artificial Sequence: Synthetic oligonucleotide
  Target: LAMA2; (+) strand; PAM type: NRG; PAM sequence: GAG
tcatttggggtttccagaat

SEQ ID NO: 183436 - DNA, 20 bp, Artificial Sequence
  Description of Artificial Sequence: Synthetic oligonucleotide
  Target: LAMA2; (+) strand; PAM type: NRG; PAM sequence: AAG
ggggtttccagaatgagata

SEQ ID NO: 183437 - DNA, 20 bp, Artificial Sequence
  Description of Artificial Sequence: Synthetic oligonucleotide
  Target: LAMA2; (+) strand; PAM type: NRG; PAM sequence: AAG
attttctttcttaacatcca

SEQ ID NO: 183438 - DNA, 20 bp, Artificial Sequence
  Description of Artificial Sequence: Synthetic oligonucleotide
  Target: LAMA2; (+) strand; PAM type: NRG; PAM sequence: CAG
acatccaaagtatgttcaaa

SEQ ID NO: 183439 - DNA, 20 bp, Artificial Sequence
  Description of Artificial Sequence: Synthetic oligonucleotide
  Target: LAMA2; (+) strand; PAM type: NRG; PAM sequence: AAG
aagtatgttcaaacagaaaa

SEQ ID NO: 183440 - DNA, 20 bp, Artificial Sequence
  Description of Artificial Sequence: Synthetic oligonucleotide
  Target: LAMA2; (+) strand; PAM type: NRG; PAM sequence: TAG
tgttcaaacagaaaaaagat

SEQ ID NO: 183441 - DNA, 20 bp, Artificial Sequence
  Description of Artificial Sequence: Synthetic oligonucleotide
  Target: LAMA2; (+) strand; PAM type: NRG; PAM sequence: TAG
attatgtaaattacaaacat

SEQ ID NO: 183442 - DNA, 20 bp, Artificial Sequence
  Description of Artificial Sequence: Synthetic oligonucleotide
  Target: LAMA2; (+) strand; PAM type: NRG; PAM sequence: AGG
ttatgtaaattacaaacatt

SEQ ID NO: 183443 - DNA, 20 bp, Artificial Sequence
  Description of Artificial Sequence: Synthetic oligonucleotide
  Target: LAMA2; (+) strand; PAM type: NRG; PAM sequence: TGG
cgtatgcaatccaactgata

SEQ ID NO: 183444 - DNA, 20 bp, Artificial Sequence
  Description of Artificial Sequence: Synthetic oligonucleotide
  Target: LAMA2; (+) strand; PAM type: NRG; PAM sequence: AAG
aacccacattccaaacaaat

SEQ ID NO: 183445 - DNA, 20 bp, Artificial Sequence
  Description of Artificial Sequence: Synthetic oligonucleotide
  Target: LAMA2; (+) strand; PAM type: NRG; PAM sequence: TAG
cattccaaacaaataagaaa

SEQ ID NO: 183446 - DNA, 20 bp, Artificial Sequence
  Description of Artificial Sequence: Synthetic oligonucleotide
  Target: LAMA2; (+) strand; PAM type: NRG; PAM sequence: AGG
attccaaacaaataagaaat

SEQ ID NO: 183447 - DNA, 20 bp, Artificial Sequence
  Description of Artificial Sequence: Synthetic oligonucleotide
  Target: LAMA2; (+) strand; PAM type: NRG; PAM sequence: GGG
ttccaaacaaataagaaata

SEQ ID NO: 183448 - DNA, 20 bp, Artificial Sequence
  Description of Artificial Sequence: Synthetic oligonucleotide
  Target: LAMA2; (+) strand; PAM type: NRG; PAM sequence: AAG
acaaataagaaatagggtat

SEQ ID NO: 183449 - DNA, 20 bp, Artificial Sequence
  Description of Artificial Sequence: Synthetic oligonucleotide
  Target: LAMA2; (+) strand; PAM type: NRG; PAM sequence: AAG
gaaatagggtataagtaatc

SEQ ID NO: 183450 - DNA, 20 bp, Artificial Sequence
  Description of Artificial Sequence: Synthetic oligonucleotide
  Target: LAMA2; (+) strand; PAM type: NRG; PAM sequence: AAG
tcaagtaattatgaaactct

SEQ ID NO: 183451 - DNA, 20 bp, Artificial Sequence
  Description of Artificial Sequence: Synthetic oligonucleotide
  Target: LAMA2; (+) strand; PAM type: NRG; PAM sequence: CAG
aattatgaaactctaagaat

SEQ ID NO: 183452 - DNA, 20 bp, Artificial Sequence
  Description of Artificial Sequence: Synthetic oligonucleotide
  Target: LAMA2; (+) strand; PAM type: NRG; PAM sequence: AAG
aactgtaaaaaaaaaaaata

SEQ ID NO: 183453 - DNA, 20 bp, Artificial Sequence
  Description of Artificial Sequence: Synthetic oligonucleotide
  Target: LAMA2; (+) strand; PAM type: NRG; PAM sequence: AAG
gctgacctattacaatacta

SEQ ID NO: 183454 - DNA, 20 bp, Artificial Sequence
  Description of Artificial Sequence: Synthetic oligonucleotide
  Target: LAMA2; (+) strand; PAM type: NRG; PAM sequence: AAG
tacaatactaaagtaataca

SEQ ID NO: 183455 - DNA, 20 bp, Artificial Sequence
  Description of Artificial Sequence: Synthetic oligonucleotide
  Target: LAMA2; (+) strand; PAM type: NRG; PAM sequence: TAG
ttaatgtacctttttgcaca

SEQ ID NO: 183456 - DNA, 20 bp, Artificial Sequence
  Description of Artificial Sequence: Synthetic oligonucleotide
  Target: LAMA2; (+) strand; PAM type: NRG; PAM sequence: CAG
atgtacctttttgcacatag

SEQ ID NO: 183457 - DNA, 20 bp, Artificial Sequence
  Description of Artificial Sequence: Synthetic oligonucleotide
  Target: LAMA2; (+) strand; PAM type: NRG; PAM sequence: AGG
tgtacctttttgcacatagc

SEQ ID NO: 183458 - DNA, 20 bp, Artificial Sequence
  Description of Artificial Sequence: Synthetic oligonucleotide
  Target: LAMA2; (+) strand; PAM type: NRG; PAM sequence: CAG
tttttgcacatagcaggcct

SEQ ID NO: 183459 - DNA, 20 bp, Artificial Sequence
  Description of Artificial Sequence: Synthetic oligonucleotide
  Target: LAMA2; (+) strand; PAM type: NRG; PAM sequence: AAG
acatagcaggcctcagtaaa

SEQ ID NO: 183460 - DNA, 20 bp, Artificial Sequence
  Description of Artificial Sequence: Synthetic oligonucleotide
  Target: LAMA2; (+) strand; PAM type: NRG; PAM sequence: TGG
aaataaatactttttaaaaa

SEQ ID NO: 183461 - DNA, 20 bp, Artificial Sequence
  Description of Artificial Sequence: Synthetic oligonucleotide
  Target: LAMA2; (+) strand; PAM type: NRG; PAM sequence: CAG
tttaaaaatggaaaacacac

SEQ ID NO: 183462 - DNA, 20 bp, Artificial Sequence
  Description of Artificial Sequence: Synthetic oligonucleotide
  Target: LAMA2; (+) strand; PAM type: NRG; PAM sequence: TGG
aaaacacaccagaatcataa

SEQ ID NO: 183463 - DNA, 20 bp, Artificial Sequence
  Description of Artificial Sequence: Synthetic oligonucleotide
  Target: LAMA2; (+) strand; PAM type: NRG; PAM sequence: TGG
cagaatcataatggacatat

SEQ ID NO: 183464 - DNA, 20 bp, Artificial Sequence
  Description of Artificial Sequence: Synthetic oligonucleotide
  Target: LAMA2; (+) strand; PAM type: NRG; PAM sequence: AAG
gtccttctcaataaaaacta

SEQ ID NO: 183465 - DNA, 20 bp, Artificial Sequence
  Description of Artificial Sequence: Synthetic oligonucleotide
  Target: LAMA2; (+) strand; PAM type: NRG; PAM sequence: TAG
taaaaactaaagaaatgatc

SEQ ID NO: 183466 - DNA, 20 bp, Artificial Sequence
  Description of Artificial Sequence: Synthetic oligonucleotide
  Target: LAMA2; (+) strand; PAM type: NRG; PAM sequence: AAG
tctagatttgatgttcctaa

SEQ ID NO: 183467 - DNA, 20 bp, Artificial Sequence
  Description of Artificial Sequence: Synthetic oligonucleotide
  Target: LAMA2; (+) strand; PAM type: NRG; PAM sequence: AGG
ctagatttgatgttcctaaa

SEQ ID NO: 183468 - DNA, 20 bp, Artificial Sequence
  Description of Artificial Sequence: Synthetic oligonucleotide
  Target: LAMA2; (+) strand; PAM type: NRG; PAM sequence: TAG
gatgttcctaaaaggtaaaa

SEQ ID NO: 183469 - DNA, 20 bp, Artificial Sequence
  Description of Artificial Sequence: Synthetic oligonucleotide
  Target: LAMA2; (+) strand; PAM type: NRG; PAM sequence: AGG
atgttcctaaaaggtaaaat

SEQ ID NO: 183470 - DNA, 20 bp, Artificial Sequence
  Description of Artificial Sequence: Synthetic oligonucleotide
  Target: LAMA2; (+) strand; PAM type: NRG; PAM sequence: GAG
gttcctaaaaggtaaaatag

SEQ ID NO: 183471 - DNA, 20 bp, Artificial Sequence
  Description of Artificial Sequence: Synthetic oligonucleotide
  Target: LAMA2; (+) strand; PAM type: NRG; PAM sequence: CAG
cctaaaaggtaaaataggag

SEQ ID NO: 183472 - DNA, 20 bp, Artificial Sequence
  Description of Artificial Sequence: Synthetic oligonucleotide
  Target: LAMA2; (+) strand; PAM type: NRG; PAM sequence: AGG
ctaaaaggtaaaataggagc

SEQ ID NO: 183473 - DNA, 20 bp, Artificial Sequence
  Description of Artificial Sequence: Synthetic oligonucleotide
  Target: LAMA2; (+) strand; PAM type: NRG; PAM sequence: TAG
ggtaaaataggagcaggatt

SEQ ID NO: 183474 - DNA, 20 bp, Artificial Sequence
  Description of Artificial Sequence: Synthetic oligonucleotide
  Target: LAMA2; (+) strand; PAM type: NRG; PAM sequence: TAG
ataggagcaggatttagctg

SEQ ID NO: 183475 - DNA, 20 bp, Artificial Sequence
  Description of Artificial Sequence: Synthetic oligonucleotide
  Target: LAMA2; (+) strand; PAM type: NRG; PAM sequence: TAG
aggatttagctgtagttttc

SEQ ID NO: 183476 - DNA, 20 bp, Artificial Sequence
  Description of Artificial Sequence: Synthetic oligonucleotide
  Target: LAMA2; (+) strand; PAM type: NRG; PAM sequence: AAG
tttctagcaatgcccttttt

SEQ ID NO: 183477 - DNA, 20 bp, Artificial Sequence
  Description of Artificial Sequence: Synthetic oligonucleotide
  Target: LAMA2; (+) strand; PAM type: NRG; PAM sequence: CAG
aatgccctttttaagtaata

SEQ ID NO: 183478 - DNA, 20 bp, Artificial Sequence
  Description of Artificial Sequence: Synthetic oligonucleotide
  Target: LAMA2; (+) strand; PAM type: NRG; PAM sequence: CAG
ctttttaagtaatacagcct

SEQ ID NO: 183479 - DNA, 20 bp, Artificial Sequence
  Description of Artificial Sequence: Synthetic oligonucleotide
  Target: LAMA2; (+) strand; PAM type: NRG; PAM sequence: AGG
tttttaagtaatacagcctc

SEQ ID NO: 183480 - DNA, 20 bp, Artificial Sequence
  Description of Artificial Sequence: Synthetic oligonucleotide
  Target: LAMA2; (+) strand; PAM type: NRG; PAM sequence: GGG
ttttaagtaatacagcctca

SEQ ID NO: 183481 - DNA, 20 bp, Artificial Sequence
  Description of Artificial Sequence: Synthetic oligonucleotide
  Target: LAMA2; (+) strand; PAM type: NRG; PAM sequence: AAG
ttaatattttccgctgtttg

SEQ ID NO: 183482 - DNA, 20 bp, Artificial Sequence
  Description of Artificial Sequence: Synthetic oligonucleotide
  Target: LAMA2; (+) strand; PAM type: NRG; PAM sequence: TAG
atattttccgctgtttgaag

SEQ ID NO: 183483 - DNA, 20 bp, Artificial Sequence
  Description of Artificial Sequence: Synthetic oligonucleotide
  Target: LAMA2; (+) strand; PAM type: NRG; PAM sequence: AGG
tattttccgctgtttgaagt

SEQ ID NO: 183484 - DNA, 20 bp, Artificial Sequence
  Description of Artificial Sequence: Synthetic oligonucleotide
  Target: LAMA2; (+) strand; PAM type: NRG; PAM sequence: TGG
catcttataaatgaatgaaa

SEQ ID NO: 183485 - DNA, 20 bp, Artificial Sequence
  Description of Artificial Sequence: Synthetic oligonucleotide
  Target: LAMA2; (+) strand; PAM type: NRG; PAM sequence: GAG
taaatgaatgaaatggacct

SEQ ID NO: 183486 - DNA, 20 bp, Artificial Sequence
  Description of Artificial Sequence: Synthetic oligonucleotide
  Target: LAMA2; (+) strand; PAM type: NRG; PAM sequence: AAG
catgattaaataacttgccc

SEQ ID NO: 183487 - DNA, 20 bp, Artificial Sequence
  Description of Artificial Sequence: Synthetic oligonucleotide
  Target: LAMA2; (+) strand; PAM type: NRG; PAM sequence: AGG
atgattaaataacttgccca

SEQ ID NO: 183488 - DNA, 20 bp, Artificial Sequence
  Description of Artificial Sequence: Synthetic oligonucleotide
  Target: LAMA2; (+) strand; PAM type: NRG; PAM sequence: CAG
ataacttgcccaaggtcaca

SEQ ID NO: 183489 - DNA, 20 bp, Artificial Sequence
  Description of Artificial Sequence: Synthetic oligonucleotide
  Target: LAMA2; (+) strand; PAM type: NRG; PAM sequence: TAG
cttgcccaaggtcacacagc

SEQ ID NO: 183490 - DNA, 20 bp, Artificial Sequence
  Description of Artificial Sequence: Synthetic oligonucleotide
  Target: LAMA2; (+) strand; PAM type: NRG; PAM sequence: AAG
cccaaggtcacacagctagt

SEQ ID NO: 183491 - DNA, 20 bp, Artificial Sequence
  Description of Artificial Sequence: Synthetic oligonucleotide
  Target: LAMA2; (+) strand; PAM type: NRG; PAM sequence: TAG
cagctagtaagcttccacac

SEQ ID NO: 183492 - DNA, 20 bp, Artificial Sequence
  Description of Artificial Sequence: Synthetic oligonucleotide
  Target: LAMA2; (+) strand; PAM type: NRG; PAM sequence: CAG
tccacactagtacttaattc

SEQ ID NO: 183493 - DNA, 20 bp, Artificial Sequence
  Description of Artificial Sequence: Synthetic oligonucleotide
  Target: LAMA2; (+) strand; PAM type: NRG; PAM sequence: AAG
ttccagtatgttcctcctga

SEQ ID NO: 183494 - DNA, 20 bp, Artificial Sequence
  Description of Artificial Sequence: Synthetic oligonucleotide
  Target: LAMA2; (+) strand; PAM type: NRG; PAM sequence: TGG
tccatcaccaccctgtgaat

SEQ ID NO: 183495 - DNA, 20 bp, Artificial Sequence
  Description of Artificial Sequence: Synthetic oligonucleotide
  Target: LAMA2; (+) strand; PAM type: NRG; PAM sequence: AAG
tgaattggtttaaaaaaaat

SEQ ID NO: 183496 - DNA, 20 bp, Artificial Sequence
  Description of Artificial Sequence: Synthetic oligonucleotide
  Target: LAMA2; (+) strand; PAM type: NRG; PAM sequence: AGG
gaattggtttaaaaaaaata

SEQ ID NO: 183497 - DNA, 20 bp, Artificial Sequence
  Description of Artificial Sequence: Synthetic oligonucleotide
  Target: LAMA2; (+) strand; PAM type: NRG; PAM sequence: GGG
aattggtttaaaaaaaataa

SEQ ID NO: 183498 - DNA, 20 bp, Artificial Sequence
  Description of Artificial Sequence: Synthetic oligonucleotide
  Target: LAMA2; (+) strand; PAM type: NRG; PAM sequence: TGG
aaaaataagggtcactatga

SEQ ID NO: 183499 - DNA, 20 bp, Artificial Sequence
  Description of Artificial Sequence: Synthetic oligonucleotide
  Target: LAMA2; (+) strand; PAM type: NRG; PAM sequence: TGG
ggtcactatgatggtccttg

SEQ ID NO: 183500 - DNA, 20 bp, Artificial Sequence
  Description of Artificial Sequence: Synthetic oligonucleotide
  Target: LAMA2; (+) strand; PAM type: NRG; PAM sequence: CAG
cactatgatggtccttgtgg

SEQ ID NO: 183501 - DNA, 20 bp, Artificial Sequence
  Description of Artificial Sequence: Synthetic oligonucleotide
  Target: LAMA2; (+) strand; PAM type: NRG; PAM sequence: CAG
cttgtggcagaaccacacta

SEQ ID NO: 183502 - DNA, 20 bp, Artificial Sequence
  Description of Artificial Sequence: Synthetic oligonucleotide
  Target: LAMA2; (+) strand; PAM type: NRG; PAM sequence: GAG
tgtggcagaaccacactaca

SEQ ID NO: 183503 - DNA, 20 bp, Artificial Sequence
  Description of Artificial Sequence: Synthetic oligonucleotide
  Target: LAMA2; (+) strand; PAM type: NRG; PAM sequence: GAG
tggcagaaccacactacaga

SEQ ID NO: 183504 - DNA, 20 bp, Artificial Sequence
  Description of Artificial Sequence: Synthetic oligonucleotide
  Target: LAMA2; (+) strand; PAM type: NRG; PAM sequence: GAG
gcagaaccacactacagaga

SEQ ID NO: 183505 - DNA, 20 bp, Artificial Sequence
  Description of Artificial Sequence: Synthetic oligonucleotide
  Target: LAMA2; (+) strand; PAM type: NRG; PAM sequence: AGG
cagaaccacactacagagag

SEQ ID NO: 183506 - DNA, 20 bp, Artificial Sequence
  Description of Artificial Sequence: Synthetic oligonucleotide
  Target: LAMA2; (+) strand; PAM type: NRG; PAM sequence: CAG
actacagagagaggctacac

SEQ ID NO: 183507 - DNA, 20 bp, Artificial Sequence
  Description of Artificial Sequence: Synthetic oligonucleotide
  Target: LAMA2; (+) strand; PAM type: NRG; PAM sequence: AAG
cagagagaggctacaccaga

SEQ ID NO: 183508 - DNA, 20 bp, Artificial Sequence
  Description of Artificial Sequence: Synthetic oligonucleotide
  Target: LAMA2; (+) strand; PAM type: NRG; PAM sequence: GAG
gagagaggctacaccagaaa

SEQ ID NO: 183509 - DNA, 20 bp, Artificial Sequence
  Description of Artificial Sequence: Synthetic oligonucleotide
  Target: LAMA2; (+) strand; PAM type: NRG; PAM sequence: AGG
agagaggctacaccagaaag

SEQ ID NO: 183510 - DNA, 20 bp, Artificial Sequence
  Description of Artificial Sequence: Synthetic oligonucleotide
  Target: LAMA2; (+) strand; PAM type: NRG; PAM sequence: AAG
gaggctacaccagaaagagg

SEQ ID NO: 183511 - DNA, 20 bp, Artificial Sequence
  Description of Artificial Sequence: Synthetic oligonucleotide
  Target: LAMA2; (+) strand; PAM type: NRG; PAM sequence: AGG
aggctacaccagaaagagga

SEQ ID NO: 183512 - DNA, 20 bp, Artificial Sequence
  Description of Artificial Sequence: Synthetic oligonucleotide
  Target: LAMA2; (+) strand; PAM type: NRG; PAM sequence: TAG
accagaaagaggaaggcctc

SEQ ID NO: 183513 - DNA, 20 bp, Artificial Sequence
  Description of Artificial Sequence: Synthetic oligonucleotide
  Target: LAMA2; (+) strand; PAM type: NRG; PAM sequence: AAG
agctttttaaaattctaatc

SEQ ID NO: 183514 - DNA, 20 bp, Artificial Sequence
  Description of Artificial Sequence: Synthetic oligonucleotide
  Target: LAMA2; (+) strand; PAM type: NRG; PAM sequence: CAG
tttaaaattctaatcaagaa

SEQ ID NO: 183515 - DNA, 20 bp, Artificial Sequence
  Description of Artificial Sequence: Synthetic oligonucleotide
  Target: LAMA2; (+) strand; PAM type: NRG; PAM sequence: GAG
taaaattctaatcaagaaca

SEQ ID NO: 183516 - DNA, 20 bp, Artificial Sequence
  Description of Artificial Sequence: Synthetic oligonucleotide
  Target: LAMA2; (+) strand; PAM type: NRG; PAM sequence: TGG
gaacagagatttactctcct

SEQ ID NO: 183517 - DNA, 20 bp, Artificial Sequence
  Description of Artificial Sequence: Synthetic oligonucleotide
  Target: LAMA2; (+) strand; PAM type: NRG; PAM sequence: CAG
tctccttggacaatctttaa

SEQ ID NO: 183518 - DNA, 20 bp, Artificial Sequence
  Description of Artificial Sequence: Synthetic oligonucleotide
  Target: LAMA2; (+) strand; PAM type: NRG; PAM sequence: GAG
tccttggacaatctttaaca

SEQ ID NO: 183519 - DNA, 20 bp, Artificial Sequence
  Description of Artificial Sequence: Synthetic oligonucleotide
  Target: LAMA2; (+) strand; PAM type: NRG; PAM sequence: AGG
ccttggacaatctttaacag

SEQ ID NO: 183520 - DNA, 20 bp, Artificial Sequence
  Description of Artificial Sequence: Synthetic oligonucleotide
  Target: LAMA2; (+) strand; PAM type: NRG; PAM sequence: TAG
tatatccttcattaaaacct

SEQ ID NO: 183521 - DNA, 20 bp, Artificial Sequence
  Description of Artificial Sequence: Synthetic oligonucleotide
  Target: LAMA2; (+) strand; PAM type: NRG; PAM sequence: AAG
atccttcattaaaaccttag

SEQ ID NO: 183522 - DNA, 20 bp, Artificial Sequence
  Description of Artificial Sequence: Synthetic oligonucleotide
  Target: LAMA2; (+) strand; PAM type: NRG; PAM sequence: AAG
ccctgtgatatcatgttgct

SEQ ID NO: 183523 - DNA, 20 bp, Artificial Sequence
  Description of Artificial Sequence: Synthetic oligonucleotide
  Target: LAMA2; (+) strand; PAM type: NRG; PAM sequence: AAG
tgtgatatcatgttgctaag

SEQ ID NO: 183524 - DNA, 20 bp, Artificial Sequence
  Description of Artificial Sequence: Synthetic oligonucleotide
  Target: LAMA2; (+) strand; PAM type: NRG; PAM sequence: GAG
tgatatcatgttgctaagaa

SEQ ID NO: 183525 - DNA, 20 bp, Artificial Sequence
  Description of Artificial Sequence: Synthetic oligonucleotide
  Target: LAMA2; (+) strand; PAM type: NRG; PAM sequence: AGG
gatatcatgttgctaagaag

SEQ ID NO: 183526 - DNA, 20 bp, Artificial Sequence
  Description of Artificial Sequence: Synthetic oligonucleotide
  Target: LAMA2; (+) strand; PAM type: NRG; PAM sequence: CAG
tgctaagaagaggctgcttt

SEQ ID NO: 183527 - DNA, 20 bp, Artificial Sequence
  Description of Artificial Sequence: Synthetic oligonucleotide
  Target: LAMA2; (+) strand; PAM type: NRG; PAM sequence: AAG
gaagaggctgctttcagcta

SEQ ID NO: 183528 - DNA, 20 bp, Artificial Sequence
  Description of Artificial Sequence: Synthetic oligonucleotide
  Target: LAMA2; (+) strand; PAM type: NRG; PAM sequence: AGG
aagaggctgctttcagctaa

SEQ ID NO: 183529 - DNA, 20 bp, Artificial Sequence
  Description of Artificial Sequence: Synthetic oligonucleotide
  Target: LAMA2; (+) strand; PAM type: NRG; PAM sequence: GGG
agaggctgctttcagctaaa

SEQ ID NO: 183530 - DNA, 20 bp, Artificial Sequence
  Description of Artificial Sequence: Synthetic oligonucleotide
  Target: LAMA2; (+) strand; PAM type: NRG; PAM sequence: GGG
gaggctgctttcagctaaag

SEQ ID NO: 183531 - DNA, 20 bp, Artificial Sequence
  Description of Artificial Sequence: Synthetic oligonucleotide
  Target: LAMA2; (+) strand; PAM type: NRG; PAM sequence: AAG
gctttcagctaaaggggaaa

SEQ ID NO: 183532 - DNA, 20 bp, Artificial Sequence
  Description of Artificial Sequence: Synthetic oligonucleotide
  Target: LAMA2; (+) strand; PAM type: NRG; PAM sequence: GAG
tttcagctaaaggggaaaaa

SEQ ID NO: 183533 - DNA, 20 bp, Artificial Sequence
  Description of Artificial Sequence: Synthetic oligonucleotide
  Target: LAMA2; (+) strand; PAM type: NRG; PAM sequence: TAG
gctaaaggggaaaaagagtg

SEQ ID NO: 183534 - DNA, 20 bp, Artificial Sequence
  Description of Artificial Sequence: Synthetic oligonucleotide
  Target: LAMA2; (+) strand; PAM type: NRG; PAM sequence: AGG
ctaaaggggaaaaagagtgt

SEQ ID NO: 183535 - DNA, 20 bp, Artificial Sequence
  Description of Artificial Sequence: Synthetic oligonucleotide
  Target: LAMA2; (+) strand; PAM type: NRG; PAM sequence: GGG
taaaggggaaaaagagtgta

SEQ ID NO: 183536 - DNA, 20 bp, Artificial Sequence
  Description of Artificial Sequence: Synthetic oligonucleotide
  Target: LAMA2; (+) strand; PAM type: NRG; PAM sequence: GGG
aaaggggaaaaagagtgtag

SEQ ID NO: 183537 - DNA, 20 bp, Artificial Sequence
  Description of Artificial Sequence: Synthetic oligonucleotide
  Target: LAMA2; (+) strand; PAM type: NRG; PAM sequence: GAG
aggggaaaaagagtgtaggg

SEQ ID NO: 183538 - DNA, 20 bp, Artificial Sequence
  Description of Artificial Sequence: Synthetic oligonucleotide
  Target: LAMA2; (+) strand; PAM type: NRG; PAM sequence: AGG
ggggaaaaagagtgtagggg

SEQ ID NO: 183539 - DNA, 20 bp, Artificial Sequence
  Description of Artificial Sequence: Synthetic oligonucleotide
  Target: LAMA2; (+) strand; PAM type: NRG; PAM sequence: GGG
gggaaaaagagtgtagggga

SEQ ID NO: 183540 - DNA, 20 bp, Artificial Sequence
  Description of Artificial Sequence: Synthetic oligonucleotide
  Target: LAMA2; (+) strand; PAM type: NRG; PAM sequence: GGG
ggaaaaagagtgtaggggag

SEQ ID NO: 183541 - DNA, 20 bp, Artificial Sequence
  Description of Artificial Sequence: Synthetic oligonucleotide
  Target: LAMA2; (+) strand; PAM type: NRG; PAM sequence: CAG
agtgtaggggaggggcttct

SEQ ID NO: 183542 - DNA, 20 bp, Artificial Sequence
  Description of Artificial Sequence: Synthetic oligonucleotide
  Target: LAMA2; (+) strand; PAM type: NRG; PAM sequence: GAG
taggggaggggcttctcagt

SEQ ID NO: 183543 - DNA, 20 bp, Artificial Sequence
  Description of Artificial Sequence: Synthetic oligonucleotide
  Target: LAMA2; (+) strand; PAM type: NRG; PAM sequence: CGG
ctcagtgagtcacacatacc

SEQ ID NO: 183544 - DNA, 20 bp, Artificial Sequence
  Description of Artificial Sequence: Synthetic oligonucleotide
  Target: LAMA2; (+) strand; PAM type: NRG; PAM sequence: AAG
agtgagtcacacatacccgg

SEQ ID NO: 183545 - DNA, 20 bp, Artificial Sequence
  Description of Artificial Sequence: Synthetic oligonucleotide
  Target: LAMA2; (+) strand; PAM type: NRG; PAM sequence: GAG
agtcacacatacccggaagt

SEQ ID NO: 183546 - DNA, 20 bp, Artificial Sequence
  Description of Artificial Sequence: Synthetic oligonucleotide
  Target: LAMA2; (+) strand; PAM type: NRG; PAM sequence: TGG
cacacatacccggaagtgag

SEQ ID NO: 183547 - DNA, 20 bp, Artificial Sequence
  Description of Artificial Sequence: Synthetic oligonucleotide
  Target: LAMA2; (+) strand; PAM type: NRG; PAM sequence: CAG
gttttctgaaattctcgtct

SEQ ID NO: 183548 - DNA, 20 bp, Artificial Sequence
  Description of Artificial Sequence: Synthetic oligonucleotide
  Target: LAMA2; (+) strand; PAM type: NRG; PAM sequence: AGG
ttttctgaaattctcgtctc

SEQ ID NO: 183549 - DNA, 20 bp, Artificial Sequence
  Description of Artificial Sequence: Synthetic oligonucleotide
  Target: LAMA2; (+) strand; PAM type: NRG; PAM sequence: TAG
caggaaaccaccgacactct

SEQ ID NO: 183550 - DNA, 20 bp, Artificial Sequence
  Description of Artificial Sequence: Synthetic oligonucleotide
  Target: LAMA2; (+) strand; PAM type: NRG; PAM sequence: AAG
aaaccaccgacactcttagc

SEQ ID NO: 183551 - DNA, 20 bp, Artificial Sequence
  Description of Artificial Sequence: Synthetic oligonucleotide
  Target: LAMA2; (+) strand; PAM type: NRG; PAM sequence: AGG
aaccaccgacactcttagca

SEQ ID NO: 183552 - DNA, 20 bp, Artificial Sequence
  Description of Artificial Sequence: Synthetic oligonucleotide
  Target: LAMA2; (+) strand; PAM type: NRG; PAM sequence: AAG
caccgacactcttagcaagg

SEQ ID NO: 183553 - DNA, 20 bp, Artificial Sequence
  Description of Artificial Sequence: Synthetic oligonucleotide
  Target: LAMA2; (+) strand; PAM type: NRG; PAM sequence: TGG
agcaaggaagctgaacctcc

SEQ ID NO: 183554 - DNA, 20 bp, Artificial Sequence
  Description of Artificial Sequence: Synthetic oligonucleotide
  Target: LAMA2; (+) strand; PAM type: NRG; PAM sequence: GGG
gcaaggaagctgaacctcct

SEQ ID NO: 183555 - DNA, 20 bp, Artificial Sequence
  Description of Artificial Sequence: Synthetic oligonucleotide
  Target: LAMA2; (+) strand; PAM type: NRG; PAM sequence: TAG
tttgccaacacatttttcca

SEQ ID NO: 183556 - DNA, 20 bp, Artificial Sequence
  Description of Artificial Sequence: Synthetic oligonucleotide
  Target: LAMA2; (+) strand; PAM type: NRG; PAM sequence: TGG
caacacatttttccatagtt

SEQ ID NO: 183557 - DNA, 20 bp, Artificial Sequence
  Description of Artificial Sequence: Synthetic oligonucleotide
  Target: LAMA2; (+) strand; PAM type: NRG; PAM sequence: AAG
catttttccatagtttggta

SEQ ID NO: 183558 - DNA, 20 bp, Artificial Sequence
  Description of Artificial Sequence: Synthetic oligonucleotide
  Target: LAMA2; (+) strand; PAM type: NRG; PAM sequence: AAG
tttccatagtttggtaaaga

SEQ ID NO: 183559 - DNA, 20 bp, Artificial Sequence
  Description of Artificial Sequence: Synthetic oligonucleotide
  Target: LAMA2; (+) strand; PAM type: NRG; PAM sequence: AAG
ggtaaagaaagaaacctcaa

SEQ ID NO: 183560 - DNA, 20 bp, Artificial Sequence
  Description of Artificial Sequence: Synthetic oligonucleotide
  Target: LAMA2; (+) strand; PAM type: NRG; PAM sequence: CGG
tctttgaaactaaattttac

SEQ ID NO: 183561 - DNA, 20 bp, Artificial Sequence
  Description of Artificial Sequence: Synthetic oligonucleotide
  Target: LAMA2; (+) strand; PAM type: NRG; PAM sequence: CAG
tcccttcttcacccccttaa

SEQ ID NO: 183562 - DNA, 20 bp, Artificial Sequence
  Description of Artificial Sequence: Synthetic oligonucleotide
  Target: LAMA2; (+) strand; PAM type: NRG; PAM sequence: GAG
cccttaacagtgacgttttt

SEQ ID NO: 183563 - DNA, 20 bp, Artificial Sequence
  Description of Artificial Sequence: Synthetic oligonucleotide
  Target: LAMA2; (+) strand; PAM type: NRG; PAM sequence: CAG
acagtgacgtttttgagcca

SEQ ID NO: 183564 - DNA, 20 bp, Artificial Sequence
  Description of Artificial Sequence: Synthetic oligonucleotide
  Target: LAMA2; (+) strand; PAM type: NRG; PAM sequence: AAG
tttgaattatcttacttgta

SEQ ID NO: 183565 - DNA, 20 bp, Artificial Sequence
  Description of Artificial Sequence: Synthetic oligonucleotide
  Target: LAMA2; (+) strand; PAM type: NRG; PAM sequence: CAG
ttacttgtaaagtgccaatt

SEQ ID NO: 183566 - DNA, 20 bp, Artificial Sequence
  Description of Artificial Sequence: Synthetic oligonucleotide
  Target: LAMA2; (+) strand; PAM type: NRG; PAM sequence: GAG
acttgtaaagtgccaattca

SEQ ID NO: 183567 - DNA, 20 bp, Artificial Sequence
  Description of Artificial Sequence: Synthetic oligonucleotide
  Target: LAMA2; (+) strand; PAM type: NRG; PAM sequence: TGG
aattcagagcatctttaccc

SEQ ID NO: 183568 - DNA, 20 bp, Artificial Sequence
  Description of Artificial Sequence: Synthetic oligonucleotide
  Target: LAMA2; (+) strand; PAM type: NRG; PAM sequence: CAG
ccctggcttattgttttttc

SEQ ID NO: 183569 - DNA, 20 bp, Artificial Sequence
  Description of Artificial Sequence: Synthetic oligonucleotide
  Target: LAMA2; (+) strand; PAM type: NRG; PAM sequence: TGG
gttttttccagttctacatg

SEQ ID NO: 183570 - DNA, 20 bp, Artificial Sequence
  Description of Artificial Sequence: Synthetic oligonucleotide
  Target: LAMA2; (+) strand; PAM type: NRG; PAM sequence: AAG
tgtggttttacttctttata

SEQ ID NO: 183571 - DNA, 20 bp, Artificial Sequence
  Description of Artificial Sequence: Synthetic oligonucleotide
  Target: LAMA2; (+) strand; PAM type: NRG; PAM sequence: AAG
ttttacttctttataaagtc

SEQ ID NO: 183572 - DNA, 20 bp, Artificial Sequence
  Description of Artificial Sequence: Synthetic oligonucleotide
  Target: LAMA2; (+) strand; PAM type: NRG; PAM sequence: AAG
acttctttataaagtcaagt

SEQ ID NO: 183573 - DNA, 20 bp, Artificial Sequence
  Description of Artificial Sequence: Synthetic oligonucleotide
  Target: LAMA2; (+) strand; PAM type: NRG; PAM sequence: GAG
ttctttataaagtcaagtaa

SEQ ID NO: 183574 - DNA, 20 bp, Artificial Sequence
  Description of Artificial Sequence: Synthetic oligonucleotide
  Target: LAMA2; (+) strand; PAM type: NRG; PAM sequence: AGG
tctttataaagtcaagtaag

SEQ ID NO: 183575 - DNA, 20 bp, Artificial Sequence
  Description of Artificial Sequence: Synthetic oligonucleotide
  Target: LAMA2; (+) strand; PAM type: NRG; PAM sequence: GGG
ctttataaagtcaagtaaga

SEQ ID NO: 183576 - DNA, 20 bp, Artificial Sequence
  Description of Artificial Sequence: Synthetic oligonucleotide
  Target: LAMA2; (+) strand; PAM type: NRG; PAM sequence: TAG
agtcaagtaagagggtactt

SEQ ID NO: 183577 - DNA, 20 bp, Artificial Sequence
  Description of Artificial Sequence: Synthetic oligonucleotide
  Target: LAMA2; (+) strand; PAM type: NRG; PAM sequence: AGG
gtcaagtaagagggtacttt

SEQ ID NO: 183578 - DNA, 20 bp, Artificial Sequence
  Description of Artificial Sequence: Synthetic oligonucleotide
  Target: LAMA2; (+) strand; PAM type: NRG; PAM sequence: GAG
taagagggtactttaggact

SEQ ID NO: 183579 - DNA, 20 bp, Artificial Sequence
  Description of Artificial Sequence: Synthetic oligonucleotide
  Target: LAMA2; (+) strand; PAM type: NRG; PAM sequence: AGG
aagagggtactttaggactg

SEQ ID NO: 183580 - DNA, 20 bp, Artificial Sequence
  Description of Artificial Sequence: Synthetic oligonucleotide
  Target: LAMA2; (+) strand; PAM type: NRG; PAM sequence: AAG
taggactgaggtttccatcc

SEQ ID NO: 183581 - DNA, 20 bp, Artificial Sequence
  Description of Artificial Sequence: Synthetic oligonucleotide
  Target: LAMA2; (+) strand; PAM type: NRG; PAM sequence: CGG
aggtttccatccaagtactc

SEQ ID NO: 183582 - DNA, 20 bp, Artificial Sequence
  Description of Artificial Sequence: Synthetic oligonucleotide
  Target: LAMA2; (+) strand; PAM type: NRG; PAM sequence: CAG
aagtactccggttttctctc

SEQ ID NO: 183583 - DNA, 20 bp, Artificial Sequence
  Description of Artificial Sequence: Synthetic oligonucleotide
  Target: LAMA2; (+) strand; PAM type: NRG; PAM sequence: AAG
cggttttctctccagatatg

SEQ ID NO: 183584 - DNA, 20 bp, Artificial Sequence
  Description of Artificial Sequence: Synthetic oligonucleotide
  Target: LAMA2; (+) strand; PAM type: NRG; PAM sequence: AAG
tttctctccagatatgaagt

SEQ ID NO: 183585 - DNA, 20 bp, Artificial Sequence
  Description of Artificial Sequence: Synthetic oligonucleotide
  Target: LAMA2; (+) strand; PAM type: NRG; PAM sequence: CAG
ccagatatgaagtaagtttt

SEQ ID NO: 183586 - DNA, 20 bp, Artificial Sequence
  Description of Artificial Sequence: Synthetic oligonucleotide
  Target: LAMA2; (+) strand; PAM type: NRG; PAM sequence: CAG
agtaatccattcatgatccc

SEQ ID NO: 183587 - DNA, 20 bp, Artificial Sequence
  Description of Artificial Sequence: Synthetic oligonucleotide
  Target: LAMA2; (+) strand; PAM type: NRG; PAM sequence: AGG
gtaatccattcatgatcccc

SEQ ID NO: 183588 - DNA, 20 bp, Artificial Sequence
  Description of Artificial Sequence: Synthetic oligonucleotide
  Target: LAMA2; (+) strand; PAM type: NRG; PAM sequence: TAG
tccattcatgatccccaggc

SEQ ID NO: 183589 - DNA, 20 bp, Artificial Sequence
  Description of Artificial Sequence: Synthetic oligonucleotide
  Target: LAMA2; (+) strand; PAM type: NRG; PAM sequence: TAG
tgactaatgcttatgactaa

SEQ ID NO: 183590 - DNA, 20 bp, Artificial Sequence
  Description of Artificial Sequence: Synthetic oligonucleotide
  Target: LAMA2; (+) strand; PAM type: NRG; PAM sequence: AAG
atagcaccatgatgactgtt

SEQ ID NO: 183591 - DNA, 20 bp, Artificial Sequence
  Description of Artificial Sequence: Synthetic oligonucleotide
  Target: LAMA2; (+) strand; PAM type: NRG; PAM sequence: CGG
cgaaactcaaaacttgcttc

SEQ ID NO: 183592 - DNA, 20 bp, Artificial Sequence
  Description of Artificial Sequence: Synthetic oligonucleotide
  Target: LAMA2; (+) strand; PAM type: NRG; PAM sequence: AAG
aaaacttgcttccggaacaa

SEQ ID NO: 183593 - DNA, 20 bp, Artificial Sequence
  Description of Artificial Sequence: Synthetic oligonucleotide
  Target: LAMA2; (+) strand; PAM type: NRG; PAM sequence: GAG
aacttgcttccggaacaaaa

SEQ ID NO: 183594 - DNA, 20 bp, Artificial Sequence
  Description of Artificial Sequence: Synthetic oligonucleotide
  Target: LAMA2; (+) strand; PAM type: NRG; PAM sequence: TGG
aacaaaagagaaaatgcctt

SEQ ID NO: 183595 - DNA, 20 bp, Artificial Sequence
  Description of Artificial Sequence: Synthetic oligonucleotide
  Target: LAMA2; (+) strand; PAM type: NRG; PAM sequence: CAG
atgcctttggtcattttcat

SEQ ID NO: 183596 - DNA, 20 bp, Artificial Sequence
  Description of Artificial Sequence: Synthetic oligonucleotide
  Target: LAMA2; (+) strand; PAM type: NRG; PAM sequence: TGG
ctttgtctccttctgattct

SEQ ID NO: 183597 - DNA, 20 bp, Artificial Sequence
  Description of Artificial Sequence: Synthetic oligonucleotide
  Target: LAMA2; (+) strand; PAM type: NRG; PAM sequence: CAG
tctccttctgattcttggcc

SEQ ID NO: 183598 - DNA, 20 bp, Artificial Sequence
  Description of Artificial Sequence: Synthetic oligonucleotide
  Target: LAMA2; (+) strand; PAM type: NRG; PAM sequence: AGG
ctccttctgattcttggccc

SEQ ID NO: 183599 - DNA, 20 bp, Artificial Sequence
  Description of Artificial Sequence: Synthetic oligonucleotide
  Target: LAMA2; (+) strand; PAM type: NRG; PAM sequence: GGG
tccttctgattcttggccca

SEQ ID NO: 183600 - DNA, 20 bp, Artificial Sequence
  Description of Artificial Sequence: Synthetic oligonucleotide
  Target: LAMA2; (+) strand; PAM type: NRG; PAM sequence: AAG
gattcttggcccagggatcc

SEQ ID NO: 183601 - DNA, 20 bp, Artificial Sequence
  Description of Artificial Sequence: Synthetic oligonucleotide
  Target: LAMA2; (+) strand; PAM type: NRG; PAM sequence: AGG
attcttggcccagggatcca

SEQ ID NO: 183602 - DNA, 20 bp, Artificial Sequence
  Description of Artificial Sequence: Synthetic oligonucleotide
  Target: LAMA2; (+) strand; PAM type: NRG; PAM sequence: AAG
atccaaggattgttgtaaat

SEQ ID NO: 183603 - DNA, 20 bp, Artificial Sequence
  Description of Artificial Sequence: Synthetic oligonucleotide
  Target: LAMA2; (+) strand; PAM type: NRG; PAM sequence: TAG
caaggattgttgtaaataag

SEQ ID NO: 183604 - DNA, 20 bp, Artificial Sequence
  Description of Artificial Sequence: Synthetic oligonucleotide
  Target: LAMA2; (+) strand; PAM type: NRG; PAM sequence: GAG
ttgttgtaaataagtagcat

SEQ ID NO: 183605 - DNA, 20 bp, Artificial Sequence
  Description of Artificial Sequence: Synthetic oligonucleotide
  Target: LAMA2; (+) strand; PAM type: NRG; PAM sequence: AGG
tgttgtaaataagtagcatg

SEQ ID NO: 183606 - DNA, 20 bp, Artificial Sequence
  Description of Artificial Sequence: Synthetic oligonucleotide
  Target: LAMA2; (+) strand; PAM type: NRG; PAM sequence: TAG
agtagcatgaggttctcaat

SEQ ID NO: 183607 - DNA, 20 bp, Artificial Sequence
  Description of Artificial Sequence: Synthetic oligonucleotide
  Target: LAMA2; (+) strand; PAM type: NRG; PAM sequence: CAG
agcatgaggttctcaattag

SEQ ID NO: 183608 - DNA, 20 bp, Artificial Sequence
  Description of Artificial Sequence: Synthetic oligonucleotide
  Target: LAMA2; (+) strand; PAM type: NRG; PAM sequence: GAG
gttctcaattagcagtgtgt

SEQ ID NO: 183609 - DNA, 20 bp, Artificial Sequence
  Description of Artificial Sequence: Synthetic oligonucleotide
  Target: LAMA2; (+) strand; PAM type: NRG; PAM sequence: AAG
gtgtgtgagttctctctcat

SEQ ID NO: 183610 - DNA, 20 bp, Artificial Sequence
  Description of Artificial Sequence: Synthetic oligonucleotide
  Target: LAMA2; (+) strand; PAM type: NRG; PAM sequence: TAG
gttctctctcataagcaaat

SEQ ID NO: 183611 - DNA, 20 bp, Artificial Sequence
  Description of Artificial Sequence: Synthetic oligonucleotide
  Target: LAMA2; (+) strand; PAM type: NRG; PAM sequence: AGG
ttctctctcataagcaaatt

SEQ ID NO: 183612 - DNA, 20 bp, Artificial Sequence
  Description of Artificial Sequence: Synthetic oligonucleotide
  Target: LAMA2; (+) strand; PAM type: NRG; PAM sequence: CAG
aattaggaaaattaatgaaa

SEQ ID NO: 183613 - DNA, 20 bp, Artificial Sequence
  Description of Artificial Sequence: Synthetic oligonucleotide
  Target: LAMA2; (+) strand; PAM type: NRG; PAM sequence: AAG
aaattaatgaaacagccact

SEQ ID NO: 183614 - DNA, 20 bp, Artificial Sequence
  Description of Artificial Sequence: Synthetic oligonucleotide
  Target: LAMA2; (+) strand; PAM type: NRG; PAM sequence: AGG
aattaatgaaacagccacta

SEQ ID NO: 183615 - DNA, 20 bp, Artificial Sequence
  Description of Artificial Sequence: Synthetic oligonucleotide
  Target: LAMA2; (+) strand; PAM type: NRG; PAM sequence: AAG
ccactaaggaaaatcattgc

SEQ ID NO: 183616 - DNA, 20 bp, Artificial Sequence
  Description of Artificial Sequence: Synthetic oligonucleotide
  Target: LAMA2; (+) strand; PAM type: NRG; PAM sequence: AGG
cactaaggaaaatcattgca

SEQ ID NO: 183617 - DNA, 20 bp, Artificial Sequence
  Description of Artificial Sequence: Synthetic oligonucleotide
  Target: LAMA2; (+) strand; PAM type: NRG; PAM sequence: TAG
aaatcattgcaaggaacaat

SEQ ID NO: 183618 - DNA, 20 bp, Artificial Sequence
  Description of Artificial Sequence: Synthetic oligonucleotide
  Target: LAMA2; (+) strand; PAM type: NRG; PAM sequence: CAG
tcattgcaaggaacaattag

SEQ ID NO: 183619 - DNA, 20 bp, Artificial Sequence
  Description of Artificial Sequence: Synthetic oligonucleotide
  Target: LAMA2; (+) strand; PAM type: NRG; PAM sequence: AGG
cattgcaaggaacaattagc

SEQ ID NO: 183620 - DNA, 20 bp, Artificial Sequence
  Description of Artificial Sequence: Synthetic oligonucleotide
  Target: LAMA2; (+) strand; PAM type: NRG; PAM sequence: GGG
attgcaaggaacaattagca

SEQ ID NO: 183621 - DNA, 20 bp, Artificial Sequence
  Description of Artificial Sequence: Synthetic oligonucleotide
  Target: LAMA2; (+) strand; PAM type: NRG; PAM sequence: AAG
tgcctgcctcttctattcaa

SEQ ID NO: 183622 - DNA, 20 bp, Artificial Sequence
  Description of Artificial Sequence: Synthetic oligonucleotide
  Target: LAMA2; (+) strand; PAM type: NRG; PAM sequence: CAG
ctcttctattcaaaagccat

SEQ ID NO: 183623 - DNA, 20 bp, Artificial Sequence
  Description of Artificial Sequence: Synthetic oligonucleotide
  Target: LAMA2; (+) strand; PAM type: NRG; PAM sequence: AAG
atcagctacattctttataa

SEQ ID NO: 183624 - DNA, 20 bp, Artificial Sequence
  Description of Artificial Sequence: Synthetic oligonucleotide
  Target: LAMA2; (+) strand; PAM type: NRG; PAM sequence: AGG
tcagctacattctttataaa

SEQ ID NO: 183625 - DNA, 20 bp, Artificial Sequence
  Description of Artificial Sequence: Synthetic oligonucleotide
  Target: LAMA2; (+) strand; PAM type: NRG; PAM sequence: AAG
ttctttataaaaggtgcttt

SEQ ID NO: 183626 - DNA, 20 bp, Artificial Sequence
  Description of Artificial Sequence: Synthetic oligonucleotide
  Target: LAMA2; (+) strand; PAM type: NRG; PAM sequence: AAG
gctgttgattcctgcaatct

SEQ ID NO: 183627 - DNA, 20 bp, Artificial Sequence
  Description of Artificial Sequence: Synthetic oligonucleotide
  Target: LAMA2; (+) strand; PAM type: NRG; PAM sequence: CAG
attcctgcaatctaagctct

SEQ ID NO: 183628 - DNA, 20 bp, Artificial Sequence
  Description of Artificial Sequence: Synthetic oligonucleotide
  Target: LAMA2; (+) strand; PAM type: NRG; PAM sequence: AGG
ttcctgcaatctaagctctc

SEQ ID NO: 183629 - DNA, 20 bp, Artificial Sequence
  Description of Artificial Sequence: Synthetic oligonucleotide
  Target: LAMA2; (+) strand; PAM type: NRG; PAM sequence: GAG
cctgcaatctaagctctcag

SEQ ID NO: 183630 - DNA, 20 bp, Artificial Sequence
  Description of Artificial Sequence: Synthetic oligonucleotide
  Target: LAMA2; (+) strand; PAM type: NRG; PAM sequence: TGG
aatctaagctctcaggagca

SEQ ID NO: 183631 - DNA, 20 bp, Artificial Sequence
  Description of Artificial Sequence: Synthetic oligonucleotide
  Target: LAMA2; (+) strand; PAM type: NRG; PAM sequence: TAG
caggagcatggtttgttccc

SEQ ID NO: 183632 - DNA, 20 bp, Artificial Sequence
  Description of Artificial Sequence: Synthetic oligonucleotide
  Target: LAMA2; (+) strand; PAM type: NRG; PAM sequence: AAG
agcatggtttgttccctagc

SEQ ID NO: 183633 - DNA, 20 bp, Artificial Sequence
  Description of Artificial Sequence: Synthetic oligonucleotide
  Target: LAMA2; (+) strand; PAM type: NRG; PAM sequence: AAG
atggtttgttccctagcaag

SEQ ID NO: 183634 - DNA, 20 bp, Artificial Sequence
  Description of Artificial Sequence: Synthetic oligonucleotide
  Target: LAMA2; (+) strand; PAM type: NRG; PAM sequence: TAG
gttccctagcaagaagataa

SEQ ID NO: 183635 - DNA, 20 bp, Artificial Sequence
  Description of Artificial Sequence: Synthetic oligonucleotide
  Target: LAMA2; (+) strand; PAM type: NRG; PAM sequence: CAG
cctagcaagaagataatagc

SEQ ID NO: 183636 - DNA, 20 bp, Artificial Sequence
  Description of Artificial Sequence: Synthetic oligonucleotide
  Target: LAMA2; (+) strand; PAM type: NRG; PAM sequence: AAG
gataatagccagcacaaccc

SEQ ID NO: 183637 - DNA, 20 bp, Artificial Sequence
  Description of Artificial Sequence: Synthetic oligonucleotide
  Target: LAMA2; (+) strand; PAM type: NRG; PAM sequence: AGG
ataatagccagcacaaccca

SEQ ID NO: 183638 - DNA, 20 bp, Artificial Sequence
  Description of Artificial Sequence: Synthetic oligonucleotide
  Target: LAMA2; (+) strand; PAM type: NRG; PAM sequence: AAG
atagccagcacaacccaagg

SEQ ID NO: 183639 - DNA, 20 bp, Artificial Sequence
  Description of Artificial Sequence: Synthetic oligonucleotide
  Target: LAMA2; (+) strand; PAM type: NRG; PAM sequence: CGG
taaacctgccaacccttata

SEQ ID NO: 183640 - DNA, 20 bp, Artificial Sequence
  Description of Artificial Sequence: Synthetic oligonucleotide
  Target: LAMA2; (+) strand; PAM type: NRG; PAM sequence: TAG
cctgccaacccttatacggt

SEQ ID NO: 183641 - DNA, 20 bp, Artificial Sequence
  Description of Artificial Sequence: Synthetic oligonucleotide
  Target: LAMA2; (+) strand; PAM type: NRG; PAM sequence: CAG
ttagacattactgcacactg

SEQ ID NO: 183642 - DNA, 20 bp, Artificial Sequence
  Description of Artificial Sequence: Synthetic oligonucleotide
  Target: LAMA2; (+) strand; PAM type: NRG; PAM sequence: AAG
gacattactgcacactgcag

SEQ ID NO: 183643 - DNA, 20 bp, Artificial Sequence
  Description of Artificial Sequence: Synthetic oligonucleotide
  Target: LAMA2; (+) strand; PAM type: NRG; PAM sequence: CAG
actgcacactgcagaagcct

SEQ ID NO: 183644 - DNA, 20 bp, Artificial Sequence
  Description of Artificial Sequence: Synthetic oligonucleotide
  Target: LAMA2; (+) strand; PAM type: NRG; PAM sequence: CAG
tgcagaagcctcagttctca

SEQ ID NO: 183645 - DNA, 20 bp, Artificial Sequence
  Description of Artificial Sequence: Synthetic oligonucleotide
  Target: LAMA2; (+) strand; PAM type: NRG; PAM sequence: AGG
gcagaagcctcagttctcac

SEQ ID NO: 183646 - DNA, 20 bp, Artificial Sequence
  Description of Artificial Sequence: Synthetic oligonucleotide
  Target: LAMA2; (+) strand; PAM type: NRG; PAM sequence: TGG
gttctcacaggctcatgtgt

SEQ ID NO: 183647 - DNA, 20 bp, Artificial Sequence
  Description of Artificial Sequence: Synthetic oligonucleotide
  Target: LAMA2; (+) strand; PAM type: NRG; PAM sequence: GGG
ttctcacaggctcatgtgtt

SEQ ID NO: 183648 - DNA, 20 bp, Artificial Sequence
  Description of Artificial Sequence: Synthetic oligonucleotide
  Target: LAMA2; (+) strand; PAM type: NRG; PAM sequence: CAG
ggctcatgtgttgggctgca

SEQ ID NO: 183649 - DNA, 20 bp, Artificial Sequence
  Description of Artificial Sequence: Synthetic oligonucleotide
  Target: LAMA2; (+) strand; PAM type: NRG; PAM sequence: CAG
gggctgcacagcgctgttgt

SEQ ID NO: 183650 - DNA, 20 bp, Artificial Sequence
  Description of Artificial Sequence: Synthetic oligonucleotide
  Target: LAMA2; (+) strand; PAM type: NRG; PAM sequence: AAG
agcgctgttgtcagctctac

SEQ ID NO: 183651 - DNA, 20 bp, Artificial Sequence
  Description of Artificial Sequence: Synthetic oligonucleotide
  Target: LAMA2; (+) strand; PAM type: NRG; PAM sequence: GAG
cgctgttgtcagctctacaa

SEQ ID NO: 183652 - DNA, 20 bp, Artificial Sequence
  Description of Artificial Sequence: Synthetic oligonucleotide
  Target: LAMA2; (+) strand; PAM type: NRG; PAM sequence: AGG
gctgttgtcagctctacaag

SEQ ID NO: 183653 - DNA, 20 bp, Artificial Sequence
  Description of Artificial Sequence: Synthetic oligonucleotide
  Target: LAMA2; (+) strand; PAM type: NRG; PAM sequence: CAG
tctacaagaggctaatgttg

SEQ ID NO: 183654 - DNA, 20 bp, Artificial Sequence
  Description of Artificial Sequence: Synthetic oligonucleotide
  Target: LAMA2; (+) strand; PAM type: NRG; PAM sequence: TGG
tgttgcagtgcgccatgacc

SEQ ID NO: 183655 - DNA, 20 bp, Artificial Sequence
  Description of Artificial Sequence: Synthetic oligonucleotide
  Target: LAMA2; (+) strand; PAM type: NRG; PAM sequence: CAG
agtgcgccatgacctggttt

SEQ ID NO: 183656 - DNA, 20 bp, Artificial Sequence
  Description of Artificial Sequence: Synthetic oligonucleotide
  Target: LAMA2; (+) strand; PAM type: NRG; PAM sequence: CAG
acctggtttcagtaaacttt

SEQ ID NO: 183657 - DNA, 20 bp, Artificial Sequence
  Description of Artificial Sequence: Synthetic oligonucleotide
  Target: LAMA2; (+) strand; PAM type: NRG; PAM sequence: AGG
cctggtttcagtaaactttc

SEQ ID NO: 183658 - DNA, 20 bp, Artificial Sequence
  Description of Artificial Sequence: Synthetic oligonucleotide
  Target: LAMA2; (+) strand; PAM type: NRG; PAM sequence: AAG
ggtttcagtaaactttcagg

SEQ ID NO: 183659 - DNA, 20 bp, Artificial Sequence
  Description of Artificial Sequence: Synthetic oligonucleotide
  Target: LAMA2; (+) strand; PAM type: NRG; PAM sequence: GAG
tttcagtaaactttcaggaa

SEQ ID NO: 183660 - DNA, 20 bp, Artificial Sequence
  Description of Artificial Sequence: Synthetic oligonucleotide
  Target: LAMA2; (+) strand; PAM type: NRG; PAM sequence: GAG
aactttcaggaagagtgaac

SEQ ID NO: 183661 - DNA, 20 bp, Artificial Sequence
  Description of Artificial Sequence: Synthetic oligonucleotide
  Target: LAMA2; (+) strand; PAM type: NRG; PAM sequence: AGG
actttcaggaagagtgaacg

SEQ ID NO: 183662 - DNA, 20 bp, Artificial Sequence
  Description of Artificial Sequence: Synthetic oligonucleotide
  Target: LAMA2; (+) strand; PAM type: NRG; PAM sequence: GGG
ctttcaggaagagtgaacga

SEQ ID NO: 183663 - DNA, 20 bp, Artificial Sequence
  Description of Artificial Sequence: Synthetic oligonucleotide
  Target: LAMA2; (+) strand; PAM type: NRG; PAM sequence: GAG
ttcaggaagagtgaacgagg

SEQ ID NO: 183664 - DNA, 20 bp, Artificial Sequence
  Description of Artificial Sequence: Synthetic oligonucleotide
  Target: LAMA2; (+) strand; PAM type: NRG; PAM sequence: TGG
aagagtgaacgagggagtca

SEQ ID NO: 183665 - DNA, 20 bp, Artificial Sequence
  Description of Artificial Sequence: Synthetic oligonucleotide
  Target: LAMA2; (+) strand; PAM type: NRG; PAM sequence: GAG
gaacgagggagtcatggaac

SEQ ID NO: 183666 - DNA, 20 bp, Artificial Sequence
  Description of Artificial Sequence: Synthetic oligonucleotide
  Target: LAMA2; (+) strand; PAM type: NRG; PAM sequence: GAG
gagtcatggaacgagatcct

SEQ ID NO: 183667 - DNA, 20 bp, Artificial Sequence
  Description of Artificial Sequence: Synthetic oligonucleotide
  Target: LAMA2; (+) strand; PAM type: NRG; PAM sequence: CAG
atggaacgagatcctgagaa

SEQ ID NO: 183668 - DNA, 20 bp, Artificial Sequence
  Description of Artificial Sequence: Synthetic oligonucleotide
  Target: LAMA2; (+) strand; PAM type: NRG; PAM sequence: TAG
tcctgagaacagcgtttgct

SEQ ID NO: 183669 - DNA, 20 bp, Artificial Sequence
  Description of Artificial Sequence: Synthetic oligonucleotide
  Target: LAMA2; (+) strand; PAM type: NRG; PAM sequence: TAG
agaacagcgtttgcttagtg

SEQ ID NO: 183670 - DNA, 20 bp, Artificial Sequence
  Description of Artificial Sequence: Synthetic oligonucleotide
  Target: LAMA2; (+) strand; PAM type: NRG; PAM sequence: AAG
ttgcttagtgtagaattcct

SEQ ID NO: 183671 - DNA, 20 bp, Artificial Sequence
  Description of Artificial Sequence: Synthetic oligonucleotide
  Target: LAMA2; (+) strand; PAM type: NRG; PAM sequence: TGG
aattcctaagcatccaattt

SEQ ID NO: 183672 - DNA, 20 bp, Artificial Sequence
  Description of Artificial Sequence: Synthetic oligonucleotide
  Target: LAMA2; (+) strand; PAM type: NRG; PAM sequence: AAG
tccaattttggctcccttaa

SEQ ID NO: 183673 - DNA, 20 bp, Artificial Sequence
  Description of Artificial Sequence: Synthetic oligonucleotide
  Target: LAMA2; (+) strand; PAM type: NRG; PAM sequence: TGG
tttggctcccttaaaagcta

SEQ ID NO: 183674 - DNA, 20 bp, Artificial Sequence
  Description of Artificial Sequence: Synthetic oligonucleotide
  Target: LAMA2; (+) strand; PAM type: NRG; PAM sequence: GAG
ctcccttaaaagctatggtt

SEQ ID NO: 183675 - DNA, 20 bp, Artificial Sequence
  Description of Artificial Sequence: Synthetic oligonucleotide
  Target: LAMA2; (+) strand; PAM type: NRG; PAM sequence: GAG
cccttaaaagctatggttga

SEQ ID NO: 183676 - DNA, 20 bp, Artificial Sequence
  Description of Artificial Sequence: Synthetic oligonucleotide
  Target: LAMA2; (+) strand; PAM type: NRG; PAM sequence: AGG
ccttaaaagctatggttgag

SEQ ID NO: 183677 - DNA, 20 bp, Artificial Sequence
  Description of Artificial Sequence: Synthetic oligonucleotide
  Target: LAMA2; (+) strand; PAM type: NRG; PAM sequence: GGG
cttaaaagctatggttgaga

SEQ ID NO: 183678 - DNA, 20 bp, Artificial Sequence
  Description of Artificial Sequence: Synthetic oligonucleotide
  Target: LAMA2; (+) strand; PAM type: NRG; PAM sequence: GGG
ttaaaagctatggttgagag

SEQ ID NO: 183679 - DNA, 20 bp, Artificial Sequence
  Description of Artificial Sequence: Synthetic oligonucleotide
  Target: LAMA2; (+) strand; PAM type: NRG; PAM sequence: AAG
agctatggttgagaggggtg

SEQ ID NO: 183680 - DNA, 20 bp, Artificial Sequence
  Description of Artificial Sequence: Synthetic oligonucleotide
  Target: LAMA2; (+) strand; PAM type: NRG; PAM sequence: AGG
gctatggttgagaggggtga

SEQ ID NO: 183681 - DNA, 20 bp, Artificial Sequence
  Description of Artificial Sequence: Synthetic oligonucleotide
  Target: LAMA2; (+) strand; PAM type: NRG; PAM sequence: GGG
ctatggttgagaggggtgaa

SEQ ID NO: 183682 - DNA, 20 bp, Artificial Sequence
  Description of Artificial Sequence: Synthetic oligonucleotide
  Target: LAMA2; (+) strand; PAM type: NRG; PAM sequence: TGG
tggttgagaggggtgaaggg

SEQ ID NO: 183683 - DNA, 20 bp, Artificial Sequence
  Description of Artificial Sequence: Synthetic oligonucleotide
  Target: LAMA2; (+) strand; PAM type: NRG; PAM sequence: CAG
ttgagaggggtgaagggtgg

SEQ ID NO: 183684 - DNA, 20 bp, Artificial Sequence
  Description of Artificial Sequence: Synthetic oligonucleotide
  Target: LAMA2; (+) strand; PAM type: NRG; PAM sequence: AGG
tgagaggggtgaagggtggc

SEQ ID NO: 183685 - DNA, 20 bp, Artificial Sequence
  Description of Artificial Sequence: Synthetic oligonucleotide
  Target: LAMA2; (+) strand; PAM type: NRG; PAM sequence: AAG
aggggtgaagggtggcagga

SEQ ID NO: 183686 - DNA, 20 bp, Artificial Sequence
  Description of Artificial Sequence: Synthetic oligonucleotide
  Target: LAMA2; (+) strand; PAM type: NRG; PAM sequence: CAG
gatttccaactgtattgaat

SEQ ID NO: 183687 - DNA, 20 bp, Artificial Sequence
  Description of Artificial Sequence: Synthetic oligonucleotide
  Target: LAMA2; (+) strand; PAM type: NRG; PAM sequence: CAG
gtttatttttaatattttat

SEQ ID NO: 183688 - DNA, 20 bp, Artificial Sequence
  Description of Artificial Sequence: Synthetic oligonucleotide
  Target: LAMA2; (+) strand; PAM type: NRG; PAM sequence: CAG
atattttatcagcatcttta

SEQ ID NO: 183689 - DNA, 20 bp, Artificial Sequence
  Description of Artificial Sequence: Synthetic oligonucleotide
  Target: LAMA2; (+) strand; PAM type: NRG; PAM sequence: AAG
tatcagcatctttacagttc

SEQ ID NO: 183690 - DNA, 20 bp, Artificial Sequence
  Description of Artificial Sequence: Synthetic oligonucleotide
  Target: LAMA2; (+) strand; PAM type: NRG; PAM sequence: TGG
cagcatctttacagttcaag

SEQ ID NO: 183691 - DNA, 20 bp, Artificial Sequence
  Description of Artificial Sequence: Synthetic oligonucleotide
  Target: LAMA2; (+) strand; PAM type: NRG; PAM sequence: CAG
acagttcaagtggatgaaaa

SEQ ID NO: 183692 - DNA, 20 bp, Artificial Sequence
  Description of Artificial Sequence: Synthetic oligonucleotide
  Target: LAMA2; (+) strand; PAM type: NRG; PAM sequence: AAG
gttcaagtggatgaaaacag

SEQ ID NO: 183693 - DNA, 20 bp, Artificial Sequence
  Description of Artificial Sequence: Synthetic oligonucleotide
  Target: LAMA2; (+) strand; PAM type: NRG; PAM sequence: CAG
aagatacatgcaaaacctga

SEQ ID NO: 183694 - DNA, 20 bp, Artificial Sequence
  Description of Artificial Sequence: Synthetic oligonucleotide
  Target: LAMA2; (+) strand; PAM type: NRG; PAM sequence: CAG
tgcaaaacctgacagttgaa

SEQ ID NO: 183695 - DNA, 20 bp, Artificial Sequence
  Description of Artificial Sequence: Synthetic oligonucleotide
  Target: LAMA2; (+) strand; PAM type: NRG; PAM sequence: AAG
gacagttgaacagcctatcg

SEQ ID NO: 183696 - DNA, 20 bp, Artificial Sequence
  Description of Artificial Sequence: Synthetic oligonucleotide
  Target: LAMA2; (+) strand; PAM type: NRG; PAM sequence: AAG
aacagcctatcgaagttaaa

SEQ ID NO: 183697 - DNA, 20 bp, Artificial Sequence
  Description of Artificial Sequence: Synthetic oligonucleotide
  Target: LAMA2; (+) strand; PAM type: NRG; PAM sequence: TGG
gaagttaaaaagcttttcgt

SEQ ID NO: 183698 - DNA, 20 bp, Artificial Sequence
  Description of Artificial Sequence: Synthetic oligonucleotide
  Target: LAMA2; (+) strand; PAM type: NRG; PAM sequence: GGG
aagttaaaaagcttttcgtt

SEQ ID NO: 183699 - DNA, 20 bp, Artificial Sequence
  Description of Artificial Sequence: Synthetic oligonucleotide
  Target: LAMA2; (+) strand; PAM type: NRG; PAM sequence: GGG
agttaaaaagcttttcgttg

SEQ ID NO: 183700 - DNA, 20 bp, Artificial Sequence
  Description of Artificial Sequence: Synthetic oligonucleotide
  Target: LAMA2; (+) strand; PAM type: NRG; PAM sequence: GGG
gttaaaaagcttttcgttgg

SEQ ID NO: 183701 - DNA, 20 bp, Artificial Sequence
  Description of Artificial Sequence: Synthetic oligonucleotide
  Target: LAMA2; (+) strand; PAM type: NRG; PAM sequence: CAG
gaatttcaaccttccccact

SEQ ID NO: 183702 - DNA, 20 bp, Artificial Sequence
  Description of Artificial Sequence: Synthetic oligonucleotide
  Target: LAMA2; (+) strand; PAM type: NRG; PAM sequence: AAG
cagaaatattcctccttttg

SEQ ID NO: 183703 - DNA, 20 bp, Artificial Sequence
  Description of Artificial Sequence: Synthetic oligonucleotide
  Target: LAMA2; (+) strand; PAM type: NRG; PAM sequence: AGG
agaaatattcctccttttga

SEQ ID NO: 183704 - DNA, 20 bp, Artificial Sequence
  Description of Artificial Sequence: Synthetic oligonucleotide
  Target: LAMA2; (+) strand; PAM type: NRG; PAM sequence: TGG
ctccttttgaaggctgcata

SEQ ID NO: 183705 - DNA, 20 bp, Artificial Sequence
  Description of Artificial Sequence: Synthetic oligonucleotide
  Target: LAMA2; (+) strand; PAM type: NRG; PAM sequence: AAG
tcttgttattaactctgtgt

SEQ ID NO: 183706 - DNA, 20 bp, Artificial Sequence
  Description of Artificial Sequence: Synthetic oligonucleotide
  Target: LAMA2; (+) strand; PAM type: NRG; PAM sequence: TGG
tgttattaactctgtgtaag

SEQ ID NO: 183707 - DNA, 20 bp, Artificial Sequence
  Description of Artificial Sequence: Synthetic oligonucleotide
  Target: LAMA2; (+) strand; PAM type: NRG; PAM sequence: TAG
ttatttttatttcttgctat

SEQ ID NO: 183708 - DNA, 20 bp, Artificial Sequence
  Description of Artificial Sequence: Synthetic oligonucleotide
  Target: LAMA2; (+) strand; PAM type: NRG; PAM sequence: AGG
tatttttatttcttgctatt

SEQ ID NO: 183709 - DNA, 20 bp, Artificial Sequence
  Description of Artificial Sequence: Synthetic oligonucleotide
  Target: LAMA2; (+) strand; PAM type: NRG; PAM sequence: GGG
atttttatttcttgctatta

SEQ ID NO: 183710 - DNA, 20 bp, Artificial Sequence
  Description of Artificial Sequence: Synthetic oligonucleotide
  Target: LAMA2; (+) strand; PAM type: NRG; PAM sequence: GGG
tttttatttcttgctattag

SEQ ID NO: 183711 - DNA, 20 bp, Artificial Sequence
  Description of Artificial Sequence: Synthetic oligonucleotide
  Target: LAMA2; (+) strand; PAM type: NRG; PAM sequence: CAG
caatgcatctacattgtcta

SEQ ID NO: 183712 - DNA, 20 bp, Artificial Sequence
  Description of Artificial Sequence: Synthetic oligonucleotide
  Target: LAMA2; (+) strand; PAM type: NRG; PAM sequence: CAG
ctacattgtctacagctatg

SEQ ID NO: 183713 - DNA, 20 bp, Artificial Sequence
  Description of Artificial Sequence: Synthetic oligonucleotide
  Target: LAMA2; (+) strand; PAM type: NRG; PAM sequence: AGG
tacattgtctacagctatgc

SEQ ID NO: 183714 - DNA, 20 bp, Artificial Sequence
  Description of Artificial Sequence: Synthetic oligonucleotide
  Target: LAMA2; (+) strand; PAM type: NRG; PAM sequence: GGG
acattgtctacagctatgca

SEQ ID NO: 183715 - DNA, 20 bp, Artificial Sequence
  Description of Artificial Sequence: Synthetic oligonucleotide
  Target: LAMA2; (+) strand; PAM type: NRG; PAM sequence: GGG
cattgtctacagctatgcag

SEQ ID NO: 183716 - DNA, 20 bp, Artificial Sequence
  Description of Artificial Sequence: Synthetic oligonucleotide
  Target: LAMA2; (+) strand; PAM type: NRG; PAM sequence: GAG
ttgtctacagctatgcaggg

SEQ ID NO: 183717 - DNA, 20 bp, Artificial Sequence
  Description of Artificial Sequence: Synthetic oligonucleotide
  Target: LAMA2; (+) strand; PAM type: NRG; PAM sequence: AGG
tgtctacagctatgcagggg

SEQ ID NO: 183718 - DNA, 20 bp, Artificial Sequence
  Description of Artificial Sequence: Synthetic oligonucleotide
  Target: LAMA2; (+) strand; PAM type: NRG; PAM sequence: GAG
tctacagctatgcaggggag

SEQ ID NO: 183719 - DNA, 20 bp, Artificial Sequence
  Description of Artificial Sequence: Synthetic oligonucleotide
  Target: LAMA2; (+) strand; PAM type: NRG; PAM sequence: AGG
ctacagctatgcaggggagg

SEQ ID NO: 183720 - DNA, 20 bp, Artificial Sequence
  Description of Artificial Sequence: Synthetic oligonucleotide
  Target: LAMA2; (+) strand; PAM type: NRG; PAM sequence: GGG
tacagctatgcaggggagga

SEQ ID NO: 183721 - DNA, 20 bp, Artificial Sequence
  Description of Artificial Sequence: Synthetic oligonucleotide
  Target: LAMA2; (+) strand; PAM type: NRG; PAM sequence: GAG
caggggaggagggaaacaat

SEQ ID NO: 183722 - DNA, 20 bp, Artificial Sequence
  Description of Artificial Sequence: Synthetic oligonucleotide
  Target: LAMA2; (+) strand; PAM type: NRG; PAM sequence: AGG
aggggaggagggaaacaatg

SEQ ID NO: 183723 - DNA, 20 bp, Artificial Sequence
  Description of Artificial Sequence: Synthetic oligonucleotide
  Target: LAMA2; (+) strand; PAM type: NRG; PAM sequence: TAG
aacaatgaggatcttcaact

SEQ ID NO: 183724 - DNA, 20 bp, Artificial Sequence
  Description of Artificial Sequence: Synthetic oligonucleotide
  Target: LAMA2; (+) strand; PAM type: NRG; PAM sequence: GAG
gaggatcttcaacttagact

SEQ ID NO: 183725 - DNA, 20 bp, Artificial Sequence
  Description of Artificial Sequence: Synthetic oligonucleotide
  Target: LAMA2; (+) strand; PAM type: NRG; PAM sequence: AAG
tcttcaacttagactgagaa

SEQ ID NO: 183726 - DNA, 20 bp, Artificial Sequence
  Description of Artificial Sequence: Synthetic oligonucleotide
  Target: LAMA2; (+) strand; PAM type: NRG; PAM sequence: TGG
gactgagaaaagcacactaa

SEQ ID NO: 183727 - DNA, 20 bp, Artificial Sequence
  Description of Artificial Sequence: Synthetic oligonucleotide
  Target: LAMA2; (+) strand; PAM type: NRG; PAM sequence: AAG
agcacactaatggacttaaa

SEQ ID NO: 183728 - DNA, 20 bp, Artificial Sequence
  Description of Artificial Sequence: Synthetic oligonucleotide
  Target: LAMA2; (+) strand; PAM type: NRG; PAM sequence: AGG
gcacactaatggacttaaaa

SEQ ID NO: 183729 - DNA, 20 bp, Artificial Sequence
  Description of Artificial Sequence: Synthetic oligonucleotide
  Target: LAMA2; (+) strand; PAM type: NRG; PAM sequence: CGG
aatggacttaaaaaggcatg

SEQ ID NO: 183730 - DNA, 20 bp, Artificial Sequence
  Description of Artificial Sequence: Synthetic oligonucleotide
  Target: LAMA2; (+) strand; PAM type: NRG; PAM sequence: GGG
atggacttaaaaaggcatgc

SEQ ID NO: 183731 - DNA, 20 bp, Artificial Sequence
  Description of Artificial Sequence: Synthetic oligonucleotide
  Target: LAMA2; (+) strand; PAM type: NRG; PAM sequence: GGG
tggacttaaaaaggcatgcg

SEQ ID NO: 183732 - DNA, 20 bp, Artificial Sequence
  Description of Artificial Sequence: Synthetic oligonucleotide
  Target: LAMA2; (+) strand; PAM type: NRG; PAM sequence: TGG
ttaaaaaggcatgcggggat

SEQ ID NO: 183733 - DNA, 20 bp, Artificial Sequence
  Description of Artificial Sequence: Synthetic oligonucleotide
  Target: LAMA2; (+) strand; PAM type: NRG; PAM sequence: GGG
taaaaaggcatgcggggatt

SEQ ID NO: 183734 - DNA, 20 bp, Artificial Sequence
  Description of Artificial Sequence: Synthetic oligonucleotide
  Target: LAMA2; (+) strand; PAM type: NRG; PAM sequence: AAG
cggggattgggcttaattgt

SEQ ID NO: 183735 - DNA, 20 bp, Artificial Sequence
  Description of Artificial Sequence: Synthetic oligonucleotide
  Target: LAMA2; (+) strand; PAM type: NRG; PAM sequence: AGG
ggggattgggcttaattgta

SEQ ID NO: 183736 - DNA, 20 bp, Artificial Sequence
  Description of Artificial Sequence: Synthetic oligonucleotide
  Target: LAMA2; (+) strand; PAM type: NRG; PAM sequence: AAG
gattgggcttaattgtaagg

SEQ ID NO: 183737 - DNA, 20 bp, Artificial Sequence
  Description of Artificial Sequence: Synthetic oligonucleotide
  Target: LAMA2; (+) strand; PAM type: NRG; PAM sequence: TAG
tcttatttattacattctat

SEQ ID NO: 183738 - DNA, 20 bp, Artificial Sequence
  Description of Artificial Sequence: Synthetic oligonucleotide
  Target: LAMA2; (+) strand; PAM type: NRG; PAM sequence: TGG
attacattctattagcccca

SEQ ID NO: 183739 - DNA, 20 bp, Artificial Sequence
  Description of Artificial Sequence: Synthetic oligonucleotide
  Target: LAMA2; (+) strand; PAM type: NRG; PAM sequence: AAG
attagccccatggactttgc

SEQ ID NO: 183740 - DNA, 20 bp, Artificial Sequence
  Description of Artificial Sequence: Synthetic oligonucleotide
  Target: LAMA2; (+) strand; PAM type: NRG; PAM sequence: AGG
ttagccccatggactttgca

SEQ ID NO: 183741 - DNA, 20 bp, Artificial Sequence
  Description of Artificial Sequence: Synthetic oligonucleotide
  Target: LAMA2; (+) strand; PAM type: NRG; PAM sequence: TGG
tccttcaaaaatgctgacat

SEQ ID NO: 183742 - DNA, 20 bp, Artificial Sequence
  Description of Artificial Sequence: Synthetic oligonucleotide
  Target: LAMA2; (+) strand; PAM type: NRG; PAM sequence: CAG
acattggtcgctgtgcccat

SEQ ID NO: 183743 - DNA, 20 bp, Artificial Sequence
  Description of Artificial Sequence: Synthetic oligonucleotide
  Target: LAMA2; (+) strand; PAM type: NRG; PAM sequence: AAG
tgcccatcagaaactccgtg

SEQ ID NO: 183744 - DNA, 20 bp, Artificial Sequence
  Description of Artificial Sequence: Synthetic oligonucleotide
  Target: LAMA2; (+) strand; PAM type: NRG; PAM sequence: AAG
tcagaaactccgtgaagatg

SEQ ID NO: 183745 - DNA, 20 bp, Artificial Sequence
  Description of Artificial Sequence: Synthetic oligonucleotide
  Target: LAMA2; (+) strand; PAM type: NRG; PAM sequence: TGG
aaactccgtgaagatgaaga

SEQ ID NO: 183746 - DNA, 20 bp, Artificial Sequence
  Description of Artificial Sequence: Synthetic oligonucleotide
  Target: LAMA2; (+) strand; PAM type: NRG; PAM sequence: GAG
actccgtgaagatgaagatg

SEQ ID NO: 183747 - DNA, 20 bp, Artificial Sequence
  Description of Artificial Sequence: Synthetic oligonucleotide
  Target: LAMA2; (+) strand; PAM type: NRG; PAM sequence: CAG
ccgtgaagatgaagatggag

SEQ ID NO: 183748 - DNA, 20 bp, Artificial Sequence
  Description of Artificial Sequence: Synthetic oligonucleotide
  Target: LAMA2; (+) strand; PAM type: NRG; PAM sequence: CAG
agatgaagatggagcagctc

SEQ ID NO: 183749 - DNA, 20 bp, Artificial Sequence
  Description of Artificial Sequence: Synthetic oligonucleotide
  Target: LAMA2; (+) strand; PAM type: NRG; PAM sequence: TAG
tggagcagctccagctgaaa

SEQ ID NO: 183750 - DNA, 20 bp, Artificial Sequence
  Description of Artificial Sequence: Synthetic oligonucleotide
  Target: LAMA2; (+) strand; PAM type: NRG; PAM sequence: CAG
ctccagctgaaatagttatc

SEQ ID NO: 183751 - DNA, 20 bp, Artificial Sequence
  Description of Artificial Sequence: Synthetic oligonucleotide
  Target: LAMA2; (+) strand; PAM type: NRG; PAM sequence: GAG
ctgaaatagttatccagcct

SEQ ID NO: 183752 - DNA, 20 bp, Artificial Sequence
  Description of Artificial Sequence: Synthetic oligonucleotide
  Target: LAMA2; (+) strand; PAM type: NRG; PAM sequence: CAG
aatagttatccagcctgagc

SEQ ID NO: 183753 - DNA, 20 bp, Artificial Sequence
  Description of Artificial Sequence: Synthetic oligonucleotide
  Target: LAMA2; (+) strand; PAM type: NRG; PAM sequence: CAG
gcctgagccagttcccaccc

SEQ ID NO: 183754 - DNA, 20 bp, Artificial Sequence
  Description of Artificial Sequence: Synthetic oligonucleotide
  Target: LAMA2; (+) strand; PAM type: NRG; PAM sequence: CAG
agcctttcctacgcccaccc

SEQ ID NO: 183755 - DNA, 20 bp, Artificial Sequence
  Description of Artificial Sequence: Synthetic oligonucleotide
  Target: LAMA2; (+) strand; PAM type: NRG; PAM sequence: AAG
accccagttctgacacatgt

SEQ ID NO: 183756 - DNA, 20 bp, Artificial Sequence
  Description of Artificial Sequence: Synthetic oligonucleotide
  Target: LAMA2; (+) strand; PAM type: NRG; PAM sequence: CAG
attgctttctaatttttacc

SEQ ID NO: 183757 - DNA, 20 bp, Artificial Sequence
  Description of Artificial Sequence: Synthetic oligonucleotide
  Target: LAMA2; (+) strand; PAM type: NRG; PAM sequence: GAG
taatttttacccagtattct

SEQ ID NO: 183758 - DNA, 20 bp, Artificial Sequence
  Description of Artificial Sequence: Synthetic oligonucleotide
  Target: LAMA2; (+) strand; PAM type: NRG; PAM sequence: CAG
cccagtattctgagtcattt

SEQ ID NO: 183759 - DNA, 20 bp, Artificial Sequence
  Description of Artificial Sequence: Synthetic oligonucleotide
  Target: LAMA2; (+) strand; PAM type: NRG; PAM sequence: AAG
agtattctgagtcatttcag

SEQ ID NO: 183760 - DNA, 20 bp, Artificial Sequence
  Description of Artificial Sequence: Synthetic oligonucleotide
  Target: LAMA2; (+) strand; PAM type: NRG; PAM sequence: AGG
gtattctgagtcatttcaga

SEQ ID NO: 183761 - DNA, 20 bp, Artificial Sequence
  Description of Artificial Sequence: Synthetic oligonucleotide
  Target: LAMA2; (+) strand; PAM type: NRG; PAM sequence: AAG
ttctgagtcatttcagaagg

SEQ ID NO: 183762 - DNA, 20 bp, Artificial Sequence
  Description of Artificial Sequence: Synthetic oligonucleotide
  Target: LAMA2; (+) strand; PAM type: NRG; PAM sequence: CAG
atttcagaaggaagattatt

SEQ ID NO: 183763 - DNA, 20 bp, Artificial Sequence
  Description of Artificial Sequence: Synthetic oligonucleotide
  Target: LAMA2; (+) strand; PAM type: NRG; PAM sequence: AGG
tttcagaaggaagattattc

SEQ ID NO: 183764 - DNA, 20 bp, Artificial Sequence
  Description of Artificial Sequence: Synthetic oligonucleotide
  Target: LAMA2; (+) strand; PAM type: NRG; PAM sequence: TAG
ggaagattattcaggatatc

SEQ ID NO: 183765 - DNA, 20 bp, Artificial Sequence
  Description of Artificial Sequence: Synthetic oligonucleotide
  Target: LAMA2; (+) strand; PAM type: NRG; PAM sequence: TAG
tatctagtacactctgatat

SEQ ID NO: 183766 - DNA, 20 bp, Artificial Sequence
  Description of Artificial Sequence: Synthetic oligonucleotide
  Target: LAMA2; (+) strand; PAM type: NRG; PAM sequence: AAG
cactctgatattagaattga

SEQ ID NO: 183767 - DNA, 20 bp, Artificial Sequence
  Description of Artificial Sequence: Synthetic oligonucleotide
  Target: LAMA2; (+) strand; PAM type: NRG; PAM sequence: CAG
cttcaattttgtttacaaaa

SEQ ID NO: 183768 - DNA, 20 bp, Artificial Sequence
  Description of Artificial Sequence: Synthetic oligonucleotide
  Target: LAMA2; (+) strand; PAM type: NRG; PAM sequence: CAG
tttacaaaacagtacatttt

SEQ ID NO: 183769 - DNA, 20 bp, Artificial Sequence
  Description of Artificial Sequence: Synthetic oligonucleotide
  Target: LAMA2; (+) strand; PAM type: NRG; PAM sequence: TGG
tacattttcagttgaaatgt

SEQ ID NO: 183770 - DNA, 20 bp, Artificial Sequence
  Description of Artificial Sequence: Synthetic oligonucleotide
  Target: LAMA2; (+) strand; PAM type: NRG; PAM sequence: CAG
agttgaaatgttggaaaaca

SEQ ID NO: 183771 - DNA, 20 bp, Artificial Sequence
  Description of Artificial Sequence: Synthetic oligonucleotide
  Target: LAMA2; (+) strand; PAM type: NRG; PAM sequence: CAG
ttggaaaacacagaaatatc

SEQ ID NO: 183772 - DNA, 20 bp, Artificial Sequence
  Description of Artificial Sequence: Synthetic oligonucleotide
  Target: LAMA2; (+) strand; PAM type: NRG; PAM sequence: AAG
atatccagaatcatgaataa

SEQ ID NO: 183773 - DNA, 20 bp, Artificial Sequence
  Description of Artificial Sequence: Synthetic oligonucleotide
  Target: LAMA2; (+) strand; PAM type: NRG; PAM sequence: CAG
agacacttataataccatga

SEQ ID NO: 183774 - DNA, 20 bp, Artificial Sequence
  Description of Artificial Sequence: Synthetic oligonucleotide
  Target: LAMA2; (+) strand; PAM type: NRG; PAM sequence: GAG
acacttataataccatgaca

SEQ ID NO: 183775 - DNA, 20 bp, Artificial Sequence
  Description of Artificial Sequence: Synthetic oligonucleotide
  Target: LAMA2; (+) strand; PAM type: NRG; PAM sequence: AGG
cacttataataccatgacag

SEQ ID NO: 183776 - DNA, 20 bp, Artificial Sequence
  Description of Artificial Sequence: Synthetic oligonucleotide
  Target: LAMA2; (+) strand; PAM type: NRG; PAM sequence: TGG
catgacagaggcaaccatgt

SEQ ID NO: 183777 - DNA, 20 bp, Artificial Sequence
  Description of Artificial Sequence: Synthetic oligonucleotide
  Target: LAMA2; (+) strand; PAM type: NRG; PAM sequence: CAG
gaggcaaccatgttggtttc

SEQ ID NO: 183778 - DNA, 20 bp, Artificial Sequence
  Description of Artificial Sequence: Synthetic oligonucleotide
  Target: LAMA2; (+) strand; PAM type: NRG; PAM sequence: AGG
aggcaaccatgttggtttcc

SEQ ID NO: 183779 - DNA, 20 bp, Artificial Sequence
  Description of Artificial Sequence: Synthetic oligonucleotide
  Target: LAMA2; (+) strand; PAM type: NRG; PAM sequence: TAG
tccaggcccttttatctgca

SEQ ID NO: 183780 - DNA, 20 bp, Artificial Sequence
  Description of Artificial Sequence: Synthetic oligonucleotide
  Target: LAMA2; (+) strand; PAM type: NRG; PAM sequence: TAG
aggcccttttatctgcatag

SEQ ID NO: 183781 - DNA, 20 bp, Artificial Sequence
  Description of Artificial Sequence: Synthetic oligonucleotide
  Target: LAMA2; (+) strand; PAM type: NRG; PAM sequence: TGG
gtcctaccttgtatacaatt

SEQ ID NO: 183782 - DNA, 20 bp, Artificial Sequence
  Description of Artificial Sequence: Synthetic oligonucleotide
  Target: LAMA2; (+) strand; PAM type: NRG; PAM sequence: TAG
acaatttggtgtcctgtttt

SEQ ID NO: 183783 - DNA, 20 bp, Artificial Sequence
  Description of Artificial Sequence: Synthetic oligonucleotide
  Target: LAMA2; (+) strand; PAM type: NRG; PAM sequence: TAG
ggtgtcctgtttttagaaac

SEQ ID NO: 183784 - DNA, 20 bp, Artificial Sequence
  Description of Artificial Sequence: Synthetic oligonucleotide
  Target: LAMA2; (+) strand; PAM type: NRG; PAM sequence: TAG
tacaccactaaaactgtttc

SEQ ID NO: 183785 - DNA, 20 bp, Artificial Sequence
  Description of Artificial Sequence: Synthetic oligonucleotide
  Target: LAMA2; (+) strand; PAM type: NRG; PAM sequence: AGG
acaccactaaaactgtttct

SEQ ID NO: 183786 - DNA, 20 bp, Artificial Sequence
  Description of Artificial Sequence: Synthetic oligonucleotide
  Target: LAMA2; (+) strand; PAM type: NRG; PAM sequence: CAG
cactaaaactgtttctaggc

SEQ ID NO: 183787 - DNA, 20 bp, Artificial Sequence
  Description of Artificial Sequence: Synthetic oligonucleotide
  Target: LAMA2; (+) strand; PAM type: NRG; PAM sequence: AGG
actaaaactgtttctaggcc

SEQ ID NO: 183788 - DNA, 20 bp, Artificial Sequence
  Description of Artificial Sequence: Synthetic oligonucleotide
  Target: LAMA2; (+) strand; PAM type: NRG; PAM sequence: CGG
aactgtttctaggccaggcg

SEQ ID NO: 183789 - DNA, 20 bp, Artificial Sequence
  Description of Artificial Sequence: Synthetic oligonucleotide
  Target: LAMA2; (+) strand; PAM type: NRG; PAM sequence: TGG
tgtttctaggccaggcgcgg

SEQ ID NO: 183790 - DNA, 20 bp, Artificial Sequence
  Description of Artificial Sequence: Synthetic oligonucleotide
  Target: LAMA2; (+) strand; PAM type: NRG; PAM sequence: TAG
gtggctcacgcctgtaatcc

SEQ ID NO: 183791 - DNA, 20 bp, Artificial Sequence
  Description of Artificial Sequence: Synthetic oligonucleotide
  Target: LAMA2; (+) strand; PAM type: NRG; PAM sequence: TGG
cgcctgtaatcctagcactt

SEQ ID NO: 183792 - DNA, 20 bp, Artificial Sequence
  Description of Artificial Sequence: Synthetic oligonucleotide
  Target: LAMA2; (+) strand; PAM type: NRG; PAM sequence: GGG
gcctgtaatcctagcacttt

SEQ ID NO: 183793 - DNA, 20 bp, Artificial Sequence
  Description of Artificial Sequence: Synthetic oligonucleotide
  Target: LAMA2; (+) strand; PAM type: NRG; PAM sequence: GAG
ctgtaatcctagcactttgg

SEQ ID NO: 183794 - DNA, 20 bp, Artificial Sequence
  Description of Artificial Sequence: Synthetic oligonucleotide
  Target: LAMA2; (+) strand; PAM type: NRG; PAM sequence: AGG
tgtaatcctagcactttggg

SEQ ID NO: 183795 - DNA, 20 bp, Artificial Sequence
  Description of Artificial Sequence: Synthetic oligonucleotide
  Target: LAMA2; (+) strand; PAM type: NRG; PAM sequence: AAG
tcctagcactttgggaggcc

SEQ ID NO: 183796 - DNA, 20 bp, Artificial Sequence
  Description of Artificial Sequence: Synthetic oligonucleotide
  Target: LAMA2; (+) strand; PAM type: NRG; PAM sequence: AGG
cctagcactttgggaggcca

SEQ ID NO: 183797 - DNA, 20 bp, Artificial Sequence
  Description of Artificial Sequence: Synthetic oligonucleotide
  Target: LAMA2; (+) strand; PAM type: NRG; PAM sequence: CAG
agcactttgggaggccaagg

SEQ ID NO: 183798 - DNA, 20 bp, Artificial Sequence
  Description of Artificial Sequence: Synthetic oligonucleotide
  Target: LAMA2; (+) strand; PAM type: NRG; PAM sequence: AGG
gcactttgggaggccaaggc

SEQ ID NO: 183799 - DNA, 20 bp, Artificial Sequence
  Description of Artificial Sequence: Synthetic oligonucleotide
  Target: LAMA2; (+) strand; PAM type: NRG; PAM sequence: CAG
ctttgggaggccaaggcagg

SEQ ID NO: 183800 - DNA, 20 bp, Artificial Sequence
  Description of Artificial Sequence: Synthetic oligonucleotide
  Target: LAMA2; (+) strand; PAM type: NRG; PAM sequence: GAG
ccaaggcaggcagattgcct

SEQ ID NO: 183801 - DNA, 20 bp, Artificial Sequence
  Description of Artificial Sequence: Synthetic oligonucleotide
  Target: LAMA2; (+) strand; PAM type: NRG; PAM sequence: CAG
gcaggcagattgcctgagct

SEQ ID NO: 183802 - DNA, 20 bp, Artificial Sequence
  Description of Artificial Sequence: Synthetic oligonucleotide
  Target: LAMA2; (+) strand; PAM type: NRG; PAM sequence: AGG
caggcagattgcctgagctc

SEQ ID NO: 183803 - DNA, 20 bp, Artificial Sequence
  Description of Artificial Sequence: Synthetic oligonucleotide
  Target: LAMA2; (+) strand; PAM type: NRG; PAM sequence: GAG
ggcagattgcctgagctcag

SEQ ID NO: 183804 - DNA, 20 bp, Artificial Sequence
  Description of Artificial Sequence: Synthetic oligonucleotide
  Target: LAMA2; (+) strand; PAM type: NRG; PAM sequence: GAG
ttgcctgagctcaggagttc

SEQ ID NO: 183805 - DNA, 20 bp, Artificial Sequence
  Description of Artificial Sequence: Synthetic oligonucleotide
  Target: LAMA2; (+) strand; PAM type: NRG; PAM sequence: CAG
tgagctcaggagttcgagac

SEQ ID NO: 183806 - DNA, 20 bp, Artificial Sequence
  Description of Artificial Sequence: Synthetic oligonucleotide
  Target: LAMA2; (+) strand; PAM type: NRG; PAM sequence: TGG
tcaggagttcgagaccagcc

SEQ ID NO: 183807 - DNA, 20 bp, Artificial Sequence
  Description of Artificial Sequence: Synthetic oligonucleotide
  Target: LAMA2; (+) strand; PAM type: NRG; PAM sequence: GGG
caggagttcgagaccagcct

SEQ ID NO: 183808 - DNA, 20 bp, Artificial Sequence
  Description of Artificial Sequence: Synthetic oligonucleotide
  Target: LAMA2; (+) strand; PAM type: NRG; PAM sequence: CGG
gagaccagcctgggcaacca

SEQ ID NO: 183809 - DNA, 20 bp, Artificial Sequence
  Description of Artificial Sequence: Synthetic oligonucleotide
  Target: LAMA2; (+) strand; PAM type: NRG; PAM sequence: TAG
tcttctaaaatacaaaaaaa

SEQ ID NO: 183810 - DNA, 20 bp, Artificial Sequence
  Description of Artificial Sequence: Synthetic oligonucleotide
  Target: LAMA2; (+) strand; PAM type: NRG; PAM sequence: TGG
taaaatacaaaaaaatagcc

SEQ ID NO: 183811 - DNA, 20 bp, Artificial Sequence
  Description of Artificial Sequence: Synthetic oligonucleotide
  Target: LAMA2; (+) strand; PAM type: NRG; PAM sequence: TGG
tacaaaaaaatagcctggca

SEQ ID NO: 183812 - DNA, 20 bp, Artificial Sequence
  Description of Artificial Sequence: Synthetic oligonucleotide
  Target: LAMA2; (+) strand; PAM type: NRG; PAM sequence: CGG
aaaaaaatagcctggcatgg

SEQ ID NO: 183813 - DNA, 20 bp, Artificial Sequence
  Description of Artificial Sequence: Synthetic oligonucleotide
  Target: LAMA2; (+) strand; PAM type: NRG; PAM sequence: TAG
ggcatggcggtgtgcacctg

SEQ ID NO: 183814 - DNA, 20 bp, Artificial Sequence
  Description of Artificial Sequence: Synthetic oligonucleotide
  Target: LAMA2; (+) strand; PAM type: NRG; PAM sequence: CAG
gcggtgtgcacctgtagtcc

SEQ ID NO: 183815 - DNA, 20 bp, Artificial Sequence
  Description of Artificial Sequence: Synthetic oligonucleotide
  Target: LAMA2; (+) strand; PAM type: NRG; PAM sequence: CAG
cacctgtagtcccagctact

SEQ ID NO: 183816 - DNA, 20 bp, Artificial Sequence
  Description of Artificial Sequence: Synthetic oligonucleotide
  Target: LAMA2; (+) strand; PAM type: NRG; PAM sequence: TAG
ctgtagtcccagctactcag

SEQ ID NO: 183817 - DNA, 20 bp, Artificial Sequence
  Description of Artificial Sequence: Synthetic oligonucleotide
  Target: LAMA2; (+) strand; PAM type: NRG; PAM sequence: AGG
tgtagtcccagctactcagt

SEQ ID NO: 183818 - DNA, 20 bp, Artificial Sequence
  Description of Artificial Sequence: Synthetic oligonucleotide
  Target: LAMA2; (+) strand; PAM type: NRG; PAM sequence: GAG
tcccagctactcagtaggct

SEQ ID NO: 183819 - DNA, 20 bp, Artificial Sequence
  Description of Artificial Sequence: Synthetic oligonucleotide
  Target: LAMA2; (+) strand; PAM type: NRG; PAM sequence: AGG
cccagctactcagtaggctg

SEQ ID NO: 183820 - DNA, 20 bp, Artificial Sequence
  Description of Artificial Sequence: Synthetic oligonucleotide
  Target: LAMA2; (+) strand; PAM type: NRG; PAM sequence: CAG
agctactcagtaggctgagg

SEQ ID NO: 183821 - DNA, 20 bp, Artificial Sequence
  Description of Artificial Sequence: Synthetic oligonucleotide
  Target: LAMA2; (+) strand; PAM type: NRG; PAM sequence: AGG
gctactcagtaggctgaggc

SEQ ID NO: 183822 - DNA, 20 bp, Artificial Sequence
  Description of Artificial Sequence: Synthetic oligonucleotide
  Target: LAMA2; (+) strand; PAM type: NRG; PAM sequence: GAG
tactcagtaggctgaggcag

SEQ ID NO: 183823 - DNA, 20 bp, Artificial Sequence
  Description of Artificial Sequence: Synthetic oligonucleotide
  Target: LAMA2; (+) strand; PAM type: NRG; PAM sequence: CAG
gcaggagaatcgcttgaacc

SEQ ID NO: 183824 - DNA, 20 bp, Artificial Sequence
  Description of Artificial Sequence: Synthetic oligonucleotide
  Target: LAMA2; (+) strand; PAM type: NRG; PAM sequence: AGG
caggagaatcgcttgaaccc

SEQ ID NO: 183825 - DNA, 20 bp, Artificial Sequence
  Description of Artificial Sequence: Synthetic oligonucleotide
  Target: LAMA2; (+) strand; PAM type: NRG; PAM sequence: GAG
ggagaatcgcttgaacccag

SEQ ID NO: 183826 - DNA, 20 bp, Artificial Sequence
  Description of Artificial Sequence: Synthetic oligonucleotide
  Target: LAMA2; (+) strand; PAM type: NRG; PAM sequence: AGG
gagaatcgcttgaacccagg

SEQ ID NO: 183827 - DNA, 20 bp, Artificial Sequence
  Description of Artificial Sequence: Synthetic oligonucleotide
  Target: LAMA2; (+) strand; PAM type: NRG; PAM sequence: CGG
aatcgcttgaacccaggagg

SEQ ID NO: 183828 - DNA, 20 bp, Artificial Sequence
  Description of Artificial Sequence: Synthetic oligonucleotide
  Target: LAMA2; (+) strand; PAM type: NRG; PAM sequence: GAG
tcgcttgaacccaggaggcg

SEQ ID NO: 183829 - DNA, 20 bp, Artificial Sequence
  Description of Artificial Sequence: Synthetic oligonucleotide
  Target: LAMA2; (+) strand; PAM type: NRG; PAM sequence: AGG
cgcttgaacccaggaggcgg

SEQ ID NO: 183830 - DNA, 20 bp, Artificial Sequence
  Description of Artificial Sequence: Synthetic oligonucleotide
  Target: LAMA2; (+) strand; PAM type: NRG; PAM sequence: CAG
aacccaggaggcggaggttg

SEQ ID NO: 183831 - DNA, 20 bp, Artificial Sequence
  Description of Artificial Sequence: Synthetic oligonucleotide
  Target: LAMA2; (+) strand; PAM type: NRG; PAM sequence: GAG
caggaggcggaggttgcagt

SEQ ID NO: 183832 - DNA, 20 bp, Artificial Sequence
  Description of Artificial Sequence: Synthetic oligonucleotide
  Target: LAMA2; (+) strand; PAM type: NRG; PAM sequence: GAG
ggcggaggttgcagtgagcc

SEQ ID NO: 183833 - DNA, 20 bp, Artificial Sequence
  Description of Artificial Sequence: Synthetic oligonucleotide
  Target: LAMA2; (+) strand; PAM type: NRG; PAM sequence: CAG
gagatcacgccactgtactc

SEQ ID NO: 183834 - DNA, 20 bp, Artificial Sequence
  Description of Artificial Sequence: Synthetic oligonucleotide
  Target: LAMA2; (+) strand; PAM type: NRG; PAM sequence: TGG
cacgccactgtactccagcc

SEQ ID NO: 183835 - DNA, 20 bp, Artificial Sequence
  Description of Artificial Sequence: Synthetic oligonucleotide
  Target: LAMA2; (+) strand; PAM type: NRG; PAM sequence: GGG
acgccactgtactccagcct

SEQ ID NO: 183836 - DNA, 20 bp, Artificial Sequence
  Description of Artificial Sequence: Synthetic oligonucleotide
  Target: LAMA2; (+) strand; PAM type: NRG; PAM sequence: CAG
ctgtactccagcctgggcaa

SEQ ID NO: 183837 - DNA, 20 bp, Artificial Sequence
  Description of Artificial Sequence: Synthetic oligonucleotide
  Target: LAMA2; (+) strand; PAM type: NRG; PAM sequence: GAG
gtactccagcctgggcaaca

SEQ ID NO: 183838 - DNA, 20 bp, Artificial Sequence
  Description of Artificial Sequence: Synthetic oligonucleotide
  Target: LAMA2; (+) strand; PAM type: NRG; PAM sequence: GAG
tccagcctgggcaacagagc

SEQ ID NO: 183839 - DNA, 20 bp, Artificial Sequence
  Description of Artificial Sequence: Synthetic oligonucleotide
  Target: LAMA2; (+) strand; PAM type: NRG; PAM sequence: AAG
gtctaatatgattttatgtt

SEQ ID NO: 183840 - DNA, 20 bp, Artificial Sequence
  Description of Artificial Sequence: Synthetic oligonucleotide
  Target: LAMA2; (+) strand; PAM type: NRG; PAM sequence: CAG
atgttaagtatatatacaca

SEQ ID NO: 183841 - DNA, 20 bp, Artificial Sequence
  Description of Artificial Sequence: Synthetic oligonucleotide
  Target: LAMA2; (+) strand; PAM type: NRG; PAM sequence: GAG
gttaagtatatatacacaca

SEQ ID NO: 183842 - DNA, 20 bp, Artificial Sequence
  Description of Artificial Sequence: Synthetic oligonucleotide
  Target: LAMA2; (+) strand; PAM type: NRG; PAM sequence: TAG
agagacacacaactatttta

SEQ ID NO: 183843 - DNA, 20 bp, Artificial Sequence
  Description of Artificial Sequence: Synthetic oligonucleotide
  Target: LAMA2; (+) strand; PAM type: NRG; PAM sequence: TGG
acacaactattttatagtat

SEQ ID NO: 183844 - DNA, 20 bp, Artificial Sequence
  Description of Artificial Sequence: Synthetic oligonucleotide
  Target: LAMA2; (+) strand; PAM type: NRG; PAM sequence: GAG
acaactattttatagtattg

SEQ ID NO: 183845 - DNA, 20 bp, Artificial Sequence
  Description of Artificial Sequence: Synthetic oligonucleotide
  Target: LAMA2; (+) strand; PAM type: NRG; PAM sequence: AGG
caactattttatagtattgg

SEQ ID NO: 183846 - DNA, 20 bp, Artificial Sequence
  Description of Artificial Sequence: Synthetic oligonucleotide
  Target: LAMA2; (+) strand; PAM type: NRG; PAM sequence: TAG
ttatagtattggaggtcata

SEQ ID NO: 183847 - DNA, 20 bp, Artificial Sequence
  Description of Artificial Sequence: Synthetic oligonucleotide
  Target: LAMA2; (+) strand; PAM type: NRG; PAM sequence: TAG
ggaggtcatatagccttgat

SEQ ID NO: 183848 - DNA, 20 bp, Artificial Sequence
  Description of Artificial Sequence: Synthetic oligonucleotide
  Target: LAMA2; (+) strand; PAM type: NRG; PAM sequence: GAG
aggtcatatagccttgatta

SEQ ID NO: 183849 - DNA, 20 bp, Artificial Sequence
  Description of Artificial Sequence: Synthetic oligonucleotide
  Target: LAMA2; (+) strand; PAM type: NRG; PAM sequence: TGG
atatagccttgattagagca

SEQ ID NO: 183850 - DNA, 20 bp, Artificial Sequence
  Description of Artificial Sequence: Synthetic oligonucleotide
  Target: LAMA2; (+) strand; PAM type: NRG; PAM sequence: GGG
tatagccttgattagagcat

SEQ ID NO: 183851 - DNA, 20 bp, Artificial Sequence
  Description of Artificial Sequence: Synthetic oligonucleotide
  Target: LAMA2; (+) strand; PAM type: NRG; PAM sequence: AAG
cttgattagagcatgggctc

SEQ ID NO: 183852 - DNA, 20 bp, Artificial Sequence
  Description of Artificial Sequence: Synthetic oligonucleotide
  Target: LAMA2; (+) strand; PAM type: NRG; PAM sequence: CAG
attagagcatgggctcaagt

SEQ ID NO: 183853 - DNA, 20 bp, Artificial Sequence
  Description of Artificial Sequence: Synthetic oligonucleotide
  Target: LAMA2; (+) strand; PAM type: NRG; PAM sequence: TGG
atgggctcaagtcagactgc

SEQ ID NO: 183854 - DNA, 20 bp, Artificial Sequence
  Description of Artificial Sequence: Synthetic oligonucleotide
  Target: LAMA2; (+) strand; PAM type: NRG; PAM sequence: CAG
gactgctggtattcaaatcc

SEQ ID NO: 183855 - DNA, 20 bp, Artificial Sequence
  Description of Artificial Sequence: Synthetic oligonucleotide
  Target: LAMA2; (+) strand; PAM type: NRG; PAM sequence: TGG
accgaccatctgtgtgaatt

SEQ ID NO: 183856 - DNA, 20 bp, Artificial Sequence
  Description of Artificial Sequence: Synthetic oligonucleotide
  Target: LAMA2; (+) strand; PAM type: NRG; PAM sequence: GGG
ccgaccatctgtgtgaattt

SEQ ID NO: 183857 - DNA, 20 bp, Artificial Sequence
  Description of Artificial Sequence: Synthetic oligonucleotide
  Target: LAMA2; (+) strand; PAM type: NRG; PAM sequence: AAG
ccatctgtgtgaatttggga

SEQ ID NO: 183858 - DNA, 20 bp, Artificial Sequence
  Description of Artificial Sequence: Synthetic oligonucleotide
  Target: LAMA2; (+) strand; PAM type: NRG; PAM sequence: CAG
tacctgtccaatctatttct

SEQ ID NO: 183859 - DNA, 20 bp, Artificial Sequence
  Description of Artificial Sequence: Synthetic oligonucleotide
  Target: LAMA2; (+) strand; PAM type: NRG; PAM sequence: AAG
tatttctcagtttcccatcc

SEQ ID NO: 183860 - DNA, 20 bp, Artificial Sequence
  Description of Artificial Sequence: Synthetic oligonucleotide
  Target: LAMA2; (+) strand; PAM type: NRG; PAM sequence: CGG
tttcccatccaagtactaac

SEQ ID NO: 183861 - DNA, 20 bp, Artificial Sequence
  Description of Artificial Sequence: Synthetic oligonucleotide
  Target: LAMA2; (+) strand; PAM type: NRG; PAM sequence: GGG
ttcccatccaagtactaacc

SEQ ID NO: 183862 - DNA, 20 bp, Artificial Sequence
  Description of Artificial Sequence: Synthetic oligonucleotide
  Target: LAMA2; (+) strand; PAM type: NRG; PAM sequence: TAG
taaccgggcccaaccctgct

SEQ ID NO: 183863 - DNA, 20 bp, Artificial Sequence
  Description of Artificial Sequence: Synthetic oligonucleotide
  Target: LAMA2; (+) strand; PAM type: NRG; PAM sequence: GAG
cccaaccctgcttagctttt

SEQ ID NO: 183864 - DNA, 20 bp, Artificial Sequence
  Description of Artificial Sequence: Synthetic oligonucleotide
  Target: LAMA2; (+) strand; PAM type: NRG; PAM sequence: CAG
ccctgcttagcttttgagat

SEQ ID NO: 183865 - DNA, 20 bp, Artificial Sequence
  Description of Artificial Sequence: Synthetic oligonucleotide
  Target: LAMA2; (+) strand; PAM type: NRG; PAM sequence: AAG
cttagcttttgagatcagaa

SEQ ID NO: 183866 - DNA, 20 bp, Artificial Sequence
  Description of Artificial Sequence: Synthetic oligonucleotide
  Target: LAMA2; (+) strand; PAM type: NRG; PAM sequence: CGG
cttttgagatcagaaaagat

SEQ ID NO: 183867 - DNA, 20 bp, Artificial Sequence
  Description of Artificial Sequence: Synthetic oligonucleotide
  Target: LAMA2; (+) strand; PAM type: NRG; PAM sequence: CAG
cagaaaagatcggatgcttt

SEQ ID NO: 183868 - DNA, 20 bp, Artificial Sequence
  Description of Artificial Sequence: Synthetic oligonucleotide
  Target: LAMA2; (+) strand; PAM type: NRG; PAM sequence: AGG
agaaaagatcggatgctttc

SEQ ID NO: 183869 - DNA, 20 bp, Artificial Sequence
  Description of Artificial Sequence: Synthetic oligonucleotide
  Target: LAMA2; (+) strand; PAM type: NRG; PAM sequence: GGG
gaaaagatcggatgctttca

SEQ ID NO: 183870 - DNA, 20 bp, Artificial Sequence
  Description of Artificial Sequence: Synthetic oligonucleotide
  Target: LAMA2; (+) strand; PAM type: NRG; PAM sequence: TGG
cggatgctttcagggtgatt

SEQ ID NO: 183871 - DNA, 20 bp, Artificial Sequence
  Description of Artificial Sequence: Synthetic oligonucleotide
  Target: LAMA2; (+) strand; PAM type: NRG; PAM sequence: TAG
ctttcagggtgatttggcca

SEQ ID NO: 183872 - DNA, 20 bp, Artificial Sequence
  Description of Artificial Sequence: Synthetic oligonucleotide
  Target: LAMA2; (+) strand; PAM type: NRG; PAM sequence: GAG
tgtttcctcatctgtcaaat

SEQ ID NO: 183873 - DNA, 20 bp, Artificial Sequence
  Description of Artificial Sequence: Synthetic oligonucleotide
  Target: LAMA2; (+) strand; PAM type: NRG; PAM sequence: AGG
gtttcctcatctgtcaaatg

SEQ ID NO: 183874 - DNA, 20 bp, Artificial Sequence
  Description of Artificial Sequence: Synthetic oligonucleotide
  Target: LAMA2; (+) strand; PAM type: NRG; PAM sequence: CAG
ctgtcaaatgaggatattaa

SEQ ID NO: 183875 - DNA, 20 bp, Artificial Sequence
  Description of Artificial Sequence: Synthetic oligonucleotide
  Target: LAMA2; (+) strand; PAM type: NRG; PAM sequence: CAG
aaatgaggatattaacagca

SEQ ID NO: 183876 - DNA, 20 bp, Artificial Sequence
  Description of Artificial Sequence: Synthetic oligonucleotide
  Target: LAMA2; (+) strand; PAM type: NRG; PAM sequence: AAG
tattaacagcacagacatca

SEQ ID NO: 183877 - DNA, 20 bp, Artificial Sequence
  Description of Artificial Sequence: Synthetic oligonucleotide
  Target: LAMA2; (+) strand; PAM type: NRG; PAM sequence: CAG
agacatcaaagactttgtat

SEQ ID NO: 183878 - DNA, 20 bp, Artificial Sequence
  Description of Artificial Sequence: Synthetic oligonucleotide
  Target: LAMA2; (+) strand; PAM type: NRG; PAM sequence: GAG
acatcaaagactttgtatca

SEQ ID NO: 183879 - DNA, 20 bp, Artificial Sequence
  Description of Artificial Sequence: Synthetic oligonucleotide
  Target: LAMA2; (+) strand; PAM type: NRG; PAM sequence: AAG
actttgtatcagagttttaa

SEQ ID NO: 183880 - DNA, 20 bp, Artificial Sequence
  Description of Artificial Sequence: Synthetic oligonucleotide
  Target: LAMA2; (+) strand; PAM type: NRG; PAM sequence: TGG
tatactgaacgtttaataaa

SEQ ID NO: 183881 - DNA, 20 bp, Artificial Sequence
  Description of Artificial Sequence: Synthetic oligonucleotide
  Target: LAMA2; (+) strand; PAM type: NRG; PAM sequence: AAG
gaacgtttaataaatggcat

SEQ ID NO: 183882 - DNA, 20 bp, Artificial Sequence
  Description of Artificial Sequence: Synthetic oligonucleotide
  Target: LAMA2; (+) strand; PAM type: NRG; PAM sequence: TAG
taaatggcataagtactatg

SEQ ID NO: 183883 - DNA, 20 bp, Artificial Sequence
  Description of Artificial Sequence: Synthetic oligonucleotide
  Target: LAMA2; (+) strand; PAM type: NRG; PAM sequence: GAG
tatgtagtaatgataataat

SEQ ID NO: 183884 - DNA, 20 bp, Artificial Sequence
  Description of Artificial Sequence: Synthetic oligonucleotide
  Target: LAMA2; (+) strand; PAM type: NRG; PAM sequence: CAG
ataataatgagtactttcac

SEQ ID NO: 183885 - DNA, 20 bp, Artificial Sequence
  Description of Artificial Sequence: Synthetic oligonucleotide
  Target: LAMA2; (+) strand; PAM type: NRG; PAM sequence: CAG
aatgagtactttcaccagcc

SEQ ID NO: 183886 - DNA, 20 bp, Artificial Sequence
  Description of Artificial Sequence: Synthetic oligonucleotide
  Target: LAMA2; (+) strand; PAM type: NRG; PAM sequence: AGG
atgagtactttcaccagccc

SEQ ID NO: 183887 - DNA, 20 bp, Artificial Sequence
  Description of Artificial Sequence: Synthetic oligonucleotide
  Target: LAMA2; (+) strand; PAM type: NRG; PAM sequence: GGG
tgagtactttcaccagccca

SEQ ID NO: 183888 - DNA, 20 bp, Artificial Sequence
  Description of Artificial Sequence: Synthetic oligonucleotide
  Target: LAMA2; (+) strand; PAM type: NRG; PAM sequence: CGG
attatatgtaattctcataa

SEQ ID NO: 183889 - DNA, 20 bp, Artificial Sequence
  Description of Artificial Sequence: Synthetic oligonucleotide
  Target: LAMA2; (+) strand; PAM type: NRG; PAM sequence: TAG
cataacggctctgtaaaata

SEQ ID NO: 183890 - DNA, 20 bp, Artificial Sequence
  Description of Artificial Sequence: Synthetic oligonucleotide
  Target: LAMA2; (+) strand; PAM type: NRG; PAM sequence: TAG
aaatatagtctttctacttt

SEQ ID NO: 183891 - DNA, 20 bp, Artificial Sequence
  Description of Artificial Sequence: Synthetic oligonucleotide
  Target: LAMA2; (+) strand; PAM type: NRG; PAM sequence: GAG
tagtctttctacttttagtc

SEQ ID NO: 183892 - DNA, 20 bp, Artificial Sequence
  Description of Artificial Sequence: Synthetic oligonucleotide
  Target: LAMA2; (+) strand; PAM type: NRG; PAM sequence: AAG
ctacttttagtcgagttaat

SEQ ID NO: 183893 - DNA, 20 bp, Artificial Sequence
  Description of Artificial Sequence: Synthetic oligonucleotide
  Target: LAMA2; (+) strand; PAM type: NRG; PAM sequence: TAG
ttagtcgagttaataagaat

SEQ ID NO: 183894 - DNA, 20 bp, Artificial Sequence
  Description of Artificial Sequence: Synthetic oligonucleotide
  Target: LAMA2; (+) strand; PAM type: NRG; PAM sequence: AAG
taataagaattagctatctt

SEQ ID NO: 183895 - DNA, 20 bp, Artificial Sequence
  Description of Artificial Sequence: Synthetic oligonucleotide
  Target: LAMA2; (+) strand; PAM type: NRG; PAM sequence: TAG
aaccaacccactcacaccac

SEQ ID NO: 183896 - DNA, 20 bp, Artificial Sequence
  Description of Artificial Sequence: Synthetic oligonucleotide
  Target: LAMA2; (+) strand; PAM type: NRG; PAM sequence: AAG
cccactcacaccactagtaa

SEQ ID NO: 183897 - DNA, 20 bp, Artificial Sequence
  Description of Artificial Sequence: Synthetic oligonucleotide
  Target: LAMA2; (+) strand; PAM type: NRG; PAM sequence: AGG
ccactcacaccactagtaaa

SEQ ID NO: 183898 - DNA, 20 bp, Artificial Sequence
  Description of Artificial Sequence: Synthetic oligonucleotide
  Target: LAMA2; (+) strand; PAM type: NRG; PAM sequence: CAG
ctcacaccactagtaaaagg

SEQ ID NO: 183899 - DNA, 20 bp, Artificial Sequence
  Description of Artificial Sequence: Synthetic oligonucleotide
  Target: LAMA2; (+) strand; PAM type: NRG; PAM sequence: GAG
cacaccactagtaaaaggca

SEQ ID NO: 183900 - DNA, 20 bp, Artificial Sequence
  Description of Artificial Sequence: Synthetic oligonucleotide
  Target: LAMA2; (+) strand; PAM type: NRG; PAM sequence: AAG
ccactagtaaaaggcagagt

SEQ ID NO: 183901 - DNA, 20 bp, Artificial Sequence
  Description of Artificial Sequence: Synthetic oligonucleotide
  Target: LAMA2; (+) strand; PAM type: NRG; PAM sequence: TAG
gcagagtaagaattttattc

SEQ ID NO: 183902 - DNA, 20 bp, Artificial Sequence
  Description of Artificial Sequence: Synthetic oligonucleotide
  Target: LAMA2; (+) strand; PAM type: NRG; PAM sequence: GAG
agtaagaattttattctagc

SEQ ID NO: 183903 - DNA, 20 bp, Artificial Sequence
  Description of Artificial Sequence: Synthetic oligonucleotide
  Target: LAMA2; (+) strand; PAM type: NRG; PAM sequence: CAG
agaattttattctagcgagt

SEQ ID NO: 183904 - DNA, 20 bp, Artificial Sequence
  Description of Artificial Sequence: Synthetic oligonucleotide
  Target: LAMA2; (+) strand; PAM type: NRG; PAM sequence: AAG
ttctagcgagtcagactcca

SEQ ID NO: 183905 - DNA, 20 bp, Artificial Sequence
  Description of Artificial Sequence: Synthetic oligonucleotide
  Target: LAMA2; (+) strand; PAM type: NRG; PAM sequence: TGG
aaagtctgactccttatctc

SEQ ID NO: 183906 - DNA, 20 bp, Artificial Sequence
  Description of Artificial Sequence: Synthetic oligonucleotide
  Target: LAMA2; (+) strand; PAM type: NRG; PAM sequence: TAG
ccaatttattctacttttaa

SEQ ID NO: 183907 - DNA, 20 bp, Artificial Sequence
  Description of Artificial Sequence: Synthetic oligonucleotide
  Target: LAMA2; (+) strand; PAM type: NRG; PAM sequence: TGG
attctacttttaatagacca

SEQ ID NO: 183908 - DNA, 20 bp, Artificial Sequence
  Description of Artificial Sequence: Synthetic oligonucleotide
  Target: LAMA2; (+) strand; PAM type: NRG; PAM sequence: TAG
ctacttttaatagaccatgg

SEQ ID NO: 183909 - DNA, 20 bp, Artificial Sequence
  Description of Artificial Sequence: Synthetic oligonucleotide
  Target: LAMA2; (+) strand; PAM type: NRG; PAM sequence: AGG
tacttttaatagaccatggt

SEQ ID NO: 183910 - DNA, 20 bp, Artificial Sequence
  Description of Artificial Sequence: Synthetic oligonucleotide
  Target: LAMA2; (+) strand; PAM type: NRG; PAM sequence: GAG
atagaccatggtaggctatt

SEQ ID NO: 183911 - DNA, 20 bp, Artificial Sequence
  Description of Artificial Sequence: Synthetic oligonucleotide
  Target: LAMA2; (+) strand; PAM type: NRG; PAM sequence: GAG
agaccatggtaggctattga

SEQ ID NO: 183912 - DNA, 20 bp, Artificial Sequence
  Description of Artificial Sequence: Synthetic oligonucleotide
  Target: LAMA2; (+) strand; PAM type: NRG; PAM sequence: CAG
taggctattgagagtgtttc

SEQ ID NO: 183913 - DNA, 20 bp, Artificial Sequence
  Description of Artificial Sequence: Synthetic oligonucleotide
  Target: LAMA2; (+) strand; PAM type: NRG; PAM sequence: TAG
tgtttccagtttttcactat

SEQ ID NO: 183914 - DNA, 20 bp, Artificial Sequence
  Description of Artificial Sequence: Synthetic oligonucleotide
  Target: LAMA2; (+) strand; PAM type: NRG; PAM sequence: GAG
attagaaactatactctgat

SEQ ID NO: 183915 - DNA, 20 bp, Artificial Sequence
  Description of Artificial Sequence: Synthetic oligonucleotide
  Target: LAMA2; (+) strand; PAM type: NRG; PAM sequence: AAG
gatgagctcctctatgcatc

SEQ ID NO: 183916 - DNA, 20 bp, Artificial Sequence
  Description of Artificial Sequence: Synthetic oligonucleotide
  Target: LAMA2; (+) strand; PAM type: NRG; PAM sequence: CAG
tcaagctttttcattatttc

SEQ ID NO: 183917 - DNA, 20 bp, Artificial Sequence
  Description of Artificial Sequence: Synthetic oligonucleotide
  Target: LAMA2; (+) strand; PAM type: NRG; PAM sequence: TAG
atttccagttattcttaaaa

SEQ ID NO: 183918 - DNA, 20 bp, Artificial Sequence
  Description of Artificial Sequence: Synthetic oligonucleotide
  Target: LAMA2; (+) strand; PAM type: NRG; PAM sequence: AAG
cagttattcttaaaatagat

SEQ ID NO: 183919 - DNA, 20 bp, Artificial Sequence
  Description of Artificial Sequence: Synthetic oligonucleotide
  Target: LAMA2; (+) strand; PAM type: NRG; PAM sequence: TAG
ttattcttaaaatagataag

SEQ ID NO: 183920 - DNA, 20 bp, Artificial Sequence
  Description of Artificial Sequence: Synthetic oligonucleotide
  Target: LAMA2; (+) strand; PAM type: NRG; PAM sequence: TAG
tcttaaaatagataagtagt

SEQ ID NO: 183921 - DNA, 20 bp, Artificial Sequence
  Description of Artificial Sequence: Synthetic oligonucleotide
  Target: LAMA2; (+) strand; PAM type: NRG; PAM sequence: AGG
cttaaaatagataagtagtt

SEQ ID NO: 183922 - DNA, 20 bp, Artificial Sequence
  Description of Artificial Sequence: Synthetic oligonucleotide
  Target: LAMA2; (+) strand; PAM type: NRG; PAM sequence: AAG
ataagtagttaggaaattat

SEQ ID NO: 183923 - DNA, 20 bp, Artificial Sequence
  Description of Artificial Sequence: Synthetic oligonucleotide
  Target: LAMA2; (+) strand; PAM type: NRG; PAM sequence: AGG
taagtagttaggaaattata

SEQ ID NO: 183924 - DNA, 20 bp, Artificial Sequence
  Description of Artificial Sequence: Synthetic oligonucleotide
  Target: LAMA2; (+) strand; PAM type: NRG; PAM sequence: AAG
ttaggaaattataaggccaa

SEQ ID NO: 183925 - DNA, 20 bp, Artificial Sequence
  Description of Artificial Sequence: Synthetic oligonucleotide
  Target: LAMA2; (+) strand; PAM type: NRG; PAM sequence: AAG
gccaaaagatgaatatgtct

SEQ ID NO: 183926 - DNA, 20 bp, Artificial Sequence
  Description of Artificial Sequence: Synthetic oligonucleotide
  Target: LAMA2; (+) strand; PAM type: NRG; PAM sequence: AGG
ccaaaagatgaatatgtcta

SEQ ID NO: 183927 - DNA, 20 bp, Artificial Sequence
  Description of Artificial Sequence: Synthetic oligonucleotide
  Target: LAMA2; (+) strand; PAM type: NRG; PAM sequence: CAG
tacctgaattgtttcttcca

SEQ ID NO: 183928 - DNA, 20 bp, Artificial Sequence
  Description of Artificial Sequence: Synthetic oligonucleotide
  Target: LAMA2; (+) strand; PAM type: NRG; PAM sequence: AGG
acctgaattgtttcttccac

SEQ ID NO: 183929 - DNA, 20 bp, Artificial Sequence
  Description of Artificial Sequence: Synthetic oligonucleotide
  Target: LAMA2; (+) strand; PAM type: NRG; PAM sequence: AAG
ttcttatcaccaatacaaca

SEQ ID NO: 183930 - DNA, 20 bp, Artificial Sequence
  Description of Artificial Sequence: Synthetic oligonucleotide
  Target: LAMA2; (+) strand; PAM type: NRG; PAM sequence: TGG
tatcaccaatacaacaaaga

SEQ ID NO: 183931 - DNA, 20 bp, Artificial Sequence
  Description of Artificial Sequence: Synthetic oligonucleotide
  Target: LAMA2; (+) strand; PAM type: NRG; PAM sequence: CAG
caatacaacaaagatggtca

SEQ ID NO: 183932 - DNA, 20 bp, Artificial Sequence
  Description of Artificial Sequence: Synthetic oligonucleotide
  Target: LAMA2; (+) strand; PAM type: NRG; PAM sequence: CAG
cacagtcactacactcttta

SEQ ID NO: 183933 - DNA, 20 bp, Artificial Sequence
  Description of Artificial Sequence: Synthetic oligonucleotide
  Target: LAMA2; (+) strand; PAM type: NRG; PAM sequence: TGG
tctttacagctcatgtgttg

SEQ ID NO: 183934 - DNA, 20 bp, Artificial Sequence
  Description of Artificial Sequence: Synthetic oligonucleotide
  Target: LAMA2; (+) strand; PAM type: NRG; PAM sequence: CAG
gttgtggttatattccatac

SEQ ID NO: 183935 - DNA, 20 bp, Artificial Sequence
  Description of Artificial Sequence: Synthetic oligonucleotide
  Target: LAMA2; (+) strand; PAM type: NRG; PAM sequence: TGG
gttatattccataccagtaa

SEQ ID NO: 183936 - DNA, 20 bp, Artificial Sequence
  Description of Artificial Sequence: Synthetic oligonucleotide
  Target: LAMA2; (+) strand; PAM type: NRG; PAM sequence: GGG
ttatattccataccagtaat

SEQ ID NO: 183937 - DNA, 20 bp, Artificial Sequence
  Description of Artificial Sequence: Synthetic oligonucleotide
  Target: LAMA2; (+) strand; PAM type: NRG; PAM sequence: TGG
tattccataccagtaatggg

SEQ ID NO: 183938 - DNA, 20 bp, Artificial Sequence
  Description of Artificial Sequence: Synthetic oligonucleotide
  Target: LAMA2; (+) strand; PAM type: NRG; PAM sequence: GGG
attccataccagtaatgggt

SEQ ID NO: 183939 - DNA, 20 bp, Artificial Sequence
  Description of Artificial Sequence: Synthetic oligonucleotide
  Target: LAMA2; (+) strand; PAM type: NRG; PAM sequence: GAG
tgggtgggcaatgttgtctt

SEQ ID NO: 183940 - DNA, 20 bp, Artificial Sequence
  Description of Artificial Sequence: Synthetic oligonucleotide
  Target: LAMA2; (+) strand; PAM type: NRG; PAM sequence: CAG
gggcaatgttgtcttgagtg

SEQ ID NO: 183941 - DNA, 20 bp, Artificial Sequence
  Description of Artificial Sequence: Synthetic oligonucleotide
  Target: LAMA2; (+) strand; PAM type: NRG; PAM sequence: TAG
gaatatctcattctcttcct

SEQ ID NO: 183942 - DNA, 20 bp, Artificial Sequence
  Description of Artificial Sequence: Synthetic oligonucleotide
  Target: LAMA2; (+) strand; PAM type: NRG; PAM sequence: TGG
ctcttccttagtgtccacga

SEQ ID NO: 183943 - DNA, 20 bp, Artificial Sequence
  Description of Artificial Sequence: Synthetic oligonucleotide
  Target: LAMA2; (+) strand; PAM type: NRG; PAM sequence: TGG
cttagtgtccacgatggaat

SEQ ID NO: 183944 - DNA, 20 bp, Artificial Sequence
  Description of Artificial Sequence: Synthetic oligonucleotide
  Target: LAMA2; (+) strand; PAM type: NRG; PAM sequence: GAG
tgtccacgatggaattggtt

SEQ ID NO: 183945 - DNA, 20 bp, Artificial Sequence
  Description of Artificial Sequence: Synthetic oligonucleotide
  Target: LAMA2; (+) strand; PAM type: NRG; PAM sequence: TAG
gagcaatgtgctccttgcac

SEQ ID NO: 183946 - DNA, 20 bp, Artificial Sequence
  Description of Artificial Sequence: Synthetic oligonucleotide
  Target: LAMA2; (+) strand; PAM type: NRG; PAM sequence: TAG
tgtgctccttgcactagaaa

SEQ ID NO: 183947 - DNA, 20 bp, Artificial Sequence
  Description of Artificial Sequence: Synthetic oligonucleotide
  Target: LAMA2; (+) strand; PAM type: NRG; PAM sequence: GAG
actagaaatagttattcaat

SEQ ID NO: 183948 - DNA, 20 bp, Artificial Sequence
  Description of Artificial Sequence: Synthetic oligonucleotide
  Target: LAMA2; (+) strand; PAM type: NRG; PAM sequence: GAG
tagaaatagttattcaatga

SEQ ID NO: 183949 - DNA, 20 bp, Artificial Sequence
  Description of Artificial Sequence: Synthetic oligonucleotide
  Target: LAMA2; (+) strand; PAM type: NRG; PAM sequence: AGG
agaaatagttattcaatgag

SEQ ID NO: 183950 - DNA, 20 bp, Artificial Sequence
  Description of Artificial Sequence: Synthetic oligonucleotide
  Target: LAMA2; (+) strand; PAM type: NRG; PAM sequence: CAG
atagttattcaatgagaggc

SEQ ID NO: 183951 - DNA, 20 bp, Artificial Sequence
  Description of Artificial Sequence: Synthetic oligonucleotide
  Target: LAMA2; (+) strand; PAM type: NRG; PAM sequence: AAG
aggccagataaccatcattc

SEQ ID NO: 183952 - DNA, 20 bp, Artificial Sequence
  Description of Artificial Sequence: Synthetic oligonucleotide
  Target: LAMA2; (+) strand; PAM type: NRG; PAM sequence: TGG
taaccatcattcaagaaaac

SEQ ID NO: 183953 - DNA, 20 bp, Artificial Sequence
  Description of Artificial Sequence: Synthetic oligonucleotide
  Target: LAMA2; (+) strand; PAM type: NRG; PAM sequence: AAG
gaaaactggttatttactcc

SEQ ID NO: 183954 - DNA, 20 bp, Artificial Sequence
  Description of Artificial Sequence: Synthetic oligonucleotide
  Target: LAMA2; (+) strand; PAM type: NRG; PAM sequence: TAG
tcctttcatcctttgtaaaa

SEQ ID NO: 183955 - DNA, 20 bp, Artificial Sequence
  Description of Artificial Sequence: Synthetic oligonucleotide
  Target: LAMA2; (+) strand; PAM type: NRG; PAM sequence: GAG
ctttcatcctttgtaaaata

SEQ ID NO: 183956 - DNA, 20 bp, Artificial Sequence
  Description of Artificial Sequence: Synthetic oligonucleotide
  Target: LAMA2; (+) strand; PAM type: NRG; PAM sequence: TAG
catctatcttgcctacaaca

SEQ ID NO: 183957 - DNA, 20 bp, Artificial Sequence
  Description of Artificial Sequence: Synthetic oligonucleotide
  Target: LAMA2; (+) strand; PAM type: NRG; PAM sequence: GAG
tctatcttgcctacaacata

SEQ ID NO: 183958 - DNA, 20 bp, Artificial Sequence
  Description of Artificial Sequence: Synthetic oligonucleotide
  Target: LAMA2; (+) strand; PAM type: NRG; PAM sequence: TGG
tagagttatgaaaaatcaaa

SEQ ID NO: 183959 - DNA, 20 bp, Artificial Sequence
  Description of Artificial Sequence: Synthetic oligonucleotide
  Target: LAMA2; (+) strand; PAM type: NRG; PAM sequence: GGG
agagttatgaaaaatcaaat

SEQ ID NO: 183960 - DNA, 20 bp, Artificial Sequence
  Description of Artificial Sequence: Synthetic oligonucleotide
  Target: LAMA2; (+) strand; PAM type: NRG; PAM sequence: CGG
atcaaatgggataatgtatg

SEQ ID NO: 183961 - DNA, 20 bp, Artificial Sequence
  Description of Artificial Sequence: Synthetic oligonucleotide
  Target: LAMA2; (+) strand; PAM type: NRG; PAM sequence: AAG
aaatgggataatgtatgcgg

SEQ ID NO: 183962 - DNA, 20 bp, Artificial Sequence
  Description of Artificial Sequence: Synthetic oligonucleotide
  Target: LAMA2; (+) strand; PAM type: NRG; PAM sequence: TGG
tgcggaagttatctgaaaac

SEQ ID NO: 183963 - DNA, 20 bp, Artificial Sequence
  Description of Artificial Sequence: Synthetic oligonucleotide
  Target: LAMA2; (+) strand; PAM type: NRG; PAM sequence: AAG
agttatctgaaaactggaaa

SEQ ID NO: 183964 - DNA, 20 bp, Artificial Sequence
  Description of Artificial Sequence: Synthetic oligonucleotide
  Target: LAMA2; (+) strand; PAM type: NRG; PAM sequence: TAG
ctggaaaaagcatacccaca

SEQ ID NO: 183965 - DNA, 20 bp, Artificial Sequence
  Description of Artificial Sequence: Synthetic oligonucleotide
  Target: LAMA2; (+) strand; PAM type: NRG; PAM sequence: GAG
catacccacatagacactct

SEQ ID NO: 183966 - DNA, 20 bp, Artificial Sequence
  Description of Artificial Sequence: Synthetic oligonucleotide
  Target: LAMA2; (+) strand; PAM type: NRG; PAM sequence: AGG
atacccacatagacactctg

SEQ ID NO: 183967 - DNA, 20 bp, Artificial Sequence
  Description of Artificial Sequence: Synthetic oligonucleotide
  Target: LAMA2; (+) strand; PAM type: NRG; PAM sequence: TAG
ctctgaggaatccctgcatt

SEQ ID NO: 183968 - DNA, 20 bp, Artificial Sequence
  Description of Artificial Sequence: Synthetic oligonucleotide
  Target: LAMA2; (+) strand; PAM type: NRG; PAM sequence: CAG
gtgaataactactatgtgtc

SEQ ID NO: 183969 - DNA, 20 bp, Artificial Sequence
  Description of Artificial Sequence: Synthetic oligonucleotide
  Target: LAMA2; (+) strand; PAM type: NRG; PAM sequence: CAG
ctatgtgtccagtactctgc

SEQ ID NO: 183970 - DNA, 20 bp, Artificial Sequence
  Description of Artificial Sequence: Synthetic oligonucleotide
  Target: LAMA2; (+) strand; PAM type: NRG; PAM sequence: AGG
tatgtgtccagtactctgcc

SEQ ID NO: 183971 - DNA, 20 bp, Artificial Sequence
  Description of Artificial Sequence: Synthetic oligonucleotide
  Target: LAMA2; (+) strand; PAM type: NRG; PAM sequence: CAG
tttacatttatttatattgc

SEQ ID NO: 183972 - DNA, 20 bp, Artificial Sequence
  Description of Artificial Sequence: Synthetic oligonucleotide
  Target: LAMA2; (+) strand; PAM type: NRG; PAM sequence: AAG
acatttatttatattgccag

SEQ ID NO: 183973 - DNA, 20 bp, Artificial Sequence
  Description of Artificial Sequence: Synthetic oligonucleotide
  Target: LAMA2; (+) strand; PAM type: NRG; PAM sequence: AAG
cagaagtattatatttcaca

SEQ ID NO: 183974 - DNA, 20 bp, Artificial Sequence
  Description of Artificial Sequence: Synthetic oligonucleotide
  Target: LAMA2; (+) strand; PAM type: NRG; PAM sequence: AGG
agaagtattatatttcacaa

SEQ ID NO: 183975 - DNA, 20 bp, Artificial Sequence
  Description of Artificial Sequence: Synthetic oligonucleotide
  Target: LAMA2; (+) strand; PAM type: NRG; PAM sequence: AAG
tttcacaaaggaaaatacct

SEQ ID NO: 183976 - DNA, 20 bp, Artificial Sequence
  Description of Artificial Sequence: Synthetic oligonucleotide
  Target: LAMA2; (+) strand; PAM type: NRG; PAM sequence: CAG
ggaaaatacctaagatcaca

SEQ ID NO: 183977 - DNA, 20 bp, Artificial Sequence
  Description of Artificial Sequence: Synthetic oligonucleotide
  Target: LAMA2; (+) strand; PAM type: NRG; PAM sequence: TAG
aatacctaagatcacacagc

SEQ ID NO: 183978 - DNA, 20 bp, Artificial Sequence
  Description of Artificial Sequence: Synthetic oligonucleotide
  Target: LAMA2; (+) strand; PAM type: NRG; PAM sequence: AAG
cctaagatcacacagctagc

SEQ ID NO: 183979 - DNA, 20 bp, Artificial Sequence
  Description of Artificial Sequence: Synthetic oligonucleotide
  Target: LAMA2; (+) strand; PAM type: NRG; PAM sequence: TGG
aagatcacacagctagcaag

SEQ ID NO: 183980 - DNA, 20 bp, Artificial Sequence
  Description of Artificial Sequence: Synthetic oligonucleotide
  Target: LAMA2; (+) strand; PAM type: NRG; PAM sequence: AAG
tcacacagctagcaagtgga

SEQ ID NO: 183981 - DNA, 20 bp, Artificial Sequence
  Description of Artificial Sequence: Synthetic oligonucleotide
  Target: LAMA2; (+) strand; PAM type: NRG; PAM sequence: CAG
gctagcaagtggaaagctgt

SEQ ID NO: 183982 - DNA, 20 bp, Artificial Sequence
  Description of Artificial Sequence: Synthetic oligonucleotide
  Target: LAMA2; (+) strand; PAM type: NRG; PAM sequence: TGG
aagtggaaagctgtcagtca

SEQ ID NO: 183983 - DNA, 20 bp, Artificial Sequence
  Description of Artificial Sequence: Synthetic oligonucleotide
  Target: LAMA2; (+) strand; PAM type: NRG; PAM sequence: GGG
agtggaaagctgtcagtcat

SEQ ID NO: 183984 - DNA, 20 bp, Artificial Sequence
  Description of Artificial Sequence: Synthetic oligonucleotide
  Target: LAMA2; (+) strand; PAM type: NRG; PAM sequence: GGG
gtggaaagctgtcagtcatg

SEQ ID NO: 183985 - DNA, 20 bp, Artificial Sequence
  Description of Artificial Sequence: Synthetic oligonucleotide
  Target: LAMA2; (+) strand; PAM type: NRG; PAM sequence: GGG
tggaaagctgtcagtcatgg

SEQ ID NO: 183986 - DNA, 20 bp, Artificial Sequence
  Description of Artificial Sequence: Synthetic oligonucleotide
  Target: LAMA2; (+) strand; PAM type: NRG; PAM sequence: GGG
ggaaagctgtcagtcatggg

SEQ ID NO: 183987 - DNA, 20 bp, Artificial Sequence
  Description of Artificial Sequence: Synthetic oligonucleotide
  Target: LAMA2; (+) strand; PAM type: NRG; PAM sequence: TAG
agctgtcagtcatggggggt

SEQ ID NO: 183988 - DNA, 20 bp, Artificial Sequence
  Description of Artificial Sequence: Synthetic oligonucleotide
  Target: LAMA2; (+) strand; PAM type: NRG; PAM sequence: CAG
cagtcatggggggttagttc

SEQ ID NO: 183989 - DNA, 20 bp, Artificial Sequence
  Description of Artificial Sequence: Synthetic oligonucleotide
  Target: LAMA2; (+) strand; PAM type: NRG; PAM sequence: AGG
agtcatggggggttagttcc

SEQ ID NO: 183990 - DNA, 20 bp, Artificial Sequence
  Description of Artificial Sequence: Synthetic oligonucleotide
  Target: LAMA2; (+) strand; PAM type: NRG; PAM sequence: GAG
tcatggggggttagttccag

SEQ ID NO: 183991 - DNA, 20 bp, Artificial Sequence
  Description of Artificial Sequence: Synthetic oligonucleotide
  Target: LAMA2; (+) strand; PAM type: NRG; PAM sequence: AAG
caggagttgatttcatccta

SEQ ID NO: 183992 - DNA, 20 bp, Artificial Sequence
  Description of Artificial Sequence: Synthetic oligonucleotide
  Target: LAMA2; (+) strand; PAM type: NRG; PAM sequence: GAG
tttcatcctaaagcattcct

SEQ ID NO: 183993 - DNA, 20 bp, Artificial Sequence
  Description of Artificial Sequence: Synthetic oligonucleotide
  Target: LAMA2; (+) strand; PAM type: NRG; PAM sequence: TGG
cattcctgagatctgccaca

SEQ ID NO: 183994 - DNA, 20 bp, Artificial Sequence
  Description of Artificial Sequence: Synthetic oligonucleotide
  Target: LAMA2; (+) strand; PAM type: NRG; PAM sequence: CAG
gagatctgccacatggattt

SEQ ID NO: 183995 - DNA, 20 bp, Artificial Sequence
  Description of Artificial Sequence: Synthetic oligonucleotide
  Target: LAMA2; (+) strand; PAM type: NRG; PAM sequence: CAG
tggatttcagaatgtttcct

SEQ ID NO: 183996 - DNA, 20 bp, Artificial Sequence
  Description of Artificial Sequence: Synthetic oligonucleotide
  Target: LAMA2; (+) strand; PAM type: NRG; PAM sequence: CAG
tcctcagctctttcataatt

SEQ ID NO: 183997 - DNA, 20 bp, Artificial Sequence
  Description of Artificial Sequence: Synthetic oligonucleotide
  Target: LAMA2; (+) strand; PAM type: NRG; PAM sequence: CAG
gctctttcataattcagcca

SEQ ID NO: 183998 - DNA, 20 bp, Artificial Sequence
  Description of Artificial Sequence: Synthetic oligonucleotide
  Target: LAMA2; (+) strand; PAM type: NRG; PAM sequence: AGG
ctctttcataattcagccac

SEQ ID NO: 183999 - DNA, 20 bp, Artificial Sequence
  Description of Artificial Sequence: Synthetic oligonucleotide
  Target: LAMA2; (+) strand; PAM type: NRG; PAM sequence: TAG
ttcataattcagccacaggt

SEQ ID NO: 184000 - DNA, 20 bp, Artificial Sequence
  Description of Artificial Sequence: Synthetic oligonucleotide
  Target: LAMA2; (+) strand; PAM type: NRG; PAM sequence: TAG
ccacaggttagatctttgct

SEQ ID NO: 184001 - DNA, 20 bp, Artificial Sequence
  Description of Artificial Sequence: Synthetic oligonucleotide
  Target: LAMA2; (+) strand; PAM type: NRG; PAM sequence: AAG
ggttagatctttgcttagca

SEQ ID NO: 184002 - DNA, 20 bp, Artificial Sequence
  Description of Artificial Sequence: Synthetic oligonucleotide
  Target: LAMA2; (+) strand; PAM type: NRG; PAM sequence: AGG
gttagatctttgcttagcaa

SEQ ID NO: 184003 - DNA, 20 bp, Artificial Sequence
  Description of Artificial Sequence: Synthetic oligonucleotide
  Target: LAMA2; (+) strand; PAM type: NRG; PAM sequence: AAG
gatctttgcttagcaaaggt

SEQ ID NO: 184004 - DNA, 20 bp, Artificial Sequence
  Description of Artificial Sequence: Synthetic oligonucleotide
  Target: LAMA2; (+) strand; PAM type: NRG; PAM sequence: AGG
atctttgcttagcaaaggta

SEQ ID NO: 184005 - DNA, 20 bp, Artificial Sequence
  Description of Artificial Sequence: Synthetic oligonucleotide
  Target: LAMA2; (+) strand; PAM type: NRG; PAM sequence: CAG
cctgaaaatcatgtgtttct

SEQ ID NO: 184006 - DNA, 20 bp, Artificial Sequence
  Description of Artificial Sequence: Synthetic oligonucleotide
  Target: LAMA2; (+) strand; PAM type: NRG; PAM sequence: CAG
cagactcataaacatgtttt

SEQ ID NO: 184007 - DNA, 20 bp, Artificial Sequence
  Description of Artificial Sequence: Synthetic oligonucleotide
  Target: LAMA2; (+) strand; PAM type: NRG; PAM sequence: AAG
cataaacatgttttcagttg

SEQ ID NO: 184008 - DNA, 20 bp, Artificial Sequence
  Description of Artificial Sequence: Synthetic oligonucleotide
  Target: LAMA2; (+) strand; PAM type: NRG; PAM sequence: TAG
catgttttcagttgaagaat

SEQ ID NO: 184009 - DNA, 20 bp, Artificial Sequence
  Description of Artificial Sequence: Synthetic oligonucleotide
  Target: LAMA2; (+) strand; PAM type: NRG; PAM sequence: GAG
gaagaattagaaaacatcat

SEQ ID NO: 184010 - DNA, 20 bp, Artificial Sequence
  Description of Artificial Sequence: Synthetic oligonucleotide
  Target: LAMA2; (+) strand; PAM type: NRG; PAM sequence: TGG
tgaataaacttttttgacct

SEQ ID NO: 184011 - DNA, 20 bp, Artificial Sequence
  Description of Artificial Sequence: Synthetic oligonucleotide
  Target: LAMA2; (+) strand; PAM type: NRG; PAM sequence: TAG
tccacttataaaaatgtttc

SEQ ID NO: 184012 - DNA, 20 bp, Artificial Sequence
  Description of Artificial Sequence: Synthetic oligonucleotide
  Target: LAMA2; (+) strand; PAM type: NRG; PAM sequence: AGG
ccacttataaaaatgtttct

SEQ ID NO: 184013 - DNA, 20 bp, Artificial Sequence
  Description of Artificial Sequence: Synthetic oligonucleotide
  Target: LAMA2; (+) strand; PAM type: NRG; PAM sequence: GAG
acttataaaaatgtttctag

SEQ ID NO: 184014 - DNA, 20 bp, Artificial Sequence
  Description of Artificial Sequence: Synthetic oligonucleotide
  Target: LAMA2; (+) strand; PAM type: NRG; PAM sequence: CAG
aaaatgtttctaggagaaaa

SEQ ID NO: 184015 - DNA, 20 bp, Artificial Sequence
  Description of Artificial Sequence: Synthetic oligonucleotide
  Target: LAMA2; (+) strand; PAM type: NRG; PAM sequence: TGG
ttaaaattataaactaaaat

SEQ ID NO: 184016 - DNA, 20 bp, Artificial Sequence
  Description of Artificial Sequence: Synthetic oligonucleotide
  Target: LAMA2; (+) strand; PAM type: NRG; PAM sequence: AAG
aattataaactaaaattggc

SEQ ID NO: 184017 - DNA, 20 bp, Artificial Sequence
  Description of Artificial Sequence: Synthetic oligonucleotide
  Target: LAMA2; (+) strand; PAM type: NRG; PAM sequence: GAG
ttataaactaaaattggcaa

SEQ ID NO: 184018 - DNA, 20 bp, Artificial Sequence
  Description of Artificial Sequence: Synthetic oligonucleotide
  Target: LAMA2; (+) strand; PAM type: NRG; PAM sequence: AAG
taaaattggcaagagcccta

SEQ ID NO: 184019 - DNA, 20 bp, Artificial Sequence
  Description of Artificial Sequence: Synthetic oligonucleotide
  Target: LAMA2; (+) strand; PAM type: NRG; PAM sequence: TGG
caagagccctaaagatcatc

SEQ ID NO: 184020 - DNA, 20 bp, Artificial Sequence
  Description of Artificial Sequence: Synthetic oligonucleotide
  Target: LAMA2; (+) strand; PAM type: NRG; PAM sequence: TGG
ccaatcaccatcttaatgca

SEQ ID NO: 184021 - DNA, 20 bp, Artificial Sequence
  Description of Artificial Sequence: Synthetic oligonucleotide
  Target: LAMA2; (+) strand; PAM type: NRG; PAM sequence: GGG
caatcaccatcttaatgcat

SEQ ID NO: 184022 - DNA, 20 bp, Artificial Sequence
  Description of Artificial Sequence: Synthetic oligonucleotide
  Target: LAMA2; (+) strand; PAM type: NRG; PAM sequence: CAG
ttccttttacatgatactta

SEQ ID NO: 184023 - DNA, 20 bp, Artificial Sequence
  Description of Artificial Sequence: Synthetic oligonucleotide
  Target: LAMA2; (+) strand; PAM type: NRG; PAM sequence: AAG
tgcttgaacatttcattgac

SEQ ID NO: 184024 - DNA, 20 bp, Artificial Sequence
  Description of Artificial Sequence: Synthetic oligonucleotide
  Target: LAMA2; (+) strand; PAM type: NRG; PAM sequence: CAG
atttcattgacaagattttc

SEQ ID NO: 184025 - DNA, 20 bp, Artificial Sequence
  Description of Artificial Sequence: Synthetic oligonucleotide
  Target: LAMA2; (+) strand; PAM type: NRG; PAM sequence: AAG
agattttccagtgttatgac

SEQ ID NO: 184026 - DNA, 20 bp, Artificial Sequence
  Description of Artificial Sequence: Synthetic oligonucleotide
  Target: LAMA2; (+) strand; PAM type: NRG; PAM sequence: AGG
gattttccagtgttatgaca

SEQ ID NO: 184027 - DNA, 20 bp, Artificial Sequence
  Description of Artificial Sequence: Synthetic oligonucleotide
  Target: LAMA2; (+) strand; PAM type: NRG; PAM sequence: CAG
tttccagtgttatgacaagg

SEQ ID NO: 184028 - DNA, 20 bp, Artificial Sequence
  Description of Artificial Sequence: Synthetic oligonucleotide
  Target: LAMA2; (+) strand; PAM type: NRG; PAM sequence: AGG
ttccagtgttatgacaaggc

SEQ ID NO: 184029 - DNA, 20 bp, Artificial Sequence
  Description of Artificial Sequence: Synthetic oligonucleotide
  Target: LAMA2; (+) strand; PAM type: NRG; PAM sequence: GAG
tgttatgacaaggcaggctc

SEQ ID NO: 184030 - DNA, 20 bp, Artificial Sequence
  Description of Artificial Sequence: Synthetic oligonucleotide
  Target: LAMA2; (+) strand; PAM type: NRG; PAM sequence: TAG
acaaggcaggctcgagttgt

SEQ ID NO: 184031 - DNA, 20 bp, Artificial Sequence
  Description of Artificial Sequence: Synthetic oligonucleotide
  Target: LAMA2; (+) strand; PAM type: NRG; PAM sequence: AAG
ggcaggctcgagttgttaga

SEQ ID NO: 184032 - DNA, 20 bp, Artificial Sequence
  Description of Artificial Sequence: Synthetic oligonucleotide
  Target: LAMA2; (+) strand; PAM type: NRG; PAM sequence: CGG
tcgagttgttagaaagccat

SEQ ID NO: 184033 - DNA, 20 bp, Artificial Sequence
  Description of Artificial Sequence: Synthetic oligonucleotide
  Target: LAMA2; (+) strand; PAM type: NRG; PAM sequence: AAG
agaaagccatcggttacatt

SEQ ID NO: 184034 - DNA, 20 bp, Artificial Sequence
  Description of Artificial Sequence: Synthetic oligonucleotide
  Target: LAMA2; (+) strand; PAM type: NRG; PAM sequence: GAG
ggttacattaagttaaaact

SEQ ID NO: 184035 - DNA, 20 bp, Artificial Sequence
  Description of Artificial Sequence: Synthetic oligonucleotide
  Target: LAMA2; (+) strand; PAM type: NRG; PAM sequence: TAG
atgtaatgattgtatttcta

SEQ ID NO: 184036 - DNA, 20 bp, Artificial Sequence
  Description of Artificial Sequence: Synthetic oligonucleotide
  Target: LAMA2; (+) strand; PAM type: NRG; PAM sequence: AGG
tgtaatgattgtatttctat

SEQ ID NO: 184037 - DNA, 20 bp, Artificial Sequence
  Description of Artificial Sequence: Synthetic oligonucleotide
  Target: LAMA2; (+) strand; PAM type: NRG; PAM sequence: TAG
tcccttcaataatttgaaaa

SEQ ID NO: 184038 - DNA, 20 bp, Artificial Sequence
  Description of Artificial Sequence: Synthetic oligonucleotide
  Target: LAMA2; (+) strand; PAM type: NRG; PAM sequence: AAG
tcaataatttgaaaatagct

SEQ ID NO: 184039 - DNA, 20 bp, Artificial Sequence
  Description of Artificial Sequence: Synthetic oligonucleotide
  Target: LAMA2; (+) strand; PAM type: NRG; PAM sequence: TAG
agctaagtcttctccttccc

SEQ ID NO: 184040 - DNA, 20 bp, Artificial Sequence
  Description of Artificial Sequence: Synthetic oligonucleotide
  Target: LAMA2; (+) strand; PAM type: NRG; PAM sequence: AGG
gctaagtcttctccttccct

SEQ ID NO: 184041 - DNA, 20 bp, Artificial Sequence
  Description of Artificial Sequence: Synthetic oligonucleotide
  Target: LAMA2; (+) strand; PAM type: NRG; PAM sequence: TAG
ccctaggctaaccatttccc

SEQ ID NO: 184042 - DNA, 20 bp, Artificial Sequence
  Description of Artificial Sequence: Synthetic oligonucleotide
  Target: LAMA2; (+) strand; PAM type: NRG; PAM sequence: TAG
ggctaaccatttccctagct

SEQ ID NO: 184043 - DNA, 20 bp, Artificial Sequence
  Description of Artificial Sequence: Synthetic oligonucleotide
  Target: LAMA2; (+) strand; PAM type: NRG; PAM sequence: AGG
gctaaccatttccctagctt

SEQ ID NO: 184044 - DNA, 20 bp, Artificial Sequence
  Description of Artificial Sequence: Synthetic oligonucleotide
  Target: LAMA2; (+) strand; PAM type: NRG; PAM sequence: CAG
attactatcccctccatgat

SEQ ID NO: 184045 - DNA, 20 bp, Artificial Sequence
  Description of Artificial Sequence: Synthetic oligonucleotide
  Target: LAMA2; (+) strand; PAM type: NRG; PAM sequence: TGG
gaaatattcccttcataata

SEQ ID NO: 184046 - DNA, 20 bp, Artificial Sequence
  Description of Artificial Sequence: Synthetic oligonucleotide
  Target: LAMA2; (+) strand; PAM type: NRG; PAM sequence: AAG
atatggcacctactgctcaa

SEQ ID NO: 184047 - DNA, 20 bp, Artificial Sequence
  Description of Artificial Sequence: Synthetic oligonucleotide
  Target: LAMA2; (+) strand; PAM type: NRG; PAM sequence: AGG
tatggcacctactgctcaaa

SEQ ID NO: 184048 - DNA, 20 bp, Artificial Sequence
  Description of Artificial Sequence: Synthetic oligonucleotide
  Target: LAMA2; (+) strand; PAM type: NRG; PAM sequence: AAG
ggcacctactgctcaaaagg

SEQ ID NO: 184049 - DNA, 20 bp, Artificial Sequence
  Description of Artificial Sequence: Synthetic oligonucleotide
  Target: LAMA2; (+) strand; PAM type: NRG; PAM sequence: CAG
actgctcaaaaggaagtcac

SEQ ID NO: 184050 - DNA, 20 bp, Artificial Sequence
  Description of Artificial Sequence: Synthetic oligonucleotide
  Target: LAMA2; (+) strand; PAM type: NRG; PAM sequence: CAG
tcaaaaggaagtcaccagct

SEQ ID NO: 184051 - DNA, 20 bp, Artificial Sequence
  Description of Artificial Sequence: Synthetic oligonucleotide
  Target: LAMA2; (+) strand; PAM type: NRG; PAM sequence: AGG
caaaaggaagtcaccagctc

SEQ ID NO: 184052 - DNA, 20 bp, Artificial Sequence
  Description of Artificial Sequence: Synthetic oligonucleotide
  Target: LAMA2; (+) strand; PAM type: NRG; PAM sequence: GGG
aaaaggaagtcaccagctca

SEQ ID NO: 184053 - DNA, 20 bp, Artificial Sequence
  Description of Artificial Sequence: Synthetic oligonucleotide
  Target: LAMA2; (+) strand; PAM type: NRG; PAM sequence: GGG
aaaggaagtcaccagctcag

SEQ ID NO: 184054 - DNA, 20 bp, Artificial Sequence
  Description of Artificial Sequence: Synthetic oligonucleotide
  Target: LAMA2; (+) strand; PAM type: NRG; PAM sequence: CAG
gaagtcaccagctcagggga

SEQ ID NO: 184055 - DNA, 20 bp, Artificial Sequence
  Description of Artificial Sequence: Synthetic oligonucleotide
  Target: LAMA2; (+) strand; PAM type: NRG; PAM sequence: AAG
atatttctattaatgcacct

SEQ ID NO: 184056 - DNA, 20 bp, Artificial Sequence
  Description of Artificial Sequence: Synthetic oligonucleotide
  Target: LAMA2; (+) strand; PAM type: NRG; PAM sequence: TAG
gaatgttttaatgtttttaa

SEQ ID NO: 184057 - DNA, 20 bp, Artificial Sequence
  Description of Artificial Sequence: Synthetic oligonucleotide
  Target: LAMA2; (+) strand; PAM type: NRG; PAM sequence: CGG
tcatgctactaattccaaat

SEQ ID NO: 184058 - DNA, 20 bp, Artificial Sequence
  Description of Artificial Sequence: Synthetic oligonucleotide
  Target: LAMA2; (+) strand; PAM type: NRG; PAM sequence: GGG
catgctactaattccaaatc

SEQ ID NO: 184059 - DNA, 20 bp, Artificial Sequence
  Description of Artificial Sequence: Synthetic oligonucleotide
  Target: LAMA2; (+) strand; PAM type: NRG; PAM sequence: AAG
atcgggtaccatattcaatc

SEQ ID NO: 184060 - DNA, 20 bp, Artificial Sequence
  Description of Artificial Sequence: Synthetic oligonucleotide
  Target: LAMA2; (+) strand; PAM type: NRG; PAM sequence: CAG
gggtaccatattcaatcaag

SEQ ID NO: 184061 - DNA, 20 bp, Artificial Sequence
  Description of Artificial Sequence: Synthetic oligonucleotide
  Target: LAMA2; (+) strand; PAM type: NRG; PAM sequence: TGG
ttcaatcaagcagaacctca

SEQ ID NO: 184062 - DNA, 20 bp, Artificial Sequence
  Description of Artificial Sequence: Synthetic oligonucleotide
  Target: LAMA2; (+) strand; PAM type: NRG; PAM sequence: TAG
tggaccttcttctctaccac

SEQ ID NO: 184063 - DNA, 20 bp, Artificial Sequence
  Description of Artificial Sequence: Synthetic oligonucleotide
  Target: LAMA2; (+) strand; PAM type: NRG; PAM sequence: CAG
tctaccactagaacatcctc

SEQ ID NO: 184064 - DNA, 20 bp, Artificial Sequence
  Description of Artificial Sequence: Synthetic oligonucleotide
  Target: LAMA2; (+) strand; PAM type: NRG; PAM sequence: AGG
ctaccactagaacatcctcc

SEQ ID NO: 184065 - DNA, 20 bp, Artificial Sequence
  Description of Artificial Sequence: Synthetic oligonucleotide
  Target: LAMA2; (+) strand; PAM type: NRG; PAM sequence: CAG
ccactagaacatcctccagg

SEQ ID NO: 184066 - DNA, 20 bp, Artificial Sequence
  Description of Artificial Sequence: Synthetic oligonucleotide
  Target: LAMA2; (+) strand; PAM type: NRG; PAM sequence: AGG
cactagaacatcctccaggc

SEQ ID NO: 184067 - DNA, 20 bp, Artificial Sequence
  Description of Artificial Sequence: Synthetic oligonucleotide
  Target: LAMA2; (+) strand; PAM type: NRG; PAM sequence: CAG
catcctccaggcaggtctct

SEQ ID NO: 184068 - DNA, 20 bp, Artificial Sequence
  Description of Artificial Sequence: Synthetic oligonucleotide
  Target: LAMA2; (+) strand; PAM type: NRG; PAM sequence: TGG
gcaggtctctcagcctgtgc

SEQ ID NO: 184069 - DNA, 20 bp, Artificial Sequence
  Description of Artificial Sequence: Synthetic oligonucleotide
  Target: LAMA2; (+) strand; PAM type: NRG; PAM sequence: TGG
tctctcagcctgtgctggtt

SEQ ID NO: 184070 - DNA, 20 bp, Artificial Sequence
  Description of Artificial Sequence: Synthetic oligonucleotide
  Target: LAMA2; (+) strand; PAM type: NRG; PAM sequence: TAG
cctgtgctggtttggatttt

SEQ ID NO: 184071 - DNA, 20 bp, Artificial Sequence
  Description of Artificial Sequence: Synthetic oligonucleotide
  Target: LAMA2; (+) strand; PAM type: NRG; PAM sequence: AGG
ctgtgctggtttggattttt

SEQ ID NO: 184072 - DNA, 20 bp, Artificial Sequence
  Description of Artificial Sequence: Synthetic oligonucleotide
  Target: LAMA2; (+) strand; PAM type: NRG; PAM sequence: GGG
tgtgctggtttggattttta

SEQ ID NO: 184073 - DNA, 20 bp, Artificial Sequence
  Description of Artificial Sequence: Synthetic oligonucleotide
  Target: LAMA2; (+) strand; PAM type: NRG; PAM sequence: CAG
atttttagggataaccctgc

SEQ ID NO: 184074 - DNA, 20 bp, Artificial Sequence
  Description of Artificial Sequence: Synthetic oligonucleotide
  Target: LAMA2; (+) strand; PAM type: NRG; PAM sequence: TGG
gataaccctgccagcctcca

SEQ ID NO: 184075 - DNA, 20 bp, Artificial Sequence
  Description of Artificial Sequence: Synthetic oligonucleotide
  Target: LAMA2; (+) strand; PAM type: NRG; PAM sequence: AAG
atggatcaccttacttttct

SEQ ID NO: 184076 - DNA, 20 bp, Artificial Sequence
  Description of Artificial Sequence: Synthetic oligonucleotide
  Target: LAMA2; (+) strand; PAM type: NRG; PAM sequence: TAG
cttacacaaactgcatttta

SEQ ID NO: 184077 - DNA, 20 bp, Artificial Sequence
  Description of Artificial Sequence: Synthetic oligonucleotide
  Target: LAMA2; (+) strand; PAM type: NRG; PAM sequence: AGG
ttacacaaactgcattttat

SEQ ID NO: 184078 - DNA, 20 bp, Artificial Sequence
  Description of Artificial Sequence: Synthetic oligonucleotide
  Target: LAMA2; (+) strand; PAM type: NRG; PAM sequence: GGG
tacacaaactgcattttata

SEQ ID NO: 184079 - DNA, 20 bp, Artificial Sequence
  Description of Artificial Sequence: Synthetic oligonucleotide
  Target: LAMA2; (+) strand; PAM type: NRG; PAM sequence: AAG
tgcattttatagggcctctc

SEQ ID NO: 184080 - DNA, 20 bp, Artificial Sequence
  Description of Artificial Sequence: Synthetic oligonucleotide
  Target: LAMA2; (+) strand; PAM type: NRG; PAM sequence: TGG
ctctcaagcacatttttctg

SEQ ID NO: 184081 - DNA, 20 bp, Artificial Sequence
  Description of Artificial Sequence: Synthetic oligonucleotide
  Target: LAMA2; (+) strand; PAM type: NRG; PAM sequence: TAG
gcacatttttctgtggtatt

SEQ ID NO: 184082 - DNA, 20 bp, Artificial Sequence
  Description of Artificial Sequence: Synthetic oligonucleotide
  Target: LAMA2; (+) strand; PAM type: NRG; PAM sequence: GAG
acatttttctgtggtattta

SEQ ID NO: 184083 - DNA, 20 bp, Artificial Sequence
  Description of Artificial Sequence: Synthetic oligonucleotide
  Target: LAMA2; (+) strand; PAM type: NRG; PAM sequence: AAG
tttccttttttctcaaaata

SEQ ID NO: 184084 - DNA, 20 bp, Artificial Sequence
  Description of Artificial Sequence: Synthetic oligonucleotide
  Target: LAMA2; (+) strand; PAM type: NRG; PAM sequence: TGG
aataaagatacttgcccatc

SEQ ID NO: 184085 - DNA, 20 bp, Artificial Sequence
  Description of Artificial Sequence: Synthetic oligonucleotide
  Target: LAMA2; (+) strand; PAM type: NRG; PAM sequence: GGG
ataaagatacttgcccatct

SEQ ID NO: 184086 - DNA, 20 bp, Artificial Sequence
  Description of Artificial Sequence: Synthetic oligonucleotide
  Target: LAMA2; (+) strand; PAM type: NRG; PAM sequence: TGG
gatacttgcccatctgggaa

SEQ ID NO: 184087 - DNA, 20 bp, Artificial Sequence
  Description of Artificial Sequence: Synthetic oligonucleotide
  Target: LAMA2; (+) strand; PAM type: NRG; PAM sequence: GAG
tacttgcccatctgggaatg

SEQ ID NO: 184088 - DNA, 20 bp, Artificial Sequence
  Description of Artificial Sequence: Synthetic oligonucleotide
  Target: LAMA2; (+) strand; PAM type: NRG; PAM sequence: AAG
atggagatttttactcattt

SEQ ID NO: 184089 - DNA, 20 bp, Artificial Sequence
  Description of Artificial Sequence: Synthetic oligonucleotide
  Target: LAMA2; (+) strand; PAM type: NRG; PAM sequence: AGG
tggagatttttactcattta

SEQ ID NO: 184090 - DNA, 20 bp, Artificial Sequence
  Description of Artificial Sequence: Synthetic oligonucleotide
  Target: LAMA2; (+) strand; PAM type: NRG; PAM sequence: CAG
tttcgatttccatttcctct

SEQ ID NO: 184091 - DNA, 20 bp, Artificial Sequence
  Description of Artificial Sequence: Synthetic oligonucleotide
  Target: LAMA2; (+) strand; PAM type: NRG; PAM sequence: CAG
cgatttccatttcctctcag

SEQ ID NO: 184092 - DNA, 20 bp, Artificial Sequence
  Description of Artificial Sequence: Synthetic oligonucleotide
  Target: LAMA2; (+) strand; PAM type: NRG; PAM sequence: CAG
tgttttaacttttccgaaaa

SEQ ID NO: 184093 - DNA, 20 bp, Artificial Sequence
  Description of Artificial Sequence: Synthetic oligonucleotide
  Target: LAMA2; (+) strand; PAM type: NRG; PAM sequence: GAG
ttttaacttttccgaaaaca

SEQ ID NO: 184094 - DNA, 20 bp, Artificial Sequence
  Description of Artificial Sequence: Synthetic oligonucleotide
  Target: LAMA2; (+) strand; PAM type: NRG; PAM sequence: TAG
cgaaaacagagcattccact

SEQ ID NO: 184095 - DNA, 20 bp, Artificial Sequence
  Description of Artificial Sequence: Synthetic oligonucleotide
  Target: LAMA2; (+) strand; PAM type: NRG; PAM sequence: TAG
aaacagagcattccacttag

SEQ ID NO: 184096 - DNA, 20 bp, Artificial Sequence
  Description of Artificial Sequence: Synthetic oligonucleotide
  Target: LAMA2; (+) strand; PAM type: NRG; PAM sequence: GAG
gagcattccacttagtagat

SEQ ID NO: 184097 - DNA, 20 bp, Artificial Sequence
  Description of Artificial Sequence: Synthetic oligonucleotide
  Target: LAMA2; (+) strand; PAM type: NRG; PAM sequence: CAG
attccacttagtagatgaga

SEQ ID NO: 184098 - DNA, 20 bp, Artificial Sequence
  Description of Artificial Sequence: Synthetic oligonucleotide
  Target: LAMA2; (+) strand; PAM type: NRG; PAM sequence: AAG
ccacttagtagatgagacag

SEQ ID NO: 184099 - DNA, 20 bp, Artificial Sequence
  Description of Artificial Sequence: Synthetic oligonucleotide
  Target: LAMA2; (+) strand; PAM type: NRG; PAM sequence: AAG
gtagatgagacagaagcaaa

SEQ ID NO: 184100 - DNA, 20 bp, Artificial Sequence
  Description of Artificial Sequence: Synthetic oligonucleotide
  Target: LAMA2; (+) strand; PAM type: NRG; PAM sequence: GAG
tgagacagaagcaaaaagtt

SEQ ID NO: 184101 - DNA, 20 bp, Artificial Sequence
  Description of Artificial Sequence: Synthetic oligonucleotide
  Target: LAMA2; (+) strand; PAM type: NRG; PAM sequence: TAG
gacagaagcaaaaagttgag

SEQ ID NO: 184102 - DNA, 20 bp, Artificial Sequence
  Description of Artificial Sequence: Synthetic oligonucleotide
  Target: LAMA2; (+) strand; PAM type: NRG; PAM sequence: TGG
agttgagtagcatgccaaat

SEQ ID NO: 184103 - DNA, 20 bp, Artificial Sequence
  Description of Artificial Sequence: Synthetic oligonucleotide
  Target: LAMA2; (+) strand; PAM type: NRG; PAM sequence: TGG
gagtagcatgccaaattggt

SEQ ID NO: 184104 - DNA, 20 bp, Artificial Sequence
  Description of Artificial Sequence: Synthetic oligonucleotide
  Target: LAMA2; (+) strand; PAM type: NRG; PAM sequence: TAG
gcatgccaaattggttggtt

SEQ ID NO: 184105 - DNA, 20 bp, Artificial Sequence
  Description of Artificial Sequence: Synthetic oligonucleotide
  Target: LAMA2; (+) strand; PAM type: NRG; PAM sequence: AAG
gccaaattggttggtttaga

SEQ ID NO: 184106 - DNA, 20 bp, Artificial Sequence
  Description of Artificial Sequence: Synthetic oligonucleotide
  Target: LAMA2; (+) strand; PAM type: NRG; PAM sequence: CAG
ggttggtttagaaagaatca

SEQ ID NO: 184107 - DNA, 20 bp, Artificial Sequence
  Description of Artificial Sequence: Synthetic oligonucleotide
  Target: LAMA2; (+) strand; PAM type: NRG; PAM sequence: TAG
tagaaagaatcacagaacat

SEQ ID NO: 184108 - DNA, 20 bp, Artificial Sequence
  Description of Artificial Sequence: Synthetic oligonucleotide
  Target: LAMA2; (+) strand; PAM type: NRG; PAM sequence: GAG
gaaagaatcacagaacatta

SEQ ID NO: 184109 - DNA, 20 bp, Artificial Sequence
  Description of Artificial Sequence: Synthetic oligonucleotide
  Target: LAMA2; (+) strand; PAM type: NRG; PAM sequence: TAG
gaatcacagaacattagagc

SEQ ID NO: 184110 - DNA, 20 bp, Artificial Sequence
  Description of Artificial Sequence: Synthetic oligonucleotide
  Target: LAMA2; (+) strand; PAM type: NRG; PAM sequence: AAG
tcacagaacattagagctag

SEQ ID NO: 184111 - DNA, 20 bp, Artificial Sequence
  Description of Artificial Sequence: Synthetic oligonucleotide
  Target: LAMA2; (+) strand; PAM type: NRG; PAM sequence: AAG
tagagctagaagacacccta

SEQ ID NO: 184112 - DNA, 20 bp, Artificial Sequence
  Description of Artificial Sequence: Synthetic oligonucleotide
  Target: LAMA2; (+) strand; PAM type: NRG; PAM sequence: GAG
ccaactcttaacttgcacat

SEQ ID NO: 184113 - DNA, 20 bp, Artificial Sequence
  Description of Artificial Sequence: Synthetic oligonucleotide
  Target: LAMA2; (+) strand; PAM type: NRG; PAM sequence: AGG
caactcttaacttgcacatg

SEQ ID NO: 184114 - DNA, 20 bp, Artificial Sequence
  Description of Artificial Sequence: Synthetic oligonucleotide
  Target: LAMA2; (+) strand; PAM type: NRG; PAM sequence: AAG
tcttaacttgcacatgagga

SEQ ID NO: 184115 - DNA, 20 bp, Artificial Sequence
  Description of Artificial Sequence: Synthetic oligonucleotide
  Target: LAMA2; (+) strand; PAM type: NRG; PAM sequence: AAG
aacttgcacatgaggaaaga

SEQ ID NO: 184116 - DNA, 20 bp, Artificial Sequence
  Description of Artificial Sequence: Synthetic oligonucleotide
  Target: LAMA2; (+) strand; PAM type: NRG; PAM sequence: CAG
aaagaaagccctcaaactta

SEQ ID NO: 184117 - DNA, 20 bp, Artificial Sequence
  Description of Artificial Sequence: Synthetic oligonucleotide
  Target: LAMA2; (+) strand; PAM type: NRG; PAM sequence: TGG
aagccctcaaacttacagca

SEQ ID NO: 184118 - DNA, 20 bp, Artificial Sequence
  Description of Artificial Sequence: Synthetic oligonucleotide
  Target: LAMA2; (+) strand; PAM type: NRG; PAM sequence: CAG
ctcaaacttacagcatggcc

SEQ ID NO: 184119 - DNA, 20 bp, Artificial Sequence
  Description of Artificial Sequence: Synthetic oligonucleotide
  Target: LAMA2; (+) strand; PAM type: NRG; PAM sequence: AGG
tcaaacttacagcatggccc

SEQ ID NO: 184120 - DNA, 20 bp, Artificial Sequence
  Description of Artificial Sequence: Synthetic oligonucleotide
  Target: LAMA2; (+) strand; PAM type: NRG; PAM sequence: GGG
caaacttacagcatggccca

SEQ ID NO: 184121 - DNA, 20 bp, Artificial Sequence
  Description of Artificial Sequence: Synthetic oligonucleotide
  Target: LAMA2; (+) strand; PAM type: NRG; PAM sequence: GGG
aaacttacagcatggcccag

SEQ ID NO: 184122 - DNA, 20 bp, Artificial Sequence
  Description of Artificial Sequence: Synthetic oligonucleotide
  Target: LAMA2; (+) strand; PAM type: NRG; PAM sequence: GGG
aacttacagcatggcccagg

SEQ ID NO: 184123 - DNA, 20 bp, Artificial Sequence
  Description of Artificial Sequence: Synthetic oligonucleotide
  Target: LAMA2; (+) strand; PAM type: NRG; PAM sequence: GAG
gcccagggggttacacacat

SEQ ID NO: 184124 - DNA, 20 bp, Artificial Sequence
  Description of Artificial Sequence: Synthetic oligonucleotide
  Target: LAMA2; (+) strand; PAM type: NRG; PAM sequence: TAG
ggggttacacacatgagcga

SEQ ID NO: 184125 - DNA, 20 bp, Artificial Sequence
  Description of Artificial Sequence: Synthetic oligonucleotide
  Target: LAMA2; (+) strand; PAM type: NRG; PAM sequence: TGG
ttacacacatgagcgatagt

SEQ ID NO: 184126 - DNA, 20 bp, Artificial Sequence
  Description of Artificial Sequence: Synthetic oligonucleotide
  Target: LAMA2; (+) strand; PAM type: NRG; PAM sequence: CAG
cgatagttggcactaaaacc

SEQ ID NO: 184127 - DNA, 20 bp, Artificial Sequence
  Description of Artificial Sequence: Synthetic oligonucleotide
  Target: LAMA2; (+) strand; PAM type: NRG; PAM sequence: GAG
tgtttgtttgtctgtttttt

SEQ ID NO: 184128 - DNA, 20 bp, Artificial Sequence
  Description of Artificial Sequence: Synthetic oligonucleotide
  Target: LAMA2; (+) strand; PAM type: NRG; PAM sequence: TGG
tgtttgtctgttttttgaga

SEQ ID NO: 184129 - DNA, 20 bp, Artificial Sequence
  Description of Artificial Sequence: Synthetic oligonucleotide
  Target: LAMA2; (+) strand; PAM type: NRG; PAM sequence: GAG
tttgtctgttttttgagatg

SEQ ID NO: 184130 - DNA, 20 bp, Artificial Sequence
  Description of Artificial Sequence: Synthetic oligonucleotide
  Target: LAMA2; (+) strand; PAM type: NRG; PAM sequence: CAG
ggagtttcactcttgctacc

SEQ ID NO: 184131 - DNA, 20 bp, Artificial Sequence
  Description of Artificial Sequence: Synthetic oligonucleotide
  Target: LAMA2; (+) strand; PAM type: NRG; PAM sequence: AGG
gagtttcactcttgctaccc

SEQ ID NO: 184132 - DNA, 20 bp, Artificial Sequence
  Description of Artificial Sequence: Synthetic oligonucleotide
  Target: LAMA2; (+) strand; PAM type: NRG; PAM sequence: TGG
ttcactcttgctacccaggc

SEQ ID NO: 184133 - DNA, 20 bp, Artificial Sequence
  Description of Artificial Sequence: Synthetic oligonucleotide
  Target: LAMA2; (+) strand; PAM type: NRG; PAM sequence: GAG
cactcttgctacccaggctg

SEQ ID NO: 184134 - DNA, 20 bp, Artificial Sequence
  Description of Artificial Sequence: Synthetic oligonucleotide
  Target: LAMA2; (+) strand; PAM type: NRG; PAM sequence: TGG
tcactgcaacctccacctcc

SEQ ID NO: 184135 - DNA, 20 bp, Artificial Sequence
  Description of Artificial Sequence: Synthetic oligonucleotide
  Target: LAMA2; (+) strand; PAM type: NRG; PAM sequence: GGG
cactgcaacctccacctcct

SEQ ID NO: 184136 - DNA, 20 bp, Artificial Sequence
  Description of Artificial Sequence: Synthetic oligonucleotide
  Target: LAMA2; (+) strand; PAM type: NRG; PAM sequence: AAG
aacctccacctcctgggttc

SEQ ID NO: 184137 - DNA, 20 bp, Artificial Sequence
  Description of Artificial Sequence: Synthetic oligonucleotide
  Target: LAMA2; (+) strand; PAM type: NRG; PAM sequence: CAG
ttcaagcaattctcctgctt

SEQ ID NO: 184138 - DNA, 20 bp, Artificial Sequence
  Description of Artificial Sequence: Synthetic oligonucleotide
  Target: LAMA2; (+) strand; PAM type: NRG; PAM sequence: GAG
ttctcctgcttcagcctccc

SEQ ID NO: 184139 - DNA, 20 bp, Artificial Sequence
  Description of Artificial Sequence: Synthetic oligonucleotide
  Target: LAMA2; (+) strand; PAM type: NRG; PAM sequence: TAG
tcctgcttcagcctcccgag

SEQ ID NO: 184140 - DNA, 20 bp, Artificial Sequence
  Description of Artificial Sequence: Synthetic oligonucleotide
  Target: LAMA2; (+) strand; PAM type: NRG; PAM sequence: TGG
gcttcagcctcccgagtagc

SEQ ID NO: 184141 - DNA, 20 bp, Artificial Sequence
  Description of Artificial Sequence: Synthetic oligonucleotide
  Target: LAMA2; (+) strand; PAM type: NRG; PAM sequence: GGG
cttcagcctcccgagtagct

SEQ ID NO: 184142 - DNA, 20 bp, Artificial Sequence
  Description of Artificial Sequence: Synthetic oligonucleotide
  Target: LAMA2; (+) strand; PAM type: NRG; PAM sequence: CGG
ctcccgagtagctgggatta

SEQ ID NO: 184143 - DNA, 20 bp, Artificial Sequence
  Description of Artificial Sequence: Synthetic oligonucleotide
  Target: LAMA2; (+) strand; PAM type: NRG; PAM sequence: GGG
tcccgagtagctgggattac

SEQ ID NO: 184144 - DNA, 20 bp, Artificial Sequence
  Description of Artificial Sequence: Synthetic oligonucleotide
  Target: LAMA2; (+) strand; PAM type: NRG; PAM sequence: TGG
cgggcatgcaccaccactct

SEQ ID NO: 184145 - DNA, 20 bp, Artificial Sequence
  Description of Artificial Sequence: Synthetic oligonucleotide
  Target: LAMA2; (+) strand; PAM type: NRG; PAM sequence: TAG
cttggctaattttgtatttt

SEQ ID NO: 184146 - DNA, 20 bp, Artificial Sequence
  Description of Artificial Sequence: Synthetic oligonucleotide
  Target: LAMA2; (+) strand; PAM type: NRG; PAM sequence: TAG
ggctaattttgtatttttag

SEQ ID NO: 184147 - DNA, 20 bp, Artificial Sequence
  Description of Artificial Sequence: Synthetic oligonucleotide
  Target: LAMA2; (+) strand; PAM type: NRG; PAM sequence: GAG
ctaattttgtatttttagta

SEQ ID NO: 184148 - DNA, 20 bp, Artificial Sequence
  Description of Artificial Sequence: Synthetic oligonucleotide
  Target: LAMA2; (+) strand; PAM type: NRG; PAM sequence: CGG
ttttgtatttttagtagaga

SEQ ID NO: 184149 - DNA, 20 bp, Artificial Sequence
  Description of Artificial Sequence: Synthetic oligonucleotide
  Target: LAMA2; (+) strand; PAM type: NRG; PAM sequence: GGG
tttgtatttttagtagagac

SEQ ID NO: 184150 - DNA, 20 bp, Artificial Sequence
  Description of Artificial Sequence: Synthetic oligonucleotide
  Target: LAMA2; (+) strand; PAM type: NRG; PAM sequence: TGG
gagacgggatttctccatgt

SEQ ID NO: 184151 - DNA, 20 bp, Artificial Sequence
  Description of Artificial Sequence: Synthetic oligonucleotide
  Target: LAMA2; (+) strand; PAM type: NRG; PAM sequence: CAG
cgggatttctccatgttggt

SEQ ID NO: 184152 - DNA, 20 bp, Artificial Sequence
  Description of Artificial Sequence: Synthetic oligonucleotide
  Target: LAMA2; (+) strand; PAM type: NRG; PAM sequence: AGG
gggatttctccatgttggtc

SEQ ID NO: 184153 - DNA, 20 bp, Artificial Sequence
  Description of Artificial Sequence: Synthetic oligonucleotide
  Target: LAMA2; (+) strand; PAM type: NRG; PAM sequence: TGG
tttctccatgttggtcaggc

SEQ ID NO: 184154 - DNA, 20 bp, Artificial Sequence
  Description of Artificial Sequence: Synthetic oligonucleotide
  Target: LAMA2; (+) strand; PAM type: NRG; PAM sequence: CAG
tggtctcgaactgccaactt

SEQ ID NO: 184155 - DNA, 20 bp, Artificial Sequence
  Description of Artificial Sequence: Synthetic oligonucleotide
  Target: LAMA2; (+) strand; PAM type: NRG; PAM sequence: AGG
ggtctcgaactgccaacttc

SEQ ID NO: 184156 - DNA, 20 bp, Artificial Sequence
  Description of Artificial Sequence: Synthetic oligonucleotide
  Target: LAMA2; (+) strand; PAM type: NRG; PAM sequence: TGG
ctcgaactgccaacttcagg

SEQ ID NO: 184157 - DNA, 20 bp, Artificial Sequence
  Description of Artificial Sequence: Synthetic oligonucleotide
  Target: LAMA2; (+) strand; PAM type: NRG; PAM sequence: CAG
ttcaggtggtctgcccacct

SEQ ID NO: 184158 - DNA, 20 bp, Artificial Sequence
  Description of Artificial Sequence: Synthetic oligonucleotide
  Target: LAMA2; (+) strand; PAM type: NRG; PAM sequence: AAG
ctgcccacctcagcctccca

SEQ ID NO: 184159 - DNA, 20 bp, Artificial Sequence
  Description of Artificial Sequence: Synthetic oligonucleotide
  Target: LAMA2; (+) strand; PAM type: NRG; PAM sequence: TGG
acctcagcctcccaaagtgc

SEQ ID NO: 184160 - DNA, 20 bp, Artificial Sequence
  Description of Artificial Sequence: Synthetic oligonucleotide
  Target: LAMA2; (+) strand; PAM type: NRG; PAM sequence: GGG
cctcagcctcccaaagtgct

SEQ ID NO: 184161 - DNA, 20 bp, Artificial Sequence
  Description of Artificial Sequence: Synthetic oligonucleotide
  Target: LAMA2; (+) strand; PAM type: NRG; PAM sequence: CAG
ctcccaaagtgctgggatta

SEQ ID NO: 184162 - DNA, 20 bp, Artificial Sequence
  Description of Artificial Sequence: Synthetic oligonucleotide
  Target: LAMA2; (+) strand; PAM type: NRG; PAM sequence: AGG
tcccaaagtgctgggattac

SEQ ID NO: 184163 - DNA, 20 bp, Artificial Sequence
  Description of Artificial Sequence: Synthetic oligonucleotide
  Target: LAMA2; (+) strand; PAM type: NRG; PAM sequence: GAG
agtgctgggattacaggcat

SEQ ID NO: 184164 - DNA, 20 bp, Artificial Sequence
  Description of Artificial Sequence: Synthetic oligonucleotide
  Target: LAMA2; (+) strand; PAM type: NRG; PAM sequence: CGG
caggcatgagacactgcgcc

SEQ ID NO: 184165 - DNA, 20 bp, Artificial Sequence
  Description of Artificial Sequence: Synthetic oligonucleotide
  Target: LAMA2; (+) strand; PAM type: NRG; PAM sequence: TAG
cttcttttgcacattataat

SEQ ID NO: 184166 - DNA, 20 bp, Artificial Sequence
  Description of Artificial Sequence: Synthetic oligonucleotide
  Target: LAMA2; (+) strand; PAM type: NRG; PAM sequence: TGG
tataattagttatgactgtg

SEQ ID NO: 184167 - DNA, 20 bp, Artificial Sequence
  Description of Artificial Sequence: Synthetic oligonucleotide
  Target: LAMA2; (+) strand; PAM type: NRG; PAM sequence: CAG
attagttatgactgtgtggt

SEQ ID NO: 184168 - DNA, 20 bp, Artificial Sequence
  Description of Artificial Sequence: Synthetic oligonucleotide
  Target: LAMA2; (+) strand; PAM type: NRG; PAM sequence: TAG
tatgactgtgtggtcagaat

SEQ ID NO: 184169 - DNA, 20 bp, Artificial Sequence
  Description of Artificial Sequence: Synthetic oligonucleotide
  Target: LAMA2; (+) strand; PAM type: NRG; PAM sequence: TAG
gtggtcagaattagattttt

SEQ ID NO: 184170 - DNA, 20 bp, Artificial Sequence
  Description of Artificial Sequence: Synthetic oligonucleotide
  Target: LAMA2; (+) strand; PAM type: NRG; PAM sequence: TAG
ctattaattgtattatattt

SEQ ID NO: 184171 - DNA, 20 bp, Artificial Sequence
  Description of Artificial Sequence: Synthetic oligonucleotide
  Target: LAMA2; (+) strand; PAM type: NRG; PAM sequence: CAG
ttgtattatattttagaaat

SEQ ID NO: 184172 - DNA, 20 bp, Artificial Sequence
  Description of Artificial Sequence: Synthetic oligonucleotide
  Target: LAMA2; (+) strand; PAM type: NRG; PAM sequence: AAG
attttagaaatcagatcatg

SEQ ID NO: 184173 - DNA, 20 bp, Artificial Sequence
  Description of Artificial Sequence: Synthetic oligonucleotide
  Target: LAMA2; (+) strand; PAM type: NRG; PAM sequence: TAG
ttatgttctttttgtgtgtg

SEQ ID NO: 184174 - DNA, 20 bp, Artificial Sequence
  Description of Artificial Sequence: Synthetic oligonucleotide
  Target: LAMA2; (+) strand; PAM type: NRG; PAM sequence: AGG
tatgttctttttgtgtgtgt

SEQ ID NO: 184175 - DNA, 20 bp, Artificial Sequence
  Description of Artificial Sequence: Synthetic oligonucleotide
  Target: LAMA2; (+) strand; PAM type: NRG; PAM sequence: GGG
atgttctttttgtgtgtgta

SEQ ID NO: 184176 - DNA, 20 bp, Artificial Sequence
  Description of Artificial Sequence: Synthetic oligonucleotide
  Target: LAMA2; (+) strand; PAM type: NRG; PAM sequence: GGG
tgttctttttgtgtgtgtag

SEQ ID NO: 184177 - DNA, 20 bp, Artificial Sequence
  Description of Artificial Sequence: Synthetic oligonucleotide
  Target: LAMA2; (+) strand; PAM type: NRG; PAM sequence: GGG
gttctttttgtgtgtgtagg

SEQ ID NO: 184178 - DNA, 20 bp, Artificial Sequence
  Description of Artificial Sequence: Synthetic oligonucleotide
  Target: LAMA2; (+) strand; PAM type: NRG; PAM sequence: AAG
ttttgtgtgtgtagggggaa

SEQ ID NO: 184179 - DNA, 20 bp, Artificial Sequence
  Description of Artificial Sequence: Synthetic oligonucleotide
  Target: LAMA2; (+) strand; PAM type: NRG; PAM sequence: AGG
tttgtgtgtgtagggggaaa

SEQ ID NO: 184180 - DNA, 20 bp, Artificial Sequence
  Description of Artificial Sequence: Synthetic oligonucleotide
  Target: LAMA2; (+) strand; PAM type: NRG; PAM sequence: GGG
ttgtgtgtgtagggggaaaa

SEQ ID NO: 184181 - DNA, 20 bp, Artificial Sequence
  Description of Artificial Sequence: Synthetic oligonucleotide
  Target: LAMA2; (+) strand; PAM type: NRG; PAM sequence: AAG
aaaagggtgtcttcttttta

SEQ ID NO: 184182 - DNA, 20 bp, Artificial Sequence
  Description of Artificial Sequence: Synthetic oligonucleotide
  Target: LAMA2; (+) strand; PAM type: NRG; PAM sequence: AGG
aaagggtgtcttctttttaa

SEQ ID NO: 184183 - DNA, 20 bp, Artificial Sequence
  Description of Artificial Sequence: Synthetic oligonucleotide
  Target: LAMA2; (+) strand; PAM type: NRG; PAM sequence: AAG
ttctttttaaaggttactaa

SEQ ID NO: 184184 - DNA, 20 bp, Artificial Sequence
  Description of Artificial Sequence: Synthetic oligonucleotide
  Target: LAMA2; (+) strand; PAM type: NRG; PAM sequence: AAG
taaaggttactaaaagttaa

SEQ ID NO: 184185 - DNA, 20 bp, Artificial Sequence
  Description of Artificial Sequence: Synthetic oligonucleotide
  Target: LAMA2; (+) strand; PAM type: NRG; PAM sequence: CAG
actaaaagttaaaagtttta

SEQ ID NO: 184186 - DNA, 20 bp, Artificial Sequence
  Description of Artificial Sequence: Synthetic oligonucleotide
  Target: LAMA2; (+) strand; PAM type: NRG; PAM sequence: AAG
ttttgtaacaaatatttatt

SEQ ID NO: 184187 - DNA, 20 bp, Artificial Sequence
  Description of Artificial Sequence: Synthetic oligonucleotide
  Target: LAMA2; (+) strand; PAM type: NRG; PAM sequence: AAG
atatttattaagcacctact

SEQ ID NO: 184188 - DNA, 20 bp, Artificial Sequence
  Description of Artificial Sequence: Synthetic oligonucleotide
  Target: LAMA2; (+) strand; PAM type: NRG; PAM sequence: AAG
ttaagcacctactaagtgca

SEQ ID NO: 184189 - DNA, 20 bp, Artificial Sequence
  Description of Artificial Sequence: Synthetic oligonucleotide
  Target: LAMA2; (+) strand; PAM type: NRG; PAM sequence: TAG
gaatacgatattatcattgc

SEQ ID NO: 184190 - DNA, 20 bp, Artificial Sequence
  Description of Artificial Sequence: Synthetic oligonucleotide
  Target: LAMA2; (+) strand; PAM type: NRG; PAM sequence: CAG
acgatattatcattgctagt

SEQ ID NO: 184191 - DNA, 20 bp, Artificial Sequence
  Description of Artificial Sequence: Synthetic oligonucleotide
  Target: LAMA2; (+) strand; PAM type: NRG; PAM sequence: GAG
gatattatcattgctagtca

SEQ ID NO: 184192 - DNA, 20 bp, Artificial Sequence
  Description of Artificial Sequence: Synthetic oligonucleotide
  Target: LAMA2; (+) strand; PAM type: NRG; PAM sequence: AAG
atcattgctagtcagagaaa

SEQ ID NO: 184193 - DNA, 20 bp, Artificial Sequence
  Description of Artificial Sequence: Synthetic oligonucleotide
  Target: LAMA2; (+) strand; PAM type: NRG; PAM sequence: GAG
cattgctagtcagagaaaaa

SEQ ID NO: 184194 - DNA, 20 bp, Artificial Sequence
  Description of Artificial Sequence: Synthetic oligonucleotide
  Target: LAMA2; (+) strand; PAM type: NRG; PAM sequence: AGG
attgctagtcagagaaaaag

SEQ ID NO: 184195 - DNA, 20 bp, Artificial Sequence
  Description of Artificial Sequence: Synthetic oligonucleotide
  Target: LAMA2; (+) strand; PAM type: NRG; PAM sequence: GGG
ttgctagtcagagaaaaaga

SEQ ID NO: 184196 - DNA, 20 bp, Artificial Sequence
  Description of Artificial Sequence: Synthetic oligonucleotide
  Target: LAMA2; (+) strand; PAM type: NRG; PAM sequence: GAG
gctagtcagagaaaaagagg

SEQ ID NO: 184197 - DNA, 20 bp, Artificial Sequence
  Description of Artificial Sequence: Synthetic oligonucleotide
  Target: LAMA2; (+) strand; PAM type: NRG; PAM sequence: GAG
tagtcagagaaaaagaggga

SEQ ID NO: 184198 - DNA, 20 bp, Artificial Sequence
  Description of Artificial Sequence: Synthetic oligonucleotide
  Target: LAMA2; (+) strand; PAM type: NRG; PAM sequence: TAG
gagagttgctttttctgcca

SEQ ID NO: 184199 - DNA, 20 bp, Artificial Sequence
  Description of Artificial Sequence: Synthetic oligonucleotide
  Target: LAMA2; (+) strand; PAM type: NRG; PAM sequence: TGG
cacttttattccatgaattc

SEQ ID NO: 184200 - DNA, 20 bp, Artificial Sequence
  Description of Artificial Sequence: Synthetic oligonucleotide
  Target: LAMA2; (+) strand; PAM type: NRG; PAM sequence: CAG
ttttattccatgaattctgg

SEQ ID NO: 184201 - DNA, 20 bp, Artificial Sequence
  Description of Artificial Sequence: Synthetic oligonucleotide
  Target: LAMA2; (+) strand; PAM type: NRG; PAM sequence: AGG
tttattccatgaattctggc

SEQ ID NO: 184202 - DNA, 20 bp, Artificial Sequence
  Description of Artificial Sequence: Synthetic oligonucleotide
  Target: LAMA2; (+) strand; PAM type: NRG; PAM sequence: TGG
tctaaatgtaaaataattaa

SEQ ID NO: 184203 - DNA, 20 bp, Artificial Sequence
  Description of Artificial Sequence: Synthetic oligonucleotide
  Target: LAMA2; (+) strand; PAM type: NRG; PAM sequence: AAG
aaaataattaatggacaaat

SEQ ID NO: 184204 - DNA, 20 bp, Artificial Sequence
  Description of Artificial Sequence: Synthetic oligonucleotide
  Target: LAMA2; (+) strand; PAM type: NRG; PAM sequence: AGG
aaataattaatggacaaata

SEQ ID NO: 184205 - DNA, 20 bp, Artificial Sequence
  Description of Artificial Sequence: Synthetic oligonucleotide
  Target: LAMA2; (+) strand; PAM type: NRG; PAM sequence: TAG
ggataataatatcttccttc

SEQ ID NO: 184206 - DNA, 20 bp, Artificial Sequence
  Description of Artificial Sequence: Synthetic oligonucleotide
  Target: LAMA2; (+) strand; PAM type: NRG; PAM sequence: AGG
gataataatatcttccttct

SEQ ID NO: 184207 - DNA, 20 bp, Artificial Sequence
  Description of Artificial Sequence: Synthetic oligonucleotide
  Target: LAMA2; (+) strand; PAM type: NRG; PAM sequence: GAG
ccttctaggattactattat

SEQ ID NO: 184208 - DNA, 20 bp, Artificial Sequence
  Description of Artificial Sequence: Synthetic oligonucleotide
  Target: LAMA2; (+) strand; PAM type: NRG; PAM sequence: AGG
cttctaggattactattatg

SEQ ID NO: 184209 - DNA, 20 bp, Artificial Sequence
  Description of Artificial Sequence: Synthetic oligonucleotide
  Target: LAMA2; (+) strand; PAM type: NRG; PAM sequence: GGG
ttctaggattactattatga

SEQ ID NO: 184210 - DNA, 20 bp, Artificial Sequence
  Description of Artificial Sequence: Synthetic oligonucleotide
  Target: LAMA2; (+) strand; PAM type: NRG; PAM sequence: AAG
gattactattatgagggaat

SEQ ID NO: 184211 - DNA, 20 bp, Artificial Sequence
  Description of Artificial Sequence: Synthetic oligonucleotide
  Target: LAMA2; (+) strand; PAM type: NRG; PAM sequence: AAG
taagttatacattttatgca

SEQ ID NO: 184212 - DNA, 20 bp, Artificial Sequence
  Description of Artificial Sequence: Synthetic oligonucleotide
  Target: LAMA2; (+) strand; PAM type: NRG; PAM sequence: TAG
tacattttatgcaaagcacc

SEQ ID NO: 184213 - DNA, 20 bp, Artificial Sequence
  Description of Artificial Sequence: Synthetic oligonucleotide
  Target: LAMA2; (+) strand; PAM type: NRG; PAM sequence: TGG
aaagcacctagcaccatgct

SEQ ID NO: 184214 - DNA, 20 bp, Artificial Sequence
  Description of Artificial Sequence: Synthetic oligonucleotide
  Target: LAMA2; (+) strand; PAM type: NRG; PAM sequence: AAG
ctagcaccatgcttggctca

SEQ ID NO: 184215 - DNA, 20 bp, Artificial Sequence
  Description of Artificial Sequence: Synthetic oligonucleotide
  Target: LAMA2; (+) strand; PAM type: NRG; PAM sequence: TAG
ctctctatttattcttttgt

SEQ ID NO: 184216 - DNA, 20 bp, Artificial Sequence
  Description of Artificial Sequence: Synthetic oligonucleotide
  Target: LAMA2; (+) strand; PAM type: NRG; PAM sequence: TAG
tttctttaacttaattattc

SEQ ID NO: 184217 - DNA, 20 bp, Artificial Sequence
  Description of Artificial Sequence: Synthetic oligonucleotide
  Target: LAMA2; (+) strand; PAM type: NRG; PAM sequence: TAG
tttaacttaattattctagt

SEQ ID NO: 184218 - DNA, 20 bp, Artificial Sequence
  Description of Artificial Sequence: Synthetic oligonucleotide
  Target: LAMA2; (+) strand; PAM type: NRG; PAM sequence: TAG
agtttaacttttcacatttt

SEQ ID NO: 184219 - DNA, 20 bp, Artificial Sequence
  Description of Artificial Sequence: Synthetic oligonucleotide
  Target: LAMA2; (+) strand; PAM type: NRG; PAM sequence: AGG
gtttaacttttcacattttt

SEQ ID NO: 184220 - DNA, 20 bp, Artificial Sequence
  Description of Artificial Sequence: Synthetic oligonucleotide
  Target: LAMA2; (+) strand; PAM type: NRG; PAM sequence: GGG
tttaacttttcacattttta

SEQ ID NO: 184221 - DNA, 20 bp, Artificial Sequence
  Description of Artificial Sequence: Synthetic oligonucleotide
  Target: LAMA2; (+) strand; PAM type: NRG; PAM sequence: TGG
aacttttcacatttttaggg

SEQ ID NO: 184222 - DNA, 20 bp, Artificial Sequence
  Description of Artificial Sequence: Synthetic oligonucleotide
  Target: LAMA2; (+) strand; PAM type: NRG; PAM sequence: GGG
acttttcacatttttagggt

SEQ ID NO: 184223 - DNA, 20 bp, Artificial Sequence
  Description of Artificial Sequence: Synthetic oligonucleotide
  Target: LAMA2; (+) strand; PAM type: NRG; PAM sequence: TGG
tttcacatttttagggtggg

SEQ ID NO: 184224 - DNA, 20 bp, Artificial Sequence
  Description of Artificial Sequence: Synthetic oligonucleotide
  Target: LAMA2; (+) strand; PAM type: NRG; PAM sequence: CAG
cacatttttagggtgggtgg

SEQ ID NO: 184225 - DNA, 20 bp, Artificial Sequence
  Description of Artificial Sequence: Synthetic oligonucleotide
  Target: LAMA2; (+) strand; PAM type: NRG; PAM sequence: AGG
acatttttagggtgggtggc

SEQ ID NO: 184226 - DNA, 20 bp, Artificial Sequence
  Description of Artificial Sequence: Synthetic oligonucleotide
  Target: LAMA2; (+) strand; PAM type: NRG; PAM sequence: TGG
ttagggtgggtggcaggtgc

SEQ ID NO: 184227 - DNA, 20 bp, Artificial Sequence
  Description of Artificial Sequence: Synthetic oligonucleotide
  Target: LAMA2; (+) strand; PAM type: NRG; PAM sequence: AAG
ggtggcaggtgctggaaaaa

SEQ ID NO: 184228 - DNA, 20 bp, Artificial Sequence
  Description of Artificial Sequence: Synthetic oligonucleotide
  Target: LAMA2; (+) strand; PAM type: NRG; PAM sequence: AGG
gtggcaggtgctggaaaaaa

SEQ ID NO: 184229 - DNA, 20 bp, Artificial Sequence
  Description of Artificial Sequence: Synthetic oligonucleotide
  Target: LAMA2; (+) strand; PAM type: NRG; PAM sequence: GGG
tggcaggtgctggaaaaaaa

SEQ ID NO: 184230 - DNA, 20 bp, Artificial Sequence
  Description of Artificial Sequence: Synthetic oligonucleotide
  Target: LAMA2; (+) strand; PAM type: NRG; PAM sequence: TGG
gtgctggaaaaaaagggatg

SEQ ID NO: 184231 - DNA, 20 bp, Artificial Sequence
  Description of Artificial Sequence: Synthetic oligonucleotide
  Target: LAMA2; (+) strand; PAM type: NRG; PAM sequence: GAG
tggaaaaaaagggatgtggt

SEQ ID NO: 184232 - DNA, 20 bp, Artificial Sequence
  Description of Artificial Sequence: Synthetic oligonucleotide
  Target: LAMA2; (+) strand; PAM type: NRG; PAM sequence: AAG
gtggtgagtattcaattttt

SEQ ID NO: 184233 - DNA, 20 bp, Artificial Sequence
  Description of Artificial Sequence: Synthetic oligonucleotide
  Target: LAMA2; (+) strand; PAM type: NRG; PAM sequence: TGG
gcaattccaaacccttttat

SEQ ID NO: 184234 - DNA, 20 bp, Artificial Sequence
  Description of Artificial Sequence: Synthetic oligonucleotide
  Target: LAMA2; (+) strand; PAM type: NRG; PAM sequence: TGG
atatatacattgtaatgatg

SEQ ID NO: 184235 - DNA, 20 bp, Artificial Sequence
  Description of Artificial Sequence: Synthetic oligonucleotide
  Target: LAMA2; (+) strand; PAM type: NRG; PAM sequence: AAG
taatgatgtggttattaaat

SEQ ID NO: 184236 - DNA, 20 bp, Artificial Sequence
  Description of Artificial Sequence: Synthetic oligonucleotide
  Target: LAMA2; (+) strand; PAM type: NRG; PAM sequence: CAG
accattttccatttttgtat

SEQ ID NO: 184237 - DNA, 20 bp, Artificial Sequence
  Description of Artificial Sequence: Synthetic oligonucleotide
  Target: LAMA2; (+) strand; PAM type: NRG; PAM sequence: TAG
tccatttttgtatcagaatt

SEQ ID NO: 184238 - DNA, 20 bp, Artificial Sequence
  Description of Artificial Sequence: Synthetic oligonucleotide
  Target: LAMA2; (+) strand; PAM type: NRG; PAM sequence: CAG
ttttttcttgctctgtcacc

SEQ ID NO: 184239 - DNA, 20 bp, Artificial Sequence
  Description of Artificial Sequence: Synthetic oligonucleotide
  Target: LAMA2; (+) strand; PAM type: NRG; PAM sequence: AGG
tttttcttgctctgtcaccc

SEQ ID NO: 184240 - DNA, 20 bp, Artificial Sequence
  Description of Artificial Sequence: Synthetic oligonucleotide
  Target: LAMA2; (+) strand; PAM type: NRG; PAM sequence: TGG
tcttgctctgtcacccaggc

SEQ ID NO: 184241 - DNA, 20 bp, Artificial Sequence
  Description of Artificial Sequence: Synthetic oligonucleotide
  Target: LAMA2; (+) strand; PAM type: NRG; PAM sequence: CAG
ctgtcacccaggctggtgtg

SEQ ID NO: 184242 - DNA, 20 bp, Artificial Sequence
  Description of Artificial Sequence: Synthetic oligonucleotide
  Target: LAMA2; (+) strand; PAM type: NRG; PAM sequence: TGG
tcacccaggctggtgtgcag

SEQ ID NO: 184243 - DNA, 20 bp, Artificial Sequence
  Description of Artificial Sequence: Synthetic oligonucleotide
  Target: LAMA2; (+) strand; PAM type: NRG; PAM sequence: TGG
ggtgtgcagtggcgcaatca

SEQ ID NO: 184244 - DNA, 20 bp, Artificial Sequence
  Description of Artificial Sequence: Synthetic oligonucleotide
  Target: LAMA2; (+) strand; PAM type: NRG; PAM sequence: CAG
ggcgcaatcatggcttactg

SEQ ID NO: 184245 - DNA, 20 bp, Artificial Sequence
  Description of Artificial Sequence: Synthetic oligonucleotide
  Target: LAMA2; (+) strand; PAM type: NRG; PAM sequence: CAG
ttactgcagccttaacctcc

SEQ ID NO: 184246 - DNA, 20 bp, Artificial Sequence
  Description of Artificial Sequence: Synthetic oligonucleotide
  Target: LAMA2; (+) strand; PAM type: NRG; PAM sequence: AGG
tactgcagccttaacctccc

SEQ ID NO: 184247 - DNA, 20 bp, Artificial Sequence
  Description of Artificial Sequence: Synthetic oligonucleotide
  Target: LAMA2; (+) strand; PAM type: NRG; PAM sequence: CAG
cagccttaacctcccaggct

SEQ ID NO: 184248 - DNA, 20 bp, Artificial Sequence
  Description of Artificial Sequence: Synthetic oligonucleotide
  Target: LAMA2; (+) strand; PAM type: NRG; PAM sequence: AGG
agccttaacctcccaggctc

SEQ ID NO: 184249 - DNA, 20 bp, Artificial Sequence
  Description of Artificial Sequence: Synthetic oligonucleotide
  Target: LAMA2; (+) strand; PAM type: NRG; PAM sequence: CAG
ctcaggcgatcctcatgcct

SEQ ID NO: 184250 - DNA, 20 bp, Artificial Sequence
  Description of Artificial Sequence: Synthetic oligonucleotide
  Target: LAMA2; (+) strand; PAM type: NRG; PAM sequence: GAG
tcctcatgcctcagcctcct

SEQ ID NO: 184251 - DNA, 20 bp, Artificial Sequence
  Description of Artificial Sequence: Synthetic oligonucleotide
  Target: LAMA2; (+) strand; PAM type: NRG; PAM sequence: TAG
tcatgcctcagcctcctgag

SEQ ID NO: 184252 - DNA, 20 bp, Artificial Sequence
  Description of Artificial Sequence: Synthetic oligonucleotide
  Target: LAMA2; (+) strand; PAM type: NRG; PAM sequence: TGG
gcctcagcctcctgagtagc

SEQ ID NO: 184253 - DNA, 20 bp, Artificial Sequence
  Description of Artificial Sequence: Synthetic oligonucleotide
  Target: LAMA2; (+) strand; PAM type: NRG; PAM sequence: GGG
cctcagcctcctgagtagct

SEQ ID NO: 184254 - DNA, 20 bp, Artificial Sequence
  Description of Artificial Sequence: Synthetic oligonucleotide
  Target: LAMA2; (+) strand; PAM type: NRG; PAM sequence: CAG
ctcctgagtagctgggactg

SEQ ID NO: 184255 - DNA, 20 bp, Artificial Sequence
  Description of Artificial Sequence: Synthetic oligonucleotide
  Target: LAMA2; (+) strand; PAM type: NRG; PAM sequence: AGG
tcctgagtagctgggactgc

SEQ ID NO: 184256 - DNA, 20 bp, Artificial Sequence
  Description of Artificial Sequence: Synthetic oligonucleotide
  Target: LAMA2; (+) strand; PAM type: NRG; PAM sequence: CGG
caggtgcattccaccatgcc

SEQ ID NO: 184257 - DNA, 20 bp, Artificial Sequence
  Description of Artificial Sequence: Synthetic oligonucleotide
  Target: LAMA2; (+) strand; PAM type: NRG; PAM sequence: TAG
gctaatttttgtatttttaa

SEQ ID NO: 184258 - DNA, 20 bp, Artificial Sequence
  Description of Artificial Sequence: Synthetic oligonucleotide
  Target: LAMA2; (+) strand; PAM type: NRG; PAM sequence: GAG
taatttttgtatttttaata

SEQ ID NO: 184259 - DNA, 20 bp, Artificial Sequence
  Description of Artificial Sequence: Synthetic oligonucleotide
  Target: LAMA2; (+) strand; PAM type: NRG; PAM sequence: TGG
ttttgtatttttaatagaga

SEQ ID NO: 184260 - DNA, 20 bp, Artificial Sequence
  Description of Artificial Sequence: Synthetic oligonucleotide
  Target: LAMA2; (+) strand; PAM type: NRG; PAM sequence: GGG
tttgtatttttaatagagat

SEQ ID NO: 184261 - DNA, 20 bp, Artificial Sequence
  Description of Artificial Sequence: Synthetic oligonucleotide
  Target: LAMA2; (+) strand; PAM type: NRG; PAM sequence: TGG
gagatgggatttcaccatgt

SEQ ID NO: 184262 - DNA, 20 bp, Artificial Sequence
  Description of Artificial Sequence: Synthetic oligonucleotide
  Target: LAMA2; (+) strand; PAM type: NRG; PAM sequence: CAG
tgggatttcaccatgttggc

SEQ ID NO: 184263 - DNA, 20 bp, Artificial Sequence
  Description of Artificial Sequence: Synthetic oligonucleotide
  Target: LAMA2; (+) strand; PAM type: NRG; PAM sequence: AGG
gggatttcaccatgttggcc

SEQ ID NO: 184264 - DNA, 20 bp, Artificial Sequence
  Description of Artificial Sequence: Synthetic oligonucleotide
  Target: LAMA2; (+) strand; PAM type: NRG; PAM sequence: TGG
tttcaccatgttggccaggc

SEQ ID NO: 184265 - DNA, 20 bp, Artificial Sequence
  Description of Artificial Sequence: Synthetic oligonucleotide
  Target: LAMA2; (+) strand; PAM type: NRG; PAM sequence: TGG
ccaggctggtctcgaactct

SEQ ID NO: 184266 - DNA, 20 bp, Artificial Sequence
  Description of Artificial Sequence: Synthetic oligonucleotide
  Target: LAMA2; (+) strand; PAM type: NRG; PAM sequence: GGG
caggctggtctcgaactctt

SEQ ID NO: 184267 - DNA, 20 bp, Artificial Sequence
  Description of Artificial Sequence: Synthetic oligonucleotide
  Target: LAMA2; (+) strand; PAM type: NRG; PAM sequence: AAG
gctggtctcgaactcttggg

SEQ ID NO: 184268 - DNA, 20 bp, Artificial Sequence
  Description of Artificial Sequence: Synthetic oligonucleotide
  Target: LAMA2; (+) strand; PAM type: NRG; PAM sequence: CAG
gggaagtgatccacctgcct

SEQ ID NO: 184269 - DNA, 20 bp, Artificial Sequence
  Description of Artificial Sequence: Synthetic oligonucleotide
  Target: LAMA2; (+) strand; PAM type: NRG; PAM sequence: AAG
ccacctgcctcagcctgcca

SEQ ID NO: 184270 - DNA, 20 bp, Artificial Sequence
  Description of Artificial Sequence: Synthetic oligonucleotide
  Target: LAMA2; (+) strand; PAM type: NRG; PAM sequence: GAG
cctcagcctgccaaagtgtt

SEQ ID NO: 184271 - DNA, 20 bp, Artificial Sequence
  Description of Artificial Sequence: Synthetic oligonucleotide
  Target: LAMA2; (+) strand; PAM type: NRG; PAM sequence: CAG
ctgccaaagtgttgagatta

SEQ ID NO: 184272 - DNA, 20 bp, Artificial Sequence
  Description of Artificial Sequence: Synthetic oligonucleotide
  Target: LAMA2; (+) strand; PAM type: NRG; PAM sequence: AGG
tgccaaagtgttgagattac

SEQ ID NO: 184273 - DNA, 20 bp, Artificial Sequence
  Description of Artificial Sequence: Synthetic oligonucleotide
  Target: LAMA2; (+) strand; PAM type: NRG; PAM sequence: AAG
agtgttgagattacaggcat

SEQ ID NO: 184274 - DNA, 20 bp, Artificial Sequence
  Description of Artificial Sequence: Synthetic oligonucleotide
  Target: LAMA2; (+) strand; PAM type: NRG; PAM sequence: TGG
caggcataagccaccacgcc

SEQ ID NO: 184275 - DNA, 20 bp, Artificial Sequence
  Description of Artificial Sequence: Synthetic oligonucleotide
  Target: LAMA2; (+) strand; PAM type: NRG; PAM sequence: CAG
ataagccaccacgcctggcc

SEQ ID NO: 184276 - DNA, 20 bp, Artificial Sequence
  Description of Artificial Sequence: Synthetic oligonucleotide
  Target: LAMA2; (+) strand; PAM type: NRG; PAM sequence: TAG
accacgcctggcccagaatt

SEQ ID NO: 184277 - DNA, 20 bp, Artificial Sequence
  Description of Artificial Sequence: Synthetic oligonucleotide
  Target: LAMA2; (+) strand; PAM type: NRG; PAM sequence: AAG
ggcccagaatttagcttttt

SEQ ID NO: 184278 - DNA, 20 bp, Artificial Sequence
  Description of Artificial Sequence: Synthetic oligonucleotide
  Target: LAMA2; (+) strand; PAM type: NRG; PAM sequence: GAG
cccagaatttagctttttaa

SEQ ID NO: 184279 - DNA, 20 bp, Artificial Sequence
  Description of Artificial Sequence: Synthetic oligonucleotide
  Target: LAMA2; (+) strand; PAM type: NRG; PAM sequence: AAG
ctttttaagagttgttattt

SEQ ID NO: 184280 - DNA, 20 bp, Artificial Sequence
  Description of Artificial Sequence: Synthetic oligonucleotide
  Target: LAMA2; (+) strand; PAM type: NRG; PAM sequence: AAG
agagttgttatttaagaact

SEQ ID NO: 184281 - DNA, 20 bp, Artificial Sequence
  Description of Artificial Sequence: Synthetic oligonucleotide
  Target: LAMA2; (+) strand; PAM type: NRG; PAM sequence: AAG
atttaagaactaagacttaa

SEQ ID NO: 184282 - DNA, 20 bp, Artificial Sequence
  Description of Artificial Sequence: Synthetic oligonucleotide
  Target: LAMA2; (+) strand; PAM type: NRG; PAM sequence: AAG
gacttaaaagttaactcctg

SEQ ID NO: 184283 - DNA, 20 bp, Artificial Sequence
  Description of Artificial Sequence: Synthetic oligonucleotide
  Target: LAMA2; (+) strand; PAM type: NRG; PAM sequence: GAG
taaaagttaactcctgaagt

SEQ ID NO: 184284 - DNA, 20 bp, Artificial Sequence
  Description of Artificial Sequence: Synthetic oligonucleotide
  Target: LAMA2; (+) strand; PAM type: NRG; PAM sequence: GAG
agtgagaactgcctatttat

SEQ ID NO: 184285 - DNA, 20 bp, Artificial Sequence
  Description of Artificial Sequence: Synthetic oligonucleotide
  Target: LAMA2; (+) strand; PAM type: NRG; PAM sequence: TAG
tatgagctccatatttgtgc

SEQ ID NO: 184286 - DNA, 20 bp, Artificial Sequence
  Description of Artificial Sequence: Synthetic oligonucleotide
  Target: LAMA2; (+) strand; PAM type: NRG; PAM sequence: CAG
gctccatatttgtgctagca

SEQ ID NO: 184287 - DNA, 20 bp, Artificial Sequence
  Description of Artificial Sequence: Synthetic oligonucleotide
  Target: LAMA2; (+) strand; PAM type: NRG; PAM sequence: CAG
atttgtgctagcacagttga

SEQ ID NO: 184288 - DNA, 20 bp, Artificial Sequence
  Description of Artificial Sequence: Synthetic oligonucleotide
  Target: LAMA2; (+) strand; PAM type: NRG; PAM sequence: AAG
tgctagcacagttgacagaa

SEQ ID NO: 184289 - DNA, 20 bp, Artificial Sequence
  Description of Artificial Sequence: Synthetic oligonucleotide
  Target: LAMA2; (+) strand; PAM type: NRG; PAM sequence: CAG
tgacagaaaagatctattct

SEQ ID NO: 184290 - DNA, 20 bp, Artificial Sequence
  Description of Artificial Sequence: Synthetic oligonucleotide
  Target: LAMA2; (+) strand; PAM type: NRG; PAM sequence: CAG
cccatcacacccaatcctgc

SEQ ID NO: 184291 - DNA, 20 bp, Artificial Sequence
  Description of Artificial Sequence: Synthetic oligonucleotide
  Target: LAMA2; (+) strand; PAM type: NRG; PAM sequence: CAG
ccaatcctgccagcaactta

SEQ ID NO: 184292 - DNA, 20 bp, Artificial Sequence
  Description of Artificial Sequence: Synthetic oligonucleotide
  Target: LAMA2; (+) strand; PAM type: NRG; PAM sequence: GAG
ctgccagcaacttacagcat

SEQ ID NO: 184293 - DNA, 20 bp, Artificial Sequence
  Description of Artificial Sequence: Synthetic oligonucleotide
  Target: LAMA2; (+) strand; PAM type: NRG; PAM sequence: AGG
tgccagcaacttacagcatg

SEQ ID NO: 184294 - DNA, 20 bp, Artificial Sequence
  Description of Artificial Sequence: Synthetic oligonucleotide
  Target: LAMA2; (+) strand; PAM type: NRG; PAM sequence: CAG
ggacaacattcactatacta

SEQ ID NO: 184295 - DNA, 20 bp, Artificial Sequence
  Description of Artificial Sequence: Synthetic oligonucleotide
  Target: LAMA2; (+) strand; PAM type: NRG; PAM sequence: AGG
gacaacattcactatactac

SEQ ID NO: 184296 - DNA, 20 bp, Artificial Sequence
  Description of Artificial Sequence: Synthetic oligonucleotide
  Target: LAMA2; (+) strand; PAM type: NRG; PAM sequence: GGG
acaacattcactatactaca

SEQ ID NO: 184297 - DNA, 20 bp, Artificial Sequence
  Description of Artificial Sequence: Synthetic oligonucleotide
  Target: LAMA2; (+) strand; PAM type: NRG; PAM sequence: AAG
actatactacagggcaatgt

SEQ ID NO: 184298 - DNA, 20 bp, Artificial Sequence
  Description of Artificial Sequence: Synthetic oligonucleotide
  Target: LAMA2; (+) strand; PAM type: NRG; PAM sequence: AGG
ctatactacagggcaatgta

SEQ ID NO: 184299 - DNA, 20 bp, Artificial Sequence
  Description of Artificial Sequence: Synthetic oligonucleotide
  Target: LAMA2; (+) strand; PAM type: NRG; PAM sequence: GGG
tatactacagggcaatgtaa

SEQ ID NO: 184300 - DNA, 20 bp, Artificial Sequence
  Description of Artificial Sequence: Synthetic oligonucleotide
  Target: LAMA2; (+) strand; PAM type: NRG; PAM sequence: GAG
gggcaatgtaagggtgtctt

SEQ ID NO: 184301 - DNA, 20 bp, Artificial Sequence
  Description of Artificial Sequence: Synthetic oligonucleotide
  Target: LAMA2; (+) strand; PAM type: NRG; PAM sequence: AAG
aatgtaagggtgtcttgaga

SEQ ID NO: 184302 - DNA, 20 bp, Artificial Sequence
  Description of Artificial Sequence: Synthetic oligonucleotide
  Target: LAMA2; (+) strand; PAM type: NRG; PAM sequence: TGG
gaaagccctgccttgtgaaa

SEQ ID NO: 184303 - DNA, 20 bp, Artificial Sequence
  Description of Artificial Sequence: Synthetic oligonucleotide
  Target: LAMA2; (+) strand; PAM type: NRG; PAM sequence: TAG
ttaattcatgttgaacacgc

SEQ ID NO: 184304 - DNA, 20 bp, Artificial Sequence
  Description of Artificial Sequence: Synthetic oligonucleotide
  Target: LAMA2; (+) strand; PAM type: NRG; PAM sequence: AAG
atgttgaacacgctagatta

SEQ ID NO: 184305 - DNA, 20 bp, Artificial Sequence
  Description of Artificial Sequence: Synthetic oligonucleotide
  Target: LAMA2; (+) strand; PAM type: NRG; PAM sequence: GAG
gttgaacacgctagattaaa

SEQ ID NO: 184306 - DNA, 20 bp, Artificial Sequence
  Description of Artificial Sequence: Synthetic oligonucleotide
  Target: LAMA2; (+) strand; PAM type: NRG; PAM sequence: TGG
tattatctcatttgatatta

SEQ ID NO: 184307 - DNA, 20 bp, Artificial Sequence
  Description of Artificial Sequence: Synthetic oligonucleotide
  Target: LAMA2; (+) strand; PAM type: NRG; PAM sequence: TAG
tatctcatttgatattatgg

SEQ ID NO: 184308 - DNA, 20 bp, Artificial Sequence
  Description of Artificial Sequence: Synthetic oligonucleotide
  Target: LAMA2; (+) strand; PAM type: NRG; PAM sequence: TAG
tatacttctctcttattctt

SEQ ID NO: 184309 - DNA, 20 bp, Artificial Sequence
  Description of Artificial Sequence: Synthetic oligonucleotide
  Target: LAMA2; (+) strand; PAM type: NRG; PAM sequence: GAG
ctcttattctttagcccatc

SEQ ID NO: 184310 - DNA, 20 bp, Artificial Sequence
  Description of Artificial Sequence: Synthetic oligonucleotide
  Target: LAMA2; (+) strand; PAM type: NRG; PAM sequence: GAG
cttattctttagcccatcga

SEQ ID NO: 184311 - DNA, 20 bp, Artificial Sequence
  Description of Artificial Sequence: Synthetic oligonucleotide
  Target: LAMA2; (+) strand; PAM type: NRG; PAM sequence: TAG
ttctttagcccatcgagagc

SEQ ID NO: 184312 - DNA, 20 bp, Artificial Sequence
  Description of Artificial Sequence: Synthetic oligonucleotide
  Target: LAMA2; (+) strand; PAM type: NRG; PAM sequence: GAG
ctttagcccatcgagagcta

SEQ ID NO: 184313 - DNA, 20 bp, Artificial Sequence
  Description of Artificial Sequence: Synthetic oligonucleotide
  Target: LAMA2; (+) strand; PAM type: NRG; PAM sequence: TGG
atttctacatgttctatttg

SEQ ID NO: 184314 - DNA, 20 bp, Artificial Sequence
  Description of Artificial Sequence: Synthetic oligonucleotide
  Target: LAMA2; (+) strand; PAM type: NRG; PAM sequence: TGG
ctatttgtggatatttttca

SEQ ID NO: 184315 - DNA, 20 bp, Artificial Sequence
  Description of Artificial Sequence: Synthetic oligonucleotide
  Target: LAMA2; (+) strand; PAM type: NRG; PAM sequence: GAG
atttgtggatatttttcatg

SEQ ID NO: 184316 - DNA, 20 bp, Artificial Sequence
  Description of Artificial Sequence: Synthetic oligonucleotide
  Target: LAMA2; (+) strand; PAM type: NRG; PAM sequence: AGG
tttgtggatatttttcatgg

SEQ ID NO: 184317 - DNA, 20 bp, Artificial Sequence
  Description of Artificial Sequence: Synthetic oligonucleotide
  Target: LAMA2; (+) strand; PAM type: NRG; PAM sequence: TGG
tggatatttttcatggagga

SEQ ID NO: 184318 - DNA, 20 bp, Artificial Sequence
  Description of Artificial Sequence: Synthetic oligonucleotide
  Target: LAMA2; (+) strand; PAM type: NRG; PAM sequence: CAG
atatttttcatggaggatgg

SEQ ID NO: 184319 - DNA, 20 bp, Artificial Sequence
  Description of Artificial Sequence: Synthetic oligonucleotide
  Target: LAMA2; (+) strand; PAM type: NRG; PAM sequence: AGG
tatttttcatggaggatggc

SEQ ID NO: 184320 - DNA, 20 bp, Artificial Sequence
  Description of Artificial Sequence: Synthetic oligonucleotide
  Target: LAMA2; (+) strand; PAM type: NRG; PAM sequence: GAG
tttttcatggaggatggcag

SEQ ID NO: 184321 - DNA, 20 bp, Artificial Sequence
  Description of Artificial Sequence: Synthetic oligonucleotide
  Target: LAMA2; (+) strand; PAM type: NRG; PAM sequence: AGG
ttttcatggaggatggcagg

SEQ ID NO: 184322 - DNA, 20 bp, Artificial Sequence
  Description of Artificial Sequence: Synthetic oligonucleotide
  Target: LAMA2; (+) strand; PAM type: NRG; PAM sequence: TAG
tcatggaggatggcaggagg

SEQ ID NO: 184323 - DNA, 20 bp, Artificial Sequence
  Description of Artificial Sequence: Synthetic oligonucleotide
  Target: LAMA2; (+) strand; PAM type: NRG; PAM sequence: GAG
atggaggatggcaggaggta

SEQ ID NO: 184324 - DNA, 20 bp, Artificial Sequence
  Description of Artificial Sequence: Synthetic oligonucleotide
  Target: LAMA2; (+) strand; PAM type: NRG; PAM sequence: AGG
tggaggatggcaggaggtag

SEQ ID NO: 184325 - DNA, 20 bp, Artificial Sequence
  Description of Artificial Sequence: Synthetic oligonucleotide
  Target: LAMA2; (+) strand; PAM type: NRG; PAM sequence: TAG
aggatggcaggaggtagagg

SEQ ID NO: 184326 - DNA, 20 bp, Artificial Sequence
  Description of Artificial Sequence: Synthetic oligonucleotide
  Target: LAMA2; (+) strand; PAM type: NRG; PAM sequence: AAG
ggcaggaggtagaggtagat

SEQ ID NO: 184327 - DNA, 20 bp, Artificial Sequence
  Description of Artificial Sequence: Synthetic oligonucleotide
  Target: LAMA2; (+) strand; PAM type: NRG; PAM sequence: GAG
caggaggtagaggtagataa

SEQ ID NO: 184328 - DNA, 20 bp, Artificial Sequence
  Description of Artificial Sequence: Synthetic oligonucleotide
  Target: LAMA2; (+) strand; PAM type: NRG; PAM sequence: AGG
aggaggtagaggtagataag

SEQ ID NO: 184329 - DNA, 20 bp, Artificial Sequence
  Description of Artificial Sequence: Synthetic oligonucleotide
  Target: LAMA2; (+) strand; PAM type: NRG; PAM sequence: AAG
tagataagaggctgaacttc

SEQ ID NO: 184330 - DNA, 20 bp, Artificial Sequence
  Description of Artificial Sequence: Synthetic oligonucleotide
  Target: LAMA2; (+) strand; PAM type: NRG; PAM sequence: CAG
aggctgaacttcaagtatta

SEQ ID NO: 184331 - DNA, 20 bp, Artificial Sequence
  Description of Artificial Sequence: Synthetic oligonucleotide
  Target: LAMA2; (+) strand; PAM type: NRG; PAM sequence: TGG
tacagaaatttgttgacatg

SEQ ID NO: 184332 - DNA, 20 bp, Artificial Sequence
  Description of Artificial Sequence: Synthetic oligonucleotide
  Target: LAMA2; (+) strand; PAM type: NRG; PAM sequence: AAG
ttgacatgtggaaacgtgac

SEQ ID NO: 184333 - DNA, 20 bp, Artificial Sequence
  Description of Artificial Sequence: Synthetic oligonucleotide
  Target: LAMA2; (+) strand; PAM type: NRG; PAM sequence: AAG
aaacgtgacaagttctctgc

SEQ ID NO: 184334 - DNA, 20 bp, Artificial Sequence
  Description of Artificial Sequence: Synthetic oligonucleotide
  Target: LAMA2; (+) strand; PAM type: NRG; PAM sequence: TAG
ctgcaagtatgtgcactgtt

SEQ ID NO: 184335 - DNA, 20 bp, Artificial Sequence
  Description of Artificial Sequence: Synthetic oligonucleotide
  Target: LAMA2; (+) strand; PAM type: NRG; PAM sequence: AAG
gtatgtgcactgtttagacc

SEQ ID NO: 184336 - DNA, 20 bp, Artificial Sequence
  Description of Artificial Sequence: Synthetic oligonucleotide
  Target: LAMA2; (+) strand; PAM type: NRG; PAM sequence: AAG
ttagaccaagtctttttaac

SEQ ID NO: 184337 - DNA, 20 bp, Artificial Sequence
  Description of Artificial Sequence: Synthetic oligonucleotide
  Target: LAMA2; (+) strand; PAM type: NRG; PAM sequence: AGG
tagaccaagtctttttaaca

SEQ ID NO: 184338 - DNA, 20 bp, Artificial Sequence
  Description of Artificial Sequence: Synthetic oligonucleotide
  Target: LAMA2; (+) strand; PAM type: NRG; PAM sequence: TAG
ccaagtctttttaacaagga

SEQ ID NO: 184339 - DNA, 20 bp, Artificial Sequence
  Description of Artificial Sequence: Synthetic oligonucleotide
  Target: LAMA2; (+) strand; PAM type: NRG; PAM sequence: TGG
tttaacaaggatagcctgtg

SEQ ID NO: 184340 - DNA, 20 bp, Artificial Sequence
  Description of Artificial Sequence: Synthetic oligonucleotide
  Target: LAMA2; (+) strand; PAM type: NRG; PAM sequence: TAG
ggatagcctgtgtggatttg

SEQ ID NO: 184341 - DNA, 20 bp, Artificial Sequence
  Description of Artificial Sequence: Synthetic oligonucleotide
  Target: LAMA2; (+) strand; PAM type: NRG; PAM sequence: GAG
tgtgtggatttgtagataat

SEQ ID NO: 184342 - DNA, 20 bp, Artificial Sequence
  Description of Artificial Sequence: Synthetic oligonucleotide
  Target: LAMA2; (+) strand; PAM type: NRG; PAM sequence: TGG
tggatttgtagataatgagc

SEQ ID NO: 184343 - DNA, 20 bp, Artificial Sequence
  Description of Artificial Sequence: Synthetic oligonucleotide
  Target: LAMA2; (+) strand; PAM type: NRG; PAM sequence: AAG
cttttacttgaattttattg

SEQ ID NO: 184344 - DNA, 20 bp, Artificial Sequence
  Description of Artificial Sequence: Synthetic oligonucleotide
  Target: LAMA2; (+) strand; PAM type: NRG; PAM sequence: GAG
tttacttgaattttattgaa

SEQ ID NO: 184345 - DNA, 20 bp, Artificial Sequence
  Description of Artificial Sequence: Synthetic oligonucleotide
  Target: LAMA2; (+) strand; PAM type: NRG; PAM sequence: CAG
ttgaattttattgaagagtt

SEQ ID NO: 184346 - DNA, 20 bp, Artificial Sequence
  Description of Artificial Sequence: Synthetic oligonucleotide
  Target: LAMA2; (+) strand; PAM type: NRG; PAM sequence: CAG
gagttcagccgtaaacctca

SEQ ID NO: 184347 - DNA, 20 bp, Artificial Sequence
  Description of Artificial Sequence: Synthetic oligonucleotide
  Target: LAMA2; (+) strand; PAM type: NRG; PAM sequence: AAG
cagtttaaaatgtgaaaact

SEQ ID NO: 184348 - DNA, 20 bp, Artificial Sequence
  Description of Artificial Sequence: Synthetic oligonucleotide
  Target: LAMA2; (+) strand; PAM type: NRG; PAM sequence: AAG
aaaactaagaaaaacaatac

SEQ ID NO: 184349 - DNA, 20 bp, Artificial Sequence
  Description of Artificial Sequence: Synthetic oligonucleotide
  Target: LAMA2; (+) strand; PAM type: NRG; PAM sequence: TAG
actaagaaaaacaatacaag

SEQ ID NO: 184350 - DNA, 20 bp, Artificial Sequence
  Description of Artificial Sequence: Synthetic oligonucleotide
  Target: LAMA2; (+) strand; PAM type: NRG; PAM sequence: TGG
aaaaacaatacaagtagcca

SEQ ID NO: 184351 - DNA, 20 bp, Artificial Sequence
  Description of Artificial Sequence: Synthetic oligonucleotide
  Target: LAMA2; (+) strand; PAM type: NRG; PAM sequence: GAG
aaacaatacaagtagccatg

SEQ ID NO: 184352 - DNA, 20 bp, Artificial Sequence
  Description of Artificial Sequence: Synthetic oligonucleotide
  Target: LAMA2; (+) strand; PAM type: NRG; PAM sequence: GAG
tggagaattcctgtactgat

SEQ ID NO: 184353 - DNA, 20 bp, Artificial Sequence
  Description of Artificial Sequence: Synthetic oligonucleotide
  Target: LAMA2; (+) strand; PAM type: NRG; PAM sequence: TGG
ctgtactgatgagctctctt

SEQ ID NO: 184354 - DNA, 20 bp, Artificial Sequence
  Description of Artificial Sequence: Synthetic oligonucleotide
  Target: LAMA2; (+) strand; PAM type: NRG; PAM sequence: GGG
tgtactgatgagctctcttt

SEQ ID NO: 184355 - DNA, 20 bp, Artificial Sequence
  Description of Artificial Sequence: Synthetic oligonucleotide
  Target: LAMA2; (+) strand; PAM type: NRG; PAM sequence: TGG
gatgagctctctttgggatt

SEQ ID NO: 184356 - DNA, 20 bp, Artificial Sequence
  Description of Artificial Sequence: Synthetic oligonucleotide
  Target: LAMA2; (+) strand; PAM type: NRG; PAM sequence: GGG
atgagctctctttgggattt

SEQ ID NO: 184357 - DNA, 20 bp, Artificial Sequence
  Description of Artificial Sequence: Synthetic oligonucleotide
  Target: LAMA2; (+) strand; PAM type: NRG; PAM sequence: GGG
tgagctctctttgggatttg

SEQ ID NO: 184358 - DNA, 20 bp, Artificial Sequence
  Description of Artificial Sequence: Synthetic oligonucleotide
  Target: LAMA2; (+) strand; PAM type: NRG; PAM sequence: AAG
tctctttgggatttggggaa

SEQ ID NO: 184359 - DNA, 20 bp, Artificial Sequence
  Description of Artificial Sequence: Synthetic oligonucleotide
  Target: LAMA2; (+) strand; PAM type: NRG; PAM sequence: AAG
ctttgggatttggggaaaag

SEQ ID NO: 184360 - DNA, 20 bp, Artificial Sequence
  Description of Artificial Sequence: Synthetic oligonucleotide
  Target: LAMA2; (+) strand; PAM type: NRG; PAM sequence: GAG
gggatttggggaaaagaagt

SEQ ID NO: 184361 - DNA, 20 bp, Artificial Sequence
  Description of Artificial Sequence: Synthetic oligonucleotide
  Target: LAMA2; (+) strand; PAM type: NRG; PAM sequence: CAG
ttggggaaaagaagtgagca

SEQ ID NO: 184362 - DNA, 20 bp, Artificial Sequence
  Description of Artificial Sequence: Synthetic oligonucleotide
  Target: LAMA2; (+) strand; PAM type: NRG; PAM sequence: AAG
gggaaaagaagtgagcacag

SEQ ID NO: 184363 - DNA, 20 bp, Artificial Sequence
  Description of Artificial Sequence: Synthetic oligonucleotide
  Target: LAMA2; (+) strand; PAM type: NRG; PAM sequence: AGG
ggaaaagaagtgagcacaga

SEQ ID NO: 184364 - DNA, 20 bp, Artificial Sequence
  Description of Artificial Sequence: Synthetic oligonucleotide
  Target: LAMA2; (+) strand; PAM type: NRG; PAM sequence: AAG
aagaagtgagcacagaagga

SEQ ID NO: 184365 - DNA, 20 bp, Artificial Sequence
  Description of Artificial Sequence: Synthetic oligonucleotide
  Target: LAMA2; (+) strand; PAM type: NRG; PAM sequence: TAG
gtgagcacagaaggaaagaa

SEQ ID NO: 184366 - DNA, 20 bp, Artificial Sequence
  Description of Artificial Sequence: Synthetic oligonucleotide
  Target: LAMA2; (+) strand; PAM type: NRG; PAM sequence: GAG
gagcacagaaggaaagaata

SEQ ID NO: 184367 - DNA, 20 bp, Artificial Sequence
  Description of Artificial Sequence: Synthetic oligonucleotide
  Target: LAMA2; (+) strand; PAM type: NRG; PAM sequence: AGG
agcacagaaggaaagaatag

SEQ ID NO: 184368 - DNA, 20 bp, Artificial Sequence
  Description of Artificial Sequence: Synthetic oligonucleotide
  Target: LAMA2; (+) strand; PAM type: NRG; PAM sequence: AAG
cagaaggaaagaatagagga

SEQ ID NO: 184369 - DNA, 20 bp, Artificial Sequence
  Description of Artificial Sequence: Synthetic oligonucleotide
  Target: LAMA2; (+) strand; PAM type: NRG; PAM sequence: AGG
agaaggaaagaatagaggaa

SEQ ID NO: 184370 - DNA, 20 bp, Artificial Sequence
  Description of Artificial Sequence: Synthetic oligonucleotide
  Target: LAMA2; (+) strand; PAM type: NRG; PAM sequence: AAG
ggaaagaatagaggaaagga

SEQ ID NO: 184371 - DNA, 20 bp, Artificial Sequence
  Description of Artificial Sequence: Synthetic oligonucleotide
  Target: LAMA2; (+) strand; PAM type: NRG; PAM sequence: TAG
ggaaaggaaagcgatttccc

SEQ ID NO: 184372 - DNA, 20 bp, Artificial Sequence
  Description of Artificial Sequence: Synthetic oligonucleotide
  Target: LAMA2; (+) strand; PAM type: NRG; PAM sequence: CAG
aaggaaagcgatttccctag

SEQ ID NO: 184373 - DNA, 20 bp, Artificial Sequence
  Description of Artificial Sequence: Synthetic oligonucleotide
  Target: LAMA2; (+) strand; PAM type: NRG; PAM sequence: TAG
agcgatttccctagcagctt

SEQ ID NO: 184374 - DNA, 20 bp, Artificial Sequence
  Description of Artificial Sequence: Synthetic oligonucleotide
  Target: LAMA2; (+) strand; PAM type: NRG; PAM sequence: AAG
agctttagtgctacaccttt

SEQ ID NO: 184375 - DNA, 20 bp, Artificial Sequence
  Description of Artificial Sequence: Synthetic oligonucleotide
  Target: LAMA2; (+) strand; PAM type: NRG; PAM sequence: AAG
gtgctacacctttaagacct

SEQ ID NO: 184376 - DNA, 20 bp, Artificial Sequence
  Description of Artificial Sequence: Synthetic oligonucleotide
  Target: LAMA2; (+) strand; PAM type: NRG; PAM sequence: CAG
acacctttaagacctaagta

SEQ ID NO: 184377 - DNA, 20 bp, Artificial Sequence
  Description of Artificial Sequence: Synthetic oligonucleotide
  Target: LAMA2; (+) strand; PAM type: NRG; PAM sequence: AAG
tttaagacctaagtacagtc

SEQ ID NO: 184378 - DNA, 20 bp, Artificial Sequence
  Description of Artificial Sequence: Synthetic oligonucleotide
  Target: LAMA2; (+) strand; PAM type: NRG; PAM sequence: AGG
ttaagacctaagtacagtca

SEQ ID NO: 184379 - DNA, 20 bp, Artificial Sequence
  Description of Artificial Sequence: Synthetic oligonucleotide
  Target: LAMA2; (+) strand; PAM type: NRG; PAM sequence: AAG
cctaagtacagtcaaggcca

SEQ ID NO: 184380 - DNA, 20 bp, Artificial Sequence
  Description of Artificial Sequence: Synthetic oligonucleotide
  Target: LAMA2; (+) strand; PAM type: NRG; PAM sequence: AGG
ctaagtacagtcaaggccaa

SEQ ID NO: 184381 - DNA, 20 bp, Artificial Sequence
  Description of Artificial Sequence: Synthetic oligonucleotide
  Target: LAMA2; (+) strand; PAM type: NRG; PAM sequence: TGG
aggccaaaggataaactgat

SEQ ID NO: 184382 - DNA, 20 bp, Artificial Sequence
  Description of Artificial Sequence: Synthetic oligonucleotide
  Target: LAMA2; (+) strand; PAM type: NRG; PAM sequence: AAG
tggatactgatatgtattta

SEQ ID NO: 184383 - DNA, 20 bp, Artificial Sequence
  Description of Artificial Sequence: Synthetic oligonucleotide
  Target: LAMA2; (+) strand; PAM type: NRG; PAM sequence: GAG
gatactgatatgtatttaaa

SEQ ID NO: 184384 - DNA, 20 bp, Artificial Sequence
  Description of Artificial Sequence: Synthetic oligonucleotide
  Target: LAMA2; (+) strand; PAM type: NRG; PAM sequence: AAG
acatacattttccacttatc

SEQ ID NO: 184385 - DNA, 20 bp, Artificial Sequence
  Description of Artificial Sequence: Synthetic oligonucleotide
  Target: LAMA2; (+) strand; PAM type: NRG; PAM sequence: AGG
catacattttccacttatca

SEQ ID NO: 184386 - DNA, 20 bp, Artificial Sequence
  Description of Artificial Sequence: Synthetic oligonucleotide
  Target: LAMA2; (+) strand; PAM type: NRG; PAM sequence: TAG
cttatcaaggaatccttgtt

SEQ ID NO: 184387 - DNA, 20 bp, Artificial Sequence
  Description of Artificial Sequence: Synthetic oligonucleotide
  Target: LAMA2; (+) strand; PAM type: NRG; PAM sequence: AAG
aaatattactgtaaatgccc

SEQ ID NO: 184388 - DNA, 20 bp, Artificial Sequence
  Description of Artificial Sequence: Synthetic oligonucleotide
  Target: LAMA2; (+) strand; PAM type: NRG; PAM sequence: AAG
aaatgcccaagacccaccaa

SEQ ID NO: 184389 - DNA, 20 bp, Artificial Sequence
  Description of Artificial Sequence: Synthetic oligonucleotide
  Target: LAMA2; (+) strand; PAM type: NRG; PAM sequence: GAG
atgcccaagacccaccaaaa

SEQ ID NO: 184390 - DNA, 20 bp, Artificial Sequence
  Description of Artificial Sequence: Synthetic oligonucleotide
  Target: LAMA2; (+) strand; PAM type: NRG; PAM sequence: AAG
aagacccaccaaaagagctt

SEQ ID NO: 184391 - DNA, 20 bp, Artificial Sequence
  Description of Artificial Sequence: Synthetic oligonucleotide
  Target: LAMA2; (+) strand; PAM type: NRG; PAM sequence: CAG
ccaccaaaagagcttaagtg

SEQ ID NO: 184392 - DNA, 20 bp, Artificial Sequence
  Description of Artificial Sequence: Synthetic oligonucleotide
  Target: LAMA2; (+) strand; PAM type: NRG; PAM sequence: CAG
gtgcagtgttaacaataatt

SEQ ID NO: 184393 - DNA, 20 bp, Artificial Sequence
  Description of Artificial Sequence: Synthetic oligonucleotide
  Target: LAMA2; (+) strand; PAM type: NRG; PAM sequence: GAG
agtttctcaataaacatctt

SEQ ID NO: 184394 - DNA, 20 bp, Artificial Sequence
  Description of Artificial Sequence: Synthetic oligonucleotide
  Target: LAMA2; (+) strand; PAM type: NRG; PAM sequence: TAG
ttctcaataaacatcttgag

SEQ ID NO: 184395 - DNA, 20 bp, Artificial Sequence
  Description of Artificial Sequence: Synthetic oligonucleotide
  Target: LAMA2; (+) strand; PAM type: NRG; PAM sequence: AGG
tctcaataaacatcttgagt

SEQ ID NO: 184396 - DNA, 20 bp, Artificial Sequence
  Description of Artificial Sequence: Synthetic oligonucleotide
  Target: LAMA2; (+) strand; PAM type: NRG; PAM sequence: GGG
ctcaataaacatcttgagta

SEQ ID NO: 184397 - DNA, 20 bp, Artificial Sequence
  Description of Artificial Sequence: Synthetic oligonucleotide
  Target: LAMA2; (+) strand; PAM type: NRG; PAM sequence: TAG
tgagtagggcttttatattt

SEQ ID NO: 184398 - DNA, 20 bp, Artificial Sequence
  Description of Artificial Sequence: Synthetic oligonucleotide
  Target: LAMA2; (+) strand; PAM type: NRG; PAM sequence: AAG
gtagggcttttatattttag

SEQ ID NO: 184399 - DNA, 20 bp, Artificial Sequence
  Description of Artificial Sequence: Synthetic oligonucleotide
  Target: LAMA2; (+) strand; PAM type: NRG; PAM sequence: AAG
gggcttttatattttagaag

SEQ ID NO: 184400 - DNA, 20 bp, Artificial Sequence
  Description of Artificial Sequence: Synthetic oligonucleotide
  Target: LAMA2; (+) strand; PAM type: NRG; PAM sequence: AAG
tatattttagaagaagatta

SEQ ID NO: 184401 - DNA, 20 bp, Artificial Sequence
  Description of Artificial Sequence: Synthetic oligonucleotide
  Target: LAMA2; (+) strand; PAM type: NRG; PAM sequence: CAG
ttttagaagaagattaaagt

SEQ ID NO: 184402 - DNA, 20 bp, Artificial Sequence
  Description of Artificial Sequence: Synthetic oligonucleotide
  Target: LAMA2; (+) strand; PAM type: NRG; PAM sequence: AAG
attaaagtcagtgctataaa

SEQ ID NO: 184403 - DNA, 20 bp, Artificial Sequence
  Description of Artificial Sequence: Synthetic oligonucleotide
  Target: LAMA2; (+) strand; PAM type: NRG; PAM sequence: AAG
cttccacttattcatccata

SEQ ID NO: 184404 - DNA, 20 bp, Artificial Sequence
  Description of Artificial Sequence: Synthetic oligonucleotide
  Target: LAMA2; (+) strand; PAM type: NRG; PAM sequence: AAG
taaagaaaatcatgacaaat

SEQ ID NO: 184405 - DNA, 20 bp, Artificial Sequence
  Description of Artificial Sequence: Synthetic oligonucleotide
  Target: LAMA2; (+) strand; PAM type: NRG; PAM sequence: CAG
aaatcatgacaaataagcac

SEQ ID NO: 184406 - DNA, 20 bp, Artificial Sequence
  Description of Artificial Sequence: Synthetic oligonucleotide
  Target: LAMA2; (+) strand; PAM type: NRG; PAM sequence: TAG
ataagcaccagatgtgattt

SEQ ID NO: 184407 - DNA, 20 bp, Artificial Sequence
  Description of Artificial Sequence: Synthetic oligonucleotide
  Target: LAMA2; (+) strand; PAM type: NRG; PAM sequence: TAG
tgattttagcccacatttat

SEQ ID NO: 184408 - DNA, 20 bp, Artificial Sequence
  Description of Artificial Sequence: Synthetic oligonucleotide
  Target: LAMA2; (+) strand; PAM type: NRG; PAM sequence: GAG
attttagcccacatttatta

SEQ ID NO: 184409 - DNA, 20 bp, Artificial Sequence
  Description of Artificial Sequence: Synthetic oligonucleotide
  Target: LAMA2; (+) strand; PAM type: NRG; PAM sequence: AAG
aattaattattgactcatga

SEQ ID NO: 184410 - DNA, 20 bp, Artificial Sequence
  Description of Artificial Sequence: Synthetic oligonucleotide
  Target: LAMA2; (+) strand; PAM type: NRG; PAM sequence: AAG
taattattgactcatgaaag

SEQ ID NO: 184411 - DNA, 20 bp, Artificial Sequence
  Description of Artificial Sequence: Synthetic oligonucleotide
  Target: LAMA2; (+) strand; PAM type: NRG; PAM sequence: TGG
ttctatgatgattcattgtt

SEQ ID NO: 184412 - DNA, 20 bp, Artificial Sequence
  Description of Artificial Sequence: Synthetic oligonucleotide
  Target: LAMA2; (+) strand; PAM type: NRG; PAM sequence: AAG
attcattgtttggtgctttc

SEQ ID NO: 184413 - DNA, 20 bp, Artificial Sequence
  Description of Artificial Sequence: Synthetic oligonucleotide
  Target: LAMA2; (+) strand; PAM type: NRG; PAM sequence: AAG
gtttggtgctttcaagaaca

SEQ ID NO: 184414 - DNA, 20 bp, Artificial Sequence
  Description of Artificial Sequence: Synthetic oligonucleotide
  Target: LAMA2; (+) strand; PAM type: NRG; PAM sequence: CAG
gctttcaagaacaaagatgc

SEQ ID NO: 184415 - DNA, 20 bp, Artificial Sequence
  Description of Artificial Sequence: Synthetic oligonucleotide
  Target: LAMA2; (+) strand; PAM type: NRG; PAM sequence: CAG
atgtaatataaatctctgct

SEQ ID NO: 184416 - DNA, 20 bp, Artificial Sequence
  Description of Artificial Sequence: Synthetic oligonucleotide
  Target: LAMA2; (+) strand; PAM type: NRG; PAM sequence: AGG
tgtaatataaatctctgctc

SEQ ID NO: 184417 - DNA, 20 bp, Artificial Sequence
  Description of Artificial Sequence: Synthetic oligonucleotide
  Target: LAMA2; (+) strand; PAM type: NRG; PAM sequence: CAG
ataaatctctgctcaggacc

SEQ ID NO: 184418 - DNA, 20 bp, Artificial Sequence
  Description of Artificial Sequence: Synthetic oligonucleotide
  Target: LAMA2; (+) strand; PAM type: NRG; PAM sequence: AGG
taaatctctgctcaggaccc

SEQ ID NO: 184419 - DNA, 20 bp, Artificial Sequence
  Description of Artificial Sequence: Synthetic oligonucleotide
  Target: LAMA2; (+) strand; PAM type: NRG; PAM sequence: AAG
gctcaggacccaggaaattc

SEQ ID NO: 184420 - DNA, 20 bp, Artificial Sequence
  Description of Artificial Sequence: Synthetic oligonucleotide
  Target: LAMA2; (+) strand; PAM type: NRG; PAM sequence: GAG
tcaggacccaggaaattcaa

SEQ ID NO: 184421 - DNA, 20 bp, Artificial Sequence
  Description of Artificial Sequence: Synthetic oligonucleotide
  Target: LAMA2; (+) strand; PAM type: NRG; PAM sequence: AAG
tcatacgcactcctgaatct

SEQ ID NO: 184422 - DNA, 20 bp, Artificial Sequence
  Description of Artificial Sequence: Synthetic oligonucleotide
  Target: LAMA2; (+) strand; PAM type: NRG; PAM sequence: CAG
aagaactcatttccaaatgt

SEQ ID NO: 184423 - DNA, 20 bp, Artificial Sequence
  Description of Artificial Sequence: Synthetic oligonucleotide
  Target: LAMA2; (+) strand; PAM type: NRG; PAM sequence: CAG
aaatgtcagccaccaatctg

SEQ ID NO: 184424 - DNA, 20 bp, Artificial Sequence
  Description of Artificial Sequence: Synthetic oligonucleotide
  Target: LAMA2; (+) strand; PAM type: NRG; PAM sequence: TAG
gtcagccaccaatctgcagt

SEQ ID NO: 184425 - DNA, 20 bp, Artificial Sequence
  Description of Artificial Sequence: Synthetic oligonucleotide
  Target: LAMA2; (+) strand; PAM type: NRG; PAM sequence: TAG
gccaccaatctgcagttagt

SEQ ID NO: 184426 - DNA, 20 bp, Artificial Sequence
  Description of Artificial Sequence: Synthetic oligonucleotide
  Target: LAMA2; (+) strand; PAM type: NRG; PAM sequence: AAG
caatctgcagttagttagaa

SEQ ID NO: 184427 - DNA, 20 bp, Artificial Sequence
  Description of Artificial Sequence: Synthetic oligonucleotide
  Target: LAMA2; (+) strand; PAM type: NRG; PAM sequence: AAG
cattgctttattctgacctg

SEQ ID NO: 184428 - DNA, 20 bp, Artificial Sequence
  Description of Artificial Sequence: Synthetic oligonucleotide
  Target: LAMA2; (+) strand; PAM type: NRG; PAM sequence: GAG
attctgacctgaagttaaat

SEQ ID NO: 184429 - DNA, 20 bp, Artificial Sequence
  Description of Artificial Sequence: Synthetic oligonucleotide
  Target: LAMA2; (+) strand; PAM type: NRG; PAM sequence: CAG
acctgaagttaaatgagtga

SEQ ID NO: 184430 - DNA, 20 bp, Artificial Sequence
  Description of Artificial Sequence: Synthetic oligonucleotide
  Target: LAMA2; (+) strand; PAM type: NRG; PAM sequence: TGG
aagttaaatgagtgacagtg

SEQ ID NO: 184431 - DNA, 20 bp, Artificial Sequence
  Description of Artificial Sequence: Synthetic oligonucleotide
  Target: LAMA2; (+) strand; PAM type: NRG; PAM sequence: GGG
agttaaatgagtgacagtgt

SEQ ID NO: 184432 - DNA, 20 bp, Artificial Sequence
  Description of Artificial Sequence: Synthetic oligonucleotide
  Target: LAMA2; (+) strand; PAM type: NRG; PAM sequence: GGG
gttaaatgagtgacagtgtg

SEQ ID NO: 184433 - DNA, 20 bp, Artificial Sequence
  Description of Artificial Sequence: Synthetic oligonucleotide
  Target: LAMA2; (+) strand; PAM type: NRG; PAM sequence: GGG
ttaaatgagtgacagtgtgg

SEQ ID NO: 184434 - DNA, 20 bp, Artificial Sequence
  Description of Artificial Sequence: Synthetic oligonucleotide
  Target: LAMA2; (+) strand; PAM type: NRG; PAM sequence: TGG
gtgtgggggtgaaaacgttt

SEQ ID NO: 184435 - DNA, 20 bp, Artificial Sequence
  Description of Artificial Sequence: Synthetic oligonucleotide
  Target: LAMA2; (+) strand; PAM type: NRG; PAM sequence: TGG
ttttggccccgttaccaatt

SEQ ID NO: 184436 - DNA, 20 bp, Artificial Sequence
  Description of Artificial Sequence: Synthetic oligonucleotide
  Target: LAMA2; (+) strand; PAM type: NRG; PAM sequence: AAG
cactatctacttccctaaac

SEQ ID NO: 184437 - DNA, 20 bp, Artificial Sequence
  Description of Artificial Sequence: Synthetic oligonucleotide
  Target: LAMA2; (+) strand; PAM type: NRG; PAM sequence: AGG
actatctacttccctaaaca

SEQ ID NO: 184438 - DNA, 20 bp, Artificial Sequence
  Description of Artificial Sequence: Synthetic oligonucleotide
  Target: LAMA2; (+) strand; PAM type: NRG; PAM sequence: TGG
tacttccctaaacaaggctt

SEQ ID NO: 184439 - DNA, 20 bp, Artificial Sequence
  Description of Artificial Sequence: Synthetic oligonucleotide
  Target: LAMA2; (+) strand; PAM type: NRG; PAM sequence: GGG
acttccctaaacaaggcttt

SEQ ID NO: 184440 - DNA, 20 bp, Artificial Sequence
  Description of Artificial Sequence: Synthetic oligonucleotide
  Target: LAMA2; (+) strand; PAM type: NRG; PAM sequence: GAG
ttccctaaacaaggctttgg

SEQ ID NO: 184441 - DNA, 20 bp, Artificial Sequence
  Description of Artificial Sequence: Synthetic oligonucleotide
  Target: LAMA2; (+) strand; PAM type: NRG; PAM sequence: TGG
taaacaaggctttgggagca

SEQ ID NO: 184442 - DNA, 20 bp, Artificial Sequence
  Description of Artificial Sequence: Synthetic oligonucleotide
  Target: LAMA2; (+) strand; PAM type: NRG; PAM sequence: CAG
cacatcactgctctaatcaa

SEQ ID NO: 184443 - DNA, 20 bp, Artificial Sequence
  Description of Artificial Sequence: Synthetic oligonucleotide
  Target: LAMA2; (+) strand; PAM type: NRG; PAM sequence: AGG
acatcactgctctaatcaac

SEQ ID NO: 184444 - DNA, 20 bp, Artificial Sequence
  Description of Artificial Sequence: Synthetic oligonucleotide
  Target: LAMA2; (+) strand; PAM type: NRG; PAM sequence: GAG
caacaggtgcaccaccacgc

SEQ ID NO: 184445 - DNA, 20 bp, Artificial Sequence
  Description of Artificial Sequence: Synthetic oligonucleotide
  Target: LAMA2; (+) strand; PAM type: NRG; PAM sequence: AAG
ccacgcgagactccccaccc

SEQ ID NO: 184446 - DNA, 20 bp, Artificial Sequence
  Description of Artificial Sequence: Synthetic oligonucleotide
  Target: LAMA2; (+) strand; PAM type: NRG; PAM sequence: AAG
cctacaacttgtaacctgcc

SEQ ID NO: 184447 - DNA, 20 bp, Artificial Sequence
  Description of Artificial Sequence: Synthetic oligonucleotide
  Target: LAMA2; (+) strand; PAM type: NRG; PAM sequence: AAG
aacttgtaacctgccaagca

SEQ ID NO: 184448 - DNA, 20 bp, Artificial Sequence
  Description of Artificial Sequence: Synthetic oligonucleotide
  Target: LAMA2; (+) strand; PAM type: NRG; PAM sequence: AGG
acttgtaacctgccaagcaa

SEQ ID NO: 184449 - DNA, 20 bp, Artificial Sequence
  Description of Artificial Sequence: Synthetic oligonucleotide
  Target: LAMA2; (+) strand; PAM type: NRG; PAM sequence: AAG
agcaaaggcaaatgaaaaac

SEQ ID NO: 184450 - DNA, 20 bp, Artificial Sequence
  Description of Artificial Sequence: Synthetic oligonucleotide
  Target: LAMA2; (+) strand; PAM type: NRG; PAM sequence: TAG
ttttccccattatctatttc

SEQ ID NO: 184451 - DNA, 20 bp, Artificial Sequence
  Description of Artificial Sequence: Synthetic oligonucleotide
  Target: LAMA2; (+) strand; PAM type: NRG; PAM sequence: AAG
tctatttctagtactttaaa

SEQ ID NO: 184452 - DNA, 20 bp, Artificial Sequence
  Description of Artificial Sequence: Synthetic oligonucleotide
  Target: LAMA2; (+) strand; PAM type: NRG; PAM sequence: AAG
gtactttaaaaagtccccac

SEQ ID NO: 184453 - DNA, 20 bp, Artificial Sequence
  Description of Artificial Sequence: Synthetic oligonucleotide
  Target: LAMA2; (+) strand; PAM type: NRG; PAM sequence: AGG
tactttaaaaagtccccaca

SEQ ID NO: 184454 - DNA, 20 bp, Artificial Sequence
  Description of Artificial Sequence: Synthetic oligonucleotide
  Target: LAMA2; (+) strand; PAM type: NRG; PAM sequence: TGG
tttaaaaagtccccacaagg

SEQ ID NO: 184455 - DNA, 20 bp, Artificial Sequence
  Description of Artificial Sequence: Synthetic oligonucleotide
  Target: LAMA2; (+) strand; PAM type: NRG; PAM sequence: CAG
aaaaagtccccacaaggtgg

SEQ ID NO: 184456 - DNA, 20 bp, Artificial Sequence
  Description of Artificial Sequence: Synthetic oligonucleotide
  Target: LAMA2; (+) strand; PAM type: NRG; PAM sequence: GAG
tggcagaattgtaacacgtt

SEQ ID NO: 184457 - DNA, 20 bp, Artificial Sequence
  Description of Artificial Sequence: Synthetic oligonucleotide
  Target: LAMA2; (+) strand; PAM type: NRG; PAM sequence: GAG
tgtaacacgttgagattgat

SEQ ID NO: 184458 - DNA, 20 bp, Artificial Sequence
  Description of Artificial Sequence: Synthetic oligonucleotide
  Target: LAMA2; (+) strand; PAM type: NRG; PAM sequence: GAG
gagattgatgagcctctact

SEQ ID NO: 184459 - DNA, 20 bp, Artificial Sequence
  Description of Artificial Sequence: Synthetic oligonucleotide
  Target: LAMA2; (+) strand; PAM type: NRG; PAM sequence: GAG
attgttgttttaacacattt

SEQ ID NO: 184460 - DNA, 20 bp, Artificial Sequence
  Description of Artificial Sequence: Synthetic oligonucleotide
  Target: LAMA2; (+) strand; PAM type: NRG; PAM sequence: GAG
tgttgttttaacacatttga

SEQ ID NO: 184461 - DNA, 20 bp, Artificial Sequence
  Description of Artificial Sequence: Synthetic oligonucleotide
  Target: LAMA2; (+) strand; PAM type: NRG; PAM sequence: TAG
ttttaacacatttgagagat

SEQ ID NO: 184462 - DNA, 20 bp, Artificial Sequence
  Description of Artificial Sequence: Synthetic oligonucleotide
  Target: LAMA2; (+) strand; PAM type: NRG; PAM sequence: CAG
ttagtgcgtccaaaacaaca

SEQ ID NO: 184463 - DNA, 20 bp, Artificial Sequence
  Description of Artificial Sequence: Synthetic oligonucleotide
  Target: LAMA2; (+) strand; PAM type: NRG; PAM sequence: AGG
tagtgcgtccaaaacaacac

SEQ ID NO: 184464 - DNA, 20 bp, Artificial Sequence
  Description of Artificial Sequence: Synthetic oligonucleotide
  Target: LAMA2; (+) strand; PAM type: NRG; PAM sequence: AAG
cgtccaaaacaacacaggta

SEQ ID NO: 184465 - DNA, 20 bp, Artificial Sequence
  Description of Artificial Sequence: Synthetic oligonucleotide
  Target: LAMA2; (+) strand; PAM type: NRG; PAM sequence: TAG
caggtaaagcatcacatcca

SEQ ID NO: 184466 - DNA, 20 bp, Artificial Sequence
  Description of Artificial Sequence: Synthetic oligonucleotide
  Target: LAMA2; (+) strand; PAM type: NRG; PAM sequence: GAG
ggtaaagcatcacatccata

SEQ ID NO: 184467 - DNA, 20 bp, Artificial Sequence
  Description of Artificial Sequence: Synthetic oligonucleotide
  Target: LAMA2; (+) strand; PAM type: NRG; PAM sequence: GAG
agcatcacatccatagagat

SEQ ID NO: 184468 - DNA, 20 bp, Artificial Sequence
  Description of Artificial Sequence: Synthetic oligonucleotide
  Target: LAMA2; (+) strand; PAM type: NRG; PAM sequence: AGG
gcatcacatccatagagatg

SEQ ID NO: 184469 - DNA, 20 bp, Artificial Sequence
  Description of Artificial Sequence: Synthetic oligonucleotide
  Target: LAMA2; (+) strand; PAM type: NRG; PAM sequence: AAG
atagagatgaggacgccttc

SEQ ID NO: 184470 - DNA, 20 bp, Artificial Sequence
  Description of Artificial Sequence: Synthetic oligonucleotide
  Target: LAMA2; (+) strand; PAM type: NRG; PAM sequence: TAG
ggacgccttcaagtatacac

SEQ ID NO: 184471 - DNA, 20 bp, Artificial Sequence
  Description of Artificial Sequence: Synthetic oligonucleotide
  Target: LAMA2; (+) strand; PAM type: NRG; PAM sequence: TAG
ccttcaagtatacactagct

SEQ ID NO: 184472 - DNA, 20 bp, Artificial Sequence
  Description of Artificial Sequence: Synthetic oligonucleotide
  Target: LAMA2; (+) strand; PAM type: NRG; PAM sequence: AAG
aagtatacactagcttagaa

SEQ ID NO: 184473 - DNA, 20 bp, Artificial Sequence
  Description of Artificial Sequence: Synthetic oligonucleotide
  Target: LAMA2; (+) strand; PAM type: NRG; PAM sequence: AGG
agtatacactagcttagaaa

SEQ ID NO: 184474 - DNA, 20 bp, Artificial Sequence
  Description of Artificial Sequence: Synthetic oligonucleotide
  Target: LAMA2; (+) strand; PAM type: NRG; PAM sequence: AAG
ttgcaatgaccattctttaa

SEQ ID NO: 184475 - DNA, 20 bp, Artificial Sequence
  Description of Artificial Sequence: Synthetic oligonucleotide
  Target: LAMA2; (+) strand; PAM type: NRG; PAM sequence: TAG
gttccttaaaattacctcat

SEQ ID NO: 184476 - DNA, 20 bp, Artificial Sequence
  Description of Artificial Sequence: Synthetic oligonucleotide
  Target: LAMA2; (+) strand; PAM type: NRG; PAM sequence: TAG
tttctcttacccttttttct

SEQ ID NO: 184477 - DNA, 20 bp, Artificial Sequence
  Description of Artificial Sequence: Synthetic oligonucleotide
  Target: LAMA2; (+) strand; PAM type: NRG; PAM sequence: TAG
cttacccttttttcttagct

SEQ ID NO: 184478 - DNA, 20 bp, Artificial Sequence
  Description of Artificial Sequence: Synthetic oligonucleotide
  Target: LAMA2; (+) strand; PAM type: NRG; PAM sequence: CAG
ttttttcttagcttagattt

SEQ ID NO: 184479 - DNA, 20 bp, Artificial Sequence
  Description of Artificial Sequence: Synthetic oligonucleotide
  Target: LAMA2; (+) strand; PAM type: NRG; PAM sequence: TGG
tttcttagcttagatttcag

SEQ ID NO: 184480 - DNA, 20 bp, Artificial Sequence
  Description of Artificial Sequence: Synthetic oligonucleotide
  Target: LAMA2; (+) strand; PAM type: NRG; PAM sequence: AAG
ttagcttagatttcagtggc

SEQ ID NO: 184481 - DNA, 20 bp, Artificial Sequence
  Description of Artificial Sequence: Synthetic oligonucleotide
  Target: LAMA2; (+) strand; PAM type: NRG; PAM sequence: CAG
gcttagatttcagtggcaag

SEQ ID NO: 184482 - DNA, 20 bp, Artificial Sequence
  Description of Artificial Sequence: Synthetic oligonucleotide
  Target: LAMA2; (+) strand; PAM type: NRG; PAM sequence: GAG
ttagatttcagtggcaagca

SEQ ID NO: 184483 - DNA, 20 bp, Artificial Sequence
  Description of Artificial Sequence: Synthetic oligonucleotide
  Target: LAMA2; (+) strand; PAM type: NRG; PAM sequence: TAG
agagttgaaaacatcatcct

SEQ ID NO: 184484 - DNA, 20 bp, Artificial Sequence
  Description of Artificial Sequence: Synthetic oligonucleotide
  Target: LAMA2; (+) strand; PAM type: NRG; PAM sequence: AAG
aaaacatcatccttagtgac

SEQ ID NO: 184485 - DNA, 20 bp, Artificial Sequence
  Description of Artificial Sequence: Synthetic oligonucleotide
  Target: LAMA2; (+) strand; PAM type: NRG; PAM sequence: GAG
gacaagatcattttatttct

SEQ ID NO: 184486 - DNA, 20 bp, Artificial Sequence
  Description of Artificial Sequence: Synthetic oligonucleotide
  Target: LAMA2; (+) strand; PAM type: NRG; PAM sequence: AAG
gatcattttatttctgagca

SEQ ID NO: 184487 - DNA, 20 bp, Artificial Sequence
  Description of Artificial Sequence: Synthetic oligonucleotide
  Target: LAMA2; (+) strand; PAM type: NRG; PAM sequence: CAG
ttttatttctgagcaaagca

SEQ ID NO: 184488 - DNA, 20 bp, Artificial Sequence
  Description of Artificial Sequence: Synthetic oligonucleotide
  Target: LAMA2; (+) strand; PAM type: NRG; PAM sequence: AGG
tttatttctgagcaaagcac

SEQ ID NO: 184489 - DNA, 20 bp, Artificial Sequence
  Description of Artificial Sequence: Synthetic oligonucleotide
  Target: LAMA2; (+) strand; PAM type: NRG; PAM sequence: GGG
ttatttctgagcaaagcaca

SEQ ID NO: 184490 - DNA, 20 bp, Artificial Sequence
  Description of Artificial Sequence: Synthetic oligonucleotide
  Target: LAMA2; (+) strand; PAM type: NRG; PAM sequence: CAG
tttctgagcaaagcacaggg

SEQ ID NO: 184491 - DNA, 20 bp, Artificial Sequence
  Description of Artificial Sequence: Synthetic oligonucleotide
  Target: LAMA2; (+) strand; PAM type: NRG; PAM sequence: TAG
ttgttccccctttaaaatgc

SEQ ID NO: 184492 - DNA, 20 bp, Artificial Sequence
  Description of Artificial Sequence: Synthetic oligonucleotide
  Target: LAMA2; (+) strand; PAM type: NRG; PAM sequence: AAG
ttccccctttaaaatgctag

SEQ ID NO: 184493 - DNA, 20 bp, Artificial Sequence
  Description of Artificial Sequence: Synthetic oligonucleotide
  Target: LAMA2; (+) strand; PAM type: NRG; PAM sequence: AGG
tccccctttaaaatgctaga

SEQ ID NO: 184494 - DNA, 20 bp, Artificial Sequence
  Description of Artificial Sequence: Synthetic oligonucleotide
  Target: LAMA2; (+) strand; PAM type: NRG; PAM sequence: AAG
ttaaaatgctagaaggaaaa

SEQ ID NO: 184495 - DNA, 20 bp, Artificial Sequence
  Description of Artificial Sequence: Synthetic oligonucleotide
  Target: LAMA2; (+) strand; PAM type: NRG; PAM sequence: AAG
aaatgctagaaggaaaaaag

SEQ ID NO: 184496 - DNA, 20 bp, Artificial Sequence
  Description of Artificial Sequence: Synthetic oligonucleotide
  Target: LAMA2; (+) strand; PAM type: NRG; PAM sequence: GAG
tagaaggaaaaaagaagctt

SEQ ID NO: 184497 - DNA, 20 bp, Artificial Sequence
  Description of Artificial Sequence: Synthetic oligonucleotide
  Target: LAMA2; (+) strand; PAM type: NRG; PAM sequence: CAG
aaggaaaaaagaagcttgag

SEQ ID NO: 184498 - DNA, 20 bp, Artificial Sequence
  Description of Artificial Sequence: Synthetic oligonucleotide
  Target: LAMA2; (+) strand; PAM type: NRG; PAM sequence: TGG
aaaaaagaagcttgagcagc

SEQ ID NO: 184499 - DNA, 20 bp, Artificial Sequence
  Description of Artificial Sequence: Synthetic oligonucleotide
  Target: LAMA2; (+) strand; PAM type: NRG; PAM sequence: GAG
agaagcttgagcagctggat

SEQ ID NO: 184500 - DNA, 20 bp, Artificial Sequence
  Description of Artificial Sequence: Synthetic oligonucleotide
  Target: LAMA2; (+) strand; PAM type: NRG; PAM sequence: CAG
agcttgagcagctggatgag

SEQ ID NO: 184501 - DNA, 20 bp, Artificial Sequence
  Description of Artificial Sequence: Synthetic oligonucleotide
  Target: LAMA2; (+) strand; PAM type: NRG; PAM sequence: TGG
atgagcagctccacccactg

SEQ ID NO: 184502 - DNA, 20 bp, Artificial Sequence
  Description of Artificial Sequence: Synthetic oligonucleotide
  Target: LAMA2; (+) strand; PAM type: NRG; PAM sequence: GGG
tgagcagctccacccactgt

SEQ ID NO: 184503 - DNA, 20 bp, Artificial Sequence
  Description of Artificial Sequence: Synthetic oligonucleotide
  Target: LAMA2; (+) strand; PAM type: NRG; PAM sequence: GAG
ctccacccactgtgggacat

SEQ ID NO: 184504 - DNA, 20 bp, Artificial Sequence
  Description of Artificial Sequence: Synthetic oligonucleotide
  Target: LAMA2; (+) strand; PAM type: NRG; PAM sequence: AGG
tccacccactgtgggacatg

SEQ ID NO: 184505 - DNA, 20 bp, Artificial Sequence
  Description of Artificial Sequence: Synthetic oligonucleotide
  Target: LAMA2; (+) strand; PAM type: NRG; PAM sequence: CAG
acccactgtgggacatgagg

SEQ ID NO: 184506 - DNA, 20 bp, Artificial Sequence
  Description of Artificial Sequence: Synthetic oligonucleotide
  Target: LAMA2; (+) strand; PAM type: NRG; PAM sequence: AAG
cactgtgggacatgaggcag

SEQ ID NO: 184507 - DNA, 20 bp, Artificial Sequence
  Description of Artificial Sequence: Synthetic oligonucleotide
  Target: LAMA2; (+) strand; PAM type: NRG; PAM sequence: AGG
actgtgggacatgaggcaga

SEQ ID NO: 184508 - DNA, 20 bp, Artificial Sequence
  Description of Artificial Sequence: Synthetic oligonucleotide
  Target: LAMA2; (+) strand; PAM type: NRG; PAM sequence: AAG
gtgggacatgaggcagaagg

SEQ ID NO: 184509 - DNA, 20 bp, Artificial Sequence
  Description of Artificial Sequence: Synthetic oligonucleotide
  Target: LAMA2; (+) strand; PAM type: NRG; PAM sequence: GAG
gggacatgaggcagaaggaa

SEQ ID NO: 184510 - DNA, 20 bp, Artificial Sequence
  Description of Artificial Sequence: Synthetic oligonucleotide
  Target: LAMA2; (+) strand; PAM type: NRG; PAM sequence: AAG
acatgaggcagaaggaagag

SEQ ID NO: 184511 - DNA, 20 bp, Artificial Sequence
  Description of Artificial Sequence: Synthetic oligonucleotide
  Target: LAMA2; (+) strand; PAM type: NRG; PAM sequence: GAG
atgaggcagaaggaagagaa

SEQ ID NO: 184512 - DNA, 20 bp, Artificial Sequence
  Description of Artificial Sequence: Synthetic oligonucleotide
  Target: LAMA2; (+) strand; PAM type: NRG; PAM sequence: AGG
tgaggcagaaggaagagaag

SEQ ID NO: 184513 - DNA, 20 bp, Artificial Sequence
  Description of Artificial Sequence: Synthetic oligonucleotide
  Target: LAMA2; (+) strand; PAM type: NRG; PAM sequence: AAG
ggcagaaggaagagaagagg

SEQ ID NO: 184514 - DNA, 20 bp, Artificial Sequence
  Description of Artificial Sequence: Synthetic oligonucleotide
  Target: LAMA2; (+) strand; PAM type: NRG; PAM sequence: CGG
aagagaagaggaagcaacac

SEQ ID NO: 184515 - DNA, 20 bp, Artificial Sequence
  Description of Artificial Sequence: Synthetic oligonucleotide
  Target: LAMA2; (+) strand; PAM type: NRG; PAM sequence: GGG
agagaagaggaagcaacacc

SEQ ID NO: 184516 - DNA, 20 bp, Artificial Sequence
  Description of Artificial Sequence: Synthetic oligonucleotide
  Target: LAMA2; (+) strand; PAM type: NRG; PAM sequence: AAG
agaggaagcaacaccgggca

SEQ ID NO: 184517 - DNA, 20 bp, Artificial Sequence
  Description of Artificial Sequence: Synthetic oligonucleotide
  Target: LAMA2; (+) strand; PAM type: NRG; PAM sequence: TGG
caccgggcaaagcaataaac

SEQ ID NO: 184518 - DNA, 20 bp, Artificial Sequence
  Description of Artificial Sequence: Synthetic oligonucleotide
  Target: LAMA2; (+) strand; PAM type: NRG; PAM sequence: GAG
atcatgttttttttcttttt

SEQ ID NO: 184519 - DNA, 20 bp, Artificial Sequence
  Description of Artificial Sequence: Synthetic oligonucleotide
  Target: LAMA2; (+) strand; PAM type: NRG; PAM sequence: CAG
tgttttttttctttttgaga

SEQ ID NO: 184520 - DNA, 20 bp, Artificial Sequence
  Description of Artificial Sequence: Synthetic oligonucleotide
  Target: LAMA2; (+) strand; PAM type: NRG; PAM sequence: AGG
gttttttttctttttgagac

SEQ ID NO: 184521 - DNA, 20 bp, Artificial Sequence
  Description of Artificial Sequence: Synthetic oligonucleotide
  Target: LAMA2; (+) strand; PAM type: NRG; PAM sequence: CAG
caggttcttgctctactgtc

SEQ ID NO: 184522 - DNA, 20 bp, Artificial Sequence
  Description of Artificial Sequence: Synthetic oligonucleotide
  Target: LAMA2; (+) strand; PAM type: NRG; PAM sequence: AGG
aggttcttgctctactgtcc

SEQ ID NO: 184523 - DNA, 20 bp, Artificial Sequence
  Description of Artificial Sequence: Synthetic oligonucleotide
  Target: LAMA2; (+) strand; PAM type: NRG; PAM sequence: TGG
tcttgctctactgtccaggt

SEQ ID NO: 184524 - DNA, 20 bp, Artificial Sequence
  Description of Artificial Sequence: Synthetic oligonucleotide
  Target: LAMA2; (+) strand; PAM type: NRG; PAM sequence: GAG
ttgctctactgtccaggttg

SEQ ID NO: 184525 - DNA, 20 bp, Artificial Sequence
  Description of Artificial Sequence: Synthetic oligonucleotide
  Target: LAMA2; (+) strand; PAM type: NRG; PAM sequence: CAG
ctactgtccaggttggagtg

SEQ ID NO: 184526 - DNA, 20 bp, Artificial Sequence
  Description of Artificial Sequence: Synthetic oligonucleotide
  Target: LAMA2; (+) strand; PAM type: NRG; PAM sequence: TAG
ggagtgcagtgatgcaatca

SEQ ID NO: 184527 - DNA, 20 bp, Artificial Sequence
  Description of Artificial Sequence: Synthetic oligonucleotide
  Target: LAMA2; (+) strand; PAM type: NRG; PAM sequence: TAG
tcactctaaccttgaactcc

SEQ ID NO: 184528 - DNA, 20 bp, Artificial Sequence
  Description of Artificial Sequence: Synthetic oligonucleotide
  Target: LAMA2; (+) strand; PAM type: NRG; PAM sequence: AGG
cactctaaccttgaactcct

SEQ ID NO: 184529 - DNA, 20 bp, Artificial Sequence
  Description of Artificial Sequence: Synthetic oligonucleotide
  Target: LAMA2; (+) strand; PAM type: NRG; PAM sequence: AAG
aaccttgaactcctaggctc

SEQ ID NO: 184530 - DNA, 20 bp, Artificial Sequence
  Description of Artificial Sequence: Synthetic oligonucleotide
  Target: LAMA2; (+) strand; PAM type: NRG; PAM sequence: TGG
ctcaagtgattctcctgcct

SEQ ID NO: 184531 - DNA, 20 bp, Artificial Sequence
  Description of Artificial Sequence: Synthetic oligonucleotide
  Target: LAMA2; (+) strand; PAM type: NRG; PAM sequence: GAG
ttctcctgccttggcctccc

SEQ ID NO: 184532 - DNA, 20 bp, Artificial Sequence
  Description of Artificial Sequence: Synthetic oligonucleotide
  Target: LAMA2; (+) strand; PAM type: NRG; PAM sequence: TAG
tcctgccttggcctcccgag

SEQ ID NO: 184533 - DNA, 20 bp, Artificial Sequence
  Description of Artificial Sequence: Synthetic oligonucleotide
  Target: LAMA2; (+) strand; PAM type: NRG; PAM sequence: TGG
gccttggcctcccgagtagc

SEQ ID NO: 184534 - DNA, 20 bp, Artificial Sequence
  Description of Artificial Sequence: Synthetic oligonucleotide
  Target: LAMA2; (+) strand; PAM type: NRG; PAM sequence: GGG
ccttggcctcccgagtagct

SEQ ID NO: 184535 - DNA, 20 bp, Artificial Sequence
  Description of Artificial Sequence: Synthetic oligonucleotide
  Target: LAMA2; (+) strand; PAM type: NRG; PAM sequence: GGG
cttggcctcccgagtagctg

SEQ ID NO: 184536 - DNA, 20 bp, Artificial Sequence
  Description of Artificial Sequence: Synthetic oligonucleotide
  Target: LAMA2; (+) strand; PAM type: NRG; PAM sequence: CAG
tcccgagtagctggggcttt

SEQ ID NO: 184537 - DNA, 20 bp, Artificial Sequence
  Description of Artificial Sequence: Synthetic oligonucleotide
  Target: LAMA2; (+) strand; PAM type: NRG; PAM sequence: CAG
tcagcatgcaacaacatgcc

SEQ ID NO: 184538 - DNA, 20 bp, Artificial Sequence
  Description of Artificial Sequence: Synthetic oligonucleotide
  Target: LAMA2; (+) strand; PAM type: NRG; PAM sequence: TGG
ttttgttgttgttgttcttt

SEQ ID NO: 184539 - DNA, 20 bp, Artificial Sequence
  Description of Artificial Sequence: Synthetic oligonucleotide
  Target: LAMA2; (+) strand; PAM type: NRG; PAM sequence: GAG
ttgttgttgttgttcttttg

SEQ ID NO: 184540 - DNA, 20 bp, Artificial Sequence
  Description of Artificial Sequence: Synthetic oligonucleotide
  Target: LAMA2; (+) strand; PAM type: NRG; PAM sequence: GAG
gttgttgttgttcttttgga

SEQ ID NO: 184541 - DNA, 20 bp, Artificial Sequence
  Description of Artificial Sequence: Synthetic oligonucleotide
  Target: LAMA2; (+) strand; PAM type: NRG; PAM sequence: CAG
ttgttgttcttttggagaga

SEQ ID NO: 184542 - DNA, 20 bp, Artificial Sequence
  Description of Artificial Sequence: Synthetic oligonucleotide
  Target: LAMA2; (+) strand; PAM type: NRG; PAM sequence: GAG
gttgttcttttggagagaca

SEQ ID NO: 184543 - DNA, 20 bp, Artificial Sequence
  Description of Artificial Sequence: Synthetic oligonucleotide
  Target: LAMA2; (+) strand; PAM type: NRG; PAM sequence: AGG
ttgttcttttggagagacag

SEQ ID NO: 184544 - DNA, 20 bp, Artificial Sequence
  Description of Artificial Sequence: Synthetic oligonucleotide
  Target: LAMA2; (+) strand; PAM type: NRG; PAM sequence: GGG
tgttcttttggagagacaga

SEQ ID NO: 184545 - DNA, 20 bp, Artificial Sequence
  Description of Artificial Sequence: Synthetic oligonucleotide
  Target: LAMA2; (+) strand; PAM type: NRG; PAM sequence: GGG
gttcttttggagagacagag

SEQ ID NO: 184546 - DNA, 20 bp, Artificial Sequence
  Description of Artificial Sequence: Synthetic oligonucleotide
  Target: LAMA2; (+) strand; PAM type: NRG; PAM sequence: GGG
ttcttttggagagacagagg

SEQ ID NO: 184547 - DNA, 20 bp, Artificial Sequence
  Description of Artificial Sequence: Synthetic oligonucleotide
  Target: LAMA2; (+) strand; PAM type: NRG; PAM sequence: GGG
tcttttggagagacagaggg

SEQ ID NO: 184548 - DNA, 20 bp, Artificial Sequence
  Description of Artificial Sequence: Synthetic oligonucleotide
  Target: LAMA2; (+) strand; PAM type: NRG; PAM sequence: CAG
tttggagagacagagggggg

SEQ ID NO: 184549 - DNA, 20 bp, Artificial Sequence
  Description of Artificial Sequence: Synthetic oligonucleotide
  Target: LAMA2; (+) strand; PAM type: NRG; PAM sequence: AGG
ttggagagacagaggggggc

SEQ ID NO: 184550 - DNA, 20 bp, Artificial Sequence
  Description of Artificial Sequence: Synthetic oligonucleotide
  Target: LAMA2; (+) strand; PAM type: NRG; PAM sequence: GGG
tggagagacagaggggggca

SEQ ID NO: 184551 - DNA, 20 bp, Artificial Sequence
  Description of Artificial Sequence: Synthetic oligonucleotide
  Target: LAMA2; (+) strand; PAM type: NRG; PAM sequence: GGG
ggagagacagaggggggcag

SEQ ID NO: 184552 - DNA, 20 bp, Artificial Sequence
  Description of Artificial Sequence: Synthetic oligonucleotide
  Target: LAMA2; (+) strand; PAM type: NRG; PAM sequence: CAG
ggggtcctcactttgttgcc

SEQ ID NO: 184553 - DNA, 20 bp, Artificial Sequence
  Description of Artificial Sequence: Synthetic oligonucleotide
  Target: LAMA2; (+) strand; PAM type: NRG; PAM sequence: AGG
gggtcctcactttgttgccc

SEQ ID NO: 184554 - DNA, 20 bp, Artificial Sequence
  Description of Artificial Sequence: Synthetic oligonucleotide
  Target: LAMA2; (+) strand; PAM type: NRG; PAM sequence: TGG
cctcactttgttgcccaggc

SEQ ID NO: 184555 - DNA, 20 bp, Artificial Sequence
  Description of Artificial Sequence: Synthetic oligonucleotide
  Target: LAMA2; (+) strand; PAM type: NRG; PAM sequence: TAG
ccaggctggtctcaaactac

SEQ ID NO: 184556 - DNA, 20 bp, Artificial Sequence
  Description of Artificial Sequence: Synthetic oligonucleotide
  Target: LAMA2; (+) strand; PAM type: NRG; PAM sequence: AAG
ggtctcaaactactagcctc

SEQ ID NO: 184557 - DNA, 20 bp, Artificial Sequence
  Description of Artificial Sequence: Synthetic oligonucleotide
  Target: LAMA2; (+) strand; PAM type: NRG; PAM sequence: CGG
ctcaagcgatcttcctgcct

SEQ ID NO: 184558 - DNA, 20 bp, Artificial Sequence
  Description of Artificial Sequence: Synthetic oligonucleotide
  Target: LAMA2; (+) strand; PAM type: NRG; PAM sequence: TGG
tgcctcggctttccaaatgc

SEQ ID NO: 184559 - DNA, 20 bp, Artificial Sequence
  Description of Artificial Sequence: Synthetic oligonucleotide
  Target: LAMA2; (+) strand; PAM type: NRG; PAM sequence: GGG
gcctcggctttccaaatgct

SEQ ID NO: 184560 - DNA, 20 bp, Artificial Sequence
  Description of Artificial Sequence: Synthetic oligonucleotide
  Target: LAMA2; (+) strand; PAM type: NRG; PAM sequence: GAG
aatgctgggattaaaaacat

SEQ ID NO: 184561 - DNA, 20 bp, Artificial Sequence
  Description of Artificial Sequence: Synthetic oligonucleotide
  Target: LAMA2; (+) strand; PAM type: NRG; PAM sequence: CAG
cgcccatcccttacacccat

SEQ ID NO: 184562 - DNA, 20 bp, Artificial Sequence
  Description of Artificial Sequence: Synthetic oligonucleotide
  Target: LAMA2; (+) strand; PAM type: NRG; PAM sequence: TGG
tcccttacacccatcagact

SEQ ID NO: 184563 - DNA, 20 bp, Artificial Sequence
  Description of Artificial Sequence: Synthetic oligonucleotide
  Target: LAMA2; (+) strand; PAM type: NRG; PAM sequence: CAG
acacccatcagacttggttt

SEQ ID NO: 184564 - DNA, 20 bp, Artificial Sequence
  Description of Artificial Sequence: Synthetic oligonucleotide
  Target: LAMA2; (+) strand; PAM type: NRG; PAM sequence: AAG
gacttggtttcagtttaccc

SEQ ID NO: 184565 - DNA, 20 bp, Artificial Sequence
  Description of Artificial Sequence: Synthetic oligonucleotide
  Target: LAMA2; (+) strand; PAM type: NRG; PAM sequence: AGG
acttggtttcagtttaccca

SEQ ID NO: 184566 - DNA, 20 bp, Artificial Sequence
  Description of Artificial Sequence: Synthetic oligonucleotide
  Target: LAMA2; (+) strand; PAM type: NRG; PAM sequence: AAG
gtttcagtttacccaaggaa

SEQ ID NO: 184567 - DNA, 20 bp, Artificial Sequence
  Description of Artificial Sequence: Synthetic oligonucleotide
  Target: LAMA2; (+) strand; PAM type: NRG; PAM sequence: AAG
tacccaaggaaaagtgatgc

SEQ ID NO: 184568 - DNA, 20 bp, Artificial Sequence
  Description of Artificial Sequence: Synthetic oligonucleotide
  Target: LAMA2; (+) strand; PAM type: NRG; PAM sequence: AGG
acccaaggaaaagtgatgca

SEQ ID NO: 184569 - DNA, 20 bp, Artificial Sequence
  Description of Artificial Sequence: Synthetic oligonucleotide
  Target: LAMA2; (+) strand; PAM type: NRG; PAM sequence: AAG
caaggaaaagtgatgcaagg

SEQ ID NO: 184570 - DNA, 20 bp, Artificial Sequence
  Description of Artificial Sequence: Synthetic oligonucleotide
  Target: LAMA2; (+) strand; PAM type: NRG; PAM sequence: AAG
aaggaagacaccctttaacc

SEQ ID NO: 184571 - DNA, 20 bp, Artificial Sequence
  Description of Artificial Sequence: Synthetic oligonucleotide
  Target: LAMA2; (+) strand; PAM type: NRG; PAM sequence: AAG
aagacaccctttaaccaagc

SEQ ID NO: 184572 - DNA, 20 bp, Artificial Sequence
  Description of Artificial Sequence: Synthetic oligonucleotide
  Target: LAMA2; (+) strand; PAM type: NRG; PAM sequence: AGG
agacaccctttaaccaagca

SEQ ID NO: 184573 - DNA, 20 bp, Artificial Sequence
  Description of Artificial Sequence: Synthetic oligonucleotide
  Target: LAMA2; (+) strand; PAM type: NRG; PAM sequence: GGG
gacaccctttaaccaagcaa

SEQ ID NO: 184574 - DNA, 20 bp, Artificial Sequence
  Description of Artificial Sequence: Synthetic oligonucleotide
  Target: LAMA2; (+) strand; PAM type: NRG; PAM sequence: GGG
acaccctttaaccaagcaag

SEQ ID NO: 184575 - DNA, 20 bp, Artificial Sequence
  Description of Artificial Sequence: Synthetic oligonucleotide
  Target: LAMA2; (+) strand; PAM type: NRG; PAM sequence: GGG
caccctttaaccaagcaagg

SEQ ID NO: 184576 - DNA, 20 bp, Artificial Sequence
  Description of Artificial Sequence: Synthetic oligonucleotide
  Target: LAMA2; (+) strand; PAM type: NRG; PAM sequence: GAG
ccctttaaccaagcaagggg

SEQ ID NO: 184577 - DNA, 20 bp, Artificial Sequence
  Description of Artificial Sequence: Synthetic oligonucleotide
  Target: LAMA2; (+) strand; PAM type: NRG; PAM sequence: AGG
cctttaaccaagcaaggggg

SEQ ID NO: 184578 - DNA, 20 bp, Artificial Sequence
  Description of Artificial Sequence: Synthetic oligonucleotide
  Target: LAMA2; (+) strand; PAM type: NRG; PAM sequence: GAG
aaccaagcaagggggaggtc

SEQ ID NO: 184579 - DNA, 20 bp, Artificial Sequence
  Description of Artificial Sequence: Synthetic oligonucleotide
  Target: LAMA2; (+) strand; PAM type: NRG; PAM sequence: TAG
tgtacaaaacactaccaaat

SEQ ID NO: 184580 - DNA, 20 bp, Artificial Sequence
  Description of Artificial Sequence: Synthetic oligonucleotide
  Target: LAMA2; (+) strand; PAM type: NRG; PAM sequence: GAG
tacaaaacactaccaaatta

SEQ ID NO: 184581 - DNA, 20 bp, Artificial Sequence
  Description of Artificial Sequence: Synthetic oligonucleotide
  Target: LAMA2; (+) strand; PAM type: NRG; PAM sequence: AGG
acaaaacactaccaaattag

SEQ ID NO: 184582 - DNA, 20 bp, Artificial Sequence
  Description of Artificial Sequence: Synthetic oligonucleotide
  Target: LAMA2; (+) strand; PAM type: NRG; PAM sequence: GGG
caaaacactaccaaattaga

SEQ ID NO: 184583 - DNA, 20 bp, Artificial Sequence
  Description of Artificial Sequence: Synthetic oligonucleotide
  Target: LAMA2; (+) strand; PAM type: NRG; PAM sequence: TGG
aacactaccaaattagaggg

SEQ ID NO: 184584 - DNA, 20 bp, Artificial Sequence
  Description of Artificial Sequence: Synthetic oligonucleotide
  Target: LAMA2; (+) strand; PAM type: NRG; PAM sequence: GGG
acactaccaaattagagggt

SEQ ID NO: 184585 - DNA, 20 bp, Artificial Sequence
  Description of Artificial Sequence: Synthetic oligonucleotide
  Target: LAMA2; (+) strand; PAM type: NRG; PAM sequence: GGG
cactaccaaattagagggtg

SEQ ID NO: 184586 - DNA, 20 bp, Artificial Sequence
  Description of Artificial Sequence: Synthetic oligonucleotide
  Target: LAMA2; (+) strand; PAM type: NRG; PAM sequence: AAG
ttttgtcccatttaaatcct

SEQ ID NO: 184587 - DNA, 20 bp, Artificial Sequence
  Description of Artificial Sequence: Synthetic oligonucleotide
  Target: LAMA2; (+) strand; PAM type: NRG; PAM sequence: AGG
tttgtcccatttaaatccta

SEQ ID NO: 184588 - DNA, 20 bp, Artificial Sequence
  Description of Artificial Sequence: Synthetic oligonucleotide
  Target: LAMA2; (+) strand; PAM type: NRG; PAM sequence: CAG
ttttaaaaaccctcttacac

SEQ ID NO: 184589 - DNA, 20 bp, Artificial Sequence
  Description of Artificial Sequence: Synthetic oligonucleotide
  Target: LAMA2; (+) strand; PAM type: NRG; PAM sequence: CAG
cctcttacaccagcacttct

SEQ ID NO: 184590 - DNA, 20 bp, Artificial Sequence
  Description of Artificial Sequence: Synthetic oligonucleotide
  Target: LAMA2; (+) strand; PAM type: NRG; PAM sequence: CAG
ctcagtccttttccaactgc

SEQ ID NO: 184591 - DNA, 20 bp, Artificial Sequence
  Description of Artificial Sequence: Synthetic oligonucleotide
  Target: LAMA2; (+) strand; PAM type: NRG; PAM sequence: AAG
ttccaactgccagtttaata

SEQ ID NO: 184592 - DNA, 20 bp, Artificial Sequence
  Description of Artificial Sequence: Synthetic oligonucleotide
  Target: LAMA2; (+) strand; PAM type: NRG; PAM sequence: AGG
tccaactgccagtttaataa

SEQ ID NO: 184593 - DNA, 20 bp, Artificial Sequence
  Description of Artificial Sequence: Synthetic oligonucleotide
  Target: LAMA2; (+) strand; PAM type: NRG; PAM sequence: AAG
aactgccagtttaataaagg

SEQ ID NO: 184594 - DNA, 20 bp, Artificial Sequence
  Description of Artificial Sequence: Synthetic oligonucleotide
  Target: LAMA2; (+) strand; PAM type: NRG; PAM sequence: AGG
actgccagtttaataaagga

SEQ ID NO: 184595 - DNA, 20 bp, Artificial Sequence
  Description of Artificial Sequence: Synthetic oligonucleotide
  Target: LAMA2; (+) strand; PAM type: NRG; PAM sequence: TAG
agtttaataaaggaaggtga

SEQ ID NO: 184596 - DNA, 20 bp, Artificial Sequence
  Description of Artificial Sequence: Synthetic oligonucleotide
  Target: LAMA2; (+) strand; PAM type: NRG; PAM sequence: AAG
ttaataaaggaaggtgatag

SEQ ID NO: 184597 - DNA, 20 bp, Artificial Sequence
  Description of Artificial Sequence: Synthetic oligonucleotide
  Target: LAMA2; (+) strand; PAM type: NRG; PAM sequence: CAG
tgatagaagttttattaaaa

SEQ ID NO: 184598 - DNA, 20 bp, Artificial Sequence
  Description of Artificial Sequence: Synthetic oligonucleotide
  Target: LAMA2; (+) strand; PAM type: NRG; PAM sequence: TAG
tgttgcaaatcaatgattga

SEQ ID NO: 184599 - DNA, 20 bp, Artificial Sequence
  Description of Artificial Sequence: Synthetic oligonucleotide
  Target: LAMA2; (+) strand; PAM type: NRG; PAM sequence: TGG
attgatagtaaacatcacct

SEQ ID NO: 184600 - DNA, 20 bp, Artificial Sequence
  Description of Artificial Sequence: Synthetic oligonucleotide
  Target: LAMA2; (+) strand; PAM type: NRG; PAM sequence: AAG
cttggatgtccttaaaaaca

SEQ ID NO: 184601 - DNA, 20 bp, Artificial Sequence
  Description of Artificial Sequence: Synthetic oligonucleotide
  Target: LAMA2; (+) strand; PAM type: NRG; PAM sequence: AGG
ttggatgtccttaaaaacaa

SEQ ID NO: 184602 - DNA, 20 bp, Artificial Sequence
  Description of Artificial Sequence: Synthetic oligonucleotide
  Target: LAMA2; (+) strand; PAM type: NRG; PAM sequence: TGG
caaaggactatacaccataa

SEQ ID NO: 184603 - DNA, 20 bp, Artificial Sequence
  Description of Artificial Sequence: Synthetic oligonucleotide
  Target: LAMA2; (+) strand; PAM type: NRG; PAM sequence: GAG
ccataatggctttaaacttt

SEQ ID NO: 184604 - DNA, 20 bp, Artificial Sequence
  Description of Artificial Sequence: Synthetic oligonucleotide
  Target: LAMA2; (+) strand; PAM type: NRG; PAM sequence: AGG
cataatggctttaaactttg

SEQ ID NO: 184605 - DNA, 20 bp, Artificial Sequence
  Description of Artificial Sequence: Synthetic oligonucleotide
  Target: LAMA2; (+) strand; PAM type: NRG; PAM sequence: TAG
taaactttgaggttacatgt

SEQ ID NO: 184606 - DNA, 20 bp, Artificial Sequence
  Description of Artificial Sequence: Synthetic oligonucleotide
  Target: LAMA2; (+) strand; PAM type: NRG; PAM sequence: GAG
aactttgaggttacatgtta

SEQ ID NO: 184607 - DNA, 20 bp, Artificial Sequence
  Description of Artificial Sequence: Synthetic oligonucleotide
  Target: LAMA2; (+) strand; PAM type: NRG; PAM sequence: CAG
aggttacatgttagagtgat

SEQ ID NO: 184608 - DNA, 20 bp, Artificial Sequence
  Description of Artificial Sequence: Synthetic oligonucleotide
  Target: LAMA2; (+) strand; PAM type: NRG; PAM sequence: TGG
acatgttagagtgatcagtt

SEQ ID NO: 184609 - DNA, 20 bp, Artificial Sequence
  Description of Artificial Sequence: Synthetic oligonucleotide
  Target: LAMA2; (+) strand; PAM type: NRG; PAM sequence: TGG
acaactcttttccataacat

SEQ ID NO: 184610 - DNA, 20 bp, Artificial Sequence
  Description of Artificial Sequence: Synthetic oligonucleotide
  Target: LAMA2; (+) strand; PAM type: NRG; PAM sequence: GAG
tccataacattggctcatct

SEQ ID NO: 184611 - DNA, 20 bp, Artificial Sequence
  Description of Artificial Sequence: Synthetic oligonucleotide
  Target: LAMA2; (+) strand; PAM type: NRG; PAM sequence: AAG
tctgagaataccgttttatt

SEQ ID NO: 184612 - DNA, 20 bp, Artificial Sequence
  Description of Artificial Sequence: Synthetic oligonucleotide
  Target: LAMA2; (+) strand; PAM type: NRG; PAM sequence: GAG
actgcttctgcctgcttctt

SEQ ID NO: 184613 - DNA, 20 bp, Artificial Sequence
  Description of Artificial Sequence: Synthetic oligonucleotide
  Target: LAMA2; (+) strand; PAM type: NRG; PAM sequence: AGG
ctgcttctgcctgcttcttg

SEQ ID NO: 184614 - DNA, 20 bp, Artificial Sequence
  Description of Artificial Sequence: Synthetic oligonucleotide
  Target: LAMA2; (+) strand; PAM type: NRG; PAM sequence: GGG
tgcttctgcctgcttcttga

SEQ ID NO: 184615 - DNA, 20 bp, Artificial Sequence
  Description of Artificial Sequence: Synthetic oligonucleotide
  Target: LAMA2; (+) strand; PAM type: NRG; PAM sequence: CAG
ttcttgagggctgcccgttg

SEQ ID NO: 184616 - DNA, 20 bp, Artificial Sequence
  Description of Artificial Sequence: Synthetic oligonucleotide
  Target: LAMA2; (+) strand; PAM type: NRG; PAM sequence: CGG
agggctgcccgttgcagaaa

SEQ ID NO: 184617 - DNA, 20 bp, Artificial Sequence
  Description of Artificial Sequence: Synthetic oligonucleotide
  Target: LAMA2; (+) strand; PAM type: NRG; PAM sequence: GAG
ggctgcccgttgcagaaacg

SEQ ID NO: 184618 - DNA, 20 bp, Artificial Sequence
  Description of Artificial Sequence: Synthetic oligonucleotide
  Target: LAMA2; (+) strand; PAM type: NRG; PAM sequence: AGG
gctgcccgttgcagaaacgg

SEQ ID NO: 184619 - DNA, 20 bp, Artificial Sequence
  Description of Artificial Sequence: Synthetic oligonucleotide
  Target: LAMA2; (+) strand; PAM type: NRG; PAM sequence: CAG
cagaaacggaggatctaatc

SEQ ID NO: 184620 - DNA, 20 bp, Artificial Sequence
  Description of Artificial Sequence: Synthetic oligonucleotide
  Target: LAMA2; (+) strand; PAM type: NRG; PAM sequence: AGG
agaaacggaggatctaatcc

SEQ ID NO: 184621 - DNA, 20 bp, Artificial Sequence
  Description of Artificial Sequence: Synthetic oligonucleotide
  Target: LAMA2; (+) strand; PAM type: NRG; PAM sequence: GAG
aaacggaggatctaatccag

SEQ ID NO: 184622 - DNA, 20 bp, Artificial Sequence
  Description of Artificial Sequence: Synthetic oligonucleotide
  Target: LAMA2; (+) strand; PAM type: NRG; PAM sequence: AGG
aacggaggatctaatccagg

SEQ ID NO: 184623 - DNA, 20 bp, Artificial Sequence
  Description of Artificial Sequence: Synthetic oligonucleotide
  Target: LAMA2; (+) strand; PAM type: NRG; PAM sequence: AAG
tgttcttcttcctaaatttc

SEQ ID NO: 184624 - DNA, 20 bp, Artificial Sequence
  Description of Artificial Sequence: Synthetic oligonucleotide
  Target: LAMA2; (+) strand; PAM type: NRG; PAM sequence: TGG
tcttcttcctaaatttcaag

SEQ ID NO: 184625 - DNA, 20 bp, Artificial Sequence
  Description of Artificial Sequence: Synthetic oligonucleotide
  Target: LAMA2; (+) strand; PAM type: NRG; PAM sequence: AAG
taacctgtaatgattcttaa

SEQ ID NO: 184626 - DNA, 20 bp, Artificial Sequence
  Description of Artificial Sequence: Synthetic oligonucleotide
  Target: LAMA2; (+) strand; PAM type: NRG; PAM sequence: AAG
ttcttaaaagaactttgaca

SEQ ID NO: 184627 - DNA, 20 bp, Artificial Sequence
  Description of Artificial Sequence: Synthetic oligonucleotide
  Target: LAMA2; (+) strand; PAM type: NRG; PAM sequence: TGG
acaaagtccctgtccttttc

SEQ ID NO: 184628 - DNA, 20 bp, Artificial Sequence
  Description of Artificial Sequence: Synthetic oligonucleotide
  Target: LAMA2; (+) strand; PAM type: NRG; PAM sequence: AAG
tccctgtccttttctggtca

SEQ ID NO: 184629 - DNA, 20 bp, Artificial Sequence
  Description of Artificial Sequence: Synthetic oligonucleotide
  Target: LAMA2; (+) strand; PAM type: NRG; PAM sequence: AGG
ccctgtccttttctggtcaa

SEQ ID NO: 184630 - DNA, 20 bp, Artificial Sequence
  Description of Artificial Sequence: Synthetic oligonucleotide
  Target: LAMA2; (+) strand; PAM type: NRG; PAM sequence: TGG
tcaaaggtttttttctaaaa

SEQ ID NO: 184631 - DNA, 20 bp, Artificial Sequence
  Description of Artificial Sequence: Synthetic oligonucleotide
  Target: LAMA2; (+) strand; PAM type: NRG; PAM sequence: CAG
tttttctaaaatggcttgac

SEQ ID NO: 184632 - DNA, 20 bp, Artificial Sequence
  Description of Artificial Sequence: Synthetic oligonucleotide
  Target: LAMA2; (+) strand; PAM type: NRG; PAM sequence: TAG
tgaccagtgccttgtccatc

SEQ ID NO: 184633 - DNA, 20 bp, Artificial Sequence
  Description of Artificial Sequence: Synthetic oligonucleotide
  Target: LAMA2; (+) strand; PAM type: NRG; PAM sequence: TAG
tgtccatctagaaaatctca

SEQ ID NO: 184634 - DNA, 20 bp, Artificial Sequence
  Description of Artificial Sequence: Synthetic oligonucleotide
  Target: LAMA2; (+) strand; PAM type: NRG; PAM sequence: TAG
caaaccaaaaaactgctgct

SEQ ID NO: 184635 - DNA, 20 bp, Artificial Sequence
  Description of Artificial Sequence: Synthetic oligonucleotide
  Target: LAMA2; (+) strand; PAM type: NRG; PAM sequence: CAG
caaaaaactgctgcttagct

SEQ ID NO: 184636 - DNA, 20 bp, Artificial Sequence
  Description of Artificial Sequence: Synthetic oligonucleotide
  Target: LAMA2; (+) strand; PAM type: NRG; PAM sequence: AGG
aaaaaactgctgcttagctc

SEQ ID NO: 184637 - DNA, 20 bp, Artificial Sequence
  Description of Artificial Sequence: Synthetic oligonucleotide
  Target: LAMA2; (+) strand; PAM type: NRG; PAM sequence: CAG
actgctgcttagctcaggac

SEQ ID NO: 184638 - DNA, 20 bp, Artificial Sequence
  Description of Artificial Sequence: Synthetic oligonucleotide
  Target: LAMA2; (+) strand; PAM type: NRG; PAM sequence: TGG
gcttagctcaggaccagttt

SEQ ID NO: 184639 - DNA, 20 bp, Artificial Sequence
  Description of Artificial Sequence: Synthetic oligonucleotide
  Target: LAMA2; (+) strand; PAM type: NRG; PAM sequence: CAG
cagttttggatacacctgtc

SEQ ID NO: 184640 - DNA, 20 bp, Artificial Sequence
  Description of Artificial Sequence: Synthetic oligonucleotide
  Target: LAMA2; (+) strand; PAM type: NRG; PAM sequence: CAG
gatacacctgtccagtctac

SEQ ID NO: 184641 - DNA, 20 bp, Artificial Sequence
  Description of Artificial Sequence: Synthetic oligonucleotide
  Target: LAMA2; (+) strand; PAM type: NRG; PAM sequence: AAG
ccagtctaccagcaatccaa

SEQ ID NO: 184642 - DNA, 20 bp, Artificial Sequence
  Description of Artificial Sequence: Synthetic oligonucleotide
  Target: LAMA2; (+) strand; PAM type: NRG; PAM sequence: CAG
caaaagttccccataacata

SEQ ID NO: 184643 - DNA, 20 bp, Artificial Sequence
  Description of Artificial Sequence: Synthetic oligonucleotide
  Target: LAMA2; (+) strand; PAM type: NRG; PAM sequence: CGG
ccataacatacagctgctac

SEQ ID NO: 184644 - DNA, 20 bp, Artificial Sequence
  Description of Artificial Sequence: Synthetic oligonucleotide
  Target: LAMA2; (+) strand; PAM type: NRG; PAM sequence: GGG
cataacatacagctgctacc

SEQ ID NO: 184645 - DNA, 20 bp, Artificial Sequence
  Description of Artificial Sequence: Synthetic oligonucleotide
  Target: LAMA2; (+) strand; PAM type: NRG; PAM sequence: GAG
taacatacagctgctaccgg

SEQ ID NO: 184646 - DNA, 20 bp, Artificial Sequence
  Description of Artificial Sequence: Synthetic oligonucleotide
  Target: LAMA2; (+) strand; PAM type: NRG; PAM sequence: TAG
gaaaattttttaaattttaa

SEQ ID NO: 184647 - DNA, 20 bp, Artificial Sequence
  Description of Artificial Sequence: Synthetic oligonucleotide
  Target: LAMA2; (+) strand; PAM type: NRG; PAM sequence: GAG
aaattttttaaattttaata

SEQ ID NO: 184648 - DNA, 20 bp, Artificial Sequence
  Description of Artificial Sequence: Synthetic oligonucleotide
  Target: LAMA2; (+) strand; PAM type: NRG; PAM sequence: AAG
ttttttaaattttaatagag

SEQ ID NO: 184649 - DNA, 20 bp, Artificial Sequence
  Description of Artificial Sequence: Synthetic oligonucleotide
  Target: LAMA2; (+) strand; PAM type: NRG; PAM sequence: TAG
gttatattgacatttacata

SEQ ID NO: 184650 - DNA, 20 bp, Artificial Sequence
  Description of Artificial Sequence: Synthetic oligonucleotide
  Target: LAMA2; (+) strand; PAM type: NRG; PAM sequence: TAG
tgacatttacatatagtaat

SEQ ID NO: 184651 - DNA, 20 bp, Artificial Sequence
  Description of Artificial Sequence: Synthetic oligonucleotide
  Target: LAMA2; (+) strand; PAM type: NRG; PAM sequence: GAG
tttacatatagtaattagac

SEQ ID NO: 184652 - DNA, 20 bp, Artificial Sequence
  Description of Artificial Sequence: Synthetic oligonucleotide
  Target: LAMA2; (+) strand; PAM type: NRG; PAM sequence: TGG
tgactgtaaccgcaataata

SEQ ID NO: 184653 - DNA, 20 bp, Artificial Sequence
  Description of Artificial Sequence: Synthetic oligonucleotide
  Target: LAMA2; (+) strand; PAM type: NRG; PAM sequence: TGG
ataatatggacataacccac

SEQ ID NO: 184654 - DNA, 20 bp, Artificial Sequence
  Description of Artificial Sequence: Synthetic oligonucleotide
  Target: LAMA2; (+) strand; PAM type: NRG; PAM sequence: TGG
atatggacataacccactgg

SEQ ID NO: 184655 - DNA, 20 bp, Artificial Sequence
  Description of Artificial Sequence: Synthetic oligonucleotide
  Target: LAMA2; (+) strand; PAM type: NRG; PAM sequence: AAG
cccactggtggttctctttt

SEQ ID NO: 184656 - DNA, 20 bp, Artificial Sequence
  Description of Artificial Sequence: Synthetic oligonucleotide
  Target: LAMA2; (+) strand; PAM type: NRG; PAM sequence: CAG
gtaattgtttcctaattcct

SEQ ID NO: 184657 - DNA, 20 bp, Artificial Sequence
  Description of Artificial Sequence: Synthetic oligonucleotide
  Target: LAMA2; (+) strand; PAM type: NRG; PAM sequence: CAG
tttcttaatccctcaatttt

SEQ ID NO: 184658 - DNA, 20 bp, Artificial Sequence
  Description of Artificial Sequence: Synthetic oligonucleotide
  Target: LAMA2; (+) strand; PAM type: NRG; PAM sequence: GAG
tcttaatccctcaattttca

SEQ ID NO: 184659 - DNA, 20 bp, Artificial Sequence
  Description of Artificial Sequence: Synthetic oligonucleotide
  Target: LAMA2; (+) strand; PAM type: NRG; PAM sequence: GAG
atccctcaattttcagagct

SEQ ID NO: 184660 - DNA, 20 bp, Artificial Sequence
  Description of Artificial Sequence: Synthetic oligonucleotide
  Target: LAMA2; (+) strand; PAM type: NRG; PAM sequence: AGG
tccctcaattttcagagctg

SEQ ID NO: 184661 - DNA, 20 bp, Artificial Sequence
  Description of Artificial Sequence: Synthetic oligonucleotide
  Target: LAMA2; (+) strand; PAM type: NRG; PAM sequence: GGG
ccctcaattttcagagctga

SEQ ID NO: 184662 - DNA, 20 bp, Artificial Sequence
  Description of Artificial Sequence: Synthetic oligonucleotide
  Target: LAMA2; (+) strand; PAM type: NRG; PAM sequence: AAG
ttttcagagctgagggtgta

SEQ ID NO: 184663 - DNA, 20 bp, Artificial Sequence
  Description of Artificial Sequence: Synthetic oligonucleotide
  Target: LAMA2; (+) strand; PAM type: NRG; PAM sequence: CAG
ctgagggtgtaaagatgttt

SEQ ID NO: 184664 - DNA, 20 bp, Artificial Sequence
  Description of Artificial Sequence: Synthetic oligonucleotide
  Target: LAMA2; (+) strand; PAM type: NRG; PAM sequence: CAG
tttcagtgaaattctgcccc

SEQ ID NO: 184665 - DNA, 20 bp, Artificial Sequence
  Description of Artificial Sequence: Synthetic oligonucleotide
  Target: LAMA2; (+) strand; PAM type: NRG; PAM sequence: TGG
cagtgaaattctgcccccag

SEQ ID NO: 184666 - DNA, 20 bp, Artificial Sequence
  Description of Artificial Sequence: Synthetic oligonucleotide
  Target: LAMA2; (+) strand; PAM type: NRG; PAM sequence: CAG
ttctgcccccagtggactca

SEQ ID NO: 184667 - DNA, 20 bp, Artificial Sequence
  Description of Artificial Sequence: Synthetic oligonucleotide
  Target: LAMA2; (+) strand; PAM type: NRG; PAM sequence: CAG
tgcccccagtggactcacag

SEQ ID NO: 184668 - DNA, 20 bp, Artificial Sequence
  Description of Artificial Sequence: Synthetic oligonucleotide
  Target: LAMA2; (+) strand; PAM type: NRG; PAM sequence: TAG
cccagtggactcacagcaga

SEQ ID NO: 184669 - DNA, 20 bp, Artificial Sequence
  Description of Artificial Sequence: Synthetic oligonucleotide
  Target: LAMA2; (+) strand; PAM type: NRG; PAM sequence: AGG
ccagtggactcacagcagat

SEQ ID NO: 184670 - DNA, 20 bp, Artificial Sequence
  Description of Artificial Sequence: Synthetic oligonucleotide
  Target: LAMA2; (+) strand; PAM type: NRG; PAM sequence: TAG
cacagcagataggattatct

SEQ ID NO: 184671 - DNA, 20 bp, Artificial Sequence
  Description of Artificial Sequence: Synthetic oligonucleotide
  Target: LAMA2; (+) strand; PAM type: NRG; PAM sequence: GAG
ggattatcttagtgatttct

SEQ ID NO: 184672 - DNA, 20 bp, Artificial Sequence
  Description of Artificial Sequence: Synthetic oligonucleotide
  Target: LAMA2; (+) strand; PAM type: NRG; PAM sequence: AGG
gattatcttagtgatttctg

SEQ ID NO: 184673 - DNA, 20 bp, Artificial Sequence
  Description of Artificial Sequence: Synthetic oligonucleotide
  Target: LAMA2; (+) strand; PAM type: NRG; PAM sequence: AAG
tatcttagtgatttctgagg

SEQ ID NO: 184674 - DNA, 20 bp, Artificial Sequence
  Description of Artificial Sequence: Synthetic oligonucleotide
  Target: LAMA2; (+) strand; PAM type: NRG; PAM sequence: AAG
tgatttctgaggaagactgc

SEQ ID NO: 184675 - DNA, 20 bp, Artificial Sequence
  Description of Artificial Sequence: Synthetic oligonucleotide
  Target: LAMA2; (+) strand; PAM type: NRG; PAM sequence: GAG
gcaagctgcgtgtgtttatc

SEQ ID NO: 184676 - DNA, 20 bp, Artificial Sequence
  Description of Artificial Sequence: Synthetic oligonucleotide
  Target: LAMA2; (+) strand; PAM type: NRG; PAM sequence: CGG
gctgcgtgtgtttatcgaga

SEQ ID NO: 184677 - DNA, 20 bp, Artificial Sequence
  Description of Artificial Sequence: Synthetic oligonucleotide
  Target: LAMA2; (+) strand; PAM type: NRG; PAM sequence: CGG
tatcgagacggtcctctgtc

SEQ ID NO: 184678 - DNA, 20 bp, Artificial Sequence
  Description of Artificial Sequence: Synthetic oligonucleotide
  Target: LAMA2; (+) strand; PAM type: NRG; PAM sequence: GGG
atcgagacggtcctctgtcc

SEQ ID NO: 184679 - DNA, 20 bp, Artificial Sequence
  Description of Artificial Sequence: Synthetic oligonucleotide
  Target: LAMA2; (+) strand; PAM type: NRG; PAM sequence: GAG
ctctgtccgggaaatatcgt

SEQ ID NO: 184680 - DNA, 20 bp, Artificial Sequence
  Description of Artificial Sequence: Synthetic oligonucleotide
  Target: LAMA2; (+) strand; PAM type: NRG; PAM sequence: GAG
ctgtccgggaaatatcgtga

SEQ ID NO: 184681 - DNA, 20 bp, Artificial Sequence
  Description of Artificial Sequence: Synthetic oligonucleotide
  Target: LAMA2; (+) strand; PAM type: NRG; PAM sequence: AGG
tgtccgggaaatatcgtgag

SEQ ID NO: 184682 - DNA, 20 bp, Artificial Sequence
  Description of Artificial Sequence: Synthetic oligonucleotide
  Target: LAMA2; (+) strand; PAM type: NRG; PAM sequence: AAG
atatcgtgagaggctgataa

SEQ ID NO: 184683 - DNA, 20 bp, Artificial Sequence
  Description of Artificial Sequence: Synthetic oligonucleotide
  Target: LAMA2; (+) strand; PAM type: NRG; PAM sequence: TAG
aaagatcccaattctattaa

SEQ ID NO: 184684 - DNA, 20 bp, Artificial Sequence
  Description of Artificial Sequence: Synthetic oligonucleotide
  Target: LAMA2; (+) strand; PAM type: NRG; PAM sequence: AAG
gatcccaattctattaatag

SEQ ID NO: 184685 - DNA, 20 bp, Artificial Sequence
  Description of Artificial Sequence: Synthetic oligonucleotide
  Target: LAMA2; (+) strand; PAM type: NRG; PAM sequence: GAG
taatagaagtattcatgact

SEQ ID NO: 184686 - DNA, 20 bp, Artificial Sequence
  Description of Artificial Sequence: Synthetic oligonucleotide
  Target: LAMA2; (+) strand; PAM type: NRG; PAM sequence: AAG
gtattcatgactgagatctt

SEQ ID NO: 184687 - DNA, 20 bp, Artificial Sequence
  Description of Artificial Sequence: Synthetic oligonucleotide
  Target: LAMA2; (+) strand; PAM type: NRG; PAM sequence: CAG
atgactgagatcttaagcta

SEQ ID NO: 184688 - DNA, 20 bp, Artificial Sequence
  Description of Artificial Sequence: Synthetic oligonucleotide
  Target: LAMA2; (+) strand; PAM type: NRG; PAM sequence: GAG
gactgagatcttaagctaca

SEQ ID NO: 184689 - DNA, 20 bp, Artificial Sequence
  Description of Artificial Sequence: Synthetic oligonucleotide
  Target: LAMA2; (+) strand; PAM type: NRG; PAM sequence: AGG
actgagatcttaagctacag

SEQ ID NO: 184690 - DNA, 20 bp, Artificial Sequence
  Description of Artificial Sequence: Synthetic oligonucleotide
  Target: LAMA2; (+) strand; PAM type: NRG; PAM sequence: CGG
gctacagaggcctttccatt

SEQ ID NO: 184691 - DNA, 20 bp, Artificial Sequence
  Description of Artificial Sequence: Synthetic oligonucleotide
  Target: LAMA2; (+) strand; PAM type: NRG; PAM sequence: GGG
ctacagaggcctttccattc

SEQ ID NO: 184692 - DNA, 20 bp, Artificial Sequence
  Description of Artificial Sequence: Synthetic oligonucleotide
  Target: LAMA2; (+) strand; PAM type: NRG; PAM sequence: CAG
ttccattcgggctctttttg

SEQ ID NO: 184693 - DNA, 20 bp, Artificial Sequence
  Description of Artificial Sequence: Synthetic oligonucleotide
  Target: LAMA2; (+) strand; PAM type: NRG; PAM sequence: AGG
tccattcgggctctttttgc

SEQ ID NO: 184694 - DNA, 20 bp, Artificial Sequence
  Description of Artificial Sequence: Synthetic oligonucleotide
  Target: LAMA2; (+) strand; PAM type: NRG; PAM sequence: CAG
attcgggctctttttgcagg

SEQ ID NO: 184695 - DNA, 20 bp, Artificial Sequence
  Description of Artificial Sequence: Synthetic oligonucleotide
  Target: LAMA2; (+) strand; PAM type: NRG; PAM sequence: AAG
ctttttgcaggcagcgtaat

SEQ ID NO: 184696 - DNA, 20 bp, Artificial Sequence
  Description of Artificial Sequence: Synthetic oligonucleotide
  Target: LAMA2; (+) strand; PAM type: NRG; PAM sequence: AAG
ttgcaggcagcgtaataaga

SEQ ID NO: 184697 - DNA, 20 bp, Artificial Sequence
  Description of Artificial Sequence: Synthetic oligonucleotide
  Target: LAMA2; (+) strand; PAM type: NRG; PAM sequence: AGG
tgcaggcagcgtaataagaa

SEQ ID NO: 184698 - DNA, 20 bp, Artificial Sequence
  Description of Artificial Sequence: Synthetic oligonucleotide
  Target: LAMA2; (+) strand; PAM type: NRG; PAM sequence: AAG
gtgccacatgctgcctctaa

SEQ ID NO: 184699 - DNA, 20 bp, Artificial Sequence
  Description of Artificial Sequence: Synthetic oligonucleotide
  Target: LAMA2; (+) strand; PAM type: NRG; PAM sequence: GAG
gccacatgctgcctctaaaa

SEQ ID NO: 184700 - DNA, 20 bp, Artificial Sequence
  Description of Artificial Sequence: Synthetic oligonucleotide
  Target: LAMA2; (+) strand; PAM type: NRG; PAM sequence: AGG
ccacatgctgcctctaaaag

SEQ ID NO: 184701 - DNA, 20 bp, Artificial Sequence
  Description of Artificial Sequence: Synthetic oligonucleotide
  Target: LAMA2; (+) strand; PAM type: NRG; PAM sequence: CAG
tgcctctaaaagaggccatt

SEQ ID NO: 184702 - DNA, 20 bp, Artificial Sequence
  Description of Artificial Sequence: Synthetic oligonucleotide
  Target: LAMA2; (+) strand; PAM type: NRG; PAM sequence: TAG
cattcagctgtgcgaatgaa

SEQ ID NO: 184703 - DNA, 20 bp, Artificial Sequence
  Description of Artificial Sequence: Synthetic oligonucleotide
  Target: LAMA2; (+) strand; PAM type: NRG; PAM sequence: CGG
gcattttcctgtcctaccca

SEQ ID NO: 184704 - DNA, 20 bp, Artificial Sequence
  Description of Artificial Sequence: Synthetic oligonucleotide
  Target: LAMA2; (+) strand; PAM type: NRG; PAM sequence: GGG
cattttcctgtcctacccac

SEQ ID NO: 184705 - DNA, 20 bp, Artificial Sequence
  Description of Artificial Sequence: Synthetic oligonucleotide
  Target: LAMA2; (+) strand; PAM type: NRG; PAM sequence: GGG
attttcctgtcctacccacg

SEQ ID NO: 184706 - DNA, 20 bp, Artificial Sequence
  Description of Artificial Sequence: Synthetic oligonucleotide
  Target: LAMA2; (+) strand; PAM type: NRG; PAM sequence: TAG
cctacccacggggttttgca

SEQ ID NO: 184707 - DNA, 20 bp, Artificial Sequence
  Description of Artificial Sequence: Synthetic oligonucleotide
  Target: LAMA2; (+) strand; PAM type: NRG; PAM sequence: CGG
ttgcatagctgtgtgaattt

SEQ ID NO: 184708 - DNA, 20 bp, Artificial Sequence
  Description of Artificial Sequence: Synthetic oligonucleotide
  Target: LAMA2; (+) strand; PAM type: NRG; PAM sequence: CAG
agctgtgtgaatttcggcca

SEQ ID NO: 184709 - DNA, 20 bp, Artificial Sequence
  Description of Artificial Sequence: Synthetic oligonucleotide
  Target: LAMA2; (+) strand; PAM type: NRG; PAM sequence: TGG
ctttataactgaccatctcc

SEQ ID NO: 184710 - DNA, 20 bp, Artificial Sequence
  Description of Artificial Sequence: Synthetic oligonucleotide
  Target: LAMA2; (+) strand; PAM type: NRG; PAM sequence: GGG
tttataactgaccatctcct

SEQ ID NO: 184711 - DNA, 20 bp, Artificial Sequence
  Description of Artificial Sequence: Synthetic oligonucleotide
  Target: LAMA2; (+) strand; PAM type: NRG; PAM sequence: AAG
ataactgaccatctcctggg

SEQ ID NO: 184712 - DNA, 20 bp, Artificial Sequence
  Description of Artificial Sequence: Synthetic oligonucleotide
  Target: LAMA2; (+) strand; PAM type: NRG; PAM sequence: AAG
ctgaccatctcctgggaagc

SEQ ID NO: 184713 - DNA, 20 bp, Artificial Sequence
  Description of Artificial Sequence: Synthetic oligonucleotide
  Target: LAMA2; (+) strand; PAM type: NRG; PAM sequence: AAG
accatctcctgggaagcaag

SEQ ID NO: 184714 - DNA, 20 bp, Artificial Sequence
  Description of Artificial Sequence: Synthetic oligonucleotide
  Target: LAMA2; (+) strand; PAM type: NRG; PAM sequence: AGG
ccatctcctgggaagcaaga

SEQ ID NO: 184715 - DNA, 20 bp, Artificial Sequence
  Description of Artificial Sequence: Synthetic oligonucleotide
  Target: LAMA2; (+) strand; PAM type: NRG; PAM sequence: GGG
catctcctgggaagcaagaa

SEQ ID NO: 184716 - DNA, 20 bp, Artificial Sequence
  Description of Artificial Sequence: Synthetic oligonucleotide
  Target: LAMA2; (+) strand; PAM type: NRG; PAM sequence: AAG
agaagggaaatacttccatg

SEQ ID NO: 184717 - DNA, 20 bp, Artificial Sequence
  Description of Artificial Sequence: Synthetic oligonucleotide
  Target: LAMA2; (+) strand; PAM type: NRG; PAM sequence: CGG
ttccatgaagaccaatttta

SEQ ID NO: 184718 - DNA, 20 bp, Artificial Sequence
  Description of Artificial Sequence: Synthetic oligonucleotide
  Target: LAMA2; (+) strand; PAM type: NRG; PAM sequence: AAG
acggcatttcaaaacacttt

SEQ ID NO: 184719 - DNA, 20 bp, Artificial Sequence
  Description of Artificial Sequence: Synthetic oligonucleotide
  Target: LAMA2; (+) strand; PAM type: NRG; PAM sequence: TGG
tttaagccttttacctgctg

SEQ ID NO: 184720 - DNA, 20 bp, Artificial Sequence
  Description of Artificial Sequence: Synthetic oligonucleotide
  Target: LAMA2; (+) strand; PAM type: NRG; PAM sequence: CAG
aagccttttacctgctgtgg

SEQ ID NO: 184721 - DNA, 20 bp, Artificial Sequence
  Description of Artificial Sequence: Synthetic oligonucleotide
  Target: LAMA2; (+) strand; PAM type: NRG; PAM sequence: GAG
gccttttacctgctgtggca

SEQ ID NO: 184722 - DNA, 20 bp, Artificial Sequence
  Description of Artificial Sequence: Synthetic oligonucleotide
  Target: LAMA2; (+) strand; PAM type: NRG; PAM sequence: AAG
gcagagtgcttcgtttgact

SEQ ID NO: 184723 - DNA, 20 bp, Artificial Sequence
  Description of Artificial Sequence: Synthetic oligonucleotide
  Target: LAMA2; (+) strand; PAM type: NRG; PAM sequence: AAG
tgcttcgtttgactaagatc

SEQ ID NO: 184724 - DNA, 20 bp, Artificial Sequence
  Description of Artificial Sequence: Synthetic oligonucleotide
  Target: LAMA2; (+) strand; PAM type: NRG; PAM sequence: GAG
cttcgtttgactaagatcaa

SEQ ID NO: 184725 - DNA, 20 bp, Artificial Sequence
  Description of Artificial Sequence: Synthetic oligonucleotide
  Target: LAMA2; (+) strand; PAM type: NRG; PAM sequence: AAG
tttgactaagatcaagagaa

SEQ ID NO: 184726 - DNA, 20 bp, Artificial Sequence
  Description of Artificial Sequence: Synthetic oligonucleotide
  Target: LAMA2; (+) strand; PAM type: NRG; PAM sequence: GAG
tgactaagatcaagagaaaa

SEQ ID NO: 184727 - DNA, 20 bp, Artificial Sequence
  Description of Artificial Sequence: Synthetic oligonucleotide
  Target: LAMA2; (+) strand; PAM type: NRG; PAM sequence: AAG
agatcaagagaaaagagaac

SEQ ID NO: 184728 - DNA, 20 bp, Artificial Sequence
  Description of Artificial Sequence: Synthetic oligonucleotide
  Target: LAMA2; (+) strand; PAM type: NRG; PAM sequence: AGG
gatcaagagaaaagagaaca

SEQ ID NO: 184729 - DNA, 20 bp, Artificial Sequence
  Description of Artificial Sequence: Synthetic oligonucleotide
  Target: LAMA2; (+) strand; PAM type: NRG; PAM sequence: AAG
gaacaaggcttttcctcatc

SEQ ID NO: 184730 - DNA, 20 bp, Artificial Sequence
  Description of Artificial Sequence: Synthetic oligonucleotide
  Target: LAMA2; (+) strand; PAM type: NRG; PAM sequence: GAG
aaaatttcctgtgtgctgat

SEQ ID NO: 184731 - DNA, 20 bp, Artificial Sequence
  Description of Artificial Sequence: Synthetic oligonucleotide
  Target: LAMA2; (+) strand; PAM type: NRG; PAM sequence: GAG
tgtgctgatgagtcatctct

SEQ ID NO: 184732 - DNA, 20 bp, Artificial Sequence
  Description of Artificial Sequence: Synthetic oligonucleotide
  Target: LAMA2; (+) strand; PAM type: NRG; PAM sequence: AGG
gtgctgatgagtcatctctg

SEQ ID NO: 184733 - DNA, 20 bp, Artificial Sequence
  Description of Artificial Sequence: Synthetic oligonucleotide
  Target: LAMA2; (+) strand; PAM type: NRG; PAM sequence: TGG
catctctgaggtacactctt

SEQ ID NO: 184734 - DNA, 20 bp, Artificial Sequence
  Description of Artificial Sequence: Synthetic oligonucleotide
  Target: LAMA2; (+) strand; PAM type: NRG; PAM sequence: GGG
atctctgaggtacactcttt

SEQ ID NO: 184735 - DNA, 20 bp, Artificial Sequence
  Description of Artificial Sequence: Synthetic oligonucleotide
  Target: LAMA2; (+) strand; PAM type: NRG; PAM sequence: AAG
tctgaggtacactctttggg

SEQ ID NO: 184736 - DNA, 20 bp, Artificial Sequence
  Description of Artificial Sequence: Synthetic oligonucleotide
  Target: LAMA2; (+) strand; PAM type: NRG; PAM sequence: AAG
ggaagaacactgtgcatcaa

SEQ ID NO: 184737 - DNA, 20 bp, Artificial Sequence
  Description of Artificial Sequence: Synthetic oligonucleotide
  Target: LAMA2; (+) strand; PAM type: NRG; PAM sequence: TGG
tgtgcatcaaaagcctgcct

SEQ ID NO: 184738 - DNA, 20 bp, Artificial Sequence
  Description of Artificial Sequence: Synthetic oligonucleotide
  Target: LAMA2; (+) strand; PAM type: NRG; PAM sequence: GGG
gtgcatcaaaagcctgcctt

SEQ ID NO: 184739 - DNA, 20 bp, Artificial Sequence
  Description of Artificial Sequence: Synthetic oligonucleotide
  Target: LAMA2; (+) strand; PAM type: NRG; PAM sequence: GAG
aagcctgccttgggctgctt

SEQ ID NO: 184740 - DNA, 20 bp, Artificial Sequence
  Description of Artificial Sequence: Synthetic oligonucleotide
  Target: LAMA2; (+) strand; PAM type: NRG; PAM sequence: GAG
gctgcttgagaacctctgct

SEQ ID NO: 184741 - DNA, 20 bp, Artificial Sequence
  Description of Artificial Sequence: Synthetic oligonucleotide
  Target: LAMA2; (+) strand; PAM type: NRG; PAM sequence: CAG
cttgagaacctctgctgagt

SEQ ID NO: 184742 - DNA, 20 bp, Artificial Sequence
  Description of Artificial Sequence: Synthetic oligonucleotide
  Target: LAMA2; (+) strand; PAM type: NRG; PAM sequence: TGG
tctgctgagtcagcactcac

SEQ ID NO: 184743 - DNA, 20 bp, Artificial Sequence
  Description of Artificial Sequence: Synthetic oligonucleotide
  Target: LAMA2; (+) strand; PAM type: NRG; PAM sequence: GGG
ctgctgagtcagcactcact

SEQ ID NO: 184744 - DNA, 20 bp, Artificial Sequence
  Description of Artificial Sequence: Synthetic oligonucleotide
  Target: LAMA2; (+) strand; PAM type: NRG; PAM sequence: GGG
tgctgagtcagcactcactg

SEQ ID NO: 184745 - DNA, 20 bp, Artificial Sequence
  Description of Artificial Sequence: Synthetic oligonucleotide
  Target: LAMA2; (+) strand; PAM type: NRG; PAM sequence: CAG
tgagtcagcactcactgggg

SEQ ID NO: 184746 - DNA, 20 bp, Artificial Sequence
  Description of Artificial Sequence: Synthetic oligonucleotide
  Target: LAMA2; (+) strand; PAM type: NRG; PAM sequence: CGG
gtcagcactcactggggcag

SEQ ID NO: 184747 - DNA, 20 bp, Artificial Sequence
  Description of Artificial Sequence: Synthetic oligonucleotide
  Target: LAMA2; (+) strand; PAM type: NRG; PAM sequence: CAG
cactcactggggcagcggcc

SEQ ID NO: 184748 - DNA, 20 bp, Artificial Sequence
  Description of Artificial Sequence: Synthetic oligonucleotide
  Target: LAMA2; (+) strand; PAM type: NRG; PAM sequence: CAG
cactggggcagcggcccagc

SEQ ID NO: 184749 - DNA, 20 bp, Artificial Sequence
  Description of Artificial Sequence: Synthetic oligonucleotide
  Target: LAMA2; (+) strand; PAM type: NRG; PAM sequence: GAG
ctggggcagcggcccagcca

SEQ ID NO: 184750 - DNA, 20 bp, Artificial Sequence
  Description of Artificial Sequence: Synthetic oligonucleotide
  Target: LAMA2; (+) strand; PAM type: NRG; PAM sequence: AAG
gcggcccagccagagctatt

SEQ ID NO: 184751 - DNA, 20 bp, Artificial Sequence
  Description of Artificial Sequence: Synthetic oligonucleotide
  Target: LAMA2; (+) strand; PAM type: NRG; PAM sequence: CAG
ccagccagagctattaagtg

SEQ ID NO: 184752 - DNA, 20 bp, Artificial Sequence
  Description of Artificial Sequence: Synthetic oligonucleotide
  Target: LAMA2; (+) strand; PAM type: NRG; PAM sequence: CAG
ttaagtgcagatcttaaaaa

SEQ ID NO: 184753 - DNA, 20 bp, Artificial Sequence
  Description of Artificial Sequence: Synthetic oligonucleotide
  Target: LAMA2; (+) strand; PAM type: NRG; PAM sequence: TGG
gatcttaaaaacagatgtgt

SEQ ID NO: 184754 - DNA, 20 bp, Artificial Sequence
  Description of Artificial Sequence: Synthetic oligonucleotide
  Target: LAMA2; (+) strand; PAM type: NRG; PAM sequence: GAG
ttaaaaacagatgtgttggt

SEQ ID NO: 184755 - DNA, 20 bp, Artificial Sequence
  Description of Artificial Sequence: Synthetic oligonucleotide
  Target: LAMA2; (+) strand; PAM type: NRG; PAM sequence: GAG
aaaaacagatgtgttggtga

SEQ ID NO: 184756 - DNA, 20 bp, Artificial Sequence
  Description of Artificial Sequence: Synthetic oligonucleotide
  Target: LAMA2; (+) strand; PAM type: NRG; PAM sequence: CAG
gatgtgttggtgagagtgtg

SEQ ID NO: 184757 - DNA, 20 bp, Artificial Sequence
  Description of Artificial Sequence: Synthetic oligonucleotide
  Target: LAMA2; (+) strand; PAM type: NRG; PAM sequence: AGG
atgtgttggtgagagtgtgc

SEQ ID NO: 184758 - DNA, 20 bp, Artificial Sequence
  Description of Artificial Sequence: Synthetic oligonucleotide
  Target: LAMA2; (+) strand; PAM type: NRG; PAM sequence: AAG
tctcatgtactgcatgttct

SEQ ID NO: 184759 - DNA, 20 bp, Artificial Sequence
  Description of Artificial Sequence: Synthetic oligonucleotide
  Target: LAMA2; (+) strand; PAM type: NRG; PAM sequence: GAG
tcatgtactgcatgttctaa

SEQ ID NO: 184760 - DNA, 20 bp, Artificial Sequence
  Description of Artificial Sequence: Synthetic oligonucleotide
  Target: LAMA2; (+) strand; PAM type: NRG; PAM sequence: AAG
catgttctaagagatgtcat

SEQ ID NO: 184761 - DNA, 20 bp, Artificial Sequence
  Description of Artificial Sequence: Synthetic oligonucleotide
  Target: LAMA2; (+) strand; PAM type: NRG; PAM sequence: CAG
gttctaagagatgtcataag

SEQ ID NO: 184762 - DNA, 20 bp, Artificial Sequence
  Description of Artificial Sequence: Synthetic oligonucleotide
  Target: LAMA2; (+) strand; PAM type: NRG; PAM sequence: TAG
atcgacctatcttgtgaaaa

SEQ ID NO: 184763 - DNA, 20 bp, Artificial Sequence
  Description of Artificial Sequence: Synthetic oligonucleotide
  Target: LAMA2; (+) strand; PAM type: NRG; PAM sequence: GAG
cgacctatcttgtgaaaata

SEQ ID NO: 184764 - DNA, 20 bp, Artificial Sequence
  Description of Artificial Sequence: Synthetic oligonucleotide
  Target: LAMA2; (+) strand; PAM type: NRG; PAM sequence: CAG
tatcttgtgaaaatagagaa

SEQ ID NO: 184765 - DNA, 20 bp, Artificial Sequence
  Description of Artificial Sequence: Synthetic oligonucleotide
  Target: LAMA2; (+) strand; PAM type: NRG; PAM sequence: AGG
atcttgtgaaaatagagaac

SEQ ID NO: 184766 - DNA, 20 bp, Artificial Sequence
  Description of Artificial Sequence: Synthetic oligonucleotide
  Target: LAMA2; (+) strand; PAM type: NRG; PAM sequence: GGG
tcttgtgaaaatagagaaca

SEQ ID NO: 184767 - DNA, 20 bp, Artificial Sequence
  Description of Artificial Sequence: Synthetic oligonucleotide
  Target: LAMA2; (+) strand; PAM type: NRG; PAM sequence: AAG
gtgaaaatagagaacaggga

SEQ ID NO: 184768 - DNA, 20 bp, Artificial Sequence
  Description of Artificial Sequence: Synthetic oligonucleotide
  Target: LAMA2; (+) strand; PAM type: NRG; PAM sequence: AGG
tgaaaatagagaacagggaa

SEQ ID NO: 184769 - DNA, 20 bp, Artificial Sequence
  Description of Artificial Sequence: Synthetic oligonucleotide
  Target: LAMA2; (+) strand; PAM type: NRG; PAM sequence: TGG
gagaacagggaaaggaattg

SEQ ID NO: 184770 - DNA, 20 bp, Artificial Sequence
  Description of Artificial Sequence: Synthetic oligonucleotide
  Target: LAMA2; (+) strand; PAM type: NRG; PAM sequence: TGG
agggaaaggaattgtggctt

SEQ ID NO: 184771 - DNA, 20 bp, Artificial Sequence
  Description of Artificial Sequence: Synthetic oligonucleotide
  Target: LAMA2; (+) strand; PAM type: NRG; PAM sequence: AAG
aattgtggctttggtaattt

SEQ ID NO: 184772 - DNA, 20 bp, Artificial Sequence
  Description of Artificial Sequence: Synthetic oligonucleotide
  Target: LAMA2; (+) strand; PAM type: NRG; PAM sequence: AGG
attgtggctttggtaattta

SEQ ID NO: 184773 - DNA, 20 bp, Artificial Sequence
  Description of Artificial Sequence: Synthetic oligonucleotide
  Target: LAMA2; (+) strand; PAM type: NRG; PAM sequence: GAG
tgtggctttggtaatttaag

SEQ ID NO: 184774 - DNA, 20 bp, Artificial Sequence
  Description of Artificial Sequence: Synthetic oligonucleotide
  Target: LAMA2; (+) strand; PAM type: NRG; PAM sequence: TGG
taaggagccttgattattta

SEQ ID NO: 184775 - DNA, 20 bp, Artificial Sequence
  Description of Artificial Sequence: Synthetic oligonucleotide
  Target: LAMA2; (+) strand; PAM type: NRG; PAM sequence: GAG
aggagccttgattatttatg

SEQ ID NO: 184776 - DNA, 20 bp, Artificial Sequence
  Description of Artificial Sequence: Synthetic oligonucleotide
  Target: LAMA2; (+) strand; PAM type: NRG; PAM sequence: TGG
atttatggagctgtgtgtta

SEQ ID NO: 184777 - DNA, 20 bp, Artificial Sequence
  Description of Artificial Sequence: Synthetic oligonucleotide
  Target: LAMA2; (+) strand; PAM type: NRG; PAM sequence: TAG
tatggagctgtgtgttatgg

SEQ ID NO: 184778 - DNA, 20 bp, Artificial Sequence
  Description of Artificial Sequence: Synthetic oligonucleotide
  Target: LAMA2; (+) strand; PAM type: NRG; PAM sequence: CAG
gtagccaaatgtgatctact

SEQ ID NO: 184779 - DNA, 20 bp, Artificial Sequence
  Description of Artificial Sequence: Synthetic oligonucleotide
  Target: LAMA2; (+) strand; PAM type: NRG; PAM sequence: CAG
ccaaatgtgatctactcagc

SEQ ID NO: 184780 - DNA, 20 bp, Artificial Sequence
  Description of Artificial Sequence: Synthetic oligonucleotide
  Target: LAMA2; (+) strand; PAM type: NRG; PAM sequence: AGG
caaatgtgatctactcagcc

SEQ ID NO: 184781 - DNA, 20 bp, Artificial Sequence
  Description of Artificial Sequence: Synthetic oligonucleotide
  Target: LAMA2; (+) strand; PAM type: NRG; PAM sequence: AAG
aggactgctgtatgctttgc

SEQ ID NO: 184782 - DNA, 20 bp, Artificial Sequence
  Description of Artificial Sequence: Synthetic oligonucleotide
  Target: LAMA2; (+) strand; PAM type: NRG; PAM sequence: AGG
ggactgctgtatgctttgca

SEQ ID NO: 184783 - DNA, 20 bp, Artificial Sequence
  Description of Artificial Sequence: Synthetic oligonucleotide
  Target: LAMA2; (+) strand; PAM type: NRG; PAM sequence: CAG
gctgtatgctttgcaaggcc

SEQ ID NO: 184784 - DNA, 20 bp, Artificial Sequence
  Description of Artificial Sequence: Synthetic oligonucleotide
  Target: LAMA2; (+) strand; PAM type: NRG; PAM sequence: TGG
ttgcaaggcccagtgcaaaa

SEQ ID NO: 184785 - DNA, 20 bp, Artificial Sequence
  Description of Artificial Sequence: Synthetic oligonucleotide
  Target: LAMA2; (+) strand; PAM type: NRG; PAM sequence: CAG
ccagtgcaaaatggaaaatg

SEQ ID NO: 184786 - DNA, 20 bp, Artificial Sequence
  Description of Artificial Sequence: Synthetic oligonucleotide
  Target: LAMA2; (+) strand; PAM type: NRG; PAM sequence: AGG
cagtgcaaaatggaaaatgc

SEQ ID NO: 184787 - DNA, 20 bp, Artificial Sequence
  Description of Artificial Sequence: Synthetic oligonucleotide
  Target: LAMA2; (+) strand; PAM type: NRG; PAM sequence: GGG
agtgcaaaatggaaaatgca

SEQ ID NO: 184788 - DNA, 20 bp, Artificial Sequence
  Description of Artificial Sequence: Synthetic oligonucleotide
  Target: LAMA2; (+) strand; PAM type: NRG; PAM sequence: AAG
cccctcactgaaaaattatt

SEQ ID NO: 184789 - DNA, 20 bp, Artificial Sequence
  Description of Artificial Sequence: Synthetic oligonucleotide
  Target: LAMA2; (+) strand; PAM type: NRG; PAM sequence: AAG
gaaaaattattaagaatttc

SEQ ID NO: 184790 - DNA, 20 bp, Artificial Sequence
  Description of Artificial Sequence: Synthetic oligonucleotide
  Target: LAMA2; (+) strand; PAM type: NRG; PAM sequence: TGG
aattattaagaatttcaaga

SEQ ID NO: 184791 - DNA, 20 bp, Artificial Sequence
  Description of Artificial Sequence: Synthetic oligonucleotide
  Target: LAMA2; (+) strand; PAM type: NRG; PAM sequence: CAG
taagaatttcaagatggtga

SEQ ID NO: 184792 - DNA, 20 bp, Artificial Sequence
  Description of Artificial Sequence: Synthetic oligonucleotide
  Target: LAMA2; (+) strand; PAM type: NRG; PAM sequence: CAG
gaatttcaagatggtgacag

SEQ ID NO: 184793 - DNA, 20 bp, Artificial Sequence
  Description of Artificial Sequence: Synthetic oligonucleotide
  Target: LAMA2; (+) strand; PAM type: NRG; PAM sequence: GAG
atttcaagatggtgacagca

SEQ ID NO: 184794 - DNA, 20 bp, Artificial Sequence
  Description of Artificial Sequence: Synthetic oligonucleotide
  Target: LAMA2; (+) strand; PAM type: NRG; PAM sequence: CAG
cattaaaccatgtgactgca

SEQ ID NO: 184795 - DNA, 20 bp, Artificial Sequence
  Description of Artificial Sequence: Synthetic oligonucleotide
  Target: LAMA2; (+) strand; PAM type: NRG; PAM sequence: TAG
tgactgcacagccccgcacc

SEQ ID NO: 184796 - DNA, 20 bp, Artificial Sequence
  Description of Artificial Sequence: Synthetic oligonucleotide
  Target: LAMA2; (+) strand; PAM type: NRG; PAM sequence: CAG
ccgcacctagctctccccct

SEQ ID NO: 184797 - DNA, 20 bp, Artificial Sequence
  Description of Artificial Sequence: Synthetic oligonucleotide
  Target: LAMA2; (+) strand; PAM type: NRG; PAM sequence: TAG
agctctccccctcagcaccc

SEQ ID NO: 184798 - DNA, 20 bp, Artificial Sequence
  Description of Artificial Sequence: Synthetic oligonucleotide
  Target: LAMA2; (+) strand; PAM type: NRG; PAM sequence: AGG
gctctccccctcagcaccct

SEQ ID NO: 184799 - DNA, 20 bp, Artificial Sequence
  Description of Artificial Sequence: Synthetic oligonucleotide
  Target: LAMA2; (+) strand; PAM type: NRG; PAM sequence: AAG
ctccccctcagcaccctagg

SEQ ID NO: 184800 - DNA, 20 bp, Artificial Sequence
  Description of Artificial Sequence: Synthetic oligonucleotide
  Target: LAMA2; (+) strand; PAM type: NRG; PAM sequence: CAG
ctaggaagctgatctttgaa

SEQ ID NO: 184801 - DNA, 20 bp, Artificial Sequence
  Description of Artificial Sequence: Synthetic oligonucleotide
  Target: LAMA2; (+) strand; PAM type: NRG; PAM sequence: TGG
ggaagctgatctttgaacag

SEQ ID NO: 184802 - DNA, 20 bp, Artificial Sequence
  Description of Artificial Sequence: Synthetic oligonucleotide
  Target: LAMA2; (+) strand; PAM type: NRG; PAM sequence: CAG
agctgatctttgaacagtgg

SEQ ID NO: 184803 - DNA, 20 bp, Artificial Sequence
  Description of Artificial Sequence: Synthetic oligonucleotide
  Target: LAMA2; (+) strand; PAM type: NRG; PAM sequence: TGG
ttgaacagtggcagttgaaa

SEQ ID NO: 184804 - DNA, 20 bp, Artificial Sequence
  Description of Artificial Sequence: Synthetic oligonucleotide
  Target: LAMA2; (+) strand; PAM type: NRG; PAM sequence: TGG
gtggcagttgaaatggtgta

SEQ ID NO: 184805 - DNA, 20 bp, Artificial Sequence
  Description of Artificial Sequence: Synthetic oligonucleotide
  Target: LAMA2; (+) strand; PAM type: NRG; PAM sequence: TGG
gcagttgaaatggtgtatgg

SEQ ID NO: 184806 - DNA, 20 bp, Artificial Sequence
  Description of Artificial Sequence: Synthetic oligonucleotide
  Target: LAMA2; (+) strand; PAM type: NRG; PAM sequence: GGG
cagttgaaatggtgtatggt

SEQ ID NO: 184807 - DNA, 20 bp, Artificial Sequence
  Description of Artificial Sequence: Synthetic oligonucleotide
  Target: LAMA2; (+) strand; PAM type: NRG; PAM sequence: TGG
gttacatttttaaaatgtgc

SEQ ID NO: 184808 - DNA, 20 bp, Artificial Sequence
  Description of Artificial Sequence: Synthetic oligonucleotide
  Target: LAMA2; (+) strand; PAM type: NRG; PAM sequence: GGG
ttacatttttaaaatgtgct

SEQ ID NO: 184809 - DNA, 20 bp, Artificial Sequence
  Description of Artificial Sequence: Synthetic oligonucleotide
  Target: LAMA2; (+) strand; PAM type: NRG; PAM sequence: TAG
ttaaaatgtgctgggttgcc

SEQ ID NO: 184810 - DNA, 20 bp, Artificial Sequence
  Description of Artificial Sequence: Synthetic oligonucleotide
  Target: LAMA2; (+) strand; PAM type: NRG; PAM sequence: TGG
gtgctgggttgcctagcaac

SEQ ID NO: 184811 - DNA, 20 bp, Artificial Sequence
  Description of Artificial Sequence: Synthetic oligonucleotide
  Target: LAMA2; (+) strand; PAM type: NRG; PAM sequence: AAG
tgggttgcctagcaactggc

SEQ ID NO: 184812 - DNA, 20 bp, Artificial Sequence
  Description of Artificial Sequence: Synthetic oligonucleotide
  Target: LAMA2; (+) strand; PAM type: NRG; PAM sequence: AGG
gggttgcctagcaactggca

SEQ ID NO: 184813 - DNA, 20 bp, Artificial Sequence
  Description of Artificial Sequence: Synthetic oligonucleotide
  Target: LAMA2; (+) strand; PAM type: NRG; PAM sequence: GGG
ggttgcctagcaactggcaa

SEQ ID NO: 184814 - DNA, 20 bp, Artificial Sequence
  Description of Artificial Sequence: Synthetic oligonucleotide
  Target: LAMA2; (+) strand; PAM type: NRG; PAM sequence: TGG
gcaactggcaagggcctgaa

SEQ ID NO: 184815 - DNA, 20 bp, Artificial Sequence
  Description of Artificial Sequence: Synthetic oligonucleotide
  Target: LAMA2; (+) strand; PAM type: NRG; PAM sequence: GGG
caactggcaagggcctgaat

SEQ ID NO: 184816 - DNA, 20 bp, Artificial Sequence
  Description of Artificial Sequence: Synthetic oligonucleotide
  Target: LAMA2; (+) strand; PAM type: NRG; PAM sequence: CAG
ggcctgaatgggctgacgtg

SEQ ID NO: 184817 - DNA, 20 bp, Artificial Sequence
  Description of Artificial Sequence: Synthetic oligonucleotide
  Target: LAMA2; (+) strand; PAM type: NRG; PAM sequence: AGG
gcctgaatgggctgacgtgc

SEQ ID NO: 184818 - DNA, 20 bp, Artificial Sequence
  Description of Artificial Sequence: Synthetic oligonucleotide
  Target: LAMA2; (+) strand; PAM type: NRG; PAM sequence: TAG
aatgggctgacgtgcaggtt

SEQ ID NO: 184819 - DNA, 20 bp, Artificial Sequence
  Description of Artificial Sequence: Synthetic oligonucleotide
  Target: LAMA2; (+) strand; PAM type: NRG; PAM sequence: AAG
gtttagatacaccatcttga

SEQ ID NO: 184820 - DNA, 20 bp, Artificial Sequence
  Description of Artificial Sequence: Synthetic oligonucleotide
  Target: LAMA2; (+) strand; PAM type: NRG; PAM sequence: TGG
atcttgaaagtctacattca

SEQ ID NO: 184821 - DNA, 20 bp, Artificial Sequence
  Description of Artificial Sequence: Synthetic oligonucleotide
  Target: LAMA2; (+) strand; PAM type: NRG; PAM sequence: TAG
ctacattcatggaaaccttc

SEQ ID NO: 184822 - DNA, 20 bp, Artificial Sequence
  Description of Artificial Sequence: Synthetic oligonucleotide
  Target: LAMA2; (+) strand; PAM type: NRG; PAM sequence: TGG
cattcatggaaaccttctag

SEQ ID NO: 184823 - DNA, 20 bp, Artificial Sequence
  Description of Artificial Sequence: Synthetic oligonucleotide
  Target: LAMA2; (+) strand; PAM type: NRG; PAM sequence: AAG
ctagtggactgataattttc

SEQ ID NO: 184824 - DNA, 20 bp, Artificial Sequence
  Description of Artificial Sequence: Synthetic oligonucleotide
  Target: LAMA2; (+) strand; PAM type: NRG; PAM sequence: AAG
gactgataattttcaagaaa

SEQ ID NO: 184825 - DNA, 20 bp, Artificial Sequence
  Description of Artificial Sequence: Synthetic oligonucleotide
  Target: LAMA2; (+) strand; PAM type: NRG; PAM sequence: TAG
attttcaagaaaaagtaata

SEQ ID NO: 184826 - DNA, 20 bp, Artificial Sequence
  Description of Artificial Sequence: Synthetic oligonucleotide
  Target: LAMA2; (+) strand; PAM type: NRG; PAM sequence: TGG
ttcaagaaaaagtaatatag

SEQ ID NO: 184827 - DNA, 20 bp, Artificial Sequence
  Description of Artificial Sequence: Synthetic oligonucleotide
  Target: LAMA2; (+) strand; PAM type: NRG; PAM sequence: GGG
tcaagaaaaagtaatatagt

SEQ ID NO: 184828 - DNA, 20 bp, Artificial Sequence
  Description of Artificial Sequence: Synthetic oligonucleotide
  Target: LAMA2; (+) strand; PAM type: NRG; PAM sequence: GAG
aagaaaaagtaatatagtgg

SEQ ID NO: 184829 - DNA, 20 bp, Artificial Sequence
  Description of Artificial Sequence: Synthetic oligonucleotide
  Target: LAMA2; (+) strand; PAM type: NRG; PAM sequence: TGG
aaaagtaatatagtgggaga

SEQ ID NO: 184830 - DNA, 20 bp, Artificial Sequence
  Description of Artificial Sequence: Synthetic oligonucleotide
  Target: LAMA2; (+) strand; PAM type: NRG; PAM sequence: TGG
aatatagtgggagatggaaa

SEQ ID NO: 184831 - DNA, 20 bp, Artificial Sequence
  Description of Artificial Sequence: Synthetic oligonucleotide
  Target: LAMA2; (+) strand; PAM type: NRG; PAM sequence: GGG
atatagtgggagatggaaat

SEQ ID NO: 184832 - DNA, 20 bp, Artificial Sequence
  Description of Artificial Sequence: Synthetic oligonucleotide
  Target: LAMA2; (+) strand; PAM type: NRG; PAM sequence: GGG
tatagtgggagatggaaatg

SEQ ID NO: 184833 - DNA, 20 bp, Artificial Sequence
  Description of Artificial Sequence: Synthetic oligonucleotide
  Target: LAMA2; (+) strand; PAM type: NRG; PAM sequence: GAG
tagtgggagatggaaatggg

SEQ ID NO: 184834 - DNA, 20 bp, Artificial Sequence
  Description of Artificial Sequence: Synthetic oligonucleotide
  Target: LAMA2; (+) strand; PAM type: NRG; PAM sequence: AGG
agtgggagatggaaatgggg

SEQ ID NO: 184835 - DNA, 20 bp, Artificial Sequence
  Description of Artificial Sequence: Synthetic oligonucleotide
  Target: LAMA2; (+) strand; PAM type: NRG; PAM sequence: GGG
gtgggagatggaaatgggga

SEQ ID NO: 184836 - DNA, 20 bp, Artificial Sequence
  Description of Artificial Sequence: Synthetic oligonucleotide
  Target: LAMA2; (+) strand; PAM type: NRG; PAM sequence: AAG
gagatggaaatggggagggc

SEQ ID NO: 184837 - DNA, 20 bp, Artificial Sequence
  Description of Artificial Sequence: Synthetic oligonucleotide
  Target: LAMA2; (+) strand; PAM type: NRG; PAM sequence: AAG
ttttgctactcttataaccc

SEQ ID NO: 184838 - DNA, 20 bp, Artificial Sequence
  Description of Artificial Sequence: Synthetic oligonucleotide
  Target: LAMA2; (+) strand; PAM type: NRG; PAM sequence: TGG
tgctactcttataacccaag

SEQ ID NO: 184839 - DNA, 20 bp, Artificial Sequence
  Description of Artificial Sequence: Synthetic oligonucleotide
  Target: LAMA2; (+) strand; PAM type: NRG; PAM sequence: TAG
actcttataacccaagtggc

SEQ ID NO: 184840 - DNA, 20 bp, Artificial Sequence
  Description of Artificial Sequence: Synthetic oligonucleotide
  Target: LAMA2; (+) strand; PAM type: NRG; PAM sequence: AAG
ttttccctgttcgatcttct

SEQ ID NO: 184841 - DNA, 20 bp, Artificial Sequence
  Description of Artificial Sequence: Synthetic oligonucleotide
  Target: LAMA2; (+) strand; PAM type: NRG; PAM sequence: TAG
cctgttcgatcttctaagaa

SEQ ID NO: 184842 - DNA, 20 bp, Artificial Sequence
  Description of Artificial Sequence: Synthetic oligonucleotide
  Target: LAMA2; (+) strand; PAM type: NRG; PAM sequence: GAG
tgttcgatcttctaagaata

SEQ ID NO: 184843 - DNA, 20 bp, Artificial Sequence
  Description of Artificial Sequence: Synthetic oligonucleotide
  Target: LAMA2; (+) strand; PAM type: NRG; PAM sequence: AAG
aatagagctcttcatatgtg

SEQ ID NO: 184844 - DNA, 20 bp, Artificial Sequence
  Description of Artificial Sequence: Synthetic oligonucleotide
  Target: LAMA2; (+) strand; PAM type: NRG; PAM sequence: AGG
atagagctcttcatatgtga

SEQ ID NO: 184845 - DNA, 20 bp, Artificial Sequence
  Description of Artificial Sequence: Synthetic oligonucleotide
  Target: LAMA2; (+) strand; PAM type: NRG; PAM sequence: AAG
catatgtgaaggaaaaatga

SEQ ID NO: 184846 - DNA, 20 bp, Artificial Sequence
  Description of Artificial Sequence: Synthetic oligonucleotide
  Target: LAMA2; (+) strand; PAM type: NRG; PAM sequence: AGG
atatgtgaaggaaaaatgaa

SEQ ID NO: 184847 - DNA, 20 bp, Artificial Sequence
  Description of Artificial Sequence: Synthetic oligonucleotide
  Target: LAMA2; (+) strand; PAM type: NRG; PAM sequence: GGG
tatgtgaaggaaaaatgaaa

SEQ ID NO: 184848 - DNA, 20 bp, Artificial Sequence
  Description of Artificial Sequence: Synthetic oligonucleotide
  Target: LAMA2; (+) strand; PAM type: NRG; PAM sequence: CAG
gaaaaatgaaagggaaattc

SEQ ID NO: 184849 - DNA, 20 bp, Artificial Sequence
  Description of Artificial Sequence: Synthetic oligonucleotide
  Target: LAMA2; (+) strand; PAM type: NRG; PAM sequence: CAG
aagggaaattccagttttct

SEQ ID NO: 184850 - DNA, 20 bp, Artificial Sequence
  Description of Artificial Sequence: Synthetic oligonucleotide
  Target: LAMA2; (+) strand; PAM type: NRG; PAM sequence: TAG
cagaaatatacataaatttt

SEQ ID NO: 184851 - DNA, 20 bp, Artificial Sequence
  Description of Artificial Sequence: Synthetic oligonucleotide
  Target: LAMA2; (+) strand; PAM type: NRG; PAM sequence: GAG
gaaatatacataaattttta

SEQ ID NO: 184852 - DNA, 20 bp, Artificial Sequence
  Description of Artificial Sequence: Synthetic oligonucleotide
  Target: LAMA2; (+) strand; PAM type: NRG; PAM sequence: AGG
aaatatacataaatttttag

SEQ ID NO: 184853 - DNA, 20 bp, Artificial Sequence
  Description of Artificial Sequence: Synthetic oligonucleotide
  Target: LAMA2; (+) strand; PAM type: NRG; PAM sequence: GAG
ttagaggataatgaaactat

SEQ ID NO: 184854 - DNA, 20 bp, Artificial Sequence
  Description of Artificial Sequence: Synthetic oligonucleotide
  Target: LAMA2; (+) strand; PAM type: NRG; PAM sequence: GAG
gttaatcaataaatatgtct

SEQ ID NO: 184855 - DNA, 20 bp, Artificial Sequence
  Description of Artificial Sequence: Synthetic oligonucleotide
  Target: LAMA2; (+) strand; PAM type: NRG; PAM sequence: TAG
tatgtctgagcacattcctt

SEQ ID NO: 184856 - DNA, 20 bp, Artificial Sequence
  Description of Artificial Sequence: Synthetic oligonucleotide
  Target: LAMA2; (+) strand; PAM type: NRG; PAM sequence: CAG
gcacattcctttagccattc

SEQ ID NO: 184857 - DNA, 20 bp, Artificial Sequence
  Description of Artificial Sequence: Synthetic oligonucleotide
  Target: LAMA2; (+) strand; PAM type: NRG; PAM sequence: AGG
cacattcctttagccattcc

SEQ ID NO: 184858 - DNA, 20 bp, Artificial Sequence
  Description of Artificial Sequence: Synthetic oligonucleotide
  Target: LAMA2; (+) strand; PAM type: NRG; PAM sequence: GGG
acattcctttagccattcca

SEQ ID NO: 184859 - DNA, 20 bp, Artificial Sequence
  Description of Artificial Sequence: Synthetic oligonucleotide
  Target: LAMA2; (+) strand; PAM type: NRG; PAM sequence: GAG
gccattccagggtgtgatat

SEQ ID NO: 184860 - DNA, 20 bp, Artificial Sequence
  Description of Artificial Sequence: Synthetic oligonucleotide
  Target: LAMA2; (+) strand; PAM type: NRG; PAM sequence: GAG
aaaactgattcacacgcact

SEQ ID NO: 184861 - DNA, 20 bp, Artificial Sequence
  Description of Artificial Sequence: Synthetic oligonucleotide
  Target: LAMA2; (+) strand; PAM type: NRG; PAM sequence: AAG
cgcactgagcactcaataat

SEQ ID NO: 184862 - DNA, 20 bp, Artificial Sequence
  Description of Artificial Sequence: Synthetic oligonucleotide
  Target: LAMA2; (+) strand; PAM type: NRG; PAM sequence: CAG
aataataagtacttactatg

SEQ ID NO: 184863 - DNA, 20 bp, Artificial Sequence
  Description of Artificial Sequence: Synthetic oligonucleotide
  Target: LAMA2; (+) strand; PAM type: NRG; PAM sequence: TAG
aataagtacttactatgcag

SEQ ID NO: 184864 - DNA, 20 bp, Artificial Sequence
  Description of Artificial Sequence: Synthetic oligonucleotide
  Target: LAMA2; (+) strand; PAM type: NRG; PAM sequence: CAG
acttactatgcagtagacta

SEQ ID NO: 184865 - DNA, 20 bp, Artificial Sequence
  Description of Artificial Sequence: Synthetic oligonucleotide
  Target: LAMA2; (+) strand; PAM type: NRG; PAM sequence: GAG
ttactatgcagtagactaca

SEQ ID NO: 184866 - DNA, 20 bp, Artificial Sequence
  Description of Artificial Sequence: Synthetic oligonucleotide
  Target: LAMA2; (+) strand; PAM type: NRG; PAM sequence: TAG
gactacagagatgaataatg

SEQ ID NO: 184867 - DNA, 20 bp, Artificial Sequence
  Description of Artificial Sequence: Synthetic oligonucleotide
  Target: LAMA2; (+) strand; PAM type: NRG; PAM sequence: AAG
taatgtagtttttattctta

SEQ ID NO: 184868 - DNA, 20 bp, Artificial Sequence
  Description of Artificial Sequence: Synthetic oligonucleotide
  Target: LAMA2; (+) strand; PAM type: NRG; PAM sequence: AAG
aaagaattacgctaatatgt

SEQ ID NO: 184869 - DNA, 20 bp, Artificial Sequence
  Description of Artificial Sequence: Synthetic oligonucleotide
  Target: LAMA2; (+) strand; PAM type: NRG; PAM sequence: TAG
gctaatatgtaagaaacaat

SEQ ID NO: 184870 - DNA, 20 bp, Artificial Sequence
  Description of Artificial Sequence: Synthetic oligonucleotide
  Target: LAMA2; (+) strand; PAM type: NRG; PAM sequence: CAG
atatgtaagaaacaattaga

SEQ ID NO: 184871 - DNA, 20 bp, Artificial Sequence
  Description of Artificial Sequence: Synthetic oligonucleotide
  Target: LAMA2; (+) strand; PAM type: NRG; PAM sequence: AAG
acagcatcattaccttttta

SEQ ID NO: 184872 - DNA, 20 bp, Artificial Sequence
  Description of Artificial Sequence: Synthetic oligonucleotide
  Target: LAMA2; (+) strand; PAM type: NRG; PAM sequence: CAG
atcattacctttttaaagaa

SEQ ID NO: 184873 - DNA, 20 bp, Artificial Sequence
  Description of Artificial Sequence: Synthetic oligonucleotide
  Target: LAMA2; (+) strand; PAM type: NRG; PAM sequence: TGG
aatctcctgtttttctctcc

SEQ ID NO: 184874 - DNA, 20 bp, Artificial Sequence
  Description of Artificial Sequence: Synthetic oligonucleotide
  Target: LAMA2; (+) strand; PAM type: NRG; PAM sequence: GGG
atctcctgtttttctctcct

SEQ ID NO: 184875 - DNA, 20 bp, Artificial Sequence
  Description of Artificial Sequence: Synthetic oligonucleotide
  Target: LAMA2; (+) strand; PAM type: NRG; PAM sequence: CAG
tttctctcctgggtatttta

SEQ ID NO: 184876 - DNA, 20 bp, Artificial Sequence
  Description of Artificial Sequence: Synthetic oligonucleotide
  Target: LAMA2; (+) strand; PAM type: NRG; PAM sequence: AGG
ttctctcctgggtattttac

SEQ ID NO: 184877 - DNA, 20 bp, Artificial Sequence
  Description of Artificial Sequence: Synthetic oligonucleotide
  Target: LAMA2; (+) strand; PAM type: NRG; PAM sequence: GGG
tctctcctgggtattttaca

SEQ ID NO: 184878 - DNA, 20 bp, Artificial Sequence
  Description of Artificial Sequence: Synthetic oligonucleotide
  Target: LAMA2; (+) strand; PAM type: NRG; PAM sequence: CAG
tttacagggtccttgtgctg

SEQ ID NO: 184879 - DNA, 20 bp, Artificial Sequence
  Description of Artificial Sequence: Synthetic oligonucleotide
  Target: LAMA2; (+) strand; PAM type: NRG; PAM sequence: CAG
gggtccttgtgctgcagaat

SEQ ID NO: 184880 - DNA, 20 bp, Artificial Sequence
  Description of Artificial Sequence: Synthetic oligonucleotide
  Target: LAMA2; (+) strand; PAM type: NRG; PAM sequence: CAG
ttgtgctgcagaatcagaac

SEQ ID NO: 184881 - DNA, 20 bp, Artificial Sequence
  Description of Artificial Sequence: Synthetic oligonucleotide
  Target: LAMA2; (+) strand; PAM type: NRG; PAM sequence: TAG
atcagaaccagctcttttga

SEQ ID NO: 184882 - DNA, 20 bp, Artificial Sequence
  Description of Artificial Sequence: Synthetic oligonucleotide
  Target: LAMA2; (+) strand; PAM type: NRG; PAM sequence: AGG
tcagaaccagctcttttgat

SEQ ID NO: 184883 - DNA, 20 bp, Artificial Sequence
  Description of Artificial Sequence: Synthetic oligonucleotide
  Target: LAMA2; (+) strand; PAM type: NRG; PAM sequence: GGG
cagaaccagctcttttgata

SEQ ID NO: 184884 - DNA, 20 bp, Artificial Sequence
  Description of Artificial Sequence: Synthetic oligonucleotide
  Target: LAMA2; (+) strand; PAM type: NRG; PAM sequence: GAG
gaaccagctcttttgatagg

SEQ ID NO: 184885 - DNA, 20 bp, Artificial Sequence
  Description of Artificial Sequence: Synthetic oligonucleotide
  Target: LAMA2; (+) strand; PAM type: NRG; PAM sequence: AAG
cagctcttttgatagggagc

SEQ ID NO: 184886 - DNA, 20 bp, Artificial Sequence
  Description of Artificial Sequence: Synthetic oligonucleotide
  Target: LAMA2; (+) strand; PAM type: NRG; PAM sequence: CAG
ctcttttgatagggagcaag

SEQ ID NO: 184887 - DNA, 20 bp, Artificial Sequence
  Description of Artificial Sequence: Synthetic oligonucleotide
  Target: LAMA2; (+) strand; PAM type: NRG; PAM sequence: CGG
ttgatagggagcaagcagtt

SEQ ID NO: 184888 - DNA, 20 bp, Artificial Sequence
  Description of Artificial Sequence: Synthetic oligonucleotide
  Target: LAMA2; (+) strand; PAM type: NRG; PAM sequence: GGG
tgatagggagcaagcagttc

SEQ ID NO: 184889 - DNA, 20 bp, Artificial Sequence
  Description of Artificial Sequence: Synthetic oligonucleotide
  Target: LAMA2; (+) strand; PAM type: NRG; PAM sequence: AAG
agcaagcagttcgggctttc

SEQ ID NO: 184890 - DNA, 20 bp, Artificial Sequence
  Description of Artificial Sequence: Synthetic oligonucleotide
  Target: LAMA2; (+) strand; PAM type: NRG; PAM sequence: CAG
cagttcgggctttcaagaaa

SEQ ID NO: 184891 - DNA, 20 bp, Artificial Sequence
  Description of Artificial Sequence: Synthetic oligonucleotide
  Target: LAMA2; (+) strand; PAM type: NRG; PAM sequence: AAG
aattgcatttgatgacacca

SEQ ID NO: 184892 - DNA, 20 bp, Artificial Sequence
  Description of Artificial Sequence: Synthetic oligonucleotide
  Target: LAMA2; (+) strand; PAM type: NRG; PAM sequence: CGG
atgacaccaaagttaaaaac

SEQ ID NO: 184893 - DNA, 20 bp, Artificial Sequence
  Description of Artificial Sequence: Synthetic oligonucleotide
  Target: LAMA2; (+) strand; PAM type: NRG; PAM sequence: GAG
aaaccggtatgtatcatcct

SEQ ID NO: 184894 - DNA, 20 bp, Artificial Sequence
  Description of Artificial Sequence: Synthetic oligonucleotide
  Target: LAMA2; (+) strand; PAM type: NRG; PAM sequence: TGG
tatgtatcatcctgagacac

SEQ ID NO: 184895 - DNA, 20 bp, Artificial Sequence
  Description of Artificial Sequence: Synthetic oligonucleotide
  Target: LAMA2; (+) strand; PAM type: NRG; PAM sequence: GGG
atgtatcatcctgagacact

SEQ ID NO: 184896 - DNA, 20 bp, Artificial Sequence
  Description of Artificial Sequence: Synthetic oligonucleotide
  Target: LAMA2; (+) strand; PAM type: NRG; PAM sequence: AAG
atcatcctgagacactggga

SEQ ID NO: 184897 - DNA, 20 bp, Artificial Sequence
  Description of Artificial Sequence: Synthetic oligonucleotide
  Target: LAMA2; (+) strand; PAM type: NRG; PAM sequence: AAG
tgggaaagaaccgataaatg

SEQ ID NO: 184898 - DNA, 20 bp, Artificial Sequence
  Description of Artificial Sequence: Synthetic oligonucleotide
  Target: LAMA2; (+) strand; PAM type: NRG; PAM sequence: GAG
gaaccgataaatgaagaact

SEQ ID NO: 184899 - DNA, 20 bp, Artificial Sequence
  Description of Artificial Sequence: Synthetic oligonucleotide
  Target: LAMA2; (+) strand; PAM type: NRG; PAM sequence: AAG
ctgagtatttgtgtttaatc

SEQ ID NO: 184900 - DNA, 20 bp, Artificial Sequence
  Description of Artificial Sequence: Synthetic oligonucleotide
  Target: LAMA2; (+) strand; PAM type: NRG; PAM sequence: AAG
actacacttattaattaatg

SEQ ID NO: 184901 - DNA, 20 bp, Artificial Sequence
  Description of Artificial Sequence: Synthetic oligonucleotide
  Target: LAMA2; (+) strand; PAM type: NRG; PAM sequence: TAG
cacttattaattaatgaagt

SEQ ID NO: 184902 - DNA, 20 bp, Artificial Sequence
  Description of Artificial Sequence: Synthetic oligonucleotide
  Target: LAMA2; (+) strand; PAM type: NRG; PAM sequence: GAG
tagcttttcttttattcact

SEQ ID NO: 184903 - DNA, 20 bp, Artificial Sequence
  Description of Artificial Sequence: Synthetic oligonucleotide
  Target: LAMA2; (+) strand; PAM type: NRG; PAM sequence: TAG
cttttattcactgagtacaa

SEQ ID NO: 184904 - DNA, 20 bp, Artificial Sequence
  Description of Artificial Sequence: Synthetic oligonucleotide
  Target: LAMA2; (+) strand; PAM type: NRG; PAM sequence: GAG
tttattcactgagtacaata

SEQ ID NO: 184905 - DNA, 20 bp, Artificial Sequence
  Description of Artificial Sequence: Synthetic oligonucleotide
  Target: LAMA2; (+) strand; PAM type: NRG; PAM sequence: TAG
tcactgagtacaatagagaa

SEQ ID NO: 184906 - DNA, 20 bp, Artificial Sequence
  Description of Artificial Sequence: Synthetic oligonucleotide
  Target: LAMA2; (+) strand; PAM type: NRG; PAM sequence: GAG
gaatagaattttatttgtct

SEQ ID NO: 184907 - DNA, 20 bp, Artificial Sequence
  Description of Artificial Sequence: Synthetic oligonucleotide
  Target: LAMA2; (+) strand; PAM type: NRG; PAM sequence: GAG
aattttatttgtctgagcct

SEQ ID NO: 184908 - DNA, 20 bp, Artificial Sequence
  Description of Artificial Sequence: Synthetic oligonucleotide
  Target: LAMA2; (+) strand; PAM type: NRG; PAM sequence: AGG
attttatttgtctgagcctg

SEQ ID NO: 184909 - DNA, 20 bp, Artificial Sequence
  Description of Artificial Sequence: Synthetic oligonucleotide
  Target: LAMA2; (+) strand; PAM type: NRG; PAM sequence: GAG
tttatttgtctgagcctgag

SEQ ID NO: 184910 - DNA, 20 bp, Artificial Sequence
  Description of Artificial Sequence: Synthetic oligonucleotide
  Target: LAMA2; (+) strand; PAM type: NRG; PAM sequence: TAG
tgagcctgaggagcccaatt

SEQ ID NO: 184911 - DNA, 20 bp, Artificial Sequence
  Description of Artificial Sequence: Synthetic oligonucleotide
  Target: LAMA2; (+) strand; PAM type: NRG; PAM sequence: AGG
gagcctgaggagcccaattt

SEQ ID NO: 184912 - DNA, 20 bp, Artificial Sequence
  Description of Artificial Sequence: Synthetic oligonucleotide
  Target: LAMA2; (+) strand; PAM type: NRG; PAM sequence: CAG
aggagcccaatttaggaaat

SEQ ID NO: 184913 - DNA, 20 bp, Artificial Sequence
  Description of Artificial Sequence: Synthetic oligonucleotide
  Target: LAMA2; (+) strand; PAM type: NRG; PAM sequence: TAG
agcccaatttaggaaatcag

SEQ ID NO: 184914 - DNA, 20 bp, Artificial Sequence
  Description of Artificial Sequence: Synthetic oligonucleotide
  Target: LAMA2; (+) strand; PAM type: NRG; PAM sequence: AAG
aggaaatcagtagcctgata

SEQ ID NO: 184915 - DNA, 20 bp, Artificial Sequence
  Description of Artificial Sequence: Synthetic oligonucleotide
  Target: LAMA2; (+) strand; PAM type: NRG; PAM sequence: GAG
ctgataaagtcctcatctct

SEQ ID NO: 184916 - DNA, 20 bp, Artificial Sequence
  Description of Artificial Sequence: Synthetic oligonucleotide
  Target: LAMA2; (+) strand; PAM type: NRG; PAM sequence: AAG
ataaagtcctcatctctgag

SEQ ID NO: 184917 - DNA, 20 bp, Artificial Sequence
  Description of Artificial Sequence: Synthetic oligonucleotide
  Target: LAMA2; (+) strand; PAM type: NRG; PAM sequence: AGG
taaagtcctcatctctgaga

SEQ ID NO: 184918 - DNA, 20 bp, Artificial Sequence
  Description of Artificial Sequence: Synthetic oligonucleotide
  Target: LAMA2; (+) strand; PAM type: NRG; PAM sequence: CAG
tactctcctttatgaaaatg

SEQ ID NO: 184919 - DNA, 20 bp, Artificial Sequence
  Description of Artificial Sequence: Synthetic oligonucleotide
  Target: LAMA2; (+) strand; PAM type: NRG; PAM sequence: TAG
gatctgataccgctctattt

SEQ ID NO: 184920 - DNA, 20 bp, Artificial Sequence
  Description of Artificial Sequence: Synthetic oligonucleotide
  Target: LAMA2; (+) strand; PAM type: NRG; PAM sequence: GAG
ataccgctctattttagcat

SEQ ID NO: 184921 - DNA, 20 bp, Artificial Sequence
  Description of Artificial Sequence: Synthetic oligonucleotide
  Target: LAMA2; (+) strand; PAM type: NRG; PAM sequence: CAG
ctttgcatgcttttgtttca

SEQ ID NO: 184922 - DNA, 20 bp, Artificial Sequence
  Description of Artificial Sequence: Synthetic oligonucleotide
  Target: LAMA2; (+) strand; PAM type: NRG; PAM sequence: GAG
tgtttcacagtctcacaatt

SEQ ID NO: 184923 - DNA, 20 bp, Artificial Sequence
  Description of Artificial Sequence: Synthetic oligonucleotide
  Target: LAMA2; (+) strand; PAM type: NRG; PAM sequence: TGG
tcacagtctcacaattgagt

SEQ ID NO: 184924 - DNA, 20 bp, Artificial Sequence
  Description of Artificial Sequence: Synthetic oligonucleotide
  Target: LAMA2; (+) strand; PAM type: NRG; PAM sequence: AAG
cagtctcacaattgagttgg

SEQ ID NO: 184925 - DNA, 20 bp, Artificial Sequence
  Description of Artificial Sequence: Synthetic oligonucleotide
  Target: LAMA2; (+) strand; PAM type: NRG; PAM sequence: AAG
ctcacaattgagttggaagt

SEQ ID NO: 184926 - DNA, 20 bp, Artificial Sequence
  Description of Artificial Sequence: Synthetic oligonucleotide
  Target: LAMA2; (+) strand; PAM type: NRG; PAM sequence: AAG
tgagttggaagtaagaaccg

SEQ ID NO: 184927 - DNA, 20 bp, Artificial Sequence
  Description of Artificial Sequence: Synthetic oligonucleotide
  Target: LAMA2; (+) strand; PAM type: NRG; PAM sequence: CGG
gtaagaaccgaagctgaatc

SEQ ID NO: 184928 - DNA, 20 bp, Artificial Sequence
  Description of Artificial Sequence: Synthetic oligonucleotide
  Target: LAMA2; (+) strand; PAM type: NRG; PAM sequence: TGG
atccggcttgcttttttaca

SEQ ID NO: 184929 - DNA, 20 bp, Artificial Sequence
  Description of Artificial Sequence: Synthetic oligonucleotide
  Target: LAMA2; (+) strand; PAM type: NRG; PAM sequence: CAG
caatcatgctgattttgcaa

SEQ ID NO: 184930 - DNA, 20 bp, Artificial Sequence
  Description of Artificial Sequence: Synthetic oligonucleotide
  Target: LAMA2; (+) strand; PAM type: NRG; PAM sequence: CAG
atgctgattttgcaacagtt

SEQ ID NO: 184931 - DNA, 20 bp, Artificial Sequence
  Description of Artificial Sequence: Synthetic oligonucleotide
  Target: LAMA2; (+) strand; PAM type: NRG; PAM sequence: GAG
gattttgcaacagttcagct

SEQ ID NO: 184932 - DNA, 20 bp, Artificial Sequence
  Description of Artificial Sequence: Synthetic oligonucleotide
  Target: LAMA2; (+) strand; PAM type: NRG; PAM sequence: TGG
gcaacagttcagctgagaaa

SEQ ID NO: 184933 - DNA, 20 bp, Artificial Sequence
  Description of Artificial Sequence: Synthetic oligonucleotide
  Target: LAMA2; (+) strand; PAM type: NRG; PAM sequence: CAG
agaaatggattgccctactt

SEQ ID NO: 184934 - DNA, 20 bp, Artificial Sequence
  Description of Artificial Sequence: Synthetic oligonucleotide
  Target: LAMA2; (+) strand; PAM type: NRG; PAM sequence: TGG
gccctacttcagctatgact

SEQ ID NO: 184935 - DNA, 20 bp, Artificial Sequence
  Description of Artificial Sequence: Synthetic oligonucleotide
  Target: LAMA2; (+) strand; PAM type: NRG; PAM sequence: GGG
ccctacttcagctatgactt

SEQ ID NO: 184936 - DNA, 20 bp, Artificial Sequence
  Description of Artificial Sequence: Synthetic oligonucleotide
  Target: LAMA2; (+) strand; PAM type: NRG; PAM sequence: GGG
cctacttcagctatgacttg

SEQ ID NO: 184937 - DNA, 20 bp, Artificial Sequence
  Description of Artificial Sequence: Synthetic oligonucleotide
  Target: LAMA2; (+) strand; PAM type: NRG; PAM sequence: GAG
tacttcagctatgacttggg

SEQ ID NO: 184938 - DNA, 20 bp, Artificial Sequence
  Description of Artificial Sequence: Synthetic oligonucleotide
  Target: LAMA2; (+) strand; PAM type: NRG; PAM sequence: TGG
ttcagctatgacttggggag

SEQ ID NO: 184939 - DNA, 20 bp, Artificial Sequence
  Description of Artificial Sequence: Synthetic oligonucleotide
  Target: LAMA2; (+) strand; PAM type: NRG; PAM sequence: GGG
tcagctatgacttggggagt

SEQ ID NO: 184940 - DNA, 20 bp, Artificial Sequence
  Description of Artificial Sequence: Synthetic oligonucleotide
  Target: LAMA2; (+) strand; PAM type: NRG; PAM sequence: GGG
cagctatgacttggggagtg

SEQ ID NO: 184941 - DNA, 20 bp, Artificial Sequence
  Description of Artificial Sequence: Synthetic oligonucleotide
  Target: LAMA2; (+) strand; PAM type: NRG; PAM sequence: TGG
atccccaccaaaatcaatga

SEQ ID NO: 184942 - DNA, 20 bp, Artificial Sequence
  Description of Artificial Sequence: Synthetic oligonucleotide
  Target: LAMA2; (+) strand; PAM type: NRG; PAM sequence: CAG
ccaccaaaatcaatgatggc

SEQ ID NO: 184943 - DNA, 20 bp, Artificial Sequence
  Description of Artificial Sequence: Synthetic oligonucleotide
  Target: LAMA2; (+) strand; PAM type: NRG; PAM sequence: TGG
ccaaaatcaatgatggccag

SEQ ID NO: 184944 - DNA, 20 bp, Artificial Sequence
  Description of Artificial Sequence: Synthetic oligonucleotide
  Target: LAMA2; (+) strand; PAM type: NRG; PAM sequence: AAG
tcaatgatggccagtggcac

SEQ ID NO: 184945 - DNA, 20 bp, Artificial Sequence
  Description of Artificial Sequence: Synthetic oligonucleotide
  Target: LAMA2; (+) strand; PAM type: NRG; PAM sequence: AGG
caatgatggccagtggcaca

SEQ ID NO: 184946 - DNA, 20 bp, Artificial Sequence
  Description of Artificial Sequence: Synthetic oligonucleotide
  Target: LAMA2; (+) strand; PAM type: NRG; PAM sequence: TAG
tggccagtggcacaaggtaa

SEQ ID NO: 184947 - DNA, 20 bp, Artificial Sequence
  Description of Artificial Sequence: Synthetic oligonucleotide
  Target: LAMA2; (+) strand; PAM type: NRG; PAM sequence: TGG
ggcacaaggtaatagtcccc

SEQ ID NO: 184948 - DNA, 20 bp, Artificial Sequence
  Description of Artificial Sequence: Synthetic oligonucleotide
  Target: LAMA2; (+) strand; PAM type: NRG; PAM sequence: TGG
ggtaatagtcccctggatat

SEQ ID NO: 184949 - DNA, 20 bp, Artificial Sequence
  Description of Artificial Sequence: Synthetic oligonucleotide
  Target: LAMA2; (+) strand; PAM type: NRG; PAM sequence: CAG
aatagtcccctggatattgg

SEQ ID NO: 184950 - DNA, 20 bp, Artificial Sequence
  Description of Artificial Sequence: Synthetic oligonucleotide
  Target: LAMA2; (+) strand; PAM type: NRG; PAM sequence: AAG
ctggatattggcagtaccct

SEQ ID NO: 184951 - DNA, 20 bp, Artificial Sequence
  Description of Artificial Sequence: Synthetic oligonucleotide
  Target: LAMA2; (+) strand; PAM type: NRG; PAM sequence: AGG
tggatattggcagtacccta

SEQ ID NO: 184952 - DNA, 20 bp, Artificial Sequence
  Description of Artificial Sequence: Synthetic oligonucleotide
  Target: LAMA2; (+) strand; PAM type: NRG; PAM sequence: GGG
ggatattggcagtaccctaa

SEQ ID NO: 184953 - DNA, 20 bp, Artificial Sequence
  Description of Artificial Sequence: Synthetic oligonucleotide
  Target: LAMA2; (+) strand; PAM type: NRG; PAM sequence: GAG
agtaccctaagggaattact

SEQ ID NO: 184954 - DNA, 20 bp, Artificial Sequence
  Description of Artificial Sequence: Synthetic oligonucleotide
  Target: LAMA2; (+) strand; PAM type: NRG; PAM sequence: TGG
accctaagggaattactgag

SEQ ID NO: 184955 - DNA, 20 bp, Artificial Sequence
  Description of Artificial Sequence: Synthetic oligonucleotide
  Target: LAMA2; (+) strand; PAM type: NRG; PAM sequence: CAG
ctaagggaattactgagtgg

SEQ ID NO: 184956 - DNA, 20 bp, Artificial Sequence
  Description of Artificial Sequence: Synthetic oligonucleotide
  Target: LAMA2; (+) strand; PAM type: NRG; PAM sequence: CAG
aattactgagtggcagccat

SEQ ID NO: 184957 - DNA, 20 bp, Artificial Sequence
  Description of Artificial Sequence: Synthetic oligonucleotide
  Target: LAMA2; (+) strand; PAM type: NRG; PAM sequence: TGG
ggcagccatcagcattctcc

SEQ ID NO: 184958 - DNA, 20 bp, Artificial Sequence
  Description of Artificial Sequence: Synthetic oligonucleotide
  Target: LAMA2; (+) strand; PAM type: NRG; PAM sequence: CAG
catcagcattctcctggtgc

SEQ ID NO: 184959 - DNA, 20 bp, Artificial Sequence
  Description of Artificial Sequence: Synthetic oligonucleotide
  Target: LAMA2; (+) strand; PAM type: NRG; PAM sequence: CAG
ctggtgccagtatattttgc

SEQ ID NO: 184960 - DNA, 20 bp, Artificial Sequence
  Description of Artificial Sequence: Synthetic oligonucleotide
  Target: LAMA2; (+) strand; PAM type: NRG; PAM sequence: AGG
tggtgccagtatattttgcc

SEQ ID NO: 184961 - DNA, 20 bp, Artificial Sequence
  Description of Artificial Sequence: Synthetic oligonucleotide
  Target: LAMA2; (+) strand; PAM type: NRG; PAM sequence: GGG
ggtgccagtatattttgcca

SEQ ID NO: 184962 - DNA, 20 bp, Artificial Sequence
  Description of Artificial Sequence: Synthetic oligonucleotide
  Target: LAMA2; (+) strand; PAM type: NRG; PAM sequence: CAG
gccagtatattttgccaggg

SEQ ID NO: 184963 - DNA, 20 bp, Artificial Sequence
  Description of Artificial Sequence: Synthetic oligonucleotide
  Target: LAMA2; (+) strand; PAM type: NRG; PAM sequence: TGG
gccagggcagacactgactc

SEQ ID NO: 184964 - DNA, 20 bp, Artificial Sequence
  Description of Artificial Sequence: Synthetic oligonucleotide
  Target: LAMA2; (+) strand; PAM type: NRG; PAM sequence: CAG
agggcagacactgactctgg

SEQ ID NO: 184965 - DNA, 20 bp, Artificial Sequence
  Description of Artificial Sequence: Synthetic oligonucleotide
  Target: LAMA2; (+) strand; PAM type: NRG; PAM sequence: AAG
gcagacactgactctggcag

SEQ ID NO: 184966 - DNA, 20 bp, Artificial Sequence
  Description of Artificial Sequence: Synthetic oligonucleotide
  Target: LAMA2; (+) strand; PAM type: NRG; PAM sequence: AAG
gcagaagctaaaaataaaat

SEQ ID NO: 184967 - DNA, 20 bp, Artificial Sequence
  Description of Artificial Sequence: Synthetic oligonucleotide
  Target: LAMA2; (+) strand; PAM type: NRG; PAM sequence: TGG
atatacaactaccacaatct

SEQ ID NO: 184968 - DNA, 20 bp, Artificial Sequence
  Description of Artificial Sequence: Synthetic oligonucleotide
  Target: LAMA2; (+) strand; PAM type: NRG; PAM sequence: CAG
acaatcttggaaaatgtgct

SEQ ID NO: 184969 - DNA, 20 bp, Artificial Sequence
  Description of Artificial Sequence: Synthetic oligonucleotide
  Target: LAMA2; (+) strand; PAM type: NRG; PAM sequence: TAG
aaaatgtgctcagacctgtg

SEQ ID NO: 184970 - DNA, 20 bp, Artificial Sequence
  Description of Artificial Sequence: Synthetic oligonucleotide
  Target: LAMA2; (+) strand; PAM type: NRG; PAM sequence: AGG
aaatgtgctcagacctgtgt

SEQ ID NO: 184971 - DNA, 20 bp, Artificial Sequence
  Description of Artificial Sequence: Synthetic oligonucleotide
  Target: LAMA2; (+) strand; PAM type: NRG; PAM sequence: TGG
gtaggtttgcatttgaccac

SEQ ID NO: 184972 - DNA, 20 bp, Artificial Sequence
  Description of Artificial Sequence: Synthetic oligonucleotide
  Target: LAMA2; (+) strand; PAM type: NRG; PAM sequence: TGG
accactggcatgcctcatca

SEQ ID NO: 184973 - DNA, 20 bp, Artificial Sequence
  Description of Artificial Sequence: Synthetic oligonucleotide
  Target: LAMA2; (+) strand; PAM type: NRG; PAM sequence: TGG
atggttccatcactgctata

SEQ ID NO: 184974 - DNA, 20 bp, Artificial Sequence
  Description of Artificial Sequence: Synthetic oligonucleotide
  Target: LAMA2; (+) strand; PAM type: NRG; PAM sequence: TGG
ccatcactgctatatggctg

SEQ ID NO: 184975 - DNA, 20 bp, Artificial Sequence
  Description of Artificial Sequence: Synthetic oligonucleotide
  Target: LAMA2; (+) strand; PAM type: NRG; PAM sequence: GAG
caaacatctacccataaact

SEQ ID NO: 184976 - DNA, 20 bp, Artificial Sequence
  Description of Artificial Sequence: Synthetic oligonucleotide
  Target: LAMA2; (+) strand; PAM type: NRG; PAM sequence: AGG
aaacatctacccataaactg

SEQ ID NO: 184977 - DNA, 20 bp, Artificial Sequence
  Description of Artificial Sequence: Synthetic oligonucleotide
  Target: LAMA2; (+) strand; PAM type: NRG; PAM sequence: CAG
atctacccataaactgaggc

SEQ ID NO: 184978 - DNA, 20 bp, Artificial Sequence
  Description of Artificial Sequence: Synthetic oligonucleotide
  Target: LAMA2; (+) strand; PAM type: NRG; PAM sequence: AGG
tctacccataaactgaggcc

SEQ ID NO: 184979 - DNA, 20 bp, Artificial Sequence
  Description of Artificial Sequence: Synthetic oligonucleotide
  Target: LAMA2; (+) strand; PAM type: NRG; PAM sequence: TGG
acccataaactgaggccagg

SEQ ID NO: 184980 - DNA, 20 bp, Artificial Sequence
  Description of Artificial Sequence: Synthetic oligonucleotide
  Target: LAMA2; (+) strand; PAM type: NRG; PAM sequence: AAG
aaactgaggccaggtggctg

SEQ ID NO: 184981 - DNA, 20 bp, Artificial Sequence
  Description of Artificial Sequence: Synthetic oligonucleotide
  Target: LAMA2; (+) strand; PAM type: NRG; PAM sequence: AAG
gaagacatttccactgctct

SEQ ID NO: 184982 - DNA, 20 bp, Artificial Sequence
  Description of Artificial Sequence: Synthetic oligonucleotide
  Target: LAMA2; (+) strand; PAM type: NRG; PAM sequence: GAG
acatttccactgctctaagt

SEQ ID NO: 184983 - DNA, 20 bp, Artificial Sequence
  Description of Artificial Sequence: Synthetic oligonucleotide
  Target: LAMA2; (+) strand; PAM type: NRG; PAM sequence: TAG
actgctctaagtgagaaacg

SEQ ID NO: 184984 - DNA, 20 bp, Artificial Sequence
  Description of Artificial Sequence: Synthetic oligonucleotide
  Target: LAMA2; (+) strand; PAM type: NRG; PAM sequence: CAG
tctaagtgagaaacgtagaa

SEQ ID NO: 184985 - DNA, 20 bp, Artificial Sequence
  Description of Artificial Sequence: Synthetic oligonucleotide
  Target: LAMA2; (+) strand; PAM type: NRG; PAM sequence: GAG
taagtgagaaacgtagaaca

SEQ ID NO: 184986 - DNA, 20 bp, Artificial Sequence
  Description of Artificial Sequence: Synthetic oligonucleotide
  Target: LAMA2; (+) strand; PAM type: NRG; PAM sequence: AAG
aacagagtgtgttcaccatc

SEQ ID NO: 184987 - DNA, 20 bp, Artificial Sequence
  Description of Artificial Sequence: Synthetic oligonucleotide
  Target: LAMA2; (+) strand; PAM type: NRG; PAM sequence: AAG
agctcgatgtattcaatttt

SEQ ID NO: 184988 - DNA, 20 bp, Artificial Sequence
  Description of Artificial Sequence: Synthetic oligonucleotide
  Target: LAMA2; (+) strand; PAM type: NRG; PAM sequence: AGG
gctcgatgtattcaatttta

SEQ ID NO: 184989 - DNA, 20 bp, Artificial Sequence
  Description of Artificial Sequence: Synthetic oligonucleotide
  Target: LAMA2; (+) strand; PAM type: NRG; PAM sequence: GAG
taaggaataatatttattct

SEQ ID NO: 184990 - DNA, 20 bp, Artificial Sequence
  Description of Artificial Sequence: Synthetic oligonucleotide
  Target: LAMA2; (+) strand; PAM type: NRG; PAM sequence: TAG
tttattctgagattatatta

SEQ ID NO: 184991 - DNA, 20 bp, Artificial Sequence
  Description of Artificial Sequence: Synthetic oligonucleotide
  Target: LAMA2; (+) strand; PAM type: NRG; PAM sequence: TGG
attatattatagcattttta

SEQ ID NO: 184992 - DNA, 20 bp, Artificial Sequence
  Description of Artificial Sequence: Synthetic oligonucleotide
  Target: LAMA2; (+) strand; PAM type: NRG; PAM sequence: TGG
atattatagcatttttatgg

SEQ ID NO: 184993 - DNA, 20 bp, Artificial Sequence
  Description of Artificial Sequence: Synthetic oligonucleotide
  Target: LAMA2; (+) strand; PAM type: NRG; PAM sequence: AAG
agcatttttatggtggctaa

SEQ ID NO: 184994 - DNA, 20 bp, Artificial Sequence
  Description of Artificial Sequence: Synthetic oligonucleotide
  Target: LAMA2; (+) strand; PAM type: NRG; PAM sequence: AGG
gcatttttatggtggctaaa

SEQ ID NO: 184995 - DNA, 20 bp, Artificial Sequence
  Description of Artificial Sequence: Synthetic oligonucleotide
  Target: LAMA2; (+) strand; PAM type: NRG; PAM sequence: TAG
aaggcctttctattatgaaa

SEQ ID NO: 184996 - DNA, 20 bp, Artificial Sequence
  Description of Artificial Sequence: Synthetic oligonucleotide
  Target: LAMA2; (+) strand; PAM type: NRG; PAM sequence: AAG
tatgaaatagtatttgccaa

SEQ ID NO: 184997 - DNA, 20 bp, Artificial Sequence
  Description of Artificial Sequence: Synthetic oligonucleotide
  Target: LAMA2; (+) strand; PAM type: NRG; PAM sequence: AAG
atagtatttgccaaaagcaa

SEQ ID NO: 184998 - DNA, 20 bp, Artificial Sequence
  Description of Artificial Sequence: Synthetic oligonucleotide
  Target: LAMA2; (+) strand; PAM type: NRG; PAM sequence: TGG
tatttgccaaaagcaaaagt

SEQ ID NO: 184999 - DNA, 20 bp, Artificial Sequence
  Description of Artificial Sequence: Synthetic oligonucleotide
  Target: LAMA2; (+) strand; PAM type: NRG; PAM sequence: TGG
aaaagttggcaacactaaaa

SEQ ID NO: 185000 - DNA, 20 bp, Artificial Sequence
  Description of Artificial Sequence: Synthetic oligonucleotide
  Target: LAMA2; (+) strand; PAM type: NRG; PAM sequence: GGG
aaagttggcaacactaaaat

SEQ ID NO: 185001 - DNA, 20 bp, Artificial Sequence
  Description of Artificial Sequence: Synthetic oligonucleotide
  Target: LAMA2; (+) strand; PAM type: NRG; PAM sequence: AAG
gcaacactaaaatgggtccc

SEQ ID NO: 185002 - DNA, 20 bp, Artificial Sequence
  Description of Artificial Sequence: Synthetic oligonucleotide
  Target: LAMA2; (+) strand; PAM type: NRG; PAM sequence: CAG
agactccccacctaaccaca

SEQ ID NO: 185003 - DNA, 20 bp, Artificial Sequence
  Description of Artificial Sequence: Synthetic oligonucleotide
  Target: LAMA2; (+) strand; PAM type: NRG; PAM sequence: TGG
ctccccacctaaccacacag

SEQ ID NO: 185004 - DNA, 20 bp, Artificial Sequence
  Description of Artificial Sequence: Synthetic oligonucleotide
  Target: LAMA2; (+) strand; PAM type: NRG; PAM sequence: CAG
acacagtggtctgtgaaaac

SEQ ID NO: 185005 - DNA, 20 bp, Artificial Sequence
  Description of Artificial Sequence: Synthetic oligonucleotide
  Target: LAMA2; (+) strand; PAM type: NRG; PAM sequence: AGG
cacagtggtctgtgaaaacc

SEQ ID NO: 185006 - DNA, 20 bp, Artificial Sequence
  Description of Artificial Sequence: Synthetic oligonucleotide
  Target: LAMA2; (+) strand; PAM type: NRG; PAM sequence: CAG
gtctgtgaaaaccaggaatc

SEQ ID NO: 185007 - DNA, 20 bp, Artificial Sequence
  Description of Artificial Sequence: Synthetic oligonucleotide
  Target: LAMA2; (+) strand; PAM type: NRG; PAM sequence: AGG
tctgtgaaaaccaggaatcc

SEQ ID NO: 185008 - DNA, 20 bp, Artificial Sequence
  Description of Artificial Sequence: Synthetic oligonucleotide
  Target: LAMA2; (+) strand; PAM type: NRG; PAM sequence: TGG
accaggaatccaggaatctc

SEQ ID NO: 185009 - DNA, 20 bp, Artificial Sequence
  Description of Artificial Sequence: Synthetic oligonucleotide
  Target: LAMA2; (+) strand; PAM type: NRG; PAM sequence: AAG
tctctggttgatcgtgttta

SEQ ID NO: 185010 - DNA, 20 bp, Artificial Sequence
  Description of Artificial Sequence: Synthetic oligonucleotide
  Target: LAMA2; (+) strand; PAM type: NRG; PAM sequence: AGG
ctctggttgatcgtgtttaa

SEQ ID NO: 185011 - DNA, 20 bp, Artificial Sequence
  Description of Artificial Sequence: Synthetic oligonucleotide
  Target: LAMA2; (+) strand; PAM type: NRG; PAM sequence: GGG
tctggttgatcgtgtttaaa

SEQ ID NO: 185012 - DNA, 20 bp, Artificial Sequence
  Description of Artificial Sequence: Synthetic oligonucleotide
  Target: LAMA2; (+) strand; PAM type: NRG; PAM sequence: AAG
gatcgtgtttaaagggctct

SEQ ID NO: 185013 - DNA, 20 bp, Artificial Sequence
  Description of Artificial Sequence: Synthetic oligonucleotide
  Target: LAMA2; (+) strand; PAM type: NRG; PAM sequence: AGG
atcgtgtttaaagggctcta

SEQ ID NO: 185014 - DNA, 20 bp, Artificial Sequence
  Description of Artificial Sequence: Synthetic oligonucleotide
  Target: LAMA2; (+) strand; PAM type: NRG; PAM sequence: CAG
taaggtatcatttctactga

SEQ ID NO: 185015 - DNA, 20 bp, Artificial Sequence
  Description of Artificial Sequence: Synthetic oligonucleotide
  Target: LAMA2; (+) strand; PAM type: NRG; PAM sequence: TGG
catttctactgacagttatt

SEQ ID NO: 185016 - DNA, 20 bp, Artificial Sequence
  Description of Artificial Sequence: Synthetic oligonucleotide
  Target: LAMA2; (+) strand; PAM type: NRG; PAM sequence: TGG
tggaacaactttaaaaacgt

SEQ ID NO: 185017 - DNA, 20 bp, Artificial Sequence
  Description of Artificial Sequence: Synthetic oligonucleotide
  Target: LAMA2; (+) strand; PAM type: NRG; PAM sequence: CAG
aaaaacgttggccttacacc

SEQ ID NO: 185018 - DNA, 20 bp, Artificial Sequence
  Description of Artificial Sequence: Synthetic oligonucleotide
  Target: LAMA2; (+) strand; PAM type: NRG; PAM sequence: TGG
ttggccttacacccagaaac

SEQ ID NO: 185019 - DNA, 20 bp, Artificial Sequence
  Description of Artificial Sequence: Synthetic oligonucleotide
  Target: LAMA2; (+) strand; PAM type: NRG; PAM sequence: TGG
cccagaaactggtactatta

SEQ ID NO: 185020 - DNA, 20 bp, Artificial Sequence
  Description of Artificial Sequence: Synthetic oligonucleotide
  Target: LAMA2; (+) strand; PAM type: NRG; PAM sequence: GGG
ccagaaactggtactattat

SEQ ID NO: 185021 - DNA, 20 bp, Artificial Sequence
  Description of Artificial Sequence: Synthetic oligonucleotide
  Target: LAMA2; (+) strand; PAM type: NRG; PAM sequence: CAG
aactggtactattatgggca

SEQ ID NO: 185022 - DNA, 20 bp, Artificial Sequence
  Description of Artificial Sequence: Synthetic oligonucleotide
  Target: LAMA2; (+) strand; PAM type: NRG; PAM sequence: AAG
tggtactattatgggcacag

SEQ ID NO: 185023 - DNA, 20 bp, Artificial Sequence
  Description of Artificial Sequence: Synthetic oligonucleotide
  Target: LAMA2; (+) strand; PAM type: NRG; PAM sequence: AGG
ggtactattatgggcacaga

SEQ ID NO: 185024 - DNA, 20 bp, Artificial Sequence
  Description of Artificial Sequence: Synthetic oligonucleotide
  Target: LAMA2; (+) strand; PAM type: NRG; PAM sequence: CAG
ggcacagaaggctcatttgc

SEQ ID NO: 185025 - DNA, 20 bp, Artificial Sequence
  Description of Artificial Sequence: Synthetic oligonucleotide
  Target: LAMA2; (+) strand; PAM type: NRG; PAM sequence: TGG
tgccagcttactgtcctctt

SEQ ID NO: 185026 - DNA, 20 bp, Artificial Sequence
  Description of Artificial Sequence: Synthetic oligonucleotide
  Target: LAMA2; (+) strand; PAM type: NRG; PAM sequence: TAG
ctctttggcatgactgcaaa

SEQ ID NO: 185027 - DNA, 20 bp, Artificial Sequence
  Description of Artificial Sequence: Synthetic oligonucleotide
  Target: LAMA2; (+) strand; PAM type: NRG; PAM sequence: TAG
atttgtctctgcacctgcga

SEQ ID NO: 185028 - DNA, 20 bp, Artificial Sequence
  Description of Artificial Sequence: Synthetic oligonucleotide
  Target: LAMA2; (+) strand; PAM type: NRG; PAM sequence: AAG
gcacctgcgatagcctatta

SEQ ID NO: 185029 - DNA, 20 bp, Artificial Sequence
  Description of Artificial Sequence: Synthetic oligonucleotide
  Target: LAMA2; (+) strand; PAM type: NRG; PAM sequence: AAG
tgcgatagcctattaaagca

SEQ ID NO: 185030 - DNA, 20 bp, Artificial Sequence
  Description of Artificial Sequence: Synthetic oligonucleotide
  Target: LAMA2; (+) strand; PAM type: NRG; PAM sequence: TAG
ctattaaagcaaagcttccc

SEQ ID NO: 185031 - DNA, 20 bp, Artificial Sequence
  Description of Artificial Sequence: Synthetic oligonucleotide
  Target: LAMA2; (+) strand; PAM type: NRG; PAM sequence: AGG
tattaaagcaaagcttccct

SEQ ID NO: 185032 - DNA, 20 bp, Artificial Sequence
  Description of Artificial Sequence: Synthetic oligonucleotide
  Target: LAMA2; (+) strand; PAM type: NRG; PAM sequence: TAG
taaagcaaagcttccctagg

SEQ ID NO: 185033 - DNA, 20 bp, Artificial Sequence
  Description of Artificial Sequence: Synthetic oligonucleotide
  Target: LAMA2; (+) strand; PAM type: NRG; PAM sequence: CAG
ccaataaaatttttaatttt

SEQ ID NO: 185034 - DNA, 20 bp, Artificial Sequence
  Description of Artificial Sequence: Synthetic oligonucleotide
  Target: LAMA2; (+) strand; PAM type: NRG; PAM sequence: GAG
aataaaatttttaattttca

SEQ ID NO: 185035 - DNA, 20 bp, Artificial Sequence
  Description of Artificial Sequence: Synthetic oligonucleotide
  Target: LAMA2; (+) strand; PAM type: NRG; PAM sequence: TAG
ttttcagagtacgatattat

SEQ ID NO: 185036 - DNA, 20 bp, Artificial Sequence
  Description of Artificial Sequence: Synthetic oligonucleotide
  Target: LAMA2; (+) strand; PAM type: NRG; PAM sequence: TAG
agtacgatattattagatgt

SEQ ID NO: 185037 - DNA, 20 bp, Artificial Sequence
  Description of Artificial Sequence: Synthetic oligonucleotide
  Target: LAMA2; (+) strand; PAM type: NRG; PAM sequence: TGG
atattattagatgttagatt

SEQ ID NO: 185038 - DNA, 20 bp, Artificial Sequence
  Description of Artificial Sequence: Synthetic oligonucleotide
  Target: LAMA2; (+) strand; PAM type: NRG; PAM sequence: TAG
tactttgacttgtcatattc

SEQ ID NO: 185039 - DNA, 20 bp, Artificial Sequence
  Description of Artificial Sequence: Synthetic oligonucleotide
  Target: LAMA2; (+) strand; PAM type: NRG; PAM sequence: AAG
ttgacttgtcatattctaga

SEQ ID NO: 185040 - DNA, 20 bp, Artificial Sequence
  Description of Artificial Sequence: Synthetic oligonucleotide
  Target: LAMA2; (+) strand; PAM type: NRG; PAM sequence: AAG
tgtcatattctagaaagcca

SEQ ID NO: 185041 - DNA, 20 bp, Artificial Sequence
  Description of Artificial Sequence: Synthetic oligonucleotide
  Target: LAMA2; (+) strand; PAM type: NRG; PAM sequence: AAG
aaagaaccttaaaaaacgcg

SEQ ID NO: 185042 - DNA, 20 bp, Artificial Sequence
  Description of Artificial Sequence: Synthetic oligonucleotide
  Target: LAMA2; (+) strand; PAM type: NRG; PAM sequence: TGG
agccaaccaatttgttatca

SEQ ID NO: 185043 - DNA, 20 bp, Artificial Sequence
  Description of Artificial Sequence: Synthetic oligonucleotide
  Target: LAMA2; (+) strand; PAM type: NRG; PAM sequence: AAG
caatttgttatcatggaaat

SEQ ID NO: 185044 - DNA, 20 bp, Artificial Sequence
  Description of Artificial Sequence: Synthetic oligonucleotide
  Target: LAMA2; (+) strand; PAM type: NRG; PAM sequence: AAG
tgttatcatggaaataagaa

SEQ ID NO: 185045 - DNA, 20 bp, Artificial Sequence
  Description of Artificial Sequence: Synthetic oligonucleotide
  Target: LAMA2; (+) strand; PAM type: NRG; PAM sequence: AGG
gttatcatggaaataagaaa

SEQ ID NO: 185046 - DNA, 20 bp, Artificial Sequence
  Description of Artificial Sequence: Synthetic oligonucleotide
  Target: LAMA2; (+) strand; PAM type: NRG; PAM sequence: TGG
aaaggaatcttcatttttgc

SEQ ID NO: 185047 - DNA, 20 bp, Artificial Sequence
  Description of Artificial Sequence: Synthetic oligonucleotide
  Target: LAMA2; (+) strand; PAM type: NRG; PAM sequence: GGG
aaggaatcttcatttttgct

SEQ ID NO: 185048 - DNA, 20 bp, Artificial Sequence
  Description of Artificial Sequence: Synthetic oligonucleotide
  Target: LAMA2; (+) strand; PAM type: NRG; PAM sequence: GAG
ggaatcttcatttttgctgg

SEQ ID NO: 185049 - DNA, 20 bp, Artificial Sequence
  Description of Artificial Sequence: Synthetic oligonucleotide
  Target: LAMA2; (+) strand; PAM type: NRG; PAM sequence: TAG
ttttgctgggagcttatgac

SEQ ID NO: 185050 - DNA, 20 bp, Artificial Sequence
  Description of Artificial Sequence: Synthetic oligonucleotide
  Target: LAMA2; (+) strand; PAM type: NRG; PAM sequence: CAG
gagcttatgactagcaaata

SEQ ID NO: 185051 - DNA, 20 bp, Artificial Sequence
  Description of Artificial Sequence: Synthetic oligonucleotide
  Target: LAMA2; (+) strand; PAM type: NRG; PAM sequence: AAG
agcaaatacagatccaaatg

SEQ ID NO: 185052 - DNA, 20 bp, Artificial Sequence
  Description of Artificial Sequence: Synthetic oligonucleotide
  Target: LAMA2; (+) strand; PAM type: NRG; PAM sequence: AGG
gcaaatacagatccaaatga

SEQ ID NO: 185053 - DNA, 20 bp, Artificial Sequence
  Description of Artificial Sequence: Synthetic oligonucleotide
  Target: LAMA2; (+) strand; PAM type: NRG; PAM sequence: GAG
aaatacagatccaaatgaag

SEQ ID NO: 185054 - DNA, 20 bp, Artificial Sequence
  Description of Artificial Sequence: Synthetic oligonucleotide
  Target: LAMA2; (+) strand; PAM type: NRG; PAM sequence: AAG
caaatgaaggagctctcatt

SEQ ID NO: 185055 - DNA, 20 bp, Artificial Sequence
  Description of Artificial Sequence: Synthetic oligonucleotide
  Target: LAMA2; (+) strand; PAM type: NRG; PAM sequence: GAG
aatgaaggagctctcattaa

SEQ ID NO: 185056 - DNA, 20 bp, Artificial Sequence
  Description of Artificial Sequence: Synthetic oligonucleotide
  Target: LAMA2; (+) strand; PAM type: NRG; PAM sequence: TAG
attaagagttcttccatctc

SEQ ID NO: 185057 - DNA, 20 bp, Artificial Sequence
  Description of Artificial Sequence: Synthetic oligonucleotide
  Target: LAMA2; (+) strand; PAM type: NRG; PAM sequence: TAG
gttcttccatctctagctaa

SEQ ID NO: 185058 - DNA, 20 bp, Artificial Sequence
  Description of Artificial Sequence: Synthetic oligonucleotide
  Target: LAMA2; (+) strand; PAM type: NRG; PAM sequence: GAG
gaataataaatatgacattt

SEQ ID NO: 185059 - DNA, 20 bp, Artificial Sequence
  Description of Artificial Sequence: Synthetic oligonucleotide
  Target: LAMA2; (+) strand; PAM type: NRG; PAM sequence: AAG
taaatatgacatttgagaaa

SEQ ID NO: 185060 - DNA, 20 bp, Artificial Sequence
  Description of Artificial Sequence: Synthetic oligonucleotide
  Target: LAMA2; (+) strand; PAM type: NRG; PAM sequence: GAG
acatattgttgaaccacaat

SEQ ID NO: 185061 - DNA, 20 bp, Artificial Sequence
  Description of Artificial Sequence: Synthetic oligonucleotide
  Target: LAMA2; (+) strand; PAM type: NRG; PAM sequence: AGG
catattgttgaaccacaatg

SEQ ID NO: 185062 - DNA, 20 bp, Artificial Sequence
  Description of Artificial Sequence: Synthetic oligonucleotide
  Target: LAMA2; (+) strand; PAM type: NRG; PAM sequence: TGG
ttgttgaaccacaatgaggc

SEQ ID NO: 185063 - DNA, 20 bp, Artificial Sequence
  Description of Artificial Sequence: Synthetic oligonucleotide
  Target: LAMA2; (+) strand; PAM type: NRG; PAM sequence: GGG
tgttgaaccacaatgaggct

SEQ ID NO: 185064 - DNA, 20 bp, Artificial Sequence
  Description of Artificial Sequence: Synthetic oligonucleotide
  Target: LAMA2; (+) strand; PAM type: NRG; PAM sequence: AAG
accacaatgaggctgggatt

SEQ ID NO: 185065 - DNA, 20 bp, Artificial Sequence
  Description of Artificial Sequence: Synthetic oligonucleotide
  Target: LAMA2; (+) strand; PAM type: NRG; PAM sequence: AAG
caatgaggctgggattaaga

SEQ ID NO: 185066 - DNA, 20 bp, Artificial Sequence
  Description of Artificial Sequence: Synthetic oligonucleotide
  Target: LAMA2; (+) strand; PAM type: NRG; PAM sequence: AGG
aatgaggctgggattaagaa

SEQ ID NO: 185067 - DNA, 20 bp, Artificial Sequence
  Description of Artificial Sequence: Synthetic oligonucleotide
  Target: LAMA2; (+) strand; PAM type: NRG; PAM sequence: GGG
atgaggctgggattaagaaa

SEQ ID NO: 185068 - DNA, 20 bp, Artificial Sequence
  Description of Artificial Sequence: Synthetic oligonucleotide
  Target: LAMA2; (+) strand; PAM type: NRG; PAM sequence: TAG
gggaacttaaatactataat

SEQ ID NO: 185069 - DNA, 20 bp, Artificial Sequence
  Description of Artificial Sequence: Synthetic oligonucleotide
  Target: LAMA2; (+) strand; PAM type: NRG; PAM sequence: CGG
ataattagtcaaattaataa

SEQ ID NO: 185070 - DNA, 20 bp, Artificial Sequence
  Description of Artificial Sequence: Synthetic oligonucleotide
  Target: LAMA2; (+) strand; PAM type: NRG; PAM sequence: TGG
ataacggattttatttttga

SEQ ID NO: 185071 - DNA, 20 bp, Artificial Sequence
  Description of Artificial Sequence: Synthetic oligonucleotide
  Target: LAMA2; (+) strand; PAM type: NRG; PAM sequence: CAG
ttaaaaattacttcccaaac

SEQ ID NO: 185072 - DNA, 20 bp, Artificial Sequence
  Description of Artificial Sequence: Synthetic oligonucleotide
  Target: LAMA2; (+) strand; PAM type: NRG; PAM sequence: TAG
aattacttcccaaaccagaa

SEQ ID NO: 185073 - DNA, 20 bp, Artificial Sequence
  Description of Artificial Sequence: Synthetic oligonucleotide
  Target: LAMA2; (+) strand; PAM type: NRG; PAM sequence: AAG
gaatagatatgtgtaaaatg

SEQ ID NO: 185074 - DNA, 20 bp, Artificial Sequence
  Description of Artificial Sequence: Synthetic oligonucleotide
  Target: LAMA2; (+) strand; PAM type: NRG; PAM sequence: CAG
aaattactctaatcctgacc

SEQ ID NO: 185075 - DNA, 20 bp, Artificial Sequence
  Description of Artificial Sequence: Synthetic oligonucleotide
  Target: LAMA2; (+) strand; PAM type: NRG; PAM sequence: TGG
gactcatttttaaaccatca

SEQ ID NO: 185076 - DNA, 20 bp, Artificial Sequence
  Description of Artificial Sequence: Synthetic oligonucleotide
  Target: LAMA2; (+) strand; PAM type: NRG; PAM sequence: TAG
tttaaaccatcatggtactt

SEQ ID NO: 185077 - DNA, 20 bp, Artificial Sequence
  Description of Artificial Sequence: Synthetic oligonucleotide
  Target: LAMA2; (+) strand; PAM type: NRG; PAM sequence: CAG
catggtactttagcatttca

SEQ ID NO: 185078 - DNA, 20 bp, Artificial Sequence
  Description of Artificial Sequence: Synthetic oligonucleotide
  Target: LAMA2; (+) strand; PAM type: NRG; PAM sequence: AGG
atggtactttagcatttcac

SEQ ID NO: 185079 - DNA, 20 bp, Artificial Sequence
  Description of Artificial Sequence: Synthetic oligonucleotide
  Target: LAMA2; (+) strand; PAM type: NRG; PAM sequence: CAG
catgctcctttacctaaatt

SEQ ID NO: 185080 - DNA, 20 bp, Artificial Sequence
  Description of Artificial Sequence: Synthetic oligonucleotide
  Target: LAMA2; (+) strand; PAM type: NRG; PAM sequence: AAG
ctttacctaaattcagactc

SEQ ID NO: 185081 - DNA, 20 bp, Artificial Sequence
  Description of Artificial Sequence: Synthetic oligonucleotide
  Target: LAMA2; (+) strand; PAM type: NRG; PAM sequence: AGG
tttacctaaattcagactca

SEQ ID NO: 185082 - DNA, 20 bp, Artificial Sequence
  Description of Artificial Sequence: Synthetic oligonucleotide
  Target: LAMA2; (+) strand; PAM type: NRG; PAM sequence: CAG
gactcaaggtttttatactc

SEQ ID NO: 185083 - DNA, 20 bp, Artificial Sequence
  Description of Artificial Sequence: Synthetic oligonucleotide
  Target: LAMA2; (+) strand; PAM type: NRG; PAM sequence: CAG
caaggtttttatactccagc

SEQ ID NO: 185084 - DNA, 20 bp, Artificial Sequence
  Description of Artificial Sequence: Synthetic oligonucleotide
  Target: LAMA2; (+) strand; PAM type: NRG; PAM sequence: CAG
ccccttatttcattctgtct

SEQ ID NO: 185085 - DNA, 20 bp, Artificial Sequence
  Description of Artificial Sequence: Synthetic oligonucleotide
  Target: LAMA2; (+) strand; PAM type: NRG; PAM sequence: AAG
cttatttcattctgtctcag

SEQ ID NO: 185086 - DNA, 20 bp, Artificial Sequence
  Description of Artificial Sequence: Synthetic oligonucleotide
  Target: LAMA2; (+) strand; PAM type: NRG; PAM sequence: CAG
cactccaccgccctaaattt

SEQ ID NO: 185087 - DNA, 20 bp, Artificial Sequence
  Description of Artificial Sequence: Synthetic oligonucleotide
  Target: LAMA2; (+) strand; PAM type: NRG; PAM sequence: CAG
accgccctaaatttcagcct

SEQ ID NO: 185088 - DNA, 20 bp, Artificial Sequence
  Description of Artificial Sequence: Synthetic oligonucleotide
  Target: LAMA2; (+) strand; PAM type: NRG; PAM sequence: CAG
ctcccccactttgtactcat

SEQ ID NO: 185089 - DNA, 20 bp, Artificial Sequence
  Description of Artificial Sequence: Synthetic oligonucleotide
  Target: LAMA2; (+) strand; PAM type: NRG; PAM sequence: AGG
tcccccactttgtactcatc

SEQ ID NO: 185090 - DNA, 20 bp, Artificial Sequence
  Description of Artificial Sequence: Synthetic oligonucleotide
  Target: LAMA2; (+) strand; PAM type: NRG; PAM sequence: CAG
tttgtactcatcaggttctg

SEQ ID NO: 185091 - DNA, 20 bp, Artificial Sequence
  Description of Artificial Sequence: Synthetic oligonucleotide
  Target: LAMA2; (+) strand; PAM type: NRG; PAM sequence: AAG
tactcatcaggttctgcaga

SEQ ID NO: 185092 - DNA, 20 bp, Artificial Sequence
  Description of Artificial Sequence: Synthetic oligonucleotide
  Target: LAMA2; (+) strand; PAM type: NRG; PAM sequence: TAG
tcatcaggttctgcagaaag

SEQ ID NO: 185093 - DNA, 20 bp, Artificial Sequence
  Description of Artificial Sequence: Synthetic oligonucleotide
  Target: LAMA2; (+) strand; PAM type: NRG; PAM sequence: CAG
aggttctgcagaaagtagtg

SEQ ID NO: 185094 - DNA, 20 bp, Artificial Sequence
  Description of Artificial Sequence: Synthetic oligonucleotide
  Target: LAMA2; (+) strand; PAM type: NRG; PAM sequence: AAG
ctctttctttaattctgcac

SEQ ID NO: 185095 - DNA, 20 bp, Artificial Sequence
  Description of Artificial Sequence: Synthetic oligonucleotide
  Target: LAMA2; (+) strand; PAM type: NRG; PAM sequence: AAG
tttctttaattctgcacaag

SEQ ID NO: 185096 - DNA, 20 bp, Artificial Sequence
  Description of Artificial Sequence: Synthetic oligonucleotide
  Target: LAMA2; (+) strand; PAM type: NRG; PAM sequence: AGG
ttctttaattctgcacaaga

SEQ ID NO: 185097 - DNA, 20 bp, Artificial Sequence
  Description of Artificial Sequence: Synthetic oligonucleotide
  Target: LAMA2; (+) strand; PAM type: NRG; PAM sequence: GGG
tctttaattctgcacaagaa

SEQ ID NO: 185098 - DNA, 20 bp, Artificial Sequence
  Description of Artificial Sequence: Synthetic oligonucleotide
  Target: LAMA2; (+) strand; PAM type: NRG; PAM sequence: TAG
tctgcacaagaagggcctgt

SEQ ID NO: 185099 - DNA, 20 bp, Artificial Sequence
  Description of Artificial Sequence: Synthetic oligonucleotide
  Target: LAMA2; (+) strand; PAM type: NRG; PAM sequence: AGG
ctgcacaagaagggcctgtt

SEQ ID NO: 185100 - DNA, 20 bp, Artificial Sequence
  Description of Artificial Sequence: Synthetic oligonucleotide
  Target: LAMA2; (+) strand; PAM type: NRG; PAM sequence: AAG
caagaagggcctgttaggca

SEQ ID NO: 185101 - DNA, 20 bp, Artificial Sequence
  Description of Artificial Sequence: Synthetic oligonucleotide
  Target: LAMA2; (+) strand; PAM type: NRG; PAM sequence: AGG
aagaagggcctgttaggcaa

SEQ ID NO: 185102 - DNA, 20 bp, Artificial Sequence
  Description of Artificial Sequence: Synthetic oligonucleotide
  Target: LAMA2; (+) strand; PAM type: NRG; PAM sequence: GGG
agaagggcctgttaggcaaa

SEQ ID NO: 185103 - DNA, 20 bp, Artificial Sequence
  Description of Artificial Sequence: Synthetic oligonucleotide
  Target: LAMA2; (+) strand; PAM type: NRG; PAM sequence: TAG
gcctgttaggcaaagggatg

SEQ ID NO: 185104 - DNA, 20 bp, Artificial Sequence
  Description of Artificial Sequence: Synthetic oligonucleotide
  Target: LAMA2; (+) strand; PAM type: NRG; PAM sequence: TGG
tagcgtatctgaaattgtgt

SEQ ID NO: 185105 - DNA, 20 bp, Artificial Sequence
  Description of Artificial Sequence: Synthetic oligonucleotide
  Target: LAMA2; (+) strand; PAM type: NRG; PAM sequence: GGG
agcgtatctgaaattgtgtt

SEQ ID NO: 185106 - DNA, 20 bp, Artificial Sequence
  Description of Artificial Sequence: Synthetic oligonucleotide
  Target: LAMA2; (+) strand; PAM type: NRG; PAM sequence: GAG
cgtatctgaaattgtgttgg

SEQ ID NO: 185107 - DNA, 20 bp, Artificial Sequence
  Description of Artificial Sequence: Synthetic oligonucleotide
  Target: LAMA2; (+) strand; PAM type: NRG; PAM sequence: CAG
ctgaaattgtgttgggagcc

SEQ ID NO: 185108 - DNA, 20 bp, Artificial Sequence
  Description of Artificial Sequence: Synthetic oligonucleotide
  Target: LAMA2; (+) strand; PAM type: NRG; PAM sequence: AGG
tgaaattgtgttgggagccc

SEQ ID NO: 185109 - DNA, 20 bp, Artificial Sequence
  Description of Artificial Sequence: Synthetic oligonucleotide
  Target: LAMA2; (+) strand; PAM type: NRG; PAM sequence: AAG
gctacccacttaatttatga

SEQ ID NO: 185110 - DNA, 20 bp, Artificial Sequence
  Description of Artificial Sequence: Synthetic oligonucleotide
  Target: LAMA2; (+) strand; PAM type: NRG; PAM sequence: TAG
ttaatttatgaaagtgctat

SEQ ID NO: 185111 - DNA, 20 bp, Artificial Sequence
  Description of Artificial Sequence: Synthetic oligonucleotide
  Target: LAMA2; (+) strand; PAM type: NRG; PAM sequence: CAG
atgaaagtgctattagtctg

SEQ ID NO: 185112 - DNA, 20 bp, Artificial Sequence
  Description of Artificial Sequence: Synthetic oligonucleotide
  Target: LAMA2; (+) strand; PAM type: NRG; PAM sequence: AGG
tgaaagtgctattagtctgc

SEQ ID NO: 185113 - DNA, 20 bp, Artificial Sequence
  Description of Artificial Sequence: Synthetic oligonucleotide
  Target: LAMA2; (+) strand; PAM type: NRG; PAM sequence: GGG
gaaagtgctattagtctgca

SEQ ID NO: 185114 - DNA, 20 bp, Artificial Sequence
  Description of Artificial Sequence: Synthetic oligonucleotide
  Target: LAMA2; (+) strand; PAM type: NRG; PAM sequence: TGG
tctccacacatatccacatt

SEQ ID NO: 185115 - DNA, 20 bp, Artificial Sequence
  Description of Artificial Sequence: Synthetic oligonucleotide
  Target: LAMA2; (+) strand; PAM type: NRG; PAM sequence: GAG
tccacatttggcaatctacc

SEQ ID NO: 185116 - DNA, 20 bp, Artificial Sequence
  Description of Artificial Sequence: Synthetic oligonucleotide
  Target: LAMA2; (+) strand; PAM type: NRG; PAM sequence: AGG
ccacatttggcaatctaccg

SEQ ID NO: 185117 - DNA, 20 bp, Artificial Sequence
  Description of Artificial Sequence: Synthetic oligonucleotide
  Target: LAMA2; (+) strand; PAM type: NRG; PAM sequence: GAG
acatttggcaatctaccgag

SEQ ID NO: 185118 - DNA, 20 bp, Artificial Sequence
  Description of Artificial Sequence: Synthetic oligonucleotide
  Target: LAMA2; (+) strand; PAM type: NRG; PAM sequence: CAG
acttcgacctaaaactgacc

SEQ ID NO: 185119 - DNA, 20 bp, Artificial Sequence
  Description of Artificial Sequence: Synthetic oligonucleotide
  Target: LAMA2; (+) strand; PAM type: NRG; PAM sequence: AGG
cttcgacctaaaactgaccc

SEQ ID NO: 185120 - DNA, 20 bp, Artificial Sequence
  Description of Artificial Sequence: Synthetic oligonucleotide
  Target: LAMA2; (+) strand; PAM type: NRG; PAM sequence: TGG
aaaactgacccaggaaaatt

SEQ ID NO: 185121 - DNA, 20 bp, Artificial Sequence
  Description of Artificial Sequence: Synthetic oligonucleotide
  Target: LAMA2; (+) strand; PAM type: NRG; PAM sequence: TGG
aggaaaatttggtattcttt

SEQ ID NO: 185122 - DNA, 20 bp, Artificial Sequence
  Description of Artificial Sequence: Synthetic oligonucleotide
  Target: LAMA2; (+) strand; PAM type: NRG; PAM sequence: TAG
atttggtattcttttggtga

SEQ ID NO: 185123 - DNA, 20 bp, Artificial Sequence
  Description of Artificial Sequence: Synthetic oligonucleotide
  Target: LAMA2; (+) strand; PAM type: NRG; PAM sequence: TAG
tggtattcttttggtgatag

SEQ ID NO: 185124 - DNA, 20 bp, Artificial Sequence
  Description of Artificial Sequence: Synthetic oligonucleotide
  Target: LAMA2; (+) strand; PAM type: NRG; PAM sequence: TGG
tcttttggtgatagtagtca

SEQ ID NO: 185125 - DNA, 20 bp, Artificial Sequence
  Description of Artificial Sequence: Synthetic oligonucleotide
  Target: LAMA2; (+) strand; PAM type: NRG; PAM sequence: AAG
tggtgatagtagtcatggaa

SEQ ID NO: 185126 - DNA, 20 bp, Artificial Sequence
  Description of Artificial Sequence: Synthetic oligonucleotide
  Target: LAMA2; (+) strand; PAM type: NRG; PAM sequence: CAG
gatagtagtcatggaaaaga

SEQ ID NO: 185127 - DNA, 20 bp, Artificial Sequence
  Description of Artificial Sequence: Synthetic oligonucleotide
  Target: LAMA2; (+) strand; PAM type: NRG; PAM sequence: GAG
tcatggaaaagacagaattt

SEQ ID NO: 185128 - DNA, 20 bp, Artificial Sequence
  Description of Artificial Sequence: Synthetic oligonucleotide
  Target: LAMA2; (+) strand; PAM type: NRG; PAM sequence: TGG
atttgagatattctgtaaaa

SEQ ID NO: 185129 - DNA, 20 bp, Artificial Sequence
  Description of Artificial Sequence: Synthetic oligonucleotide
  Target: LAMA2; (+) strand; PAM type: NRG; PAM sequence: GGG
tttgagatattctgtaaaat

SEQ ID NO: 185130 - DNA, 20 bp, Artificial Sequence
  Description of Artificial Sequence: Synthetic oligonucleotide
  Target: LAMA2; (+) strand; PAM type: NRG; PAM sequence: TGG
tttaactttcccatatataa

SEQ ID NO: 185131 - DNA, 20 bp, Artificial Sequence
  Description of Artificial Sequence: Synthetic oligonucleotide
  Target: LAMA2; (+) strand; PAM type: NRG; PAM sequence: GGG
ttaactttcccatatataat

SEQ ID NO: 185132 - DNA, 20 bp, Artificial Sequence
  Description of Artificial Sequence: Synthetic oligonucleotide
  Target: LAMA2; (+) strand; PAM type: NRG; PAM sequence: TAG
tttcccatatataatgggct

SEQ ID NO: 185133 - DNA, 20 bp, Artificial Sequence
  Description of Artificial Sequence: Synthetic oligonucleotide
  Target: LAMA2; (+) strand; PAM type: NRG; PAM sequence: AAG
taatgggcttagcgcatact

SEQ ID NO: 185134 - DNA, 20 bp, Artificial Sequence
  Description of Artificial Sequence: Synthetic oligonucleotide
  Target: LAMA2; (+) strand; PAM type: NRG; PAM sequence: TGG
tacattgtttcaatttttct

SEQ ID NO: 185135 - DNA, 20 bp, Artificial Sequence
  Description of Artificial Sequence: Synthetic oligonucleotide
  Target: LAMA2; (+) strand; PAM type: NRG; PAM sequence: TAG
atttttcttggtaacatcgt

SEQ ID NO: 185136 - DNA, 20 bp, Artificial Sequence
  Description of Artificial Sequence: Synthetic oligonucleotide
  Target: LAMA2; (+) strand; PAM type: NRG; PAM sequence: GAG
ttttcttggtaacatcgtta

SEQ ID NO: 185137 - DNA, 20 bp, Artificial Sequence
  Description of Artificial Sequence: Synthetic oligonucleotide
  Target: LAMA2; (+) strand; PAM type: NRG; PAM sequence: CAG
ctgcatatgtgaaatttgtt

SEQ ID NO: 185138 - DNA, 20 bp, Artificial Sequence
  Description of Artificial Sequence: Synthetic oligonucleotide
  Target: LAMA2; (+) strand; PAM type: NRG; PAM sequence: AGG
tgcatatgtgaaatttgttc

SEQ ID NO: 185139 - DNA, 20 bp, Artificial Sequence
  Description of Artificial Sequence: Synthetic oligonucleotide
  Target: LAMA2; (+) strand; PAM type: NRG; PAM sequence: TGG
atgtgaaatttgttcaggat

SEQ ID NO: 185140 - DNA, 20 bp, Artificial Sequence
  Description of Artificial Sequence: Synthetic oligonucleotide
  Target: LAMA2; (+) strand; PAM type: NRG; PAM sequence: TAG
aatgactcctttcttttttg

SEQ ID NO: 185141 - DNA, 20 bp, Artificial Sequence
  Description of Artificial Sequence: Synthetic oligonucleotide
  Target: LAMA2; (+) strand; PAM type: NRG; PAM sequence: AAG
tcctttcttttttgtagatt

SEQ ID NO: 185142 - DNA, 20 bp, Artificial Sequence
  Description of Artificial Sequence: Synthetic oligonucleotide
  Target: LAMA2; (+) strand; PAM type: NRG; PAM sequence: GAG
tttttgtagattaagataat

SEQ ID NO: 185143 - DNA, 20 bp, Artificial Sequence
  Description of Artificial Sequence: Synthetic oligonucleotide
  Target: LAMA2; (+) strand; PAM type: NRG; PAM sequence: AAG
ttgtagattaagataatgag

SEQ ID NO: 185144 - DNA, 20 bp, Artificial Sequence
  Description of Artificial Sequence: Synthetic oligonucleotide
  Target: LAMA2; (+) strand; PAM type: NRG; PAM sequence: AAG
agattaagataatgagaagt

SEQ ID NO: 185145 - DNA, 20 bp, Artificial Sequence
  Description of Artificial Sequence: Synthetic oligonucleotide
  Target: LAMA2; (+) strand; PAM type: NRG; PAM sequence: AAG
taagataatgagaagtaagc

SEQ ID NO: 185146 - DNA, 20 bp, Artificial Sequence
  Description of Artificial Sequence: Synthetic oligonucleotide
  Target: LAMA2; (+) strand; PAM type: NRG; PAM sequence: AAG
gataatgagaagtaagcaag

SEQ ID NO: 185147 - DNA, 20 bp, Artificial Sequence
  Description of Artificial Sequence: Synthetic oligonucleotide
  Target: LAMA2; (+) strand; PAM type: NRG; PAM sequence: AGG
ataatgagaagtaagcaaga

SEQ ID NO: 185148 - DNA, 20 bp, Artificial Sequence
  Description of Artificial Sequence: Synthetic oligonucleotide
  Target: LAMA2; (+) strand; PAM type: NRG; PAM sequence: TAG
gcaagaaggaattctttatg

SEQ ID NO: 185149 - DNA, 20 bp, Artificial Sequence
  Description of Artificial Sequence: Synthetic oligonucleotide
  Target: LAMA2; (+) strand; PAM type: NRG; PAM sequence: TGG
gaaggaattctttatgtaga

SEQ ID NO: 185150 - DNA, 20 bp, Artificial Sequence
  Description of Artificial Sequence: Synthetic oligonucleotide
  Target: LAMA2; (+) strand; PAM type: NRG; PAM sequence: GGG
aaggaattctttatgtagat

SEQ ID NO: 185151 - DNA, 20 bp, Artificial Sequence
  Description of Artificial Sequence: Synthetic oligonucleotide
  Target: LAMA2; (+) strand; PAM type: NRG; PAM sequence: GGG
aggaattctttatgtagatg

SEQ ID NO: 185152 - DNA, 20 bp, Artificial Sequence
  Description of Artificial Sequence: Synthetic oligonucleotide
  Target: LAMA2; (+) strand; PAM type: NRG; PAM sequence: CAG
tatgtagatggggcttccaa

SEQ ID NO: 185153 - DNA, 20 bp, Artificial Sequence
  Description of Artificial Sequence: Synthetic oligonucleotide
  Target: LAMA2; (+) strand; PAM type: NRG; PAM sequence: CAG
ggggcttccaacagaaccat

SEQ ID NO: 185154 - DNA, 20 bp, Artificial Sequence
  Description of Artificial Sequence: Synthetic oligonucleotide
  Target: LAMA2; (+) strand; PAM type: NRG; PAM sequence: AAG
cagaaccatcagtcccaaaa

SEQ ID NO: 185155 - DNA, 20 bp, Artificial Sequence
  Description of Artificial Sequence: Synthetic oligonucleotide
  Target: LAMA2; (+) strand; PAM type: NRG; PAM sequence: TGG
tcccaaaaaagccgacatcc

SEQ ID NO: 185156 - DNA, 20 bp, Artificial Sequence
  Description of Artificial Sequence: Synthetic oligonucleotide
  Target: LAMA2; (+) strand; PAM type: NRG; PAM sequence: TGG
agccgacatcctggatgtcg

SEQ ID NO: 185157 - DNA, 20 bp, Artificial Sequence
  Description of Artificial Sequence: Synthetic oligonucleotide
  Target: LAMA2; (+) strand; PAM type: NRG; PAM sequence: GGG
gccgacatcctggatgtcgt

SEQ ID NO: 185158 - DNA, 20 bp, Artificial Sequence
  Description of Artificial Sequence: Synthetic oligonucleotide
  Target: LAMA2; (+) strand; PAM type: NRG; PAM sequence: TGG
gtcgtgggaatgctgtatgt

SEQ ID NO: 185159 - DNA, 20 bp, Artificial Sequence
  Description of Artificial Sequence: Synthetic oligonucleotide
  Target: LAMA2; (+) strand; PAM type: NRG; PAM sequence: TGG
gtgggaatgctgtatgttgg

SEQ ID NO: 185160 - DNA, 20 bp, Artificial Sequence
  Description of Artificial Sequence: Synthetic oligonucleotide
  Target: LAMA2; (+) strand; PAM type: NRG; PAM sequence: GGG
tgggaatgctgtatgttggt

SEQ ID NO: 185161 - DNA, 20 bp, Artificial Sequence
  Description of Artificial Sequence: Synthetic oligonucleotide
  Target: LAMA2; (+) strand; PAM type: NRG; PAM sequence: AAG
cccatcaactacactacccg

SEQ ID NO: 185162 - DNA, 20 bp, Artificial Sequence
  Description of Artificial Sequence: Synthetic oligonucleotide
  Target: LAMA2; (+) strand; PAM type: NRG; PAM sequence: TGG
aactacactacccgaagaat

SEQ ID NO: 185163 - DNA, 20 bp, Artificial Sequence
  Description of Artificial Sequence: Synthetic oligonucleotide
  Target: LAMA2; (+) strand; PAM type: NRG; PAM sequence: CAG
cactacccgaagaattggtc

SEQ ID NO: 185164 - DNA, 20 bp, Artificial Sequence
  Description of Artificial Sequence: Synthetic oligonucleotide
  Target: LAMA2; (+) strand; PAM type: NRG; PAM sequence: TGG
ttctttattacttaaatata

SEQ ID NO: 185165 - DNA, 20 bp, Artificial Sequence
  Description of Artificial Sequence: Synthetic oligonucleotide
  Target: LAMA2; (+) strand; PAM type: NRG; PAM sequence: TAG
attgatatattttgacttat

SEQ ID NO: 185166 - DNA, 20 bp, Artificial Sequence
  Description of Artificial Sequence: Synthetic oligonucleotide
  Target: LAMA2; (+) strand; PAM type: NRG; PAM sequence: AGG
ttgatatattttgacttatt

SEQ ID NO: 185167 - DNA, 20 bp, Artificial Sequence
  Description of Artificial Sequence: Synthetic oligonucleotide
  Target: LAMA2; (+) strand; PAM type: NRG; PAM sequence: TGG
ttttgacttattaggtcaca

SEQ ID NO: 185168 - DNA, 20 bp, Artificial Sequence
  Description of Artificial Sequence: Synthetic oligonucleotide
  Target: LAMA2; (+) strand; PAM type: NRG; PAM sequence: GGG
tttgacttattaggtcacat

SEQ ID NO: 185169 - DNA, 20 bp, Artificial Sequence
  Description of Artificial Sequence: Synthetic oligonucleotide
  Target: LAMA2; (+) strand; PAM type: NRG; PAM sequence: TAG
catgggcccatgaaaactga

SEQ ID NO: 185170 - DNA, 20 bp, Artificial Sequence
  Description of Artificial Sequence: Synthetic oligonucleotide
  Target: LAMA2; (+) strand; PAM type: NRG; PAM sequence: AGG
atgggcccatgaaaactgat

SEQ ID NO: 185171 - DNA, 20 bp, Artificial Sequence
  Description of Artificial Sequence: Synthetic oligonucleotide
  Target: LAMA2; (+) strand; PAM type: NRG; PAM sequence: TAG
catgaaaactgataggtgaa

SEQ ID NO: 185172 - DNA, 20 bp, Artificial Sequence
  Description of Artificial Sequence: Synthetic oligonucleotide
  Target: LAMA2; (+) strand; PAM type: NRG; PAM sequence: AGG
atgaaaactgataggtgaat

SEQ ID NO: 185173 - DNA, 20 bp, Artificial Sequence
  Description of Artificial Sequence: Synthetic oligonucleotide
  Target: LAMA2; (+) strand; PAM type: NRG; PAM sequence: AAG
aaaactgataggtgaatagg

SEQ ID NO: 185174 - DNA, 20 bp, Artificial Sequence
  Description of Artificial Sequence: Synthetic oligonucleotide
  Target: LAMA2; (+) strand; PAM type: NRG; PAM sequence: AAG
aggaagtcatcttttctgat

SEQ ID NO: 185175 - DNA, 20 bp, Artificial Sequence
  Description of Artificial Sequence: Synthetic oligonucleotide
  Target: LAMA2; (+) strand; PAM type: NRG; PAM sequence: AGG
ggaagtcatcttttctgata

SEQ ID NO: 185176 - DNA, 20 bp, Artificial Sequence
  Description of Artificial Sequence: Synthetic oligonucleotide
  Target: LAMA2; (+) strand; PAM type: NRG; PAM sequence: GGG
gaagtcatcttttctgataa

SEQ ID NO: 185177 - DNA, 20 bp, Artificial Sequence
  Description of Artificial Sequence: Synthetic oligonucleotide
  Target: LAMA2; (+) strand; PAM type: NRG; PAM sequence: CAG
tcatcttttctgataaggga

SEQ ID NO: 185178 - DNA, 20 bp, Artificial Sequence
  Description of Artificial Sequence: Synthetic oligonucleotide
  Target: LAMA2; (+) strand; PAM type: NRG; PAM sequence: AAG
tcttttctgataagggacag

SEQ ID NO: 185179 - DNA, 20 bp, Artificial Sequence
  Description of Artificial Sequence: Synthetic oligonucleotide
  Target: LAMA2; (+) strand; PAM type: NRG; PAM sequence: AGG
cttttctgataagggacaga

SEQ ID NO: 185180 - DNA, 20 bp, Artificial Sequence
  Description of Artificial Sequence: Synthetic oligonucleotide
  Target: LAMA2; (+) strand; PAM type: NRG; PAM sequence: GGG
ttttctgataagggacagaa

SEQ ID NO: 185181 - DNA, 20 bp, Artificial Sequence
  Description of Artificial Sequence: Synthetic oligonucleotide
  Target: LAMA2; (+) strand; PAM type: NRG; PAM sequence: GAG
tttgtttgtttgtttgtttt

SEQ ID NO: 185182 - DNA, 20 bp, Artificial Sequence
  Description of Artificial Sequence: Synthetic oligonucleotide
  Target: LAMA2; (+) strand; PAM type: NRG; PAM sequence: CAG
tttgtttgtttgttttgaga

SEQ ID NO: 185183 - DNA, 20 bp, Artificial Sequence
  Description of Artificial Sequence: Synthetic oligonucleotide
  Target: LAMA2; (+) strand; PAM type: NRG; PAM sequence: GAG
tgtttgtttgttttgagaca

SEQ ID NO: 185184 - DNA, 20 bp, Artificial Sequence
  Description of Artificial Sequence: Synthetic oligonucleotide
  Target: LAMA2; (+) strand; PAM type: NRG; PAM sequence: CAG
cagagtctcgctctgtcgcc

SEQ ID NO: 185185 - DNA, 20 bp, Artificial Sequence
  Description of Artificial Sequence: Synthetic oligonucleotide
  Target: LAMA2; (+) strand; PAM type: NRG; PAM sequence: AGG
agagtctcgctctgtcgccc

SEQ ID NO: 185186 - DNA, 20 bp, Artificial Sequence
  Description of Artificial Sequence: Synthetic oligonucleotide
  Target: LAMA2; (+) strand; PAM type: NRG; PAM sequence: TGG
tctcgctctgtcgcccaggc

SEQ ID NO: 185187 - DNA, 20 bp, Artificial Sequence
  Description of Artificial Sequence: Synthetic oligonucleotide
  Target: LAMA2; (+) strand; PAM type: NRG; PAM sequence: GAG
tcgctctgtcgcccaggctg

SEQ ID NO: 185188 - DNA, 20 bp, Artificial Sequence
  Description of Artificial Sequence: Synthetic oligonucleotide
  Target: LAMA2; (+) strand; PAM type: NRG; PAM sequence: CAG
ctgtcgcccaggctggagtg

SEQ ID NO: 185189 - DNA, 20 bp, Artificial Sequence
  Description of Artificial Sequence: Synthetic oligonucleotide
  Target: LAMA2; (+) strand; PAM type: NRG; PAM sequence: TGG
tcgcccaggctggagtgcag

SEQ ID NO: 185190 - DNA, 20 bp, Artificial Sequence
  Description of Artificial Sequence: Synthetic oligonucleotide
  Target: LAMA2; (+) strand; PAM type: NRG; PAM sequence: TGG
ggagtgcagtggtgcgatct

SEQ ID NO: 185191 - DNA, 20 bp, Artificial Sequence
  Description of Artificial Sequence: Synthetic oligonucleotide
  Target: LAMA2; (+) strand; PAM type: NRG; PAM sequence: AAG
gtgcgatcttggctcactgc

SEQ ID NO: 185192 - DNA, 20 bp, Artificial Sequence
  Description of Artificial Sequence: Synthetic oligonucleotide
  Target: LAMA2; (+) strand; PAM type: NRG; PAM sequence: CGG
tcactgcaagctctccctcc

SEQ ID NO: 185193 - DNA, 20 bp, Artificial Sequence
  Description of Artificial Sequence: Synthetic oligonucleotide
  Target: LAMA2; (+) strand; PAM type: NRG; PAM sequence: GGG
cactgcaagctctccctccc

SEQ ID NO: 185194 - DNA, 20 bp, Artificial Sequence
  Description of Artificial Sequence: Synthetic oligonucleotide
  Target: LAMA2; (+) strand; PAM type: NRG; PAM sequence: CAG
ttcacgccattctcctgcct

SEQ ID NO: 185195 - DNA, 20 bp, Artificial Sequence
  Description of Artificial Sequence: Synthetic oligonucleotide
  Target: LAMA2; (+) strand; PAM type: NRG; PAM sequence: TAG
ttctcctgcctcagcctccc

SEQ ID NO: 185196 - DNA, 20 bp, Artificial Sequence
  Description of Artificial Sequence: Synthetic oligonucleotide
  Target: LAMA2; (+) strand; PAM type: NRG; PAM sequence: TAG
tcctgcctcagcctccctag

SEQ ID NO: 185197 - DNA, 20 bp, Artificial Sequence
  Description of Artificial Sequence: Synthetic oligonucleotide
  Target: LAMA2; (+) strand; PAM type: NRG; PAM sequence: TGG
gcctcagcctccctagtagc

SEQ ID NO: 185198 - DNA, 20 bp, Artificial Sequence
  Description of Artificial Sequence: Synthetic oligonucleotide
  Target: LAMA2; (+) strand; PAM type: NRG; PAM sequence: GGG
cctcagcctccctagtagct

SEQ ID NO: 185199 - DNA, 20 bp, Artificial Sequence
  Description of Artificial Sequence: Synthetic oligonucleotide
  Target: LAMA2; (+) strand; PAM type: NRG; PAM sequence: CAG
ctccctagtagctgggacta

SEQ ID NO: 185200 - DNA, 20 bp, Artificial Sequence
  Description of Artificial Sequence: Synthetic oligonucleotide
  Target: LAMA2; (+) strand; PAM type: NRG; PAM sequence: AGG
tccctagtagctgggactac

SEQ ID NO: 185201 - DNA, 20 bp, Artificial Sequence
  Description of Artificial Sequence: Synthetic oligonucleotide
  Target: LAMA2; (+) strand; PAM type: NRG; PAM sequence: TGG
caggtgcctaccaccacgcc

SEQ ID NO: 185202 - DNA, 20 bp, Artificial Sequence
  Description of Artificial Sequence: Synthetic oligonucleotide
  Target: LAMA2; (+) strand; PAM type: NRG; PAM sequence: TAG
ctaattttttgtacttttaa

SEQ ID NO: 185203 - DNA, 20 bp, Artificial Sequence
  Description of Artificial Sequence: Synthetic oligonucleotide
  Target: LAMA2; (+) strand; PAM type: NRG; PAM sequence: GAG
aattttttgtacttttaata

SEQ ID NO: 185204 - DNA, 20 bp, Artificial Sequence
  Description of Artificial Sequence: Synthetic oligonucleotide
  Target: LAMA2; (+) strand; PAM type: NRG; PAM sequence: CGG
ttttgtacttttaatagaga

SEQ ID NO: 185205 - DNA, 20 bp, Artificial Sequence
  Description of Artificial Sequence: Synthetic oligonucleotide
  Target: LAMA2; (+) strand; PAM type: NRG; PAM sequence: GGG
tttgtacttttaatagagac

SEQ ID NO: 185206 - DNA, 20 bp, Artificial Sequence
  Description of Artificial Sequence: Synthetic oligonucleotide
  Target: LAMA2; (+) strand; PAM type: NRG; PAM sequence: GGG
ttgtacttttaatagagacg

SEQ ID NO: 185207 - DNA, 20 bp, Artificial Sequence
  Description of Artificial Sequence: Synthetic oligonucleotide
  Target: LAMA2; (+) strand; PAM type: NRG; PAM sequence: TAG
gagacggggtgtacttttaa

SEQ ID NO: 185208 - DNA, 20 bp, Artificial Sequence
  Description of Artificial Sequence: Synthetic oligonucleotide
  Target: LAMA2; (+) strand; PAM type: NRG; PAM sequence: GAG
gacggggtgtacttttaata

SEQ ID NO: 185209 - DNA, 20 bp, Artificial Sequence
  Description of Artificial Sequence: Synthetic oligonucleotide
  Target: LAMA2; (+) strand; PAM type: NRG; PAM sequence: CGG
gggtgtacttttaatagaga

SEQ ID NO: 185210 - DNA, 20 bp, Artificial Sequence
  Description of Artificial Sequence: Synthetic oligonucleotide
  Target: LAMA2; (+) strand; PAM type: NRG; PAM sequence: GGG
ggtgtacttttaatagagac

SEQ ID NO: 185211 - DNA, 20 bp, Artificial Sequence
  Description of Artificial Sequence: Synthetic oligonucleotide
  Target: LAMA2; (+) strand; PAM type: NRG; PAM sequence: GGG
gtgtacttttaatagagacg

SEQ ID NO: 185212 - DNA, 20 bp, Artificial Sequence
  Description of Artificial Sequence: Synthetic oligonucleotide
  Target: LAMA2; (+) strand; PAM type: NRG; PAM sequence: GGG
tgtacttttaatagagacgg

SEQ ID NO: 185213 - DNA, 20 bp, Artificial Sequence
  Description of Artificial Sequence: Synthetic oligonucleotide
  Target: LAMA2; (+) strand; PAM type: NRG; PAM sequence: GGG
gtacttttaatagagacggg

SEQ ID NO: 185214 - DNA, 20 bp, Artificial Sequence
  Description of Artificial Sequence: Synthetic oligonucleotide
  Target: LAMA2; (+) strand; PAM type: NRG; PAM sequence: TAG
gacggggggtttcactgtgt

SEQ ID NO: 185215 - DNA, 20 bp, Artificial Sequence
  Description of Artificial Sequence: Synthetic oligonucleotide
  Target: LAMA2; (+) strand; PAM type: NRG; PAM sequence: CAG
gggggtttcactgtgttagc

SEQ ID NO: 185216 - DNA, 20 bp, Artificial Sequence
  Description of Artificial Sequence: Synthetic oligonucleotide
  Target: LAMA2; (+) strand; PAM type: NRG; PAM sequence: AGG
ggggtttcactgtgttagcc

SEQ ID NO: 185217 - DNA, 20 bp, Artificial Sequence
  Description of Artificial Sequence: Synthetic oligonucleotide
  Target: LAMA2; (+) strand; PAM type: NRG; PAM sequence: TGG
tttcactgtgttagccagga

SEQ ID NO: 185218 - DNA, 20 bp, Artificial Sequence
  Description of Artificial Sequence: Synthetic oligonucleotide
  Target: LAMA2; (+) strand; PAM type: NRG; PAM sequence: CGG
acctcatgatccgcctgcct

SEQ ID NO: 185219 - DNA, 20 bp, Artificial Sequence
  Description of Artificial Sequence: Synthetic oligonucleotide
  Target: LAMA2; (+) strand; PAM type: NRG; PAM sequence: AAG
ccgcctgcctcggcctccca

SEQ ID NO: 185220 - DNA, 20 bp, Artificial Sequence
  Description of Artificial Sequence: Synthetic oligonucleotide
  Target: LAMA2; (+) strand; PAM type: NRG; PAM sequence: TGG
gcctcggcctcccaaagtgc

SEQ ID NO: 185221 - DNA, 20 bp, Artificial Sequence
  Description of Artificial Sequence: Synthetic oligonucleotide
  Target: LAMA2; (+) strand; PAM type: NRG; PAM sequence: GGG
cctcggcctcccaaagtgct

SEQ ID NO: 185222 - DNA, 20 bp, Artificial Sequence
  Description of Artificial Sequence: Synthetic oligonucleotide
  Target: LAMA2; (+) strand; PAM type: NRG; PAM sequence: CAG
ctcccaaagtgctgggatta

SEQ ID NO: 185223 - DNA, 20 bp, Artificial Sequence
  Description of Artificial Sequence: Synthetic oligonucleotide
  Target: LAMA2; (+) strand; PAM type: NRG; PAM sequence: AGG
tcccaaagtgctgggattac

SEQ ID NO: 185224 - DNA, 20 bp, Artificial Sequence
  Description of Artificial Sequence: Synthetic oligonucleotide
  Target: LAMA2; (+) strand; PAM type: NRG; PAM sequence: GAG
agtgctgggattacaggcct

SEQ ID NO: 185225 - DNA, 20 bp, Artificial Sequence
  Description of Artificial Sequence: Synthetic oligonucleotide
  Target: LAMA2; (+) strand; PAM type: NRG; PAM sequence: CAG
caggcctgagccacctcgcc

SEQ ID NO: 185226 - DNA, 20 bp, Artificial Sequence
  Description of Artificial Sequence: Synthetic oligonucleotide
  Target: LAMA2; (+) strand; PAM type: NRG; PAM sequence: CAG
gagccacctcgcccagctga

SEQ ID NO: 185227 - DNA, 20 bp, Artificial Sequence
  Description of Artificial Sequence: Synthetic oligonucleotide
  Target: LAMA2; (+) strand; PAM type: NRG; PAM sequence: AAG
ccacctcgcccagctgacag

SEQ ID NO: 185228 - DNA, 20 bp, Artificial Sequence
  Description of Artificial Sequence: Synthetic oligonucleotide
  Target: LAMA2; (+) strand; PAM type: NRG; PAM sequence: AGG
cacctcgcccagctgacaga

SEQ ID NO: 185229 - DNA, 20 bp, Artificial Sequence
  Description of Artificial Sequence: Synthetic oligonucleotide
  Target: LAMA2; (+) strand; PAM type: NRG; PAM sequence: TAG
ccagctgacagaaggttttt

SEQ ID NO: 185230 - DNA, 20 bp, Artificial Sequence
  Description of Artificial Sequence: Synthetic oligonucleotide
  Target: LAMA2; (+) strand; PAM type: NRG; PAM sequence: TAG
ctgacagaaggttttttaga

SEQ ID NO: 185231 - DNA, 20 bp, Artificial Sequence
  Description of Artificial Sequence: Synthetic oligonucleotide
  Target: LAMA2; (+) strand; PAM type: NRG; PAM sequence: TAG
agaaggttttttagatagat

SEQ ID NO: 185232 - DNA, 20 bp, Artificial Sequence
  Description of Artificial Sequence: Synthetic oligonucleotide
  Target: LAMA2; (+) strand; PAM type: NRG; PAM sequence: GAG
ttttagatagattagattat

SEQ ID NO: 185233 - DNA, 20 bp, Artificial Sequence
  Description of Artificial Sequence: Synthetic oligonucleotide
  Target: LAMA2; (+) strand; PAM type: NRG; PAM sequence: GAG
ttagatagattagattatga

SEQ ID NO: 185234 - DNA, 20 bp, Artificial Sequence
  Description of Artificial Sequence: Synthetic oligonucleotide
  Target: LAMA2; (+) strand; PAM type: NRG; PAM sequence: CGG
gattatgagagacaatgcca

SEQ ID NO: 185235 - DNA, 20 bp, Artificial Sequence
  Description of Artificial Sequence: Synthetic oligonucleotide
  Target: LAMA2; (+) strand; PAM type: NRG; PAM sequence: GAG
agacaatgccacggaacact

SEQ ID NO: 185236 - DNA, 20 bp, Artificial Sequence
  Description of Artificial Sequence: Synthetic oligonucleotide
  Target: LAMA2; (+) strand; PAM type: NRG; PAM sequence: TGG
caatgccacggaacactgag

SEQ ID NO: 185237 - DNA, 20 bp, Artificial Sequence
  Description of Artificial Sequence: Synthetic oligonucleotide
  Target: LAMA2; (+) strand; PAM type: NRG; PAM sequence: GGG
aatgccacggaacactgagt

SEQ ID NO: 185238 - DNA, 20 bp, Artificial Sequence
  Description of Artificial Sequence: Synthetic oligonucleotide
  Target: LAMA2; (+) strand; PAM type: NRG; PAM sequence: GGG
atgccacggaacactgagtg

SEQ ID NO: 185239 - DNA, 20 bp, Artificial Sequence
  Description of Artificial Sequence: Synthetic oligonucleotide
  Target: LAMA2; (+) strand; PAM type: NRG; PAM sequence: TGG
ggaacactgagtggggaacc

SEQ ID NO: 185240 - DNA, 20 bp, Artificial Sequence
  Description of Artificial Sequence: Synthetic oligonucleotide
  Target: LAMA2; (+) strand; PAM type: NRG; PAM sequence: GAG
aacactgagtggggaacctg

SEQ ID NO: 185241 - DNA, 20 bp, Artificial Sequence
  Description of Artificial Sequence: Synthetic oligonucleotide
  Target: LAMA2; (+) strand; PAM type: NRG; PAM sequence: TGG
aacctggagccaaactgtct

SEQ ID NO: 185242 - DNA, 20 bp, Artificial Sequence
  Description of Artificial Sequence: Synthetic oligonucleotide
  Target: LAMA2; (+) strand; PAM type: NRG; PAM sequence: TAG
atacctatttaactattgac

SEQ ID NO: 185243 - DNA, 20 bp, Artificial Sequence
  Description of Artificial Sequence: Synthetic oligonucleotide
  Target: LAMA2; (+) strand; PAM type: NRG; PAM sequence: TGG
tattgactagctgtgtgttt

SEQ ID NO: 185244 - DNA, 20 bp, Artificial Sequence
  Description of Artificial Sequence: Synthetic oligonucleotide
  Target: LAMA2; (+) strand; PAM type: NRG; PAM sequence: GAG
ttgactagctgtgtgttttg

SEQ ID NO: 185245 - DNA, 20 bp, Artificial Sequence
  Description of Artificial Sequence: Synthetic oligonucleotide
  Target: LAMA2; (+) strand; PAM type: NRG; PAM sequence: AAG
ctagctgtgtgttttggagc

SEQ ID NO: 185246 - DNA, 20 bp, Artificial Sequence
  Description of Artificial Sequence: Synthetic oligonucleotide
  Target: LAMA2; (+) strand; PAM type: NRG; PAM sequence: AAG
caagttaatcttttttaaca

SEQ ID NO: 185247 - DNA, 20 bp, Artificial Sequence
  Description of Artificial Sequence: Synthetic oligonucleotide
  Target: LAMA2; (+) strand; PAM type: NRG; PAM sequence: CAG
aagatttctcttttgcaaaa

SEQ ID NO: 185248 - DNA, 20 bp, Artificial Sequence
  Description of Artificial Sequence: Synthetic oligonucleotide
  Target: LAMA2; (+) strand; PAM type: NRG; PAM sequence: AGG
agatttctcttttgcaaaac

SEQ ID NO: 185249 - DNA, 20 bp, Artificial Sequence
  Description of Artificial Sequence: Synthetic oligonucleotide
  Target: LAMA2; (+) strand; PAM type: NRG; PAM sequence: GGG
gatttctcttttgcaaaaca

SEQ ID NO: 185250 - DNA, 20 bp, Artificial Sequence
  Description of Artificial Sequence: Synthetic oligonucleotide
  Target: LAMA2; (+) strand; PAM type: NRG; PAM sequence: AAG
taatgataatactaaacaaa

SEQ ID NO: 185251 - DNA, 20 bp, Artificial Sequence
  Description of Artificial Sequence: Synthetic oligonucleotide
  Target: LAMA2; (+) strand; PAM type: NRG; PAM sequence: AGG
aatgataatactaaacaaaa

SEQ ID NO: 185252 - DNA, 20 bp, Artificial Sequence
  Description of Artificial Sequence: Synthetic oligonucleotide
  Target: LAMA2; (+) strand; PAM type: NRG; PAM sequence: AAG
taaacaaaaaggattgcata

SEQ ID NO: 185253 - DNA, 20 bp, Artificial Sequence
  Description of Artificial Sequence: Synthetic oligonucleotide
  Target: LAMA2; (+) strand; PAM type: NRG; PAM sequence: GAG
ggattgcataaagattaaat

SEQ ID NO: 185254 - DNA, 20 bp, Artificial Sequence
  Description of Artificial Sequence: Synthetic oligonucleotide
  Target: LAMA2; (+) strand; PAM type: NRG; PAM sequence: AGG
gattgcataaagattaaatg

SEQ ID NO: 185255 - DNA, 20 bp, Artificial Sequence
  Description of Artificial Sequence: Synthetic oligonucleotide
  Target: LAMA2; (+) strand; PAM type: NRG; PAM sequence: AAG
taaatgaggtaatttattta

SEQ ID NO: 185256 - DNA, 20 bp, Artificial Sequence
  Description of Artificial Sequence: Synthetic oligonucleotide
  Target: LAMA2; (+) strand; PAM type: NRG; PAM sequence: TGG
ggtaatttatttaaagtgat

SEQ ID NO: 185257 - DNA, 20 bp, Artificial Sequence
  Description of Artificial Sequence: Synthetic oligonucleotide
  Target: LAMA2; (+) strand; PAM type: NRG; PAM sequence: GGG
gtaatttatttaaagtgatt

SEQ ID NO: 185258 - DNA, 20 bp, Artificial Sequence
  Description of Artificial Sequence: Synthetic oligonucleotide
  Target: LAMA2; (+) strand; PAM type: NRG; PAM sequence: TGG
tttatttaaagtgattgggt

SEQ ID NO: 185259 - DNA, 20 bp, Artificial Sequence
  Description of Artificial Sequence: Synthetic oligonucleotide
  Target: LAMA2; (+) strand; PAM type: NRG; PAM sequence: GGG
ttatttaaagtgattgggtt

SEQ ID NO: 185260 - DNA, 20 bp, Artificial Sequence
  Description of Artificial Sequence: Synthetic oligonucleotide
  Target: LAMA2; (+) strand; PAM type: NRG; PAM sequence: TGG
taaagtgattgggttgggca

SEQ ID NO: 185261 - DNA, 20 bp, Artificial Sequence
  Description of Artificial Sequence: Synthetic oligonucleotide
  Target: LAMA2; (+) strand; PAM type: NRG; PAM sequence: TGG
agtgattgggttgggcatgg

SEQ ID NO: 185262 - DNA, 20 bp, Artificial Sequence
  Description of Artificial Sequence: Synthetic oligonucleotide
  Target: LAMA2; (+) strand; PAM type: NRG; PAM sequence: CAG
gtggctcacacctgtaatcc

SEQ ID NO: 185263 - DNA, 20 bp, Artificial Sequence
  Description of Artificial Sequence: Synthetic oligonucleotide
  Target: LAMA2; (+) strand; PAM type: NRG; PAM sequence: TGG
cacctgtaatcccagcactt

SEQ ID NO: 185264 - DNA, 20 bp, Artificial Sequence
  Description of Artificial Sequence: Synthetic oligonucleotide
  Target: LAMA2; (+) strand; PAM type: NRG; PAM sequence: GGG
acctgtaatcccagcacttt

SEQ ID NO: 185265 - DNA, 20 bp, Artificial Sequence
  Description of Artificial Sequence: Synthetic oligonucleotide
  Target: LAMA2; (+) strand; PAM type: NRG; PAM sequence: GAG
ctgtaatcccagcactttgg

SEQ ID NO: 185266 - DNA, 20 bp, Artificial Sequence
  Description of Artificial Sequence: Synthetic oligonucleotide
  Target: LAMA2; (+) strand; PAM type: NRG; PAM sequence: AGG
tgtaatcccagcactttggg

SEQ ID NO: 185267 - DNA, 20 bp, Artificial Sequence
  Description of Artificial Sequence: Synthetic oligonucleotide
  Target: LAMA2; (+) strand; PAM type: NRG; PAM sequence: AAG
tcccagcactttgggaggcc

SEQ ID NO: 185268 - DNA, 20 bp, Artificial Sequence
  Description of Artificial Sequence: Synthetic oligonucleotide
  Target: LAMA2; (+) strand; PAM type: NRG; PAM sequence: AGG
cccagcactttgggaggcca

SEQ ID NO: 185269 - DNA, 20 bp, Artificial Sequence
  Description of Artificial Sequence: Synthetic oligonucleotide
  Target: LAMA2; (+) strand; PAM type: NRG; PAM sequence: CAG
agcactttgggaggccaagg

SEQ ID NO: 185270 - DNA, 20 bp, Artificial Sequence
  Description of Artificial Sequence: Synthetic oligonucleotide
  Target: LAMA2; (+) strand; PAM type: NRG; PAM sequence: AGG
gcactttgggaggccaaggc

SEQ ID NO: 185271 - DNA, 20 bp, Artificial Sequence
  Description of Artificial Sequence: Synthetic oligonucleotide
  Target: LAMA2; (+) strand; PAM type: NRG; PAM sequence: CAG
ctttgggaggccaaggcagg

SEQ ID NO: 185272 - DNA, 20 bp, Artificial Sequence
  Description of Artificial Sequence: Synthetic oligonucleotide
  Target: LAMA2; (+) strand; PAM type: NRG; PAM sequence: GAG
ccaaggcaggcagatcactt

SEQ ID NO: 185273 - DNA, 20 bp, Artificial Sequence
  Description of Artificial Sequence: Synthetic oligonucleotide
  Target: LAMA2; (+) strand; PAM type: NRG; PAM sequence: CAG
gcaggcagatcacttgagac

SEQ ID NO: 185274 - DNA, 20 bp, Artificial Sequence
  Description of Artificial Sequence: Synthetic oligonucleotide
  Target: LAMA2; (+) strand; PAM type: NRG; PAM sequence: AGG
caggcagatcacttgagacc

SEQ ID NO: 185275 - DNA, 20 bp, Artificial Sequence
  Description of Artificial Sequence: Synthetic oligonucleotide
  Target: LAMA2; (+) strand; PAM type: NRG; PAM sequence: GAG
ggcagatcacttgagaccag

SEQ ID NO: 185276 - DNA, 20 bp, Artificial Sequence
  Description of Artificial Sequence: Synthetic oligonucleotide
  Target: LAMA2; (+) strand; PAM type: NRG; PAM sequence: AAG
tcacttgagaccaggagttc

SEQ ID NO: 185277 - DNA, 20 bp, Artificial Sequence
  Description of Artificial Sequence: Synthetic oligonucleotide
  Target: LAMA2; (+) strand; PAM type: NRG; PAM sequence: GAG
tgagaccaggagttcaagat

SEQ ID NO: 185278 - DNA, 20 bp, Artificial Sequence
  Description of Artificial Sequence: Synthetic oligonucleotide
  Target: LAMA2; (+) strand; PAM type: NRG; PAM sequence: TGG
ccaggagttcaagatgagcc

SEQ ID NO: 185279 - DNA, 20 bp, Artificial Sequence
  Description of Artificial Sequence: Synthetic oligonucleotide
  Target: LAMA2; (+) strand; PAM type: NRG; PAM sequence: TAG
caagatgagcctggccatca

SEQ ID NO: 185280 - DNA, 20 bp, Artificial Sequence
  Description of Artificial Sequence: Synthetic oligonucleotide
  Target: LAMA2; (+) strand; PAM type: NRG; PAM sequence: AAG
tgtctctacaaaaatacaaa

SEQ ID NO: 185281 - DNA, 20 bp, Artificial Sequence
  Description of Artificial Sequence: Synthetic oligonucleotide
  Target: LAMA2; (+) strand; PAM type: NRG; PAM sequence: TAG
tctacaaaaatacaaaaagt

SEQ ID NO: 185282 - DNA, 20 bp, Artificial Sequence
  Description of Artificial Sequence: Synthetic oligonucleotide
  Target: LAMA2; (+) strand; PAM type: NRG; PAM sequence: CAG
caaaaatacaaaaagttagc

SEQ ID NO: 185283 - DNA, 20 bp, Artificial Sequence
  Description of Artificial Sequence: Synthetic oligonucleotide
  Target: LAMA2; (+) strand; PAM type: NRG; PAM sequence: AGG
aaaaatacaaaaagttagcc

SEQ ID NO: 185284 - DNA, 20 bp, Artificial Sequence
  Description of Artificial Sequence: Synthetic oligonucleotide
  Target: LAMA2; (+) strand; PAM type: NRG; PAM sequence: TGG
tacaaaaagttagccaggtg

SEQ ID NO: 185285 - DNA, 20 bp, Artificial Sequence
  Description of Artificial Sequence: Synthetic oligonucleotide
  Target: LAMA2; (+) strand; PAM type: NRG; PAM sequence: TGG
aaaaagttagccaggtgtgg

SEQ ID NO: 185286 - DNA, 20 bp, Artificial Sequence
  Description of Artificial Sequence: Synthetic oligonucleotide
  Target: LAMA2; (+) strand; PAM type: NRG; PAM sequence: TAG
ggtgtggtggtgtgtgtctg

SEQ ID NO: 185287 - DNA, 20 bp, Artificial Sequence
  Description of Artificial Sequence: Synthetic oligonucleotide
  Target: LAMA2; (+) strand; PAM type: NRG; PAM sequence: CAG
gtggtgtgtgtctgtagtcc

SEQ ID NO: 185288 - DNA, 20 bp, Artificial Sequence
  Description of Artificial Sequence: Synthetic oligonucleotide
  Target: LAMA2; (+) strand; PAM type: NRG; PAM sequence: TGG
gtctgtagtcccagctactt

SEQ ID NO: 185289 - DNA, 20 bp, Artificial Sequence
  Description of Artificial Sequence: Synthetic oligonucleotide
  Target: LAMA2; (+) strand; PAM type: NRG; PAM sequence: GAG
ctgtagtcccagctactttg

SEQ ID NO: 185290 - DNA, 20 bp, Artificial Sequence
  Description of Artificial Sequence: Synthetic oligonucleotide
  Target: LAMA2; (+) strand; PAM type: NRG; PAM sequence: AGG
tgtagtcccagctactttgg

SEQ ID NO: 185291 - DNA, 20 bp, Artificial Sequence
  Description of Artificial Sequence: Synthetic oligonucleotide
  Target: LAMA2; (+) strand; PAM type: NRG; PAM sequence: GAG
tcccagctactttggaggct

SEQ ID NO: 185292 - DNA, 20 bp, Artificial Sequence
  Description of Artificial Sequence: Synthetic oligonucleotide
  Target: LAMA2; (+) strand; PAM type: NRG; PAM sequence: AGG
cccagctactttggaggctg

SEQ ID NO: 185293 - DNA, 20 bp, Artificial Sequence
  Description of Artificial Sequence: Synthetic oligonucleotide
  Target: LAMA2; (+) strand; PAM type: NRG; PAM sequence: AAG
gctactttggaggctgaggc

SEQ ID NO: 185294 - DNA, 20 bp, Artificial Sequence
  Description of Artificial Sequence: Synthetic oligonucleotide
  Target: LAMA2; (+) strand; PAM type: NRG; PAM sequence: GAG
tactttggaggctgaggcaa

SEQ ID NO: 185295 - DNA, 20 bp, Artificial Sequence
  Description of Artificial Sequence: Synthetic oligonucleotide
  Target: LAMA2; (+) strand; PAM type: NRG; PAM sequence: GAG
caagagaatcacttgaaccc

SEQ ID NO: 185296 - DNA, 20 bp, Artificial Sequence
  Description of Artificial Sequence: Synthetic oligonucleotide
  Target: LAMA2; (+) strand; PAM type: NRG; PAM sequence: AGG
aagagaatcacttgaacccg

SEQ ID NO: 185297 - DNA, 20 bp, Artificial Sequence
  Description of Artificial Sequence: Synthetic oligonucleotide
  Target: LAMA2; (+) strand; PAM type: NRG; PAM sequence: GGG
agagaatcacttgaacccga

SEQ ID NO: 185298 - DNA, 20 bp, Artificial Sequence
  Description of Artificial Sequence: Synthetic oligonucleotide
  Target: LAMA2; (+) strand; PAM type: NRG; PAM sequence: CAG
aatcacttgaacccgagggt

SEQ ID NO: 185299 - DNA, 20 bp, Artificial Sequence
  Description of Artificial Sequence: Synthetic oligonucleotide
  Target: LAMA2; (+) strand; PAM type: NRG; PAM sequence: GAG
tcacttgaacccgagggtca

SEQ ID NO: 185300 - DNA, 20 bp, Artificial Sequence
  Description of Artificial Sequence: Synthetic oligonucleotide
  Target: LAMA2; (+) strand; PAM type: NRG; PAM sequence: AGG
cacttgaacccgagggtcag

SEQ ID NO: 185301 - DNA, 20 bp, Artificial Sequence
  Description of Artificial Sequence: Synthetic oligonucleotide
  Target: LAMA2; (+) strand; PAM type: NRG; PAM sequence: CAG
aacccgagggtcagaggttg

SEQ ID NO: 185302 - DNA, 20 bp, Artificial Sequence
  Description of Artificial Sequence: Synthetic oligonucleotide
  Target: LAMA2; (+) strand; PAM type: NRG; PAM sequence: GAG
cgagggtcagaggttgcagt

SEQ ID NO: 185303 - DNA, 20 bp, Artificial Sequence
  Description of Artificial Sequence: Synthetic oligonucleotide
  Target: LAMA2; (+) strand; PAM type: NRG; PAM sequence: TAG
gaggttgcagtgagctgtaa

SEQ ID NO: 185304 - DNA, 20 bp, Artificial Sequence
  Description of Artificial Sequence: Synthetic oligonucleotide
  Target: LAMA2; (+) strand; PAM type: NRG; PAM sequence: CAG
gtaatagcaccactgcattc

SEQ ID NO: 185305 - DNA, 20 bp, Artificial Sequence
  Description of Artificial Sequence: Synthetic oligonucleotide
  Target: LAMA2; (+) strand; PAM type: NRG; PAM sequence: TGG
agcaccactgcattccagcc

SEQ ID NO: 185306 - DNA, 20 bp, Artificial Sequence
  Description of Artificial Sequence: Synthetic oligonucleotide
  Target: LAMA2; (+) strand; PAM type: NRG; PAM sequence: GGG
gcaccactgcattccagcct

SEQ ID NO: 185307 - DNA, 20 bp, Artificial Sequence
  Description of Artificial Sequence: Synthetic oligonucleotide
  Target: LAMA2; (+) strand; PAM type: NRG; PAM sequence: CAG
ctgcattccagcctgggcaa

SEQ ID NO: 185308 - DNA, 20 bp, Artificial Sequence
  Description of Artificial Sequence: Synthetic oligonucleotide
  Target: LAMA2; (+) strand; PAM type: NRG; PAM sequence: GAG
gcattccagcctgggcaaca

SEQ ID NO: 185309 - DNA, 20 bp, Artificial Sequence
  Description of Artificial Sequence: Synthetic oligonucleotide
  Target: LAMA2; (+) strand; PAM type: NRG; PAM sequence: GAG
tccagcctgggcaacagagc

SEQ ID NO: 185310 - DNA, 20 bp, Artificial Sequence
  Description of Artificial Sequence: Synthetic oligonucleotide
  Target: LAMA2; (+) strand; PAM type: NRG; PAM sequence: AAG
aataaataaaaataaaaata

SEQ ID NO: 185311 - DNA, 20 bp, Artificial Sequence
  Description of Artificial Sequence: Synthetic oligonucleotide
  Target: LAMA2; (+) strand; PAM type: NRG; PAM sequence: TGG
aaaaataaaaataaagtgat

SEQ ID NO: 185312 - DNA, 20 bp, Artificial Sequence
  Description of Artificial Sequence: Synthetic oligonucleotide
  Target: LAMA2; (+) strand; PAM type: NRG; PAM sequence: AAG
aataaaaataaagtgattgg

SEQ ID NO: 185313 - DNA, 20 bp, Artificial Sequence
  Description of Artificial Sequence: Synthetic oligonucleotide
  Target: LAMA2; (+) strand; PAM type: NRG; PAM sequence: GAG
taaaaataaagtgattggaa

SEQ ID NO: 185314 - DNA, 20 bp, Artificial Sequence
  Description of Artificial Sequence: Synthetic oligonucleotide
  Target: LAMA2; (+) strand; PAM type: NRG; PAM sequence: TAG
aaataaagtgattggaagag

SEQ ID NO: 185315 - DNA, 20 bp, Artificial Sequence
  Description of Artificial Sequence: Synthetic oligonucleotide
  Target: LAMA2; (+) strand; PAM type: NRG; PAM sequence: CAG
taaagtgattggaagagtag

SEQ ID NO: 185316 - DNA, 20 bp, Artificial Sequence
  Description of Artificial Sequence: Synthetic oligonucleotide
  Target: LAMA2; (+) strand; PAM type: NRG; PAM sequence: AGG
aaagtgattggaagagtagc

SEQ ID NO: 185317 - DNA, 20 bp, Artificial Sequence
  Description of Artificial Sequence: Synthetic oligonucleotide
  Target: LAMA2; (+) strand; PAM type: NRG; PAM sequence: AAG
aagagtagcaggcatataaa

SEQ ID NO: 185318 - DNA, 20 bp, Artificial Sequence
  Description of Artificial Sequence: Synthetic oligonucleotide
  Target: LAMA2; (+) strand; PAM type: NRG; PAM sequence: AAG
aggcatataaaaagcactga

SEQ ID NO: 185319 - DNA, 20 bp, Artificial Sequence
  Description of Artificial Sequence: Synthetic oligonucleotide
  Target: LAMA2; (+) strand; PAM type: NRG; PAM sequence: TGG
gcactgaaagatgaaaatga

SEQ ID NO: 185320 - DNA, 20 bp, Artificial Sequence
  Description of Artificial Sequence: Synthetic oligonucleotide
  Target: LAMA2; (+) strand; PAM type: NRG; PAM sequence: TGG
aaaatgatggtatgtattca

SEQ ID NO: 185321 - DNA, 20 bp, Artificial Sequence
  Description of Artificial Sequence: Synthetic oligonucleotide
  Target: LAMA2; (+) strand; PAM type: NRG; PAM sequence: CAG
ggtatgtattcatggtgttt

SEQ ID NO: 185322 - DNA, 20 bp, Artificial Sequence
  Description of Artificial Sequence: Synthetic oligonucleotide
  Target: LAMA2; (+) strand; PAM type: NRG; PAM sequence: AGG
gtatgtattcatggtgtttc

SEQ ID NO: 185323 - DNA, 20 bp, Artificial Sequence
  Description of Artificial Sequence: Synthetic oligonucleotide
  Target: LAMA2; (+) strand; PAM type: NRG; PAM sequence: TAG
tattcatggtgtttcaggca

SEQ ID NO: 185324 - DNA, 20 bp, Artificial Sequence
  Description of Artificial Sequence: Synthetic oligonucleotide
  Target: LAMA2; (+) strand; PAM type: NRG; PAM sequence: GAG
ttcatggtgtttcaggcata

SEQ ID NO: 185325 - DNA, 20 bp, Artificial Sequence
  Description of Artificial Sequence: Synthetic oligonucleotide
  Target: LAMA2; (+) strand; PAM type: NRG; PAM sequence: TAG
gtgtttcaggcatagagatt

SEQ ID NO: 185326 - DNA, 20 bp, Artificial Sequence
  Description of Artificial Sequence: Synthetic oligonucleotide
  Target: LAMA2; (+) strand; PAM type: NRG; PAM sequence: GAG
atagagatttagcaaatatt

SEQ ID NO: 185327 - DNA, 20 bp, Artificial Sequence
  Description of Artificial Sequence: Synthetic oligonucleotide
  Target: LAMA2; (+) strand; PAM type: NRG; PAM sequence: GAG
agagatttagcaaatattga

SEQ ID NO: 185328 - DNA, 20 bp, Artificial Sequence
  Description of Artificial Sequence: Synthetic oligonucleotide
  Target: LAMA2; (+) strand; PAM type: NRG; PAM sequence: AGG
gagatttagcaaatattgag

SEQ ID NO: 185329 - DNA, 20 bp, Artificial Sequence
  Description of Artificial Sequence: Synthetic oligonucleotide
  Target: LAMA2; (+) strand; PAM type: NRG; PAM sequence: CAG
ttagcaaatattgagaggtg

SEQ ID NO: 185330 - DNA, 20 bp, Artificial Sequence
  Description of Artificial Sequence: Synthetic oligonucleotide
  Target: LAMA2; (+) strand; PAM type: NRG; PAM sequence: TAG
gcaaatattgagaggtgcag

SEQ ID NO: 185331 - DNA, 20 bp, Artificial Sequence
  Description of Artificial Sequence: Synthetic oligonucleotide
  Target: LAMA2; (+) strand; PAM type: NRG; PAM sequence: CAG
attgagaggtgcagtagtta

SEQ ID NO: 185332 - DNA, 20 bp, Artificial Sequence
  Description of Artificial Sequence: Synthetic oligonucleotide
  Target: LAMA2; (+) strand; PAM type: NRG; PAM sequence: CAG
gaggtgcagtagttacagta

SEQ ID NO: 185333 - DNA, 20 bp, Artificial Sequence
  Description of Artificial Sequence: Synthetic oligonucleotide
  Target: LAMA2; (+) strand; PAM type: NRG; PAM sequence: TGG
acagtacagttatccaattt

SEQ ID NO: 185334 - DNA, 20 bp, Artificial Sequence
  Description of Artificial Sequence: Synthetic oligonucleotide
  Target: LAMA2; (+) strand; PAM type: NRG; PAM sequence: CAG
cagttatccaattttggatt

SEQ ID NO: 185335 - DNA, 20 bp, Artificial Sequence
  Description of Artificial Sequence: Synthetic oligonucleotide
  Target: LAMA2; (+) strand; PAM type: NRG; PAM sequence: AAG
aattttggattcagaattta

SEQ ID NO: 185336 - DNA, 20 bp, Artificial Sequence
  Description of Artificial Sequence: Synthetic oligonucleotide
  Target: LAMA2; (+) strand; PAM type: NRG; PAM sequence: CAG
ttcagaatttaaagccctca

SEQ ID NO: 185337 - DNA, 20 bp, Artificial Sequence
  Description of Artificial Sequence: Synthetic oligonucleotide
  Target: LAMA2; (+) strand; PAM type: NRG; PAM sequence: TAG
ttcacaaaataattttttat

SEQ ID NO: 185338 - DNA, 20 bp, Artificial Sequence
  Description of Artificial Sequence: Synthetic oligonucleotide
  Target: LAMA2; (+) strand; PAM type: NRG; PAM sequence: TAG
ttttattagaccgtgtatcc

SEQ ID NO: 185339 - DNA, 20 bp, Artificial Sequence
  Description of Artificial Sequence: Synthetic oligonucleotide
  Target: LAMA2; (+) strand; PAM type: NRG; PAM sequence: TGG
ccgtgtatcctagtttgctt

SEQ ID NO: 185340 - DNA, 20 bp, Artificial Sequence
  Description of Artificial Sequence: Synthetic oligonucleotide
  Target: LAMA2; (+) strand; PAM type: NRG; PAM sequence: AAG
gtatcctagtttgctttgga

SEQ ID NO: 185341 - DNA, 20 bp, Artificial Sequence
  Description of Artificial Sequence: Synthetic oligonucleotide
  Target: LAMA2; (+) strand; PAM type: NRG; PAM sequence: GAG
gctttggaaagtgttactct

SEQ ID NO: 185342 - DNA, 20 bp, Artificial Sequence
  Description of Artificial Sequence: Synthetic oligonucleotide
  Target: LAMA2; (+) strand; PAM type: NRG; PAM sequence: GAG
tttggaaagtgttactctga

SEQ ID NO: 185343 - DNA, 20 bp, Artificial Sequence
  Description of Artificial Sequence: Synthetic oligonucleotide
  Target: LAMA2; (+) strand; PAM type: NRG; PAM sequence: AAG
ggaaagtgttactctgagag

SEQ ID NO: 185344 - DNA, 20 bp, Artificial Sequence
  Description of Artificial Sequence: Synthetic oligonucleotide
  Target: LAMA2; (+) strand; PAM type: NRG; PAM sequence: CGG
gtgttactctgagagaagca

SEQ ID NO: 185345 - DNA, 20 bp, Artificial Sequence
  Description of Artificial Sequence: Synthetic oligonucleotide
  Target: LAMA2; (+) strand; PAM type: NRG; PAM sequence: GGG
tgttactctgagagaagcac

SEQ ID NO: 185346 - DNA, 20 bp, Artificial Sequence
  Description of Artificial Sequence: Synthetic oligonucleotide
  Target: LAMA2; (+) strand; PAM type: NRG; PAM sequence: GGG
gttactctgagagaagcacg

SEQ ID NO: 185347 - DNA, 20 bp, Artificial Sequence
  Description of Artificial Sequence: Synthetic oligonucleotide
  Target: LAMA2; (+) strand; PAM type: NRG; PAM sequence: GGG
ttactctgagagaagcacgg

SEQ ID NO: 185348 - DNA, 20 bp, Artificial Sequence
  Description of Artificial Sequence: Synthetic oligonucleotide
  Target: LAMA2; (+) strand; PAM type: NRG; PAM sequence: TGG
gagaagcacgggggattgat

SEQ ID NO: 185349 - DNA, 20 bp, Artificial Sequence
  Description of Artificial Sequence: Synthetic oligonucleotide
  Target: LAMA2; (+) strand; PAM type: NRG; PAM sequence: TAG
gggggattgattggtgcttt

SEQ ID NO: 185350 - DNA, 20 bp, Artificial Sequence
  Description of Artificial Sequence: Synthetic oligonucleotide
  Target: LAMA2; (+) strand; PAM type: NRG; PAM sequence: GAG
gggattgattggtgctttta

SEQ ID NO: 185351 - DNA, 20 bp, Artificial Sequence
  Description of Artificial Sequence: Synthetic oligonucleotide
  Target: LAMA2; (+) strand; PAM type: NRG; PAM sequence: TAG
ggtgcttttagagaacacac

SEQ ID NO: 185352 - DNA, 20 bp, Artificial Sequence
  Description of Artificial Sequence: Synthetic oligonucleotide
  Target: LAMA2; (+) strand; PAM type: NRG; PAM sequence: TAG
atacatttctatactcaaat

SEQ ID NO: 185353 - DNA, 20 bp, Artificial Sequence
  Description of Artificial Sequence: Synthetic oligonucleotide
  Target: LAMA2; (+) strand; PAM type: NRG; PAM sequence: TAG
aattagaacacatgataatg

SEQ ID NO: 185354 - DNA, 20 bp, Artificial Sequence
  Description of Artificial Sequence: Synthetic oligonucleotide
  Target: LAMA2; (+) strand; PAM type: NRG; PAM sequence: AAG
gtagatttgttcattcatca

SEQ ID NO: 185355 - DNA, 20 bp, Artificial Sequence
  Description of Artificial Sequence: Synthetic oligonucleotide
  Target: LAMA2; (+) strand; PAM type: NRG; PAM sequence: TAG
tcaaagacaatcacccatta

SEQ ID NO: 185356 - DNA, 20 bp, Artificial Sequence
  Description of Artificial Sequence: Synthetic oligonucleotide
  Target: LAMA2; (+) strand; PAM type: NRG; PAM sequence: CAG
cccattatagttgtaattct

SEQ ID NO: 185357 - DNA, 20 bp, Artificial Sequence
  Description of Artificial Sequence: Synthetic oligonucleotide
  Target: LAMA2; (+) strand; PAM type: NRG; PAM sequence: TGG
tagttgtaattctcagtatt

SEQ ID NO: 185358 - DNA, 20 bp, Artificial Sequence
  Description of Artificial Sequence: Synthetic oligonucleotide
  Target: LAMA2; (+) strand; PAM type: NRG; PAM sequence: TGG
tcagtatttggcttctcttg

SEQ ID NO: 185359 - DNA, 20 bp, Artificial Sequence
  Description of Artificial Sequence: Synthetic oligonucleotide
  Target: LAMA2; (+) strand; PAM type: NRG; PAM sequence: CAG
tggcttctcttgtggatgat

SEQ ID NO: 185360 - DNA, 20 bp, Artificial Sequence
  Description of Artificial Sequence: Synthetic oligonucleotide
  Target: LAMA2; (+) strand; PAM type: NRG; PAM sequence: TAG
tcagtattacttttctttca

SEQ ID NO: 185361 - DNA, 20 bp, Artificial Sequence
  Description of Artificial Sequence: Synthetic oligonucleotide
  Target: LAMA2; (+) strand; PAM type: NRG; PAM sequence: AGG
cagtattacttttctttcat

SEQ ID NO: 185362 - DNA, 20 bp, Artificial Sequence
  Description of Artificial Sequence: Synthetic oligonucleotide
  Target: LAMA2; (+) strand; PAM type: NRG; PAM sequence: TGG
tacttttctttcataggtat

SEQ ID NO: 185363 - DNA, 20 bp, Artificial Sequence
  Description of Artificial Sequence: Synthetic oligonucleotide
  Target: LAMA2; (+) strand; PAM type: NRG; PAM sequence: TAG
taggtattggatatgctttt

SEQ ID NO: 185364 - DNA, 20 bp, Artificial Sequence
  Description of Artificial Sequence: Synthetic oligonucleotide
  Target: LAMA2; (+) strand; PAM type: NRG; PAM sequence: AGG
aggtattggatatgcttttt

SEQ ID NO: 185365 - DNA, 20 bp, Artificial Sequence
  Description of Artificial Sequence: Synthetic oligonucleotide
  Target: LAMA2; (+) strand; PAM type: NRG; PAM sequence: AAG
tttaggtctatcaaaaacta

SEQ ID NO: 185366 - DNA, 20 bp, Artificial Sequence
  Description of Artificial Sequence: Synthetic oligonucleotide
  Target: LAMA2; (+) strand; PAM type: NRG; PAM sequence: AAG
atcaaaaactaaagtctctg

SEQ ID NO: 185367 - DNA, 20 bp, Artificial Sequence
  Description of Artificial Sequence: Synthetic oligonucleotide
  Target: LAMA2; (+) strand; PAM type: NRG; PAM sequence: TGG
taaagtctctgaagtgacac

SEQ ID NO: 185368 - DNA, 20 bp, Artificial Sequence
  Description of Artificial Sequence: Synthetic oligonucleotide
  Target: LAMA2; (+) strand; PAM type: NRG; PAM sequence: AAG
ctctgaagtgacactggtac

SEQ ID NO: 185369 - DNA, 20 bp, Artificial Sequence
  Description of Artificial Sequence: Synthetic oligonucleotide
  Target: LAMA2; (+) strand; PAM type: NRG; PAM sequence: CAG
ttcacttgaatttctaaaaa

SEQ ID NO: 185370 - DNA, 20 bp, Artificial Sequence
  Description of Artificial Sequence: Synthetic oligonucleotide
  Target: LAMA2; (+) strand; PAM type: NRG; PAM sequence: TGG
taaaaacagataaaatataa

SEQ ID NO: 185371 - DNA, 20 bp, Artificial Sequence
  Description of Artificial Sequence: Synthetic oligonucleotide
  Target: LAMA2; (+) strand; PAM type: NRG; PAM sequence: CAG
acagataaaatataatggac

SEQ ID NO: 185372 - DNA, 20 bp, Artificial Sequence
  Description of Artificial Sequence: Synthetic oligonucleotide
  Target: LAMA2; (+) strand; PAM type: NRG; PAM sequence: GAG
agataaaatataatggacca

SEQ ID NO: 185373 - DNA, 20 bp, Artificial Sequence
  Description of Artificial Sequence: Synthetic oligonucleotide
  Target: LAMA2; (+) strand; PAM type: NRG; PAM sequence: GAG
taatggaccagagtgtgatt

SEQ ID NO: 185374 - DNA, 20 bp, Artificial Sequence
  Description of Artificial Sequence: Synthetic oligonucleotide
  Target: LAMA2; (+) strand; PAM type: NRG; PAM sequence: AAG
aatgtttcatgcaaactttc

SEQ ID NO: 185375 - DNA, 20 bp, Artificial Sequence
  Description of Artificial Sequence: Synthetic oligonucleotide
  Target: LAMA2; (+) strand; PAM type: NRG; PAM sequence: TAG
tatgcatatttgcattttct

SEQ ID NO: 185376 - DNA, 20 bp, Artificial Sequence
  Description of Artificial Sequence: Synthetic oligonucleotide
  Target: LAMA2; (+) strand; PAM type: NRG; PAM sequence: AGG
atgcatatttgcattttctt

SEQ ID NO: 185377 - DNA, 20 bp, Artificial Sequence
  Description of Artificial Sequence: Synthetic oligonucleotide
  Target: LAMA2; (+) strand; PAM type: NRG; PAM sequence: GGG
tgcatatttgcattttctta

SEQ ID NO: 185378 - DNA, 20 bp, Artificial Sequence
  Description of Artificial Sequence: Synthetic oligonucleotide
  Target: LAMA2; (+) strand; PAM type: NRG; PAM sequence: GGG
gcatatttgcattttcttag

SEQ ID NO: 185379 - DNA, 20 bp, Artificial Sequence
  Description of Artificial Sequence: Synthetic oligonucleotide
  Target: LAMA2; (+) strand; PAM type: NRG; PAM sequence: GAG
atatttgcattttcttaggg

SEQ ID NO: 185380 - DNA, 20 bp, Artificial Sequence
  Description of Artificial Sequence: Synthetic oligonucleotide
  Target: LAMA2; (+) strand; PAM type: NRG; PAM sequence: AGG
tatttgcattttcttagggg

SEQ ID NO: 185381 - DNA, 20 bp, Artificial Sequence
  Description of Artificial Sequence: Synthetic oligonucleotide
  Target: LAMA2; (+) strand; PAM type: NRG; PAM sequence: GGG
atttgcattttcttagggga

SEQ ID NO: 185382 - DNA, 20 bp, Artificial Sequence
  Description of Artificial Sequence: Synthetic oligonucleotide
  Target: LAMA2; (+) strand; PAM type: NRG; PAM sequence: TAG
ggagggtctgctgctttcat

SEQ ID NO: 185383 - DNA, 20 bp, Artificial Sequence
  Description of Artificial Sequence: Synthetic oligonucleotide
  Target: LAMA2; (+) strand; PAM type: NRG; PAM sequence: AAG
tgctttcattagatattcaa

SEQ ID NO: 185384 - DNA, 20 bp, Artificial Sequence
  Description of Artificial Sequence: Synthetic oligonucleotide
  Target: LAMA2; (+) strand; PAM type: NRG; PAM sequence: AGG
gctttcattagatattcaaa

SEQ ID NO: 185385 - DNA, 20 bp, Artificial Sequence
  Description of Artificial Sequence: Synthetic oligonucleotide
  Target: LAMA2; (+) strand; PAM type: NRG; PAM sequence: AAG
ttcattagatattcaaaagg

SEQ ID NO: 185386 - DNA, 20 bp, Artificial Sequence
  Description of Artificial Sequence: Synthetic oligonucleotide
  Target: LAMA2; (+) strand; PAM type: NRG; PAM sequence: AAG
attagatattcaaaaggaag

SEQ ID NO: 185387 - DNA, 20 bp, Artificial Sequence
  Description of Artificial Sequence: Synthetic oligonucleotide
  Target: LAMA2; (+) strand; PAM type: NRG; PAM sequence: TAG
aacctaattaccttttcaaa

SEQ ID NO: 185388 - DNA, 20 bp, Artificial Sequence
  Description of Artificial Sequence: Synthetic oligonucleotide
  Target: LAMA2; (+) strand; PAM type: NRG; PAM sequence: TAG
tttcaaatagaaattgaaca

SEQ ID NO: 185389 - DNA, 20 bp, Artificial Sequence
  Description of Artificial Sequence: Synthetic oligonucleotide
  Target: LAMA2; (+) strand; PAM type: NRG; PAM sequence: AGG
ttcaaatagaaattgaacat

SEQ ID NO: 185390 - DNA, 20 bp, Artificial Sequence
  Description of Artificial Sequence: Synthetic oligonucleotide
  Target: LAMA2; (+) strand; PAM type: NRG; PAM sequence: TGG
gaacataggctatgacaaaa

SEQ ID NO: 185391 - DNA, 20 bp, Artificial Sequence
  Description of Artificial Sequence: Synthetic oligonucleotide
  Target: LAMA2; (+) strand; PAM type: NRG; PAM sequence: GGG
aacataggctatgacaaaat

SEQ ID NO: 185392 - DNA, 20 bp, Artificial Sequence
  Description of Artificial Sequence: Synthetic oligonucleotide
  Target: LAMA2; (+) strand; PAM type: NRG; PAM sequence: TAG
gctatgacaaaatgggtata

SEQ ID NO: 185393 - DNA, 20 bp, Artificial Sequence
  Description of Artificial Sequence: Synthetic oligonucleotide
  Target: LAMA2; (+) strand; PAM type: NRG; PAM sequence: AAG
tgacaaaatgggtatatagt

SEQ ID NO: 185394 - DNA, 20 bp, Artificial Sequence
  Description of Artificial Sequence: Synthetic oligonucleotide
  Target: LAMA2; (+) strand; PAM type: NRG; PAM sequence: AGG
gacaaaatgggtatatagta

SEQ ID NO: 185395 - DNA, 20 bp, Artificial Sequence
  Description of Artificial Sequence: Synthetic oligonucleotide
  Target: LAMA2; (+) strand; PAM type: NRG; PAM sequence: TAG
taaggttaataaactattaa

SEQ ID NO: 185396 - DNA, 20 bp, Artificial Sequence
  Description of Artificial Sequence: Synthetic oligonucleotide
  Target: LAMA2; (+) strand; PAM type: NRG; PAM sequence: CAG
tattaatagaaacataaaat

SEQ ID NO: 185397 - DNA, 20 bp, Artificial Sequence
  Description of Artificial Sequence: Synthetic oligonucleotide
  Target: LAMA2; (+) strand; PAM type: NRG; PAM sequence: AGG
attaatagaaacataaaatc

SEQ ID NO: 185398 - DNA, 20 bp, Artificial Sequence
  Description of Artificial Sequence: Synthetic oligonucleotide
  Target: LAMA2; (+) strand; PAM type: NRG; PAM sequence: AAG
aaacataaaatcaggaacgt

SEQ ID NO: 185399 - DNA, 20 bp, Artificial Sequence
  Description of Artificial Sequence: Synthetic oligonucleotide
  Target: LAMA2; (+) strand; PAM type: NRG; PAM sequence: GAG
acataaaatcaggaacgtaa

SEQ ID NO: 185400 - DNA, 20 bp, Artificial Sequence
  Description of Artificial Sequence: Synthetic oligonucleotide
  Target: LAMA2; (+) strand; PAM type: NRG; PAM sequence: TGG
taaaacttatgataccaaca

SEQ ID NO: 185401 - DNA, 20 bp, Artificial Sequence
  Description of Artificial Sequence: Synthetic oligonucleotide
  Target: LAMA2; (+) strand; PAM type: NRG; PAM sequence: GGG
aaaacttatgataccaacat

SEQ ID NO: 185402 - DNA, 20 bp, Artificial Sequence
  Description of Artificial Sequence: Synthetic oligonucleotide
  Target: LAMA2; (+) strand; PAM type: NRG; PAM sequence: GGG
aaacttatgataccaacatg

SEQ ID NO: 185403 - DNA, 20 bp, Artificial Sequence
  Description of Artificial Sequence: Synthetic oligonucleotide
  Target: LAMA2; (+) strand; PAM type: NRG; PAM sequence: TAG
tgataccaacatggggccca

SEQ ID NO: 185404 - DNA, 20 bp, Artificial Sequence
  Description of Artificial Sequence: Synthetic oligonucleotide
  Target: LAMA2; (+) strand; PAM type: NRG; PAM sequence: TGG
ccatagctctgtcaaaccaa

SEQ ID NO: 185405 - DNA, 20 bp, Artificial Sequence
  Description of Artificial Sequence: Synthetic oligonucleotide
  Target: LAMA2; (+) strand; PAM type: NRG; PAM sequence: GAG
atagctctgtcaaaccaatg

SEQ ID NO: 185406 - DNA, 20 bp, Artificial Sequence
  Description of Artificial Sequence: Synthetic oligonucleotide
  Target: LAMA2; (+) strand; PAM type: NRG; PAM sequence: TAG
ctgtcaaaccaatggagaca

SEQ ID NO: 185407 - DNA, 20 bp, Artificial Sequence
  Description of Artificial Sequence: Synthetic oligonucleotide
  Target: LAMA2; (+) strand; PAM type: NRG; PAM sequence: CAG
accaatggagacatagtgtg

SEQ ID NO: 185408 - DNA, 20 bp, Artificial Sequence
  Description of Artificial Sequence: Synthetic oligonucleotide
  Target: LAMA2; (+) strand; PAM type: NRG; PAM sequence: TAG
gagacatagtgtgcagtatt

SEQ ID NO: 185409 - DNA, 20 bp, Artificial Sequence
  Description of Artificial Sequence: Synthetic oligonucleotide
  Target: LAMA2; (+) strand; PAM type: NRG; PAM sequence: GAG
gtgtgcagtatttagactat

SEQ ID NO: 185410 - DNA, 20 bp, Artificial Sequence
  Description of Artificial Sequence: Synthetic oligonucleotide
  Target: LAMA2; (+) strand; PAM type: NRG; PAM sequence: CAG
cagtatttagactatgagaa

SEQ ID NO: 185411 - DNA, 20 bp, Artificial Sequence
  Description of Artificial Sequence: Synthetic oligonucleotide
  Target: LAMA2; (+) strand; PAM type: NRG; PAM sequence: CAG
ctatgagaacagtcatattc

SEQ ID NO: 185412 - DNA, 20 bp, Artificial Sequence
  Description of Artificial Sequence: Synthetic oligonucleotide
  Target: LAMA2; (+) strand; PAM type: NRG; PAM sequence: AGG
tatgagaacagtcatattcc

SEQ ID NO: 185413 - DNA, 20 bp, Artificial Sequence
  Description of Artificial Sequence: Synthetic oligonucleotide
  Target: LAMA2; (+) strand; PAM type: NRG; PAM sequence: TAG
agaacagtcatattccagga

SEQ ID NO: 185414 - DNA, 20 bp, Artificial Sequence
  Description of Artificial Sequence: Synthetic oligonucleotide
  Target: LAMA2; (+) strand; PAM type: NRG; PAM sequence: AAG
attccaggatagacacatcc

SEQ ID NO: 185415 - DNA, 20 bp, Artificial Sequence
  Description of Artificial Sequence: Synthetic oligonucleotide
  Target: LAMA2; (+) strand; PAM type: NRG; PAM sequence: GAG
aggatagacacatccaagtt

SEQ ID NO: 185416 - DNA, 20 bp, Artificial Sequence
  Description of Artificial Sequence: Synthetic oligonucleotide
  Target: LAMA2; (+) strand; PAM type: NRG; PAM sequence: AAG
atagacacatccaagttgag

SEQ ID NO: 185417 - DNA, 20 bp, Artificial Sequence
  Description of Artificial Sequence: Synthetic oligonucleotide
  Target: LAMA2; (+) strand; PAM type: NRG; PAM sequence: CAG
ccaagttgagaagcacaaca

SEQ ID NO: 185418 - DNA, 20 bp, Artificial Sequence
  Description of Artificial Sequence: Synthetic oligonucleotide
  Target: LAMA2; (+) strand; PAM type: NRG; PAM sequence: AGG
caagttgagaagcacaacac

SEQ ID NO: 185419 - DNA, 20 bp, Artificial Sequence
  Description of Artificial Sequence: Synthetic oligonucleotide
  Target: LAMA2; (+) strand; PAM type: NRG; PAM sequence: CAG
aggattttctgcatccatgc

SEQ ID NO: 185420 - DNA, 20 bp, Artificial Sequence
  Description of Artificial Sequence: Synthetic oligonucleotide
  Target: LAMA2; (+) strand; PAM type: NRG; PAM sequence: AGG
ggattttctgcatccatgcc

SEQ ID NO: 185421 - DNA, 20 bp, Artificial Sequence
  Description of Artificial Sequence: Synthetic oligonucleotide
  Target: LAMA2; (+) strand; PAM type: NRG; PAM sequence: GAG
attttctgcatccatgccag

SEQ ID NO: 185422 - DNA, 20 bp, Artificial Sequence
  Description of Artificial Sequence: Synthetic oligonucleotide
  Target: LAMA2; (+) strand; PAM type: NRG; PAM sequence: AGG
ttttctgcatccatgccagg

SEQ ID NO: 185423 - DNA, 20 bp, Artificial Sequence
  Description of Artificial Sequence: Synthetic oligonucleotide
  Target: LAMA2; (+) strand; PAM type: NRG; PAM sequence: TGG
tgcatccatgccaggaggcc

SEQ ID NO: 185424 - DNA, 20 bp, Artificial Sequence
  Description of Artificial Sequence: Synthetic oligonucleotide
  Target: LAMA2; (+) strand; PAM type: NRG; PAM sequence: TGG
atccatgccaggaggcctgg

SEQ ID NO: 185425 - DNA, 20 bp, Artificial Sequence
  Description of Artificial Sequence: Synthetic oligonucleotide
  Target: LAMA2; (+) strand; PAM type: NRG; PAM sequence: CAG
gccaggaggcctggtggtaa

SEQ ID NO: 185426 - DNA, 20 bp, Artificial Sequence
  Description of Artificial Sequence: Synthetic oligonucleotide
  Target: LAMA2; (+) strand; PAM type: NRG; PAM sequence: GAG
caggaggcctggtggtaaca

SEQ ID NO: 185427 - DNA, 20 bp, Artificial Sequence
  Description of Artificial Sequence: Synthetic oligonucleotide
  Target: LAMA2; (+) strand; PAM type: NRG; PAM sequence: CAG
cctggtggtaacagagaacc

SEQ ID NO: 185428 - DNA, 20 bp, Artificial Sequence
  Description of Artificial Sequence: Synthetic oligonucleotide
  Target: LAMA2; (+) strand; PAM type: NRG; PAM sequence: AGG
ctggtggtaacagagaaccc

SEQ ID NO: 185429 - DNA, 20 bp, Artificial Sequence
  Description of Artificial Sequence: Synthetic oligonucleotide
  Target: LAMA2; (+) strand; PAM type: NRG; PAM sequence: CAG
gtggtaacagagaacccagg

SEQ ID NO: 185430 - DNA, 20 bp, Artificial Sequence
  Description of Artificial Sequence: Synthetic oligonucleotide
  Target: LAMA2; (+) strand; PAM type: NRG; PAM sequence: TGG
acagagaacccaggcagctt

SEQ ID NO: 185431 - DNA, 20 bp, Artificial Sequence
  Description of Artificial Sequence: Synthetic oligonucleotide
  Target: LAMA2; (+) strand; PAM type: NRG; PAM sequence: GGG
cagagaacccaggcagcttt

SEQ ID NO: 185432 - DNA, 20 bp, Artificial Sequence
  Description of Artificial Sequence: Synthetic oligonucleotide
  Target: LAMA2; (+) strand; PAM type: NRG; PAM sequence: GGG
agagaacccaggcagctttg

SEQ ID NO: 185433 - DNA, 20 bp, Artificial Sequence
  Description of Artificial Sequence: Synthetic oligonucleotide
  Target: LAMA2; (+) strand; PAM type: NRG; PAM sequence: GGG
gagaacccaggcagctttgg

SEQ ID NO: 185434 - DNA, 20 bp, Artificial Sequence
  Description of Artificial Sequence: Synthetic oligonucleotide
  Target: LAMA2; (+) strand; PAM type: NRG; PAM sequence: AAG
tttgggggatatcccatcct

SEQ ID NO: 185435 - DNA, 20 bp, Artificial Sequence
  Description of Artificial Sequence: Synthetic oligonucleotide
  Target: LAMA2; (+) strand; PAM type: NRG; PAM sequence: TGG
atatcccatcctaagacaac

SEQ ID NO: 185436 - DNA, 20 bp, Artificial Sequence
  Description of Artificial Sequence: Synthetic oligonucleotide
  Target: LAMA2; (+) strand; PAM type: NRG; PAM sequence: TAG
caactggataactacacaca

SEQ ID NO: 185437 - DNA, 20 bp, Artificial Sequence
  Description of Artificial Sequence: Synthetic oligonucleotide
  Target: LAMA2; (+) strand; PAM type: NRG; PAM sequence: GAG
actggataactacacacata

SEQ ID NO: 185438 - DNA, 20 bp, Artificial Sequence
  Description of Artificial Sequence: Synthetic oligonucleotide
  Target: LAMA2; (+) strand; PAM type: NRG; PAM sequence: AAG
aaatgactgtattctacata

SEQ ID NO: 185439 - DNA, 20 bp, Artificial Sequence
  Description of Artificial Sequence: Synthetic oligonucleotide
  Target: LAMA2; (+) strand; PAM type: NRG; PAM sequence: AGG
aatgactgtattctacataa

SEQ ID NO: 185440 - DNA, 20 bp, Artificial Sequence
  Description of Artificial Sequence: Synthetic oligonucleotide
  Target: LAMA2; (+) strand; PAM type: NRG; PAM sequence: AAG
ctgtattctacataaaggca

SEQ ID NO: 185441 - DNA, 20 bp, Artificial Sequence
  Description of Artificial Sequence: Synthetic oligonucleotide
  Target: LAMA2; (+) strand; PAM type: NRG; PAM sequence: TAG
tttcttctgatctgaatgtt

SEQ ID NO: 185442 - DNA, 20 bp, Artificial Sequence
  Description of Artificial Sequence: Synthetic oligonucleotide
  Target: LAMA2; (+) strand; PAM type: NRG; PAM sequence: AGG
ttcttctgatctgaatgttt

SEQ ID NO: 185443 - DNA, 20 bp, Artificial Sequence
  Description of Artificial Sequence: Synthetic oligonucleotide
  Target: LAMA2; (+) strand; PAM type: NRG; PAM sequence: TAG
ctgaatgtttaggtgaccta

SEQ ID NO: 185444 - DNA, 20 bp, Artificial Sequence
  Description of Artificial Sequence: Synthetic oligonucleotide
  Target: LAMA2; (+) strand; PAM type: NRG; PAM sequence: TGG
taggtgacctatagcattga

SEQ ID NO: 185445 - DNA, 20 bp, Artificial Sequence
  Description of Artificial Sequence: Synthetic oligonucleotide
  Target: LAMA2; (+) strand; PAM type: NRG; PAM sequence: CAG
tatagcattgatggctgcgt

SEQ ID NO: 185446 - DNA, 20 bp, Artificial Sequence
  Description of Artificial Sequence: Synthetic oligonucleotide
  Target: LAMA2; (+) strand; PAM type: NRG; PAM sequence: AGG
atagcattgatggctgcgtc

SEQ ID NO: 185447 - DNA, 20 bp, Artificial Sequence
  Description of Artificial Sequence: Synthetic oligonucleotide
  Target: LAMA2; (+) strand; PAM type: NRG; PAM sequence: TGG
ctgcgtcaggaatctccaca

SEQ ID NO: 185448 - DNA, 20 bp, Artificial Sequence
  Description of Artificial Sequence: Synthetic oligonucleotide
  Target: LAMA2; (+) strand; PAM type: NRG; PAM sequence: CAG
cgtcaggaatctccacatgg

SEQ ID NO: 185449 - DNA, 20 bp, Artificial Sequence
  Description of Artificial Sequence: Synthetic oligonucleotide
  Target: LAMA2; (+) strand; PAM type: NRG; PAM sequence: GAG
tcaggaatctccacatggca

SEQ ID NO: 185450 - DNA, 20 bp, Artificial Sequence
  Description of Artificial Sequence: Synthetic oligonucleotide
  Target: LAMA2; (+) strand; PAM type: NRG; PAM sequence: AGG
caggaatctccacatggcag

SEQ ID NO: 185451 - DNA, 20 bp, Artificial Sequence
  Description of Artificial Sequence: Synthetic oligonucleotide
  Target: LAMA2; (+) strand; PAM type: NRG; PAM sequence: TGG
ggcagaggcccctgccgatc

SEQ ID NO: 185452 - DNA, 20 bp, Artificial Sequence
  Description of Artificial Sequence: Synthetic oligonucleotide
  Target: LAMA2; (+) strand; PAM type: NRG; PAM sequence: CAG
gatctggaacaacccacctc

SEQ ID NO: 185453 - DNA, 20 bp, Artificial Sequence
  Description of Artificial Sequence: Synthetic oligonucleotide
  Target: LAMA2; (+) strand; PAM type: NRG; PAM sequence: TGG
cccacctccagcttccatgt

SEQ ID NO: 185454 - DNA, 20 bp, Artificial Sequence
  Description of Artificial Sequence: Synthetic oligonucleotide
  Target: LAMA2; (+) strand; PAM type: NRG; PAM sequence: GGG
ccacctccagcttccatgtt

SEQ ID NO: 185455 - DNA, 20 bp, Artificial Sequence
  Description of Artificial Sequence: Synthetic oligonucleotide
  Target: LAMA2; (+) strand; PAM type: NRG; PAM sequence: CAG
ggacatgttttgcaaatgct

SEQ ID NO: 185456 - DNA, 20 bp, Artificial Sequence
  Description of Artificial Sequence: Synthetic oligonucleotide
  Target: LAMA2; (+) strand; PAM type: NRG; PAM sequence: GAG
acatgttttgcaaatgctca

SEQ ID NO: 185457 - DNA, 20 bp, Artificial Sequence
  Description of Artificial Sequence: Synthetic oligonucleotide
  Target: LAMA2; (+) strand; PAM type: NRG; PAM sequence: AGG
catgttttgcaaatgctcag

SEQ ID NO: 185458 - DNA, 20 bp, Artificial Sequence
  Description of Artificial Sequence: Synthetic oligonucleotide
  Target: LAMA2; (+) strand; PAM type: NRG; PAM sequence: GGG
atgttttgcaaatgctcaga

SEQ ID NO: 185459 - DNA, 20 bp, Artificial Sequence
  Description of Artificial Sequence: Synthetic oligonucleotide
  Target: LAMA2; (+) strand; PAM type: NRG; PAM sequence: GGG
tgttttgcaaatgctcagag

SEQ ID NO: 185460 - DNA, 20 bp, Artificial Sequence
  Description of Artificial Sequence: Synthetic oligonucleotide
  Target: LAMA2; (+) strand; PAM type: NRG; PAM sequence: CGG
cagaggggaacatattttga

SEQ ID NO: 185461 - DNA, 20 bp, Artificial Sequence
  Description of Artificial Sequence: Synthetic oligonucleotide
  Target: LAMA2; (+) strand; PAM type: NRG; PAM sequence: CGG
ggaacatattttgacggaac

SEQ ID NO: 185462 - DNA, 20 bp, Artificial Sequence
  Description of Artificial Sequence: Synthetic oligonucleotide
  Target: LAMA2; (+) strand; PAM type: NRG; PAM sequence: AAG
tgacggaaccggttttgcca

SEQ ID NO: 185463 - DNA, 20 bp, Artificial Sequence
  Description of Artificial Sequence: Synthetic oligonucleotide
  Target: LAMA2; (+) strand; PAM type: NRG; PAM sequence: CAG
cggaaccggttttgccaaag

SEQ ID NO: 185464 - DNA, 20 bp, Artificial Sequence
  Description of Artificial Sequence: Synthetic oligonucleotide
  Target: LAMA2; (+) strand; PAM type: NRG; PAM sequence: AGG
ggaaccggttttgccaaagc

SEQ ID NO: 185465 - DNA, 20 bp, Artificial Sequence
  Description of Artificial Sequence: Synthetic oligonucleotide
  Target: LAMA2; (+) strand; PAM type: NRG; PAM sequence: AAG
ccggttttgccaaagcaggt

SEQ ID NO: 185466 - DNA, 20 bp, Artificial Sequence
  Description of Artificial Sequence: Synthetic oligonucleotide
  Target: LAMA2; (+) strand; PAM type: NRG; PAM sequence: AGG
cggttttgccaaagcaggta

SEQ ID NO: 185467 - DNA, 20 bp, Artificial Sequence
  Description of Artificial Sequence: Synthetic oligonucleotide
  Target: LAMA2; (+) strand; PAM type: NRG; PAM sequence: TAG
ccttcctgttgattattaac

SEQ ID NO: 185468 - DNA, 20 bp, Artificial Sequence
  Description of Artificial Sequence: Synthetic oligonucleotide
  Target: LAMA2; (+) strand; PAM type: NRG; PAM sequence: TAG
tacaaatactaacttcttgc

SEQ ID NO: 185469 - DNA, 20 bp, Artificial Sequence
  Description of Artificial Sequence: Synthetic oligonucleotide
  Target: LAMA2; (+) strand; PAM type: NRG; PAM sequence: AAG
ttgctagtaccaaataataa

SEQ ID NO: 185470 - DNA, 20 bp, Artificial Sequence
  Description of Artificial Sequence: Synthetic oligonucleotide
  Target: LAMA2; (+) strand; PAM type: NRG; PAM sequence: TAG
taccaaataataaaagttcc

SEQ ID NO: 185471 - DNA, 20 bp, Artificial Sequence
  Description of Artificial Sequence: Synthetic oligonucleotide
  Target: LAMA2; (+) strand; PAM type: NRG; PAM sequence: GAG
ccaaataataaaagttccta

SEQ ID NO: 185472 - DNA, 20 bp, Artificial Sequence
  Description of Artificial Sequence: Synthetic oligonucleotide
  Target: LAMA2; (+) strand; PAM type: NRG; PAM sequence: TAG
aagttcctagagtcctaaac

SEQ ID NO: 185473 - DNA, 20 bp, Artificial Sequence
  Description of Artificial Sequence: Synthetic oligonucleotide
  Target: LAMA2; (+) strand; PAM type: NRG; PAM sequence: AAG
taaactagtatcctttattt

SEQ ID NO: 185474 - DNA, 20 bp, Artificial Sequence
  Description of Artificial Sequence: Synthetic oligonucleotide
  Target: LAMA2; (+) strand; PAM type: NRG; PAM sequence: AAG
tatcctttatttaagccaaa

SEQ ID NO: 185475 - DNA, 20 bp, Artificial Sequence
  Description of Artificial Sequence: Synthetic oligonucleotide
  Target: LAMA2; (+) strand; PAM type: NRG; PAM sequence: TGG
ttaagccaaaaagaaactta

SEQ ID NO: 185476 - DNA, 20 bp, Artificial Sequence
  Description of Artificial Sequence: Synthetic oligonucleotide
  Target: LAMA2; (+) strand; PAM type: NRG; PAM sequence: AAG
agccaaaaagaaacttatgg

SEQ ID NO: 185477 - DNA, 20 bp, Artificial Sequence
  Description of Artificial Sequence: Synthetic oligonucleotide
  Target: LAMA2; (+) strand; PAM type: NRG; PAM sequence: AAG
ttcatgtatctgatcctgat

SEQ ID NO: 185478 - DNA, 20 bp, Artificial Sequence
  Description of Artificial Sequence: Synthetic oligonucleotide
  Target: LAMA2; (+) strand; PAM type: NRG; PAM sequence: TAG
ctgatcctgataagaattaa

SEQ ID NO: 185479 - DNA, 20 bp, Artificial Sequence
  Description of Artificial Sequence: Synthetic oligonucleotide
  Target: LAMA2; (+) strand; PAM type: NRG; PAM sequence: AAG
atcctgataagaattaatag

SEQ ID NO: 185480 - DNA, 20 bp, Artificial Sequence
  Description of Artificial Sequence: Synthetic oligonucleotide
  Target: LAMA2; (+) strand; PAM type: NRG; PAM sequence: AAG
aagaattaatagaagaaata

SEQ ID NO: 185481 - DNA, 20 bp, Artificial Sequence
  Description of Artificial Sequence: Synthetic oligonucleotide
  Target: LAMA2; (+) strand; PAM type: NRG; PAM sequence: AAG
taatagaagaaataaagtaa

SEQ ID NO: 185482 - DNA, 20 bp, Artificial Sequence
  Description of Artificial Sequence: Synthetic oligonucleotide
  Target: LAMA2; (+) strand; PAM type: NRG; PAM sequence: AGG
aatagaagaaataaagtaaa

SEQ ID NO: 185483 - DNA, 20 bp, Artificial Sequence
  Description of Artificial Sequence: Synthetic oligonucleotide
  Target: LAMA2; (+) strand; PAM type: NRG; PAM sequence: TAG
aataaagtaaaaggtctatt

SEQ ID NO: 185484 - DNA, 20 bp, Artificial Sequence
  Description of Artificial Sequence: Synthetic oligonucleotide
  Target: LAMA2; (+) strand; PAM type: NRG; PAM sequence: GAG
taaagtaaaaggtctattta

SEQ ID NO: 185485 - DNA, 20 bp, Artificial Sequence
  Description of Artificial Sequence: Synthetic oligonucleotide
  Target: LAMA2; (+) strand; PAM type: NRG; PAM sequence: TGG
atttattccatctccttcac

SEQ ID NO: 185486 - DNA, 20 bp, Artificial Sequence
  Description of Artificial Sequence: Synthetic oligonucleotide
  Target: LAMA2; (+) strand; PAM type: NRG; PAM sequence: GAG
ttattccatctccttcactg

SEQ ID NO: 185487 - DNA, 20 bp, Artificial Sequence
  Description of Artificial Sequence: Synthetic oligonucleotide
  Target: LAMA2; (+) strand; PAM type: NRG; PAM sequence: AGG
tattccatctccttcactgg

SEQ ID NO: 185488 - DNA, 20 bp, Artificial Sequence
  Description of Artificial Sequence: Synthetic oligonucleotide
  Target: LAMA2; (+) strand; PAM type: NRG; PAM sequence: AAG
catctccttcactggaggtt

SEQ ID NO: 185489 - DNA, 20 bp, Artificial Sequence
  Description of Artificial Sequence: Synthetic oligonucleotide
  Target: LAMA2; (+) strand; PAM type: NRG; PAM sequence: CAG
ccttcactggaggttaagaa

SEQ ID NO: 185490 - DNA, 20 bp, Artificial Sequence
  Description of Artificial Sequence: Synthetic oligonucleotide
  Target: LAMA2; (+) strand; PAM type: NRG; PAM sequence: AAG
agcaaaataaataattttgc

SEQ ID NO: 185491 - DNA, 20 bp, Artificial Sequence
  Description of Artificial Sequence: Synthetic oligonucleotide
  Target: LAMA2; (+) strand; PAM type: NRG; PAM sequence: CAG
tatgttgtttttctaccttc

SEQ ID NO: 185492 - DNA, 20 bp, Artificial Sequence
  Description of Artificial Sequence: Synthetic oligonucleotide
  Target: LAMA2; (+) strand; PAM type: NRG; PAM sequence: TGG
tttttctaccttccagtttc

SEQ ID NO: 185493 - DNA, 20 bp, Artificial Sequence
  Description of Artificial Sequence: Synthetic oligonucleotide
  Target: LAMA2; (+) strand; PAM type: NRG; PAM sequence: GAG
tttctaccttccagtttctg

SEQ ID NO: 185494 - DNA, 20 bp, Artificial Sequence
  Description of Artificial Sequence: Synthetic oligonucleotide
  Target: LAMA2; (+) strand; PAM type: NRG; PAM sequence: GAG
accttccagtttctggagat

SEQ ID NO: 185495 - DNA, 20 bp, Artificial Sequence
  Description of Artificial Sequence: Synthetic oligonucleotide
  Target: LAMA2; (+) strand; PAM type: NRG; PAM sequence: AAG
ttttttcttcaattccctgc

SEQ ID NO: 185496 - DNA, 20 bp, Artificial Sequence
  Description of Artificial Sequence: Synthetic oligonucleotide
  Target: LAMA2; (+) strand; PAM type: NRG; PAM sequence: AGG
tttttcttcaattccctgca

SEQ ID NO: 185497 - DNA, 20 bp, Artificial Sequence
  Description of Artificial Sequence: Synthetic oligonucleotide
  Target: LAMA2; (+) strand; PAM type: NRG; PAM sequence: TAG
ccatgtctgtttcttgttga

SEQ ID NO: 185498 - DNA, 20 bp, Artificial Sequence
  Description of Artificial Sequence: Synthetic oligonucleotide
  Target: LAMA2; (+) strand; PAM type: NRG; PAM sequence: TGG
ttgttgatagtgacaatgac

SEQ ID NO: 185499 - DNA, 20 bp, Artificial Sequence
  Description of Artificial Sequence: Synthetic oligonucleotide
  Target: LAMA2; (+) strand; PAM type: NRG; PAM sequence: TGG
acaatgactggcatctttcc

SEQ ID NO: 185500 - DNA, 20 bp, Artificial Sequence
  Description of Artificial Sequence: Synthetic oligonucleotide
  Target: LAMA2; (+) strand; PAM type: NRG; PAM sequence: CAG
ccgtttctaatgaacatttc

SEQ ID NO: 185501 - DNA, 20 bp, Artificial Sequence
  Description of Artificial Sequence: Synthetic oligonucleotide
  Target: LAMA2; (+) strand; PAM type: NRG; PAM sequence: TGG
tctaatgaacatttccagta

SEQ ID NO: 185502 - DNA, 20 bp, Artificial Sequence
  Description of Artificial Sequence: Synthetic oligonucleotide
  Target: LAMA2; (+) strand; PAM type: NRG; PAM sequence: TGG
ccagtatggttttatatcac

SEQ ID NO: 185503 - DNA, 20 bp, Artificial Sequence
  Description of Artificial Sequence: Synthetic oligonucleotide
  Target: LAMA2; (+) strand; PAM type: NRG; PAM sequence: AAG
gttttatatcactggtcatg

SEQ ID NO: 185504 - DNA, 20 bp, Artificial Sequence
  Description of Artificial Sequence: Synthetic oligonucleotide
  Target: LAMA2; (+) strand; PAM type: NRG; PAM sequence: AGG
ttttatatcactggtcatga

SEQ ID NO: 185505 - DNA, 20 bp, Artificial Sequence
  Description of Artificial Sequence: Synthetic oligonucleotide
  Target: LAMA2; (+) strand; PAM type: NRG; PAM sequence: CAG
tatcactggtcatgaaggta

SEQ ID NO: 185506 - DNA, 20 bp, Artificial Sequence
  Description of Artificial Sequence: Synthetic oligonucleotide
  Target: LAMA2; (+) strand; PAM type: NRG; PAM sequence: TAG
actggtcatgaaggtacagt

SEQ ID NO: 185507 - DNA, 20 bp, Artificial Sequence
  Description of Artificial Sequence: Synthetic oligonucleotide
  Target: LAMA2; (+) strand; PAM type: NRG; PAM sequence: AGG
ctggtcatgaaggtacagtt

SEQ ID NO: 185508 - DNA, 20 bp, Artificial Sequence
  Description of Artificial Sequence: Synthetic oligonucleotide
  Target: LAMA2; (+) strand; PAM type: NRG; PAM sequence: AAG
atgaaggtacagttaggaaa

SEQ ID NO: 185509 - DNA, 20 bp, Artificial Sequence
  Description of Artificial Sequence: Synthetic oligonucleotide
  Target: LAMA2; (+) strand; PAM type: NRG; PAM sequence: TAG
gtacagttaggaaaaagaaa

SEQ ID NO: 185510 - DNA, 20 bp, Artificial Sequence
  Description of Artificial Sequence: Synthetic oligonucleotide
  Target: LAMA2; (+) strand; PAM type: NRG; PAM sequence: AGG
tacagttaggaaaaagaaat

SEQ ID NO: 185511 - DNA, 20 bp, Artificial Sequence
  Description of Artificial Sequence: Synthetic oligonucleotide
  Target: LAMA2; (+) strand; PAM type: NRG; PAM sequence: TGG
cctttaatttttaatttttg

SEQ ID NO: 185512 - DNA, 20 bp, Artificial Sequence
  Description of Artificial Sequence: Synthetic oligonucleotide
  Target: LAMA2; (+) strand; PAM type: NRG; PAM sequence: GGG
ctttaatttttaatttttgt

SEQ ID NO: 185513 - DNA, 20 bp, Artificial Sequence
  Description of Artificial Sequence: Synthetic oligonucleotide
  Target: LAMA2; (+) strand; PAM type: NRG; PAM sequence: CAG
ttttaatttttgtgggtaca

SEQ ID NO: 185514 - DNA, 20 bp, Artificial Sequence
  Description of Artificial Sequence: Synthetic oligonucleotide
  Target: LAMA2; (+) strand; PAM type: NRG; PAM sequence: TGG
taatttttgtgggtacacag

SEQ ID NO: 185515 - DNA, 20 bp, Artificial Sequence
  Description of Artificial Sequence: Synthetic oligonucleotide
  Target: LAMA2; (+) strand; PAM type: NRG; PAM sequence: GGG
aatttttgtgggtacacagt

SEQ ID NO: 185516 - DNA, 20 bp, Artificial Sequence
  Description of Artificial Sequence: Synthetic oligonucleotide
  Target: LAMA2; (+) strand; PAM type: NRG; PAM sequence: TGG
acagtgggtgtatatattta

SEQ ID NO: 185517 - DNA, 20 bp, Artificial Sequence
  Description of Artificial Sequence: Synthetic oligonucleotide
  Target: LAMA2; (+) strand; PAM type: NRG; PAM sequence: GGG
cagtgggtgtatatatttat

SEQ ID NO: 185518 - DNA, 20 bp, Artificial Sequence
  Description of Artificial Sequence: Synthetic oligonucleotide
  Target: LAMA2; (+) strand; PAM type: NRG; PAM sequence: GAG
tatatatttatgggtgacct

SEQ ID NO: 185519 - DNA, 20 bp, Artificial Sequence
  Description of Artificial Sequence: Synthetic oligonucleotide
  Target: LAMA2; (+) strand; PAM type: NRG; PAM sequence: TAG
tgacctgagatattttgatg

SEQ ID NO: 185520 - DNA, 20 bp, Artificial Sequence
  Description of Artificial Sequence: Synthetic oligonucleotide
  Target: LAMA2; (+) strand; PAM type: NRG; PAM sequence: AGG
gacctgagatattttgatgt

SEQ ID NO: 185521 - DNA, 20 bp, Artificial Sequence
  Description of Artificial Sequence: Synthetic oligonucleotide
  Target: LAMA2; (+) strand; PAM type: NRG; PAM sequence: CAG
gcaatgcataataatcatat

SEQ ID NO: 185522 - DNA, 20 bp, Artificial Sequence
  Description of Artificial Sequence: Synthetic oligonucleotide
  Target: LAMA2; (+) strand; PAM type: NRG; PAM sequence: AGG
caatgcataataatcatatc

SEQ ID NO: 185523 - DNA, 20 bp, Artificial Sequence
  Description of Artificial Sequence: Synthetic oligonucleotide
  Target: LAMA2; (+) strand; PAM type: NRG; PAM sequence: GGG
aatgcataataatcatatca

SEQ ID NO: 185524 - DNA, 20 bp, Artificial Sequence
  Description of Artificial Sequence: Synthetic oligonucleotide
  Target: LAMA2; (+) strand; PAM type: NRG; PAM sequence: TGG
aataatcatatcagggtaaa

SEQ ID NO: 185525 - DNA, 20 bp, Artificial Sequence
  Description of Artificial Sequence: Synthetic oligonucleotide
  Target: LAMA2; (+) strand; PAM type: NRG; PAM sequence: GGG
ataatcatatcagggtaaat

SEQ ID NO: 185526 - DNA, 20 bp, Artificial Sequence
  Description of Artificial Sequence: Synthetic oligonucleotide
  Target: LAMA2; (+) strand; PAM type: NRG; PAM sequence: GGG
taatcatatcagggtaaatg

SEQ ID NO: 185527 - DNA, 20 bp, Artificial Sequence
  Description of Artificial Sequence: Synthetic oligonucleotide
  Target: LAMA2; (+) strand; PAM type: NRG; PAM sequence: TAG
acaatctgattatactcttt

SEQ ID NO: 185528 - DNA, 20 bp, Artificial Sequence
  Description of Artificial Sequence: Synthetic oligonucleotide
  Target: LAMA2; (+) strand; PAM type: NRG; PAM sequence: TAG
ttatttttttttttttactg

SEQ ID NO: 185529 - DNA, 20 bp, Artificial Sequence
  Description of Artificial Sequence: Synthetic oligonucleotide
  Target: LAMA2; (+) strand; PAM type: NRG; PAM sequence: TAG
tactgtagttacccttgtgc

SEQ ID NO: 185530 - DNA, 20 bp, Artificial Sequence
  Description of Artificial Sequence: Synthetic oligonucleotide
  Target: LAMA2; (+) strand; PAM type: NRG; PAM sequence: TGG
ccactaaccttcccaacctc

SEQ ID NO: 185531 - DNA, 20 bp, Artificial Sequence
  Description of Artificial Sequence: Synthetic oligonucleotide
  Target: LAMA2; (+) strand; PAM type: NRG; PAM sequence: GAG
tactttctatctatctccat

SEQ ID NO: 185532 - DNA, 20 bp, Artificial Sequence
  Description of Artificial Sequence: Synthetic oligonucleotide
  Target: LAMA2; (+) strand; PAM type: NRG; PAM sequence: TAG
agttgaattgctttaatttt

SEQ ID NO: 185533 - DNA, 20 bp, Artificial Sequence
  Description of Artificial Sequence: Synthetic oligonucleotide
  Target: LAMA2; (+) strand; PAM type: NRG; PAM sequence: CAG
gctttaatttttagctccca

SEQ ID NO: 185534 - DNA, 20 bp, Artificial Sequence
  Description of Artificial Sequence: Synthetic oligonucleotide
  Target: LAMA2; (+) strand; PAM type: NRG; PAM sequence: AAG
aatttttagctcccacagat

SEQ ID NO: 185535 - DNA, 20 bp, Artificial Sequence
  Description of Artificial Sequence: Synthetic oligonucleotide
  Target: LAMA2; (+) strand; PAM type: NRG; PAM sequence: GAG
tttagctcccacagataagt

SEQ ID NO: 185536 - DNA, 20 bp, Artificial Sequence
  Description of Artificial Sequence: Synthetic oligonucleotide
  Target: LAMA2; (+) strand; PAM type: NRG; PAM sequence: TGG
gatgtttgcctttgtgtgcc

SEQ ID NO: 185537 - DNA, 20 bp, Artificial Sequence
  Description of Artificial Sequence: Synthetic oligonucleotide
  Target: LAMA2; (+) strand; PAM type: NRG; PAM sequence: AAG
tcacttaacataatgacctc

SEQ ID NO: 185538 - DNA, 20 bp, Artificial Sequence
  Description of Artificial Sequence: Synthetic oligonucleotide
  Target: LAMA2; (+) strand; PAM type: NRG; PAM sequence: CAG
aagaaccacccatgttgttg

SEQ ID NO: 185539 - DNA, 20 bp, Artificial Sequence
  Description of Artificial Sequence: Synthetic oligonucleotide
  Target: LAMA2; (+) strand; PAM type: NRG; PAM sequence: TAG
acccatgttgttgcagatga

SEQ ID NO: 185540 - DNA, 20 bp, Artificial Sequence
  Description of Artificial Sequence: Synthetic oligonucleotide
  Target: LAMA2; (+) strand; PAM type: NRG; PAM sequence: AGG
cccatgttgttgcagatgat

SEQ ID NO: 185541 - DNA, 20 bp, Artificial Sequence
  Description of Artificial Sequence: Synthetic oligonucleotide
  Target: LAMA2; (+) strand; PAM type: NRG; PAM sequence: TGG
taggatctcattctttttta

SEQ ID NO: 185542 - DNA, 20 bp, Artificial Sequence
  Description of Artificial Sequence: Synthetic oligonucleotide
  Target: LAMA2; (+) strand; PAM type: NRG; PAM sequence: CAG
ttttatggcttattcatatc

SEQ ID NO: 185543 - DNA, 20 bp, Artificial Sequence
  Description of Artificial Sequence: Synthetic oligonucleotide
  Target: LAMA2; (+) strand; PAM type: NRG; PAM sequence: TGG
tttatccgttcatctgctga

SEQ ID NO: 185544 - DNA, 20 bp, Artificial Sequence
  Description of Artificial Sequence: Synthetic oligonucleotide
  Target: LAMA2; (+) strand; PAM type: NRG; PAM sequence: TAG
ttcatctgctgatggacact

SEQ ID NO: 185545 - DNA, 20 bp, Artificial Sequence
  Description of Artificial Sequence: Synthetic oligonucleotide
  Target: LAMA2; (+) strand; PAM type: NRG; PAM sequence: AGG
tcatctgctgatggacactt

SEQ ID NO: 185546 - DNA, 20 bp, Artificial Sequence
  Description of Artificial Sequence: Synthetic oligonucleotide
  Target: LAMA2; (+) strand; PAM type: NRG; PAM sequence: TGG
tctgctgatggacacttagg

SEQ ID NO: 185547 - DNA, 20 bp, Artificial Sequence
  Description of Artificial Sequence: Synthetic oligonucleotide
  Target: LAMA2; (+) strand; PAM type: NRG; PAM sequence: TAG
gcttccaaatctattgtaac

SEQ ID NO: 185548 - DNA, 20 bp, Artificial Sequence
  Description of Artificial Sequence: Synthetic oligonucleotide
  Target: LAMA2; (+) strand; PAM type: NRG; PAM sequence: TGG
aactagtgctgcaataaacg

SEQ ID NO: 185549 - DNA, 20 bp, Artificial Sequence
  Description of Artificial Sequence: Synthetic oligonucleotide
  Target: LAMA2; (+) strand; PAM type: NRG; PAM sequence: GGG
actagtgctgcaataaacgt

SEQ ID NO: 185550 - DNA, 20 bp, Artificial Sequence
  Description of Artificial Sequence: Synthetic oligonucleotide
  Target: LAMA2; (+) strand; PAM type: NRG; PAM sequence: GAG
tagtgctgcaataaacgtgg

SEQ ID NO: 185551 - DNA, 20 bp, Artificial Sequence
  Description of Artificial Sequence: Synthetic oligonucleotide
  Target: LAMA2; (+) strand; PAM type: NRG; PAM sequence: CAG
ctgcaataaacgtgggagtg

SEQ ID NO: 185552 - DNA, 20 bp, Artificial Sequence
  Description of Artificial Sequence: Synthetic oligonucleotide
  Target: LAMA2; (+) strand; PAM type: NRG; PAM sequence: TGG
atatctcttcaatattcttt

SEQ ID NO: 185553 - DNA, 20 bp, Artificial Sequence
  Description of Artificial Sequence: Synthetic oligonucleotide
  Target: LAMA2; (+) strand; PAM type: NRG; PAM sequence: GGG
tatctcttcaatattctttt

SEQ ID NO: 185554 - DNA, 20 bp, Artificial Sequence
  Description of Artificial Sequence: Synthetic oligonucleotide
  Target: LAMA2; (+) strand; PAM type: NRG; PAM sequence: AAG
attcttttgggtatatatct

SEQ ID NO: 185555 - DNA, 20 bp, Artificial Sequence
  Description of Artificial Sequence: Synthetic oligonucleotide
  Target: LAMA2; (+) strand; PAM type: NRG; PAM sequence: GAG
tcttttgggtatatatctaa

SEQ ID NO: 185556 - DNA, 20 bp, Artificial Sequence
  Description of Artificial Sequence: Synthetic oligonucleotide
  Target: LAMA2; (+) strand; PAM type: NRG; PAM sequence: TGG
tttgggtatatatctaagag

SEQ ID NO: 185557 - DNA, 20 bp, Artificial Sequence
  Description of Artificial Sequence: Synthetic oligonucleotide
  Target: LAMA2; (+) strand; PAM type: NRG; PAM sequence: TGG
atatctaagagtggaattga

SEQ ID NO: 185558 - DNA, 20 bp, Artificial Sequence
  Description of Artificial Sequence: Synthetic oligonucleotide
  Target: LAMA2; (+) strand; PAM type: NRG; PAM sequence: TGG
agtggaattgatggatcata

SEQ ID NO: 185559 - DNA, 20 bp, Artificial Sequence
  Description of Artificial Sequence: Synthetic oligonucleotide
  Target: LAMA2; (+) strand; PAM type: NRG; PAM sequence: TAG
ggaattgatggatcatatgg

SEQ ID NO: 185560 - DNA, 20 bp, Artificial Sequence
  Description of Artificial Sequence: Synthetic oligonucleotide
  Target: LAMA2; (+) strand; PAM type: NRG; PAM sequence: TGG
tcatatggtagctctatttt

SEQ ID NO: 185561 - DNA, 20 bp, Artificial Sequence
  Description of Artificial Sequence: Synthetic oligonucleotide
  Target: LAMA2; (+) strand; PAM type: NRG; PAM sequence: GAG
agctctatttttggtgtttt

SEQ ID NO: 185562 - DNA, 20 bp, Artificial Sequence
  Description of Artificial Sequence: Synthetic oligonucleotide
  Target: LAMA2; (+) strand; PAM type: NRG; PAM sequence: AGG
gctctatttttggtgttttg

SEQ ID NO: 185563 - DNA, 20 bp, Artificial Sequence
  Description of Artificial Sequence: Synthetic oligonucleotide
  Target: LAMA2; (+) strand; PAM type: NRG; PAM sequence: TAG
aacctccaaactgttctgca

SEQ ID NO: 185564 - DNA, 20 bp, Artificial Sequence
  Description of Artificial Sequence: Synthetic oligonucleotide
  Target: LAMA2; (+) strand; PAM type: NRG; PAM sequence: CAG
ctccaaactgttctgcatag

SEQ ID NO: 185565 - DNA, 20 bp, Artificial Sequence
  Description of Artificial Sequence: Synthetic oligonucleotide
  Target: LAMA2; (+) strand; PAM type: NRG; PAM sequence: TAG
gttctgcatagcagttgcac

SEQ ID NO: 185566 - DNA, 20 bp, Artificial Sequence
  Description of Artificial Sequence: Synthetic oligonucleotide
  Target: LAMA2; (+) strand; PAM type: NRG; PAM sequence: CAG
ctagtttacgttcccaccaa

SEQ ID NO: 185567 - DNA, 20 bp, Artificial Sequence
  Description of Artificial Sequence: Synthetic oligonucleotide
  Target: LAMA2; (+) strand; PAM type: NRG; PAM sequence: AAG
cgttcccaccaacagtgtac

SEQ ID NO: 185568 - DNA, 20 bp, Artificial Sequence
  Description of Artificial Sequence: Synthetic oligonucleotide
  Target: LAMA2; (+) strand; PAM type: NRG; PAM sequence: AGG
gttcccaccaacagtgtaca

SEQ ID NO: 185569 - DNA, 20 bp, Artificial Sequence
  Description of Artificial Sequence: Synthetic oligonucleotide
  Target: LAMA2; (+) strand; PAM type: NRG; PAM sequence: GGG
ttcccaccaacagtgtacaa

SEQ ID NO: 185570 - DNA, 20 bp, Artificial Sequence
  Description of Artificial Sequence: Synthetic oligonucleotide
  Target: LAMA2; (+) strand; PAM type: NRG; PAM sequence: CAG
tcttttctccacatcctcgt

SEQ ID NO: 185571 - DNA, 20 bp, Artificial Sequence
  Description of Artificial Sequence: Synthetic oligonucleotide
  Target: LAMA2; (+) strand; PAM type: NRG; PAM sequence: TGG
atttgttattgcctgtcttt

SEQ ID NO: 185572 - DNA, 20 bp, Artificial Sequence
  Description of Artificial Sequence: Synthetic oligonucleotide
  Target: LAMA2; (+) strand; PAM type: NRG; PAM sequence: AAG
attgcctgtcttttggataa

SEQ ID NO: 185573 - DNA, 20 bp, Artificial Sequence
  Description of Artificial Sequence: Synthetic oligonucleotide
  Target: LAMA2; (+) strand; PAM type: NRG; PAM sequence: TGG
ggataaaagccattttaact

SEQ ID NO: 185574 - DNA, 20 bp, Artificial Sequence
  Description of Artificial Sequence: Synthetic oligonucleotide
  Target: LAMA2; (+) strand; PAM type: NRG; PAM sequence: GGG
gataaaagccattttaactt

SEQ ID NO: 185575 - DNA, 20 bp, Artificial Sequence
  Description of Artificial Sequence: Synthetic oligonucleotide
  Target: LAMA2; (+) strand; PAM type: NRG; PAM sequence: GAG
aaagccattttaacttgggt

SEQ ID NO: 185576 - DNA, 20 bp, Artificial Sequence
  Description of Artificial Sequence: Synthetic oligonucleotide
  Target: LAMA2; (+) strand; PAM type: NRG; PAM sequence: TAG
ttttaacttgggtgagatga

SEQ ID NO: 185577 - DNA, 20 bp, Artificial Sequence
  Description of Artificial Sequence: Synthetic oligonucleotide
  Target: LAMA2; (+) strand; PAM type: NRG; PAM sequence: TAG
ggtgagatgatagctcattg

SEQ ID NO: 185578 - DNA, 20 bp, Artificial Sequence
  Description of Artificial Sequence: Synthetic oligonucleotide
  Target: LAMA2; (+) strand; PAM type: NRG; PAM sequence: CAG
atttgcatttctctgatgat

SEQ ID NO: 185579 - DNA, 20 bp, Artificial Sequence
  Description of Artificial Sequence: Synthetic oligonucleotide
  Target: LAMA2; (+) strand; PAM type: NRG; PAM sequence: GAG
ctctgatgatcagtgatgtt

SEQ ID NO: 185580 - DNA, 20 bp, Artificial Sequence
  Description of Artificial Sequence: Synthetic oligonucleotide
  Target: LAMA2; (+) strand; PAM type: NRG; PAM sequence: GAG
tcatctgaatatcttctttt

SEQ ID NO: 185581 - DNA, 20 bp, Artificial Sequence
  Description of Artificial Sequence: Synthetic oligonucleotide
  Target: LAMA2; (+) strand; PAM type: NRG; PAM sequence: TAG
atcttgtacccatttttaaa

SEQ ID NO: 185582 - DNA, 20 bp, Artificial Sequence
  Description of Artificial Sequence: Synthetic oligonucleotide
  Target: LAMA2; (+) strand; PAM type: NRG; PAM sequence: AGG
tcttgtacccatttttaaat

SEQ ID NO: 185583 - DNA, 20 bp, Artificial Sequence
  Description of Artificial Sequence: Synthetic oligonucleotide
  Target: LAMA2; (+) strand; PAM type: NRG; PAM sequence: TAG
ccatttttaaataggattat

SEQ ID NO: 185584 - DNA, 20 bp, Artificial Sequence
  Description of Artificial Sequence: Synthetic oligonucleotide
  Target: LAMA2; (+) strand; PAM type: NRG; PAM sequence: TAG
attattagatttttttccta

SEQ ID NO: 185585 - DNA, 20 bp, Artificial Sequence
  Description of Artificial Sequence: Synthetic oligonucleotide
  Target: LAMA2; (+) strand; PAM type: NRG; PAM sequence: TGG
tttgaattccttttatattc

SEQ ID NO: 185586 - DNA, 20 bp, Artificial Sequence
  Description of Artificial Sequence: Synthetic oligonucleotide
  Target: LAMA2; (+) strand; PAM type: NRG; PAM sequence: CAG
tctggttattaatcccttct

SEQ ID NO: 185587 - DNA, 20 bp, Artificial Sequence
  Description of Artificial Sequence: Synthetic oligonucleotide
  Target: LAMA2; (+) strand; PAM type: NRG; PAM sequence: TGG
gttattaatcccttctcaga

SEQ ID NO: 185588 - DNA, 20 bp, Artificial Sequence
  Description of Artificial Sequence: Synthetic oligonucleotide
  Target: LAMA2; (+) strand; PAM type: NRG; PAM sequence: GGG
ttattaatcccttctcagat

SEQ ID NO: 185589 - DNA, 20 bp, Artificial Sequence
  Description of Artificial Sequence: Synthetic oligonucleotide
  Target: LAMA2; (+) strand; PAM type: NRG; PAM sequence: TAG
ttaatcccttctcagatggg

SEQ ID NO: 185590 - DNA, 20 bp, Artificial Sequence
  Description of Artificial Sequence: Synthetic oligonucleotide
  Target: LAMA2; (+) strand; PAM type: NRG; PAM sequence: TGG
aaatattttatcccattctg

SEQ ID NO: 185591 - DNA, 20 bp, Artificial Sequence
  Description of Artificial Sequence: Synthetic oligonucleotide
  Target: LAMA2; (+) strand; PAM type: NRG; PAM sequence: GGG
aatattttatcccattctgt

SEQ ID NO: 185592 - DNA, 20 bp, Artificial Sequence
  Description of Artificial Sequence: Synthetic oligonucleotide
  Target: LAMA2; (+) strand; PAM type: NRG; PAM sequence: CAG
tgattgtttactttgctgtg

SEQ ID NO: 185593 - DNA, 20 bp, Artificial Sequence
  Description of Artificial Sequence: Synthetic oligonucleotide
  Target: LAMA2; (+) strand; PAM type: NRG; PAM sequence: AAG
ttgtttactttgctgtgcag

SEQ ID NO: 185594 - DNA, 20 bp, Artificial Sequence
  Description of Artificial Sequence: Synthetic oligonucleotide
  Target: LAMA2; (+) strand; PAM type: NRG; PAM sequence: TGG
ccatttgtctatttttactt

SEQ ID NO: 185595 - DNA, 20 bp, Artificial Sequence
  Description of Artificial Sequence: Synthetic oligonucleotide
  Target: LAMA2; (+) strand; PAM type: NRG; PAM sequence: TGG
actttggttgcctgtgcttg

SEQ ID NO: 185596 - DNA, 20 bp, Artificial Sequence
  Description of Artificial Sequence: Synthetic oligonucleotide
  Target: LAMA2; (+) strand; PAM type: NRG; PAM sequence: GGG
ctttggttgcctgtgcttgt

SEQ ID NO: 185597 - DNA, 20 bp, Artificial Sequence
  Description of Artificial Sequence: Synthetic oligonucleotide
  Target: LAMA2; (+) strand; PAM type: NRG; PAM sequence: CAG
ctgtgcttgtgggtattact

SEQ ID NO: 185598 - DNA, 20 bp, Artificial Sequence
  Description of Artificial Sequence: Synthetic oligonucleotide
  Target: LAMA2; (+) strand; PAM type: NRG; PAM sequence: AGG
tgtgcttgtgggtattactc

SEQ ID NO: 185599 - DNA, 20 bp, Artificial Sequence
  Description of Artificial Sequence: Synthetic oligonucleotide
  Target: LAMA2; (+) strand; PAM type: NRG; PAM sequence: AAG
gcttgtgggtattactcagg

SEQ ID NO: 185600 - DNA, 20 bp, Artificial Sequence
  Description of Artificial Sequence: Synthetic oligonucleotide
  Target: LAMA2; (+) strand; PAM type: NRG; PAM sequence: TGG
ctttgcccatttcaatgtcc

SEQ ID NO: 185601 - DNA, 20 bp, Artificial Sequence
  Description of Artificial Sequence: Synthetic oligonucleotide
  Target: LAMA2; (+) strand; PAM type: NRG; PAM sequence: GAG
ttgcccatttcaatgtcctg

SEQ ID NO: 185602 - DNA, 20 bp, Artificial Sequence
  Description of Artificial Sequence: Synthetic oligonucleotide
  Target: LAMA2; (+) strand; PAM type: NRG; PAM sequence: TAG
tccccaatgttttattgtaa

SEQ ID NO: 185603 - DNA, 20 bp, Artificial Sequence
  Description of Artificial Sequence: Synthetic oligonucleotide
  Target: LAMA2; (+) strand; PAM type: NRG; PAM sequence: TAG
gttttattgtaatagtttca

SEQ ID NO: 185604 - DNA, 20 bp, Artificial Sequence
  Description of Artificial Sequence: Synthetic oligonucleotide
  Target: LAMA2; (+) strand; PAM type: NRG; PAM sequence: TGG
tattgtaatagtttcatagt

SEQ ID NO: 185605 - DNA, 20 bp, Artificial Sequence
  Description of Artificial Sequence: Synthetic oligonucleotide
  Target: LAMA2; (+) strand; PAM type: NRG; PAM sequence: TAG
agtttcatagttggatctct

SEQ ID NO: 185606 - DNA, 20 bp, Artificial Sequence
  Description of Artificial Sequence: Synthetic oligonucleotide
  Target: LAMA2; (+) strand; PAM type: NRG; PAM sequence: AAG
tagttggatctcttagattc

SEQ ID NO: 185607 - DNA, 20 bp, Artificial Sequence
  Description of Artificial Sequence: Synthetic oligonucleotide
  Target: LAMA2; (+) strand; PAM type: NRG; PAM sequence: TGG
tttgatttgatttttgtata

SEQ ID NO: 185608 - DNA, 20 bp, Artificial Sequence
  Description of Artificial Sequence: Synthetic oligonucleotide
  Target: LAMA2; (+) strand; PAM type: NRG; PAM sequence: GAG
atttgatttttgtatatggc

SEQ ID NO: 185609 - DNA, 20 bp, Artificial Sequence
  Description of Artificial Sequence: Synthetic oligonucleotide
  Target: LAMA2; (+) strand; PAM type: NRG; PAM sequence: GAG
ttgatttttgtatatggcga

SEQ ID NO: 185610 - DNA, 20 bp, Artificial Sequence
  Description of Artificial Sequence: Synthetic oligonucleotide
  Target: LAMA2; (+) strand; PAM type: NRG; PAM sequence: TAG
tttttgtatatggcgagaga

SEQ ID NO: 185611 - DNA, 20 bp, Artificial Sequence
  Description of Artificial Sequence: Synthetic oligonucleotide
  Target: LAMA2; (+) strand; PAM type: NRG; PAM sequence: AGG
ttttgtatatggcgagagat

SEQ ID NO: 185612 - DNA, 20 bp, Artificial Sequence
  Description of Artificial Sequence: Synthetic oligonucleotide
  Target: LAMA2; (+) strand; PAM type: NRG; PAM sequence: GGG
tttgtatatggcgagagata

SEQ ID NO: 185613 - DNA, 20 bp, Artificial Sequence
  Description of Artificial Sequence: Synthetic oligonucleotide
  Target: LAMA2; (+) strand; PAM type: NRG; PAM sequence: TAG
tatggcgagagatagggatc

SEQ ID NO: 185614 - DNA, 20 bp, Artificial Sequence
  Description of Artificial Sequence: Synthetic oligonucleotide
  Target: LAMA2; (+) strand; PAM type: NRG; PAM sequence: CAG
ttcttccgcatatgaatatc

SEQ ID NO: 185615 - DNA, 20 bp, Artificial Sequence
  Description of Artificial Sequence: Synthetic oligonucleotide
  Target: LAMA2; (+) strand; PAM type: NRG; PAM sequence: AAG
tttccctgcaccatttattg

SEQ ID NO: 185616 - DNA, 20 bp, Artificial Sequence
  Description of Artificial Sequence: Synthetic oligonucleotide
  Target: LAMA2; (+) strand; PAM type: NRG; PAM sequence: GAG
tccctgcaccatttattgaa

SEQ ID NO: 185617 - DNA, 20 bp, Artificial Sequence
  Description of Artificial Sequence: Synthetic oligonucleotide
  Target: LAMA2; (+) strand; PAM type: NRG; PAM sequence: TAG
ctttccctaatgtatgttct

SEQ ID NO: 185618 - DNA, 20 bp, Artificial Sequence
  Description of Artificial Sequence: Synthetic oligonucleotide
  Target: LAMA2; (+) strand; PAM type: NRG; PAM sequence: TGG
gtatgttcttagaaccttta

SEQ ID NO: 185619 - DNA, 20 bp, Artificial Sequence
  Description of Artificial Sequence: Synthetic oligonucleotide
  Target: LAMA2; (+) strand; PAM type: NRG; PAM sequence: GAG
ttagaacctttatggaaaat

SEQ ID NO: 185620 - DNA, 20 bp, Artificial Sequence
  Description of Artificial Sequence: Synthetic oligonucleotide
  Target: LAMA2; (+) strand; PAM type: NRG; PAM sequence: TAG
tatggaaaatgagttcactg

SEQ ID NO: 185621 - DNA, 20 bp, Artificial Sequence
  Description of Artificial Sequence: Synthetic oligonucleotide
  Target: LAMA2; (+) strand; PAM type: NRG; PAM sequence: TGG
atgagttcactgtagatgta

SEQ ID NO: 185622 - DNA, 20 bp, Artificial Sequence
  Description of Artificial Sequence: Synthetic oligonucleotide
  Target: LAMA2; (+) strand; PAM type: NRG; PAM sequence: TGG
tagatgtatggatttatttc

SEQ ID NO: 185623 - DNA, 20 bp, Artificial Sequence
  Description of Artificial Sequence: Synthetic oligonucleotide
  Target: LAMA2; (+) strand; PAM type: NRG; PAM sequence: TGG
gcttctctatcctgttccac

SEQ ID NO: 185624 - DNA, 20 bp, Artificial Sequence
  Description of Artificial Sequence: Synthetic oligonucleotide
  Target: LAMA2; (+) strand; PAM type: NRG; PAM sequence: CAG
ctatgtgcctatttttatgc

SEQ ID NO: 185625 - DNA, 20 bp, Artificial Sequence
  Description of Artificial Sequence: Synthetic oligonucleotide
  Target: LAMA2; (+) strand; PAM type: NRG; PAM sequence: TGG
tatgccagtactatgccgtt

SEQ ID NO: 185626 - DNA, 20 bp, Artificial Sequence
  Description of Artificial Sequence: Synthetic oligonucleotide
  Target: LAMA2; (+) strand; PAM type: NRG; PAM sequence: TAG
ctatgccgtttggcttacta

SEQ ID NO: 185627 - DNA, 20 bp, Artificial Sequence
  Description of Artificial Sequence: Synthetic oligonucleotide
  Target: LAMA2; (+) strand; PAM type: NRG; PAM sequence: TGG
tttggcttactatagttctg

SEQ ID NO: 185628 - DNA, 20 bp, Artificial Sequence
  Description of Artificial Sequence: Synthetic oligonucleotide
  Target: LAMA2; (+) strand; PAM type: NRG; PAM sequence: AAG
tagttctgtggtataatttg

SEQ ID NO: 185629 - DNA, 20 bp, Artificial Sequence
  Description of Artificial Sequence: Synthetic oligonucleotide
  Target: LAMA2; (+) strand; PAM type: NRG; PAM sequence: CGG
ctgtggtataatttgaagtc

SEQ ID NO: 185630 - DNA, 20 bp, Artificial Sequence
  Description of Artificial Sequence: Synthetic oligonucleotide
  Target: LAMA2; (+) strand; PAM type: NRG; PAM sequence: TAG
ccaattttgttccttttgca

SEQ ID NO: 185631 - DNA, 20 bp, Artificial Sequence
  Description of Artificial Sequence: Synthetic oligonucleotide
  Target: LAMA2; (+) strand; PAM type: NRG; PAM sequence: AGG
caattttgttccttttgcat

SEQ ID NO: 185632 - DNA, 20 bp, Artificial Sequence
  Description of Artificial Sequence: Synthetic oligonucleotide
  Target: LAMA2; (+) strand; PAM type: NRG; PAM sequence: TAG
tttgttccttttgcatagga

SEQ ID NO: 185633 - DNA, 20 bp, Artificial Sequence
  Description of Artificial Sequence: Synthetic oligonucleotide
  Target: LAMA2; (+) strand; PAM type: NRG; PAM sequence: TGG
ccttttgcataggatagctg

SEQ ID NO: 185634 - DNA, 20 bp, Artificial Sequence
  Description of Artificial Sequence: Synthetic oligonucleotide
  Target: LAMA2; (+) strand; PAM type: NRG; PAM sequence: TGG
taggatagctgtggctattc

SEQ ID NO: 185635 - DNA, 20 bp, Artificial Sequence
  Description of Artificial Sequence: Synthetic oligonucleotide
  Target: LAMA2; (+) strand; PAM type: NRG; PAM sequence: GGG
aggatagctgtggctattct

SEQ ID NO: 185636 - DNA, 20 bp, Artificial Sequence
  Description of Artificial Sequence: Synthetic oligonucleotide
  Target: LAMA2; (+) strand; PAM type: NRG; PAM sequence: TAG
tctgggtttcatatgaattt

SEQ ID NO: 185637 - DNA, 20 bp, Artificial Sequence
  Description of Artificial Sequence: Synthetic oligonucleotide
  Target: LAMA2; (+) strand; PAM type: NRG; PAM sequence: AGG
ctgggtttcatatgaatttt

SEQ ID NO: 185638 - DNA, 20 bp, Artificial Sequence
  Description of Artificial Sequence: Synthetic oligonucleotide
  Target: LAMA2; (+) strand; PAM type: NRG; PAM sequence: AAG
gaattttttctatttctgtg

SEQ ID NO: 185639 - DNA, 20 bp, Artificial Sequence
  Description of Artificial Sequence: Synthetic oligonucleotide
  Target: LAMA2; (+) strand; PAM type: NRG; PAM sequence: TGG
atttctgtgaagaatctcat

SEQ ID NO: 185640 - DNA, 20 bp, Artificial Sequence
  Description of Artificial Sequence: Synthetic oligonucleotide
  Target: LAMA2; (+) strand; PAM type: NRG; PAM sequence: TAG
gaatctcattggtattttaa

SEQ ID NO: 185641 - DNA, 20 bp, Artificial Sequence
  Description of Artificial Sequence: Synthetic oligonucleotide
  Target: LAMA2; (+) strand; PAM type: NRG; PAM sequence: AGG
aatctcattggtattttaat

SEQ ID NO: 185642 - DNA, 20 bp, Artificial Sequence
  Description of Artificial Sequence: Synthetic oligonucleotide
  Target: LAMA2; (+) strand; PAM type: NRG; PAM sequence: GGG
atctcattggtattttaata

SEQ ID NO: 185643 - DNA, 20 bp, Artificial Sequence
  Description of Artificial Sequence: Synthetic oligonucleotide
  Target: LAMA2; (+) strand; PAM type: NRG; PAM sequence: CAG
tagggattatattaaatctg

SEQ ID NO: 185644 - DNA, 20 bp, Artificial Sequence
  Description of Artificial Sequence: Synthetic oligonucleotide
  Target: LAMA2; (+) strand; PAM type: NRG; PAM sequence: TGG
attaaatctgcagattgctc

SEQ ID NO: 185645 - DNA, 20 bp, Artificial Sequence
  Description of Artificial Sequence: Synthetic oligonucleotide
  Target: LAMA2; (+) strand; PAM type: NRG; PAM sequence: GGG
ttaaatctgcagattgctct

SEQ ID NO: 185646 - DNA, 20 bp, Artificial Sequence
  Description of Artificial Sequence: Synthetic oligonucleotide
  Target: LAMA2; (+) strand; PAM type: NRG; PAM sequence: TAG
aatctgcagattgctctggg

SEQ ID NO: 185647 - DNA, 20 bp, Artificial Sequence
  Description of Artificial Sequence: Synthetic oligonucleotide
  Target: LAMA2; (+) strand; PAM type: NRG; PAM sequence: TGG
gcagattgctctgggtagta

SEQ ID NO: 185648 - DNA, 20 bp, Artificial Sequence
  Description of Artificial Sequence: Synthetic oligonucleotide
  Target: LAMA2; (+) strand; PAM type: NRG; PAM sequence: TGG
attcttccaatccattaaca

SEQ ID NO: 185649 - DNA, 20 bp, Artificial Sequence
  Description of Artificial Sequence: Synthetic oligonucleotide
  Target: LAMA2; (+) strand; PAM type: NRG; PAM sequence: TAG
tttcttgcatcattgtttta

SEQ ID NO: 185650 - DNA, 20 bp, Artificial Sequence
  Description of Artificial Sequence: Synthetic oligonucleotide
  Target: LAMA2; (+) strand; PAM type: NRG; PAM sequence: AAG
tttttattgtactttcctct

SEQ ID NO: 185651 - DNA, 20 bp, Artificial Sequence
  Description of Artificial Sequence: Synthetic oligonucleotide
  Target: LAMA2; (+) strand; PAM type: NRG; PAM sequence: TGG
ttgtactttcctctaagatc

SEQ ID NO: 185652 - DNA, 20 bp, Artificial Sequence
  Description of Artificial Sequence: Synthetic oligonucleotide
  Target: LAMA2; (+) strand; PAM type: NRG; PAM sequence: AAG
tctaagatctggaacacgac

SEQ ID NO: 185653 - DNA, 20 bp, Artificial Sequence
  Description of Artificial Sequence: Synthetic oligonucleotide
  Target: LAMA2; (+) strand; PAM type: NRG; PAM sequence: AGG
ctaagatctggaacacgaca

SEQ ID NO: 185654 - DNA, 20 bp, Artificial Sequence
  Description of Artificial Sequence: Synthetic oligonucleotide
  Target: LAMA2; (+) strand; PAM type: NRG; PAM sequence: TAG
ctcaccactgttattcaaca

SEQ ID NO: 185655 - DNA, 20 bp, Artificial Sequence
  Description of Artificial Sequence: Synthetic oligonucleotide
  Target: LAMA2; (+) strand; PAM type: NRG; PAM sequence: TGG
actgttattcaacatagtat

SEQ ID NO: 185656 - DNA, 20 bp, Artificial Sequence
  Description of Artificial Sequence: Synthetic oligonucleotide
  Target: LAMA2; (+) strand; PAM type: NRG; PAM sequence: AAG
gttattcaacatagtattgg

SEQ ID NO: 185657 - DNA, 20 bp, Artificial Sequence
  Description of Artificial Sequence: Synthetic oligonucleotide
  Target: LAMA2; (+) strand; PAM type: NRG; PAM sequence: TAG
caacatagtattggaagtcc

SEQ ID NO: 185658 - DNA, 20 bp, Artificial Sequence
  Description of Artificial Sequence: Synthetic oligonucleotide
  Target: LAMA2; (+) strand; PAM type: NRG; PAM sequence: TAG
atagtattggaagtcctagc

SEQ ID NO: 185659 - DNA, 20 bp, Artificial Sequence
  Description of Artificial Sequence: Synthetic oligonucleotide
  Target: LAMA2; (+) strand; PAM type: NRG; PAM sequence: GAG
agtattggaagtcctagcta

SEQ ID NO: 185660 - DNA, 20 bp, Artificial Sequence
  Description of Artificial Sequence: Synthetic oligonucleotide
  Target: LAMA2; (+) strand; PAM type: NRG; PAM sequence: CAG
attggaagtcctagctagag

SEQ ID NO: 185661 - DNA, 20 bp, Artificial Sequence
  Description of Artificial Sequence: Synthetic oligonucleotide
  Target: LAMA2; (+) strand; PAM type: NRG; PAM sequence: CAG
gaagtcctagctagagcagt

SEQ ID NO: 185662 - DNA, 20 bp, Artificial Sequence
  Description of Artificial Sequence: Synthetic oligonucleotide
  Target: LAMA2; (+) strand; PAM type: NRG; PAM sequence: AAG
cctagctagagcagtcagac

SEQ ID NO: 185663 - DNA, 20 bp, Artificial Sequence
  Description of Artificial Sequence: Synthetic oligonucleotide
  Target: LAMA2; (+) strand; PAM type: NRG; PAM sequence: GAG
tagctagagcagtcagacaa

SEQ ID NO: 185664 - DNA, 20 bp, Artificial Sequence
  Description of Artificial Sequence: Synthetic oligonucleotide
  Target: LAMA2; (+) strand; PAM type: NRG; PAM sequence: AAG
agcagtcagacaagagaaaa

SEQ ID NO: 185665 - DNA, 20 bp, Artificial Sequence
  Description of Artificial Sequence: Synthetic oligonucleotide
  Target: LAMA2; (+) strand; PAM type: NRG; PAM sequence: CGG
agacaagagaaaaaagtaaa

SEQ ID NO: 185666 - DNA, 20 bp, Artificial Sequence
  Description of Artificial Sequence: Synthetic oligonucleotide
  Target: LAMA2; (+) strand; PAM type: NRG; PAM sequence: AAG
gaaaaaagtaaacggcatcc

SEQ ID NO: 185667 - DNA, 20 bp, Artificial Sequence
  Description of Artificial Sequence: Synthetic oligonucleotide
  Target: LAMA2; (+) strand; PAM type: NRG; PAM sequence: AGG
aaaaaagtaaacggcatcca

SEQ ID NO: 185668 - DNA, 20 bp, Artificial Sequence
  Description of Artificial Sequence: Synthetic oligonucleotide
  Target: LAMA2; (+) strand; PAM type: NRG; PAM sequence: AAG
aaagtaaacggcatccaagg

SEQ ID NO: 185669 - DNA, 20 bp, Artificial Sequence
  Description of Artificial Sequence: Synthetic oligonucleotide
  Target: LAMA2; (+) strand; PAM type: NRG; PAM sequence: AAG
gtaaacggcatccaaggaag

SEQ ID NO: 185670 - DNA, 20 bp, Artificial Sequence
  Description of Artificial Sequence: Synthetic oligonucleotide
  Target: LAMA2; (+) strand; PAM type: NRG; PAM sequence: TGG
aaatgatatgattttgtatt

SEQ ID NO: 185671 - DNA, 20 bp, Artificial Sequence
  Description of Artificial Sequence: Synthetic oligonucleotide
  Target: LAMA2; (+) strand; PAM type: NRG; PAM sequence: AAG
atatgattttgtatttggaa

SEQ ID NO: 185672 - DNA, 20 bp, Artificial Sequence
  Description of Artificial Sequence: Synthetic oligonucleotide
  Target: LAMA2; (+) strand; PAM type: NRG; PAM sequence: AAG
tttgtatttggaaaagccta

SEQ ID NO: 185673 - DNA, 20 bp, Artificial Sequence
  Description of Artificial Sequence: Synthetic oligonucleotide
  Target: LAMA2; (+) strand; PAM type: NRG; PAM sequence: TAG
agaccccaccaaaaaaccat

SEQ ID NO: 185674 - DNA, 20 bp, Artificial Sequence
  Description of Artificial Sequence: Synthetic oligonucleotide
  Target: LAMA2; (+) strand; PAM type: NRG; PAM sequence: CAG
accattagaactgataaatt

SEQ ID NO: 185675 - DNA, 20 bp, Artificial Sequence
  Description of Artificial Sequence: Synthetic oligonucleotide
  Target: LAMA2; (+) strand; PAM type: NRG; PAM sequence: AAG
tagaactgataaattcagta

SEQ ID NO: 185676 - DNA, 20 bp, Artificial Sequence
  Description of Artificial Sequence: Synthetic oligonucleotide
  Target: LAMA2; (+) strand; PAM type: NRG; PAM sequence: CAG
tgataaattcagtaaagctg

SEQ ID NO: 185677 - DNA, 20 bp, Artificial Sequence
  Description of Artificial Sequence: Synthetic oligonucleotide
  Target: LAMA2; (+) strand; PAM type: NRG; PAM sequence: AGG
gataaattcagtaaagctgc

SEQ ID NO: 185678 - DNA, 20 bp, Artificial Sequence
  Description of Artificial Sequence: Synthetic oligonucleotide
  Target: LAMA2; (+) strand; PAM type: NRG; PAM sequence: AAG
cagtaaagctgcaggataca

SEQ ID NO: 185679 - DNA, 20 bp, Artificial Sequence
  Description of Artificial Sequence: Synthetic oligonucleotide
  Target: LAMA2; (+) strand; PAM type: NRG; PAM sequence: CAG
caaagtcaacatacaaaaat

SEQ ID NO: 185680 - DNA, 20 bp, Artificial Sequence
  Description of Artificial Sequence: Synthetic oligonucleotide
  Target: LAMA2; (+) strand; PAM type: NRG; PAM sequence: CAG
gtaacatttctatatgccaa

SEQ ID NO: 185681 - DNA, 20 bp, Artificial Sequence
  Description of Artificial Sequence: Synthetic oligonucleotide
  Target: LAMA2; (+) strand; PAM type: NRG; PAM sequence: CAG
atatgccaacagcaaacaat

SEQ ID NO: 185682 - DNA, 20 bp, Artificial Sequence
  Description of Artificial Sequence: Synthetic oligonucleotide
  Target: LAMA2; (+) strand; PAM type: NRG; PAM sequence: AAG
caacagcaaacaatcagaaa

SEQ ID NO: 185683 - DNA, 20 bp, Artificial Sequence
  Description of Artificial Sequence: Synthetic oligonucleotide
  Target: LAMA2; (+) strand; PAM type: NRG; PAM sequence: AAG
aacaatcagaaaaagaaatc

SEQ ID NO: 185684 - DNA, 20 bp, Artificial Sequence
  Description of Artificial Sequence: Synthetic oligonucleotide
  Target: LAMA2; (+) strand; PAM type: NRG; PAM sequence: AAG
atcagaaaaagaaatcaaga

SEQ ID NO: 185685 - DNA, 20 bp, Artificial Sequence
  Description of Artificial Sequence: Synthetic oligonucleotide
  Target: LAMA2; (+) strand; PAM type: NRG; PAM sequence: CAG
caagaaagtaattccattta

SEQ ID NO: 185686 - DNA, 20 bp, Artificial Sequence
  Description of Artificial Sequence: Synthetic oligonucleotide
  Target: LAMA2; (+) strand; PAM type: NRG; PAM sequence: TAG
gaaagtaattccatttacag

SEQ ID NO: 185687 - DNA, 20 bp, Artificial Sequence
  Description of Artificial Sequence: Synthetic oligonucleotide
  Target: LAMA2; (+) strand; PAM type: NRG; PAM sequence: AAG
tacaaataaaataaaatact

SEQ ID NO: 185688 - DNA, 20 bp, Artificial Sequence
  Description of Artificial Sequence: Synthetic oligonucleotide
  Target: LAMA2; (+) strand; PAM type: NRG; PAM sequence: AGG
acaaataaaataaaatacta

SEQ ID NO: 185689 - DNA, 20 bp, Artificial Sequence
  Description of Artificial Sequence: Synthetic oligonucleotide
  Target: LAMA2; (+) strand; PAM type: NRG; PAM sequence: AAG
tactaaggaattaaccaaat

SEQ ID NO: 185690 - DNA, 20 bp, Artificial Sequence
  Description of Artificial Sequence: Synthetic oligonucleotide
  Target: LAMA2; (+) strand; PAM type: NRG; PAM sequence: AAG
ggaattaaccaaataagtga

SEQ ID NO: 185691 - DNA, 20 bp, Artificial Sequence
  Description of Artificial Sequence: Synthetic oligonucleotide
  Target: LAMA2; (+) strand; PAM type: NRG; PAM sequence: AGG
gaattaaccaaataagtgaa

SEQ ID NO: 185692 - DNA, 20 bp, Artificial Sequence
  Description of Artificial Sequence: Synthetic oligonucleotide
  Target: LAMA2; (+) strand; PAM type: NRG; PAM sequence: AAG
atctgcaattaatgtacttt

SEQ ID NO: 185693 - DNA, 20 bp, Artificial Sequence
  Description of Artificial Sequence: Synthetic oligonucleotide
  Target: LAMA2; (+) strand; PAM type: NRG; PAM sequence: TAG
gcaattaatgtactttaaga

SEQ ID NO: 185694 - DNA, 20 bp, Artificial Sequence
  Description of Artificial Sequence: Synthetic oligonucleotide
  Target: LAMA2; (+) strand; PAM type: NRG; PAM sequence: CAG
gtactttaagatagaatatt

SEQ ID NO: 185695 - DNA, 20 bp, Artificial Sequence
  Description of Artificial Sequence: Synthetic oligonucleotide
  Target: LAMA2; (+) strand; PAM type: NRG; PAM sequence: TGG
agatagaatattcagtcccg

SEQ ID NO: 185696 - DNA, 20 bp, Artificial Sequence
  Description of Artificial Sequence: Synthetic oligonucleotide
  Target: LAMA2; (+) strand; PAM type: NRG; PAM sequence: TAG
tattcagtcccgtggtatca

SEQ ID NO: 185697 - DNA, 20 bp, Artificial Sequence
  Description of Artificial Sequence: Synthetic oligonucleotide
  Target: LAMA2; (+) strand; PAM type: NRG; PAM sequence: TAG
agaaatacgtgtatgttcat

SEQ ID NO: 185698 - DNA, 20 bp, Artificial Sequence
  Description of Artificial Sequence: Synthetic oligonucleotide
  Target: LAMA2; (+) strand; PAM type: NRG; PAM sequence: AAG
ttcattagaaataaactaat

SEQ ID NO: 185699 - DNA, 20 bp, Artificial Sequence
  Description of Artificial Sequence: Synthetic oligonucleotide
  Target: LAMA2; (+) strand; PAM type: NRG; PAM sequence: TGG
actaataagcacataatatg

SEQ ID NO: 185700 - DNA, 20 bp, Artificial Sequence
  Description of Artificial Sequence: Synthetic oligonucleotide
  Target: LAMA2; (+) strand; PAM type: NRG; PAM sequence: GAG
taataagcacataatatgtg

SEQ ID NO: 185701 - DNA, 20 bp, Artificial Sequence
  Description of Artificial Sequence: Synthetic oligonucleotide
  Target: LAMA2; (+) strand; PAM type: NRG; PAM sequence: TGG
ataatatgtggagattatga

SEQ ID NO: 185702 - DNA, 20 bp, Artificial Sequence
  Description of Artificial Sequence: Synthetic oligonucleotide
  Target: LAMA2; (+) strand; PAM type: NRG; PAM sequence: GGG
taatatgtggagattatgat

SEQ ID NO: 185703 - DNA, 20 bp, Artificial Sequence
  Description of Artificial Sequence: Synthetic oligonucleotide
  Target: LAMA2; (+) strand; PAM type: NRG; PAM sequence: CAG
gtggagattatgatgggaaa

SEQ ID NO: 185704 - DNA, 20 bp, Artificial Sequence
  Description of Artificial Sequence: Synthetic oligonucleotide
  Target: LAMA2; (+) strand; PAM type: NRG; PAM sequence: AAG
ttatgatgggaaacagaaat

SEQ ID NO: 185705 - DNA, 20 bp, Artificial Sequence
  Description of Artificial Sequence: Synthetic oligonucleotide
  Target: LAMA2; (+) strand; PAM type: NRG; PAM sequence: TAG
ggaaacagaaataagtaaca

SEQ ID NO: 185706 - DNA, 20 bp, Artificial Sequence
  Description of Artificial Sequence: Synthetic oligonucleotide
  Target: LAMA2; (+) strand; PAM type: NRG; PAM sequence: AAG
gtaacatagttctttctatc

SEQ ID NO: 185707 - DNA, 20 bp, Artificial Sequence
  Description of Artificial Sequence: Synthetic oligonucleotide
  Target: LAMA2; (+) strand; PAM type: NRG; PAM sequence: TGG
atcaagaatatattatcaac

SEQ ID NO: 185708 - DNA, 20 bp, Artificial Sequence
  Description of Artificial Sequence: Synthetic oligonucleotide
  Target: LAMA2; (+) strand; PAM type: NRG; PAM sequence: AAG
agaatatattatcaactggt

SEQ ID NO: 185709 - DNA, 20 bp, Artificial Sequence
  Description of Artificial Sequence: Synthetic oligonucleotide
  Target: LAMA2; (+) strand; PAM type: NRG; PAM sequence: AAG
atcaactggtaagaaattga

SEQ ID NO: 185710 - DNA, 20 bp, Artificial Sequence
  Description of Artificial Sequence: Synthetic oligonucleotide
  Target: LAMA2; (+) strand; PAM type: NRG; PAM sequence: AAG
aactggtaagaaattgaaag

SEQ ID NO: 185711 - DNA, 20 bp, Artificial Sequence
  Description of Artificial Sequence: Synthetic oligonucleotide
  Target: LAMA2; (+) strand; PAM type: NRG; PAM sequence: AGG
actggtaagaaattgaaaga

SEQ ID NO: 185712 - DNA, 20 bp, Artificial Sequence
  Description of Artificial Sequence: Synthetic oligonucleotide
  Target: LAMA2; (+) strand; PAM type: NRG; PAM sequence: AAG
gtaagaaattgaaagaaggc

SEQ ID NO: 185713 - DNA, 20 bp, Artificial Sequence
  Description of Artificial Sequence: Synthetic oligonucleotide
  Target: LAMA2; (+) strand; PAM type: NRG; PAM sequence: AAG
aaggcaagtaaaaatgatta

SEQ ID NO: 185714 - DNA, 20 bp, Artificial Sequence
  Description of Artificial Sequence: Synthetic oligonucleotide
  Target: LAMA2; (+) strand; PAM type: NRG; PAM sequence: AAG
aaaatgattaaagacaaaaa

SEQ ID NO: 185715 - DNA, 20 bp, Artificial Sequence
  Description of Artificial Sequence: Synthetic oligonucleotide
  Target: LAMA2; (+) strand; PAM type: NRG; PAM sequence: CAG
gattaaagacaaaaaaagca

SEQ ID NO: 185716 - DNA, 20 bp, Artificial Sequence
  Description of Artificial Sequence: Synthetic oligonucleotide
  Target: LAMA2; (+) strand; PAM type: NRG; PAM sequence: TAG
acaaaaaaagcacagttctg

SEQ ID NO: 185717 - DNA, 20 bp, Artificial Sequence
  Description of Artificial Sequence: Synthetic oligonucleotide
  Target: LAMA2; (+) strand; PAM type: NRG; PAM sequence: TAG
agcacagttctgtagatact

SEQ ID NO: 185718 - DNA, 20 bp, Artificial Sequence
  Description of Artificial Sequence: Synthetic oligonucleotide
  Target: LAMA2; (+) strand; PAM type: NRG; PAM sequence: AAG
tctgtagatacttagaaaaa

SEQ ID NO: 185719 - DNA, 20 bp, Artificial Sequence
  Description of Artificial Sequence: Synthetic oligonucleotide
  Target: LAMA2; (+) strand; PAM type: NRG; PAM sequence: TGG
aaaaaaagattaattttgtt

SEQ ID NO: 185720 - DNA, 20 bp, Artificial Sequence
  Description of Artificial Sequence: Synthetic oligonucleotide
  Target: LAMA2; (+) strand; PAM type: NRG; PAM sequence: GGG
aaaaaagattaattttgttt

SEQ ID NO: 185721 - DNA, 20 bp, Artificial Sequence
  Description of Artificial Sequence: Synthetic oligonucleotide
  Target: LAMA2; (+) strand; PAM type: NRG; PAM sequence: GGG
aaaaagattaattttgtttg

SEQ ID NO: 185722 - DNA, 20 bp, Artificial Sequence
  Description of Artificial Sequence: Synthetic oligonucleotide
  Target: LAMA2; (+) strand; PAM type: NRG; PAM sequence: GGG
aaaagattaattttgtttgg

SEQ ID NO: 185723 - DNA, 20 bp, Artificial Sequence
  Description of Artificial Sequence: Synthetic oligonucleotide
  Target: LAMA2; (+) strand; PAM type: NRG; PAM sequence: CAG
taattttgtttgggggatat

SEQ ID NO: 185724 - DNA, 20 bp, Artificial Sequence
  Description of Artificial Sequence: Synthetic oligonucleotide
  Target: LAMA2; (+) strand; PAM type: NRG; PAM sequence: AGG
aattttgtttgggggatatc

SEQ ID NO: 185725 - DNA, 20 bp, Artificial Sequence
  Description of Artificial Sequence: Synthetic oligonucleotide
  Target: LAMA2; (+) strand; PAM type: NRG; PAM sequence: TGG
ggatatcaggaaacgtttca

SEQ ID NO: 185726 - DNA, 20 bp, Artificial Sequence
  Description of Artificial Sequence: Synthetic oligonucleotide
  Target: LAMA2; (+) strand; PAM type: NRG; PAM sequence: GAG
atatcaggaaacgtttcatg

SEQ ID NO: 185727 - DNA, 20 bp, Artificial Sequence
  Description of Artificial Sequence: Synthetic oligonucleotide
  Target: LAMA2; (+) strand; PAM type: NRG; PAM sequence: AGG
tatcaggaaacgtttcatgg

SEQ ID NO: 185728 - DNA, 20 bp, Artificial Sequence
  Description of Artificial Sequence: Synthetic oligonucleotide
  Target: LAMA2; (+) strand; PAM type: NRG; PAM sequence: CAG
gaaacgtttcatggaggaat

SEQ ID NO: 185729 - DNA, 20 bp, Artificial Sequence
  Description of Artificial Sequence: Synthetic oligonucleotide
  Target: LAMA2; (+) strand; PAM type: NRG; PAM sequence: GAG
tcatggaggaatcagcattt

SEQ ID NO: 185730 - DNA, 20 bp, Artificial Sequence
  Description of Artificial Sequence: Synthetic oligonucleotide
  Target: LAMA2; (+) strand; PAM type: NRG; PAM sequence: AAG
ggaggaatcagcatttgagc

SEQ ID NO: 185731 - DNA, 20 bp, Artificial Sequence
  Description of Artificial Sequence: Synthetic oligonucleotide
  Target: LAMA2; (+) strand; PAM type: NRG; PAM sequence: AGG
gaggaatcagcatttgagca

SEQ ID NO: 185732 - DNA, 20 bp, Artificial Sequence
  Description of Artificial Sequence: Synthetic oligonucleotide
  Target: LAMA2; (+) strand; PAM type: NRG; PAM sequence: CAG
tcagcatttgagcaaggctt

SEQ ID NO: 185733 - DNA, 20 bp, Artificial Sequence
  Description of Artificial Sequence: Synthetic oligonucleotide
  Target: LAMA2; (+) strand; PAM type: NRG; PAM sequence: AGG
cagcatttgagcaaggcttc

SEQ ID NO: 185734 - DNA, 20 bp, Artificial Sequence
  Description of Artificial Sequence: Synthetic oligonucleotide
  Target: LAMA2; (+) strand; PAM type: NRG; PAM sequence: AAG
gattttaacactcccataca

SEQ ID NO: 185735 - DNA, 20 bp, Artificial Sequence
  Description of Artificial Sequence: Synthetic oligonucleotide
  Target: LAMA2; (+) strand; PAM type: NRG; PAM sequence: TAG
tttaacactcccatacaaag

SEQ ID NO: 185736 - DNA, 20 bp, Artificial Sequence
  Description of Artificial Sequence: Synthetic oligonucleotide
  Target: LAMA2; (+) strand; PAM type: NRG; PAM sequence: TGG
aacactcccatacaaagtag

SEQ ID NO: 185737 - DNA, 20 bp, Artificial Sequence
  Description of Artificial Sequence: Synthetic oligonucleotide
  Target: LAMA2; (+) strand; PAM type: NRG; PAM sequence: GGG
acactcccatacaaagtagt

SEQ ID NO: 185738 - DNA, 20 bp, Artificial Sequence
  Description of Artificial Sequence: Synthetic oligonucleotide
  Target: LAMA2; (+) strand; PAM type: NRG; PAM sequence: TAG
ccatacaaagtagtgggtga

SEQ ID NO: 185739 - DNA, 20 bp, Artificial Sequence
  Description of Artificial Sequence: Synthetic oligonucleotide
  Target: LAMA2; (+) strand; PAM type: NRG; PAM sequence: AAG
tacaaagtagtgggtgatag

SEQ ID NO: 185740 - DNA, 20 bp, Artificial Sequence
  Description of Artificial Sequence: Synthetic oligonucleotide
  Target: LAMA2; (+) strand; PAM type: NRG; PAM sequence: GAG
caaagtagtgggtgatagaa

SEQ ID NO: 185741 - DNA, 20 bp, Artificial Sequence
  Description of Artificial Sequence: Synthetic oligonucleotide
  Target: LAMA2; (+) strand; PAM type: NRG; PAM sequence: TAG
agtagtgggtgatagaagag

SEQ ID NO: 185742 - DNA, 20 bp, Artificial Sequence
  Description of Artificial Sequence: Synthetic oligonucleotide
  Target: LAMA2; (+) strand; PAM type: NRG; PAM sequence: AGG
gtagtgggtgatagaagagt

SEQ ID NO: 185743 - DNA, 20 bp, Artificial Sequence
  Description of Artificial Sequence: Synthetic oligonucleotide
  Target: LAMA2; (+) strand; PAM type: NRG; PAM sequence: TAG
taggaccctccaccaaaata

SEQ ID NO: 185744 - DNA, 20 bp, Artificial Sequence
  Description of Artificial Sequence: Synthetic oligonucleotide
  Target: LAMA2; (+) strand; PAM type: NRG; PAM sequence: AGG
aggaccctccaccaaaatat

SEQ ID NO: 185745 - DNA, 20 bp, Artificial Sequence
  Description of Artificial Sequence: Synthetic oligonucleotide
  Target: LAMA2; (+) strand; PAM type: NRG; PAM sequence: TAG
accctccaccaaaatatagg

SEQ ID NO: 185746 - DNA, 20 bp, Artificial Sequence
  Description of Artificial Sequence: Synthetic oligonucleotide
  Target: LAMA2; (+) strand; PAM type: NRG; PAM sequence: AGG
ccctccaccaaaatataggt

SEQ ID NO: 185747 - DNA, 20 bp, Artificial Sequence
  Description of Artificial Sequence: Synthetic oligonucleotide
  Target: LAMA2; (+) strand; PAM type: NRG; PAM sequence: CAG
taggtaggaaaccccaccta

SEQ ID NO: 185748 - DNA, 20 bp, Artificial Sequence
  Description of Artificial Sequence: Synthetic oligonucleotide
  Target: LAMA2; (+) strand; PAM type: NRG; PAM sequence: AGG
aggtaggaaaccccacctac

SEQ ID NO: 185749 - DNA, 20 bp, Artificial Sequence
  Description of Artificial Sequence: Synthetic oligonucleotide
  Target: LAMA2; (+) strand; PAM type: NRG; PAM sequence: GGG
ggtaggaaaccccacctaca

SEQ ID NO: 185750 - DNA, 20 bp, Artificial Sequence
  Description of Artificial Sequence: Synthetic oligonucleotide
  Target: LAMA2; (+) strand; PAM type: NRG; PAM sequence: AAG
aggaaaccccacctacaggg

SEQ ID NO: 185751 - DNA, 20 bp, Artificial Sequence
  Description of Artificial Sequence: Synthetic oligonucleotide
  Target: LAMA2; (+) strand; PAM type: NRG; PAM sequence: CAG
aaaccccacctacagggaag

SEQ ID NO: 185752 - DNA, 20 bp, Artificial Sequence
  Description of Artificial Sequence: Synthetic oligonucleotide
  Target: LAMA2; (+) strand; PAM type: NRG; PAM sequence: CAG
acctacagggaagcagaaaa

SEQ ID NO: 185753 - DNA, 20 bp, Artificial Sequence
  Description of Artificial Sequence: Synthetic oligonucleotide
  Target: LAMA2; (+) strand; PAM type: NRG; PAM sequence: CAG
aagcagaaaacagaaaaaca

SEQ ID NO: 185754 - DNA, 20 bp, Artificial Sequence
  Description of Artificial Sequence: Synthetic oligonucleotide
  Target: LAMA2; (+) strand; PAM type: NRG; PAM sequence: AGG
agcagaaaacagaaaaacac

SEQ ID NO: 185755 - DNA, 20 bp, Artificial Sequence
  Description of Artificial Sequence: Synthetic oligonucleotide
  Target: LAMA2; (+) strand; PAM type: NRG; PAM sequence: CAG
tgttaaatattgaaacgtta

SEQ ID NO: 185756 - DNA, 20 bp, Artificial Sequence
  Description of Artificial Sequence: Synthetic oligonucleotide
  Target: LAMA2; (+) strand; PAM type: NRG; PAM sequence: AGG
gttaaatattgaaacgttac

SEQ ID NO: 185757 - DNA, 20 bp, Artificial Sequence
  Description of Artificial Sequence: Synthetic oligonucleotide
  Target: LAMA2; (+) strand; PAM type: NRG; PAM sequence: AAG
ccgaattccatgtgctatga

SEQ ID NO: 185758 - DNA, 20 bp, Artificial Sequence
  Description of Artificial Sequence: Synthetic oligonucleotide
  Target: LAMA2; (+) strand; PAM type: NRG; PAM sequence: AAG
catgtgctatgaaagtctaa

SEQ ID NO: 185759 - DNA, 20 bp, Artificial Sequence
  Description of Artificial Sequence: Synthetic oligonucleotide
  Target: LAMA2; (+) strand; PAM type: NRG; PAM sequence: AAG
aaagtctaaaagcttccccc

SEQ ID NO: 185760 - DNA, 20 bp, Artificial Sequence
  Description of Artificial Sequence: Synthetic oligonucleotide
  Target: LAMA2; (+) strand; PAM type: NRG; PAM sequence: CAG
ccaagatttctgcaaattca

SEQ ID NO: 185761 - DNA, 20 bp, Artificial Sequence
  Description of Artificial Sequence: Synthetic oligonucleotide
  Target: LAMA2; (+) strand; PAM type: NRG; PAM sequence: TGG
gatttctgcaaattcacaga

SEQ ID NO: 185762 - DNA, 20 bp, Artificial Sequence
  Description of Artificial Sequence: Synthetic oligonucleotide
  Target: LAMA2; (+) strand; PAM type: NRG; PAM sequence: TGG
tctgcaaattcacagatggc

SEQ ID NO: 185763 - DNA, 20 bp, Artificial Sequence
  Description of Artificial Sequence: Synthetic oligonucleotide
  Target: LAMA2; (+) strand; PAM type: NRG; PAM sequence: TAG
acagatggctggcattctct

SEQ ID NO: 185764 - DNA, 20 bp, Artificial Sequence
  Description of Artificial Sequence: Synthetic oligonucleotide
  Target: LAMA2; (+) strand; PAM type: NRG; PAM sequence: AAG
tcttagtcaaattttatgac

SEQ ID NO: 185765 - DNA, 20 bp, Artificial Sequence
  Description of Artificial Sequence: Synthetic oligonucleotide
  Target: LAMA2; (+) strand; PAM type: NRG; PAM sequence: CAG
tcaaattttatgacaagttt

SEQ ID NO: 185766 - DNA, 20 bp, Artificial Sequence
  Description of Artificial Sequence: Synthetic oligonucleotide
  Target: LAMA2; (+) strand; PAM type: NRG; PAM sequence: CAG
tttatgacaagtttcagctt

SEQ ID NO: 185767 - DNA, 20 bp, Artificial Sequence
  Description of Artificial Sequence: Synthetic oligonucleotide
  Target: LAMA2; (+) strand; PAM type: NRG; PAM sequence: TGG
gcttcagcttttgcacttaa

SEQ ID NO: 185768 - DNA, 20 bp, Artificial Sequence
  Description of Artificial Sequence: Synthetic oligonucleotide
  Target: LAMA2; (+) strand; PAM type: NRG; PAM sequence: TGG
gattgacttgccatcctgcc

SEQ ID NO: 185769 - DNA, 20 bp, Artificial Sequence
  Description of Artificial Sequence: Synthetic oligonucleotide
  Target: LAMA2; (+) strand; PAM type: NRG; PAM sequence: GGG
attgacttgccatcctgcct

SEQ ID NO: 185770 - DNA, 20 bp, Artificial Sequence
  Description of Artificial Sequence: Synthetic oligonucleotide
  Target: LAMA2; (+) strand; PAM type: NRG; PAM sequence: TGG
tgcctgggctcttataattc

SEQ ID NO: 185771 - DNA, 20 bp, Artificial Sequence
  Description of Artificial Sequence: Synthetic oligonucleotide
  Target: LAMA2; (+) strand; PAM type: NRG; PAM sequence: CAG
aattctggatcaaacaaaac

SEQ ID NO: 185772 - DNA, 20 bp, Artificial Sequence
  Description of Artificial Sequence: Synthetic oligonucleotide
  Target: LAMA2; (+) strand; PAM type: NRG; PAM sequence: CAG
cttgccatcccctgaacaca

SEQ ID NO: 185773 - DNA, 20 bp, Artificial Sequence
  Description of Artificial Sequence: Synthetic oligonucleotide
  Target: LAMA2; (+) strand; PAM type: NRG; PAM sequence: AAG
cagtgtaatacaatttacat

SEQ ID NO: 185774 - DNA, 20 bp, Artificial Sequence
  Description of Artificial Sequence: Synthetic oligonucleotide
  Target: LAMA2; (+) strand; PAM type: NRG; PAM sequence: TGG
aatacaatttacataagact

SEQ ID NO: 185775 - DNA, 20 bp, Artificial Sequence
  Description of Artificial Sequence: Synthetic oligonucleotide
  Target: LAMA2; (+) strand; PAM type: NRG; PAM sequence: GGG
atacaatttacataagactt

SEQ ID NO: 185776 - DNA, 20 bp, Artificial Sequence
  Description of Artificial Sequence: Synthetic oligonucleotide
  Target: LAMA2; (+) strand; PAM type: NRG; PAM sequence: TGG
caatttacataagacttggg

SEQ ID NO: 185777 - DNA, 20 bp, Artificial Sequence
  Description of Artificial Sequence: Synthetic oligonucleotide
  Target: LAMA2; (+) strand; PAM type: NRG; PAM sequence: CAG
ttacataagacttgggtggt

SEQ ID NO: 185778 - DNA, 20 bp, Artificial Sequence
  Description of Artificial Sequence: Synthetic oligonucleotide
  Target: LAMA2; (+) strand; PAM type: NRG; PAM sequence: AAG
cataagacttgggtggtcag

SEQ ID NO: 185779 - DNA, 20 bp, Artificial Sequence
  Description of Artificial Sequence: Synthetic oligonucleotide
  Target: LAMA2; (+) strand; PAM type: NRG; PAM sequence: GAG
taagacttgggtggtcagaa

SEQ ID NO: 185780 - DNA, 20 bp, Artificial Sequence
  Description of Artificial Sequence: Synthetic oligonucleotide
  Target: LAMA2; (+) strand; PAM type: NRG; PAM sequence: TGG
gtcagaagagatcacttcac

SEQ ID NO: 185781 - DNA, 20 bp, Artificial Sequence
  Description of Artificial Sequence: Synthetic oligonucleotide
  Target: LAMA2; (+) strand; PAM type: NRG; PAM sequence: AAG
tttgacatctttgttcttaa

SEQ ID NO: 185782 - DNA, 20 bp, Artificial Sequence
  Description of Artificial Sequence: Synthetic oligonucleotide
  Target: LAMA2; (+) strand; PAM type: NRG; PAM sequence: CAG
ctttgttcttaaaagttttc

SEQ ID NO: 185783 - DNA, 20 bp, Artificial Sequence
  Description of Artificial Sequence: Synthetic oligonucleotide
  Target: LAMA2; (+) strand; PAM type: NRG; PAM sequence: TGG
ttttccagcgacccaatcac

SEQ ID NO: 185784 - DNA, 20 bp, Artificial Sequence
  Description of Artificial Sequence: Synthetic oligonucleotide
  Target: LAMA2; (+) strand; PAM type: NRG; PAM sequence: GGG
tttccagcgacccaatcact

SEQ ID NO: 185785 - DNA, 20 bp, Artificial Sequence
  Description of Artificial Sequence: Synthetic oligonucleotide
  Target: LAMA2; (+) strand; PAM type: NRG; PAM sequence: GGG
ttccagcgacccaatcactg

SEQ ID NO: 185786 - DNA, 20 bp, Artificial Sequence
  Description of Artificial Sequence: Synthetic oligonucleotide
  Target: LAMA2; (+) strand; PAM type: NRG; PAM sequence: TGG
caatcactggggcttttttt

SEQ ID NO: 185787 - DNA, 20 bp, Artificial Sequence
  Description of Artificial Sequence: Synthetic oligonucleotide
  Target: LAMA2; (+) strand; PAM type: NRG; PAM sequence: CAG
ctcttcattccttctgtcct

SEQ ID NO: 185788 - DNA, 20 bp, Artificial Sequence
  Description of Artificial Sequence: Synthetic oligonucleotide
  Target: LAMA2; (+) strand; PAM type: NRG; PAM sequence: CAG
tccctttctgttttattttg

SEQ ID NO: 185789 - DNA, 20 bp, Artificial Sequence
  Description of Artificial Sequence: Synthetic oligonucleotide
  Target: LAMA2; (+) strand; PAM type: NRG; PAM sequence: GAG
cctttctgttttattttgca

SEQ ID NO: 185790 - DNA, 20 bp, Artificial Sequence
  Description of Artificial Sequence: Synthetic oligonucleotide
  Target: LAMA2; (+) strand; PAM type: NRG; PAM sequence: CAG
ttttattttgcagagcaatt

SEQ ID NO: 185791 - DNA, 20 bp, Artificial Sequence
  Description of Artificial Sequence: Synthetic oligonucleotide
  Target: LAMA2; (+) strand; PAM type: NRG; PAM sequence: CAG
tttattttttcgtttatttc

SEQ ID NO: 185792 - DNA, 20 bp, Artificial Sequence
  Description of Artificial Sequence: Synthetic oligonucleotide
  Target: LAMA2; (+) strand; PAM type: NRG; PAM sequence: AAG
attttttcgtttatttccag

SEQ ID NO: 185793 - DNA, 20 bp, Artificial Sequence
  Description of Artificial Sequence: Synthetic oligonucleotide
  Target: LAMA2; (+) strand; PAM type: NRG; PAM sequence: AGG
ttttttcgtttatttccaga

SEQ ID NO: 185794 - DNA, 20 bp, Artificial Sequence
  Description of Artificial Sequence: Synthetic oligonucleotide
  Target: LAMA2; (+) strand; PAM type: NRG; PAM sequence: GGG
tttttcgtttatttccagaa

SEQ ID NO: 185795 - DNA, 20 bp, Artificial Sequence
  Description of Artificial Sequence: Synthetic oligonucleotide
  Target: LAMA2; (+) strand; PAM type: NRG; PAM sequence: GGG
ttttcgtttatttccagaag

SEQ ID NO: 185796 - DNA, 20 bp, Artificial Sequence
  Description of Artificial Sequence: Synthetic oligonucleotide
  Target: LAMA2; (+) strand; PAM type: NRG; PAM sequence: CAG
aggggtgtcactatgttgcc

SEQ ID NO: 185797 - DNA, 20 bp, Artificial Sequence
  Description of Artificial Sequence: Synthetic oligonucleotide
  Target: LAMA2; (+) strand; PAM type: NRG; PAM sequence: AGG
ggggtgtcactatgttgccc

SEQ ID NO: 185798 - DNA, 20 bp, Artificial Sequence
  Description of Artificial Sequence: Synthetic oligonucleotide
  Target: LAMA2; (+) strand; PAM type: NRG; PAM sequence: TGG
ctatgttgcccaggcgcaac

SEQ ID NO: 185799 - DNA, 20 bp, Artificial Sequence
  Description of Artificial Sequence: Synthetic oligonucleotide
  Target: LAMA2; (+) strand; PAM type: NRG; PAM sequence: TAG
gttgcccaggcgcaactggc

SEQ ID NO: 185800 - DNA, 20 bp, Artificial Sequence
  Description of Artificial Sequence: Synthetic oligonucleotide
  Target: LAMA2; (+) strand; PAM type: NRG; PAM sequence: AAG
tttgccaatccaaacccatc

SEQ ID NO: 185801 - DNA, 20 bp, Artificial Sequence
  Description of Artificial Sequence: Synthetic oligonucleotide
  Target: LAMA2; (+) strand; PAM type: NRG; PAM sequence: AGG
ttgccaatccaaacccatca

SEQ ID NO: 185802 - DNA, 20 bp, Artificial Sequence
  Description of Artificial Sequence: Synthetic oligonucleotide
  Target: LAMA2; (+) strand; PAM type: NRG; PAM sequence: CAG
tccaaacccatcaaggttct

SEQ ID NO: 185803 - DNA, 20 bp, Artificial Sequence
  Description of Artificial Sequence: Synthetic oligonucleotide
  Target: LAMA2; (+) strand; PAM type: NRG; PAM sequence: TAG
aaacccatcaaggttctcag

SEQ ID NO: 185804 - DNA, 20 bp, Artificial Sequence
  Description of Artificial Sequence: Synthetic oligonucleotide
  Target: LAMA2; (+) strand; PAM type: NRG; PAM sequence: AAG
caaggttctcagtagaacaa

SEQ ID NO: 185805 - DNA, 20 bp, Artificial Sequence
  Description of Artificial Sequence: Synthetic oligonucleotide
  Target: LAMA2; (+) strand; PAM type: NRG; PAM sequence: CAG
aacaaaagtctttcatgtaa

SEQ ID NO: 185806 - DNA, 20 bp, Artificial Sequence
  Description of Artificial Sequence: Synthetic oligonucleotide
  Target: LAMA2; (+) strand; PAM type: NRG; PAM sequence: CAG
acagctaccatccttcattg

SEQ ID NO: 185807 - DNA, 20 bp, Artificial Sequence
  Description of Artificial Sequence: Synthetic oligonucleotide
  Target: LAMA2; (+) strand; PAM type: NRG; PAM sequence: CAG
ctaccatccttcattgcaga

SEQ ID NO: 185808 - DNA, 20 bp, Artificial Sequence
  Description of Artificial Sequence: Synthetic oligonucleotide
  Target: LAMA2; (+) strand; PAM type: NRG; PAM sequence: TGG
tccttcattgcagacagccg

SEQ ID NO: 185809 - DNA, 20 bp, Artificial Sequence
  Description of Artificial Sequence: Synthetic oligonucleotide
  Target: LAMA2; (+) strand; PAM type: NRG; PAM sequence: TAG
cagacagccgtggctacaca

SEQ ID NO: 185810 - DNA, 20 bp, Artificial Sequence
  Description of Artificial Sequence: Synthetic oligonucleotide
  Target: LAMA2; (+) strand; PAM type: NRG; PAM sequence: TAG
tttatttcttgcctaataaa

SEQ ID NO: 185811 - DNA, 20 bp, Artificial Sequence
  Description of Artificial Sequence: Synthetic oligonucleotide
  Target: LAMA2; (+) strand; PAM type: NRG; PAM sequence: AAG
atttcttgcctaataaatag

SEQ ID NO: 185812 - DNA, 20 bp, Artificial Sequence
  Description of Artificial Sequence: Synthetic oligonucleotide
  Target: LAMA2; (+) strand; PAM type: NRG; PAM sequence: TGG
tgcctaataaatagaagact

SEQ ID NO: 185813 - DNA, 20 bp, Artificial Sequence
  Description of Artificial Sequence: Synthetic oligonucleotide
  Target: LAMA2; (+) strand; PAM type: NRG; PAM sequence: GAG
cctaataaatagaagacttg

SEQ ID NO: 185814 - DNA, 20 bp, Artificial Sequence
  Description of Artificial Sequence: Synthetic oligonucleotide
  Target: LAMA2; (+) strand; PAM type: NRG; PAM sequence: GAG
gacttggagaaaattcccct

SEQ ID NO: 185815 - DNA, 20 bp, Artificial Sequence
  Description of Artificial Sequence: Synthetic oligonucleotide
  Target: LAMA2; (+) strand; PAM type: NRG; PAM sequence: CAG
ctgagtatttctctgatact

SEQ ID NO: 185816 - DNA, 20 bp, Artificial Sequence
  Description of Artificial Sequence: Synthetic oligonucleotide
  Target: LAMA2; (+) strand; PAM type: NRG; PAM sequence: CAG
tatttctctgatactcagtt

SEQ ID NO: 185817 - DNA, 20 bp, Artificial Sequence
  Description of Artificial Sequence: Synthetic oligonucleotide
  Target: LAMA2; (+) strand; PAM type: NRG; PAM sequence: TGG
tctctgatactcagttcagt

SEQ ID NO: 185818 - DNA, 20 bp, Artificial Sequence
  Description of Artificial Sequence: Synthetic oligonucleotide
  Target: LAMA2; (+) strand; PAM type: NRG; PAM sequence: TGG
gatactcagttcagttggtg

SEQ ID NO: 185819 - DNA, 20 bp, Artificial Sequence
  Description of Artificial Sequence: Synthetic oligonucleotide
  Target: LAMA2; (+) strand; PAM type: NRG; PAM sequence: TAG
tcagttcagttggtgtggtc

SEQ ID NO: 185820 - DNA, 20 bp, Artificial Sequence
  Description of Artificial Sequence: Synthetic oligonucleotide
  Target: LAMA2; (+) strand; PAM type: NRG; PAM sequence: CAG
ttcagttggtgtggtctaga

SEQ ID NO: 185821 - DNA, 20 bp, Artificial Sequence
  Description of Artificial Sequence: Synthetic oligonucleotide
  Target: LAMA2; (+) strand; PAM type: NRG; PAM sequence: AAG
taacatatcactttgttcct

SEQ ID NO: 185822 - DNA, 20 bp, Artificial Sequence
  Description of Artificial Sequence: Synthetic oligonucleotide
  Target: LAMA2; (+) strand; PAM type: NRG; PAM sequence: AAG
ctatcttaaatacttgctca

SEQ ID NO: 185823 - DNA, 20 bp, Artificial Sequence
  Description of Artificial Sequence: Synthetic oligonucleotide
  Target: LAMA2; (+) strand; PAM type: NRG; PAM sequence: AAG
aaagattaaaaaaaaaatca

SEQ ID NO: 185824 - DNA, 20 bp, Artificial Sequence
  Description of Artificial Sequence: Synthetic oligonucleotide
  Target: LAMA2; (+) strand; PAM type: NRG; PAM sequence: GAG
agattaaaaaaaaaatcaaa

SEQ ID NO: 185825 - DNA, 20 bp, Artificial Sequence
  Description of Artificial Sequence: Synthetic oligonucleotide
  Target: LAMA2; (+) strand; PAM type: NRG; PAM sequence: TGG
aaaaatcaaagagtcaaata

SEQ ID NO: 185826 - DNA, 20 bp, Artificial Sequence
  Description of Artificial Sequence: Synthetic oligonucleotide
  Target: LAMA2; (+) strand; PAM type: NRG; PAM sequence: TAG
gagtcaaatatggaaaatca

SEQ ID NO: 185827 - DNA, 20 bp, Artificial Sequence
  Description of Artificial Sequence: Synthetic oligonucleotide
  Target: LAMA2; (+) strand; PAM type: NRG; PAM sequence: GAG
gtcaaatatggaaaatcata

SEQ ID NO: 185828 - DNA, 20 bp, Artificial Sequence
  Description of Artificial Sequence: Synthetic oligonucleotide
  Target: LAMA2; (+) strand; PAM type: NRG; PAM sequence: AGG
tcaaatatggaaaatcatag

SEQ ID NO: 185829 - DNA, 20 bp, Artificial Sequence
  Description of Artificial Sequence: Synthetic oligonucleotide
  Target: LAMA2; (+) strand; PAM type: NRG; PAM sequence: AAG
atatggaaaatcatagagga

SEQ ID NO: 185830 - DNA, 20 bp, Artificial Sequence
  Description of Artificial Sequence: Synthetic oligonucleotide
  Target: LAMA2; (+) strand; PAM type: NRG; PAM sequence: TGG
tcatagaggaaagaattaac

SEQ ID NO: 185831 - DNA, 20 bp, Artificial Sequence
  Description of Artificial Sequence: Synthetic oligonucleotide
  Target: LAMA2; (+) strand; PAM type: NRG; PAM sequence: AAG
aaagaattaactggatgaac

SEQ ID NO: 185832 - DNA, 20 bp, Artificial Sequence
  Description of Artificial Sequence: Synthetic oligonucleotide
  Target: LAMA2; (+) strand; PAM type: NRG; PAM sequence: AAG
attaactggatgaacaagat

SEQ ID NO: 185833 - DNA, 20 bp, Artificial Sequence
  Description of Artificial Sequence: Synthetic oligonucleotide
  Target: LAMA2; (+) strand; PAM type: NRG; PAM sequence: CAG
agataagtctatttatgtcc

SEQ ID NO: 185834 - DNA, 20 bp, Artificial Sequence
  Description of Artificial Sequence: Synthetic oligonucleotide
  Target: LAMA2; (+) strand; PAM type: NRG; PAM sequence: AAG
taagtctatttatgtcccag

SEQ ID NO: 185835 - DNA, 20 bp, Artificial Sequence
  Description of Artificial Sequence: Synthetic oligonucleotide
  Target: LAMA2; (+) strand; PAM type: NRG; PAM sequence: CAG
tcccatcaacattgtactta

SEQ ID NO: 185836 - DNA, 20 bp, Artificial Sequence
  Description of Artificial Sequence: Synthetic oligonucleotide
  Target: LAMA2; (+) strand; PAM type: NRG; PAM sequence: TGG
ctctttattaataaaatgtg

SEQ ID NO: 185837 - DNA, 20 bp, Artificial Sequence
  Description of Artificial Sequence: Synthetic oligonucleotide
  Target: LAMA2; (+) strand; PAM type: NRG; PAM sequence: CAG
tggcaacttttgaaaccttt

SEQ ID NO: 185838 - DNA, 20 bp, Artificial Sequence
  Description of Artificial Sequence: Synthetic oligonucleotide
  Target: LAMA2; (+) strand; PAM type: NRG; PAM sequence: TGG
tgaaacctttcagatgattg

SEQ ID NO: 185839 - DNA, 20 bp, Artificial Sequence
  Description of Artificial Sequence: Synthetic oligonucleotide
  Target: LAMA2; (+) strand; PAM type: NRG; PAM sequence: TAG
cagatgattgtggcaccatt

SEQ ID NO: 185840 - DNA, 20 bp, Artificial Sequence
  Description of Artificial Sequence: Synthetic oligonucleotide
  Target: LAMA2; (+) strand; PAM type: NRG; PAM sequence: CAG
aaatgtttttctttacccaa

SEQ ID NO: 185841 - DNA, 20 bp, Artificial Sequence
  Description of Artificial Sequence: Synthetic oligonucleotide
  Target: LAMA2; (+) strand; PAM type: NRG; PAM sequence: GAG
atgtttttctttacccaaca

SEQ ID NO: 185842 - DNA, 20 bp, Artificial Sequence
  Description of Artificial Sequence: Synthetic oligonucleotide
  Target: LAMA2; (+) strand; PAM type: NRG; PAM sequence: GAG
gtttttctttacccaacaga

SEQ ID NO: 185843 - DNA, 20 bp, Artificial Sequence
  Description of Artificial Sequence: Synthetic oligonucleotide
  Target: LAMA2; (+) strand; PAM type: NRG; PAM sequence: AAG
tacccaacagagagacttct

SEQ ID NO: 185844 - DNA, 20 bp, Artificial Sequence
  Description of Artificial Sequence: Synthetic oligonucleotide
  Target: LAMA2; (+) strand; PAM type: NRG; PAM sequence: CAG
tctaagataataatacctga

SEQ ID NO: 185845 - DNA, 20 bp, Artificial Sequence
  Description of Artificial Sequence: Synthetic oligonucleotide
  Target: LAMA2; (+) strand; PAM type: NRG; PAM sequence: GAG
agataataatacctgacagt

SEQ ID NO: 185846 - DNA, 20 bp, Artificial Sequence
  Description of Artificial Sequence: Synthetic oligonucleotide
  Target: LAMA2; (+) strand; PAM type: NRG; PAM sequence: AAG
acctgacagtgagattcttt

SEQ ID NO: 185847 - DNA, 20 bp, Artificial Sequence
  Description of Artificial Sequence: Synthetic oligonucleotide
  Target: LAMA2; (+) strand; PAM type: NRG; PAM sequence: CAG
gagattctttaagtcaatct

SEQ ID NO: 185848 - DNA, 20 bp, Artificial Sequence
  Description of Artificial Sequence: Synthetic oligonucleotide
  Target: LAMA2; (+) strand; PAM type: NRG; PAM sequence: TAG
ccatttattcaaataataca

SEQ ID NO: 185849 - DNA, 20 bp, Artificial Sequence
  Description of Artificial Sequence: Synthetic oligonucleotide
  Target: LAMA2; (+) strand; PAM type: NRG; PAM sequence: CAG
agtaaaccctcatgttgtgc

SEQ ID NO: 185850 - DNA, 20 bp, Artificial Sequence
  Description of Artificial Sequence: Synthetic oligonucleotide
  Target: LAMA2; (+) strand; PAM type: NRG; PAM sequence: TGG
tcatgttgtgccagatactt

SEQ ID NO: 185851 - DNA, 20 bp, Artificial Sequence
  Description of Artificial Sequence: Synthetic oligonucleotide
  Target: LAMA2; (+) strand; PAM type: NRG; PAM sequence: AAG
gttgtgccagatactttggt

SEQ ID NO: 185852 - DNA, 20 bp, Artificial Sequence
  Description of Artificial Sequence: Synthetic oligonucleotide
  Target: LAMA2; (+) strand; PAM type: NRG; PAM sequence: CAG
gccagatactttggtaagca

SEQ ID NO: 185853 - DNA, 20 bp, Artificial Sequence
  Description of Artificial Sequence: Synthetic oligonucleotide
  Target: LAMA2; (+) strand; PAM type: NRG; PAM sequence: AGG
ccagatactttggtaagcac

SEQ ID NO: 185854 - DNA, 20 bp, Artificial Sequence
  Description of Artificial Sequence: Synthetic oligonucleotide
  Target: LAMA2; (+) strand; PAM type: NRG; PAM sequence: GGG
cagatactttggtaagcaca

SEQ ID NO: 185855 - DNA, 20 bp, Artificial Sequence
  Description of Artificial Sequence: Synthetic oligonucleotide
  Target: LAMA2; (+) strand; PAM type: NRG; PAM sequence: TGG
tggtaagcacagggataaaa

SEQ ID NO: 185856 - DNA, 20 bp, Artificial Sequence
  Description of Artificial Sequence: Synthetic oligonucleotide
  Target: LAMA2; (+) strand; PAM type: NRG; PAM sequence: TAG
ggataaaatggtgaaaaata

SEQ ID NO: 185857 - DNA, 20 bp, Artificial Sequence
  Description of Artificial Sequence: Synthetic oligonucleotide
  Target: LAMA2; (+) strand; PAM type: NRG; PAM sequence: TAG
agacaatgcccctgatctca

SEQ ID NO: 185858 - DNA, 20 bp, Artificial Sequence
  Description of Artificial Sequence: Synthetic oligonucleotide
  Target: LAMA2; (+) strand; PAM type: NRG; PAM sequence: AAG
tcatagcacatacattctaa

SEQ ID NO: 185859 - DNA, 20 bp, Artificial Sequence
  Description of Artificial Sequence: Synthetic oligonucleotide
  Target: LAMA2; (+) strand; PAM type: NRG; PAM sequence: AGG
catagcacatacattctaaa

SEQ ID NO: 185860 - DNA, 20 bp, Artificial Sequence
  Description of Artificial Sequence: Synthetic oligonucleotide
  Target: LAMA2; (+) strand; PAM type: NRG; PAM sequence: GGG
atagcacatacattctaaaa

SEQ ID NO: 185861 - DNA, 20 bp, Artificial Sequence
  Description of Artificial Sequence: Synthetic oligonucleotide
  Target: LAMA2; (+) strand; PAM type: NRG; PAM sequence: AAG
gcacatacattctaaaaggg

SEQ ID NO: 185862 - DNA, 20 bp, Artificial Sequence
  Description of Artificial Sequence: Synthetic oligonucleotide
  Target: LAMA2; (+) strand; PAM type: NRG; PAM sequence: AGG
cacatacattctaaaaggga

SEQ ID NO: 185863 - DNA, 20 bp, Artificial Sequence
  Description of Artificial Sequence: Synthetic oligonucleotide
  Target: LAMA2; (+) strand; PAM type: NRG; PAM sequence: TAG
atacattctaaaagggaagg

SEQ ID NO: 185864 - DNA, 20 bp, Artificial Sequence
  Description of Artificial Sequence: Synthetic oligonucleotide
  Target: LAMA2; (+) strand; PAM type: NRG; PAM sequence: CAG
ttctaaaagggaaggtagcc

SEQ ID NO: 185865 - DNA, 20 bp, Artificial Sequence
  Description of Artificial Sequence: Synthetic oligonucleotide
  Target: LAMA2; (+) strand; PAM type: NRG; PAM sequence: AAG
gggaaggtagcccagaaaat

SEQ ID NO: 185866 - DNA, 20 bp, Artificial Sequence
  Description of Artificial Sequence: Synthetic oligonucleotide
  Target: LAMA2; (+) strand; PAM type: NRG; PAM sequence: TGG
aaataagcaataactaacta

SEQ ID NO: 185867 - DNA, 20 bp, Artificial Sequence
  Description of Artificial Sequence: Synthetic oligonucleotide
  Target: LAMA2; (+) strand; PAM type: NRG; PAM sequence: GAG
ataagcaataactaactatg

SEQ ID NO: 185868 - DNA, 20 bp, Artificial Sequence
  Description of Artificial Sequence: Synthetic oligonucleotide
  Target: LAMA2; (+) strand; PAM type: NRG; PAM sequence: CAG
atggagtgtgttacatgatg

SEQ ID NO: 185869 - DNA, 20 bp, Artificial Sequence
  Description of Artificial Sequence: Synthetic oligonucleotide
  Target: LAMA2; (+) strand; PAM type: NRG; PAM sequence: TGG
gagtgtgttacatgatgcag

SEQ ID NO: 185870 - DNA, 20 bp, Artificial Sequence
  Description of Artificial Sequence: Synthetic oligonucleotide
  Target: LAMA2; (+) strand; PAM type: NRG; PAM sequence: TGG
tgtgttacatgatgcagtgg

SEQ ID NO: 185871 - DNA, 20 bp, Artificial Sequence
  Description of Artificial Sequence: Synthetic oligonucleotide
  Target: LAMA2; (+) strand; PAM type: NRG; PAM sequence: AAG
gttacatgatgcagtggtgg

SEQ ID NO: 185872 - DNA, 20 bp, Artificial Sequence
  Description of Artificial Sequence: Synthetic oligonucleotide
  Target: LAMA2; (+) strand; PAM type: NRG; PAM sequence: TAG
catgatgcagtggtggaaga

SEQ ID NO: 185873 - DNA, 20 bp, Artificial Sequence
  Description of Artificial Sequence: Synthetic oligonucleotide
  Target: LAMA2; (+) strand; PAM type: NRG; PAM sequence: AGG
atgatgcagtggtggaagat

SEQ ID NO: 185874 - DNA, 20 bp, Artificial Sequence
  Description of Artificial Sequence: Synthetic oligonucleotide
  Target: LAMA2; (+) strand; PAM type: NRG; PAM sequence: CAG
tgcagtggtggaagataggc

SEQ ID NO: 185875 - DNA, 20 bp, Artificial Sequence
  Description of Artificial Sequence: Synthetic oligonucleotide
  Target: LAMA2; (+) strand; PAM type: NRG; PAM sequence: AGG
gcagtggtggaagataggcc

SEQ ID NO: 185876 - DNA, 20 bp, Artificial Sequence
  Description of Artificial Sequence: Synthetic oligonucleotide
  Target: LAMA2; (+) strand; PAM type: NRG; PAM sequence: CAG
gtggtggaagataggccagg

SEQ ID NO: 185877 - DNA, 20 bp, Artificial Sequence
  Description of Artificial Sequence: Synthetic oligonucleotide
  Target: LAMA2; (+) strand; PAM type: NRG; PAM sequence: AGG
tggtggaagataggccaggc

SEQ ID NO: 185878 - DNA, 20 bp, Artificial Sequence
  Description of Artificial Sequence: Synthetic oligonucleotide
  Target: LAMA2; (+) strand; PAM type: NRG; PAM sequence: TAG
caggcaggatctgaaactta

SEQ ID NO: 185879 - DNA, 20 bp, Artificial Sequence
  Description of Artificial Sequence: Synthetic oligonucleotide
  Target: LAMA2; (+) strand; PAM type: NRG; PAM sequence: TAG
ctgaaacttatagccctcat

SEQ ID NO: 185880 - DNA, 20 bp, Artificial Sequence
  Description of Artificial Sequence: Synthetic oligonucleotide
  Target: LAMA2; (+) strand; PAM type: NRG; PAM sequence: TAG
cttatagccctcattagaat

SEQ ID NO: 185881 - DNA, 20 bp, Artificial Sequence
  Description of Artificial Sequence: Synthetic oligonucleotide
  Target: LAMA2; (+) strand; PAM type: NRG; PAM sequence: TAG
tagccctcattagaattagc

SEQ ID NO: 185882 - DNA, 20 bp, Artificial Sequence
  Description of Artificial Sequence: Synthetic oligonucleotide
  Target: LAMA2; (+) strand; PAM type: NRG; PAM sequence: AAG
ttgaattgaaatataataaa

SEQ ID NO: 185883 - DNA, 20 bp, Artificial Sequence
  Description of Artificial Sequence: Synthetic oligonucleotide
  Target: LAMA2; (+) strand; PAM type: NRG; PAM sequence: CAG
attttaaaatcttcatttta

SEQ ID NO: 185884 - DNA, 20 bp, Artificial Sequence
  Description of Artificial Sequence: Synthetic oligonucleotide
  Target: LAMA2; (+) strand; PAM type: NRG; PAM sequence: TGG
taaaatcttcattttacagt

SEQ ID NO: 185885 - DNA, 20 bp, Artificial Sequence
  Description of Artificial Sequence: Synthetic oligonucleotide
  Target: LAMA2; (+) strand; PAM type: NRG; PAM sequence: TGG
aatcttcattttacagttgg

SEQ ID NO: 185886 - DNA, 20 bp, Artificial Sequence
  Description of Artificial Sequence: Synthetic oligonucleotide
  Target: LAMA2; (+) strand; PAM type: NRG; PAM sequence: AAG
ttttacagttggtggattca

SEQ ID NO: 185887 - DNA, 20 bp, Artificial Sequence
  Description of Artificial Sequence: Synthetic oligonucleotide
  Target: LAMA2; (+) strand; PAM type: NRG; PAM sequence: TGG
tacagttggtggattcaaag

SEQ ID NO: 185888 - DNA, 20 bp, Artificial Sequence
  Description of Artificial Sequence: Synthetic oligonucleotide
  Target: LAMA2; (+) strand; PAM type: NRG; PAM sequence: GGG
acagttggtggattcaaagt

SEQ ID NO: 185889 - DNA, 20 bp, Artificial Sequence
  Description of Artificial Sequence: Synthetic oligonucleotide
  Target: LAMA2; (+) strand; PAM type: NRG; PAM sequence: TGG
tggtggattcaaagtgggat

SEQ ID NO: 185890 - DNA, 20 bp, Artificial Sequence
  Description of Artificial Sequence: Synthetic oligonucleotide
  Target: LAMA2; (+) strand; PAM type: NRG; PAM sequence: TAG
agtgggattggaccttcttg

SEQ ID NO: 185891 - DNA, 20 bp, Artificial Sequence
  Description of Artificial Sequence: Synthetic oligonucleotide
  Target: LAMA2; (+) strand; PAM type: NRG; PAM sequence: TGG
ttccgcacaactacaacgac

SEQ ID NO: 185892 - DNA, 20 bp, Artificial Sequence
  Description of Artificial Sequence: Synthetic oligonucleotide
  Target: LAMA2; (+) strand; PAM type: NRG; PAM sequence: GAG
ccgcacaactacaacgactg

SEQ ID NO: 185893 - DNA, 20 bp, Artificial Sequence
  Description of Artificial Sequence: Synthetic oligonucleotide
  Target: LAMA2; (+) strand; PAM type: NRG; PAM sequence: TGG
tacaacgactggagttcttc

SEQ ID NO: 185894 - DNA, 20 bp, Artificial Sequence
  Description of Artificial Sequence: Synthetic oligonucleotide
  Target: LAMA2; (+) strand; PAM type: NRG; PAM sequence: GGG
acaacgactggagttcttct

SEQ ID NO: 185895 - DNA, 20 bp, Artificial Sequence
  Description of Artificial Sequence: Synthetic oligonucleotide
  Target: LAMA2; (+) strand; PAM type: NRG; PAM sequence: GGG
caacgactggagttcttctg

SEQ ID NO: 185896 - DNA, 20 bp, Artificial Sequence
  Description of Artificial Sequence: Synthetic oligonucleotide
  Target: LAMA2; (+) strand; PAM type: NRG; PAM sequence: CAG
actggagttcttctggggat

SEQ ID NO: 185897 - DNA, 20 bp, Artificial Sequence
  Description of Artificial Sequence: Synthetic oligonucleotide
  Target: LAMA2; (+) strand; PAM type: NRG; PAM sequence: TAG
ggagttcttctggggatcag

SEQ ID NO: 185898 - DNA, 20 bp, Artificial Sequence
  Description of Artificial Sequence: Synthetic oligonucleotide
  Target: LAMA2; (+) strand; PAM type: NRG; PAM sequence: TGG
ggggatcagtagtcaaaaaa

SEQ ID NO: 185899 - DNA, 20 bp, Artificial Sequence
  Description of Artificial Sequence: Synthetic oligonucleotide
  Target: LAMA2; (+) strand; PAM type: NRG; PAM sequence: TGG
atcagtagtcaaaaaatgga

SEQ ID NO: 185900 - DNA, 20 bp, Artificial Sequence
  Description of Artificial Sequence: Synthetic oligonucleotide
  Target: LAMA2; (+) strand; PAM type: NRG; PAM sequence: TGG
tagtcaaaaaatggatggaa

SEQ ID NO: 185901 - DNA, 20 bp, Artificial Sequence
  Description of Artificial Sequence: Synthetic oligonucleotide
  Target: LAMA2; (+) strand; PAM type: NRG; PAM sequence: GGG
agtcaaaaaatggatggaat

SEQ ID NO: 185902 - DNA, 20 bp, Artificial Sequence
  Description of Artificial Sequence: Synthetic oligonucleotide
  Target: LAMA2; (+) strand; PAM type: NRG; PAM sequence: AAG
gtattgaaatgattgatgaa

SEQ ID NO: 185903 - DNA, 20 bp, Artificial Sequence
  Description of Artificial Sequence: Synthetic oligonucleotide
  Target: LAMA2; (+) strand; PAM type: NRG; PAM sequence: AGG
tattgaaatgattgatgaaa

SEQ ID NO: 185904 - DNA, 20 bp, Artificial Sequence
  Description of Artificial Sequence: Synthetic oligonucleotide
  Target: LAMA2; (+) strand; PAM type: NRG; PAM sequence: GAG
gaaatgattgatgaaaaggt

SEQ ID NO: 185905 - DNA, 20 bp, Artificial Sequence
  Description of Artificial Sequence: Synthetic oligonucleotide
  Target: LAMA2; (+) strand; PAM type: NRG; PAM sequence: CAG
attgatgaaaaggtgagtgt

SEQ ID NO: 185906 - DNA, 20 bp, Artificial Sequence
  Description of Artificial Sequence: Synthetic oligonucleotide
  Target: LAMA2; (+) strand; PAM type: NRG; PAM sequence: TAG
ttcatgatattgttgatgtg

SEQ ID NO: 185907 - DNA, 20 bp, Artificial Sequence
  Description of Artificial Sequence: Synthetic oligonucleotide
  Target: LAMA2; (+) strand; PAM type: NRG; PAM sequence: TGG
gtgtagatatcatccatgtg

SEQ ID NO: 185908 - DNA, 20 bp, Artificial Sequence
  Description of Artificial Sequence: Synthetic oligonucleotide
  Target: LAMA2; (+) strand; PAM type: NRG; PAM sequence: GGG
tgtagatatcatccatgtgt

SEQ ID NO: 185909 - DNA, 20 bp, Artificial Sequence
  Description of Artificial Sequence: Synthetic oligonucleotide
  Target: LAMA2; (+) strand; PAM type: NRG; PAM sequence: AAG
tgggaaactcgaatattttg

SEQ ID NO: 185910 - DNA, 20 bp, Artificial Sequence
  Description of Artificial Sequence: Synthetic oligonucleotide
  Target: LAMA2; (+) strand; PAM type: NRG; PAM sequence: CGG
aactcgaatattttgaagcc

SEQ ID NO: 185911 - DNA, 20 bp, Artificial Sequence
  Description of Artificial Sequence: Synthetic oligonucleotide
  Target: LAMA2; (+) strand; PAM type: NRG; PAM sequence: TGG
agcccggctgtattctttgt

SEQ ID NO: 185912 - DNA, 20 bp, Artificial Sequence
  Description of Artificial Sequence: Synthetic oligonucleotide
  Target: LAMA2; (+) strand; PAM type: NRG; PAM sequence: GGG
gcccggctgtattctttgtt

SEQ ID NO: 185913 - DNA, 20 bp, Artificial Sequence
  Description of Artificial Sequence: Synthetic oligonucleotide
  Target: LAMA2; (+) strand; PAM type: NRG; PAM sequence: GAG
ccggctgtattctttgttgg

SEQ ID NO: 185914 - DNA, 20 bp, Artificial Sequence
  Description of Artificial Sequence: Synthetic oligonucleotide
  Target: LAMA2; (+) strand; PAM type: NRG; PAM sequence: AAG
ctgtattctttgttgggaga

SEQ ID NO: 185915 - DNA, 20 bp, Artificial Sequence
  Description of Artificial Sequence: Synthetic oligonucleotide
  Target: LAMA2; (+) strand; PAM type: NRG; PAM sequence: TGG
attgtatgttttcatccttc

SEQ ID NO: 185916 - DNA, 20 bp, Artificial Sequence
  Description of Artificial Sequence: Synthetic oligonucleotide
  Target: LAMA2; (+) strand; PAM type: NRG; PAM sequence: CAG
cttcaatttgtgtatgtttt

SEQ ID NO: 185917 - DNA, 20 bp, Artificial Sequence
  Description of Artificial Sequence: Synthetic oligonucleotide
  Target: LAMA2; (+) strand; PAM type: NRG; PAM sequence: TAG
tgtatgttttcagcatgttg

SEQ ID NO: 185918 - DNA, 20 bp, Artificial Sequence
  Description of Artificial Sequence: Synthetic oligonucleotide
  Target: LAMA2; (+) strand; PAM type: NRG; PAM sequence: AGG
gtatgttttcagcatgttgt

SEQ ID NO: 185919 - DNA, 20 bp, Artificial Sequence
  Description of Artificial Sequence: Synthetic oligonucleotide
  Target: LAMA2; (+) strand; PAM type: NRG; PAM sequence: CAG
gttttcagcatgttgtaggc

SEQ ID NO: 185920 - DNA, 20 bp, Artificial Sequence
  Description of Artificial Sequence: Synthetic oligonucleotide
  Target: LAMA2; (+) strand; PAM type: NRG; PAM sequence: CAG
ttttaaatgcattaattgta

SEQ ID NO: 185921 - DNA, 20 bp, Artificial Sequence
  Description of Artificial Sequence: Synthetic oligonucleotide
  Target: LAMA2; (+) strand; PAM type: NRG; PAM sequence: AAG
aaatgcattaattgtacagc

SEQ ID NO: 185922 - DNA, 20 bp, Artificial Sequence
  Description of Artificial Sequence: Synthetic oligonucleotide
  Target: LAMA2; (+) strand; PAM type: NRG; PAM sequence: TAG
ttgactaataatgaaccaaa

SEQ ID NO: 185923 - DNA, 20 bp, Artificial Sequence
  Description of Artificial Sequence: Synthetic oligonucleotide
  Target: LAMA2; (+) strand; PAM type: NRG; PAM sequence: GAG
aataatgaaccaaatagttt

SEQ ID NO: 185924 - DNA, 20 bp, Artificial Sequence
  Description of Artificial Sequence: Synthetic oligonucleotide
  Target: LAMA2; (+) strand; PAM type: NRG; PAM sequence: GAG
accaaatagtttgagatctc

SEQ ID NO: 185925 - DNA, 20 bp, Artificial Sequence
  Description of Artificial Sequence: Synthetic oligonucleotide
  Target: LAMA2; (+) strand; PAM type: NRG; PAM sequence: AAG
cacactcttattctcctctt

SEQ ID NO: 185926 - DNA, 20 bp, Artificial Sequence
  Description of Artificial Sequence: Synthetic oligonucleotide
  Target: LAMA2; (+) strand; PAM type: NRG; PAM sequence: AGG
acactcttattctcctctta

SEQ ID NO: 185927 - DNA, 20 bp, Artificial Sequence
  Description of Artificial Sequence: Synthetic oligonucleotide
  Target: LAMA2; (+) strand; PAM type: NRG; PAM sequence: CAG
ttctcctcttaaggaacaca

SEQ ID NO: 185928 - DNA, 20 bp, Artificial Sequence
  Description of Artificial Sequence: Synthetic oligonucleotide
  Target: LAMA2; (+) strand; PAM type: NRG; PAM sequence: GAG
ttaaggaacacacagtctat

SEQ ID NO: 185929 - DNA, 20 bp, Artificial Sequence
  Description of Artificial Sequence: Synthetic oligonucleotide
  Target: LAMA2; (+) strand; PAM type: NRG; PAM sequence: TGG
acacacagtctatgagacta

SEQ ID NO: 185930 - DNA, 20 bp, Artificial Sequence
  Description of Artificial Sequence: Synthetic oligonucleotide
  Target: LAMA2; (+) strand; PAM type: NRG; PAM sequence: CAG
gtctatgagactatggactc

SEQ ID NO: 185931 - DNA, 20 bp, Artificial Sequence
  Description of Artificial Sequence: Synthetic oligonucleotide
  Target: LAMA2; (+) strand; PAM type: NRG; PAM sequence: TGG
tatgagactatggactccag

SEQ ID NO: 185932 - DNA, 20 bp, Artificial Sequence
  Description of Artificial Sequence: Synthetic oligonucleotide
  Target: LAMA2; (+) strand; PAM type: NRG; PAM sequence: GGG
atgagactatggactccagt

SEQ ID NO: 185933 - DNA, 20 bp, Artificial Sequence
  Description of Artificial Sequence: Synthetic oligonucleotide
  Target: LAMA2; (+) strand; PAM type: NRG; PAM sequence: GAG
gagactatggactccagtgg

SEQ ID NO: 185934 - DNA, 20 bp, Artificial Sequence
  Description of Artificial Sequence: Synthetic oligonucleotide
  Target: LAMA2; (+) strand; PAM type: NRG; PAM sequence: AAG
tatggactccagtgggagaa

SEQ ID NO: 185935 - DNA, 20 bp, Artificial Sequence
  Description of Artificial Sequence: Synthetic oligonucleotide
  Target: LAMA2; (+) strand; PAM type: NRG; PAM sequence: AGG
atggactccagtgggagaaa

SEQ ID NO: 185936 - DNA, 20 bp, Artificial Sequence
  Description of Artificial Sequence: Synthetic oligonucleotide
  Target: LAMA2; (+) strand; PAM type: NRG; PAM sequence: CAG
gactccagtgggagaaaagg

SEQ ID NO: 185937 - DNA, 20 bp, Artificial Sequence
  Description of Artificial Sequence: Synthetic oligonucleotide
  Target: LAMA2; (+) strand; PAM type: NRG; PAM sequence: GAG
ctccagtgggagaaaaggca

SEQ ID NO: 185938 - DNA, 20 bp, Artificial Sequence
  Description of Artificial Sequence: Synthetic oligonucleotide
  Target: LAMA2; (+) strand; PAM type: NRG; PAM sequence: GAG
ccagtgggagaaaaggcaga

SEQ ID NO: 185939 - DNA, 20 bp, Artificial Sequence
  Description of Artificial Sequence: Synthetic oligonucleotide
  Target: LAMA2; (+) strand; PAM type: NRG; PAM sequence: AGG
cagtgggagaaaaggcagag

SEQ ID NO: 185940 - DNA, 20 bp, Artificial Sequence
  Description of Artificial Sequence: Synthetic oligonucleotide
  Target: LAMA2; (+) strand; PAM type: NRG; PAM sequence: TGG
tgggagaaaaggcagagagg

SEQ ID NO: 185941 - DNA, 20 bp, Artificial Sequence
  Description of Artificial Sequence: Synthetic oligonucleotide
  Target: LAMA2; (+) strand; PAM type: NRG; PAM sequence: TAG
agaggtggatcatctaaaat

SEQ ID NO: 185942 - DNA, 20 bp, Artificial Sequence
  Description of Artificial Sequence: Synthetic oligonucleotide
  Target: LAMA2; (+) strand; PAM type: NRG; PAM sequence: CAG
aattagtctgcctcttttaa

SEQ ID NO: 185943 - DNA, 20 bp, Artificial Sequence
  Description of Artificial Sequence: Synthetic oligonucleotide
  Target: LAMA2; (+) strand; PAM type: NRG; PAM sequence: AGG
attagtctgcctcttttaac

SEQ ID NO: 185944 - DNA, 20 bp, Artificial Sequence
  Description of Artificial Sequence: Synthetic oligonucleotide
  Target: LAMA2; (+) strand; PAM type: NRG; PAM sequence: TAG
gtctgcctcttttaacaggc

SEQ ID NO: 185945 - DNA, 20 bp, Artificial Sequence
  Description of Artificial Sequence: Synthetic oligonucleotide
  Target: LAMA2; (+) strand; PAM type: NRG; PAM sequence: AGG
tctgcctcttttaacaggct

SEQ ID NO: 185946 - DNA, 20 bp, Artificial Sequence
  Description of Artificial Sequence: Synthetic oligonucleotide
  Target: LAMA2; (+) strand; PAM type: NRG; PAM sequence: TAG
ttaacaggctaggcatctct

SEQ ID NO: 185947 - DNA, 20 bp, Artificial Sequence
  Description of Artificial Sequence: Synthetic oligonucleotide
  Target: LAMA2; (+) strand; PAM type: NRG; PAM sequence: AAG
acaggctaggcatctcttag

SEQ ID NO: 185948 - DNA, 20 bp, Artificial Sequence
  Description of Artificial Sequence: Synthetic oligonucleotide
  Target: LAMA2; (+) strand; PAM type: NRG; PAM sequence: AAG
ctaggcatctcttagaagcc

SEQ ID NO: 185949 - DNA, 20 bp, Artificial Sequence
  Description of Artificial Sequence: Synthetic oligonucleotide
  Target: LAMA2; (+) strand; PAM type: NRG; PAM sequence: AGG
taggcatctcttagaagcca

SEQ ID NO: 185950 - DNA, 20 bp, Artificial Sequence
  Description of Artificial Sequence: Synthetic oligonucleotide
  Target: LAMA2; (+) strand; PAM type: NRG; PAM sequence: TAG
gcatctcttagaagccaagg

SEQ ID NO: 185951 - DNA, 20 bp, Artificial Sequence
  Description of Artificial Sequence: Synthetic oligonucleotide
  Target: LAMA2; (+) strand; PAM type: NRG; PAM sequence: CAG
aaggtagccaactgacgcat

SEQ ID NO: 185952 - DNA, 20 bp, Artificial Sequence
  Description of Artificial Sequence: Synthetic oligonucleotide
  Target: LAMA2; (+) strand; PAM type: NRG; PAM sequence: AAG
gtttctcaatttgtttaaaa

SEQ ID NO: 185953 - DNA, 20 bp, Artificial Sequence
  Description of Artificial Sequence: Synthetic oligonucleotide
  Target: LAMA2; (+) strand; PAM type: NRG; PAM sequence: CAG
aatttgtttaaaaaagcatc

SEQ ID NO: 185954 - DNA, 20 bp, Artificial Sequence
  Description of Artificial Sequence: Synthetic oligonucleotide
  Target: LAMA2; (+) strand; PAM type: NRG; PAM sequence: CAG
ccagctaccatttcaaaaaa

SEQ ID NO: 185955 - DNA, 20 bp, Artificial Sequence
  Description of Artificial Sequence: Synthetic oligonucleotide
  Target: LAMA2; (+) strand; PAM type: NRG; PAM sequence: AAG
aaaaaacagcaaatttataa

SEQ ID NO: 185956 - DNA, 20 bp, Artificial Sequence
  Description of Artificial Sequence: Synthetic oligonucleotide
  Target: LAMA2; (+) strand; PAM type: NRG; PAM sequence: TAG
aaacagcaaatttataaaag

SEQ ID NO: 185957 - DNA, 20 bp, Artificial Sequence
  Description of Artificial Sequence: Synthetic oligonucleotide
  Target: LAMA2; (+) strand; PAM type: NRG; PAM sequence: CAG
aatttataaaagtagtgtgt

SEQ ID NO: 185958 - DNA, 20 bp, Artificial Sequence
  Description of Artificial Sequence: Synthetic oligonucleotide
  Target: LAMA2; (+) strand; PAM type: NRG; PAM sequence: CAG
caaattctaaacacctcttt

SEQ ID NO: 185959 - DNA, 20 bp, Artificial Sequence
  Description of Artificial Sequence: Synthetic oligonucleotide
  Target: LAMA2; (+) strand; PAM type: NRG; PAM sequence: AAG
acctctttcagccctgcatt

SEQ ID NO: 185960 - DNA, 20 bp, Artificial Sequence
  Description of Artificial Sequence: Synthetic oligonucleotide
  Target: LAMA2; (+) strand; PAM type: NRG; PAM sequence: TAG
attaagacaactttgcacta

SEQ ID NO: 185961 - DNA, 20 bp, Artificial Sequence
  Description of Artificial Sequence: Synthetic oligonucleotide
  Target: LAMA2; (+) strand; PAM type: NRG; PAM sequence: AGG
ttaagacaactttgcactat

SEQ ID NO: 185962 - DNA, 20 bp, Artificial Sequence
  Description of Artificial Sequence: Synthetic oligonucleotide
  Target: LAMA2; (+) strand; PAM type: NRG; PAM sequence: CAG
agacaactttgcactatagg

SEQ ID NO: 185963 - DNA, 20 bp, Artificial Sequence
  Description of Artificial Sequence: Synthetic oligonucleotide
  Target: LAMA2; (+) strand; PAM type: NRG; PAM sequence: CAG
caactttgcactataggcag

SEQ ID NO: 185964 - DNA, 20 bp, Artificial Sequence
  Description of Artificial Sequence: Synthetic oligonucleotide
  Target: LAMA2; (+) strand; PAM type: NRG; PAM sequence: AGG
aactttgcactataggcagc

SEQ ID NO: 185965 - DNA, 20 bp, Artificial Sequence
  Description of Artificial Sequence: Synthetic oligonucleotide
  Target: LAMA2; (+) strand; PAM type: NRG; PAM sequence: CAG
cactataggcagcaggtaaa

SEQ ID NO: 185966 - DNA, 20 bp, Artificial Sequence
  Description of Artificial Sequence: Synthetic oligonucleotide
  Target: LAMA2; (+) strand; PAM type: NRG; PAM sequence: GAG
ctataggcagcaggtaaaca

SEQ ID NO: 185967 - DNA, 20 bp, Artificial Sequence
  Description of Artificial Sequence: Synthetic oligonucleotide
  Target: LAMA2; (+) strand; PAM type: NRG; PAM sequence: AAG
taggcagcaggtaaacagag

SEQ ID NO: 185968 - DNA, 20 bp, Artificial Sequence
  Description of Artificial Sequence: Synthetic oligonucleotide
  Target: LAMA2; (+) strand; PAM type: NRG; PAM sequence: AGG
aggcagcaggtaaacagaga

SEQ ID NO: 185969 - DNA, 20 bp, Artificial Sequence
  Description of Artificial Sequence: Synthetic oligonucleotide
  Target: LAMA2; (+) strand; PAM type: NRG; PAM sequence: GGG
ggcagcaggtaaacagagaa

SEQ ID NO: 185970 - DNA, 20 bp, Artificial Sequence
  Description of Artificial Sequence: Synthetic oligonucleotide
  Target: LAMA2; (+) strand; PAM type: NRG; PAM sequence: AAG
gtaaacagagaagggaaaac

SEQ ID NO: 185971 - DNA, 20 bp, Artificial Sequence
  Description of Artificial Sequence: Synthetic oligonucleotide
  Target: LAMA2; (+) strand; PAM type: NRG; PAM sequence: AAG
gggaaaacaagaaatttcac

SEQ ID NO: 185972 - DNA, 20 bp, Artificial Sequence
  Description of Artificial Sequence: Synthetic oligonucleotide
  Target: LAMA2; (+) strand; PAM type: NRG; PAM sequence: TGG
aatttcacaagttttctatt

SEQ ID NO: 185973 - DNA, 20 bp, Artificial Sequence
  Description of Artificial Sequence: Synthetic oligonucleotide
  Target: LAMA2; (+) strand; PAM type: NRG; PAM sequence: TAG
ttttctatttggttattaaa

SEQ ID NO: 185974 - DNA, 20 bp, Artificial Sequence
  Description of Artificial Sequence: Synthetic oligonucleotide
  Target: LAMA2; (+) strand; PAM type: NRG; PAM sequence: AGG
tttctatttggttattaaat

SEQ ID NO: 185975 - DNA, 20 bp, Artificial Sequence
  Description of Artificial Sequence: Synthetic oligonucleotide
  Target: LAMA2; (+) strand; PAM type: NRG; PAM sequence: CAG
ataggaatcgtacttcaact

SEQ ID NO: 185976 - DNA, 20 bp, Artificial Sequence
  Description of Artificial Sequence: Synthetic oligonucleotide
  Target: LAMA2; (+) strand; PAM type: NRG; PAM sequence: TAG
tcagttcacgtttccaccct

SEQ ID NO: 185977 - DNA, 20 bp, Artificial Sequence
  Description of Artificial Sequence: Synthetic oligonucleotide
  Target: LAMA2; (+) strand; PAM type: NRG; PAM sequence: AAG
cacccttagtgttgcctccc

SEQ ID NO: 185978 - DNA, 20 bp, Artificial Sequence
  Description of Artificial Sequence: Synthetic oligonucleotide
  Target: LAMA2; (+) strand; PAM type: NRG; PAM sequence: AAG
ccttagtgttgcctcccaag

SEQ ID NO: 185979 - DNA, 20 bp, Artificial Sequence
  Description of Artificial Sequence: Synthetic oligonucleotide
  Target: LAMA2; (+) strand; PAM type: NRG; PAM sequence: CAG
tcccaagaagaaaaatcaca

SEQ ID NO: 185980 - DNA, 20 bp, Artificial Sequence
  Description of Artificial Sequence: Synthetic oligonucleotide
  Target: LAMA2; (+) strand; PAM type: NRG; PAM sequence: TAG
aatcacacagtgacctaaaa

SEQ ID NO: 185981 - DNA, 20 bp, Artificial Sequence
  Description of Artificial Sequence: Synthetic oligonucleotide
  Target: LAMA2; (+) strand; PAM type: NRG; PAM sequence: AAG
tttcaaactgtcctccaaca

SEQ ID NO: 185982 - DNA, 20 bp, Artificial Sequence
  Description of Artificial Sequence: Synthetic oligonucleotide
  Target: LAMA2; (+) strand; PAM type: NRG; PAM sequence: AGG
ttcaaactgtcctccaacaa

SEQ ID NO: 185983 - DNA, 20 bp, Artificial Sequence
  Description of Artificial Sequence: Synthetic oligonucleotide
  Target: LAMA2; (+) strand; PAM type: NRG; PAM sequence: TAG
gtcctccaacaaaggtaata

SEQ ID NO: 185984 - DNA, 20 bp, Artificial Sequence
  Description of Artificial Sequence: Synthetic oligonucleotide
  Target: LAMA2; (+) strand; PAM type: NRG; PAM sequence: AGG
tcctccaacaaaggtaatat

SEQ ID NO: 185985 - DNA, 20 bp, Artificial Sequence
  Description of Artificial Sequence: Synthetic oligonucleotide
  Target: LAMA2; (+) strand; PAM type: NRG; PAM sequence: AAG
acaaaggtaatataggaaaa

SEQ ID NO: 185986 - DNA, 20 bp, Artificial Sequence
  Description of Artificial Sequence: Synthetic oligonucleotide
  Target: LAMA2; (+) strand; PAM type: NRG; PAM sequence: CAG
atataggaaaaaagatccac

SEQ ID NO: 185987 - DNA, 20 bp, Artificial Sequence
  Description of Artificial Sequence: Synthetic oligonucleotide
  Target: LAMA2; (+) strand; PAM type: NRG; PAM sequence: TAG
ggaaaaaagatccaccagct

SEQ ID NO: 185988 - DNA, 20 bp, Artificial Sequence
  Description of Artificial Sequence: Synthetic oligonucleotide
  Target: LAMA2; (+) strand; PAM type: NRG; PAM sequence: GAG
aaaaaagatccaccagctta

SEQ ID NO: 185989 - DNA, 20 bp, Artificial Sequence
  Description of Artificial Sequence: Synthetic oligonucleotide
  Target: LAMA2; (+) strand; PAM type: NRG; PAM sequence: AGG
aaaaagatccaccagcttag

SEQ ID NO: 185990 - DNA, 20 bp, Artificial Sequence
  Description of Artificial Sequence: Synthetic oligonucleotide
  Target: LAMA2; (+) strand; PAM type: NRG; PAM sequence: AAG
tccaccagcttagaggtaaa

SEQ ID NO: 185991 - DNA, 20 bp, Artificial Sequence
  Description of Artificial Sequence: Synthetic oligonucleotide
  Target: LAMA2; (+) strand; PAM type: NRG; PAM sequence: AGG
ccaccagcttagaggtaaaa

SEQ ID NO: 185992 - DNA, 20 bp, Artificial Sequence
  Description of Artificial Sequence: Synthetic oligonucleotide
  Target: LAMA2; (+) strand; PAM type: NRG; PAM sequence: GAG
accagcttagaggtaaaaag

SEQ ID NO: 185993 - DNA, 20 bp, Artificial Sequence
  Description of Artificial Sequence: Synthetic oligonucleotide
  Target: LAMA2; (+) strand; PAM type: NRG; PAM sequence: AAG
gtaaaaaggagtgaacaaat

SEQ ID NO: 185994 - DNA, 20 bp, Artificial Sequence
  Description of Artificial Sequence: Synthetic oligonucleotide
  Target: LAMA2; (+) strand; PAM type: NRG; PAM sequence: TAG
aacaaataagtaacactcaa

SEQ ID NO: 185995 - DNA, 20 bp, Artificial Sequence
  Description of Artificial Sequence: Synthetic oligonucleotide
  Target: LAMA2; (+) strand; PAM type: NRG; PAM sequence: AAG
acttttactacatctttttc

SEQ ID NO: 185996 - DNA, 20 bp, Artificial Sequence
  Description of Artificial Sequence: Synthetic oligonucleotide
  Target: LAMA2; (+) strand; PAM type: NRG; PAM sequence: AAG
ttttcaagtaacatgctctt

SEQ ID NO: 185997 - DNA, 20 bp, Artificial Sequence
  Description of Artificial Sequence: Synthetic oligonucleotide
  Target: LAMA2; (+) strand; PAM type: NRG; PAM sequence: AGG
tttcaagtaacatgctctta

SEQ ID NO: 185998 - DNA, 20 bp, Artificial Sequence
  Description of Artificial Sequence: Synthetic oligonucleotide
  Target: LAMA2; (+) strand; PAM type: NRG; PAM sequence: GGG
ttcaagtaacatgctcttaa

SEQ ID NO: 185999 - DNA, 20 bp, Artificial Sequence
  Description of Artificial Sequence: Synthetic oligonucleotide
  Target: LAMA2; (+) strand; PAM type: NRG; PAM sequence: CAG
aagtaacatgctcttaaggg

SEQ ID NO: 186000 - DNA, 20 bp, Artificial Sequence
  Description of Artificial Sequence: Synthetic oligonucleotide
  Target: LAMA2; (+) strand; PAM type: NRG; PAM sequence: AAG
tatcatgtgcgtttctcacc

SEQ ID NO: 186001 - DNA, 20 bp, Artificial Sequence
  Description of Artificial Sequence: Synthetic oligonucleotide
  Target: LAMA2; (+) strand; PAM type: NRG; PAM sequence: AAG
caagctccttttacatgcaa

SEQ ID NO: 186002 - DNA, 20 bp, Artificial Sequence
  Description of Artificial Sequence: Synthetic oligonucleotide
  Target: LAMA2; (+) strand; PAM type: NRG; PAM sequence: TAG
tatgcaaactccacccaata

SEQ ID NO: 186003 - DNA, 20 bp, Artificial Sequence
  Description of Artificial Sequence: Synthetic oligonucleotide
  Target: LAMA2; (+) strand; PAM type: NRG; PAM sequence: TAG
ttcattaataattacatcaa

SEQ ID NO: 186004 - DNA, 20 bp, Artificial Sequence
  Description of Artificial Sequence: Synthetic oligonucleotide
  Target: LAMA2; (+) strand; PAM type: NRG; PAM sequence: GAG
cattaataattacatcaata

SEQ ID NO: 186005 - DNA, 20 bp, Artificial Sequence
  Description of Artificial Sequence: Synthetic oligonucleotide
  Target: LAMA2; (+) strand; PAM type: NRG; PAM sequence: AAG
catttttaatctttcttctt

SEQ ID NO: 186006 - DNA, 20 bp, Artificial Sequence
  Description of Artificial Sequence: Synthetic oligonucleotide
  Target: LAMA2; (+) strand; PAM type: NRG; PAM sequence: TAG
gccaaactgactaatgtttt

SEQ ID NO: 186007 - DNA, 20 bp, Artificial Sequence
  Description of Artificial Sequence: Synthetic oligonucleotide
  Target: LAMA2; (+) strand; PAM type: NRG; PAM sequence: CAG
aatatgtttcgtttcttcac

SEQ ID NO: 186008 - DNA, 20 bp, Artificial Sequence
  Description of Artificial Sequence: Synthetic oligonucleotide
  Target: LAMA2; (+) strand; PAM type: NRG; PAM sequence: AAG
cgtttcttcaccagcttcaa

SEQ ID NO: 186009 - DNA, 20 bp, Artificial Sequence
  Description of Artificial Sequence: Synthetic oligonucleotide
  Target: LAMA2; (+) strand; PAM type: NRG; PAM sequence: CAG
aattctgtcatctcaaattt

SEQ ID NO: 186010 - DNA, 20 bp, Artificial Sequence
  Description of Artificial Sequence: Synthetic oligonucleotide
  Target: LAMA2; (+) strand; PAM type: NRG; PAM sequence: AGG
attctgtcatctcaaatttc

SEQ ID NO: 186011 - DNA, 20 bp, Artificial Sequence
  Description of Artificial Sequence: Synthetic oligonucleotide
  Target: LAMA2; (+) strand; PAM type: NRG; PAM sequence: GGG
ttctgtcatctcaaatttca

SEQ ID NO: 186012 - DNA, 20 bp, Artificial Sequence
  Description of Artificial Sequence: Synthetic oligonucleotide
  Target: LAMA2; (+) strand; PAM type: NRG; PAM sequence: GGG
tctgtcatctcaaatttcag

SEQ ID NO: 186013 - DNA, 20 bp, Artificial Sequence
  Description of Artificial Sequence: Synthetic oligonucleotide
  Target: LAMA2; (+) strand; PAM type: NRG; PAM sequence: CAG
cttttccacattactaaaaa

SEQ ID NO: 186014 - DNA, 20 bp, Artificial Sequence
  Description of Artificial Sequence: Synthetic oligonucleotide
  Target: LAMA2; (+) strand; PAM type: NRG; PAM sequence: TAG
aaaaacagatttttctcatt

SEQ ID NO: 186015 - DNA, 20 bp, Artificial Sequence
  Description of Artificial Sequence: Synthetic oligonucleotide
  Target: LAMA2; (+) strand; PAM type: NRG; PAM sequence: CAG
cagatttttctcatttagac

SEQ ID NO: 186016 - DNA, 20 bp, Artificial Sequence
  Description of Artificial Sequence: Synthetic oligonucleotide
  Target: LAMA2; (+) strand; PAM type: NRG; PAM sequence: TAG
ctcatttagaccagaacttc

SEQ ID NO: 186017 - DNA, 20 bp, Artificial Sequence
  Description of Artificial Sequence: Synthetic oligonucleotide
  Target: LAMA2; (+) strand; PAM type: NRG; PAM sequence: AAG
tagaccagaacttctagtct

SEQ ID NO: 186018 - DNA, 20 bp, Artificial Sequence
  Description of Artificial Sequence: Synthetic oligonucleotide
  Target: LAMA2; (+) strand; PAM type: NRG; PAM sequence: TAG
tagtctaagttcttcattgt

SEQ ID NO: 186019 - DNA, 20 bp, Artificial Sequence
  Description of Artificial Sequence: Synthetic oligonucleotide
  Target: LAMA2; (+) strand; PAM type: NRG; PAM sequence: AGG
agtctaagttcttcattgtt

SEQ ID NO: 186020 - DNA, 20 bp, Artificial Sequence
  Description of Artificial Sequence: Synthetic oligonucleotide
  Target: LAMA2; (+) strand; PAM type: NRG; PAM sequence: TGG
ttcattgttaggaatttaac

SEQ ID NO: 186021 - DNA, 20 bp, Artificial Sequence
  Description of Artificial Sequence: Synthetic oligonucleotide
  Target: LAMA2; (+) strand; PAM type: NRG; PAM sequence: TGG
taggaatttaactggccttc

SEQ ID NO: 186022 - DNA, 20 bp, Artificial Sequence
  Description of Artificial Sequence: Synthetic oligonucleotide
  Target: LAMA2; (+) strand; PAM type: NRG; PAM sequence: CAG
atttaactggccttctggct

SEQ ID NO: 186023 - DNA, 20 bp, Artificial Sequence
  Description of Artificial Sequence: Synthetic oligonucleotide
  Target: LAMA2; (+) strand; PAM type: NRG; PAM sequence: AGG
tttaactggccttctggctc

SEQ ID NO: 186024 - DNA, 20 bp, Artificial Sequence
  Description of Artificial Sequence: Synthetic oligonucleotide
  Target: LAMA2; (+) strand; PAM type: NRG; PAM sequence: TGG
ggccttctggctcaggtctt

SEQ ID NO: 186025 - DNA, 20 bp, Artificial Sequence
  Description of Artificial Sequence: Synthetic oligonucleotide
  Target: LAMA2; (+) strand; PAM type: NRG; PAM sequence: CGG
ttggcacctgtgacatgaaa

SEQ ID NO: 186026 - DNA, 20 bp, Artificial Sequence
  Description of Artificial Sequence: Synthetic oligonucleotide
  Target: LAMA2; (+) strand; PAM type: NRG; PAM sequence: GGG
tggcacctgtgacatgaaac

SEQ ID NO: 186027 - DNA, 20 bp, Artificial Sequence
  Description of Artificial Sequence: Synthetic oligonucleotide
  Target: LAMA2; (+) strand; PAM type: NRG; PAM sequence: AAG
tatataaaatgaaatccatg

SEQ ID NO: 186028 - DNA, 20 bp, Artificial Sequence
  Description of Artificial Sequence: Synthetic oligonucleotide
  Target: LAMA2; (+) strand; PAM type: NRG; PAM sequence: AGG
atataaaatgaaatccatga

SEQ ID NO: 186029 - DNA, 20 bp, Artificial Sequence
  Description of Artificial Sequence: Synthetic oligonucleotide
  Target: LAMA2; (+) strand; PAM type: NRG; PAM sequence: AAG
aaatataattaaaacatcaa

SEQ ID NO: 186030 - DNA, 20 bp, Artificial Sequence
  Description of Artificial Sequence: Synthetic oligonucleotide
  Target: LAMA2; (+) strand; PAM type: NRG; PAM sequence: GAG
aatttgtaaaccaaattaat

SEQ ID NO: 186031 - DNA, 20 bp, Artificial Sequence
  Description of Artificial Sequence: Synthetic oligonucleotide
  Target: LAMA2; (+) strand; PAM type: NRG; PAM sequence: AAG
cactttaaacaatatctttt

SEQ ID NO: 186032 - DNA, 20 bp, Artificial Sequence
  Description of Artificial Sequence: Synthetic oligonucleotide
  Target: LAMA2; (+) strand; PAM type: NRG; PAM sequence: AAG
atcttttaagaaaattttat

SEQ ID NO: 186033 - DNA, 20 bp, Artificial Sequence
  Description of Artificial Sequence: Synthetic oligonucleotide
  Target: LAMA2; (+) strand; PAM type: NRG; PAM sequence: AGG
tcttttaagaaaattttata

SEQ ID NO: 186034 - DNA, 20 bp, Artificial Sequence
  Description of Artificial Sequence: Synthetic oligonucleotide
  Target: LAMA2; (+) strand; PAM type: NRG; PAM sequence: CAG
taagaaaattttataaggtt

SEQ ID NO: 186035 - DNA, 20 bp, Artificial Sequence
  Description of Artificial Sequence: Synthetic oligonucleotide
  Target: LAMA2; (+) strand; PAM type: NRG; PAM sequence: CAG
aaaattttataaggttcagt

SEQ ID NO: 186036 - DNA, 20 bp, Artificial Sequence
  Description of Artificial Sequence: Synthetic oligonucleotide
  Target: LAMA2; (+) strand; PAM type: NRG; PAM sequence: AAG
cagaactctcacattctaaa

SEQ ID NO: 186037 - DNA, 20 bp, Artificial Sequence
  Description of Artificial Sequence: Synthetic oligonucleotide
  Target: LAMA2; (+) strand; PAM type: NRG; PAM sequence: GAG
ctcacattctaaaaagacgt

SEQ ID NO: 186038 - DNA, 20 bp, Artificial Sequence
  Description of Artificial Sequence: Synthetic oligonucleotide
  Target: LAMA2; (+) strand; PAM type: NRG; PAM sequence: AGG
tcacattctaaaaagacgtg

SEQ ID NO: 186039 - DNA, 20 bp, Artificial Sequence
  Description of Artificial Sequence: Synthetic oligonucleotide
  Target: LAMA2; (+) strand; PAM type: NRG; PAM sequence: TAG
cattctaaaaagacgtgagg

SEQ ID NO: 186040 - DNA, 20 bp, Artificial Sequence
  Description of Artificial Sequence: Synthetic oligonucleotide
  Target: LAMA2; (+) strand; PAM type: NRG; PAM sequence: TAG
gaatttttccctgtgtacac

SEQ ID NO: 186041 - DNA, 20 bp, Artificial Sequence
  Description of Artificial Sequence: Synthetic oligonucleotide
  Target: LAMA2; (+) strand; PAM type: NRG; PAM sequence: AGG
aatttttccctgtgtacact

SEQ ID NO: 186042 - DNA, 20 bp, Artificial Sequence
  Description of Artificial Sequence: Synthetic oligonucleotide
  Target: LAMA2; (+) strand; PAM type: NRG; PAM sequence: TGG
taggtccttttcttgtcacc

SEQ ID NO: 186043 - DNA, 20 bp, Artificial Sequence
  Description of Artificial Sequence: Synthetic oligonucleotide
  Target: LAMA2; (+) strand; PAM type: NRG; PAM sequence: AAG
ctggcctcaaatttttctga

SEQ ID NO: 186044 - DNA, 20 bp, Artificial Sequence
  Description of Artificial Sequence: Synthetic oligonucleotide
  Target: LAMA2; (+) strand; PAM type: NRG; PAM sequence: CAG
gcctcaaatttttctgaaag

SEQ ID NO: 186045 - DNA, 20 bp, Artificial Sequence
  Description of Artificial Sequence: Synthetic oligonucleotide
  Target: LAMA2; (+) strand; PAM type: NRG; PAM sequence: CAG
tctgaaagcagaattattac

SEQ ID NO: 186046 - DNA, 20 bp, Artificial Sequence
  Description of Artificial Sequence: Synthetic oligonucleotide
  Target: LAMA2; (+) strand; PAM type: NRG; PAM sequence: AAG
taactcccaacaatgcccca

SEQ ID NO: 186047 - DNA, 20 bp, Artificial Sequence
  Description of Artificial Sequence: Synthetic oligonucleotide
  Target: LAMA2; (+) strand; PAM type: NRG; PAM sequence: AAG
cccaacaatgccccaaagca

SEQ ID NO: 186048 - DNA, 20 bp, Artificial Sequence
  Description of Artificial Sequence: Synthetic oligonucleotide
  Target: LAMA2; (+) strand; PAM type: NRG; PAM sequence: GAG
caacaatgccccaaagcaaa

SEQ ID NO: 186049 - DNA, 20 bp, Artificial Sequence
  Description of Artificial Sequence: Synthetic oligonucleotide
  Target: LAMA2; (+) strand; PAM type: NRG; PAM sequence: TGG
aaagcaaagagcataatttg

SEQ ID NO: 186050 - DNA, 20 bp, Artificial Sequence
  Description of Artificial Sequence: Synthetic oligonucleotide
  Target: LAMA2; (+) strand; PAM type: NRG; PAM sequence: TGG
agagcataatttgtggctcc

SEQ ID NO: 186051 - DNA, 20 bp, Artificial Sequence
  Description of Artificial Sequence: Synthetic oligonucleotide
  Target: LAMA2; (+) strand; PAM type: NRG; PAM sequence: TAG
aatttgtggctcctggtgat

SEQ ID NO: 186052 - DNA, 20 bp, Artificial Sequence
  Description of Artificial Sequence: Synthetic oligonucleotide
  Target: LAMA2; (+) strand; PAM type: NRG; PAM sequence: AAG
gatttatactttaatttgtc

SEQ ID NO: 186053 - DNA, 20 bp, Artificial Sequence
  Description of Artificial Sequence: Synthetic oligonucleotide
  Target: LAMA2; (+) strand; PAM type: NRG; PAM sequence: CAG
aaaatttttttcaatatgcc

SEQ ID NO: 186054 - DNA, 20 bp, Artificial Sequence
  Description of Artificial Sequence: Synthetic oligonucleotide
  Target: LAMA2; (+) strand; PAM type: NRG; PAM sequence: TGG
acatccatttcaaatgattc

SEQ ID NO: 186055 - DNA, 20 bp, Artificial Sequence
  Description of Artificial Sequence: Synthetic oligonucleotide
  Target: LAMA2; (+) strand; PAM type: NRG; PAM sequence: TAG
attctggctgatgtctttcc

SEQ ID NO: 186056 - DNA, 20 bp, Artificial Sequence
  Description of Artificial Sequence: Synthetic oligonucleotide
  Target: LAMA2; (+) strand; PAM type: NRG; PAM sequence: GAG
tctggctgatgtctttccta

SEQ ID NO: 186057 - DNA, 20 bp, Artificial Sequence
  Description of Artificial Sequence: Synthetic oligonucleotide
  Target: LAMA2; (+) strand; PAM type: NRG; PAM sequence: CAG
ctgttctatttcctactttc

SEQ ID NO: 186058 - DNA, 20 bp, Artificial Sequence
  Description of Artificial Sequence: Synthetic oligonucleotide
  Target: LAMA2; (+) strand; PAM type: NRG; PAM sequence: TGG
tttccagttgatgtttcatg

SEQ ID NO: 186059 - DNA, 20 bp, Artificial Sequence
  Description of Artificial Sequence: Synthetic oligonucleotide
  Target: LAMA2; (+) strand; PAM type: NRG; PAM sequence: TGG
ttgatgtttcatgtggacaa

SEQ ID NO: 186060 - DNA, 20 bp, Artificial Sequence
  Description of Artificial Sequence: Synthetic oligonucleotide
  Target: LAMA2; (+) strand; PAM type: NRG; PAM sequence: CGG
gtttcatgtggacaatggtg

SEQ ID NO: 186061 - DNA, 20 bp, Artificial Sequence
  Description of Artificial Sequence: Synthetic oligonucleotide
  Target: LAMA2; (+) strand; PAM type: NRG; PAM sequence: GGG
tttcatgtggacaatggtgc

SEQ ID NO: 186062 - DNA, 20 bp, Artificial Sequence
  Description of Artificial Sequence: Synthetic oligonucleotide
  Target: LAMA2; (+) strand; PAM type: NRG; PAM sequence: CAG
catgtggacaatggtgcggg

SEQ ID NO: 186063 - DNA, 20 bp, Artificial Sequence
  Description of Artificial Sequence: Synthetic oligonucleotide
  Target: LAMA2; (+) strand; PAM type: NRG; PAM sequence: TGG
ttcactgctgtctatgatgc

SEQ ID NO: 186064 - DNA, 20 bp, Artificial Sequence
  Description of Artificial Sequence: Synthetic oligonucleotide
  Target: LAMA2; (+) strand; PAM type: NRG; PAM sequence: GGG
tcactgctgtctatgatgct

SEQ ID NO: 186065 - DNA, 20 bp, Artificial Sequence
  Description of Artificial Sequence: Synthetic oligonucleotide
  Target: LAMA2; (+) strand; PAM type: NRG; PAM sequence: GGG
cactgctgtctatgatgctg

SEQ ID NO: 186066 - DNA, 20 bp, Artificial Sequence
  Description of Artificial Sequence: Synthetic oligonucleotide
  Target: LAMA2; (+) strand; PAM type: NRG; PAM sequence: CAG
tgtctatgatgctggggttc

SEQ ID NO: 186067 - DNA, 20 bp, Artificial Sequence
  Description of Artificial Sequence: Synthetic oligonucleotide
  Target: LAMA2; (+) strand; PAM type: NRG; PAM sequence: AGG
gtctatgatgctggggttcc

SEQ ID NO: 186068 - DNA, 20 bp, Artificial Sequence
  Description of Artificial Sequence: Synthetic oligonucleotide
  Target: LAMA2; (+) strand; PAM type: NRG; PAM sequence: GGG
tctatgatgctggggttcca

SEQ ID NO: 186069 - DNA, 20 bp, Artificial Sequence
  Description of Artificial Sequence: Synthetic oligonucleotide
  Target: LAMA2; (+) strand; PAM type: NRG; PAM sequence: TGG
gttccagggcatttgtgtga

SEQ ID NO: 186070 - DNA, 20 bp, Artificial Sequence
  Description of Artificial Sequence: Synthetic oligonucleotide
  Target: LAMA2; (+) strand; PAM type: NRG; PAM sequence: TGG
ggcatttgtgtgatggacaa

SEQ ID NO: 186071 - DNA, 20 bp, Artificial Sequence
  Description of Artificial Sequence: Synthetic oligonucleotide
  Target: LAMA2; (+) strand; PAM type: NRG; PAM sequence: AAG
gtgtgatggacaatggcata

SEQ ID NO: 186072 - DNA, 20 bp, Artificial Sequence
  Description of Artificial Sequence: Synthetic oligonucleotide
  Target: LAMA2; (+) strand; PAM type: NRG; PAM sequence: AAG
ggcataaagtcactgccaac

SEQ ID NO: 186073 - DNA, 20 bp, Artificial Sequence
  Description of Artificial Sequence: Synthetic oligonucleotide
  Target: LAMA2; (+) strand; PAM type: NRG; PAM sequence: GAG
acaagatcaaacaccgcatt

SEQ ID NO: 186074 - DNA, 20 bp, Artificial Sequence
  Description of Artificial Sequence: Synthetic oligonucleotide
  Target: LAMA2; (+) strand; PAM type: NRG; PAM sequence: CAG
caaacaccgcattgagctca

SEQ ID NO: 186075 - DNA, 20 bp, Artificial Sequence
  Description of Artificial Sequence: Synthetic oligonucleotide
  Target: LAMA2; (+) strand; PAM type: NRG; PAM sequence: TGG
cgcattgagctcacagtcga

SEQ ID NO: 186076 - DNA, 20 bp, Artificial Sequence
  Description of Artificial Sequence: Synthetic oligonucleotide
  Target: LAMA2; (+) strand; PAM type: NRG; PAM sequence: GGG
gcattgagctcacagtcgat

SEQ ID NO: 186077 - DNA, 20 bp, Artificial Sequence
  Description of Artificial Sequence: Synthetic oligonucleotide
  Target: LAMA2; (+) strand; PAM type: NRG; PAM sequence: CAG
agctcacagtcgatgggaac

SEQ ID NO: 186078 - DNA, 20 bp, Artificial Sequence
  Description of Artificial Sequence: Synthetic oligonucleotide
  Target: LAMA2; (+) strand; PAM type: NRG; PAM sequence: AGG
gctcacagtcgatgggaacc

SEQ ID NO: 186079 - DNA, 20 bp, Artificial Sequence
  Description of Artificial Sequence: Synthetic oligonucleotide
  Target: LAMA2; (+) strand; PAM type: NRG; PAM sequence: TGG
cacagtcgatgggaaccagg

SEQ ID NO: 186080 - DNA, 20 bp, Artificial Sequence
  Description of Artificial Sequence: Synthetic oligonucleotide
  Target: LAMA2; (+) strand; PAM type: NRG; PAM sequence: AAG
agtcgatgggaaccaggtgg

SEQ ID NO: 186081 - DNA, 20 bp, Artificial Sequence
  Description of Artificial Sequence: Synthetic oligonucleotide
  Target: LAMA2; (+) strand; PAM type: NRG; PAM sequence: AAG
gggaaccaggtggaagccca

SEQ ID NO: 186082 - DNA, 20 bp, Artificial Sequence
  Description of Artificial Sequence: Synthetic oligonucleotide
  Target: LAMA2; (+) strand; PAM type: NRG; PAM sequence: CAG
ggaagcccaaagcccaaacc

SEQ ID NO: 186083 - DNA, 20 bp, Artificial Sequence
  Description of Artificial Sequence: Synthetic oligonucleotide
  Target: LAMA2; (+) strand; PAM type: NRG; PAM sequence: CAG
cccaaacccagcatctacat

SEQ ID NO: 186084 - DNA, 20 bp, Artificial Sequence
  Description of Artificial Sequence: Synthetic oligonucleotide
  Target: LAMA2; (+) strand; PAM type: NRG; PAM sequence: TGG
acaaatgaccctgtgtttgt

SEQ ID NO: 186085 - DNA, 20 bp, Artificial Sequence
  Description of Artificial Sequence: Synthetic oligonucleotide
  Target: LAMA2; (+) strand; PAM type: NRG; PAM sequence: GAG
aaatgaccctgtgtttgttg

SEQ ID NO: 186086 - DNA, 20 bp, Artificial Sequence
  Description of Artificial Sequence: Synthetic oligonucleotide
  Target: LAMA2; (+) strand; PAM type: NRG; PAM sequence: AGG
aatgaccctgtgtttgttgg

SEQ ID NO: 186087 - DNA, 20 bp, Artificial Sequence
  Description of Artificial Sequence: Synthetic oligonucleotide
  Target: LAMA2; (+) strand; PAM type: NRG; PAM sequence: CAG
tgtgtttgttggaggcttcc

SEQ ID NO: 186088 - DNA, 20 bp, Artificial Sequence
  Description of Artificial Sequence: Synthetic oligonucleotide
  Target: LAMA2; (+) strand; PAM type: NRG; PAM sequence: AGG
gtgtttgttggaggcttccc

SEQ ID NO: 186089 - DNA, 20 bp, Artificial Sequence
  Description of Artificial Sequence: Synthetic oligonucleotide
  Target: LAMA2; (+) strand; PAM type: NRG; PAM sequence: GAG
ttgttggaggcttcccaggt

SEQ ID NO: 186090 - DNA, 20 bp, Artificial Sequence
  Description of Artificial Sequence: Synthetic oligonucleotide
  Target: LAMA2; (+) strand; PAM type: NRG; PAM sequence: TGG
gaggcttcccaggtgagtgt

SEQ ID NO: 186091 - DNA, 20 bp, Artificial Sequence
  Description of Artificial Sequence: Synthetic oligonucleotide
  Target: LAMA2; (+) strand; PAM type: NRG; PAM sequence: CAG
caggtgagtgttggctaccc

SEQ ID NO: 186092 - DNA, 20 bp, Artificial Sequence
  Description of Artificial Sequence: Synthetic oligonucleotide
  Target: LAMA2; (+) strand; PAM type: NRG; PAM sequence: TGG
tctttgctctcttatgttac

SEQ ID NO: 186093 - DNA, 20 bp, Artificial Sequence
  Description of Artificial Sequence: Synthetic oligonucleotide
  Target: LAMA2; (+) strand; PAM type: NRG; PAM sequence: AAG
atttatatttacgtgtgtct

SEQ ID NO: 186094 - DNA, 20 bp, Artificial Sequence
  Description of Artificial Sequence: Synthetic oligonucleotide
  Target: LAMA2; (+) strand; PAM type: NRG; PAM sequence: TAG
gcttatgtgtacttgcttcc

SEQ ID NO: 186095 - DNA, 20 bp, Artificial Sequence
  Description of Artificial Sequence: Synthetic oligonucleotide
  Target: LAMA2; (+) strand; PAM type: NRG; PAM sequence: TAG
gtgtacttgcttcctagctt

SEQ ID NO: 186096 - DNA, 20 bp, Artificial Sequence
  Description of Artificial Sequence: Synthetic oligonucleotide
  Target: LAMA2; (+) strand; PAM type: NRG; PAM sequence: TAG
tcctagctttagaatctgct

SEQ ID NO: 186097 - DNA, 20 bp, Artificial Sequence
  Description of Artificial Sequence: Synthetic oligonucleotide
  Target: LAMA2; (+) strand; PAM type: NRG; PAM sequence: CAG
tgcaccttacctaaaatttc

SEQ ID NO: 186098 - DNA, 20 bp, Artificial Sequence
  Description of Artificial Sequence: Synthetic oligonucleotide
  Target: LAMA2; (+) strand; PAM type: NRG; PAM sequence: TGG
tattacttatataaaccaca

SEQ ID NO: 186099 - DNA, 20 bp, Artificial Sequence
  Description of Artificial Sequence: Synthetic oligonucleotide
  Target: LAMA2; (+) strand; PAM type: NRG; PAM sequence: GGG
attacttatataaaccacat

SEQ ID NO: 186100 - DNA, 20 bp, Artificial Sequence
  Description of Artificial Sequence: Synthetic oligonucleotide
  Target: LAMA2; (+) strand; PAM type: NRG; PAM sequence: GAG
catgggactgaacttttcat

SEQ ID NO: 186101 - DNA, 20 bp, Artificial Sequence
  Description of Artificial Sequence: Synthetic oligonucleotide
  Target: LAMA2; (+) strand; PAM type: NRG; PAM sequence: GAG
tgggactgaacttttcatga

SEQ ID NO: 186102 - DNA, 20 bp, Artificial Sequence
  Description of Artificial Sequence: Synthetic oligonucleotide
  Target: LAMA2; (+) strand; PAM type: NRG; PAM sequence: AAG
acttttcatgagagccccca

SEQ ID NO: 186103 - DNA, 20 bp, Artificial Sequence
  Description of Artificial Sequence: Synthetic oligonucleotide
  Target: LAMA2; (+) strand; PAM type: NRG; PAM sequence: TGG
agcccccaaagtttccttcg

SEQ ID NO: 186104 - DNA, 20 bp, Artificial Sequence
  Description of Artificial Sequence: Synthetic oligonucleotide
  Target: LAMA2; (+) strand; PAM type: NRG; PAM sequence: GAG
cccccaaagtttccttcgtg

SEQ ID NO: 186105 - DNA, 20 bp, Artificial Sequence
  Description of Artificial Sequence: Synthetic oligonucleotide
  Target: LAMA2; (+) strand; PAM type: NRG; PAM sequence: GAG
cccaaagtttccttcgtgga

SEQ ID NO: 186106 - DNA, 20 bp, Artificial Sequence
  Description of Artificial Sequence: Synthetic oligonucleotide
  Target: LAMA2; (+) strand; PAM type: NRG; PAM sequence: AAG
tttccttcgtggagagattg

SEQ ID NO: 186107 - DNA, 20 bp, Artificial Sequence
  Description of Artificial Sequence: Synthetic oligonucleotide
  Target: LAMA2; (+) strand; PAM type: NRG; PAM sequence: TGG
cttcgtggagagattgaagc

SEQ ID NO: 186108 - DNA, 20 bp, Artificial Sequence
  Description of Artificial Sequence: Synthetic oligonucleotide
  Target: LAMA2; (+) strand; PAM type: NRG; PAM sequence: GAG
tcgtggagagattgaagctg

SEQ ID NO: 186109 - DNA, 20 bp, Artificial Sequence
  Description of Artificial Sequence: Synthetic oligonucleotide
  Target: LAMA2; (+) strand; PAM type: NRG; PAM sequence: AGG
cgtggagagattgaagctgg

SEQ ID NO: 186110 - DNA, 20 bp, Artificial Sequence
  Description of Artificial Sequence: Synthetic oligonucleotide
  Target: LAMA2; (+) strand; PAM type: NRG; PAM sequence: TGG
gaagctggaggaaatgaatt

SEQ ID NO: 186111 - DNA, 20 bp, Artificial Sequence
  Description of Artificial Sequence: Synthetic oligonucleotide
  Target: LAMA2; (+) strand; PAM type: NRG; PAM sequence: AAG
gaaatgaatttggcttataa

SEQ ID NO: 186112 - DNA, 20 bp, Artificial Sequence
  Description of Artificial Sequence: Synthetic oligonucleotide
  Target: LAMA2; (+) strand; PAM type: NRG; PAM sequence: GAG
atttggcttataaaagatat

SEQ ID NO: 186113 - DNA, 20 bp, Artificial Sequence
  Description of Artificial Sequence: Synthetic oligonucleotide
  Target: LAMA2; (+) strand; PAM type: NRG; PAM sequence: AGG
tttggcttataaaagatatg

SEQ ID NO: 186114 - DNA, 20 bp, Artificial Sequence
  Description of Artificial Sequence: Synthetic oligonucleotide
  Target: LAMA2; (+) strand; PAM type: NRG; PAM sequence: CAG
aaaagatatgaggcatttaa

SEQ ID NO: 186115 - DNA, 20 bp, Artificial Sequence
  Description of Artificial Sequence: Synthetic oligonucleotide
  Target: LAMA2; (+) strand; PAM type: NRG; PAM sequence: TGG
atgaggcatttaacagcaat

SEQ ID NO: 186116 - DNA, 20 bp, Artificial Sequence
  Description of Artificial Sequence: Synthetic oligonucleotide
  Target: LAMA2; (+) strand; PAM type: NRG; PAM sequence: GAG
gaggcatttaacagcaattg

SEQ ID NO: 186117 - DNA, 20 bp, Artificial Sequence
  Description of Artificial Sequence: Synthetic oligonucleotide
  Target: LAMA2; (+) strand; PAM type: NRG; PAM sequence: TGG
acagcaattggagccaaact

SEQ ID NO: 186118 - DNA, 20 bp, Artificial Sequence
  Description of Artificial Sequence: Synthetic oligonucleotide
  Target: LAMA2; (+) strand; PAM type: NRG; PAM sequence: CAG
tttttttaaaattaatatac

SEQ ID NO: 186119 - DNA, 20 bp, Artificial Sequence
  Description of Artificial Sequence: Synthetic oligonucleotide
  Target: LAMA2; (+) strand; PAM type: NRG; PAM sequence: GAG
tttttaaaattaatatacca

SEQ ID NO: 186120 - DNA, 20 bp, Artificial Sequence
  Description of Artificial Sequence: Synthetic oligonucleotide
  Target: LAMA2; (+) strand; PAM type: NRG; PAM sequence: AGG
ttttaaaattaatataccag

SEQ ID NO: 186121 - DNA, 20 bp, Artificial Sequence
  Description of Artificial Sequence: Synthetic oligonucleotide
  Target: LAMA2; (+) strand; PAM type: NRG; PAM sequence: TGG
gaatcaatcataaaatgtta

SEQ ID NO: 186122 - DNA, 20 bp, Artificial Sequence
  Description of Artificial Sequence: Synthetic oligonucleotide
  Target: LAMA2; (+) strand; PAM type: NRG; PAM sequence: AAG
gttatggaacttatttcctc

SEQ ID NO: 186123 - DNA, 20 bp, Artificial Sequence
  Description of Artificial Sequence: Synthetic oligonucleotide
  Target: LAMA2; (+) strand; PAM type: NRG; PAM sequence: TGG
gaacttatttcctcaagttc

SEQ ID NO: 186124 - DNA, 20 bp, Artificial Sequence
  Description of Artificial Sequence: Synthetic oligonucleotide
  Target: LAMA2; (+) strand; PAM type: NRG; PAM sequence: TGG
cctcaagttctggaaatcat

SEQ ID NO: 186125 - DNA, 20 bp, Artificial Sequence
  Description of Artificial Sequence: Synthetic oligonucleotide
  Target: LAMA2; (+) strand; PAM type: NRG; PAM sequence: GGG
ctcaagttctggaaatcatt

SEQ ID NO: 186126 - DNA, 20 bp, Artificial Sequence
  Description of Artificial Sequence: Synthetic oligonucleotide
  Target: LAMA2; (+) strand; PAM type: NRG; PAM sequence: TAG
ggaaatcattgggttaaaca

SEQ ID NO: 186127 - DNA, 20 bp, Artificial Sequence
  Description of Artificial Sequence: Synthetic oligonucleotide
  Target: LAMA2; (+) strand; PAM type: NRG; PAM sequence: TAG
atttcccccttatgttatta

SEQ ID NO: 186128 - DNA, 20 bp, Artificial Sequence
  Description of Artificial Sequence: Synthetic oligonucleotide
  Target: LAMA2; (+) strand; PAM type: NRG; PAM sequence: GAG
ttcccccttatgttattata

SEQ ID NO: 186129 - DNA, 20 bp, Artificial Sequence
  Description of Artificial Sequence: Synthetic oligonucleotide
  Target: LAMA2; (+) strand; PAM type: NRG; PAM sequence: AAG
gagtttatatttatattaca

SEQ ID NO: 186130 - DNA, 20 bp, Artificial Sequence
  Description of Artificial Sequence: Synthetic oligonucleotide
  Target: LAMA2; (+) strand; PAM type: NRG; PAM sequence: AAG
tttatattacaaagaaacgc

SEQ ID NO: 186131 - DNA, 20 bp, Artificial Sequence
  Description of Artificial Sequence: Synthetic oligonucleotide
  Target: LAMA2; (+) strand; PAM type: NRG; PAM sequence: CAG
gcaagcaataaatcctcatt

SEQ ID NO: 186132 - DNA, 20 bp, Artificial Sequence
  Description of Artificial Sequence: Synthetic oligonucleotide
  Target: LAMA2; (+) strand; PAM type: NRG; PAM sequence: TAG
cctcattcagaatccttctc

SEQ ID NO: 186133 - DNA, 20 bp, Artificial Sequence
  Description of Artificial Sequence: Synthetic oligonucleotide
  Target: LAMA2; (+) strand; PAM type: NRG; PAM sequence: TAG
cttctctagcacattaaata

SEQ ID NO: 186134 - DNA, 20 bp, Artificial Sequence
  Description of Artificial Sequence: Synthetic oligonucleotide
  Target: LAMA2; (+) strand; PAM type: NRG; PAM sequence: TAG
taaatatagcatgtgaactg

SEQ ID NO: 186135 - DNA, 20 bp, Artificial Sequence
  Description of Artificial Sequence: Synthetic oligonucleotide
  Target: LAMA2; (+) strand; PAM type: NRG; PAM sequence: GAG
aatatagcatgtgaactgta

SEQ ID NO: 186136 - DNA, 20 bp, Artificial Sequence
  Description of Artificial Sequence: Synthetic oligonucleotide
  Target: LAMA2; (+) strand; PAM type: NRG; PAM sequence: AAG
gaactgtagagatttaccta

SEQ ID NO: 186137 - DNA, 20 bp, Artificial Sequence
  Description of Artificial Sequence: Synthetic oligonucleotide
  Target: LAMA2; (+) strand; PAM type: NRG; PAM sequence: AAG
tacctaaagtgcccataaac

SEQ ID NO: 186138 - DNA, 20 bp, Artificial Sequence
  Description of Artificial Sequence: Synthetic oligonucleotide
  Target: LAMA2; (+) strand; PAM type: NRG; PAM sequence: GAG
cctaaagtgcccataaacaa

SEQ ID NO: 186139 - DNA, 20 bp, Artificial Sequence
  Description of Artificial Sequence: Synthetic oligonucleotide
  Target: LAMA2; (+) strand; PAM type: NRG; PAM sequence: TGG
aaagtgcccataaacaagag

SEQ ID NO: 186140 - DNA, 20 bp, Artificial Sequence
  Description of Artificial Sequence: Synthetic oligonucleotide
  Target: LAMA2; (+) strand; PAM type: NRG; PAM sequence: GAG
acaagagtggccaacttgat

SEQ ID NO: 186141 - DNA, 20 bp, Artificial Sequence
  Description of Artificial Sequence: Synthetic oligonucleotide
  Target: LAMA2; (+) strand; PAM type: NRG; PAM sequence: AAG
agagtggccaacttgatgag

SEQ ID NO: 186142 - DNA, 20 bp, Artificial Sequence
  Description of Artificial Sequence: Synthetic oligonucleotide
  Target: LAMA2; (+) strand; PAM type: NRG; PAM sequence: AAG
tggccaacttgatgagaagt

SEQ ID NO: 186143 - DNA, 20 bp, Artificial Sequence
  Description of Artificial Sequence: Synthetic oligonucleotide
  Target: LAMA2; (+) strand; PAM type: NRG; PAM sequence: AAG
aacttgatgagaagtaagcc

SEQ ID NO: 186144 - DNA, 20 bp, Artificial Sequence
  Description of Artificial Sequence: Synthetic oligonucleotide
  Target: LAMA2; (+) strand; PAM type: NRG; PAM sequence: AAG
taagccaagtgcctcttaat

SEQ ID NO: 186145 - DNA, 20 bp, Artificial Sequence
  Description of Artificial Sequence: Synthetic oligonucleotide
  Target: LAMA2; (+) strand; PAM type: NRG; PAM sequence: TAG
taataagtactgtaataaca

SEQ ID NO: 186146 - DNA, 20 bp, Artificial Sequence
  Description of Artificial Sequence: Synthetic oligonucleotide
  Target: LAMA2; (+) strand; PAM type: NRG; PAM sequence: TGG
actgtaataacatagcctcc

SEQ ID NO: 186147 - DNA, 20 bp, Artificial Sequence
  Description of Artificial Sequence: Synthetic oligonucleotide
  Target: LAMA2; (+) strand; PAM type: NRG; PAM sequence: TGG
aataacatagcctcctggaa

SEQ ID NO: 186148 - DNA, 20 bp, Artificial Sequence
  Description of Artificial Sequence: Synthetic oligonucleotide
  Target: LAMA2; (+) strand; PAM type: NRG; PAM sequence: AAG
tggtctttcatcattttgtc

SEQ ID NO: 186149 - DNA, 20 bp, Artificial Sequence
  Description of Artificial Sequence: Synthetic oligonucleotide
  Target: LAMA2; (+) strand; PAM type: NRG; PAM sequence: GAG
gtctttcatcattttgtcaa

SEQ ID NO: 186150 - DNA, 20 bp, Artificial Sequence
  Description of Artificial Sequence: Synthetic oligonucleotide
  Target: LAMA2; (+) strand; PAM type: NRG; PAM sequence: AGG
tctttcatcattttgtcaag

SEQ ID NO: 186151 - DNA, 20 bp, Artificial Sequence
  Description of Artificial Sequence: Synthetic oligonucleotide
  Target: LAMA2; (+) strand; PAM type: NRG; PAM sequence: AAG
cttttatccctgtttatata

SEQ ID NO: 186152 - DNA, 20 bp, Artificial Sequence
  Description of Artificial Sequence: Synthetic oligonucleotide
  Target: LAMA2; (+) strand; PAM type: NRG; PAM sequence: AAG
gctcctttgctaaatgaaac

SEQ ID NO: 186153 - DNA, 20 bp, Artificial Sequence
  Description of Artificial Sequence: Synthetic oligonucleotide
  Target: LAMA2; (+) strand; PAM type: NRG; PAM sequence: CAG
aaacaagcaaaatgtatatt

SEQ ID NO: 186154 - DNA, 20 bp, Artificial Sequence
  Description of Artificial Sequence: Synthetic oligonucleotide
  Target: LAMA2; (+) strand; PAM type: NRG; PAM sequence: CAG
gtatattcagcaattgttga

SEQ ID NO: 186155 - DNA, 20 bp, Artificial Sequence
  Description of Artificial Sequence: Synthetic oligonucleotide
  Target: LAMA2; (+) strand; PAM type: NRG; PAM sequence: GAG
atattcagcaattgttgaca

SEQ ID NO: 186156 - DNA, 20 bp, Artificial Sequence
  Description of Artificial Sequence: Synthetic oligonucleotide
  Target: LAMA2; (+) strand; PAM type: NRG; PAM sequence: TAG
tgttgacagagcaatgttga

SEQ ID NO: 186157 - DNA, 20 bp, Artificial Sequence
  Description of Artificial Sequence: Synthetic oligonucleotide
  Target: LAMA2; (+) strand; PAM type: NRG; PAM sequence: TGG
caatgttgatagaaatgcaa

SEQ ID NO: 186158 - DNA, 20 bp, Artificial Sequence
  Description of Artificial Sequence: Synthetic oligonucleotide
  Target: LAMA2; (+) strand; PAM type: NRG; PAM sequence: GGG
aatgttgatagaaatgcaat

SEQ ID NO: 186159 - DNA, 20 bp, Artificial Sequence
  Description of Artificial Sequence: Synthetic oligonucleotide
  Target: LAMA2; (+) strand; PAM type: NRG; PAM sequence: GGG
atgttgatagaaatgcaatg

SEQ ID NO: 186160 - DNA, 20 bp, Artificial Sequence
  Description of Artificial Sequence: Synthetic oligonucleotide
  Target: LAMA2; (+) strand; PAM type: NRG; PAM sequence: GGG
tgttgatagaaatgcaatgg

SEQ ID NO: 186161 - DNA, 20 bp, Artificial Sequence
  Description of Artificial Sequence: Synthetic oligonucleotide
  Target: LAMA2; (+) strand; PAM type: NRG; PAM sequence: CAG
atgcaatgggggcccaacga

SEQ ID NO: 186162 - DNA, 20 bp, Artificial Sequence
  Description of Artificial Sequence: Synthetic oligonucleotide
  Target: LAMA2; (+) strand; PAM type: NRG; PAM sequence: AAG
aacgacagctcctctttcca

SEQ ID NO: 186163 - DNA, 20 bp, Artificial Sequence
  Description of Artificial Sequence: Synthetic oligonucleotide
  Target: LAMA2; (+) strand; PAM type: NRG; PAM sequence: TGG
gacagctcctctttccaaag

SEQ ID NO: 186164 - DNA, 20 bp, Artificial Sequence
  Description of Artificial Sequence: Synthetic oligonucleotide
  Target: LAMA2; (+) strand; PAM type: NRG; PAM sequence: AAG
agtggcttctgtgttttaaa

SEQ ID NO: 186165 - DNA, 20 bp, Artificial Sequence
  Description of Artificial Sequence: Synthetic oligonucleotide
  Target: LAMA2; (+) strand; PAM type: NRG; PAM sequence: CAG
aaaagatcttttgcttcaat

SEQ ID NO: 186166 - DNA, 20 bp, Artificial Sequence
  Description of Artificial Sequence: Synthetic oligonucleotide
  Target: LAMA2; (+) strand; PAM type: NRG; PAM sequence: AGG
aaagatcttttgcttcaatc

SEQ ID NO: 186167 - DNA, 20 bp, Artificial Sequence
  Description of Artificial Sequence: Synthetic oligonucleotide
  Target: LAMA2; (+) strand; PAM type: NRG; PAM sequence: AAG
cttcaatcaggataaattcc

SEQ ID NO: 186168 - DNA, 20 bp, Artificial Sequence
  Description of Artificial Sequence: Synthetic oligonucleotide
  Target: LAMA2; (+) strand; PAM type: NRG; PAM sequence: AAG
ataaattccaagatattatg

SEQ ID NO: 186169 - DNA, 20 bp, Artificial Sequence
  Description of Artificial Sequence: Synthetic oligonucleotide
  Target: LAMA2; (+) strand; PAM type: NRG; PAM sequence: AGG
taaattccaagatattatga

SEQ ID NO: 186170 - DNA, 20 bp, Artificial Sequence
  Description of Artificial Sequence: Synthetic oligonucleotide
  Target: LAMA2; (+) strand; PAM type: NRG; PAM sequence: GAG
aattccaagatattatgaag

SEQ ID NO: 186171 - DNA, 20 bp, Artificial Sequence
  Description of Artificial Sequence: Synthetic oligonucleotide
  Target: LAMA2; (+) strand; PAM type: NRG; PAM sequence: AGG
attccaagatattatgaagg

SEQ ID NO: 186172 - DNA, 20 bp, Artificial Sequence
  Description of Artificial Sequence: Synthetic oligonucleotide
  Target: LAMA2; (+) strand; PAM type: NRG; PAM sequence: CAG
aggtaatgtacttctccatt

SEQ ID NO: 186173 - DNA, 20 bp, Artificial Sequence
  Description of Artificial Sequence: Synthetic oligonucleotide
  Target: LAMA2; (+) strand; PAM type: NRG; PAM sequence: TGG
ctccattcagtctatgataa

SEQ ID NO: 186174 - DNA, 20 bp, Artificial Sequence
  Description of Artificial Sequence: Synthetic oligonucleotide
  Target: LAMA2; (+) strand; PAM type: NRG; PAM sequence: GGG
tccattcagtctatgataat

SEQ ID NO: 186175 - DNA, 20 bp, Artificial Sequence
  Description of Artificial Sequence: Synthetic oligonucleotide
  Target: LAMA2; (+) strand; PAM type: NRG; PAM sequence: TAG
atgggatcctaattaacacc

SEQ ID NO: 186176 - DNA, 20 bp, Artificial Sequence
  Description of Artificial Sequence: Synthetic oligonucleotide
  Target: LAMA2; (+) strand; PAM type: NRG; PAM sequence: TAG
ggatcctaattaacacctag

SEQ ID NO: 186177 - DNA, 20 bp, Artificial Sequence
  Description of Artificial Sequence: Synthetic oligonucleotide
  Target: LAMA2; (+) strand; PAM type: NRG; PAM sequence: AGG
gatcctaattaacacctagt

SEQ ID NO: 186178 - DNA, 20 bp, Artificial Sequence
  Description of Artificial Sequence: Synthetic oligonucleotide
  Target: LAMA2; (+) strand; PAM type: NRG; PAM sequence: AAG
cctagtaggcctactgaaac

SEQ ID NO: 186179 - DNA, 20 bp, Artificial Sequence
  Description of Artificial Sequence: Synthetic oligonucleotide
  Target: LAMA2; (+) strand; PAM type: NRG; PAM sequence: AAG
gaaacaagcacctctataat

SEQ ID NO: 186180 - DNA, 20 bp, Artificial Sequence
  Description of Artificial Sequence: Synthetic oligonucleotide
  Target: LAMA2; (+) strand; PAM type: NRG; PAM sequence: GAG
aacaagcacctctataataa

SEQ ID NO: 186181 - DNA, 20 bp, Artificial Sequence
  Description of Artificial Sequence: Synthetic oligonucleotide
  Target: LAMA2; (+) strand; PAM type: NRG; PAM sequence: AGG
acaagcacctctataataag

SEQ ID NO: 186182 - DNA, 20 bp, Artificial Sequence
  Description of Artificial Sequence: Synthetic oligonucleotide
  Target: LAMA2; (+) strand; PAM type: NRG; PAM sequence: AAG
agcacctctataataagagg

SEQ ID NO: 186183 - DNA, 20 bp, Artificial Sequence
  Description of Artificial Sequence: Synthetic oligonucleotide
  Target: LAMA2; (+) strand; PAM type: NRG; PAM sequence: TAG
tatccaacctacttaacctt

SEQ ID NO: 186184 - DNA, 20 bp, Artificial Sequence
  Description of Artificial Sequence: Synthetic oligonucleotide
  Target: LAMA2; (+) strand; PAM type: NRG; PAM sequence: AGG
atccaacctacttaaccttt

SEQ ID NO: 186185 - DNA, 20 bp, Artificial Sequence
  Description of Artificial Sequence: Synthetic oligonucleotide
  Target: LAMA2; (+) strand; PAM type: NRG; PAM sequence: GGG
tccaacctacttaaccttta

SEQ ID NO: 186186 - DNA, 20 bp, Artificial Sequence
  Description of Artificial Sequence: Synthetic oligonucleotide
  Target: LAMA2; (+) strand; PAM type: NRG; PAM sequence: AAG
gggatttatttttacaatgt

SEQ ID NO: 186187 - DNA, 20 bp, Artificial Sequence
  Description of Artificial Sequence: Synthetic oligonucleotide
  Target: LAMA2; (+) strand; PAM type: NRG; PAM sequence: AAG
tttatttttacaatgtaaga

SEQ ID NO: 186188 - DNA, 20 bp, Artificial Sequence
  Description of Artificial Sequence: Synthetic oligonucleotide
  Target: LAMA2; (+) strand; PAM type: NRG; PAM sequence: AAG
tacaatgtaagaaagtgata

SEQ ID NO: 186189 - DNA, 20 bp, Artificial Sequence
  Description of Artificial Sequence: Synthetic oligonucleotide
  Target: LAMA2; (+) strand; PAM type: NRG; PAM sequence: AAG
gtgataaagtcaccttcaaa

SEQ ID NO: 186190 - DNA, 20 bp, Artificial Sequence
  Description of Artificial Sequence: Synthetic oligonucleotide
  Target: LAMA2; (+) strand; PAM type: NRG; PAM sequence: AAG
agtcaccttcaaaaagttct

SEQ ID NO: 186191 - DNA, 20 bp, Artificial Sequence
  Description of Artificial Sequence: Synthetic oligonucleotide
  Target: LAMA2; (+) strand; PAM type: NRG; PAM sequence: AAG
accttcaaaaagttctaagt

SEQ ID NO: 186192 - DNA, 20 bp, Artificial Sequence
  Description of Artificial Sequence: Synthetic oligonucleotide
  Target: LAMA2; (+) strand; PAM type: NRG; PAM sequence: CAG
tcaaaaagttctaagtaagt

SEQ ID NO: 186193 - DNA, 20 bp, Artificial Sequence
  Description of Artificial Sequence: Synthetic oligonucleotide
  Target: LAMA2; (+) strand; PAM type: NRG; PAM sequence: AAG
ctaagtaagtcagtacttaa

SEQ ID NO: 186194 - DNA, 20 bp, Artificial Sequence
  Description of Artificial Sequence: Synthetic oligonucleotide
  Target: LAMA2; (+) strand; PAM type: NRG; PAM sequence: AAG
atcaattgctttgtttcatg

SEQ ID NO: 186195 - DNA, 20 bp, Artificial Sequence
  Description of Artificial Sequence: Synthetic oligonucleotide
  Target: LAMA2; (+) strand; PAM type: NRG; PAM sequence: AAG
aagtaacattttacaatttt

SEQ ID NO: 186196 - DNA, 20 bp, Artificial Sequence
  Description of Artificial Sequence: Synthetic oligonucleotide
  Target: LAMA2; (+) strand; PAM type: NRG; PAM sequence: AAG
aaatttgttcatcccaaacc

SEQ ID NO: 186197 - DNA, 20 bp, Artificial Sequence
  Description of Artificial Sequence: Synthetic oligonucleotide
  Target: LAMA2; (+) strand; PAM type: NRG; PAM sequence: AAG
accaagttatttcatgtctt

SEQ ID NO: 186198 - DNA, 20 bp, Artificial Sequence
  Description of Artificial Sequence: Synthetic oligonucleotide
  Target: LAMA2; (+) strand; PAM type: NRG; PAM sequence: TAG
tgtcttaagatgtataattc

SEQ ID NO: 186199 - DNA, 20 bp, Artificial Sequence
  Description of Artificial Sequence: Synthetic oligonucleotide
  Target: LAMA2; (+) strand; PAM type: NRG; PAM sequence: AAG
catatgttataactattaaa

SEQ ID NO: 186200 - DNA, 20 bp, Artificial Sequence
  Description of Artificial Sequence: Synthetic oligonucleotide
  Target: LAMA2; (+) strand; PAM type: NRG; PAM sequence: GAG
gttataactattaaaaagtt

SEQ ID NO: 186201 - DNA, 20 bp, Artificial Sequence
  Description of Artificial Sequence: Synthetic oligonucleotide
  Target: LAMA2; (+) strand; PAM type: NRG; PAM sequence: AGG
ttataactattaaaaagttg

SEQ ID NO: 186202 - DNA, 20 bp, Artificial Sequence
  Description of Artificial Sequence: Synthetic oligonucleotide
  Target: LAMA2; (+) strand; PAM type: NRG; PAM sequence: TGG
aactattaaaaagttgaggc

SEQ ID NO: 186203 - DNA, 20 bp, Artificial Sequence
  Description of Artificial Sequence: Synthetic oligonucleotide
  Target: LAMA2; (+) strand; PAM type: NRG; PAM sequence: TGG
taaaaagttgaggctggaca

SEQ ID NO: 186204 - DNA, 20 bp, Artificial Sequence
  Description of Artificial Sequence: Synthetic oligonucleotide
  Target: LAMA2; (+) strand; PAM type: NRG; PAM sequence: TGG
aaagttgaggctggacatgg

SEQ ID NO: 186205 - DNA, 20 bp, Artificial Sequence
  Description of Artificial Sequence: Synthetic oligonucleotide
  Target: LAMA2; (+) strand; PAM type: NRG; PAM sequence: TGG
tgcctgtaatcccaacactt

SEQ ID NO: 186206 - DNA, 20 bp, Artificial Sequence
  Description of Artificial Sequence: Synthetic oligonucleotide
  Target: LAMA2; (+) strand; PAM type: NRG; PAM sequence: TGG
aacactttggaattacactt

SEQ ID NO: 186207 - DNA, 20 bp, Artificial Sequence
  Description of Artificial Sequence: Synthetic oligonucleotide
  Target: LAMA2; (+) strand; PAM type: NRG; PAM sequence: GGG
acactttggaattacacttt

SEQ ID NO: 186208 - DNA, 20 bp, Artificial Sequence
  Description of Artificial Sequence: Synthetic oligonucleotide
  Target: LAMA2; (+) strand; PAM type: NRG; PAM sequence: TAG
ttggaattacactttgggca

SEQ ID NO: 186209 - DNA, 20 bp, Artificial Sequence
  Description of Artificial Sequence: Synthetic oligonucleotide
  Target: LAMA2; (+) strand; PAM type: NRG; PAM sequence: TGG
aattacactttgggcataga

SEQ ID NO: 186210 - DNA, 20 bp, Artificial Sequence
  Description of Artificial Sequence: Synthetic oligonucleotide
  Target: LAMA2; (+) strand; PAM type: NRG; PAM sequence: GGG
attacactttgggcatagat

SEQ ID NO: 186211 - DNA, 20 bp, Artificial Sequence
  Description of Artificial Sequence: Synthetic oligonucleotide
  Target: LAMA2; (+) strand; PAM type: NRG; PAM sequence: GGG
ttacactttgggcatagatg

SEQ ID NO: 186212 - DNA, 20 bp, Artificial Sequence
  Description of Artificial Sequence: Synthetic oligonucleotide
  Target: LAMA2; (+) strand; PAM type: NRG; PAM sequence: GAG
acactttgggcatagatggg

SEQ ID NO: 186213 - DNA, 20 bp, Artificial Sequence
  Description of Artificial Sequence: Synthetic oligonucleotide
  Target: LAMA2; (+) strand; PAM type: NRG; PAM sequence: GAG
catagatggggagatctctt

SEQ ID NO: 186214 - DNA, 20 bp, Artificial Sequence
  Description of Artificial Sequence: Synthetic oligonucleotide
  Target: LAMA2; (+) strand; PAM type: NRG; PAM sequence: CAG
atggggagatctcttgagcc

SEQ ID NO: 186215 - DNA, 20 bp, Artificial Sequence
  Description of Artificial Sequence: Synthetic oligonucleotide
  Target: LAMA2; (+) strand; PAM type: NRG; PAM sequence: AGG
tggggagatctcttgagccc

SEQ ID NO: 186216 - DNA, 20 bp, Artificial Sequence
  Description of Artificial Sequence: Synthetic oligonucleotide
  Target: LAMA2; (+) strand; PAM type: NRG; PAM sequence: GAG
gggagatctcttgagcccag

SEQ ID NO: 186217 - DNA, 20 bp, Artificial Sequence
  Description of Artificial Sequence: Synthetic oligonucleotide
  Target: LAMA2; (+) strand; PAM type: NRG; PAM sequence: TGG
gatctcttgagcccaggagt

SEQ ID NO: 186218 - DNA, 20 bp, Artificial Sequence
  Description of Artificial Sequence: Synthetic oligonucleotide
  Target: LAMA2; (+) strand; PAM type: NRG; PAM sequence: GAG
tctcttgagcccaggagttg

SEQ ID NO: 186219 - DNA, 20 bp, Artificial Sequence
  Description of Artificial Sequence: Synthetic oligonucleotide
  Target: LAMA2; (+) strand; PAM type: NRG; PAM sequence: GAG
tcttgagcccaggagttgga

SEQ ID NO: 186220 - DNA, 20 bp, Artificial Sequence
  Description of Artificial Sequence: Synthetic oligonucleotide
  Target: LAMA2; (+) strand; PAM type: NRG; PAM sequence: CAG
tgagcccaggagttggagag

SEQ ID NO: 186221 - DNA, 20 bp, Artificial Sequence
  Description of Artificial Sequence: Synthetic oligonucleotide
  Target: LAMA2; (+) strand; PAM type: NRG; PAM sequence: TGG
ccaggagttggagagcagcc

SEQ ID NO: 186222 - DNA, 20 bp, Artificial Sequence
  Description of Artificial Sequence: Synthetic oligonucleotide
  Target: LAMA2; (+) strand; PAM type: NRG; PAM sequence: GGG
caggagttggagagcagcct

SEQ ID NO: 186223 - DNA, 20 bp, Artificial Sequence
  Description of Artificial Sequence: Synthetic oligonucleotide
  Target: LAMA2; (+) strand; PAM type: NRG; PAM sequence: CGG
ggagagcagcctgggcaaca

SEQ ID NO: 186224 - DNA, 20 bp, Artificial Sequence
  Description of Artificial Sequence: Synthetic oligonucleotide
  Target: LAMA2; (+) strand; PAM type: NRG; PAM sequence: AAG
gcagcctgggcaacacggcg

SEQ ID NO: 186225 - DNA, 20 bp, Artificial Sequence
  Description of Artificial Sequence: Synthetic oligonucleotide
  Target: LAMA2; (+) strand; PAM type: NRG; PAM sequence: AGG
cagcctgggcaacacggcga

SEQ ID NO: 186226 - DNA, 20 bp, Artificial Sequence
  Description of Artificial Sequence: Synthetic oligonucleotide
  Target: LAMA2; (+) strand; PAM type: NRG; PAM sequence: GGG
agcctgggcaacacggcgaa

SEQ ID NO: 186227 - DNA, 20 bp, Artificial Sequence
  Description of Artificial Sequence: Synthetic oligonucleotide
  Target: LAMA2; (+) strand; PAM type: NRG; PAM sequence: GAG
cctgggcaacacggcgaagg

SEQ ID NO: 186228 - DNA, 20 bp, Artificial Sequence
  Description of Artificial Sequence: Synthetic oligonucleotide
  Target: LAMA2; (+) strand; PAM type: NRG; PAM sequence: AGG
ctgggcaacacggcgaaggg

SEQ ID NO: 186229 - DNA, 20 bp, Artificial Sequence
  Description of Artificial Sequence: Synthetic oligonucleotide
  Target: LAMA2; (+) strand; PAM type: NRG; PAM sequence: GAG
cggcgaagggaggatcgctt

SEQ ID NO: 186230 - DNA, 20 bp, Artificial Sequence
  Description of Artificial Sequence: Synthetic oligonucleotide
  Target: LAMA2; (+) strand; PAM type: NRG; PAM sequence: CAG
aagggaggatcgcttgagcc

SEQ ID NO: 186231 - DNA, 20 bp, Artificial Sequence
  Description of Artificial Sequence: Synthetic oligonucleotide
  Target: LAMA2; (+) strand; PAM type: NRG; PAM sequence: AGG
agggaggatcgcttgagccc

SEQ ID NO: 186232 - DNA, 20 bp, Artificial Sequence
  Description of Artificial Sequence: Synthetic oligonucleotide
  Target: LAMA2; (+) strand; PAM type: NRG; PAM sequence: GAG
ggaggatcgcttgagcccag

SEQ ID NO: 186233 - DNA, 20 bp, Artificial Sequence
  Description of Artificial Sequence: Synthetic oligonucleotide
  Target: LAMA2; (+) strand; PAM type: NRG; PAM sequence: AGG
gaggatcgcttgagcccagg

SEQ ID NO: 186234 - DNA, 20 bp, Artificial Sequence
  Description of Artificial Sequence: Synthetic oligonucleotide
  Target: LAMA2; (+) strand; PAM type: NRG; PAM sequence: GAG
tcgcttgagcccaggaggtt

SEQ ID NO: 186235 - DNA, 20 bp, Artificial Sequence
  Description of Artificial Sequence: Synthetic oligonucleotide
  Target: LAMA2; (+) strand; PAM type: NRG; PAM sequence: AGG
cgcttgagcccaggaggttg

SEQ ID NO: 186236 - DNA, 20 bp, Artificial Sequence
  Description of Artificial Sequence: Synthetic oligonucleotide
  Target: LAMA2; (+) strand; PAM type: NRG; PAM sequence: CAG
agcccaggaggttgaggctg

SEQ ID NO: 186237 - DNA, 20 bp, Artificial Sequence
  Description of Artificial Sequence: Synthetic oligonucleotide
  Target: LAMA2; (+) strand; PAM type: NRG; PAM sequence: AAG
caggaggttgaggctgcagt

SEQ ID NO: 186238 - DNA, 20 bp, Artificial Sequence
  Description of Artificial Sequence: Synthetic oligonucleotide
  Target: LAMA2; (+) strand; PAM type: NRG; PAM sequence: CAG
ttgattgcgccattgcactc

SEQ ID NO: 186239 - DNA, 20 bp, Artificial Sequence
  Description of Artificial Sequence: Synthetic oligonucleotide
  Target: LAMA2; (+) strand; PAM type: NRG; PAM sequence: TGG
tgcgccattgcactccagcc

SEQ ID NO: 186240 - DNA, 20 bp, Artificial Sequence
  Description of Artificial Sequence: Synthetic oligonucleotide
  Target: LAMA2; (+) strand; PAM type: NRG; PAM sequence: GGG
gcgccattgcactccagcct

SEQ ID NO: 186241 - DNA, 20 bp, Artificial Sequence
  Description of Artificial Sequence: Synthetic oligonucleotide
  Target: LAMA2; (+) strand; PAM type: NRG; PAM sequence: CAG
ttgcactccagcctgggcaa

SEQ ID NO: 186242 - DNA, 20 bp, Artificial Sequence
  Description of Artificial Sequence: Synthetic oligonucleotide
  Target: LAMA2; (+) strand; PAM type: NRG; PAM sequence: GAG
gcactccagcctgggcaaca

SEQ ID NO: 186243 - DNA, 20 bp, Artificial Sequence
  Description of Artificial Sequence: Synthetic oligonucleotide
  Target: LAMA2; (+) strand; PAM type: NRG; PAM sequence: AAG
tccagcctgggcaacagagc

SEQ ID NO: 186244 - DNA, 20 bp, Artificial Sequence
  Description of Artificial Sequence: Synthetic oligonucleotide
  Target: LAMA2; (+) strand; PAM type: NRG; PAM sequence: AAG
aacctgtctcaaaaaatttt

SEQ ID NO: 186245 - DNA, 20 bp, Artificial Sequence
  Description of Artificial Sequence: Synthetic oligonucleotide
  Target: LAMA2; (+) strand; PAM type: NRG; PAM sequence: TAG
ttctttctctacaattctat

SEQ ID NO: 186246 - DNA, 20 bp, Artificial Sequence
  Description of Artificial Sequence: Synthetic oligonucleotide
  Target: LAMA2; (+) strand; PAM type: NRG; PAM sequence: AAG
ttctctacaattctattagt

SEQ ID NO: 186247 - DNA, 20 bp, Artificial Sequence
  Description of Artificial Sequence: Synthetic oligonucleotide
  Target: LAMA2; (+) strand; PAM type: NRG; PAM sequence: AGG
tctctacaattctattagta

SEQ ID NO: 186248 - DNA, 20 bp, Artificial Sequence
  Description of Artificial Sequence: Synthetic oligonucleotide
  Target: LAMA2; (+) strand; PAM type: NRG; PAM sequence: CAG
accactaactttgcataaaa

SEQ ID NO: 186249 - DNA, 20 bp, Artificial Sequence
  Description of Artificial Sequence: Synthetic oligonucleotide
  Target: LAMA2; (+) strand; PAM type: NRG; PAM sequence: AAG
cagcattccaatttaatctc

SEQ ID NO: 186250 - DNA, 20 bp, Artificial Sequence
  Description of Artificial Sequence: Synthetic oligonucleotide
  Target: LAMA2; (+) strand; PAM type: NRG; PAM sequence: CAG
ccaatttaatctcaagctaa

SEQ ID NO: 186251 - DNA, 20 bp, Artificial Sequence
  Description of Artificial Sequence: Synthetic oligonucleotide
  Target: LAMA2; (+) strand; PAM type: NRG; PAM sequence: TGG
tgaaacatgctcttaatatt

SEQ ID NO: 186252 - DNA, 20 bp, Artificial Sequence
  Description of Artificial Sequence: Synthetic oligonucleotide
  Target: LAMA2; (+) strand; PAM type: NRG; PAM sequence: CAG
catgctcttaatatttggtg

SEQ ID NO: 186253 - DNA, 20 bp, Artificial Sequence
  Description of Artificial Sequence: Synthetic oligonucleotide
  Target: LAMA2; (+) strand; PAM type: NRG; PAM sequence: AGG
atgctcttaatatttggtgc

SEQ ID NO: 186254 - DNA, 20 bp, Artificial Sequence
  Description of Artificial Sequence: Synthetic oligonucleotide
  Target: LAMA2; (+) strand; PAM type: NRG; PAM sequence: AAG
atttggtgcaggacatttca

SEQ ID NO: 186255 - DNA, 20 bp, Artificial Sequence
  Description of Artificial Sequence: Synthetic oligonucleotide
  Target: LAMA2; (+) strand; PAM type: NRG; PAM sequence: GAG
gtgcaggacatttcaaagct

SEQ ID NO: 186256 - DNA, 20 bp, Artificial Sequence
  Description of Artificial Sequence: Synthetic oligonucleotide
  Target: LAMA2; (+) strand; PAM type: NRG; PAM sequence: CAG
ccctcttgcattgccttttt

SEQ ID NO: 186257 - DNA, 20 bp, Artificial Sequence
  Description of Artificial Sequence: Synthetic oligonucleotide
  Target: LAMA2; (+) strand; PAM type: NRG; PAM sequence: AAG
tgcctttttcagatgacctc

SEQ ID NO: 186258 - DNA, 20 bp, Artificial Sequence
  Description of Artificial Sequence: Synthetic oligonucleotide
  Target: LAMA2; (+) strand; PAM type: NRG; PAM sequence: CAG
ctttttcagatgacctcaag

SEQ ID NO: 186259 - DNA, 20 bp, Artificial Sequence
  Description of Artificial Sequence: Synthetic oligonucleotide
  Target: LAMA2; (+) strand; PAM type: NRG; PAM sequence: TGG
tcagatgacctcaagcagtt

SEQ ID NO: 186260 - DNA, 20 bp, Artificial Sequence
  Description of Artificial Sequence: Synthetic oligonucleotide
  Target: LAMA2; (+) strand; PAM type: NRG; PAM sequence: CAG
aagcagtttggcctaacaac

SEQ ID NO: 186261 - DNA, 20 bp, Artificial Sequence
  Description of Artificial Sequence: Synthetic oligonucleotide
  Target: LAMA2; (+) strand; PAM type: NRG; PAM sequence: GAG
aacaaccagtattccgttcc

SEQ ID NO: 186262 - DNA, 20 bp, Artificial Sequence
  Description of Artificial Sequence: Synthetic oligonucleotide
  Target: LAMA2; (+) strand; PAM type: NRG; PAM sequence: AGG
acaaccagtattccgttccg

SEQ ID NO: 186263 - DNA, 20 bp, Artificial Sequence
  Description of Artificial Sequence: Synthetic oligonucleotide
  Target: LAMA2; (+) strand; PAM type: NRG; PAM sequence: CAG
attccgttccgaggttgcat

SEQ ID NO: 186264 - DNA, 20 bp, Artificial Sequence
  Description of Artificial Sequence: Synthetic oligonucleotide
  Target: LAMA2; (+) strand; PAM type: NRG; PAM sequence: AAG
gaggttgcatcagatccctg

SEQ ID NO: 186265 - DNA, 20 bp, Artificial Sequence
  Description of Artificial Sequence: Synthetic oligonucleotide
  Target: LAMA2; (+) strand; PAM type: NRG; PAM sequence: AAG
cagatccctgaagctcacca

SEQ ID NO: 186266 - DNA, 20 bp, Artificial Sequence
  Description of Artificial Sequence: Synthetic oligonucleotide
  Target: LAMA2; (+) strand; PAM type: NRG; PAM sequence: AGG
agatccctgaagctcaccaa

SEQ ID NO: 186267 - DNA, 20 bp, Artificial Sequence
  Description of Artificial Sequence: Synthetic oligonucleotide
  Target: LAMA2; (+) strand; PAM type: NRG; PAM sequence: CAG
cctgaagctcaccaaaggca

SEQ ID NO: 186268 - DNA, 20 bp, Artificial Sequence
  Description of Artificial Sequence: Synthetic oligonucleotide
  Target: LAMA2; (+) strand; PAM type: NRG; PAM sequence: AGG
ctgaagctcaccaaaggcac

SEQ ID NO: 186269 - DNA, 20 bp, Artificial Sequence
  Description of Artificial Sequence: Synthetic oligonucleotide
  Target: LAMA2; (+) strand; PAM type: NRG; PAM sequence: AAG
agctcaccaaaggcacaggc

SEQ ID NO: 186270 - DNA, 20 bp, Artificial Sequence
  Description of Artificial Sequence: Synthetic oligonucleotide
  Target: LAMA2; (+) strand; PAM type: NRG; PAM sequence: TGG
caaaggcacaggcaagccac

SEQ ID NO: 186271 - DNA, 20 bp, Artificial Sequence
  Description of Artificial Sequence: Synthetic oligonucleotide
  Target: LAMA2; (+) strand; PAM type: NRG; PAM sequence: GAG
aaggcacaggcaagccactg

SEQ ID NO: 186272 - DNA, 20 bp, Artificial Sequence
  Description of Artificial Sequence: Synthetic oligonucleotide
  Target: LAMA2; (+) strand; PAM type: NRG; PAM sequence: AGG
aggcacaggcaagccactgg

SEQ ID NO: 186273 - DNA, 20 bp, Artificial Sequence
  Description of Artificial Sequence: Synthetic oligonucleotide
  Target: LAMA2; (+) strand; PAM type: NRG; PAM sequence: AAG
cactggaggttaattttgcc

SEQ ID NO: 186274 - DNA, 20 bp, Artificial Sequence
  Description of Artificial Sequence: Synthetic oligonucleotide
  Target: LAMA2; (+) strand; PAM type: NRG; PAM sequence: AGG
actggaggttaattttgcca

SEQ ID NO: 186275 - DNA, 20 bp, Artificial Sequence
  Description of Artificial Sequence: Synthetic oligonucleotide
  Target: LAMA2; (+) strand; PAM type: NRG; PAM sequence: TGG
ggttaattttgccaaggccc

SEQ ID NO: 186276 - DNA, 20 bp, Artificial Sequence
  Description of Artificial Sequence: Synthetic oligonucleotide
  Target: LAMA2; (+) strand; PAM type: NRG; PAM sequence: GAG
tttgccaaggccctggaact

SEQ ID NO: 186277 - DNA, 20 bp, Artificial Sequence
  Description of Artificial Sequence: Synthetic oligonucleotide
  Target: LAMA2; (+) strand; PAM type: NRG; PAM sequence: AGG
ttgccaaggccctggaactg

SEQ ID NO: 186278 - DNA, 20 bp, Artificial Sequence
  Description of Artificial Sequence: Synthetic oligonucleotide
  Target: LAMA2; (+) strand; PAM type: NRG; PAM sequence: GGG
tgccaaggccctggaactga

SEQ ID NO: 186279 - DNA, 20 bp, Artificial Sequence
  Description of Artificial Sequence: Synthetic oligonucleotide
  Target: LAMA2; (+) strand; PAM type: NRG; PAM sequence: GGG
gccaaggccctggaactgag

SEQ ID NO: 186280 - DNA, 20 bp, Artificial Sequence
  Description of Artificial Sequence: Synthetic oligonucleotide
  Target: LAMA2; (+) strand; PAM type: NRG; PAM sequence: CAG
cgttcaacctgtatcatgcc

SEQ ID NO: 186281 - DNA, 20 bp, Artificial Sequence
  Description of Artificial Sequence: Synthetic oligonucleotide
  Target: LAMA2; (+) strand; PAM type: NRG; PAM sequence: AAG
cccagccaactaataaaaat

SEQ ID NO: 186282 - DNA, 20 bp, Artificial Sequence
  Description of Artificial Sequence: Synthetic oligonucleotide
  Target: LAMA2; (+) strand; PAM type: NRG; PAM sequence: CAG
aataaaaataagtgtaaccc

SEQ ID NO: 186283 - DNA, 20 bp, Artificial Sequence
  Description of Artificial Sequence: Synthetic oligonucleotide
  Target: LAMA2; (+) strand; PAM type: NRG; PAM sequence: AGG
ataaaaataagtgtaacccc

SEQ ID NO: 186284 - DNA, 20 bp, Artificial Sequence
  Description of Artificial Sequence: Synthetic oligonucleotide
  Target: LAMA2; (+) strand; PAM type: NRG; PAM sequence: AAG
aaaataagtgtaaccccagg

SEQ ID NO: 186285 - DNA, 20 bp, Artificial Sequence
  Description of Artificial Sequence: Synthetic oligonucleotide
  Target: LAMA2; (+) strand; PAM type: NRG; PAM sequence: GAG
aataagtgtaaccccaggaa

SEQ ID NO: 186286 - DNA, 20 bp, Artificial Sequence
  Description of Artificial Sequence: Synthetic oligonucleotide
  Target: LAMA2; (+) strand; PAM type: NRG; PAM sequence: AAG
caggaagagtctgtcaaaac

SEQ ID NO: 186287 - DNA, 20 bp, Artificial Sequence
  Description of Artificial Sequence: Synthetic oligonucleotide
  Target: LAMA2; (+) strand; PAM type: NRG; PAM sequence: AAG
tctgtcaaaacaagtatatc

SEQ ID NO: 186288 - DNA, 20 bp, Artificial Sequence
  Description of Artificial Sequence: Synthetic oligonucleotide
  Target: LAMA2; (+) strand; PAM type: NRG; PAM sequence: TAG
aactaatttgtgcatgtaca

SEQ ID NO: 186289 - DNA, 20 bp, Artificial Sequence
  Description of Artificial Sequence: Synthetic oligonucleotide
  Target: LAMA2; (+) strand; PAM type: NRG; PAM sequence: CAG
catagaattctttctgtatt

SEQ ID NO: 186290 - DNA, 20 bp, Artificial Sequence
  Description of Artificial Sequence: Synthetic oligonucleotide
  Target: LAMA2; (+) strand; PAM type: NRG; PAM sequence: TGG
gaattctttctgtattcaga

SEQ ID NO: 186291 - DNA, 20 bp, Artificial Sequence
  Description of Artificial Sequence: Synthetic oligonucleotide
  Target: LAMA2; (+) strand; PAM type: NRG; PAM sequence: CAG
gtattcagatggtgctaatt

SEQ ID NO: 186292 - DNA, 20 bp, Artificial Sequence
  Description of Artificial Sequence: Synthetic oligonucleotide
  Target: LAMA2; (+) strand; PAM type: NRG; PAM sequence: CAG
gatggtgctaattcagactc

SEQ ID NO: 186293 - DNA, 20 bp, Artificial Sequence
  Description of Artificial Sequence: Synthetic oligonucleotide
  Target: LAMA2; (+) strand; PAM type: NRG; PAM sequence: AAG
tccagactgaattttaattc

SEQ ID NO: 186294 - DNA, 20 bp, Artificial Sequence
  Description of Artificial Sequence: Synthetic oligonucleotide
  Target: LAMA2; (+) strand; PAM type: NRG; PAM sequence: AAG
tttaattcaagttctttctc

SEQ ID NO: 186295 - DNA, 20 bp, Artificial Sequence
  Description of Artificial Sequence: Synthetic oligonucleotide
  Target: LAMA2; (+) strand; PAM type: NRG; PAM sequence: AAG
tgcctgttttgtgtgatttt

SEQ ID NO: 186296 - DNA, 20 bp, Artificial Sequence
  Description of Artificial Sequence: Synthetic oligonucleotide
  Target: LAMA2; (+) strand; PAM type: NRG; PAM sequence: AGG
gcctgttttgtgtgatttta

SEQ ID NO: 186297 - DNA, 20 bp, Artificial Sequence
  Description of Artificial Sequence: Synthetic oligonucleotide
  Target: LAMA2; (+) strand; PAM type: NRG; PAM sequence: AAG
ttgtgtgattttaaggataa

SEQ ID NO: 186298 - DNA, 20 bp, Artificial Sequence
  Description of Artificial Sequence: Synthetic oligonucleotide
  Target: LAMA2; (+) strand; PAM type: NRG; PAM sequence: AGG
tgtgtgattttaaggataaa

SEQ ID NO: 186299 - DNA, 20 bp, Artificial Sequence
  Description of Artificial Sequence: Synthetic oligonucleotide
  Target: LAMA2; (+) strand; PAM type: NRG; PAM sequence: TGG
ttttaaggataaaaggtaac

SEQ ID NO: 186300 - DNA, 20 bp, Artificial Sequence
  Description of Artificial Sequence: Synthetic oligonucleotide
  Target: LAMA2; (+) strand; PAM type: NRG; PAM sequence: GAG
gtaactggccataaattgtt

SEQ ID NO: 186301 - DNA, 20 bp, Artificial Sequence
  Description of Artificial Sequence: Synthetic oligonucleotide
  Target: LAMA2; (+) strand; PAM type: NRG; PAM sequence: CAG
tgagtttgcaacatgccctc

SEQ ID NO: 186302 - DNA, 20 bp, Artificial Sequence
  Description of Artificial Sequence: Synthetic oligonucleotide
  Target: LAMA2; (+) strand; PAM type: NRG; PAM sequence: AAG
acatgccctccagtcatctc

SEQ ID NO: 186303 - DNA, 20 bp, Artificial Sequence
  Description of Artificial Sequence: Synthetic oligonucleotide
  Target: LAMA2; (+) strand; PAM type: NRG; PAM sequence: AGG
catgccctccagtcatctca

SEQ ID NO: 186304 - DNA, 20 bp, Artificial Sequence
  Description of Artificial Sequence: Synthetic oligonucleotide
  Target: LAMA2; (+) strand; PAM type: NRG; PAM sequence: AAG
ccctccagtcatctcaagga

SEQ ID NO: 186305 - DNA, 20 bp, Artificial Sequence
  Description of Artificial Sequence: Synthetic oligonucleotide
  Target: LAMA2; (+) strand; PAM type: NRG; PAM sequence: GAG
ctccagtcatctcaaggaaa

SEQ ID NO: 186306 - DNA, 20 bp, Artificial Sequence
  Description of Artificial Sequence: Synthetic oligonucleotide
  Target: LAMA2; (+) strand; PAM type: NRG; PAM sequence: CAG
gtcatctcaaggaaagagtt

SEQ ID NO: 186307 - DNA, 20 bp, Artificial Sequence
  Description of Artificial Sequence: Synthetic oligonucleotide
  Target: LAMA2; (+) strand; PAM type: NRG; PAM sequence: TGG
aagagttcagatgtaattta

SEQ ID NO: 186308 - DNA, 20 bp, Artificial Sequence
  Description of Artificial Sequence: Synthetic oligonucleotide
  Target: LAMA2; (+) strand; PAM type: NRG; PAM sequence: GAG
gagttcagatgtaatttatg

SEQ ID NO: 186309 - DNA, 20 bp, Artificial Sequence
  Description of Artificial Sequence: Synthetic oligonucleotide
  Target: LAMA2; (+) strand; PAM type: NRG; PAM sequence: AGG
agttcagatgtaatttatgg

SEQ ID NO: 186310 - DNA, 20 bp, Artificial Sequence
  Description of Artificial Sequence: Synthetic oligonucleotide
  Target: LAMA2; (+) strand; PAM type: NRG; PAM sequence: CAG
tcatcctttaccatgtatga

SEQ ID NO: 186311 - DNA, 20 bp, Artificial Sequence
  Description of Artificial Sequence: Synthetic oligonucleotide
  Target: LAMA2; (+) strand; PAM type: NRG; PAM sequence: TGG
tttaccatgtatgacagctt

SEQ ID NO: 186312 - DNA, 20 bp, Artificial Sequence
  Description of Artificial Sequence: Synthetic oligonucleotide
  Target: LAMA2; (+) strand; PAM type: NRG; PAM sequence: AAG
acagctttggccttctgtcc

SEQ ID NO: 186313 - DNA, 20 bp, Artificial Sequence
  Description of Artificial Sequence: Synthetic oligonucleotide
  Target: LAMA2; (+) strand; PAM type: NRG; PAM sequence: CAG
ccttctgtccaagccactga

SEQ ID NO: 186314 - DNA, 20 bp, Artificial Sequence
  Description of Artificial Sequence: Synthetic oligonucleotide
  Target: LAMA2; (+) strand; PAM type: NRG; PAM sequence: AAG
ctgtccaagccactgacagc

SEQ ID NO: 186315 - DNA, 20 bp, Artificial Sequence
  Description of Artificial Sequence: Synthetic oligonucleotide
  Target: LAMA2; (+) strand; PAM type: NRG; PAM sequence: TGG
ccactgacagcaagtgaatt

SEQ ID NO: 186316 - DNA, 20 bp, Artificial Sequence
  Description of Artificial Sequence: Synthetic oligonucleotide
  Target: LAMA2; (+) strand; PAM type: NRG; PAM sequence: TGG
gtgaatttggcatgtgtgat

SEQ ID NO: 186317 - DNA, 20 bp, Artificial Sequence
  Description of Artificial Sequence: Synthetic oligonucleotide
  Target: LAMA2; (+) strand; PAM type: NRG; PAM sequence: GGG
tgaatttggcatgtgtgatt

SEQ ID NO: 186318 - DNA, 20 bp, Artificial Sequence
  Description of Artificial Sequence: Synthetic oligonucleotide
  Target: LAMA2; (+) strand; PAM type: NRG; PAM sequence: GAG
aatttggcatgtgtgattgg

SEQ ID NO: 186319 - DNA, 20 bp, Artificial Sequence
  Description of Artificial Sequence: Synthetic oligonucleotide
  Target: LAMA2; (+) strand; PAM type: NRG; PAM sequence: AGG
atttggcatgtgtgattggg

SEQ ID NO: 186320 - DNA, 20 bp, Artificial Sequence
  Description of Artificial Sequence: Synthetic oligonucleotide
  Target: LAMA2; (+) strand; PAM type: NRG; PAM sequence: CAG
atgtgtgattgggaggaaat

SEQ ID NO: 186321 - DNA, 20 bp, Artificial Sequence
  Description of Artificial Sequence: Synthetic oligonucleotide
  Target: LAMA2; (+) strand; PAM type: NRG; PAM sequence: AAG
ttcccttactctatttatga

SEQ ID NO: 186322 - DNA, 20 bp, Artificial Sequence
  Description of Artificial Sequence: Synthetic oligonucleotide
  Target: LAMA2; (+) strand; PAM type: NRG; PAM sequence: TAG
tctatttatgaaagaattat

SEQ ID NO: 186323 - DNA, 20 bp, Artificial Sequence
  Description of Artificial Sequence: Synthetic oligonucleotide
  Target: LAMA2; (+) strand; PAM type: NRG; PAM sequence: AAG
gcaaatcattgtcctgaccc

SEQ ID NO: 186324 - DNA, 20 bp, Artificial Sequence
  Description of Artificial Sequence: Synthetic oligonucleotide
  Target: LAMA2; (+) strand; PAM type: NRG; PAM sequence: TAG
tcctgacccaagttcattat

SEQ ID NO: 186325 - DNA, 20 bp, Artificial Sequence
  Description of Artificial Sequence: Synthetic oligonucleotide
  Target: LAMA2; (+) strand; PAM type: NRG; PAM sequence: GAG
ctgacccaagttcattatta

SEQ ID NO: 186326 - DNA, 20 bp, Artificial Sequence
  Description of Artificial Sequence: Synthetic oligonucleotide
  Target: LAMA2; (+) strand; PAM type: NRG; PAM sequence: GAG
gacccaagttcattattaga

SEQ ID NO: 186327 - DNA, 20 bp, Artificial Sequence
  Description of Artificial Sequence: Synthetic oligonucleotide
  Target: LAMA2; (+) strand; PAM type: NRG; PAM sequence: TAG
tcattattagagagtttaac

SEQ ID NO: 186328 - DNA, 20 bp, Artificial Sequence
  Description of Artificial Sequence: Synthetic oligonucleotide
  Target: LAMA2; (+) strand; PAM type: NRG; PAM sequence: GAG
gagagtttaactagccgtat

SEQ ID NO: 186329 - DNA, 20 bp, Artificial Sequence
  Description of Artificial Sequence: Synthetic oligonucleotide
  Target: LAMA2; (+) strand; PAM type: NRG; PAM sequence: TAG
taactagccgtatgagtgaa

SEQ ID NO: 186330 - DNA, 20 bp, Artificial Sequence
  Description of Artificial Sequence: Synthetic oligonucleotide
  Target: LAMA2; (+) strand; PAM type: NRG; PAM sequence: AAG
gtgaatagctttttatgctg

SEQ ID NO: 186331 - DNA, 20 bp, Artificial Sequence
  Description of Artificial Sequence: Synthetic oligonucleotide
  Target: LAMA2; (+) strand; PAM type: NRG; PAM sequence: AGG
tgaatagctttttatgctga

SEQ ID NO: 186332 - DNA, 20 bp, Artificial Sequence
  Description of Artificial Sequence: Synthetic oligonucleotide
  Target: LAMA2; (+) strand; PAM type: NRG; PAM sequence: TAG
atagctttttatgctgaagg

SEQ ID NO: 186333 - DNA, 20 bp, Artificial Sequence
  Description of Artificial Sequence: Synthetic oligonucleotide
  Target: LAMA2; (+) strand; PAM type: NRG; PAM sequence: GAG
agctttttatgctgaaggta

SEQ ID NO: 186334 - DNA, 20 bp, Artificial Sequence
  Description of Artificial Sequence: Synthetic oligonucleotide
  Target: LAMA2; (+) strand; PAM type: NRG; PAM sequence: AGG
gctttttatgctgaaggtag

SEQ ID NO: 186335 - DNA, 20 bp, Artificial Sequence
  Description of Artificial Sequence: Synthetic oligonucleotide
  Target: LAMA2; (+) strand; PAM type: NRG; PAM sequence: GGG
ctttttatgctgaaggtaga

SEQ ID NO: 186336 - DNA, 20 bp, Artificial Sequence
  Description of Artificial Sequence: Synthetic oligonucleotide
  Target: LAMA2; (+) strand; PAM type: NRG; PAM sequence: TAG
tatgctgaaggtagagggta

SEQ ID NO: 186337 - DNA, 20 bp, Artificial Sequence
  Description of Artificial Sequence: Synthetic oligonucleotide
  Target: LAMA2; (+) strand; PAM type: NRG; PAM sequence: CAG
tgaaggtagagggtatagac

SEQ ID NO: 186338 - DNA, 20 bp, Artificial Sequence
  Description of Artificial Sequence: Synthetic oligonucleotide
  Target: LAMA2; (+) strand; PAM type: NRG; PAM sequence: CAG
tagagggtatagaccagatt

SEQ ID NO: 186339 - DNA, 20 bp, Artificial Sequence
  Description of Artificial Sequence: Synthetic oligonucleotide
  Target: LAMA2; (+) strand; PAM type: NRG; PAM sequence: AGG
agagggtatagaccagattc

SEQ ID NO: 186340 - DNA, 20 bp, Artificial Sequence
  Description of Artificial Sequence: Synthetic oligonucleotide
  Target: LAMA2; (+) strand; PAM type: NRG; PAM sequence: CAG
ggtatagaccagattcaggc

SEQ ID NO: 186341 - DNA, 20 bp, Artificial Sequence
  Description of Artificial Sequence: Synthetic oligonucleotide
  Target: LAMA2; (+) strand; PAM type: NRG; PAM sequence: AAG
tagaccagattcaggccaga

SEQ ID NO: 186342 - DNA, 20 bp, Artificial Sequence
  Description of Artificial Sequence: Synthetic oligonucleotide
  Target: LAMA2; (+) strand; PAM type: NRG; PAM sequence: TGG
tcttatttgataatgattta

SEQ ID NO: 186343 - DNA, 20 bp, Artificial Sequence
  Description of Artificial Sequence: Synthetic oligonucleotide
  Target: LAMA2; (+) strand; PAM type: NRG; PAM sequence: GGG
cttatttgataatgatttat

SEQ ID NO: 186344 - DNA, 20 bp, Artificial Sequence
  Description of Artificial Sequence: Synthetic oligonucleotide
  Target: LAMA2; (+) strand; PAM type: NRG; PAM sequence: TGG
tgataatgatttatgggctt

SEQ ID NO: 186345 - DNA, 20 bp, Artificial Sequence
  Description of Artificial Sequence: Synthetic oligonucleotide
  Target: LAMA2; (+) strand; PAM type: NRG; PAM sequence: GGG
gataatgatttatgggcttt

SEQ ID NO: 186346 - DNA, 20 bp, Artificial Sequence
  Description of Artificial Sequence: Synthetic oligonucleotide
  Target: LAMA2; (+) strand; PAM type: NRG; PAM sequence: GGG
ataatgatttatgggctttg

SEQ ID NO: 186347 - DNA, 20 bp, Artificial Sequence
  Description of Artificial Sequence: Synthetic oligonucleotide
  Target: LAMA2; (+) strand; PAM type: NRG; PAM sequence: GAG
aatgatttatgggctttggg

SEQ ID NO: 186348 - DNA, 20 bp, Artificial Sequence
  Description of Artificial Sequence: Synthetic oligonucleotide
  Target: LAMA2; (+) strand; PAM type: NRG; PAM sequence: AAG
tttggggagatgccaaaacc

SEQ ID NO: 186349 - DNA, 20 bp, Artificial Sequence
  Description of Artificial Sequence: Synthetic oligonucleotide
  Target: LAMA2; (+) strand; PAM type: NRG; PAM sequence: AAG
caagcttatgaatgacaacc

SEQ ID NO: 186350 - DNA, 20 bp, Artificial Sequence
  Description of Artificial Sequence: Synthetic oligonucleotide
  Target: LAMA2; (+) strand; PAM type: NRG; PAM sequence: CAG
caagcacacatttgatacta

SEQ ID NO: 186351 - DNA, 20 bp, Artificial Sequence
  Description of Artificial Sequence: Synthetic oligonucleotide
  Target: LAMA2; (+) strand; PAM type: NRG; PAM sequence: AAG
acatttgatactacagtact

SEQ ID NO: 186352 - DNA, 20 bp, Artificial Sequence
  Description of Artificial Sequence: Synthetic oligonucleotide
  Target: LAMA2; (+) strand; PAM type: NRG; PAM sequence: AAG
ttgatactacagtactaaga

SEQ ID NO: 186353 - DNA, 20 bp, Artificial Sequence
  Description of Artificial Sequence: Synthetic oligonucleotide
  Target: LAMA2; (+) strand; PAM type: NRG; PAM sequence: TGG
ctacagtactaagaaagatt

SEQ ID NO: 186354 - DNA, 20 bp, Artificial Sequence
  Description of Artificial Sequence: Synthetic oligonucleotide
  Target: LAMA2; (+) strand; PAM type: NRG; PAM sequence: GGG
tacagtactaagaaagattt

SEQ ID NO: 186355 - DNA, 20 bp, Artificial Sequence
  Description of Artificial Sequence: Synthetic oligonucleotide
  Target: LAMA2; (+) strand; PAM type: NRG; PAM sequence: GGG
acagtactaagaaagatttg

SEQ ID NO: 186356 - DNA, 20 bp, Artificial Sequence
  Description of Artificial Sequence: Synthetic oligonucleotide
  Target: LAMA2; (+) strand; PAM type: NRG; PAM sequence: AAG
agaaagatttggggctctct

SEQ ID NO: 186357 - DNA, 20 bp, Artificial Sequence
  Description of Artificial Sequence: Synthetic oligonucleotide
  Target: LAMA2; (+) strand; PAM type: NRG; PAM sequence: CAG
tttggggctctctaagccta

SEQ ID NO: 186358 - DNA, 20 bp, Artificial Sequence
  Description of Artificial Sequence: Synthetic oligonucleotide
  Target: LAMA2; (+) strand; PAM type: NRG; PAM sequence: TAG
tgaatatcacaatttacacc

SEQ ID NO: 186359 - DNA, 20 bp, Artificial Sequence
  Description of Artificial Sequence: Synthetic oligonucleotide
  Target: LAMA2; (+) strand; PAM type: NRG; PAM sequence: AGG
gaatatcacaatttacacct

SEQ ID NO: 186360 - DNA, 20 bp, Artificial Sequence
  Description of Artificial Sequence: Synthetic oligonucleotide
  Target: LAMA2; (+) strand; PAM type: NRG; PAM sequence: TGG
tatcacaatttacacctagg

SEQ ID NO: 186361 - DNA, 20 bp, Artificial Sequence
  Description of Artificial Sequence: Synthetic oligonucleotide
  Target: LAMA2; (+) strand; PAM type: NRG; PAM sequence: GAG
tcacaatttacacctaggtg

SEQ ID NO: 186362 - DNA, 20 bp, Artificial Sequence
  Description of Artificial Sequence: Synthetic oligonucleotide
  Target: LAMA2; (+) strand; PAM type: NRG; PAM sequence: GAG
acaatttacacctaggtgga

SEQ ID NO: 186363 - DNA, 20 bp, Artificial Sequence
  Description of Artificial Sequence: Synthetic oligonucleotide
  Target: LAMA2; (+) strand; PAM type: NRG; PAM sequence: AGG
caatttacacctaggtggag

SEQ ID NO: 186364 - DNA, 20 bp, Artificial Sequence
  Description of Artificial Sequence: Synthetic oligonucleotide
  Target: LAMA2; (+) strand; PAM type: NRG; PAM sequence: CAG
tgaaatgcatttgtacttat

SEQ ID NO: 186365 - DNA, 20 bp, Artificial Sequence
  Description of Artificial Sequence: Synthetic oligonucleotide
  Target: LAMA2; (+) strand; PAM type: NRG; PAM sequence: AGG
gaaatgcatttgtacttatc

SEQ ID NO: 186366 - DNA, 20 bp, Artificial Sequence
  Description of Artificial Sequence: Synthetic oligonucleotide
  Target: LAMA2; (+) strand; PAM type: NRG; PAM sequence: CAG
cttatcaggaaacaataaac

SEQ ID NO: 186367 - DNA, 20 bp, Artificial Sequence
  Description of Artificial Sequence: Synthetic oligonucleotide
  Target: LAMA2; (+) strand; PAM type: NRG; PAM sequence: AAG
acaataaaccagaaacttaa

SEQ ID NO: 186368 - DNA, 20 bp, Artificial Sequence
  Description of Artificial Sequence: Synthetic oligonucleotide
  Target: LAMA2; (+) strand; PAM type: NRG; PAM sequence: AGG
caataaaccagaaacttaaa

SEQ ID NO: 186369 - DNA, 20 bp, Artificial Sequence
  Description of Artificial Sequence: Synthetic oligonucleotide
  Target: LAMA2; (+) strand; PAM type: NRG; PAM sequence: GAG
cttaaaaggcatacttcatt

SEQ ID NO: 186370 - DNA, 20 bp, Artificial Sequence
  Description of Artificial Sequence: Synthetic oligonucleotide
  Target: LAMA2; (+) strand; PAM type: NRG; PAM sequence: TGG
gcatacttcattgagtcttt

SEQ ID NO: 186371 - DNA, 20 bp, Artificial Sequence
  Description of Artificial Sequence: Synthetic oligonucleotide
  Target: LAMA2; (+) strand; PAM type: NRG; PAM sequence: GAG
atacttcattgagtcttttg

SEQ ID NO: 186372 - DNA, 20 bp, Artificial Sequence
  Description of Artificial Sequence: Synthetic oligonucleotide
  Target: LAMA2; (+) strand; PAM type: NRG; PAM sequence: CAG
tctcctttaacccatgattt

SEQ ID NO: 186373 - DNA, 20 bp, Artificial Sequence
  Description of Artificial Sequence: Synthetic oligonucleotide
  Target: LAMA2; (+) strand; PAM type: NRG; PAM sequence: AAG
catgatttcagtcatcttca

SEQ ID NO: 186374 - DNA, 20 bp, Artificial Sequence
  Description of Artificial Sequence: Synthetic oligonucleotide
  Target: LAMA2; (+) strand; PAM type: NRG; PAM sequence: GAG
tgatttcagtcatcttcaaa

SEQ ID NO: 186375 - DNA, 20 bp, Artificial Sequence
  Description of Artificial Sequence: Synthetic oligonucleotide
  Target: LAMA2; (+) strand; PAM type: NRG; PAM sequence: GAG
tcatcttcaaagagctctgt

SEQ ID NO: 186376 - DNA, 20 bp, Artificial Sequence
  Description of Artificial Sequence: Synthetic oligonucleotide
  Target: LAMA2; (+) strand; PAM type: NRG; PAM sequence: AAG
tcttcaaagagctctgtgag

SEQ ID NO: 186377 - DNA, 20 bp, Artificial Sequence
  Description of Artificial Sequence: Synthetic oligonucleotide
  Target: LAMA2; (+) strand; PAM type: NRG; PAM sequence: TGG
aaagagctctgtgagaagac

SEQ ID NO: 186378 - DNA, 20 bp, Artificial Sequence
  Description of Artificial Sequence: Synthetic oligonucleotide
  Target: LAMA2; (+) strand; PAM type: NRG; PAM sequence: CAG
ctggccttgattttattcac

SEQ ID NO: 186379 - DNA, 20 bp, Artificial Sequence
  Description of Artificial Sequence: Synthetic oligonucleotide
  Target: LAMA2; (+) strand; PAM type: NRG; PAM sequence: AAG
attttattcaccagcttaaa

SEQ ID NO: 186380 - DNA, 20 bp, Artificial Sequence
  Description of Artificial Sequence: Synthetic oligonucleotide
  Target: LAMA2; (+) strand; PAM type: NRG; PAM sequence: AGG
ttttattcaccagcttaaaa

SEQ ID NO: 186381 - DNA, 20 bp, Artificial Sequence
  Description of Artificial Sequence: Synthetic oligonucleotide
  Target: LAMA2; (+) strand; PAM type: NRG; PAM sequence: TAG
aacgtttcatttgccatctt

SEQ ID NO: 186382 - DNA, 20 bp, Artificial Sequence
  Description of Artificial Sequence: Synthetic oligonucleotide
  Target: LAMA2; (+) strand; PAM type: NRG; PAM sequence: TAG
gtttcatttgccatctttag

SEQ ID NO: 186383 - DNA, 20 bp, Artificial Sequence
  Description of Artificial Sequence: Synthetic oligonucleotide
  Target: LAMA2; (+) strand; PAM type: NRG; PAM sequence: TGG
ttgccatctttagtagacaa

SEQ ID NO: 186384 - DNA, 20 bp, Artificial Sequence
  Description of Artificial Sequence: Synthetic oligonucleotide
  Target: LAMA2; (+) strand; PAM type: NRG; PAM sequence: CAG
tctttagtagacaatggttg

SEQ ID NO: 186385 - DNA, 20 bp, Artificial Sequence
  Description of Artificial Sequence: Synthetic oligonucleotide
  Target: LAMA2; (+) strand; PAM type: NRG; PAM sequence: CAG
atggttgcagtctaataatt

SEQ ID NO: 186386 - DNA, 20 bp, Artificial Sequence
  Description of Artificial Sequence: Synthetic oligonucleotide
  Target: LAMA2; (+) strand; PAM type: NRG; PAM sequence: AAG
taataattcagaacatgtaa

SEQ ID NO: 186387 - DNA, 20 bp, Artificial Sequence
  Description of Artificial Sequence: Synthetic oligonucleotide
  Target: LAMA2; (+) strand; PAM type: NRG; PAM sequence: CAG
attcagaacatgtaaaagaa

SEQ ID NO: 186388 - DNA, 20 bp, Artificial Sequence
  Description of Artificial Sequence: Synthetic oligonucleotide
  Target: LAMA2; (+) strand; PAM type: NRG; PAM sequence: AGG
ttcagaacatgtaaaagaac

SEQ ID NO: 186389 - DNA, 20 bp, Artificial Sequence
  Description of Artificial Sequence: Synthetic oligonucleotide
  Target: LAMA2; (+) strand; PAM type: NRG; PAM sequence: TGG
caggaaactcctttctccta

SEQ ID NO: 186390 - DNA, 20 bp, Artificial Sequence
  Description of Artificial Sequence: Synthetic oligonucleotide
  Target: LAMA2; (+) strand; PAM type: NRG; PAM sequence: TAG
cctttctcctatggaaattt

SEQ ID NO: 186391 - DNA, 20 bp, Artificial Sequence
  Description of Artificial Sequence: Synthetic oligonucleotide
  Target: LAMA2; (+) strand; PAM type: NRG; PAM sequence: AAG
ctatggaaattttagcaaca

SEQ ID NO: 186392 - DNA, 20 bp, Artificial Sequence
  Description of Artificial Sequence: Synthetic oligonucleotide
  Target: LAMA2; (+) strand; PAM type: NRG; PAM sequence: TAG
ctgacaatgttgttatccac

SEQ ID NO: 186393 - DNA, 20 bp, Artificial Sequence
  Description of Artificial Sequence: Synthetic oligonucleotide
  Target: LAMA2; (+) strand; PAM type: NRG; PAM sequence: AGG
tgacaatgttgttatccact

SEQ ID NO: 186394 - DNA, 20 bp, Artificial Sequence
  Description of Artificial Sequence: Synthetic oligonucleotide
  Target: LAMA2; (+) strand; PAM type: NRG; PAM sequence: GGG
gacaatgttgttatccacta

SEQ ID NO: 186395 - DNA, 20 bp, Artificial Sequence
  Description of Artificial Sequence: Synthetic oligonucleotide
  Target: LAMA2; (+) strand; PAM type: NRG; PAM sequence: GGG
acaatgttgttatccactag

SEQ ID NO: 186396 - DNA, 20 bp, Artificial Sequence
  Description of Artificial Sequence: Synthetic oligonucleotide
  Target: LAMA2; (+) strand; PAM type: NRG; PAM sequence: AAG
atgttgttatccactagggg

SEQ ID NO: 186397 - DNA, 20 bp, Artificial Sequence
  Description of Artificial Sequence: Synthetic oligonucleotide
  Target: LAMA2; (+) strand; PAM type: NRG; PAM sequence: AGG
tgttgttatccactagggga

SEQ ID NO: 186398 - DNA, 20 bp, Artificial Sequence
  Description of Artificial Sequence: Synthetic oligonucleotide
  Target: LAMA2; (+) strand; PAM type: NRG; PAM sequence: AAG
tgttatccactaggggaagg

SEQ ID NO: 186399 - DNA, 20 bp, Artificial Sequence
  Description of Artificial Sequence: Synthetic oligonucleotide
  Target: LAMA2; (+) strand; PAM type: NRG; PAM sequence: AGG
gttatccactaggggaagga

SEQ ID NO: 186400 - DNA, 20 bp, Artificial Sequence
  Description of Artificial Sequence: Synthetic oligonucleotide
  Target: LAMA2; (+) strand; PAM type: NRG; PAM sequence: GAG
ggaaggtgctgtttccaatt

SEQ ID NO: 186401 - DNA, 20 bp, Artificial Sequence
  Description of Artificial Sequence: Synthetic oligonucleotide
  Target: LAMA2; (+) strand; PAM type: NRG; PAM sequence: AGG
gaaggtgctgtttccaattg

SEQ ID NO: 186402 - DNA, 20 bp, Artificial Sequence
  Description of Artificial Sequence: Synthetic oligonucleotide
  Target: LAMA2; (+) strand; PAM type: NRG; PAM sequence: TGG
gctgtttccaattgaggtga

SEQ ID NO: 186403 - DNA, 20 bp, Artificial Sequence
  Description of Artificial Sequence: Synthetic oligonucleotide
  Target: LAMA2; (+) strand; PAM type: NRG; PAM sequence: CAG
gtacacacaactttattcta

SEQ ID NO: 186404 - DNA, 20 bp, Artificial Sequence
  Description of Artificial Sequence: Synthetic oligonucleotide
  Target: LAMA2; (+) strand; PAM type: NRG; PAM sequence: AAG
cacacaactttattctacag

SEQ ID NO: 186405 - DNA, 20 bp, Artificial Sequence
  Description of Artificial Sequence: Synthetic oligonucleotide
  Target: LAMA2; (+) strand; PAM type: NRG; PAM sequence: AAG
attctacagaagcaattctc

SEQ ID NO: 186406 - DNA, 20 bp, Artificial Sequence
  Description of Artificial Sequence: Synthetic oligonucleotide
  Target: LAMA2; (+) strand; PAM type: NRG; PAM sequence: TAG
acagaagcaattctcaagct

SEQ ID NO: 186407 - DNA, 20 bp, Artificial Sequence
  Description of Artificial Sequence: Synthetic oligonucleotide
  Target: LAMA2; (+) strand; PAM type: NRG; PAM sequence: CAG
agcaattctcaagcttagct

SEQ ID NO: 186408 - DNA, 20 bp, Artificial Sequence
  Description of Artificial Sequence: Synthetic oligonucleotide
  Target: LAMA2; (+) strand; PAM type: NRG; PAM sequence: TAG
ttaaaaaactgcctatgctt

SEQ ID NO: 186409 - DNA, 20 bp, Artificial Sequence
  Description of Artificial Sequence: Synthetic oligonucleotide
  Target: LAMA2; (+) strand; PAM type: NRG; PAM sequence: AAG
aaactgcctatgctttagaa

SEQ ID NO: 186410 - DNA, 20 bp, Artificial Sequence
  Description of Artificial Sequence: Synthetic oligonucleotide
  Target: LAMA2; (+) strand; PAM type: NRG; PAM sequence: TAG
ctatgctttagaaaagtgcc

SEQ ID NO: 186411 - DNA, 20 bp, Artificial Sequence
  Description of Artificial Sequence: Synthetic oligonucleotide
  Target: LAMA2; (+) strand; PAM type: NRG; PAM sequence: AGG
tatgctttagaaaagtgcct

SEQ ID NO: 186412 - DNA, 20 bp, Artificial Sequence
  Description of Artificial Sequence: Synthetic oligonucleotide
  Target: LAMA2; (+) strand; PAM type: NRG; PAM sequence: GGG
atgctttagaaaagtgccta

SEQ ID NO: 186413 - DNA, 20 bp, Artificial Sequence
  Description of Artificial Sequence: Synthetic oligonucleotide
  Target: LAMA2; (+) strand; PAM type: NRG; PAM sequence: GAG
gctttagaaaagtgcctagg

SEQ ID NO: 186414 - DNA, 20 bp, Artificial Sequence
  Description of Artificial Sequence: Synthetic oligonucleotide
  Target: LAMA2; (+) strand; PAM type: NRG; PAM sequence: TAG
ctagggagtttttaaaaatc

SEQ ID NO: 186415 - DNA, 20 bp, Artificial Sequence
  Description of Artificial Sequence: Synthetic oligonucleotide
  Target: LAMA2; (+) strand; PAM type: NRG; PAM sequence: TGG
gtttttaaaaatctagtacc

SEQ ID NO: 186416 - DNA, 20 bp, Artificial Sequence
  Description of Artificial Sequence: Synthetic oligonucleotide
  Target: LAMA2; (+) strand; PAM type: NRG; PAM sequence: CAG
taaaaatctagtacctggtc

SEQ ID NO: 186417 - DNA, 20 bp, Artificial Sequence
  Description of Artificial Sequence: Synthetic oligonucleotide
  Target: LAMA2; (+) strand; PAM type: NRG; PAM sequence: TAG
ccagtgattctgattttgtc

SEQ ID NO: 186418 - DNA, 20 bp, Artificial Sequence
  Description of Artificial Sequence: Synthetic oligonucleotide
  Target: LAMA2; (+) strand; PAM type: NRG; PAM sequence: AGG
cagtgattctgattttgtct

SEQ ID NO: 186419 - DNA, 20 bp, Artificial Sequence
  Description of Artificial Sequence: Synthetic oligonucleotide
  Target: LAMA2; (+) strand; PAM type: NRG; PAM sequence: TAG
ttctgattttgtctaggaca

SEQ ID NO: 186420 - DNA, 20 bp, Artificial Sequence
  Description of Artificial Sequence: Synthetic oligonucleotide
  Target: LAMA2; (+) strand; PAM type: NRG; PAM sequence: CAG
gattttgtctaggacatagc

SEQ ID NO: 186421 - DNA, 20 bp, Artificial Sequence
  Description of Artificial Sequence: Synthetic oligonucleotide
  Target: LAMA2; (+) strand; PAM type: NRG; PAM sequence: GAG
ttttgtctaggacatagcca

SEQ ID NO: 186422 - DNA, 20 bp, Artificial Sequence
  Description of Artificial Sequence: Synthetic oligonucleotide
  Target: LAMA2; (+) strand; PAM type: NRG; PAM sequence: GAG
taatgatttttttttttttt

SEQ ID NO: 186423 - DNA, 20 bp, Artificial Sequence
  Description of Artificial Sequence: Synthetic oligonucleotide
  Target: LAMA2; (+) strand; PAM type: NRG; PAM sequence: CAG
gattttttttttttttgaga

SEQ ID NO: 186424 - DNA, 20 bp, Artificial Sequence
  Description of Artificial Sequence: Synthetic oligonucleotide
  Target: LAMA2; (+) strand; PAM type: NRG; PAM sequence: AGG
attttttttttttttgagac

SEQ ID NO: 186425 - DNA, 20 bp, Artificial Sequence
  Description of Artificial Sequence: Synthetic oligonucleotide
  Target: LAMA2; (+) strand; PAM type: NRG; PAM sequence: GGG
ttttttttttttttgagaca

SEQ ID NO: 186426 - DNA, 20 bp, Artificial Sequence
  Description of Artificial Sequence: Synthetic oligonucleotide
  Target: LAMA2; (+) strand; PAM type: NRG; PAM sequence: CAG
cagggtctcatgttgtcacc

SEQ ID NO: 186427 - DNA, 20 bp, Artificial Sequence
  Description of Artificial Sequence: Synthetic oligonucleotide
  Target: LAMA2; (+) strand; PAM type: NRG; PAM sequence: AGG
agggtctcatgttgtcaccc

SEQ ID NO: 186428 - DNA, 20 bp, Artificial Sequence
  Description of Artificial Sequence: Synthetic oligonucleotide
  Target: LAMA2; (+) strand; PAM type: NRG; PAM sequence: CAG
gtctcatgttgtcacccagg

SEQ ID NO: 186429 - DNA, 20 bp, Artificial Sequence
  Description of Artificial Sequence: Synthetic oligonucleotide
  Target: LAMA2; (+) strand; PAM type: NRG; PAM sequence: AGG
tctcatgttgtcacccaggc

SEQ ID NO: 186430 - DNA, 20 bp, Artificial Sequence
  Description of Artificial Sequence: Synthetic oligonucleotide
  Target: LAMA2; (+) strand; PAM type: NRG; PAM sequence: GAG
tcatgttgtcacccaggcag

SEQ ID NO: 186431 - DNA, 20 bp, Artificial Sequence
  Description of Artificial Sequence: Synthetic oligonucleotide
  Target: LAMA2; (+) strand; PAM type: NRG; PAM sequence: TGG
tcacccaggcaggagtgcaa

SEQ ID NO: 186432 - DNA, 20 bp, Artificial Sequence
  Description of Artificial Sequence: Synthetic oligonucleotide
  Target: LAMA2; (+) strand; PAM type: NRG; PAM sequence: TGG
ggagtgcaatggcaccatct

SEQ ID NO: 186433 - DNA, 20 bp, Artificial Sequence
  Description of Artificial Sequence: Synthetic oligonucleotide
  Target: LAMA2; (+) strand; PAM type: NRG; PAM sequence: CAG
ggcaccatcttggctcactg

SEQ ID NO: 186434 - DNA, 20 bp, Artificial Sequence
  Description of Artificial Sequence: Synthetic oligonucleotide
  Target: LAMA2; (+) strand; PAM type: NRG; PAM sequence: CAG
cactgcagcctcaacctccc

SEQ ID NO: 186435 - DNA, 20 bp, Artificial Sequence
  Description of Artificial Sequence: Synthetic oligonucleotide
  Target: LAMA2; (+) strand; PAM type: NRG; PAM sequence: AAG
agcctcaacctccccagttc

SEQ ID NO: 186436 - DNA, 20 bp, Artificial Sequence
  Description of Artificial Sequence: Synthetic oligonucleotide
  Target: LAMA2; (+) strand; PAM type: NRG; PAM sequence: AAG
atcctcctgcctcactcccc

SEQ ID NO: 186437 - DNA, 20 bp, Artificial Sequence
  Description of Artificial Sequence: Synthetic oligonucleotide
  Target: LAMA2; (+) strand; PAM type: NRG; PAM sequence: TAG
ctcctgcctcactccccaag

SEQ ID NO: 186438 - DNA, 20 bp, Artificial Sequence
  Description of Artificial Sequence: Synthetic oligonucleotide
  Target: LAMA2; (+) strand; PAM type: NRG; PAM sequence: TGG
tgcctcactccccaagtagc

SEQ ID NO: 186439 - DNA, 20 bp, Artificial Sequence
  Description of Artificial Sequence: Synthetic oligonucleotide
  Target: LAMA2; (+) strand; PAM type: NRG; PAM sequence: GGG
gcctcactccccaagtagct

SEQ ID NO: 186440 - DNA, 20 bp, Artificial Sequence
  Description of Artificial Sequence: Synthetic oligonucleotide
  Target: LAMA2; (+) strand; PAM type: NRG; PAM sequence: CAG
tccccaagtagctgggacta

SEQ ID NO: 186441 - DNA, 20 bp, Artificial Sequence
  Description of Artificial Sequence: Synthetic oligonucleotide
  Target: LAMA2; (+) strand; PAM type: NRG; PAM sequence: AGG
ccccaagtagctgggactac

SEQ ID NO: 186442 - DNA, 20 bp, Artificial Sequence
  Description of Artificial Sequence: Synthetic oligonucleotide
  Target: LAMA2; (+) strand; PAM type: NRG; PAM sequence: TGG
caagtagctgggactacagg

SEQ ID NO: 186443 - DNA, 20 bp, Artificial Sequence
  Description of Artificial Sequence: Synthetic oligonucleotide
  Target: LAMA2; (+) strand; PAM type: NRG; PAM sequence: GGG
aagtagctgggactacaggt

SEQ ID NO: 186444 - DNA, 20 bp, Artificial Sequence
  Description of Artificial Sequence: Synthetic oligonucleotide
  Target: LAMA2; (+) strand; PAM type: NRG; PAM sequence: CAG
caggtgggcaccaccacacc

SEQ ID NO: 186445 - DNA, 20 bp, Artificial Sequence
  Description of Artificial Sequence: Synthetic oligonucleotide
  Target: LAMA2; (+) strand; PAM type: NRG; PAM sequence: TAG
ccagctaatttttatatttt

SEQ ID NO: 186446 - DNA, 20 bp, Artificial Sequence
  Description of Artificial Sequence: Synthetic oligonucleotide
  Target: LAMA2; (+) strand; PAM type: NRG; PAM sequence: TAG
gctaatttttatatttttag

SEQ ID NO: 186447 - DNA, 20 bp, Artificial Sequence
  Description of Artificial Sequence: Synthetic oligonucleotide
  Target: LAMA2; (+) strand; PAM type: NRG; PAM sequence: GAG
taatttttatatttttagta

SEQ ID NO: 186448 - DNA, 20 bp, Artificial Sequence
  Description of Artificial Sequence: Synthetic oligonucleotide
  Target: LAMA2; (+) strand; PAM type: NRG; PAM sequence: TGG
ttttatatttttagtagaga

SEQ ID NO: 186449 - DNA, 20 bp, Artificial Sequence
  Description of Artificial Sequence: Synthetic oligonucleotide
  Target: LAMA2; (+) strand; PAM type: NRG; PAM sequence: GGG
tttatatttttagtagagat

SEQ ID NO: 186450 - DNA, 20 bp, Artificial Sequence
  Description of Artificial Sequence: Synthetic oligonucleotide
  Target: LAMA2; (+) strand; PAM type: NRG; PAM sequence: CAG
atgggtttcaccatgttgcc

SEQ ID NO: 186451 - DNA, 20 bp, Artificial Sequence
  Description of Artificial Sequence: Synthetic oligonucleotide
  Target: LAMA2; (+) strand; PAM type: NRG; PAM sequence: AGG
tgggtttcaccatgttgccc

SEQ ID NO: 186452 - DNA, 20 bp, Artificial Sequence
  Description of Artificial Sequence: Synthetic oligonucleotide
  Target: LAMA2; (+) strand; PAM type: NRG; PAM sequence: TGG
tttcaccatgttgcccaggc

SEQ ID NO: 186453 - DNA, 20 bp, Artificial Sequence
  Description of Artificial Sequence: Synthetic oligonucleotide
  Target: LAMA2; (+) strand; PAM type: NRG; PAM sequence: GAG
caggctggtctcgaactcct

SEQ ID NO: 186454 - DNA, 20 bp, Artificial Sequence
  Description of Artificial Sequence: Synthetic oligonucleotide
  Target: LAMA2; (+) strand; PAM type: NRG; PAM sequence: AAG
ggtctcgaactcctgagctc

SEQ ID NO: 186455 - DNA, 20 bp, Artificial Sequence
  Description of Artificial Sequence: Synthetic oligonucleotide
  Target: LAMA2; (+) strand; PAM type: NRG; PAM sequence: CAG
ctcaagaaatctgcctgcct

SEQ ID NO: 186456 - DNA, 20 bp, Artificial Sequence
  Description of Artificial Sequence: Synthetic oligonucleotide
  Target: LAMA2; (+) strand; PAM type: NRG; PAM sequence: AAG
ctgcctgcctcagcctccca

SEQ ID NO: 186457 - DNA, 20 bp, Artificial Sequence
  Description of Artificial Sequence: Synthetic oligonucleotide
  Target: LAMA2; (+) strand; PAM type: NRG; PAM sequence: TAG
gcctcagcctcccaaagtgc

SEQ ID NO: 186458 - DNA, 20 bp, Artificial Sequence
  Description of Artificial Sequence: Synthetic oligonucleotide
  Target: LAMA2; (+) strand; PAM type: NRG; PAM sequence: AGG
cctcagcctcccaaagtgct

SEQ ID NO: 186459 - DNA, 20 bp, Artificial Sequence
  Description of Artificial Sequence: Synthetic oligonucleotide
  Target: LAMA2; (+) strand; PAM type: NRG; PAM sequence: TGG
tcccaaagtgctaggattac

SEQ ID NO: 186460 - DNA, 20 bp, Artificial Sequence
  Description of Artificial Sequence: Synthetic oligonucleotide
  Target: LAMA2; (+) strand; PAM type: NRG; PAM sequence: CAG
ctggcatgaaccactgtgcc

SEQ ID NO: 186461 - DNA, 20 bp, Artificial Sequence
  Description of Artificial Sequence: Synthetic oligonucleotide
  Target: LAMA2; (+) strand; PAM type: NRG; PAM sequence: AAG
atgaaccactgtgcccagtc

SEQ ID NO: 186462 - DNA, 20 bp, Artificial Sequence
  Description of Artificial Sequence: Synthetic oligonucleotide
  Target: LAMA2; (+) strand; PAM type: NRG; PAM sequence: GAG
cactgtgcccagtcaagcat

SEQ ID NO: 186463 - DNA, 20 bp, Artificial Sequence
  Description of Artificial Sequence: Synthetic oligonucleotide
  Target: LAMA2; (+) strand; PAM type: NRG; PAM sequence: AGG
actgtgcccagtcaagcatg

SEQ ID NO: 186464 - DNA, 20 bp, Artificial Sequence
  Description of Artificial Sequence: Synthetic oligonucleotide
  Target: LAMA2; (+) strand; PAM type: NRG; PAM sequence: CAG
aggattcttaaaaacattcc

SEQ ID NO: 186465 - DNA, 20 bp, Artificial Sequence
  Description of Artificial Sequence: Synthetic oligonucleotide
  Target: LAMA2; (+) strand; PAM type: NRG; PAM sequence: AGG
ggattcttaaaaacattccc

SEQ ID NO: 186466 - DNA, 20 bp, Artificial Sequence
  Description of Artificial Sequence: Synthetic oligonucleotide
  Target: LAMA2; (+) strand; PAM type: NRG; PAM sequence: AAG
ggcaattctaatgtgttgtc

SEQ ID NO: 186467 - DNA, 20 bp, Artificial Sequence
  Description of Artificial Sequence: Synthetic oligonucleotide
  Target: LAMA2; (+) strand; PAM type: NRG; PAM sequence: AGG
gcaattctaatgtgttgtca

SEQ ID NO: 186468 - DNA, 20 bp, Artificial Sequence
  Description of Artificial Sequence: Synthetic oligonucleotide
  Target: LAMA2; (+) strand; PAM type: NRG; PAM sequence: AAG
gtgttgtcaaggatgaacct

SEQ ID NO: 186469 - DNA, 20 bp, Artificial Sequence
  Description of Artificial Sequence: Synthetic oligonucleotide
  Target: LAMA2; (+) strand; PAM type: NRG; PAM sequence: AAG
aggatgaacctaagaaaaat

SEQ ID NO: 186470 - DNA, 20 bp, Artificial Sequence
  Description of Artificial Sequence: Synthetic oligonucleotide
  Target: LAMA2; (+) strand; PAM type: NRG; PAM sequence: TAG
aacctaagaaaaataagcaa

SEQ ID NO: 186471 - DNA, 20 bp, Artificial Sequence
  Description of Artificial Sequence: Synthetic oligonucleotide
  Target: LAMA2; (+) strand; PAM type: NRG; PAM sequence: AGG
acctaagaaaaataagcaat

SEQ ID NO: 186472 - DNA, 20 bp, Artificial Sequence
  Description of Artificial Sequence: Synthetic oligonucleotide
  Target: LAMA2; (+) strand; PAM type: NRG; PAM sequence: GGG
cctaagaaaaataagcaata

SEQ ID NO: 186473 - DNA, 20 bp, Artificial Sequence
  Description of Artificial Sequence: Synthetic oligonucleotide
  Target: LAMA2; (+) strand; PAM type: NRG; PAM sequence: AAG
agaaaaataagcaataggga

SEQ ID NO: 186474 - DNA, 20 bp, Artificial Sequence
  Description of Artificial Sequence: Synthetic oligonucleotide
  Target: LAMA2; (+) strand; PAM type: NRG; PAM sequence: AGG
gaaaaataagcaatagggaa

SEQ ID NO: 186475 - DNA, 20 bp, Artificial Sequence
  Description of Artificial Sequence: Synthetic oligonucleotide
  Target: LAMA2; (+) strand; PAM type: NRG; PAM sequence: TGG
aggattccctatttaataaa

SEQ ID NO: 186476 - DNA, 20 bp, Artificial Sequence
  Description of Artificial Sequence: Synthetic oligonucleotide
  Target: LAMA2; (+) strand; PAM type: NRG; PAM sequence: TGG
ccctatttaataaatggtgc

SEQ ID NO: 186477 - DNA, 20 bp, Artificial Sequence
  Description of Artificial Sequence: Synthetic oligonucleotide
  Target: LAMA2; (+) strand; PAM type: NRG; PAM sequence: GGG
cctatttaataaatggtgct

SEQ ID NO: 186478 - DNA, 20 bp, Artificial Sequence
  Description of Artificial Sequence: Synthetic oligonucleotide
  Target: LAMA2; (+) strand; PAM type: NRG; PAM sequence: TGG
ataaatggtgctgggaaaac

SEQ ID NO: 186479 - DNA, 20 bp, Artificial Sequence
  Description of Artificial Sequence: Synthetic oligonucleotide
  Target: LAMA2; (+) strand; PAM type: NRG; PAM sequence: AAG
atggtgctgggaaaactggc

SEQ ID NO: 186480 - DNA, 20 bp, Artificial Sequence
  Description of Artificial Sequence: Synthetic oligonucleotide
  Target: LAMA2; (+) strand; PAM type: NRG; PAM sequence: AAG
tgggaaaactggcaagccat

SEQ ID NO: 186481 - DNA, 20 bp, Artificial Sequence
  Description of Artificial Sequence: Synthetic oligonucleotide
  Target: LAMA2; (+) strand; PAM type: NRG; PAM sequence: TAG
gaaaactggcaagccataag

SEQ ID NO: 186482 - DNA, 20 bp, Artificial Sequence
  Description of Artificial Sequence: Synthetic oligonucleotide
  Target: LAMA2; (+) strand; PAM type: NRG; PAM sequence: AAG
actggcaagccataagtaga

SEQ ID NO: 186483 - DNA, 20 bp, Artificial Sequence
  Description of Artificial Sequence: Synthetic oligonucleotide
  Target: LAMA2; (+) strand; PAM type: NRG; PAM sequence: TGG
cataagtagaaagctgaaac

SEQ ID NO: 186484 - DNA, 20 bp, Artificial Sequence
  Description of Artificial Sequence: Synthetic oligonucleotide
  Target: LAMA2; (+) strand; PAM type: NRG; PAM sequence: AAG
ccttatacaaaaattaattc

SEQ ID NO: 186485 - DNA, 20 bp, Artificial Sequence
  Description of Artificial Sequence: Synthetic oligonucleotide
  Target: LAMA2; (+) strand; PAM type: NRG; PAM sequence: TGG
atacaaaaattaattcaaga

SEQ ID NO: 186486 - DNA, 20 bp, Artificial Sequence
  Description of Artificial Sequence: Synthetic oligonucleotide
  Target: LAMA2; (+) strand; PAM type: NRG; PAM sequence: AAG
aattaattcaagatggatta

SEQ ID NO: 186487 - DNA, 20 bp, Artificial Sequence
  Description of Artificial Sequence: Synthetic oligonucleotide
  Target: LAMA2; (+) strand; PAM type: NRG; PAM sequence: TAG
tggattaaagacttaaacgt

SEQ ID NO: 186488 - DNA, 20 bp, Artificial Sequence
  Description of Artificial Sequence: Synthetic oligonucleotide
  Target: LAMA2; (+) strand; PAM type: NRG; PAM sequence: TAG
acctaaaaccatacaaaccc

SEQ ID NO: 186489 - DNA, 20 bp, Artificial Sequence
  Description of Artificial Sequence: Synthetic oligonucleotide
  Target: LAMA2; (+) strand; PAM type: NRG; PAM sequence: AAG
taaaaccatacaaaccctag

SEQ ID NO: 186490 - DNA, 20 bp, Artificial Sequence
  Description of Artificial Sequence: Synthetic oligonucleotide
  Target: LAMA2; (+) strand; PAM type: NRG; PAM sequence: TAG
acaaaccctagaagaaaacc

SEQ ID NO: 186491 - DNA, 20 bp, Artificial Sequence
  Description of Artificial Sequence: Synthetic oligonucleotide
  Target: LAMA2; (+) strand; PAM type: NRG; PAM sequence: AGG
caaaccctagaagaaaacct

SEQ ID NO: 186492 - DNA, 20 bp, Artificial Sequence
  Description of Artificial Sequence: Synthetic oligonucleotide
  Target: LAMA2; (+) strand; PAM type: NRG; PAM sequence: CAG
aaaacctaggcattaccatt

SEQ ID NO: 186493 - DNA, 20 bp, Artificial Sequence
  Description of Artificial Sequence: Synthetic oligonucleotide
  Target: LAMA2; (+) strand; PAM type: NRG; PAM sequence: AGG
aaacctaggcattaccattc

SEQ ID NO: 186494 - DNA, 20 bp, Artificial Sequence
  Description of Artificial Sequence: Synthetic oligonucleotide
  Target: LAMA2; (+) strand; PAM type: NRG; PAM sequence: TAG
aggcattaccattcaggaca

SEQ ID NO: 186495 - DNA, 20 bp, Artificial Sequence
  Description of Artificial Sequence: Synthetic oligonucleotide
  Target: LAMA2; (+) strand; PAM type: NRG; PAM sequence: AGG
ggcattaccattcaggacat

SEQ ID NO: 186496 - DNA, 20 bp, Artificial Sequence
  Description of Artificial Sequence: Synthetic oligonucleotide
  Target: LAMA2; (+) strand; PAM type: NRG; PAM sequence: TGG
taccattcaggacataggca

SEQ ID NO: 186497 - DNA, 20 bp, Artificial Sequence
  Description of Artificial Sequence: Synthetic oligonucleotide
  Target: LAMA2; (+) strand; PAM type: NRG; PAM sequence: GGG
accattcaggacataggcat

SEQ ID NO: 186498 - DNA, 20 bp, Artificial Sequence
  Description of Artificial Sequence: Synthetic oligonucleotide
  Target: LAMA2; (+) strand; PAM type: NRG; PAM sequence: AAG
ttcaggacataggcatgggc

SEQ ID NO: 186499 - DNA, 20 bp, Artificial Sequence
  Description of Artificial Sequence: Synthetic oligonucleotide
  Target: LAMA2; (+) strand; PAM type: NRG; PAM sequence: AGG
tcaggacataggcatgggca

SEQ ID NO: 186500 - DNA, 20 bp, Artificial Sequence
  Description of Artificial Sequence: Synthetic oligonucleotide
  Target: LAMA2; (+) strand; PAM type: NRG; PAM sequence: AAG
cttcatgtctaaaacaccaa

SEQ ID NO: 186501 - DNA, 20 bp, Artificial Sequence
  Description of Artificial Sequence: Synthetic oligonucleotide
  Target: LAMA2; (+) strand; PAM type: NRG; PAM sequence: TGG
gtctaaaacaccaaaagcaa

SEQ ID NO: 186502 - DNA, 20 bp, Artificial Sequence
  Description of Artificial Sequence: Synthetic oligonucleotide
  Target: LAMA2; (+) strand; PAM type: NRG; PAM sequence: AAG
accaaaagcaatggcaacaa

SEQ ID NO: 186503 - DNA, 20 bp, Artificial Sequence
  Description of Artificial Sequence: Synthetic oligonucleotide
  Target: LAMA2; (+) strand; PAM type: NRG; PAM sequence: TGG
caaaagccaaaattgacaaa

SEQ ID NO: 186504 - DNA, 20 bp, Artificial Sequence
  Description of Artificial Sequence: Synthetic oligonucleotide
  Target: LAMA2; (+) strand; PAM type: NRG; PAM sequence: GGG
aaaagccaaaattgacaaat

SEQ ID NO: 186505 - DNA, 20 bp, Artificial Sequence
  Description of Artificial Sequence: Synthetic oligonucleotide
  Target: LAMA2; (+) strand; PAM type: NRG; PAM sequence: AAG
aatgggatctaattaaacta

SEQ ID NO: 186506 - DNA, 20 bp, Artificial Sequence
  Description of Artificial Sequence: Synthetic oligonucleotide
  Target: LAMA2; (+) strand; PAM type: NRG; PAM sequence: GAG
tgggatctaattaaactaaa

SEQ ID NO: 186507 - DNA, 20 bp, Artificial Sequence
  Description of Artificial Sequence: Synthetic oligonucleotide
  Target: LAMA2; (+) strand; PAM type: NRG; PAM sequence: CAG
taaactaaagagcttctgca

SEQ ID NO: 186508 - DNA, 20 bp, Artificial Sequence
  Description of Artificial Sequence: Synthetic oligonucleotide
  Target: LAMA2; (+) strand; PAM type: NRG; PAM sequence: AAG
aaagagcttctgcacagcaa

SEQ ID NO: 186509 - DNA, 20 bp, Artificial Sequence
  Description of Artificial Sequence: Synthetic oligonucleotide
  Target: LAMA2; (+) strand; PAM type: NRG; PAM sequence: CAG
tgcacagcaaaagaaactac

SEQ ID NO: 186510 - DNA, 20 bp, Artificial Sequence
  Description of Artificial Sequence: Synthetic oligonucleotide
  Target: LAMA2; (+) strand; PAM type: NRG; PAM sequence: CAG
acagcaaaagaaactaccag

SEQ ID NO: 186511 - DNA, 20 bp, Artificial Sequence
  Description of Artificial Sequence: Synthetic oligonucleotide
  Target: LAMA2; (+) strand; PAM type: NRG; PAM sequence: GAG
agcaaaagaaactaccagca

SEQ ID NO: 186512 - DNA, 20 bp, Artificial Sequence
  Description of Artificial Sequence: Synthetic oligonucleotide
  Target: LAMA2; (+) strand; PAM type: NRG; PAM sequence: CAG
gaaactaccagcagagcgaa

SEQ ID NO: 186513 - DNA, 20 bp, Artificial Sequence
  Description of Artificial Sequence: Synthetic oligonucleotide
  Target: LAMA2; (+) strand; PAM type: NRG; PAM sequence: AGG
aaactaccagcagagcgaac

SEQ ID NO: 186514 - DNA, 20 bp, Artificial Sequence
  Description of Artificial Sequence: Synthetic oligonucleotide
  Target: LAMA2; (+) strand; PAM type: NRG; PAM sequence: CAG
cagagcgaacaggcaaccta

SEQ ID NO: 186515 - DNA, 20 bp, Artificial Sequence
  Description of Artificial Sequence: Synthetic oligonucleotide
  Target: LAMA2; (+) strand; PAM type: NRG; PAM sequence: TGG
cgaacaggcaacctacagaa

SEQ ID NO: 186516 - DNA, 20 bp, Artificial Sequence
  Description of Artificial Sequence: Synthetic oligonucleotide
  Target: LAMA2; (+) strand; PAM type: NRG; PAM sequence: GGG
gaacaggcaacctacagaat

SEQ ID NO: 186517 - DNA, 20 bp, Artificial Sequence
  Description of Artificial Sequence: Synthetic oligonucleotide
  Target: LAMA2; (+) strand; PAM type: NRG; PAM sequence: GAG
acaggcaacctacagaatgg

SEQ ID NO: 186518 - DNA, 20 bp, Artificial Sequence
  Description of Artificial Sequence: Synthetic oligonucleotide
  Target: LAMA2; (+) strand; PAM type: NRG; PAM sequence: AAG
cgcaacctactcatctgaca

SEQ ID NO: 186519 - DNA, 20 bp, Artificial Sequence
  Description of Artificial Sequence: Synthetic oligonucleotide
  Target: LAMA2; (+) strand; PAM type: NRG; PAM sequence: AGG
gcaacctactcatctgacaa

SEQ ID NO: 186520 - DNA, 20 bp, Artificial Sequence
  Description of Artificial Sequence: Synthetic oligonucleotide
  Target: LAMA2; (+) strand; PAM type: NRG; PAM sequence: GGG
caacctactcatctgacaaa

SEQ ID NO: 186521 - DNA, 20 bp, Artificial Sequence
  Description of Artificial Sequence: Synthetic oligonucleotide
  Target: LAMA2; (+) strand; PAM type: NRG; PAM sequence: CAG
tctgacaaagggctaatatc

SEQ ID NO: 186522 - DNA, 20 bp, Artificial Sequence
  Description of Artificial Sequence: Synthetic oligonucleotide
  Target: LAMA2; (+) strand; PAM type: NRG; PAM sequence: AAG
atgaactcaaacaaatttac

SEQ ID NO: 186523 - DNA, 20 bp, Artificial Sequence
  Description of Artificial Sequence: Synthetic oligonucleotide
  Target: LAMA2; (+) strand; PAM type: NRG; PAM sequence: AAG
aaaaaaacaaccccatcaaa

SEQ ID NO: 186524 - DNA, 20 bp, Artificial Sequence
  Description of Artificial Sequence: Synthetic oligonucleotide
  Target: LAMA2; (+) strand; PAM type: NRG; PAM sequence: TGG
aaaacaaccccatcaaaaag

SEQ ID NO: 186525 - DNA, 20 bp, Artificial Sequence
  Description of Artificial Sequence: Synthetic oligonucleotide
  Target: LAMA2; (+) strand; PAM type: NRG; PAM sequence: GGG
aaacaaccccatcaaaaagt

SEQ ID NO: 186526 - DNA, 20 bp, Artificial Sequence
  Description of Artificial Sequence: Synthetic oligonucleotide
  Target: LAMA2; (+) strand; PAM type: NRG; PAM sequence: AAG
accccatcaaaaagtgggca

SEQ ID NO: 186527 - DNA, 20 bp, Artificial Sequence
  Description of Artificial Sequence: Synthetic oligonucleotide
  Target: LAMA2; (+) strand; PAM type: NRG; PAM sequence: AGG
ccccatcaaaaagtgggcaa

SEQ ID NO: 186528 - DNA, 20 bp, Artificial Sequence
  Description of Artificial Sequence: Synthetic oligonucleotide
  Target: LAMA2; (+) strand; PAM type: NRG; PAM sequence: CAG
aagtgggcaaaggatatgaa

SEQ ID NO: 186529 - DNA, 20 bp, Artificial Sequence
  Description of Artificial Sequence: Synthetic oligonucleotide
  Target: LAMA2; (+) strand; PAM type: NRG; PAM sequence: CAG
ggatatgaacagacacttct

SEQ ID NO: 186530 - DNA, 20 bp, Artificial Sequence
  Description of Artificial Sequence: Synthetic oligonucleotide
  Target: LAMA2; (+) strand; PAM type: NRG; PAM sequence: AAG
tatgaacagacacttctcag

SEQ ID NO: 186531 - DNA, 20 bp, Artificial Sequence
  Description of Artificial Sequence: Synthetic oligonucleotide
  Target: LAMA2; (+) strand; PAM type: NRG; PAM sequence: AGG
atgaacagacacttctcaga

SEQ ID NO: 186532 - DNA, 20 bp, Artificial Sequence
  Description of Artificial Sequence: Synthetic oligonucleotide
  Target: LAMA2; (+) strand; PAM type: NRG; PAM sequence: GAG
gaacagacacttctcagaag

SEQ ID NO: 186533 - DNA, 20 bp, Artificial Sequence
  Description of Artificial Sequence: Synthetic oligonucleotide
  Target: LAMA2; (+) strand; PAM type: NRG; PAM sequence: CAG
ctcagaaggagacatttatg

SEQ ID NO: 186534 - DNA, 20 bp, Artificial Sequence
  Description of Artificial Sequence: Synthetic oligonucleotide
  Target: LAMA2; (+) strand; PAM type: NRG; PAM sequence: AAG
ggagacatttatgcagccaa

SEQ ID NO: 186535 - DNA, 20 bp, Artificial Sequence
  Description of Artificial Sequence: Synthetic oligonucleotide
  Target: LAMA2; (+) strand; PAM type: NRG; PAM sequence: TGG
gaaaaaatgctcatcatcac

SEQ ID NO: 186536 - DNA, 20 bp, Artificial Sequence
  Description of Artificial Sequence: Synthetic oligonucleotide
  Target: LAMA2; (+) strand; PAM type: NRG; PAM sequence: CAG
tgctcatcatcactggccat

SEQ ID NO: 186537 - DNA, 20 bp, Artificial Sequence
  Description of Artificial Sequence: Synthetic oligonucleotide
  Target: LAMA2; (+) strand; PAM type: NRG; PAM sequence: GAG
ctcatcatcactggccatca

SEQ ID NO: 186538 - DNA, 20 bp, Artificial Sequence
  Description of Artificial Sequence: Synthetic oligonucleotide
  Target: LAMA2; (+) strand; PAM type: NRG; PAM sequence: GAG
atgcaaatcaaaaccacaat

SEQ ID NO: 186539 - DNA, 20 bp, Artificial Sequence
  Description of Artificial Sequence: Synthetic oligonucleotide
  Target: LAMA2; (+) strand; PAM type: NRG; PAM sequence: CAG
aatgagataccatctcacac

SEQ ID NO: 186540 - DNA, 20 bp, Artificial Sequence
  Description of Artificial Sequence: Synthetic oligonucleotide
  Target: LAMA2; (+) strand; PAM type: NRG; PAM sequence: TAG
agataccatctcacaccagt

SEQ ID NO: 186541 - DNA, 20 bp, Artificial Sequence
  Description of Artificial Sequence: Synthetic oligonucleotide
  Target: LAMA2; (+) strand; PAM type: NRG; PAM sequence: TGG
ccatctcacaccagttagaa

SEQ ID NO: 186542 - DNA, 20 bp, Artificial Sequence
  Description of Artificial Sequence: Synthetic oligonucleotide
  Target: LAMA2; (+) strand; PAM type: NRG; PAM sequence: AAG
ttagaatggcaatcattaaa

SEQ ID NO: 186543 - DNA, 20 bp, Artificial Sequence
  Description of Artificial Sequence: Synthetic oligonucleotide
  Target: LAMA2; (+) strand; PAM type: NRG; PAM sequence: CAG
aatggcaatcattaaaaagt

SEQ ID NO: 186544 - DNA, 20 bp, Artificial Sequence
  Description of Artificial Sequence: Synthetic oligonucleotide
  Target: LAMA2; (+) strand; PAM type: NRG; PAM sequence: AGG
atggcaatcattaaaaagtc

SEQ ID NO: 186545 - DNA, 20 bp, Artificial Sequence
  Description of Artificial Sequence: Synthetic oligonucleotide
  Target: LAMA2; (+) strand; PAM type: NRG; PAM sequence: CAG
attaaaaagtcaggaaacaa

SEQ ID NO: 186546 - DNA, 20 bp, Artificial Sequence
  Description of Artificial Sequence: Synthetic oligonucleotide
  Target: LAMA2; (+) strand; PAM type: NRG; PAM sequence: AGG
ttaaaaagtcaggaaacaac

SEQ ID NO: 186547 - DNA, 20 bp, Artificial Sequence
  Description of Artificial Sequence: Synthetic oligonucleotide
  Target: LAMA2; (+) strand; PAM type: NRG; PAM sequence: TGG
agtcaggaaacaacaggtgc

SEQ ID NO: 186548 - DNA, 20 bp, Artificial Sequence
  Description of Artificial Sequence: Synthetic oligonucleotide
  Target: LAMA2; (+) strand; PAM type: NRG; PAM sequence: GAG
tcaggaaacaacaggtgctg

SEQ ID NO: 186549 - DNA, 20 bp, Artificial Sequence
  Description of Artificial Sequence: Synthetic oligonucleotide
  Target: LAMA2; (+) strand; PAM type: NRG; PAM sequence: GAG
aggaaacaacaggtgctgga

SEQ ID NO: 186550 - DNA, 20 bp, Artificial Sequence
  Description of Artificial Sequence: Synthetic oligonucleotide
  Target: LAMA2; (+) strand; PAM type: NRG; PAM sequence: AGG
ggaaacaacaggtgctggag

SEQ ID NO: 186551 - DNA, 20 bp, Artificial Sequence
  Description of Artificial Sequence: Synthetic oligonucleotide
  Target: LAMA2; (+) strand; PAM type: NRG; PAM sequence: TGG
aacaggtgctggagaggatg

SEQ ID NO: 186552 - DNA, 20 bp, Artificial Sequence
  Description of Artificial Sequence: Synthetic oligonucleotide
  Target: LAMA2; (+) strand; PAM type: NRG; PAM sequence: GAG
caggtgctggagaggatgtg

SEQ ID NO: 186553 - DNA, 20 bp, Artificial Sequence
  Description of Artificial Sequence: Synthetic oligonucleotide
  Target: LAMA2; (+) strand; PAM type: NRG; PAM sequence: TAG
ctggagaggatgtggagaaa

SEQ ID NO: 186554 - DNA, 20 bp, Artificial Sequence
  Description of Artificial Sequence: Synthetic oligonucleotide
  Target: LAMA2; (+) strand; PAM type: NRG; PAM sequence: AGG
tggagaggatgtggagaaat

SEQ ID NO: 186555 - DNA, 20 bp, Artificial Sequence
  Description of Artificial Sequence: Synthetic oligonucleotide
  Target: LAMA2; (+) strand; PAM type: NRG; PAM sequence: TGG
taggaacacttttacactgt

SEQ ID NO: 186556 - DNA, 20 bp, Artificial Sequence
  Description of Artificial Sequence: Synthetic oligonucleotide
  Target: LAMA2; (+) strand; PAM type: NRG; PAM sequence: TGG
gaacacttttacactgttgg

SEQ ID NO: 186557 - DNA, 20 bp, Artificial Sequence
  Description of Artificial Sequence: Synthetic oligonucleotide
  Target: LAMA2; (+) strand; PAM type: NRG; PAM sequence: GGG
aacacttttacactgttggt

SEQ ID NO: 186558 - DNA, 20 bp, Artificial Sequence
  Description of Artificial Sequence: Synthetic oligonucleotide
  Target: LAMA2; (+) strand; PAM type: NRG; PAM sequence: TAG
ctgttggtgggactgtaaac

SEQ ID NO: 186559 - DNA, 20 bp, Artificial Sequence
  Description of Artificial Sequence: Synthetic oligonucleotide
  Target: LAMA2; (+) strand; PAM type: NRG; PAM sequence: TGG
gtaaactagttcaaccattg

SEQ ID NO: 186560 - DNA, 20 bp, Artificial Sequence
  Description of Artificial Sequence: Synthetic oligonucleotide
  Target: LAMA2; (+) strand; PAM type: NRG; PAM sequence: AAG
aactagttcaaccattgtgg

SEQ ID NO: 186561 - DNA, 20 bp, Artificial Sequence
  Description of Artificial Sequence: Synthetic oligonucleotide
  Target: LAMA2; (+) strand; PAM type: NRG; PAM sequence: CAG
agttcaaccattgtggaagt

SEQ ID NO: 186562 - DNA, 20 bp, Artificial Sequence
  Description of Artificial Sequence: Synthetic oligonucleotide
  Target: LAMA2; (+) strand; PAM type: NRG; PAM sequence: TGG
aaccattgtggaagtcagtg

SEQ ID NO: 186563 - DNA, 20 bp, Artificial Sequence
  Description of Artificial Sequence: Synthetic oligonucleotide
  Target: LAMA2; (+) strand; PAM type: NRG; PAM sequence: CAG
aagtcagtgtggccattcct

SEQ ID NO: 186564 - DNA, 20 bp, Artificial Sequence
  Description of Artificial Sequence: Synthetic oligonucleotide
  Target: LAMA2; (+) strand; PAM type: NRG; PAM sequence: AGG
agtcagtgtggccattcctc

SEQ ID NO: 186565 - DNA, 20 bp, Artificial Sequence
  Description of Artificial Sequence: Synthetic oligonucleotide
  Target: LAMA2; (+) strand; PAM type: NRG; PAM sequence: GGG
gtcagtgtggccattcctca

SEQ ID NO: 186566 - DNA, 20 bp, Artificial Sequence
  Description of Artificial Sequence: Synthetic oligonucleotide
  Target: LAMA2; (+) strand; PAM type: NRG; PAM sequence: TAG
gtggccattcctcagggatc

SEQ ID NO: 186567 - DNA, 20 bp, Artificial Sequence
  Description of Artificial Sequence: Synthetic oligonucleotide
  Target: LAMA2; (+) strand; PAM type: NRG; PAM sequence: TAG
attcctcagggatctagaac

SEQ ID NO: 186568 - DNA, 20 bp, Artificial Sequence
  Description of Artificial Sequence: Synthetic oligonucleotide
  Target: LAMA2; (+) strand; PAM type: NRG; PAM sequence: CAG
actagaaataccatttgacc

SEQ ID NO: 186569 - DNA, 20 bp, Artificial Sequence
  Description of Artificial Sequence: Synthetic oligonucleotide
  Target: LAMA2; (+) strand; PAM type: NRG; PAM sequence: TGG
tgacccagccatcccattac

SEQ ID NO: 186570 - DNA, 20 bp, Artificial Sequence
  Description of Artificial Sequence: Synthetic oligonucleotide
  Target: LAMA2; (+) strand; PAM type: NRG; PAM sequence: GGG
gacccagccatcccattact

SEQ ID NO: 186571 - DNA, 20 bp, Artificial Sequence
  Description of Artificial Sequence: Synthetic oligonucleotide
  Target: LAMA2; (+) strand; PAM type: NRG; PAM sequence: AAG
cattactgggtatataccca

SEQ ID NO: 186572 - DNA, 20 bp, Artificial Sequence
  Description of Artificial Sequence: Synthetic oligonucleotide
  Target: LAMA2; (+) strand; PAM type: NRG; PAM sequence: AGG
attactgggtatatacccaa

SEQ ID NO: 186573 - DNA, 20 bp, Artificial Sequence
  Description of Artificial Sequence: Synthetic oligonucleotide
  Target: LAMA2; (+) strand; PAM type: NRG; PAM sequence: AAG
ctataaatcatgctgctata

SEQ ID NO: 186574 - DNA, 20 bp, Artificial Sequence
  Description of Artificial Sequence: Synthetic oligonucleotide
  Target: LAMA2; (+) strand; PAM type: NRG; PAM sequence: CGG
atgcacatgtatgtttattg

SEQ ID NO: 186575 - DNA, 20 bp, Artificial Sequence
  Description of Artificial Sequence: Synthetic oligonucleotide
  Target: LAMA2; (+) strand; PAM type: NRG; PAM sequence: TAG
tattgcggcactattcacaa

SEQ ID NO: 186576 - DNA, 20 bp, Artificial Sequence
  Description of Artificial Sequence: Synthetic oligonucleotide
  Target: LAMA2; (+) strand; PAM type: NRG; PAM sequence: AAG
cggcactattcacaatagca

SEQ ID NO: 186577 - DNA, 20 bp, Artificial Sequence
  Description of Artificial Sequence: Synthetic oligonucleotide
  Target: LAMA2; (+) strand; PAM type: NRG; PAM sequence: TGG
tattcacaatagcaaagact

SEQ ID NO: 186578 - DNA, 20 bp, Artificial Sequence
  Description of Artificial Sequence: Synthetic oligonucleotide
  Target: LAMA2; (+) strand; PAM type: NRG; PAM sequence: TAG
acccaaatgtccaacaatga

SEQ ID NO: 186579 - DNA, 20 bp, Artificial Sequence
  Description of Artificial Sequence: Synthetic oligonucleotide
  Target: LAMA2; (+) strand; PAM type: NRG; PAM sequence: TGG
aatgtccaacaatgatagac

SEQ ID NO: 186580 - DNA, 20 bp, Artificial Sequence
  Description of Artificial Sequence: Synthetic oligonucleotide
  Target: LAMA2; (+) strand; PAM type: NRG; PAM sequence: AAG
caacaatgatagactggatt

SEQ ID NO: 186581 - DNA, 20 bp, Artificial Sequence
  Description of Artificial Sequence: Synthetic oligonucleotide
  Target: LAMA2; (+) strand; PAM type: NRG; PAM sequence: TGG
tagactggattaagcaaatg

SEQ ID NO: 186582 - DNA, 20 bp, Artificial Sequence
  Description of Artificial Sequence: Synthetic oligonucleotide
  Target: LAMA2; (+) strand; PAM type: NRG; PAM sequence: TGG
aatgtggcacatatacacca

SEQ ID NO: 186583 - DNA, 20 bp, Artificial Sequence
  Description of Artificial Sequence: Synthetic oligonucleotide
  Target: LAMA2; (+) strand; PAM type: NRG; PAM sequence: TAG
ggcacatatacaccatggaa

SEQ ID NO: 186584 - DNA, 20 bp, Artificial Sequence
  Description of Artificial Sequence: Synthetic oligonucleotide
  Target: LAMA2; (+) strand; PAM type: NRG; PAM sequence: AAG
aatagtatgcataaaaaatg

SEQ ID NO: 186585 - DNA, 20 bp, Artificial Sequence
  Description of Artificial Sequence: Synthetic oligonucleotide
  Target: LAMA2; (+) strand; PAM type: NRG; PAM sequence: GAG
tagtatgcataaaaaatgaa

SEQ ID NO: 186586 - DNA, 20 bp, Artificial Sequence
  Description of Artificial Sequence: Synthetic oligonucleotide
  Target: LAMA2; (+) strand; PAM type: NRG; PAM sequence: TAG
tgaagagttcatgtcctttg

SEQ ID NO: 186587 - DNA, 20 bp, Artificial Sequence
  Description of Artificial Sequence: Synthetic oligonucleotide
  Target: LAMA2; (+) strand; PAM type: NRG; PAM sequence: AGG
gaagagttcatgtcctttgt

SEQ ID NO: 186588 - DNA, 20 bp, Artificial Sequence
  Description of Artificial Sequence: Synthetic oligonucleotide
  Target: LAMA2; (+) strand; PAM type: NRG; PAM sequence: GGG
aagagttcatgtcctttgta

SEQ ID NO: 186589 - DNA, 20 bp, Artificial Sequence
  Description of Artificial Sequence: Synthetic oligonucleotide
  Target: LAMA2; (+) strand; PAM type: NRG; PAM sequence: TGG
tcatgtcctttgtagggaca

SEQ ID NO: 186590 - DNA, 20 bp, Artificial Sequence
  Description of Artificial Sequence: Synthetic oligonucleotide
  Target: LAMA2; (+) strand; PAM type: NRG; PAM sequence: TGG
tgtagggacatggatgaaac

SEQ ID NO: 186591 - DNA, 20 bp, Artificial Sequence
  Description of Artificial Sequence: Synthetic oligonucleotide
  Target: LAMA2; (+) strand; PAM type: NRG; PAM sequence: CAG
aaactggaaatcatcattct

SEQ ID NO: 186592 - DNA, 20 bp, Artificial Sequence
  Description of Artificial Sequence: Synthetic oligonucleotide
  Target: LAMA2; (+) strand; PAM type: NRG; PAM sequence: AAG
cattctcagtaaactatcac

SEQ ID NO: 186593 - DNA, 20 bp, Artificial Sequence
  Description of Artificial Sequence: Synthetic oligonucleotide
  Target: LAMA2; (+) strand; PAM type: NRG; PAM sequence: AGG
attctcagtaaactatcaca

SEQ ID NO: 186594 - DNA, 20 bp, Artificial Sequence
  Description of Artificial Sequence: Synthetic oligonucleotide
  Target: LAMA2; (+) strand; PAM type: NRG; PAM sequence: TAG
acaacgcatgttctcactca

SEQ ID NO: 186595 - DNA, 20 bp, Artificial Sequence
  Description of Artificial Sequence: Synthetic oligonucleotide
  Target: LAMA2; (+) strand; PAM type: NRG; PAM sequence: TGG
cgcatgttctcactcataga

SEQ ID NO: 186596 - DNA, 20 bp, Artificial Sequence
  Description of Artificial Sequence: Synthetic oligonucleotide
  Target: LAMA2; (+) strand; PAM type: NRG; PAM sequence: GGG
gcatgttctcactcatagat

SEQ ID NO: 186597 - DNA, 20 bp, Artificial Sequence
  Description of Artificial Sequence: Synthetic oligonucleotide
  Target: LAMA2; (+) strand; PAM type: NRG; PAM sequence: GAG
atagatgggaattgaacaat

SEQ ID NO: 186598 - DNA, 20 bp, Artificial Sequence
  Description of Artificial Sequence: Synthetic oligonucleotide
  Target: LAMA2; (+) strand; PAM type: NRG; PAM sequence: TGG
aattgaacaatgagaacaca

SEQ ID NO: 186599 - DNA, 20 bp, Artificial Sequence
  Description of Artificial Sequence: Synthetic oligonucleotide
  Target: LAMA2; (+) strand; PAM type: NRG; PAM sequence: CAG
acaatgagaacacatggaca

SEQ ID NO: 186600 - DNA, 20 bp, Artificial Sequence
  Description of Artificial Sequence: Synthetic oligonucleotide
  Target: LAMA2; (+) strand; PAM type: NRG; PAM sequence: AGG
caatgagaacacatggacac

SEQ ID NO: 186601 - DNA, 20 bp, Artificial Sequence
  Description of Artificial Sequence: Synthetic oligonucleotide
  Target: LAMA2; (+) strand; PAM type: NRG; PAM sequence: AAG
tgagaacacatggacacagg

SEQ ID NO: 186602 - DNA, 20 bp, Artificial Sequence
  Description of Artificial Sequence: Synthetic oligonucleotide
  Target: LAMA2; (+) strand; PAM type: NRG; PAM sequence: AGG
gagaacacatggacacagga

SEQ ID NO: 186603 - DNA, 20 bp, Artificial Sequence
  Description of Artificial Sequence: Synthetic oligonucleotide
  Target: LAMA2; (+) strand; PAM type: NRG; PAM sequence: GGG
agaacacatggacacaggaa

SEQ ID NO: 186604 - DNA, 20 bp, Artificial Sequence
  Description of Artificial Sequence: Synthetic oligonucleotide
  Target: LAMA2; (+) strand; PAM type: NRG; PAM sequence: GGG
gaacacatggacacaggaag

SEQ ID NO: 186605 - DNA, 20 bp, Artificial Sequence
  Description of Artificial Sequence: Synthetic oligonucleotide
  Target: LAMA2; (+) strand; PAM type: NRG; PAM sequence: TGG
ggaaggggaacatcacactc

SEQ ID NO: 186606 - DNA, 20 bp, Artificial Sequence
  Description of Artificial Sequence: Synthetic oligonucleotide
  Target: LAMA2; (+) strand; PAM type: NRG; PAM sequence: GGG
gaaggggaacatcacactct

SEQ ID NO: 186607 - DNA, 20 bp, Artificial Sequence
  Description of Artificial Sequence: Synthetic oligonucleotide
  Target: LAMA2; (+) strand; PAM type: NRG; PAM sequence: GGG
aaggggaacatcacactctg

SEQ ID NO: 186608 - DNA, 20 bp, Artificial Sequence
  Description of Artificial Sequence: Synthetic oligonucleotide
  Target: LAMA2; (+) strand; PAM type: NRG; PAM sequence: TGG
tcacactctggggactgttt

SEQ ID NO: 186609 - DNA, 20 bp, Artificial Sequence
  Description of Artificial Sequence: Synthetic oligonucleotide
  Target: LAMA2; (+) strand; PAM type: NRG; PAM sequence: GGG
cacactctggggactgtttt

SEQ ID NO: 186610 - DNA, 20 bp, Artificial Sequence
  Description of Artificial Sequence: Synthetic oligonucleotide
  Target: LAMA2; (+) strand; PAM type: NRG; PAM sequence: GGG
acactctggggactgttttg

SEQ ID NO: 186611 - DNA, 20 bp, Artificial Sequence
  Description of Artificial Sequence: Synthetic oligonucleotide
  Target: LAMA2; (+) strand; PAM type: NRG; PAM sequence: TGG
ctctggggactgttttgggg

SEQ ID NO: 186612 - DNA, 20 bp, Artificial Sequence
  Description of Artificial Sequence: Synthetic oligonucleotide
  Target: LAMA2; (+) strand; PAM type: NRG; PAM sequence: GGG
tctggggactgttttggggt

SEQ ID NO: 186613 - DNA, 20 bp, Artificial Sequence
  Description of Artificial Sequence: Synthetic oligonucleotide
  Target: LAMA2; (+) strand; PAM type: NRG; PAM sequence: GGG
ctggggactgttttggggtg

SEQ ID NO: 186614 - DNA, 20 bp, Artificial Sequence
  Description of Artificial Sequence: Synthetic oligonucleotide
  Target: LAMA2; (+) strand; PAM type: NRG; PAM sequence: GGG
tggggactgttttggggtgg

SEQ ID NO: 186615 - DNA, 20 bp, Artificial Sequence
  Description of Artificial Sequence: Synthetic oligonucleotide
  Target: LAMA2; (+) strand; PAM type: NRG; PAM sequence: GGG
ggggactgttttggggtggg

SEQ ID NO: 186616 - DNA, 20 bp, Artificial Sequence
  Description of Artificial Sequence: Synthetic oligonucleotide
  Target: LAMA2; (+) strand; PAM type: NRG; PAM sequence: GAG
ggactgttttggggtggggg

SEQ ID NO: 186617 - DNA, 20 bp, Artificial Sequence
  Description of Artificial Sequence: Synthetic oligonucleotide
  Target: LAMA2; (+) strand; PAM type: NRG; PAM sequence: AGG
gactgttttggggtgggggg

SEQ ID NO: 186618 - DNA, 20 bp, Artificial Sequence
  Description of Artificial Sequence: Synthetic oligonucleotide
  Target: LAMA2; (+) strand; PAM type: NRG; PAM sequence: GGG
actgttttggggtgggggga

SEQ ID NO: 186619 - DNA, 20 bp, Artificial Sequence
  Description of Artificial Sequence: Synthetic oligonucleotide
  Target: LAMA2; (+) strand; PAM type: NRG; PAM sequence: GGG
ctgttttggggtggggggag

SEQ ID NO: 186620 - DNA, 20 bp, Artificial Sequence
  Description of Artificial Sequence: Synthetic oligonucleotide
  Target: LAMA2; (+) strand; PAM type: NRG; PAM sequence: GGG
tgttttggggtggggggagg

SEQ ID NO: 186621 - DNA, 20 bp, Artificial Sequence
  Description of Artificial Sequence: Synthetic oligonucleotide
  Target: LAMA2; (+) strand; PAM type: NRG; PAM sequence: GGG
gttttggggtggggggaggg

SEQ ID NO: 186622 - DNA, 20 bp, Artificial Sequence
  Description of Artificial Sequence: Synthetic oligonucleotide
  Target: LAMA2; (+) strand; PAM type: NRG; PAM sequence: GAG
tttggggtggggggaggggg

SEQ ID NO: 186623 - DNA, 20 bp, Artificial Sequence
  Description of Artificial Sequence: Synthetic oligonucleotide
  Target: LAMA2; (+) strand; PAM type: NRG; PAM sequence: AGG
ttggggtggggggagggggg

SEQ ID NO: 186624 - DNA, 20 bp, Artificial Sequence
  Description of Artificial Sequence: Synthetic oligonucleotide
  Target: LAMA2; (+) strand; PAM type: NRG; PAM sequence: GGG
tggggtggggggagggggga

SEQ ID NO: 186625 - DNA, 20 bp, Artificial Sequence
  Description of Artificial Sequence: Synthetic oligonucleotide
  Target: LAMA2; (+) strand; PAM type: NRG; PAM sequence: TAG
gtggggggaggggggaggga

SEQ ID NO: 186626 - DNA, 20 bp, Artificial Sequence
  Description of Artificial Sequence: Synthetic oligonucleotide
  Target: LAMA2; (+) strand; PAM type: NRG; PAM sequence: TAG
ggaggggggagggatagcat

SEQ ID NO: 186627 - DNA, 20 bp, Artificial Sequence
  Description of Artificial Sequence: Synthetic oligonucleotide
  Target: LAMA2; (+) strand; PAM type: NRG; PAM sequence: AGG
gaggggggagggatagcatt

SEQ ID NO: 186628 - DNA, 20 bp, Artificial Sequence
  Description of Artificial Sequence: Synthetic oligonucleotide
  Target: LAMA2; (+) strand; PAM type: NRG; PAM sequence: GAG
ggggggagggatagcattag

SEQ ID NO: 186629 - DNA, 20 bp, Artificial Sequence
  Description of Artificial Sequence: Synthetic oligonucleotide
  Target: LAMA2; (+) strand; PAM type: NRG; PAM sequence: TAG
ggagggatagcattaggaga

SEQ ID NO: 186630 - DNA, 20 bp, Artificial Sequence
  Description of Artificial Sequence: Synthetic oligonucleotide
  Target: LAMA2; (+) strand; PAM type: NRG; PAM sequence: GAG
tatacctaatgttaaatgat

SEQ ID NO: 186631 - DNA, 20 bp, Artificial Sequence
  Description of Artificial Sequence: Synthetic oligonucleotide
  Target: LAMA2; (+) strand; PAM type: NRG; PAM sequence: TGG
aatgttaaatgatgagttaa

SEQ ID NO: 186632 - DNA, 20 bp, Artificial Sequence
  Description of Artificial Sequence: Synthetic oligonucleotide
  Target: LAMA2; (+) strand; PAM type: NRG; PAM sequence: GGG
atgttaaatgatgagttaat

SEQ ID NO: 186633 - DNA, 20 bp, Artificial Sequence
  Description of Artificial Sequence: Synthetic oligonucleotide
  Target: LAMA2; (+) strand; PAM type: NRG; PAM sequence: CAG
aaatgatgagttaatgggtg

SEQ ID NO: 186634 - DNA, 20 bp, Artificial Sequence
  Description of Artificial Sequence: Synthetic oligonucleotide
  Target: LAMA2; (+) strand; PAM type: NRG; PAM sequence: CAG
agttaatgggtgcagcacac

SEQ ID NO: 186635 - DNA, 20 bp, Artificial Sequence
  Description of Artificial Sequence: Synthetic oligonucleotide
  Target: LAMA2; (+) strand; PAM type: NRG; PAM sequence: TGG
atgggtgcagcacaccagca

SEQ ID NO: 186636 - DNA, 20 bp, Artificial Sequence
  Description of Artificial Sequence: Synthetic oligonucleotide
  Target: LAMA2; (+) strand; PAM type: NRG; PAM sequence: CGG
tgtatacatatgtaactaac

SEQ ID NO: 186637 - DNA, 20 bp, Artificial Sequence
  Description of Artificial Sequence: Synthetic oligonucleotide
  Target: LAMA2; (+) strand; PAM type: NRG; PAM sequence: AAG
cacatgtacccttaaactta

SEQ ID NO: 186638 - DNA, 20 bp, Artificial Sequence
  Description of Artificial Sequence: Synthetic oligonucleotide
  Target: LAMA2; (+) strand; PAM type: NRG; PAM sequence: AAG
agtataataataataaaaaa

SEQ ID NO: 186639 - DNA, 20 bp, Artificial Sequence
  Description of Artificial Sequence: Synthetic oligonucleotide
  Target: LAMA2; (+) strand; PAM type: NRG; PAM sequence: AAG
taataaaaaaaagaaaaaaa

SEQ ID NO: 186640 - DNA, 20 bp, Artificial Sequence
  Description of Artificial Sequence: Synthetic oligonucleotide
  Target: LAMA2; (+) strand; PAM type: NRG; PAM sequence: AGG
aataaaaaaaagaaaaaaaa

SEQ ID NO: 186641 - DNA, 20 bp, Artificial Sequence
  Description of Artificial Sequence: Synthetic oligonucleotide
  Target: LAMA2; (+) strand; PAM type: NRG; PAM sequence: GAG
aaaaaagaaaaaaaaaggat

SEQ ID NO: 186642 - DNA, 20 bp, Artificial Sequence
  Description of Artificial Sequence: Synthetic oligonucleotide
  Target: LAMA2; (+) strand; PAM type: NRG; PAM sequence: AAG
aaagaaaaaaaaaggatgag

SEQ ID NO: 186643 - DNA, 20 bp, Artificial Sequence
  Description of Artificial Sequence: Synthetic oligonucleotide
  Target: LAMA2; (+) strand; PAM type: NRG; PAM sequence: AAG
atgagaagcactattctaaa

SEQ ID NO: 186644 - DNA, 20 bp, Artificial Sequence
  Description of Artificial Sequence: Synthetic oligonucleotide
  Target: LAMA2; (+) strand; PAM type: NRG; PAM sequence: AAG
cattatcctccatgccaaca

SEQ ID NO: 186645 - DNA, 20 bp, Artificial Sequence
  Description of Artificial Sequence: Synthetic oligonucleotide
  Target: LAMA2; (+) strand; PAM type: NRG; PAM sequence: GAG
ttatcctccatgccaacaaa

SEQ ID NO: 186646 - DNA, 20 bp, Artificial Sequence
  Description of Artificial Sequence: Synthetic oligonucleotide
  Target: LAMA2; (+) strand; PAM type: NRG; PAM sequence: TAG
catgccaacaaagagtttta

SEQ ID NO: 186647 - DNA, 20 bp, Artificial Sequence
  Description of Artificial Sequence: Synthetic oligonucleotide
  Target: LAMA2; (+) strand; PAM type: NRG; PAM sequence: GAG
aaagagttttatagtcattt

SEQ ID NO: 186648 - DNA, 20 bp, Artificial Sequence
  Description of Artificial Sequence: Synthetic oligonucleotide
  Target: LAMA2; (+) strand; PAM type: NRG; PAM sequence: TAG
tcatttgagaattctactat

SEQ ID NO: 186649 - DNA, 20 bp, Artificial Sequence
  Description of Artificial Sequence: Synthetic oligonucleotide
  Target: LAMA2; (+) strand; PAM type: NRG; PAM sequence: TGG
ttctactattagctttgtct

SEQ ID NO: 186650 - DNA, 20 bp, Artificial Sequence
  Description of Artificial Sequence: Synthetic oligonucleotide
  Target: LAMA2; (+) strand; PAM type: NRG; PAM sequence: TAG
cattaaaaataataatatta

SEQ ID NO: 186651 - DNA, 20 bp, Artificial Sequence
  Description of Artificial Sequence: Synthetic oligonucleotide
  Target: LAMA2; (+) strand; PAM type: NRG; PAM sequence: AGG
attaaaaataataatattat

SEQ ID NO: 186652 - DNA, 20 bp, Artificial Sequence
  Description of Artificial Sequence: Synthetic oligonucleotide
  Target: LAMA2; (+) strand; PAM type: NRG; PAM sequence: CAG
aaaataataatattataggc

SEQ ID NO: 186653 - DNA, 20 bp, Artificial Sequence
  Description of Artificial Sequence: Synthetic oligonucleotide
  Target: LAMA2; (+) strand; PAM type: NRG; PAM sequence: AGG
aaataataatattataggcc

SEQ ID NO: 186654 - DNA, 20 bp, Artificial Sequence
  Description of Artificial Sequence: Synthetic oligonucleotide
  Target: LAMA2; (+) strand; PAM type: NRG; PAM sequence: CAG
ataatattataggccaggtg

SEQ ID NO: 186655 - DNA, 20 bp, Artificial Sequence
  Description of Artificial Sequence: Synthetic oligonucleotide
  Target: LAMA2; (+) strand; PAM type: NRG; PAM sequence: TAG
atattataggccaggtgcag

SEQ ID NO: 186656 - DNA, 20 bp, Artificial Sequence
  Description of Artificial Sequence: Synthetic oligonucleotide
  Target: LAMA2; (+) strand; PAM type: NRG; PAM sequence: CAG
gtagttcacacctgtaatcc

SEQ ID NO: 186657 - DNA, 20 bp, Artificial Sequence
  Description of Artificial Sequence: Synthetic oligonucleotide
  Target: LAMA2; (+) strand; PAM type: NRG; PAM sequence: TGG
cacctgtaatcccagcactt

SEQ ID NO: 186658 - DNA, 20 bp, Artificial Sequence
  Description of Artificial Sequence: Synthetic oligonucleotide
  Target: LAMA2; (+) strand; PAM type: NRG; PAM sequence: CAG
atcccagcactttggtcgct

SEQ ID NO: 186659 - DNA, 20 bp, Artificial Sequence
  Description of Artificial Sequence: Synthetic oligonucleotide
  Target: LAMA2; (+) strand; PAM type: NRG; PAM sequence: AGG
tcccagcactttggtcgctc

SEQ ID NO: 186660 - DNA, 20 bp, Artificial Sequence
  Description of Artificial Sequence: Synthetic oligonucleotide
  Target: LAMA2; (+) strand; PAM type: NRG; PAM sequence: CAG
cagcactttggtcgctcagg

SEQ ID NO: 186661 - DNA, 20 bp, Artificial Sequence
  Description of Artificial Sequence: Synthetic oligonucleotide
  Target: LAMA2; (+) strand; PAM type: NRG; PAM sequence: AGG
agcactttggtcgctcaggc

SEQ ID NO: 186662 - DNA, 20 bp, Artificial Sequence
  Description of Artificial Sequence: Synthetic oligonucleotide
  Target: LAMA2; (+) strand; PAM type: NRG; PAM sequence: GAG
cactttggtcgctcaggcag

SEQ ID NO: 186663 - DNA, 20 bp, Artificial Sequence
  Description of Artificial Sequence: Synthetic oligonucleotide
  Target: LAMA2; (+) strand; PAM type: NRG; PAM sequence: AGG
actttggtcgctcaggcagg

SEQ ID NO: 186664 - DNA, 20 bp, Artificial Sequence
  Description of Artificial Sequence: Synthetic oligonucleotide
  Target: LAMA2; (+) strand; PAM type: NRG; PAM sequence: CAG
ggtcgctcaggcaggaggat

SEQ ID NO: 186665 - DNA, 20 bp, Artificial Sequence
  Description of Artificial Sequence: Synthetic oligonucleotide
  Target: LAMA2; (+) strand; PAM type: NRG; PAM sequence: TGG
cgctcaggcaggaggatcag

SEQ ID NO: 186666 - DNA, 20 bp, Artificial Sequence
  Description of Artificial Sequence: Synthetic oligonucleotide
  Target: LAMA2; (+) strand; PAM type: NRG; PAM sequence: CAG
gcaggaggatcagtggaacc

SEQ ID NO: 186667 - DNA, 20 bp, Artificial Sequence
  Description of Artificial Sequence: Synthetic oligonucleotide
  Target: LAMA2; (+) strand; PAM type: NRG; PAM sequence: AGG
caggaggatcagtggaaccc

SEQ ID NO: 186668 - DNA, 20 bp, Artificial Sequence
  Description of Artificial Sequence: Synthetic oligonucleotide
  Target: LAMA2; (+) strand; PAM type: NRG; PAM sequence: GAG
ggaggatcagtggaacccag

SEQ ID NO: 186669 - DNA, 20 bp, Artificial Sequence
  Description of Artificial Sequence: Synthetic oligonucleotide
  Target: LAMA2; (+) strand; PAM type: NRG; PAM sequence: GAG
tcagtggaacccaggagttt

SEQ ID NO: 186670 - DNA, 20 bp, Artificial Sequence
  Description of Artificial Sequence: Synthetic oligonucleotide
  Target: LAMA2; (+) strand; PAM type: NRG; PAM sequence: CAG
ggaacccaggagtttgagac

SEQ ID NO: 186671 - DNA, 20 bp, Artificial Sequence
  Description of Artificial Sequence: Synthetic oligonucleotide
  Target: LAMA2; (+) strand; PAM type: NRG; PAM sequence: TGG
ccaggagtttgagaccagcc

SEQ ID NO: 186672 - DNA, 20 bp, Artificial Sequence
  Description of Artificial Sequence: Synthetic oligonucleotide
  Target: LAMA2; (+) strand; PAM type: NRG; PAM sequence: GGG
caggagtttgagaccagcct

SEQ ID NO: 186673 - DNA, 20 bp, Artificial Sequence
  Description of Artificial Sequence: Synthetic oligonucleotide
  Target: LAMA2; (+) strand; PAM type: NRG; PAM sequence: TAG
tgagaccagcctgggcaaca

SEQ ID NO: 186674 - DNA, 20 bp, Artificial Sequence
  Description of Artificial Sequence: Synthetic oligonucleotide
  Target: LAMA2; (+) strand; PAM type: NRG; PAM sequence: AGG
gagaccagcctgggcaacat

SEQ ID NO: 186675 - DNA, 20 bp, Artificial Sequence
  Description of Artificial Sequence: Synthetic oligonucleotide
  Target: LAMA2; (+) strand; PAM type: NRG; PAM sequence: GGG
agaccagcctgggcaacata

SEQ ID NO: 186676 - DNA, 20 bp, Artificial Sequence
  Description of Artificial Sequence: Synthetic oligonucleotide
  Target: LAMA2; (+) strand; PAM type: NRG; PAM sequence: GAG
accagcctgggcaacatagg

SEQ ID NO: 186677 - DNA, 20 bp, Artificial Sequence
  Description of Artificial Sequence: Synthetic oligonucleotide
  Target: LAMA2; (+) strand; PAM type: NRG; PAM sequence: TAG
tctaccaaaaatttaaaaat

SEQ ID NO: 186678 - DNA, 20 bp, Artificial Sequence
  Description of Artificial Sequence: Synthetic oligonucleotide
  Target: LAMA2; (+) strand; PAM type: NRG; PAM sequence: CAG
ccaaaaatttaaaaattagc

SEQ ID NO: 186679 - DNA, 20 bp, Artificial Sequence
  Description of Artificial Sequence: Synthetic oligonucleotide
  Target: LAMA2; (+) strand; PAM type: NRG; PAM sequence: AGG
caaaaatttaaaaattagcc

SEQ ID NO: 186680 - DNA, 20 bp, Artificial Sequence
  Description of Artificial Sequence: Synthetic oligonucleotide
  Target: LAMA2; (+) strand; PAM type: NRG; PAM sequence: TAG
atttaaaaattagccaggca

SEQ ID NO: 186681 - DNA, 20 bp, Artificial Sequence
  Description of Artificial Sequence: Synthetic oligonucleotide
  Target: LAMA2; (+) strand; PAM type: NRG; PAM sequence: TGG
taaaaattagccaggcatag

SEQ ID NO: 186682 - DNA, 20 bp, Artificial Sequence
  Description of Artificial Sequence: Synthetic oligonucleotide
  Target: LAMA2; (+) strand; PAM type: NRG; PAM sequence: TAG
ggcatagtggcatgcaccta

SEQ ID NO: 186683 - DNA, 20 bp, Artificial Sequence
  Description of Artificial Sequence: Synthetic oligonucleotide
  Target: LAMA2; (+) strand; PAM type: NRG; PAM sequence: TAG
gtggcatgcacctatagtcc

SEQ ID NO: 186684 - DNA, 20 bp, Artificial Sequence
  Description of Artificial Sequence: Synthetic oligonucleotide
  Target: LAMA2; (+) strand; PAM type: NRG; PAM sequence: CAG
acctatagtcctagctactc

SEQ ID NO: 186685 - DNA, 20 bp, Artificial Sequence
  Description of Artificial Sequence: Synthetic oligonucleotide
  Target: LAMA2; (+) strand; PAM type: NRG; PAM sequence: AGG
cctatagtcctagctactcc

SEQ ID NO: 186686 - DNA, 20 bp, Artificial Sequence
  Description of Artificial Sequence: Synthetic oligonucleotide
  Target: LAMA2; (+) strand; PAM type: NRG; PAM sequence: GAG
tatagtcctagctactccag

SEQ ID NO: 186687 - DNA, 20 bp, Artificial Sequence
  Description of Artificial Sequence: Synthetic oligonucleotide
  Target: LAMA2; (+) strand; PAM type: NRG; PAM sequence: AGG
atagtcctagctactccagg

SEQ ID NO: 186688 - DNA, 20 bp, Artificial Sequence
  Description of Artificial Sequence: Synthetic oligonucleotide
  Target: LAMA2; (+) strand; PAM type: NRG; PAM sequence: CAG
gctactccaggaggttgatg

SEQ ID NO: 186689 - DNA, 20 bp, Artificial Sequence
  Description of Artificial Sequence: Synthetic oligonucleotide
  Target: LAMA2; (+) strand; PAM type: NRG; PAM sequence: AGG
ctactccaggaggttgatgc

SEQ ID NO: 186690 - DNA, 20 bp, Artificial Sequence
  Description of Artificial Sequence: Synthetic oligonucleotide
  Target: LAMA2; (+) strand; PAM type: NRG; PAM sequence: AAG
ctccaggaggttgatgcagg

SEQ ID NO: 186691 - DNA, 20 bp, Artificial Sequence
  Description of Artificial Sequence: Synthetic oligonucleotide
  Target: LAMA2; (+) strand; PAM type: NRG; PAM sequence: GAG
ttgatgcaggaagattgctt

SEQ ID NO: 186692 - DNA, 20 bp, Artificial Sequence
  Description of Artificial Sequence: Synthetic oligonucleotide
  Target: LAMA2; (+) strand; PAM type: NRG; PAM sequence: TGG
gcaggaagattgcttgagcc

SEQ ID NO: 186693 - DNA, 20 bp, Artificial Sequence
  Description of Artificial Sequence: Synthetic oligonucleotide
  Target: LAMA2; (+) strand; PAM type: NRG; PAM sequence: GGG
caggaagattgcttgagcct

SEQ ID NO: 186694 - DNA, 20 bp, Artificial Sequence
  Description of Artificial Sequence: Synthetic oligonucleotide
  Target: LAMA2; (+) strand; PAM type: NRG; PAM sequence: GAG
ggaagattgcttgagcctgg

SEQ ID NO: 186695 - DNA, 20 bp, Artificial Sequence
  Description of Artificial Sequence: Synthetic oligonucleotide
  Target: LAMA2; (+) strand; PAM type: NRG; PAM sequence: AGG
gaagattgcttgagcctggg

SEQ ID NO: 186696 - DNA, 20 bp, Artificial Sequence
  Description of Artificial Sequence: Synthetic oligonucleotide
  Target: LAMA2; (+) strand; PAM type: NRG; PAM sequence: AAG
tgcttgagcctgggaggtca

SEQ ID NO: 186697 - DNA, 20 bp, Artificial Sequence
  Description of Artificial Sequence: Synthetic oligonucleotide
  Target: LAMA2; (+) strand; PAM type: NRG; PAM sequence: CAG
agcctgggaggtcaaagctc

SEQ ID NO: 186698 - DNA, 20 bp, Artificial Sequence
  Description of Artificial Sequence: Synthetic oligonucleotide
  Target: LAMA2; (+) strand; PAM type: NRG; PAM sequence: GAG
tgggaggtcaaagctccagt

SEQ ID NO: 186699 - DNA, 20 bp, Artificial Sequence
  Description of Artificial Sequence: Synthetic oligonucleotide
  Target: LAMA2; (+) strand; PAM type: NRG; PAM sequence: CAG
atgattataccactgcactc

SEQ ID NO: 186700 - DNA, 20 bp, Artificial Sequence
  Description of Artificial Sequence: Synthetic oligonucleotide
  Target: LAMA2; (+) strand; PAM type: NRG; PAM sequence: TGG
tataccactgcactccagcc

SEQ ID NO: 186701 - DNA, 20 bp, Artificial Sequence
  Description of Artificial Sequence: Synthetic oligonucleotide
  Target: LAMA2; (+) strand; PAM type: NRG; PAM sequence: GGG
ataccactgcactccagcct

SEQ ID NO: 186702 - DNA, 20 bp, Artificial Sequence
  Description of Artificial Sequence: Synthetic oligonucleotide
  Target: LAMA2; (+) strand; PAM type: NRG; PAM sequence: CAG
ctgcactccagcctgggcaa

SEQ ID NO: 186703 - DNA, 20 bp, Artificial Sequence
  Description of Artificial Sequence: Synthetic oligonucleotide
  Target: LAMA2; (+) strand; PAM type: NRG; PAM sequence: GAG
gcactccagcctgggcaaca

SEQ ID NO: 186704 - DNA, 20 bp, Artificial Sequence
  Description of Artificial Sequence: Synthetic oligonucleotide
  Target: LAMA2; (+) strand; PAM type: NRG; PAM sequence: AAG
tccagcctgggcaacagagc

SEQ ID NO: 186705 - DNA, 20 bp, Artificial Sequence
  Description of Artificial Sequence: Synthetic oligonucleotide
  Target: LAMA2; (+) strand; PAM type: NRG; PAM sequence: AAG
caagaccctgtctcaaatga

SEQ ID NO: 186706 - DNA, 20 bp, Artificial Sequence
  Description of Artificial Sequence: Synthetic oligonucleotide
  Target: LAMA2; (+) strand; PAM type: NRG; PAM sequence: TAG
tttatatcaaatattgaatc

SEQ ID NO: 186707 - DNA, 20 bp, Artificial Sequence
  Description of Artificial Sequence: Synthetic oligonucleotide
  Target: LAMA2; (+) strand; PAM type: NRG; PAM sequence: TAG
aatatataaaacattgaatc

SEQ ID NO: 186708 - DNA, 20 bp, Artificial Sequence
  Description of Artificial Sequence: Synthetic oligonucleotide
  Target: LAMA2; (+) strand; PAM type: NRG; PAM sequence: AAG
atatcttttaaccaaacttt

SEQ ID NO: 186709 - DNA, 20 bp, Artificial Sequence
  Description of Artificial Sequence: Synthetic oligonucleotide
  Target: LAMA2; (+) strand; PAM type: NRG; PAM sequence: AAG
tgaaaaccaatgtgttttaa

SEQ ID NO: 186710 - DNA, 20 bp, Artificial Sequence
  Description of Artificial Sequence: Synthetic oligonucleotide
  Target: LAMA2; (+) strand; PAM type: NRG; PAM sequence: TGG
aaaccaatgtgttttaaaag

SEQ ID NO: 186711 - DNA, 20 bp, Artificial Sequence
  Description of Artificial Sequence: Synthetic oligonucleotide
  Target: LAMA2; (+) strand; PAM type: NRG; PAM sequence: TGG
taaacgctgacatgactttt

SEQ ID NO: 186712 - DNA, 20 bp, Artificial Sequence
  Description of Artificial Sequence: Synthetic oligonucleotide
  Target: LAMA2; (+) strand; PAM type: NRG; PAM sequence: GGG
aaacgctgacatgacttttt

SEQ ID NO: 186713 - DNA, 20 bp, Artificial Sequence
  Description of Artificial Sequence: Synthetic oligonucleotide
  Target: LAMA2; (+) strand; PAM type: NRG; PAM sequence: TGG
atgactttttgggcttaatc

SEQ ID NO: 186714 - DNA, 20 bp, Artificial Sequence
  Description of Artificial Sequence: Synthetic oligonucleotide
  Target: LAMA2; (+) strand; PAM type: NRG; PAM sequence: GAG
ttgggcttaatctggacact

SEQ ID NO: 186715 - DNA, 20 bp, Artificial Sequence
  Description of Artificial Sequence: Synthetic oligonucleotide
  Target: LAMA2; (+) strand; PAM type: NRG; PAM sequence: TGG
ggcttaatctggacactgag

SEQ ID NO: 186716 - DNA, 20 bp, Artificial Sequence
  Description of Artificial Sequence: Synthetic oligonucleotide
  Target: LAMA2; (+) strand; PAM type: NRG; PAM sequence: GGG
gcttaatctggacactgagt

SEQ ID NO: 186717 - DNA, 20 bp, Artificial Sequence
  Description of Artificial Sequence: Synthetic oligonucleotide
  Target: LAMA2; (+) strand; PAM type: NRG; PAM sequence: CAG
tggacactgagtgggataaa

SEQ ID NO: 186718 - DNA, 20 bp, Artificial Sequence
  Description of Artificial Sequence: Synthetic oligonucleotide
  Target: LAMA2; (+) strand; PAM type: NRG; PAM sequence: AGG
ggacactgagtgggataaac

SEQ ID NO: 186719 - DNA, 20 bp, Artificial Sequence
  Description of Artificial Sequence: Synthetic oligonucleotide
  Target: LAMA2; (+) strand; PAM type: NRG; PAM sequence: AAG
gagtgggataaacaggaata

SEQ ID NO: 186720 - DNA, 20 bp, Artificial Sequence
  Description of Artificial Sequence: Synthetic oligonucleotide
  Target: LAMA2; (+) strand; PAM type: NRG; PAM sequence: TGG
ataaacaggaataaagatgt

SEQ ID NO: 186721 - DNA, 20 bp, Artificial Sequence
  Description of Artificial Sequence: Synthetic oligonucleotide
  Target: LAMA2; (+) strand; PAM type: NRG; PAM sequence: GGG
taaacaggaataaagatgtt

SEQ ID NO: 186722 - DNA, 20 bp, Artificial Sequence
  Description of Artificial Sequence: Synthetic oligonucleotide
  Target: LAMA2; (+) strand; PAM type: NRG; PAM sequence: TAG
aataaagatgttgggttcct

SEQ ID NO: 186723 - DNA, 20 bp, Artificial Sequence
  Description of Artificial Sequence: Synthetic oligonucleotide
  Target: LAMA2; (+) strand; PAM type: NRG; PAM sequence: AAG
tgttgggttccttagattaa

SEQ ID NO: 186724 - DNA, 20 bp, Artificial Sequence
  Description of Artificial Sequence: Synthetic oligonucleotide
  Target: LAMA2; (+) strand; PAM type: NRG; PAM sequence: AAG
gttccttagattaaaagcta

SEQ ID NO: 186725 - DNA, 20 bp, Artificial Sequence
  Description of Artificial Sequence: Synthetic oligonucleotide
  Target: LAMA2; (+) strand; PAM type: NRG; PAM sequence: GAG
agctaaagcctttctttctt

SEQ ID NO: 186726 - DNA, 20 bp, Artificial Sequence
  Description of Artificial Sequence: Synthetic oligonucleotide
  Target: LAMA2; (+) strand; PAM type: NRG; PAM sequence: CAG
tttctttcttgagtcctgca

SEQ ID NO: 186727 - DNA, 20 bp, Artificial Sequence
  Description of Artificial Sequence: Synthetic oligonucleotide
  Target: LAMA2; (+) strand; PAM type: NRG; PAM sequence: AAG
tttcttgagtcctgcacaga

SEQ ID NO: 186728 - DNA, 20 bp, Artificial Sequence
  Description of Artificial Sequence: Synthetic oligonucleotide
  Target: LAMA2; (+) strand; PAM type: NRG; PAM sequence: CGG
cagaaagatatgtaacaaaa

SEQ ID NO: 186729 - DNA, 20 bp, Artificial Sequence
  Description of Artificial Sequence: Synthetic oligonucleotide
  Target: LAMA2; (+) strand; PAM type: NRG; PAM sequence: AAG
aagatatgtaacaaaacgga

SEQ ID NO: 186730 - DNA, 20 bp, Artificial Sequence
  Description of Artificial Sequence: Synthetic oligonucleotide
  Target: LAMA2; (+) strand; PAM type: NRG; PAM sequence: AAG
atgtaacaaaacggaaagca

SEQ ID NO: 186731 - DNA, 20 bp, Artificial Sequence
  Description of Artificial Sequence: Synthetic oligonucleotide
  Target: LAMA2; (+) strand; PAM type: NRG; PAM sequence: AGG
tgtaacaaaacggaaagcaa

SEQ ID NO: 186732 - DNA, 20 bp, Artificial Sequence
  Description of Artificial Sequence: Synthetic oligonucleotide
  Target: LAMA2; (+) strand; PAM type: NRG; PAM sequence: CAG
aacaaaacggaaagcaaagg

SEQ ID NO: 186733 - DNA, 20 bp, Artificial Sequence
  Description of Artificial Sequence: Synthetic oligonucleotide
  Target: LAMA2; (+) strand; PAM type: NRG; PAM sequence: TGG
gaaagcaaaggcagttaaat

SEQ ID NO: 186734 - DNA, 20 bp, Artificial Sequence
  Description of Artificial Sequence: Synthetic oligonucleotide
  Target: LAMA2; (+) strand; PAM type: NRG; PAM sequence: CAG
agttaaattggcactcctat

SEQ ID NO: 186735 - DNA, 20 bp, Artificial Sequence
  Description of Artificial Sequence: Synthetic oligonucleotide
  Target: LAMA2; (+) strand; PAM type: NRG; PAM sequence: AAG
ttggcactcctatcagaata

SEQ ID NO: 186736 - DNA, 20 bp, Artificial Sequence
  Description of Artificial Sequence: Synthetic oligonucleotide
  Target: LAMA2; (+) strand; PAM type: NRG; PAM sequence: CAG
atcagaataaagtcctgcct

SEQ ID NO: 186737 - DNA, 20 bp, Artificial Sequence
  Description of Artificial Sequence: Synthetic oligonucleotide
  Target: LAMA2; (+) strand; PAM type: NRG; PAM sequence: TAG
gtcctgcctcagtcaatttg

SEQ ID NO: 186738 - DNA, 20 bp, Artificial Sequence
  Description of Artificial Sequence: Synthetic oligonucleotide
  Target: LAMA2; (+) strand; PAM type: NRG; PAM sequence: AGG
tcctgcctcagtcaatttgt

SEQ ID NO: 186739 - DNA, 20 bp, Artificial Sequence
  Description of Artificial Sequence: Synthetic oligonucleotide
  Target: LAMA2; (+) strand; PAM type: NRG; PAM sequence: TAG
tgcctcagtcaatttgtagg

SEQ ID NO: 186740 - DNA, 20 bp, Artificial Sequence
  Description of Artificial Sequence: Synthetic oligonucleotide
  Target: LAMA2; (+) strand; PAM type: NRG; PAM sequence: TAG
caatttgtaggtagatgcct

SEQ ID NO: 186741 - DNA, 20 bp, Artificial Sequence
  Description of Artificial Sequence: Synthetic oligonucleotide
  Target: LAMA2; (+) strand; PAM type: NRG; PAM sequence: TAG
aggtagatgccttagaatga

SEQ ID NO: 186742 - DNA, 20 bp, Artificial Sequence
  Description of Artificial Sequence: Synthetic oligonucleotide
  Target: LAMA2; (+) strand; PAM type: NRG; PAM sequence: TAG
gccttagaatgatagaatga

SEQ ID NO: 186743 - DNA, 20 bp, Artificial Sequence
  Description of Artificial Sequence: Synthetic oligonucleotide
  Target: LAMA2; (+) strand; PAM type: NRG; PAM sequence: TGG
gaatgatagaatgatagaac

SEQ ID NO: 186744 - DNA, 20 bp, Artificial Sequence
  Description of Artificial Sequence: Synthetic oligonucleotide
  Target: LAMA2; (+) strand; PAM type: NRG; PAM sequence: AAG
tgatagaatgatagaactgg

SEQ ID NO: 186745 - DNA, 20 bp, Artificial Sequence
  Description of Artificial Sequence: Synthetic oligonucleotide
  Target: LAMA2; (+) strand; PAM type: NRG; PAM sequence: GAG
gatagaactggaagtgaatt

SEQ ID NO: 186746 - DNA, 20 bp, Artificial Sequence
  Description of Artificial Sequence: Synthetic oligonucleotide
  Target: LAMA2; (+) strand; PAM type: NRG; PAM sequence: CAG
aactggaagtgaattgagat

SEQ ID NO: 186747 - DNA, 20 bp, Artificial Sequence
  Description of Artificial Sequence: Synthetic oligonucleotide
  Target: LAMA2; (+) strand; PAM type: NRG; PAM sequence: CAG
tgaattgagatcagcgaata

SEQ ID NO: 186748 - DNA, 20 bp, Artificial Sequence
  Description of Artificial Sequence: Synthetic oligonucleotide
  Target: LAMA2; (+) strand; PAM type: NRG; PAM sequence: AAG
cagcgaatacagtgattctc

SEQ ID NO: 186749 - DNA, 20 bp, Artificial Sequence
  Description of Artificial Sequence: Synthetic oligonucleotide
  Target: LAMA2; (+) strand; PAM type: NRG; PAM sequence: TAG
aatacagtgattctcaagtc

SEQ ID NO: 186750 - DNA, 20 bp, Artificial Sequence
  Description of Artificial Sequence: Synthetic oligonucleotide
  Target: LAMA2; (+) strand; PAM type: NRG; PAM sequence: TAG
cagtgattctcaagtctagc

SEQ ID NO: 186751 - DNA, 20 bp, Artificial Sequence
  Description of Artificial Sequence: Synthetic oligonucleotide
  Target: LAMA2; (+) strand; PAM type: NRG; PAM sequence: AAG
caagtctagctagatgttta

SEQ ID NO: 186752 - DNA, 20 bp, Artificial Sequence
  Description of Artificial Sequence: Synthetic oligonucleotide
  Target: LAMA2; (+) strand; PAM type: NRG; PAM sequence: TGG
gctagatgtttaaagtgctt

SEQ ID NO: 186753 - DNA, 20 bp, Artificial Sequence
  Description of Artificial Sequence: Synthetic oligonucleotide
  Target: LAMA2; (+) strand; PAM type: NRG; PAM sequence: GGG
ctagatgtttaaagtgcttt

SEQ ID NO: 186754 - DNA, 20 bp, Artificial Sequence
  Description of Artificial Sequence: Synthetic oligonucleotide
  Target: LAMA2; (+) strand; PAM type: NRG; PAM sequence: TGG
gtgcttaaaaaatctacatt

SEQ ID NO: 186755 - DNA, 20 bp, Artificial Sequence
  Description of Artificial Sequence: Synthetic oligonucleotide
  Target: LAMA2; (+) strand; PAM type: NRG; PAM sequence: GGG
tgcttaaaaaatctacattt

SEQ ID NO: 186756 - DNA, 20 bp, Artificial Sequence
  Description of Artificial Sequence: Synthetic oligonucleotide
  Target: LAMA2; (+) strand; PAM type: NRG; PAM sequence: TGG
taaaaaatctacatttgggc

SEQ ID NO: 186757 - DNA, 20 bp, Artificial Sequence
  Description of Artificial Sequence: Synthetic oligonucleotide
  Target: LAMA2; (+) strand; PAM type: NRG; PAM sequence: GGG
aaaaaatctacatttgggct

SEQ ID NO: 186758 - DNA, 20 bp, Artificial Sequence
  Description of Artificial Sequence: Synthetic oligonucleotide
  Target: LAMA2; (+) strand; PAM type: NRG; PAM sequence: CAG
atctacatttgggctgggca

SEQ ID NO: 186759 - DNA, 20 bp, Artificial Sequence
  Description of Artificial Sequence: Synthetic oligonucleotide
  Target: LAMA2; (+) strand; PAM type: NRG; PAM sequence: CAG
tacatttgggctgggcacag

SEQ ID NO: 186760 - DNA, 20 bp, Artificial Sequence
  Description of Artificial Sequence: Synthetic oligonucleotide
  Target: LAMA2; (+) strand; PAM type: NRG; PAM sequence: TGG
cgcctgtaatcccaacactc

SEQ ID NO: 186761 - DNA, 20 bp, Artificial Sequence
  Description of Artificial Sequence: Synthetic oligonucleotide
  Target: LAMA2; (+) strand; PAM type: NRG; PAM sequence: GGG
gcctgtaatcccaacactct

SEQ ID NO: 186762 - DNA, 20 bp, Artificial Sequence
  Description of Artificial Sequence: Synthetic oligonucleotide
  Target: LAMA2; (+) strand; PAM type: NRG; PAM sequence: GAG
ctgtaatcccaacactctgg

SEQ ID NO: 186763 - DNA, 20 bp, Artificial Sequence
  Description of Artificial Sequence: Synthetic oligonucleotide
  Target: LAMA2; (+) strand; PAM type: NRG; PAM sequence: AGG
tgtaatcccaacactctggg

SEQ ID NO: 186764 - DNA, 20 bp, Artificial Sequence
  Description of Artificial Sequence: Synthetic oligonucleotide
  Target: LAMA2; (+) strand; PAM type: NRG; PAM sequence: AAG
tcccaacactctgggaggcc

SEQ ID NO: 186765 - DNA, 20 bp, Artificial Sequence
  Description of Artificial Sequence: Synthetic oligonucleotide
  Target: LAMA2; (+) strand; PAM type: NRG; PAM sequence: AGG
cccaacactctgggaggcca

SEQ ID NO: 186766 - DNA, 20 bp, Artificial Sequence
  Description of Artificial Sequence: Synthetic oligonucleotide
  Target: LAMA2; (+) strand; PAM type: NRG; PAM sequence: CAG
aacactctgggaggccaagg

SEQ ID NO: 186767 - DNA, 20 bp, Artificial Sequence
  Description of Artificial Sequence: Synthetic oligonucleotide
  Target: LAMA2; (+) strand; PAM type: NRG; PAM sequence: AGG
acactctgggaggccaaggc

SEQ ID NO: 186768 - DNA, 20 bp, Artificial Sequence
  Description of Artificial Sequence: Synthetic oligonucleotide
  Target: LAMA2; (+) strand; PAM type: NRG; PAM sequence: GAG
actctgggaggccaaggcag

SEQ ID NO: 186769 - DNA, 20 bp, Artificial Sequence
  Description of Artificial Sequence: Synthetic oligonucleotide
  Target: LAMA2; (+) strand; PAM type: NRG; PAM sequence: AGG
ctctgggaggccaaggcagg

SEQ ID NO: 186770 - DNA, 20 bp, Artificial Sequence
  Description of Artificial Sequence: Synthetic oligonucleotide
  Target: LAMA2; (+) strand; PAM type: NRG; PAM sequence: AAG
ccaaggcaggaggatcactt

SEQ ID NO: 186771 - DNA, 20 bp, Artificial Sequence
  Description of Artificial Sequence: Synthetic oligonucleotide
  Target: LAMA2; (+) strand; PAM type: NRG; PAM sequence: CAG
gcaggaggatcacttaagcc

SEQ ID NO: 186772 - DNA, 20 bp, Artificial Sequence
  Description of Artificial Sequence: Synthetic oligonucleotide
  Target: LAMA2; (+) strand; PAM type: NRG; PAM sequence: AGG
caggaggatcacttaagccc

SEQ ID NO: 186773 - DNA, 20 bp, Artificial Sequence
  Description of Artificial Sequence: Synthetic oligonucleotide
  Target: LAMA2; (+) strand; PAM type: NRG; PAM sequence: GAG
ggaggatcacttaagcccag

SEQ ID NO: 186774 - DNA, 20 bp, Artificial Sequence
  Description of Artificial Sequence: Synthetic oligonucleotide
  Target: LAMA2; (+) strand; PAM type: NRG; PAM sequence: GAG
tcacttaagcccaggagttt

SEQ ID NO: 186775 - DNA, 20 bp, Artificial Sequence
  Description of Artificial Sequence: Synthetic oligonucleotide
  Target: LAMA2; (+) strand; PAM type: NRG; PAM sequence: CAG
taagcccaggagtttgagac

SEQ ID NO: 186776 - DNA, 20 bp, Artificial Sequence
  Description of Artificial Sequence: Synthetic oligonucleotide
  Target: LAMA2; (+) strand; PAM type: NRG; PAM sequence: GAG
caggagtttgagaccagcct

SEQ ID NO: 186777 - DNA, 20 bp, Artificial Sequence
  Description of Artificial Sequence: Synthetic oligonucleotide
  Target: LAMA2; (+) strand; PAM type: NRG; PAM sequence: CAG
tgagaccagcctgagccaca

SEQ ID NO: 186778 - DNA, 20 bp, Artificial Sequence
  Description of Artificial Sequence: Synthetic oligonucleotide
  Target: LAMA2; (+) strand; PAM type: NRG; PAM sequence: GAG
accagcctgagccacacagt

SEQ ID NO: 186779 - DNA, 20 bp, Artificial Sequence
  Description of Artificial Sequence: Synthetic oligonucleotide
  Target: LAMA2; (+) strand; PAM type: NRG; PAM sequence: TAG
tgagccacacagtgagacct

SEQ ID NO: 186780 - DNA, 20 bp, Artificial Sequence
  Description of Artificial Sequence: Synthetic oligonucleotide
  Target: LAMA2; (+) strand; PAM type: NRG; PAM sequence: TAG
aaaaaaaaaaaaaaaaaaat

SEQ ID NO: 186781 - DNA, 20 bp, Artificial Sequence
  Description of Artificial Sequence: Synthetic oligonucleotide
  Target: LAMA2; (+) strand; PAM type: NRG; PAM sequence: TGG
aaaaaaaaaaaaaattagcc

SEQ ID NO: 186782 - DNA, 20 bp, Artificial Sequence
  Description of Artificial Sequence: Synthetic oligonucleotide
  Target: LAMA2; (+) strand; PAM type: NRG; PAM sequence: TGG
aaaaaattagcctggtgtgt

SEQ ID NO: 186783 - DNA, 20 bp, Artificial Sequence
  Description of Artificial Sequence: Synthetic oligonucleotide
  Target: LAMA2; (+) strand; PAM type: NRG; PAM sequence: TGG
aaattagcctggtgtgttgg

SEQ ID NO: 186784 - DNA, 20 bp, Artificial Sequence
  Description of Artificial Sequence: Synthetic oligonucleotide
  Target: LAMA2; (+) strand; PAM type: NRG; PAM sequence: TGG
gttggtggtgcatgcctgtg

SEQ ID NO: 186785 - DNA, 20 bp, Artificial Sequence
  Description of Artificial Sequence: Synthetic oligonucleotide
  Target: LAMA2; (+) strand; PAM type: NRG; PAM sequence: TGG
cctgtgtggtcccgactatt

SEQ ID NO: 186786 - DNA, 20 bp, Artificial Sequence
  Description of Artificial Sequence: Synthetic oligonucleotide
  Target: LAMA2; (+) strand; PAM type: NRG; PAM sequence: GGG
ctgtgtggtcccgactattt

SEQ ID NO: 186787 - DNA, 20 bp, Artificial Sequence
  Description of Artificial Sequence: Synthetic oligonucleotide
  Target: LAMA2; (+) strand; PAM type: NRG; PAM sequence: AAG
tgtggtcccgactatttggg

SEQ ID NO: 186788 - DNA, 20 bp, Artificial Sequence
  Description of Artificial Sequence: Synthetic oligonucleotide
  Target: LAMA2; (+) strand; PAM type: NRG; PAM sequence: GAG
tcccgactatttgggaagct

SEQ ID NO: 186789 - DNA, 20 bp, Artificial Sequence
  Description of Artificial Sequence: Synthetic oligonucleotide
  Target: LAMA2; (+) strand; PAM type: NRG; PAM sequence: AGG
cccgactatttgggaagctg

SEQ ID NO: 186790 - DNA, 20 bp, Artificial Sequence
  Description of Artificial Sequence: Synthetic oligonucleotide
  Target: LAMA2; (+) strand; PAM type: NRG; PAM sequence: TGG
gactatttgggaagctgagg

SEQ ID NO: 186791 - DNA, 20 bp, Artificial Sequence
  Description of Artificial Sequence: Synthetic oligonucleotide
  Target: LAMA2; (+) strand; PAM type: NRG; PAM sequence: GGG
actatttgggaagctgaggt

SEQ ID NO: 186792 - DNA, 20 bp, Artificial Sequence
  Description of Artificial Sequence: Synthetic oligonucleotide
  Target: LAMA2; (+) strand; PAM type: NRG; PAM sequence: GAG
tatttgggaagctgaggtgg

SEQ ID NO: 186793 - DNA, 20 bp, Artificial Sequence
  Description of Artificial Sequence: Synthetic oligonucleotide
  Target: LAMA2; (+) strand; PAM type: NRG; PAM sequence: AGG
atttgggaagctgaggtggg

SEQ ID NO: 186794 - DNA, 20 bp, Artificial Sequence
  Description of Artificial Sequence: Synthetic oligonucleotide
  Target: LAMA2; (+) strand; PAM type: NRG; PAM sequence: GAG
ctgaggtgggaggttcactt

SEQ ID NO: 186795 - DNA, 20 bp, Artificial Sequence
  Description of Artificial Sequence: Synthetic oligonucleotide
  Target: LAMA2; (+) strand; PAM type: NRG; PAM sequence: CAG
aggtgggaggttcacttgag

SEQ ID NO: 186796 - DNA, 20 bp, Artificial Sequence
  Description of Artificial Sequence: Synthetic oligonucleotide
  Target: LAMA2; (+) strand; PAM type: NRG; PAM sequence: AGG
ggtgggaggttcacttgagc

SEQ ID NO: 186797 - DNA, 20 bp, Artificial Sequence
  Description of Artificial Sequence: Synthetic oligonucleotide
  Target: LAMA2; (+) strand; PAM type: NRG; PAM sequence: GGG
gtgggaggttcacttgagca

SEQ ID NO: 186798 - DNA, 20 bp, Artificial Sequence
  Description of Artificial Sequence: Synthetic oligonucleotide
  Target: LAMA2; (+) strand; PAM type: NRG; PAM sequence: TAG
ggaggttcacttgagcaggg

SEQ ID NO: 186799 - DNA, 20 bp, Artificial Sequence
  Description of Artificial Sequence: Synthetic oligonucleotide
  Target: LAMA2; (+) strand; PAM type: NRG; PAM sequence: AGG
gaggttcacttgagcagggt

SEQ ID NO: 186800 - DNA, 20 bp, Artificial Sequence
  Description of Artificial Sequence: Synthetic oligonucleotide
  Target: LAMA2; (+) strand; PAM type: NRG; PAM sequence: AAG
tcacttgagcagggtaggtt

SEQ ID NO: 186801 - DNA, 20 bp, Artificial Sequence
  Description of Artificial Sequence: Synthetic oligonucleotide
  Target: LAMA2; (+) strand; PAM type: NRG; PAM sequence: AGG
cacttgagcagggtaggtta

SEQ ID NO: 186802 - DNA, 20 bp, Artificial Sequence
  Description of Artificial Sequence: Synthetic oligonucleotide
  Target: LAMA2; (+) strand; PAM type: NRG; PAM sequence: CAG
agcagggtaggttaaggctg

SEQ ID NO: 186803 - DNA, 20 bp, Artificial Sequence
  Description of Artificial Sequence: Synthetic oligonucleotide
  Target: LAMA2; (+) strand; PAM type: NRG; PAM sequence: GAG
gggtaggttaaggctgcagt

SEQ ID NO: 186804 - DNA, 20 bp, Artificial Sequence
  Description of Artificial Sequence: Synthetic oligonucleotide
  Target: LAMA2; (+) strand; PAM type: NRG; PAM sequence: CAG
aggttaaggctgcagtgagc

SEQ ID NO: 186805 - DNA, 20 bp, Artificial Sequence
  Description of Artificial Sequence: Synthetic oligonucleotide
  Target: LAMA2; (+) strand; PAM type: NRG; PAM sequence: CAG
gtgatcgtgacactatgcta

SEQ ID NO: 186806 - DNA, 20 bp, Artificial Sequence
  Description of Artificial Sequence: Synthetic oligonucleotide
  Target: LAMA2; (+) strand; PAM type: NRG; PAM sequence: TGG
cgtgacactatgctacagcc

SEQ ID NO: 186807 - DNA, 20 bp, Artificial Sequence
  Description of Artificial Sequence: Synthetic oligonucleotide
  Target: LAMA2; (+) strand; PAM type: NRG; PAM sequence: GGG
gtgacactatgctacagcct

SEQ ID NO: 186808 - DNA, 20 bp, Artificial Sequence
  Description of Artificial Sequence: Synthetic oligonucleotide
  Target: LAMA2; (+) strand; PAM type: NRG; PAM sequence: AAG
atgctacagcctgggcaaca

SEQ ID NO: 186809 - DNA, 20 bp, Artificial Sequence
  Description of Artificial Sequence: Synthetic oligonucleotide
  Target: LAMA2; (+) strand; PAM type: NRG; PAM sequence: AAG
agcaatatcctgtctcaaaa

SEQ ID NO: 186810 - DNA, 20 bp, Artificial Sequence
  Description of Artificial Sequence: Synthetic oligonucleotide
  Target: LAMA2; (+) strand; PAM type: NRG; PAM sequence: TGG
agaaaaaaaaaattgacatc

SEQ ID NO: 186811 - DNA, 20 bp, Artificial Sequence
  Description of Artificial Sequence: Synthetic oligonucleotide
  Target: LAMA2; (+) strand; PAM type: NRG; PAM sequence: GGG
gaaaaaaaaaattgacatct

SEQ ID NO: 186812 - DNA, 20 bp, Artificial Sequence
  Description of Artificial Sequence: Synthetic oligonucleotide
  Target: LAMA2; (+) strand; PAM type: NRG; PAM sequence: CAG
ttgacatctgggtgtcaccc

SEQ ID NO: 186813 - DNA, 20 bp, Artificial Sequence
  Description of Artificial Sequence: Synthetic oligonucleotide
  Target: LAMA2; (+) strand; PAM type: NRG; PAM sequence: TGG
cccaattaaactataatctc

SEQ ID NO: 186814 - DNA, 20 bp, Artificial Sequence
  Description of Artificial Sequence: Synthetic oligonucleotide
  Target: LAMA2; (+) strand; PAM type: NRG; PAM sequence: GGG
ccaattaaactataatctct

SEQ ID NO: 186815 - DNA, 20 bp, Artificial Sequence
  Description of Artificial Sequence: Synthetic oligonucleotide
  Target: LAMA2; (+) strand; PAM type: NRG; PAM sequence: TAG
attaaactataatctctggg

SEQ ID NO: 186816 - DNA, 20 bp, Artificial Sequence
  Description of Artificial Sequence: Synthetic oligonucleotide
  Target: LAMA2; (+) strand; PAM type: NRG; PAM sequence: AGG
ttaaactataatctctgggt

SEQ ID NO: 186817 - DNA, 20 bp, Artificial Sequence
  Description of Artificial Sequence: Synthetic oligonucleotide
  Target: LAMA2; (+) strand; PAM type: NRG; PAM sequence: GGG
taaactataatctctgggta

SEQ ID NO: 186818 - DNA, 20 bp, Artificial Sequence
  Description of Artificial Sequence: Synthetic oligonucleotide
  Target: LAMA2; (+) strand; PAM type: NRG; PAM sequence: CAG
tataatctctgggtagggcc

SEQ ID NO: 186819 - DNA, 20 bp, Artificial Sequence
  Description of Artificial Sequence: Synthetic oligonucleotide
  Target: LAMA2; (+) strand; PAM type: NRG; PAM sequence: AGG
ataatctctgggtagggccc

SEQ ID NO: 186820 - DNA, 20 bp, Artificial Sequence
  Description of Artificial Sequence: Synthetic oligonucleotide
  Target: LAMA2; (+) strand; PAM type: NRG; PAM sequence: TGG
tctgggtagggcccaggcat

SEQ ID NO: 186821 - DNA, 20 bp, Artificial Sequence
  Description of Artificial Sequence: Synthetic oligonucleotide
  Target: LAMA2; (+) strand; PAM type: NRG; PAM sequence: AAG
cttgattcaaatgtgaaacc

SEQ ID NO: 186822 - DNA, 20 bp, Artificial Sequence
  Description of Artificial Sequence: Synthetic oligonucleotide
  Target: LAMA2; (+) strand; PAM type: NRG; PAM sequence: TGG
aaaccaagactgaaaacccc

SEQ ID NO: 186823 - DNA, 20 bp, Artificial Sequence
  Description of Artificial Sequence: Synthetic oligonucleotide
  Target: LAMA2; (+) strand; PAM type: NRG; PAM sequence: GGG
aaccaagactgaaaacccct

SEQ ID NO: 186824 - DNA, 20 bp, Artificial Sequence
  Description of Artificial Sequence: Synthetic oligonucleotide
  Target: LAMA2; (+) strand; PAM type: NRG; PAM sequence: TGG
cctgtcacctccacatttta

SEQ ID NO: 186825 - DNA, 20 bp, Artificial Sequence
  Description of Artificial Sequence: Synthetic oligonucleotide
  Target: LAMA2; (+) strand; PAM type: NRG; PAM sequence: GGG
ctgtcacctccacattttat

SEQ ID NO: 186826 - DNA, 20 bp, Artificial Sequence
  Description of Artificial Sequence: Synthetic oligonucleotide
  Target: LAMA2; (+) strand; PAM type: NRG; PAM sequence: GGG
tgtcacctccacattttatg

SEQ ID NO: 186827 - DNA, 20 bp, Artificial Sequence
  Description of Artificial Sequence: Synthetic oligonucleotide
  Target: LAMA2; (+) strand; PAM type: NRG; PAM sequence: GAG
tcacctccacattttatggg

SEQ ID NO: 186828 - DNA, 20 bp, Artificial Sequence
  Description of Artificial Sequence: Synthetic oligonucleotide
  Target: LAMA2; (+) strand; PAM type: NRG; PAM sequence: AGG
cacctccacattttatgggg

SEQ ID NO: 186829 - DNA, 20 bp, Artificial Sequence
  Description of Artificial Sequence: Synthetic oligonucleotide
  Target: LAMA2; (+) strand; PAM type: NRG; PAM sequence: TAG
cacattttatggggaggaac

SEQ ID NO: 186830 - DNA, 20 bp, Artificial Sequence
  Description of Artificial Sequence: Synthetic oligonucleotide
  Target: LAMA2; (+) strand; PAM type: NRG; PAM sequence: AAG
attttatggggaggaactag

SEQ ID NO: 186831 - DNA, 20 bp, Artificial Sequence
  Description of Artificial Sequence: Synthetic oligonucleotide
  Target: LAMA2; (+) strand; PAM type: NRG; PAM sequence: AGG
ttttatggggaggaactaga

SEQ ID NO: 186832 - DNA, 20 bp, Artificial Sequence
  Description of Artificial Sequence: Synthetic oligonucleotide
  Target: LAMA2; (+) strand; PAM type: NRG; PAM sequence: AAG
ggaggaactagaaggaactc

SEQ ID NO: 186833 - DNA, 20 bp, Artificial Sequence
  Description of Artificial Sequence: Synthetic oligonucleotide
  Target: LAMA2; (+) strand; PAM type: NRG; PAM sequence: AGG
gaggaactagaaggaactca

SEQ ID NO: 186834 - DNA, 20 bp, Artificial Sequence
  Description of Artificial Sequence: Synthetic oligonucleotide
  Target: LAMA2; (+) strand; PAM type: NRG; PAM sequence: AAG
tattttgataactgtgctca

SEQ ID NO: 186835 - DNA, 20 bp, Artificial Sequence
  Description of Artificial Sequence: Synthetic oligonucleotide
  Target: LAMA2; (+) strand; PAM type: NRG; PAM sequence: TAG
ctgtgctcaaagtcccacct

SEQ ID NO: 186836 - DNA, 20 bp, Artificial Sequence
  Description of Artificial Sequence: Synthetic oligonucleotide
  Target: LAMA2; (+) strand; PAM type: NRG; PAM sequence: AAG
ctcaaagtcccaccttagta

SEQ ID NO: 186837 - DNA, 20 bp, Artificial Sequence
  Description of Artificial Sequence: Synthetic oligonucleotide
  Target: LAMA2; (+) strand; PAM type: NRG; PAM sequence: TAG
cttagtaaagtttcccaatg

SEQ ID NO: 186838 - DNA, 20 bp, Artificial Sequence
  Description of Artificial Sequence: Synthetic oligonucleotide
  Target: LAMA2; (+) strand; PAM type: NRG; PAM sequence: CAG
taaagtttcccaatgtagtc

SEQ ID NO: 186839 - DNA, 20 bp, Artificial Sequence
  Description of Artificial Sequence: Synthetic oligonucleotide
  Target: LAMA2; (+) strand; PAM type: NRG; PAM sequence: CAG
gtttcccaatgtagtccaga

SEQ ID NO: 186840 - DNA, 20 bp, Artificial Sequence
  Description of Artificial Sequence: Synthetic oligonucleotide
  Target: LAMA2; (+) strand; PAM type: NRG; PAM sequence: TGG
gtagtccagacagttgcatc

SEQ ID NO: 186841 - DNA, 20 bp, Artificial Sequence
  Description of Artificial Sequence: Synthetic oligonucleotide
  Target: LAMA2; (+) strand; PAM type: NRG; PAM sequence: AAG
agacagttgcatctggatcc

SEQ ID NO: 186842 - DNA, 20 bp, Artificial Sequence
  Description of Artificial Sequence: Synthetic oligonucleotide
  Target: LAMA2; (+) strand; PAM type: NRG; PAM sequence: CAG
cagttgcatctggatccaag

SEQ ID NO: 186843 - DNA, 20 bp, Artificial Sequence
  Description of Artificial Sequence: Synthetic oligonucleotide
  Target: LAMA2; (+) strand; PAM type: NRG; PAM sequence: TAG
ccaagcagaattcactgaat

SEQ ID NO: 186844 - DNA, 20 bp, Artificial Sequence
  Description of Artificial Sequence: Synthetic oligonucleotide
  Target: LAMA2; (+) strand; PAM type: NRG; PAM sequence: AGG
caagcagaattcactgaatt

SEQ ID NO: 186845 - DNA, 20 bp, Artificial Sequence
  Description of Artificial Sequence: Synthetic oligonucleotide
  Target: LAMA2; (+) strand; PAM type: NRG; PAM sequence: TGG
agaattcactgaattaggtt

SEQ ID NO: 186846 - DNA, 20 bp, Artificial Sequence
  Description of Artificial Sequence: Synthetic oligonucleotide
  Target: LAMA2; (+) strand; PAM type: NRG; PAM sequence: CAG
cccatgcaaaattcatactc

SEQ ID NO: 186847 - DNA, 20 bp, Artificial Sequence
  Description of Artificial Sequence: Synthetic oligonucleotide
  Target: LAMA2; (+) strand; PAM type: NRG; PAM sequence: GAG
catgcaaaattcatactcca

SEQ ID NO: 186848 - DNA, 20 bp, Artificial Sequence
  Description of Artificial Sequence: Synthetic oligonucleotide
  Target: LAMA2; (+) strand; PAM type: NRG; PAM sequence: TGG
tccagagtgacccatgaatt

SEQ ID NO: 186849 - DNA, 20 bp, Artificial Sequence
  Description of Artificial Sequence: Synthetic oligonucleotide
  Target: LAMA2; (+) strand; PAM type: NRG; PAM sequence: AAG
ccaaaaattgtccacatttt

SEQ ID NO: 186850 - DNA, 20 bp, Artificial Sequence
  Description of Artificial Sequence: Synthetic oligonucleotide
  Target: LAMA2; (+) strand; PAM type: NRG; PAM sequence: AGG
caaaaattgtccacatttta

SEQ ID NO: 186851 - DNA, 20 bp, Artificial Sequence
  Description of Artificial Sequence: Synthetic oligonucleotide
  Target: LAMA2; (+) strand; PAM type: NRG; PAM sequence: CAG
aattgtccacattttaaggt

SEQ ID NO: 186852 - DNA, 20 bp, Artificial Sequence
  Description of Artificial Sequence: Synthetic oligonucleotide
  Target: LAMA2; (+) strand; PAM type: NRG; PAM sequence: AAG
cacattttaaggtcagaaat

SEQ ID NO: 186853 - DNA, 20 bp, Artificial Sequence
  Description of Artificial Sequence: Synthetic oligonucleotide
  Target: LAMA2; (+) strand; PAM type: NRG; PAM sequence: AGG
acattttaaggtcagaaata

SEQ ID NO: 186854 - DNA, 20 bp, Artificial Sequence
  Description of Artificial Sequence: Synthetic oligonucleotide
  Target: LAMA2; (+) strand; PAM type: NRG; PAM sequence: TGG
ggtcagaaataaggacattt

SEQ ID NO: 186855 - DNA, 20 bp, Artificial Sequence
  Description of Artificial Sequence: Synthetic oligonucleotide
  Target: LAMA2; (+) strand; PAM type: NRG; PAM sequence: TGG
agaaataaggacattttggt

SEQ ID NO: 186856 - DNA, 20 bp, Artificial Sequence
  Description of Artificial Sequence: Synthetic oligonucleotide
  Target: LAMA2; (+) strand; PAM type: NRG; PAM sequence: GGG
gaaataaggacattttggtt

SEQ ID NO: 186857 - DNA, 20 bp, Artificial Sequence
  Description of Artificial Sequence: Synthetic oligonucleotide
  Target: LAMA2; (+) strand; PAM type: NRG; PAM sequence: CGG
aaggacattttggttgggca

SEQ ID NO: 186858 - DNA, 20 bp, Artificial Sequence
  Description of Artificial Sequence: Synthetic oligonucleotide
  Target: LAMA2; (+) strand; PAM type: NRG; PAM sequence: TGG
gacattttggttgggcacgg

SEQ ID NO: 186859 - DNA, 20 bp, Artificial Sequence
  Description of Artificial Sequence: Synthetic oligonucleotide
  Target: LAMA2; (+) strand; PAM type: NRG; PAM sequence: CAG
gtggctcacgcctgtaatcc

SEQ ID NO: 186860 - DNA, 20 bp, Artificial Sequence
  Description of Artificial Sequence: Synthetic oligonucleotide
  Target: LAMA2; (+) strand; PAM type: NRG; PAM sequence: TGG
cgcctgtaatcccagcactt

SEQ ID NO: 186861 - DNA, 20 bp, Artificial Sequence
  Description of Artificial Sequence: Synthetic oligonucleotide
  Target: LAMA2; (+) strand; PAM type: NRG; PAM sequence: GGG
gcctgtaatcccagcacttt

SEQ ID NO: 186862 - DNA, 20 bp, Artificial Sequence
  Description of Artificial Sequence: Synthetic oligonucleotide
  Target: LAMA2; (+) strand; PAM type: NRG; PAM sequence: GAG
ctgtaatcccagcactttgg

SEQ ID NO: 186863 - DNA, 20 bp, Artificial Sequence
  Description of Artificial Sequence: Synthetic oligonucleotide
  Target: LAMA2; (+) strand; PAM type: NRG; PAM sequence: AGG
tgtaatcccagcactttggg

SEQ ID NO: 186864 - DNA, 20 bp, Artificial Sequence
  Description of Artificial Sequence: Synthetic oligonucleotide
  Target: LAMA2; (+) strand; PAM type: NRG; PAM sequence: AAG
cccagcactttgggaggctg

SEQ ID NO: 186865 - DNA, 20 bp, Artificial Sequence
  Description of Artificial Sequence: Synthetic oligonucleotide
  Target: LAMA2; (+) strand; PAM type: NRG; PAM sequence: CAG
agcactttgggaggctgaag

SEQ ID NO: 186866 - DNA, 20 bp, Artificial Sequence
  Description of Artificial Sequence: Synthetic oligonucleotide
  Target: LAMA2; (+) strand; PAM type: NRG; PAM sequence: AGG
gcactttgggaggctgaagc

SEQ ID NO: 186867 - DNA, 20 bp, Artificial Sequence
  Description of Artificial Sequence: Synthetic oligonucleotide
  Target: LAMA2; (+) strand; PAM type: NRG; PAM sequence: TGG
ctttgggaggctgaagcagg

SEQ ID NO: 186868 - DNA, 20 bp, Artificial Sequence
  Description of Artificial Sequence: Synthetic oligonucleotide
  Target: LAMA2; (+) strand; PAM type: NRG; PAM sequence: GAG
ctgaagcaggtggaccacct

SEQ ID NO: 186869 - DNA, 20 bp, Artificial Sequence
  Description of Artificial Sequence: Synthetic oligonucleotide
  Target: LAMA2; (+) strand; PAM type: NRG; PAM sequence: AGG
tgaagcaggtggaccacctg

SEQ ID NO: 186870 - DNA, 20 bp, Artificial Sequence
  Description of Artificial Sequence: Synthetic oligonucleotide
  Target: LAMA2; (+) strand; PAM type: NRG; PAM sequence: CAG
gcaggtggaccacctgaggt

SEQ ID NO: 186871 - DNA, 20 bp, Artificial Sequence
  Description of Artificial Sequence: Synthetic oligonucleotide
  Target: LAMA2; (+) strand; PAM type: NRG; PAM sequence: AGG
caggtggaccacctgaggtc

SEQ ID NO: 186872 - DNA, 20 bp, Artificial Sequence
  Description of Artificial Sequence: Synthetic oligonucleotide
  Target: LAMA2; (+) strand; PAM type: NRG; PAM sequence: GAG
ggtggaccacctgaggtcag

SEQ ID NO: 186873 - DNA, 20 bp, Artificial Sequence
  Description of Artificial Sequence: Synthetic oligonucleotide
  Target: LAMA2; (+) strand; PAM type: NRG; PAM sequence: AAG
ccacctgaggtcaggagttc

SEQ ID NO: 186874 - DNA, 20 bp, Artificial Sequence
  Description of Artificial Sequence: Synthetic oligonucleotide
  Target: LAMA2; (+) strand; PAM type: NRG; PAM sequence: CAG
tgaggtcaggagttcaagac

SEQ ID NO: 186875 - DNA, 20 bp, Artificial Sequence
  Description of Artificial Sequence: Synthetic oligonucleotide
  Target: LAMA2; (+) strand; PAM type: NRG; PAM sequence: TGG
tcaggagttcaagaccagcc

SEQ ID NO: 186876 - DNA, 20 bp, Artificial Sequence
  Description of Artificial Sequence: Synthetic oligonucleotide
  Target: LAMA2; (+) strand; PAM type: NRG; PAM sequence: TGG
caagaccagcctggccaaca

SEQ ID NO: 186877 - DNA, 20 bp, Artificial Sequence
  Description of Artificial Sequence: Synthetic oligonucleotide
  Target: LAMA2; (+) strand; PAM type: NRG; PAM sequence: CAG
ctaacaatacaaaaattaac

SEQ ID NO: 186878 - DNA, 20 bp, Artificial Sequence
  Description of Artificial Sequence: Synthetic oligonucleotide
  Target: LAMA2; (+) strand; PAM type: NRG; PAM sequence: AGG
taacaatacaaaaattaacc

SEQ ID NO: 186879 - DNA, 20 bp, Artificial Sequence
  Description of Artificial Sequence: Synthetic oligonucleotide
  Target: LAMA2; (+) strand; PAM type: NRG; PAM sequence: TGG
atacaaaaattaaccaggtg

SEQ ID NO: 186880 - DNA, 20 bp, Artificial Sequence
  Description of Artificial Sequence: Synthetic oligonucleotide
  Target: LAMA2; (+) strand; PAM type: NRG; PAM sequence: TGG
caaaaattaaccaggtgtgg

SEQ ID NO: 186881 - DNA, 20 bp, Artificial Sequence
  Description of Artificial Sequence: Synthetic oligonucleotide
  Target: LAMA2; (+) strand; PAM type: NRG; PAM sequence: CAG
aaattaaccaggtgtggtgg

SEQ ID NO: 186882 - DNA, 20 bp, Artificial Sequence
  Description of Artificial Sequence: Synthetic oligonucleotide
  Target: LAMA2; (+) strand; PAM type: NRG; PAM sequence: AGG
aattaaccaggtgtggtggc

SEQ ID NO: 186883 - DNA, 20 bp, Artificial Sequence
  Description of Artificial Sequence: Synthetic oligonucleotide
  Target: LAMA2; (+) strand; PAM type: NRG; PAM sequence: CAG
gtggcaggcacctgtaatct

SEQ ID NO: 186884 - DNA, 20 bp, Artificial Sequence
  Description of Artificial Sequence: Synthetic oligonucleotide
  Target: LAMA2; (+) strand; PAM type: NRG; PAM sequence: CGG
cacctgtaatctcagctact

SEQ ID NO: 186885 - DNA, 20 bp, Artificial Sequence
  Description of Artificial Sequence: Synthetic oligonucleotide
  Target: LAMA2; (+) strand; PAM type: NRG; PAM sequence: GGG
acctgtaatctcagctactc

SEQ ID NO: 186886 - DNA, 20 bp, Artificial Sequence
  Description of Artificial Sequence: Synthetic oligonucleotide
  Target: LAMA2; (+) strand; PAM type: NRG; PAM sequence: GAG
ctgtaatctcagctactcgg

SEQ ID NO: 186887 - DNA, 20 bp, Artificial Sequence
  Description of Artificial Sequence: Synthetic oligonucleotide
  Target: LAMA2; (+) strand; PAM type: NRG; PAM sequence: AGG
tgtaatctcagctactcggg

SEQ ID NO: 186888 - DNA, 20 bp, Artificial Sequence
  Description of Artificial Sequence: Synthetic oligonucleotide
  Target: LAMA2; (+) strand; PAM type: NRG; PAM sequence: GAG
tctcagctactcgggaggct

SEQ ID NO: 186889 - DNA, 20 bp, Artificial Sequence
  Description of Artificial Sequence: Synthetic oligonucleotide
  Target: LAMA2; (+) strand; PAM type: NRG; PAM sequence: AGG
ctcagctactcgggaggctg

SEQ ID NO: 186890 - DNA, 20 bp, Artificial Sequence
  Description of Artificial Sequence: Synthetic oligonucleotide
  Target: LAMA2; (+) strand; PAM type: NRG; PAM sequence: CAG
agctactcgggaggctgagg

SEQ ID NO: 186891 - DNA, 20 bp, Artificial Sequence
  Description of Artificial Sequence: Synthetic oligonucleotide
  Target: LAMA2; (+) strand; PAM type: NRG; PAM sequence: AGG
gctactcgggaggctgaggc

SEQ ID NO: 186892 - DNA, 20 bp, Artificial Sequence
  Description of Artificial Sequence: Synthetic oligonucleotide
  Target: LAMA2; (+) strand; PAM type: NRG; PAM sequence: GAG
tactcgggaggctgaggcag

SEQ ID NO: 186893 - DNA, 20 bp, Artificial Sequence
  Description of Artificial Sequence: Synthetic oligonucleotide
  Target: LAMA2; (+) strand; PAM type: NRG; PAM sequence: AAG
caggagaatcgcttgaaccc

SEQ ID NO: 186894 - DNA, 20 bp, Artificial Sequence
  Description of Artificial Sequence: Synthetic oligonucleotide
  Target: LAMA2; (+) strand; PAM type: NRG; PAM sequence: GAG
ggagaatcgcttgaacccaa

SEQ ID NO: 186895 - DNA, 20 bp, Artificial Sequence
  Description of Artificial Sequence: Synthetic oligonucleotide
  Target: LAMA2; (+) strand; PAM type: NRG; PAM sequence: AGG
gagaatcgcttgaacccaag

SEQ ID NO: 186896 - DNA, 20 bp, Artificial Sequence
  Description of Artificial Sequence: Synthetic oligonucleotide
  Target: LAMA2; (+) strand; PAM type: NRG; PAM sequence: CGG
aatcgcttgaacccaagagg

SEQ ID NO: 186897 - DNA, 20 bp, Artificial Sequence
  Description of Artificial Sequence: Synthetic oligonucleotide
  Target: LAMA2; (+) strand; PAM type: NRG; PAM sequence: GAG
tcgcttgaacccaagaggcg

SEQ ID NO: 186898 - DNA, 20 bp, Artificial Sequence
  Description of Artificial Sequence: Synthetic oligonucleotide
  Target: LAMA2; (+) strand; PAM type: NRG; PAM sequence: AGG
cgcttgaacccaagaggcgg

SEQ ID NO: 186899 - DNA, 20 bp, Artificial Sequence
  Description of Artificial Sequence: Synthetic oligonucleotide
  Target: LAMA2; (+) strand; PAM type: NRG; PAM sequence: CAG
aacccaagaggcggaggttg

SEQ ID NO: 186900 - DNA, 20 bp, Artificial Sequence
  Description of Artificial Sequence: Synthetic oligonucleotide
  Target: LAMA2; (+) strand; PAM type: NRG; PAM sequence: GAG
caagaggcggaggttgcagt

SEQ ID NO: 186901 - DNA, 20 bp, Artificial Sequence
  Description of Artificial Sequence: Synthetic oligonucleotide
  Target: LAMA2; (+) strand; PAM type: NRG; PAM sequence: AAG
ggcggaggttgcagtgagcc

SEQ ID NO: 186902 - DNA, 20 bp, Artificial Sequence
  Description of Artificial Sequence: Synthetic oligonucleotide
  Target: LAMA2; (+) strand; PAM type: NRG; PAM sequence: CAG
aagatcgtgccactgcactc

SEQ ID NO: 186903 - DNA, 20 bp, Artificial Sequence
  Description of Artificial Sequence: Synthetic oligonucleotide
  Target: LAMA2; (+) strand; PAM type: NRG; PAM sequence: TGG
cgtgccactgcactccagcc

SEQ ID NO: 186904 - DNA, 20 bp, Artificial Sequence
  Description of Artificial Sequence: Synthetic oligonucleotide
  Target: LAMA2; (+) strand; PAM type: NRG; PAM sequence: GGG
gtgccactgcactccagcct

SEQ ID NO: 186905 - DNA, 20 bp, Artificial Sequence
  Description of Artificial Sequence: Synthetic oligonucleotide
  Target: LAMA2; (+) strand; PAM type: NRG; PAM sequence: CAG
ctgcactccagcctgggcga

SEQ ID NO: 186906 - DNA, 20 bp, Artificial Sequence
  Description of Artificial Sequence: Synthetic oligonucleotide
  Target: LAMA2; (+) strand; PAM type: NRG; PAM sequence: GAG
gcactccagcctgggcgaca

SEQ ID NO: 186907 - DNA, 20 bp, Artificial Sequence
  Description of Artificial Sequence: Synthetic oligonucleotide
  Target: LAMA2; (+) strand; PAM type: NRG; PAM sequence: AAG
taaataaataaataataaat

SEQ ID NO: 186908 - DNA, 20 bp, Artificial Sequence
  Description of Artificial Sequence: Synthetic oligonucleotide
  Target: LAMA2; (+) strand; PAM type: NRG; PAM sequence: AGG
aaataaataaataataaata

SEQ ID NO: 186909 - DNA, 20 bp, Artificial Sequence
  Description of Artificial Sequence: Synthetic oligonucleotide
  Target: LAMA2; (+) strand; PAM type: NRG; PAM sequence: AAG
taaataaggacgttttatga

SEQ ID NO: 186910 - DNA, 20 bp, Artificial Sequence
  Description of Artificial Sequence: Synthetic oligonucleotide
  Target: LAMA2; (+) strand; PAM type: NRG; PAM sequence: AGG
aaataaggacgttttatgaa

SEQ ID NO: 186911 - DNA, 20 bp, Artificial Sequence
  Description of Artificial Sequence: Synthetic oligonucleotide
  Target: LAMA2; (+) strand; PAM type: NRG; PAM sequence: GGG
aataaggacgttttatgaaa

SEQ ID NO: 186912 - DNA, 20 bp, Artificial Sequence
  Description of Artificial Sequence: Synthetic oligonucleotide
  Target: LAMA2; (+) strand; PAM type: NRG; PAM sequence: AAG
ggacgttttatgaaagggaa

SEQ ID NO: 186913 - DNA, 20 bp, Artificial Sequence
  Description of Artificial Sequence: Synthetic oligonucleotide
  Target: LAMA2; (+) strand; PAM type: NRG; PAM sequence: TAG
aaagggaaaagtttcttctc

SEQ ID NO: 186914 - DNA, 20 bp, Artificial Sequence
  Description of Artificial Sequence: Synthetic oligonucleotide
  Target: LAMA2; (+) strand; PAM type: NRG; PAM sequence: TAG
tctgacctcaaaaatcaaat

SEQ ID NO: 186915 - DNA, 20 bp, Artificial Sequence
  Description of Artificial Sequence: Synthetic oligonucleotide
  Target: LAMA2; (+) strand; PAM type: NRG; PAM sequence: AAG
attagttcttatcccaaaac

SEQ ID NO: 186916 - DNA, 20 bp, Artificial Sequence
  Description of Artificial Sequence: Synthetic oligonucleotide
  Target: LAMA2; (+) strand; PAM type: NRG; PAM sequence: CAG
tcctcacctcctgccaccca

SEQ ID NO: 186917 - DNA, 20 bp, Artificial Sequence
  Description of Artificial Sequence: Synthetic oligonucleotide
  Target: LAMA2; (+) strand; PAM type: NRG; PAM sequence: AAG
tgccacccacagcaattatg

SEQ ID NO: 186918 - DNA, 20 bp, Artificial Sequence
  Description of Artificial Sequence: Synthetic oligonucleotide
  Target: LAMA2; (+) strand; PAM type: NRG; PAM sequence: AAG
acccacagcaattatgaaga

SEQ ID NO: 186919 - DNA, 20 bp, Artificial Sequence
  Description of Artificial Sequence: Synthetic oligonucleotide
  Target: LAMA2; (+) strand; PAM type: NRG; PAM sequence: CAG
cacagcaattatgaagaaag

SEQ ID NO: 186920 - DNA, 20 bp, Artificial Sequence
  Description of Artificial Sequence: Synthetic oligonucleotide
  Target: LAMA2; (+) strand; PAM type: NRG; PAM sequence: AAG
agcaattatgaagaaagcag

SEQ ID NO: 186921 - DNA, 20 bp, Artificial Sequence
  Description of Artificial Sequence: Synthetic oligonucleotide
  Target: LAMA2; (+) strand; PAM type: NRG; PAM sequence: CAG
ttccaaacacccactcctac

SEQ ID NO: 186922 - DNA, 20 bp, Artificial Sequence
  Description of Artificial Sequence: Synthetic oligonucleotide
  Target: LAMA2; (+) strand; PAM type: NRG; PAM sequence: AGG
tccaaacacccactcctacc

SEQ ID NO: 186923 - DNA, 20 bp, Artificial Sequence
  Description of Artificial Sequence: Synthetic oligonucleotide
  Target: LAMA2; (+) strand; PAM type: NRG; PAM sequence: CAG
acccactcctaccaggttgt

SEQ ID NO: 186924 - DNA, 20 bp, Artificial Sequence
  Description of Artificial Sequence: Synthetic oligonucleotide
  Target: LAMA2; (+) strand; PAM type: NRG; PAM sequence: AAG
tgtcagccttcttctttaaa

SEQ ID NO: 186925 - DNA, 20 bp, Artificial Sequence
  Description of Artificial Sequence: Synthetic oligonucleotide
  Target: LAMA2; (+) strand; PAM type: NRG; PAM sequence: AGG
gtcagccttcttctttaaaa

SEQ ID NO: 186926 - DNA, 20 bp, Artificial Sequence
  Description of Artificial Sequence: Synthetic oligonucleotide
  Target: LAMA2; (+) strand; PAM type: NRG; PAM sequence: TAG
taaaaaggtgctttgcactt

SEQ ID NO: 186927 - DNA, 20 bp, Artificial Sequence
  Description of Artificial Sequence: Synthetic oligonucleotide
  Target: LAMA2; (+) strand; PAM type: NRG; PAM sequence: AAG
aaaggtgctttgcactttag

SEQ ID NO: 186928 - DNA, 20 bp, Artificial Sequence
  Description of Artificial Sequence: Synthetic oligonucleotide
  Target: LAMA2; (+) strand; PAM type: NRG; PAM sequence: GAG
tttagaagaaaaacatttgt

SEQ ID NO: 186929 - DNA, 20 bp, Artificial Sequence
  Description of Artificial Sequence: Synthetic oligonucleotide
  Target: LAMA2; (+) strand; PAM type: NRG; PAM sequence: AGG
ttagaagaaaaacatttgtg

SEQ ID NO: 186930 - DNA, 20 bp, Artificial Sequence
  Description of Artificial Sequence: Synthetic oligonucleotide
  Target: LAMA2; (+) strand; PAM type: NRG; PAM sequence: GGG
tagaagaaaaacatttgtga

SEQ ID NO: 186931 - DNA, 20 bp, Artificial Sequence
  Description of Artificial Sequence: Synthetic oligonucleotide
  Target: LAMA2; (+) strand; PAM type: NRG; PAM sequence: GGG
agaagaaaaacatttgtgag

SEQ ID NO: 186932 - DNA, 20 bp, Artificial Sequence
  Description of Artificial Sequence: Synthetic oligonucleotide
  Target: LAMA2; (+) strand; PAM type: NRG; PAM sequence: AAG
ttgtgaggggacttttattg

SEQ ID NO: 186933 - DNA, 20 bp, Artificial Sequence
  Description of Artificial Sequence: Synthetic oligonucleotide
  Target: LAMA2; (-) strand; PAM type: YTN; PAM sequence: TTT
gggtttcttttttttttttt

SEQ ID NO: 186934 - DNA, 20 bp, Artificial Sequence
  Description of Artificial Sequence: Synthetic oligonucleotide
  Target: LAMA2; (-) strand; PAM type: YTN; PAM sequence: TTT
tgggtttctttttttttttt

SEQ ID NO: 186935 - DNA, 20 bp, Artificial Sequence
  Description of Artificial Sequence: Synthetic oligonucleotide
  Target: LAMA2; (-) strand; PAM type: YTN; PAM sequence: CTT
ttgggtttcttttttttttt

SEQ ID NO: 186936 - DNA, 20 bp, Artificial Sequence
  Description of Artificial Sequence: Synthetic oligonucleotide
  Target: LAMA2; (-) strand; PAM type: YTN; PAM sequence: TTG
aatgtacatgtcttttgggt

SEQ ID NO: 186937 - DNA, 20 bp, Artificial Sequence
  Description of Artificial Sequence: Synthetic oligonucleotide
  Target: LAMA2; (-) strand; PAM type: YTN; PAM sequence: TTT
gaatgtacatgtcttttggg

SEQ ID NO: 186938 - DNA, 20 bp, Artificial Sequence
  Description of Artificial Sequence: Synthetic oligonucleotide
  Target: LAMA2; (-) strand; PAM type: YTN; PAM sequence: TTT
tgaatgtacatgtcttttgg

SEQ ID NO: 186939 - DNA, 20 bp, Artificial Sequence
  Description of Artificial Sequence: Synthetic oligonucleotide
  Target: LAMA2; (-) strand; PAM type: YTN; PAM sequence: TTA
tagttttgaatgtacatgtc

SEQ ID NO: 186940 - DNA, 20 bp, Artificial Sequence
  Description of Artificial Sequence: Synthetic oligonucleotide
  Target: LAMA2; (-) strand; PAM type: YTN; PAM sequence: CTT
atagttttgaatgtacatgt

SEQ ID NO: 186941 - DNA, 20 bp, Artificial Sequence
  Description of Artificial Sequence: Synthetic oligonucleotide
  Target: LAMA2; (-) strand; PAM type: YTN; PAM sequence: CTA
agcagtgccttatagttttg

SEQ ID NO: 186942 - DNA, 20 bp, Artificial Sequence
  Description of Artificial Sequence: Synthetic oligonucleotide
  Target: LAMA2; (-) strand; PAM type: YTN; PAM sequence: TTC
taagcagtgccttatagttt

SEQ ID NO: 186943 - DNA, 20 bp, Artificial Sequence
  Description of Artificial Sequence: Synthetic oligonucleotide
  Target: LAMA2; (-) strand; PAM type: YTN; PAM sequence: TTA
atattctaagcagtgcctta

SEQ ID NO: 186944 - DNA, 20 bp, Artificial Sequence
  Description of Artificial Sequence: Synthetic oligonucleotide
  Target: LAMA2; (-) strand; PAM type: YTN; PAM sequence: TTT
aatattctaagcagtgcctt

SEQ ID NO: 186945 - DNA, 20 bp, Artificial Sequence
  Description of Artificial Sequence: Synthetic oligonucleotide
  Target: LAMA2; (-) strand; PAM type: YTN; PAM sequence: TTA
catgtttaatattctaagca

SEQ ID NO: 186946 - DNA, 20 bp, Artificial Sequence
  Description of Artificial Sequence: Synthetic oligonucleotide
  Target: LAMA2; (-) strand; PAM type: YTN; PAM sequence: TTT
acatgtttaatattctaagc

SEQ ID NO: 186947 - DNA, 20 bp, Artificial Sequence
  Description of Artificial Sequence: Synthetic oligonucleotide
  Target: LAMA2; (-) strand; PAM type: YTN; PAM sequence: TTA
tttacatgtttaatattcta

SEQ ID NO: 186948 - DNA, 20 bp, Artificial Sequence
  Description of Artificial Sequence: Synthetic oligonucleotide
  Target: LAMA2; (-) strand; PAM type: YTN; PAM sequence: TTT
atttacatgtttaatattct

SEQ ID NO: 186949 - DNA, 20 bp, Artificial Sequence
  Description of Artificial Sequence: Synthetic oligonucleotide
  Target: LAMA2; (-) strand; PAM type: YTN; PAM sequence: TTC
atttatttacatgtttaata

SEQ ID NO: 186950 - DNA, 20 bp, Artificial Sequence
  Description of Artificial Sequence: Synthetic oligonucleotide
  Target: LAMA2; (-) strand; PAM type: YTN; PAM sequence: CTT
catttatttacatgtttaat

SEQ ID NO: 186951 - DNA, 20 bp, Artificial Sequence
  Description of Artificial Sequence: Synthetic oligonucleotide
  Target: LAMA2; (-) strand; PAM type: YTN; PAM sequence: TTC
acaaatatagcccgtcttca

SEQ ID NO: 186952 - DNA, 20 bp, Artificial Sequence
  Description of Artificial Sequence: Synthetic oligonucleotide
  Target: LAMA2; (-) strand; PAM type: YTN; PAM sequence: TTC
cattcacaaatatagcccgt

SEQ ID NO: 186953 - DNA, 20 bp, Artificial Sequence
  Description of Artificial Sequence: Synthetic oligonucleotide
  Target: LAMA2; (-) strand; PAM type: YTN; PAM sequence: CTT
ccattcacaaatatagcccg

SEQ ID NO: 186954 - DNA, 20 bp, Artificial Sequence
  Description of Artificial Sequence: Synthetic oligonucleotide
  Target: LAMA2; (-) strand; PAM type: YTN; PAM sequence: TTA
gacttccattcacaaatata

SEQ ID NO: 186955 - DNA, 20 bp, Artificial Sequence
  Description of Artificial Sequence: Synthetic oligonucleotide
  Target: LAMA2; (-) strand; PAM type: YTN; PAM sequence: TTT
agacttccattcacaaatat

SEQ ID NO: 186956 - DNA, 20 bp, Artificial Sequence
  Description of Artificial Sequence: Synthetic oligonucleotide
  Target: LAMA2; (-) strand; PAM type: YTN; PAM sequence: TTA
gcaatatttagacttccatt

SEQ ID NO: 186957 - DNA, 20 bp, Artificial Sequence
  Description of Artificial Sequence: Synthetic oligonucleotide
  Target: LAMA2; (-) strand; PAM type: YTN; PAM sequence: CTT
agcaatatttagacttccat

SEQ ID NO: 186958 - DNA, 20 bp, Artificial Sequence
  Description of Artificial Sequence: Synthetic oligonucleotide
  Target: LAMA2; (-) strand; PAM type: YTN; PAM sequence: TTG
atatcttagcaatatttaga

SEQ ID NO: 186959 - DNA, 20 bp, Artificial Sequence
  Description of Artificial Sequence: Synthetic oligonucleotide
  Target: LAMA2; (-) strand; PAM type: YTN; PAM sequence: TTG
tgggataattgatatcttag

SEQ ID NO: 186960 - DNA, 20 bp, Artificial Sequence
  Description of Artificial Sequence: Synthetic oligonucleotide
  Target: LAMA2; (-) strand; PAM type: YTN; PAM sequence: CTA
cagataaattgtgggataat

SEQ ID NO: 186961 - DNA, 20 bp, Artificial Sequence
  Description of Artificial Sequence: Synthetic oligonucleotide
  Target: LAMA2; (-) strand; PAM type: YTN; PAM sequence: TTG
gacctacagataaattgtgg

SEQ ID NO: 186962 - DNA, 20 bp, Artificial Sequence
  Description of Artificial Sequence: Synthetic oligonucleotide
  Target: LAMA2; (-) strand; PAM type: YTN; PAM sequence: TTG
taatgaggttggacctacag

SEQ ID NO: 186963 - DNA, 20 bp, Artificial Sequence
  Description of Artificial Sequence: Synthetic oligonucleotide
  Target: LAMA2; (-) strand; PAM type: YTN; PAM sequence: CTA
cccaaaaaaggagagtaggg

SEQ ID NO: 186964 - DNA, 20 bp, Artificial Sequence
  Description of Artificial Sequence: Synthetic oligonucleotide
  Target: LAMA2; (-) strand; PAM type: YTN; PAM sequence: TTC
tacccaaaaaaggagagtag

SEQ ID NO: 186965 - DNA, 20 bp, Artificial Sequence
  Description of Artificial Sequence: Synthetic oligonucleotide
  Target: LAMA2; (-) strand; PAM type: YTN; PAM sequence: TTT
ctacccaaaaaaggagagta

SEQ ID NO: 186966 - DNA, 20 bp, Artificial Sequence
  Description of Artificial Sequence: Synthetic oligonucleotide
  Target: LAMA2; (-) strand; PAM type: YTN; PAM sequence: TTA
atttctacccaaaaaaggag

SEQ ID NO: 186967 - DNA, 20 bp, Artificial Sequence
  Description of Artificial Sequence: Synthetic oligonucleotide
  Target: LAMA2; (-) strand; PAM type: YTN; PAM sequence: TTA
ttaatttctacccaaaaaag

SEQ ID NO: 186968 - DNA, 20 bp, Artificial Sequence
  Description of Artificial Sequence: Synthetic oligonucleotide
  Target: LAMA2; (-) strand; PAM type: YTN; PAM sequence: CTT
attaatttctacccaaaaaa

SEQ ID NO: 186969 - DNA, 20 bp, Artificial Sequence
  Description of Artificial Sequence: Synthetic oligonucleotide
  Target: LAMA2; (-) strand; PAM type: YTN; PAM sequence: TTA
aatatcagcttattaatttc

SEQ ID NO: 186970 - DNA, 20 bp, Artificial Sequence
  Description of Artificial Sequence: Synthetic oligonucleotide
  Target: LAMA2; (-) strand; PAM type: YTN; PAM sequence: TTT
aaatatcagcttattaattt

SEQ ID NO: 186971 - DNA, 20 bp, Artificial Sequence
  Description of Artificial Sequence: Synthetic oligonucleotide
  Target: LAMA2; (-) strand; PAM type: YTN; PAM sequence: TTT
taaatatcagcttattaatt

SEQ ID NO: 186972 - DNA, 20 bp, Artificial Sequence
  Description of Artificial Sequence: Synthetic oligonucleotide
  Target: LAMA2; (-) strand; PAM type: YTN; PAM sequence: TTA
agtccatataattttaaata

SEQ ID NO: 186973 - DNA, 20 bp, Artificial Sequence
  Description of Artificial Sequence: Synthetic oligonucleotide
  Target: LAMA2; (-) strand; PAM type: YTN; PAM sequence: CTT
aagtccatataattttaaat

SEQ ID NO: 186974 - DNA, 20 bp, Artificial Sequence
  Description of Artificial Sequence: Synthetic oligonucleotide
  Target: LAMA2; (-) strand; PAM type: YTN; PAM sequence: TTC
ttaagtccatataattttaa

SEQ ID NO: 186975 - DNA, 20 bp, Artificial Sequence
  Description of Artificial Sequence: Synthetic oligonucleotide
  Target: LAMA2; (-) strand; PAM type: YTN; PAM sequence: TTT
cttaagtccatataatttta

SEQ ID NO: 186976 - DNA, 20 bp, Artificial Sequence
  Description of Artificial Sequence: Synthetic oligonucleotide
  Target: LAMA2; (-) strand; PAM type: YTN; PAM sequence: TTT
tcttaagtccatataatttt

SEQ ID NO: 186977 - DNA, 20 bp, Artificial Sequence
  Description of Artificial Sequence: Synthetic oligonucleotide
  Target: LAMA2; (-) strand; PAM type: YTN; PAM sequence: TTA
gttttcttaagtccatataa

SEQ ID NO: 186978 - DNA, 20 bp, Artificial Sequence
  Description of Artificial Sequence: Synthetic oligonucleotide
  Target: LAMA2; (-) strand; PAM type: YTN; PAM sequence: TTT
agttttcttaagtccatata

SEQ ID NO: 186979 - DNA, 20 bp, Artificial Sequence
  Description of Artificial Sequence: Synthetic oligonucleotide
  Target: LAMA2; (-) strand; PAM type: YTN; PAM sequence: CTG
gatcatatggtaagaatatg

SEQ ID NO: 186980 - DNA, 20 bp, Artificial Sequence
  Description of Artificial Sequence: Synthetic oligonucleotide
  Target: LAMA2; (-) strand; PAM type: YTN; PAM sequence: TTG
cctggatcatatggtaagaa

SEQ ID NO: 186981 - DNA, 20 bp, Artificial Sequence
  Description of Artificial Sequence: Synthetic oligonucleotide
  Target: LAMA2; (-) strand; PAM type: YTN; PAM sequence: TTG
agtaaatacccagaagcaca

SEQ ID NO: 186982 - DNA, 20 bp, Artificial Sequence
  Description of Artificial Sequence: Synthetic oligonucleotide
  Target: LAMA2; (-) strand; PAM type: YTN; PAM sequence: TTT
gagtaaatacccagaagcac

SEQ ID NO: 186983 - DNA, 20 bp, Artificial Sequence
  Description of Artificial Sequence: Synthetic oligonucleotide
  Target: LAMA2; (-) strand; PAM type: YTN; PAM sequence: CTT
tgagtaaatacccagaagca

SEQ ID NO: 186984 - DNA, 20 bp, Artificial Sequence
  Description of Artificial Sequence: Synthetic oligonucleotide
  Target: LAMA2; (-) strand; PAM type: YTN; PAM sequence: CTC
ctttgagtaaatacccagaa

SEQ ID NO: 186985 - DNA, 20 bp, Artificial Sequence
  Description of Artificial Sequence: Synthetic oligonucleotide
  Target: LAMA2; (-) strand; PAM type: YTN; PAM sequence: TTC
caactcctttgagtaaatac

SEQ ID NO: 186986 - DNA, 20 bp, Artificial Sequence
  Description of Artificial Sequence: Synthetic oligonucleotide
  Target: LAMA2; (-) strand; PAM type: YTN; PAM sequence: TTT
ccaactcctttgagtaaata

SEQ ID NO: 186987 - DNA, 20 bp, Artificial Sequence
  Description of Artificial Sequence: Synthetic oligonucleotide
  Target: LAMA2; (-) strand; PAM type: YTN; PAM sequence: TTG
tgtggacacaagtttccaac

SEQ ID NO: 186988 - DNA, 20 bp, Artificial Sequence
  Description of Artificial Sequence: Synthetic oligonucleotide
  Target: LAMA2; (-) strand; PAM type: YTN; PAM sequence: TTT
gtgtggacacaagtttccaa

SEQ ID NO: 186989 - DNA, 20 bp, Artificial Sequence
  Description of Artificial Sequence: Synthetic oligonucleotide
  Target: LAMA2; (-) strand; PAM type: YTN; PAM sequence: TTT
tgtgtggacacaagtttcca

SEQ ID NO: 186990 - DNA, 20 bp, Artificial Sequence
  Description of Artificial Sequence: Synthetic oligonucleotide
  Target: LAMA2; (-) strand; PAM type: YTN; PAM sequence: TTT
ttgtgtggacacaagtttcc

SEQ ID NO: 186991 - DNA, 20 bp, Artificial Sequence
  Description of Artificial Sequence: Synthetic oligonucleotide
  Target: LAMA2; (-) strand; PAM type: YTN; PAM sequence: TTC
acatgtgaaggtttttgtgt

SEQ ID NO: 186992 - DNA, 20 bp, Artificial Sequence
  Description of Artificial Sequence: Synthetic oligonucleotide
  Target: LAMA2; (-) strand; PAM type: YTN; PAM sequence: TTT
cacatgtgaaggtttttgtg

SEQ ID NO: 186993 - DNA, 20 bp, Artificial Sequence
  Description of Artificial Sequence: Synthetic oligonucleotide
  Target: LAMA2; (-) strand; PAM type: YTN; PAM sequence: CTC
atatttcacatgtgaaggtt

SEQ ID NO: 186994 - DNA, 20 bp, Artificial Sequence
  Description of Artificial Sequence: Synthetic oligonucleotide
  Target: LAMA2; (-) strand; PAM type: YTN; PAM sequence: TTC
tcatatttcacatgtgaagg

SEQ ID NO: 186995 - DNA, 20 bp, Artificial Sequence
  Description of Artificial Sequence: Synthetic oligonucleotide
  Target: LAMA2; (-) strand; PAM type: YTN; PAM sequence: CTA
ttctcatatttcacatgtga

SEQ ID NO: 186996 - DNA, 20 bp, Artificial Sequence
  Description of Artificial Sequence: Synthetic oligonucleotide
  Target: LAMA2; (-) strand; PAM type: YTN; PAM sequence: TTA
taactattctcatatttcac

SEQ ID NO: 186997 - DNA, 20 bp, Artificial Sequence
  Description of Artificial Sequence: Synthetic oligonucleotide
  Target: LAMA2; (-) strand; PAM type: YTN; PAM sequence: CTA
tagattataactattctcat

SEQ ID NO: 186998 - DNA, 20 bp, Artificial Sequence
  Description of Artificial Sequence: Synthetic oligonucleotide
  Target: LAMA2; (-) strand; PAM type: YTN; PAM sequence: TTG
tcactatagattataactat

SEQ ID NO: 186999 - DNA, 20 bp, Artificial Sequence
  Description of Artificial Sequence: Synthetic oligonucleotide
  Target: LAMA2; (-) strand; PAM type: YTN; PAM sequence: TTT
gtcactatagattataacta

SEQ ID NO: 187000 - DNA, 20 bp, Artificial Sequence
  Description of Artificial Sequence: Synthetic oligonucleotide
  Target: LAMA2; (-) strand; PAM type: YTN; PAM sequence: TTT
tgtcactatagattataact

SEQ ID NO: 187001 - DNA, 20 bp, Artificial Sequence
  Description of Artificial Sequence: Synthetic oligonucleotide
  Target: LAMA2; (-) strand; PAM type: YTN; PAM sequence: CTA
attttgtcactatagattat

SEQ ID NO: 187002 - DNA, 20 bp, Artificial Sequence
  Description of Artificial Sequence: Synthetic oligonucleotide
  Target: LAMA2; (-) strand; PAM type: YTN; PAM sequence: CTG
atctaattttgtcactatag

SEQ ID NO: 187003 - DNA, 20 bp, Artificial Sequence
  Description of Artificial Sequence: Synthetic oligonucleotide
  Target: LAMA2; (-) strand; PAM type: YTN; PAM sequence: CTG
ctgatctaattttgtcacta

SEQ ID NO: 187004 - DNA, 20 bp, Artificial Sequence
  Description of Artificial Sequence: Synthetic oligonucleotide
  Target: LAMA2; (-) strand; PAM type: YTN; PAM sequence: TTC
ccagaaaaaggcaactgctg

SEQ ID NO: 187005 - DNA, 20 bp, Artificial Sequence
  Description of Artificial Sequence: Synthetic oligonucleotide
  Target: LAMA2; (-) strand; PAM type: YTN; PAM sequence: CTC
cattcccagaaaaaggcaac

SEQ ID NO: 187006 - DNA, 20 bp, Artificial Sequence
  Description of Artificial Sequence: Synthetic oligonucleotide
  Target: LAMA2; (-) strand; PAM type: YTN; PAM sequence: TTG
caataaatcccccaacctcc

SEQ ID NO: 187007 - DNA, 20 bp, Artificial Sequence
  Description of Artificial Sequence: Synthetic oligonucleotide
  Target: LAMA2; (-) strand; PAM type: YTN; PAM sequence: TTT
gcaataaatcccccaacctc

SEQ ID NO: 187008 - DNA, 20 bp, Artificial Sequence
  Description of Artificial Sequence: Synthetic oligonucleotide
  Target: LAMA2; (-) strand; PAM type: YTN; PAM sequence: TTT
tgcaataaatcccccaacct

SEQ ID NO: 187009 - DNA, 20 bp, Artificial Sequence
  Description of Artificial Sequence: Synthetic oligonucleotide
  Target: LAMA2; (-) strand; PAM type: YTN; PAM sequence: CTT
ttgcaataaatcccccaacc

SEQ ID NO: 187010 - DNA, 20 bp, Artificial Sequence
  Description of Artificial Sequence: Synthetic oligonucleotide
  Target: LAMA2; (-) strand; PAM type: YTN; PAM sequence: CTG
accttttgcaataaatcccc

SEQ ID NO: 187011 - DNA, 20 bp, Artificial Sequence
  Description of Artificial Sequence: Synthetic oligonucleotide
  Target: LAMA2; (-) strand; PAM type: YTN; PAM sequence: CTA
tcagcatctgaccttttgca

SEQ ID NO: 187012 - DNA, 20 bp, Artificial Sequence
  Description of Artificial Sequence: Synthetic oligonucleotide
  Target: LAMA2; (-) strand; PAM type: YTN; PAM sequence: CTG
ctatcagcatctgacctttt

SEQ ID NO: 187013 - DNA, 20 bp, Artificial Sequence
  Description of Artificial Sequence: Synthetic oligonucleotide
  Target: LAMA2; (-) strand; PAM type: YTN; PAM sequence: TTG
atacaactgctatcagcatc

SEQ ID NO: 187014 - DNA, 20 bp, Artificial Sequence
  Description of Artificial Sequence: Synthetic oligonucleotide
  Target: LAMA2; (-) strand; PAM type: YTN; PAM sequence: TTA
ttgatacaactgctatcagc

SEQ ID NO: 187015 - DNA, 20 bp, Artificial Sequence
  Description of Artificial Sequence: Synthetic oligonucleotide
  Target: LAMA2; (-) strand; PAM type: YTN; PAM sequence: TTG
acaattattgatacaactgc

SEQ ID NO: 187016 - DNA, 20 bp, Artificial Sequence
  Description of Artificial Sequence: Synthetic oligonucleotide
  Target: LAMA2; (-) strand; PAM type: YTN; PAM sequence: TTT
gacaattattgatacaactg

SEQ ID NO: 187017 - DNA, 20 bp, Artificial Sequence
  Description of Artificial Sequence: Synthetic oligonucleotide
  Target: LAMA2; (-) strand; PAM type: YTN; PAM sequence: TTT
tgacaattattgatacaact

SEQ ID NO: 187018 - DNA, 20 bp, Artificial Sequence
  Description of Artificial Sequence: Synthetic oligonucleotide
  Target: LAMA2; (-) strand; PAM type: YTN; PAM sequence: TTC
caagttttgacaattattga

SEQ ID NO: 187019 - DNA, 20 bp, Artificial Sequence
  Description of Artificial Sequence: Synthetic oligonucleotide
  Target: LAMA2; (-) strand; PAM type: YTN; PAM sequence: TTG
gttccaagttttgacaatta

SEQ ID NO: 187020 - DNA, 20 bp, Artificial Sequence
  Description of Artificial Sequence: Synthetic oligonucleotide
  Target: LAMA2; (-) strand; PAM type: YTN; PAM sequence: TTG
gttggttccaagttttgaca

SEQ ID NO: 187021 - DNA, 20 bp, Artificial Sequence
  Description of Artificial Sequence: Synthetic oligonucleotide
  Target: LAMA2; (-) strand; PAM type: YTN; PAM sequence: CTT
ggttggttccaagttttgac

SEQ ID NO: 187022 - DNA, 20 bp, Artificial Sequence
  Description of Artificial Sequence: Synthetic oligonucleotide
  Target: LAMA2; (-) strand; PAM type: YTN; PAM sequence: CTA
atgaaaaacaccttggttgg

SEQ ID NO: 187023 - DNA, 20 bp, Artificial Sequence
  Description of Artificial Sequence: Synthetic oligonucleotide
  Target: LAMA2; (-) strand; PAM type: YTN; PAM sequence: TTC
atctaatgaaaaacaccttg

SEQ ID NO: 187024 - DNA, 20 bp, Artificial Sequence
  Description of Artificial Sequence: Synthetic oligonucleotide
  Target: LAMA2; (-) strand; PAM type: YTN; PAM sequence: CTC
atccattcatctaatgaaaa

SEQ ID NO: 187025 - DNA, 20 bp, Artificial Sequence
  Description of Artificial Sequence: Synthetic oligonucleotide
  Target: LAMA2; (-) strand; PAM type: YTN; PAM sequence: TTA
ctcatccattcatctaatga

SEQ ID NO: 187026 - DNA, 20 bp, Artificial Sequence
  Description of Artificial Sequence: Synthetic oligonucleotide
  Target: LAMA2; (-) strand; PAM type: YTN; PAM sequence: TTT
actcatccattcatctaatg

SEQ ID NO: 187027 - DNA, 20 bp, Artificial Sequence
  Description of Artificial Sequence: Synthetic oligonucleotide
  Target: LAMA2; (-) strand; PAM type: YTN; PAM sequence: TTG
aagtaccacagtttactcat

SEQ ID NO: 187028 - DNA, 20 bp, Artificial Sequence
  Description of Artificial Sequence: Synthetic oligonucleotide
  Target: LAMA2; (-) strand; PAM type: YTN; PAM sequence: CTT
gaagtaccacagtttactca

SEQ ID NO: 187029 - DNA, 20 bp, Artificial Sequence
  Description of Artificial Sequence: Synthetic oligonucleotide
  Target: LAMA2; (-) strand; PAM type: YTN; PAM sequence: TTA
tcttgaagtaccacagttta

SEQ ID NO: 187030 - DNA, 20 bp, Artificial Sequence
  Description of Artificial Sequence: Synthetic oligonucleotide
  Target: LAMA2; (-) strand; PAM type: YTN; PAM sequence: TTC
gttatcttgaagtaccacag

SEQ ID NO: 187031 - DNA, 20 bp, Artificial Sequence
  Description of Artificial Sequence: Synthetic oligonucleotide
  Target: LAMA2; (-) strand; PAM type: YTN; PAM sequence: TTT
cgttatcttgaagtaccaca

SEQ ID NO: 187032 - DNA, 20 bp, Artificial Sequence
  Description of Artificial Sequence: Synthetic oligonucleotide
  Target: LAMA2; (-) strand; PAM type: YTN; PAM sequence: CTG
aaaaaatatttcgttatctt

SEQ ID NO: 187033 - DNA, 20 bp, Artificial Sequence
  Description of Artificial Sequence: Synthetic oligonucleotide
  Target: LAMA2; (-) strand; PAM type: YTN; PAM sequence: TTA
gcactgaaaaaatatttcgt

SEQ ID NO: 187034 - DNA, 20 bp, Artificial Sequence
  Description of Artificial Sequence: Synthetic oligonucleotide
  Target: LAMA2; (-) strand; PAM type: YTN; PAM sequence: TTT
agcactgaaaaaatatttcg

SEQ ID NO: 187035 - DNA, 20 bp, Artificial Sequence
  Description of Artificial Sequence: Synthetic oligonucleotide
  Target: LAMA2; (-) strand; PAM type: YTN; PAM sequence: TTT
tagcactgaaaaaatatttc

SEQ ID NO: 187036 - DNA, 20 bp, Artificial Sequence
  Description of Artificial Sequence: Synthetic oligonucleotide
  Target: LAMA2; (-) strand; PAM type: YTN; PAM sequence: TTT
ttagcactgaaaaaatattt

SEQ ID NO: 187037 - DNA, 20 bp, Artificial Sequence
  Description of Artificial Sequence: Synthetic oligonucleotide
  Target: LAMA2; (-) strand; PAM type: YTN; PAM sequence: CTT
tttagcactgaaaaaatatt

SEQ ID NO: 187038 - DNA, 20 bp, Artificial Sequence
  Description of Artificial Sequence: Synthetic oligonucleotide
  Target: LAMA2; (-) strand; PAM type: YTN; PAM sequence: TTC
tttttagcactgaaaaaata

SEQ ID NO: 187039 - DNA, 20 bp, Artificial Sequence
  Description of Artificial Sequence: Synthetic oligonucleotide
  Target: LAMA2; (-) strand; PAM type: YTN; PAM sequence: TTT
ctttttagcactgaaaaaat

SEQ ID NO: 187040 - DNA, 20 bp, Artificial Sequence
  Description of Artificial Sequence: Synthetic oligonucleotide
  Target: LAMA2; (-) strand; PAM type: YTN; PAM sequence: CTC
atttctttttagcactgaaa

SEQ ID NO: 187041 - DNA, 20 bp, Artificial Sequence
  Description of Artificial Sequence: Synthetic oligonucleotide
  Target: LAMA2; (-) strand; PAM type: YTN; PAM sequence: TTG
atagctcatttctttttagc

SEQ ID NO: 187042 - DNA, 20 bp, Artificial Sequence
  Description of Artificial Sequence: Synthetic oligonucleotide
  Target: LAMA2; (-) strand; PAM type: YTN; PAM sequence: CTT
gatagctcatttctttttag

SEQ ID NO: 187043 - DNA, 20 bp, Artificial Sequence
  Description of Artificial Sequence: Synthetic oligonucleotide
  Target: LAMA2; (-) strand; PAM type: YTN; PAM sequence: TTC
atggcttgatagctcatttc

SEQ ID NO: 187044 - DNA, 20 bp, Artificial Sequence
  Description of Artificial Sequence: Synthetic oligonucleotide
  Target: LAMA2; (-) strand; PAM type: YTN; PAM sequence: TTT
catggcttgatagctcattt

SEQ ID NO: 187045 - DNA, 20 bp, Artificial Sequence
  Description of Artificial Sequence: Synthetic oligonucleotide
  Target: LAMA2; (-) strand; PAM type: YTN; PAM sequence: TTT
tcatggcttgatagctcatt

SEQ ID NO: 187046 - DNA, 20 bp, Artificial Sequence
  Description of Artificial Sequence: Synthetic oligonucleotide
  Target: LAMA2; (-) strand; PAM type: YTN; PAM sequence: CTT
ttcatggcttgatagctcat

SEQ ID NO: 187047 - DNA, 20 bp, Artificial Sequence
  Description of Artificial Sequence: Synthetic oligonucleotide
  Target: LAMA2; (-) strand; PAM type: YTN; PAM sequence: CTC
ttttcatggcttgatagctc

SEQ ID NO: 187048 - DNA, 20 bp, Artificial Sequence
  Description of Artificial Sequence: Synthetic oligonucleotide
  Target: LAMA2; (-) strand; PAM type: YTN; PAM sequence: TTC
ctcttttcatggcttgatag

SEQ ID NO: 187049 - DNA, 20 bp, Artificial Sequence
  Description of Artificial Sequence: Synthetic oligonucleotide
  Target: LAMA2; (-) strand; PAM type: YTN; PAM sequence: TTT
cctcttttcatggcttgata

SEQ ID NO: 187050 - DNA, 20 bp, Artificial Sequence
  Description of Artificial Sequence: Synthetic oligonucleotide
  Target: LAMA2; (-) strand; PAM type: YTN; PAM sequence: TTA
agtttcctcttttcatggct

SEQ ID NO: 187051 - DNA, 20 bp, Artificial Sequence
  Description of Artificial Sequence: Synthetic oligonucleotide
  Target: LAMA2; (-) strand; PAM type: YTN; PAM sequence: TTT
aagtttcctcttttcatggc

SEQ ID NO: 187052 - DNA, 20 bp, Artificial Sequence
  Description of Artificial Sequence: Synthetic oligonucleotide
  Target: LAMA2; (-) strand; PAM type: YTN; PAM sequence: TTA
gtaatatgcatttaagtttc

SEQ ID NO: 187053 - DNA, 20 bp, Artificial Sequence
  Description of Artificial Sequence: Synthetic oligonucleotide
  Target: LAMA2; (-) strand; PAM type: YTN; PAM sequence: CTT
agtaatatgcatttaagttt

SEQ ID NO: 187054 - DNA, 20 bp, Artificial Sequence
  Description of Artificial Sequence: Synthetic oligonucleotide
  Target: LAMA2; (-) strand; PAM type: YTN; PAM sequence: TTC
acttagtaatatgcatttaa

SEQ ID NO: 187055 - DNA, 20 bp, Artificial Sequence
  Description of Artificial Sequence: Synthetic oligonucleotide
  Target: LAMA2; (-) strand; PAM type: YTN; PAM sequence: TTT
cacttagtaatatgcattta

SEQ ID NO: 187056 - DNA, 20 bp, Artificial Sequence
  Description of Artificial Sequence: Synthetic oligonucleotide
  Target: LAMA2; (-) strand; PAM type: YTN; PAM sequence: CTT
tcacttagtaatatgcattt

SEQ ID NO: 187057 - DNA, 20 bp, Artificial Sequence
  Description of Artificial Sequence: Synthetic oligonucleotide
  Target: LAMA2; (-) strand; PAM type: YTN; PAM sequence: TTC
tttcacttagtaatatgcat

SEQ ID NO: 187058 - DNA, 20 bp, Artificial Sequence
  Description of Artificial Sequence: Synthetic oligonucleotide
  Target: LAMA2; (-) strand; PAM type: YTN; PAM sequence: TTT
ctttcacttagtaatatgca

SEQ ID NO: 187059 - DNA, 20 bp, Artificial Sequence
  Description of Artificial Sequence: Synthetic oligonucleotide
  Target: LAMA2; (-) strand; PAM type: YTN; PAM sequence: TTC
agataagtttctttcactta

SEQ ID NO: 187060 - DNA, 20 bp, Artificial Sequence
  Description of Artificial Sequence: Synthetic oligonucleotide
  Target: LAMA2; (-) strand; PAM type: YTN; PAM sequence: TTT
cagataagtttctttcactt

SEQ ID NO: 187061 - DNA, 20 bp, Artificial Sequence
  Description of Artificial Sequence: Synthetic oligonucleotide
  Target: LAMA2; (-) strand; PAM type: YTN; PAM sequence: CTT
tcagataagtttctttcact

SEQ ID NO: 187062 - DNA, 20 bp, Artificial Sequence
  Description of Artificial Sequence: Synthetic oligonucleotide
  Target: LAMA2; (-) strand; PAM type: YTN; PAM sequence: TTG
gaatcatacaatatatagcc

SEQ ID NO: 187063 - DNA, 20 bp, Artificial Sequence
  Description of Artificial Sequence: Synthetic oligonucleotide
  Target: LAMA2; (-) strand; PAM type: YTN; PAM sequence: TTT
ggaatcatacaatatatagc

SEQ ID NO: 187064 - DNA, 20 bp, Artificial Sequence
  Description of Artificial Sequence: Synthetic oligonucleotide
  Target: LAMA2; (-) strand; PAM type: YTN; PAM sequence: TTC
caaaaggtcatatatttgga

SEQ ID NO: 187065 - DNA, 20 bp, Artificial Sequence
  Description of Artificial Sequence: Synthetic oligonucleotide
  Target: LAMA2; (-) strand; PAM type: YTN; PAM sequence: TTT
ccaaaaggtcatatatttgg

SEQ ID NO: 187066 - DNA, 20 bp, Artificial Sequence
  Description of Artificial Sequence: Synthetic oligonucleotide
  Target: LAMA2; (-) strand; PAM type: YTN; PAM sequence: TTT
tccaaaaggtcatatatttg

SEQ ID NO: 187067 - DNA, 20 bp, Artificial Sequence
  Description of Artificial Sequence: Synthetic oligonucleotide
  Target: LAMA2; (-) strand; PAM type: YTN; PAM sequence: CTT
ttccaaaaggtcatatattt

SEQ ID NO: 187068 - DNA, 20 bp, Artificial Sequence
  Description of Artificial Sequence: Synthetic oligonucleotide
  Target: LAMA2; (-) strand; PAM type: YTN; PAM sequence: TTA
ccttttccaaaaggtcatat

SEQ ID NO: 187069 - DNA, 20 bp, Artificial Sequence
  Description of Artificial Sequence: Synthetic oligonucleotide
  Target: LAMA2; (-) strand; PAM type: YTN; PAM sequence: TTT
accttttccaaaaggtcata

SEQ ID NO: 187070 - DNA, 20 bp, Artificial Sequence
  Description of Artificial Sequence: Synthetic oligonucleotide
  Target: LAMA2; (-) strand; PAM type: YTN; PAM sequence: TTT
taccttttccaaaaggtcat

SEQ ID NO: 187071 - DNA, 20 bp, Artificial Sequence
  Description of Artificial Sequence: Synthetic oligonucleotide
  Target: LAMA2; (-) strand; PAM type: YTN; PAM sequence: TTA
gttttaccttttccaaaagg

SEQ ID NO: 187072 - DNA, 20 bp, Artificial Sequence
  Description of Artificial Sequence: Synthetic oligonucleotide
  Target: LAMA2; (-) strand; PAM type: YTN; PAM sequence: CTT
agttttaccttttccaaaag

SEQ ID NO: 187073 - DNA, 20 bp, Artificial Sequence
  Description of Artificial Sequence: Synthetic oligonucleotide
  Target: LAMA2; (-) strand; PAM type: YTN; PAM sequence: CTG
tccccttagttttacctttt

SEQ ID NO: 187074 - DNA, 20 bp, Artificial Sequence
  Description of Artificial Sequence: Synthetic oligonucleotide
  Target: LAMA2; (-) strand; PAM type: YTN; PAM sequence: TTA
ctgtccccttagttttacct

SEQ ID NO: 187075 - DNA, 20 bp, Artificial Sequence
  Description of Artificial Sequence: Synthetic oligonucleotide
  Target: LAMA2; (-) strand; PAM type: YTN; PAM sequence: TTT
actgtccccttagttttacc

SEQ ID NO: 187076 - DNA, 20 bp, Artificial Sequence
  Description of Artificial Sequence: Synthetic oligonucleotide
  Target: LAMA2; (-) strand; PAM type: YTN; PAM sequence: TTT
tactgtccccttagttttac

SEQ ID NO: 187077 - DNA, 20 bp, Artificial Sequence
  Description of Artificial Sequence: Synthetic oligonucleotide
  Target: LAMA2; (-) strand; PAM type: YTN; PAM sequence: TTT
ttactgtccccttagtttta

SEQ ID NO: 187078 - DNA, 20 bp, Artificial Sequence
  Description of Artificial Sequence: Synthetic oligonucleotide
  Target: LAMA2; (-) strand; PAM type: YTN; PAM sequence: CTT
tttactgtccccttagtttt

SEQ ID NO: 187079 - DNA, 20 bp, Artificial Sequence
  Description of Artificial Sequence: Synthetic oligonucleotide
  Target: LAMA2; (-) strand; PAM type: YTN; PAM sequence: CTG
atctttttactgtcccctta

SEQ ID NO: 187080 - DNA, 20 bp, Artificial Sequence
  Description of Artificial Sequence: Synthetic oligonucleotide
  Target: LAMA2; (-) strand; PAM type: YTN; PAM sequence: CTG
gcaaccactgatctttttac

SEQ ID NO: 187081 - DNA, 20 bp, Artificial Sequence
  Description of Artificial Sequence: Synthetic oligonucleotide
  Target: LAMA2; (-) strand; PAM type: YTN; PAM sequence: CTC
caaacactggcaaccactga

SEQ ID NO: 187082 - DNA, 20 bp, Artificial Sequence
  Description of Artificial Sequence: Synthetic oligonucleotide
  Target: LAMA2; (-) strand; PAM type: YTN; PAM sequence: CTG
tccccacctccaaacactgg

SEQ ID NO: 187083 - DNA, 20 bp, Artificial Sequence
  Description of Artificial Sequence: Synthetic oligonucleotide
  Target: LAMA2; (-) strand; PAM type: YTN; PAM sequence: CTC
cctgtccccacctccaaaca

SEQ ID NO: 187084 - DNA, 20 bp, Artificial Sequence
  Description of Artificial Sequence: Synthetic oligonucleotide
  Target: LAMA2; (-) strand; PAM type: YTN; PAM sequence: CTC
ctccctgtccccacctccaa

SEQ ID NO: 187085 - DNA, 20 bp, Artificial Sequence
  Description of Artificial Sequence: Synthetic oligonucleotide
  Target: LAMA2; (-) strand; PAM type: YTN; PAM sequence: TTC
atgcctcctccctgtcccca

SEQ ID NO: 187086 - DNA, 20 bp, Artificial Sequence
  Description of Artificial Sequence: Synthetic oligonucleotide
  Target: LAMA2; (-) strand; PAM type: YTN; PAM sequence: CTC
cacgtattcatgcctcctcc

SEQ ID NO: 187087 - DNA, 20 bp, Artificial Sequence
  Description of Artificial Sequence: Synthetic oligonucleotide
  Target: LAMA2; (-) strand; PAM type: YTN; PAM sequence: CTG
tgctccacgtattcatgcct

SEQ ID NO: 187088 - DNA, 20 bp, Artificial Sequence
  Description of Artificial Sequence: Synthetic oligonucleotide
  Target: LAMA2; (-) strand; PAM type: YTN; PAM sequence: CTC
tgtgctccacgtattcatgc

SEQ ID NO: 187089 - DNA, 20 bp, Artificial Sequence
  Description of Artificial Sequence: Synthetic oligonucleotide
  Target: LAMA2; (-) strand; PAM type: YTN; PAM sequence: TTC
ctctgtgctccacgtattca

SEQ ID NO: 187090 - DNA, 20 bp, Artificial Sequence
  Description of Artificial Sequence: Synthetic oligonucleotide
  Target: LAMA2; (-) strand; PAM type: YTN; PAM sequence: CTG
agattcctctgtgctccacg

SEQ ID NO: 187091 - DNA, 20 bp, Artificial Sequence
  Description of Artificial Sequence: Synthetic oligonucleotide
  Target: LAMA2; (-) strand; PAM type: YTN; PAM sequence: CTG
ccctgagattcctctgtgct

SEQ ID NO: 187092 - DNA, 20 bp, Artificial Sequence
  Description of Artificial Sequence: Synthetic oligonucleotide
  Target: LAMA2; (-) strand; PAM type: YTN; PAM sequence: TTA
ctgccctgagattcctctgt

SEQ ID NO: 187093 - DNA, 20 bp, Artificial Sequence
  Description of Artificial Sequence: Synthetic oligonucleotide
  Target: LAMA2; (-) strand; PAM type: YTN; PAM sequence: TTT
actgccctgagattcctctg

SEQ ID NO: 187094 - DNA, 20 bp, Artificial Sequence
  Description of Artificial Sequence: Synthetic oligonucleotide
  Target: LAMA2; (-) strand; PAM type: YTN; PAM sequence: TTT
tactgccctgagattcctct

SEQ ID NO: 187095 - DNA, 20 bp, Artificial Sequence
  Description of Artificial Sequence: Synthetic oligonucleotide
  Target: LAMA2; (-) strand; PAM type: YTN; PAM sequence: CTA
tcatatagagtaattttact

SEQ ID NO: 187096 - DNA, 20 bp, Artificial Sequence
  Description of Artificial Sequence: Synthetic oligonucleotide
  Target: LAMA2; (-) strand; PAM type: YTN; PAM sequence: TTA
cactatcatatagagtaatt

SEQ ID NO: 187097 - DNA, 20 bp, Artificial Sequence
  Description of Artificial Sequence: Synthetic oligonucleotide
  Target: LAMA2; (-) strand; PAM type: YTN; PAM sequence: TTA
taatgacatgtatccaacat

SEQ ID NO: 187098 - DNA, 20 bp, Artificial Sequence
  Description of Artificial Sequence: Synthetic oligonucleotide
  Target: LAMA2; (-) strand; PAM type: YTN; PAM sequence: TTT
ataatgacatgtatccaaca

SEQ ID NO: 187099 - DNA, 20 bp, Artificial Sequence
  Description of Artificial Sequence: Synthetic oligonucleotide
  Target: LAMA2; (-) strand; PAM type: YTN; PAM sequence: TTA
aatttataatgacatgtatc

SEQ ID NO: 187100 - DNA, 20 bp, Artificial Sequence
  Description of Artificial Sequence: Synthetic oligonucleotide
  Target: LAMA2; (-) strand; PAM type: YTN; PAM sequence: TTA
cattaaatttataatgacat

SEQ ID NO: 187101 - DNA, 20 bp, Artificial Sequence
  Description of Artificial Sequence: Synthetic oligonucleotide
  Target: LAMA2; (-) strand; PAM type: YTN; PAM sequence: TTA
taattacattaaatttataa

SEQ ID NO: 187102 - DNA, 20 bp, Artificial Sequence
  Description of Artificial Sequence: Synthetic oligonucleotide
  Target: LAMA2; (-) strand; PAM type: YTN; PAM sequence: TTT
ataattacattaaatttata

SEQ ID NO: 187103 - DNA, 20 bp, Artificial Sequence
  Description of Artificial Sequence: Synthetic oligonucleotide
  Target: LAMA2; (-) strand; PAM type: YTN; PAM sequence: TTA
atgtaatttataattacatt

SEQ ID NO: 187104 - DNA, 20 bp, Artificial Sequence
  Description of Artificial Sequence: Synthetic oligonucleotide
  Target: LAMA2; (-) strand; PAM type: YTN; PAM sequence: TTT
aatgtaatttataattacat

SEQ ID NO: 187105 - DNA, 20 bp, Artificial Sequence
  Description of Artificial Sequence: Synthetic oligonucleotide
  Target: LAMA2; (-) strand; PAM type: YTN; PAM sequence: TTT
taatgtaatttataattaca

SEQ ID NO: 187106 - DNA, 20 bp, Artificial Sequence
  Description of Artificial Sequence: Synthetic oligonucleotide
  Target: LAMA2; (-) strand; PAM type: YTN; PAM sequence: TTA
ggttttaatgtaatttataa

SEQ ID NO: 187107 - DNA, 20 bp, Artificial Sequence
  Description of Artificial Sequence: Synthetic oligonucleotide
  Target: LAMA2; (-) strand; PAM type: YTN; PAM sequence: TTA
cattaggttttaatgtaatt

SEQ ID NO: 187108 - DNA, 20 bp, Artificial Sequence
  Description of Artificial Sequence: Synthetic oligonucleotide
  Target: LAMA2; (-) strand; PAM type: YTN; PAM sequence: TTT
acattaggttttaatgtaat

SEQ ID NO: 187109 - DNA, 20 bp, Artificial Sequence
  Description of Artificial Sequence: Synthetic oligonucleotide
  Target: LAMA2; (-) strand; PAM type: YTN; PAM sequence: TTC
atagtttacattaggtttta

SEQ ID NO: 187110 - DNA, 20 bp, Artificial Sequence
  Description of Artificial Sequence: Synthetic oligonucleotide
  Target: LAMA2; (-) strand; PAM type: YTN; PAM sequence: TTT
catagtttacattaggtttt

SEQ ID NO: 187111 - DNA, 20 bp, Artificial Sequence
  Description of Artificial Sequence: Synthetic oligonucleotide
  Target: LAMA2; (-) strand; PAM type: YTN; PAM sequence: CTC
cgatttcatagtttacatta

SEQ ID NO: 187112 - DNA, 20 bp, Artificial Sequence
  Description of Artificial Sequence: Synthetic oligonucleotide
  Target: LAMA2; (-) strand; PAM type: YTN; PAM sequence: TTA
tcactccgatttcatagttt

SEQ ID NO: 187113 - DNA, 20 bp, Artificial Sequence
  Description of Artificial Sequence: Synthetic oligonucleotide
  Target: LAMA2; (-) strand; PAM type: YTN; PAM sequence: TTG
acatatcattatcactccga

SEQ ID NO: 187114 - DNA, 20 bp, Artificial Sequence
  Description of Artificial Sequence: Synthetic oligonucleotide
  Target: LAMA2; (-) strand; PAM type: YTN; PAM sequence: CTA
cattgacatatcattatcac

SEQ ID NO: 187115 - DNA, 20 bp, Artificial Sequence
  Description of Artificial Sequence: Synthetic oligonucleotide
  Target: LAMA2; (-) strand; PAM type: YTN; PAM sequence: CTG
aaaacctacattgacatatc

SEQ ID NO: 187116 - DNA, 20 bp, Artificial Sequence
  Description of Artificial Sequence: Synthetic oligonucleotide
  Target: LAMA2; (-) strand; PAM type: YTN; PAM sequence: TTG
tcacaactgaaaacctacat

SEQ ID NO: 187117 - DNA, 20 bp, Artificial Sequence
  Description of Artificial Sequence: Synthetic oligonucleotide
  Target: LAMA2; (-) strand; PAM type: YTN; PAM sequence: TTT
gtcacaactgaaaacctaca

SEQ ID NO: 187118 - DNA, 20 bp, Artificial Sequence
  Description of Artificial Sequence: Synthetic oligonucleotide
  Target: LAMA2; (-) strand; PAM type: YTN; PAM sequence: TTA
tcaacatgccccatcagagt

SEQ ID NO: 187119 - DNA, 20 bp, Artificial Sequence
  Description of Artificial Sequence: Synthetic oligonucleotide
  Target: LAMA2; (-) strand; PAM type: YTN; PAM sequence: TTT
atcaacatgccccatcagag

SEQ ID NO: 187120 - DNA, 20 bp, Artificial Sequence
  Description of Artificial Sequence: Synthetic oligonucleotide
  Target: LAMA2; (-) strand; PAM type: YTN; PAM sequence: CTT
tatcaacatgccccatcaga

SEQ ID NO: 187121 - DNA, 20 bp, Artificial Sequence
  Description of Artificial Sequence: Synthetic oligonucleotide
  Target: LAMA2; (-) strand; PAM type: YTN; PAM sequence: CTC
cccctttatcaacatgcccc

SEQ ID NO: 187122 - DNA, 20 bp, Artificial Sequence
  Description of Artificial Sequence: Synthetic oligonucleotide
  Target: LAMA2; (-) strand; PAM type: YTN; PAM sequence: TTC
atagcctccccctttatcaa

SEQ ID NO: 187123 - DNA, 20 bp, Artificial Sequence
  Description of Artificial Sequence: Synthetic oligonucleotide
  Target: LAMA2; (-) strand; PAM type: YTN; PAM sequence: CTG
acccaacacattcatagcct

SEQ ID NO: 187124 - DNA, 20 bp, Artificial Sequence
  Description of Artificial Sequence: Synthetic oligonucleotide
  Target: LAMA2; (-) strand; PAM type: YTN; PAM sequence: CTC
tgacccaacacattcatagc

SEQ ID NO: 187125 - DNA, 20 bp, Artificial Sequence
  Description of Artificial Sequence: Synthetic oligonucleotide
  Target: LAMA2; (-) strand; PAM type: YTN; PAM sequence: TTC
catatacctctgacccaaca

SEQ ID NO: 187126 - DNA, 20 bp, Artificial Sequence
  Description of Artificial Sequence: Synthetic oligonucleotide
  Target: LAMA2; (-) strand; PAM type: YTN; PAM sequence: TTT
ccatatacctctgacccaac

SEQ ID NO: 187127 - DNA, 20 bp, Artificial Sequence
  Description of Artificial Sequence: Synthetic oligonucleotide
  Target: LAMA2; (-) strand; PAM type: YTN; PAM sequence: TTT
tccatatacctctgacccaa

SEQ ID NO: 187128 - DNA, 20 bp, Artificial Sequence
  Description of Artificial Sequence: Synthetic oligonucleotide
  Target: LAMA2; (-) strand; PAM type: YTN; PAM sequence: TTG
agcagaaggtacagagattt

SEQ ID NO: 187129 - DNA, 20 bp, Artificial Sequence
  Description of Artificial Sequence: Synthetic oligonucleotide
  Target: LAMA2; (-) strand; PAM type: YTN; PAM sequence: TTC
acaacaaagttgagcagaag

SEQ ID NO: 187130 - DNA, 20 bp, Artificial Sequence
  Description of Artificial Sequence: Synthetic oligonucleotide
  Target: LAMA2; (-) strand; PAM type: YTN; PAM sequence: TTA
gattcacaacaaagttgagc

SEQ ID NO: 187131 - DNA, 20 bp, Artificial Sequence
  Description of Artificial Sequence: Synthetic oligonucleotide
  Target: LAMA2; (-) strand; PAM type: YTN; PAM sequence: TTT
agattcacaacaaagttgag

SEQ ID NO: 187132 - DNA, 20 bp, Artificial Sequence
  Description of Artificial Sequence: Synthetic oligonucleotide
  Target: LAMA2; (-) strand; PAM type: YTN; PAM sequence: TTT
tagattcacaacaaagttga

SEQ ID NO: 187133 - DNA, 20 bp, Artificial Sequence
  Description of Artificial Sequence: Synthetic oligonucleotide
  Target: LAMA2; (-) strand; PAM type: YTN; PAM sequence: CTG
ttttagattcacaacaaagt

SEQ ID NO: 187134 - DNA, 20 bp, Artificial Sequence
  Description of Artificial Sequence: Synthetic oligonucleotide
  Target: LAMA2; (-) strand; PAM type: YTN; PAM sequence: TTA
gagctgttttagattcacaa

SEQ ID NO: 187135 - DNA, 20 bp, Artificial Sequence
  Description of Artificial Sequence: Synthetic oligonucleotide
  Target: LAMA2; (-) strand; PAM type: YTN; PAM sequence: TTT
agagctgttttagattcaca

SEQ ID NO: 187136 - DNA, 20 bp, Artificial Sequence
  Description of Artificial Sequence: Synthetic oligonucleotide
  Target: LAMA2; (-) strand; PAM type: YTN; PAM sequence: TTG
tttagagctgttttagattc

SEQ ID NO: 187137 - DNA, 20 bp, Artificial Sequence
  Description of Artificial Sequence: Synthetic oligonucleotide
  Target: LAMA2; (-) strand; PAM type: YTN; PAM sequence: CTA
ttgtttagagctgttttaga

SEQ ID NO: 187138 - DNA, 20 bp, Artificial Sequence
  Description of Artificial Sequence: Synthetic oligonucleotide
  Target: LAMA2; (-) strand; PAM type: YTN; PAM sequence: TTA
atagactattgtttagagct

SEQ ID NO: 187139 - DNA, 20 bp, Artificial Sequence
  Description of Artificial Sequence: Synthetic oligonucleotide
  Target: LAMA2; (-) strand; PAM type: YTN; PAM sequence: TTT
aatagactattgtttagagc

SEQ ID NO: 187140 - DNA, 20 bp, Artificial Sequence
  Description of Artificial Sequence: Synthetic oligonucleotide
  Target: LAMA2; (-) strand; PAM type: YTN; PAM sequence: TTT
taatagactattgtttagag

SEQ ID NO: 187141 - DNA, 20 bp, Artificial Sequence
  Description of Artificial Sequence: Synthetic oligonucleotide
  Target: LAMA2; (-) strand; PAM type: YTN; PAM sequence: TTA
attttaatagactattgttt

SEQ ID NO: 187142 - DNA, 20 bp, Artificial Sequence
  Description of Artificial Sequence: Synthetic oligonucleotide
  Target: LAMA2; (-) strand; PAM type: YTN; PAM sequence: TTT
aattttaatagactattgtt

SEQ ID NO: 187143 - DNA, 20 bp, Artificial Sequence
  Description of Artificial Sequence: Synthetic oligonucleotide
  Target: LAMA2; (-) strand; PAM type: YTN; PAM sequence: TTT
taattttaatagactattgt

SEQ ID NO: 187144 - DNA, 20 bp, Artificial Sequence
  Description of Artificial Sequence: Synthetic oligonucleotide
  Target: LAMA2; (-) strand; PAM type: YTN; PAM sequence: TTT
ttaattttaatagactattg

SEQ ID NO: 187145 - DNA, 20 bp, Artificial Sequence
  Description of Artificial Sequence: Synthetic oligonucleotide
  Target: LAMA2; (-) strand; PAM type: YTN; PAM sequence: TTT
tttaattttaatagactatt

SEQ ID NO: 187146 - DNA, 20 bp, Artificial Sequence
  Description of Artificial Sequence: Synthetic oligonucleotide
  Target: LAMA2; (-) strand; PAM type: YTN; PAM sequence: TTA
ttttttaattttaatagact

SEQ ID NO: 187147 - DNA, 20 bp, Artificial Sequence
  Description of Artificial Sequence: Synthetic oligonucleotide
  Target: LAMA2; (-) strand; PAM type: YTN; PAM sequence: TTT
attttttaattttaatagac

SEQ ID NO: 187148 - DNA, 20 bp, Artificial Sequence
  Description of Artificial Sequence: Synthetic oligonucleotide
  Target: LAMA2; (-) strand; PAM type: YTN; PAM sequence: TTT
tattttttaattttaataga

SEQ ID NO: 187149 - DNA, 20 bp, Artificial Sequence
  Description of Artificial Sequence: Synthetic oligonucleotide
  Target: LAMA2; (-) strand; PAM type: YTN; PAM sequence: TTG
aatattttattttttaattt

SEQ ID NO: 187150 - DNA, 20 bp, Artificial Sequence
  Description of Artificial Sequence: Synthetic oligonucleotide
  Target: LAMA2; (-) strand; PAM type: YTN; PAM sequence: TTG
gtgaagttgaatattttatt

SEQ ID NO: 187151 - DNA, 20 bp, Artificial Sequence
  Description of Artificial Sequence: Synthetic oligonucleotide
  Target: LAMA2; (-) strand; PAM type: YTN; PAM sequence: TTC
attggtgaagttgaatattt

SEQ ID NO: 187152 - DNA, 20 bp, Artificial Sequence
  Description of Artificial Sequence: Synthetic oligonucleotide
  Target: LAMA2; (-) strand; PAM type: YTN; PAM sequence: CTA
ttcattggtgaagttgaata

SEQ ID NO: 187153 - DNA, 20 bp, Artificial Sequence
  Description of Artificial Sequence: Synthetic oligonucleotide
  Target: LAMA2; (-) strand; PAM type: YTN; PAM sequence: TTA
ggtaaaaatctattcattgg

SEQ ID NO: 187154 - DNA, 20 bp, Artificial Sequence
  Description of Artificial Sequence: Synthetic oligonucleotide
  Target: LAMA2; (-) strand; PAM type: YTN; PAM sequence: TTT
aggtaaaaatctattcattg

SEQ ID NO: 187155 - DNA, 20 bp, Artificial Sequence
  Description of Artificial Sequence: Synthetic oligonucleotide
  Target: LAMA2; (-) strand; PAM type: YTN; PAM sequence: TTA
tgtaatatttaggtaaaaat

SEQ ID NO: 187156 - DNA, 20 bp, Artificial Sequence
  Description of Artificial Sequence: Synthetic oligonucleotide
  Target: LAMA2; (-) strand; PAM type: YTN; PAM sequence: TTC
acatattatgtaatatttag

SEQ ID NO: 187157 - DNA, 20 bp, Artificial Sequence
  Description of Artificial Sequence: Synthetic oligonucleotide
  Target: LAMA2; (-) strand; PAM type: YTN; PAM sequence: CTT
cacatattatgtaatattta

SEQ ID NO: 187158 - DNA, 20 bp, Artificial Sequence
  Description of Artificial Sequence: Synthetic oligonucleotide
  Target: LAMA2; (-) strand; PAM type: YTN; PAM sequence: TTC
ttcacatattatgtaatatt

SEQ ID NO: 187159 - DNA, 20 bp, Artificial Sequence
  Description of Artificial Sequence: Synthetic oligonucleotide
  Target: LAMA2; (-) strand; PAM type: YTN; PAM sequence: TTA
ggttcttcacatattatgta

SEQ ID NO: 187160 - DNA, 20 bp, Artificial Sequence
  Description of Artificial Sequence: Synthetic oligonucleotide
  Target: LAMA2; (-) strand; PAM type: YTN; PAM sequence: TTT
aggttcttcacatattatgt

SEQ ID NO: 187161 - DNA, 20 bp, Artificial Sequence
  Description of Artificial Sequence: Synthetic oligonucleotide
  Target: LAMA2; (-) strand; PAM type: YTN; PAM sequence: TTT
taggttcttcacatattatg

SEQ ID NO: 187162 - DNA, 20 bp, Artificial Sequence
  Description of Artificial Sequence: Synthetic oligonucleotide
  Target: LAMA2; (-) strand; PAM type: YTN; PAM sequence: CTA
ttttaggttcttcacatatt

SEQ ID NO: 187163 - DNA, 20 bp, Artificial Sequence
  Description of Artificial Sequence: Synthetic oligonucleotide
  Target: LAMA2; (-) strand; PAM type: YTN; PAM sequence: TTA
ctattttaggttcttcacat

SEQ ID NO: 187164 - DNA, 20 bp, Artificial Sequence
  Description of Artificial Sequence: Synthetic oligonucleotide
  Target: LAMA2; (-) strand; PAM type: YTN; PAM sequence: TTT
actattttaggttcttcaca

SEQ ID NO: 187165 - DNA, 20 bp, Artificial Sequence
  Description of Artificial Sequence: Synthetic oligonucleotide
  Target: LAMA2; (-) strand; PAM type: YTN; PAM sequence: CTT
tactattttaggttcttcac

SEQ ID NO: 187166 - DNA, 20 bp, Artificial Sequence
  Description of Artificial Sequence: Synthetic oligonucleotide
  Target: LAMA2; (-) strand; PAM type: YTN; PAM sequence: TTA
tctttactattttaggttct

SEQ ID NO: 187167 - DNA, 20 bp, Artificial Sequence
  Description of Artificial Sequence: Synthetic oligonucleotide
  Target: LAMA2; (-) strand; PAM type: YTN; PAM sequence: TTA
caaaacaaaattatctttac

SEQ ID NO: 187168 - DNA, 20 bp, Artificial Sequence
  Description of Artificial Sequence: Synthetic oligonucleotide
  Target: LAMA2; (-) strand; PAM type: YTN; PAM sequence: TTT
acaaaacaaaattatcttta

SEQ ID NO: 187169 - DNA, 20 bp, Artificial Sequence
  Description of Artificial Sequence: Synthetic oligonucleotide
  Target: LAMA2; (-) strand; PAM type: YTN; PAM sequence: TTT
tacaaaacaaaattatcttt

SEQ ID NO: 187170 - DNA, 20 bp, Artificial Sequence
  Description of Artificial Sequence: Synthetic oligonucleotide
  Target: LAMA2; (-) strand; PAM type: YTN; PAM sequence: TTG
ttttacaaaacaaaattatc

SEQ ID NO: 187171 - DNA, 20 bp, Artificial Sequence
  Description of Artificial Sequence: Synthetic oligonucleotide
  Target: LAMA2; (-) strand; PAM type: YTN; PAM sequence: CTA
taatgttgttttacaaaaca

SEQ ID NO: 187172 - DNA, 20 bp, Artificial Sequence
  Description of Artificial Sequence: Synthetic oligonucleotide
  Target: LAMA2; (-) strand; PAM type: YTN; PAM sequence: TTA
ggtaaggtaaatcctataat

SEQ ID NO: 187173 - DNA, 20 bp, Artificial Sequence
  Description of Artificial Sequence: Synthetic oligonucleotide
  Target: LAMA2; (-) strand; PAM type: YTN; PAM sequence: CTC
aaagttaggtaaggtaaatc

SEQ ID NO: 187174 - DNA, 20 bp, Artificial Sequence
  Description of Artificial Sequence: Synthetic oligonucleotide
  Target: LAMA2; (-) strand; PAM type: YTN; PAM sequence: TTA
cagtgagcctcaaagttagg

SEQ ID NO: 187175 - DNA, 20 bp, Artificial Sequence
  Description of Artificial Sequence: Synthetic oligonucleotide
  Target: LAMA2; (-) strand; PAM type: YTN; PAM sequence: TTT
acagtgagcctcaaagttag

SEQ ID NO: 187176 - DNA, 20 bp, Artificial Sequence
  Description of Artificial Sequence: Synthetic oligonucleotide
  Target: LAMA2; (-) strand; PAM type: YTN; PAM sequence: CTT
tacagtgagcctcaaagtta

SEQ ID NO: 187177 - DNA, 20 bp, Artificial Sequence
  Description of Artificial Sequence: Synthetic oligonucleotide
  Target: LAMA2; (-) strand; PAM type: YTN; PAM sequence: CTG
tagctttacagtgagcctca

SEQ ID NO: 187178 - DNA, 20 bp, Artificial Sequence
  Description of Artificial Sequence: Synthetic oligonucleotide
  Target: LAMA2; (-) strand; PAM type: YTN; PAM sequence: TTA
ctgtagctttacagtgagcc

SEQ ID NO: 187179 - DNA, 20 bp, Artificial Sequence
  Description of Artificial Sequence: Synthetic oligonucleotide
  Target: LAMA2; (-) strand; PAM type: YTN; PAM sequence: CTA
ttactgtagctttacagtga

SEQ ID NO: 187180 - DNA, 20 bp, Artificial Sequence
  Description of Artificial Sequence: Synthetic oligonucleotide
  Target: LAMA2; (-) strand; PAM type: YTN; PAM sequence: CTC
tattactgtagctttacagt

SEQ ID NO: 187181 - DNA, 20 bp, Artificial Sequence
  Description of Artificial Sequence: Synthetic oligonucleotide
  Target: LAMA2; (-) strand; PAM type: YTN; PAM sequence: CTA
tcacagtctctattactgta

SEQ ID NO: 187182 - DNA, 20 bp, Artificial Sequence
  Description of Artificial Sequence: Synthetic oligonucleotide
  Target: LAMA2; (-) strand; PAM type: YTN; PAM sequence: TTC
cactatcacagtctctatta

SEQ ID NO: 187183 - DNA, 20 bp, Artificial Sequence
  Description of Artificial Sequence: Synthetic oligonucleotide
  Target: LAMA2; (-) strand; PAM type: YTN; PAM sequence: TTA
ttccactatcacagtctcta

SEQ ID NO: 187184 - DNA, 20 bp, Artificial Sequence
  Description of Artificial Sequence: Synthetic oligonucleotide
  Target: LAMA2; (-) strand; PAM type: YTN; PAM sequence: CTT
attccactatcacagtctct

SEQ ID NO: 187185 - DNA, 20 bp, Artificial Sequence
  Description of Artificial Sequence: Synthetic oligonucleotide
  Target: LAMA2; (-) strand; PAM type: YTN; PAM sequence: CTC
cttattccactatcacagtc

SEQ ID NO: 187186 - DNA, 20 bp, Artificial Sequence
  Description of Artificial Sequence: Synthetic oligonucleotide
  Target: LAMA2; (-) strand; PAM type: YTN; PAM sequence: TTG
gcatatatatatatatatat

SEQ ID NO: 187187 - DNA, 20 bp, Artificial Sequence
  Description of Artificial Sequence: Synthetic oligonucleotide
  Target: LAMA2; (-) strand; PAM type: YTN; PAM sequence: TTC
attggcatatatatatatat

SEQ ID NO: 187188 - DNA, 20 bp, Artificial Sequence
  Description of Artificial Sequence: Synthetic oligonucleotide
  Target: LAMA2; (-) strand; PAM type: YTN; PAM sequence: TTT
cattggcatatatatatata

SEQ ID NO: 187189 - DNA, 20 bp, Artificial Sequence
  Description of Artificial Sequence: Synthetic oligonucleotide
  Target: LAMA2; (-) strand; PAM type: YTN; PAM sequence: TTT
tcattggcatatatatatat

SEQ ID NO: 187190 - DNA, 20 bp, Artificial Sequence
  Description of Artificial Sequence: Synthetic oligonucleotide
  Target: LAMA2; (-) strand; PAM type: YTN; PAM sequence: CTT
ttcattggcatatatatata

SEQ ID NO: 187191 - DNA, 20 bp, Artificial Sequence
  Description of Artificial Sequence: Synthetic oligonucleotide
  Target: LAMA2; (-) strand; PAM type: YTN; PAM sequence: CTC
ttttcattggcatatatata

SEQ ID NO: 187192 - DNA, 20 bp, Artificial Sequence
  Description of Artificial Sequence: Synthetic oligonucleotide
  Target: LAMA2; (-) strand; PAM type: YTN; PAM sequence: CTC
tcttttcattggcatatata

SEQ ID NO: 187193 - DNA, 20 bp, Artificial Sequence
  Description of Artificial Sequence: Synthetic oligonucleotide
  Target: LAMA2; (-) strand; PAM type: YTN; PAM sequence: TTG
gactctcttttcattggcat

SEQ ID NO: 187194 - DNA, 20 bp, Artificial Sequence
  Description of Artificial Sequence: Synthetic oligonucleotide
  Target: LAMA2; (-) strand; PAM type: YTN; PAM sequence: TTT
ggactctcttttcattggca

SEQ ID NO: 187195 - DNA, 20 bp, Artificial Sequence
  Description of Artificial Sequence: Synthetic oligonucleotide
  Target: LAMA2; (-) strand; PAM type: YTN; PAM sequence: TTT
tggactctcttttcattggc

SEQ ID NO: 187196 - DNA, 20 bp, Artificial Sequence
  Description of Artificial Sequence: Synthetic oligonucleotide
  Target: LAMA2; (-) strand; PAM type: YTN; PAM sequence: TTT
ttggactctcttttcattgg

SEQ ID NO: 187197 - DNA, 20 bp, Artificial Sequence
  Description of Artificial Sequence: Synthetic oligonucleotide
  Target: LAMA2; (-) strand; PAM type: YTN; PAM sequence: CTA
tttttggactctcttttcat

SEQ ID NO: 187198 - DNA, 20 bp, Artificial Sequence
  Description of Artificial Sequence: Synthetic oligonucleotide
  Target: LAMA2; (-) strand; PAM type: YTN; PAM sequence: TTG
accacgtgtgggtctatttt

SEQ ID NO: 187199 - DNA, 20 bp, Artificial Sequence
  Description of Artificial Sequence: Synthetic oligonucleotide
  Target: LAMA2; (-) strand; PAM type: YTN; PAM sequence: TTC
aaaagtcaattgaccacgtg

SEQ ID NO: 187200 - DNA, 20 bp, Artificial Sequence
  Description of Artificial Sequence: Synthetic oligonucleotide
  Target: LAMA2; (-) strand; PAM type: YTN; PAM sequence: TTT
caaaagtcaattgaccacgt

SEQ ID NO: 187201 - DNA, 20 bp, Artificial Sequence
  Description of Artificial Sequence: Synthetic oligonucleotide
  Target: LAMA2; (-) strand; PAM type: YTN; PAM sequence: TTT
tcaaaagtcaattgaccacg

SEQ ID NO: 187202 - DNA, 20 bp, Artificial Sequence
  Description of Artificial Sequence: Synthetic oligonucleotide
  Target: LAMA2; (-) strand; PAM type: YTN; PAM sequence: TTT
ttcaaaagtcaattgaccac

SEQ ID NO: 187203 - DNA, 20 bp, Artificial Sequence
  Description of Artificial Sequence: Synthetic oligonucleotide
  Target: LAMA2; (-) strand; PAM type: YTN; PAM sequence: TTT
tttcaaaagtcaattgacca

SEQ ID NO: 187204 - DNA, 20 bp, Artificial Sequence
  Description of Artificial Sequence: Synthetic oligonucleotide
  Target: LAMA2; (-) strand; PAM type: YTN; PAM sequence: CTT
ttttcaaaagtcaattgacc

SEQ ID NO: 187205 - DNA, 20 bp, Artificial Sequence
  Description of Artificial Sequence: Synthetic oligonucleotide
  Target: LAMA2; (-) strand; PAM type: YTN; PAM sequence: TTG
gatcttttttcaaaagtcaa

SEQ ID NO: 187206 - DNA, 20 bp, Artificial Sequence
  Description of Artificial Sequence: Synthetic oligonucleotide
  Target: LAMA2; (-) strand; PAM type: YTN; PAM sequence: CTT
ggatcttttttcaaaagtca

SEQ ID NO: 187207 - DNA, 20 bp, Artificial Sequence
  Description of Artificial Sequence: Synthetic oligonucleotide
  Target: LAMA2; (-) strand; PAM type: YTN; PAM sequence: TTA
ccttggatcttttttcaaaa

SEQ ID NO: 187208 - DNA, 20 bp, Artificial Sequence
  Description of Artificial Sequence: Synthetic oligonucleotide
  Target: LAMA2; (-) strand; PAM type: YTN; PAM sequence: CTA
attaccttggatcttttttc

SEQ ID NO: 187209 - DNA, 20 bp, Artificial Sequence
  Description of Artificial Sequence: Synthetic oligonucleotide
  Target: LAMA2; (-) strand; PAM type: YTN; PAM sequence: CTC
gtctaattaccttggatctt

SEQ ID NO: 187210 - DNA, 20 bp, Artificial Sequence
  Description of Artificial Sequence: Synthetic oligonucleotide
  Target: LAMA2; (-) strand; PAM type: YTN; PAM sequence: TTC
ctcgtctaattaccttggat

SEQ ID NO: 187211 - DNA, 20 bp, Artificial Sequence
  Description of Artificial Sequence: Synthetic oligonucleotide
  Target: LAMA2; (-) strand; PAM type: YTN; PAM sequence: TTT
cctcgtctaattaccttgga

SEQ ID NO: 187212 - DNA, 20 bp, Artificial Sequence
  Description of Artificial Sequence: Synthetic oligonucleotide
  Target: LAMA2; (-) strand; PAM type: YTN; PAM sequence: TTG
agaaagatataatttcctcg

SEQ ID NO: 187213 - DNA, 20 bp, Artificial Sequence
  Description of Artificial Sequence: Synthetic oligonucleotide
  Target: LAMA2; (-) strand; PAM type: YTN; PAM sequence: TTG
ttgagaaagatataatttcc

SEQ ID NO: 187214 - DNA, 20 bp, Artificial Sequence
  Description of Artificial Sequence: Synthetic oligonucleotide
  Target: LAMA2; (-) strand; PAM type: YTN; PAM sequence: TTT
gttgagaaagatataatttc

SEQ ID NO: 187215 - DNA, 20 bp, Artificial Sequence
  Description of Artificial Sequence: Synthetic oligonucleotide
  Target: LAMA2; (-) strand; PAM type: YTN; PAM sequence: TTC
atcatcatttgttgagaaag

SEQ ID NO: 187216 - DNA, 20 bp, Artificial Sequence
  Description of Artificial Sequence: Synthetic oligonucleotide
  Target: LAMA2; (-) strand; PAM type: YTN; PAM sequence: CTT
catcatcatttgttgagaaa

SEQ ID NO: 187217 - DNA, 20 bp, Artificial Sequence
  Description of Artificial Sequence: Synthetic oligonucleotide
  Target: LAMA2; (-) strand; PAM type: YTN; PAM sequence: TTC
acttcatcatcatttgttga

SEQ ID NO: 187218 - DNA, 20 bp, Artificial Sequence
  Description of Artificial Sequence: Synthetic oligonucleotide
  Target: LAMA2; (-) strand; PAM type: YTN; PAM sequence: TTC
catgtagatatccattcact

SEQ ID NO: 187219 - DNA, 20 bp, Artificial Sequence
  Description of Artificial Sequence: Synthetic oligonucleotide
  Target: LAMA2; (-) strand; PAM type: YTN; PAM sequence: TTT
ccatgtagatatccattcac

SEQ ID NO: 187220 - DNA, 20 bp, Artificial Sequence
  Description of Artificial Sequence: Synthetic oligonucleotide
  Target: LAMA2; (-) strand; PAM type: YTN; PAM sequence: TTT
tccatgtagatatccattca

SEQ ID NO: 187221 - DNA, 20 bp, Artificial Sequence
  Description of Artificial Sequence: Synthetic oligonucleotide
  Target: LAMA2; (-) strand; PAM type: YTN; PAM sequence: TTT
ttccatgtagatatccattc

SEQ ID NO: 187222 - DNA, 20 bp, Artificial Sequence
  Description of Artificial Sequence: Synthetic oligonucleotide
  Target: LAMA2; (-) strand; PAM type: YTN; PAM sequence: CTT
tttccatgtagatatccatt

SEQ ID NO: 187223 - DNA, 20 bp, Artificial Sequence
  Description of Artificial Sequence: Synthetic oligonucleotide
  Target: LAMA2; (-) strand; PAM type: YTN; PAM sequence: TTC
tttttccatgtagatatcca

SEQ ID NO: 187224 - DNA, 20 bp, Artificial Sequence
  Description of Artificial Sequence: Synthetic oligonucleotide
  Target: LAMA2; (-) strand; PAM type: YTN; PAM sequence: TTT
ctttttccatgtagatatcc

SEQ ID NO: 187225 - DNA, 20 bp, Artificial Sequence
  Description of Artificial Sequence: Synthetic oligonucleotide
  Target: LAMA2; (-) strand; PAM type: YTN; PAM sequence: CTT
tctttttccatgtagatatc

SEQ ID NO: 187226 - DNA, 20 bp, Artificial Sequence
  Description of Artificial Sequence: Synthetic oligonucleotide
  Target: LAMA2; (-) strand; PAM type: YTN; PAM sequence: TTA
ggtaagggctttctttttcc

SEQ ID NO: 187227 - DNA, 20 bp, Artificial Sequence
  Description of Artificial Sequence: Synthetic oligonucleotide
  Target: LAMA2; (-) strand; PAM type: YTN; PAM sequence: CTT
aggtaagggctttctttttc

SEQ ID NO: 187228 - DNA, 20 bp, Artificial Sequence
  Description of Artificial Sequence: Synthetic oligonucleotide
  Target: LAMA2; (-) strand; PAM type: YTN; PAM sequence: CTG
tgaagtagaggcttaggtaa

SEQ ID NO: 187229 - DNA, 20 bp, Artificial Sequence
  Description of Artificial Sequence: Synthetic oligonucleotide
  Target: LAMA2; (-) strand; PAM type: YTN; PAM sequence: TTG
ctgtgaagtagaggcttagg

SEQ ID NO: 187230 - DNA, 20 bp, Artificial Sequence
  Description of Artificial Sequence: Synthetic oligonucleotide
  Target: LAMA2; (-) strand; PAM type: YTN; PAM sequence: TTT
gctgtgaagtagaggcttag

SEQ ID NO: 187231 - DNA, 20 bp, Artificial Sequence
  Description of Artificial Sequence: Synthetic oligonucleotide
  Target: LAMA2; (-) strand; PAM type: YTN; PAM sequence: TTG
gtgtttgctgtgaagtagag

SEQ ID NO: 187232 - DNA, 20 bp, Artificial Sequence
  Description of Artificial Sequence: Synthetic oligonucleotide
  Target: LAMA2; (-) strand; PAM type: YTN; PAM sequence: TTT
ggtgtttgctgtgaagtaga

SEQ ID NO: 187233 - DNA, 20 bp, Artificial Sequence
  Description of Artificial Sequence: Synthetic oligonucleotide
  Target: LAMA2; (-) strand; PAM type: YTN; PAM sequence: TTT
tggtgtttgctgtgaagtag

SEQ ID NO: 187234 - DNA, 20 bp, Artificial Sequence
  Description of Artificial Sequence: Synthetic oligonucleotide
  Target: LAMA2; (-) strand; PAM type: YTN; PAM sequence: TTC
cagcaaattttggtgtttgc

SEQ ID NO: 187235 - DNA, 20 bp, Artificial Sequence
  Description of Artificial Sequence: Synthetic oligonucleotide
  Target: LAMA2; (-) strand; PAM type: YTN; PAM sequence: TTT
ccagcaaattttggtgtttg

SEQ ID NO: 187236 - DNA, 20 bp, Artificial Sequence
  Description of Artificial Sequence: Synthetic oligonucleotide
  Target: LAMA2; (-) strand; PAM type: YTN; PAM sequence: TTA
tttccagcaaattttggtgt

SEQ ID NO: 187237 - DNA, 20 bp, Artificial Sequence
  Description of Artificial Sequence: Synthetic oligonucleotide
  Target: LAMA2; (-) strand; PAM type: YTN; PAM sequence: TTT
atttccagcaaattttggtg

SEQ ID NO: 187238 - DNA, 20 bp, Artificial Sequence
  Description of Artificial Sequence: Synthetic oligonucleotide
  Target: LAMA2; (-) strand; PAM type: YTN; PAM sequence: CTA
tgatttatttccagcaaatt

SEQ ID NO: 187239 - DNA, 20 bp, Artificial Sequence
  Description of Artificial Sequence: Synthetic oligonucleotide
  Target: LAMA2; (-) strand; PAM type: YTN; PAM sequence: TTG
ggtctatgatttatttccag

SEQ ID NO: 187240 - DNA, 20 bp, Artificial Sequence
  Description of Artificial Sequence: Synthetic oligonucleotide
  Target: LAMA2; (-) strand; PAM type: YTN; PAM sequence: CTA
cagttgggtctatgatttat

SEQ ID NO: 187241 - DNA, 20 bp, Artificial Sequence
  Description of Artificial Sequence: Synthetic oligonucleotide
  Target: LAMA2; (-) strand; PAM type: YTN; PAM sequence: TTC
tacagttgggtctatgattt

SEQ ID NO: 187242 - DNA, 20 bp, Artificial Sequence
  Description of Artificial Sequence: Synthetic oligonucleotide
  Target: LAMA2; (-) strand; PAM type: YTN; PAM sequence: CTT
ctacagttgggtctatgatt

SEQ ID NO: 187243 - DNA, 20 bp, Artificial Sequence
  Description of Artificial Sequence: Synthetic oligonucleotide
  Target: LAMA2; (-) strand; PAM type: YTN; PAM sequence: TTA
gcttctacagttgggtctat

SEQ ID NO: 187244 - DNA, 20 bp, Artificial Sequence
  Description of Artificial Sequence: Synthetic oligonucleotide
  Target: LAMA2; (-) strand; PAM type: YTN; PAM sequence: CTT
agcttctacagttgggtcta

SEQ ID NO: 187245 - DNA, 20 bp, Artificial Sequence
  Description of Artificial Sequence: Synthetic oligonucleotide
  Target: LAMA2; (-) strand; PAM type: YTN; PAM sequence: TTA
tagtcttagcttctacagtt

SEQ ID NO: 187246 - DNA, 20 bp, Artificial Sequence
  Description of Artificial Sequence: Synthetic oligonucleotide
  Target: LAMA2; (-) strand; PAM type: YTN; PAM sequence: TTT
atagtcttagcttctacagt

SEQ ID NO: 187247 - DNA, 20 bp, Artificial Sequence
  Description of Artificial Sequence: Synthetic oligonucleotide
  Target: LAMA2; (-) strand; PAM type: YTN; PAM sequence: TTT
tatagtcttagcttctacag

SEQ ID NO: 187248 - DNA, 20 bp, Artificial Sequence
  Description of Artificial Sequence: Synthetic oligonucleotide
  Target: LAMA2; (-) strand; PAM type: YTN; PAM sequence: CTA
gagattttatagtcttagct

SEQ ID NO: 187249 - DNA, 20 bp, Artificial Sequence
  Description of Artificial Sequence: Synthetic oligonucleotide
  Target: LAMA2; (-) strand; PAM type: YTN; PAM sequence: TTC
tagagattttatagtcttag

SEQ ID NO: 187250 - DNA, 20 bp, Artificial Sequence
  Description of Artificial Sequence: Synthetic oligonucleotide
  Target: LAMA2; (-) strand; PAM type: YTN; PAM sequence: TTT
ctagagattttatagtctta

SEQ ID NO: 187251 - DNA, 20 bp, Artificial Sequence
  Description of Artificial Sequence: Synthetic oligonucleotide
  Target: LAMA2; (-) strand; PAM type: YTN; PAM sequence: TTT
tctagagattttatagtctt

SEQ ID NO: 187252 - DNA, 20 bp, Artificial Sequence
  Description of Artificial Sequence: Synthetic oligonucleotide
  Target: LAMA2; (-) strand; PAM type: YTN; PAM sequence: TTT
ttctagagattttatagtct

SEQ ID NO: 187253 - DNA, 20 bp, Artificial Sequence
  Description of Artificial Sequence: Synthetic oligonucleotide
  Target: LAMA2; (-) strand; PAM type: YTN; PAM sequence: TTT
tttctagagattttatagtc

SEQ ID NO: 187254 - DNA, 20 bp, Artificial Sequence
  Description of Artificial Sequence: Synthetic oligonucleotide
  Target: LAMA2; (-) strand; PAM type: YTN; PAM sequence: TTT
ttttctagagattttatagt

SEQ ID NO: 187255 - DNA, 20 bp, Artificial Sequence
  Description of Artificial Sequence: Synthetic oligonucleotide
  Target: LAMA2; (-) strand; PAM type: YTN; PAM sequence: TTT
tttttctagagattttatag

SEQ ID NO: 187256 - DNA, 20 bp, Artificial Sequence
  Description of Artificial Sequence: Synthetic oligonucleotide
  Target: LAMA2; (-) strand; PAM type: YTN; PAM sequence: TTA
ttttttttctagagatttta

SEQ ID NO: 187257 - DNA, 20 bp, Artificial Sequence
  Description of Artificial Sequence: Synthetic oligonucleotide
  Target: LAMA2; (-) strand; PAM type: YTN; PAM sequence: TTT
attttttttctagagatttt

SEQ ID NO: 187258 - DNA, 20 bp, Artificial Sequence
  Description of Artificial Sequence: Synthetic oligonucleotide
  Target: LAMA2; (-) strand; PAM type: YTN; PAM sequence: CTT
tattttttttctagagattt

SEQ ID NO: 187259 - DNA, 20 bp, Artificial Sequence
  Description of Artificial Sequence: Synthetic oligonucleotide
  Target: LAMA2; (-) strand; PAM type: YTN; PAM sequence: TTC
tttattttttttctagagat

SEQ ID NO: 187260 - DNA, 20 bp, Artificial Sequence
  Description of Artificial Sequence: Synthetic oligonucleotide
  Target: LAMA2; (-) strand; PAM type: YTN; PAM sequence: CTT
ctttattttttttctagaga

SEQ ID NO: 187261 - DNA, 20 bp, Artificial Sequence
  Description of Artificial Sequence: Synthetic oligonucleotide
  Target: LAMA2; (-) strand; PAM type: YTN; PAM sequence: TTA
tcttctttattttttttcta

SEQ ID NO: 187262 - DNA, 20 bp, Artificial Sequence
  Description of Artificial Sequence: Synthetic oligonucleotide
  Target: LAMA2; (-) strand; PAM type: YTN; PAM sequence: TTG
tgaacattatcttctttatt

SEQ ID NO: 187263 - DNA, 20 bp, Artificial Sequence
  Description of Artificial Sequence: Synthetic oligonucleotide
  Target: LAMA2; (-) strand; PAM type: YTN; PAM sequence: CTA
caccaaagttgtgaacatta

SEQ ID NO: 187264 - DNA, 20 bp, Artificial Sequence
  Description of Artificial Sequence: Synthetic oligonucleotide
  Target: LAMA2; (-) strand; PAM type: YTN; PAM sequence: TTG
cctacaccaaagttgtgaac

SEQ ID NO: 187265 - DNA, 20 bp, Artificial Sequence
  Description of Artificial Sequence: Synthetic oligonucleotide
  Target: LAMA2; (-) strand; PAM type: YTN; PAM sequence: TTC
agaaatcattgcctacacca

SEQ ID NO: 187266 - DNA, 20 bp, Artificial Sequence
  Description of Artificial Sequence: Synthetic oligonucleotide
  Target: LAMA2; (-) strand; PAM type: YTN; PAM sequence: TTT
cagaaatcattgcctacacc

SEQ ID NO: 187267 - DNA, 20 bp, Artificial Sequence
  Description of Artificial Sequence: Synthetic oligonucleotide
  Target: LAMA2; (-) strand; PAM type: YTN; PAM sequence: CTT
tcagaaatcattgcctacac

SEQ ID NO: 187268 - DNA, 20 bp, Artificial Sequence
  Description of Artificial Sequence: Synthetic oligonucleotide
  Target: LAMA2; (-) strand; PAM type: YTN; PAM sequence: TTG
tccctttcagaaatcattgc

SEQ ID NO: 187269 - DNA, 20 bp, Artificial Sequence
  Description of Artificial Sequence: Synthetic oligonucleotide
  Target: LAMA2; (-) strand; PAM type: YTN; PAM sequence: TTT
gtccctttcagaaatcattg

SEQ ID NO: 187270 - DNA, 20 bp, Artificial Sequence
  Description of Artificial Sequence: Synthetic oligonucleotide
  Target: LAMA2; (-) strand; PAM type: YTN; PAM sequence: TTT
tgtccctttcagaaatcatt

SEQ ID NO: 187271 - DNA, 20 bp, Artificial Sequence
  Description of Artificial Sequence: Synthetic oligonucleotide
  Target: LAMA2; (-) strand; PAM type: YTN; PAM sequence: TTT
ttgtccctttcagaaatcat

SEQ ID NO: 187272 - DNA, 20 bp, Artificial Sequence
  Description of Artificial Sequence: Synthetic oligonucleotide
  Target: LAMA2; (-) strand; PAM type: YTN; PAM sequence: TTT
tttgtccctttcagaaatca

SEQ ID NO: 187273 - DNA, 20 bp, Artificial Sequence
  Description of Artificial Sequence: Synthetic oligonucleotide
  Target: LAMA2; (-) strand; PAM type: YTN; PAM sequence: TTA
atattttttgtccctttcag

SEQ ID NO: 187274 - DNA, 20 bp, Artificial Sequence
  Description of Artificial Sequence: Synthetic oligonucleotide
  Target: LAMA2; (-) strand; PAM type: YTN; PAM sequence: CTT
aatattttttgtccctttca

SEQ ID NO: 187275 - DNA, 20 bp, Artificial Sequence
  Description of Artificial Sequence: Synthetic oligonucleotide
  Target: LAMA2; (-) strand; PAM type: YTN; PAM sequence: TTA
tgcttaatattttttgtccc

SEQ ID NO: 187276 - DNA, 20 bp, Artificial Sequence
  Description of Artificial Sequence: Synthetic oligonucleotide
  Target: LAMA2; (-) strand; PAM type: YTN; PAM sequence: TTC
attatgcttaatattttttg

SEQ ID NO: 187277 - DNA, 20 bp, Artificial Sequence
  Description of Artificial Sequence: Synthetic oligonucleotide
  Target: LAMA2; (-) strand; PAM type: YTN; PAM sequence: TTA
aatcattcattatgcttaat

SEQ ID NO: 187278 - DNA, 20 bp, Artificial Sequence
  Description of Artificial Sequence: Synthetic oligonucleotide
  Target: LAMA2; (-) strand; PAM type: YTN; PAM sequence: TTA
ttaaatcattcattatgctt

SEQ ID NO: 187279 - DNA, 20 bp, Artificial Sequence
  Description of Artificial Sequence: Synthetic oligonucleotide
  Target: LAMA2; (-) strand; PAM type: YTN; PAM sequence: TTT
attaaatcattcattatgct

SEQ ID NO: 187280 - DNA, 20 bp, Artificial Sequence
  Description of Artificial Sequence: Synthetic oligonucleotide
  Target: LAMA2; (-) strand; PAM type: YTN; PAM sequence: TTA
aatacaatttattaaatcat

SEQ ID NO: 187281 - DNA, 20 bp, Artificial Sequence
  Description of Artificial Sequence: Synthetic oligonucleotide
  Target: LAMA2; (-) strand; PAM type: YTN; PAM sequence: CTG
attaaatacaatttattaaa

SEQ ID NO: 187282 - DNA, 20 bp, Artificial Sequence
  Description of Artificial Sequence: Synthetic oligonucleotide
  Target: LAMA2; (-) strand; PAM type: YTN; PAM sequence: TTC
tgattaaatacaatttatta

SEQ ID NO: 187283 - DNA, 20 bp, Artificial Sequence
  Description of Artificial Sequence: Synthetic oligonucleotide
  Target: LAMA2; (-) strand; PAM type: YTN; PAM sequence: TTA
attctgattaaatacaattt

SEQ ID NO: 187284 - DNA, 20 bp, Artificial Sequence
  Description of Artificial Sequence: Synthetic oligonucleotide
  Target: LAMA2; (-) strand; PAM type: YTN; PAM sequence: TTT
aattctgattaaatacaatt

SEQ ID NO: 187285 - DNA, 20 bp, Artificial Sequence
  Description of Artificial Sequence: Synthetic oligonucleotide
  Target: LAMA2; (-) strand; PAM type: YTN; PAM sequence: TTC
aaagagcagaagtgtttaat

SEQ ID NO: 187286 - DNA, 20 bp, Artificial Sequence
  Description of Artificial Sequence: Synthetic oligonucleotide
  Target: LAMA2; (-) strand; PAM type: YTN; PAM sequence: TTT
caaagagcagaagtgtttaa

SEQ ID NO: 187287 - DNA, 20 bp, Artificial Sequence
  Description of Artificial Sequence: Synthetic oligonucleotide
  Target: LAMA2; (-) strand; PAM type: YTN; PAM sequence: CTT
tcaaagagcagaagtgttta

SEQ ID NO: 187288 - DNA, 20 bp, Artificial Sequence
  Description of Artificial Sequence: Synthetic oligonucleotide
  Target: LAMA2; (-) strand; PAM type: YTN; PAM sequence: TTG
gagtgctttcaaagagcaga

SEQ ID NO: 187289 - DNA, 20 bp, Artificial Sequence
  Description of Artificial Sequence: Synthetic oligonucleotide
  Target: LAMA2; (-) strand; PAM type: YTN; PAM sequence: TTT
ggagtgctttcaaagagcag

SEQ ID NO: 187290 - DNA, 20 bp, Artificial Sequence
  Description of Artificial Sequence: Synthetic oligonucleotide
  Target: LAMA2; (-) strand; PAM type: YTN; PAM sequence: TTG
catttggagtgctttcaaag

SEQ ID NO: 187291 - DNA, 20 bp, Artificial Sequence
  Description of Artificial Sequence: Synthetic oligonucleotide
  Target: LAMA2; (-) strand; PAM type: YTN; PAM sequence: TTT
gcatttggagtgctttcaaa

SEQ ID NO: 187292 - DNA, 20 bp, Artificial Sequence
  Description of Artificial Sequence: Synthetic oligonucleotide
  Target: LAMA2; (-) strand; PAM type: YTN; PAM sequence: CTT
tgcatttggagtgctttcaa

SEQ ID NO: 187293 - DNA, 20 bp, Artificial Sequence
  Description of Artificial Sequence: Synthetic oligonucleotide
  Target: LAMA2; (-) strand; PAM type: YTN; PAM sequence: TTG
actttgcatttggagtgctt

SEQ ID NO: 187294 - DNA, 20 bp, Artificial Sequence
  Description of Artificial Sequence: Synthetic oligonucleotide
  Target: LAMA2; (-) strand; PAM type: YTN; PAM sequence: CTT
gactttgcatttggagtgct

SEQ ID NO: 187295 - DNA, 20 bp, Artificial Sequence
  Description of Artificial Sequence: Synthetic oligonucleotide
  Target: LAMA2; (-) strand; PAM type: YTN; PAM sequence: CTG
tggcttgactttgcatttgg

SEQ ID NO: 187296 - DNA, 20 bp, Artificial Sequence
  Description of Artificial Sequence: Synthetic oligonucleotide
  Target: LAMA2; (-) strand; PAM type: YTN; PAM sequence: CTC
aatctgtggcttgactttgc

SEQ ID NO: 187297 - DNA, 20 bp, Artificial Sequence
  Description of Artificial Sequence: Synthetic oligonucleotide
  Target: LAMA2; (-) strand; PAM type: YTN; PAM sequence: TTC
tcaatctgtggcttgacttt

SEQ ID NO: 187298 - DNA, 20 bp, Artificial Sequence
  Description of Artificial Sequence: Synthetic oligonucleotide
  Target: LAMA2; (-) strand; PAM type: YTN; PAM sequence: TTG
ttctcaatctgtggcttgac

SEQ ID NO: 187299 - DNA, 20 bp, Artificial Sequence
  Description of Artificial Sequence: Synthetic oligonucleotide
  Target: LAMA2; (-) strand; PAM type: YTN; PAM sequence: CTA
taatatgtattgttctcaat

SEQ ID NO: 187300 - DNA, 20 bp, Artificial Sequence
  Description of Artificial Sequence: Synthetic oligonucleotide
  Target: LAMA2; (-) strand; PAM type: YTN; PAM sequence: TTA
ctataatatgtattgttctc

SEQ ID NO: 187301 - DNA, 20 bp, Artificial Sequence
  Description of Artificial Sequence: Synthetic oligonucleotide
  Target: LAMA2; (-) strand; PAM type: YTN; PAM sequence: TTT
actataatatgtattgttct

SEQ ID NO: 187302 - DNA, 20 bp, Artificial Sequence
  Description of Artificial Sequence: Synthetic oligonucleotide
  Target: LAMA2; (-) strand; PAM type: YTN; PAM sequence: TTG
tcaagtacatttactataat

SEQ ID NO: 187303 - DNA, 20 bp, Artificial Sequence
  Description of Artificial Sequence: Synthetic oligonucleotide
  Target: LAMA2; (-) strand; PAM type: YTN; PAM sequence: TTT
gtcaagtacatttactataa

SEQ ID NO: 187304 - DNA, 20 bp, Artificial Sequence
  Description of Artificial Sequence: Synthetic oligonucleotide
  Target: LAMA2; (-) strand; PAM type: YTN; PAM sequence: CTT
tgtcaagtacatttactata

SEQ ID NO: 187305 - DNA, 20 bp, Artificial Sequence
  Description of Artificial Sequence: Synthetic oligonucleotide
  Target: LAMA2; (-) strand; PAM type: YTN; PAM sequence: CTA
gagaaaagacctttgtcaag

SEQ ID NO: 187306 - DNA, 20 bp, Artificial Sequence
  Description of Artificial Sequence: Synthetic oligonucleotide
  Target: LAMA2; (-) strand; PAM type: YTN; PAM sequence: TTC
tagagaaaagacctttgtca

SEQ ID NO: 187307 - DNA, 20 bp, Artificial Sequence
  Description of Artificial Sequence: Synthetic oligonucleotide
  Target: LAMA2; (-) strand; PAM type: YTN; PAM sequence: TTA
aatacatattctagagaaaa

SEQ ID NO: 187308 - DNA, 20 bp, Artificial Sequence
  Description of Artificial Sequence: Synthetic oligonucleotide
  Target: LAMA2; (-) strand; PAM type: YTN; PAM sequence: TTT
aaatacatattctagagaaa

SEQ ID NO: 187309 - DNA, 20 bp, Artificial Sequence
  Description of Artificial Sequence: Synthetic oligonucleotide
  Target: LAMA2; (-) strand; PAM type: YTN; PAM sequence: TTA
ataagatttaaatacatatt

SEQ ID NO: 187310 - DNA, 20 bp, Artificial Sequence
  Description of Artificial Sequence: Synthetic oligonucleotide
  Target: LAMA2; (-) strand; PAM type: YTN; PAM sequence: TTA
ttaataagatttaaatacat

SEQ ID NO: 187311 - DNA, 20 bp, Artificial Sequence
  Description of Artificial Sequence: Synthetic oligonucleotide
  Target: LAMA2; (-) strand; PAM type: YTN; PAM sequence: TTG
ccagattattaataagattt

SEQ ID NO: 187312 - DNA, 20 bp, Artificial Sequence
  Description of Artificial Sequence: Synthetic oligonucleotide
  Target: LAMA2; (-) strand; PAM type: YTN; PAM sequence: TTT
gccagattattaataagatt

SEQ ID NO: 187313 - DNA, 20 bp, Artificial Sequence
  Description of Artificial Sequence: Synthetic oligonucleotide
  Target: LAMA2; (-) strand; PAM type: YTN; PAM sequence: TTG
tttgccagattattaataag

SEQ ID NO: 187314 - DNA, 20 bp, Artificial Sequence
  Description of Artificial Sequence: Synthetic oligonucleotide
  Target: LAMA2; (-) strand; PAM type: YTN; PAM sequence: TTT
gtttgccagattattaataa

SEQ ID NO: 187315 - DNA, 20 bp, Artificial Sequence
  Description of Artificial Sequence: Synthetic oligonucleotide
  Target: LAMA2; (-) strand; PAM type: YTN; PAM sequence: CTT
tgtttgccagattattaata

SEQ ID NO: 187316 - DNA, 20 bp, Artificial Sequence
  Description of Artificial Sequence: Synthetic oligonucleotide
  Target: LAMA2; (-) strand; PAM type: YTN; PAM sequence: TTG
ctttgtttgccagattatta

SEQ ID NO: 187317 - DNA, 20 bp, Artificial Sequence
  Description of Artificial Sequence: Synthetic oligonucleotide
  Target: LAMA2; (-) strand; PAM type: YTN; PAM sequence: TTT
gctttgtttgccagattatt

SEQ ID NO: 187318 - DNA, 20 bp, Artificial Sequence
  Description of Artificial Sequence: Synthetic oligonucleotide
  Target: LAMA2; (-) strand; PAM type: YTN; PAM sequence: TTT
tgctttgtttgccagattat

SEQ ID NO: 187319 - DNA, 20 bp, Artificial Sequence
  Description of Artificial Sequence: Synthetic oligonucleotide
  Target: LAMA2; (-) strand; PAM type: YTN; PAM sequence: CTC
attttgctttgtttgccaga

SEQ ID NO: 187320 - DNA, 20 bp, Artificial Sequence
  Description of Artificial Sequence: Synthetic oligonucleotide
  Target: LAMA2; (-) strand; PAM type: YTN; PAM sequence: TTG
ctcattttgctttgtttgcc

SEQ ID NO: 187321 - DNA, 20 bp, Artificial Sequence
  Description of Artificial Sequence: Synthetic oligonucleotide
  Target: LAMA2; (-) strand; PAM type: YTN; PAM sequence: TTT
gctcattttgctttgtttgc

SEQ ID NO: 187322 - DNA, 20 bp, Artificial Sequence
  Description of Artificial Sequence: Synthetic oligonucleotide
  Target: LAMA2; (-) strand; PAM type: YTN; PAM sequence: CTT
tgctcattttgctttgtttg

SEQ ID NO: 187323 - DNA, 20 bp, Artificial Sequence
  Description of Artificial Sequence: Synthetic oligonucleotide
  Target: LAMA2; (-) strand; PAM type: YTN; PAM sequence: TTG
aaatctttgctcattttgct

SEQ ID NO: 187324 - DNA, 20 bp, Artificial Sequence
  Description of Artificial Sequence: Synthetic oligonucleotide
  Target: LAMA2; (-) strand; PAM type: YTN; PAM sequence: CTT
gaaatctttgctcattttgc

SEQ ID NO: 187325 - DNA, 20 bp, Artificial Sequence
  Description of Artificial Sequence: Synthetic oligonucleotide
  Target: LAMA2; (-) strand; PAM type: YTN; PAM sequence: TTC
ttgaaatctttgctcatttt

SEQ ID NO: 187326 - DNA, 20 bp, Artificial Sequence
  Description of Artificial Sequence: Synthetic oligonucleotide
  Target: LAMA2; (-) strand; PAM type: YTN; PAM sequence: CTT
cttgaaatctttgctcattt

SEQ ID NO: 187327 - DNA, 20 bp, Artificial Sequence
  Description of Artificial Sequence: Synthetic oligonucleotide
  Target: LAMA2; (-) strand; PAM type: YTN; PAM sequence: TTC
ttcttgaaatctttgctcat

SEQ ID NO: 187328 - DNA, 20 bp, Artificial Sequence
  Description of Artificial Sequence: Synthetic oligonucleotide
  Target: LAMA2; (-) strand; PAM type: YTN; PAM sequence: TTG
tgaaattcttcttgaaatct

SEQ ID NO: 187329 - DNA, 20 bp, Artificial Sequence
  Description of Artificial Sequence: Synthetic oligonucleotide
  Target: LAMA2; (-) strand; PAM type: YTN; PAM sequence: TTT
gtgaaattcttcttgaaatc

SEQ ID NO: 187330 - DNA, 20 bp, Artificial Sequence
  Description of Artificial Sequence: Synthetic oligonucleotide
  Target: LAMA2; (-) strand; PAM type: YTN; PAM sequence: TTT
tgtgaaattcttcttgaaat

SEQ ID NO: 187331 - DNA, 20 bp, Artificial Sequence
  Description of Artificial Sequence: Synthetic oligonucleotide
  Target: LAMA2; (-) strand; PAM type: YTN; PAM sequence: TTA
ttttgtgaaattcttcttga

SEQ ID NO: 187332 - DNA, 20 bp, Artificial Sequence
  Description of Artificial Sequence: Synthetic oligonucleotide
  Target: LAMA2; (-) strand; PAM type: YTN; PAM sequence: CTT
attttgtgaaattcttcttg

SEQ ID NO: 187333 - DNA, 20 bp, Artificial Sequence
  Description of Artificial Sequence: Synthetic oligonucleotide
  Target: LAMA2; (-) strand; PAM type: YTN; PAM sequence: TTG
tatatcttattttgtgaaat

SEQ ID NO: 187334 - DNA, 20 bp, Artificial Sequence
  Description of Artificial Sequence: Synthetic oligonucleotide
  Target: LAMA2; (-) strand; PAM type: YTN; PAM sequence: TTT
gtatatcttattttgtgaaa

SEQ ID NO: 187335 - DNA, 20 bp, Artificial Sequence
  Description of Artificial Sequence: Synthetic oligonucleotide
  Target: LAMA2; (-) strand; PAM type: YTN; PAM sequence: TTA
atcgtcatttgtatatctta

SEQ ID NO: 187336 - DNA, 20 bp, Artificial Sequence
  Description of Artificial Sequence: Synthetic oligonucleotide
  Target: LAMA2; (-) strand; PAM type: YTN; PAM sequence: CTT
aatcgtcatttgtatatctt

SEQ ID NO: 187337 - DNA, 20 bp, Artificial Sequence
  Description of Artificial Sequence: Synthetic oligonucleotide
  Target: LAMA2; (-) strand; PAM type: YTN; PAM sequence: TTC
atgtgcttaatcgtcatttg

SEQ ID NO: 187338 - DNA, 20 bp, Artificial Sequence
  Description of Artificial Sequence: Synthetic oligonucleotide
  Target: LAMA2; (-) strand; PAM type: YTN; PAM sequence: TTT
catgtgcttaatcgtcattt

SEQ ID NO: 187339 - DNA, 20 bp, Artificial Sequence
  Description of Artificial Sequence: Synthetic oligonucleotide
  Target: LAMA2; (-) strand; PAM type: YTN; PAM sequence: TTT
tcatgtgcttaatcgtcatt

SEQ ID NO: 187340 - DNA, 20 bp, Artificial Sequence
  Description of Artificial Sequence: Synthetic oligonucleotide
  Target: LAMA2; (-) strand; PAM type: YTN; PAM sequence: CTG
aacatattttcatgtgctta

SEQ ID NO: 187341 - DNA, 20 bp, Artificial Sequence
  Description of Artificial Sequence: Synthetic oligonucleotide
  Target: LAMA2; (-) strand; PAM type: YTN; PAM sequence: TTG
atgatgctgaacatattttc

SEQ ID NO: 187342 - DNA, 20 bp, Artificial Sequence
  Description of Artificial Sequence: Synthetic oligonucleotide
  Target: LAMA2; (-) strand; PAM type: YTN; PAM sequence: TTT
gatgatgctgaacatatttt

SEQ ID NO: 187343 - DNA, 20 bp, Artificial Sequence
  Description of Artificial Sequence: Synthetic oligonucleotide
  Target: LAMA2; (-) strand; PAM type: YTN; PAM sequence: CTT
tgatgatgctgaacatattt

SEQ ID NO: 187344 - DNA, 20 bp, Artificial Sequence
  Description of Artificial Sequence: Synthetic oligonucleotide
  Target: LAMA2; (-) strand; PAM type: YTN; PAM sequence: TTC
tttgatgatgctgaacatat

SEQ ID NO: 187345 - DNA, 20 bp, Artificial Sequence
  Description of Artificial Sequence: Synthetic oligonucleotide
  Target: LAMA2; (-) strand; PAM type: YTN; PAM sequence: CTT
ctttgatgatgctgaacata

SEQ ID NO: 187346 - DNA, 20 bp, Artificial Sequence
  Description of Artificial Sequence: Synthetic oligonucleotide
  Target: LAMA2; (-) strand; PAM type: YTN; PAM sequence: TTG
cacttctttgatgatgctga

SEQ ID NO: 187347 - DNA, 20 bp, Artificial Sequence
  Description of Artificial Sequence: Synthetic oligonucleotide
  Target: LAMA2; (-) strand; PAM type: YTN; PAM sequence: TTT
gcacttctttgatgatgctg

SEQ ID NO: 187348 - DNA, 20 bp, Artificial Sequence
  Description of Artificial Sequence: Synthetic oligonucleotide
  Target: LAMA2; (-) strand; PAM type: YTN; PAM sequence: TTG
gtggtgtcatttgcacttct

SEQ ID NO: 187349 - DNA, 20 bp, Artificial Sequence
  Description of Artificial Sequence: Synthetic oligonucleotide
  Target: LAMA2; (-) strand; PAM type: YTN; PAM sequence: CTC
attggtggtgtcatttgcac

SEQ ID NO: 187350 - DNA, 20 bp, Artificial Sequence
  Description of Artificial Sequence: Synthetic oligonucleotide
  Target: LAMA2; (-) strand; PAM type: YTN; PAM sequence: TTG
tgtggtgatacctcattggt

SEQ ID NO: 187351 - DNA, 20 bp, Artificial Sequence
  Description of Artificial Sequence: Synthetic oligonucleotide
  Target: LAMA2; (-) strand; PAM type: YTN; PAM sequence: CTT
gtgtggtgatacctcattgg

SEQ ID NO: 187352 - DNA, 20 bp, Artificial Sequence
  Description of Artificial Sequence: Synthetic oligonucleotide
  Target: LAMA2; (-) strand; PAM type: YTN; PAM sequence: CTA
gtgcttgtgtggtgatacct

SEQ ID NO: 187353 - DNA, 20 bp, Artificial Sequence
  Description of Artificial Sequence: Synthetic oligonucleotide
  Target: LAMA2; (-) strand; PAM type: YTN; PAM sequence: TTC
tagtgcttgtgtggtgatac

SEQ ID NO: 187354 - DNA, 20 bp, Artificial Sequence
  Description of Artificial Sequence: Synthetic oligonucleotide
  Target: LAMA2; (-) strand; PAM type: YTN; PAM sequence: TTA
gccattctagtgcttgtgtg

SEQ ID NO: 187355 - DNA, 20 bp, Artificial Sequence
  Description of Artificial Sequence: Synthetic oligonucleotide
  Target: LAMA2; (-) strand; PAM type: YTN; PAM sequence: TTT
agccattctagtgcttgtgt

SEQ ID NO: 187356 - DNA, 20 bp, Artificial Sequence
  Description of Artificial Sequence: Synthetic oligonucleotide
  Target: LAMA2; (-) strand; PAM type: YTN; PAM sequence: TTT
tagccattctagtgcttgtg

SEQ ID NO: 187357 - DNA, 20 bp, Artificial Sequence
  Description of Artificial Sequence: Synthetic oligonucleotide
  Target: LAMA2; (-) strand; PAM type: YTN; PAM sequence: TTA
cattttagccattctagtgc

SEQ ID NO: 187358 - DNA, 20 bp, Artificial Sequence
  Description of Artificial Sequence: Synthetic oligonucleotide
  Target: LAMA2; (-) strand; PAM type: YTN; PAM sequence: TTG
ttacattttagccattctag

SEQ ID NO: 187359 - DNA, 20 bp, Artificial Sequence
  Description of Artificial Sequence: Synthetic oligonucleotide
  Target: LAMA2; (-) strand; PAM type: YTN; PAM sequence: CTA
atattgttacattttagcca

SEQ ID NO: 187360 - DNA, 20 bp, Artificial Sequence
  Description of Artificial Sequence: Synthetic oligonucleotide
  Target: LAMA2; (-) strand; PAM type: YTN; PAM sequence: TTA
acatctaatattgttacatt

SEQ ID NO: 187361 - DNA, 20 bp, Artificial Sequence
  Description of Artificial Sequence: Synthetic oligonucleotide
  Target: LAMA2; (-) strand; PAM type: YTN; PAM sequence: TTA
ttaacatctaatattgttac

SEQ ID NO: 187362 - DNA, 20 bp, Artificial Sequence
  Description of Artificial Sequence: Synthetic oligonucleotide
  Target: LAMA2; (-) strand; PAM type: YTN; PAM sequence: TTT
attaacatctaatattgtta

SEQ ID NO: 187363 - DNA, 20 bp, Artificial Sequence
  Description of Artificial Sequence: Synthetic oligonucleotide
  Target: LAMA2; (-) strand; PAM type: YTN; PAM sequence: CTT
tattaacatctaatattgtt

SEQ ID NO: 187364 - DNA, 20 bp, Artificial Sequence
  Description of Artificial Sequence: Synthetic oligonucleotide
  Target: LAMA2; (-) strand; PAM type: YTN; PAM sequence: CTA
tggctttattaacatctaat

SEQ ID NO: 187365 - DNA, 20 bp, Artificial Sequence
  Description of Artificial Sequence: Synthetic oligonucleotide
  Target: LAMA2; (-) strand; PAM type: YTN; PAM sequence: CTC
tatggctttattaacatcta

SEQ ID NO: 187366 - DNA, 20 bp, Artificial Sequence
  Description of Artificial Sequence: Synthetic oligonucleotide
  Target: LAMA2; (-) strand; PAM type: YTN; PAM sequence: TTC
cagatgctctatggctttat

SEQ ID NO: 187367 - DNA, 20 bp, Artificial Sequence
  Description of Artificial Sequence: Synthetic oligonucleotide
  Target: LAMA2; (-) strand; PAM type: YTN; PAM sequence: CTC
ccacagcaatatataggagt

SEQ ID NO: 187368 - DNA, 20 bp, Artificial Sequence
  Description of Artificial Sequence: Synthetic oligonucleotide
  Target: LAMA2; (-) strand; PAM type: YTN; PAM sequence: TTC
ctcccacagcaatatatagg

SEQ ID NO: 187369 - DNA, 20 bp, Artificial Sequence
  Description of Artificial Sequence: Synthetic oligonucleotide
  Target: LAMA2; (-) strand; PAM type: YTN; PAM sequence: TTA
cattcctcccacagcaatat

SEQ ID NO: 187370 - DNA, 20 bp, Artificial Sequence
  Description of Artificial Sequence: Synthetic oligonucleotide
  Target: LAMA2; (-) strand; PAM type: YTN; PAM sequence: TTT
acattcctcccacagcaata

SEQ ID NO: 187371 - DNA, 20 bp, Artificial Sequence
  Description of Artificial Sequence: Synthetic oligonucleotide
  Target: LAMA2; (-) strand; PAM type: YTN; PAM sequence: TTT
tacattcctcccacagcaat

SEQ ID NO: 187372 - DNA, 20 bp, Artificial Sequence
  Description of Artificial Sequence: Synthetic oligonucleotide
  Target: LAMA2; (-) strand; PAM type: YTN; PAM sequence: TTA
taattttacattcctcccac

SEQ ID NO: 187373 - DNA, 20 bp, Artificial Sequence
  Description of Artificial Sequence: Synthetic oligonucleotide
  Target: LAMA2; (-) strand; PAM type: YTN; PAM sequence: TTT
ataattttacattcctccca

SEQ ID NO: 187374 - DNA, 20 bp, Artificial Sequence
  Description of Artificial Sequence: Synthetic oligonucleotide
  Target: LAMA2; (-) strand; PAM type: YTN; PAM sequence: TTT
tataattttacattcctccc

SEQ ID NO: 187375 - DNA, 20 bp, Artificial Sequence
  Description of Artificial Sequence: Synthetic oligonucleotide
  Target: LAMA2; (-) strand; PAM type: YTN; PAM sequence: TTG
ttttataattttacattcct

SEQ ID NO: 187376 - DNA, 20 bp, Artificial Sequence
  Description of Artificial Sequence: Synthetic oligonucleotide
  Target: LAMA2; (-) strand; PAM type: YTN; PAM sequence: TTC
caatgttgttttataatttt

SEQ ID NO: 187377 - DNA, 20 bp, Artificial Sequence
  Description of Artificial Sequence: Synthetic oligonucleotide
  Target: LAMA2; (-) strand; PAM type: YTN; PAM sequence: TTT
ccaatgttgttttataattt

SEQ ID NO: 187378 - DNA, 20 bp, Artificial Sequence
  Description of Artificial Sequence: Synthetic oligonucleotide
  Target: LAMA2; (-) strand; PAM type: YTN; PAM sequence: TTT
tccaatgttgttttataatt

SEQ ID NO: 187379 - DNA, 20 bp, Artificial Sequence
  Description of Artificial Sequence: Synthetic oligonucleotide
  Target: LAMA2; (-) strand; PAM type: YTN; PAM sequence: CTT
ttccaatgttgttttataat

SEQ ID NO: 187380 - DNA, 20 bp, Artificial Sequence
  Description of Artificial Sequence: Synthetic oligonucleotide
  Target: LAMA2; (-) strand; PAM type: YTN; PAM sequence: CTC
ttttccaatgttgttttata

SEQ ID NO: 187381 - DNA, 20 bp, Artificial Sequence
  Description of Artificial Sequence: Synthetic oligonucleotide
  Target: LAMA2; (-) strand; PAM type: YTN; PAM sequence: CTG
tgaacctcttttccaatgtt

SEQ ID NO: 187382 - DNA, 20 bp, Artificial Sequence
  Description of Artificial Sequence: Synthetic oligonucleotide
  Target: LAMA2; (-) strand; PAM type: YTN; PAM sequence: CTA
tacaaaactgtgaacctctt

SEQ ID NO: 187383 - DNA, 20 bp, Artificial Sequence
  Description of Artificial Sequence: Synthetic oligonucleotide
  Target: LAMA2; (-) strand; PAM type: YTN; PAM sequence: TTA
gcgctatacaaaactgtgaa

SEQ ID NO: 187384 - DNA, 20 bp, Artificial Sequence
  Description of Artificial Sequence: Synthetic oligonucleotide
  Target: LAMA2; (-) strand; PAM type: YTN; PAM sequence: TTA
tcaggtatgtaattagcgct

SEQ ID NO: 187385 - DNA, 20 bp, Artificial Sequence
  Description of Artificial Sequence: Synthetic oligonucleotide
  Target: LAMA2; (-) strand; PAM type: YTN; PAM sequence: TTA
tattatcaggtatgtaatta

SEQ ID NO: 187386 - DNA, 20 bp, Artificial Sequence
  Description of Artificial Sequence: Synthetic oligonucleotide
  Target: LAMA2; (-) strand; PAM type: YTN; PAM sequence: TTA
ggagttatattatcaggtat

SEQ ID NO: 187387 - DNA, 20 bp, Artificial Sequence
  Description of Artificial Sequence: Synthetic oligonucleotide
  Target: LAMA2; (-) strand; PAM type: YTN; PAM sequence: CTT
aggagttatattatcaggta

SEQ ID NO: 187388 - DNA, 20 bp, Artificial Sequence
  Description of Artificial Sequence: Synthetic oligonucleotide
  Target: LAMA2; (-) strand; PAM type: YTN; PAM sequence: CTA
tcaagtcttaggagttatat

SEQ ID NO: 187389 - DNA, 20 bp, Artificial Sequence
  Description of Artificial Sequence: Synthetic oligonucleotide
  Target: LAMA2; (-) strand; PAM type: YTN; PAM sequence: TTC
ctatcaagtcttaggagtta

SEQ ID NO: 187390 - DNA, 20 bp, Artificial Sequence
  Description of Artificial Sequence: Synthetic oligonucleotide
  Target: LAMA2; (-) strand; PAM type: YTN; PAM sequence: CTA
ttcctatcaagtcttaggag

SEQ ID NO: 187391 - DNA, 20 bp, Artificial Sequence
  Description of Artificial Sequence: Synthetic oligonucleotide
  Target: LAMA2; (-) strand; PAM type: YTN; PAM sequence: CTC
tattcctatcaagtcttagg

SEQ ID NO: 187392 - DNA, 20 bp, Artificial Sequence
  Description of Artificial Sequence: Synthetic oligonucleotide
  Target: LAMA2; (-) strand; PAM type: YTN; PAM sequence: TTC
tctattcctatcaagtctta

SEQ ID NO: 187393 - DNA, 20 bp, Artificial Sequence
  Description of Artificial Sequence: Synthetic oligonucleotide
  Target: LAMA2; (-) strand; PAM type: YTN; PAM sequence: TTT
ctctattcctatcaagtctt

SEQ ID NO: 187394 - DNA, 20 bp, Artificial Sequence
  Description of Artificial Sequence: Synthetic oligonucleotide
  Target: LAMA2; (-) strand; PAM type: YTN; PAM sequence: TTA
tatttctctattcctatcaa

SEQ ID NO: 187395 - DNA, 20 bp, Artificial Sequence
  Description of Artificial Sequence: Synthetic oligonucleotide
  Target: LAMA2; (-) strand; PAM type: YTN; PAM sequence: TTT
atatttctctattcctatca

SEQ ID NO: 187396 - DNA, 20 bp, Artificial Sequence
  Description of Artificial Sequence: Synthetic oligonucleotide
  Target: LAMA2; (-) strand; PAM type: YTN; PAM sequence: TTC
gcatggacatgtttatattt

SEQ ID NO: 187397 - DNA, 20 bp, Artificial Sequence
  Description of Artificial Sequence: Synthetic oligonucleotide
  Target: LAMA2; (-) strand; PAM type: YTN; PAM sequence: TTA
aacacagtgttcgcatggac

SEQ ID NO: 187398 - DNA, 20 bp, Artificial Sequence
  Description of Artificial Sequence: Synthetic oligonucleotide
  Target: LAMA2; (-) strand; PAM type: YTN; PAM sequence: TTT
aaacacagtgttcgcatgga

SEQ ID NO: 187399 - DNA, 20 bp, Artificial Sequence
  Description of Artificial Sequence: Synthetic oligonucleotide
  Target: LAMA2; (-) strand; PAM type: YTN; PAM sequence: TTA
tttaaacacagtgttcgcat

SEQ ID NO: 187400 - DNA, 20 bp, Artificial Sequence
  Description of Artificial Sequence: Synthetic oligonucleotide
  Target: LAMA2; (-) strand; PAM type: YTN; PAM sequence: CTA
tgattatttaaacacagtgt

SEQ ID NO: 187401 - DNA, 20 bp, Artificial Sequence
  Description of Artificial Sequence: Synthetic oligonucleotide
  Target: LAMA2; (-) strand; PAM type: YTN; PAM sequence: TTG
ctatgattatttaaacacag

SEQ ID NO: 187402 - DNA, 20 bp, Artificial Sequence
  Description of Artificial Sequence: Synthetic oligonucleotide
  Target: LAMA2; (-) strand; PAM type: YTN; PAM sequence: CTA
tgaagaataaaattgctatg

SEQ ID NO: 187403 - DNA, 20 bp, Artificial Sequence
  Description of Artificial Sequence: Synthetic oligonucleotide
  Target: LAMA2; (-) strand; PAM type: YTN; PAM sequence: TTG
gggctatgaagaataaaatt

SEQ ID NO: 187404 - DNA, 20 bp, Artificial Sequence
  Description of Artificial Sequence: Synthetic oligonucleotide
  Target: LAMA2; (-) strand; PAM type: YTN; PAM sequence: TTT
ggggctatgaagaataaaat

SEQ ID NO: 187405 - DNA, 20 bp, Artificial Sequence
  Description of Artificial Sequence: Synthetic oligonucleotide
  Target: LAMA2; (-) strand; PAM type: YTN; PAM sequence: TTC
cagtttggggctatgaagaa

SEQ ID NO: 187406 - DNA, 20 bp, Artificial Sequence
  Description of Artificial Sequence: Synthetic oligonucleotide
  Target: LAMA2; (-) strand; PAM type: YTN; PAM sequence: TTG
ttccagtttggggctatgaa

SEQ ID NO: 187407 - DNA, 20 bp, Artificial Sequence
  Description of Artificial Sequence: Synthetic oligonucleotide
  Target: LAMA2; (-) strand; PAM type: YTN; PAM sequence: TTG
ggttgttccagtttggggct

SEQ ID NO: 187408 - DNA, 20 bp, Artificial Sequence
  Description of Artificial Sequence: Synthetic oligonucleotide
  Target: LAMA2; (-) strand; PAM type: YTN; PAM sequence: TTT
gggttgttccagtttggggc

SEQ ID NO: 187409 - DNA, 20 bp, Artificial Sequence
  Description of Artificial Sequence: Synthetic oligonucleotide
  Target: LAMA2; (-) strand; PAM type: YTN; PAM sequence: TTA
aagtacatttgggttgttcc

SEQ ID NO: 187410 - DNA, 20 bp, Artificial Sequence
  Description of Artificial Sequence: Synthetic oligonucleotide
  Target: LAMA2; (-) strand; PAM type: YTN; PAM sequence: CTA
ttaaagtacatttgggttgt

SEQ ID NO: 187411 - DNA, 20 bp, Artificial Sequence
  Description of Artificial Sequence: Synthetic oligonucleotide
  Target: LAMA2; (-) strand; PAM type: YTN; PAM sequence: TTC
aactattaaagtacatttgg

SEQ ID NO: 187412 - DNA, 20 bp, Artificial Sequence
  Description of Artificial Sequence: Synthetic oligonucleotide
  Target: LAMA2; (-) strand; PAM type: YTN; PAM sequence: TTA
atacattcaactattaaagt

SEQ ID NO: 187413 - DNA, 20 bp, Artificial Sequence
  Description of Artificial Sequence: Synthetic oligonucleotide
  Target: LAMA2; (-) strand; PAM type: YTN; PAM sequence: TTT
aatacattcaactattaaag

SEQ ID NO: 187414 - DNA, 20 bp, Artificial Sequence
  Description of Artificial Sequence: Synthetic oligonucleotide
  Target: LAMA2; (-) strand; PAM type: YTN; PAM sequence: TTT
taatacattcaactattaaa

SEQ ID NO: 187415 - DNA, 20 bp, Artificial Sequence
  Description of Artificial Sequence: Synthetic oligonucleotide
  Target: LAMA2; (-) strand; PAM type: YTN; PAM sequence: TTT
ttaatacattcaactattaa

SEQ ID NO: 187416 - DNA, 20 bp, Artificial Sequence
  Description of Artificial Sequence: Synthetic oligonucleotide
  Target: LAMA2; (-) strand; PAM type: YTN; PAM sequence: TTT
tttaatacattcaactatta

SEQ ID NO: 187417 - DNA, 20 bp, Artificial Sequence
  Description of Artificial Sequence: Synthetic oligonucleotide
  Target: LAMA2; (-) strand; PAM type: YTN; PAM sequence: CTA
tatcgtatggatatatcaca

SEQ ID NO: 187418 - DNA, 20 bp, Artificial Sequence
  Description of Artificial Sequence: Synthetic oligonucleotide
  Target: LAMA2; (-) strand; PAM type: YTN; PAM sequence: TTC
tatatcgtatggatatatca

SEQ ID NO: 187419 - DNA, 20 bp, Artificial Sequence
  Description of Artificial Sequence: Synthetic oligonucleotide
  Target: LAMA2; (-) strand; PAM type: YTN; PAM sequence: CTA
tcattctatatcgtatggat

SEQ ID NO: 187420 - DNA, 20 bp, Artificial Sequence
  Description of Artificial Sequence: Synthetic oligonucleotide
  Target: LAMA2; (-) strand; PAM type: YTN; PAM sequence: CTA
atagtatctatcattctata

SEQ ID NO: 187421 - DNA, 20 bp, Artificial Sequence
  Description of Artificial Sequence: Synthetic oligonucleotide
  Target: LAMA2; (-) strand; PAM type: YTN; PAM sequence: TTC
taatagtatctatcattcta

SEQ ID NO: 187422 - DNA, 20 bp, Artificial Sequence
  Description of Artificial Sequence: Synthetic oligonucleotide
  Target: LAMA2; (-) strand; PAM type: YTN; PAM sequence: CTA
tcattctaatagtatctatc

SEQ ID NO: 187423 - DNA, 20 bp, Artificial Sequence
  Description of Artificial Sequence: Synthetic oligonucleotide
  Target: LAMA2; (-) strand; PAM type: YTN; PAM sequence: TTC
tatcattctaatagtatcta

SEQ ID NO: 187424 - DNA, 20 bp, Artificial Sequence
  Description of Artificial Sequence: Synthetic oligonucleotide
  Target: LAMA2; (-) strand; PAM type: YTN; PAM sequence: CTG
aataatattctatcattcta

SEQ ID NO: 187425 - DNA, 20 bp, Artificial Sequence
  Description of Artificial Sequence: Synthetic oligonucleotide
  Target: LAMA2; (-) strand; PAM type: YTN; PAM sequence: CTC
tgaataatattctatcattc

SEQ ID NO: 187426 - DNA, 20 bp, Artificial Sequence
  Description of Artificial Sequence: Synthetic oligonucleotide
  Target: LAMA2; (-) strand; PAM type: YTN; PAM sequence: TTC
atctctgaataatattctat

SEQ ID NO: 187427 - DNA, 20 bp, Artificial Sequence
  Description of Artificial Sequence: Synthetic oligonucleotide
  Target: LAMA2; (-) strand; PAM type: YTN; PAM sequence: TTT
catctctgaataatattcta

SEQ ID NO: 187428 - DNA, 20 bp, Artificial Sequence
  Description of Artificial Sequence: Synthetic oligonucleotide
  Target: LAMA2; (-) strand; PAM type: YTN; PAM sequence: TTT
tcatctctgaataatattct

SEQ ID NO: 187429 - DNA, 20 bp, Artificial Sequence
  Description of Artificial Sequence: Synthetic oligonucleotide
  Target: LAMA2; (-) strand; PAM type: YTN; PAM sequence: CTT
ttcatctctgaataatattc

SEQ ID NO: 187430 - DNA, 20 bp, Artificial Sequence
  Description of Artificial Sequence: Synthetic oligonucleotide
  Target: LAMA2; (-) strand; PAM type: YTN; PAM sequence: TTC
cttttcatctctgaataata

SEQ ID NO: 187431 - DNA, 20 bp, Artificial Sequence
  Description of Artificial Sequence: Synthetic oligonucleotide
  Target: LAMA2; (-) strand; PAM type: YTN; PAM sequence: TTA
tatcagtaatacattccttt

SEQ ID NO: 187432 - DNA, 20 bp, Artificial Sequence
  Description of Artificial Sequence: Synthetic oligonucleotide
  Target: LAMA2; (-) strand; PAM type: YTN; PAM sequence: CTT
atatcagtaatacattcctt

SEQ ID NO: 187433 - DNA, 20 bp, Artificial Sequence
  Description of Artificial Sequence: Synthetic oligonucleotide
  Target: LAMA2; (-) strand; PAM type: YTN; PAM sequence: TTG
cttatatcagtaatacattc

SEQ ID NO: 187434 - DNA, 20 bp, Artificial Sequence
  Description of Artificial Sequence: Synthetic oligonucleotide
  Target: LAMA2; (-) strand; PAM type: YTN; PAM sequence: TTG
gaggtatagtcatgttgctt

SEQ ID NO: 187435 - DNA, 20 bp, Artificial Sequence
  Description of Artificial Sequence: Synthetic oligonucleotide
  Target: LAMA2; (-) strand; PAM type: YTN; PAM sequence: TTT
ggaggtatagtcatgttgct

SEQ ID NO: 187436 - DNA, 20 bp, Artificial Sequence
  Description of Artificial Sequence: Synthetic oligonucleotide
  Target: LAMA2; (-) strand; PAM type: YTN; PAM sequence: TTT
tggaggtatagtcatgttgc

SEQ ID NO: 187437 - DNA, 20 bp, Artificial Sequence
  Description of Artificial Sequence: Synthetic oligonucleotide
  Target: LAMA2; (-) strand; PAM type: YTN; PAM sequence: TTG
caacatgttttggaggtata

SEQ ID NO: 187438 - DNA, 20 bp, Artificial Sequence
  Description of Artificial Sequence: Synthetic oligonucleotide
  Target: LAMA2; (-) strand; PAM type: YTN; PAM sequence: TTT
gcaacatgttttggaggtat

SEQ ID NO: 187439 - DNA, 20 bp, Artificial Sequence
  Description of Artificial Sequence: Synthetic oligonucleotide
  Target: LAMA2; (-) strand; PAM type: YTN; PAM sequence: CTT
tgcaacatgttttggaggta

SEQ ID NO: 187440 - DNA, 20 bp, Artificial Sequence
  Description of Artificial Sequence: Synthetic oligonucleotide
  Target: LAMA2; (-) strand; PAM type: YTN; PAM sequence: TTC
actttgcaacatgttttgga

SEQ ID NO: 187441 - DNA, 20 bp, Artificial Sequence
  Description of Artificial Sequence: Synthetic oligonucleotide
  Target: LAMA2; (-) strand; PAM type: YTN; PAM sequence: TTT
cactttgcaacatgttttgg

SEQ ID NO: 187442 - DNA, 20 bp, Artificial Sequence
  Description of Artificial Sequence: Synthetic oligonucleotide
  Target: LAMA2; (-) strand; PAM type: YTN; PAM sequence: CTT
tcactttgcaacatgttttg

SEQ ID NO: 187443 - DNA, 20 bp, Artificial Sequence
  Description of Artificial Sequence: Synthetic oligonucleotide
  Target: LAMA2; (-) strand; PAM type: YTN; PAM sequence: TTC
tttcactttgcaacatgttt

SEQ ID NO: 187444 - DNA, 20 bp, Artificial Sequence
  Description of Artificial Sequence: Synthetic oligonucleotide
  Target: LAMA2; (-) strand; PAM type: YTN; PAM sequence: CTT
ctttcactttgcaacatgtt

SEQ ID NO: 187445 - DNA, 20 bp, Artificial Sequence
  Description of Artificial Sequence: Synthetic oligonucleotide
  Target: LAMA2; (-) strand; PAM type: YTN; PAM sequence: CTG
gcttctttcactttgcaaca

SEQ ID NO: 187446 - DNA, 20 bp, Artificial Sequence
  Description of Artificial Sequence: Synthetic oligonucleotide
  Target: LAMA2; (-) strand; PAM type: YTN; PAM sequence: TTG
tgtctggcttctttcacttt

SEQ ID NO: 187447 - DNA, 20 bp, Artificial Sequence
  Description of Artificial Sequence: Synthetic oligonucleotide
  Target: LAMA2; (-) strand; PAM type: YTN; PAM sequence: TTT
gtgtctggcttctttcactt

SEQ ID NO: 187448 - DNA, 20 bp, Artificial Sequence
  Description of Artificial Sequence: Synthetic oligonucleotide
  Target: LAMA2; (-) strand; PAM type: YTN; PAM sequence: TTT
tgtgtctggcttctttcact

SEQ ID NO: 187449 - DNA, 20 bp, Artificial Sequence
  Description of Artificial Sequence: Synthetic oligonucleotide
  Target: LAMA2; (-) strand; PAM type: YTN; PAM sequence: CTT
ttgtgtctggcttctttcac

SEQ ID NO: 187450 - DNA, 20 bp, Artificial Sequence
  Description of Artificial Sequence: Synthetic oligonucleotide
  Target: LAMA2; (-) strand; PAM type: YTN; PAM sequence: TTC
atgtaaatacaataataaaa

SEQ ID NO: 187451 - DNA, 20 bp, Artificial Sequence
  Description of Artificial Sequence: Synthetic oligonucleotide
  Target: LAMA2; (-) strand; PAM type: YTN; PAM sequence: TTT
catgtaaatacaataataaa

SEQ ID NO: 187452 - DNA, 20 bp, Artificial Sequence
  Description of Artificial Sequence: Synthetic oligonucleotide
  Target: LAMA2; (-) strand; PAM type: YTN; PAM sequence: CTC
atatttcatgtaaatacaat

SEQ ID NO: 187453 - DNA, 20 bp, Artificial Sequence
  Description of Artificial Sequence: Synthetic oligonucleotide
  Target: LAMA2; (-) strand; PAM type: YTN; PAM sequence: TTC
tcatatttcatgtaaataca

SEQ ID NO: 187454 - DNA, 20 bp, Artificial Sequence
  Description of Artificial Sequence: Synthetic oligonucleotide
  Target: LAMA2; (-) strand; PAM type: YTN; PAM sequence: CTA
ttctcatatttcatgtaaat

SEQ ID NO: 187455 - DNA, 20 bp, Artificial Sequence
  Description of Artificial Sequence: Synthetic oligonucleotide
  Target: LAMA2; (-) strand; PAM type: YTN; PAM sequence: TTA
taactattctcatatttcat

SEQ ID NO: 187456 - DNA, 20 bp, Artificial Sequence
  Description of Artificial Sequence: Synthetic oligonucleotide
  Target: LAMA2; (-) strand; PAM type: YTN; PAM sequence: CTA
tagattataactattctcat

SEQ ID NO: 187457 - DNA, 20 bp, Artificial Sequence
  Description of Artificial Sequence: Synthetic oligonucleotide
  Target: LAMA2; (-) strand; PAM type: YTN; PAM sequence: TTG
tcactatagattataactat

SEQ ID NO: 187458 - DNA, 20 bp, Artificial Sequence
  Description of Artificial Sequence: Synthetic oligonucleotide
  Target: LAMA2; (-) strand; PAM type: YTN; PAM sequence: TTT
gtcactatagattataacta

SEQ ID NO: 187459 - DNA, 20 bp, Artificial Sequence
  Description of Artificial Sequence: Synthetic oligonucleotide
  Target: LAMA2; (-) strand; PAM type: YTN; PAM sequence: TTT
tgtcactatagattataact

SEQ ID NO: 187460 - DNA, 20 bp, Artificial Sequence
  Description of Artificial Sequence: Synthetic oligonucleotide
  Target: LAMA2; (-) strand; PAM type: YTN; PAM sequence: CTA
attttgtcactatagattat

SEQ ID NO: 187461 - DNA, 20 bp, Artificial Sequence
  Description of Artificial Sequence: Synthetic oligonucleotide
  Target: LAMA2; (-) strand; PAM type: YTN; PAM sequence: CTG
atctaattttgtcactatag

SEQ ID NO: 187462 - DNA, 20 bp, Artificial Sequence
  Description of Artificial Sequence: Synthetic oligonucleotide
  Target: LAMA2; (-) strand; PAM type: YTN; PAM sequence: CTG
ctgatctaattttgtcacta

SEQ ID NO: 187463 - DNA, 20 bp, Artificial Sequence
  Description of Artificial Sequence: Synthetic oligonucleotide
  Target: LAMA2; (-) strand; PAM type: YTN; PAM sequence: TTC
ccagaaaaaggcaactgctg

SEQ ID NO: 187464 - DNA, 20 bp, Artificial Sequence
  Description of Artificial Sequence: Synthetic oligonucleotide
  Target: LAMA2; (-) strand; PAM type: YTN; PAM sequence: CTC
cattcccagaaaaaggcaac

SEQ ID NO: 187465 - DNA, 20 bp, Artificial Sequence
  Description of Artificial Sequence: Synthetic oligonucleotide
  Target: LAMA2; (-) strand; PAM type: YTN; PAM sequence: TTG
caataaatcccccaacctcc

SEQ ID NO: 187466 - DNA, 20 bp, Artificial Sequence
  Description of Artificial Sequence: Synthetic oligonucleotide
  Target: LAMA2; (-) strand; PAM type: YTN; PAM sequence: TTT
gcaataaatcccccaacctc

SEQ ID NO: 187467 - DNA, 20 bp, Artificial Sequence
  Description of Artificial Sequence: Synthetic oligonucleotide
  Target: LAMA2; (-) strand; PAM type: YTN; PAM sequence: TTT
tgcaataaatcccccaacct

SEQ ID NO: 187468 - DNA, 20 bp, Artificial Sequence
  Description of Artificial Sequence: Synthetic oligonucleotide
  Target: LAMA2; (-) strand; PAM type: YTN; PAM sequence: CTT
ttgcaataaatcccccaacc

SEQ ID NO: 187469 - DNA, 20 bp, Artificial Sequence
  Description of Artificial Sequence: Synthetic oligonucleotide
  Target: LAMA2; (-) strand; PAM type: YTN; PAM sequence: CTG
accttttgcaataaatcccc

SEQ ID NO: 187470 - DNA, 20 bp, Artificial Sequence
  Description of Artificial Sequence: Synthetic oligonucleotide
  Target: LAMA2; (-) strand; PAM type: YTN; PAM sequence: TTC
tgaccttttgcaataaatcc

SEQ ID NO: 187471 - DNA, 20 bp, Artificial Sequence
  Description of Artificial Sequence: Synthetic oligonucleotide
  Target: LAMA2; (-) strand; PAM type: YTN; PAM sequence: TTT
ctgaccttttgcaataaatc

SEQ ID NO: 187472 - DNA, 20 bp, Artificial Sequence
  Description of Artificial Sequence: Synthetic oligonucleotide
  Target: LAMA2; (-) strand; PAM type: YTN; PAM sequence: CTT
tctgaccttttgcaataaat

SEQ ID NO: 187473 - DNA, 20 bp, Artificial Sequence
  Description of Artificial Sequence: Synthetic oligonucleotide
  Target: LAMA2; (-) strand; PAM type: YTN; PAM sequence: TTC
tttctgaccttttgcaataa

SEQ ID NO: 187474 - DNA, 20 bp, Artificial Sequence
  Description of Artificial Sequence: Synthetic oligonucleotide
  Target: LAMA2; (-) strand; PAM type: YTN; PAM sequence: TTT
ctttctgaccttttgcaata

SEQ ID NO: 187475 - DNA, 20 bp, Artificial Sequence
  Description of Artificial Sequence: Synthetic oligonucleotide
  Target: LAMA2; (-) strand; PAM type: YTN; PAM sequence: TTT
tctttctgaccttttgcaat

SEQ ID NO: 187476 - DNA, 20 bp, Artificial Sequence
  Description of Artificial Sequence: Synthetic oligonucleotide
  Target: LAMA2; (-) strand; PAM type: YTN; PAM sequence: CTC
aaaaagttttctttctgacc

SEQ ID NO: 187477 - DNA, 20 bp, Artificial Sequence
  Description of Artificial Sequence: Synthetic oligonucleotide
  Target: LAMA2; (-) strand; PAM type: YTN; PAM sequence: CTA
taatctcaaaaagttttctt

SEQ ID NO: 187478 - DNA, 20 bp, Artificial Sequence
  Description of Artificial Sequence: Synthetic oligonucleotide
  Target: LAMA2; (-) strand; PAM type: YTN; PAM sequence: TTC
tataatctcaaaaagttttc

SEQ ID NO: 187479 - DNA, 20 bp, Artificial Sequence
  Description of Artificial Sequence: Synthetic oligonucleotide
  Target: LAMA2; (-) strand; PAM type: YTN; PAM sequence: TTT
ctataatctcaaaaagtttt

SEQ ID NO: 187480 - DNA, 20 bp, Artificial Sequence
  Description of Artificial Sequence: Synthetic oligonucleotide
  Target: LAMA2; (-) strand; PAM type: YTN; PAM sequence: CTA
tttctataatctcaaaaagt

SEQ ID NO: 187481 - DNA, 20 bp, Artificial Sequence
  Description of Artificial Sequence: Synthetic oligonucleotide
  Target: LAMA2; (-) strand; PAM type: YTN; PAM sequence: CTG
acaaagtacccaatacatag

SEQ ID NO: 187482 - DNA, 20 bp, Artificial Sequence
  Description of Artificial Sequence: Synthetic oligonucleotide
  Target: LAMA2; (-) strand; PAM type: YTN; PAM sequence: CTC
atctgacaaagtacccaata

SEQ ID NO: 187483 - DNA, 20 bp, Artificial Sequence
  Description of Artificial Sequence: Synthetic oligonucleotide
  Target: LAMA2; (-) strand; PAM type: YTN; PAM sequence: TTA
gatgtaaatactcatctgac

SEQ ID NO: 187484 - DNA, 20 bp, Artificial Sequence
  Description of Artificial Sequence: Synthetic oligonucleotide
  Target: LAMA2; (-) strand; PAM type: YTN; PAM sequence: TTT
agatgtaaatactcatctga

SEQ ID NO: 187485 - DNA, 20 bp, Artificial Sequence
  Description of Artificial Sequence: Synthetic oligonucleotide
  Target: LAMA2; (-) strand; PAM type: YTN; PAM sequence: TTT
tagatgtaaatactcatctg

SEQ ID NO: 187486 - DNA, 20 bp, Artificial Sequence
  Description of Artificial Sequence: Synthetic oligonucleotide
  Target: LAMA2; (-) strand; PAM type: YTN; PAM sequence: TTT
ttagatgtaaatactcatct

SEQ ID NO: 187487 - DNA, 20 bp, Artificial Sequence
  Description of Artificial Sequence: Synthetic oligonucleotide
  Target: LAMA2; (-) strand; PAM type: YTN; PAM sequence: TTT
tttagatgtaaatactcatc

SEQ ID NO: 187488 - DNA, 20 bp, Artificial Sequence
  Description of Artificial Sequence: Synthetic oligonucleotide
  Target: LAMA2; (-) strand; PAM type: YTN; PAM sequence: TTG
aaacattttttagatgtaaa

SEQ ID NO: 187489 - DNA, 20 bp, Artificial Sequence
  Description of Artificial Sequence: Synthetic oligonucleotide
  Target: LAMA2; (-) strand; PAM type: YTN; PAM sequence: TTT
gaaacattttttagatgtaa

SEQ ID NO: 187490 - DNA, 20 bp, Artificial Sequence
  Description of Artificial Sequence: Synthetic oligonucleotide
  Target: LAMA2; (-) strand; PAM type: YTN; PAM sequence: CTC
atttgaaacattttttagat

SEQ ID NO: 187491 - DNA, 20 bp, Artificial Sequence
  Description of Artificial Sequence: Synthetic oligonucleotide
  Target: LAMA2; (-) strand; PAM type: YTN; PAM sequence: TTA
cacacaataaatatgctcat

SEQ ID NO: 187492 - DNA, 20 bp, Artificial Sequence
  Description of Artificial Sequence: Synthetic oligonucleotide
  Target: LAMA2; (-) strand; PAM type: YTN; PAM sequence: TTT
acacacaataaatatgctca

SEQ ID NO: 187493 - DNA, 20 bp, Artificial Sequence
  Description of Artificial Sequence: Synthetic oligonucleotide
  Target: LAMA2; (-) strand; PAM type: YTN; PAM sequence: CTA
aataaggtacaatttacaca

SEQ ID NO: 187494 - DNA, 20 bp, Artificial Sequence
  Description of Artificial Sequence: Synthetic oligonucleotide
  Target: LAMA2; (-) strand; PAM type: YTN; PAM sequence: TTC
caaataaacctaaataaggt

SEQ ID NO: 187495 - DNA, 20 bp, Artificial Sequence
  Description of Artificial Sequence: Synthetic oligonucleotide
  Target: LAMA2; (-) strand; PAM type: YTN; PAM sequence: TTT
ccaaataaacctaaataagg

SEQ ID NO: 187496 - DNA, 20 bp, Artificial Sequence
  Description of Artificial Sequence: Synthetic oligonucleotide
  Target: LAMA2; (-) strand; PAM type: YTN; PAM sequence: TTT
tccaaataaacctaaataag

SEQ ID NO: 187497 - DNA, 20 bp, Artificial Sequence
  Description of Artificial Sequence: Synthetic oligonucleotide
  Target: LAMA2; (-) strand; PAM type: YTN; PAM sequence: TTT
ttccaaataaacctaaataa

SEQ ID NO: 187498 - DNA, 20 bp, Artificial Sequence
  Description of Artificial Sequence: Synthetic oligonucleotide
  Target: LAMA2; (-) strand; PAM type: YTN; PAM sequence: TTT
tttccaaataaacctaaata

SEQ ID NO: 187499 - DNA, 20 bp, Artificial Sequence
  Description of Artificial Sequence: Synthetic oligonucleotide
  Target: LAMA2; (-) strand; PAM type: YTN; PAM sequence: CTA
tattttttccaaataaacct

SEQ ID NO: 187500 - DNA, 20 bp, Artificial Sequence
  Description of Artificial Sequence: Synthetic oligonucleotide
  Target: LAMA2; (-) strand; PAM type: YTN; PAM sequence: TTA
gagctatattttttccaaat

SEQ ID NO: 187501 - DNA, 20 bp, Artificial Sequence
  Description of Artificial Sequence: Synthetic oligonucleotide
  Target: LAMA2; (-) strand; PAM type: YTN; PAM sequence: TTT
agagctatattttttccaaa

SEQ ID NO: 187502 - DNA, 20 bp, Artificial Sequence
  Description of Artificial Sequence: Synthetic oligonucleotide
  Target: LAMA2; (-) strand; PAM type: YTN; PAM sequence: TTA
aaatgaaccagtatatttag

SEQ ID NO: 187503 - DNA, 20 bp, Artificial Sequence
  Description of Artificial Sequence: Synthetic oligonucleotide
  Target: LAMA2; (-) strand; PAM type: YTN; PAM sequence: TTA
acccaaattaaaatgaacca

SEQ ID NO: 187504 - DNA, 20 bp, Artificial Sequence
  Description of Artificial Sequence: Synthetic oligonucleotide
  Target: LAMA2; (-) strand; PAM type: YTN; PAM sequence: TTT
aacccaaattaaaatgaacc

SEQ ID NO: 187505 - DNA, 20 bp, Artificial Sequence
  Description of Artificial Sequence: Synthetic oligonucleotide
  Target: LAMA2; (-) strand; PAM type: YTN; PAM sequence: TTA
aatatttaacccaaattaaa

SEQ ID NO: 187506 - DNA, 20 bp, Artificial Sequence
  Description of Artificial Sequence: Synthetic oligonucleotide
  Target: LAMA2; (-) strand; PAM type: YTN; PAM sequence: CTT
aaatatttaacccaaattaa

SEQ ID NO: 187507 - DNA, 20 bp, Artificial Sequence
  Description of Artificial Sequence: Synthetic oligonucleotide
  Target: LAMA2; (-) strand; PAM type: YTN; PAM sequence: TTC
ttaaatatttaacccaaatt

SEQ ID NO: 187508 - DNA, 20 bp, Artificial Sequence
  Description of Artificial Sequence: Synthetic oligonucleotide
  Target: LAMA2; (-) strand; PAM type: YTN; PAM sequence: TTC
agcacatggaaaaaattctt

SEQ ID NO: 187509 - DNA, 20 bp, Artificial Sequence
  Description of Artificial Sequence: Synthetic oligonucleotide
  Target: LAMA2; (-) strand; PAM type: YTN; PAM sequence: TTG
attcagcacatggaaaaaat

SEQ ID NO: 187510 - DNA, 20 bp, Artificial Sequence
  Description of Artificial Sequence: Synthetic oligonucleotide
  Target: LAMA2; (-) strand; PAM type: YTN; PAM sequence: TTT
gattcagcacatggaaaaaa

SEQ ID NO: 187511 - DNA, 20 bp, Artificial Sequence
  Description of Artificial Sequence: Synthetic oligonucleotide
  Target: LAMA2; (-) strand; PAM type: YTN; PAM sequence: TTG
tttgattcagcacatggaaa

SEQ ID NO: 187512 - DNA, 20 bp, Artificial Sequence
  Description of Artificial Sequence: Synthetic oligonucleotide
  Target: LAMA2; (-) strand; PAM type: YTN; PAM sequence: CTT
gtttgattcagcacatggaa

SEQ ID NO: 187513 - DNA, 20 bp, Artificial Sequence
  Description of Artificial Sequence: Synthetic oligonucleotide
  Target: LAMA2; (-) strand; PAM type: YTN; PAM sequence: CTA
cttgtttgattcagcacatg

SEQ ID NO: 187514 - DNA, 20 bp, Artificial Sequence
  Description of Artificial Sequence: Synthetic oligonucleotide
  Target: LAMA2; (-) strand; PAM type: YTN; PAM sequence: CTC
tacttgtttgattcagcaca

SEQ ID NO: 187515 - DNA, 20 bp, Artificial Sequence
  Description of Artificial Sequence: Synthetic oligonucleotide
  Target: LAMA2; (-) strand; PAM type: YTN; PAM sequence: CTG
tcaactctacttgtttgatt

SEQ ID NO: 187516 - DNA, 20 bp, Artificial Sequence
  Description of Artificial Sequence: Synthetic oligonucleotide
  Target: LAMA2; (-) strand; PAM type: YTN; PAM sequence: CTC
cactgtcaactctacttgtt

SEQ ID NO: 187517 - DNA, 20 bp, Artificial Sequence
  Description of Artificial Sequence: Synthetic oligonucleotide
  Target: LAMA2; (-) strand; PAM type: YTN; PAM sequence: CTA
tgatctccactgtcaactct

SEQ ID NO: 187518 - DNA, 20 bp, Artificial Sequence
  Description of Artificial Sequence: Synthetic oligonucleotide
  Target: LAMA2; (-) strand; PAM type: YTN; PAM sequence: TTG
agaataagactatgatctcc

SEQ ID NO: 187519 - DNA, 20 bp, Artificial Sequence
  Description of Artificial Sequence: Synthetic oligonucleotide
  Target: LAMA2; (-) strand; PAM type: YTN; PAM sequence: CTT
gagaataagactatgatctc

SEQ ID NO: 187520 - DNA, 20 bp, Artificial Sequence
  Description of Artificial Sequence: Synthetic oligonucleotide
  Target: LAMA2; (-) strand; PAM type: YTN; PAM sequence: TTA
catgaaaatgccttgagaat

SEQ ID NO: 187521 - DNA, 20 bp, Artificial Sequence
  Description of Artificial Sequence: Synthetic oligonucleotide
  Target: LAMA2; (-) strand; PAM type: YTN; PAM sequence: TTT
acatgaaaatgccttgagaa

SEQ ID NO: 187522 - DNA, 20 bp, Artificial Sequence
  Description of Artificial Sequence: Synthetic oligonucleotide
  Target: LAMA2; (-) strand; PAM type: YTN; PAM sequence: TTT
tacatgaaaatgccttgaga

SEQ ID NO: 187523 - DNA, 20 bp, Artificial Sequence
  Description of Artificial Sequence: Synthetic oligonucleotide
  Target: LAMA2; (-) strand; PAM type: YTN; PAM sequence: CTA
ttttacatgaaaatgccttg

SEQ ID NO: 187524 - DNA, 20 bp, Artificial Sequence
  Description of Artificial Sequence: Synthetic oligonucleotide
  Target: LAMA2; (-) strand; PAM type: YTN; PAM sequence: TTC
ctattttacatgaaaatgcc

SEQ ID NO: 187525 - DNA, 20 bp, Artificial Sequence
  Description of Artificial Sequence: Synthetic oligonucleotide
  Target: LAMA2; (-) strand; PAM type: YTN; PAM sequence: CTG
agttcctattttacatgaaa

SEQ ID NO: 187526 - DNA, 20 bp, Artificial Sequence
  Description of Artificial Sequence: Synthetic oligonucleotide
  Target: LAMA2; (-) strand; PAM type: YTN; PAM sequence: TTA
cctgagttcctattttacat

SEQ ID NO: 187527 - DNA, 20 bp, Artificial Sequence
  Description of Artificial Sequence: Synthetic oligonucleotide
  Target: LAMA2; (-) strand; PAM type: YTN; PAM sequence: CTG
cagttacctgagttcctatt

SEQ ID NO: 187528 - DNA, 20 bp, Artificial Sequence
  Description of Artificial Sequence: Synthetic oligonucleotide
  Target: LAMA2; (-) strand; PAM type: YTN; PAM sequence: TTA
ctgcagttacctgagttcct

SEQ ID NO: 187529 - DNA, 20 bp, Artificial Sequence
  Description of Artificial Sequence: Synthetic oligonucleotide
  Target: LAMA2; (-) strand; PAM type: YTN; PAM sequence: CTG
cagttactgcagttacctga

SEQ ID NO: 187530 - DNA, 20 bp, Artificial Sequence
  Description of Artificial Sequence: Synthetic oligonucleotide
  Target: LAMA2; (-) strand; PAM type: YTN; PAM sequence: TTC
tgcagttactgcagttacct

SEQ ID NO: 187531 - DNA, 20 bp, Artificial Sequence
  Description of Artificial Sequence: Synthetic oligonucleotide
  Target: LAMA2; (-) strand; PAM type: YTN; PAM sequence: TTT
ctgcagttactgcagttacc

SEQ ID NO: 187532 - DNA, 20 bp, Artificial Sequence
  Description of Artificial Sequence: Synthetic oligonucleotide
  Target: LAMA2; (-) strand; PAM type: YTN; PAM sequence: TTT
tctgcagttactgcagttac

SEQ ID NO: 187533 - DNA, 20 bp, Artificial Sequence
  Description of Artificial Sequence: Synthetic oligonucleotide
  Target: LAMA2; (-) strand; PAM type: YTN; PAM sequence: CTT
ttctgcagttactgcagtta

SEQ ID NO: 187534 - DNA, 20 bp, Artificial Sequence
  Description of Artificial Sequence: Synthetic oligonucleotide
  Target: LAMA2; (-) strand; PAM type: YTN; PAM sequence: CTG
cttttctgcagttactgcag

SEQ ID NO: 187535 - DNA, 20 bp, Artificial Sequence
  Description of Artificial Sequence: Synthetic oligonucleotide
  Target: LAMA2; (-) strand; PAM type: YTN; PAM sequence: TTG
tacctgcttttctgcagtta

SEQ ID NO: 187536 - DNA, 20 bp, Artificial Sequence
  Description of Artificial Sequence: Synthetic oligonucleotide
  Target: LAMA2; (-) strand; PAM type: YTN; PAM sequence: TTT
gtacctgcttttctgcagtt

SEQ ID NO: 187537 - DNA, 20 bp, Artificial Sequence
  Description of Artificial Sequence: Synthetic oligonucleotide
  Target: LAMA2; (-) strand; PAM type: YTN; PAM sequence: TTA
taatcaatatttgtacctgc

SEQ ID NO: 187538 - DNA, 20 bp, Artificial Sequence
  Description of Artificial Sequence: Synthetic oligonucleotide
  Target: LAMA2; (-) strand; PAM type: YTN; PAM sequence: TTT
ataatcaatatttgtacctg

SEQ ID NO: 187539 - DNA, 20 bp, Artificial Sequence
  Description of Artificial Sequence: Synthetic oligonucleotide
  Target: LAMA2; (-) strand; PAM type: YTN; PAM sequence: TTT
tataatcaatatttgtacct

SEQ ID NO: 187540 - DNA, 20 bp, Artificial Sequence
  Description of Artificial Sequence: Synthetic oligonucleotide
  Target: LAMA2; (-) strand; PAM type: YTN; PAM sequence: TTC
ccaggattttataatcaata

SEQ ID NO: 187541 - DNA, 20 bp, Artificial Sequence
  Description of Artificial Sequence: Synthetic oligonucleotide
  Target: LAMA2; (-) strand; PAM type: YTN; PAM sequence: TTT
cccaggattttataatcaat

SEQ ID NO: 187542 - DNA, 20 bp, Artificial Sequence
  Description of Artificial Sequence: Synthetic oligonucleotide
  Target: LAMA2; (-) strand; PAM type: YTN; PAM sequence: TTT
tcccaggattttataatcaa

SEQ ID NO: 187543 - DNA, 20 bp, Artificial Sequence
  Description of Artificial Sequence: Synthetic oligonucleotide
  Target: LAMA2; (-) strand; PAM type: YTN; PAM sequence: TTA
cattttcccaggattttata

SEQ ID NO: 187544 - DNA, 20 bp, Artificial Sequence
  Description of Artificial Sequence: Synthetic oligonucleotide
  Target: LAMA2; (-) strand; PAM type: YTN; PAM sequence: TTT
acattttcccaggattttat

SEQ ID NO: 187545 - DNA, 20 bp, Artificial Sequence
  Description of Artificial Sequence: Synthetic oligonucleotide
  Target: LAMA2; (-) strand; PAM type: YTN; PAM sequence: CTT
tacattttcccaggatttta

SEQ ID NO: 187546 - DNA, 20 bp, Artificial Sequence
  Description of Artificial Sequence: Synthetic oligonucleotide
  Target: LAMA2; (-) strand; PAM type: YTN; PAM sequence: CTC
tttacattttcccaggattt

SEQ ID NO: 187547 - DNA, 20 bp, Artificial Sequence
  Description of Artificial Sequence: Synthetic oligonucleotide
  Target: LAMA2; (-) strand; PAM type: YTN; PAM sequence: TTC
ctctttacattttcccagga

SEQ ID NO: 187548 - DNA, 20 bp, Artificial Sequence
  Description of Artificial Sequence: Synthetic oligonucleotide
  Target: LAMA2; (-) strand; PAM type: YTN; PAM sequence: CTT
cctctttacattttcccagg

SEQ ID NO: 187549 - DNA, 20 bp, Artificial Sequence
  Description of Artificial Sequence: Synthetic oligonucleotide
  Target: LAMA2; (-) strand; PAM type: YTN; PAM sequence: CTA
tccccttcctctttacattt

SEQ ID NO: 187550 - DNA, 20 bp, Artificial Sequence
  Description of Artificial Sequence: Synthetic oligonucleotide
  Target: LAMA2; (-) strand; PAM type: YTN; PAM sequence: CTC
tatccccttcctctttacat

SEQ ID NO: 187551 - DNA, 20 bp, Artificial Sequence
  Description of Artificial Sequence: Synthetic oligonucleotide
  Target: LAMA2; (-) strand; PAM type: YTN; PAM sequence: TTC
cctctatccccttcctcttt

SEQ ID NO: 187552 - DNA, 20 bp, Artificial Sequence
  Description of Artificial Sequence: Synthetic oligonucleotide
  Target: LAMA2; (-) strand; PAM type: YTN; PAM sequence: TTG
tggaatgaaaatataccatg

SEQ ID NO: 187553 - DNA, 20 bp, Artificial Sequence
  Description of Artificial Sequence: Synthetic oligonucleotide
  Target: LAMA2; (-) strand; PAM type: YTN; PAM sequence: CTA
attgtggaatgaaaatatac

SEQ ID NO: 187554 - DNA, 20 bp, Artificial Sequence
  Description of Artificial Sequence: Synthetic oligonucleotide
  Target: LAMA2; (-) strand; PAM type: YTN; PAM sequence: CTC
taattgtggaatgaaaatat

SEQ ID NO: 187555 - DNA, 20 bp, Artificial Sequence
  Description of Artificial Sequence: Synthetic oligonucleotide
  Target: LAMA2; (-) strand; PAM type: YTN; PAM sequence: CTA
actctaattgtggaatgaaa

SEQ ID NO: 187556 - DNA, 20 bp, Artificial Sequence
  Description of Artificial Sequence: Synthetic oligonucleotide
  Target: LAMA2; (-) strand; PAM type: YTN; PAM sequence: CTG
ctaactctaattgtggaatg

SEQ ID NO: 187557 - DNA, 20 bp, Artificial Sequence
  Description of Artificial Sequence: Synthetic oligonucleotide
  Target: LAMA2; (-) strand; PAM type: YTN; PAM sequence: TTA
taaaaaggaaaatcagaatg

SEQ ID NO: 187558 - DNA, 20 bp, Artificial Sequence
  Description of Artificial Sequence: Synthetic oligonucleotide
  Target: LAMA2; (-) strand; PAM type: YTN; PAM sequence: TTT
ataaaaaggaaaatcagaat

SEQ ID NO: 187559 - DNA, 20 bp, Artificial Sequence
  Description of Artificial Sequence: Synthetic oligonucleotide
  Target: LAMA2; (-) strand; PAM type: YTN; PAM sequence: CTA
ataaataataaaaaatattt

SEQ ID NO: 187560 - DNA, 20 bp, Artificial Sequence
  Description of Artificial Sequence: Synthetic oligonucleotide
  Target: LAMA2; (-) strand; PAM type: YTN; PAM sequence: TTA
atctaataaataataaaaaa

SEQ ID NO: 187561 - DNA, 20 bp, Artificial Sequence
  Description of Artificial Sequence: Synthetic oligonucleotide
  Target: LAMA2; (-) strand; PAM type: YTN; PAM sequence: TTA
gttaatctaataaataataa

SEQ ID NO: 187562 - DNA, 20 bp, Artificial Sequence
  Description of Artificial Sequence: Synthetic oligonucleotide
  Target: LAMA2; (-) strand; PAM type: YTN; PAM sequence: CTC
aaattagttaatctaataaa

SEQ ID NO: 187563 - DNA, 20 bp, Artificial Sequence
  Description of Artificial Sequence: Synthetic oligonucleotide
  Target: LAMA2; (-) strand; PAM type: YTN; PAM sequence: CTC
aactcaaattagttaatcta

SEQ ID NO: 187564 - DNA, 20 bp, Artificial Sequence
  Description of Artificial Sequence: Synthetic oligonucleotide
  Target: LAMA2; (-) strand; PAM type: YTN; PAM sequence: TTG
tggcctcaactcaaattagt

SEQ ID NO: 187565 - DNA, 20 bp, Artificial Sequence
  Description of Artificial Sequence: Synthetic oligonucleotide
  Target: LAMA2; (-) strand; PAM type: YTN; PAM sequence: CTC
aaccatgttgtggcctcaac

SEQ ID NO: 187566 - DNA, 20 bp, Artificial Sequence
  Description of Artificial Sequence: Synthetic oligonucleotide
  Target: LAMA2; (-) strand; PAM type: YTN; PAM sequence: TTA
ctcaaccatgttgtggcctc

SEQ ID NO: 187567 - DNA, 20 bp, Artificial Sequence
  Description of Artificial Sequence: Synthetic oligonucleotide
  Target: LAMA2; (-) strand; PAM type: YTN; PAM sequence: TTT
actcaaccatgttgtggcct

SEQ ID NO: 187568 - DNA, 20 bp, Artificial Sequence
  Description of Artificial Sequence: Synthetic oligonucleotide
  Target: LAMA2; (-) strand; PAM type: YTN; PAM sequence: TTT
tactcaaccatgttgtggcc

SEQ ID NO: 187569 - DNA, 20 bp, Artificial Sequence
  Description of Artificial Sequence: Synthetic oligonucleotide
  Target: LAMA2; (-) strand; PAM type: YTN; PAM sequence: TTT
ttactcaaccatgttgtggc

SEQ ID NO: 187570 - DNA, 20 bp, Artificial Sequence
  Description of Artificial Sequence: Synthetic oligonucleotide
  Target: LAMA2; (-) strand; PAM type: YTN; PAM sequence: TTA
tttttactcaaccatgttgt

SEQ ID NO: 187571 - DNA, 20 bp, Artificial Sequence
  Description of Artificial Sequence: Synthetic oligonucleotide
  Target: LAMA2; (-) strand; PAM type: YTN; PAM sequence: TTA
taaaaaggaaaatgattatt

SEQ ID NO: 187572 - DNA, 20 bp, Artificial Sequence
  Description of Artificial Sequence: Synthetic oligonucleotide
  Target: LAMA2; (-) strand; PAM type: YTN; PAM sequence: TTT
ataaaaaggaaaatgattat

SEQ ID NO: 187573 - DNA, 20 bp, Artificial Sequence
  Description of Artificial Sequence: Synthetic oligonucleotide
  Target: LAMA2; (-) strand; PAM type: YTN; PAM sequence: TTG
aatatttataaaaaggaaaa

SEQ ID NO: 187574 - DNA, 20 bp, Artificial Sequence
  Description of Artificial Sequence: Synthetic oligonucleotide
  Target: LAMA2; (-) strand; PAM type: YTN; PAM sequence: TTA
ttgaatatttataaaaagga

SEQ ID NO: 187575 - DNA, 20 bp, Artificial Sequence
  Description of Artificial Sequence: Synthetic oligonucleotide
  Target: LAMA2; (-) strand; PAM type: YTN; PAM sequence: TTT
attgaatatttataaaaagg

SEQ ID NO: 187576 - DNA, 20 bp, Artificial Sequence
  Description of Artificial Sequence: Synthetic oligonucleotide
  Target: LAMA2; (-) strand; PAM type: YTN; PAM sequence: TTT
tattgaatatttataaaaag

SEQ ID NO: 187577 - DNA, 20 bp, Artificial Sequence
  Description of Artificial Sequence: Synthetic oligonucleotide
  Target: LAMA2; (-) strand; PAM type: YTN; PAM sequence: TTA
taaaaaggaaaagttttatt

SEQ ID NO: 187578 - DNA, 20 bp, Artificial Sequence
  Description of Artificial Sequence: Synthetic oligonucleotide
  Target: LAMA2; (-) strand; PAM type: YTN; PAM sequence: TTT
ataaaaaggaaaagttttat

SEQ ID NO: 187579 - DNA, 20 bp, Artificial Sequence
  Description of Artificial Sequence: Synthetic oligonucleotide
  Target: LAMA2; (-) strand; PAM type: YTN; PAM sequence: CTA
ataaataataaaaaatattt

SEQ ID NO: 187580 - DNA, 20 bp, Artificial Sequence
  Description of Artificial Sequence: Synthetic oligonucleotide
  Target: LAMA2; (-) strand; PAM type: YTN; PAM sequence: TTA
atctaataaataataaaaaa

SEQ ID NO: 187581 - DNA, 20 bp, Artificial Sequence
  Description of Artificial Sequence: Synthetic oligonucleotide
  Target: LAMA2; (-) strand; PAM type: YTN; PAM sequence: TTA
gttaatctaataaataataa

SEQ ID NO: 187582 - DNA, 20 bp, Artificial Sequence
  Description of Artificial Sequence: Synthetic oligonucleotide
  Target: LAMA2; (-) strand; PAM type: YTN; PAM sequence: CTC
aaattagttaatctaataaa

SEQ ID NO: 187583 - DNA, 20 bp, Artificial Sequence
  Description of Artificial Sequence: Synthetic oligonucleotide
  Target: LAMA2; (-) strand; PAM type: YTN; PAM sequence: CTC
aactcaaattagttaatcta

SEQ ID NO: 187584 - DNA, 20 bp, Artificial Sequence
  Description of Artificial Sequence: Synthetic oligonucleotide
  Target: LAMA2; (-) strand; PAM type: YTN; PAM sequence: TTG
tggcctcaactcaaattagt

SEQ ID NO: 187585 - DNA, 20 bp, Artificial Sequence
  Description of Artificial Sequence: Synthetic oligonucleotide
  Target: LAMA2; (-) strand; PAM type: YTN; PAM sequence: CTC
aaccacgttgtggcctcaac

SEQ ID NO: 187586 - DNA, 20 bp, Artificial Sequence
  Description of Artificial Sequence: Synthetic oligonucleotide
  Target: LAMA2; (-) strand; PAM type: YTN; PAM sequence: TTA
ctcaaccacgttgtggcctc

SEQ ID NO: 187587 - DNA, 20 bp, Artificial Sequence
  Description of Artificial Sequence: Synthetic oligonucleotide
  Target: LAMA2; (-) strand; PAM type: YTN; PAM sequence: TTT
actcaaccacgttgtggcct

SEQ ID NO: 187588 - DNA, 20 bp, Artificial Sequence
  Description of Artificial Sequence: Synthetic oligonucleotide
  Target: LAMA2; (-) strand; PAM type: YTN; PAM sequence: TTT
tactcaaccacgttgtggcc

SEQ ID NO: 187589 - DNA, 20 bp, Artificial Sequence
  Description of Artificial Sequence: Synthetic oligonucleotide
  Target: LAMA2; (-) strand; PAM type: YTN; PAM sequence: TTT
ttactcaaccacgttgtggc

SEQ ID NO: 187590 - DNA, 20 bp, Artificial Sequence
  Description of Artificial Sequence: Synthetic oligonucleotide
  Target: LAMA2; (-) strand; PAM type: YTN; PAM sequence: TTA
tttttactcaaccacgttgt

SEQ ID NO: 187591 - DNA, 20 bp, Artificial Sequence
  Description of Artificial Sequence: Synthetic oligonucleotide
  Target: LAMA2; (-) strand; PAM type: YTN; PAM sequence: CTC
agaatgattatttttactca

SEQ ID NO: 187592 - DNA, 20 bp, Artificial Sequence
  Description of Artificial Sequence: Synthetic oligonucleotide
  Target: LAMA2; (-) strand; PAM type: YTN; PAM sequence: TTC
tcagaatgattatttttact

SEQ ID NO: 187593 - DNA, 20 bp, Artificial Sequence
  Description of Artificial Sequence: Synthetic oligonucleotide
  Target: LAMA2; (-) strand; PAM type: YTN; PAM sequence: CTA
ttctcagaatgattattttt

SEQ ID NO: 187594 - DNA, 20 bp, Artificial Sequence
  Description of Artificial Sequence: Synthetic oligonucleotide
  Target: LAMA2; (-) strand; PAM type: YTN; PAM sequence: TTG
ctattctcagaatgattatt

SEQ ID NO: 187595 - DNA, 20 bp, Artificial Sequence
  Description of Artificial Sequence: Synthetic oligonucleotide
  Target: LAMA2; (-) strand; PAM type: YTN; PAM sequence: CTA
ttgctattctcagaatgatt

SEQ ID NO: 187596 - DNA, 20 bp, Artificial Sequence
  Description of Artificial Sequence: Synthetic oligonucleotide
  Target: LAMA2; (-) strand; PAM type: YTN; PAM sequence: CTA
aacctattgctattctcaga

SEQ ID NO: 187597 - DNA, 20 bp, Artificial Sequence
  Description of Artificial Sequence: Synthetic oligonucleotide
  Target: LAMA2; (-) strand; PAM type: YTN; PAM sequence: TTC
taaacctattgctattctca

SEQ ID NO: 187598 - DNA, 20 bp, Artificial Sequence
  Description of Artificial Sequence: Synthetic oligonucleotide
  Target: LAMA2; (-) strand; PAM type: YTN; PAM sequence: CTT
ctaaacctattgctattctc

SEQ ID NO: 187599 - DNA, 20 bp, Artificial Sequence
  Description of Artificial Sequence: Synthetic oligonucleotide
  Target: LAMA2; (-) strand; PAM type: YTN; PAM sequence: TTA
accttctaaacctattgcta

SEQ ID NO: 187600 - DNA, 20 bp, Artificial Sequence
  Description of Artificial Sequence: Synthetic oligonucleotide
  Target: LAMA2; (-) strand; PAM type: YTN; PAM sequence: CTA
aattaaccttctaaacctat

SEQ ID NO: 187601 - DNA, 20 bp, Artificial Sequence
  Description of Artificial Sequence: Synthetic oligonucleotide
  Target: LAMA2; (-) strand; PAM type: YTN; PAM sequence: CTA
atagcagagaggcaccctaa

SEQ ID NO: 187602 - DNA, 20 bp, Artificial Sequence
  Description of Artificial Sequence: Synthetic oligonucleotide
  Target: LAMA2; (-) strand; PAM type: YTN; PAM sequence: TTC
aggtacatctaatagcagag

SEQ ID NO: 187603 - DNA, 20 bp, Artificial Sequence
  Description of Artificial Sequence: Synthetic oligonucleotide
  Target: LAMA2; (-) strand; PAM type: YTN; PAM sequence: TTT
caggtacatctaatagcaga

SEQ ID NO: 187604 - DNA, 20 bp, Artificial Sequence
  Description of Artificial Sequence: Synthetic oligonucleotide
  Target: LAMA2; (-) strand; PAM type: YTN; PAM sequence: TTT
tcaggtacatctaatagcag

SEQ ID NO: 187605 - DNA, 20 bp, Artificial Sequence
  Description of Artificial Sequence: Synthetic oligonucleotide
  Target: LAMA2; (-) strand; PAM type: YTN; PAM sequence: TTT
ttcaggtacatctaatagca

SEQ ID NO: 187606 - DNA, 20 bp, Artificial Sequence
  Description of Artificial Sequence: Synthetic oligonucleotide
  Target: LAMA2; (-) strand; PAM type: YTN; PAM sequence: CTA
gaagtgtttttcaggtacat

SEQ ID NO: 187607 - DNA, 20 bp, Artificial Sequence
  Description of Artificial Sequence: Synthetic oligonucleotide
  Target: LAMA2; (-) strand; PAM type: YTN; PAM sequence: TTG
cctagaagtgtttttcaggt

SEQ ID NO: 187608 - DNA, 20 bp, Artificial Sequence
  Description of Artificial Sequence: Synthetic oligonucleotide
  Target: LAMA2; (-) strand; PAM type: YTN; PAM sequence: TTT
gcctagaagtgtttttcagg

SEQ ID NO: 187609 - DNA, 20 bp, Artificial Sequence
  Description of Artificial Sequence: Synthetic oligonucleotide
  Target: LAMA2; (-) strand; PAM type: YTN; PAM sequence: TTT
tgcctagaagtgtttttcag

SEQ ID NO: 187610 - DNA, 20 bp, Artificial Sequence
  Description of Artificial Sequence: Synthetic oligonucleotide
  Target: LAMA2; (-) strand; PAM type: YTN; PAM sequence: CTA
attttgcctagaagtgtttt

SEQ ID NO: 187611 - DNA, 20 bp, Artificial Sequence
  Description of Artificial Sequence: Synthetic oligonucleotide
  Target: LAMA2; (-) strand; PAM type: YTN; PAM sequence: TTG
gtctaattttgcctagaagt

SEQ ID NO: 187612 - DNA, 20 bp, Artificial Sequence
  Description of Artificial Sequence: Synthetic oligonucleotide
  Target: LAMA2; (-) strand; PAM type: YTN; PAM sequence: TTT
ggtctaattttgcctagaag

SEQ ID NO: 187613 - DNA, 20 bp, Artificial Sequence
  Description of Artificial Sequence: Synthetic oligonucleotide
  Target: LAMA2; (-) strand; PAM type: YTN; PAM sequence: TTA
atttggtctaattttgccta

SEQ ID NO: 187614 - DNA, 20 bp, Artificial Sequence
  Description of Artificial Sequence: Synthetic oligonucleotide
  Target: LAMA2; (-) strand; PAM type: YTN; PAM sequence: TTT
aatttggtctaattttgcct

SEQ ID NO: 187615 - DNA, 20 bp, Artificial Sequence
  Description of Artificial Sequence: Synthetic oligonucleotide
  Target: LAMA2; (-) strand; PAM type: YTN; PAM sequence: TTT
taatttggtctaattttgcc

SEQ ID NO: 187616 - DNA, 20 bp, Artificial Sequence
  Description of Artificial Sequence: Synthetic oligonucleotide
  Target: LAMA2; (-) strand; PAM type: YTN; PAM sequence: TTT
ttaatttggtctaattttgc

SEQ ID NO: 187617 - DNA, 20 bp, Artificial Sequence
  Description of Artificial Sequence: Synthetic oligonucleotide
  Target: LAMA2; (-) strand; PAM type: YTN; PAM sequence: TTG
aagccccagtgtttttaatt

SEQ ID NO: 187618 - DNA, 20 bp, Artificial Sequence
  Description of Artificial Sequence: Synthetic oligonucleotide
  Target: LAMA2; (-) strand; PAM type: YTN; PAM sequence: TTA
taattgaagccccagtgttt

SEQ ID NO: 187619 - DNA, 20 bp, Artificial Sequence
  Description of Artificial Sequence: Synthetic oligonucleotide
  Target: LAMA2; (-) strand; PAM type: YTN; PAM sequence: TTA
ttataattgaagccccagtg

SEQ ID NO: 187620 - DNA, 20 bp, Artificial Sequence
  Description of Artificial Sequence: Synthetic oligonucleotide
  Target: LAMA2; (-) strand; PAM type: YTN; PAM sequence: TTT
attataattgaagccccagt

SEQ ID NO: 187621 - DNA, 20 bp, Artificial Sequence
  Description of Artificial Sequence: Synthetic oligonucleotide
  Target: LAMA2; (-) strand; PAM type: YTN; PAM sequence: TTG
agagtttattataattgaag

SEQ ID NO: 187622 - DNA, 20 bp, Artificial Sequence
  Description of Artificial Sequence: Synthetic oligonucleotide
  Target: LAMA2; (-) strand; PAM type: YTN; PAM sequence: TTT
gagagtttattataattgaa

SEQ ID NO: 187623 - DNA, 20 bp, Artificial Sequence
  Description of Artificial Sequence: Synthetic oligonucleotide
  Target: LAMA2; (-) strand; PAM type: YTN; PAM sequence: TTA
tatttgagagtttattataa

SEQ ID NO: 187624 - DNA, 20 bp, Artificial Sequence
  Description of Artificial Sequence: Synthetic oligonucleotide
  Target: LAMA2; (-) strand; PAM type: YTN; PAM sequence: CTT
atatttgagagtttattata

SEQ ID NO: 187625 - DNA, 20 bp, Artificial Sequence
  Description of Artificial Sequence: Synthetic oligonucleotide
  Target: LAMA2; (-) strand; PAM type: YTN; PAM sequence: TTA
taataaacaataataaaact

SEQ ID NO: 187626 - DNA, 20 bp, Artificial Sequence
  Description of Artificial Sequence: Synthetic oligonucleotide
  Target: LAMA2; (-) strand; PAM type: YTN; PAM sequence: TTA
ttataataaacaataataaa

SEQ ID NO: 187627 - DNA, 20 bp, Artificial Sequence
  Description of Artificial Sequence: Synthetic oligonucleotide
  Target: LAMA2; (-) strand; PAM type: YTN; PAM sequence: TTA
ttattataataaacaataat

SEQ ID NO: 187628 - DNA, 20 bp, Artificial Sequence
  Description of Artificial Sequence: Synthetic oligonucleotide
  Target: LAMA2; (-) strand; PAM type: YTN; PAM sequence: TTT
attattataataaacaataa

SEQ ID NO: 187629 - DNA, 20 bp, Artificial Sequence
  Description of Artificial Sequence: Synthetic oligonucleotide
  Target: LAMA2; (-) strand; PAM type: YTN; PAM sequence: TTA
tttattattataataaacaa

SEQ ID NO: 187630 - DNA, 20 bp, Artificial Sequence
  Description of Artificial Sequence: Synthetic oligonucleotide
  Target: LAMA2; (-) strand; PAM type: YTN; PAM sequence: TTA
tacattatttattattataa

SEQ ID NO: 187631 - DNA, 20 bp, Artificial Sequence
  Description of Artificial Sequence: Synthetic oligonucleotide
  Target: LAMA2; (-) strand; PAM type: YTN; PAM sequence: CTT
atacattatttattattata

SEQ ID NO: 187632 - DNA, 20 bp, Artificial Sequence
  Description of Artificial Sequence: Synthetic oligonucleotide
  Target: LAMA2; (-) strand; PAM type: YTN; PAM sequence: CTG
cacacttatacattatttat

SEQ ID NO: 187633 - DNA, 20 bp, Artificial Sequence
  Description of Artificial Sequence: Synthetic oligonucleotide
  Target: LAMA2; (-) strand; PAM type: YTN; PAM sequence: CTG
cccatgtctgcacacttata

SEQ ID NO: 187634 - DNA, 20 bp, Artificial Sequence
  Description of Artificial Sequence: Synthetic oligonucleotide
  Target: LAMA2; (-) strand; PAM type: YTN; PAM sequence: TTG
caaaatgtagtctgcccatg

SEQ ID NO: 187635 - DNA, 20 bp, Artificial Sequence
  Description of Artificial Sequence: Synthetic oligonucleotide
  Target: LAMA2; (-) strand; PAM type: YTN; PAM sequence: TTT
gcaaaatgtagtctgcccat

SEQ ID NO: 187636 - DNA, 20 bp, Artificial Sequence
  Description of Artificial Sequence: Synthetic oligonucleotide
  Target: LAMA2; (-) strand; PAM type: YTN; PAM sequence: CTG
tggaaatttgcaaaatgtag

SEQ ID NO: 187637 - DNA, 20 bp, Artificial Sequence
  Description of Artificial Sequence: Synthetic oligonucleotide
  Target: LAMA2; (-) strand; PAM type: YTN; PAM sequence: TTA
ctgtggaaatttgcaaaatg

SEQ ID NO: 187638 - DNA, 20 bp, Artificial Sequence
  Description of Artificial Sequence: Synthetic oligonucleotide
  Target: LAMA2; (-) strand; PAM type: YTN; PAM sequence: CTT
actgtggaaatttgcaaaat

SEQ ID NO: 187639 - DNA, 20 bp, Artificial Sequence
  Description of Artificial Sequence: Synthetic oligonucleotide
  Target: LAMA2; (-) strand; PAM type: YTN; PAM sequence: TTA
ccttactgtggaaatttgca

SEQ ID NO: 187640 - DNA, 20 bp, Artificial Sequence
  Description of Artificial Sequence: Synthetic oligonucleotide
  Target: LAMA2; (-) strand; PAM type: YTN; PAM sequence: TTT
accttactgtggaaatttgc

SEQ ID NO: 187641 - DNA, 20 bp, Artificial Sequence
  Description of Artificial Sequence: Synthetic oligonucleotide
  Target: LAMA2; (-) strand; PAM type: YTN; PAM sequence: TTT
taccttactgtggaaatttg

SEQ ID NO: 187642 - DNA, 20 bp, Artificial Sequence
  Description of Artificial Sequence: Synthetic oligonucleotide
  Target: LAMA2; (-) strand; PAM type: YTN; PAM sequence: CTT
ttaccttactgtggaaattt

SEQ ID NO: 187643 - DNA, 20 bp, Artificial Sequence
  Description of Artificial Sequence: Synthetic oligonucleotide
  Target: LAMA2; (-) strand; PAM type: YTN; PAM sequence: TTG
taatccttttaccttactgt

SEQ ID NO: 187644 - DNA, 20 bp, Artificial Sequence
  Description of Artificial Sequence: Synthetic oligonucleotide
  Target: LAMA2; (-) strand; PAM type: YTN; PAM sequence: TTT
gtaatccttttaccttactg

SEQ ID NO: 187645 - DNA, 20 bp, Artificial Sequence
  Description of Artificial Sequence: Synthetic oligonucleotide
  Target: LAMA2; (-) strand; PAM type: YTN; PAM sequence: CTT
tgtaatccttttaccttact

SEQ ID NO: 187646 - DNA, 20 bp, Artificial Sequence
  Description of Artificial Sequence: Synthetic oligonucleotide
  Target: LAMA2; (-) strand; PAM type: YTN; PAM sequence: TTA
taccagaaagctttgtaatc

SEQ ID NO: 187647 - DNA, 20 bp, Artificial Sequence
  Description of Artificial Sequence: Synthetic oligonucleotide
  Target: LAMA2; (-) strand; PAM type: YTN; PAM sequence: TTA
atattataccagaaagcttt

SEQ ID NO: 187648 - DNA, 20 bp, Artificial Sequence
  Description of Artificial Sequence: Synthetic oligonucleotide
  Target: LAMA2; (-) strand; PAM type: YTN; PAM sequence: CTG
ttaatattataccagaaagc

SEQ ID NO: 187649 - DNA, 20 bp, Artificial Sequence
  Description of Artificial Sequence: Synthetic oligonucleotide
  Target: LAMA2; (-) strand; PAM type: YTN; PAM sequence: TTC
tgttaatattataccagaaa

SEQ ID NO: 187650 - DNA, 20 bp, Artificial Sequence
  Description of Artificial Sequence: Synthetic oligonucleotide
  Target: LAMA2; (-) strand; PAM type: YTN; PAM sequence: TTA
gttctgttaatattatacca

SEQ ID NO: 187651 - DNA, 20 bp, Artificial Sequence
  Description of Artificial Sequence: Synthetic oligonucleotide
  Target: LAMA2; (-) strand; PAM type: YTN; PAM sequence: TTT
agttctgttaatattatacc

SEQ ID NO: 187652 - DNA, 20 bp, Artificial Sequence
  Description of Artificial Sequence: Synthetic oligonucleotide
  Target: LAMA2; (-) strand; PAM type: YTN; PAM sequence: TTT
tagttctgttaatattatac

SEQ ID NO: 187653 - DNA, 20 bp, Artificial Sequence
  Description of Artificial Sequence: Synthetic oligonucleotide
  Target: LAMA2; (-) strand; PAM type: YTN; PAM sequence: CTT
ttagttctgttaatattata

SEQ ID NO: 187654 - DNA, 20 bp, Artificial Sequence
  Description of Artificial Sequence: Synthetic oligonucleotide
  Target: LAMA2; (-) strand; PAM type: YTN; PAM sequence: TTC
atgtcttttagttctgttaa

SEQ ID NO: 187655 - DNA, 20 bp, Artificial Sequence
  Description of Artificial Sequence: Synthetic oligonucleotide
  Target: LAMA2; (-) strand; PAM type: YTN; PAM sequence: TTA
ttcatgtcttttagttctgt

SEQ ID NO: 187656 - DNA, 20 bp, Artificial Sequence
  Description of Artificial Sequence: Synthetic oligonucleotide
  Target: LAMA2; (-) strand; PAM type: YTN; PAM sequence: TTA
atattattcatgtcttttag

SEQ ID NO: 187657 - DNA, 20 bp, Artificial Sequence
  Description of Artificial Sequence: Synthetic oligonucleotide
  Target: LAMA2; (-) strand; PAM type: YTN; PAM sequence: TTT
aatattattcatgtctttta

SEQ ID NO: 187658 - DNA, 20 bp, Artificial Sequence
  Description of Artificial Sequence: Synthetic oligonucleotide
  Target: LAMA2; (-) strand; PAM type: YTN; PAM sequence: CTT
taatattattcatgtctttt

SEQ ID NO: 187659 - DNA, 20 bp, Artificial Sequence
  Description of Artificial Sequence: Synthetic oligonucleotide
  Target: LAMA2; (-) strand; PAM type: YTN; PAM sequence: TTC
tttaatattattcatgtctt

SEQ ID NO: 187660 - DNA, 20 bp, Artificial Sequence
  Description of Artificial Sequence: Synthetic oligonucleotide
  Target: LAMA2; (-) strand; PAM type: YTN; PAM sequence: CTA
gccaaagcccattctttaat

SEQ ID NO: 187661 - DNA, 20 bp, Artificial Sequence
  Description of Artificial Sequence: Synthetic oligonucleotide
  Target: LAMA2; (-) strand; PAM type: YTN; PAM sequence: TTG
aaaatcactagccaaagccc

SEQ ID NO: 187662 - DNA, 20 bp, Artificial Sequence
  Description of Artificial Sequence: Synthetic oligonucleotide
  Target: LAMA2; (-) strand; PAM type: YTN; PAM sequence: TTG
attgaaaatcactagccaaa

SEQ ID NO: 187663 - DNA, 20 bp, Artificial Sequence
  Description of Artificial Sequence: Synthetic oligonucleotide
  Target: LAMA2; (-) strand; PAM type: YTN; PAM sequence: TTG
aagagaattgattgaaaatc

SEQ ID NO: 187664 - DNA, 20 bp, Artificial Sequence
  Description of Artificial Sequence: Synthetic oligonucleotide
  Target: LAMA2; (-) strand; PAM type: YTN; PAM sequence: TTT
gaagagaattgattgaaaat

SEQ ID NO: 187665 - DNA, 20 bp, Artificial Sequence
  Description of Artificial Sequence: Synthetic oligonucleotide
  Target: LAMA2; (-) strand; PAM type: YTN; PAM sequence: CTT
tgaagagaattgattgaaaa

SEQ ID NO: 187666 - DNA, 20 bp, Artificial Sequence
  Description of Artificial Sequence: Synthetic oligonucleotide
  Target: LAMA2; (-) strand; PAM type: YTN; PAM sequence: TTG
ctttgaagagaattgattga

SEQ ID NO: 187667 - DNA, 20 bp, Artificial Sequence
  Description of Artificial Sequence: Synthetic oligonucleotide
  Target: LAMA2; (-) strand; PAM type: YTN; PAM sequence: TTA
agagagtattgctttgaaga

SEQ ID NO: 187668 - DNA, 20 bp, Artificial Sequence
  Description of Artificial Sequence: Synthetic oligonucleotide
  Target: LAMA2; (-) strand; PAM type: YTN; PAM sequence: TTC
agtaaaattaagagagtatt

SEQ ID NO: 187669 - DNA, 20 bp, Artificial Sequence
  Description of Artificial Sequence: Synthetic oligonucleotide
  Target: LAMA2; (-) strand; PAM type: YTN; PAM sequence: TTT
cagtaaaattaagagagtat

SEQ ID NO: 187670 - DNA, 20 bp, Artificial Sequence
  Description of Artificial Sequence: Synthetic oligonucleotide
  Target: LAMA2; (-) strand; PAM type: YTN; PAM sequence: CTT
tcagtaaaattaagagagta

SEQ ID NO: 187671 - DNA, 20 bp, Artificial Sequence
  Description of Artificial Sequence: Synthetic oligonucleotide
  Target: LAMA2; (-) strand; PAM type: YTN; PAM sequence: TTC
tttcagtaaaattaagagag

SEQ ID NO: 187672 - DNA, 20 bp, Artificial Sequence
  Description of Artificial Sequence: Synthetic oligonucleotide
  Target: LAMA2; (-) strand; PAM type: YTN; PAM sequence: TTT
ctttcagtaaaattaagaga

SEQ ID NO: 187673 - DNA, 20 bp, Artificial Sequence
  Description of Artificial Sequence: Synthetic oligonucleotide
  Target: LAMA2; (-) strand; PAM type: YTN; PAM sequence: TTT
tctttcagtaaaattaagag

SEQ ID NO: 187674 - DNA, 20 bp, Artificial Sequence
  Description of Artificial Sequence: Synthetic oligonucleotide
  Target: LAMA2; (-) strand; PAM type: YTN; PAM sequence: TTG
aattttctttcagtaaaatt

SEQ ID NO: 187675 - DNA, 20 bp, Artificial Sequence
  Description of Artificial Sequence: Synthetic oligonucleotide
  Target: LAMA2; (-) strand; PAM type: YTN; PAM sequence: TTA
aagttgaattttctttcagt

SEQ ID NO: 187676 - DNA, 20 bp, Artificial Sequence
  Description of Artificial Sequence: Synthetic oligonucleotide
  Target: LAMA2; (-) strand; PAM type: YTN; PAM sequence: TTA
tattaaagttgaattttctt

SEQ ID NO: 187677 - DNA, 20 bp, Artificial Sequence
  Description of Artificial Sequence: Synthetic oligonucleotide
  Target: LAMA2; (-) strand; PAM type: YTN; PAM sequence: CTA
aatattatattaaagttgaa

SEQ ID NO: 187678 - DNA, 20 bp, Artificial Sequence
  Description of Artificial Sequence: Synthetic oligonucleotide
  Target: LAMA2; (-) strand; PAM type: YTN; PAM sequence: TTA
tctaaatattatattaaagt

SEQ ID NO: 187679 - DNA, 20 bp, Artificial Sequence
  Description of Artificial Sequence: Synthetic oligonucleotide
  Target: LAMA2; (-) strand; PAM type: YTN; PAM sequence: TTT
atctaaatattatattaaag

SEQ ID NO: 187680 - DNA, 20 bp, Artificial Sequence
  Description of Artificial Sequence: Synthetic oligonucleotide
  Target: LAMA2; (-) strand; PAM type: YTN; PAM sequence: TTG
atttatctaaatattatatt

SEQ ID NO: 187681 - DNA, 20 bp, Artificial Sequence
  Description of Artificial Sequence: Synthetic oligonucleotide
  Target: LAMA2; (-) strand; PAM type: YTN; PAM sequence: TTA
agatgtattgatttatctaa

SEQ ID NO: 187682 - DNA, 20 bp, Artificial Sequence
  Description of Artificial Sequence: Synthetic oligonucleotide
  Target: LAMA2; (-) strand; PAM type: YTN; PAM sequence: TTA
tagttaagatgtattgattt

SEQ ID NO: 187683 - DNA, 20 bp, Artificial Sequence
  Description of Artificial Sequence: Synthetic oligonucleotide
  Target: LAMA2; (-) strand; PAM type: YTN; PAM sequence: TTT
atagttaagatgtattgatt

SEQ ID NO: 187684 - DNA, 20 bp, Artificial Sequence
  Description of Artificial Sequence: Synthetic oligonucleotide
  Target: LAMA2; (-) strand; PAM type: YTN; PAM sequence: TTT
tatagttaagatgtattgat

SEQ ID NO: 187685 - DNA, 20 bp, Artificial Sequence
  Description of Artificial Sequence: Synthetic oligonucleotide
  Target: LAMA2; (-) strand; PAM type: YTN; PAM sequence: TTT
ttatagttaagatgtattga

SEQ ID NO: 187686 - DNA, 20 bp, Artificial Sequence
  Description of Artificial Sequence: Synthetic oligonucleotide
  Target: LAMA2; (-) strand; PAM type: YTN; PAM sequence: TTT
tttatagttaagatgtattg

SEQ ID NO: 187687 - DNA, 20 bp, Artificial Sequence
  Description of Artificial Sequence: Synthetic oligonucleotide
  Target: LAMA2; (-) strand; PAM type: YTN; PAM sequence: CTT
ttttatagttaagatgtatt

SEQ ID NO: 187688 - DNA, 20 bp, Artificial Sequence
  Description of Artificial Sequence: Synthetic oligonucleotide
  Target: LAMA2; (-) strand; PAM type: YTN; PAM sequence: TTC
ttttttatagttaagatgta

SEQ ID NO: 187689 - DNA, 20 bp, Artificial Sequence
  Description of Artificial Sequence: Synthetic oligonucleotide
  Target: LAMA2; (-) strand; PAM type: YTN; PAM sequence: TTT
cttttttatagttaagatgt

SEQ ID NO: 187690 - DNA, 20 bp, Artificial Sequence
  Description of Artificial Sequence: Synthetic oligonucleotide
  Target: LAMA2; (-) strand; PAM type: YTN; PAM sequence: TTT
tcttttttatagttaagatg

SEQ ID NO: 187691 - DNA, 20 bp, Artificial Sequence
  Description of Artificial Sequence: Synthetic oligonucleotide
  Target: LAMA2; (-) strand; PAM type: YTN; PAM sequence: TTA
tatagatagttttctttttt

SEQ ID NO: 187692 - DNA, 20 bp, Artificial Sequence
  Description of Artificial Sequence: Synthetic oligonucleotide
  Target: LAMA2; (-) strand; PAM type: YTN; PAM sequence: CTT
atatagatagttttcttttt

SEQ ID NO: 187693 - DNA, 20 bp, Artificial Sequence
  Description of Artificial Sequence: Synthetic oligonucleotide
  Target: LAMA2; (-) strand; PAM type: YTN; PAM sequence: TTG
tcttatatagatagttttct

SEQ ID NO: 187694 - DNA, 20 bp, Artificial Sequence
  Description of Artificial Sequence: Synthetic oligonucleotide
  Target: LAMA2; (-) strand; PAM type: YTN; PAM sequence: TTG
aaatacatattgtcttatat

SEQ ID NO: 187695 - DNA, 20 bp, Artificial Sequence
  Description of Artificial Sequence: Synthetic oligonucleotide
  Target: LAMA2; (-) strand; PAM type: YTN; PAM sequence: TTA
tatgttgaaatacatattgt

SEQ ID NO: 187696 - DNA, 20 bp, Artificial Sequence
  Description of Artificial Sequence: Synthetic oligonucleotide
  Target: LAMA2; (-) strand; PAM type: YTN; PAM sequence: TTT
atatgttgaaatacatattg

SEQ ID NO: 187697 - DNA, 20 bp, Artificial Sequence
  Description of Artificial Sequence: Synthetic oligonucleotide
  Target: LAMA2; (-) strand; PAM type: YTN; PAM sequence: TTA
cccaagcatttatatgttga

SEQ ID NO: 187698 - DNA, 20 bp, Artificial Sequence
  Description of Artificial Sequence: Synthetic oligonucleotide
  Target: LAMA2; (-) strand; PAM type: YTN; PAM sequence: TTT
acccaagcatttatatgttg

SEQ ID NO: 187699 - DNA, 20 bp, Artificial Sequence
  Description of Artificial Sequence: Synthetic oligonucleotide
  Target: LAMA2; (-) strand; PAM type: YTN; PAM sequence: TTT
tacccaagcatttatatgtt

SEQ ID NO: 187700 - DNA, 20 bp, Artificial Sequence
  Description of Artificial Sequence: Synthetic oligonucleotide
  Target: LAMA2; (-) strand; PAM type: YTN; PAM sequence: CTA
aggaagttttacccaagcat

SEQ ID NO: 187701 - DNA, 20 bp, Artificial Sequence
  Description of Artificial Sequence: Synthetic oligonucleotide
  Target: LAMA2; (-) strand; PAM type: YTN; PAM sequence: CTC
ctaaggaagttttacccaag

SEQ ID NO: 187702 - DNA, 20 bp, Artificial Sequence
  Description of Artificial Sequence: Synthetic oligonucleotide
  Target: LAMA2; (-) strand; PAM type: YTN; PAM sequence: TTG
cctcctaaggaagttttacc

SEQ ID NO: 187703 - DNA, 20 bp, Artificial Sequence
  Description of Artificial Sequence: Synthetic oligonucleotide
  Target: LAMA2; (-) strand; PAM type: YTN; PAM sequence: TTT
gcctcctaaggaagttttac

SEQ ID NO: 187704 - DNA, 20 bp, Artificial Sequence
  Description of Artificial Sequence: Synthetic oligonucleotide
  Target: LAMA2; (-) strand; PAM type: YTN; PAM sequence: TTT
tgcctcctaaggaagtttta

SEQ ID NO: 187705 - DNA, 20 bp, Artificial Sequence
  Description of Artificial Sequence: Synthetic oligonucleotide
  Target: LAMA2; (-) strand; PAM type: YTN; PAM sequence: TTA
ttttgcctcctaaggaagtt

SEQ ID NO: 187706 - DNA, 20 bp, Artificial Sequence
  Description of Artificial Sequence: Synthetic oligonucleotide
  Target: LAMA2; (-) strand; PAM type: YTN; PAM sequence: TTT
attttgcctcctaaggaagt

SEQ ID NO: 187707 - DNA, 20 bp, Artificial Sequence
  Description of Artificial Sequence: Synthetic oligonucleotide
  Target: LAMA2; (-) strand; PAM type: YTN; PAM sequence: TTT
tattttgcctcctaaggaag

SEQ ID NO: 187708 - DNA, 20 bp, Artificial Sequence
  Description of Artificial Sequence: Synthetic oligonucleotide
  Target: LAMA2; (-) strand; PAM type: YTN; PAM sequence: TTA
ttttattttgcctcctaagg

SEQ ID NO: 187709 - DNA, 20 bp, Artificial Sequence
  Description of Artificial Sequence: Synthetic oligonucleotide
  Target: LAMA2; (-) strand; PAM type: YTN; PAM sequence: TTT
attttattttgcctcctaag

SEQ ID NO: 187710 - DNA, 20 bp, Artificial Sequence
  Description of Artificial Sequence: Synthetic oligonucleotide
  Target: LAMA2; (-) strand; PAM type: YTN; PAM sequence: TTT
tattttattttgcctcctaa

SEQ ID NO: 187711 - DNA, 20 bp, Artificial Sequence
  Description of Artificial Sequence: Synthetic oligonucleotide
  Target: LAMA2; (-) strand; PAM type: YTN; PAM sequence: CTT
ttattttattttgcctccta

SEQ ID NO: 187712 - DNA, 20 bp, Artificial Sequence
  Description of Artificial Sequence: Synthetic oligonucleotide
  Target: LAMA2; (-) strand; PAM type: YTN; PAM sequence: CTA
agaataggtgcaaactttta

SEQ ID NO: 187713 - DNA, 20 bp, Artificial Sequence
  Description of Artificial Sequence: Synthetic oligonucleotide
  Target: LAMA2; (-) strand; PAM type: YTN; PAM sequence: CTG
gggtcatctaagaataggtg

SEQ ID NO: 187714 - DNA, 20 bp, Artificial Sequence
  Description of Artificial Sequence: Synthetic oligonucleotide
  Target: LAMA2; (-) strand; PAM type: YTN; PAM sequence: TTA
cactggggtcatctaagaat

SEQ ID NO: 187715 - DNA, 20 bp, Artificial Sequence
  Description of Artificial Sequence: Synthetic oligonucleotide
  Target: LAMA2; (-) strand; PAM type: YTN; PAM sequence: TTG
agtcaccagcacaatatcaa

SEQ ID NO: 187716 - DNA, 20 bp, Artificial Sequence
  Description of Artificial Sequence: Synthetic oligonucleotide
  Target: LAMA2; (-) strand; PAM type: YTN; PAM sequence: CTT
gagtcaccagcacaatatca

SEQ ID NO: 187717 - DNA, 20 bp, Artificial Sequence
  Description of Artificial Sequence: Synthetic oligonucleotide
  Target: LAMA2; (-) strand; PAM type: YTN; PAM sequence: TTG
cccatggtacttgagtcacc

SEQ ID NO: 187718 - DNA, 20 bp, Artificial Sequence
  Description of Artificial Sequence: Synthetic oligonucleotide
  Target: LAMA2; (-) strand; PAM type: YTN; PAM sequence: CTT
gcccatggtacttgagtcac

SEQ ID NO: 187719 - DNA, 20 bp, Artificial Sequence
  Description of Artificial Sequence: Synthetic oligonucleotide
  Target: LAMA2; (-) strand; PAM type: YTN; PAM sequence: CTG
ataacaaccttgcccatggt

SEQ ID NO: 187720 - DNA, 20 bp, Artificial Sequence
  Description of Artificial Sequence: Synthetic oligonucleotide
  Target: LAMA2; (-) strand; PAM type: YTN; PAM sequence: TTC
agagaagcacatcactgata

SEQ ID NO: 187721 - DNA, 20 bp, Artificial Sequence
  Description of Artificial Sequence: Synthetic oligonucleotide
  Target: LAMA2; (-) strand; PAM type: YTN; PAM sequence: TTT
cagagaagcacatcactgat

SEQ ID NO: 187722 - DNA, 20 bp, Artificial Sequence
  Description of Artificial Sequence: Synthetic oligonucleotide
  Target: LAMA2; (-) strand; PAM type: YTN; PAM sequence: CTT
tcagagaagcacatcactga

SEQ ID NO: 187723 - DNA, 20 bp, Artificial Sequence
  Description of Artificial Sequence: Synthetic oligonucleotide
  Target: LAMA2; (-) strand; PAM type: YTN; PAM sequence: TTG
tcaatgggtgtaaagatgta

SEQ ID NO: 187724 - DNA, 20 bp, Artificial Sequence
  Description of Artificial Sequence: Synthetic oligonucleotide
  Target: LAMA2; (-) strand; PAM type: YTN; PAM sequence: TTT
gtcaatgggtgtaaagatgt

SEQ ID NO: 187725 - DNA, 20 bp, Artificial Sequence
  Description of Artificial Sequence: Synthetic oligonucleotide
  Target: LAMA2; (-) strand; PAM type: YTN; PAM sequence: TTA
cacccatttgtcaatgggtg

SEQ ID NO: 187726 - DNA, 20 bp, Artificial Sequence
  Description of Artificial Sequence: Synthetic oligonucleotide
  Target: LAMA2; (-) strand; PAM type: YTN; PAM sequence: TTT
acacccatttgtcaatgggt

SEQ ID NO: 187727 - DNA, 20 bp, Artificial Sequence
  Description of Artificial Sequence: Synthetic oligonucleotide
  Target: LAMA2; (-) strand; PAM type: YTN; PAM sequence: TTT
tacacccatttgtcaatggg

SEQ ID NO: 187728 - DNA, 20 bp, Artificial Sequence
  Description of Artificial Sequence: Synthetic oligonucleotide
  Target: LAMA2; (-) strand; PAM type: YTN; PAM sequence: TTG
gattttacacccatttgtca

SEQ ID NO: 187729 - DNA, 20 bp, Artificial Sequence
  Description of Artificial Sequence: Synthetic oligonucleotide
  Target: LAMA2; (-) strand; PAM type: YTN; PAM sequence: TTT
ggattttacacccatttgtc

SEQ ID NO: 187730 - DNA, 20 bp, Artificial Sequence
  Description of Artificial Sequence: Synthetic oligonucleotide
  Target: LAMA2; (-) strand; PAM type: YTN; PAM sequence: TTT
tggattttacacccatttgt

SEQ ID NO: 187731 - DNA, 20 bp, Artificial Sequence
  Description of Artificial Sequence: Synthetic oligonucleotide
  Target: LAMA2; (-) strand; PAM type: YTN; PAM sequence: TTT
ttggattttacacccatttg

SEQ ID NO: 187732 - DNA, 20 bp, Artificial Sequence
  Description of Artificial Sequence: Synthetic oligonucleotide
  Target: LAMA2; (-) strand; PAM type: YTN; PAM sequence: TTG
tgtttttggattttacaccc

SEQ ID NO: 187733 - DNA, 20 bp, Artificial Sequence
  Description of Artificial Sequence: Synthetic oligonucleotide
  Target: LAMA2; (-) strand; PAM type: YTN; PAM sequence: TTT
gtgtttttggattttacacc

SEQ ID NO: 187734 - DNA, 20 bp, Artificial Sequence
  Description of Artificial Sequence: Synthetic oligonucleotide
  Target: LAMA2; (-) strand; PAM type: YTN; PAM sequence: CTT
tgtgtttttggattttacac

SEQ ID NO: 187735 - DNA, 20 bp, Artificial Sequence
  Description of Artificial Sequence: Synthetic oligonucleotide
  Target: LAMA2; (-) strand; PAM type: YTN; PAM sequence: TTA
ctttgtgtttttggatttta

SEQ ID NO: 187736 - DNA, 20 bp, Artificial Sequence
  Description of Artificial Sequence: Synthetic oligonucleotide
  Target: LAMA2; (-) strand; PAM type: YTN; PAM sequence: TTT
actttgtgtttttggatttt

SEQ ID NO: 187737 - DNA, 20 bp, Artificial Sequence
  Description of Artificial Sequence: Synthetic oligonucleotide
  Target: LAMA2; (-) strand; PAM type: YTN; PAM sequence: TTG
agaagataatttactttgtg

SEQ ID NO: 187738 - DNA, 20 bp, Artificial Sequence
  Description of Artificial Sequence: Synthetic oligonucleotide
  Target: LAMA2; (-) strand; PAM type: YTN; PAM sequence: CTA
tatacattgagaagataatt

SEQ ID NO: 187739 - DNA, 20 bp, Artificial Sequence
  Description of Artificial Sequence: Synthetic oligonucleotide
  Target: LAMA2; (-) strand; PAM type: YTN; PAM sequence: CTA
ctatatacattgagaagata

SEQ ID NO: 187740 - DNA, 20 bp, Artificial Sequence
  Description of Artificial Sequence: Synthetic oligonucleotide
  Target: LAMA2; (-) strand; PAM type: YTN; PAM sequence: CTA
ggatgcatctactatataca

SEQ ID NO: 187741 - DNA, 20 bp, Artificial Sequence
  Description of Artificial Sequence: Synthetic oligonucleotide
  Target: LAMA2; (-) strand; PAM type: YTN; PAM sequence: TTC
taggatgcatctactatata

SEQ ID NO: 187742 - DNA, 20 bp, Artificial Sequence
  Description of Artificial Sequence: Synthetic oligonucleotide
  Target: LAMA2; (-) strand; PAM type: YTN; PAM sequence: TTT
ctaggatgcatctactatat

SEQ ID NO: 187743 - DNA, 20 bp, Artificial Sequence
  Description of Artificial Sequence: Synthetic oligonucleotide
  Target: LAMA2; (-) strand; PAM type: YTN; PAM sequence: TTT
tctaggatgcatctactata

SEQ ID NO: 187744 - DNA, 20 bp, Artificial Sequence
  Description of Artificial Sequence: Synthetic oligonucleotide
  Target: LAMA2; (-) strand; PAM type: YTN; PAM sequence: TTT
ttctaggatgcatctactat

SEQ ID NO: 187745 - DNA, 20 bp, Artificial Sequence
  Description of Artificial Sequence: Synthetic oligonucleotide
  Target: LAMA2; (-) strand; PAM type: YTN; PAM sequence: TTT
tttctaggatgcatctacta

SEQ ID NO: 187746 - DNA, 20 bp, Artificial Sequence
  Description of Artificial Sequence: Synthetic oligonucleotide
  Target: LAMA2; (-) strand; PAM type: YTN; PAM sequence: TTT
ttttctaggatgcatctact

SEQ ID NO: 187747 - DNA, 20 bp, Artificial Sequence
  Description of Artificial Sequence: Synthetic oligonucleotide
  Target: LAMA2; (-) strand; PAM type: YTN; PAM sequence: TTG
tttttttctaggatgcatct

SEQ ID NO: 187748 - DNA, 20 bp, Artificial Sequence
  Description of Artificial Sequence: Synthetic oligonucleotide
  Target: LAMA2; (-) strand; PAM type: YTN; PAM sequence: TTT
gtttttttctaggatgcatc

SEQ ID NO: 187749 - DNA, 20 bp, Artificial Sequence
  Description of Artificial Sequence: Synthetic oligonucleotide
  Target: LAMA2; (-) strand; PAM type: YTN; PAM sequence: TTG
tttgtttttttctaggatgc

SEQ ID NO: 187750 - DNA, 20 bp, Artificial Sequence
  Description of Artificial Sequence: Synthetic oligonucleotide
  Target: LAMA2; (-) strand; PAM type: YTN; PAM sequence: TTT
gtttgtttttttctaggatg

SEQ ID NO: 187751 - DNA, 20 bp, Artificial Sequence
  Description of Artificial Sequence: Synthetic oligonucleotide
  Target: LAMA2; (-) strand; PAM type: YTN; PAM sequence: TTG
tttgtttgtttttttctagg

SEQ ID NO: 187752 - DNA, 20 bp, Artificial Sequence
  Description of Artificial Sequence: Synthetic oligonucleotide
  Target: LAMA2; (-) strand; PAM type: YTN; PAM sequence: TTT
gtttgtttgtttttttctag

SEQ ID NO: 187753 - DNA, 20 bp, Artificial Sequence
  Description of Artificial Sequence: Synthetic oligonucleotide
  Target: LAMA2; (-) strand; PAM type: YTN; PAM sequence: TTG
tttgtttgtttgtttttttc

SEQ ID NO: 187754 - DNA, 20 bp, Artificial Sequence
  Description of Artificial Sequence: Synthetic oligonucleotide
  Target: LAMA2; (-) strand; PAM type: YTN; PAM sequence: TTT
gtttgtttgtttgttttttt

SEQ ID NO: 187755 - DNA, 20 bp, Artificial Sequence
  Description of Artificial Sequence: Synthetic oligonucleotide
  Target: LAMA2; (-) strand; PAM type: YTN; PAM sequence: TTT
tgtttgtttgtttgtttttt

SEQ ID NO: 187756 - DNA, 20 bp, Artificial Sequence
  Description of Artificial Sequence: Synthetic oligonucleotide
  Target: LAMA2; (-) strand; PAM type: YTN; PAM sequence: TTT
ttgtttgtttgtttgttttt

SEQ ID NO: 187757 - DNA, 20 bp, Artificial Sequence
  Description of Artificial Sequence: Synthetic oligonucleotide
  Target: LAMA2; (-) strand; PAM type: YTN; PAM sequence: TTT
tttgtttgtttgtttgtttt

SEQ ID NO: 187758 - DNA, 20 bp, Artificial Sequence
  Description of Artificial Sequence: Synthetic oligonucleotide
  Target: LAMA2; (-) strand; PAM type: YTN; PAM sequence: TTG
tgtgtgttttttgtttgttt

SEQ ID NO: 187759 - DNA, 20 bp, Artificial Sequence
  Description of Artificial Sequence: Synthetic oligonucleotide
  Target: LAMA2; (-) strand; PAM type: YTN; PAM sequence: TTT
gtgtgtgttttttgtttgtt

SEQ ID NO: 187760 - DNA, 20 bp, Artificial Sequence
  Description of Artificial Sequence: Synthetic oligonucleotide
  Target: LAMA2; (-) strand; PAM type: YTN; PAM sequence: TTT
tgtgtgtgttttttgtttgt

SEQ ID NO: 187761 - DNA, 20 bp, Artificial Sequence
  Description of Artificial Sequence: Synthetic oligonucleotide
  Target: LAMA2; (-) strand; PAM type: YTN; PAM sequence: TTT
ttgtgtgtgttttttgtttg

SEQ ID NO: 187762 - DNA, 20 bp, Artificial Sequence
  Description of Artificial Sequence: Synthetic oligonucleotide
  Target: LAMA2; (-) strand; PAM type: YTN; PAM sequence: TTC
cacatcaaatttttgtgtgt

SEQ ID NO: 187763 - DNA, 20 bp, Artificial Sequence
  Description of Artificial Sequence: Synthetic oligonucleotide
  Target: LAMA2; (-) strand; PAM type: YTN; PAM sequence: TTT
ccacatcaaatttttgtgtg

SEQ ID NO: 187764 - DNA, 20 bp, Artificial Sequence
  Description of Artificial Sequence: Synthetic oligonucleotide
  Target: LAMA2; (-) strand; PAM type: YTN; PAM sequence: TTG
tttccacatcaaatttttgt

SEQ ID NO: 187765 - DNA, 20 bp, Artificial Sequence
  Description of Artificial Sequence: Synthetic oligonucleotide
  Target: LAMA2; (-) strand; PAM type: YTN; PAM sequence: TTT
gtttccacatcaaatttttg

SEQ ID NO: 187766 - DNA, 20 bp, Artificial Sequence
  Description of Artificial Sequence: Synthetic oligonucleotide
  Target: LAMA2; (-) strand; PAM type: YTN; PAM sequence: TTA
agtttgtttccacatcaaat

SEQ ID NO: 187767 - DNA, 20 bp, Artificial Sequence
  Description of Artificial Sequence: Synthetic oligonucleotide
  Target: LAMA2; (-) strand; PAM type: YTN; PAM sequence: TTT
aagtttgtttccacatcaaa

SEQ ID NO: 187768 - DNA, 20 bp, Artificial Sequence
  Description of Artificial Sequence: Synthetic oligonucleotide
  Target: LAMA2; (-) strand; PAM type: YTN; PAM sequence: CTA
atttaagtttgtttccacat

SEQ ID NO: 187769 - DNA, 20 bp, Artificial Sequence
  Description of Artificial Sequence: Synthetic oligonucleotide
  Target: LAMA2; (-) strand; PAM type: YTN; PAM sequence: TTG
aaacctaatttaagtttgtt

SEQ ID NO: 187770 - DNA, 20 bp, Artificial Sequence
  Description of Artificial Sequence: Synthetic oligonucleotide
  Target: LAMA2; (-) strand; PAM type: YTN; PAM sequence: TTT
gaaacctaatttaagtttgt

SEQ ID NO: 187771 - DNA, 20 bp, Artificial Sequence
  Description of Artificial Sequence: Synthetic oligonucleotide
  Target: LAMA2; (-) strand; PAM type: YTN; PAM sequence: TTA
tatttgaaacctaatttaag

SEQ ID NO: 187772 - DNA, 20 bp, Artificial Sequence
  Description of Artificial Sequence: Synthetic oligonucleotide
  Target: LAMA2; (-) strand; PAM type: YTN; PAM sequence: CTT
atatttgaaacctaatttaa

SEQ ID NO: 187773 - DNA, 20 bp, Artificial Sequence
  Description of Artificial Sequence: Synthetic oligonucleotide
  Target: LAMA2; (-) strand; PAM type: YTN; PAM sequence: TTG
ccttatatttgaaacctaat

SEQ ID NO: 187774 - DNA, 20 bp, Artificial Sequence
  Description of Artificial Sequence: Synthetic oligonucleotide
  Target: LAMA2; (-) strand; PAM type: YTN; PAM sequence: CTT
gccttatatttgaaacctaa

SEQ ID NO: 187775 - DNA, 20 bp, Artificial Sequence
  Description of Artificial Sequence: Synthetic oligonucleotide
  Target: LAMA2; (-) strand; PAM type: YTN; PAM sequence: TTA
tgtagtgagtaaacaaacaa

SEQ ID NO: 187776 - DNA, 20 bp, Artificial Sequence
  Description of Artificial Sequence: Synthetic oligonucleotide
  Target: LAMA2; (-) strand; PAM type: YTN; PAM sequence: TTT
atgtagtgagtaaacaaaca

SEQ ID NO: 187777 - DNA, 20 bp, Artificial Sequence
  Description of Artificial Sequence: Synthetic oligonucleotide
  Target: LAMA2; (-) strand; PAM type: YTN; PAM sequence: CTG
gtcatttatgtagtgagtaa

SEQ ID NO: 187778 - DNA, 20 bp, Artificial Sequence
  Description of Artificial Sequence: Synthetic oligonucleotide
  Target: LAMA2; (-) strand; PAM type: YTN; PAM sequence: CTG
aatgggccactggtcattta

SEQ ID NO: 187779 - DNA, 20 bp, Artificial Sequence
  Description of Artificial Sequence: Synthetic oligonucleotide
  Target: LAMA2; (-) strand; PAM type: YTN; PAM sequence: TTC
tgaatgggccactggtcatt

SEQ ID NO: 187780 - DNA, 20 bp, Artificial Sequence
  Description of Artificial Sequence: Synthetic oligonucleotide
  Target: LAMA2; (-) strand; PAM type: YTN; PAM sequence: CTT
ctgaatgggccactggtcat

SEQ ID NO: 187781 - DNA, 20 bp, Artificial Sequence
  Description of Artificial Sequence: Synthetic oligonucleotide
  Target: LAMA2; (-) strand; PAM type: YTN; PAM sequence: TTA
gacttctgaatgggccactg

SEQ ID NO: 187782 - DNA, 20 bp, Artificial Sequence
  Description of Artificial Sequence: Synthetic oligonucleotide
  Target: LAMA2; (-) strand; PAM type: YTN; PAM sequence: CTT
agacttctgaatgggccact

SEQ ID NO: 187783 - DNA, 20 bp, Artificial Sequence
  Description of Artificial Sequence: Synthetic oligonucleotide
  Target: LAMA2; (-) strand; PAM type: YTN; PAM sequence: TTG
tccttagacttctgaatggg

SEQ ID NO: 187784 - DNA, 20 bp, Artificial Sequence
  Description of Artificial Sequence: Synthetic oligonucleotide
  Target: LAMA2; (-) strand; PAM type: YTN; PAM sequence: TTT
gtccttagacttctgaatgg

SEQ ID NO: 187785 - DNA, 20 bp, Artificial Sequence
  Description of Artificial Sequence: Synthetic oligonucleotide
  Target: LAMA2; (-) strand; PAM type: YTN; PAM sequence: TTT
tgtccttagacttctgaatg

SEQ ID NO: 187786 - DNA, 20 bp, Artificial Sequence
  Description of Artificial Sequence: Synthetic oligonucleotide
  Target: LAMA2; (-) strand; PAM type: YTN; PAM sequence: CTA
caacatattttgtccttaga

SEQ ID NO: 187787 - DNA, 20 bp, Artificial Sequence
  Description of Artificial Sequence: Synthetic oligonucleotide
  Target: LAMA2; (-) strand; PAM type: YTN; PAM sequence: CTC
agtggtcaggacagtcctac

SEQ ID NO: 187788 - DNA, 20 bp, Artificial Sequence
  Description of Artificial Sequence: Synthetic oligonucleotide
  Target: LAMA2; (-) strand; PAM type: YTN; PAM sequence: CTG
tccctcagtggtcaggacag

SEQ ID NO: 187789 - DNA, 20 bp, Artificial Sequence
  Description of Artificial Sequence: Synthetic oligonucleotide
  Target: LAMA2; (-) strand; PAM type: YTN; PAM sequence: TTG
ggtcagggtgtgagctgtcc

SEQ ID NO: 187790 - DNA, 20 bp, Artificial Sequence
  Description of Artificial Sequence: Synthetic oligonucleotide
  Target: LAMA2; (-) strand; PAM type: YTN; PAM sequence: CTG
ttgggtcagggtgtgagctg

SEQ ID NO: 187791 - DNA, 20 bp, Artificial Sequence
  Description of Artificial Sequence: Synthetic oligonucleotide
  Target: LAMA2; (-) strand; PAM type: YTN; PAM sequence: TTA
gtgtactgttgggtcagggt

SEQ ID NO: 187792 - DNA, 20 bp, Artificial Sequence
  Description of Artificial Sequence: Synthetic oligonucleotide
  Target: LAMA2; (-) strand; PAM type: YTN; PAM sequence: CTG
caggcattagtgtactgttg

SEQ ID NO: 187793 - DNA, 20 bp, Artificial Sequence
  Description of Artificial Sequence: Synthetic oligonucleotide
  Target: LAMA2; (-) strand; PAM type: YTN; PAM sequence: CTC
cgggaacggtgggtactgca

SEQ ID NO: 187794 - DNA, 20 bp, Artificial Sequence
  Description of Artificial Sequence: Synthetic oligonucleotide
  Target: LAMA2; (-) strand; PAM type: YTN; PAM sequence: TTA
ctccgggaacggtgggtact

SEQ ID NO: 187795 - DNA, 20 bp, Artificial Sequence
  Description of Artificial Sequence: Synthetic oligonucleotide
  Target: LAMA2; (-) strand; PAM type: YTN; PAM sequence: TTT
actccgggaacggtgggtac

SEQ ID NO: 187796 - DNA, 20 bp, Artificial Sequence
  Description of Artificial Sequence: Synthetic oligonucleotide
  Target: LAMA2; (-) strand; PAM type: YTN; PAM sequence: TTG
gtttactccgggaacggtgg

SEQ ID NO: 187797 - DNA, 20 bp, Artificial Sequence
  Description of Artificial Sequence: Synthetic oligonucleotide
  Target: LAMA2; (-) strand; PAM type: YTN; PAM sequence: TTT
ggtttactccgggaacggtg

SEQ ID NO: 187798 - DNA, 20 bp, Artificial Sequence
  Description of Artificial Sequence: Synthetic oligonucleotide
  Target: LAMA2; (-) strand; PAM type: YTN; PAM sequence: TTT
tggtttactccgggaacggt

SEQ ID NO: 187799 - DNA, 20 bp, Artificial Sequence
  Description of Artificial Sequence: Synthetic oligonucleotide
  Target: LAMA2; (-) strand; PAM type: YTN; PAM sequence: CTT
ttggtttactccgggaacgg

SEQ ID NO: 187800 - DNA, 20 bp, Artificial Sequence
  Description of Artificial Sequence: Synthetic oligonucleotide
  Target: LAMA2; (-) strand; PAM type: YTN; PAM sequence: TTG
tgagtcgcaggatgtctttt

SEQ ID NO: 187801 - DNA, 20 bp, Artificial Sequence
  Description of Artificial Sequence: Synthetic oligonucleotide
  Target: LAMA2; (-) strand; PAM type: YTN; PAM sequence: TTT
gtgagtcgcaggatgtcttt

SEQ ID NO: 187802 - DNA, 20 bp, Artificial Sequence
  Description of Artificial Sequence: Synthetic oligonucleotide
  Target: LAMA2; (-) strand; PAM type: YTN; PAM sequence: TTT
tgtgagtcgcaggatgtctt

SEQ ID NO: 187803 - DNA, 20 bp, Artificial Sequence
  Description of Artificial Sequence: Synthetic oligonucleotide
  Target: LAMA2; (-) strand; PAM type: YTN; PAM sequence: CTC
cataatggattttgtgagtc

SEQ ID NO: 187804 - DNA, 20 bp, Artificial Sequence
  Description of Artificial Sequence: Synthetic oligonucleotide
  Target: LAMA2; (-) strand; PAM type: YTN; PAM sequence: TTA
aaacaactccataatggatt

SEQ ID NO: 187805 - DNA, 20 bp, Artificial Sequence
  Description of Artificial Sequence: Synthetic oligonucleotide
  Target: LAMA2; (-) strand; PAM type: YTN; PAM sequence: TTT
aaaacaactccataatggat

SEQ ID NO: 187806 - DNA, 20 bp, Artificial Sequence
  Description of Artificial Sequence: Synthetic oligonucleotide
  Target: LAMA2; (-) strand; PAM type: YTN; PAM sequence: CTC
ataaggtttaaaacaactcc

SEQ ID NO: 187807 - DNA, 20 bp, Artificial Sequence
  Description of Artificial Sequence: Synthetic oligonucleotide
  Target: LAMA2; (-) strand; PAM type: YTN; PAM sequence: TTC
tcataaggtttaaaacaact

SEQ ID NO: 187808 - DNA, 20 bp, Artificial Sequence
  Description of Artificial Sequence: Synthetic oligonucleotide
  Target: LAMA2; (-) strand; PAM type: YTN; PAM sequence: CTA
ggtcagtggttctcataagg

SEQ ID NO: 187809 - DNA, 20 bp, Artificial Sequence
  Description of Artificial Sequence: Synthetic oligonucleotide
  Target: LAMA2; (-) strand; PAM type: YTN; PAM sequence: TTA
tggcctaggtcagtggttct

SEQ ID NO: 187810 - DNA, 20 bp, Artificial Sequence
  Description of Artificial Sequence: Synthetic oligonucleotide
  Target: LAMA2; (-) strand; PAM type: YTN; PAM sequence: TTT
atggcctaggtcagtggttc

SEQ ID NO: 187811 - DNA, 20 bp, Artificial Sequence
  Description of Artificial Sequence: Synthetic oligonucleotide
  Target: LAMA2; (-) strand; PAM type: YTN; PAM sequence: TTT
tatggcctaggtcagtggtt

SEQ ID NO: 187812 - DNA, 20 bp, Artificial Sequence
  Description of Artificial Sequence: Synthetic oligonucleotide
  Target: LAMA2; (-) strand; PAM type: YTN; PAM sequence: TTT
ttatggcctaggtcagtggt

SEQ ID NO: 187813 - DNA, 20 bp, Artificial Sequence
  Description of Artificial Sequence: Synthetic oligonucleotide
  Target: LAMA2; (-) strand; PAM type: YTN; PAM sequence: TTT
tttatggcctaggtcagtgg

SEQ ID NO: 187814 - DNA, 20 bp, Artificial Sequence
  Description of Artificial Sequence: Synthetic oligonucleotide
  Target: LAMA2; (-) strand; PAM type: YTN; PAM sequence: TTG
ttttttatggcctaggtcag

SEQ ID NO: 187815 - DNA, 20 bp, Artificial Sequence
  Description of Artificial Sequence: Synthetic oligonucleotide
  Target: LAMA2; (-) strand; PAM type: YTN; PAM sequence: TTT
gttttttatggcctaggtca

SEQ ID NO: 187816 - DNA, 20 bp, Artificial Sequence
  Description of Artificial Sequence: Synthetic oligonucleotide
  Target: LAMA2; (-) strand; PAM type: YTN; PAM sequence: TTC
atttgttttttatggcctag

SEQ ID NO: 187817 - DNA, 20 bp, Artificial Sequence
  Description of Artificial Sequence: Synthetic oligonucleotide
  Target: LAMA2; (-) strand; PAM type: YTN; PAM sequence: TTT
catttgttttttatggccta

SEQ ID NO: 187818 - DNA, 20 bp, Artificial Sequence
  Description of Artificial Sequence: Synthetic oligonucleotide
  Target: LAMA2; (-) strand; PAM type: YTN; PAM sequence: TTT
tcatttgttttttatggcct

SEQ ID NO: 187819 - DNA, 20 bp, Artificial Sequence
  Description of Artificial Sequence: Synthetic oligonucleotide
  Target: LAMA2; (-) strand; PAM type: YTN; PAM sequence: TTT
ttcatttgttttttatggcc

SEQ ID NO: 187820 - DNA, 20 bp, Artificial Sequence
  Description of Artificial Sequence: Synthetic oligonucleotide
  Target: LAMA2; (-) strand; PAM type: YTN; PAM sequence: TTT
tttcatttgttttttatggc

SEQ ID NO: 187821 - DNA, 20 bp, Artificial Sequence
  Description of Artificial Sequence: Synthetic oligonucleotide
  Target: LAMA2; (-) strand; PAM type: YTN; PAM sequence: TTG
ttttttcatttgttttttat

SEQ ID NO: 187822 - DNA, 20 bp, Artificial Sequence
  Description of Artificial Sequence: Synthetic oligonucleotide
  Target: LAMA2; (-) strand; PAM type: YTN; PAM sequence: TTG
ttgttttttcatttgttttt

SEQ ID NO: 187823 - DNA, 20 bp, Artificial Sequence
  Description of Artificial Sequence: Synthetic oligonucleotide
  Target: LAMA2; (-) strand; PAM type: YTN; PAM sequence: TTT
gttgttttttcatttgtttt

SEQ ID NO: 187824 - DNA, 20 bp, Artificial Sequence
  Description of Artificial Sequence: Synthetic oligonucleotide
  Target: LAMA2; (-) strand; PAM type: YTN; PAM sequence: TTT
tgttgttttttcatttgttt

SEQ ID NO: 187825 - DNA, 20 bp, Artificial Sequence
  Description of Artificial Sequence: Synthetic oligonucleotide
  Target: LAMA2; (-) strand; PAM type: YTN; PAM sequence: TTT
ttgttgttttttcatttgtt

SEQ ID NO: 187826 - DNA, 20 bp, Artificial Sequence
  Description of Artificial Sequence: Synthetic oligonucleotide
  Target: LAMA2; (-) strand; PAM type: YTN; PAM sequence: CTA
gtttttgttgttttttcatt

SEQ ID NO: 187827 - DNA, 20 bp, Artificial Sequence
  Description of Artificial Sequence: Synthetic oligonucleotide
  Target: LAMA2; (-) strand; PAM type: YTN; PAM sequence: TTC
ctagtttttgttgttttttc

SEQ ID NO: 187828 - DNA, 20 bp, Artificial Sequence
  Description of Artificial Sequence: Synthetic oligonucleotide
  Target: LAMA2; (-) strand; PAM type: YTN; PAM sequence: CTG
ccattcctagtttttgttgt

SEQ ID NO: 187829 - DNA, 20 bp, Artificial Sequence
  Description of Artificial Sequence: Synthetic oligonucleotide
  Target: LAMA2; (-) strand; PAM type: YTN; PAM sequence: CTA
ctgccattcctagtttttgt

SEQ ID NO: 187830 - DNA, 20 bp, Artificial Sequence
  Description of Artificial Sequence: Synthetic oligonucleotide
  Target: LAMA2; (-) strand; PAM type: YTN; PAM sequence: CTC
aacagaactactgccattcc

SEQ ID NO: 187831 - DNA, 20 bp, Artificial Sequence
  Description of Artificial Sequence: Synthetic oligonucleotide
  Target: LAMA2; (-) strand; PAM type: YTN; PAM sequence: TTA
actcaacagaactactgcca

SEQ ID NO: 187832 - DNA, 20 bp, Artificial Sequence
  Description of Artificial Sequence: Synthetic oligonucleotide
  Target: LAMA2; (-) strand; PAM type: YTN; PAM sequence: TTT
aactcaacagaactactgcc

SEQ ID NO: 187833 - DNA, 20 bp, Artificial Sequence
  Description of Artificial Sequence: Synthetic oligonucleotide
  Target: LAMA2; (-) strand; PAM type: YTN; PAM sequence: CTT
taactcaacagaactactgc

SEQ ID NO: 187834 - DNA, 20 bp, Artificial Sequence
  Description of Artificial Sequence: Synthetic oligonucleotide
  Target: LAMA2; (-) strand; PAM type: YTN; PAM sequence: CTC
tttaactcaacagaactact

SEQ ID NO: 187835 - DNA, 20 bp, Artificial Sequence
  Description of Artificial Sequence: Synthetic oligonucleotide
  Target: LAMA2; (-) strand; PAM type: YTN; PAM sequence: CTC
ctctttaactcaacagaact

SEQ ID NO: 187836 - DNA, 20 bp, Artificial Sequence
  Description of Artificial Sequence: Synthetic oligonucleotide
  Target: LAMA2; (-) strand; PAM type: YTN; PAM sequence: TTC
tcctctttaactcaacagaa

SEQ ID NO: 187837 - DNA, 20 bp, Artificial Sequence
  Description of Artificial Sequence: Synthetic oligonucleotide
  Target: LAMA2; (-) strand; PAM type: YTN; PAM sequence: TTT
ctcctctttaactcaacaga

SEQ ID NO: 187838 - DNA, 20 bp, Artificial Sequence
  Description of Artificial Sequence: Synthetic oligonucleotide
  Target: LAMA2; (-) strand; PAM type: YTN; PAM sequence: CTT
tctcctctttaactcaacag

SEQ ID NO: 187839 - DNA, 20 bp, Artificial Sequence
  Description of Artificial Sequence: Synthetic oligonucleotide
  Target: LAMA2; (-) strand; PAM type: YTN; PAM sequence: CTC
tttctcctctttaactcaac

SEQ ID NO: 187840 - DNA, 20 bp, Artificial Sequence
  Description of Artificial Sequence: Synthetic oligonucleotide
  Target: LAMA2; (-) strand; PAM type: YTN; PAM sequence: CTC
ctctttctcctctttaactc

SEQ ID NO: 187841 - DNA, 20 bp, Artificial Sequence
  Description of Artificial Sequence: Synthetic oligonucleotide
  Target: LAMA2; (-) strand; PAM type: YTN; PAM sequence: TTC
tcctctttctcctctttaac

SEQ ID NO: 187842 - DNA, 20 bp, Artificial Sequence
  Description of Artificial Sequence: Synthetic oligonucleotide
  Target: LAMA2; (-) strand; PAM type: YTN; PAM sequence: TTT
ctcctctttctcctctttaa

SEQ ID NO: 187843 - DNA, 20 bp, Artificial Sequence
  Description of Artificial Sequence: Synthetic oligonucleotide
  Target: LAMA2; (-) strand; PAM type: YTN; PAM sequence: CTG
gtttctcctctttctcctct

SEQ ID NO: 187844 - DNA, 20 bp, Artificial Sequence
  Description of Artificial Sequence: Synthetic oligonucleotide
  Target: LAMA2; (-) strand; PAM type: YTN; PAM sequence: TTC
cagtcctggtttctcctctt

SEQ ID NO: 187845 - DNA, 20 bp, Artificial Sequence
  Description of Artificial Sequence: Synthetic oligonucleotide
  Target: LAMA2; (-) strand; PAM type: YTN; PAM sequence: CTT
ccagtcctggtttctcctct

SEQ ID NO: 187846 - DNA, 20 bp, Artificial Sequence
  Description of Artificial Sequence: Synthetic oligonucleotide
  Target: LAMA2; (-) strand; PAM type: YTN; PAM sequence: CTC
ttccagtcctggtttctcct

SEQ ID NO: 187847 - DNA, 20 bp, Artificial Sequence
  Description of Artificial Sequence: Synthetic oligonucleotide
  Target: LAMA2; (-) strand; PAM type: YTN; PAM sequence: TTC
atctcttccagtcctggttt

SEQ ID NO: 187848 - DNA, 20 bp, Artificial Sequence
  Description of Artificial Sequence: Synthetic oligonucleotide
  Target: LAMA2; (-) strand; PAM type: YTN; PAM sequence: TTT
catctcttccagtcctggtt

SEQ ID NO: 187849 - DNA, 20 bp, Artificial Sequence
  Description of Artificial Sequence: Synthetic oligonucleotide
  Target: LAMA2; (-) strand; PAM type: YTN; PAM sequence: CTC
acaatttcatctcttccagt

SEQ ID NO: 187850 - DNA, 20 bp, Artificial Sequence
  Description of Artificial Sequence: Synthetic oligonucleotide
  Target: LAMA2; (-) strand; PAM type: YTN; PAM sequence: TTC
cagactcacaatttcatctc

SEQ ID NO: 187851 - DNA, 20 bp, Artificial Sequence
  Description of Artificial Sequence: Synthetic oligonucleotide
  Target: LAMA2; (-) strand; PAM type: YTN; PAM sequence: CTT
ccagactcacaatttcatct

SEQ ID NO: 187852 - DNA, 20 bp, Artificial Sequence
  Description of Artificial Sequence: Synthetic oligonucleotide
  Target: LAMA2; (-) strand; PAM type: YTN; PAM sequence: TTC
cttccagactcacaatttca

SEQ ID NO: 187853 - DNA, 20 bp, Artificial Sequence
  Description of Artificial Sequence: Synthetic oligonucleotide
  Target: LAMA2; (-) strand; PAM type: YTN; PAM sequence: TTT
ccttccagactcacaatttc

SEQ ID NO: 187854 - DNA, 20 bp, Artificial Sequence
  Description of Artificial Sequence: Synthetic oligonucleotide
  Target: LAMA2; (-) strand; PAM type: YTN; PAM sequence: TTG
caatagtttccttccagact

SEQ ID NO: 187855 - DNA, 20 bp, Artificial Sequence
  Description of Artificial Sequence: Synthetic oligonucleotide
  Target: LAMA2; (-) strand; PAM type: YTN; PAM sequence: TTT
gcaatagtttccttccagac

SEQ ID NO: 187856 - DNA, 20 bp, Artificial Sequence
  Description of Artificial Sequence: Synthetic oligonucleotide
  Target: LAMA2; (-) strand; PAM type: YTN; PAM sequence: CTT
tgcaatagtttccttccaga

SEQ ID NO: 187857 - DNA, 20 bp, Artificial Sequence
  Description of Artificial Sequence: Synthetic oligonucleotide
  Target: LAMA2; (-) strand; PAM type: YTN; PAM sequence: TTA
aaggtaataaaggcctttgc

SEQ ID NO: 187858 - DNA, 20 bp, Artificial Sequence
  Description of Artificial Sequence: Synthetic oligonucleotide
  Target: LAMA2; (-) strand; PAM type: YTN; PAM sequence: CTT
aaaggtaataaaggcctttg

SEQ ID NO: 187859 - DNA, 20 bp, Artificial Sequence
  Description of Artificial Sequence: Synthetic oligonucleotide
  Target: LAMA2; (-) strand; PAM type: YTN; PAM sequence: TTA
cttaaaggtaataaaggcct

SEQ ID NO: 187860 - DNA, 20 bp, Artificial Sequence
  Description of Artificial Sequence: Synthetic oligonucleotide
  Target: LAMA2; (-) strand; PAM type: YTN; PAM sequence: TTT
acttaaaggtaataaaggcc

SEQ ID NO: 187861 - DNA, 20 bp, Artificial Sequence
  Description of Artificial Sequence: Synthetic oligonucleotide
  Target: LAMA2; (-) strand; PAM type: YTN; PAM sequence: TTA
ggagacatttacttaaaggt

SEQ ID NO: 187862 - DNA, 20 bp, Artificial Sequence
  Description of Artificial Sequence: Synthetic oligonucleotide
  Target: LAMA2; (-) strand; PAM type: YTN; PAM sequence: TTC
agttaggagacatttactta

SEQ ID NO: 187863 - DNA, 20 bp, Artificial Sequence
  Description of Artificial Sequence: Synthetic oligonucleotide
  Target: LAMA2; (-) strand; PAM type: YTN; PAM sequence: TTC
agttcagttaggagacattt

SEQ ID NO: 187864 - DNA, 20 bp, Artificial Sequence
  Description of Artificial Sequence: Synthetic oligonucleotide
  Target: LAMA2; (-) strand; PAM type: YTN; PAM sequence: TTT
cagttcagttaggagacatt

SEQ ID NO: 187865 - DNA, 20 bp, Artificial Sequence
  Description of Artificial Sequence: Synthetic oligonucleotide
  Target: LAMA2; (-) strand; PAM type: YTN; PAM sequence: CTT
tcagttcagttaggagacat

SEQ ID NO: 187866 - DNA, 20 bp, Artificial Sequence
  Description of Artificial Sequence: Synthetic oligonucleotide
  Target: LAMA2; (-) strand; PAM type: YTN; PAM sequence: TTA
gaatgaaggctttcagttca

SEQ ID NO: 187867 - DNA, 20 bp, Artificial Sequence
  Description of Artificial Sequence: Synthetic oligonucleotide
  Target: LAMA2; (-) strand; PAM type: YTN; PAM sequence: CTA
atggttagaatgaaggcttt

SEQ ID NO: 187868 - DNA, 20 bp, Artificial Sequence
  Description of Artificial Sequence: Synthetic oligonucleotide
  Target: LAMA2; (-) strand; PAM type: YTN; PAM sequence: CTG
accaaactaatggttagaat

SEQ ID NO: 187869 - DNA, 20 bp, Artificial Sequence
  Description of Artificial Sequence: Synthetic oligonucleotide
  Target: LAMA2; (-) strand; PAM type: YTN; PAM sequence: TTC
ctgaccaaactaatggttag

SEQ ID NO: 187870 - DNA, 20 bp, Artificial Sequence
  Description of Artificial Sequence: Synthetic oligonucleotide
  Target: LAMA2; (-) strand; PAM type: YTN; PAM sequence: CTG
aaatgttcctgaccaaacta

SEQ ID NO: 187871 - DNA, 20 bp, Artificial Sequence
  Description of Artificial Sequence: Synthetic oligonucleotide
  Target: LAMA2; (-) strand; PAM type: YTN; PAM sequence: CTG
gcgtccctgaaatgttcctg

SEQ ID NO: 187872 - DNA, 20 bp, Artificial Sequence
  Description of Artificial Sequence: Synthetic oligonucleotide
  Target: LAMA2; (-) strand; PAM type: YTN; PAM sequence: CTG
ggagggcagtaaaggaagtg

SEQ ID NO: 187873 - DNA, 20 bp, Artificial Sequence
  Description of Artificial Sequence: Synthetic oligonucleotide
  Target: LAMA2; (-) strand; PAM type: YTN; PAM sequence: CTG
ctgggagggcagtaaaggaa

SEQ ID NO: 187874 - DNA, 20 bp, Artificial Sequence
  Description of Artificial Sequence: Synthetic oligonucleotide
  Target: LAMA2; (-) strand; PAM type: YTN; PAM sequence: CTA
ggtaggctgctgggagggca

SEQ ID NO: 187875 - DNA, 20 bp, Artificial Sequence
  Description of Artificial Sequence: Synthetic oligonucleotide
  Target: LAMA2; (-) strand; PAM type: YTN; PAM sequence: CTG
ctaggtaggctgctgggagg

SEQ ID NO: 187876 - DNA, 20 bp, Artificial Sequence
  Description of Artificial Sequence: Synthetic oligonucleotide
  Target: LAMA2; (-) strand; PAM type: YTN; PAM sequence: TTA
ctgctaggtaggctgctggg

SEQ ID NO: 187877 - DNA, 20 bp, Artificial Sequence
  Description of Artificial Sequence: Synthetic oligonucleotide
  Target: LAMA2; (-) strand; PAM type: YTN; PAM sequence: CTT
actgctaggtaggctgctgg

SEQ ID NO: 187878 - DNA, 20 bp, Artificial Sequence
  Description of Artificial Sequence: Synthetic oligonucleotide
  Target: LAMA2; (-) strand; PAM type: YTN; PAM sequence: CTG
gggaacttactgctaggtag

SEQ ID NO: 187879 - DNA, 20 bp, Artificial Sequence
  Description of Artificial Sequence: Synthetic oligonucleotide
  Target: LAMA2; (-) strand; PAM type: YTN; PAM sequence: CTG
caggctggggaacttactgc

SEQ ID NO: 187880 - DNA, 20 bp, Artificial Sequence
  Description of Artificial Sequence: Synthetic oligonucleotide
  Target: LAMA2; (-) strand; PAM type: YTN; PAM sequence: CTG
gggacactgcaggctgggga

SEQ ID NO: 187881 - DNA, 20 bp, Artificial Sequence
  Description of Artificial Sequence: Synthetic oligonucleotide
  Target: LAMA2; (-) strand; PAM type: YTN; PAM sequence: CTC
tggggacactgcaggctggg

SEQ ID NO: 187882 - DNA, 20 bp, Artificial Sequence
  Description of Artificial Sequence: Synthetic oligonucleotide
  Target: LAMA2; (-) strand; PAM type: YTN; PAM sequence: CTA
gccgagggaaggtgccctct

SEQ ID NO: 187883 - DNA, 20 bp, Artificial Sequence
  Description of Artificial Sequence: Synthetic oligonucleotide
  Target: LAMA2; (-) strand; PAM type: YTN; PAM sequence: TTA
ctagccgagggaaggtgccc

SEQ ID NO: 187884 - DNA, 20 bp, Artificial Sequence
  Description of Artificial Sequence: Synthetic oligonucleotide
  Target: LAMA2; (-) strand; PAM type: YTN; PAM sequence: CTG
agaagttactagccgaggga

SEQ ID NO: 187885 - DNA, 20 bp, Artificial Sequence
  Description of Artificial Sequence: Synthetic oligonucleotide
  Target: LAMA2; (-) strand; PAM type: YTN; PAM sequence: CTA
gaagatccaagacatcccca

SEQ ID NO: 187886 - DNA, 20 bp, Artificial Sequence
  Description of Artificial Sequence: Synthetic oligonucleotide
  Target: LAMA2; (-) strand; PAM type: YTN; PAM sequence: CTG
tgtacctagaagatccaaga

SEQ ID NO: 187887 - DNA, 20 bp, Artificial Sequence
  Description of Artificial Sequence: Synthetic oligonucleotide
  Target: LAMA2; (-) strand; PAM type: YTN; PAM sequence: CTG
tgtgcagccactgtgtacct

SEQ ID NO: 187888 - DNA, 20 bp, Artificial Sequence
  Description of Artificial Sequence: Synthetic oligonucleotide
  Target: LAMA2; (-) strand; PAM type: YTN; PAM sequence: CTG
gcaaaactgtgtgcagccac

SEQ ID NO: 187889 - DNA, 20 bp, Artificial Sequence
  Description of Artificial Sequence: Synthetic oligonucleotide
  Target: LAMA2; (-) strand; PAM type: YTN; PAM sequence: TTG
agaaaggcctggcaaaactg

SEQ ID NO: 187890 - DNA, 20 bp, Artificial Sequence
  Description of Artificial Sequence: Synthetic oligonucleotide
  Target: LAMA2; (-) strand; PAM type: YTN; PAM sequence: CTT
gagaaaggcctggcaaaact

SEQ ID NO: 187891 - DNA, 20 bp, Artificial Sequence
  Description of Artificial Sequence: Synthetic oligonucleotide
  Target: LAMA2; (-) strand; PAM type: YTN; PAM sequence: CTC
ttgagaaaggcctggcaaaa

SEQ ID NO: 187892 - DNA, 20 bp, Artificial Sequence
  Description of Artificial Sequence: Synthetic oligonucleotide
  Target: LAMA2; (-) strand; PAM type: YTN; PAM sequence: TTA
cctcttgagaaaggcctggc

SEQ ID NO: 187893 - DNA, 20 bp, Artificial Sequence
  Description of Artificial Sequence: Synthetic oligonucleotide
  Target: LAMA2; (-) strand; PAM type: YTN; PAM sequence: TTT
acctcttgagaaaggcctgg

SEQ ID NO: 187894 - DNA, 20 bp, Artificial Sequence
  Description of Artificial Sequence: Synthetic oligonucleotide
  Target: LAMA2; (-) strand; PAM type: YTN; PAM sequence: TTT
tacctcttgagaaaggcctg

SEQ ID NO: 187895 - DNA, 20 bp, Artificial Sequence
  Description of Artificial Sequence: Synthetic oligonucleotide
  Target: LAMA2; (-) strand; PAM type: YTN; PAM sequence: CTT
ttacctcttgagaaaggcct

SEQ ID NO: 187896 - DNA, 20 bp, Artificial Sequence
  Description of Artificial Sequence: Synthetic oligonucleotide
  Target: LAMA2; (-) strand; PAM type: YTN; PAM sequence: CTA
ggaacttttacctcttgaga

SEQ ID NO: 187897 - DNA, 20 bp, Artificial Sequence
  Description of Artificial Sequence: Synthetic oligonucleotide
  Target: LAMA2; (-) strand; PAM type: YTN; PAM sequence: CTG
ggaaatgcaaacagctagga

SEQ ID NO: 187898 - DNA, 20 bp, Artificial Sequence
  Description of Artificial Sequence: Synthetic oligonucleotide
  Target: LAMA2; (-) strand; PAM type: YTN; PAM sequence: TTC
tgggaaatgcaaacagctag

SEQ ID NO: 187899 - DNA, 20 bp, Artificial Sequence
  Description of Artificial Sequence: Synthetic oligonucleotide
  Target: LAMA2; (-) strand; PAM type: YTN; PAM sequence: TTT
ctgggaaatgcaaacagcta

SEQ ID NO: 187900 - DNA, 20 bp, Artificial Sequence
  Description of Artificial Sequence: Synthetic oligonucleotide
  Target: LAMA2; (-) strand; PAM type: YTN; PAM sequence: TTA
tttctgggaaatgcaaacag

SEQ ID NO: 187901 - DNA, 20 bp, Artificial Sequence
  Description of Artificial Sequence: Synthetic oligonucleotide
  Target: LAMA2; (-) strand; PAM type: YTN; PAM sequence: CTA
cacatggaaaacattatttc

SEQ ID NO: 187902 - DNA, 20 bp, Artificial Sequence
  Description of Artificial Sequence: Synthetic oligonucleotide
  Target: LAMA2; (-) strand; PAM type: YTN; PAM sequence: CTG
taaaatccctacacatggaa

SEQ ID NO: 187903 - DNA, 20 bp, Artificial Sequence
  Description of Artificial Sequence: Synthetic oligonucleotide
  Target: LAMA2; (-) strand; PAM type: YTN; PAM sequence: TTG
aaatctgtaaaatccctaca

SEQ ID NO: 187904 - DNA, 20 bp, Artificial Sequence
  Description of Artificial Sequence: Synthetic oligonucleotide
  Target: LAMA2; (-) strand; PAM type: YTN; PAM sequence: TTT
gaaatctgtaaaatccctac

SEQ ID NO: 187905 - DNA, 20 bp, Artificial Sequence
  Description of Artificial Sequence: Synthetic oligonucleotide
  Target: LAMA2; (-) strand; PAM type: YTN; PAM sequence: CTT
tgaaatctgtaaaatcccta

SEQ ID NO: 187906 - DNA, 20 bp, Artificial Sequence
  Description of Artificial Sequence: Synthetic oligonucleotide
  Target: LAMA2; (-) strand; PAM type: YTN; PAM sequence: TTG
acatgaaagcactttgaaat

SEQ ID NO: 187907 - DNA, 20 bp, Artificial Sequence
  Description of Artificial Sequence: Synthetic oligonucleotide
  Target: LAMA2; (-) strand; PAM type: YTN; PAM sequence: TTA
aagaaagtaattgacatgaa

SEQ ID NO: 187908 - DNA, 20 bp, Artificial Sequence
  Description of Artificial Sequence: Synthetic oligonucleotide
  Target: LAMA2; (-) strand; PAM type: YTN; PAM sequence: TTA
aattaaagaaagtaattgac

SEQ ID NO: 187909 - DNA, 20 bp, Artificial Sequence
  Description of Artificial Sequence: Synthetic oligonucleotide
  Target: LAMA2; (-) strand; PAM type: YTN; PAM sequence: TTT
aaattaaagaaagtaattga

SEQ ID NO: 187910 - DNA, 20 bp, Artificial Sequence
  Description of Artificial Sequence: Synthetic oligonucleotide
  Target: LAMA2; (-) strand; PAM type: YTN; PAM sequence: TTT
taaattaaagaaagtaattg

SEQ ID NO: 187911 - DNA, 20 bp, Artificial Sequence
  Description of Artificial Sequence: Synthetic oligonucleotide
  Target: LAMA2; (-) strand; PAM type: YTN; PAM sequence: CTT
ttaaattaaagaaagtaatt

SEQ ID NO: 187912 - DNA, 20 bp, Artificial Sequence
  Description of Artificial Sequence: Synthetic oligonucleotide
  Target: LAMA2; (-) strand; PAM type: YTN; PAM sequence: TTC
ttttaaattaaagaaagtaa

SEQ ID NO: 187913 - DNA, 20 bp, Artificial Sequence
  Description of Artificial Sequence: Synthetic oligonucleotide
  Target: LAMA2; (-) strand; PAM type: YTN; PAM sequence: CTT
cttttaaattaaagaaagta

SEQ ID NO: 187914 - DNA, 20 bp, Artificial Sequence
  Description of Artificial Sequence: Synthetic oligonucleotide
  Target: LAMA2; (-) strand; PAM type: YTN; PAM sequence: CTG
aacttcttttaaattaaaga

SEQ ID NO: 187915 - DNA, 20 bp, Artificial Sequence
  Description of Artificial Sequence: Synthetic oligonucleotide
  Target: LAMA2; (-) strand; PAM type: YTN; PAM sequence: CTG
gtatctgaacttcttttaaa

SEQ ID NO: 187916 - DNA, 20 bp, Artificial Sequence
  Description of Artificial Sequence: Synthetic oligonucleotide
  Target: LAMA2; (-) strand; PAM type: YTN; PAM sequence: TTG
acctggtatctgaacttctt

SEQ ID NO: 187917 - DNA, 20 bp, Artificial Sequence
  Description of Artificial Sequence: Synthetic oligonucleotide
  Target: LAMA2; (-) strand; PAM type: YTN; PAM sequence: CTT
gacctggtatctgaacttct

SEQ ID NO: 187918 - DNA, 20 bp, Artificial Sequence
  Description of Artificial Sequence: Synthetic oligonucleotide
  Target: LAMA2; (-) strand; PAM type: YTN; PAM sequence: CTA
gcttgacctggtatctgaac

SEQ ID NO: 187919 - DNA, 20 bp, Artificial Sequence
  Description of Artificial Sequence: Synthetic oligonucleotide
  Target: LAMA2; (-) strand; PAM type: YTN; PAM sequence: TTC
ctagcttgacctggtatctg

SEQ ID NO: 187920 - DNA, 20 bp, Artificial Sequence
  Description of Artificial Sequence: Synthetic oligonucleotide
  Target: LAMA2; (-) strand; PAM type: YTN; PAM sequence: CTG
agaccggatcattcctagct

SEQ ID NO: 187921 - DNA, 20 bp, Artificial Sequence
  Description of Artificial Sequence: Synthetic oligonucleotide
  Target: LAMA2; (-) strand; PAM type: YTN; PAM sequence: CTC
tgagaccggatcattcctag

SEQ ID NO: 187922 - DNA, 20 bp, Artificial Sequence
  Description of Artificial Sequence: Synthetic oligonucleotide
  Target: LAMA2; (-) strand; PAM type: YTN; PAM sequence: TTC
cctctgagaccggatcattc

SEQ ID NO: 187923 - DNA, 20 bp, Artificial Sequence
  Description of Artificial Sequence: Synthetic oligonucleotide
  Target: LAMA2; (-) strand; PAM type: YTN; PAM sequence: CTT
ccctctgagaccggatcatt

SEQ ID NO: 187924 - DNA, 20 bp, Artificial Sequence
  Description of Artificial Sequence: Synthetic oligonucleotide
  Target: LAMA2; (-) strand; PAM type: YTN; PAM sequence: CTC
cttccctctgagaccggatc

SEQ ID NO: 187925 - DNA, 20 bp, Artificial Sequence
  Description of Artificial Sequence: Synthetic oligonucleotide
  Target: LAMA2; (-) strand; PAM type: YTN; PAM sequence: CTA
gagcgctccttccctctgag

SEQ ID NO: 187926 - DNA, 20 bp, Artificial Sequence
  Description of Artificial Sequence: Synthetic oligonucleotide
  Target: LAMA2; (-) strand; PAM type: YTN; PAM sequence: TTC
ctagagcgctccttccctct

SEQ ID NO: 187927 - DNA, 20 bp, Artificial Sequence
  Description of Artificial Sequence: Synthetic oligonucleotide
  Target: LAMA2; (-) strand; PAM type: YTN; PAM sequence: TTT
cctagagcgctccttccctc

SEQ ID NO: 187928 - DNA, 20 bp, Artificial Sequence
  Description of Artificial Sequence: Synthetic oligonucleotide
  Target: LAMA2; (-) strand; PAM type: YTN; PAM sequence: CTT
tcctagagcgctccttccct

SEQ ID NO: 187929 - DNA, 20 bp, Artificial Sequence
  Description of Artificial Sequence: Synthetic oligonucleotide
  Target: LAMA2; (-) strand; PAM type: YTN; PAM sequence: CTC
ctttcctagagcgctccttc

SEQ ID NO: 187930 - DNA, 20 bp, Artificial Sequence
  Description of Artificial Sequence: Synthetic oligonucleotide
  Target: LAMA2; (-) strand; PAM type: YTN; PAM sequence: TTA
aaggatcctcctttcctaga

SEQ ID NO: 187931 - DNA, 20 bp, Artificial Sequence
  Description of Artificial Sequence: Synthetic oligonucleotide
  Target: LAMA2; (-) strand; PAM type: YTN; PAM sequence: CTA
ttaaaggatcctcctttcct

SEQ ID NO: 187932 - DNA, 20 bp, Artificial Sequence
  Description of Artificial Sequence: Synthetic oligonucleotide
  Target: LAMA2; (-) strand; PAM type: YTN; PAM sequence: CTC
tattaaaggatcctcctttc

SEQ ID NO: 187933 - DNA, 20 bp, Artificial Sequence
  Description of Artificial Sequence: Synthetic oligonucleotide
  Target: LAMA2; (-) strand; PAM type: YTN; PAM sequence: TTC
catgggcacgcggccccagg

SEQ ID NO: 187934 - DNA, 20 bp, Artificial Sequence
  Description of Artificial Sequence: Synthetic oligonucleotide
  Target: LAMA2; (-) strand; PAM type: YTN; PAM sequence: CTT
ccatgggcacgcggccccag

SEQ ID NO: 187935 - DNA, 20 bp, Artificial Sequence
  Description of Artificial Sequence: Synthetic oligonucleotide
  Target: LAMA2; (-) strand; PAM type: YTN; PAM sequence: CTC
gccttccatgggcacgcggc

SEQ ID NO: 187936 - DNA, 20 bp, Artificial Sequence
  Description of Artificial Sequence: Synthetic oligonucleotide
  Target: LAMA2; (-) strand; PAM type: YTN; PAM sequence: CTC
tcgccttccatgggcacgcg

SEQ ID NO: 187937 - DNA, 20 bp, Artificial Sequence
  Description of Artificial Sequence: Synthetic oligonucleotide
  Target: LAMA2; (-) strand; PAM type: YTN; PAM sequence: CTC
cactctcgccttccatgggc

SEQ ID NO: 187938 - DNA, 20 bp, Artificial Sequence
  Description of Artificial Sequence: Synthetic oligonucleotide
  Target: LAMA2; (-) strand; PAM type: YTN; PAM sequence: CTC
ctccactctcgccttccatg

SEQ ID NO: 187939 - DNA, 20 bp, Artificial Sequence
  Description of Artificial Sequence: Synthetic oligonucleotide
  Target: LAMA2; (-) strand; PAM type: YTN; PAM sequence: CTG
agggtgggggagaaagagga

SEQ ID NO: 187940 - DNA, 20 bp, Artificial Sequence
  Description of Artificial Sequence: Synthetic oligonucleotide
  Target: LAMA2; (-) strand; PAM type: YTN; PAM sequence: TTG
gccgggccgccgcctgaggg

SEQ ID NO: 187941 - DNA, 20 bp, Artificial Sequence
  Description of Artificial Sequence: Synthetic oligonucleotide
  Target: LAMA2; (-) strand; PAM type: YTN; PAM sequence: TTT
ggccgggccgccgcctgagg

SEQ ID NO: 187942 - DNA, 20 bp, Artificial Sequence
  Description of Artificial Sequence: Synthetic oligonucleotide
  Target: LAMA2; (-) strand; PAM type: YTN; PAM sequence: CTT
tggccgggccgccgcctgag

SEQ ID NO: 187943 - DNA, 20 bp, Artificial Sequence
  Description of Artificial Sequence: Synthetic oligonucleotide
  Target: LAMA2; (-) strand; PAM type: YTN; PAM sequence: CTG
gctttggccgggccgccgcc

SEQ ID NO: 187944 - DNA, 20 bp, Artificial Sequence
  Description of Artificial Sequence: Synthetic oligonucleotide
  Target: LAMA2; (-) strand; PAM type: YTN; PAM sequence: CTC
tggctttggccgggccgccg

SEQ ID NO: 187945 - DNA, 20 bp, Artificial Sequence
  Description of Artificial Sequence: Synthetic oligonucleotide
  Target: LAMA2; (-) strand; PAM type: YTN; PAM sequence: CTG
gggaagaggaggagacagcc

SEQ ID NO: 187946 - DNA, 20 bp, Artificial Sequence
  Description of Artificial Sequence: Synthetic oligonucleotide
  Target: LAMA2; (-) strand; PAM type: YTN; PAM sequence: CTG
ctggggaagaggaggagaca

SEQ ID NO: 187947 - DNA, 20 bp, Artificial Sequence
  Description of Artificial Sequence: Synthetic oligonucleotide
  Target: LAMA2; (-) strand; PAM type: YTN; PAM sequence: CTG
agcgagcagcagctgctggg

SEQ ID NO: 187948 - DNA, 20 bp, Artificial Sequence
  Description of Artificial Sequence: Synthetic oligonucleotide
  Target: LAMA2; (-) strand; PAM type: YTN; PAM sequence: TTG
tgagctgagcgagcagcagc

SEQ ID NO: 187949 - DNA, 20 bp, Artificial Sequence
  Description of Artificial Sequence: Synthetic oligonucleotide
  Target: LAMA2; (-) strand; PAM type: YTN; PAM sequence: CTT
gtgagctgagcgagcagcag

SEQ ID NO: 187950 - DNA, 20 bp, Artificial Sequence
  Description of Artificial Sequence: Synthetic oligonucleotide
  Target: LAMA2; (-) strand; PAM type: YTN; PAM sequence: TTG
gcttgtgagctgagcgagca

SEQ ID NO: 187951 - DNA, 20 bp, Artificial Sequence
  Description of Artificial Sequence: Synthetic oligonucleotide
  Target: LAMA2; (-) strand; PAM type: YTN; PAM sequence: CTT
ggcttgtgagctgagcgagc

SEQ ID NO: 187952 - DNA, 20 bp, Artificial Sequence
  Description of Artificial Sequence: Synthetic oligonucleotide
  Target: LAMA2; (-) strand; PAM type: YTN; PAM sequence: CTG
gccttggcttgtgagctgag

SEQ ID NO: 187953 - DNA, 20 bp, Artificial Sequence
  Description of Artificial Sequence: Synthetic oligonucleotide
  Target: LAMA2; (-) strand; PAM type: YTN; PAM sequence: CTG
tcccctggccttggcttgtg

SEQ ID NO: 187954 - DNA, 20 bp, Artificial Sequence
  Description of Artificial Sequence: Synthetic oligonucleotide
  Target: LAMA2; (-) strand; PAM type: YTN; PAM sequence: CTG
ccgccctgtcccctggcctt

SEQ ID NO: 187955 - DNA, 20 bp, Artificial Sequence
  Description of Artificial Sequence: Synthetic oligonucleotide
  Target: LAMA2; (-) strand; PAM type: YTN; PAM sequence: CTC
gggagccagaggagtcgctg

SEQ ID NO: 187956 - DNA, 20 bp, Artificial Sequence
  Description of Artificial Sequence: Synthetic oligonucleotide
  Target: LAMA2; (-) strand; PAM type: YTN; PAM sequence: TTC
tcgggagccagaggagtcgc

SEQ ID NO: 187957 - DNA, 20 bp, Artificial Sequence
  Description of Artificial Sequence: Synthetic oligonucleotide
  Target: LAMA2; (-) strand; PAM type: YTN; PAM sequence: CTT
ctcgggagccagaggagtcg

SEQ ID NO: 187958 - DNA, 20 bp, Artificial Sequence
  Description of Artificial Sequence: Synthetic oligonucleotide
  Target: LAMA2; (-) strand; PAM type: YTN; PAM sequence: CTC
ccggcatcgtagtggccgcg

SEQ ID NO: 187959 - DNA, 20 bp, Artificial Sequence
  Description of Artificial Sequence: Synthetic oligonucleotide
  Target: LAMA2; (-) strand; PAM type: YTN; PAM sequence: CTC
cggagagcagcagaaggagg

SEQ ID NO: 187960 - DNA, 20 bp, Artificial Sequence
  Description of Artificial Sequence: Synthetic oligonucleotide
  Target: LAMA2; (-) strand; PAM type: YTN; PAM sequence: CTG
tacgcccccgaggcctccgg

SEQ ID NO: 187961 - DNA, 20 bp, Artificial Sequence
  Description of Artificial Sequence: Synthetic oligonucleotide
  Target: LAMA2; (-) strand; PAM type: YTN; PAM sequence: CTG
cgcctgtacgcccccgaggc

SEQ ID NO: 187962 - DNA, 20 bp, Artificial Sequence
  Description of Artificial Sequence: Synthetic oligonucleotide
  Target: LAMA2; (-) strand; PAM type: YTN; PAM sequence: CTG
cggccgctgcgcctgtacgc

SEQ ID NO: 187963 - DNA, 20 bp, Artificial Sequence
  Description of Artificial Sequence: Synthetic oligonucleotide
  Target: LAMA2; (-) strand; PAM type: YTN; PAM sequence: CTG
ctgcggccgctgcgcctgta

SEQ ID NO: 187964 - DNA, 20 bp, Artificial Sequence
  Description of Artificial Sequence: Synthetic oligonucleotide
  Target: LAMA2; (-) strand; PAM type: YTN; PAM sequence: CTG
ctgctgcggccgctgcgcct

SEQ ID NO: 187965 - DNA, 20 bp, Artificial Sequence
  Description of Artificial Sequence: Synthetic oligonucleotide
  Target: LAMA2; (-) strand; PAM type: YTN; PAM sequence: CTG
ccgctgctgctgcggccgct

SEQ ID NO: 187966 - DNA, 20 bp, Artificial Sequence
  Description of Artificial Sequence: Synthetic oligonucleotide
  Target: LAMA2; (-) strand; PAM type: YTN; PAM sequence: CTG
tgactgccgctgctgctgcg

SEQ ID NO: 187967 - DNA, 20 bp, Artificial Sequence
  Description of Artificial Sequence: Synthetic oligonucleotide
  Target: LAMA2; (-) strand; PAM type: YTN; PAM sequence: CTG
atgtgcctgtgactgccgct

SEQ ID NO: 187968 - DNA, 20 bp, Artificial Sequence
  Description of Artificial Sequence: Synthetic oligonucleotide
  Target: LAMA2; (-) strand; PAM type: YTN; PAM sequence: TTG
ctgatgtgcctgtgactgcc

SEQ ID NO: 187969 - DNA, 20 bp, Artificial Sequence
  Description of Artificial Sequence: Synthetic oligonucleotide
  Target: LAMA2; (-) strand; PAM type: YTN; PAM sequence: TTT
gctgatgtgcctgtgactgc

SEQ ID NO: 187970 - DNA, 20 bp, Artificial Sequence
  Description of Artificial Sequence: Synthetic oligonucleotide
  Target: LAMA2; (-) strand; PAM type: YTN; PAM sequence: CTT
tgctgatgtgcctgtgactg

SEQ ID NO: 187971 - DNA, 20 bp, Artificial Sequence
  Description of Artificial Sequence: Synthetic oligonucleotide
  Target: LAMA2; (-) strand; PAM type: YTN; PAM sequence: CTC
tttgctgatgtgcctgtgac

SEQ ID NO: 187972 - DNA, 20 bp, Artificial Sequence
  Description of Artificial Sequence: Synthetic oligonucleotide
  Target: LAMA2; (-) strand; PAM type: YTN; PAM sequence: CTG
tacctctttgctgatgtgcc

SEQ ID NO: 187973 - DNA, 20 bp, Artificial Sequence
  Description of Artificial Sequence: Synthetic oligonucleotide
  Target: LAMA2; (-) strand; PAM type: YTN; PAM sequence: CTC
gactgtacctctttgctgat

SEQ ID NO: 187974 - DNA, 20 bp, Artificial Sequence
  Description of Artificial Sequence: Synthetic oligonucleotide
  Target: LAMA2; (-) strand; PAM type: YTN; PAM sequence: CTC
ggtcccggcaaaggatgcaa

SEQ ID NO: 187975 - DNA, 20 bp, Artificial Sequence
  Description of Artificial Sequence: Synthetic oligonucleotide
  Target: LAMA2; (-) strand; PAM type: YTN; PAM sequence: CTC
ggaagagtggaagaagtgag

SEQ ID NO: 187976 - DNA, 20 bp, Artificial Sequence
  Description of Artificial Sequence: Synthetic oligonucleotide
  Target: LAMA2; (-) strand; PAM type: YTN; PAM sequence: CTC
tcggaagagtggaagaagtg

SEQ ID NO: 187977 - DNA, 20 bp, Artificial Sequence
  Description of Artificial Sequence: Synthetic oligonucleotide
  Target: LAMA2; (-) strand; PAM type: YTN; PAM sequence: CTG
aaggcgaagcaagacggcag

SEQ ID NO: 187978 - DNA, 20 bp, Artificial Sequence
  Description of Artificial Sequence: Synthetic oligonucleotide
  Target: LAMA2; (-) strand; PAM type: YTN; PAM sequence: CTC
tgaaggcgaagcaagacggc

SEQ ID NO: 187979 - DNA, 20 bp, Artificial Sequence
  Description of Artificial Sequence: Synthetic oligonucleotide
  Target: LAMA2; (-) strand; PAM type: YTN; PAM sequence: CTC
tctgaaggcgaagcaagacg

SEQ ID NO: 187980 - DNA, 20 bp, Artificial Sequence
  Description of Artificial Sequence: Synthetic oligonucleotide
  Target: LAMA2; (-) strand; PAM type: YTN; PAM sequence: TTG
ccccagagcgcactctctga

SEQ ID NO: 187981 - DNA, 20 bp, Artificial Sequence
  Description of Artificial Sequence: Synthetic oligonucleotide
  Target: LAMA2; (-) strand; PAM type: YTN; PAM sequence: CTT
gccccagagcgcactctctg

SEQ ID NO: 187982 - DNA, 20 bp, Artificial Sequence
  Description of Artificial Sequence: Synthetic oligonucleotide
  Target: LAMA2; (-) strand; PAM type: YTN; PAM sequence: CTC
ttgccccagagcgcactctc

SEQ ID NO: 187983 - DNA, 20 bp, Artificial Sequence
  Description of Artificial Sequence: Synthetic oligonucleotide
  Target: LAMA2; (-) strand; PAM type: YTN; PAM sequence: TTC
ctcttgccccagagcgcact

SEQ ID NO: 187984 - DNA, 20 bp, Artificial Sequence
  Description of Artificial Sequence: Synthetic oligonucleotide
  Target: LAMA2; (-) strand; PAM type: YTN; PAM sequence: TTC
aagttcctcttgccccagag

SEQ ID NO: 187985 - DNA, 20 bp, Artificial Sequence
  Description of Artificial Sequence: Synthetic oligonucleotide
  Target: LAMA2; (-) strand; PAM type: YTN; PAM sequence: CTT
caagttcctcttgccccaga

SEQ ID NO: 187986 - DNA, 20 bp, Artificial Sequence
  Description of Artificial Sequence: Synthetic oligonucleotide
  Target: LAMA2; (-) strand; PAM type: YTN; PAM sequence: TTG
cttcaagttcctcttgcccc

SEQ ID NO: 187987 - DNA, 20 bp, Artificial Sequence
  Description of Artificial Sequence: Synthetic oligonucleotide
  Target: LAMA2; (-) strand; PAM type: YTN; PAM sequence: CTT
gcttcaagttcctcttgccc

SEQ ID NO: 187988 - DNA, 20 bp, Artificial Sequence
  Description of Artificial Sequence: Synthetic oligonucleotide
  Target: LAMA2; (-) strand; PAM type: YTN; PAM sequence: TTG
aacttgcttcaagttcctct

SEQ ID NO: 187989 - DNA, 20 bp, Artificial Sequence
  Description of Artificial Sequence: Synthetic oligonucleotide
  Target: LAMA2; (-) strand; PAM type: YTN; PAM sequence: CTT
gaacttgcttcaagttcctc

SEQ ID NO: 187990 - DNA, 20 bp, Artificial Sequence
  Description of Artificial Sequence: Synthetic oligonucleotide
  Target: LAMA2; (-) strand; PAM type: YTN; PAM sequence: TTG
aacttgaacttgcttcaagt

SEQ ID NO: 187991 - DNA, 20 bp, Artificial Sequence
  Description of Artificial Sequence: Synthetic oligonucleotide
  Target: LAMA2; (-) strand; PAM type: YTN; PAM sequence: CTC
atggcattgaacttgaactt

SEQ ID NO: 187992 - DNA, 20 bp, Artificial Sequence
  Description of Artificial Sequence: Synthetic oligonucleotide
  Target: LAMA2; (-) strand; PAM type: YTN; PAM sequence: CTC
tcatggcattgaacttgaac

SEQ ID NO: 187993 - DNA, 20 bp, Artificial Sequence
  Description of Artificial Sequence: Synthetic oligonucleotide
  Target: LAMA2; (-) strand; PAM type: YTN; PAM sequence: CTA
cgctctcatggcattgaact

SEQ ID NO: 187994 - DNA, 20 bp, Artificial Sequence
  Description of Artificial Sequence: Synthetic oligonucleotide
  Target: LAMA2; (-) strand; PAM type: YTN; PAM sequence: CTA
cactacgctctcatggcatt

SEQ ID NO: 187995 - DNA, 20 bp, Artificial Sequence
  Description of Artificial Sequence: Synthetic oligonucleotide
  Target: LAMA2; (-) strand; PAM type: YTN; PAM sequence: TTC
cccctacactacgctctcat

SEQ ID NO: 187996 - DNA, 20 bp, Artificial Sequence
  Description of Artificial Sequence: Synthetic oligonucleotide
  Target: LAMA2; (-) strand; PAM type: YTN; PAM sequence: TTA
ggtaattccccctacactac

SEQ ID NO: 187997 - DNA, 20 bp, Artificial Sequence
  Description of Artificial Sequence: Synthetic oligonucleotide
  Target: LAMA2; (-) strand; PAM type: YTN; PAM sequence: CTT
aggtaattccccctacacta

SEQ ID NO: 187998 - DNA, 20 bp, Artificial Sequence
  Description of Artificial Sequence: Synthetic oligonucleotide
  Target: LAMA2; (-) strand; PAM type: YTN; PAM sequence: TTG
caggacttaggtaattcccc

SEQ ID NO: 187999 - DNA, 20 bp, Artificial Sequence
  Description of Artificial Sequence: Synthetic oligonucleotide
  Target: LAMA2; (-) strand; PAM type: YTN; PAM sequence: TTT
gcaggacttaggtaattccc

SEQ ID NO: 188000 - DNA, 20 bp, Artificial Sequence
  Description of Artificial Sequence: Synthetic oligonucleotide
  Target: LAMA2; (-) strand; PAM type: YTN; PAM sequence: TTT
tgcaggacttaggtaattcc

SEQ ID NO: 188001 - DNA, 20 bp, Artificial Sequence
  Description of Artificial Sequence: Synthetic oligonucleotide
  Target: LAMA2; (-) strand; PAM type: YTN; PAM sequence: CTT
ttgcaggacttaggtaattc

SEQ ID NO: 188002 - DNA, 20 bp, Artificial Sequence
  Description of Artificial Sequence: Synthetic oligonucleotide
  Target: LAMA2; (-) strand; PAM type: YTN; PAM sequence: TTC
cttttgcaggacttaggtaa

SEQ ID NO: 188003 - DNA, 20 bp, Artificial Sequence
  Description of Artificial Sequence: Synthetic oligonucleotide
  Target: LAMA2; (-) strand; PAM type: YTN; PAM sequence: CTC
cccgttccttttgcaggact

SEQ ID NO: 188004 - DNA, 20 bp, Artificial Sequence
  Description of Artificial Sequence: Synthetic oligonucleotide
  Target: LAMA2; (-) strand; PAM type: YTN; PAM sequence: CTA
aagaacaatgaaaagcactc

SEQ ID NO: 188005 - DNA, 20 bp, Artificial Sequence
  Description of Artificial Sequence: Synthetic oligonucleotide
  Target: LAMA2; (-) strand; PAM type: YTN; PAM sequence: TTC
gaaactaaagaacaatgaaa

SEQ ID NO: 188006 - DNA, 20 bp, Artificial Sequence
  Description of Artificial Sequence: Synthetic oligonucleotide
  Target: LAMA2; (-) strand; PAM type: YTN; PAM sequence: CTT
cgaaactaaagaacaatgaa

SEQ ID NO: 188007 - DNA, 20 bp, Artificial Sequence
  Description of Artificial Sequence: Synthetic oligonucleotide
  Target: LAMA2; (-) strand; PAM type: YTN; PAM sequence: CTC
ttcgaaactaaagaacaatg

SEQ ID NO: 188008 - DNA, 20 bp, Artificial Sequence
  Description of Artificial Sequence: Synthetic oligonucleotide
  Target: LAMA2; (-) strand; PAM type: YTN; PAM sequence: TTA
cgggatgtatcgtgatagca

SEQ ID NO: 188009 - DNA, 20 bp, Artificial Sequence
  Description of Artificial Sequence: Synthetic oligonucleotide
  Target: LAMA2; (-) strand; PAM type: YTN; PAM sequence: TTT
acgggatgtatcgtgatagc

SEQ ID NO: 188010 - DNA, 20 bp, Artificial Sequence
  Description of Artificial Sequence: Synthetic oligonucleotide
  Target: LAMA2; (-) strand; PAM type: YTN; PAM sequence: TTC
agaaatcaatttacgggatg

SEQ ID NO: 188011 - DNA, 20 bp, Artificial Sequence
  Description of Artificial Sequence: Synthetic oligonucleotide
  Target: LAMA2; (-) strand; PAM type: YTN; PAM sequence: TTT
cagaaatcaatttacgggat

SEQ ID NO: 188012 - DNA, 20 bp, Artificial Sequence
  Description of Artificial Sequence: Synthetic oligonucleotide
  Target: LAMA2; (-) strand; PAM type: YTN; PAM sequence: TTG
gaaagatttcagaaatcaat

SEQ ID NO: 188013 - DNA, 20 bp, Artificial Sequence
  Description of Artificial Sequence: Synthetic oligonucleotide
  Target: LAMA2; (-) strand; PAM type: YTN; PAM sequence: CTT
ggaaagatttcagaaatcaa

SEQ ID NO: 188014 - DNA, 20 bp, Artificial Sequence
  Description of Artificial Sequence: Synthetic oligonucleotide
  Target: LAMA2; (-) strand; PAM type: YTN; PAM sequence: CTC
ttggaaagatttcagaaatc

SEQ ID NO: 188015 - DNA, 20 bp, Artificial Sequence
  Description of Artificial Sequence: Synthetic oligonucleotide
  Target: LAMA2; (-) strand; PAM type: YTN; PAM sequence: TTC
ctcttggaaagatttcagaa

SEQ ID NO: 188016 - DNA, 20 bp, Artificial Sequence
  Description of Artificial Sequence: Synthetic oligonucleotide
  Target: LAMA2; (-) strand; PAM type: YTN; PAM sequence: TTT
cctcttggaaagatttcaga

SEQ ID NO: 188017 - DNA, 20 bp, Artificial Sequence
  Description of Artificial Sequence: Synthetic oligonucleotide
  Target: LAMA2; (-) strand; PAM type: YTN; PAM sequence: TTT
tcctcttggaaagatttcag

SEQ ID NO: 188018 - DNA, 20 bp, Artificial Sequence
  Description of Artificial Sequence: Synthetic oligonucleotide
  Target: LAMA2; (-) strand; PAM type: YTN; PAM sequence: TTG
gaaaaagttttcctcttgga

SEQ ID NO: 188019 - DNA, 20 bp, Artificial Sequence
  Description of Artificial Sequence: Synthetic oligonucleotide
  Target: LAMA2; (-) strand; PAM type: YTN; PAM sequence: TTC
caattggaaaaagttttcct

SEQ ID NO: 188020 - DNA, 20 bp, Artificial Sequence
  Description of Artificial Sequence: Synthetic oligonucleotide
  Target: LAMA2; (-) strand; PAM type: YTN; PAM sequence: TTT
ccaattggaaaaagttttcc

SEQ ID NO: 188021 - DNA, 20 bp, Artificial Sequence
  Description of Artificial Sequence: Synthetic oligonucleotide
  Target: LAMA2; (-) strand; PAM type: YTN; PAM sequence: TTT
tccaattggaaaaagttttc

SEQ ID NO: 188022 - DNA, 20 bp, Artificial Sequence
  Description of Artificial Sequence: Synthetic oligonucleotide
  Target: LAMA2; (-) strand; PAM type: YTN; PAM sequence: TTT
ttccaattggaaaaagtttt

SEQ ID NO: 188023 - DNA, 20 bp, Artificial Sequence
  Description of Artificial Sequence: Synthetic oligonucleotide
  Target: LAMA2; (-) strand; PAM type: YTN; PAM sequence: TTT
tttccaattggaaaaagttt

SEQ ID NO: 188024 - DNA, 20 bp, Artificial Sequence
  Description of Artificial Sequence: Synthetic oligonucleotide
  Target: LAMA2; (-) strand; PAM type: YTN; PAM sequence: TTT
ttttccaattggaaaaagtt

SEQ ID NO: 188025 - DNA, 20 bp, Artificial Sequence
  Description of Artificial Sequence: Synthetic oligonucleotide
  Target: LAMA2; (-) strand; PAM type: YTN; PAM sequence: TTT
tttttccaattggaaaaagt

SEQ ID NO: 188026 - DNA, 20 bp, Artificial Sequence
  Description of Artificial Sequence: Synthetic oligonucleotide
  Target: LAMA2; (-) strand; PAM type: YTN; PAM sequence: CTT
ttttttccaattggaaaaag

SEQ ID NO: 188027 - DNA, 20 bp, Artificial Sequence
  Description of Artificial Sequence: Synthetic oligonucleotide
  Target: LAMA2; (-) strand; PAM type: YTN; PAM sequence: TTC
ttttttttccaattggaaaa

SEQ ID NO: 188028 - DNA, 20 bp, Artificial Sequence
  Description of Artificial Sequence: Synthetic oligonucleotide
  Target: LAMA2; (-) strand; PAM type: YTN; PAM sequence: TTG
aagaaattcttttttttcca

SEQ ID NO: 188029 - DNA, 20 bp, Artificial Sequence
  Description of Artificial Sequence: Synthetic oligonucleotide
  Target: LAMA2; (-) strand; PAM type: YTN; PAM sequence: TTT
gaagaaattcttttttttcc

SEQ ID NO: 188030 - DNA, 20 bp, Artificial Sequence
  Description of Artificial Sequence: Synthetic oligonucleotide
  Target: LAMA2; (-) strand; PAM type: YTN; PAM sequence: CTG
atttgaagaaattctttttt

SEQ ID NO: 188031 - DNA, 20 bp, Artificial Sequence
  Description of Artificial Sequence: Synthetic oligonucleotide
  Target: LAMA2; (-) strand; PAM type: YTN; PAM sequence: CTC
tgatttgaagaaattctttt

SEQ ID NO: 188032 - DNA, 20 bp, Artificial Sequence
  Description of Artificial Sequence: Synthetic oligonucleotide
  Target: LAMA2; (-) strand; PAM type: YTN; PAM sequence: CTG
caggatgggctctgatttga

SEQ ID NO: 188033 - DNA, 20 bp, Artificial Sequence
  Description of Artificial Sequence: Synthetic oligonucleotide
  Target: LAMA2; (-) strand; PAM type: YTN; PAM sequence: CTC
tgcaggatgggctctgattt

SEQ ID NO: 188034 - DNA, 20 bp, Artificial Sequence
  Description of Artificial Sequence: Synthetic oligonucleotide
  Target: LAMA2; (-) strand; PAM type: YTN; PAM sequence: TTC
tctgcaggatgggctctgat

SEQ ID NO: 188035 - DNA, 20 bp, Artificial Sequence
  Description of Artificial Sequence: Synthetic oligonucleotide
  Target: LAMA2; (-) strand; PAM type: YTN; PAM sequence: TTT
ctctgcaggatgggctctga

SEQ ID NO: 188036 - DNA, 20 bp, Artificial Sequence
  Description of Artificial Sequence: Synthetic oligonucleotide
  Target: LAMA2; (-) strand; PAM type: YTN; PAM sequence: CTT
tctctgcaggatgggctctg

SEQ ID NO: 188037 - DNA, 20 bp, Artificial Sequence
  Description of Artificial Sequence: Synthetic oligonucleotide
  Target: LAMA2; (-) strand; PAM type: YTN; PAM sequence: TTG
ggaagcctttctctgcagga

SEQ ID NO: 188038 - DNA, 20 bp, Artificial Sequence
  Description of Artificial Sequence: Synthetic oligonucleotide
  Target: LAMA2; (-) strand; PAM type: YTN; PAM sequence: CTT
gggaagcctttctctgcagg

SEQ ID NO: 188039 - DNA, 20 bp, Artificial Sequence
  Description of Artificial Sequence: Synthetic oligonucleotide
  Target: LAMA2; (-) strand; PAM type: YTN; PAM sequence: CTC
cataaagtcccaggatgaac

SEQ ID NO: 188040 - DNA, 20 bp, Artificial Sequence
  Description of Artificial Sequence: Synthetic oligonucleotide
  Target: LAMA2; (-) strand; PAM type: YTN; PAM sequence: CTA
ccctccataaagtcccagga

SEQ ID NO: 188041 - DNA, 20 bp, Artificial Sequence
  Description of Artificial Sequence: Synthetic oligonucleotide
  Target: LAMA2; (-) strand; PAM type: YTN; PAM sequence: TTG
atgcatcagctaccctccat

SEQ ID NO: 188042 - DNA, 20 bp, Artificial Sequence
  Description of Artificial Sequence: Synthetic oligonucleotide
  Target: LAMA2; (-) strand; PAM type: YTN; PAM sequence: TTT
gatgcatcagctaccctcca

SEQ ID NO: 188043 - DNA, 20 bp, Artificial Sequence
  Description of Artificial Sequence: Synthetic oligonucleotide
  Target: LAMA2; (-) strand; PAM type: YTN; PAM sequence: TTT
tgatgcatcagctaccctcc

SEQ ID NO: 188044 - DNA, 20 bp, Artificial Sequence
  Description of Artificial Sequence: Synthetic oligonucleotide
  Target: LAMA2; (-) strand; PAM type: YTN; PAM sequence: TTT
ttgatgcatcagctaccctc

SEQ ID NO: 188045 - DNA, 20 bp, Artificial Sequence
  Description of Artificial Sequence: Synthetic oligonucleotide
  Target: LAMA2; (-) strand; PAM type: YTN; PAM sequence: TTT
tttgatgcatcagctaccct

SEQ ID NO: 188046 - DNA, 20 bp, Artificial Sequence
  Description of Artificial Sequence: Synthetic oligonucleotide
  Target: LAMA2; (-) strand; PAM type: YTN; PAM sequence: TTT
ttttgatgcatcagctaccc

SEQ ID NO: 188047 - DNA, 20 bp, Artificial Sequence
  Description of Artificial Sequence: Synthetic oligonucleotide
  Target: LAMA2; (-) strand; PAM type: YTN; PAM sequence: TTT
tttttgatgcatcagctacc

SEQ ID NO: 188048 - DNA, 20 bp, Artificial Sequence
  Description of Artificial Sequence: Synthetic oligonucleotide
  Target: LAMA2; (-) strand; PAM type: YTN; PAM sequence: TTT
ttttttgatgcatcagctac

SEQ ID NO: 188049 - DNA, 20 bp, Artificial Sequence
  Description of Artificial Sequence: Synthetic oligonucleotide
  Target: LAMA2; (-) strand; PAM type: YTN; PAM sequence: TTA
tatatatatatatgtgtgtg

SEQ ID NO: 188050 - DNA, 20 bp, Artificial Sequence
  Description of Artificial Sequence: Synthetic oligonucleotide
  Target: LAMA2; (-) strand; PAM type: YTN; PAM sequence: TTT
atatatatatatatgtgtgt

SEQ ID NO: 188051 - DNA, 20 bp, Artificial Sequence
  Description of Artificial Sequence: Synthetic oligonucleotide
  Target: LAMA2; (-) strand; PAM type: YTN; PAM sequence: CTT
tatatatatatatatgtgtg

SEQ ID NO: 188052 - DNA, 20 bp, Artificial Sequence
  Description of Artificial Sequence: Synthetic oligonucleotide
  Target: LAMA2; (-) strand; PAM type: YTN; PAM sequence: CTG
taaaactttatatatatata

SEQ ID NO: 188053 - DNA, 20 bp, Artificial Sequence
  Description of Artificial Sequence: Synthetic oligonucleotide
  Target: LAMA2; (-) strand; PAM type: YTN; PAM sequence: TTC
tgtaaaactttatatatata

SEQ ID NO: 188054 - DNA, 20 bp, Artificial Sequence
  Description of Artificial Sequence: Synthetic oligonucleotide
  Target: LAMA2; (-) strand; PAM type: YTN; PAM sequence: TTG
aaaacaaagttctgtaaaac

SEQ ID NO: 188055 - DNA, 20 bp, Artificial Sequence
  Description of Artificial Sequence: Synthetic oligonucleotide
  Target: LAMA2; (-) strand; PAM type: YTN; PAM sequence: TTA
aaagttgaaaacaaagttct

SEQ ID NO: 188056 - DNA, 20 bp, Artificial Sequence
  Description of Artificial Sequence: Synthetic oligonucleotide
  Target: LAMA2; (-) strand; PAM type: YTN; PAM sequence: TTT
aaaagttgaaaacaaagttc

SEQ ID NO: 188057 - DNA, 20 bp, Artificial Sequence
  Description of Artificial Sequence: Synthetic oligonucleotide
  Target: LAMA2; (-) strand; PAM type: YTN; PAM sequence: TTT
taaaagttgaaaacaaagtt

SEQ ID NO: 188058 - DNA, 20 bp, Artificial Sequence
  Description of Artificial Sequence: Synthetic oligonucleotide
  Target: LAMA2; (-) strand; PAM type: YTN; PAM sequence: CTG
ttttaaaagttgaaaacaaa

SEQ ID NO: 188059 - DNA, 20 bp, Artificial Sequence
  Description of Artificial Sequence: Synthetic oligonucleotide
  Target: LAMA2; (-) strand; PAM type: YTN; PAM sequence: TTA
gaaatcctgttttaaaagtt

SEQ ID NO: 188060 - DNA, 20 bp, Artificial Sequence
  Description of Artificial Sequence: Synthetic oligonucleotide
  Target: LAMA2; (-) strand; PAM type: YTN; PAM sequence: TTT
agaaatcctgttttaaaagt

SEQ ID NO: 188061 - DNA, 20 bp, Artificial Sequence
  Description of Artificial Sequence: Synthetic oligonucleotide
  Target: LAMA2; (-) strand; PAM type: YTN; PAM sequence: CTT
tagaaatcctgttttaaaag

SEQ ID NO: 188062 - DNA, 20 bp, Artificial Sequence
  Description of Artificial Sequence: Synthetic oligonucleotide
  Target: LAMA2; (-) strand; PAM type: YTN; PAM sequence: TTC
tttagaaatcctgttttaaa

SEQ ID NO: 188063 - DNA, 20 bp, Artificial Sequence
  Description of Artificial Sequence: Synthetic oligonucleotide
  Target: LAMA2; (-) strand; PAM type: YTN; PAM sequence: CTT
ctttagaaatcctgttttaa

SEQ ID NO: 188064 - DNA, 20 bp, Artificial Sequence
  Description of Artificial Sequence: Synthetic oligonucleotide
  Target: LAMA2; (-) strand; PAM type: YTN; PAM sequence: TTG
ccatgaaagaaaaaaaacca

SEQ ID NO: 188065 - DNA, 20 bp, Artificial Sequence
  Description of Artificial Sequence: Synthetic oligonucleotide
  Target: LAMA2; (-) strand; PAM type: YTN; PAM sequence: CTG
gaggcgccattgccatgaaa

SEQ ID NO: 188066 - DNA, 20 bp, Artificial Sequence
  Description of Artificial Sequence: Synthetic oligonucleotide
  Target: LAMA2; (-) strand; PAM type: YTN; PAM sequence: TTG
aaaaaggtgaggctggaggc

SEQ ID NO: 188067 - DNA, 20 bp, Artificial Sequence
  Description of Artificial Sequence: Synthetic oligonucleotide
  Target: LAMA2; (-) strand; PAM type: YTN; PAM sequence: TTT
gaaaaaggtgaggctggagg

SEQ ID NO: 188068 - DNA, 20 bp, Artificial Sequence
  Description of Artificial Sequence: Synthetic oligonucleotide
  Target: LAMA2; (-) strand; PAM type: YTN; PAM sequence: CTA
caataaaataggatatgaag

SEQ ID NO: 188069 - DNA, 20 bp, Artificial Sequence
  Description of Artificial Sequence: Synthetic oligonucleotide
  Target: LAMA2; (-) strand; PAM type: YTN; PAM sequence: TTC
actacaataaaataggatat

SEQ ID NO: 188070 - DNA, 20 bp, Artificial Sequence
  Description of Artificial Sequence: Synthetic oligonucleotide
  Target: LAMA2; (-) strand; PAM type: YTN; PAM sequence: TTT
cactacaataaaataggata

SEQ ID NO: 188071 - DNA, 20 bp, Artificial Sequence
  Description of Artificial Sequence: Synthetic oligonucleotide
  Target: LAMA2; (-) strand; PAM type: YTN; PAM sequence: TTC
acgatttcactacaataaaa

SEQ ID NO: 188072 - DNA, 20 bp, Artificial Sequence
  Description of Artificial Sequence: Synthetic oligonucleotide
  Target: LAMA2; (-) strand; PAM type: YTN; PAM sequence: TTT
cacgatttcactacaataaa

SEQ ID NO: 188073 - DNA, 20 bp, Artificial Sequence
  Description of Artificial Sequence: Synthetic oligonucleotide
  Target: LAMA2; (-) strand; PAM type: YTN; PAM sequence: TTA
agcaaaaggagaaatttcac

SEQ ID NO: 188074 - DNA, 20 bp, Artificial Sequence
  Description of Artificial Sequence: Synthetic oligonucleotide
  Target: LAMA2; (-) strand; PAM type: YTN; PAM sequence: TTT
aagcaaaaggagaaatttca

SEQ ID NO: 188075 - DNA, 20 bp, Artificial Sequence
  Description of Artificial Sequence: Synthetic oligonucleotide
  Target: LAMA2; (-) strand; PAM type: YTN; PAM sequence: CTG
tatttaagcaaaaggagaaa

SEQ ID NO: 188076 - DNA, 20 bp, Artificial Sequence
  Description of Artificial Sequence: Synthetic oligonucleotide
  Target: LAMA2; (-) strand; PAM type: YTN; PAM sequence: CTC
tgtatttaagcaaaaggaga

SEQ ID NO: 188077 - DNA, 20 bp, Artificial Sequence
  Description of Artificial Sequence: Synthetic oligonucleotide
  Target: LAMA2; (-) strand; PAM type: YTN; PAM sequence: CTC
ctctgtatttaagcaaaagg

SEQ ID NO: 188078 - DNA, 20 bp, Artificial Sequence
  Description of Artificial Sequence: Synthetic oligonucleotide
  Target: LAMA2; (-) strand; PAM type: YTN; PAM sequence: TTA
aagtacacatgacatagaag

SEQ ID NO: 188079 - DNA, 20 bp, Artificial Sequence
  Description of Artificial Sequence: Synthetic oligonucleotide
  Target: LAMA2; (-) strand; PAM type: YTN; PAM sequence: CTT
aaagtacacatgacatagaa

SEQ ID NO: 188080 - DNA, 20 bp, Artificial Sequence
  Description of Artificial Sequence: Synthetic oligonucleotide
  Target: LAMA2; (-) strand; PAM type: YTN; PAM sequence: CTG
tggccttaaagtacacatga

SEQ ID NO: 188081 - DNA, 20 bp, Artificial Sequence
  Description of Artificial Sequence: Synthetic oligonucleotide
  Target: LAMA2; (-) strand; PAM type: YTN; PAM sequence: CTA
gtcactgtggccttaaagta

SEQ ID NO: 188082 - DNA, 20 bp, Artificial Sequence
  Description of Artificial Sequence: Synthetic oligonucleotide
  Target: LAMA2; (-) strand; PAM type: YTN; PAM sequence: CTC
caaagtgtatatctagtcac

SEQ ID NO: 188083 - DNA, 20 bp, Artificial Sequence
  Description of Artificial Sequence: Synthetic oligonucleotide
  Target: LAMA2; (-) strand; PAM type: YTN; PAM sequence: TTC
caaagtcctccaaagtgtat

SEQ ID NO: 188084 - DNA, 20 bp, Artificial Sequence
  Description of Artificial Sequence: Synthetic oligonucleotide
  Target: LAMA2; (-) strand; PAM type: YTN; PAM sequence: CTT
ccaaagtcctccaaagtgta

SEQ ID NO: 188085 - DNA, 20 bp, Artificial Sequence
  Description of Artificial Sequence: Synthetic oligonucleotide
  Target: LAMA2; (-) strand; PAM type: YTN; PAM sequence: TTA
aatacagccatcttccaaag

SEQ ID NO: 188086 - DNA, 20 bp, Artificial Sequence
  Description of Artificial Sequence: Synthetic oligonucleotide
  Target: LAMA2; (-) strand; PAM type: YTN; PAM sequence: TTA
cattaaatacagccatcttc

SEQ ID NO: 188087 - DNA, 20 bp, Artificial Sequence
  Description of Artificial Sequence: Synthetic oligonucleotide
  Target: LAMA2; (-) strand; PAM type: YTN; PAM sequence: TTA
agttacattaaatacagcca

SEQ ID NO: 188088 - DNA, 20 bp, Artificial Sequence
  Description of Artificial Sequence: Synthetic oligonucleotide
  Target: LAMA2; (-) strand; PAM type: YTN; PAM sequence: TTT
aagttacattaaatacagcc

SEQ ID NO: 188089 - DNA, 20 bp, Artificial Sequence
  Description of Artificial Sequence: Synthetic oligonucleotide
  Target: LAMA2; (-) strand; PAM type: YTN; PAM sequence: TTA
tttaagttacattaaataca

SEQ ID NO: 188090 - DNA, 20 bp, Artificial Sequence
  Description of Artificial Sequence: Synthetic oligonucleotide
  Target: LAMA2; (-) strand; PAM type: YTN; PAM sequence: CTG
aggagaataagttatttaag

SEQ ID NO: 188091 - DNA, 20 bp, Artificial Sequence
  Description of Artificial Sequence: Synthetic oligonucleotide
  Target: LAMA2; (-) strand; PAM type: YTN; PAM sequence: CTC
tgaggagaataagttattta

SEQ ID NO: 188092 - DNA, 20 bp, Artificial Sequence
  Description of Artificial Sequence: Synthetic oligonucleotide
  Target: LAMA2; (-) strand; PAM type: YTN; PAM sequence: CTA
agaggctctgaggagaataa

SEQ ID NO: 188093 - DNA, 20 bp, Artificial Sequence
  Description of Artificial Sequence: Synthetic oligonucleotide
  Target: LAMA2; (-) strand; PAM type: YTN; PAM sequence: CTA
tatatacataaacactaaga

SEQ ID NO: 188094 - DNA, 20 bp, Artificial Sequence
  Description of Artificial Sequence: Synthetic oligonucleotide
  Target: LAMA2; (-) strand; PAM type: YTN; PAM sequence: TTC
agaaatgagagctatatata

SEQ ID NO: 188095 - DNA, 20 bp, Artificial Sequence
  Description of Artificial Sequence: Synthetic oligonucleotide
  Target: LAMA2; (-) strand; PAM type: YTN; PAM sequence: TTT
cagaaatgagagctatatat

SEQ ID NO: 188096 - DNA, 20 bp, Artificial Sequence
  Description of Artificial Sequence: Synthetic oligonucleotide
  Target: LAMA2; (-) strand; PAM type: YTN; PAM sequence: CTC
cccaaagtttcagaaatgag

SEQ ID NO: 188097 - DNA, 20 bp, Artificial Sequence
  Description of Artificial Sequence: Synthetic oligonucleotide
  Target: LAMA2; (-) strand; PAM type: YTN; PAM sequence: TTC
aaagactccccaaagtttca

SEQ ID NO: 188098 - DNA, 20 bp, Artificial Sequence
  Description of Artificial Sequence: Synthetic oligonucleotide
  Target: LAMA2; (-) strand; PAM type: YTN; PAM sequence: CTT
caaagactccccaaagtttc

SEQ ID NO: 188099 - DNA, 20 bp, Artificial Sequence
  Description of Artificial Sequence: Synthetic oligonucleotide
  Target: LAMA2; (-) strand; PAM type: YTN; PAM sequence: CTC
ttcaaagactccccaaagtt

SEQ ID NO: 188100 - DNA, 20 bp, Artificial Sequence
  Description of Artificial Sequence: Synthetic oligonucleotide
  Target: LAMA2; (-) strand; PAM type: YTN; PAM sequence: TTC
atgataataaaataactctt

SEQ ID NO: 188101 - DNA, 20 bp, Artificial Sequence
  Description of Artificial Sequence: Synthetic oligonucleotide
  Target: LAMA2; (-) strand; PAM type: YTN; PAM sequence: CTG
taaaattcatgataataaaa

SEQ ID NO: 188102 - DNA, 20 bp, Artificial Sequence
  Description of Artificial Sequence: Synthetic oligonucleotide
  Target: LAMA2; (-) strand; PAM type: YTN; PAM sequence: TTC
ctgtaaaattcatgataata

SEQ ID NO: 188103 - DNA, 20 bp, Artificial Sequence
  Description of Artificial Sequence: Synthetic oligonucleotide
  Target: LAMA2; (-) strand; PAM type: YTN; PAM sequence: CTT
cctgtaaaattcatgataat

SEQ ID NO: 188104 - DNA, 20 bp, Artificial Sequence
  Description of Artificial Sequence: Synthetic oligonucleotide
  Target: LAMA2; (-) strand; PAM type: YTN; PAM sequence: CTG
cacatgtgcttcctgtaaaa

SEQ ID NO: 188105 - DNA, 20 bp, Artificial Sequence
  Description of Artificial Sequence: Synthetic oligonucleotide
  Target: LAMA2; (-) strand; PAM type: YTN; PAM sequence: TTA
caatgctgcacatgtgcttc

SEQ ID NO: 188106 - DNA, 20 bp, Artificial Sequence
  Description of Artificial Sequence: Synthetic oligonucleotide
  Target: LAMA2; (-) strand; PAM type: YTN; PAM sequence: CTT
acaatgctgcacatgtgctt

SEQ ID NO: 188107 - DNA, 20 bp, Artificial Sequence
  Description of Artificial Sequence: Synthetic oligonucleotide
  Target: LAMA2; (-) strand; PAM type: YTN; PAM sequence: TTA
caaagtatgtcttacaatgc

SEQ ID NO: 188108 - DNA, 20 bp, Artificial Sequence
  Description of Artificial Sequence: Synthetic oligonucleotide
  Target: LAMA2; (-) strand; PAM type: YTN; PAM sequence: CTG
aaataatgtgttacaaagta

SEQ ID NO: 188109 - DNA, 20 bp, Artificial Sequence
  Description of Artificial Sequence: Synthetic oligonucleotide
  Target: LAMA2; (-) strand; PAM type: YTN; PAM sequence: TTG
ctgaaataatgtgttacaaa

SEQ ID NO: 188110 - DNA, 20 bp, Artificial Sequence
  Description of Artificial Sequence: Synthetic oligonucleotide
  Target: LAMA2; (-) strand; PAM type: YTN; PAM sequence: TTT
gctgaaataatgtgttacaa

SEQ ID NO: 188111 - DNA, 20 bp, Artificial Sequence
  Description of Artificial Sequence: Synthetic oligonucleotide
  Target: LAMA2; (-) strand; PAM type: YTN; PAM sequence: TTG
tttgctgaaataatgtgtta

SEQ ID NO: 188112 - DNA, 20 bp, Artificial Sequence
  Description of Artificial Sequence: Synthetic oligonucleotide
  Target: LAMA2; (-) strand; PAM type: YTN; PAM sequence: TTA
aagaattgtttgctgaaata

SEQ ID NO: 188113 - DNA, 20 bp, Artificial Sequence
  Description of Artificial Sequence: Synthetic oligonucleotide
  Target: LAMA2; (-) strand; PAM type: YTN; PAM sequence: CTT
aaagaattgtttgctgaaat

SEQ ID NO: 188114 - DNA, 20 bp, Artificial Sequence
  Description of Artificial Sequence: Synthetic oligonucleotide
  Target: LAMA2; (-) strand; PAM type: YTN; PAM sequence: TTC
caacttaaagaattgtttgc

SEQ ID NO: 188115 - DNA, 20 bp, Artificial Sequence
  Description of Artificial Sequence: Synthetic oligonucleotide
  Target: LAMA2; (-) strand; PAM type: YTN; PAM sequence: TTT
ccaacttaaagaattgtttg

SEQ ID NO: 188116 - DNA, 20 bp, Artificial Sequence
  Description of Artificial Sequence: Synthetic oligonucleotide
  Target: LAMA2; (-) strand; PAM type: YTN; PAM sequence: TTT
tccaacttaaagaattgttt

SEQ ID NO: 188117 - DNA, 20 bp, Artificial Sequence
  Description of Artificial Sequence: Synthetic oligonucleotide
  Target: LAMA2; (-) strand; PAM type: YTN; PAM sequence: TTG
atacaggttttccaacttaa

SEQ ID NO: 188118 - DNA, 20 bp, Artificial Sequence
  Description of Artificial Sequence: Synthetic oligonucleotide
  Target: LAMA2; (-) strand; PAM type: YTN; PAM sequence: TTT
gatacaggttttccaactta

SEQ ID NO: 188119 - DNA, 20 bp, Artificial Sequence
  Description of Artificial Sequence: Synthetic oligonucleotide
  Target: LAMA2; (-) strand; PAM type: YTN; PAM sequence: CTT
tgatacaggttttccaactt

SEQ ID NO: 188120 - DNA, 20 bp, Artificial Sequence
  Description of Artificial Sequence: Synthetic oligonucleotide
  Target: LAMA2; (-) strand; PAM type: YTN; PAM sequence: TTA
ctttgatacaggttttccaa

SEQ ID NO: 188121 - DNA, 20 bp, Artificial Sequence
  Description of Artificial Sequence: Synthetic oligonucleotide
  Target: LAMA2; (-) strand; PAM type: YTN; PAM sequence: TTT
actttgatacaggttttcca

SEQ ID NO: 188122 - DNA, 20 bp, Artificial Sequence
  Description of Artificial Sequence: Synthetic oligonucleotide
  Target: LAMA2; (-) strand; PAM type: YTN; PAM sequence: TTT
tactttgatacaggttttcc

SEQ ID NO: 188123 - DNA, 20 bp, Artificial Sequence
  Description of Artificial Sequence: Synthetic oligonucleotide
  Target: LAMA2; (-) strand; PAM type: YTN; PAM sequence: TTT
ttactttgatacaggttttc

SEQ ID NO: 188124 - DNA, 20 bp, Artificial Sequence
  Description of Artificial Sequence: Synthetic oligonucleotide
  Target: LAMA2; (-) strand; PAM type: YTN; PAM sequence: TTT
tttactttgatacaggtttt

SEQ ID NO: 188125 - DNA, 20 bp, Artificial Sequence
  Description of Artificial Sequence: Synthetic oligonucleotide
  Target: LAMA2; (-) strand; PAM type: YTN; PAM sequence: TTT
ttttactttgatacaggttt

SEQ ID NO: 188126 - DNA, 20 bp, Artificial Sequence
  Description of Artificial Sequence: Synthetic oligonucleotide
  Target: LAMA2; (-) strand; PAM type: YTN; PAM sequence: TTT
tttttactttgatacaggtt

SEQ ID NO: 188127 - DNA, 20 bp, Artificial Sequence
  Description of Artificial Sequence: Synthetic oligonucleotide
  Target: LAMA2; (-) strand; PAM type: YTN; PAM sequence: TTT
ttttttactttgatacaggt

SEQ ID NO: 188128 - DNA, 20 bp, Artificial Sequence
  Description of Artificial Sequence: Synthetic oligonucleotide
  Target: LAMA2; (-) strand; PAM type: YTN; PAM sequence: TTT
tttttttactttgatacagg

SEQ ID NO: 188129 - DNA, 20 bp, Artificial Sequence
  Description of Artificial Sequence: Synthetic oligonucleotide
  Target: LAMA2; (-) strand; PAM type: YTN; PAM sequence: CTT
ttttttttactttgatacag

SEQ ID NO: 188130 - DNA, 20 bp, Artificial Sequence
  Description of Artificial Sequence: Synthetic oligonucleotide
  Target: LAMA2; (-) strand; PAM type: YTN; PAM sequence: TTC
ttttttttttactttgatac

SEQ ID NO: 188131 - DNA, 20 bp, Artificial Sequence
  Description of Artificial Sequence: Synthetic oligonucleotide
  Target: LAMA2; (-) strand; PAM type: YTN; PAM sequence: TTT
cttttttttttactttgata

SEQ ID NO: 188132 - DNA, 20 bp, Artificial Sequence
  Description of Artificial Sequence: Synthetic oligonucleotide
  Target: LAMA2; (-) strand; PAM type: YTN; PAM sequence: TTA
aaaccgaataataaatattt

SEQ ID NO: 188133 - DNA, 20 bp, Artificial Sequence
  Description of Artificial Sequence: Synthetic oligonucleotide
  Target: LAMA2; (-) strand; PAM type: YTN; PAM sequence: TTT
aaaaccgaataataaatatt

SEQ ID NO: 188134 - DNA, 20 bp, Artificial Sequence
  Description of Artificial Sequence: Synthetic oligonucleotide
  Target: LAMA2; (-) strand; PAM type: YTN; PAM sequence: TTC
atatttaaaaccgaataata

SEQ ID NO: 188135 - DNA, 20 bp, Artificial Sequence
  Description of Artificial Sequence: Synthetic oligonucleotide
  Target: LAMA2; (-) strand; PAM type: YTN; PAM sequence: TTT
catatttaaaaccgaataat

SEQ ID NO: 188136 - DNA, 20 bp, Artificial Sequence
  Description of Artificial Sequence: Synthetic oligonucleotide
  Target: LAMA2; (-) strand; PAM type: YTN; PAM sequence: TTT
tcatatttaaaaccgaataa

SEQ ID NO: 188137 - DNA, 20 bp, Artificial Sequence
  Description of Artificial Sequence: Synthetic oligonucleotide
  Target: LAMA2; (-) strand; PAM type: YTN; PAM sequence: TTA
aacattttcatatttaaaac

SEQ ID NO: 188138 - DNA, 20 bp, Artificial Sequence
  Description of Artificial Sequence: Synthetic oligonucleotide
  Target: LAMA2; (-) strand; PAM type: YTN; PAM sequence: TTA
ggttaaacattttcatattt

SEQ ID NO: 188139 - DNA, 20 bp, Artificial Sequence
  Description of Artificial Sequence: Synthetic oligonucleotide
  Target: LAMA2; (-) strand; PAM type: YTN; PAM sequence: CTT
aggttaaacattttcatatt

SEQ ID NO: 188140 - DNA, 20 bp, Artificial Sequence
  Description of Artificial Sequence: Synthetic oligonucleotide
  Target: LAMA2; (-) strand; PAM type: YTN; PAM sequence: CTC
ttaggttaaacattttcata

SEQ ID NO: 188141 - DNA, 20 bp, Artificial Sequence
  Description of Artificial Sequence: Synthetic oligonucleotide
  Target: LAMA2; (-) strand; PAM type: YTN; PAM sequence: TTG
tactcttaggttaaacattt

SEQ ID NO: 188142 - DNA, 20 bp, Artificial Sequence
  Description of Artificial Sequence: Synthetic oligonucleotide
  Target: LAMA2; (-) strand; PAM type: YTN; PAM sequence: TTT
gtactcttaggttaaacatt

SEQ ID NO: 188143 - DNA, 20 bp, Artificial Sequence
  Description of Artificial Sequence: Synthetic oligonucleotide
  Target: LAMA2; (-) strand; PAM type: YTN; PAM sequence: TTT
tgtactcttaggttaaacat

SEQ ID NO: 188144 - DNA, 20 bp, Artificial Sequence
  Description of Artificial Sequence: Synthetic oligonucleotide
  Target: LAMA2; (-) strand; PAM type: YTN; PAM sequence: CTA
cagattttgtactcttaggt

SEQ ID NO: 188145 - DNA, 20 bp, Artificial Sequence
  Description of Artificial Sequence: Synthetic oligonucleotide
  Target: LAMA2; (-) strand; PAM type: YTN; PAM sequence: CTA
acctacagattttgtactct

SEQ ID NO: 188146 - DNA, 20 bp, Artificial Sequence
  Description of Artificial Sequence: Synthetic oligonucleotide
  Target: LAMA2; (-) strand; PAM type: YTN; PAM sequence: TTC
taacctacagattttgtact

SEQ ID NO: 188147 - DNA, 20 bp, Artificial Sequence
  Description of Artificial Sequence: Synthetic oligonucleotide
  Target: LAMA2; (-) strand; PAM type: YTN; PAM sequence: CTT
ctaacctacagattttgtac

SEQ ID NO: 188148 - DNA, 20 bp, Artificial Sequence
  Description of Artificial Sequence: Synthetic oligonucleotide
  Target: LAMA2; (-) strand; PAM type: YTN; PAM sequence: TTA
aaagcttctaacctacagat

SEQ ID NO: 188149 - DNA, 20 bp, Artificial Sequence
  Description of Artificial Sequence: Synthetic oligonucleotide
  Target: LAMA2; (-) strand; PAM type: YTN; PAM sequence: TTT
aaaagcttctaacctacaga

SEQ ID NO: 188150 - DNA, 20 bp, Artificial Sequence
  Description of Artificial Sequence: Synthetic oligonucleotide
  Target: LAMA2; (-) strand; PAM type: YTN; PAM sequence: TTT
taaaagcttctaacctacag

SEQ ID NO: 188151 - DNA, 20 bp, Artificial Sequence
  Description of Artificial Sequence: Synthetic oligonucleotide
  Target: LAMA2; (-) strand; PAM type: YTN; PAM sequence: CTT
ttaaaagcttctaacctaca

SEQ ID NO: 188152 - DNA, 20 bp, Artificial Sequence
  Description of Artificial Sequence: Synthetic oligonucleotide
  Target: LAMA2; (-) strand; PAM type: YTN; PAM sequence: TTA
aaacttttaaaagcttctaa

SEQ ID NO: 188153 - DNA, 20 bp, Artificial Sequence
  Description of Artificial Sequence: Synthetic oligonucleotide
  Target: LAMA2; (-) strand; PAM type: YTN; PAM sequence: CTC
attaaaacttttaaaagctt

SEQ ID NO: 188154 - DNA, 20 bp, Artificial Sequence
  Description of Artificial Sequence: Synthetic oligonucleotide
  Target: LAMA2; (-) strand; PAM type: YTN; PAM sequence: TTC
agcctcattaaaacttttaa

SEQ ID NO: 188155 - DNA, 20 bp, Artificial Sequence
  Description of Artificial Sequence: Synthetic oligonucleotide
  Target: LAMA2; (-) strand; PAM type: YTN; PAM sequence: TTA
agcagattcagcctcattaa

SEQ ID NO: 188156 - DNA, 20 bp, Artificial Sequence
  Description of Artificial Sequence: Synthetic oligonucleotide
  Target: LAMA2; (-) strand; PAM type: YTN; PAM sequence: CTT
aagcagattcagcctcatta

SEQ ID NO: 188157 - DNA, 20 bp, Artificial Sequence
  Description of Artificial Sequence: Synthetic oligonucleotide
  Target: LAMA2; (-) strand; PAM type: YTN; PAM sequence: TTC
aaaacttaagcagattcagc

SEQ ID NO: 188158 - DNA, 20 bp, Artificial Sequence
  Description of Artificial Sequence: Synthetic oligonucleotide
  Target: LAMA2; (-) strand; PAM type: YTN; PAM sequence: CTT
caaaacttaagcagattcag

SEQ ID NO: 188159 - DNA, 20 bp, Artificial Sequence
  Description of Artificial Sequence: Synthetic oligonucleotide
  Target: LAMA2; (-) strand; PAM type: YTN; PAM sequence: CTG
gaagaaggataagtatactt

SEQ ID NO: 188160 - DNA, 20 bp, Artificial Sequence
  Description of Artificial Sequence: Synthetic oligonucleotide
  Target: LAMA2; (-) strand; PAM type: YTN; PAM sequence: TTA
actggaagaaggataagtat

SEQ ID NO: 188161 - DNA, 20 bp, Artificial Sequence
  Description of Artificial Sequence: Synthetic oligonucleotide
  Target: LAMA2; (-) strand; PAM type: YTN; PAM sequence: CTA
gaagttaactggaagaagga

SEQ ID NO: 188162 - DNA, 20 bp, Artificial Sequence
  Description of Artificial Sequence: Synthetic oligonucleotide
  Target: LAMA2; (-) strand; PAM type: YTN; PAM sequence: TTG
gctagaagttaactggaaga

SEQ ID NO: 188163 - DNA, 20 bp, Artificial Sequence
  Description of Artificial Sequence: Synthetic oligonucleotide
  Target: LAMA2; (-) strand; PAM type: YTN; PAM sequence: CTT
ggctagaagttaactggaag

SEQ ID NO: 188164 - DNA, 20 bp, Artificial Sequence
  Description of Artificial Sequence: Synthetic oligonucleotide
  Target: LAMA2; (-) strand; PAM type: YTN; PAM sequence: TTG
acttggctagaagttaactg

SEQ ID NO: 188165 - DNA, 20 bp, Artificial Sequence
  Description of Artificial Sequence: Synthetic oligonucleotide
  Target: LAMA2; (-) strand; PAM type: YTN; PAM sequence: CTA
ttgacttggctagaagttaa

SEQ ID NO: 188166 - DNA, 20 bp, Artificial Sequence
  Description of Artificial Sequence: Synthetic oligonucleotide
  Target: LAMA2; (-) strand; PAM type: YTN; PAM sequence: TTA
taagaacaaatatcagaact

SEQ ID NO: 188167 - DNA, 20 bp, Artificial Sequence
  Description of Artificial Sequence: Synthetic oligonucleotide
  Target: LAMA2; (-) strand; PAM type: YTN; PAM sequence: CTA
gattataagaacaaatatca

SEQ ID NO: 188168 - DNA, 20 bp, Artificial Sequence
  Description of Artificial Sequence: Synthetic oligonucleotide
  Target: LAMA2; (-) strand; PAM type: YTN; PAM sequence: CTA
aaaatgctagattataagaa

SEQ ID NO: 188169 - DNA, 20 bp, Artificial Sequence
  Description of Artificial Sequence: Synthetic oligonucleotide
  Target: LAMA2; (-) strand; PAM type: YTN; PAM sequence: CTG
ctaaaaatgctagattataa

SEQ ID NO: 188170 - DNA, 20 bp, Artificial Sequence
  Description of Artificial Sequence: Synthetic oligonucleotide
  Target: LAMA2; (-) strand; PAM type: YTN; PAM sequence: TTA
aaaaatagtactgctaaaaa

SEQ ID NO: 188171 - DNA, 20 bp, Artificial Sequence
  Description of Artificial Sequence: Synthetic oligonucleotide
  Target: LAMA2; (-) strand; PAM type: YTN; PAM sequence: CTT
aaaaaatagtactgctaaaa

SEQ ID NO: 188172 - DNA, 20 bp, Artificial Sequence
  Description of Artificial Sequence: Synthetic oligonucleotide
  Target: LAMA2; (-) strand; PAM type: YTN; PAM sequence: CTC
cttaaaaaatagtactgcta

SEQ ID NO: 188173 - DNA, 20 bp, Artificial Sequence
  Description of Artificial Sequence: Synthetic oligonucleotide
  Target: LAMA2; (-) strand; PAM type: YTN; PAM sequence: TTA
ctccttaaaaaatagtactg

SEQ ID NO: 188174 - DNA, 20 bp, Artificial Sequence
  Description of Artificial Sequence: Synthetic oligonucleotide
  Target: LAMA2; (-) strand; PAM type: YTN; PAM sequence: TTT
actccttaaaaaatagtact

SEQ ID NO: 188175 - DNA, 20 bp, Artificial Sequence
  Description of Artificial Sequence: Synthetic oligonucleotide
  Target: LAMA2; (-) strand; PAM type: YTN; PAM sequence: CTT
tactccttaaaaaatagtac

SEQ ID NO: 188176 - DNA, 20 bp, Artificial Sequence
  Description of Artificial Sequence: Synthetic oligonucleotide
  Target: LAMA2; (-) strand; PAM type: YTN; PAM sequence: CTC
tttactccttaaaaaatagt

SEQ ID NO: 188177 - DNA, 20 bp, Artificial Sequence
  Description of Artificial Sequence: Synthetic oligonucleotide
  Target: LAMA2; (-) strand; PAM type: YTN; PAM sequence: TTG
ggatatctctttactcctta

SEQ ID NO: 188178 - DNA, 20 bp, Artificial Sequence
  Description of Artificial Sequence: Synthetic oligonucleotide
  Target: LAMA2; (-) strand; PAM type: YTN; PAM sequence: CTT
gggatatctctttactcctt

SEQ ID NO: 188179 - DNA, 20 bp, Artificial Sequence
  Description of Artificial Sequence: Synthetic oligonucleotide
  Target: LAMA2; (-) strand; PAM type: YTN; PAM sequence: TTA
tagaaagagcttgggatatc

SEQ ID NO: 188180 - DNA, 20 bp, Artificial Sequence
  Description of Artificial Sequence: Synthetic oligonucleotide
  Target: LAMA2; (-) strand; PAM type: YTN; PAM sequence: TTA
ttatagaaagagcttgggat

SEQ ID NO: 188181 - DNA, 20 bp, Artificial Sequence
  Description of Artificial Sequence: Synthetic oligonucleotide
  Target: LAMA2; (-) strand; PAM type: YTN; PAM sequence: TTA
ttattatagaaagagcttgg

SEQ ID NO: 188182 - DNA, 20 bp, Artificial Sequence
  Description of Artificial Sequence: Synthetic oligonucleotide
  Target: LAMA2; (-) strand; PAM type: YTN; PAM sequence: TTA
atcagggagttattattata

SEQ ID NO: 188183 - DNA, 20 bp, Artificial Sequence
  Description of Artificial Sequence: Synthetic oligonucleotide
  Target: LAMA2; (-) strand; PAM type: YTN; PAM sequence: TTT
aatcagggagttattattat

SEQ ID NO: 188184 - DNA, 20 bp, Artificial Sequence
  Description of Artificial Sequence: Synthetic oligonucleotide
  Target: LAMA2; (-) strand; PAM type: YTN; PAM sequence: TTT
taatcagggagttattatta

SEQ ID NO: 188185 - DNA, 20 bp, Artificial Sequence
  Description of Artificial Sequence: Synthetic oligonucleotide
  Target: LAMA2; (-) strand; PAM type: YTN; PAM sequence: TTC
caagaattttaatcagggag

SEQ ID NO: 188186 - DNA, 20 bp, Artificial Sequence
  Description of Artificial Sequence: Synthetic oligonucleotide
  Target: LAMA2; (-) strand; PAM type: YTN; PAM sequence: TTA
ttccaagaattttaatcagg

SEQ ID NO: 188187 - DNA, 20 bp, Artificial Sequence
  Description of Artificial Sequence: Synthetic oligonucleotide
  Target: LAMA2; (-) strand; PAM type: YTN; PAM sequence: TTT
attccaagaattttaatcag

SEQ ID NO: 188188 - DNA, 20 bp, Artificial Sequence
  Description of Artificial Sequence: Synthetic oligonucleotide
  Target: LAMA2; (-) strand; PAM type: YTN; PAM sequence: TTT
tattccaagaattttaatca

SEQ ID NO: 188189 - DNA, 20 bp, Artificial Sequence
  Description of Artificial Sequence: Synthetic oligonucleotide
  Target: LAMA2; (-) strand; PAM type: YTN; PAM sequence: TTT
ttattccaagaattttaatc

SEQ ID NO: 188190 - DNA, 20 bp, Artificial Sequence
  Description of Artificial Sequence: Synthetic oligonucleotide
  Target: LAMA2; (-) strand; PAM type: YTN; PAM sequence: TTA
tatagtgaatgcaaggtcat

SEQ ID NO: 188191 - DNA, 20 bp, Artificial Sequence
  Description of Artificial Sequence: Synthetic oligonucleotide
  Target: LAMA2; (-) strand; PAM type: YTN; PAM sequence: CTC
agagaagcaaaagcaaaaat

SEQ ID NO: 188192 - DNA, 20 bp, Artificial Sequence
  Description of Artificial Sequence: Synthetic oligonucleotide
  Target: LAMA2; (-) strand; PAM type: YTN; PAM sequence: CTC
tcagagaagcaaaagcaaaa

SEQ ID NO: 188193 - DNA, 20 bp, Artificial Sequence
  Description of Artificial Sequence: Synthetic oligonucleotide
  Target: LAMA2; (-) strand; PAM type: YTN; PAM sequence: TTA
cctctcagagaagcaaaagc

SEQ ID NO: 188194 - DNA, 20 bp, Artificial Sequence
  Description of Artificial Sequence: Synthetic oligonucleotide
  Target: LAMA2; (-) strand; PAM type: YTN; PAM sequence: TTT
acctctcagagaagcaaaag

SEQ ID NO: 188195 - DNA, 20 bp, Artificial Sequence
  Description of Artificial Sequence: Synthetic oligonucleotide
  Target: LAMA2; (-) strand; PAM type: YTN; PAM sequence: TTT
tacctctcagagaagcaaaa

SEQ ID NO: 188196 - DNA, 20 bp, Artificial Sequence
  Description of Artificial Sequence: Synthetic oligonucleotide
  Target: LAMA2; (-) strand; PAM type: YTN; PAM sequence: TTG
gccccattttacctctcaga

SEQ ID NO: 188197 - DNA, 20 bp, Artificial Sequence
  Description of Artificial Sequence: Synthetic oligonucleotide
  Target: LAMA2; (-) strand; PAM type: YTN; PAM sequence: TTA
agtcatattggccccatttt

SEQ ID NO: 188198 - DNA, 20 bp, Artificial Sequence
  Description of Artificial Sequence: Synthetic oligonucleotide
  Target: LAMA2; (-) strand; PAM type: YTN; PAM sequence: TTA
attaagtcatattggcccca

SEQ ID NO: 188199 - DNA, 20 bp, Artificial Sequence
  Description of Artificial Sequence: Synthetic oligonucleotide
  Target: LAMA2; (-) strand; PAM type: YTN; PAM sequence: TTA
tattaattaagtcatattgg

SEQ ID NO: 188200 - DNA, 20 bp, Artificial Sequence
  Description of Artificial Sequence: Synthetic oligonucleotide
  Target: LAMA2; (-) strand; PAM type: YTN; PAM sequence: CTC
gtaaattatattaattaagt

SEQ ID NO: 188201 - DNA, 20 bp, Artificial Sequence
  Description of Artificial Sequence: Synthetic oligonucleotide
  Target: LAMA2; (-) strand; PAM type: YTN; PAM sequence: CTC
tcgtaaattatattaattaa

SEQ ID NO: 188202 - DNA, 20 bp, Artificial Sequence
  Description of Artificial Sequence: Synthetic oligonucleotide
  Target: LAMA2; (-) strand; PAM type: YTN; PAM sequence: TTA
aaatcactctcgtaaattat

SEQ ID NO: 188203 - DNA, 20 bp, Artificial Sequence
  Description of Artificial Sequence: Synthetic oligonucleotide
  Target: LAMA2; (-) strand; PAM type: YTN; PAM sequence: CTT
aaaatcactctcgtaaatta

SEQ ID NO: 188204 - DNA, 20 bp, Artificial Sequence
  Description of Artificial Sequence: Synthetic oligonucleotide
  Target: LAMA2; (-) strand; PAM type: YTN; PAM sequence: CTC
ttaaaatcactctcgtaaat

SEQ ID NO: 188205 - DNA, 20 bp, Artificial Sequence
  Description of Artificial Sequence: Synthetic oligonucleotide
  Target: LAMA2; (-) strand; PAM type: YTN; PAM sequence: TTA
aaaataagtggccagagata

SEQ ID NO: 188206 - DNA, 20 bp, Artificial Sequence
  Description of Artificial Sequence: Synthetic oligonucleotide
  Target: LAMA2; (-) strand; PAM type: YTN; PAM sequence: TTT
aaaaataagtggccagagat

SEQ ID NO: 188207 - DNA, 20 bp, Artificial Sequence
  Description of Artificial Sequence: Synthetic oligonucleotide
  Target: LAMA2; (-) strand; PAM type: YTN; PAM sequence: TTT
taaaaataagtggccagaga

SEQ ID NO: 188208 - DNA, 20 bp, Artificial Sequence
  Description of Artificial Sequence: Synthetic oligonucleotide
  Target: LAMA2; (-) strand; PAM type: YTN; PAM sequence: TTT
ttaaaaataagtggccagag

SEQ ID NO: 188209 - DNA, 20 bp, Artificial Sequence
  Description of Artificial Sequence: Synthetic oligonucleotide
  Target: LAMA2; (-) strand; PAM type: YTN; PAM sequence: TTA
aaagtagaatttttaaaaat

SEQ ID NO: 188210 - DNA, 20 bp, Artificial Sequence
  Description of Artificial Sequence: Synthetic oligonucleotide
  Target: LAMA2; (-) strand; PAM type: YTN; PAM sequence: TTA
atagttaaaagtagaatttt

SEQ ID NO: 188211 - DNA, 20 bp, Artificial Sequence
  Description of Artificial Sequence: Synthetic oligonucleotide
  Target: LAMA2; (-) strand; PAM type: YTN; PAM sequence: TTT
aatagttaaaagtagaattt

SEQ ID NO: 188212 - DNA, 20 bp, Artificial Sequence
  Description of Artificial Sequence: Synthetic oligonucleotide
  Target: LAMA2; (-) strand; PAM type: YTN; PAM sequence: TTG
agcaaagtttaatagttaaa

SEQ ID NO: 188213 - DNA, 20 bp, Artificial Sequence
  Description of Artificial Sequence: Synthetic oligonucleotide
  Target: LAMA2; (-) strand; PAM type: YTN; PAM sequence: TTG
taattgagcaaagtttaata

SEQ ID NO: 188214 - DNA, 20 bp, Artificial Sequence
  Description of Artificial Sequence: Synthetic oligonucleotide
  Target: LAMA2; (-) strand; PAM type: YTN; PAM sequence: CTT
gtaattgagcaaagtttaat

SEQ ID NO: 188215 - DNA, 20 bp, Artificial Sequence
  Description of Artificial Sequence: Synthetic oligonucleotide
  Target: LAMA2; (-) strand; PAM type: YTN; PAM sequence: TTA
aacacaccttgtaattgagc

SEQ ID NO: 188216 - DNA, 20 bp, Artificial Sequence
  Description of Artificial Sequence: Synthetic oligonucleotide
  Target: LAMA2; (-) strand; PAM type: YTN; PAM sequence: TTT
aaacacaccttgtaattgag

SEQ ID NO: 188217 - DNA, 20 bp, Artificial Sequence
  Description of Artificial Sequence: Synthetic oligonucleotide
  Target: LAMA2; (-) strand; PAM type: YTN; PAM sequence: TTG
tttaaacacaccttgtaatt

SEQ ID NO: 188218 - DNA, 20 bp, Artificial Sequence
  Description of Artificial Sequence: Synthetic oligonucleotide
  Target: LAMA2; (-) strand; PAM type: YTN; PAM sequence: CTT
gtttaaacacaccttgtaat

SEQ ID NO: 188219 - DNA, 20 bp, Artificial Sequence
  Description of Artificial Sequence: Synthetic oligonucleotide
  Target: LAMA2; (-) strand; PAM type: YTN; PAM sequence: TTA
tgtcttgtttaaacacacct

SEQ ID NO: 188220 - DNA, 20 bp, Artificial Sequence
  Description of Artificial Sequence: Synthetic oligonucleotide
  Target: LAMA2; (-) strand; PAM type: YTN; PAM sequence: TTA
aagtattatgtcttgtttaa

SEQ ID NO: 188221 - DNA, 20 bp, Artificial Sequence
  Description of Artificial Sequence: Synthetic oligonucleotide
  Target: LAMA2; (-) strand; PAM type: YTN; PAM sequence: TTA
ttaaagtattatgtcttgtt

SEQ ID NO: 188222 - DNA, 20 bp, Artificial Sequence
  Description of Artificial Sequence: Synthetic oligonucleotide
  Target: LAMA2; (-) strand; PAM type: YTN; PAM sequence: CTA
acattattaaagtattatgt

SEQ ID NO: 188223 - DNA, 20 bp, Artificial Sequence
  Description of Artificial Sequence: Synthetic oligonucleotide
  Target: LAMA2; (-) strand; PAM type: YTN; PAM sequence: CTG
cctaacattattaaagtatt

SEQ ID NO: 188224 - DNA, 20 bp, Artificial Sequence
  Description of Artificial Sequence: Synthetic oligonucleotide
  Target: LAMA2; (-) strand; PAM type: YTN; PAM sequence: CTC
ccagctgcctaacattatta

SEQ ID NO: 188225 - DNA, 20 bp, Artificial Sequence
  Description of Artificial Sequence: Synthetic oligonucleotide
  Target: LAMA2; (-) strand; PAM type: YTN; PAM sequence: TTC
tcccagctgcctaacattat

SEQ ID NO: 188226 - DNA, 20 bp, Artificial Sequence
  Description of Artificial Sequence: Synthetic oligonucleotide
  Target: LAMA2; (-) strand; PAM type: YTN; PAM sequence: TTT
ctcccagctgcctaacatta

SEQ ID NO: 188227 - DNA, 20 bp, Artificial Sequence
  Description of Artificial Sequence: Synthetic oligonucleotide
  Target: LAMA2; (-) strand; PAM type: YTN; PAM sequence: CTC
atttctcccagctgcctaac

SEQ ID NO: 188228 - DNA, 20 bp, Artificial Sequence
  Description of Artificial Sequence: Synthetic oligonucleotide
  Target: LAMA2; (-) strand; PAM type: YTN; PAM sequence: CTG
gcccctcatttctcccagct

SEQ ID NO: 188229 - DNA, 20 bp, Artificial Sequence
  Description of Artificial Sequence: Synthetic oligonucleotide
  Target: LAMA2; (-) strand; PAM type: YTN; PAM sequence: TTG
gtgcccctggcccctcattt

SEQ ID NO: 188230 - DNA, 20 bp, Artificial Sequence
  Description of Artificial Sequence: Synthetic oligonucleotide
  Target: LAMA2; (-) strand; PAM type: YTN; PAM sequence: TTC
caagtggacataaggattgg

SEQ ID NO: 188231 - DNA, 20 bp, Artificial Sequence
  Description of Artificial Sequence: Synthetic oligonucleotide
  Target: LAMA2; (-) strand; PAM type: YTN; PAM sequence: CTG
ccccattccaagtggacata

SEQ ID NO: 188232 - DNA, 20 bp, Artificial Sequence
  Description of Artificial Sequence: Synthetic oligonucleotide
  Target: LAMA2; (-) strand; PAM type: YTN; PAM sequence: TTC
tgccccattccaagtggaca

SEQ ID NO: 188233 - DNA, 20 bp, Artificial Sequence
  Description of Artificial Sequence: Synthetic oligonucleotide
  Target: LAMA2; (-) strand; PAM type: YTN; PAM sequence: TTT
ctgccccattccaagtggac

SEQ ID NO: 188234 - DNA, 20 bp, Artificial Sequence
  Description of Artificial Sequence: Synthetic oligonucleotide
  Target: LAMA2; (-) strand; PAM type: YTN; PAM sequence: TTG
agtttctgccccattccaag

SEQ ID NO: 188235 - DNA, 20 bp, Artificial Sequence
  Description of Artificial Sequence: Synthetic oligonucleotide
  Target: LAMA2; (-) strand; PAM type: YTN; PAM sequence: TTT
gagtttctgccccattccaa

SEQ ID NO: 188236 - DNA, 20 bp, Artificial Sequence
  Description of Artificial Sequence: Synthetic oligonucleotide
  Target: LAMA2; (-) strand; PAM type: YTN; PAM sequence: CTT
tgagtttctgccccattcca

SEQ ID NO: 188237 - DNA, 20 bp, Artificial Sequence
  Description of Artificial Sequence: Synthetic oligonucleotide
  Target: LAMA2; (-) strand; PAM type: YTN; PAM sequence: CTG
catgctttgagtttctgccc

SEQ ID NO: 188238 - DNA, 20 bp, Artificial Sequence
  Description of Artificial Sequence: Synthetic oligonucleotide
  Target: LAMA2; (-) strand; PAM type: YTN; PAM sequence: CTC
tgcatgctttgagtttctgc

SEQ ID NO: 188239 - DNA, 20 bp, Artificial Sequence
  Description of Artificial Sequence: Synthetic oligonucleotide
  Target: LAMA2; (-) strand; PAM type: YTN; PAM sequence: TTA
ctctgcatgctttgagtttc

SEQ ID NO: 188240 - DNA, 20 bp, Artificial Sequence
  Description of Artificial Sequence: Synthetic oligonucleotide
  Target: LAMA2; (-) strand; PAM type: YTN; PAM sequence: CTT
actctgcatgctttgagttt

SEQ ID NO: 188241 - DNA, 20 bp, Artificial Sequence
  Description of Artificial Sequence: Synthetic oligonucleotide
  Target: LAMA2; (-) strand; PAM type: YTN; PAM sequence: TTG
atccttactctgcatgcttt

SEQ ID NO: 188242 - DNA, 20 bp, Artificial Sequence
  Description of Artificial Sequence: Synthetic oligonucleotide
  Target: LAMA2; (-) strand; PAM type: YTN; PAM sequence: CTT
gatccttactctgcatgctt

SEQ ID NO: 188243 - DNA, 20 bp, Artificial Sequence
  Description of Artificial Sequence: Synthetic oligonucleotide
  Target: LAMA2; (-) strand; PAM type: YTN; PAM sequence: TTA
cttgatccttactctgcatg

SEQ ID NO: 188244 - DNA, 20 bp, Artificial Sequence
  Description of Artificial Sequence: Synthetic oligonucleotide
  Target: LAMA2; (-) strand; PAM type: YTN; PAM sequence: TTT
acttgatccttactctgcat

SEQ ID NO: 188245 - DNA, 20 bp, Artificial Sequence
  Description of Artificial Sequence: Synthetic oligonucleotide
  Target: LAMA2; (-) strand; PAM type: YTN; PAM sequence: TTA
gcaacaatttacttgatcct

SEQ ID NO: 188246 - DNA, 20 bp, Artificial Sequence
  Description of Artificial Sequence: Synthetic oligonucleotide
  Target: LAMA2; (-) strand; PAM type: YTN; PAM sequence: CTT
agcaacaatttacttgatcc

SEQ ID NO: 188247 - DNA, 20 bp, Artificial Sequence
  Description of Artificial Sequence: Synthetic oligonucleotide
  Target: LAMA2; (-) strand; PAM type: YTN; PAM sequence: TTC
ttagcaacaatttacttgat

SEQ ID NO: 188248 - DNA, 20 bp, Artificial Sequence
  Description of Artificial Sequence: Synthetic oligonucleotide
  Target: LAMA2; (-) strand; PAM type: YTN; PAM sequence: TTC
aggataattcttagcaacaa

SEQ ID NO: 188249 - DNA, 20 bp, Artificial Sequence
  Description of Artificial Sequence: Synthetic oligonucleotide
  Target: LAMA2; (-) strand; PAM type: YTN; PAM sequence: CTG
tgtgtgttcaggataattct

SEQ ID NO: 188250 - DNA, 20 bp, Artificial Sequence
  Description of Artificial Sequence: Synthetic oligonucleotide
  Target: LAMA2; (-) strand; PAM type: YTN; PAM sequence: TTG
aaaagagagtaaataagaag

SEQ ID NO: 188251 - DNA, 20 bp, Artificial Sequence
  Description of Artificial Sequence: Synthetic oligonucleotide
  Target: LAMA2; (-) strand; PAM type: YTN; PAM sequence: TTT
gaaaagagagtaaataagaa

SEQ ID NO: 188252 - DNA, 20 bp, Artificial Sequence
  Description of Artificial Sequence: Synthetic oligonucleotide
  Target: LAMA2; (-) strand; PAM type: YTN; PAM sequence: TTA
tttgaaaagagagtaaataa

SEQ ID NO: 188253 - DNA, 20 bp, Artificial Sequence
  Description of Artificial Sequence: Synthetic oligonucleotide
  Target: LAMA2; (-) strand; PAM type: YTN; PAM sequence: CTT
atttgaaaagagagtaaata

SEQ ID NO: 188254 - DNA, 20 bp, Artificial Sequence
  Description of Artificial Sequence: Synthetic oligonucleotide
  Target: LAMA2; (-) strand; PAM type: YTN; PAM sequence: TTA
ccttatttgaaaagagagta

SEQ ID NO: 188255 - DNA, 20 bp, Artificial Sequence
  Description of Artificial Sequence: Synthetic oligonucleotide
  Target: LAMA2; (-) strand; PAM type: YTN; PAM sequence: TTA
atattaccttatttgaaaag

SEQ ID NO: 188256 - DNA, 20 bp, Artificial Sequence
  Description of Artificial Sequence: Synthetic oligonucleotide
  Target: LAMA2; (-) strand; PAM type: YTN; PAM sequence: CTG
ggtcatagaaatcagagtta

SEQ ID NO: 188257 - DNA, 20 bp, Artificial Sequence
  Description of Artificial Sequence: Synthetic oligonucleotide
  Target: LAMA2; (-) strand; PAM type: YTN; PAM sequence: TTG
tgcctgggtcatagaaatca

SEQ ID NO: 188258 - DNA, 20 bp, Artificial Sequence
  Description of Artificial Sequence: Synthetic oligonucleotide
  Target: LAMA2; (-) strand; PAM type: YTN; PAM sequence: CTT
gtgcctgggtcatagaaatc

SEQ ID NO: 188259 - DNA, 20 bp, Artificial Sequence
  Description of Artificial Sequence: Synthetic oligonucleotide
  Target: LAMA2; (-) strand; PAM type: YTN; PAM sequence: TTC
atcttgtgcctgggtcatag

SEQ ID NO: 188260 - DNA, 20 bp, Artificial Sequence
  Description of Artificial Sequence: Synthetic oligonucleotide
  Target: LAMA2; (-) strand; PAM type: YTN; PAM sequence: CTT
catcttgtgcctgggtcata

SEQ ID NO: 188261 - DNA, 20 bp, Artificial Sequence
  Description of Artificial Sequence: Synthetic oligonucleotide
  Target: LAMA2; (-) strand; PAM type: YTN; PAM sequence: TTC
acttcatcttgtgcctgggt

SEQ ID NO: 188262 - DNA, 20 bp, Artificial Sequence
  Description of Artificial Sequence: Synthetic oligonucleotide
  Target: LAMA2; (-) strand; PAM type: YTN; PAM sequence: CTG
aattcacttcatcttgtgcc

SEQ ID NO: 188263 - DNA, 20 bp, Artificial Sequence
  Description of Artificial Sequence: Synthetic oligonucleotide
  Target: LAMA2; (-) strand; PAM type: YTN; PAM sequence: CTC
ctgaattcacttcatcttgt

SEQ ID NO: 188264 - DNA, 20 bp, Artificial Sequence
  Description of Artificial Sequence: Synthetic oligonucleotide
  Target: LAMA2; (-) strand; PAM type: YTN; PAM sequence: TTC
ctcctgaattcacttcatct

SEQ ID NO: 188265 - DNA, 20 bp, Artificial Sequence
  Description of Artificial Sequence: Synthetic oligonucleotide
  Target: LAMA2; (-) strand; PAM type: YTN; PAM sequence: CTT
cctcctgaattcacttcatc

SEQ ID NO: 188266 - DNA, 20 bp, Artificial Sequence
  Description of Artificial Sequence: Synthetic oligonucleotide
  Target: LAMA2; (-) strand; PAM type: YTN; PAM sequence: TTG
acagaatggtagtataaacc

SEQ ID NO: 188267 - DNA, 20 bp, Artificial Sequence
  Description of Artificial Sequence: Synthetic oligonucleotide
  Target: LAMA2; (-) strand; PAM type: YTN; PAM sequence: CTT
gacagaatggtagtataaac

SEQ ID NO: 188268 - DNA, 20 bp, Artificial Sequence
  Description of Artificial Sequence: Synthetic oligonucleotide
  Target: LAMA2; (-) strand; PAM type: YTN; PAM sequence: TTA
agtggtatcttgacagaatg

SEQ ID NO: 188269 - DNA, 20 bp, Artificial Sequence
  Description of Artificial Sequence: Synthetic oligonucleotide
  Target: LAMA2; (-) strand; PAM type: YTN; PAM sequence: TTT
aagtggtatcttgacagaat

SEQ ID NO: 188270 - DNA, 20 bp, Artificial Sequence
  Description of Artificial Sequence: Synthetic oligonucleotide
  Target: LAMA2; (-) strand; PAM type: YTN; PAM sequence: TTG
tatgtagcatttaagtggta

SEQ ID NO: 188271 - DNA, 20 bp, Artificial Sequence
  Description of Artificial Sequence: Synthetic oligonucleotide
  Target: LAMA2; (-) strand; PAM type: YTN; PAM sequence: TTA
ttgtatgtagcatttaagtg

SEQ ID NO: 188272 - DNA, 20 bp, Artificial Sequence
  Description of Artificial Sequence: Synthetic oligonucleotide
  Target: LAMA2; (-) strand; PAM type: YTN; PAM sequence: CTT
attgtatgtagcatttaagt

SEQ ID NO: 188273 - DNA, 20 bp, Artificial Sequence
  Description of Artificial Sequence: Synthetic oligonucleotide
  Target: LAMA2; (-) strand; PAM type: YTN; PAM sequence: TTC
cttattgtatgtagcattta

SEQ ID NO: 188274 - DNA, 20 bp, Artificial Sequence
  Description of Artificial Sequence: Synthetic oligonucleotide
  Target: LAMA2; (-) strand; PAM type: YTN; PAM sequence: TTG
aataaaattccttattgtat

SEQ ID NO: 188275 - DNA, 20 bp, Artificial Sequence
  Description of Artificial Sequence: Synthetic oligonucleotide
  Target: LAMA2; (-) strand; PAM type: YTN; PAM sequence: TTT
gaataaaattccttattgta

SEQ ID NO: 188276 - DNA, 20 bp, Artificial Sequence
  Description of Artificial Sequence: Synthetic oligonucleotide
  Target: LAMA2; (-) strand; PAM type: YTN; PAM sequence: TTT
tgaataaaattccttattgt

SEQ ID NO: 188277 - DNA, 20 bp, Artificial Sequence
  Description of Artificial Sequence: Synthetic oligonucleotide
  Target: LAMA2; (-) strand; PAM type: YTN; PAM sequence: CTA
ttttgaataaaattccttat

SEQ ID NO: 188278 - DNA, 20 bp, Artificial Sequence
  Description of Artificial Sequence: Synthetic oligonucleotide
  Target: LAMA2; (-) strand; PAM type: YTN; PAM sequence: TTG
tagctattttgaataaaatt

SEQ ID NO: 188279 - DNA, 20 bp, Artificial Sequence
  Description of Artificial Sequence: Synthetic oligonucleotide
  Target: LAMA2; (-) strand; PAM type: YTN; PAM sequence: TTG
tatgttgtagctattttgaa

SEQ ID NO: 188280 - DNA, 20 bp, Artificial Sequence
  Description of Artificial Sequence: Synthetic oligonucleotide
  Target: LAMA2; (-) strand; PAM type: YTN; PAM sequence: CTA
tagtagattgtatgttgtag

SEQ ID NO: 188281 - DNA, 20 bp, Artificial Sequence
  Description of Artificial Sequence: Synthetic oligonucleotide
  Target: LAMA2; (-) strand; PAM type: YTN; PAM sequence: TTA
tagcagcctatagtagattg

SEQ ID NO: 188282 - DNA, 20 bp, Artificial Sequence
  Description of Artificial Sequence: Synthetic oligonucleotide
  Target: LAMA2; (-) strand; PAM type: YTN; PAM sequence: CTA
gaatgcagattatagcagcc

SEQ ID NO: 188283 - DNA, 20 bp, Artificial Sequence
  Description of Artificial Sequence: Synthetic oligonucleotide
  Target: LAMA2; (-) strand; PAM type: YTN; PAM sequence: CTA
tgacaaagacaataatatat

SEQ ID NO: 188284 - DNA, 20 bp, Artificial Sequence
  Description of Artificial Sequence: Synthetic oligonucleotide
  Target: LAMA2; (-) strand; PAM type: YTN; PAM sequence: TTG
taaatggtctatgacaaaga

SEQ ID NO: 188285 - DNA, 20 bp, Artificial Sequence
  Description of Artificial Sequence: Synthetic oligonucleotide
  Target: LAMA2; (-) strand; PAM type: YTN; PAM sequence: CTC
cagatatattgtaaatggtc

SEQ ID NO: 188286 - DNA, 20 bp, Artificial Sequence
  Description of Artificial Sequence: Synthetic oligonucleotide
  Target: LAMA2; (-) strand; PAM type: YTN; PAM sequence: TTG
agccaacctccagatatatt

SEQ ID NO: 188287 - DNA, 20 bp, Artificial Sequence
  Description of Artificial Sequence: Synthetic oligonucleotide
  Target: LAMA2; (-) strand; PAM type: YTN; PAM sequence: CTT
gagccaacctccagatatat

SEQ ID NO: 188288 - DNA, 20 bp, Artificial Sequence
  Description of Artificial Sequence: Synthetic oligonucleotide
  Target: LAMA2; (-) strand; PAM type: YTN; PAM sequence: TTA
tccttgagccaacctccaga

SEQ ID NO: 188289 - DNA, 20 bp, Artificial Sequence
  Description of Artificial Sequence: Synthetic oligonucleotide
  Target: LAMA2; (-) strand; PAM type: YTN; PAM sequence: TTT
atccttgagccaacctccag

SEQ ID NO: 188290 - DNA, 20 bp, Artificial Sequence
  Description of Artificial Sequence: Synthetic oligonucleotide
  Target: LAMA2; (-) strand; PAM type: YTN; PAM sequence: TTA
agtcatttatccttgagcca

SEQ ID NO: 188291 - DNA, 20 bp, Artificial Sequence
  Description of Artificial Sequence: Synthetic oligonucleotide
  Target: LAMA2; (-) strand; PAM type: YTN; PAM sequence: TTT
aagtcatttatccttgagcc

SEQ ID NO: 188292 - DNA, 20 bp, Artificial Sequence
  Description of Artificial Sequence: Synthetic oligonucleotide
  Target: LAMA2; (-) strand; PAM type: YTN; PAM sequence: TTA
acaggtttaagtcatttatc

SEQ ID NO: 188293 - DNA, 20 bp, Artificial Sequence
  Description of Artificial Sequence: Synthetic oligonucleotide
  Target: LAMA2; (-) strand; PAM type: YTN; PAM sequence: TTC
aacattaacaggtttaagtc

SEQ ID NO: 188294 - DNA, 20 bp, Artificial Sequence
  Description of Artificial Sequence: Synthetic oligonucleotide
  Target: LAMA2; (-) strand; PAM type: YTN; PAM sequence: TTT
caacattaacaggtttaagt

SEQ ID NO: 188295 - DNA, 20 bp, Artificial Sequence
  Description of Artificial Sequence: Synthetic oligonucleotide
  Target: LAMA2; (-) strand; PAM type: YTN; PAM sequence: CTT
tcaacattaacaggtttaag

SEQ ID NO: 188296 - DNA, 20 bp, Artificial Sequence
  Description of Artificial Sequence: Synthetic oligonucleotide
  Target: LAMA2; (-) strand; PAM type: YTN; PAM sequence: TTA
catactttcaacattaacag

SEQ ID NO: 188297 - DNA, 20 bp, Artificial Sequence
  Description of Artificial Sequence: Synthetic oligonucleotide
  Target: LAMA2; (-) strand; PAM type: YTN; PAM sequence: TTT
acatactttcaacattaaca

SEQ ID NO: 188298 - DNA, 20 bp, Artificial Sequence
  Description of Artificial Sequence: Synthetic oligonucleotide
  Target: LAMA2; (-) strand; PAM type: YTN; PAM sequence: TTT
tacatactttcaacattaac

SEQ ID NO: 188299 - DNA, 20 bp, Artificial Sequence
  Description of Artificial Sequence: Synthetic oligonucleotide
  Target: LAMA2; (-) strand; PAM type: YTN; PAM sequence: TTC
atgaattttacatactttca

SEQ ID NO: 188300 - DNA, 20 bp, Artificial Sequence
  Description of Artificial Sequence: Synthetic oligonucleotide
  Target: LAMA2; (-) strand; PAM type: YTN; PAM sequence: TTT
catgaattttacatactttc

SEQ ID NO: 188301 - DNA, 20 bp, Artificial Sequence
  Description of Artificial Sequence: Synthetic oligonucleotide
  Target: LAMA2; (-) strand; PAM type: YTN; PAM sequence: TTA
aagtttcatgaattttacat

SEQ ID NO: 188302 - DNA, 20 bp, Artificial Sequence
  Description of Artificial Sequence: Synthetic oligonucleotide
  Target: LAMA2; (-) strand; PAM type: YTN; PAM sequence: TTT
aaagtttcatgaattttaca

SEQ ID NO: 188303 - DNA, 20 bp, Artificial Sequence
  Description of Artificial Sequence: Synthetic oligonucleotide
  Target: LAMA2; (-) strand; PAM type: YTN; PAM sequence: TTT
taaagtttcatgaattttac

SEQ ID NO: 188304 - DNA, 20 bp, Artificial Sequence
  Description of Artificial Sequence: Synthetic oligonucleotide
  Target: LAMA2; (-) strand; PAM type: YTN; PAM sequence: CTA
tccaattttaaagtttcatg

SEQ ID NO: 188305 - DNA, 20 bp, Artificial Sequence
  Description of Artificial Sequence: Synthetic oligonucleotide
  Target: LAMA2; (-) strand; PAM type: YTN; PAM sequence: TTA
aatcataaatcactatccaa

SEQ ID NO: 188306 - DNA, 20 bp, Artificial Sequence
  Description of Artificial Sequence: Synthetic oligonucleotide
  Target: LAMA2; (-) strand; PAM type: YTN; PAM sequence: TTT
aaatcataaatcactatcca

SEQ ID NO: 188307 - DNA, 20 bp, Artificial Sequence
  Description of Artificial Sequence: Synthetic oligonucleotide
  Target: LAMA2; (-) strand; PAM type: YTN; PAM sequence: TTT
taaatcataaatcactatcc

SEQ ID NO: 188308 - DNA, 20 bp, Artificial Sequence
  Description of Artificial Sequence: Synthetic oligonucleotide
  Target: LAMA2; (-) strand; PAM type: YTN; PAM sequence: TTT
ttaaatcataaatcactatc

SEQ ID NO: 188309 - DNA, 20 bp, Artificial Sequence
  Description of Artificial Sequence: Synthetic oligonucleotide
  Target: LAMA2; (-) strand; PAM type: YTN; PAM sequence: CTG
aaggtgaataaagatcgtgt

SEQ ID NO: 188310 - DNA, 20 bp, Artificial Sequence
  Description of Artificial Sequence: Synthetic oligonucleotide
  Target: LAMA2; (-) strand; PAM type: YTN; PAM sequence: TTG
agaataataatatctgaagg

SEQ ID NO: 188311 - DNA, 20 bp, Artificial Sequence
  Description of Artificial Sequence: Synthetic oligonucleotide
  Target: LAMA2; (-) strand; PAM type: YTN; PAM sequence: TTT
gagaataataatatctgaag

SEQ ID NO: 188312 - DNA, 20 bp, Artificial Sequence
  Description of Artificial Sequence: Synthetic oligonucleotide
  Target: LAMA2; (-) strand; PAM type: YTN; PAM sequence: CTT
tgagaataataatatctgaa

SEQ ID NO: 188313 - DNA, 20 bp, Artificial Sequence
  Description of Artificial Sequence: Synthetic oligonucleotide
  Target: LAMA2; (-) strand; PAM type: YTN; PAM sequence: TTG
tcctttgagaataataatat

SEQ ID NO: 188314 - DNA, 20 bp, Artificial Sequence
  Description of Artificial Sequence: Synthetic oligonucleotide
  Target: LAMA2; (-) strand; PAM type: YTN; PAM sequence: TTT
gtcctttgagaataataata

SEQ ID NO: 188315 - DNA, 20 bp, Artificial Sequence
  Description of Artificial Sequence: Synthetic oligonucleotide
  Target: LAMA2; (-) strand; PAM type: YTN; PAM sequence: CTA
aatttgtcctttgagaataa

SEQ ID NO: 188316 - DNA, 20 bp, Artificial Sequence
  Description of Artificial Sequence: Synthetic oligonucleotide
  Target: LAMA2; (-) strand; PAM type: YTN; PAM sequence: TTC
taaatttgtcctttgagaat

SEQ ID NO: 188317 - DNA, 20 bp, Artificial Sequence
  Description of Artificial Sequence: Synthetic oligonucleotide
  Target: LAMA2; (-) strand; PAM type: YTN; PAM sequence: CTA
agttctaaatttgtcctttg

SEQ ID NO: 188318 - DNA, 20 bp, Artificial Sequence
  Description of Artificial Sequence: Synthetic oligonucleotide
  Target: LAMA2; (-) strand; PAM type: YTN; PAM sequence: CTG
gaagcctaagttctaaattt

SEQ ID NO: 188319 - DNA, 20 bp, Artificial Sequence
  Description of Artificial Sequence: Synthetic oligonucleotide
  Target: LAMA2; (-) strand; PAM type: YTN; PAM sequence: CTA
ctggaagcctaagttctaaa

SEQ ID NO: 188320 - DNA, 20 bp, Artificial Sequence
  Description of Artificial Sequence: Synthetic oligonucleotide
  Target: LAMA2; (-) strand; PAM type: YTN; PAM sequence: TTA
caactactggaagcctaagt

SEQ ID NO: 188321 - DNA, 20 bp, Artificial Sequence
  Description of Artificial Sequence: Synthetic oligonucleotide
  Target: LAMA2; (-) strand; PAM type: YTN; PAM sequence: TTA
aattacaactactggaagcc

SEQ ID NO: 188322 - DNA, 20 bp, Artificial Sequence
  Description of Artificial Sequence: Synthetic oligonucleotide
  Target: LAMA2; (-) strand; PAM type: YTN; PAM sequence: CTT
aaattacaactactggaagc

SEQ ID NO: 188323 - DNA, 20 bp, Artificial Sequence
  Description of Artificial Sequence: Synthetic oligonucleotide
  Target: LAMA2; (-) strand; PAM type: YTN; PAM sequence: TTA
tgtaaacttaaattacaact

SEQ ID NO: 188324 - DNA, 20 bp, Artificial Sequence
  Description of Artificial Sequence: Synthetic oligonucleotide
  Target: LAMA2; (-) strand; PAM type: YTN; PAM sequence: TTA
ttatgtaaacttaaattaca

SEQ ID NO: 188325 - DNA, 20 bp, Artificial Sequence
  Description of Artificial Sequence: Synthetic oligonucleotide
  Target: LAMA2; (-) strand; PAM type: YTN; PAM sequence: TTA
ttattatgtaaacttaaatt

SEQ ID NO: 188326 - DNA, 20 bp, Artificial Sequence
  Description of Artificial Sequence: Synthetic oligonucleotide
  Target: LAMA2; (-) strand; PAM type: YTN; PAM sequence: TTG
aaataaagttattattatgt

SEQ ID NO: 188327 - DNA, 20 bp, Artificial Sequence
  Description of Artificial Sequence: Synthetic oligonucleotide
  Target: LAMA2; (-) strand; PAM type: YTN; PAM sequence: TTG
ttgaaataaagttattatta

SEQ ID NO: 188328 - DNA, 20 bp, Artificial Sequence
  Description of Artificial Sequence: Synthetic oligonucleotide
  Target: LAMA2; (-) strand; PAM type: YTN; PAM sequence: TTA
gttgttgaaataaagttatt

SEQ ID NO: 188329 - DNA, 20 bp, Artificial Sequence
  Description of Artificial Sequence: Synthetic oligonucleotide
  Target: LAMA2; (-) strand; PAM type: YTN; PAM sequence: TTT
agttgttgaaataaagttat

SEQ ID NO: 188330 - DNA, 20 bp, Artificial Sequence
  Description of Artificial Sequence: Synthetic oligonucleotide
  Target: LAMA2; (-) strand; PAM type: YTN; PAM sequence: TTT
tagttgttgaaataaagtta

SEQ ID NO: 188331 - DNA, 20 bp, Artificial Sequence
  Description of Artificial Sequence: Synthetic oligonucleotide
  Target: LAMA2; (-) strand; PAM type: YTN; PAM sequence: TTC
agcacaaacaataccggaag

SEQ ID NO: 188332 - DNA, 20 bp, Artificial Sequence
  Description of Artificial Sequence: Synthetic oligonucleotide
  Target: LAMA2; (-) strand; PAM type: YTN; PAM sequence: TTG
gaaccataaaaaagggaatt

SEQ ID NO: 188333 - DNA, 20 bp, Artificial Sequence
  Description of Artificial Sequence: Synthetic oligonucleotide
  Target: LAMA2; (-) strand; PAM type: YTN; PAM sequence: CTT
ggaaccataaaaaagggaat

SEQ ID NO: 188334 - DNA, 20 bp, Artificial Sequence
  Description of Artificial Sequence: Synthetic oligonucleotide
  Target: LAMA2; (-) strand; PAM type: YTN; PAM sequence: TTA
atggaaagaaaccttggaac

SEQ ID NO: 188335 - DNA, 20 bp, Artificial Sequence
  Description of Artificial Sequence: Synthetic oligonucleotide
  Target: LAMA2; (-) strand; PAM type: YTN; PAM sequence: CTA
aacaattaatggaaagaaac

SEQ ID NO: 188336 - DNA, 20 bp, Artificial Sequence
  Description of Artificial Sequence: Synthetic oligonucleotide
  Target: LAMA2; (-) strand; PAM type: YTN; PAM sequence: CTA
aaaagaaaacatggcctaaa

SEQ ID NO: 188337 - DNA, 20 bp, Artificial Sequence
  Description of Artificial Sequence: Synthetic oligonucleotide
  Target: LAMA2; (-) strand; PAM type: YTN; PAM sequence: TTC
aatggaacaacactaaaaag

SEQ ID NO: 188338 - DNA, 20 bp, Artificial Sequence
  Description of Artificial Sequence: Synthetic oligonucleotide
  Target: LAMA2; (-) strand; PAM type: YTN; PAM sequence: CTT
caatggaacaacactaaaaa

SEQ ID NO: 188339 - DNA, 20 bp, Artificial Sequence
  Description of Artificial Sequence: Synthetic oligonucleotide
  Target: LAMA2; (-) strand; PAM type: YTN; PAM sequence: TTG
cttcaatggaacaacactaa

SEQ ID NO: 188340 - DNA, 20 bp, Artificial Sequence
  Description of Artificial Sequence: Synthetic oligonucleotide
  Target: LAMA2; (-) strand; PAM type: YTN; PAM sequence: CTT
gcttcaatggaacaacacta

SEQ ID NO: 188341 - DNA, 20 bp, Artificial Sequence
  Description of Artificial Sequence: Synthetic oligonucleotide
  Target: LAMA2; (-) strand; PAM type: YTN; PAM sequence: TTC
acagagggcttgcttcaatg

SEQ ID NO: 188342 - DNA, 20 bp, Artificial Sequence
  Description of Artificial Sequence: Synthetic oligonucleotide
  Target: LAMA2; (-) strand; PAM type: YTN; PAM sequence: TTT
cacagagggcttgcttcaat

SEQ ID NO: 188343 - DNA, 20 bp, Artificial Sequence
  Description of Artificial Sequence: Synthetic oligonucleotide
  Target: LAMA2; (-) strand; PAM type: YTN; PAM sequence: TTT
tcacagagggcttgcttcaa

SEQ ID NO: 188344 - DNA, 20 bp, Artificial Sequence
  Description of Artificial Sequence: Synthetic oligonucleotide
  Target: LAMA2; (-) strand; PAM type: YTN; PAM sequence: CTC
atatcccgtgattttcacag

SEQ ID NO: 188345 - DNA, 20 bp, Artificial Sequence
  Description of Artificial Sequence: Synthetic oligonucleotide
  Target: LAMA2; (-) strand; PAM type: YTN; PAM sequence: CTC
cagtcaaactcatatcccgt

SEQ ID NO: 188346 - DNA, 20 bp, Artificial Sequence
  Description of Artificial Sequence: Synthetic oligonucleotide
  Target: LAMA2; (-) strand; PAM type: YTN; PAM sequence: TTC
tccagtcaaactcatatccc

SEQ ID NO: 188347 - DNA, 20 bp, Artificial Sequence
  Description of Artificial Sequence: Synthetic oligonucleotide
  Target: LAMA2; (-) strand; PAM type: YTN; PAM sequence: CTT
ctccagtcaaactcatatcc

SEQ ID NO: 188348 - DNA, 20 bp, Artificial Sequence
  Description of Artificial Sequence: Synthetic oligonucleotide
  Target: LAMA2; (-) strand; PAM type: YTN; PAM sequence: TTG
atcatagccaggaaaaccct

SEQ ID NO: 188349 - DNA, 20 bp, Artificial Sequence
  Description of Artificial Sequence: Synthetic oligonucleotide
  Target: LAMA2; (-) strand; PAM type: YTN; PAM sequence: CTA
gtataatcgaaaacagaaaa

SEQ ID NO: 188350 - DNA, 20 bp, Artificial Sequence
  Description of Artificial Sequence: Synthetic oligonucleotide
  Target: LAMA2; (-) strand; PAM type: YTN; PAM sequence: CTA
gaaaggtcagtgctagtata

SEQ ID NO: 188351 - DNA, 20 bp, Artificial Sequence
  Description of Artificial Sequence: Synthetic oligonucleotide
  Target: LAMA2; (-) strand; PAM type: YTN; PAM sequence: TTG
cctagaaaggtcagtgctag

SEQ ID NO: 188352 - DNA, 20 bp, Artificial Sequence
  Description of Artificial Sequence: Synthetic oligonucleotide
  Target: LAMA2; (-) strand; PAM type: YTN; PAM sequence: CTT
gcctagaaaggtcagtgcta

SEQ ID NO: 188353 - DNA, 20 bp, Artificial Sequence
  Description of Artificial Sequence: Synthetic oligonucleotide
  Target: LAMA2; (-) strand; PAM type: YTN; PAM sequence: TTA
gcgcttgcctagaaaggtca

SEQ ID NO: 188354 - DNA, 20 bp, Artificial Sequence
  Description of Artificial Sequence: Synthetic oligonucleotide
  Target: LAMA2; (-) strand; PAM type: YTN; PAM sequence: CTA
cacaattagcgcttgcctag

SEQ ID NO: 188355 - DNA, 20 bp, Artificial Sequence
  Description of Artificial Sequence: Synthetic oligonucleotide
  Target: LAMA2; (-) strand; PAM type: YTN; PAM sequence: TTC
tacacaattagcgcttgcct

SEQ ID NO: 188356 - DNA, 20 bp, Artificial Sequence
  Description of Artificial Sequence: Synthetic oligonucleotide
  Target: LAMA2; (-) strand; PAM type: YTN; PAM sequence: CTT
ctacacaattagcgcttgcc

SEQ ID NO: 188357 - DNA, 20 bp, Artificial Sequence
  Description of Artificial Sequence: Synthetic oligonucleotide
  Target: LAMA2; (-) strand; PAM type: YTN; PAM sequence: TTA
taaggggaaatagaacttct

SEQ ID NO: 188358 - DNA, 20 bp, Artificial Sequence
  Description of Artificial Sequence: Synthetic oligonucleotide
  Target: LAMA2; (-) strand; PAM type: YTN; PAM sequence: TTA
ataaagtggtatcgaattat

SEQ ID NO: 188359 - DNA, 20 bp, Artificial Sequence
  Description of Artificial Sequence: Synthetic oligonucleotide
  Target: LAMA2; (-) strand; PAM type: YTN; PAM sequence: CTT
aataaagtggtatcgaatta

SEQ ID NO: 188360 - DNA, 20 bp, Artificial Sequence
  Description of Artificial Sequence: Synthetic oligonucleotide
  Target: LAMA2; (-) strand; PAM type: YTN; PAM sequence: TTC
ttaataaagtggtatcgaat

SEQ ID NO: 188361 - DNA, 20 bp, Artificial Sequence
  Description of Artificial Sequence: Synthetic oligonucleotide
  Target: LAMA2; (-) strand; PAM type: YTN; PAM sequence: TTC
atgtcaaaaattcttaataa

SEQ ID NO: 188362 - DNA, 20 bp, Artificial Sequence
  Description of Artificial Sequence: Synthetic oligonucleotide
  Target: LAMA2; (-) strand; PAM type: YTN; PAM sequence: TTG
attcatgtcaaaaattctta

SEQ ID NO: 188363 - DNA, 20 bp, Artificial Sequence
  Description of Artificial Sequence: Synthetic oligonucleotide
  Target: LAMA2; (-) strand; PAM type: YTN; PAM sequence: CTA
aaaatggttgattcatgtca

SEQ ID NO: 188364 - DNA, 20 bp, Artificial Sequence
  Description of Artificial Sequence: Synthetic oligonucleotide
  Target: LAMA2; (-) strand; PAM type: YTN; PAM sequence: CTG
caacatctaaaaatggttga

SEQ ID NO: 188365 - DNA, 20 bp, Artificial Sequence
  Description of Artificial Sequence: Synthetic oligonucleotide
  Target: LAMA2; (-) strand; PAM type: YTN; PAM sequence: CTC
aactgcaacatctaaaaatg

SEQ ID NO: 188366 - DNA, 20 bp, Artificial Sequence
  Description of Artificial Sequence: Synthetic oligonucleotide
  Target: LAMA2; (-) strand; PAM type: YTN; PAM sequence: CTA
actcaactgcaacatctaaa

SEQ ID NO: 188367 - DNA, 20 bp, Artificial Sequence
  Description of Artificial Sequence: Synthetic oligonucleotide
  Target: LAMA2; (-) strand; PAM type: YTN; PAM sequence: TTC
taactcaactgcaacatcta

SEQ ID NO: 188368 - DNA, 20 bp, Artificial Sequence
  Description of Artificial Sequence: Synthetic oligonucleotide
  Target: LAMA2; (-) strand; PAM type: YTN; PAM sequence: TTT
ctaactcaactgcaacatct

SEQ ID NO: 188369 - DNA, 20 bp, Artificial Sequence
  Description of Artificial Sequence: Synthetic oligonucleotide
  Target: LAMA2; (-) strand; PAM type: YTN; PAM sequence: TTA
tgtttctaactcaactgcaa

SEQ ID NO: 188370 - DNA, 20 bp, Artificial Sequence
  Description of Artificial Sequence: Synthetic oligonucleotide
  Target: LAMA2; (-) strand; PAM type: YTN; PAM sequence: CTG
gttatgtttctaactcaact

SEQ ID NO: 188371 - DNA, 20 bp, Artificial Sequence
  Description of Artificial Sequence: Synthetic oligonucleotide
  Target: LAMA2; (-) strand; PAM type: YTN; PAM sequence: TTC
aaagaaaaagtaaaaaacaa

SEQ ID NO: 188372 - DNA, 20 bp, Artificial Sequence
  Description of Artificial Sequence: Synthetic oligonucleotide
  Target: LAMA2; (-) strand; PAM type: YTN; PAM sequence: TTT
caaagaaaaagtaaaaaaca

SEQ ID NO: 188373 - DNA, 20 bp, Artificial Sequence
  Description of Artificial Sequence: Synthetic oligonucleotide
  Target: LAMA2; (-) strand; PAM type: YTN; PAM sequence: CTA
tagaaaccacataagatttc

SEQ ID NO: 188374 - DNA, 20 bp, Artificial Sequence
  Description of Artificial Sequence: Synthetic oligonucleotide
  Target: LAMA2; (-) strand; PAM type: YTN; PAM sequence: CTA
caatcgagtatgctatagaa

SEQ ID NO: 188375 - DNA, 20 bp, Artificial Sequence
  Description of Artificial Sequence: Synthetic oligonucleotide
  Target: LAMA2; (-) strand; PAM type: YTN; PAM sequence: TTC
atactacaatcgagtatgct

SEQ ID NO: 188376 - DNA, 20 bp, Artificial Sequence
  Description of Artificial Sequence: Synthetic oligonucleotide
  Target: LAMA2; (-) strand; PAM type: YTN; PAM sequence: CTA
ttcatactacaatcgagtat

SEQ ID NO: 188377 - DNA, 20 bp, Artificial Sequence
  Description of Artificial Sequence: Synthetic oligonucleotide
  Target: LAMA2; (-) strand; PAM type: YTN; PAM sequence: CTG
aatcaatgctattcatacta

SEQ ID NO: 188378 - DNA, 20 bp, Artificial Sequence
  Description of Artificial Sequence: Synthetic oligonucleotide
  Target: LAMA2; (-) strand; PAM type: YTN; PAM sequence: TTG
ctgaatcaatgctattcata

SEQ ID NO: 188379 - DNA, 20 bp, Artificial Sequence
  Description of Artificial Sequence: Synthetic oligonucleotide
  Target: LAMA2; (-) strand; PAM type: YTN; PAM sequence: CTT
gctgaatcaatgctattcat

SEQ ID NO: 188380 - DNA, 20 bp, Artificial Sequence
  Description of Artificial Sequence: Synthetic oligonucleotide
  Target: LAMA2; (-) strand; PAM type: YTN; PAM sequence: TTC
ttgctgaatcaatgctattc

SEQ ID NO: 188381 - DNA, 20 bp, Artificial Sequence
  Description of Artificial Sequence: Synthetic oligonucleotide
  Target: LAMA2; (-) strand; PAM type: YTN; PAM sequence: TTG
gaatatcattcttgctgaat

SEQ ID NO: 188382 - DNA, 20 bp, Artificial Sequence
  Description of Artificial Sequence: Synthetic oligonucleotide
  Target: LAMA2; (-) strand; PAM type: YTN; PAM sequence: CTT
ggaatatcattcttgctgaa

SEQ ID NO: 188383 - DNA, 20 bp, Artificial Sequence
  Description of Artificial Sequence: Synthetic oligonucleotide
  Target: LAMA2; (-) strand; PAM type: YTN; PAM sequence: TTC
cttggaatatcattcttgct

SEQ ID NO: 188384 - DNA, 20 bp, Artificial Sequence
  Description of Artificial Sequence: Synthetic oligonucleotide
  Target: LAMA2; (-) strand; PAM type: YTN; PAM sequence: TTT
ccttggaatatcattcttgc

SEQ ID NO: 188385 - DNA, 20 bp, Artificial Sequence
  Description of Artificial Sequence: Synthetic oligonucleotide
  Target: LAMA2; (-) strand; PAM type: YTN; PAM sequence: CTA
aagaatttccttggaatatc

SEQ ID NO: 188386 - DNA, 20 bp, Artificial Sequence
  Description of Artificial Sequence: Synthetic oligonucleotide
  Target: LAMA2; (-) strand; PAM type: YTN; PAM sequence: TTA
aatatagctaaagaatttcc

SEQ ID NO: 188387 - DNA, 20 bp, Artificial Sequence
  Description of Artificial Sequence: Synthetic oligonucleotide
  Target: LAMA2; (-) strand; PAM type: YTN; PAM sequence: TTT
aaatatagctaaagaatttc

SEQ ID NO: 188388 - DNA, 20 bp, Artificial Sequence
  Description of Artificial Sequence: Synthetic oligonucleotide
  Target: LAMA2; (-) strand; PAM type: YTN; PAM sequence: TTT
taaatatagctaaagaattt

SEQ ID NO: 188389 - DNA, 20 bp, Artificial Sequence
  Description of Artificial Sequence: Synthetic oligonucleotide
  Target: LAMA2; (-) strand; PAM type: YTN; PAM sequence: TTC
gtcaattttaaatatagcta

SEQ ID NO: 188390 - DNA, 20 bp, Artificial Sequence
  Description of Artificial Sequence: Synthetic oligonucleotide
  Target: LAMA2; (-) strand; PAM type: YTN; PAM sequence: TTT
cgtcaattttaaatatagct

SEQ ID NO: 188391 - DNA, 20 bp, Artificial Sequence
  Description of Artificial Sequence: Synthetic oligonucleotide
  Target: LAMA2; (-) strand; PAM type: YTN; PAM sequence: CTA
tttcgtcaattttaaatata

SEQ ID NO: 188392 - DNA, 20 bp, Artificial Sequence
  Description of Artificial Sequence: Synthetic oligonucleotide
  Target: LAMA2; (-) strand; PAM type: YTN; PAM sequence: TTC
tatttcgtcaattttaaata

SEQ ID NO: 188393 - DNA, 20 bp, Artificial Sequence
  Description of Artificial Sequence: Synthetic oligonucleotide
  Target: LAMA2; (-) strand; PAM type: YTN; PAM sequence: TTG
catcattctatttcgtcaat

SEQ ID NO: 188394 - DNA, 20 bp, Artificial Sequence
  Description of Artificial Sequence: Synthetic oligonucleotide
  Target: LAMA2; (-) strand; PAM type: YTN; PAM sequence: TTG
attgcatcattctatttcgt

SEQ ID NO: 188395 - DNA, 20 bp, Artificial Sequence
  Description of Artificial Sequence: Synthetic oligonucleotide
  Target: LAMA2; (-) strand; PAM type: YTN; PAM sequence: TTT
gattgcatcattctatttcg

SEQ ID NO: 188396 - DNA, 20 bp, Artificial Sequence
  Description of Artificial Sequence: Synthetic oligonucleotide
  Target: LAMA2; (-) strand; PAM type: YTN; PAM sequence: TTT
tgattgcatcattctatttc

SEQ ID NO: 188397 - DNA, 20 bp, Artificial Sequence
  Description of Artificial Sequence: Synthetic oligonucleotide
  Target: LAMA2; (-) strand; PAM type: YTN; PAM sequence: CTG
aaatgcagaatcattttgat

SEQ ID NO: 188398 - DNA, 20 bp, Artificial Sequence
  Description of Artificial Sequence: Synthetic oligonucleotide
  Target: LAMA2; (-) strand; PAM type: YTN; PAM sequence: TTG
ctgaaatgcagaatcatttt

SEQ ID NO: 188399 - DNA, 20 bp, Artificial Sequence
  Description of Artificial Sequence: Synthetic oligonucleotide
  Target: LAMA2; (-) strand; PAM type: YTN; PAM sequence: CTT
gctgaaatgcagaatcattt

SEQ ID NO: 188400 - DNA, 20 bp, Artificial Sequence
  Description of Artificial Sequence: Synthetic oligonucleotide
  Target: LAMA2; (-) strand; PAM type: YTN; PAM sequence: CTG
ccttgctgaaatgcagaatc

SEQ ID NO: 188401 - DNA, 20 bp, Artificial Sequence
  Description of Artificial Sequence: Synthetic oligonucleotide
  Target: LAMA2; (-) strand; PAM type: YTN; PAM sequence: TTA
gacactgccttgctgaaatg

SEQ ID NO: 188402 - DNA, 20 bp, Artificial Sequence
  Description of Artificial Sequence: Synthetic oligonucleotide
  Target: LAMA2; (-) strand; PAM type: YTN; PAM sequence: TTT
agacactgccttgctgaaat

SEQ ID NO: 188403 - DNA, 20 bp, Artificial Sequence
  Description of Artificial Sequence: Synthetic oligonucleotide
  Target: LAMA2; (-) strand; PAM type: YTN; PAM sequence: TTT
tagacactgccttgctgaaa

SEQ ID NO: 188404 - DNA, 20 bp, Artificial Sequence
  Description of Artificial Sequence: Synthetic oligonucleotide
  Target: LAMA2; (-) strand; PAM type: YTN; PAM sequence: TTC
acaagaatatcagaaaacat

SEQ ID NO: 188405 - DNA, 20 bp, Artificial Sequence
  Description of Artificial Sequence: Synthetic oligonucleotide
  Target: LAMA2; (-) strand; PAM type: YTN; PAM sequence: TTA
ttcacaagaatatcagaaaa

SEQ ID NO: 188406 - DNA, 20 bp, Artificial Sequence
  Description of Artificial Sequence: Synthetic oligonucleotide
  Target: LAMA2; (-) strand; PAM type: YTN; PAM sequence: TTC
cacatattattcacaagaat

SEQ ID NO: 188407 - DNA, 20 bp, Artificial Sequence
  Description of Artificial Sequence: Synthetic oligonucleotide
  Target: LAMA2; (-) strand; PAM type: YTN; PAM sequence: TTT
ccacatattattcacaagaa

SEQ ID NO: 188408 - DNA, 20 bp, Artificial Sequence
  Description of Artificial Sequence: Synthetic oligonucleotide
  Target: LAMA2; (-) strand; PAM type: YTN; PAM sequence: TTC
agtttccacatattattcac

SEQ ID NO: 188409 - DNA, 20 bp, Artificial Sequence
  Description of Artificial Sequence: Synthetic oligonucleotide
  Target: LAMA2; (-) strand; PAM type: YTN; PAM sequence: CTT
cagtttccacatattattca

SEQ ID NO: 188410 - DNA, 20 bp, Artificial Sequence
  Description of Artificial Sequence: Synthetic oligonucleotide
  Target: LAMA2; (-) strand; PAM type: YTN; PAM sequence: TTA
tgcttcagtttccacatatt

SEQ ID NO: 188411 - DNA, 20 bp, Artificial Sequence
  Description of Artificial Sequence: Synthetic oligonucleotide
  Target: LAMA2; (-) strand; PAM type: YTN; PAM sequence: CTG
ccattatgcttcagtttcca

SEQ ID NO: 188412 - DNA, 20 bp, Artificial Sequence
  Description of Artificial Sequence: Synthetic oligonucleotide
  Target: LAMA2; (-) strand; PAM type: YTN; PAM sequence: TTA
cctgccattatgcttcagtt

SEQ ID NO: 188413 - DNA, 20 bp, Artificial Sequence
  Description of Artificial Sequence: Synthetic oligonucleotide
  Target: LAMA2; (-) strand; PAM type: YTN; PAM sequence: TTT
acctgccattatgcttcagt

SEQ ID NO: 188414 - DNA, 20 bp, Artificial Sequence
  Description of Artificial Sequence: Synthetic oligonucleotide
  Target: LAMA2; (-) strand; PAM type: YTN; PAM sequence: TTG
caatttacctgccattatgc

SEQ ID NO: 188415 - DNA, 20 bp, Artificial Sequence
  Description of Artificial Sequence: Synthetic oligonucleotide
  Target: LAMA2; (-) strand; PAM type: YTN; PAM sequence: TTC
aatcagttgcaatttacctg

SEQ ID NO: 188416 - DNA, 20 bp, Artificial Sequence
  Description of Artificial Sequence: Synthetic oligonucleotide
  Target: LAMA2; (-) strand; PAM type: YTN; PAM sequence: TTT
caatcagttgcaatttacct

SEQ ID NO: 188417 - DNA, 20 bp, Artificial Sequence
  Description of Artificial Sequence: Synthetic oligonucleotide
  Target: LAMA2; (-) strand; PAM type: YTN; PAM sequence: TTT
tcaatcagttgcaatttacc

SEQ ID NO: 188418 - DNA, 20 bp, Artificial Sequence
  Description of Artificial Sequence: Synthetic oligonucleotide
  Target: LAMA2; (-) strand; PAM type: YTN; PAM sequence: TTT
ttcaatcagttgcaatttac

SEQ ID NO: 188419 - DNA, 20 bp, Artificial Sequence
  Description of Artificial Sequence: Synthetic oligonucleotide
  Target: LAMA2; (-) strand; PAM type: YTN; PAM sequence: CTA
tttttcaatcagttgcaatt

SEQ ID NO: 188420 - DNA, 20 bp, Artificial Sequence
  Description of Artificial Sequence: Synthetic oligonucleotide
  Target: LAMA2; (-) strand; PAM type: YTN; PAM sequence: TTG
tgaactatttttcaatcagt

SEQ ID NO: 188421 - DNA, 20 bp, Artificial Sequence
  Description of Artificial Sequence: Synthetic oligonucleotide
  Target: LAMA2; (-) strand; PAM type: YTN; PAM sequence: TTT
gtgaactatttttcaatcag

SEQ ID NO: 188422 - DNA, 20 bp, Artificial Sequence
  Description of Artificial Sequence: Synthetic oligonucleotide
  Target: LAMA2; (-) strand; PAM type: YTN; PAM sequence: CTT
tgtgaactatttttcaatca

SEQ ID NO: 188423 - DNA, 20 bp, Artificial Sequence
  Description of Artificial Sequence: Synthetic oligonucleotide
  Target: LAMA2; (-) strand; PAM type: YTN; PAM sequence: TTC
tttgtgaactatttttcaat

SEQ ID NO: 188424 - DNA, 20 bp, Artificial Sequence
  Description of Artificial Sequence: Synthetic oligonucleotide
  Target: LAMA2; (-) strand; PAM type: YTN; PAM sequence: CTA
tgcaatattctttgtgaact

SEQ ID NO: 188425 - DNA, 20 bp, Artificial Sequence
  Description of Artificial Sequence: Synthetic oligonucleotide
  Target: LAMA2; (-) strand; PAM type: YTN; PAM sequence: TTA
atccactatgcaatattctt

SEQ ID NO: 188426 - DNA, 20 bp, Artificial Sequence
  Description of Artificial Sequence: Synthetic oligonucleotide
  Target: LAMA2; (-) strand; PAM type: YTN; PAM sequence: CTT
aatccactatgcaatattct

SEQ ID NO: 188427 - DNA, 20 bp, Artificial Sequence
  Description of Artificial Sequence: Synthetic oligonucleotide
  Target: LAMA2; (-) strand; PAM type: YTN; PAM sequence: TTG
accttaatccactatgcaat

SEQ ID NO: 188428 - DNA, 20 bp, Artificial Sequence
  Description of Artificial Sequence: Synthetic oligonucleotide
  Target: LAMA2; (-) strand; PAM type: YTN; PAM sequence: TTC
cggattgaccttaatccact

SEQ ID NO: 188429 - DNA, 20 bp, Artificial Sequence
  Description of Artificial Sequence: Synthetic oligonucleotide
  Target: LAMA2; (-) strand; PAM type: YTN; PAM sequence: TTT
ccggattgaccttaatccac

SEQ ID NO: 188430 - DNA, 20 bp, Artificial Sequence
  Description of Artificial Sequence: Synthetic oligonucleotide
  Target: LAMA2; (-) strand; PAM type: YTN; PAM sequence: CTT
tccggattgaccttaatcca

SEQ ID NO: 188431 - DNA, 20 bp, Artificial Sequence
  Description of Artificial Sequence: Synthetic oligonucleotide
  Target: LAMA2; (-) strand; PAM type: YTN; PAM sequence: TTC
tttccggattgaccttaatc

SEQ ID NO: 188432 - DNA, 20 bp, Artificial Sequence
  Description of Artificial Sequence: Synthetic oligonucleotide
  Target: LAMA2; (-) strand; PAM type: YTN; PAM sequence: CTT
ctttccggattgaccttaat

SEQ ID NO: 188433 - DNA, 20 bp, Artificial Sequence
  Description of Artificial Sequence: Synthetic oligonucleotide
  Target: LAMA2; (-) strand; PAM type: YTN; PAM sequence: CTA
gagacttctttccggattga

SEQ ID NO: 188434 - DNA, 20 bp, Artificial Sequence
  Description of Artificial Sequence: Synthetic oligonucleotide
  Target: LAMA2; (-) strand; PAM type: YTN; PAM sequence: CTG
ctagagacttctttccggat

SEQ ID NO: 188435 - DNA, 20 bp, Artificial Sequence
  Description of Artificial Sequence: Synthetic oligonucleotide
  Target: LAMA2; (-) strand; PAM type: YTN; PAM sequence: TTG
cactgctagagacttctttc

SEQ ID NO: 188436 - DNA, 20 bp, Artificial Sequence
  Description of Artificial Sequence: Synthetic oligonucleotide
  Target: LAMA2; (-) strand; PAM type: YTN; PAM sequence: CTG
ttgcactgctagagacttct

SEQ ID NO: 188437 - DNA, 20 bp, Artificial Sequence
  Description of Artificial Sequence: Synthetic oligonucleotide
  Target: LAMA2; (-) strand; PAM type: YTN; PAM sequence: CTC
tgttgcactgctagagactt

SEQ ID NO: 188438 - DNA, 20 bp, Artificial Sequence
  Description of Artificial Sequence: Synthetic oligonucleotide
  Target: LAMA2; (-) strand; PAM type: YTN; PAM sequence: TTG
agtataagaaaacctctgtt

SEQ ID NO: 188439 - DNA, 20 bp, Artificial Sequence
  Description of Artificial Sequence: Synthetic oligonucleotide
  Target: LAMA2; (-) strand; PAM type: YTN; PAM sequence: TTA
ccaagatagttgagtataag

SEQ ID NO: 188440 - DNA, 20 bp, Artificial Sequence
  Description of Artificial Sequence: Synthetic oligonucleotide
  Target: LAMA2; (-) strand; PAM type: YTN; PAM sequence: TTC
catcaagccattaccaagat

SEQ ID NO: 188441 - DNA, 20 bp, Artificial Sequence
  Description of Artificial Sequence: Synthetic oligonucleotide
  Target: LAMA2; (-) strand; PAM type: YTN; PAM sequence: TTT
ccatcaagccattaccaaga

SEQ ID NO: 188442 - DNA, 20 bp, Artificial Sequence
  Description of Artificial Sequence: Synthetic oligonucleotide
  Target: LAMA2; (-) strand; PAM type: YTN; PAM sequence: TTT
tccatcaagccattaccaag

SEQ ID NO: 188443 - DNA, 20 bp, Artificial Sequence
  Description of Artificial Sequence: Synthetic oligonucleotide
  Target: LAMA2; (-) strand; PAM type: YTN; PAM sequence: TTA
cattttccatcaagccatta

SEQ ID NO: 188444 - DNA, 20 bp, Artificial Sequence
  Description of Artificial Sequence: Synthetic oligonucleotide
  Target: LAMA2; (-) strand; PAM type: YTN; PAM sequence: TTT
acattttccatcaagccatt

SEQ ID NO: 188445 - DNA, 20 bp, Artificial Sequence
  Description of Artificial Sequence: Synthetic oligonucleotide
  Target: LAMA2; (-) strand; PAM type: YTN; PAM sequence: TTT
tacattttccatcaagccat

SEQ ID NO: 188446 - DNA, 20 bp, Artificial Sequence
  Description of Artificial Sequence: Synthetic oligonucleotide
  Target: LAMA2; (-) strand; PAM type: YTN; PAM sequence: TTG
gattttacattttccatcaa

SEQ ID NO: 188447 - DNA, 20 bp, Artificial Sequence
  Description of Artificial Sequence: Synthetic oligonucleotide
  Target: LAMA2; (-) strand; PAM type: YTN; PAM sequence: CTT
ggattttacattttccatca

SEQ ID NO: 188448 - DNA, 20 bp, Artificial Sequence
  Description of Artificial Sequence: Synthetic oligonucleotide
  Target: LAMA2; (-) strand; PAM type: YTN; PAM sequence: CTG
ataagcttggattttacatt

SEQ ID NO: 188449 - DNA, 20 bp, Artificial Sequence
  Description of Artificial Sequence: Synthetic oligonucleotide
  Target: LAMA2; (-) strand; PAM type: YTN; PAM sequence: TTC
tgataagcttggattttaca

SEQ ID NO: 188450 - DNA, 20 bp, Artificial Sequence
  Description of Artificial Sequence: Synthetic oligonucleotide
  Target: LAMA2; (-) strand; PAM type: YTN; PAM sequence: TTG
gaccacatgcagttctgata

SEQ ID NO: 188451 - DNA, 20 bp, Artificial Sequence
  Description of Artificial Sequence: Synthetic oligonucleotide
  Target: LAMA2; (-) strand; PAM type: YTN; PAM sequence: TTT
ggaccacatgcagttctgat

SEQ ID NO: 188452 - DNA, 20 bp, Artificial Sequence
  Description of Artificial Sequence: Synthetic oligonucleotide
  Target: LAMA2; (-) strand; PAM type: YTN; PAM sequence: TTT
tggaccacatgcagttctga

SEQ ID NO: 188453 - DNA, 20 bp, Artificial Sequence
  Description of Artificial Sequence: Synthetic oligonucleotide
  Target: LAMA2; (-) strand; PAM type: YTN; PAM sequence: CTA
tcaattttggaccacatgca

SEQ ID NO: 188454 - DNA, 20 bp, Artificial Sequence
  Description of Artificial Sequence: Synthetic oligonucleotide
  Target: LAMA2; (-) strand; PAM type: YTN; PAM sequence: CTC
tatcaattttggaccacatg

SEQ ID NO: 188455 - DNA, 20 bp, Artificial Sequence
  Description of Artificial Sequence: Synthetic oligonucleotide
  Target: LAMA2; (-) strand; PAM type: YTN; PAM sequence: TTA
gccacctctatcaattttgg

SEQ ID NO: 188456 - DNA, 20 bp, Artificial Sequence
  Description of Artificial Sequence: Synthetic oligonucleotide
  Target: LAMA2; (-) strand; PAM type: YTN; PAM sequence: CTT
agccacctctatcaattttg

SEQ ID NO: 188457 - DNA, 20 bp, Artificial Sequence
  Description of Artificial Sequence: Synthetic oligonucleotide
  Target: LAMA2; (-) strand; PAM type: YTN; PAM sequence: TTA
gtaaccagcttagccacctc

SEQ ID NO: 188458 - DNA, 20 bp, Artificial Sequence
  Description of Artificial Sequence: Synthetic oligonucleotide
  Target: LAMA2; (-) strand; PAM type: YTN; PAM sequence: TTG
ttagtaaccagcttagccac

SEQ ID NO: 188459 - DNA, 20 bp, Artificial Sequence
  Description of Artificial Sequence: Synthetic oligonucleotide
  Target: LAMA2; (-) strand; PAM type: YTN; PAM sequence: CTT
gttagtaaccagcttagcca

SEQ ID NO: 188460 - DNA, 20 bp, Artificial Sequence
  Description of Artificial Sequence: Synthetic oligonucleotide
  Target: LAMA2; (-) strand; PAM type: YTN; PAM sequence: CTG
aacttgttagtaaccagctt

SEQ ID NO: 188461 - DNA, 20 bp, Artificial Sequence
  Description of Artificial Sequence: Synthetic oligonucleotide
  Target: LAMA2; (-) strand; PAM type: YTN; PAM sequence: TTC
tgaacttgttagtaaccagc

SEQ ID NO: 188462 - DNA, 20 bp, Artificial Sequence
  Description of Artificial Sequence: Synthetic oligonucleotide
  Target: LAMA2; (-) strand; PAM type: YTN; PAM sequence: TTT
ctgaacttgttagtaaccag

SEQ ID NO: 188463 - DNA, 20 bp, Artificial Sequence
  Description of Artificial Sequence: Synthetic oligonucleotide
  Target: LAMA2; (-) strand; PAM type: YTN; PAM sequence: TTA
aaatttctgaacttgttagt

SEQ ID NO: 188464 - DNA, 20 bp, Artificial Sequence
  Description of Artificial Sequence: Synthetic oligonucleotide
  Target: LAMA2; (-) strand; PAM type: YTN; PAM sequence: TTT
aaaatttctgaacttgttag

SEQ ID NO: 188465 - DNA, 20 bp, Artificial Sequence
  Description of Artificial Sequence: Synthetic oligonucleotide
  Target: LAMA2; (-) strand; PAM type: YTN; PAM sequence: CTT
taaaatttctgaacttgtta

SEQ ID NO: 188466 - DNA, 20 bp, Artificial Sequence
  Description of Artificial Sequence: Synthetic oligonucleotide
  Target: LAMA2; (-) strand; PAM type: YTN; PAM sequence: CTA
tagagacctttaaaatttct

SEQ ID NO: 188467 - DNA, 20 bp, Artificial Sequence
  Description of Artificial Sequence: Synthetic oligonucleotide
  Target: LAMA2; (-) strand; PAM type: YTN; PAM sequence: TTC
atggtcaaggctatagagac

SEQ ID NO: 188468 - DNA, 20 bp, Artificial Sequence
  Description of Artificial Sequence: Synthetic oligonucleotide
  Target: LAMA2; (-) strand; PAM type: YTN; PAM sequence: TTC
atgtaggtgccattcatggt

SEQ ID NO: 188469 - DNA, 20 bp, Artificial Sequence
  Description of Artificial Sequence: Synthetic oligonucleotide
  Target: LAMA2; (-) strand; PAM type: YTN; PAM sequence: CTT
catgtaggtgccattcatgg

SEQ ID NO: 188470 - DNA, 20 bp, Artificial Sequence
  Description of Artificial Sequence: Synthetic oligonucleotide
  Target: LAMA2; (-) strand; PAM type: YTN; PAM sequence: TTA
acatgtggatatgaataata

SEQ ID NO: 188471 - DNA, 20 bp, Artificial Sequence
  Description of Artificial Sequence: Synthetic oligonucleotide
  Target: LAMA2; (-) strand; PAM type: YTN; PAM sequence: TTT
aacatgtggatatgaataat

SEQ ID NO: 188472 - DNA, 20 bp, Artificial Sequence
  Description of Artificial Sequence: Synthetic oligonucleotide
  Target: LAMA2; (-) strand; PAM type: YTN; PAM sequence: TTT
taacatgtggatatgaataa

SEQ ID NO: 188473 - DNA, 20 bp, Artificial Sequence
  Description of Artificial Sequence: Synthetic oligonucleotide
  Target: LAMA2; (-) strand; PAM type: YTN; PAM sequence: TTT
ttaacatgtggatatgaata

SEQ ID NO: 188474 - DNA, 20 bp, Artificial Sequence
  Description of Artificial Sequence: Synthetic oligonucleotide
  Target: LAMA2; (-) strand; PAM type: YTN; PAM sequence: TTT
tttaacatgtggatatgaat

SEQ ID NO: 188475 - DNA, 20 bp, Artificial Sequence
  Description of Artificial Sequence: Synthetic oligonucleotide
  Target: LAMA2; (-) strand; PAM type: YTN; PAM sequence: TTT
ttttaacatgtggatatgaa

SEQ ID NO: 188476 - DNA, 20 bp, Artificial Sequence
  Description of Artificial Sequence: Synthetic oligonucleotide
  Target: LAMA2; (-) strand; PAM type: YTN; PAM sequence: TTT
tttttaacatgtggatatga

SEQ ID NO: 188477 - DNA, 20 bp, Artificial Sequence
  Description of Artificial Sequence: Synthetic oligonucleotide
  Target: LAMA2; (-) strand; PAM type: YTN; PAM sequence: TTT
ttttttaacatgtggatatg

SEQ ID NO: 188478 - DNA, 20 bp, Artificial Sequence
  Description of Artificial Sequence: Synthetic oligonucleotide
  Target: LAMA2; (-) strand; PAM type: YTN; PAM sequence: TTT
tttttttaacatgtggatat

SEQ ID NO: 188479 - DNA, 20 bp, Artificial Sequence
  Description of Artificial Sequence: Synthetic oligonucleotide
  Target: LAMA2; (-) strand; PAM type: YTN; PAM sequence: TTT
ttttttttaacatgtggata

SEQ ID NO: 188480 - DNA, 20 bp, Artificial Sequence
  Description of Artificial Sequence: Synthetic oligonucleotide
  Target: LAMA2; (-) strand; PAM type: YTN; PAM sequence: CTT
tttttttttaacatgtggat

SEQ ID NO: 188481 - DNA, 20 bp, Artificial Sequence
  Description of Artificial Sequence: Synthetic oligonucleotide
  Target: LAMA2; (-) strand; PAM type: YTN; PAM sequence: TTC
cagaagagcacaaatggact

SEQ ID NO: 188482 - DNA, 20 bp, Artificial Sequence
  Description of Artificial Sequence: Synthetic oligonucleotide
  Target: LAMA2; (-) strand; PAM type: YTN; PAM sequence: TTT
ccagaagagcacaaatggac

SEQ ID NO: 188483 - DNA, 20 bp, Artificial Sequence
  Description of Artificial Sequence: Synthetic oligonucleotide
  Target: LAMA2; (-) strand; PAM type: YTN; PAM sequence: CTA
atttccagaagagcacaaat

SEQ ID NO: 188484 - DNA, 20 bp, Artificial Sequence
  Description of Artificial Sequence: Synthetic oligonucleotide
  Target: LAMA2; (-) strand; PAM type: YTN; PAM sequence: CTA
aacatataaacaatgtaact

SEQ ID NO: 188485 - DNA, 20 bp, Artificial Sequence
  Description of Artificial Sequence: Synthetic oligonucleotide
  Target: LAMA2; (-) strand; PAM type: YTN; PAM sequence: TTC
ctaaacatataaacaatgta

SEQ ID NO: 188486 - DNA, 20 bp, Artificial Sequence
  Description of Artificial Sequence: Synthetic oligonucleotide
  Target: LAMA2; (-) strand; PAM type: YTN; PAM sequence: TTC
attcctaaacatataaacaa

SEQ ID NO: 188487 - DNA, 20 bp, Artificial Sequence
  Description of Artificial Sequence: Synthetic oligonucleotide
  Target: LAMA2; (-) strand; PAM type: YTN; PAM sequence: TTC
atattcattcctaaacatat

SEQ ID NO: 188488 - DNA, 20 bp, Artificial Sequence
  Description of Artificial Sequence: Synthetic oligonucleotide
  Target: LAMA2; (-) strand; PAM type: YTN; PAM sequence: CTT
catattcattcctaaacata

SEQ ID NO: 188489 - DNA, 20 bp, Artificial Sequence
  Description of Artificial Sequence: Synthetic oligonucleotide
  Target: LAMA2; (-) strand; PAM type: YTN; PAM sequence: CTG
tcttcatattcattcctaaa

SEQ ID NO: 188490 - DNA, 20 bp, Artificial Sequence
  Description of Artificial Sequence: Synthetic oligonucleotide
  Target: LAMA2; (-) strand; PAM type: YTN; PAM sequence: TTC
ctgtcttcatattcattcct

SEQ ID NO: 188491 - DNA, 20 bp, Artificial Sequence
  Description of Artificial Sequence: Synthetic oligonucleotide
  Target: LAMA2; (-) strand; PAM type: YTN; PAM sequence: CTT
cctgtcttcatattcattcc

SEQ ID NO: 188492 - DNA, 20 bp, Artificial Sequence
  Description of Artificial Sequence: Synthetic oligonucleotide
  Target: LAMA2; (-) strand; PAM type: YTN; PAM sequence: CTC
ttcctgtcttcatattcatt

SEQ ID NO: 188493 - DNA, 20 bp, Artificial Sequence
  Description of Artificial Sequence: Synthetic oligonucleotide
  Target: LAMA2; (-) strand; PAM type: YTN; PAM sequence: TTC
tcttcctgtcttcatattca

SEQ ID NO: 188494 - DNA, 20 bp, Artificial Sequence
  Description of Artificial Sequence: Synthetic oligonucleotide
  Target: LAMA2; (-) strand; PAM type: YTN; PAM sequence: TTT
ctcttcctgtcttcatattc

SEQ ID NO: 188495 - DNA, 20 bp, Artificial Sequence
  Description of Artificial Sequence: Synthetic oligonucleotide
  Target: LAMA2; (-) strand; PAM type: YTN; PAM sequence: CTT
tctcttcctgtcttcatatt

SEQ ID NO: 188496 - DNA, 20 bp, Artificial Sequence
  Description of Artificial Sequence: Synthetic oligonucleotide
  Target: LAMA2; (-) strand; PAM type: YTN; PAM sequence: TTC
agagtggcctttctcttcct

SEQ ID NO: 188497 - DNA, 20 bp, Artificial Sequence
  Description of Artificial Sequence: Synthetic oligonucleotide
  Target: LAMA2; (-) strand; PAM type: YTN; PAM sequence: CTG
caattcagagtggcctttct

SEQ ID NO: 188498 - DNA, 20 bp, Artificial Sequence
  Description of Artificial Sequence: Synthetic oligonucleotide
  Target: LAMA2; (-) strand; PAM type: YTN; PAM sequence: TTG
ctgcaattcagagtggcctt

SEQ ID NO: 188499 - DNA, 20 bp, Artificial Sequence
  Description of Artificial Sequence: Synthetic oligonucleotide
  Target: LAMA2; (-) strand; PAM type: YTN; PAM sequence: CTT
gctgcaattcagagtggcct

SEQ ID NO: 188500 - DNA, 20 bp, Artificial Sequence
  Description of Artificial Sequence: Synthetic oligonucleotide
  Target: LAMA2; (-) strand; PAM type: YTN; PAM sequence: TTC
atatcgaacttgctgcaatt

SEQ ID NO: 188501 - DNA, 20 bp, Artificial Sequence
  Description of Artificial Sequence: Synthetic oligonucleotide
  Target: LAMA2; (-) strand; PAM type: YTN; PAM sequence: CTA
tatgttcatatcgaacttgc

SEQ ID NO: 188502 - DNA, 20 bp, Artificial Sequence
  Description of Artificial Sequence: Synthetic oligonucleotide
  Target: LAMA2; (-) strand; PAM type: YTN; PAM sequence: TTA
cactatatgttcatatcgaa

SEQ ID NO: 188503 - DNA, 20 bp, Artificial Sequence
  Description of Artificial Sequence: Synthetic oligonucleotide
  Target: LAMA2; (-) strand; PAM type: YTN; PAM sequence: TTG
tcaccatattacactatatg

SEQ ID NO: 188504 - DNA, 20 bp, Artificial Sequence
  Description of Artificial Sequence: Synthetic oligonucleotide
  Target: LAMA2; (-) strand; PAM type: YTN; PAM sequence: TTT
gtcaccatattacactatat

SEQ ID NO: 188505 - DNA, 20 bp, Artificial Sequence
  Description of Artificial Sequence: Synthetic oligonucleotide
  Target: LAMA2; (-) strand; PAM type: YTN; PAM sequence: TTT
tgtcaccatattacactata

SEQ ID NO: 188506 - DNA, 20 bp, Artificial Sequence
  Description of Artificial Sequence: Synthetic oligonucleotide
  Target: LAMA2; (-) strand; PAM type: YTN; PAM sequence: TTT
ttgtcaccatattacactat

SEQ ID NO: 188507 - DNA, 20 bp, Artificial Sequence
  Description of Artificial Sequence: Synthetic oligonucleotide
  Target: LAMA2; (-) strand; PAM type: YTN; PAM sequence: TTT
tttgtcaccatattacacta

SEQ ID NO: 188508 - DNA, 20 bp, Artificial Sequence
  Description of Artificial Sequence: Synthetic oligonucleotide
  Target: LAMA2; (-) strand; PAM type: YTN; PAM sequence: CTT
ttttgtcaccatattacact

SEQ ID NO: 188509 - DNA, 20 bp, Artificial Sequence
  Description of Artificial Sequence: Synthetic oligonucleotide
  Target: LAMA2; (-) strand; PAM type: YTN; PAM sequence: TTG
tgtaaaagtgagccaacctt

SEQ ID NO: 188510 - DNA, 20 bp, Artificial Sequence
  Description of Artificial Sequence: Synthetic oligonucleotide
  Target: LAMA2; (-) strand; PAM type: YTN; PAM sequence: TTT
gtgtaaaagtgagccaacct

SEQ ID NO: 188511 - DNA, 20 bp, Artificial Sequence
  Description of Artificial Sequence: Synthetic oligonucleotide
  Target: LAMA2; (-) strand; PAM type: YTN; PAM sequence: TTT
tgtgtaaaagtgagccaacc

SEQ ID NO: 188512 - DNA, 20 bp, Artificial Sequence
  Description of Artificial Sequence: Synthetic oligonucleotide
  Target: LAMA2; (-) strand; PAM type: YTN; PAM sequence: CTA
tgagttttgtgtaaaagtga

SEQ ID NO: 188513 - DNA, 20 bp, Artificial Sequence
  Description of Artificial Sequence: Synthetic oligonucleotide
  Target: LAMA2; (-) strand; PAM type: YTN; PAM sequence: TTC
tatgagttttgtgtaaaagt

SEQ ID NO: 188514 - DNA, 20 bp, Artificial Sequence
  Description of Artificial Sequence: Synthetic oligonucleotide
  Target: LAMA2; (-) strand; PAM type: YTN; PAM sequence: CTT
ctatgagttttgtgtaaaag

SEQ ID NO: 188515 - DNA, 20 bp, Artificial Sequence
  Description of Artificial Sequence: Synthetic oligonucleotide
  Target: LAMA2; (-) strand; PAM type: YTN; PAM sequence: CTA
tgtgcttctatgagttttgt

SEQ ID NO: 188516 - DNA, 20 bp, Artificial Sequence
  Description of Artificial Sequence: Synthetic oligonucleotide
  Target: LAMA2; (-) strand; PAM type: YTN; PAM sequence: TTA
agcaacagacctatgtgctt

SEQ ID NO: 188517 - DNA, 20 bp, Artificial Sequence
  Description of Artificial Sequence: Synthetic oligonucleotide
  Target: LAMA2; (-) strand; PAM type: YTN; PAM sequence: TTG
tcaatgaaatacccaaatgt

SEQ ID NO: 188518 - DNA, 20 bp, Artificial Sequence
  Description of Artificial Sequence: Synthetic oligonucleotide
  Target: LAMA2; (-) strand; PAM type: YTN; PAM sequence: TTT
gtcaatgaaatacccaaatg

SEQ ID NO: 188519 - DNA, 20 bp, Artificial Sequence
  Description of Artificial Sequence: Synthetic oligonucleotide
  Target: LAMA2; (-) strand; PAM type: YTN; PAM sequence: CTA
cacccatttgtcaatgaaat

SEQ ID NO: 188520 - DNA, 20 bp, Artificial Sequence
  Description of Artificial Sequence: Synthetic oligonucleotide
  Target: LAMA2; (-) strand; PAM type: YTN; PAM sequence: CTG
catctacacccatttgtcaa

SEQ ID NO: 188521 - DNA, 20 bp, Artificial Sequence
  Description of Artificial Sequence: Synthetic oligonucleotide
  Target: LAMA2; (-) strand; PAM type: YTN; PAM sequence: CTC
tgcatctacacccatttgtc

SEQ ID NO: 188522 - DNA, 20 bp, Artificial Sequence
  Description of Artificial Sequence: Synthetic oligonucleotide
  Target: LAMA2; (-) strand; PAM type: YTN; PAM sequence: TTC
tctgcatctacacccatttg

SEQ ID NO: 188523 - DNA, 20 bp, Artificial Sequence
  Description of Artificial Sequence: Synthetic oligonucleotide
  Target: LAMA2; (-) strand; PAM type: YTN; PAM sequence: CTT
ctctgcatctacacccattt

SEQ ID NO: 188524 - DNA, 20 bp, Artificial Sequence
  Description of Artificial Sequence: Synthetic oligonucleotide
  Target: LAMA2; (-) strand; PAM type: YTN; PAM sequence: CTC
ccttctctgcatctacaccc

SEQ ID NO: 188525 - DNA, 20 bp, Artificial Sequence
  Description of Artificial Sequence: Synthetic oligonucleotide
  Target: LAMA2; (-) strand; PAM type: YTN; PAM sequence: CTC
tcccttctctgcatctacac

SEQ ID NO: 188526 - DNA, 20 bp, Artificial Sequence
  Description of Artificial Sequence: Synthetic oligonucleotide
  Target: LAMA2; (-) strand; PAM type: YTN; PAM sequence: CTG
ctctcccttctctgcatcta

SEQ ID NO: 188527 - DNA, 20 bp, Artificial Sequence
  Description of Artificial Sequence: Synthetic oligonucleotide
  Target: LAMA2; (-) strand; PAM type: YTN; PAM sequence: TTC
tgctctcccttctctgcatc

SEQ ID NO: 188528 - DNA, 20 bp, Artificial Sequence
  Description of Artificial Sequence: Synthetic oligonucleotide
  Target: LAMA2; (-) strand; PAM type: YTN; PAM sequence: TTA
accattctgctctcccttct

SEQ ID NO: 188529 - DNA, 20 bp, Artificial Sequence
  Description of Artificial Sequence: Synthetic oligonucleotide
  Target: LAMA2; (-) strand; PAM type: YTN; PAM sequence: CTT
aaccattctgctctcccttc

SEQ ID NO: 188530 - DNA, 20 bp, Artificial Sequence
  Description of Artificial Sequence: Synthetic oligonucleotide
  Target: LAMA2; (-) strand; PAM type: YTN; PAM sequence: CTC
ttaaccattctgctctccct

SEQ ID NO: 188531 - DNA, 20 bp, Artificial Sequence
  Description of Artificial Sequence: Synthetic oligonucleotide
  Target: LAMA2; (-) strand; PAM type: YTN; PAM sequence: CTC
agactcttaaccattctgct

SEQ ID NO: 188532 - DNA, 20 bp, Artificial Sequence
  Description of Artificial Sequence: Synthetic oligonucleotide
  Target: LAMA2; (-) strand; PAM type: YTN; PAM sequence: TTC
tcagactcttaaccattctg

SEQ ID NO: 188533 - DNA, 20 bp, Artificial Sequence
  Description of Artificial Sequence: Synthetic oligonucleotide
  Target: LAMA2; (-) strand; PAM type: YTN; PAM sequence: CTT
ctcagactcttaaccattct

SEQ ID NO: 188534 - DNA, 20 bp, Artificial Sequence
  Description of Artificial Sequence: Synthetic oligonucleotide
  Target: LAMA2; (-) strand; PAM type: YTN; PAM sequence: CTG
aaaatcttctcagactctta

SEQ ID NO: 188535 - DNA, 20 bp, Artificial Sequence
  Description of Artificial Sequence: Synthetic oligonucleotide
  Target: LAMA2; (-) strand; PAM type: YTN; PAM sequence: TTC
tgaaaatcttctcagactct

SEQ ID NO: 188536 - DNA, 20 bp, Artificial Sequence
  Description of Artificial Sequence: Synthetic oligonucleotide
  Target: LAMA2; (-) strand; PAM type: YTN; PAM sequence: CTT
ctgaaaatcttctcagactc

SEQ ID NO: 188537 - DNA, 20 bp, Artificial Sequence
  Description of Artificial Sequence: Synthetic oligonucleotide
  Target: LAMA2; (-) strand; PAM type: YTN; PAM sequence: CTC
ttctgaaaatcttctcagac

SEQ ID NO: 188538 - DNA, 20 bp, Artificial Sequence
  Description of Artificial Sequence: Synthetic oligonucleotide
  Target: LAMA2; (-) strand; PAM type: YTN; PAM sequence: TTC
ctcttctgaaaatcttctca

SEQ ID NO: 188539 - DNA, 20 bp, Artificial Sequence
  Description of Artificial Sequence: Synthetic oligonucleotide
  Target: LAMA2; (-) strand; PAM type: YTN; PAM sequence: TTG
ggacattcctcttctgaaaa

SEQ ID NO: 188540 - DNA, 20 bp, Artificial Sequence
  Description of Artificial Sequence: Synthetic oligonucleotide
  Target: LAMA2; (-) strand; PAM type: YTN; PAM sequence: CTT
gggacattcctcttctgaaa

SEQ ID NO: 188541 - DNA, 20 bp, Artificial Sequence
  Description of Artificial Sequence: Synthetic oligonucleotide
  Target: LAMA2; (-) strand; PAM type: YTN; PAM sequence: TTA
cttgggacattcctcttctg

SEQ ID NO: 188542 - DNA, 20 bp, Artificial Sequence
  Description of Artificial Sequence: Synthetic oligonucleotide
  Target: LAMA2; (-) strand; PAM type: YTN; PAM sequence: TTT
acttgggacattcctcttct

SEQ ID NO: 188543 - DNA, 20 bp, Artificial Sequence
  Description of Artificial Sequence: Synthetic oligonucleotide
  Target: LAMA2; (-) strand; PAM type: YTN; PAM sequence: TTT
tacttgggacattcctcttc

SEQ ID NO: 188544 - DNA, 20 bp, Artificial Sequence
  Description of Artificial Sequence: Synthetic oligonucleotide
  Target: LAMA2; (-) strand; PAM type: YTN; PAM sequence: TTC
agatggaaagattttacttg

SEQ ID NO: 188545 - DNA, 20 bp, Artificial Sequence
  Description of Artificial Sequence: Synthetic oligonucleotide
  Target: LAMA2; (-) strand; PAM type: YTN; PAM sequence: TTG
ttcagatggaaagattttac

SEQ ID NO: 188546 - DNA, 20 bp, Artificial Sequence
  Description of Artificial Sequence: Synthetic oligonucleotide
  Target: LAMA2; (-) strand; PAM type: YTN; PAM sequence: CTT
gttcagatggaaagatttta

SEQ ID NO: 188547 - DNA, 20 bp, Artificial Sequence
  Description of Artificial Sequence: Synthetic oligonucleotide
  Target: LAMA2; (-) strand; PAM type: YTN; PAM sequence: TTC
cttgttcagatggaaagatt

SEQ ID NO: 188548 - DNA, 20 bp, Artificial Sequence
  Description of Artificial Sequence: Synthetic oligonucleotide
  Target: LAMA2; (-) strand; PAM type: YTN; PAM sequence: TTT
ccttgttcagatggaaagat

SEQ ID NO: 188549 - DNA, 20 bp, Artificial Sequence
  Description of Artificial Sequence: Synthetic oligonucleotide
  Target: LAMA2; (-) strand; PAM type: YTN; PAM sequence: CTT
tccttgttcagatggaaaga

SEQ ID NO: 188550 - DNA, 20 bp, Artificial Sequence
  Description of Artificial Sequence: Synthetic oligonucleotide
  Target: LAMA2; (-) strand; PAM type: YTN; PAM sequence: CTA
aatctttccttgttcagatg

SEQ ID NO: 188551 - DNA, 20 bp, Artificial Sequence
  Description of Artificial Sequence: Synthetic oligonucleotide
  Target: LAMA2; (-) strand; PAM type: YTN; PAM sequence: TTC
cctaaatctttccttgttca

SEQ ID NO: 188552 - DNA, 20 bp, Artificial Sequence
  Description of Artificial Sequence: Synthetic oligonucleotide
  Target: LAMA2; (-) strand; PAM type: YTN; PAM sequence: CTT
ccctaaatctttccttgttc

SEQ ID NO: 188553 - DNA, 20 bp, Artificial Sequence
  Description of Artificial Sequence: Synthetic oligonucleotide
  Target: LAMA2; (-) strand; PAM type: YTN; PAM sequence: TTG
ccttccctaaatctttcctt

SEQ ID NO: 188554 - DNA, 20 bp, Artificial Sequence
  Description of Artificial Sequence: Synthetic oligonucleotide
  Target: LAMA2; (-) strand; PAM type: YTN; PAM sequence: TTA
tgattgccttccctaaatct

SEQ ID NO: 188555 - DNA, 20 bp, Artificial Sequence
  Description of Artificial Sequence: Synthetic oligonucleotide
  Target: LAMA2; (-) strand; PAM type: YTN; PAM sequence: CTT
atgattgccttccctaaatc

SEQ ID NO: 188556 - DNA, 20 bp, Artificial Sequence
  Description of Artificial Sequence: Synthetic oligonucleotide
  Target: LAMA2; (-) strand; PAM type: YTN; PAM sequence: TTG
aggacagtccttatgattgc

SEQ ID NO: 188557 - DNA, 20 bp, Artificial Sequence
  Description of Artificial Sequence: Synthetic oligonucleotide
  Target: LAMA2; (-) strand; PAM type: YTN; PAM sequence: TTT
gaggacagtccttatgattg

SEQ ID NO: 188558 - DNA, 20 bp, Artificial Sequence
  Description of Artificial Sequence: Synthetic oligonucleotide
  Target: LAMA2; (-) strand; PAM type: YTN; PAM sequence: CTG
aaaatttgaggacagtcctt

SEQ ID NO: 188559 - DNA, 20 bp, Artificial Sequence
  Description of Artificial Sequence: Synthetic oligonucleotide
  Target: LAMA2; (-) strand; PAM type: YTN; PAM sequence: TTC
tgaaaatttgaggacagtcc

SEQ ID NO: 188560 - DNA, 20 bp, Artificial Sequence
  Description of Artificial Sequence: Synthetic oligonucleotide
  Target: LAMA2; (-) strand; PAM type: YTN; PAM sequence: CTT
ctgaaaatttgaggacagtc

SEQ ID NO: 188561 - DNA, 20 bp, Artificial Sequence
  Description of Artificial Sequence: Synthetic oligonucleotide
  Target: LAMA2; (-) strand; PAM type: YTN; PAM sequence: CTC
ttctgaaaatttgaggacag

SEQ ID NO: 188562 - DNA, 20 bp, Artificial Sequence
  Description of Artificial Sequence: Synthetic oligonucleotide
  Target: LAMA2; (-) strand; PAM type: YTN; PAM sequence: TTA
acataacgactcttctgaaa

SEQ ID NO: 188563 - DNA, 20 bp, Artificial Sequence
  Description of Artificial Sequence: Synthetic oligonucleotide
  Target: LAMA2; (-) strand; PAM type: YTN; PAM sequence: TTT
aacataacgactcttctgaa

SEQ ID NO: 188564 - DNA, 20 bp, Artificial Sequence
  Description of Artificial Sequence: Synthetic oligonucleotide
  Target: LAMA2; (-) strand; PAM type: YTN; PAM sequence: CTT
taacataacgactcttctga

SEQ ID NO: 188565 - DNA, 20 bp, Artificial Sequence
  Description of Artificial Sequence: Synthetic oligonucleotide
  Target: LAMA2; (-) strand; PAM type: YTN; PAM sequence: CTC
tttaacataacgactcttct

SEQ ID NO: 188566 - DNA, 20 bp, Artificial Sequence
  Description of Artificial Sequence: Synthetic oligonucleotide
  Target: LAMA2; (-) strand; PAM type: YTN; PAM sequence: TTA
gaatagtccctctttaacat

SEQ ID NO: 188567 - DNA, 20 bp, Artificial Sequence
  Description of Artificial Sequence: Synthetic oligonucleotide
  Target: LAMA2; (-) strand; PAM type: YTN; PAM sequence: TTT
agaatagtccctctttaaca

SEQ ID NO: 188568 - DNA, 20 bp, Artificial Sequence
  Description of Artificial Sequence: Synthetic oligonucleotide
  Target: LAMA2; (-) strand; PAM type: YTN; PAM sequence: CTT
tagaatagtccctctttaac

SEQ ID NO: 188569 - DNA, 20 bp, Artificial Sequence
  Description of Artificial Sequence: Synthetic oligonucleotide
  Target: LAMA2; (-) strand; PAM type: YTN; PAM sequence: TTC
agcctttagaatagtccctc

SEQ ID NO: 188570 - DNA, 20 bp, Artificial Sequence
  Description of Artificial Sequence: Synthetic oligonucleotide
  Target: LAMA2; (-) strand; PAM type: YTN; PAM sequence: CTT
cagcctttagaatagtccct

SEQ ID NO: 188571 - DNA, 20 bp, Artificial Sequence
  Description of Artificial Sequence: Synthetic oligonucleotide
  Target: LAMA2; (-) strand; PAM type: YTN; PAM sequence: CTA
tggatccaccttcagccttt

SEQ ID NO: 188572 - DNA, 20 bp, Artificial Sequence
  Description of Artificial Sequence: Synthetic oligonucleotide
  Target: LAMA2; (-) strand; PAM type: YTN; PAM sequence: TTC
tatggatccaccttcagcct

SEQ ID NO: 188573 - DNA, 20 bp, Artificial Sequence
  Description of Artificial Sequence: Synthetic oligonucleotide
  Target: LAMA2; (-) strand; PAM type: YTN; PAM sequence: CTT
ctatggatccaccttcagcc

SEQ ID NO: 188574 - DNA, 20 bp, Artificial Sequence
  Description of Artificial Sequence: Synthetic oligonucleotide
  Target: LAMA2; (-) strand; PAM type: YTN; PAM sequence: TTC
ttctatggatccaccttcag

SEQ ID NO: 188575 - DNA, 20 bp, Artificial Sequence
  Description of Artificial Sequence: Synthetic oligonucleotide
  Target: LAMA2; (-) strand; PAM type: YTN; PAM sequence: TTG
tcatgttcttctatggatcc

SEQ ID NO: 188576 - DNA, 20 bp, Artificial Sequence
  Description of Artificial Sequence: Synthetic oligonucleotide
  Target: LAMA2; (-) strand; PAM type: YTN; PAM sequence: TTT
gtcatgttcttctatggatc

SEQ ID NO: 188577 - DNA, 20 bp, Artificial Sequence
  Description of Artificial Sequence: Synthetic oligonucleotide
  Target: LAMA2; (-) strand; PAM type: YTN; PAM sequence: TTG
tttgtcatgttcttctatgg

SEQ ID NO: 188578 - DNA, 20 bp, Artificial Sequence
  Description of Artificial Sequence: Synthetic oligonucleotide
  Target: LAMA2; (-) strand; PAM type: YTN; PAM sequence: CTG
gttgtttgtcatgttcttct

SEQ ID NO: 188579 - DNA, 20 bp, Artificial Sequence
  Description of Artificial Sequence: Synthetic oligonucleotide
  Target: LAMA2; (-) strand; PAM type: YTN; PAM sequence: TTC
aaacctggttgtttgtcatg

SEQ ID NO: 188580 - DNA, 20 bp, Artificial Sequence
  Description of Artificial Sequence: Synthetic oligonucleotide
  Target: LAMA2; (-) strand; PAM type: YTN; PAM sequence: TTA
taaaattcaaacctggttgt

SEQ ID NO: 188581 - DNA, 20 bp, Artificial Sequence
  Description of Artificial Sequence: Synthetic oligonucleotide
  Target: LAMA2; (-) strand; PAM type: YTN; PAM sequence: CTC
catattataaaattcaaacc

SEQ ID NO: 188582 - DNA, 20 bp, Artificial Sequence
  Description of Artificial Sequence: Synthetic oligonucleotide
  Target: LAMA2; (-) strand; PAM type: YTN; PAM sequence: TTC
tccatattataaaattcaaa

SEQ ID NO: 188583 - DNA, 20 bp, Artificial Sequence
  Description of Artificial Sequence: Synthetic oligonucleotide
  Target: LAMA2; (-) strand; PAM type: YTN; PAM sequence: TTT
ctccatattataaaattcaa

SEQ ID NO: 188584 - DNA, 20 bp, Artificial Sequence
  Description of Artificial Sequence: Synthetic oligonucleotide
  Target: LAMA2; (-) strand; PAM type: YTN; PAM sequence: TTT
tctccatattataaaattca

SEQ ID NO: 188585 - DNA, 20 bp, Artificial Sequence
  Description of Artificial Sequence: Synthetic oligonucleotide
  Target: LAMA2; (-) strand; PAM type: YTN; PAM sequence: CTA
ttttctccatattataaaat

SEQ ID NO: 188586 - DNA, 20 bp, Artificial Sequence
  Description of Artificial Sequence: Synthetic oligonucleotide
  Target: LAMA2; (-) strand; PAM type: YTN; PAM sequence: CTC
aaaatggcatggggaggaag

SEQ ID NO: 188587 - DNA, 20 bp, Artificial Sequence
  Description of Artificial Sequence: Synthetic oligonucleotide
  Target: LAMA2; (-) strand; PAM type: YTN; PAM sequence: CTG
aacaactcaaaatggcatgg

SEQ ID NO: 188588 - DNA, 20 bp, Artificial Sequence
  Description of Artificial Sequence: Synthetic oligonucleotide
  Target: LAMA2; (-) strand; PAM type: YTN; PAM sequence: TTC
tgaacaactcaaaatggcat

SEQ ID NO: 188589 - DNA, 20 bp, Artificial Sequence
  Description of Artificial Sequence: Synthetic oligonucleotide
  Target: LAMA2; (-) strand; PAM type: YTN; PAM sequence: TTT
ctgaacaactcaaaatggca

SEQ ID NO: 188590 - DNA, 20 bp, Artificial Sequence
  Description of Artificial Sequence: Synthetic oligonucleotide
  Target: LAMA2; (-) strand; PAM type: YTN; PAM sequence: CTA
tttctgaacaactcaaaatg

SEQ ID NO: 188591 - DNA, 20 bp, Artificial Sequence
  Description of Artificial Sequence: Synthetic oligonucleotide
  Target: LAMA2; (-) strand; PAM type: YTN; PAM sequence: TTC
agctatttctgaacaactca

SEQ ID NO: 188592 - DNA, 20 bp, Artificial Sequence
  Description of Artificial Sequence: Synthetic oligonucleotide
  Target: LAMA2; (-) strand; PAM type: YTN; PAM sequence: CTC
aaacacaattcagctatttc

SEQ ID NO: 188593 - DNA, 20 bp, Artificial Sequence
  Description of Artificial Sequence: Synthetic oligonucleotide
  Target: LAMA2; (-) strand; PAM type: YTN; PAM sequence: TTG
ctcaaacacaattcagctat

SEQ ID NO: 188594 - DNA, 20 bp, Artificial Sequence
  Description of Artificial Sequence: Synthetic oligonucleotide
  Target: LAMA2; (-) strand; PAM type: YTN; PAM sequence: TTC
cagaagcaagttgctcaaac

SEQ ID NO: 188595 - DNA, 20 bp, Artificial Sequence
  Description of Artificial Sequence: Synthetic oligonucleotide
  Target: LAMA2; (-) strand; PAM type: YTN; PAM sequence: TTT
ccagaagcaagttgctcaaa

SEQ ID NO: 188596 - DNA, 20 bp, Artificial Sequence
  Description of Artificial Sequence: Synthetic oligonucleotide
  Target: LAMA2; (-) strand; PAM type: YTN; PAM sequence: CTG
catggtcatttccagaagca

SEQ ID NO: 188597 - DNA, 20 bp, Artificial Sequence
  Description of Artificial Sequence: Synthetic oligonucleotide
  Target: LAMA2; (-) strand; PAM type: YTN; PAM sequence: CTG
atcactgcatggtcatttcc

SEQ ID NO: 188598 - DNA, 20 bp, Artificial Sequence
  Description of Artificial Sequence: Synthetic oligonucleotide
  Target: LAMA2; (-) strand; PAM type: YTN; PAM sequence: CTG
tacatctgatcactgcatgg

SEQ ID NO: 188599 - DNA, 20 bp, Artificial Sequence
  Description of Artificial Sequence: Synthetic oligonucleotide
  Target: LAMA2; (-) strand; PAM type: YTN; PAM sequence: CTA
actgtacatctgatcactgc

SEQ ID NO: 188600 - DNA, 20 bp, Artificial Sequence
  Description of Artificial Sequence: Synthetic oligonucleotide
  Target: LAMA2; (-) strand; PAM type: YTN; PAM sequence: CTC
actaactgtacatctgatca

SEQ ID NO: 188601 - DNA, 20 bp, Artificial Sequence
  Description of Artificial Sequence: Synthetic oligonucleotide
  Target: LAMA2; (-) strand; PAM type: YTN; PAM sequence: CTC
ataaagcatccctcactaac

SEQ ID NO: 188602 - DNA, 20 bp, Artificial Sequence
  Description of Artificial Sequence: Synthetic oligonucleotide
  Target: LAMA2; (-) strand; PAM type: YTN; PAM sequence: TTC
cctcataaagcatccctcac

SEQ ID NO: 188603 - DNA, 20 bp, Artificial Sequence
  Description of Artificial Sequence: Synthetic oligonucleotide
  Target: LAMA2; (-) strand; PAM type: YTN; PAM sequence: CTC
agtagaggcattccctcata

SEQ ID NO: 188604 - DNA, 20 bp, Artificial Sequence
  Description of Artificial Sequence: Synthetic oligonucleotide
  Target: LAMA2; (-) strand; PAM type: YTN; PAM sequence: CTC
tcagtagaggcattccctca

SEQ ID NO: 188605 - DNA, 20 bp, Artificial Sequence
  Description of Artificial Sequence: Synthetic oligonucleotide
  Target: LAMA2; (-) strand; PAM type: YTN; PAM sequence: TTC
ctctcagtagaggcattccc

SEQ ID NO: 188606 - DNA, 20 bp, Artificial Sequence
  Description of Artificial Sequence: Synthetic oligonucleotide
  Target: LAMA2; (-) strand; PAM type: YTN; PAM sequence: CTT
cctctcagtagaggcattcc

SEQ ID NO: 188607 - DNA, 20 bp, Artificial Sequence
  Description of Artificial Sequence: Synthetic oligonucleotide
  Target: LAMA2; (-) strand; PAM type: YTN; PAM sequence: TTA
acttcctctcagtagaggca

SEQ ID NO: 188608 - DNA, 20 bp, Artificial Sequence
  Description of Artificial Sequence: Synthetic oligonucleotide
  Target: LAMA2; (-) strand; PAM type: YTN; PAM sequence: CTT
aacttcctctcagtagaggc

SEQ ID NO: 188609 - DNA, 20 bp, Artificial Sequence
  Description of Artificial Sequence: Synthetic oligonucleotide
  Target: LAMA2; (-) strand; PAM type: YTN; PAM sequence: TTG
atgagtcttaacttcctctc

SEQ ID NO: 188610 - DNA, 20 bp, Artificial Sequence
  Description of Artificial Sequence: Synthetic oligonucleotide
  Target: LAMA2; (-) strand; PAM type: YTN; PAM sequence: CTA
gacagttgatgagtcttaac

SEQ ID NO: 188611 - DNA, 20 bp, Artificial Sequence
  Description of Artificial Sequence: Synthetic oligonucleotide
  Target: LAMA2; (-) strand; PAM type: YTN; PAM sequence: CTG
acaaatggctagacagttga

SEQ ID NO: 188612 - DNA, 20 bp, Artificial Sequence
  Description of Artificial Sequence: Synthetic oligonucleotide
  Target: LAMA2; (-) strand; PAM type: YTN; PAM sequence: TTA
gaactgacaaatggctagac

SEQ ID NO: 188613 - DNA, 20 bp, Artificial Sequence
  Description of Artificial Sequence: Synthetic oligonucleotide
  Target: LAMA2; (-) strand; PAM type: YTN; PAM sequence: CTT
agaactgacaaatggctaga

SEQ ID NO: 188614 - DNA, 20 bp, Artificial Sequence
  Description of Artificial Sequence: Synthetic oligonucleotide
  Target: LAMA2; (-) strand; PAM type: YTN; PAM sequence: TTA
gaatcttagaactgacaaat

SEQ ID NO: 188615 - DNA, 20 bp, Artificial Sequence
  Description of Artificial Sequence: Synthetic oligonucleotide
  Target: LAMA2; (-) strand; PAM type: YTN; PAM sequence: CTA
taatattagaatcttagaac

SEQ ID NO: 188616 - DNA, 20 bp, Artificial Sequence
  Description of Artificial Sequence: Synthetic oligonucleotide
  Target: LAMA2; (-) strand; PAM type: YTN; PAM sequence: CTA
aaagcaatagactataatat

SEQ ID NO: 188617 - DNA, 20 bp, Artificial Sequence
  Description of Artificial Sequence: Synthetic oligonucleotide
  Target: LAMA2; (-) strand; PAM type: YTN; PAM sequence: CTC
taaaagcaatagactataat

SEQ ID NO: 188618 - DNA, 20 bp, Artificial Sequence
  Description of Artificial Sequence: Synthetic oligonucleotide
  Target: LAMA2; (-) strand; PAM type: YTN; PAM sequence: TTA
aatgcaagtatgcactctaa

SEQ ID NO: 188619 - DNA, 20 bp, Artificial Sequence
  Description of Artificial Sequence: Synthetic oligonucleotide
  Target: LAMA2; (-) strand; PAM type: YTN; PAM sequence: TTT
aaatgcaagtatgcactcta

SEQ ID NO: 188620 - DNA, 20 bp, Artificial Sequence
  Description of Artificial Sequence: Synthetic oligonucleotide
  Target: LAMA2; (-) strand; PAM type: YTN; PAM sequence: TTC
agaaatttaaatgcaagtat

SEQ ID NO: 188621 - DNA, 20 bp, Artificial Sequence
  Description of Artificial Sequence: Synthetic oligonucleotide
  Target: LAMA2; (-) strand; PAM type: YTN; PAM sequence: TTA
agaattcagaaatttaaatg

SEQ ID NO: 188622 - DNA, 20 bp, Artificial Sequence
  Description of Artificial Sequence: Synthetic oligonucleotide
  Target: LAMA2; (-) strand; PAM type: YTN; PAM sequence: TTT
aagaattcagaaatttaaat

SEQ ID NO: 188623 - DNA, 20 bp, Artificial Sequence
  Description of Artificial Sequence: Synthetic oligonucleotide
  Target: LAMA2; (-) strand; PAM type: YTN; PAM sequence: TTT
taagaattcagaaatttaaa

SEQ ID NO: 188624 - DNA, 20 bp, Artificial Sequence
  Description of Artificial Sequence: Synthetic oligonucleotide
  Target: LAMA2; (-) strand; PAM type: YTN; PAM sequence: TTG
acattttaagaattcagaaa

SEQ ID NO: 188625 - DNA, 20 bp, Artificial Sequence
  Description of Artificial Sequence: Synthetic oligonucleotide
  Target: LAMA2; (-) strand; PAM type: YTN; PAM sequence: CTT
gacattttaagaattcagaa

SEQ ID NO: 188626 - DNA, 20 bp, Artificial Sequence
  Description of Artificial Sequence: Synthetic oligonucleotide
  Target: LAMA2; (-) strand; PAM type: YTN; PAM sequence: TTC
ttgacattttaagaattcag

SEQ ID NO: 188627 - DNA, 20 bp, Artificial Sequence
  Description of Artificial Sequence: Synthetic oligonucleotide
  Target: LAMA2; (-) strand; PAM type: YTN; PAM sequence: TTT
cttgacattttaagaattca

SEQ ID NO: 188628 - DNA, 20 bp, Artificial Sequence
  Description of Artificial Sequence: Synthetic oligonucleotide
  Target: LAMA2; (-) strand; PAM type: YTN; PAM sequence: TTT
tcttgacattttaagaattc

SEQ ID NO: 188629 - DNA, 20 bp, Artificial Sequence
  Description of Artificial Sequence: Synthetic oligonucleotide
  Target: LAMA2; (-) strand; PAM type: YTN; PAM sequence: TTA
acattttcttgacattttaa

SEQ ID NO: 188630 - DNA, 20 bp, Artificial Sequence
  Description of Artificial Sequence: Synthetic oligonucleotide
  Target: LAMA2; (-) strand; PAM type: YTN; PAM sequence: TTT
aacattttcttgacatttta

SEQ ID NO: 188631 - DNA, 20 bp, Artificial Sequence
  Description of Artificial Sequence: Synthetic oligonucleotide
  Target: LAMA2; (-) strand; PAM type: YTN; PAM sequence: TTA
tatatttaacattttcttga

SEQ ID NO: 188632 - DNA, 20 bp, Artificial Sequence
  Description of Artificial Sequence: Synthetic oligonucleotide
  Target: LAMA2; (-) strand; PAM type: YTN; PAM sequence: TTT
atatatttaacattttcttg

SEQ ID NO: 188633 - DNA, 20 bp, Artificial Sequence
  Description of Artificial Sequence: Synthetic oligonucleotide
  Target: LAMA2; (-) strand; PAM type: YTN; PAM sequence: TTT
tatatatttaacattttctt

SEQ ID NO: 188634 - DNA, 20 bp, Artificial Sequence
  Description of Artificial Sequence: Synthetic oligonucleotide
  Target: LAMA2; (-) strand; PAM type: YTN; PAM sequence: TTT
ttatatatttaacattttct

SEQ ID NO: 188635 - DNA, 20 bp, Artificial Sequence
  Description of Artificial Sequence: Synthetic oligonucleotide
  Target: LAMA2; (-) strand; PAM type: YTN; PAM sequence: TTA
aaaacacatttttatatatt

SEQ ID NO: 188636 - DNA, 20 bp, Artificial Sequence
  Description of Artificial Sequence: Synthetic oligonucleotide
  Target: LAMA2; (-) strand; PAM type: YTN; PAM sequence: TTT
aaaaacacatttttatatat

SEQ ID NO: 188637 - DNA, 20 bp, Artificial Sequence
  Description of Artificial Sequence: Synthetic oligonucleotide
  Target: LAMA2; (-) strand; PAM type: YTN; PAM sequence: TTA
aatcccagaagggatttaaa

SEQ ID NO: 188638 - DNA, 20 bp, Artificial Sequence
  Description of Artificial Sequence: Synthetic oligonucleotide
  Target: LAMA2; (-) strand; PAM type: YTN; PAM sequence: TTT
aaatcccagaagggatttaa

SEQ ID NO: 188639 - DNA, 20 bp, Artificial Sequence
  Description of Artificial Sequence: Synthetic oligonucleotide
  Target: LAMA2; (-) strand; PAM type: YTN; PAM sequence: TTT
taaatcccagaagggattta

SEQ ID NO: 188640 - DNA, 20 bp, Artificial Sequence
  Description of Artificial Sequence: Synthetic oligonucleotide
  Target: LAMA2; (-) strand; PAM type: YTN; PAM sequence: TTA
ttttaaatcccagaagggat

SEQ ID NO: 188641 - DNA, 20 bp, Artificial Sequence
  Description of Artificial Sequence: Synthetic oligonucleotide
  Target: LAMA2; (-) strand; PAM type: YTN; PAM sequence: TTT
attttaaatcccagaaggga

SEQ ID NO: 188642 - DNA, 20 bp, Artificial Sequence
  Description of Artificial Sequence: Synthetic oligonucleotide
  Target: LAMA2; (-) strand; PAM type: YTN; PAM sequence: TTT
tattttaaatcccagaaggg

SEQ ID NO: 188643 - DNA, 20 bp, Artificial Sequence
  Description of Artificial Sequence: Synthetic oligonucleotide
  Target: LAMA2; (-) strand; PAM type: YTN; PAM sequence: TTT
ttattttaaatcccagaagg

SEQ ID NO: 188644 - DNA, 20 bp, Artificial Sequence
  Description of Artificial Sequence: Synthetic oligonucleotide
  Target: LAMA2; (-) strand; PAM type: YTN; PAM sequence: CTC
aaacatgtttttattttaaa

SEQ ID NO: 188645 - DNA, 20 bp, Artificial Sequence
  Description of Artificial Sequence: Synthetic oligonucleotide
  Target: LAMA2; (-) strand; PAM type: YTN; PAM sequence: TTG
tctcaaacatgtttttattt

SEQ ID NO: 188646 - DNA, 20 bp, Artificial Sequence
  Description of Artificial Sequence: Synthetic oligonucleotide
  Target: LAMA2; (-) strand; PAM type: YTN; PAM sequence: TTG
ccaaaaatgtgtgaggattg

SEQ ID NO: 188647 - DNA, 20 bp, Artificial Sequence
  Description of Artificial Sequence: Synthetic oligonucleotide
  Target: LAMA2; (-) strand; PAM type: YTN; PAM sequence: CTT
gccaaaaatgtgtgaggatt

SEQ ID NO: 188648 - DNA, 20 bp, Artificial Sequence
  Description of Artificial Sequence: Synthetic oligonucleotide
  Target: LAMA2; (-) strand; PAM type: YTN; PAM sequence: TTC
ttgccaaaaatgtgtgagga

SEQ ID NO: 188649 - DNA, 20 bp, Artificial Sequence
  Description of Artificial Sequence: Synthetic oligonucleotide
  Target: LAMA2; (-) strand; PAM type: YTN; PAM sequence: CTA
agtattcttgccaaaaatgt

SEQ ID NO: 188650 - DNA, 20 bp, Artificial Sequence
  Description of Artificial Sequence: Synthetic oligonucleotide
  Target: LAMA2; (-) strand; PAM type: YTN; PAM sequence: CTA
aatatctaagtattcttgcc

SEQ ID NO: 188651 - DNA, 20 bp, Artificial Sequence
  Description of Artificial Sequence: Synthetic oligonucleotide
  Target: LAMA2; (-) strand; PAM type: YTN; PAM sequence: TTG
acgatgatgtggaaaatcca

SEQ ID NO: 188652 - DNA, 20 bp, Artificial Sequence
  Description of Artificial Sequence: Synthetic oligonucleotide
  Target: LAMA2; (-) strand; PAM type: YTN; PAM sequence: CTG
tgcaattgacgatgatgtgg

SEQ ID NO: 188653 - DNA, 20 bp, Artificial Sequence
  Description of Artificial Sequence: Synthetic oligonucleotide
  Target: LAMA2; (-) strand; PAM type: YTN; PAM sequence: TTA
gaactgtgcaattgacgatg

SEQ ID NO: 188654 - DNA, 20 bp, Artificial Sequence
  Description of Artificial Sequence: Synthetic oligonucleotide
  Target: LAMA2; (-) strand; PAM type: YTN; PAM sequence: TTT
agaactgtgcaattgacgat

SEQ ID NO: 188655 - DNA, 20 bp, Artificial Sequence
  Description of Artificial Sequence: Synthetic oligonucleotide
  Target: LAMA2; (-) strand; PAM type: YTN; PAM sequence: TTT
tagaactgtgcaattgacga

SEQ ID NO: 188656 - DNA, 20 bp, Artificial Sequence
  Description of Artificial Sequence: Synthetic oligonucleotide
  Target: LAMA2; (-) strand; PAM type: YTN; PAM sequence: TTA
taacacaagatgttttagaa

SEQ ID NO: 188657 - DNA, 20 bp, Artificial Sequence
  Description of Artificial Sequence: Synthetic oligonucleotide
  Target: LAMA2; (-) strand; PAM type: YTN; PAM sequence: TTG
cgtgttataacacaagatgt

SEQ ID NO: 188658 - DNA, 20 bp, Artificial Sequence
  Description of Artificial Sequence: Synthetic oligonucleotide
  Target: LAMA2; (-) strand; PAM type: YTN; PAM sequence: CTT
gcgtgttataacacaagatg

SEQ ID NO: 188659 - DNA, 20 bp, Artificial Sequence
  Description of Artificial Sequence: Synthetic oligonucleotide
  Target: LAMA2; (-) strand; PAM type: YTN; PAM sequence: TTC
ttgcgtgttataacacaaga

SEQ ID NO: 188660 - DNA, 20 bp, Artificial Sequence
  Description of Artificial Sequence: Synthetic oligonucleotide
  Target: LAMA2; (-) strand; PAM type: YTN; PAM sequence: TTA
taaagtattcttgcgtgtta

SEQ ID NO: 188661 - DNA, 20 bp, Artificial Sequence
  Description of Artificial Sequence: Synthetic oligonucleotide
  Target: LAMA2; (-) strand; PAM type: YTN; PAM sequence: TTT
ataaagtattcttgcgtgtt

SEQ ID NO: 188662 - DNA, 20 bp, Artificial Sequence
  Description of Artificial Sequence: Synthetic oligonucleotide
  Target: LAMA2; (-) strand; PAM type: YTN; PAM sequence: CTC
aggtaatttataaagtattc

SEQ ID NO: 188663 - DNA, 20 bp, Artificial Sequence
  Description of Artificial Sequence: Synthetic oligonucleotide
  Target: LAMA2; (-) strand; PAM type: YTN; PAM sequence: TTC
tcaggtaatttataaagtat

SEQ ID NO: 188664 - DNA, 20 bp, Artificial Sequence
  Description of Artificial Sequence: Synthetic oligonucleotide
  Target: LAMA2; (-) strand; PAM type: YTN; PAM sequence: TTT
ctcaggtaatttataaagta

SEQ ID NO: 188665 - DNA, 20 bp, Artificial Sequence
  Description of Artificial Sequence: Synthetic oligonucleotide
  Target: LAMA2; (-) strand; PAM type: YTN; PAM sequence: CTG
aaaatttctcaggtaattta

SEQ ID NO: 188666 - DNA, 20 bp, Artificial Sequence
  Description of Artificial Sequence: Synthetic oligonucleotide
  Target: LAMA2; (-) strand; PAM type: YTN; PAM sequence: CTA
tgaatcccctgaaaatttct

SEQ ID NO: 188667 - DNA, 20 bp, Artificial Sequence
  Description of Artificial Sequence: Synthetic oligonucleotide
  Target: LAMA2; (-) strand; PAM type: YTN; PAM sequence: TTA
tggccactatgaatcccctg

SEQ ID NO: 188668 - DNA, 20 bp, Artificial Sequence
  Description of Artificial Sequence: Synthetic oligonucleotide
  Target: LAMA2; (-) strand; PAM type: YTN; PAM sequence: TTT
atggccactatgaatcccct

SEQ ID NO: 188669 - DNA, 20 bp, Artificial Sequence
  Description of Artificial Sequence: Synthetic oligonucleotide
  Target: LAMA2; (-) strand; PAM type: YTN; PAM sequence: TTC
caggtttatggccactatga

SEQ ID NO: 188670 - DNA, 20 bp, Artificial Sequence
  Description of Artificial Sequence: Synthetic oligonucleotide
  Target: LAMA2; (-) strand; PAM type: YTN; PAM sequence: TTA
attccaggtttatggccact

SEQ ID NO: 188671 - DNA, 20 bp, Artificial Sequence
  Description of Artificial Sequence: Synthetic oligonucleotide
  Target: LAMA2; (-) strand; PAM type: YTN; PAM sequence: TTA
aaaaaattaattccaggttt

SEQ ID NO: 188672 - DNA, 20 bp, Artificial Sequence
  Description of Artificial Sequence: Synthetic oligonucleotide
  Target: LAMA2; (-) strand; PAM type: YTN; PAM sequence: TTT
aaaaaaattaattccaggtt

SEQ ID NO: 188673 - DNA, 20 bp, Artificial Sequence
  Description of Artificial Sequence: Synthetic oligonucleotide
  Target: LAMA2; (-) strand; PAM type: YTN; PAM sequence: TTA
acatatgcagcaaagaaaaa

SEQ ID NO: 188674 - DNA, 20 bp, Artificial Sequence
  Description of Artificial Sequence: Synthetic oligonucleotide
  Target: LAMA2; (-) strand; PAM type: YTN; PAM sequence: TTA
ggtcagtatatggcaaacaa

SEQ ID NO: 188675 - DNA, 20 bp, Artificial Sequence
  Description of Artificial Sequence: Synthetic oligonucleotide
  Target: LAMA2; (-) strand; PAM type: YTN; PAM sequence: CTA
aatgattaggtcagtatatg

SEQ ID NO: 188676 - DNA, 20 bp, Artificial Sequence
  Description of Artificial Sequence: Synthetic oligonucleotide
  Target: LAMA2; (-) strand; PAM type: YTN; PAM sequence: TTA
ctaaatgattaggtcagtat

SEQ ID NO: 188677 - DNA, 20 bp, Artificial Sequence
  Description of Artificial Sequence: Synthetic oligonucleotide
  Target: LAMA2; (-) strand; PAM type: YTN; PAM sequence: TTT
actaaatgattaggtcagta

SEQ ID NO: 188678 - DNA, 20 bp, Artificial Sequence
  Description of Artificial Sequence: Synthetic oligonucleotide
  Target: LAMA2; (-) strand; PAM type: YTN; PAM sequence: TTT
tactaaatgattaggtcagt

SEQ ID NO: 188679 - DNA, 20 bp, Artificial Sequence
  Description of Artificial Sequence: Synthetic oligonucleotide
  Target: LAMA2; (-) strand; PAM type: YTN; PAM sequence: TTT
ttactaaatgattaggtcag

SEQ ID NO: 188680 - DNA, 20 bp, Artificial Sequence
  Description of Artificial Sequence: Synthetic oligonucleotide
  Target: LAMA2; (-) strand; PAM type: YTN; PAM sequence: TTA
tgaatcatttttactaaatg

SEQ ID NO: 188681 - DNA, 20 bp, Artificial Sequence
  Description of Artificial Sequence: Synthetic oligonucleotide
  Target: LAMA2; (-) strand; PAM type: YTN; PAM sequence: CTG
ttatgaatcatttttactaa

SEQ ID NO: 188682 - DNA, 20 bp, Artificial Sequence
  Description of Artificial Sequence: Synthetic oligonucleotide
  Target: LAMA2; (-) strand; PAM type: YTN; PAM sequence: TTA
tctgttatgaatcattttta

SEQ ID NO: 188683 - DNA, 20 bp, Artificial Sequence
  Description of Artificial Sequence: Synthetic oligonucleotide
  Target: LAMA2; (-) strand; PAM type: YTN; PAM sequence: TTT
atctgttatgaatcattttt

SEQ ID NO: 188684 - DNA, 20 bp, Artificial Sequence
  Description of Artificial Sequence: Synthetic oligonucleotide
  Target: LAMA2; (-) strand; PAM type: YTN; PAM sequence: TTT
tatctgttatgaatcatttt

SEQ ID NO: 188685 - DNA, 20 bp, Artificial Sequence
  Description of Artificial Sequence: Synthetic oligonucleotide
  Target: LAMA2; (-) strand; PAM type: YTN; PAM sequence: TTG
aaatgccatgcattttatct

SEQ ID NO: 188686 - DNA, 20 bp, Artificial Sequence
  Description of Artificial Sequence: Synthetic oligonucleotide
  Target: LAMA2; (-) strand; PAM type: YTN; PAM sequence: TTG
aatatgttgaaatgccatgc

SEQ ID NO: 188687 - DNA, 20 bp, Artificial Sequence
  Description of Artificial Sequence: Synthetic oligonucleotide
  Target: LAMA2; (-) strand; PAM type: YTN; PAM sequence: TTT
gaatatgttgaaatgccatg

SEQ ID NO: 188688 - DNA, 20 bp, Artificial Sequence
  Description of Artificial Sequence: Synthetic oligonucleotide
  Target: LAMA2; (-) strand; PAM type: YTN; PAM sequence: TTT
tgaatatgttgaaatgccat

SEQ ID NO: 188689 - DNA, 20 bp, Artificial Sequence
  Description of Artificial Sequence: Synthetic oligonucleotide
  Target: LAMA2; (-) strand; PAM type: YTN; PAM sequence: TTC
atataaatattttgaatatg

SEQ ID NO: 188690 - DNA, 20 bp, Artificial Sequence
  Description of Artificial Sequence: Synthetic oligonucleotide
  Target: LAMA2; (-) strand; PAM type: YTN; PAM sequence: TTG
aatatgttcatataaatatt

SEQ ID NO: 188691 - DNA, 20 bp, Artificial Sequence
  Description of Artificial Sequence: Synthetic oligonucleotide
  Target: LAMA2; (-) strand; PAM type: YTN; PAM sequence: TTC
agtgttgaatatgttcatat

SEQ ID NO: 188692 - DNA, 20 bp, Artificial Sequence
  Description of Artificial Sequence: Synthetic oligonucleotide
  Target: LAMA2; (-) strand; PAM type: YTN; PAM sequence: CTA
taatattcagtgttgaatat

SEQ ID NO: 188693 - DNA, 20 bp, Artificial Sequence
  Description of Artificial Sequence: Synthetic oligonucleotide
  Target: LAMA2; (-) strand; PAM type: YTN; PAM sequence: CTA
tcacatctataatattcagt

SEQ ID NO: 188694 - DNA, 20 bp, Artificial Sequence
  Description of Artificial Sequence: Synthetic oligonucleotide
  Target: LAMA2; (-) strand; PAM type: YTN; PAM sequence: TTC
tatcacatctataatattca

SEQ ID NO: 188695 - DNA, 20 bp, Artificial Sequence
  Description of Artificial Sequence: Synthetic oligonucleotide
  Target: LAMA2; (-) strand; PAM type: YTN; PAM sequence: TTA
attctatcacatctataata

SEQ ID NO: 188696 - DNA, 20 bp, Artificial Sequence
  Description of Artificial Sequence: Synthetic oligonucleotide
  Target: LAMA2; (-) strand; PAM type: YTN; PAM sequence: TTA
ttaattctatcacatctata

SEQ ID NO: 188697 - DNA, 20 bp, Artificial Sequence
  Description of Artificial Sequence: Synthetic oligonucleotide
  Target: LAMA2; (-) strand; PAM type: YTN; PAM sequence: TTT
attaattctatcacatctat

SEQ ID NO: 188698 - DNA, 20 bp, Artificial Sequence
  Description of Artificial Sequence: Synthetic oligonucleotide
  Target: LAMA2; (-) strand; PAM type: YTN; PAM sequence: TTT
tattaattctatcacatcta

SEQ ID NO: 188699 - DNA, 20 bp, Artificial Sequence
  Description of Artificial Sequence: Synthetic oligonucleotide
  Target: LAMA2; (-) strand; PAM type: YTN; PAM sequence: TTA
tataaattttattaattcta

SEQ ID NO: 188700 - DNA, 20 bp, Artificial Sequence
  Description of Artificial Sequence: Synthetic oligonucleotide
  Target: LAMA2; (-) strand; PAM type: YTN; PAM sequence: TTT
atataaattttattaattct

SEQ ID NO: 188701 - DNA, 20 bp, Artificial Sequence
  Description of Artificial Sequence: Synthetic oligonucleotide
  Target: LAMA2; (-) strand; PAM type: YTN; PAM sequence: TTG
atatgtgaaatataacataa

SEQ ID NO: 188702 - DNA, 20 bp, Artificial Sequence
  Description of Artificial Sequence: Synthetic oligonucleotide
  Target: LAMA2; (-) strand; PAM type: YTN; PAM sequence: CTG
tacacattgatatgtgaaat

SEQ ID NO: 188703 - DNA, 20 bp, Artificial Sequence
  Description of Artificial Sequence: Synthetic oligonucleotide
  Target: LAMA2; (-) strand; PAM type: YTN; PAM sequence: TTA
agatagaccagaaatctgta

SEQ ID NO: 188704 - DNA, 20 bp, Artificial Sequence
  Description of Artificial Sequence: Synthetic oligonucleotide
  Target: LAMA2; (-) strand; PAM type: YTN; PAM sequence: CTT
aagatagaccagaaatctgt

SEQ ID NO: 188705 - DNA, 20 bp, Artificial Sequence
  Description of Artificial Sequence: Synthetic oligonucleotide
  Target: LAMA2; (-) strand; PAM type: YTN; PAM sequence: CTA
gggtagaaaaatcttaagat

SEQ ID NO: 188706 - DNA, 20 bp, Artificial Sequence
  Description of Artificial Sequence: Synthetic oligonucleotide
  Target: LAMA2; (-) strand; PAM type: YTN; PAM sequence: TTG
catgaaatcctagggtagaa

SEQ ID NO: 188707 - DNA, 20 bp, Artificial Sequence
  Description of Artificial Sequence: Synthetic oligonucleotide
  Target: LAMA2; (-) strand; PAM type: YTN; PAM sequence: TTT
gcatgaaatcctagggtaga

SEQ ID NO: 188708 - DNA, 20 bp, Artificial Sequence
  Description of Artificial Sequence: Synthetic oligonucleotide
  Target: LAMA2; (-) strand; PAM type: YTN; PAM sequence: TTA
gtttgcatgaaatcctaggg

SEQ ID NO: 188709 - DNA, 20 bp, Artificial Sequence
  Description of Artificial Sequence: Synthetic oligonucleotide
  Target: LAMA2; (-) strand; PAM type: YTN; PAM sequence: TTC
attagtttgcatgaaatcct

SEQ ID NO: 188710 - DNA, 20 bp, Artificial Sequence
  Description of Artificial Sequence: Synthetic oligonucleotide
  Target: LAMA2; (-) strand; PAM type: YTN; PAM sequence: TTC
agttcattagtttgcatgaa

SEQ ID NO: 188711 - DNA, 20 bp, Artificial Sequence
  Description of Artificial Sequence: Synthetic oligonucleotide
  Target: LAMA2; (-) strand; PAM type: YTN; PAM sequence: TTG
atatagattcagttcattag

SEQ ID NO: 188712 - DNA, 20 bp, Artificial Sequence
  Description of Artificial Sequence: Synthetic oligonucleotide
  Target: LAMA2; (-) strand; PAM type: YTN; PAM sequence: CTT
gatatagattcagttcatta

SEQ ID NO: 188713 - DNA, 20 bp, Artificial Sequence
  Description of Artificial Sequence: Synthetic oligonucleotide
  Target: LAMA2; (-) strand; PAM type: YTN; PAM sequence: TTG
cccagcccccagcatccctt

SEQ ID NO: 188714 - DNA, 20 bp, Artificial Sequence
  Description of Artificial Sequence: Synthetic oligonucleotide
  Target: LAMA2; (-) strand; PAM type: YTN; PAM sequence: CTT
gcccagcccccagcatccct

SEQ ID NO: 188715 - DNA, 20 bp, Artificial Sequence
  Description of Artificial Sequence: Synthetic oligonucleotide
  Target: LAMA2; (-) strand; PAM type: YTN; PAM sequence: TTA
caggagtgagccaccttgcc

SEQ ID NO: 188716 - DNA, 20 bp, Artificial Sequence
  Description of Artificial Sequence: Synthetic oligonucleotide
  Target: LAMA2; (-) strand; PAM type: YTN; PAM sequence: CTG
cgattacaggagtgagccac

SEQ ID NO: 188717 - DNA, 20 bp, Artificial Sequence
  Description of Artificial Sequence: Synthetic oligonucleotide
  Target: LAMA2; (-) strand; PAM type: YTN; PAM sequence: CTC
ccaaagtgctgcgattacag

SEQ ID NO: 188718 - DNA, 20 bp, Artificial Sequence
  Description of Artificial Sequence: Synthetic oligonucleotide
  Target: LAMA2; (-) strand; PAM type: YTN; PAM sequence: CTA
ggcctcccaaagtgctgcga

SEQ ID NO: 188719 - DNA, 20 bp, Artificial Sequence
  Description of Artificial Sequence: Synthetic oligonucleotide
  Target: LAMA2; (-) strand; PAM type: YTN; PAM sequence: CTA
aggtgatccacccacctagg

SEQ ID NO: 188720 - DNA, 20 bp, Artificial Sequence
  Description of Artificial Sequence: Synthetic oligonucleotide
  Target: LAMA2; (-) strand; PAM type: YTN; PAM sequence: CTG
acctaaggtgatccacccac

SEQ ID NO: 188721 - DNA, 20 bp, Artificial Sequence
  Description of Artificial Sequence: Synthetic oligonucleotide
  Target: LAMA2; (-) strand; PAM type: YTN; PAM sequence: CTC
ctgacctaaggtgatccacc

SEQ ID NO: 188722 - DNA, 20 bp, Artificial Sequence
  Description of Artificial Sequence: Synthetic oligonucleotide
  Target: LAMA2; (-) strand; PAM type: YTN; PAM sequence: TTG
aactcctgacctaaggtgat

SEQ ID NO: 188723 - DNA, 20 bp, Artificial Sequence
  Description of Artificial Sequence: Synthetic oligonucleotide
  Target: LAMA2; (-) strand; PAM type: YTN; PAM sequence: CTT
gaactcctgacctaaggtga

SEQ ID NO: 188724 - DNA, 20 bp, Artificial Sequence
  Description of Artificial Sequence: Synthetic oligonucleotide
  Target: LAMA2; (-) strand; PAM type: YTN; PAM sequence: CTG
gtcttgaactcctgacctaa

SEQ ID NO: 188725 - DNA, 20 bp, Artificial Sequence
  Description of Artificial Sequence: Synthetic oligonucleotide
  Target: LAMA2; (-) strand; PAM type: YTN; PAM sequence: TTG
gtcaggctggtcttgaactc

SEQ ID NO: 188726 - DNA, 20 bp, Artificial Sequence
  Description of Artificial Sequence: Synthetic oligonucleotide
  Target: LAMA2; (-) strand; PAM type: YTN; PAM sequence: TTA
tgttggtcaggctggtcttg

SEQ ID NO: 188727 - DNA, 20 bp, Artificial Sequence
  Description of Artificial Sequence: Synthetic oligonucleotide
  Target: LAMA2; (-) strand; PAM type: YTN; PAM sequence: TTC
cgttatgttggtcaggctgg

SEQ ID NO: 188728 - DNA, 20 bp, Artificial Sequence
  Description of Artificial Sequence: Synthetic oligonucleotide
  Target: LAMA2; (-) strand; PAM type: YTN; PAM sequence: TTT
ccgttatgttggtcaggctg

SEQ ID NO: 188729 - DNA, 20 bp, Artificial Sequence
  Description of Artificial Sequence: Synthetic oligonucleotide
  Target: LAMA2; (-) strand; PAM type: YTN; PAM sequence: TTA
gtagagacacggtttccgtt

SEQ ID NO: 188730 - DNA, 20 bp, Artificial Sequence
  Description of Artificial Sequence: Synthetic oligonucleotide
  Target: LAMA2; (-) strand; PAM type: YTN; PAM sequence: TTT
agtagagacacggtttccgt

SEQ ID NO: 188731 - DNA, 20 bp, Artificial Sequence
  Description of Artificial Sequence: Synthetic oligonucleotide
  Target: LAMA2; (-) strand; PAM type: YTN; PAM sequence: TTT
tagtagagacacggtttccg

SEQ ID NO: 188732 - DNA, 20 bp, Artificial Sequence
  Description of Artificial Sequence: Synthetic oligonucleotide
  Target: LAMA2; (-) strand; PAM type: YTN; PAM sequence: TTT
ttagtagagacacggtttcc

SEQ ID NO: 188733 - DNA, 20 bp, Artificial Sequence
  Description of Artificial Sequence: Synthetic oligonucleotide
  Target: LAMA2; (-) strand; PAM type: YTN; PAM sequence: TTG
tatttttagtagagacacgg

SEQ ID NO: 188734 - DNA, 20 bp, Artificial Sequence
  Description of Artificial Sequence: Synthetic oligonucleotide
  Target: LAMA2; (-) strand; PAM type: YTN; PAM sequence: TTT
gtatttttagtagagacacg

SEQ ID NO: 188735 - DNA, 20 bp, Artificial Sequence
  Description of Artificial Sequence: Synthetic oligonucleotide
  Target: LAMA2; (-) strand; PAM type: YTN; PAM sequence: TTT
tgtatttttagtagagacac

SEQ ID NO: 188736 - DNA, 20 bp, Artificial Sequence
  Description of Artificial Sequence: Synthetic oligonucleotide
  Target: LAMA2; (-) strand; PAM type: YTN; PAM sequence: TTT
ttgtatttttagtagagaca

SEQ ID NO: 188737 - DNA, 20 bp, Artificial Sequence
  Description of Artificial Sequence: Synthetic oligonucleotide
  Target: LAMA2; (-) strand; PAM type: YTN; PAM sequence: CTA
atttttgtatttttagtaga

SEQ ID NO: 188738 - DNA, 20 bp, Artificial Sequence
  Description of Artificial Sequence: Synthetic oligonucleotide
  Target: LAMA2; (-) strand; PAM type: YTN; PAM sequence: CTG
gctaatttttgtatttttag

SEQ ID NO: 188739 - DNA, 20 bp, Artificial Sequence
  Description of Artificial Sequence: Synthetic oligonucleotide
  Target: LAMA2; (-) strand; PAM type: YTN; PAM sequence: TTA
caggcacatgccaccacgcc

SEQ ID NO: 188740 - DNA, 20 bp, Artificial Sequence
  Description of Artificial Sequence: Synthetic oligonucleotide
  Target: LAMA2; (-) strand; PAM type: YTN; PAM sequence: CTG
ggattacaggcacatgccac

SEQ ID NO: 188741 - DNA, 20 bp, Artificial Sequence
  Description of Artificial Sequence: Synthetic oligonucleotide
  Target: LAMA2; (-) strand; PAM type: YTN; PAM sequence: CTG
agtagctgggattacaggca

SEQ ID NO: 188742 - DNA, 20 bp, Artificial Sequence
  Description of Artificial Sequence: Synthetic oligonucleotide
  Target: LAMA2; (-) strand; PAM type: YTN; PAM sequence: CTC
ctgagtagctgggattacag

SEQ ID NO: 188743 - DNA, 20 bp, Artificial Sequence
  Description of Artificial Sequence: Synthetic oligonucleotide
  Target: LAMA2; (-) strand; PAM type: YTN; PAM sequence: CTC
agcctcctgagtagctggga

SEQ ID NO: 188744 - DNA, 20 bp, Artificial Sequence
  Description of Artificial Sequence: Synthetic oligonucleotide
  Target: LAMA2; (-) strand; PAM type: YTN; PAM sequence: CTG
cctcagcctcctgagtagct

SEQ ID NO: 188745 - DNA, 20 bp, Artificial Sequence
  Description of Artificial Sequence: Synthetic oligonucleotide
  Target: LAMA2; (-) strand; PAM type: YTN; PAM sequence: CTC
ctgcctcagcctcctgagta

SEQ ID NO: 188746 - DNA, 20 bp, Artificial Sequence
  Description of Artificial Sequence: Synthetic oligonucleotide
  Target: LAMA2; (-) strand; PAM type: YTN; PAM sequence: TTC
tcctgcctcagcctcctgag

SEQ ID NO: 188747 - DNA, 20 bp, Artificial Sequence
  Description of Artificial Sequence: Synthetic oligonucleotide
  Target: LAMA2; (-) strand; PAM type: YTN; PAM sequence: TTC
aagtgattctcctgcctcag

SEQ ID NO: 188748 - DNA, 20 bp, Artificial Sequence
  Description of Artificial Sequence: Synthetic oligonucleotide
  Target: LAMA2; (-) strand; PAM type: YTN; PAM sequence: CTC
cagggttcaagtgattctcc

SEQ ID NO: 188749 - DNA, 20 bp, Artificial Sequence
  Description of Artificial Sequence: Synthetic oligonucleotide
  Target: LAMA2; (-) strand; PAM type: YTN; PAM sequence: CTG
cctccagggttcaagtgatt

SEQ ID NO: 188750 - DNA, 20 bp, Artificial Sequence
  Description of Artificial Sequence: Synthetic oligonucleotide
  Target: LAMA2; (-) strand; PAM type: YTN; PAM sequence: CTC
tgcctccagggttcaagtga

SEQ ID NO: 188751 - DNA, 20 bp, Artificial Sequence
  Description of Artificial Sequence: Synthetic oligonucleotide
  Target: LAMA2; (-) strand; PAM type: YTN; PAM sequence: CTG
caacctctgcctccagggtt

SEQ ID NO: 188752 - DNA, 20 bp, Artificial Sequence
  Description of Artificial Sequence: Synthetic oligonucleotide
  Target: LAMA2; (-) strand; PAM type: YTN; PAM sequence: CTC
actgcaacctctgcctccag

SEQ ID NO: 188753 - DNA, 20 bp, Artificial Sequence
  Description of Artificial Sequence: Synthetic oligonucleotide
  Target: LAMA2; (-) strand; PAM type: YTN; PAM sequence: CTC
ggctcactgcaacctctgcc

SEQ ID NO: 188754 - DNA, 20 bp, Artificial Sequence
  Description of Artificial Sequence: Synthetic oligonucleotide
  Target: LAMA2; (-) strand; PAM type: YTN; PAM sequence: CTG
gagtgcaatgacacgatctc

SEQ ID NO: 188755 - DNA, 20 bp, Artificial Sequence
  Description of Artificial Sequence: Synthetic oligonucleotide
  Target: LAMA2; (-) strand; PAM type: YTN; PAM sequence: TTG
cccaggctggagtgcaatga

SEQ ID NO: 188756 - DNA, 20 bp, Artificial Sequence
  Description of Artificial Sequence: Synthetic oligonucleotide
  Target: LAMA2; (-) strand; PAM type: YTN; PAM sequence: CTG
ttgcccaggctggagtgcaa

SEQ ID NO: 188757 - DNA, 20 bp, Artificial Sequence
  Description of Artificial Sequence: Synthetic oligonucleotide
  Target: LAMA2; (-) strand; PAM type: YTN; PAM sequence: CTC
tgttgcccaggctggagtgc

SEQ ID NO: 188758 - DNA, 20 bp, Artificial Sequence
  Description of Artificial Sequence: Synthetic oligonucleotide
  Target: LAMA2; (-) strand; PAM type: YTN; PAM sequence: CTC
cctctgttgcccaggctgga

SEQ ID NO: 188759 - DNA, 20 bp, Artificial Sequence
  Description of Artificial Sequence: Synthetic oligonucleotide
  Target: LAMA2; (-) strand; PAM type: YTN; PAM sequence: TTG
agatagagtctccctctgtt

SEQ ID NO: 188760 - DNA, 20 bp, Artificial Sequence
  Description of Artificial Sequence: Synthetic oligonucleotide
  Target: LAMA2; (-) strand; PAM type: YTN; PAM sequence: TTT
gagatagagtctccctctgt

SEQ ID NO: 188761 - DNA, 20 bp, Artificial Sequence
  Description of Artificial Sequence: Synthetic oligonucleotide
  Target: LAMA2; (-) strand; PAM type: YTN; PAM sequence: TTG
tttgagatagagtctccctc

SEQ ID NO: 188762 - DNA, 20 bp, Artificial Sequence
  Description of Artificial Sequence: Synthetic oligonucleotide
  Target: LAMA2; (-) strand; PAM type: YTN; PAM sequence: TTT
gtttgagatagagtctccct

SEQ ID NO: 188763 - DNA, 20 bp, Artificial Sequence
  Description of Artificial Sequence: Synthetic oligonucleotide
  Target: LAMA2; (-) strand; PAM type: YTN; PAM sequence: TTT
tgtttgagatagagtctccc

SEQ ID NO: 188764 - DNA, 20 bp, Artificial Sequence
  Description of Artificial Sequence: Synthetic oligonucleotide
  Target: LAMA2; (-) strand; PAM type: YTN; PAM sequence: TTG
ttttgtttgagatagagtct

SEQ ID NO: 188765 - DNA, 20 bp, Artificial Sequence
  Description of Artificial Sequence: Synthetic oligonucleotide
  Target: LAMA2; (-) strand; PAM type: YTN; PAM sequence: TTT
gttttgtttgagatagagtc

SEQ ID NO: 188766 - DNA, 20 bp, Artificial Sequence
  Description of Artificial Sequence: Synthetic oligonucleotide
  Target: LAMA2; (-) strand; PAM type: YTN; PAM sequence: TTT
tgttttgtttgagatagagt

SEQ ID NO: 188767 - DNA, 20 bp, Artificial Sequence
  Description of Artificial Sequence: Synthetic oligonucleotide
  Target: LAMA2; (-) strand; PAM type: YTN; PAM sequence: TTG
ttttgttttgtttgagatag

SEQ ID NO: 188768 - DNA, 20 bp, Artificial Sequence
  Description of Artificial Sequence: Synthetic oligonucleotide
  Target: LAMA2; (-) strand; PAM type: YTN; PAM sequence: TTT
gttttgttttgtttgagata

SEQ ID NO: 188769 - DNA, 20 bp, Artificial Sequence
  Description of Artificial Sequence: Synthetic oligonucleotide
  Target: LAMA2; (-) strand; PAM type: YTN; PAM sequence: TTT
tgttttgttttgtttgagat

SEQ ID NO: 188770 - DNA, 20 bp, Artificial Sequence
  Description of Artificial Sequence: Synthetic oligonucleotide
  Target: LAMA2; (-) strand; PAM type: YTN; PAM sequence: TTG
ttttgttttgttttgtttga

SEQ ID NO: 188771 - DNA, 20 bp, Artificial Sequence
  Description of Artificial Sequence: Synthetic oligonucleotide
  Target: LAMA2; (-) strand; PAM type: YTN; PAM sequence: TTT
gttttgttttgttttgtttg

SEQ ID NO: 188772 - DNA, 20 bp, Artificial Sequence
  Description of Artificial Sequence: Synthetic oligonucleotide
  Target: LAMA2; (-) strand; PAM type: YTN; PAM sequence: TTT
tgttttgttttgttttgttt

SEQ ID NO: 188773 - DNA, 20 bp, Artificial Sequence
  Description of Artificial Sequence: Synthetic oligonucleotide
  Target: LAMA2; (-) strand; PAM type: YTN; PAM sequence: TTG
ttttgttttgttttgttttg

SEQ ID NO: 188774 - DNA, 20 bp, Artificial Sequence
  Description of Artificial Sequence: Synthetic oligonucleotide
  Target: LAMA2; (-) strand; PAM type: YTN; PAM sequence: TTT
gttttgttttgttttgtttt

SEQ ID NO: 188775 - DNA, 20 bp, Artificial Sequence
  Description of Artificial Sequence: Synthetic oligonucleotide
  Target: LAMA2; (-) strand; PAM type: YTN; PAM sequence: TTT
tgttttgttttgttttgttt

SEQ ID NO: 188776 - DNA, 20 bp, Artificial Sequence
  Description of Artificial Sequence: Synthetic oligonucleotide
  Target: LAMA2; (-) strand; PAM type: YTN; PAM sequence: TTT
ttgttttgttttgttttgtt

SEQ ID NO: 188777 - DNA, 20 bp, Artificial Sequence
  Description of Artificial Sequence: Synthetic oligonucleotide
  Target: LAMA2; (-) strand; PAM type: YTN; PAM sequence: TTA
aatttttgttttgttttgtt

SEQ ID NO: 188778 - DNA, 20 bp, Artificial Sequence
  Description of Artificial Sequence: Synthetic oligonucleotide
  Target: LAMA2; (-) strand; PAM type: YTN; PAM sequence: TTT
aaatttttgttttgttttgt

SEQ ID NO: 188779 - DNA, 20 bp, Artificial Sequence
  Description of Artificial Sequence: Synthetic oligonucleotide
  Target: LAMA2; (-) strand; PAM type: YTN; PAM sequence: TTT
taaatttttgttttgttttg

SEQ ID NO: 188780 - DNA, 20 bp, Artificial Sequence
  Description of Artificial Sequence: Synthetic oligonucleotide
  Target: LAMA2; (-) strand; PAM type: YTN; PAM sequence: TTT
ttaaatttttgttttgtttt

SEQ ID NO: 188781 - DNA, 20 bp, Artificial Sequence
  Description of Artificial Sequence: Synthetic oligonucleotide
  Target: LAMA2; (-) strand; PAM type: YTN; PAM sequence: CTT
tttaaatttttgttttgttt

SEQ ID NO: 188782 - DNA, 20 bp, Artificial Sequence
  Description of Artificial Sequence: Synthetic oligonucleotide
  Target: LAMA2; (-) strand; PAM type: YTN; PAM sequence: TTG
caaatctttttaaatttttg

SEQ ID NO: 188783 - DNA, 20 bp, Artificial Sequence
  Description of Artificial Sequence: Synthetic oligonucleotide
  Target: LAMA2; (-) strand; PAM type: YTN; PAM sequence: CTG
gatagatgataagttgcaaa

SEQ ID NO: 188784 - DNA, 20 bp, Artificial Sequence
  Description of Artificial Sequence: Synthetic oligonucleotide
  Target: LAMA2; (-) strand; PAM type: YTN; PAM sequence: CTG
caaactggatagatgataag

SEQ ID NO: 188785 - DNA, 20 bp, Artificial Sequence
  Description of Artificial Sequence: Synthetic oligonucleotide
  Target: LAMA2; (-) strand; PAM type: YTN; PAM sequence: CTA
ctgcaaactggatagatgat

SEQ ID NO: 188786 - DNA, 20 bp, Artificial Sequence
  Description of Artificial Sequence: Synthetic oligonucleotide
  Target: LAMA2; (-) strand; PAM type: YTN; PAM sequence: CTA
aataaggccctactgcaaac

SEQ ID NO: 188787 - DNA, 20 bp, Artificial Sequence
  Description of Artificial Sequence: Synthetic oligonucleotide
  Target: LAMA2; (-) strand; PAM type: YTN; PAM sequence: CTA
gatgctaaataaggccctac

SEQ ID NO: 188788 - DNA, 20 bp, Artificial Sequence
  Description of Artificial Sequence: Synthetic oligonucleotide
  Target: LAMA2; (-) strand; PAM type: YTN; PAM sequence: TTC
tagatgctaaataaggccct

SEQ ID NO: 188789 - DNA, 20 bp, Artificial Sequence
  Description of Artificial Sequence: Synthetic oligonucleotide
  Target: LAMA2; (-) strand; PAM type: YTN; PAM sequence: TTT
ctagatgctaaataaggccc

SEQ ID NO: 188790 - DNA, 20 bp, Artificial Sequence
  Description of Artificial Sequence: Synthetic oligonucleotide
  Target: LAMA2; (-) strand; PAM type: YTN; PAM sequence: TTC
acatggtttctagatgctaa

SEQ ID NO: 188791 - DNA, 20 bp, Artificial Sequence
  Description of Artificial Sequence: Synthetic oligonucleotide
  Target: LAMA2; (-) strand; PAM type: YTN; PAM sequence: TTT
cacatggtttctagatgcta

SEQ ID NO: 188792 - DNA, 20 bp, Artificial Sequence
  Description of Artificial Sequence: Synthetic oligonucleotide
  Target: LAMA2; (-) strand; PAM type: YTN; PAM sequence: TTT
tcacatggtttctagatgct

SEQ ID NO: 188793 - DNA, 20 bp, Artificial Sequence
  Description of Artificial Sequence: Synthetic oligonucleotide
  Target: LAMA2; (-) strand; PAM type: YTN; PAM sequence: TTT
ttcacatggtttctagatgc

SEQ ID NO: 188794 - DNA, 20 bp, Artificial Sequence
  Description of Artificial Sequence: Synthetic oligonucleotide
  Target: LAMA2; (-) strand; PAM type: YTN; PAM sequence: CTT
tttcacatggtttctagatg

SEQ ID NO: 188795 - DNA, 20 bp, Artificial Sequence
  Description of Artificial Sequence: Synthetic oligonucleotide
  Target: LAMA2; (-) strand; PAM type: YTN; PAM sequence: CTG
atctttttcacatggtttct

SEQ ID NO: 188796 - DNA, 20 bp, Artificial Sequence
  Description of Artificial Sequence: Synthetic oligonucleotide
  Target: LAMA2; (-) strand; PAM type: YTN; PAM sequence: TTC
ctgatctttttcacatggtt

SEQ ID NO: 188797 - DNA, 20 bp, Artificial Sequence
  Description of Artificial Sequence: Synthetic oligonucleotide
  Target: LAMA2; (-) strand; PAM type: YTN; PAM sequence: CTT
cctgatctttttcacatggt

SEQ ID NO: 188798 - DNA, 20 bp, Artificial Sequence
  Description of Artificial Sequence: Synthetic oligonucleotide
  Target: LAMA2; (-) strand; PAM type: YTN; PAM sequence: TTC
ttcctgatctttttcacatg

SEQ ID NO: 188799 - DNA, 20 bp, Artificial Sequence
  Description of Artificial Sequence: Synthetic oligonucleotide
  Target: LAMA2; (-) strand; PAM type: YTN; PAM sequence: TTT
cttcctgatctttttcacat

SEQ ID NO: 188800 - DNA, 20 bp, Artificial Sequence
  Description of Artificial Sequence: Synthetic oligonucleotide
  Target: LAMA2; (-) strand; PAM type: YTN; PAM sequence: TTA
caataatttcttcctgatct

SEQ ID NO: 188801 - DNA, 20 bp, Artificial Sequence
  Description of Artificial Sequence: Synthetic oligonucleotide
  Target: LAMA2; (-) strand; PAM type: YTN; PAM sequence: TTT
acaataatttcttcctgatc

SEQ ID NO: 188802 - DNA, 20 bp, Artificial Sequence
  Description of Artificial Sequence: Synthetic oligonucleotide
  Target: LAMA2; (-) strand; PAM type: YTN; PAM sequence: TTA
tttacaataatttcttcctg

SEQ ID NO: 188803 - DNA, 20 bp, Artificial Sequence
  Description of Artificial Sequence: Synthetic oligonucleotide
  Target: LAMA2; (-) strand; PAM type: YTN; PAM sequence: TTA
caataattatttacaataat

SEQ ID NO: 188804 - DNA, 20 bp, Artificial Sequence
  Description of Artificial Sequence: Synthetic oligonucleotide
  Target: LAMA2; (-) strand; PAM type: YTN; PAM sequence: TTT
acaataattatttacaataa

SEQ ID NO: 188805 - DNA, 20 bp, Artificial Sequence
  Description of Artificial Sequence: Synthetic oligonucleotide
  Target: LAMA2; (-) strand; PAM type: YTN; PAM sequence: TTG
tgcaaccatttacaataatt

SEQ ID NO: 188806 - DNA, 20 bp, Artificial Sequence
  Description of Artificial Sequence: Synthetic oligonucleotide
  Target: LAMA2; (-) strand; PAM type: YTN; PAM sequence: CTT
gtgcaaccatttacaataat

SEQ ID NO: 188807 - DNA, 20 bp, Artificial Sequence
  Description of Artificial Sequence: Synthetic oligonucleotide
  Target: LAMA2; (-) strand; PAM type: YTN; PAM sequence: TTA
aaccacttgtgcaaccattt

SEQ ID NO: 188808 - DNA, 20 bp, Artificial Sequence
  Description of Artificial Sequence: Synthetic oligonucleotide
  Target: LAMA2; (-) strand; PAM type: YTN; PAM sequence: TTA
gaagttaaaccacttgtgca

SEQ ID NO: 188809 - DNA, 20 bp, Artificial Sequence
  Description of Artificial Sequence: Synthetic oligonucleotide
  Target: LAMA2; (-) strand; PAM type: YTN; PAM sequence: CTA
gattagaagttaaaccactt

SEQ ID NO: 188810 - DNA, 20 bp, Artificial Sequence
  Description of Artificial Sequence: Synthetic oligonucleotide
  Target: LAMA2; (-) strand; PAM type: YTN; PAM sequence: TTC
tagattagaagttaaaccac

SEQ ID NO: 188811 - DNA, 20 bp, Artificial Sequence
  Description of Artificial Sequence: Synthetic oligonucleotide
  Target: LAMA2; (-) strand; PAM type: YTN; PAM sequence: CTT
ctagattagaagttaaacca

SEQ ID NO: 188812 - DNA, 20 bp, Artificial Sequence
  Description of Artificial Sequence: Synthetic oligonucleotide
  Target: LAMA2; (-) strand; PAM type: YTN; PAM sequence: CTA
aacccgaatcttctagatta

SEQ ID NO: 188813 - DNA, 20 bp, Artificial Sequence
  Description of Artificial Sequence: Synthetic oligonucleotide
  Target: LAMA2; (-) strand; PAM type: YTN; PAM sequence: CTG
taaacaaatcctaaacccga

SEQ ID NO: 188814 - DNA, 20 bp, Artificial Sequence
  Description of Artificial Sequence: Synthetic oligonucleotide
  Target: LAMA2; (-) strand; PAM type: YTN; PAM sequence: TTG
caactgtaaacaaatcctaa

SEQ ID NO: 188815 - DNA, 20 bp, Artificial Sequence
  Description of Artificial Sequence: Synthetic oligonucleotide
  Target: LAMA2; (-) strand; PAM type: YTN; PAM sequence: CTC
aagttgcaactgtaaacaaa

SEQ ID NO: 188816 - DNA, 20 bp, Artificial Sequence
  Description of Artificial Sequence: Synthetic oligonucleotide
  Target: LAMA2; (-) strand; PAM type: YTN; PAM sequence: CTA
tcgaggctcaagttgcaact

SEQ ID NO: 188817 - DNA, 20 bp, Artificial Sequence
  Description of Artificial Sequence: Synthetic oligonucleotide
  Target: LAMA2; (-) strand; PAM type: YTN; PAM sequence: TTA
gctatcgaggctcaagttgc

SEQ ID NO: 188818 - DNA, 20 bp, Artificial Sequence
  Description of Artificial Sequence: Synthetic oligonucleotide
  Target: LAMA2; (-) strand; PAM type: YTN; PAM sequence: TTT
agctatcgaggctcaagttg

SEQ ID NO: 188819 - DNA, 20 bp, Artificial Sequence
  Description of Artificial Sequence: Synthetic oligonucleotide
  Target: LAMA2; (-) strand; PAM type: YTN; PAM sequence: CTG
tttagctatcgaggctcaag

SEQ ID NO: 188820 - DNA, 20 bp, Artificial Sequence
  Description of Artificial Sequence: Synthetic oligonucleotide
  Target: LAMA2; (-) strand; PAM type: YTN; PAM sequence: TTC
ctgtttagctatcgaggctc

SEQ ID NO: 188821 - DNA, 20 bp, Artificial Sequence
  Description of Artificial Sequence: Synthetic oligonucleotide
  Target: LAMA2; (-) strand; PAM type: YTN; PAM sequence: CTA
aattcctgtttagctatcga

SEQ ID NO: 188822 - DNA, 20 bp, Artificial Sequence
  Description of Artificial Sequence: Synthetic oligonucleotide
  Target: LAMA2; (-) strand; PAM type: YTN; PAM sequence: CTG
cctaaattcctgtttagcta

SEQ ID NO: 188823 - DNA, 20 bp, Artificial Sequence
  Description of Artificial Sequence: Synthetic oligonucleotide
  Target: LAMA2; (-) strand; PAM type: YTN; PAM sequence: TTC
tgcctaaattcctgtttagc

SEQ ID NO: 188824 - DNA, 20 bp, Artificial Sequence
  Description of Artificial Sequence: Synthetic oligonucleotide
  Target: LAMA2; (-) strand; PAM type: YTN; PAM sequence: CTT
ctgcctaaattcctgtttag

SEQ ID NO: 188825 - DNA, 20 bp, Artificial Sequence
  Description of Artificial Sequence: Synthetic oligonucleotide
  Target: LAMA2; (-) strand; PAM type: YTN; PAM sequence: CTG
aaacggagcttctgcctaaa

SEQ ID NO: 188826 - DNA, 20 bp, Artificial Sequence
  Description of Artificial Sequence: Synthetic oligonucleotide
  Target: LAMA2; (-) strand; PAM type: YTN; PAM sequence: TTA
ctgaaacggagcttctgcct

SEQ ID NO: 188827 - DNA, 20 bp, Artificial Sequence
  Description of Artificial Sequence: Synthetic oligonucleotide
  Target: LAMA2; (-) strand; PAM type: YTN; PAM sequence: TTT
actgaaacggagcttctgcc

SEQ ID NO: 188828 - DNA, 20 bp, Artificial Sequence
  Description of Artificial Sequence: Synthetic oligonucleotide
  Target: LAMA2; (-) strand; PAM type: YTN; PAM sequence: CTC
atttactgaaacggagcttc

SEQ ID NO: 188829 - DNA, 20 bp, Artificial Sequence
  Description of Artificial Sequence: Synthetic oligonucleotide
  Target: LAMA2; (-) strand; PAM type: YTN; PAM sequence: TTC
tcatttactgaaacggagct

SEQ ID NO: 188830 - DNA, 20 bp, Artificial Sequence
  Description of Artificial Sequence: Synthetic oligonucleotide
  Target: LAMA2; (-) strand; PAM type: YTN; PAM sequence: TTT
ctcatttactgaaacggagc

SEQ ID NO: 188831 - DNA, 20 bp, Artificial Sequence
  Description of Artificial Sequence: Synthetic oligonucleotide
  Target: LAMA2; (-) strand; PAM type: YTN; PAM sequence: TTT
tctcatttactgaaacggag

SEQ ID NO: 188832 - DNA, 20 bp, Artificial Sequence
  Description of Artificial Sequence: Synthetic oligonucleotide
  Target: LAMA2; (-) strand; PAM type: YTN; PAM sequence: TTG
ttttctcatttactgaaacg

SEQ ID NO: 188833 - DNA, 20 bp, Artificial Sequence
  Description of Artificial Sequence: Synthetic oligonucleotide
  Target: LAMA2; (-) strand; PAM type: YTN; PAM sequence: CTT
gttttctcatttactgaaac

SEQ ID NO: 188834 - DNA, 20 bp, Artificial Sequence
  Description of Artificial Sequence: Synthetic oligonucleotide
  Target: LAMA2; (-) strand; PAM type: YTN; PAM sequence: CTG
tcttgttttctcatttactg

SEQ ID NO: 188835 - DNA, 20 bp, Artificial Sequence
  Description of Artificial Sequence: Synthetic oligonucleotide
  Target: LAMA2; (-) strand; PAM type: YTN; PAM sequence: CTC
tgtcttgttttctcatttac

SEQ ID NO: 188836 - DNA, 20 bp, Artificial Sequence
  Description of Artificial Sequence: Synthetic oligonucleotide
  Target: LAMA2; (-) strand; PAM type: YTN; PAM sequence: CTA
aactctgtcttgttttctca

SEQ ID NO: 188837 - DNA, 20 bp, Artificial Sequence
  Description of Artificial Sequence: Synthetic oligonucleotide
  Target: LAMA2; (-) strand; PAM type: YTN; PAM sequence: CTC
taaactctgtcttgttttct

SEQ ID NO: 188838 - DNA, 20 bp, Artificial Sequence
  Description of Artificial Sequence: Synthetic oligonucleotide
  Target: LAMA2; (-) strand; PAM type: YTN; PAM sequence: TTC
tctaaactctgtcttgtttt

SEQ ID NO: 188839 - DNA, 20 bp, Artificial Sequence
  Description of Artificial Sequence: Synthetic oligonucleotide
  Target: LAMA2; (-) strand; PAM type: YTN; PAM sequence: TTT
ctctaaactctgtcttgttt

SEQ ID NO: 188840 - DNA, 20 bp, Artificial Sequence
  Description of Artificial Sequence: Synthetic oligonucleotide
  Target: LAMA2; (-) strand; PAM type: YTN; PAM sequence: CTT
tctctaaactctgtcttgtt

SEQ ID NO: 188841 - DNA, 20 bp, Artificial Sequence
  Description of Artificial Sequence: Synthetic oligonucleotide
  Target: LAMA2; (-) strand; PAM type: YTN; PAM sequence: TTA
tctttctctaaactctgtct

SEQ ID NO: 188842 - DNA, 20 bp, Artificial Sequence
  Description of Artificial Sequence: Synthetic oligonucleotide
  Target: LAMA2; (-) strand; PAM type: YTN; PAM sequence: TTT
atctttctctaaactctgtc

SEQ ID NO: 188843 - DNA, 20 bp, Artificial Sequence
  Description of Artificial Sequence: Synthetic oligonucleotide
  Target: LAMA2; (-) strand; PAM type: YTN; PAM sequence: TTT
tatctttctctaaactctgt

SEQ ID NO: 188844 - DNA, 20 bp, Artificial Sequence
  Description of Artificial Sequence: Synthetic oligonucleotide
  Target: LAMA2; (-) strand; PAM type: YTN; PAM sequence: CTT
ttatctttctctaaactctg

SEQ ID NO: 188845 - DNA, 20 bp, Artificial Sequence
  Description of Artificial Sequence: Synthetic oligonucleotide
  Target: LAMA2; (-) strand; PAM type: YTN; PAM sequence: CTA
cttttatctttctctaaact

SEQ ID NO: 188846 - DNA, 20 bp, Artificial Sequence
  Description of Artificial Sequence: Synthetic oligonucleotide
  Target: LAMA2; (-) strand; PAM type: YTN; PAM sequence: CTG
gaaaatctacttttatcttt

SEQ ID NO: 188847 - DNA, 20 bp, Artificial Sequence
  Description of Artificial Sequence: Synthetic oligonucleotide
  Target: LAMA2; (-) strand; PAM type: YTN; PAM sequence: CTA
agcctggaaaatctactttt

SEQ ID NO: 188848 - DNA, 20 bp, Artificial Sequence
  Description of Artificial Sequence: Synthetic oligonucleotide
  Target: LAMA2; (-) strand; PAM type: YTN; PAM sequence: TTG
gtatatactaagcctggaaa

SEQ ID NO: 188849 - DNA, 20 bp, Artificial Sequence
  Description of Artificial Sequence: Synthetic oligonucleotide
  Target: LAMA2; (-) strand; PAM type: YTN; PAM sequence: CTT
ggtatatactaagcctggaa

SEQ ID NO: 188850 - DNA, 20 bp, Artificial Sequence
  Description of Artificial Sequence: Synthetic oligonucleotide
  Target: LAMA2; (-) strand; PAM type: YTN; PAM sequence: CTG
cttggtatatactaagcctg

SEQ ID NO: 188851 - DNA, 20 bp, Artificial Sequence
  Description of Artificial Sequence: Synthetic oligonucleotide
  Target: LAMA2; (-) strand; PAM type: YTN; PAM sequence: CTA
tctgcttggtatatactaag

SEQ ID NO: 188852 - DNA, 20 bp, Artificial Sequence
  Description of Artificial Sequence: Synthetic oligonucleotide
  Target: LAMA2; (-) strand; PAM type: YTN; PAM sequence: TTC
tatctgcttggtatatacta

SEQ ID NO: 188853 - DNA, 20 bp, Artificial Sequence
  Description of Artificial Sequence: Synthetic oligonucleotide
  Target: LAMA2; (-) strand; PAM type: YTN; PAM sequence: TTT
ctatctgcttggtatatact

SEQ ID NO: 188854 - DNA, 20 bp, Artificial Sequence
  Description of Artificial Sequence: Synthetic oligonucleotide
  Target: LAMA2; (-) strand; PAM type: YTN; PAM sequence: TTA
tttctatctgcttggtatat

SEQ ID NO: 188855 - DNA, 20 bp, Artificial Sequence
  Description of Artificial Sequence: Synthetic oligonucleotide
  Target: LAMA2; (-) strand; PAM type: YTN; PAM sequence: TTT
atttctatctgcttggtata

SEQ ID NO: 188856 - DNA, 20 bp, Artificial Sequence
  Description of Artificial Sequence: Synthetic oligonucleotide
  Target: LAMA2; (-) strand; PAM type: YTN; PAM sequence: TTT
tatttctatctgcttggtat

SEQ ID NO: 188857 - DNA, 20 bp, Artificial Sequence
  Description of Artificial Sequence: Synthetic oligonucleotide
  Target: LAMA2; (-) strand; PAM type: YTN; PAM sequence: TTA
gttttatttctatctgcttg

SEQ ID NO: 188858 - DNA, 20 bp, Artificial Sequence
  Description of Artificial Sequence: Synthetic oligonucleotide
  Target: LAMA2; (-) strand; PAM type: YTN; PAM sequence: CTA
gaattagttttatttctatc

SEQ ID NO: 188859 - DNA, 20 bp, Artificial Sequence
  Description of Artificial Sequence: Synthetic oligonucleotide
  Target: LAMA2; (-) strand; PAM type: YTN; PAM sequence: TTA
ccaatggggaaagcctagaa

SEQ ID NO: 188860 - DNA, 20 bp, Artificial Sequence
  Description of Artificial Sequence: Synthetic oligonucleotide
  Target: LAMA2; (-) strand; PAM type: YTN; PAM sequence: CTT
accaatggggaaagcctaga

SEQ ID NO: 188861 - DNA, 20 bp, Artificial Sequence
  Description of Artificial Sequence: Synthetic oligonucleotide
  Target: LAMA2; (-) strand; PAM type: YTN; PAM sequence: TTC
agtcttaccaatggggaaag

SEQ ID NO: 188862 - DNA, 20 bp, Artificial Sequence
  Description of Artificial Sequence: Synthetic oligonucleotide
  Target: LAMA2; (-) strand; PAM type: YTN; PAM sequence: CTA
aattcagtcttaccaatggg

SEQ ID NO: 188863 - DNA, 20 bp, Artificial Sequence
  Description of Artificial Sequence: Synthetic oligonucleotide
  Target: LAMA2; (-) strand; PAM type: YTN; PAM sequence: CTC
taaattcagtcttaccaatg

SEQ ID NO: 188864 - DNA, 20 bp, Artificial Sequence
  Description of Artificial Sequence: Synthetic oligonucleotide
  Target: LAMA2; (-) strand; PAM type: YTN; PAM sequence: CTG
acctctaaattcagtcttac

SEQ ID NO: 188865 - DNA, 20 bp, Artificial Sequence
  Description of Artificial Sequence: Synthetic oligonucleotide
  Target: LAMA2; (-) strand; PAM type: YTN; PAM sequence: TTC
tgacctctaaattcagtctt

SEQ ID NO: 188866 - DNA, 20 bp, Artificial Sequence
  Description of Artificial Sequence: Synthetic oligonucleotide
  Target: LAMA2; (-) strand; PAM type: YTN; PAM sequence: CTT
ctgacctctaaattcagtct

SEQ ID NO: 188867 - DNA, 20 bp, Artificial Sequence
  Description of Artificial Sequence: Synthetic oligonucleotide
  Target: LAMA2; (-) strand; PAM type: YTN; PAM sequence: TTC
acaacttctgacctctaaat

SEQ ID NO: 188868 - DNA, 20 bp, Artificial Sequence
  Description of Artificial Sequence: Synthetic oligonucleotide
  Target: LAMA2; (-) strand; PAM type: YTN; PAM sequence: CTT
cacaacttctgacctctaaa

SEQ ID NO: 188869 - DNA, 20 bp, Artificial Sequence
  Description of Artificial Sequence: Synthetic oligonucleotide
  Target: LAMA2; (-) strand; PAM type: YTN; PAM sequence: TTC
cttcacaacttctgacctct

SEQ ID NO: 188870 - DNA, 20 bp, Artificial Sequence
  Description of Artificial Sequence: Synthetic oligonucleotide
  Target: LAMA2; (-) strand; PAM type: YTN; PAM sequence: TTT
ccttcacaacttctgacctc

SEQ ID NO: 188871 - DNA, 20 bp, Artificial Sequence
  Description of Artificial Sequence: Synthetic oligonucleotide
  Target: LAMA2; (-) strand; PAM type: YTN; PAM sequence: TTC
caatgcatataggcccaacc

SEQ ID NO: 188872 - DNA, 20 bp, Artificial Sequence
  Description of Artificial Sequence: Synthetic oligonucleotide
  Target: LAMA2; (-) strand; PAM type: YTN; PAM sequence: TTA
ccacattccaatgcatatag

SEQ ID NO: 188873 - DNA, 20 bp, Artificial Sequence
  Description of Artificial Sequence: Synthetic oligonucleotide
  Target: LAMA2; (-) strand; PAM type: YTN; PAM sequence: TTT
accacattccaatgcatata

SEQ ID NO: 188874 - DNA, 20 bp, Artificial Sequence
  Description of Artificial Sequence: Synthetic oligonucleotide
  Target: LAMA2; (-) strand; PAM type: YTN; PAM sequence: TTC
atttaccacattccaatgca

SEQ ID NO: 188875 - DNA, 20 bp, Artificial Sequence
  Description of Artificial Sequence: Synthetic oligonucleotide
  Target: LAMA2; (-) strand; PAM type: YTN; PAM sequence: TTC
attcatttaccacattccaa

SEQ ID NO: 188876 - DNA, 20 bp, Artificial Sequence
  Description of Artificial Sequence: Synthetic oligonucleotide
  Target: LAMA2; (-) strand; PAM type: YTN; PAM sequence: CTG
taaacattcattcatttacc

SEQ ID NO: 188877 - DNA, 20 bp, Artificial Sequence
  Description of Artificial Sequence: Synthetic oligonucleotide
  Target: LAMA2; (-) strand; PAM type: YTN; PAM sequence: CTC
actgtaaacattcattcatt

SEQ ID NO: 188878 - DNA, 20 bp, Artificial Sequence
  Description of Artificial Sequence: Synthetic oligonucleotide
  Target: LAMA2; (-) strand; PAM type: YTN; PAM sequence: TTA
ctcactgtaaacattcattc

SEQ ID NO: 188879 - DNA, 20 bp, Artificial Sequence
  Description of Artificial Sequence: Synthetic oligonucleotide
  Target: LAMA2; (-) strand; PAM type: YTN; PAM sequence: TTT
actcactgtaaacattcatt

SEQ ID NO: 188880 - DNA, 20 bp, Artificial Sequence
  Description of Artificial Sequence: Synthetic oligonucleotide
  Target: LAMA2; (-) strand; PAM type: YTN; PAM sequence: CTT
tactcactgtaaacattcat

SEQ ID NO: 188881 - DNA, 20 bp, Artificial Sequence
  Description of Artificial Sequence: Synthetic oligonucleotide
  Target: LAMA2; (-) strand; PAM type: YTN; PAM sequence: TTC
tttactcactgtaaacattc

SEQ ID NO: 188882 - DNA, 20 bp, Artificial Sequence
  Description of Artificial Sequence: Synthetic oligonucleotide
  Target: LAMA2; (-) strand; PAM type: YTN; PAM sequence: CTT
ctttactcactgtaaacatt

SEQ ID NO: 188883 - DNA, 20 bp, Artificial Sequence
  Description of Artificial Sequence: Synthetic oligonucleotide
  Target: LAMA2; (-) strand; PAM type: YTN; PAM sequence: TTA
tcttctttactcactgtaaa

SEQ ID NO: 188884 - DNA, 20 bp, Artificial Sequence
  Description of Artificial Sequence: Synthetic oligonucleotide
  Target: LAMA2; (-) strand; PAM type: YTN; PAM sequence: TTT
atcttctttactcactgtaa

SEQ ID NO: 188885 - DNA, 20 bp, Artificial Sequence
  Description of Artificial Sequence: Synthetic oligonucleotide
  Target: LAMA2; (-) strand; PAM type: YTN; PAM sequence: TTT
tatcttctttactcactgta

SEQ ID NO: 188886 - DNA, 20 bp, Artificial Sequence
  Description of Artificial Sequence: Synthetic oligonucleotide
  Target: LAMA2; (-) strand; PAM type: YTN; PAM sequence: TTT
ttatcttctttactcactgt

SEQ ID NO: 188887 - DNA, 20 bp, Artificial Sequence
  Description of Artificial Sequence: Synthetic oligonucleotide
  Target: LAMA2; (-) strand; PAM type: YTN; PAM sequence: TTT
tttatcttctttactcactg

SEQ ID NO: 188888 - DNA, 20 bp, Artificial Sequence
  Description of Artificial Sequence: Synthetic oligonucleotide
  Target: LAMA2; (-) strand; PAM type: YTN; PAM sequence: TTT
ttttatcttctttactcact

SEQ ID NO: 188889 - DNA, 20 bp, Artificial Sequence
  Description of Artificial Sequence: Synthetic oligonucleotide
  Target: LAMA2; (-) strand; PAM type: YTN; PAM sequence: TTC
cacaagagcaggaatttttt

SEQ ID NO: 188890 - DNA, 20 bp, Artificial Sequence
  Description of Artificial Sequence: Synthetic oligonucleotide
  Target: LAMA2; (-) strand; PAM type: YTN; PAM sequence: TTA
gttccacaagagcaggaatt

SEQ ID NO: 188891 - DNA, 20 bp, Artificial Sequence
  Description of Artificial Sequence: Synthetic oligonucleotide
  Target: LAMA2; (-) strand; PAM type: YTN; PAM sequence: CTA
aatattagttccacaagagc

SEQ ID NO: 188892 - DNA, 20 bp, Artificial Sequence
  Description of Artificial Sequence: Synthetic oligonucleotide
  Target: LAMA2; (-) strand; PAM type: YTN; PAM sequence: CTC
catcccaactaaatattagt

SEQ ID NO: 188893 - DNA, 20 bp, Artificial Sequence
  Description of Artificial Sequence: Synthetic oligonucleotide
  Target: LAMA2; (-) strand; PAM type: YTN; PAM sequence: CTC
atctccatcccaactaaata

SEQ ID NO: 188894 - DNA, 20 bp, Artificial Sequence
  Description of Artificial Sequence: Synthetic oligonucleotide
  Target: LAMA2; (-) strand; PAM type: YTN; PAM sequence: CTG
ctcatctccatcccaactaa

SEQ ID NO: 188895 - DNA, 20 bp, Artificial Sequence
  Description of Artificial Sequence: Synthetic oligonucleotide
  Target: LAMA2; (-) strand; PAM type: YTN; PAM sequence: CTG
tctgctcatctccatcccaa

SEQ ID NO: 188896 - DNA, 20 bp, Artificial Sequence
  Description of Artificial Sequence: Synthetic oligonucleotide
  Target: LAMA2; (-) strand; PAM type: YTN; PAM sequence: TTC
atcatagtcctgtctgctca

SEQ ID NO: 188897 - DNA, 20 bp, Artificial Sequence
  Description of Artificial Sequence: Synthetic oligonucleotide
  Target: LAMA2; (-) strand; PAM type: YTN; PAM sequence: TTC
atcatatattcatcatagtc

SEQ ID NO: 188898 - DNA, 20 bp, Artificial Sequence
  Description of Artificial Sequence: Synthetic oligonucleotide
  Target: LAMA2; (-) strand; PAM type: YTN; PAM sequence: CTT
catcatatattcatcatagt

SEQ ID NO: 188899 - DNA, 20 bp, Artificial Sequence
  Description of Artificial Sequence: Synthetic oligonucleotide
  Target: LAMA2; (-) strand; PAM type: YTN; PAM sequence: TTG
cttcatcatatattcatcat

SEQ ID NO: 188900 - DNA, 20 bp, Artificial Sequence
  Description of Artificial Sequence: Synthetic oligonucleotide
  Target: LAMA2; (-) strand; PAM type: YTN; PAM sequence: TTG
ttgcttcatcatatattcat

SEQ ID NO: 188901 - DNA, 20 bp, Artificial Sequence
  Description of Artificial Sequence: Synthetic oligonucleotide
  Target: LAMA2; (-) strand; PAM type: YTN; PAM sequence: TTT
gttgcttcatcatatattca

SEQ ID NO: 188902 - DNA, 20 bp, Artificial Sequence
  Description of Artificial Sequence: Synthetic oligonucleotide
  Target: LAMA2; (-) strand; PAM type: YTN; PAM sequence: TTT
tgttgcttcatcatatattc

SEQ ID NO: 188903 - DNA, 20 bp, Artificial Sequence
  Description of Artificial Sequence: Synthetic oligonucleotide
  Target: LAMA2; (-) strand; PAM type: YTN; PAM sequence: CTT
ttgttgcttcatcatatatt

SEQ ID NO: 188904 - DNA, 20 bp, Artificial Sequence
  Description of Artificial Sequence: Synthetic oligonucleotide
  Target: LAMA2; (-) strand; PAM type: YTN; PAM sequence: TTC
ttttgttgcttcatcatata

SEQ ID NO: 188905 - DNA, 20 bp, Artificial Sequence
  Description of Artificial Sequence: Synthetic oligonucleotide
  Target: LAMA2; (-) strand; PAM type: YTN; PAM sequence: TTA
tacaatataggtgttctttt

SEQ ID NO: 188906 - DNA, 20 bp, Artificial Sequence
  Description of Artificial Sequence: Synthetic oligonucleotide
  Target: LAMA2; (-) strand; PAM type: YTN; PAM sequence: TTT
atacaatataggtgttcttt

SEQ ID NO: 188907 - DNA, 20 bp, Artificial Sequence
  Description of Artificial Sequence: Synthetic oligonucleotide
  Target: LAMA2; (-) strand; PAM type: YTN; PAM sequence: TTT
tatacaatataggtgttctt

SEQ ID NO: 188908 - DNA, 20 bp, Artificial Sequence
  Description of Artificial Sequence: Synthetic oligonucleotide
  Target: LAMA2; (-) strand; PAM type: YTN; PAM sequence: CTA
cattttatacaatataggtg

SEQ ID NO: 188909 - DNA, 20 bp, Artificial Sequence
  Description of Artificial Sequence: Synthetic oligonucleotide
  Target: LAMA2; (-) strand; PAM type: YTN; PAM sequence: TTC
atcaactacattttatacaa

SEQ ID NO: 188910 - DNA, 20 bp, Artificial Sequence
  Description of Artificial Sequence: Synthetic oligonucleotide
  Target: LAMA2; (-) strand; PAM type: YTN; PAM sequence: TTT
catcaactacattttataca

SEQ ID NO: 188911 - DNA, 20 bp, Artificial Sequence
  Description of Artificial Sequence: Synthetic oligonucleotide
  Target: LAMA2; (-) strand; PAM type: YTN; PAM sequence: TTT
tcatcaactacattttatac

SEQ ID NO: 188912 - DNA, 20 bp, Artificial Sequence
  Description of Artificial Sequence: Synthetic oligonucleotide
  Target: LAMA2; (-) strand; PAM type: YTN; PAM sequence: TTT
ttcatcaactacattttata

SEQ ID NO: 188913 - DNA, 20 bp, Artificial Sequence
  Description of Artificial Sequence: Synthetic oligonucleotide
  Target: LAMA2; (-) strand; PAM type: YTN; PAM sequence: TTG
tccaggacatttttcatcaa

SEQ ID NO: 188914 - DNA, 20 bp, Artificial Sequence
  Description of Artificial Sequence: Synthetic oligonucleotide
  Target: LAMA2; (-) strand; PAM type: YTN; PAM sequence: TTT
gtccaggacatttttcatca

SEQ ID NO: 188915 - DNA, 20 bp, Artificial Sequence
  Description of Artificial Sequence: Synthetic oligonucleotide
  Target: LAMA2; (-) strand; PAM type: YTN; PAM sequence: TTG
tttgtccaggacatttttca

SEQ ID NO: 188916 - DNA, 20 bp, Artificial Sequence
  Description of Artificial Sequence: Synthetic oligonucleotide
  Target: LAMA2; (-) strand; PAM type: YTN; PAM sequence: TTT
gtttgtccaggacatttttc

SEQ ID NO: 188917 - DNA, 20 bp, Artificial Sequence
  Description of Artificial Sequence: Synthetic oligonucleotide
  Target: LAMA2; (-) strand; PAM type: YTN; PAM sequence: TTG
tatttgtttgtccaggacat

SEQ ID NO: 188918 - DNA, 20 bp, Artificial Sequence
  Description of Artificial Sequence: Synthetic oligonucleotide
  Target: LAMA2; (-) strand; PAM type: YTN; PAM sequence: TTA
ccccgttgtatttgtttgtc

SEQ ID NO: 188919 - DNA, 20 bp, Artificial Sequence
  Description of Artificial Sequence: Synthetic oligonucleotide
  Target: LAMA2; (-) strand; PAM type: YTN; PAM sequence: CTT
accccgttgtatttgtttgt

SEQ ID NO: 188920 - DNA, 20 bp, Artificial Sequence
  Description of Artificial Sequence: Synthetic oligonucleotide
  Target: LAMA2; (-) strand; PAM type: YTN; PAM sequence: CTG
tccttaccccgttgtatttg

SEQ ID NO: 188921 - DNA, 20 bp, Artificial Sequence
  Description of Artificial Sequence: Synthetic oligonucleotide
  Target: LAMA2; (-) strand; PAM type: YTN; PAM sequence: CTG
actgtccttaccccgttgta

SEQ ID NO: 188922 - DNA, 20 bp, Artificial Sequence
  Description of Artificial Sequence: Synthetic oligonucleotide
  Target: LAMA2; (-) strand; PAM type: YTN; PAM sequence: CTC
ctgactgtccttaccccgtt

SEQ ID NO: 188923 - DNA, 20 bp, Artificial Sequence
  Description of Artificial Sequence: Synthetic oligonucleotide
  Target: LAMA2; (-) strand; PAM type: YTN; PAM sequence: CTA
gaactcctgactgtccttac

SEQ ID NO: 188924 - DNA, 20 bp, Artificial Sequence
  Description of Artificial Sequence: Synthetic oligonucleotide
  Target: LAMA2; (-) strand; PAM type: YTN; PAM sequence: TTC
ctagaactcctgactgtcct

SEQ ID NO: 188925 - DNA, 20 bp, Artificial Sequence
  Description of Artificial Sequence: Synthetic oligonucleotide
  Target: LAMA2; (-) strand; PAM type: YTN; PAM sequence: CTC
cattcctagaactcctgact

SEQ ID NO: 188926 - DNA, 20 bp, Artificial Sequence
  Description of Artificial Sequence: Synthetic oligonucleotide
  Target: LAMA2; (-) strand; PAM type: YTN; PAM sequence: CTC
cctccattcctagaactcct

SEQ ID NO: 188927 - DNA, 20 bp, Artificial Sequence
  Description of Artificial Sequence: Synthetic oligonucleotide
  Target: LAMA2; (-) strand; PAM type: YTN; PAM sequence: TTA
ccaacaaaatagccatcaac

SEQ ID NO: 188928 - DNA, 20 bp, Artificial Sequence
  Description of Artificial Sequence: Synthetic oligonucleotide
  Target: LAMA2; (-) strand; PAM type: YTN; PAM sequence: TTT
accaacaaaatagccatcaa

SEQ ID NO: 188929 - DNA, 20 bp, Artificial Sequence
  Description of Artificial Sequence: Synthetic oligonucleotide
  Target: LAMA2; (-) strand; PAM type: YTN; PAM sequence: CTT
taccaacaaaatagccatca

SEQ ID NO: 188930 - DNA, 20 bp, Artificial Sequence
  Description of Artificial Sequence: Synthetic oligonucleotide
  Target: LAMA2; (-) strand; PAM type: YTN; PAM sequence: TTA
ccaacctttaccaacaaaat

SEQ ID NO: 188931 - DNA, 20 bp, Artificial Sequence
  Description of Artificial Sequence: Synthetic oligonucleotide
  Target: LAMA2; (-) strand; PAM type: YTN; PAM sequence: TTT
accaacctttaccaacaaaa

SEQ ID NO: 188932 - DNA, 20 bp, Artificial Sequence
  Description of Artificial Sequence: Synthetic oligonucleotide
  Target: LAMA2; (-) strand; PAM type: YTN; PAM sequence: CTT
taccaacctttaccaacaaa

SEQ ID NO: 188933 - DNA, 20 bp, Artificial Sequence
  Description of Artificial Sequence: Synthetic oligonucleotide
  Target: LAMA2; (-) strand; PAM type: YTN; PAM sequence: CTC
aaagaggtcaacctttacca

SEQ ID NO: 188934 - DNA, 20 bp, Artificial Sequence
  Description of Artificial Sequence: Synthetic oligonucleotide
  Target: LAMA2; (-) strand; PAM type: YTN; PAM sequence: CTC
tcaaagaggtcaacctttac

SEQ ID NO: 188935 - DNA, 20 bp, Artificial Sequence
  Description of Artificial Sequence: Synthetic oligonucleotide
  Target: LAMA2; (-) strand; PAM type: YTN; PAM sequence: TTG
ccaaagtgagatcctctcaa

SEQ ID NO: 188936 - DNA, 20 bp, Artificial Sequence
  Description of Artificial Sequence: Synthetic oligonucleotide
  Target: LAMA2; (-) strand; PAM type: YTN; PAM sequence: TTT
gccaaagtgagatcctctca

SEQ ID NO: 188937 - DNA, 20 bp, Artificial Sequence
  Description of Artificial Sequence: Synthetic oligonucleotide
  Target: LAMA2; (-) strand; PAM type: YTN; PAM sequence: TTC
aagtgtttgccaaagtgaga

SEQ ID NO: 188938 - DNA, 20 bp, Artificial Sequence
  Description of Artificial Sequence: Synthetic oligonucleotide
  Target: LAMA2; (-) strand; PAM type: YTN; PAM sequence: CTT
caagtgtttgccaaagtgag

SEQ ID NO: 188939 - DNA, 20 bp, Artificial Sequence
  Description of Artificial Sequence: Synthetic oligonucleotide
  Target: LAMA2; (-) strand; PAM type: YTN; PAM sequence: CTC
ccacgtcatcttcaagtgtt

SEQ ID NO: 188940 - DNA, 20 bp, Artificial Sequence
  Description of Artificial Sequence: Synthetic oligonucleotide
  Target: LAMA2; (-) strand; PAM type: YTN; PAM sequence: CTG
cacaaatcactcccacgtca

SEQ ID NO: 188941 - DNA, 20 bp, Artificial Sequence
  Description of Artificial Sequence: Synthetic oligonucleotide
  Target: LAMA2; (-) strand; PAM type: YTN; PAM sequence: CTG
ataactgcacaaatcactcc

SEQ ID NO: 188942 - DNA, 20 bp, Artificial Sequence
  Description of Artificial Sequence: Synthetic oligonucleotide
  Target: LAMA2; (-) strand; PAM type: YTN; PAM sequence: TTC
cccctgataactgcacaaat

SEQ ID NO: 188943 - DNA, 20 bp, Artificial Sequence
  Description of Artificial Sequence: Synthetic oligonucleotide
  Target: LAMA2; (-) strand; PAM type: YTN; PAM sequence: CTT
ccccctgataactgcacaaa

SEQ ID NO: 188944 - DNA, 20 bp, Artificial Sequence
  Description of Artificial Sequence: Synthetic oligonucleotide
  Target: LAMA2; (-) strand; PAM type: YTN; PAM sequence: CTC
ttccccctgataactgcaca

SEQ ID NO: 188945 - DNA, 20 bp, Artificial Sequence
  Description of Artificial Sequence: Synthetic oligonucleotide
  Target: LAMA2; (-) strand; PAM type: YTN; PAM sequence: CTG
tacagagagtactcttcccc

SEQ ID NO: 188946 - DNA, 20 bp, Artificial Sequence
  Description of Artificial Sequence: Synthetic oligonucleotide
  Target: LAMA2; (-) strand; PAM type: YTN; PAM sequence: CTC
cctgtacagagagtactctt

SEQ ID NO: 188947 - DNA, 20 bp, Artificial Sequence
  Description of Artificial Sequence: Synthetic oligonucleotide
  Target: LAMA2; (-) strand; PAM type: YTN; PAM sequence: CTG
ctccctgtacagagagtact

SEQ ID NO: 188948 - DNA, 20 bp, Artificial Sequence
  Description of Artificial Sequence: Synthetic oligonucleotide
  Target: LAMA2; (-) strand; PAM type: YTN; PAM sequence: CTC
ataggcctgctccctgtaca

SEQ ID NO: 188949 - DNA, 20 bp, Artificial Sequence
  Description of Artificial Sequence: Synthetic oligonucleotide
  Target: LAMA2; (-) strand; PAM type: YTN; PAM sequence: TTA
gatcctcataggcctgctcc

SEQ ID NO: 188950 - DNA, 20 bp, Artificial Sequence
  Description of Artificial Sequence: Synthetic oligonucleotide
  Target: LAMA2; (-) strand; PAM type: YTN; PAM sequence: CTT
agatcctcataggcctgctc

SEQ ID NO: 188951 - DNA, 20 bp, Artificial Sequence
  Description of Artificial Sequence: Synthetic oligonucleotide
  Target: LAMA2; (-) strand; PAM type: YTN; PAM sequence: CTC
caagcttagatcctcatagg

SEQ ID NO: 188952 - DNA, 20 bp, Artificial Sequence
  Description of Artificial Sequence: Synthetic oligonucleotide
  Target: LAMA2; (-) strand; PAM type: YTN; PAM sequence: CTC
accatgctccaagcttagat

SEQ ID NO: 188953 - DNA, 20 bp, Artificial Sequence
  Description of Artificial Sequence: Synthetic oligonucleotide
  Target: LAMA2; (-) strand; PAM type: YTN; PAM sequence: TTC
tcaccatgctccaagcttag

SEQ ID NO: 188954 - DNA, 20 bp, Artificial Sequence
  Description of Artificial Sequence: Synthetic oligonucleotide
  Target: LAMA2; (-) strand; PAM type: YTN; PAM sequence: CTT
ctcaccatgctccaagctta

SEQ ID NO: 188955 - DNA, 20 bp, Artificial Sequence
  Description of Artificial Sequence: Synthetic oligonucleotide
  Target: LAMA2; (-) strand; PAM type: YTN; PAM sequence: CTG
agccttctcaccatgctcca

SEQ ID NO: 188956 - DNA, 20 bp, Artificial Sequence
  Description of Artificial Sequence: Synthetic oligonucleotide
  Target: LAMA2; (-) strand; PAM type: YTN; PAM sequence: CTC
tgagccttctcaccatgctc

SEQ ID NO: 188957 - DNA, 20 bp, Artificial Sequence
  Description of Artificial Sequence: Synthetic oligonucleotide
  Target: LAMA2; (-) strand; PAM type: YTN; PAM sequence: CTC
ctctgagccttctcaccatg

SEQ ID NO: 188958 - DNA, 20 bp, Artificial Sequence
  Description of Artificial Sequence: Synthetic oligonucleotide
  Target: LAMA2; (-) strand; PAM type: YTN; PAM sequence: TTC
tcctctgagccttctcacca

SEQ ID NO: 188959 - DNA, 20 bp, Artificial Sequence
  Description of Artificial Sequence: Synthetic oligonucleotide
  Target: LAMA2; (-) strand; PAM type: YTN; PAM sequence: TTT
ctcctctgagccttctcacc

SEQ ID NO: 188960 - DNA, 20 bp, Artificial Sequence
  Description of Artificial Sequence: Synthetic oligonucleotide
  Target: LAMA2; (-) strand; PAM type: YTN; PAM sequence: TTC
ccatttctcctctgagcctt

SEQ ID NO: 188961 - DNA, 20 bp, Artificial Sequence
  Description of Artificial Sequence: Synthetic oligonucleotide
  Target: LAMA2; (-) strand; PAM type: YTN; PAM sequence: TTT
cccatttctcctctgagcct

SEQ ID NO: 188962 - DNA, 20 bp, Artificial Sequence
  Description of Artificial Sequence: Synthetic oligonucleotide
  Target: LAMA2; (-) strand; PAM type: YTN; PAM sequence: TTC
cagtttcccatttctcctct

SEQ ID NO: 188963 - DNA, 20 bp, Artificial Sequence
  Description of Artificial Sequence: Synthetic oligonucleotide
  Target: LAMA2; (-) strand; PAM type: YTN; PAM sequence: CTA
tgtgttccagtttcccattt

SEQ ID NO: 188964 - DNA, 20 bp, Artificial Sequence
  Description of Artificial Sequence: Synthetic oligonucleotide
  Target: LAMA2; (-) strand; PAM type: YTN; PAM sequence: TTA
aggtcaacaatgctatgtgt

SEQ ID NO: 188965 - DNA, 20 bp, Artificial Sequence
  Description of Artificial Sequence: Synthetic oligonucleotide
  Target: LAMA2; (-) strand; PAM type: YTN; PAM sequence: TTA
aaattaaggtcaacaatgct

SEQ ID NO: 188966 - DNA, 20 bp, Artificial Sequence
  Description of Artificial Sequence: Synthetic oligonucleotide
  Target: LAMA2; (-) strand; PAM type: YTN; PAM sequence: TTT
aaaattaaggtcaacaatgc

SEQ ID NO: 188967 - DNA, 20 bp, Artificial Sequence
  Description of Artificial Sequence: Synthetic oligonucleotide
  Target: LAMA2; (-) strand; PAM type: YTN; PAM sequence: CTT
taaaattaaggtcaacaatg

SEQ ID NO: 188968 - DNA, 20 bp, Artificial Sequence
  Description of Artificial Sequence: Synthetic oligonucleotide
  Target: LAMA2; (-) strand; PAM type: YTN; PAM sequence: CTC
agacaaaaaggcaaaatctt

SEQ ID NO: 188969 - DNA, 20 bp, Artificial Sequence
  Description of Artificial Sequence: Synthetic oligonucleotide
  Target: LAMA2; (-) strand; PAM type: YTN; PAM sequence: CTC
actcagacaaaaaggcaaaa

SEQ ID NO: 188970 - DNA, 20 bp, Artificial Sequence
  Description of Artificial Sequence: Synthetic oligonucleotide
  Target: LAMA2; (-) strand; PAM type: YTN; PAM sequence: CTC
atctcactcagacaaaaagg

SEQ ID NO: 188971 - DNA, 20 bp, Artificial Sequence
  Description of Artificial Sequence: Synthetic oligonucleotide
  Target: LAMA2; (-) strand; PAM type: YTN; PAM sequence: CTC
ctcatctcactcagacaaaa

SEQ ID NO: 188972 - DNA, 20 bp, Artificial Sequence
  Description of Artificial Sequence: Synthetic oligonucleotide
  Target: LAMA2; (-) strand; PAM type: YTN; PAM sequence: CTC
accgatgcctcctcatctca

SEQ ID NO: 188973 - DNA, 20 bp, Artificial Sequence
  Description of Artificial Sequence: Synthetic oligonucleotide
  Target: LAMA2; (-) strand; PAM type: YTN; PAM sequence: TTA
aaactcaccgatgcctcctc

SEQ ID NO: 188974 - DNA, 20 bp, Artificial Sequence
  Description of Artificial Sequence: Synthetic oligonucleotide
  Target: LAMA2; (-) strand; PAM type: YTN; PAM sequence: CTG
ttaaaactcaccgatgcctc

SEQ ID NO: 188975 - DNA, 20 bp, Artificial Sequence
  Description of Artificial Sequence: Synthetic oligonucleotide
  Target: LAMA2; (-) strand; PAM type: YTN; PAM sequence: CTC
tgttaaaactcaccgatgcc

SEQ ID NO: 188976 - DNA, 20 bp, Artificial Sequence
  Description of Artificial Sequence: Synthetic oligonucleotide
  Target: LAMA2; (-) strand; PAM type: YTN; PAM sequence: TTA
actctgttaaaactcaccga

SEQ ID NO: 188977 - DNA, 20 bp, Artificial Sequence
  Description of Artificial Sequence: Synthetic oligonucleotide
  Target: LAMA2; (-) strand; PAM type: YTN; PAM sequence: TTT
aactctgttaaaactcaccg

SEQ ID NO: 188978 - DNA, 20 bp, Artificial Sequence
  Description of Artificial Sequence: Synthetic oligonucleotide
  Target: LAMA2; (-) strand; PAM type: YTN; PAM sequence: TTA
tttaactctgttaaaactca

SEQ ID NO: 188979 - DNA, 20 bp, Artificial Sequence
  Description of Artificial Sequence: Synthetic oligonucleotide
  Target: LAMA2; (-) strand; PAM type: YTN; PAM sequence: TTT
atttaactctgttaaaactc

SEQ ID NO: 188980 - DNA, 20 bp, Artificial Sequence
  Description of Artificial Sequence: Synthetic oligonucleotide
  Target: LAMA2; (-) strand; PAM type: YTN; PAM sequence: TTC
atttatttaactctgttaaa

SEQ ID NO: 188981 - DNA, 20 bp, Artificial Sequence
  Description of Artificial Sequence: Synthetic oligonucleotide
  Target: LAMA2; (-) strand; PAM type: YTN; PAM sequence: TTA
ttcatttatttaactctgtt

SEQ ID NO: 188982 - DNA, 20 bp, Artificial Sequence
  Description of Artificial Sequence: Synthetic oligonucleotide
  Target: LAMA2; (-) strand; PAM type: YTN; PAM sequence: TTT
attcatttatttaactctgt

SEQ ID NO: 188983 - DNA, 20 bp, Artificial Sequence
  Description of Artificial Sequence: Synthetic oligonucleotide
  Target: LAMA2; (-) strand; PAM type: YTN; PAM sequence: TTT
tattcatttatttaactctg

SEQ ID NO: 188984 - DNA, 20 bp, Artificial Sequence
  Description of Artificial Sequence: Synthetic oligonucleotide
  Target: LAMA2; (-) strand; PAM type: YTN; PAM sequence: CTG
tgattttattcatttattta

SEQ ID NO: 188985 - DNA, 20 bp, Artificial Sequence
  Description of Artificial Sequence: Synthetic oligonucleotide
  Target: LAMA2; (-) strand; PAM type: YTN; PAM sequence: TTG
agacaaaaaaacctgtgatt

SEQ ID NO: 188986 - DNA, 20 bp, Artificial Sequence
  Description of Artificial Sequence: Synthetic oligonucleotide
  Target: LAMA2; (-) strand; PAM type: YTN; PAM sequence: TTT
gagacaaaaaaacctgtgat

SEQ ID NO: 188987 - DNA, 20 bp, Artificial Sequence
  Description of Artificial Sequence: Synthetic oligonucleotide
  Target: LAMA2; (-) strand; PAM type: YTN; PAM sequence: TTA
gtgcgtatttgagacaaaaa

SEQ ID NO: 188988 - DNA, 20 bp, Artificial Sequence
  Description of Artificial Sequence: Synthetic oligonucleotide
  Target: LAMA2; (-) strand; PAM type: YTN; PAM sequence: CTA
gtcccatggattagtgcgta

SEQ ID NO: 188989 - DNA, 20 bp, Artificial Sequence
  Description of Artificial Sequence: Synthetic oligonucleotide
  Target: LAMA2; (-) strand; PAM type: YTN; PAM sequence: TTG
gtctagtcccatggattagt

SEQ ID NO: 188990 - DNA, 20 bp, Artificial Sequence
  Description of Artificial Sequence: Synthetic oligonucleotide
  Target: LAMA2; (-) strand; PAM type: YTN; PAM sequence: CTG
ttggtctagtcccatggatt

SEQ ID NO: 188991 - DNA, 20 bp, Artificial Sequence
  Description of Artificial Sequence: Synthetic oligonucleotide
  Target: LAMA2; (-) strand; PAM type: YTN; PAM sequence: TTG
gactgttggtctagtcccat

SEQ ID NO: 188992 - DNA, 20 bp, Artificial Sequence
  Description of Artificial Sequence: Synthetic oligonucleotide
  Target: LAMA2; (-) strand; PAM type: YTN; PAM sequence: CTT
ggactgttggtctagtccca

SEQ ID NO: 188993 - DNA, 20 bp, Artificial Sequence
  Description of Artificial Sequence: Synthetic oligonucleotide
  Target: LAMA2; (-) strand; PAM type: YTN; PAM sequence: CTA
tgcttggactgttggtctag

SEQ ID NO: 188994 - DNA, 20 bp, Artificial Sequence
  Description of Artificial Sequence: Synthetic oligonucleotide
  Target: LAMA2; (-) strand; PAM type: YTN; PAM sequence: TTC
tatgcttggactgttggtct

SEQ ID NO: 188995 - DNA, 20 bp, Artificial Sequence
  Description of Artificial Sequence: Synthetic oligonucleotide
  Target: LAMA2; (-) strand; PAM type: YTN; PAM sequence: CTA
aaataattctatgcttggac

SEQ ID NO: 188996 - DNA, 20 bp, Artificial Sequence
  Description of Artificial Sequence: Synthetic oligonucleotide
  Target: LAMA2; (-) strand; PAM type: YTN; PAM sequence: TTG
ggacaagagataaatctaaa

SEQ ID NO: 188997 - DNA, 20 bp, Artificial Sequence
  Description of Artificial Sequence: Synthetic oligonucleotide
  Target: LAMA2; (-) strand; PAM type: YTN; PAM sequence: TTT
gggacaagagataaatctaa

SEQ ID NO: 188998 - DNA, 20 bp, Artificial Sequence
  Description of Artificial Sequence: Synthetic oligonucleotide
  Target: LAMA2; (-) strand; PAM type: YTN; PAM sequence: CTA
tcagtggagtgtttgggaca

SEQ ID NO: 188999 - DNA, 20 bp, Artificial Sequence
  Description of Artificial Sequence: Synthetic oligonucleotide
  Target: LAMA2; (-) strand; PAM type: YTN; PAM sequence: TTC
tatcagtggagtgtttggga

SEQ ID NO: 189000 - DNA, 20 bp, Artificial Sequence
  Description of Artificial Sequence: Synthetic oligonucleotide
  Target: LAMA2; (-) strand; PAM type: YTN; PAM sequence: TTA
aatgtgttctatcagtggag

SEQ ID NO: 189001 - DNA, 20 bp, Artificial Sequence
  Description of Artificial Sequence: Synthetic oligonucleotide
  Target: LAMA2; (-) strand; PAM type: YTN; PAM sequence: CTT
aaatgtgttctatcagtgga

SEQ ID NO: 189002 - DNA, 20 bp, Artificial Sequence
  Description of Artificial Sequence: Synthetic oligonucleotide
  Target: LAMA2; (-) strand; PAM type: YTN; PAM sequence: TTG
aatgtagaatcacttaaatg

SEQ ID NO: 189003 - DNA, 20 bp, Artificial Sequence
  Description of Artificial Sequence: Synthetic oligonucleotide
  Target: LAMA2; (-) strand; PAM type: YTN; PAM sequence: CTT
gaatgtagaatcacttaaat

SEQ ID NO: 189004 - DNA, 20 bp, Artificial Sequence
  Description of Artificial Sequence: Synthetic oligonucleotide
  Target: LAMA2; (-) strand; PAM type: YTN; PAM sequence: CTC
ttgaatgtagaatcacttaa

SEQ ID NO: 189005 - DNA, 20 bp, Artificial Sequence
  Description of Artificial Sequence: Synthetic oligonucleotide
  Target: LAMA2; (-) strand; PAM type: YTN; PAM sequence: TTG
aagtggaatgctcttgaatg

SEQ ID NO: 189006 - DNA, 20 bp, Artificial Sequence
  Description of Artificial Sequence: Synthetic oligonucleotide
  Target: LAMA2; (-) strand; PAM type: YTN; PAM sequence: TTC
accatgataagatggttgaa

SEQ ID NO: 189007 - DNA, 20 bp, Artificial Sequence
  Description of Artificial Sequence: Synthetic oligonucleotide
  Target: LAMA2; (-) strand; PAM type: YTN; PAM sequence: CTT
caccatgataagatggttga

SEQ ID NO: 189008 - DNA, 20 bp, Artificial Sequence
  Description of Artificial Sequence: Synthetic oligonucleotide
  Target: LAMA2; (-) strand; PAM type: YTN; PAM sequence: CTG
agcttcaccatgataagatg

SEQ ID NO: 189009 - DNA, 20 bp, Artificial Sequence
  Description of Artificial Sequence: Synthetic oligonucleotide
  Target: LAMA2; (-) strand; PAM type: YTN; PAM sequence: TTA
caaagacacatctgagcttc

SEQ ID NO: 189010 - DNA, 20 bp, Artificial Sequence
  Description of Artificial Sequence: Synthetic oligonucleotide
  Target: LAMA2; (-) strand; PAM type: YTN; PAM sequence: TTG
ccaaagggaagaaaagagtg

SEQ ID NO: 189011 - DNA, 20 bp, Artificial Sequence
  Description of Artificial Sequence: Synthetic oligonucleotide
  Target: LAMA2; (-) strand; PAM type: YTN; PAM sequence: CTG
agttgccaaagggaagaaaa

SEQ ID NO: 189012 - DNA, 20 bp, Artificial Sequence
  Description of Artificial Sequence: Synthetic oligonucleotide
  Target: LAMA2; (-) strand; PAM type: YTN; PAM sequence: TTG
aataatggaatagcactgag

SEQ ID NO: 189013 - DNA, 20 bp, Artificial Sequence
  Description of Artificial Sequence: Synthetic oligonucleotide
  Target: LAMA2; (-) strand; PAM type: YTN; PAM sequence: TTT
gaataatggaatagcactga

SEQ ID NO: 189014 - DNA, 20 bp, Artificial Sequence
  Description of Artificial Sequence: Synthetic oligonucleotide
  Target: LAMA2; (-) strand; PAM type: YTN; PAM sequence: TTT
tgaataatggaatagcactg

SEQ ID NO: 189015 - DNA, 20 bp, Artificial Sequence
  Description of Artificial Sequence: Synthetic oligonucleotide
  Target: LAMA2; (-) strand; PAM type: YTN; PAM sequence: CTG
atatattttgaataatggaa

SEQ ID NO: 189016 - DNA, 20 bp, Artificial Sequence
  Description of Artificial Sequence: Synthetic oligonucleotide
  Target: LAMA2; (-) strand; PAM type: YTN; PAM sequence: CTG
aggtactgatatattttgaa

SEQ ID NO: 189017 - DNA, 20 bp, Artificial Sequence
  Description of Artificial Sequence: Synthetic oligonucleotide
  Target: LAMA2; (-) strand; PAM type: YTN; PAM sequence: TTC
tgaggtactgatatattttg

SEQ ID NO: 189018 - DNA, 20 bp, Artificial Sequence
  Description of Artificial Sequence: Synthetic oligonucleotide
  Target: LAMA2; (-) strand; PAM type: YTN; PAM sequence: TTT
ctgaggtactgatatatttt

SEQ ID NO: 189019 - DNA, 20 bp, Artificial Sequence
  Description of Artificial Sequence: Synthetic oligonucleotide
  Target: LAMA2; (-) strand; PAM type: YTN; PAM sequence: TTG
tttctgaggtactgatatat

SEQ ID NO: 189020 - DNA, 20 bp, Artificial Sequence
  Description of Artificial Sequence: Synthetic oligonucleotide
  Target: LAMA2; (-) strand; PAM type: YTN; PAM sequence: CTG
cacacaaattgtttctgagg

SEQ ID NO: 189021 - DNA, 20 bp, Artificial Sequence
  Description of Artificial Sequence: Synthetic oligonucleotide
  Target: LAMA2; (-) strand; PAM type: YTN; PAM sequence: TTC
cctgcacacaaattgtttct

SEQ ID NO: 189022 - DNA, 20 bp, Artificial Sequence
  Description of Artificial Sequence: Synthetic oligonucleotide
  Target: LAMA2; (-) strand; PAM type: YTN; PAM sequence: CTG
cggaagttccctgcacacaa

SEQ ID NO: 189023 - DNA, 20 bp, Artificial Sequence
  Description of Artificial Sequence: Synthetic oligonucleotide
  Target: LAMA2; (-) strand; PAM type: YTN; PAM sequence: TTA
aaagctgcggaagttccctg

SEQ ID NO: 189024 - DNA, 20 bp, Artificial Sequence
  Description of Artificial Sequence: Synthetic oligonucleotide
  Target: LAMA2; (-) strand; PAM type: YTN; PAM sequence: TTT
aaaagctgcggaagttccct

SEQ ID NO: 189025 - DNA, 20 bp, Artificial Sequence
  Description of Artificial Sequence: Synthetic oligonucleotide
  Target: LAMA2; (-) strand; PAM type: YTN; PAM sequence: TTT
taaaagctgcggaagttccc

SEQ ID NO: 189026 - DNA, 20 bp, Artificial Sequence
  Description of Artificial Sequence: Synthetic oligonucleotide
  Target: LAMA2; (-) strand; PAM type: YTN; PAM sequence: TTT
ttaaaagctgcggaagttcc

SEQ ID NO: 189027 - DNA, 20 bp, Artificial Sequence
  Description of Artificial Sequence: Synthetic oligonucleotide
  Target: LAMA2; (-) strand; PAM type: YTN; PAM sequence: CTG
gagcaaaatttttaaaagct

SEQ ID NO: 189028 - DNA, 20 bp, Artificial Sequence
  Description of Artificial Sequence: Synthetic oligonucleotide
  Target: LAMA2; (-) strand; PAM type: YTN; PAM sequence: CTA
cactggagcaaaatttttaa

SEQ ID NO: 189029 - DNA, 20 bp, Artificial Sequence
  Description of Artificial Sequence: Synthetic oligonucleotide
  Target: LAMA2; (-) strand; PAM type: YTN; PAM sequence: CTA
actacactggagcaaaattt

SEQ ID NO: 189030 - DNA, 20 bp, Artificial Sequence
  Description of Artificial Sequence: Synthetic oligonucleotide
  Target: LAMA2; (-) strand; PAM type: YTN; PAM sequence: TTC
taactacactggagcaaaat

SEQ ID NO: 189031 - DNA, 20 bp, Artificial Sequence
  Description of Artificial Sequence: Synthetic oligonucleotide
  Target: LAMA2; (-) strand; PAM type: YTN; PAM sequence: TTT
ctaactacactggagcaaaa

SEQ ID NO: 189032 - DNA, 20 bp, Artificial Sequence
  Description of Artificial Sequence: Synthetic oligonucleotide
  Target: LAMA2; (-) strand; PAM type: YTN; PAM sequence: CTG
tcatatttctaactacactg

SEQ ID NO: 189033 - DNA, 20 bp, Artificial Sequence
  Description of Artificial Sequence: Synthetic oligonucleotide
  Target: LAMA2; (-) strand; PAM type: YTN; PAM sequence: TTA
aaaatctgtcatatttctaa

SEQ ID NO: 189034 - DNA, 20 bp, Artificial Sequence
  Description of Artificial Sequence: Synthetic oligonucleotide
  Target: LAMA2; (-) strand; PAM type: YTN; PAM sequence: CTT
aaaaatctgtcatatttcta

SEQ ID NO: 189035 - DNA, 20 bp, Artificial Sequence
  Description of Artificial Sequence: Synthetic oligonucleotide
  Target: LAMA2; (-) strand; PAM type: YTN; PAM sequence: TTA
cccttaaaaatctgtcatat

SEQ ID NO: 189036 - DNA, 20 bp, Artificial Sequence
  Description of Artificial Sequence: Synthetic oligonucleotide
  Target: LAMA2; (-) strand; PAM type: YTN; PAM sequence: TTA
aaattacccttaaaaatctg

SEQ ID NO: 189037 - DNA, 20 bp, Artificial Sequence
  Description of Artificial Sequence: Synthetic oligonucleotide
  Target: LAMA2; (-) strand; PAM type: YTN; PAM sequence: TTT
aaaattacccttaaaaatct

SEQ ID NO: 189038 - DNA, 20 bp, Artificial Sequence
  Description of Artificial Sequence: Synthetic oligonucleotide
  Target: LAMA2; (-) strand; PAM type: YTN; PAM sequence: CTA
tttaaaattacccttaaaaa

SEQ ID NO: 189039 - DNA, 20 bp, Artificial Sequence
  Description of Artificial Sequence: Synthetic oligonucleotide
  Target: LAMA2; (-) strand; PAM type: YTN; PAM sequence: TTA
aagtgcatactatttaaaat

SEQ ID NO: 189040 - DNA, 20 bp, Artificial Sequence
  Description of Artificial Sequence: Synthetic oligonucleotide
  Target: LAMA2; (-) strand; PAM type: YTN; PAM sequence: TTT
aaagtgcatactatttaaaa

SEQ ID NO: 189041 - DNA, 20 bp, Artificial Sequence
  Description of Artificial Sequence: Synthetic oligonucleotide
  Target: LAMA2; (-) strand; PAM type: YTN; PAM sequence: TTT
taaagtgcatactatttaaa

SEQ ID NO: 189042 - DNA, 20 bp, Artificial Sequence
  Description of Artificial Sequence: Synthetic oligonucleotide
  Target: LAMA2; (-) strand; PAM type: YTN; PAM sequence: TTG
ttttaaagtgcatactattt

SEQ ID NO: 189043 - DNA, 20 bp, Artificial Sequence
  Description of Artificial Sequence: Synthetic oligonucleotide
  Target: LAMA2; (-) strand; PAM type: YTN; PAM sequence: TTT
gttttaaagtgcatactatt

SEQ ID NO: 189044 - DNA, 20 bp, Artificial Sequence
  Description of Artificial Sequence: Synthetic oligonucleotide
  Target: LAMA2; (-) strand; PAM type: YTN; PAM sequence: TTT
tgttttaaagtgcatactat

SEQ ID NO: 189045 - DNA, 20 bp, Artificial Sequence
  Description of Artificial Sequence: Synthetic oligonucleotide
  Target: LAMA2; (-) strand; PAM type: YTN; PAM sequence: TTT
ttgttttaaagtgcatacta

SEQ ID NO: 189046 - DNA, 20 bp, Artificial Sequence
  Description of Artificial Sequence: Synthetic oligonucleotide
  Target: LAMA2; (-) strand; PAM type: YTN; PAM sequence: TTC
atttttgttttaaagtgcat

SEQ ID NO: 189047 - DNA, 20 bp, Artificial Sequence
  Description of Artificial Sequence: Synthetic oligonucleotide
  Target: LAMA2; (-) strand; PAM type: YTN; PAM sequence: TTG
tgaataattcatttttgttt

SEQ ID NO: 189048 - DNA, 20 bp, Artificial Sequence
  Description of Artificial Sequence: Synthetic oligonucleotide
  Target: LAMA2; (-) strand; PAM type: YTN; PAM sequence: CTA
tatgtccatgtgggattgtg

SEQ ID NO: 189049 - DNA, 20 bp, Artificial Sequence
  Description of Artificial Sequence: Synthetic oligonucleotide
  Target: LAMA2; (-) strand; PAM type: YTN; PAM sequence: CTC
caaagtacctatatgtccat

SEQ ID NO: 189050 - DNA, 20 bp, Artificial Sequence
  Description of Artificial Sequence: Synthetic oligonucleotide
  Target: LAMA2; (-) strand; PAM type: YTN; PAM sequence: TTG
aaatagataataaaaaaggg

SEQ ID NO: 189051 - DNA, 20 bp, Artificial Sequence
  Description of Artificial Sequence: Synthetic oligonucleotide
  Target: LAMA2; (-) strand; PAM type: YTN; PAM sequence: CTG
agattgaaatagataataaa

SEQ ID NO: 189052 - DNA, 20 bp, Artificial Sequence
  Description of Artificial Sequence: Synthetic oligonucleotide
  Target: LAMA2; (-) strand; PAM type: YTN; PAM sequence: TTA
gcgtctgagattgaaataga

SEQ ID NO: 189053 - DNA, 20 bp, Artificial Sequence
  Description of Artificial Sequence: Synthetic oligonucleotide
  Target: LAMA2; (-) strand; PAM type: YTN; PAM sequence: TTT
agcgtctgagattgaaatag

SEQ ID NO: 189054 - DNA, 20 bp, Artificial Sequence
  Description of Artificial Sequence: Synthetic oligonucleotide
  Target: LAMA2; (-) strand; PAM type: YTN; PAM sequence: CTT
tagcgtctgagattgaaata

SEQ ID NO: 189055 - DNA, 20 bp, Artificial Sequence
  Description of Artificial Sequence: Synthetic oligonucleotide
  Target: LAMA2; (-) strand; PAM type: YTN; PAM sequence: CTA
aactttagcgtctgagattg

SEQ ID NO: 189056 - DNA, 20 bp, Artificial Sequence
  Description of Artificial Sequence: Synthetic oligonucleotide
  Target: LAMA2; (-) strand; PAM type: YTN; PAM sequence: TTG
tgtctaaactttagcgtctg

SEQ ID NO: 189057 - DNA, 20 bp, Artificial Sequence
  Description of Artificial Sequence: Synthetic oligonucleotide
  Target: LAMA2; (-) strand; PAM type: YTN; PAM sequence: TTC
aacaattgtgtctaaacttt

SEQ ID NO: 189058 - DNA, 20 bp, Artificial Sequence
  Description of Artificial Sequence: Synthetic oligonucleotide
  Target: LAMA2; (-) strand; PAM type: YTN; PAM sequence: TTT
caacaattgtgtctaaactt

SEQ ID NO: 189059 - DNA, 20 bp, Artificial Sequence
  Description of Artificial Sequence: Synthetic oligonucleotide
  Target: LAMA2; (-) strand; PAM type: YTN; PAM sequence: TTT
tcaacaattgtgtctaaact

SEQ ID NO: 189060 - DNA, 20 bp, Artificial Sequence
  Description of Artificial Sequence: Synthetic oligonucleotide
  Target: LAMA2; (-) strand; PAM type: YTN; PAM sequence: CTA
tgtcattttcaacaattgtg

SEQ ID NO: 189061 - DNA, 20 bp, Artificial Sequence
  Description of Artificial Sequence: Synthetic oligonucleotide
  Target: LAMA2; (-) strand; PAM type: YTN; PAM sequence: TTC
atatcataaaagaaatcatc

SEQ ID NO: 189062 - DNA, 20 bp, Artificial Sequence
  Description of Artificial Sequence: Synthetic oligonucleotide
  Target: LAMA2; (-) strand; PAM type: YTN; PAM sequence: TTT
catatcataaaagaaatcat

SEQ ID NO: 189063 - DNA, 20 bp, Artificial Sequence
  Description of Artificial Sequence: Synthetic oligonucleotide
  Target: LAMA2; (-) strand; PAM type: YTN; PAM sequence: TTC
aaatttcatatcataaaaga

SEQ ID NO: 189064 - DNA, 20 bp, Artificial Sequence
  Description of Artificial Sequence: Synthetic oligonucleotide
  Target: LAMA2; (-) strand; PAM type: YTN; PAM sequence: TTT
caaatttcatatcataaaag

SEQ ID NO: 189065 - DNA, 20 bp, Artificial Sequence
  Description of Artificial Sequence: Synthetic oligonucleotide
  Target: LAMA2; (-) strand; PAM type: YTN; PAM sequence: CTG
aatgtaaaacaggtagcatt

SEQ ID NO: 189066 - DNA, 20 bp, Artificial Sequence
  Description of Artificial Sequence: Synthetic oligonucleotide
  Target: LAMA2; (-) strand; PAM type: YTN; PAM sequence: TTC
tgaatgtaaaacaggtagca

SEQ ID NO: 189067 - DNA, 20 bp, Artificial Sequence
  Description of Artificial Sequence: Synthetic oligonucleotide
  Target: LAMA2; (-) strand; PAM type: YTN; PAM sequence: TTT
ctgaatgtaaaacaggtagc

SEQ ID NO: 189068 - DNA, 20 bp, Artificial Sequence
  Description of Artificial Sequence: Synthetic oligonucleotide
  Target: LAMA2; (-) strand; PAM type: YTN; PAM sequence: TTA
aaacagtaacaaaaatggaa

SEQ ID NO: 189069 - DNA, 20 bp, Artificial Sequence
  Description of Artificial Sequence: Synthetic oligonucleotide
  Target: LAMA2; (-) strand; PAM type: YTN; PAM sequence: CTT
aaaacagtaacaaaaatgga

SEQ ID NO: 189070 - DNA, 20 bp, Artificial Sequence
  Description of Artificial Sequence: Synthetic oligonucleotide
  Target: LAMA2; (-) strand; PAM type: YTN; PAM sequence: TTC
ttaaaacagtaacaaaaatg

SEQ ID NO: 189071 - DNA, 20 bp, Artificial Sequence
  Description of Artificial Sequence: Synthetic oligonucleotide
  Target: LAMA2; (-) strand; PAM type: YTN; PAM sequence: TTA
caagtgattcttaaaacagt

SEQ ID NO: 189072 - DNA, 20 bp, Artificial Sequence
  Description of Artificial Sequence: Synthetic oligonucleotide
  Target: LAMA2; (-) strand; PAM type: YTN; PAM sequence: CTT
acaagtgattcttaaaacag

SEQ ID NO: 189073 - DNA, 20 bp, Artificial Sequence
  Description of Artificial Sequence: Synthetic oligonucleotide
  Target: LAMA2; (-) strand; PAM type: YTN; PAM sequence: TTA
aagcttacaagtgattctta

SEQ ID NO: 189074 - DNA, 20 bp, Artificial Sequence
  Description of Artificial Sequence: Synthetic oligonucleotide
  Target: LAMA2; (-) strand; PAM type: YTN; PAM sequence: TTG
ttaaagcttacaagtgattc

SEQ ID NO: 189075 - DNA, 20 bp, Artificial Sequence
  Description of Artificial Sequence: Synthetic oligonucleotide
  Target: LAMA2; (-) strand; PAM type: YTN; PAM sequence: TTA
ttgttaaagcttacaagtga

SEQ ID NO: 189076 - DNA, 20 bp, Artificial Sequence
  Description of Artificial Sequence: Synthetic oligonucleotide
  Target: LAMA2; (-) strand; PAM type: YTN; PAM sequence: CTA
tagtccaaaacgttattgtt

SEQ ID NO: 189077 - DNA, 20 bp, Artificial Sequence
  Description of Artificial Sequence: Synthetic oligonucleotide
  Target: LAMA2; (-) strand; PAM type: YTN; PAM sequence: TTA
ctatagtccaaaacgttatt

SEQ ID NO: 189078 - DNA, 20 bp, Artificial Sequence
  Description of Artificial Sequence: Synthetic oligonucleotide
  Target: LAMA2; (-) strand; PAM type: YTN; PAM sequence: TTG
cattactatagtccaaaacg

SEQ ID NO: 189079 - DNA, 20 bp, Artificial Sequence
  Description of Artificial Sequence: Synthetic oligonucleotide
  Target: LAMA2; (-) strand; PAM type: YTN; PAM sequence: TTA
ggccaaaattgcattactat

SEQ ID NO: 189080 - DNA, 20 bp, Artificial Sequence
  Description of Artificial Sequence: Synthetic oligonucleotide
  Target: LAMA2; (-) strand; PAM type: YTN; PAM sequence: TTA
aattaggccaaaattgcatt

SEQ ID NO: 189081 - DNA, 20 bp, Artificial Sequence
  Description of Artificial Sequence: Synthetic oligonucleotide
  Target: LAMA2; (-) strand; PAM type: YTN; PAM sequence: CTA
aatgacagaattaaattagg

SEQ ID NO: 189082 - DNA, 20 bp, Artificial Sequence
  Description of Artificial Sequence: Synthetic oligonucleotide
  Target: LAMA2; (-) strand; PAM type: YTN; PAM sequence: TTC
taaatgacagaattaaatta

SEQ ID NO: 189083 - DNA, 20 bp, Artificial Sequence
  Description of Artificial Sequence: Synthetic oligonucleotide
  Target: LAMA2; (-) strand; PAM type: YTN; PAM sequence: TTG
ttctaaatgacagaattaaa

SEQ ID NO: 189084 - DNA, 20 bp, Artificial Sequence
  Description of Artificial Sequence: Synthetic oligonucleotide
  Target: LAMA2; (-) strand; PAM type: YTN; PAM sequence: TTT
gttctaaatgacagaattaa

SEQ ID NO: 189085 - DNA, 20 bp, Artificial Sequence
  Description of Artificial Sequence: Synthetic oligonucleotide
  Target: LAMA2; (-) strand; PAM type: YTN; PAM sequence: TTT
tgttctaaatgacagaatta

SEQ ID NO: 189086 - DNA, 20 bp, Artificial Sequence
  Description of Artificial Sequence: Synthetic oligonucleotide
  Target: LAMA2; (-) strand; PAM type: YTN; PAM sequence: TTT
ttgttctaaatgacagaatt

SEQ ID NO: 189087 - DNA, 20 bp, Artificial Sequence
  Description of Artificial Sequence: Synthetic oligonucleotide
  Target: LAMA2; (-) strand; PAM type: YTN; PAM sequence: TTT
tttgttctaaatgacagaat

SEQ ID NO: 189088 - DNA, 20 bp, Artificial Sequence
  Description of Artificial Sequence: Synthetic oligonucleotide
  Target: LAMA2; (-) strand; PAM type: YTN; PAM sequence: CTT
ttttgttctaaatgacagaa

SEQ ID NO: 189089 - DNA, 20 bp, Artificial Sequence
  Description of Artificial Sequence: Synthetic oligonucleotide
  Target: LAMA2; (-) strand; PAM type: YTN; PAM sequence: TTA
ccttttttgttctaaatgac

SEQ ID NO: 189090 - DNA, 20 bp, Artificial Sequence
  Description of Artificial Sequence: Synthetic oligonucleotide
  Target: LAMA2; (-) strand; PAM type: YTN; PAM sequence: TTT
accttttttgttctaaatga

SEQ ID NO: 189091 - DNA, 20 bp, Artificial Sequence
  Description of Artificial Sequence: Synthetic oligonucleotide
  Target: LAMA2; (-) strand; PAM type: YTN; PAM sequence: TTT
taccttttttgttctaaatg

SEQ ID NO: 189092 - DNA, 20 bp, Artificial Sequence
  Description of Artificial Sequence: Synthetic oligonucleotide
  Target: LAMA2; (-) strand; PAM type: YTN; PAM sequence: TTT
ttaccttttttgttctaaat

SEQ ID NO: 189093 - DNA, 20 bp, Artificial Sequence
  Description of Artificial Sequence: Synthetic oligonucleotide
  Target: LAMA2; (-) strand; PAM type: YTN; PAM sequence: TTT
tttaccttttttgttctaaa

SEQ ID NO: 189094 - DNA, 20 bp, Artificial Sequence
  Description of Artificial Sequence: Synthetic oligonucleotide
  Target: LAMA2; (-) strand; PAM type: YTN; PAM sequence: TTT
ttttaccttttttgttctaa

SEQ ID NO: 189095 - DNA, 20 bp, Artificial Sequence
  Description of Artificial Sequence: Synthetic oligonucleotide
  Target: LAMA2; (-) strand; PAM type: YTN; PAM sequence: CTA
tccaatttttttaccttttt

SEQ ID NO: 189096 - DNA, 20 bp, Artificial Sequence
  Description of Artificial Sequence: Synthetic oligonucleotide
  Target: LAMA2; (-) strand; PAM type: YTN; PAM sequence: CTA
agggaaaaggaaaataaaga

SEQ ID NO: 189097 - DNA, 20 bp, Artificial Sequence
  Description of Artificial Sequence: Synthetic oligonucleotide
  Target: LAMA2; (-) strand; PAM type: YTN; PAM sequence: TTC
acaggaagaatactaaggga

SEQ ID NO: 189098 - DNA, 20 bp, Artificial Sequence
  Description of Artificial Sequence: Synthetic oligonucleotide
  Target: LAMA2; (-) strand; PAM type: YTN; PAM sequence: TTA
ttcacaggaagaatactaag

SEQ ID NO: 189099 - DNA, 20 bp, Artificial Sequence
  Description of Artificial Sequence: Synthetic oligonucleotide
  Target: LAMA2; (-) strand; PAM type: YTN; PAM sequence: TTT
attcacaggaagaatactaa

SEQ ID NO: 189100 - DNA, 20 bp, Artificial Sequence
  Description of Artificial Sequence: Synthetic oligonucleotide
  Target: LAMA2; (-) strand; PAM type: YTN; PAM sequence: TTT
tattcacaggaagaatacta

SEQ ID NO: 189101 - DNA, 20 bp, Artificial Sequence
  Description of Artificial Sequence: Synthetic oligonucleotide
  Target: LAMA2; (-) strand; PAM type: YTN; PAM sequence: TTA
ttttattcacaggaagaata

SEQ ID NO: 189102 - DNA, 20 bp, Artificial Sequence
  Description of Artificial Sequence: Synthetic oligonucleotide
  Target: LAMA2; (-) strand; PAM type: YTN; PAM sequence: CTT
attttattcacaggaagaat

SEQ ID NO: 189103 - DNA, 20 bp, Artificial Sequence
  Description of Artificial Sequence: Synthetic oligonucleotide
  Target: LAMA2; (-) strand; PAM type: YTN; PAM sequence: TTA
ccttattttattcacaggaa

SEQ ID NO: 189104 - DNA, 20 bp, Artificial Sequence
  Description of Artificial Sequence: Synthetic oligonucleotide
  Target: LAMA2; (-) strand; PAM type: YTN; PAM sequence: TTA
attaccttattttattcaca

SEQ ID NO: 189105 - DNA, 20 bp, Artificial Sequence
  Description of Artificial Sequence: Synthetic oligonucleotide
  Target: LAMA2; (-) strand; PAM type: YTN; PAM sequence: TTT
aattaccttattttattcac

SEQ ID NO: 189106 - DNA, 20 bp, Artificial Sequence
  Description of Artificial Sequence: Synthetic oligonucleotide
  Target: LAMA2; (-) strand; PAM type: YTN; PAM sequence: TTT
taattaccttattttattca

SEQ ID NO: 189107 - DNA, 20 bp, Artificial Sequence
  Description of Artificial Sequence: Synthetic oligonucleotide
  Target: LAMA2; (-) strand; PAM type: YTN; PAM sequence: CTA
ttttaattaccttattttat

SEQ ID NO: 189108 - DNA, 20 bp, Artificial Sequence
  Description of Artificial Sequence: Synthetic oligonucleotide
  Target: LAMA2; (-) strand; PAM type: YTN; PAM sequence: TTA
tctattttaattaccttatt

SEQ ID NO: 189109 - DNA, 20 bp, Artificial Sequence
  Description of Artificial Sequence: Synthetic oligonucleotide
  Target: LAMA2; (-) strand; PAM type: YTN; PAM sequence: TTA
gaattatctattttaattac

SEQ ID NO: 189110 - DNA, 20 bp, Artificial Sequence
  Description of Artificial Sequence: Synthetic oligonucleotide
  Target: LAMA2; (-) strand; PAM type: YTN; PAM sequence: TTG
ttagaattatctattttaat

SEQ ID NO: 189111 - DNA, 20 bp, Artificial Sequence
  Description of Artificial Sequence: Synthetic oligonucleotide
  Target: LAMA2; (-) strand; PAM type: YTN; PAM sequence: TTT
gttagaattatctattttaa

SEQ ID NO: 189112 - DNA, 20 bp, Artificial Sequence
  Description of Artificial Sequence: Synthetic oligonucleotide
  Target: LAMA2; (-) strand; PAM type: YTN; PAM sequence: TTA
tatttgttagaattatctat

SEQ ID NO: 189113 - DNA, 20 bp, Artificial Sequence
  Description of Artificial Sequence: Synthetic oligonucleotide
  Target: LAMA2; (-) strand; PAM type: YTN; PAM sequence: CTA
aatgttatatttgttagaat

SEQ ID NO: 189114 - DNA, 20 bp, Artificial Sequence
  Description of Artificial Sequence: Synthetic oligonucleotide
  Target: LAMA2; (-) strand; PAM type: YTN; PAM sequence: TTC
ctaaatgttatatttgttag

SEQ ID NO: 189115 - DNA, 20 bp, Artificial Sequence
  Description of Artificial Sequence: Synthetic oligonucleotide
  Target: LAMA2; (-) strand; PAM type: YTN; PAM sequence: CTT
cctaaatgttatatttgtta

SEQ ID NO: 189116 - DNA, 20 bp, Artificial Sequence
  Description of Artificial Sequence: Synthetic oligonucleotide
  Target: LAMA2; (-) strand; PAM type: YTN; PAM sequence: CTA
tcttcctaaatgttatattt

SEQ ID NO: 189117 - DNA, 20 bp, Artificial Sequence
  Description of Artificial Sequence: Synthetic oligonucleotide
  Target: LAMA2; (-) strand; PAM type: YTN; PAM sequence: TTA
ctatcttcctaaatgttata

SEQ ID NO: 189118 - DNA, 20 bp, Artificial Sequence
  Description of Artificial Sequence: Synthetic oligonucleotide
  Target: LAMA2; (-) strand; PAM type: YTN; PAM sequence: CTT
actatcttcctaaatgttat

SEQ ID NO: 189119 - DNA, 20 bp, Artificial Sequence
  Description of Artificial Sequence: Synthetic oligonucleotide
  Target: LAMA2; (-) strand; PAM type: YTN; PAM sequence: TTG
ccttactatcttcctaaatg

SEQ ID NO: 189120 - DNA, 20 bp, Artificial Sequence
  Description of Artificial Sequence: Synthetic oligonucleotide
  Target: LAMA2; (-) strand; PAM type: YTN; PAM sequence: TTT
gccttactatcttcctaaat

SEQ ID NO: 189121 - DNA, 20 bp, Artificial Sequence
  Description of Artificial Sequence: Synthetic oligonucleotide
  Target: LAMA2; (-) strand; PAM type: YTN; PAM sequence: TTT
tgccttactatcttcctaaa

SEQ ID NO: 189122 - DNA, 20 bp, Artificial Sequence
  Description of Artificial Sequence: Synthetic oligonucleotide
  Target: LAMA2; (-) strand; PAM type: YTN; PAM sequence: TTA
agtaaagttttgccttacta

SEQ ID NO: 189123 - DNA, 20 bp, Artificial Sequence
  Description of Artificial Sequence: Synthetic oligonucleotide
  Target: LAMA2; (-) strand; PAM type: YTN; PAM sequence: TTT
aagtaaagttttgccttact

SEQ ID NO: 189124 - DNA, 20 bp, Artificial Sequence
  Description of Artificial Sequence: Synthetic oligonucleotide
  Target: LAMA2; (-) strand; PAM type: YTN; PAM sequence: TTA
ataaggaagatttaagtaaa

SEQ ID NO: 189125 - DNA, 20 bp, Artificial Sequence
  Description of Artificial Sequence: Synthetic oligonucleotide
  Target: LAMA2; (-) strand; PAM type: YTN; PAM sequence: TTT
aataaggaagatttaagtaa

SEQ ID NO: 189126 - DNA, 20 bp, Artificial Sequence
  Description of Artificial Sequence: Synthetic oligonucleotide
  Target: LAMA2; (-) strand; PAM type: YTN; PAM sequence: TTT
taataaggaagatttaagta

SEQ ID NO: 189127 - DNA, 20 bp, Artificial Sequence
  Description of Artificial Sequence: Synthetic oligonucleotide
  Target: LAMA2; (-) strand; PAM type: YTN; PAM sequence: CTT
ttaataaggaagatttaagt

SEQ ID NO: 189128 - DNA, 20 bp, Artificial Sequence
  Description of Artificial Sequence: Synthetic oligonucleotide
  Target: LAMA2; (-) strand; PAM type: YTN; PAM sequence: CTG
tggcttttaataaggaagat

SEQ ID NO: 189129 - DNA, 20 bp, Artificial Sequence
  Description of Artificial Sequence: Synthetic oligonucleotide
  Target: LAMA2; (-) strand; PAM type: YTN; PAM sequence: TTA
cctgtggcttttaataagga

SEQ ID NO: 189130 - DNA, 20 bp, Artificial Sequence
  Description of Artificial Sequence: Synthetic oligonucleotide
  Target: LAMA2; (-) strand; PAM type: YTN; PAM sequence: TTA
gatagtaattacctgtggct

SEQ ID NO: 189131 - DNA, 20 bp, Artificial Sequence
  Description of Artificial Sequence: Synthetic oligonucleotide
  Target: LAMA2; (-) strand; PAM type: YTN; PAM sequence: TTT
agatagtaattacctgtggc

SEQ ID NO: 189132 - DNA, 20 bp, Artificial Sequence
  Description of Artificial Sequence: Synthetic oligonucleotide
  Target: LAMA2; (-) strand; PAM type: YTN; PAM sequence: CTT
tagatagtaattacctgtgg

SEQ ID NO: 189133 - DNA, 20 bp, Artificial Sequence
  Description of Artificial Sequence: Synthetic oligonucleotide
  Target: LAMA2; (-) strand; PAM type: YTN; PAM sequence: CTA
tctttagatagtaattacct

SEQ ID NO: 189134 - DNA, 20 bp, Artificial Sequence
  Description of Artificial Sequence: Synthetic oligonucleotide
  Target: LAMA2; (-) strand; PAM type: YTN; PAM sequence: CTC
aaactatctttagatagtaa

SEQ ID NO: 189135 - DNA, 20 bp, Artificial Sequence
  Description of Artificial Sequence: Synthetic oligonucleotide
  Target: LAMA2; (-) strand; PAM type: YTN; PAM sequence: CTG
aaaatatgtctcaaactatc

SEQ ID NO: 189136 - DNA, 20 bp, Artificial Sequence
  Description of Artificial Sequence: Synthetic oligonucleotide
  Target: LAMA2; (-) strand; PAM type: YTN; PAM sequence: CTC
accctgaaaatatgtctcaa

SEQ ID NO: 189137 - DNA, 20 bp, Artificial Sequence
  Description of Artificial Sequence: Synthetic oligonucleotide
  Target: LAMA2; (-) strand; PAM type: YTN; PAM sequence: TTA
actcaccctgaaaatatgtc

SEQ ID NO: 189138 - DNA, 20 bp, Artificial Sequence
  Description of Artificial Sequence: Synthetic oligonucleotide
  Target: LAMA2; (-) strand; PAM type: YTN; PAM sequence: TTT
aactcaccctgaaaatatgt

SEQ ID NO: 189139 - DNA, 20 bp, Artificial Sequence
  Description of Artificial Sequence: Synthetic oligonucleotide
  Target: LAMA2; (-) strand; PAM type: YTN; PAM sequence: CTT
taactcaccctgaaaatatg

SEQ ID NO: 189140 - DNA, 20 bp, Artificial Sequence
  Description of Artificial Sequence: Synthetic oligonucleotide
  Target: LAMA2; (-) strand; PAM type: YTN; PAM sequence: TTA
gctttaactcaccctgaaaa

SEQ ID NO: 189141 - DNA, 20 bp, Artificial Sequence
  Description of Artificial Sequence: Synthetic oligonucleotide
  Target: LAMA2; (-) strand; PAM type: YTN; PAM sequence: TTT
agctttaactcaccctgaaa

SEQ ID NO: 189142 - DNA, 20 bp, Artificial Sequence
  Description of Artificial Sequence: Synthetic oligonucleotide
  Target: LAMA2; (-) strand; PAM type: YTN; PAM sequence: CTT
tagctttaactcaccctgaa

SEQ ID NO: 189143 - DNA, 20 bp, Artificial Sequence
  Description of Artificial Sequence: Synthetic oligonucleotide
  Target: LAMA2; (-) strand; PAM type: YTN; PAM sequence: TTG
acaagcaaatgtctttagct

SEQ ID NO: 189144 - DNA, 20 bp, Artificial Sequence
  Description of Artificial Sequence: Synthetic oligonucleotide
  Target: LAMA2; (-) strand; PAM type: YTN; PAM sequence: TTT
gacaagcaaatgtctttagc

SEQ ID NO: 189145 - DNA, 20 bp, Artificial Sequence
  Description of Artificial Sequence: Synthetic oligonucleotide
  Target: LAMA2; (-) strand; PAM type: YTN; PAM sequence: CTT
tgacaagcaaatgtctttag

SEQ ID NO: 189146 - DNA, 20 bp, Artificial Sequence
  Description of Artificial Sequence: Synthetic oligonucleotide
  Target: LAMA2; (-) strand; PAM type: YTN; PAM sequence: TTA
tacatctttgacaagcaaat

SEQ ID NO: 189147 - DNA, 20 bp, Artificial Sequence
  Description of Artificial Sequence: Synthetic oligonucleotide
  Target: LAMA2; (-) strand; PAM type: YTN; PAM sequence: TTA
aacccatattatacatcttt

SEQ ID NO: 189148 - DNA, 20 bp, Artificial Sequence
  Description of Artificial Sequence: Synthetic oligonucleotide
  Target: LAMA2; (-) strand; PAM type: YTN; PAM sequence: TTT
aaacccatattatacatctt

SEQ ID NO: 189149 - DNA, 20 bp, Artificial Sequence
  Description of Artificial Sequence: Synthetic oligonucleotide
  Target: LAMA2; (-) strand; PAM type: YTN; PAM sequence: TTT
taaacccatattatacatct

SEQ ID NO: 189150 - DNA, 20 bp, Artificial Sequence
  Description of Artificial Sequence: Synthetic oligonucleotide
  Target: LAMA2; (-) strand; PAM type: YTN; PAM sequence: TTT
ttaaacccatattatacatc

SEQ ID NO: 189151 - DNA, 20 bp, Artificial Sequence
  Description of Artificial Sequence: Synthetic oligonucleotide
  Target: LAMA2; (-) strand; PAM type: YTN; PAM sequence: TTA
ggagaaaaacatttttaaac

SEQ ID NO: 189152 - DNA, 20 bp, Artificial Sequence
  Description of Artificial Sequence: Synthetic oligonucleotide
  Target: LAMA2; (-) strand; PAM type: YTN; PAM sequence: CTT
aggagaaaaacatttttaaa

SEQ ID NO: 189153 - DNA, 20 bp, Artificial Sequence
  Description of Artificial Sequence: Synthetic oligonucleotide
  Target: LAMA2; (-) strand; PAM type: YTN; PAM sequence: TTA
cttaggagaaaaacattttt

SEQ ID NO: 189154 - DNA, 20 bp, Artificial Sequence
  Description of Artificial Sequence: Synthetic oligonucleotide
  Target: LAMA2; (-) strand; PAM type: YTN; PAM sequence: CTC
aagattacttaggagaaaaa

SEQ ID NO: 189155 - DNA, 20 bp, Artificial Sequence
  Description of Artificial Sequence: Synthetic oligonucleotide
  Target: LAMA2; (-) strand; PAM type: YTN; PAM sequence: TTA
agatccacactcaagattac

SEQ ID NO: 189156 - DNA, 20 bp, Artificial Sequence
  Description of Artificial Sequence: Synthetic oligonucleotide
  Target: LAMA2; (-) strand; PAM type: YTN; PAM sequence: TTC
ccatattaagatccacactc

SEQ ID NO: 189157 - DNA, 20 bp, Artificial Sequence
  Description of Artificial Sequence: Synthetic oligonucleotide
  Target: LAMA2; (-) strand; PAM type: YTN; PAM sequence: TTG
taaatgtcacgtgtccaaat

SEQ ID NO: 189158 - DNA, 20 bp, Artificial Sequence
  Description of Artificial Sequence: Synthetic oligonucleotide
  Target: LAMA2; (-) strand; PAM type: YTN; PAM sequence: TTT
gtaaatgtcacgtgtccaaa

SEQ ID NO: 189159 - DNA, 20 bp, Artificial Sequence
  Description of Artificial Sequence: Synthetic oligonucleotide
  Target: LAMA2; (-) strand; PAM type: YTN; PAM sequence: TTT
tgtaaatgtcacgtgtccaa

SEQ ID NO: 189160 - DNA, 20 bp, Artificial Sequence
  Description of Artificial Sequence: Synthetic oligonucleotide
  Target: LAMA2; (-) strand; PAM type: YTN; PAM sequence: CTT
ttgtaaatgtcacgtgtcca

SEQ ID NO: 189161 - DNA, 20 bp, Artificial Sequence
  Description of Artificial Sequence: Synthetic oligonucleotide
  Target: LAMA2; (-) strand; PAM type: YTN; PAM sequence: CTC
aatgatcttttgtaaatgtc

SEQ ID NO: 189162 - DNA, 20 bp, Artificial Sequence
  Description of Artificial Sequence: Synthetic oligonucleotide
  Target: LAMA2; (-) strand; PAM type: YTN; PAM sequence: TTA
ataggcaatcctcaatgatc

SEQ ID NO: 189163 - DNA, 20 bp, Artificial Sequence
  Description of Artificial Sequence: Synthetic oligonucleotide
  Target: LAMA2; (-) strand; PAM type: YTN; PAM sequence: TTA
tgaataataacccattaata

SEQ ID NO: 189164 - DNA, 20 bp, Artificial Sequence
  Description of Artificial Sequence: Synthetic oligonucleotide
  Target: LAMA2; (-) strand; PAM type: YTN; PAM sequence: TTA
ggcatgtcacagaggccgat

SEQ ID NO: 189165 - DNA, 20 bp, Artificial Sequence
  Description of Artificial Sequence: Synthetic oligonucleotide
  Target: LAMA2; (-) strand; PAM type: YTN; PAM sequence: CTA
gattaggcatgtcacagagg

SEQ ID NO: 189166 - DNA, 20 bp, Artificial Sequence
  Description of Artificial Sequence: Synthetic oligonucleotide
  Target: LAMA2; (-) strand; PAM type: YTN; PAM sequence: TTG
aactagattaggcatgtcac

SEQ ID NO: 189167 - DNA, 20 bp, Artificial Sequence
  Description of Artificial Sequence: Synthetic oligonucleotide
  Target: LAMA2; (-) strand; PAM type: YTN; PAM sequence: TTT
gaactagattaggcatgtca

SEQ ID NO: 189168 - DNA, 20 bp, Artificial Sequence
  Description of Artificial Sequence: Synthetic oligonucleotide
  Target: LAMA2; (-) strand; PAM type: YTN; PAM sequence: TTG
tttgaactagattaggcatg

SEQ ID NO: 189169 - DNA, 20 bp, Artificial Sequence
  Description of Artificial Sequence: Synthetic oligonucleotide
  Target: LAMA2; (-) strand; PAM type: YTN; PAM sequence: TTG
ttgtttgaactagattaggc

SEQ ID NO: 189170 - DNA, 20 bp, Artificial Sequence
  Description of Artificial Sequence: Synthetic oligonucleotide
  Target: LAMA2; (-) strand; PAM type: YTN; PAM sequence: CTT
gttgtttgaactagattagg

SEQ ID NO: 189171 - DNA, 20 bp, Artificial Sequence
  Description of Artificial Sequence: Synthetic oligonucleotide
  Target: LAMA2; (-) strand; PAM type: YTN; PAM sequence: TTA
acttgttgtttgaactagat

SEQ ID NO: 189172 - DNA, 20 bp, Artificial Sequence
  Description of Artificial Sequence: Synthetic oligonucleotide
  Target: LAMA2; (-) strand; PAM type: YTN; PAM sequence: TTG
catagattaacttgttgttt

SEQ ID NO: 189173 - DNA, 20 bp, Artificial Sequence
  Description of Artificial Sequence: Synthetic oligonucleotide
  Target: LAMA2; (-) strand; PAM type: YTN; PAM sequence: TTT
gcatagattaacttgttgtt

SEQ ID NO: 189174 - DNA, 20 bp, Artificial Sequence
  Description of Artificial Sequence: Synthetic oligonucleotide
  Target: LAMA2; (-) strand; PAM type: YTN; PAM sequence: TTC
atcatcaggaatttgcatag

SEQ ID NO: 189175 - DNA, 20 bp, Artificial Sequence
  Description of Artificial Sequence: Synthetic oligonucleotide
  Target: LAMA2; (-) strand; PAM type: YTN; PAM sequence: TTT
catcatcaggaatttgcata

SEQ ID NO: 189176 - DNA, 20 bp, Artificial Sequence
  Description of Artificial Sequence: Synthetic oligonucleotide
  Target: LAMA2; (-) strand; PAM type: YTN; PAM sequence: TTT
tcatcatcaggaatttgcat

SEQ ID NO: 189177 - DNA, 20 bp, Artificial Sequence
  Description of Artificial Sequence: Synthetic oligonucleotide
  Target: LAMA2; (-) strand; PAM type: YTN; PAM sequence: CTG
aggttttcatcatcaggaat

SEQ ID NO: 189178 - DNA, 20 bp, Artificial Sequence
  Description of Artificial Sequence: Synthetic oligonucleotide
  Target: LAMA2; (-) strand; PAM type: YTN; PAM sequence: CTC
ctgaggttttcatcatcagg

SEQ ID NO: 189179 - DNA, 20 bp, Artificial Sequence
  Description of Artificial Sequence: Synthetic oligonucleotide
  Target: LAMA2; (-) strand; PAM type: YTN; PAM sequence: CTA
aatagctcctgaggttttca

SEQ ID NO: 189180 - DNA, 20 bp, Artificial Sequence
  Description of Artificial Sequence: Synthetic oligonucleotide
  Target: LAMA2; (-) strand; PAM type: YTN; PAM sequence: CTA
agtgccaggcactaaatagc

SEQ ID NO: 189181 - DNA, 20 bp, Artificial Sequence
  Description of Artificial Sequence: Synthetic oligonucleotide
  Target: LAMA2; (-) strand; PAM type: YTN; PAM sequence: TTC
ctaagtgccaggcactaaat

SEQ ID NO: 189182 - DNA, 20 bp, Artificial Sequence
  Description of Artificial Sequence: Synthetic oligonucleotide
  Target: LAMA2; (-) strand; PAM type: YTN; PAM sequence: TTT
cctaagtgccaggcactaaa

SEQ ID NO: 189183 - DNA, 20 bp, Artificial Sequence
  Description of Artificial Sequence: Synthetic oligonucleotide
  Target: LAMA2; (-) strand; PAM type: YTN; PAM sequence: TTG
cacaaggtacatttcctaag

SEQ ID NO: 189184 - DNA, 20 bp, Artificial Sequence
  Description of Artificial Sequence: Synthetic oligonucleotide
  Target: LAMA2; (-) strand; PAM type: YTN; PAM sequence: TTA
acattgcacaaggtacattt

SEQ ID NO: 189185 - DNA, 20 bp, Artificial Sequence
  Description of Artificial Sequence: Synthetic oligonucleotide
  Target: LAMA2; (-) strand; PAM type: YTN; PAM sequence: CTT
aacattgcacaaggtacatt

SEQ ID NO: 189186 - DNA, 20 bp, Artificial Sequence
  Description of Artificial Sequence: Synthetic oligonucleotide
  Target: LAMA2; (-) strand; PAM type: YTN; PAM sequence: CTA
cacatacagagacatactta

SEQ ID NO: 189187 - DNA, 20 bp, Artificial Sequence
  Description of Artificial Sequence: Synthetic oligonucleotide
  Target: LAMA2; (-) strand; PAM type: YTN; PAM sequence: TTG
agtggactacacatacagag

SEQ ID NO: 189188 - DNA, 20 bp, Artificial Sequence
  Description of Artificial Sequence: Synthetic oligonucleotide
  Target: LAMA2; (-) strand; PAM type: YTN; PAM sequence: TTC
gggggtcagttgagtggact

SEQ ID NO: 189189 - DNA, 20 bp, Artificial Sequence
  Description of Artificial Sequence: Synthetic oligonucleotide
  Target: LAMA2; (-) strand; PAM type: YTN; PAM sequence: TTG
gggaggtacacagttcgggg

SEQ ID NO: 189190 - DNA, 20 bp, Artificial Sequence
  Description of Artificial Sequence: Synthetic oligonucleotide
  Target: LAMA2; (-) strand; PAM type: YTN; PAM sequence: CTT
ggggaggtacacagttcggg

SEQ ID NO: 189191 - DNA, 20 bp, Artificial Sequence
  Description of Artificial Sequence: Synthetic oligonucleotide
  Target: LAMA2; (-) strand; PAM type: YTN; PAM sequence: CTA
aatgaagagccttggggagg

SEQ ID NO: 189192 - DNA, 20 bp, Artificial Sequence
  Description of Artificial Sequence: Synthetic oligonucleotide
  Target: LAMA2; (-) strand; PAM type: YTN; PAM sequence: CTC
aagacgcagctaaatgaaga

SEQ ID NO: 189193 - DNA, 20 bp, Artificial Sequence
  Description of Artificial Sequence: Synthetic oligonucleotide
  Target: LAMA2; (-) strand; PAM type: YTN; PAM sequence: CTG
gcactcaagacgcagctaaa

SEQ ID NO: 189194 - DNA, 20 bp, Artificial Sequence
  Description of Artificial Sequence: Synthetic oligonucleotide
  Target: LAMA2; (-) strand; PAM type: YTN; PAM sequence: CTA
aaccatctggcactcaagac

SEQ ID NO: 189195 - DNA, 20 bp, Artificial Sequence
  Description of Artificial Sequence: Synthetic oligonucleotide
  Target: LAMA2; (-) strand; PAM type: YTN; PAM sequence: TTA
taccaatctaaaccatctgg

SEQ ID NO: 189196 - DNA, 20 bp, Artificial Sequence
  Description of Artificial Sequence: Synthetic oligonucleotide
  Target: LAMA2; (-) strand; PAM type: YTN; PAM sequence: TTA
ttataccaatctaaaccatc

SEQ ID NO: 189197 - DNA, 20 bp, Artificial Sequence
  Description of Artificial Sequence: Synthetic oligonucleotide
  Target: LAMA2; (-) strand; PAM type: YTN; PAM sequence: CTA
catattattataccaatcta

SEQ ID NO: 189198 - DNA, 20 bp, Artificial Sequence
  Description of Artificial Sequence: Synthetic oligonucleotide
  Target: LAMA2; (-) strand; PAM type: YTN; PAM sequence: CTC
acaatgcactacatattatt

SEQ ID NO: 189199 - DNA, 20 bp, Artificial Sequence
  Description of Artificial Sequence: Synthetic oligonucleotide
  Target: LAMA2; (-) strand; PAM type: YTN; PAM sequence: TTA
atgctcacaatgcactacat

SEQ ID NO: 189200 - DNA, 20 bp, Artificial Sequence
  Description of Artificial Sequence: Synthetic oligonucleotide
  Target: LAMA2; (-) strand; PAM type: YTN; PAM sequence: CTA
cgtaagtaaatgtgttaatg

SEQ ID NO: 189201 - DNA, 20 bp, Artificial Sequence
  Description of Artificial Sequence: Synthetic oligonucleotide
  Target: LAMA2; (-) strand; PAM type: YTN; PAM sequence: CTG
ctacgtaagtaaatgtgtta

SEQ ID NO: 189202 - DNA, 20 bp, Artificial Sequence
  Description of Artificial Sequence: Synthetic oligonucleotide
  Target: LAMA2; (-) strand; PAM type: YTN; PAM sequence: CTC
tgctacgtaagtaaatgtgt

SEQ ID NO: 189203 - DNA, 20 bp, Artificial Sequence
  Description of Artificial Sequence: Synthetic oligonucleotide
  Target: LAMA2; (-) strand; PAM type: YTN; PAM sequence: CTA
aacagctctgctacgtaagt

SEQ ID NO: 189204 - DNA, 20 bp, Artificial Sequence
  Description of Artificial Sequence: Synthetic oligonucleotide
  Target: LAMA2; (-) strand; PAM type: YTN; PAM sequence: CTA
ctaaacagctctgctacgta

SEQ ID NO: 189205 - DNA, 20 bp, Artificial Sequence
  Description of Artificial Sequence: Synthetic oligonucleotide
  Target: LAMA2; (-) strand; PAM type: YTN; PAM sequence: TTA
atctactaaacagctctgct

SEQ ID NO: 189206 - DNA, 20 bp, Artificial Sequence
  Description of Artificial Sequence: Synthetic oligonucleotide
  Target: LAMA2; (-) strand; PAM type: YTN; PAM sequence: TTA
tattaatctactaaacagct

SEQ ID NO: 189207 - DNA, 20 bp, Artificial Sequence
  Description of Artificial Sequence: Synthetic oligonucleotide
  Target: LAMA2; (-) strand; PAM type: YTN; PAM sequence: CTG
aggataattatattaatcta

SEQ ID NO: 189208 - DNA, 20 bp, Artificial Sequence
  Description of Artificial Sequence: Synthetic oligonucleotide
  Target: LAMA2; (-) strand; PAM type: YTN; PAM sequence: CTA
caaactgaggataattatat

SEQ ID NO: 189209 - DNA, 20 bp, Artificial Sequence
  Description of Artificial Sequence: Synthetic oligonucleotide
  Target: LAMA2; (-) strand; PAM type: YTN; PAM sequence: TTC
tacaaactgaggataattat

SEQ ID NO: 189210 - DNA, 20 bp, Artificial Sequence
  Description of Artificial Sequence: Synthetic oligonucleotide
  Target: LAMA2; (-) strand; PAM type: YTN; PAM sequence: CTT
ctacaaactgaggataatta

SEQ ID NO: 189211 - DNA, 20 bp, Artificial Sequence
  Description of Artificial Sequence: Synthetic oligonucleotide
  Target: LAMA2; (-) strand; PAM type: YTN; PAM sequence: TTC
cttctacaaactgaggataa

SEQ ID NO: 189212 - DNA, 20 bp, Artificial Sequence
  Description of Artificial Sequence: Synthetic oligonucleotide
  Target: LAMA2; (-) strand; PAM type: YTN; PAM sequence: TTT
ccttctacaaactgaggata

SEQ ID NO: 189213 - DNA, 20 bp, Artificial Sequence
  Description of Artificial Sequence: Synthetic oligonucleotide
  Target: LAMA2; (-) strand; PAM type: YTN; PAM sequence: TTT
tccttctacaaactgaggat

SEQ ID NO: 189214 - DNA, 20 bp, Artificial Sequence
  Description of Artificial Sequence: Synthetic oligonucleotide
  Target: LAMA2; (-) strand; PAM type: YTN; PAM sequence: CTG
ggcatattttccttctacaa

SEQ ID NO: 189215 - DNA, 20 bp, Artificial Sequence
  Description of Artificial Sequence: Synthetic oligonucleotide
  Target: LAMA2; (-) strand; PAM type: YTN; PAM sequence: TTG
ctgggcatattttccttcta

SEQ ID NO: 189216 - DNA, 20 bp, Artificial Sequence
  Description of Artificial Sequence: Synthetic oligonucleotide
  Target: LAMA2; (-) strand; PAM type: YTN; PAM sequence: TTG
acaagttgctgggcatattt

SEQ ID NO: 189217 - DNA, 20 bp, Artificial Sequence
  Description of Artificial Sequence: Synthetic oligonucleotide
  Target: LAMA2; (-) strand; PAM type: YTN; PAM sequence: CTT
gacaagttgctgggcatatt

SEQ ID NO: 189218 - DNA, 20 bp, Artificial Sequence
  Description of Artificial Sequence: Synthetic oligonucleotide
  Target: LAMA2; (-) strand; PAM type: YTN; PAM sequence: TTG
tccttgacaagttgctgggc

SEQ ID NO: 189219 - DNA, 20 bp, Artificial Sequence
  Description of Artificial Sequence: Synthetic oligonucleotide
  Target: LAMA2; (-) strand; PAM type: YTN; PAM sequence: TTT
gtccttgacaagttgctggg

SEQ ID NO: 189220 - DNA, 20 bp, Artificial Sequence
  Description of Artificial Sequence: Synthetic oligonucleotide
  Target: LAMA2; (-) strand; PAM type: YTN; PAM sequence: TTG
tttgtccttgacaagttgct

SEQ ID NO: 189221 - DNA, 20 bp, Artificial Sequence
  Description of Artificial Sequence: Synthetic oligonucleotide
  Target: LAMA2; (-) strand; PAM type: YTN; PAM sequence: TTT
gtttgtccttgacaagttgc

SEQ ID NO: 189222 - DNA, 20 bp, Artificial Sequence
  Description of Artificial Sequence: Synthetic oligonucleotide
  Target: LAMA2; (-) strand; PAM type: YTN; PAM sequence: TTT
tgtttgtccttgacaagttg

SEQ ID NO: 189223 - DNA, 20 bp, Artificial Sequence
  Description of Artificial Sequence: Synthetic oligonucleotide
  Target: LAMA2; (-) strand; PAM type: YTN; PAM sequence: TTT
ttgtttgtccttgacaagtt

SEQ ID NO: 189224 - DNA, 20 bp, Artificial Sequence
  Description of Artificial Sequence: Synthetic oligonucleotide
  Target: LAMA2; (-) strand; PAM type: YTN; PAM sequence: TTG
gaatttttgtttgtccttga

SEQ ID NO: 189225 - DNA, 20 bp, Artificial Sequence
  Description of Artificial Sequence: Synthetic oligonucleotide
  Target: LAMA2; (-) strand; PAM type: YTN; PAM sequence: CTA
aaataagcattggaattttt

SEQ ID NO: 189226 - DNA, 20 bp, Artificial Sequence
  Description of Artificial Sequence: Synthetic oligonucleotide
  Target: LAMA2; (-) strand; PAM type: YTN; PAM sequence: TTC
taaaataagcattggaattt

SEQ ID NO: 189227 - DNA, 20 bp, Artificial Sequence
  Description of Artificial Sequence: Synthetic oligonucleotide
  Target: LAMA2; (-) strand; PAM type: YTN; PAM sequence: CTA
attctaaaataagcattgga

SEQ ID NO: 189228 - DNA, 20 bp, Artificial Sequence
  Description of Artificial Sequence: Synthetic oligonucleotide
  Target: LAMA2; (-) strand; PAM type: YTN; PAM sequence: TTC
taattctaaaataagcattg

SEQ ID NO: 189229 - DNA, 20 bp, Artificial Sequence
  Description of Artificial Sequence: Synthetic oligonucleotide
  Target: LAMA2; (-) strand; PAM type: YTN; PAM sequence: TTT
ctaattctaaaataagcatt

SEQ ID NO: 189230 - DNA, 20 bp, Artificial Sequence
  Description of Artificial Sequence: Synthetic oligonucleotide
  Target: LAMA2; (-) strand; PAM type: YTN; PAM sequence: TTA
atttctaattctaaaataag

SEQ ID NO: 189231 - DNA, 20 bp, Artificial Sequence
  Description of Artificial Sequence: Synthetic oligonucleotide
  Target: LAMA2; (-) strand; PAM type: YTN; PAM sequence: TTT
aatttctaattctaaaataa

SEQ ID NO: 189232 - DNA, 20 bp, Artificial Sequence
  Description of Artificial Sequence: Synthetic oligonucleotide
  Target: LAMA2; (-) strand; PAM type: YTN; PAM sequence: CTA
caaagtcaagagcaggaccg

SEQ ID NO: 189233 - DNA, 20 bp, Artificial Sequence
  Description of Artificial Sequence: Synthetic oligonucleotide
  Target: LAMA2; (-) strand; PAM type: YTN; PAM sequence: TTA
gcatctacaaagtcaagagc

SEQ ID NO: 189234 - DNA, 20 bp, Artificial Sequence
  Description of Artificial Sequence: Synthetic oligonucleotide
  Target: LAMA2; (-) strand; PAM type: YTN; PAM sequence: TTA
tgaaagataaatatataaaa

SEQ ID NO: 189235 - DNA, 20 bp, Artificial Sequence
  Description of Artificial Sequence: Synthetic oligonucleotide
  Target: LAMA2; (-) strand; PAM type: YTN; PAM sequence: TTT
atgaaagataaatatataaa

SEQ ID NO: 189236 - DNA, 20 bp, Artificial Sequence
  Description of Artificial Sequence: Synthetic oligonucleotide
  Target: LAMA2; (-) strand; PAM type: YTN; PAM sequence: TTT
tatgaaagataaatatataa

SEQ ID NO: 189237 - DNA, 20 bp, Artificial Sequence
  Description of Artificial Sequence: Synthetic oligonucleotide
  Target: LAMA2; (-) strand; PAM type: YTN; PAM sequence: CTC
agggtattttatgaaagata

SEQ ID NO: 189238 - DNA, 20 bp, Artificial Sequence
  Description of Artificial Sequence: Synthetic oligonucleotide
  Target: LAMA2; (-) strand; PAM type: YTN; PAM sequence: TTC
ctcagggtattttatgaaag

SEQ ID NO: 189239 - DNA, 20 bp, Artificial Sequence
  Description of Artificial Sequence: Synthetic oligonucleotide
  Target: LAMA2; (-) strand; PAM type: YTN; PAM sequence: TTT
cctcagggtattttatgaaa

SEQ ID NO: 189240 - DNA, 20 bp, Artificial Sequence
  Description of Artificial Sequence: Synthetic oligonucleotide
  Target: LAMA2; (-) strand; PAM type: YTN; PAM sequence: TTT
tcctcagggtattttatgaa

SEQ ID NO: 189241 - DNA, 20 bp, Artificial Sequence
  Description of Artificial Sequence: Synthetic oligonucleotide
  Target: LAMA2; (-) strand; PAM type: YTN; PAM sequence: TTT
ttcctcagggtattttatga

SEQ ID NO: 189242 - DNA, 20 bp, Artificial Sequence
  Description of Artificial Sequence: Synthetic oligonucleotide
  Target: LAMA2; (-) strand; PAM type: YTN; PAM sequence: TTT
tttcctcagggtattttatg

SEQ ID NO: 189243 - DNA, 20 bp, Artificial Sequence
  Description of Artificial Sequence: Synthetic oligonucleotide
  Target: LAMA2; (-) strand; PAM type: YTN; PAM sequence: TTT
ttttcctcagggtattttat

SEQ ID NO: 189244 - DNA, 20 bp, Artificial Sequence
  Description of Artificial Sequence: Synthetic oligonucleotide
  Target: LAMA2; (-) strand; PAM type: YTN; PAM sequence: TTT
tttttcctcagggtatttta

SEQ ID NO: 189245 - DNA, 20 bp, Artificial Sequence
  Description of Artificial Sequence: Synthetic oligonucleotide
  Target: LAMA2; (-) strand; PAM type: YTN; PAM sequence: TTT
ttttttcctcagggtatttt

SEQ ID NO: 189246 - DNA, 20 bp, Artificial Sequence
  Description of Artificial Sequence: Synthetic oligonucleotide
  Target: LAMA2; (-) strand; PAM type: YTN; PAM sequence: TTA
gaaatggatttttttttcct

SEQ ID NO: 189247 - DNA, 20 bp, Artificial Sequence
  Description of Artificial Sequence: Synthetic oligonucleotide
  Target: LAMA2; (-) strand; PAM type: YTN; PAM sequence: CTT
agaaatggatttttttttcc

SEQ ID NO: 189248 - DNA, 20 bp, Artificial Sequence
  Description of Artificial Sequence: Synthetic oligonucleotide
  Target: LAMA2; (-) strand; PAM type: YTN; PAM sequence: CTA
acataacttagaaatggatt

SEQ ID NO: 189249 - DNA, 20 bp, Artificial Sequence
  Description of Artificial Sequence: Synthetic oligonucleotide
  Target: LAMA2; (-) strand; PAM type: YTN; PAM sequence: CTG
gatatgatagactaacataa

SEQ ID NO: 189250 - DNA, 20 bp, Artificial Sequence
  Description of Artificial Sequence: Synthetic oligonucleotide
  Target: LAMA2; (-) strand; PAM type: YTN; PAM sequence: CTC
tggatatgatagactaacat

SEQ ID NO: 189251 - DNA, 20 bp, Artificial Sequence
  Description of Artificial Sequence: Synthetic oligonucleotide
  Target: LAMA2; (-) strand; PAM type: YTN; PAM sequence: TTC
cataataccaaatgaatctc

SEQ ID NO: 189252 - DNA, 20 bp, Artificial Sequence
  Description of Artificial Sequence: Synthetic oligonucleotide
  Target: LAMA2; (-) strand; PAM type: YTN; PAM sequence: CTT
ccataataccaaatgaatct

SEQ ID NO: 189253 - DNA, 20 bp, Artificial Sequence
  Description of Artificial Sequence: Synthetic oligonucleotide
  Target: LAMA2; (-) strand; PAM type: YTN; PAM sequence: TTC
ttccataataccaaatgaat

SEQ ID NO: 189254 - DNA, 20 bp, Artificial Sequence
  Description of Artificial Sequence: Synthetic oligonucleotide
  Target: LAMA2; (-) strand; PAM type: YTN; PAM sequence: TTG
ttcttccataataccaaatg

SEQ ID NO: 189255 - DNA, 20 bp, Artificial Sequence
  Description of Artificial Sequence: Synthetic oligonucleotide
  Target: LAMA2; (-) strand; PAM type: YTN; PAM sequence: TTT
gttcttccataataccaaat

SEQ ID NO: 189256 - DNA, 20 bp, Artificial Sequence
  Description of Artificial Sequence: Synthetic oligonucleotide
  Target: LAMA2; (-) strand; PAM type: YTN; PAM sequence: TTT
tgttcttccataataccaaa

SEQ ID NO: 189257 - DNA, 20 bp, Artificial Sequence
  Description of Artificial Sequence: Synthetic oligonucleotide
  Target: LAMA2; (-) strand; PAM type: YTN; PAM sequence: TTT
ttgttcttccataataccaa

SEQ ID NO: 189258 - DNA, 20 bp, Artificial Sequence
  Description of Artificial Sequence: Synthetic oligonucleotide
  Target: LAMA2; (-) strand; PAM type: YTN; PAM sequence: TTT
tttgttcttccataatacca

SEQ ID NO: 189259 - DNA, 20 bp, Artificial Sequence
  Description of Artificial Sequence: Synthetic oligonucleotide
  Target: LAMA2; (-) strand; PAM type: YTN; PAM sequence: TTA
ttttttgttcttccataata

SEQ ID NO: 189260 - DNA, 20 bp, Artificial Sequence
  Description of Artificial Sequence: Synthetic oligonucleotide
  Target: LAMA2; (-) strand; PAM type: YTN; PAM sequence: TTT
attttttgttcttccataat

SEQ ID NO: 189261 - DNA, 20 bp, Artificial Sequence
  Description of Artificial Sequence: Synthetic oligonucleotide
  Target: LAMA2; (-) strand; PAM type: YTN; PAM sequence: TTT
tattttttgttcttccataa

SEQ ID NO: 189262 - DNA, 20 bp, Artificial Sequence
  Description of Artificial Sequence: Synthetic oligonucleotide
  Target: LAMA2; (-) strand; PAM type: YTN; PAM sequence: CTA
cacattttattttttgttct

SEQ ID NO: 189263 - DNA, 20 bp, Artificial Sequence
  Description of Artificial Sequence: Synthetic oligonucleotide
  Target: LAMA2; (-) strand; PAM type: YTN; PAM sequence: TTC
aagactacacattttatttt

SEQ ID NO: 189264 - DNA, 20 bp, Artificial Sequence
  Description of Artificial Sequence: Synthetic oligonucleotide
  Target: LAMA2; (-) strand; PAM type: YTN; PAM sequence: CTT
caagactacacattttattt

SEQ ID NO: 189265 - DNA, 20 bp, Artificial Sequence
  Description of Artificial Sequence: Synthetic oligonucleotide
  Target: LAMA2; (-) strand; PAM type: YTN; PAM sequence: TTA
aatgaaaaagacccttcaag

SEQ ID NO: 189266 - DNA, 20 bp, Artificial Sequence
  Description of Artificial Sequence: Synthetic oligonucleotide
  Target: LAMA2; (-) strand; PAM type: YTN; PAM sequence: TTT
aaatgaaaaagacccttcaa

SEQ ID NO: 189267 - DNA, 20 bp, Artificial Sequence
  Description of Artificial Sequence: Synthetic oligonucleotide
  Target: LAMA2; (-) strand; PAM type: YTN; PAM sequence: CTA
catagtaataagcagcatgt

SEQ ID NO: 189268 - DNA, 20 bp, Artificial Sequence
  Description of Artificial Sequence: Synthetic oligonucleotide
  Target: LAMA2; (-) strand; PAM type: YTN; PAM sequence: TTA
agtaatacatgtgtgtatat

SEQ ID NO: 189269 - DNA, 20 bp, Artificial Sequence
  Description of Artificial Sequence: Synthetic oligonucleotide
  Target: LAMA2; (-) strand; PAM type: YTN; PAM sequence: TTT
aagtaatacatgtgtgtata

SEQ ID NO: 189270 - DNA, 20 bp, Artificial Sequence
  Description of Artificial Sequence: Synthetic oligonucleotide
  Target: LAMA2; (-) strand; PAM type: YTN; PAM sequence: TTT
taagtaatacatgtgtgtat

SEQ ID NO: 189271 - DNA, 20 bp, Artificial Sequence
  Description of Artificial Sequence: Synthetic oligonucleotide
  Target: LAMA2; (-) strand; PAM type: YTN; PAM sequence: TTA
atgcatagttttaagtaata

SEQ ID NO: 189272 - DNA, 20 bp, Artificial Sequence
  Description of Artificial Sequence: Synthetic oligonucleotide
  Target: LAMA2; (-) strand; PAM type: YTN; PAM sequence: TTG
aattaatgcatagttttaag

SEQ ID NO: 189273 - DNA, 20 bp, Artificial Sequence
  Description of Artificial Sequence: Synthetic oligonucleotide
  Target: LAMA2; (-) strand; PAM type: YTN; PAM sequence: TTT
gaattaatgcatagttttaa

SEQ ID NO: 189274 - DNA, 20 bp, Artificial Sequence
  Description of Artificial Sequence: Synthetic oligonucleotide
  Target: LAMA2; (-) strand; PAM type: YTN; PAM sequence: TTG
atgaatgcatttgaattaat

SEQ ID NO: 189275 - DNA, 20 bp, Artificial Sequence
  Description of Artificial Sequence: Synthetic oligonucleotide
  Target: LAMA2; (-) strand; PAM type: YTN; PAM sequence: TTT
gatgaatgcatttgaattaa

SEQ ID NO: 189276 - DNA, 20 bp, Artificial Sequence
  Description of Artificial Sequence: Synthetic oligonucleotide
  Target: LAMA2; (-) strand; PAM type: YTN; PAM sequence: CTA
aaatttgatgaatgcatttg

SEQ ID NO: 189277 - DNA, 20 bp, Artificial Sequence
  Description of Artificial Sequence: Synthetic oligonucleotide
  Target: LAMA2; (-) strand; PAM type: YTN; PAM sequence: TTC
caagaatgtaaacactaaaa

SEQ ID NO: 189278 - DNA, 20 bp, Artificial Sequence
  Description of Artificial Sequence: Synthetic oligonucleotide
  Target: LAMA2; (-) strand; PAM type: YTN; PAM sequence: CTA
gtgtccagtaatcaaagttc

SEQ ID NO: 189279 - DNA, 20 bp, Artificial Sequence
  Description of Artificial Sequence: Synthetic oligonucleotide
  Target: LAMA2; (-) strand; PAM type: YTN; PAM sequence: TTA
tagcctagtgtccagtaatc

SEQ ID NO: 189280 - DNA, 20 bp, Artificial Sequence
  Description of Artificial Sequence: Synthetic oligonucleotide
  Target: LAMA2; (-) strand; PAM type: YTN; PAM sequence: CTT
atagcctagtgtccagtaat

SEQ ID NO: 189281 - DNA, 20 bp, Artificial Sequence
  Description of Artificial Sequence: Synthetic oligonucleotide
  Target: LAMA2; (-) strand; PAM type: YTN; PAM sequence: TTC
ttatagcctagtgtccagta

SEQ ID NO: 189282 - DNA, 20 bp, Artificial Sequence
  Description of Artificial Sequence: Synthetic oligonucleotide
  Target: LAMA2; (-) strand; PAM type: YTN; PAM sequence: TTT
cttatagcctagtgtccagt

SEQ ID NO: 189283 - DNA, 20 bp, Artificial Sequence
  Description of Artificial Sequence: Synthetic oligonucleotide
  Target: LAMA2; (-) strand; PAM type: YTN; PAM sequence: TTT
tcttatagcctagtgtccag

SEQ ID NO: 189284 - DNA, 20 bp, Artificial Sequence
  Description of Artificial Sequence: Synthetic oligonucleotide
  Target: LAMA2; (-) strand; PAM type: YTN; PAM sequence: TTA
atattttcttatagcctagt

SEQ ID NO: 189285 - DNA, 20 bp, Artificial Sequence
  Description of Artificial Sequence: Synthetic oligonucleotide
  Target: LAMA2; (-) strand; PAM type: YTN; PAM sequence: TTC
agaaaagccaataaagaatc

SEQ ID NO: 189286 - DNA, 20 bp, Artificial Sequence
  Description of Artificial Sequence: Synthetic oligonucleotide
  Target: LAMA2; (-) strand; PAM type: YTN; PAM sequence: CTT
cagaaaagccaataaagaat

SEQ ID NO: 189287 - DNA, 20 bp, Artificial Sequence
  Description of Artificial Sequence: Synthetic oligonucleotide
  Target: LAMA2; (-) strand; PAM type: YTN; PAM sequence: TTA
cttcagaaaagccaataaag

SEQ ID NO: 189288 - DNA, 20 bp, Artificial Sequence
  Description of Artificial Sequence: Synthetic oligonucleotide
  Target: LAMA2; (-) strand; PAM type: YTN; PAM sequence: CTG
taaagttacttcagaaaagc

SEQ ID NO: 189289 - DNA, 20 bp, Artificial Sequence
  Description of Artificial Sequence: Synthetic oligonucleotide
  Target: LAMA2; (-) strand; PAM type: YTN; PAM sequence: TTC
tgtaaagttacttcagaaaa

SEQ ID NO: 189290 - DNA, 20 bp, Artificial Sequence
  Description of Artificial Sequence: Synthetic oligonucleotide
  Target: LAMA2; (-) strand; PAM type: YTN; PAM sequence: CTT
ctgtaaagttacttcagaaa

SEQ ID NO: 189291 - DNA, 20 bp, Artificial Sequence
  Description of Artificial Sequence: Synthetic oligonucleotide
  Target: LAMA2; (-) strand; PAM type: YTN; PAM sequence: CTG
aagtaacttctgtaaagtta

SEQ ID NO: 189292 - DNA, 20 bp, Artificial Sequence
  Description of Artificial Sequence: Synthetic oligonucleotide
  Target: LAMA2; (-) strand; PAM type: YTN; PAM sequence: TTG
ctgaagtaacttctgtaaag

SEQ ID NO: 189293 - DNA, 20 bp, Artificial Sequence
  Description of Artificial Sequence: Synthetic oligonucleotide
  Target: LAMA2; (-) strand; PAM type: YTN; PAM sequence: CTT
gctgaagtaacttctgtaaa

SEQ ID NO: 189294 - DNA, 20 bp, Artificial Sequence
  Description of Artificial Sequence: Synthetic oligonucleotide
  Target: LAMA2; (-) strand; PAM type: YTN; PAM sequence: CTA
gcttgctgaagtaacttctg

SEQ ID NO: 189295 - DNA, 20 bp, Artificial Sequence
  Description of Artificial Sequence: Synthetic oligonucleotide
  Target: LAMA2; (-) strand; PAM type: YTN; PAM sequence: TTC
tagcttgctgaagtaacttc

SEQ ID NO: 189296 - DNA, 20 bp, Artificial Sequence
  Description of Artificial Sequence: Synthetic oligonucleotide
  Target: LAMA2; (-) strand; PAM type: YTN; PAM sequence: TTT
ctagcttgctgaagtaactt

SEQ ID NO: 189297 - DNA, 20 bp, Artificial Sequence
  Description of Artificial Sequence: Synthetic oligonucleotide
  Target: LAMA2; (-) strand; PAM type: YTN; PAM sequence: TTG
tttctagcttgctgaagtaa

SEQ ID NO: 189298 - DNA, 20 bp, Artificial Sequence
  Description of Artificial Sequence: Synthetic oligonucleotide
  Target: LAMA2; (-) strand; PAM type: YTN; PAM sequence: TTA
tacagtataataaataccgt

SEQ ID NO: 189299 - DNA, 20 bp, Artificial Sequence
  Description of Artificial Sequence: Synthetic oligonucleotide
  Target: LAMA2; (-) strand; PAM type: YTN; PAM sequence: TTC
attatacagtataataaata

SEQ ID NO: 189300 - DNA, 20 bp, Artificial Sequence
  Description of Artificial Sequence: Synthetic oligonucleotide
  Target: LAMA2; (-) strand; PAM type: YTN; PAM sequence: TTA
aagggttcattatacagtat

SEQ ID NO: 189301 - DNA, 20 bp, Artificial Sequence
  Description of Artificial Sequence: Synthetic oligonucleotide
  Target: LAMA2; (-) strand; PAM type: YTN; PAM sequence: CTT
aaagggttcattatacagta

SEQ ID NO: 189302 - DNA, 20 bp, Artificial Sequence
  Description of Artificial Sequence: Synthetic oligonucleotide
  Target: LAMA2; (-) strand; PAM type: YTN; PAM sequence: TTC
ttaaagggttcattatacag

SEQ ID NO: 189303 - DNA, 20 bp, Artificial Sequence
  Description of Artificial Sequence: Synthetic oligonucleotide
  Target: LAMA2; (-) strand; PAM type: YTN; PAM sequence: CTA
ttcttaaagggttcattata

SEQ ID NO: 189304 - DNA, 20 bp, Artificial Sequence
  Description of Artificial Sequence: Synthetic oligonucleotide
  Target: LAMA2; (-) strand; PAM type: YTN; PAM sequence: TTG
actattcttaaagggttcat

SEQ ID NO: 189305 - DNA, 20 bp, Artificial Sequence
  Description of Artificial Sequence: Synthetic oligonucleotide
  Target: LAMA2; (-) strand; PAM type: YTN; PAM sequence: TTA
cacattgactattcttaaag

SEQ ID NO: 189306 - DNA, 20 bp, Artificial Sequence
  Description of Artificial Sequence: Synthetic oligonucleotide
  Target: LAMA2; (-) strand; PAM type: YTN; PAM sequence: TTT
acacattgactattcttaaa

SEQ ID NO: 189307 - DNA, 20 bp, Artificial Sequence
  Description of Artificial Sequence: Synthetic oligonucleotide
  Target: LAMA2; (-) strand; PAM type: YTN; PAM sequence: CTG
acatttacacattgactatt

SEQ ID NO: 189308 - DNA, 20 bp, Artificial Sequence
  Description of Artificial Sequence: Synthetic oligonucleotide
  Target: LAMA2; (-) strand; PAM type: YTN; PAM sequence: TTC
actgacatttacacattgac

SEQ ID NO: 189309 - DNA, 20 bp, Artificial Sequence
  Description of Artificial Sequence: Synthetic oligonucleotide
  Target: LAMA2; (-) strand; PAM type: YTN; PAM sequence: TTC
attcactgacatttacacat

SEQ ID NO: 189310 - DNA, 20 bp, Artificial Sequence
  Description of Artificial Sequence: Synthetic oligonucleotide
  Target: LAMA2; (-) strand; PAM type: YTN; PAM sequence: TTT
cattcactgacatttacaca

SEQ ID NO: 189311 - DNA, 20 bp, Artificial Sequence
  Description of Artificial Sequence: Synthetic oligonucleotide
  Target: LAMA2; (-) strand; PAM type: YTN; PAM sequence: TTT
tcattcactgacatttacac

SEQ ID NO: 189312 - DNA, 20 bp, Artificial Sequence
  Description of Artificial Sequence: Synthetic oligonucleotide
  Target: LAMA2; (-) strand; PAM type: YTN; PAM sequence: CTT
ttcattcactgacatttaca

SEQ ID NO: 189313 - DNA, 20 bp, Artificial Sequence
  Description of Artificial Sequence: Synthetic oligonucleotide
  Target: LAMA2; (-) strand; PAM type: YTN; PAM sequence: TTC
ttttcattcactgacattta

SEQ ID NO: 189314 - DNA, 20 bp, Artificial Sequence
  Description of Artificial Sequence: Synthetic oligonucleotide
  Target: LAMA2; (-) strand; PAM type: YTN; PAM sequence: TTG
ttcttttcattcactgacat

SEQ ID NO: 189315 - DNA, 20 bp, Artificial Sequence
  Description of Artificial Sequence: Synthetic oligonucleotide
  Target: LAMA2; (-) strand; PAM type: YTN; PAM sequence: CTT
gttcttttcattcactgaca

SEQ ID NO: 189316 - DNA, 20 bp, Artificial Sequence
  Description of Artificial Sequence: Synthetic oligonucleotide
  Target: LAMA2; (-) strand; PAM type: YTN; PAM sequence: TTC
ttgttcttttcattcactga

SEQ ID NO: 189317 - DNA, 20 bp, Artificial Sequence
  Description of Artificial Sequence: Synthetic oligonucleotide
  Target: LAMA2; (-) strand; PAM type: YTN; PAM sequence: TTG
gttcttgttcttttcattca

SEQ ID NO: 189318 - DNA, 20 bp, Artificial Sequence
  Description of Artificial Sequence: Synthetic oligonucleotide
  Target: LAMA2; (-) strand; PAM type: YTN; PAM sequence: TTT
ggttcttgttcttttcattc

SEQ ID NO: 189319 - DNA, 20 bp, Artificial Sequence
  Description of Artificial Sequence: Synthetic oligonucleotide
  Target: LAMA2; (-) strand; PAM type: YTN; PAM sequence: CTG
tttggttcttgttcttttca

SEQ ID NO: 189320 - DNA, 20 bp, Artificial Sequence
  Description of Artificial Sequence: Synthetic oligonucleotide
  Target: LAMA2; (-) strand; PAM type: YTN; PAM sequence: TTA
ggtatatctgtttggttctt

SEQ ID NO: 189321 - DNA, 20 bp, Artificial Sequence
  Description of Artificial Sequence: Synthetic oligonucleotide
  Target: LAMA2; (-) strand; PAM type: YTN; PAM sequence: CTT
aggtatatctgtttggttct

SEQ ID NO: 189322 - DNA, 20 bp, Artificial Sequence
  Description of Artificial Sequence: Synthetic oligonucleotide
  Target: LAMA2; (-) strand; PAM type: YTN; PAM sequence: TTC
ttaggtatatctgtttggtt

SEQ ID NO: 189323 - DNA, 20 bp, Artificial Sequence
  Description of Artificial Sequence: Synthetic oligonucleotide
  Target: LAMA2; (-) strand; PAM type: YTN; PAM sequence: CTG
attcttaggtatatctgttt

SEQ ID NO: 189324 - DNA, 20 bp, Artificial Sequence
  Description of Artificial Sequence: Synthetic oligonucleotide
  Target: LAMA2; (-) strand; PAM type: YTN; PAM sequence: CTC
tgattcttaggtatatctgt

SEQ ID NO: 189325 - DNA, 20 bp, Artificial Sequence
  Description of Artificial Sequence: Synthetic oligonucleotide
  Target: LAMA2; (-) strand; PAM type: YTN; PAM sequence: TTG
ctctgattcttaggtatatc

SEQ ID NO: 189326 - DNA, 20 bp, Artificial Sequence
  Description of Artificial Sequence: Synthetic oligonucleotide
  Target: LAMA2; (-) strand; PAM type: YTN; PAM sequence: CTT
gctctgattcttaggtatat

SEQ ID NO: 189327 - DNA, 20 bp, Artificial Sequence
  Description of Artificial Sequence: Synthetic oligonucleotide
  Target: LAMA2; (-) strand; PAM type: YTN; PAM sequence: TTA
atcttgctctgattcttagg

SEQ ID NO: 189328 - DNA, 20 bp, Artificial Sequence
  Description of Artificial Sequence: Synthetic oligonucleotide
  Target: LAMA2; (-) strand; PAM type: YTN; PAM sequence: TTG
agattaatcttgctctgatt

SEQ ID NO: 189329 - DNA, 20 bp, Artificial Sequence
  Description of Artificial Sequence: Synthetic oligonucleotide
  Target: LAMA2; (-) strand; PAM type: YTN; PAM sequence: TTT
gagattaatcttgctctgat

SEQ ID NO: 189330 - DNA, 20 bp, Artificial Sequence
  Description of Artificial Sequence: Synthetic oligonucleotide
  Target: LAMA2; (-) strand; PAM type: YTN; PAM sequence: TTT
tgagattaatcttgctctga

SEQ ID NO: 189331 - DNA, 20 bp, Artificial Sequence
  Description of Artificial Sequence: Synthetic oligonucleotide
  Target: LAMA2; (-) strand; PAM type: YTN; PAM sequence: TTC
agaaggaattttgagattaa

SEQ ID NO: 189332 - DNA, 20 bp, Artificial Sequence
  Description of Artificial Sequence: Synthetic oligonucleotide
  Target: LAMA2; (-) strand; PAM type: YTN; PAM sequence: TTT
cagaaggaattttgagatta

SEQ ID NO: 189333 - DNA, 20 bp, Artificial Sequence
  Description of Artificial Sequence: Synthetic oligonucleotide
  Target: LAMA2; (-) strand; PAM type: YTN; PAM sequence: TTT
tcagaaggaattttgagatt

SEQ ID NO: 189334 - DNA, 20 bp, Artificial Sequence
  Description of Artificial Sequence: Synthetic oligonucleotide
  Target: LAMA2; (-) strand; PAM type: YTN; PAM sequence: CTT
ttcagaaggaattttgagat

SEQ ID NO: 189335 - DNA, 20 bp, Artificial Sequence
  Description of Artificial Sequence: Synthetic oligonucleotide
  Target: LAMA2; (-) strand; PAM type: YTN; PAM sequence: TTC
atcttttcagaaggaatttt

SEQ ID NO: 189336 - DNA, 20 bp, Artificial Sequence
  Description of Artificial Sequence: Synthetic oligonucleotide
  Target: LAMA2; (-) strand; PAM type: YTN; PAM sequence: TTT
catcttttcagaaggaattt

SEQ ID NO: 189337 - DNA, 20 bp, Artificial Sequence
  Description of Artificial Sequence: Synthetic oligonucleotide
  Target: LAMA2; (-) strand; PAM type: YTN; PAM sequence: TTT
tcatcttttcagaaggaatt

SEQ ID NO: 189338 - DNA, 20 bp, Artificial Sequence
  Description of Artificial Sequence: Synthetic oligonucleotide
  Target: LAMA2; (-) strand; PAM type: YTN; PAM sequence: TTT
ttcatcttttcagaaggaat

SEQ ID NO: 189339 - DNA, 20 bp, Artificial Sequence
  Description of Artificial Sequence: Synthetic oligonucleotide
  Target: LAMA2; (-) strand; PAM type: YTN; PAM sequence: TTA
tgaagatgtcaaggtttttc

SEQ ID NO: 189340 - DNA, 20 bp, Artificial Sequence
  Description of Artificial Sequence: Synthetic oligonucleotide
  Target: LAMA2; (-) strand; PAM type: YTN; PAM sequence: TTT
atgaagatgtcaaggttttt

SEQ ID NO: 189341 - DNA, 20 bp, Artificial Sequence
  Description of Artificial Sequence: Synthetic oligonucleotide
  Target: LAMA2; (-) strand; PAM type: YTN; PAM sequence: TTT
tatgaagatgtcaaggtttt

SEQ ID NO: 189342 - DNA, 20 bp, Artificial Sequence
  Description of Artificial Sequence: Synthetic oligonucleotide
  Target: LAMA2; (-) strand; PAM type: YTN; PAM sequence: TTT
ttatgaagatgtcaaggttt

SEQ ID NO: 189343 - DNA, 20 bp, Artificial Sequence
  Description of Artificial Sequence: Synthetic oligonucleotide
  Target: LAMA2; (-) strand; PAM type: YTN; PAM sequence: TTA
aatgtttttatgaagatgtc

SEQ ID NO: 189344 - DNA, 20 bp, Artificial Sequence
  Description of Artificial Sequence: Synthetic oligonucleotide
  Target: LAMA2; (-) strand; PAM type: YTN; PAM sequence: TTT
aaatgtttttatgaagatgt

SEQ ID NO: 189345 - DNA, 20 bp, Artificial Sequence
  Description of Artificial Sequence: Synthetic oligonucleotide
  Target: LAMA2; (-) strand; PAM type: YTN; PAM sequence: CTT
taaatgtttttatgaagatg

SEQ ID NO: 189346 - DNA, 20 bp, Artificial Sequence
  Description of Artificial Sequence: Synthetic oligonucleotide
  Target: LAMA2; (-) strand; PAM type: YTN; PAM sequence: TTC
aaatgaaagtctttaaatgt

SEQ ID NO: 189347 - DNA, 20 bp, Artificial Sequence
  Description of Artificial Sequence: Synthetic oligonucleotide
  Target: LAMA2; (-) strand; PAM type: YTN; PAM sequence: CTT
caaatgaaagtctttaaatg

SEQ ID NO: 189348 - DNA, 20 bp, Artificial Sequence
  Description of Artificial Sequence: Synthetic oligonucleotide
  Target: LAMA2; (-) strand; PAM type: YTN; PAM sequence: TTC
aacttcaaatgaaagtcttt

SEQ ID NO: 189349 - DNA, 20 bp, Artificial Sequence
  Description of Artificial Sequence: Synthetic oligonucleotide
  Target: LAMA2; (-) strand; PAM type: YTN; PAM sequence: CTG
agttcaacttcaaatgaaag

SEQ ID NO: 189350 - DNA, 20 bp, Artificial Sequence
  Description of Artificial Sequence: Synthetic oligonucleotide
  Target: LAMA2; (-) strand; PAM type: YTN; PAM sequence: TTA
actgagttcaacttcaaatg

SEQ ID NO: 189351 - DNA, 20 bp, Artificial Sequence
  Description of Artificial Sequence: Synthetic oligonucleotide
  Target: LAMA2; (-) strand; PAM type: YTN; PAM sequence: CTT
aactgagttcaacttcaaat

SEQ ID NO: 189352 - DNA, 20 bp, Artificial Sequence
  Description of Artificial Sequence: Synthetic oligonucleotide
  Target: LAMA2; (-) strand; PAM type: YTN; PAM sequence: TTG
tcttaactgagttcaacttc

SEQ ID NO: 189353 - DNA, 20 bp, Artificial Sequence
  Description of Artificial Sequence: Synthetic oligonucleotide
  Target: LAMA2; (-) strand; PAM type: YTN; PAM sequence: TTT
gtcttaactgagttcaactt

SEQ ID NO: 189354 - DNA, 20 bp, Artificial Sequence
  Description of Artificial Sequence: Synthetic oligonucleotide
  Target: LAMA2; (-) strand; PAM type: YTN; PAM sequence: TTT
tgtcttaactgagttcaact

SEQ ID NO: 189355 - DNA, 20 bp, Artificial Sequence
  Description of Artificial Sequence: Synthetic oligonucleotide
  Target: LAMA2; (-) strand; PAM type: YTN; PAM sequence: CTT
ttgtcttaactgagttcaac

SEQ ID NO: 189356 - DNA, 20 bp, Artificial Sequence
  Description of Artificial Sequence: Synthetic oligonucleotide
  Target: LAMA2; (-) strand; PAM type: YTN; PAM sequence: TTG
gaagacttttgtcttaactg

SEQ ID NO: 189357 - DNA, 20 bp, Artificial Sequence
  Description of Artificial Sequence: Synthetic oligonucleotide
  Target: LAMA2; (-) strand; PAM type: YTN; PAM sequence: CTG
ggagattggaagacttttgt

SEQ ID NO: 189358 - DNA, 20 bp, Artificial Sequence
  Description of Artificial Sequence: Synthetic oligonucleotide
  Target: LAMA2; (-) strand; PAM type: YTN; PAM sequence: CTC
aaaatctgggagattggaag

SEQ ID NO: 189359 - DNA, 20 bp, Artificial Sequence
  Description of Artificial Sequence: Synthetic oligonucleotide
  Target: LAMA2; (-) strand; PAM type: YTN; PAM sequence: CTC
tcaaaatctgggagattgga

SEQ ID NO: 189360 - DNA, 20 bp, Artificial Sequence
  Description of Artificial Sequence: Synthetic oligonucleotide
  Target: LAMA2; (-) strand; PAM type: YTN; PAM sequence: CTG
caatcacatacatacacaaa

SEQ ID NO: 189361 - DNA, 20 bp, Artificial Sequence
  Description of Artificial Sequence: Synthetic oligonucleotide
  Target: LAMA2; (-) strand; PAM type: YTN; PAM sequence: CTG
gtgctgcaatcacatacata

SEQ ID NO: 189362 - DNA, 20 bp, Artificial Sequence
  Description of Artificial Sequence: Synthetic oligonucleotide
  Target: LAMA2; (-) strand; PAM type: YTN; PAM sequence: CTG
taaatggtacatgtgcactg

SEQ ID NO: 189363 - DNA, 20 bp, Artificial Sequence
  Description of Artificial Sequence: Synthetic oligonucleotide
  Target: LAMA2; (-) strand; PAM type: YTN; PAM sequence: CTA
ggctgtaaatggtacatgtg

SEQ ID NO: 189364 - DNA, 20 bp, Artificial Sequence
  Description of Artificial Sequence: Synthetic oligonucleotide
  Target: LAMA2; (-) strand; PAM type: YTN; PAM sequence: CTG
tgagtgctaggctgtaaatg

SEQ ID NO: 189365 - DNA, 20 bp, Artificial Sequence
  Description of Artificial Sequence: Synthetic oligonucleotide
  Target: LAMA2; (-) strand; PAM type: YTN; PAM sequence: TTA
ggtcctgtgagtgctaggct

SEQ ID NO: 189366 - DNA, 20 bp, Artificial Sequence
  Description of Artificial Sequence: Synthetic oligonucleotide
  Target: LAMA2; (-) strand; PAM type: YTN; PAM sequence: CTA
aatatacaaattaggtcctg

SEQ ID NO: 189367 - DNA, 20 bp, Artificial Sequence
  Description of Artificial Sequence: Synthetic oligonucleotide
  Target: LAMA2; (-) strand; PAM type: YTN; PAM sequence: TTA
agacaacaaaaatcaaacag

SEQ ID NO: 189368 - DNA, 20 bp, Artificial Sequence
  Description of Artificial Sequence: Synthetic oligonucleotide
  Target: LAMA2; (-) strand; PAM type: YTN; PAM sequence: CTT
aagacaacaaaaatcaaaca

SEQ ID NO: 189369 - DNA, 20 bp, Artificial Sequence
  Description of Artificial Sequence: Synthetic oligonucleotide
  Target: LAMA2; (-) strand; PAM type: YTN; PAM sequence: CTA
ataccttaagacaacaaaaa

SEQ ID NO: 189370 - DNA, 20 bp, Artificial Sequence
  Description of Artificial Sequence: Synthetic oligonucleotide
  Target: LAMA2; (-) strand; PAM type: YTN; PAM sequence: TTG
ataaacaaaatctaatacct

SEQ ID NO: 189371 - DNA, 20 bp, Artificial Sequence
  Description of Artificial Sequence: Synthetic oligonucleotide
  Target: LAMA2; (-) strand; PAM type: YTN; PAM sequence: TTT
gataaacaaaatctaatacc

SEQ ID NO: 189372 - DNA, 20 bp, Artificial Sequence
  Description of Artificial Sequence: Synthetic oligonucleotide
  Target: LAMA2; (-) strand; PAM type: YTN; PAM sequence: TTT
tgataaacaaaatctaatac

SEQ ID NO: 189373 - DNA, 20 bp, Artificial Sequence
  Description of Artificial Sequence: Synthetic oligonucleotide
  Target: LAMA2; (-) strand; PAM type: YTN; PAM sequence: TTC
aaagattttgataaacaaaa

SEQ ID NO: 189374 - DNA, 20 bp, Artificial Sequence
  Description of Artificial Sequence: Synthetic oligonucleotide
  Target: LAMA2; (-) strand; PAM type: YTN; PAM sequence: TTA
ttcaaagattttgataaaca

SEQ ID NO: 189375 - DNA, 20 bp, Artificial Sequence
  Description of Artificial Sequence: Synthetic oligonucleotide
  Target: LAMA2; (-) strand; PAM type: YTN; PAM sequence: CTT
attcaaagattttgataaac

SEQ ID NO: 189376 - DNA, 20 bp, Artificial Sequence
  Description of Artificial Sequence: Synthetic oligonucleotide
  Target: LAMA2; (-) strand; PAM type: YTN; PAM sequence: TTC
ttattcaaagattttgataa

SEQ ID NO: 189377 - DNA, 20 bp, Artificial Sequence
  Description of Artificial Sequence: Synthetic oligonucleotide
  Target: LAMA2; (-) strand; PAM type: YTN; PAM sequence: TTT
cttattcaaagattttgata

SEQ ID NO: 189378 - DNA, 20 bp, Artificial Sequence
  Description of Artificial Sequence: Synthetic oligonucleotide
  Target: LAMA2; (-) strand; PAM type: YTN; PAM sequence: TTT
tcttattcaaagattttgat

SEQ ID NO: 189379 - DNA, 20 bp, Artificial Sequence
  Description of Artificial Sequence: Synthetic oligonucleotide
  Target: LAMA2; (-) strand; PAM type: YTN; PAM sequence: TTA
gattttcttattcaaagatt

SEQ ID NO: 189380 - DNA, 20 bp, Artificial Sequence
  Description of Artificial Sequence: Synthetic oligonucleotide
  Target: LAMA2; (-) strand; PAM type: YTN; PAM sequence: TTT
agattttcttattcaaagat

SEQ ID NO: 189381 - DNA, 20 bp, Artificial Sequence
  Description of Artificial Sequence: Synthetic oligonucleotide
  Target: LAMA2; (-) strand; PAM type: YTN; PAM sequence: TTT
tagattttcttattcaaaga

SEQ ID NO: 189382 - DNA, 20 bp, Artificial Sequence
  Description of Artificial Sequence: Synthetic oligonucleotide
  Target: LAMA2; (-) strand; PAM type: YTN; PAM sequence: TTT
ttagattttcttattcaaag

SEQ ID NO: 189383 - DNA, 20 bp, Artificial Sequence
  Description of Artificial Sequence: Synthetic oligonucleotide
  Target: LAMA2; (-) strand; PAM type: YTN; PAM sequence: TTC
aatttttagattttcttatt

SEQ ID NO: 189384 - DNA, 20 bp, Artificial Sequence
  Description of Artificial Sequence: Synthetic oligonucleotide
  Target: LAMA2; (-) strand; PAM type: YTN; PAM sequence: CTA
gaaattcaatttttagattt

SEQ ID NO: 189385 - DNA, 20 bp, Artificial Sequence
  Description of Artificial Sequence: Synthetic oligonucleotide
  Target: LAMA2; (-) strand; PAM type: YTN; PAM sequence: TTC
tagaaattcaatttttagat

SEQ ID NO: 189386 - DNA, 20 bp, Artificial Sequence
  Description of Artificial Sequence: Synthetic oligonucleotide
  Target: LAMA2; (-) strand; PAM type: YTN; PAM sequence: TTT
ctagaaattcaatttttaga

SEQ ID NO: 189387 - DNA, 20 bp, Artificial Sequence
  Description of Artificial Sequence: Synthetic oligonucleotide
  Target: LAMA2; (-) strand; PAM type: YTN; PAM sequence: TTT
tctagaaattcaatttttag

SEQ ID NO: 189388 - DNA, 20 bp, Artificial Sequence
  Description of Artificial Sequence: Synthetic oligonucleotide
  Target: LAMA2; (-) strand; PAM type: YTN; PAM sequence: CTA
gagttttctagaaattcaat

SEQ ID NO: 189389 - DNA, 20 bp, Artificial Sequence
  Description of Artificial Sequence: Synthetic oligonucleotide
  Target: LAMA2; (-) strand; PAM type: YTN; PAM sequence: TTG
tcaaggcaactagagttttc

SEQ ID NO: 189390 - DNA, 20 bp, Artificial Sequence
  Description of Artificial Sequence: Synthetic oligonucleotide
  Target: LAMA2; (-) strand; PAM type: YTN; PAM sequence: TTT
gtcaaggcaactagagtttt

SEQ ID NO: 189391 - DNA, 20 bp, Artificial Sequence
  Description of Artificial Sequence: Synthetic oligonucleotide
  Target: LAMA2; (-) strand; PAM type: YTN; PAM sequence: TTG
gtccataatcatttgtcaag

SEQ ID NO: 189392 - DNA, 20 bp, Artificial Sequence
  Description of Artificial Sequence: Synthetic oligonucleotide
  Target: LAMA2; (-) strand; PAM type: YTN; PAM sequence: TTT
ggtccataatcatttgtcaa

SEQ ID NO: 189393 - DNA, 20 bp, Artificial Sequence
  Description of Artificial Sequence: Synthetic oligonucleotide
  Target: LAMA2; (-) strand; PAM type: YTN; PAM sequence: CTT
tggtccataatcatttgtca

SEQ ID NO: 189394 - DNA, 20 bp, Artificial Sequence
  Description of Artificial Sequence: Synthetic oligonucleotide
  Target: LAMA2; (-) strand; PAM type: YTN; PAM sequence: TTC
tttggtccataatcatttgt

SEQ ID NO: 189395 - DNA, 20 bp, Artificial Sequence
  Description of Artificial Sequence: Synthetic oligonucleotide
  Target: LAMA2; (-) strand; PAM type: YTN; PAM sequence: TTA
ttctttggtccataatcatt

SEQ ID NO: 189396 - DNA, 20 bp, Artificial Sequence
  Description of Artificial Sequence: Synthetic oligonucleotide
  Target: LAMA2; (-) strand; PAM type: YTN; PAM sequence: TTT
attctttggtccataatcat

SEQ ID NO: 189397 - DNA, 20 bp, Artificial Sequence
  Description of Artificial Sequence: Synthetic oligonucleotide
  Target: LAMA2; (-) strand; PAM type: YTN; PAM sequence: TTA
taatttattctttggtccat

SEQ ID NO: 189398 - DNA, 20 bp, Artificial Sequence
  Description of Artificial Sequence: Synthetic oligonucleotide
  Target: LAMA2; (-) strand; PAM type: YTN; PAM sequence: TTT
ataatttattctttggtcca

SEQ ID NO: 189399 - DNA, 20 bp, Artificial Sequence
  Description of Artificial Sequence: Synthetic oligonucleotide
  Target: LAMA2; (-) strand; PAM type: YTN; PAM sequence: CTC
atttataatttattctttgg

SEQ ID NO: 189400 - DNA, 20 bp, Artificial Sequence
  Description of Artificial Sequence: Synthetic oligonucleotide
  Target: LAMA2; (-) strand; PAM type: YTN; PAM sequence: TTG
tctcatttataatttattct

SEQ ID NO: 189401 - DNA, 20 bp, Artificial Sequence
  Description of Artificial Sequence: Synthetic oligonucleotide
  Target: LAMA2; (-) strand; PAM type: YTN; PAM sequence: TTA
taattgtctcatttataatt

SEQ ID NO: 189402 - DNA, 20 bp, Artificial Sequence
  Description of Artificial Sequence: Synthetic oligonucleotide
  Target: LAMA2; (-) strand; PAM type: YTN; PAM sequence: CTG
gatggaatattataattgtc

SEQ ID NO: 189403 - DNA, 20 bp, Artificial Sequence
  Description of Artificial Sequence: Synthetic oligonucleotide
  Target: LAMA2; (-) strand; PAM type: YTN; PAM sequence: CTA
ctggatggaatattataatt

SEQ ID NO: 189404 - DNA, 20 bp, Artificial Sequence
  Description of Artificial Sequence: Synthetic oligonucleotide
  Target: LAMA2; (-) strand; PAM type: YTN; PAM sequence: TTA
acagtatagctactggatgg

SEQ ID NO: 189405 - DNA, 20 bp, Artificial Sequence
  Description of Artificial Sequence: Synthetic oligonucleotide
  Target: LAMA2; (-) strand; PAM type: YTN; PAM sequence: TTT
aacagtatagctactggatg

SEQ ID NO: 189406 - DNA, 20 bp, Artificial Sequence
  Description of Artificial Sequence: Synthetic oligonucleotide
  Target: LAMA2; (-) strand; PAM type: YTN; PAM sequence: TTT
taacagtatagctactggat

SEQ ID NO: 189407 - DNA, 20 bp, Artificial Sequence
  Description of Artificial Sequence: Synthetic oligonucleotide
  Target: LAMA2; (-) strand; PAM type: YTN; PAM sequence: TTG
gaattttaacagtatagcta

SEQ ID NO: 189408 - DNA, 20 bp, Artificial Sequence
  Description of Artificial Sequence: Synthetic oligonucleotide
  Target: LAMA2; (-) strand; PAM type: YTN; PAM sequence: CTT
ggaattttaacagtatagct

SEQ ID NO: 189409 - DNA, 20 bp, Artificial Sequence
  Description of Artificial Sequence: Synthetic oligonucleotide
  Target: LAMA2; (-) strand; PAM type: YTN; PAM sequence: TTA
taccttggaattttaacagt

SEQ ID NO: 189410 - DNA, 20 bp, Artificial Sequence
  Description of Artificial Sequence: Synthetic oligonucleotide
  Target: LAMA2; (-) strand; PAM type: YTN; PAM sequence: CTC
gaaagggattataccttgga

SEQ ID NO: 189411 - DNA, 20 bp, Artificial Sequence
  Description of Artificial Sequence: Synthetic oligonucleotide
  Target: LAMA2; (-) strand; PAM type: YTN; PAM sequence: TTA
caagcaactcgaaagggatt

SEQ ID NO: 189412 - DNA, 20 bp, Artificial Sequence
  Description of Artificial Sequence: Synthetic oligonucleotide
  Target: LAMA2; (-) strand; PAM type: YTN; PAM sequence: CTA
agttacaagcaactcgaaag

SEQ ID NO: 189413 - DNA, 20 bp, Artificial Sequence
  Description of Artificial Sequence: Synthetic oligonucleotide
  Target: LAMA2; (-) strand; PAM type: YTN; PAM sequence: TTC
taagttacaagcaactcgaa

SEQ ID NO: 189414 - DNA, 20 bp, Artificial Sequence
  Description of Artificial Sequence: Synthetic oligonucleotide
  Target: LAMA2; (-) strand; PAM type: YTN; PAM sequence: CTT
ctaagttacaagcaactcga

SEQ ID NO: 189415 - DNA, 20 bp, Artificial Sequence
  Description of Artificial Sequence: Synthetic oligonucleotide
  Target: LAMA2; (-) strand; PAM type: YTN; PAM sequence: CTA
tagaataggaccttctaagt

SEQ ID NO: 189416 - DNA, 20 bp, Artificial Sequence
  Description of Artificial Sequence: Synthetic oligonucleotide
  Target: LAMA2; (-) strand; PAM type: YTN; PAM sequence: TTC
tatagaataggaccttctaa

SEQ ID NO: 189417 - DNA, 20 bp, Artificial Sequence
  Description of Artificial Sequence: Synthetic oligonucleotide
  Target: LAMA2; (-) strand; PAM type: YTN; PAM sequence: CTT
ctatagaataggaccttcta

SEQ ID NO: 189418 - DNA, 20 bp, Artificial Sequence
  Description of Artificial Sequence: Synthetic oligonucleotide
  Target: LAMA2; (-) strand; PAM type: YTN; PAM sequence: TTC
ttctatagaataggaccttc

SEQ ID NO: 189419 - DNA, 20 bp, Artificial Sequence
  Description of Artificial Sequence: Synthetic oligonucleotide
  Target: LAMA2; (-) strand; PAM type: YTN; PAM sequence: TTT
cttctatagaataggacctt

SEQ ID NO: 189420 - DNA, 20 bp, Artificial Sequence
  Description of Artificial Sequence: Synthetic oligonucleotide
  Target: LAMA2; (-) strand; PAM type: YTN; PAM sequence: CTA
tttcttctatagaataggac

SEQ ID NO: 189421 - DNA, 20 bp, Artificial Sequence
  Description of Artificial Sequence: Synthetic oligonucleotide
  Target: LAMA2; (-) strand; PAM type: YTN; PAM sequence: CTC
tatttcttctatagaatagg

SEQ ID NO: 189422 - DNA, 20 bp, Artificial Sequence
  Description of Artificial Sequence: Synthetic oligonucleotide
  Target: LAMA2; (-) strand; PAM type: YTN; PAM sequence: CTA
actctatttcttctatagaa

SEQ ID NO: 189423 - DNA, 20 bp, Artificial Sequence
  Description of Artificial Sequence: Synthetic oligonucleotide
  Target: LAMA2; (-) strand; PAM type: YTN; PAM sequence: CTA
ctaactctatttcttctata

SEQ ID NO: 189424 - DNA, 20 bp, Artificial Sequence
  Description of Artificial Sequence: Synthetic oligonucleotide
  Target: LAMA2; (-) strand; PAM type: YTN; PAM sequence: CTC
tactaactctatttcttcta

SEQ ID NO: 189425 - DNA, 20 bp, Artificial Sequence
  Description of Artificial Sequence: Synthetic oligonucleotide
  Target: LAMA2; (-) strand; PAM type: YTN; PAM sequence: TTG
atgcagcaaactctactaac

SEQ ID NO: 189426 - DNA, 20 bp, Artificial Sequence
  Description of Artificial Sequence: Synthetic oligonucleotide
  Target: LAMA2; (-) strand; PAM type: YTN; PAM sequence: TTT
gatgcagcaaactctactaa

SEQ ID NO: 189427 - DNA, 20 bp, Artificial Sequence
  Description of Artificial Sequence: Synthetic oligonucleotide
  Target: LAMA2; (-) strand; PAM type: YTN; PAM sequence: TTG
aaaaaatatatttgatgcag

SEQ ID NO: 189428 - DNA, 20 bp, Artificial Sequence
  Description of Artificial Sequence: Synthetic oligonucleotide
  Target: LAMA2; (-) strand; PAM type: YTN; PAM sequence: TTT
gaaaaaatatatttgatgca

SEQ ID NO: 189429 - DNA, 20 bp, Artificial Sequence
  Description of Artificial Sequence: Synthetic oligonucleotide
  Target: LAMA2; (-) strand; PAM type: YTN; PAM sequence: CTA
taatatgtaggcatttgaaa

SEQ ID NO: 189430 - DNA, 20 bp, Artificial Sequence
  Description of Artificial Sequence: Synthetic oligonucleotide
  Target: LAMA2; (-) strand; PAM type: YTN; PAM sequence: TTG
tgtcaactataatatgtagg

SEQ ID NO: 189431 - DNA, 20 bp, Artificial Sequence
  Description of Artificial Sequence: Synthetic oligonucleotide
  Target: LAMA2; (-) strand; PAM type: YTN; PAM sequence: TTG
cacagaaggcaataaagcca

SEQ ID NO: 189432 - DNA, 20 bp, Artificial Sequence
  Description of Artificial Sequence: Synthetic oligonucleotide
  Target: LAMA2; (-) strand; PAM type: YTN; PAM sequence: TTG
aaaattgcacagaaggcaat

SEQ ID NO: 189433 - DNA, 20 bp, Artificial Sequence
  Description of Artificial Sequence: Synthetic oligonucleotide
  Target: LAMA2; (-) strand; PAM type: YTN; PAM sequence: CTC
atccaataattgaaaattgc

SEQ ID NO: 189434 - DNA, 20 bp, Artificial Sequence
  Description of Artificial Sequence: Synthetic oligonucleotide
  Target: LAMA2; (-) strand; PAM type: YTN; PAM sequence: TTC
agcctcatccaataattgaa

SEQ ID NO: 189435 - DNA, 20 bp, Artificial Sequence
  Description of Artificial Sequence: Synthetic oligonucleotide
  Target: LAMA2; (-) strand; PAM type: YTN; PAM sequence: TTT
cagcctcatccaataattga

SEQ ID NO: 189436 - DNA, 20 bp, Artificial Sequence
  Description of Artificial Sequence: Synthetic oligonucleotide
  Target: LAMA2; (-) strand; PAM type: YTN; PAM sequence: CTT
tcagcctcatccaataattg

SEQ ID NO: 189437 - DNA, 20 bp, Artificial Sequence
  Description of Artificial Sequence: Synthetic oligonucleotide
  Target: LAMA2; (-) strand; PAM type: YTN; PAM sequence: TTC
aaactttcagcctcatccaa

SEQ ID NO: 189438 - DNA, 20 bp, Artificial Sequence
  Description of Artificial Sequence: Synthetic oligonucleotide
  Target: LAMA2; (-) strand; PAM type: YTN; PAM sequence: TTT
caaactttcagcctcatcca

SEQ ID NO: 189439 - DNA, 20 bp, Artificial Sequence
  Description of Artificial Sequence: Synthetic oligonucleotide
  Target: LAMA2; (-) strand; PAM type: YTN; PAM sequence: CTT
tcaaactttcagcctcatcc

SEQ ID NO: 189440 - DNA, 20 bp, Artificial Sequence
  Description of Artificial Sequence: Synthetic oligonucleotide
  Target: LAMA2; (-) strand; PAM type: YTN; PAM sequence: CTC
tttcaaactttcagcctcat

SEQ ID NO: 189441 - DNA, 20 bp, Artificial Sequence
  Description of Artificial Sequence: Synthetic oligonucleotide
  Target: LAMA2; (-) strand; PAM type: YTN; PAM sequence: TTC
tctttcaaactttcagcctc

SEQ ID NO: 189442 - DNA, 20 bp, Artificial Sequence
  Description of Artificial Sequence: Synthetic oligonucleotide
  Target: LAMA2; (-) strand; PAM type: YTN; PAM sequence: TTC
atattctctttcaaactttc

SEQ ID NO: 189443 - DNA, 20 bp, Artificial Sequence
  Description of Artificial Sequence: Synthetic oligonucleotide
  Target: LAMA2; (-) strand; PAM type: YTN; PAM sequence: CTT
catattctctttcaaacttt

SEQ ID NO: 189444 - DNA, 20 bp, Artificial Sequence
  Description of Artificial Sequence: Synthetic oligonucleotide
  Target: LAMA2; (-) strand; PAM type: YTN; PAM sequence: CTG
cttcatattctctttcaaac

SEQ ID NO: 189445 - DNA, 20 bp, Artificial Sequence
  Description of Artificial Sequence: Synthetic oligonucleotide
  Target: LAMA2; (-) strand; PAM type: YTN; PAM sequence: TTG
cactgcttcatattctcttt

SEQ ID NO: 189446 - DNA, 20 bp, Artificial Sequence
  Description of Artificial Sequence: Synthetic oligonucleotide
  Target: LAMA2; (-) strand; PAM type: YTN; PAM sequence: CTG
aaatgacaattgcactgctt

SEQ ID NO: 189447 - DNA, 20 bp, Artificial Sequence
  Description of Artificial Sequence: Synthetic oligonucleotide
  Target: LAMA2; (-) strand; PAM type: YTN; PAM sequence: CTC
actgaaatgacaattgcact

SEQ ID NO: 189448 - DNA, 20 bp, Artificial Sequence
  Description of Artificial Sequence: Synthetic oligonucleotide
  Target: LAMA2; (-) strand; PAM type: YTN; PAM sequence: TTA
catatgtaccacgacaaacc

SEQ ID NO: 189449 - DNA, 20 bp, Artificial Sequence
  Description of Artificial Sequence: Synthetic oligonucleotide
  Target: LAMA2; (-) strand; PAM type: YTN; PAM sequence: TTT
acatatgtaccacgacaaac

SEQ ID NO: 189450 - DNA, 20 bp, Artificial Sequence
  Description of Artificial Sequence: Synthetic oligonucleotide
  Target: LAMA2; (-) strand; PAM type: YTN; PAM sequence: TTT
tacatatgtaccacgacaaa

SEQ ID NO: 189451 - DNA, 20 bp, Artificial Sequence
  Description of Artificial Sequence: Synthetic oligonucleotide
  Target: LAMA2; (-) strand; PAM type: YTN; PAM sequence: TTC
agtgttttacatatgtacca

SEQ ID NO: 189452 - DNA, 20 bp, Artificial Sequence
  Description of Artificial Sequence: Synthetic oligonucleotide
  Target: LAMA2; (-) strand; PAM type: YTN; PAM sequence: TTA
tattcagtgttttacatatg

SEQ ID NO: 189453 - DNA, 20 bp, Artificial Sequence
  Description of Artificial Sequence: Synthetic oligonucleotide
  Target: LAMA2; (-) strand; PAM type: YTN; PAM sequence: TTT
atattcagtgttttacatat

SEQ ID NO: 189454 - DNA, 20 bp, Artificial Sequence
  Description of Artificial Sequence: Synthetic oligonucleotide
  Target: LAMA2; (-) strand; PAM type: YTN; PAM sequence: TTT
tatattcagtgttttacata

SEQ ID NO: 189455 - DNA, 20 bp, Artificial Sequence
  Description of Artificial Sequence: Synthetic oligonucleotide
  Target: LAMA2; (-) strand; PAM type: YTN; PAM sequence: TTC
atgttttatattcagtgttt

SEQ ID NO: 189456 - DNA, 20 bp, Artificial Sequence
  Description of Artificial Sequence: Synthetic oligonucleotide
  Target: LAMA2; (-) strand; PAM type: YTN; PAM sequence: TTT
catgttttatattcagtgtt

SEQ ID NO: 189457 - DNA, 20 bp, Artificial Sequence
  Description of Artificial Sequence: Synthetic oligonucleotide
  Target: LAMA2; (-) strand; PAM type: YTN; PAM sequence: CTA
gatgtttcatgttttatatt

SEQ ID NO: 189458 - DNA, 20 bp, Artificial Sequence
  Description of Artificial Sequence: Synthetic oligonucleotide
  Target: LAMA2; (-) strand; PAM type: YTN; PAM sequence: TTA
ctagatgtttcatgttttat

SEQ ID NO: 189459 - DNA, 20 bp, Artificial Sequence
  Description of Artificial Sequence: Synthetic oligonucleotide
  Target: LAMA2; (-) strand; PAM type: YTN; PAM sequence: CTT
actagatgtttcatgtttta

SEQ ID NO: 189460 - DNA, 20 bp, Artificial Sequence
  Description of Artificial Sequence: Synthetic oligonucleotide
  Target: LAMA2; (-) strand; PAM type: YTN; PAM sequence: TTG
aggccttactagatgtttca

SEQ ID NO: 189461 - DNA, 20 bp, Artificial Sequence
  Description of Artificial Sequence: Synthetic oligonucleotide
  Target: LAMA2; (-) strand; PAM type: YTN; PAM sequence: TTA
ttgaggccttactagatgtt

SEQ ID NO: 189462 - DNA, 20 bp, Artificial Sequence
  Description of Artificial Sequence: Synthetic oligonucleotide
  Target: LAMA2; (-) strand; PAM type: YTN; PAM sequence: TTT
attgaggccttactagatgt

SEQ ID NO: 189463 - DNA, 20 bp, Artificial Sequence
  Description of Artificial Sequence: Synthetic oligonucleotide
  Target: LAMA2; (-) strand; PAM type: YTN; PAM sequence: TTG
aaaatgaacatttattgagg

SEQ ID NO: 189464 - DNA, 20 bp, Artificial Sequence
  Description of Artificial Sequence: Synthetic oligonucleotide
  Target: LAMA2; (-) strand; PAM type: YTN; PAM sequence: TTT
gaaaatgaacatttattgag

SEQ ID NO: 189465 - DNA, 20 bp, Artificial Sequence
  Description of Artificial Sequence: Synthetic oligonucleotide
  Target: LAMA2; (-) strand; PAM type: YTN; PAM sequence: TTT
tgaaaatgaacatttattga

SEQ ID NO: 189466 - DNA, 20 bp, Artificial Sequence
  Description of Artificial Sequence: Synthetic oligonucleotide
  Target: LAMA2; (-) strand; PAM type: YTN; PAM sequence: TTG
aggcattttgaaaatgaaca

SEQ ID NO: 189467 - DNA, 20 bp, Artificial Sequence
  Description of Artificial Sequence: Synthetic oligonucleotide
  Target: LAMA2; (-) strand; PAM type: YTN; PAM sequence: TTT
gaggcattttgaaaatgaac

SEQ ID NO: 189468 - DNA, 20 bp, Artificial Sequence
  Description of Artificial Sequence: Synthetic oligonucleotide
  Target: LAMA2; (-) strand; PAM type: YTN; PAM sequence: TTT
tgaggcattttgaaaatgaa

SEQ ID NO: 189469 - DNA, 20 bp, Artificial Sequence
  Description of Artificial Sequence: Synthetic oligonucleotide
  Target: LAMA2; (-) strand; PAM type: YTN; PAM sequence: TTT
ttgaggcattttgaaaatga

SEQ ID NO: 189470 - DNA, 20 bp, Artificial Sequence
  Description of Artificial Sequence: Synthetic oligonucleotide
  Target: LAMA2; (-) strand; PAM type: YTN; PAM sequence: TTT
tttgaggcattttgaaaatg

SEQ ID NO: 189471 - DNA, 20 bp, Artificial Sequence
  Description of Artificial Sequence: Synthetic oligonucleotide
  Target: LAMA2; (-) strand; PAM type: YTN; PAM sequence: TTC
attttttgaggcattttgaa

SEQ ID NO: 189472 - DNA, 20 bp, Artificial Sequence
  Description of Artificial Sequence: Synthetic oligonucleotide
  Target: LAMA2; (-) strand; PAM type: YTN; PAM sequence: TTA
attcattttttgaggcattt

SEQ ID NO: 189473 - DNA, 20 bp, Artificial Sequence
  Description of Artificial Sequence: Synthetic oligonucleotide
  Target: LAMA2; (-) strand; PAM type: YTN; PAM sequence: TTT
aattcattttttgaggcatt

SEQ ID NO: 189474 - DNA, 20 bp, Artificial Sequence
  Description of Artificial Sequence: Synthetic oligonucleotide
  Target: LAMA2; (-) strand; PAM type: YTN; PAM sequence: TTA
ggtttaattcattttttgag

SEQ ID NO: 189475 - DNA, 20 bp, Artificial Sequence
  Description of Artificial Sequence: Synthetic oligonucleotide
  Target: LAMA2; (-) strand; PAM type: YTN; PAM sequence: TTG
ttaggtttaattcatttttt

SEQ ID NO: 189476 - DNA, 20 bp, Artificial Sequence
  Description of Artificial Sequence: Synthetic oligonucleotide
  Target: LAMA2; (-) strand; PAM type: YTN; PAM sequence: TTA
ggttgttaggtttaattcat

SEQ ID NO: 189477 - DNA, 20 bp, Artificial Sequence
  Description of Artificial Sequence: Synthetic oligonucleotide
  Target: LAMA2; (-) strand; PAM type: YTN; PAM sequence: TTC
agccagagaatgtcatgtta

SEQ ID NO: 189478 - DNA, 20 bp, Artificial Sequence
  Description of Artificial Sequence: Synthetic oligonucleotide
  Target: LAMA2; (-) strand; PAM type: YTN; PAM sequence: TTT
cagccagagaatgtcatgtt

SEQ ID NO: 189479 - DNA, 20 bp, Artificial Sequence
  Description of Artificial Sequence: Synthetic oligonucleotide
  Target: LAMA2; (-) strand; PAM type: YTN; PAM sequence: CTT
tcagccagagaatgtcatgt

SEQ ID NO: 189480 - DNA, 20 bp, Artificial Sequence
  Description of Artificial Sequence: Synthetic oligonucleotide
  Target: LAMA2; (-) strand; PAM type: YTN; PAM sequence: TTC
tttcagccagagaatgtcat

SEQ ID NO: 189481 - DNA, 20 bp, Artificial Sequence
  Description of Artificial Sequence: Synthetic oligonucleotide
  Target: LAMA2; (-) strand; PAM type: YTN; PAM sequence: TTT
ctttcagccagagaatgtca

SEQ ID NO: 189482 - DNA, 20 bp, Artificial Sequence
  Description of Artificial Sequence: Synthetic oligonucleotide
  Target: LAMA2; (-) strand; PAM type: YTN; PAM sequence: TTG
gagaagagtgtttctttcag

SEQ ID NO: 189483 - DNA, 20 bp, Artificial Sequence
  Description of Artificial Sequence: Synthetic oligonucleotide
  Target: LAMA2; (-) strand; PAM type: YTN; PAM sequence: TTG
gtataccacatgatgttgga

SEQ ID NO: 189484 - DNA, 20 bp, Artificial Sequence
  Description of Artificial Sequence: Synthetic oligonucleotide
  Target: LAMA2; (-) strand; PAM type: YTN; PAM sequence: TTT
ggtataccacatgatgttgg

SEQ ID NO: 189485 - DNA, 20 bp, Artificial Sequence
  Description of Artificial Sequence: Synthetic oligonucleotide
  Target: LAMA2; (-) strand; PAM type: YTN; PAM sequence: CTG
aatttggtataccacatgat

SEQ ID NO: 189486 - DNA, 20 bp, Artificial Sequence
  Description of Artificial Sequence: Synthetic oligonucleotide
  Target: LAMA2; (-) strand; PAM type: YTN; PAM sequence: CTC
aactgaatttggtataccac

SEQ ID NO: 189487 - DNA, 20 bp, Artificial Sequence
  Description of Artificial Sequence: Synthetic oligonucleotide
  Target: LAMA2; (-) strand; PAM type: YTN; PAM sequence: TTC
acaaacagtctcaactgaat

SEQ ID NO: 189488 - DNA, 20 bp, Artificial Sequence
  Description of Artificial Sequence: Synthetic oligonucleotide
  Target: LAMA2; (-) strand; PAM type: YTN; PAM sequence: CTT
cacaaacagtctcaactgaa

SEQ ID NO: 189489 - DNA, 20 bp, Artificial Sequence
  Description of Artificial Sequence: Synthetic oligonucleotide
  Target: LAMA2; (-) strand; PAM type: YTN; PAM sequence: TTC
cttcacaaacagtctcaact

SEQ ID NO: 189490 - DNA, 20 bp, Artificial Sequence
  Description of Artificial Sequence: Synthetic oligonucleotide
  Target: LAMA2; (-) strand; PAM type: YTN; PAM sequence: CTT
ccttcacaaacagtctcaac

SEQ ID NO: 189491 - DNA, 20 bp, Artificial Sequence
  Description of Artificial Sequence: Synthetic oligonucleotide
  Target: LAMA2; (-) strand; PAM type: YTN; PAM sequence: TTC
cttccttcacaaacagtctc

SEQ ID NO: 189492 - DNA, 20 bp, Artificial Sequence
  Description of Artificial Sequence: Synthetic oligonucleotide
  Target: LAMA2; (-) strand; PAM type: YTN; PAM sequence: TTA
agtatataagcaaattcctt

SEQ ID NO: 189493 - DNA, 20 bp, Artificial Sequence
  Description of Artificial Sequence: Synthetic oligonucleotide
  Target: LAMA2; (-) strand; PAM type: YTN; PAM sequence: TTT
aagtatataagcaaattcct

SEQ ID NO: 189494 - DNA, 20 bp, Artificial Sequence
  Description of Artificial Sequence: Synthetic oligonucleotide
  Target: LAMA2; (-) strand; PAM type: YTN; PAM sequence: TTG
tgtgtttaagtatataagca

SEQ ID NO: 189495 - DNA, 20 bp, Artificial Sequence
  Description of Artificial Sequence: Synthetic oligonucleotide
  Target: LAMA2; (-) strand; PAM type: YTN; PAM sequence: CTT
gtgtgtttaagtatataagc

SEQ ID NO: 189496 - DNA, 20 bp, Artificial Sequence
  Description of Artificial Sequence: Synthetic oligonucleotide
  Target: LAMA2; (-) strand; PAM type: YTN; PAM sequence: TTC
aaatacttgtgtgtttaagt

SEQ ID NO: 189497 - DNA, 20 bp, Artificial Sequence
  Description of Artificial Sequence: Synthetic oligonucleotide
  Target: LAMA2; (-) strand; PAM type: YTN; PAM sequence: TTA
gaattcaaatacttgtgtgt

SEQ ID NO: 189498 - DNA, 20 bp, Artificial Sequence
  Description of Artificial Sequence: Synthetic oligonucleotide
  Target: LAMA2; (-) strand; PAM type: YTN; PAM sequence: CTA
attagaattcaaatacttgt

SEQ ID NO: 189499 - DNA, 20 bp, Artificial Sequence
  Description of Artificial Sequence: Synthetic oligonucleotide
  Target: LAMA2; (-) strand; PAM type: YTN; PAM sequence: TTC
taattagaattcaaatactt

SEQ ID NO: 189500 - DNA, 20 bp, Artificial Sequence
  Description of Artificial Sequence: Synthetic oligonucleotide
  Target: LAMA2; (-) strand; PAM type: YTN; PAM sequence: CTG
cagcacaaattctaattaga

SEQ ID NO: 189501 - DNA, 20 bp, Artificial Sequence
  Description of Artificial Sequence: Synthetic oligonucleotide
  Target: LAMA2; (-) strand; PAM type: YTN; PAM sequence: TTG
agaataaagaaatactgcag

SEQ ID NO: 189502 - DNA, 20 bp, Artificial Sequence
  Description of Artificial Sequence: Synthetic oligonucleotide
  Target: LAMA2; (-) strand; PAM type: YTN; PAM sequence: CTA
taaagttgagaataaagaaa

SEQ ID NO: 189503 - DNA, 20 bp, Artificial Sequence
  Description of Artificial Sequence: Synthetic oligonucleotide
  Target: LAMA2; (-) strand; PAM type: YTN; PAM sequence: CTA
agctataaagttgagaataa

SEQ ID NO: 189504 - DNA, 20 bp, Artificial Sequence
  Description of Artificial Sequence: Synthetic oligonucleotide
  Target: LAMA2; (-) strand; PAM type: YTN; PAM sequence: TTG
taggctaagctataaagttg

SEQ ID NO: 189505 - DNA, 20 bp, Artificial Sequence
  Description of Artificial Sequence: Synthetic oligonucleotide
  Target: LAMA2; (-) strand; PAM type: YTN; PAM sequence: TTA
ttgtaggctaagctataaag

SEQ ID NO: 189506 - DNA, 20 bp, Artificial Sequence
  Description of Artificial Sequence: Synthetic oligonucleotide
  Target: LAMA2; (-) strand; PAM type: YTN; PAM sequence: TTT
attgtaggctaagctataaa

SEQ ID NO: 189507 - DNA, 20 bp, Artificial Sequence
  Description of Artificial Sequence: Synthetic oligonucleotide
  Target: LAMA2; (-) strand; PAM type: YTN; PAM sequence: TTT
tattgtaggctaagctataa

SEQ ID NO: 189508 - DNA, 20 bp, Artificial Sequence
  Description of Artificial Sequence: Synthetic oligonucleotide
  Target: LAMA2; (-) strand; PAM type: YTN; PAM sequence: TTT
ttattgtaggctaagctata

SEQ ID NO: 189509 - DNA, 20 bp, Artificial Sequence
  Description of Artificial Sequence: Synthetic oligonucleotide
  Target: LAMA2; (-) strand; PAM type: YTN; PAM sequence: TTG
ataagagtttttattgtagg

SEQ ID NO: 189510 - DNA, 20 bp, Artificial Sequence
  Description of Artificial Sequence: Synthetic oligonucleotide
  Target: LAMA2; (-) strand; PAM type: YTN; PAM sequence: CTA
aaggtataaagaggtacgta

SEQ ID NO: 189511 - DNA, 20 bp, Artificial Sequence
  Description of Artificial Sequence: Synthetic oligonucleotide
  Target: LAMA2; (-) strand; PAM type: YTN; PAM sequence: CTG
tatgtggaaactaaaggtat

SEQ ID NO: 189512 - DNA, 20 bp, Artificial Sequence
  Description of Artificial Sequence: Synthetic oligonucleotide
  Target: LAMA2; (-) strand; PAM type: YTN; PAM sequence: CTC
caaagaagagtactgtatgt

SEQ ID NO: 189513 - DNA, 20 bp, Artificial Sequence
  Description of Artificial Sequence: Synthetic oligonucleotide
  Target: LAMA2; (-) strand; PAM type: YTN; PAM sequence: TTA
cctccaaagaagagtactgt

SEQ ID NO: 189514 - DNA, 20 bp, Artificial Sequence
  Description of Artificial Sequence: Synthetic oligonucleotide
  Target: LAMA2; (-) strand; PAM type: YTN; PAM sequence: TTC
agttacctccaaagaagagt

SEQ ID NO: 189515 - DNA, 20 bp, Artificial Sequence
  Description of Artificial Sequence: Synthetic oligonucleotide
  Target: LAMA2; (-) strand; PAM type: YTN; PAM sequence: CTA
cgattcagttacctccaaag

SEQ ID NO: 189516 - DNA, 20 bp, Artificial Sequence
  Description of Artificial Sequence: Synthetic oligonucleotide
  Target: LAMA2; (-) strand; PAM type: YTN; PAM sequence: TTC
tacgattcagttacctccaa

SEQ ID NO: 189517 - DNA, 20 bp, Artificial Sequence
  Description of Artificial Sequence: Synthetic oligonucleotide
  Target: LAMA2; (-) strand; PAM type: YTN; PAM sequence: TTT
ctacgattcagttacctcca

SEQ ID NO: 189518 - DNA, 20 bp, Artificial Sequence
  Description of Artificial Sequence: Synthetic oligonucleotide
  Target: LAMA2; (-) strand; PAM type: YTN; PAM sequence: TTT
tctacgattcagttacctcc

SEQ ID NO: 189519 - DNA, 20 bp, Artificial Sequence
  Description of Artificial Sequence: Synthetic oligonucleotide
  Target: LAMA2; (-) strand; PAM type: YTN; PAM sequence: CTA
agtccatacgttttctacga

SEQ ID NO: 189520 - DNA, 20 bp, Artificial Sequence
  Description of Artificial Sequence: Synthetic oligonucleotide
  Target: LAMA2; (-) strand; PAM type: YTN; PAM sequence: CTC
ctaagtccatacgttttcta

SEQ ID NO: 189521 - DNA, 20 bp, Artificial Sequence
  Description of Artificial Sequence: Synthetic oligonucleotide
  Target: LAMA2; (-) strand; PAM type: YTN; PAM sequence: TTC
tcctaagtccatacgttttc

SEQ ID NO: 189522 - DNA, 20 bp, Artificial Sequence
  Description of Artificial Sequence: Synthetic oligonucleotide
  Target: LAMA2; (-) strand; PAM type: YTN; PAM sequence: CTT
ctcctaagtccatacgtttt

SEQ ID NO: 189523 - DNA, 20 bp, Artificial Sequence
  Description of Artificial Sequence: Synthetic oligonucleotide
  Target: LAMA2; (-) strand; PAM type: YTN; PAM sequence: CTA
gccttctcctaagtccatac

SEQ ID NO: 189524 - DNA, 20 bp, Artificial Sequence
  Description of Artificial Sequence: Synthetic oligonucleotide
  Target: LAMA2; (-) strand; PAM type: YTN; PAM sequence: CTA
tggatccgagtctagccttc

SEQ ID NO: 189525 - DNA, 20 bp, Artificial Sequence
  Description of Artificial Sequence: Synthetic oligonucleotide
  Target: LAMA2; (-) strand; PAM type: YTN; PAM sequence: TTG
gctatggatccgagtctagc

SEQ ID NO: 189526 - DNA, 20 bp, Artificial Sequence
  Description of Artificial Sequence: Synthetic oligonucleotide
  Target: LAMA2; (-) strand; PAM type: YTN; PAM sequence: CTT
ggctatggatccgagtctag

SEQ ID NO: 189527 - DNA, 20 bp, Artificial Sequence
  Description of Artificial Sequence: Synthetic oligonucleotide
  Target: LAMA2; (-) strand; PAM type: YTN; PAM sequence: TTA
gtaaagtggtgacttggcta

SEQ ID NO: 189528 - DNA, 20 bp, Artificial Sequence
  Description of Artificial Sequence: Synthetic oligonucleotide
  Target: LAMA2; (-) strand; PAM type: YTN; PAM sequence: CTT
agtaaagtggtgacttggct

SEQ ID NO: 189529 - DNA, 20 bp, Artificial Sequence
  Description of Artificial Sequence: Synthetic oligonucleotide
  Target: LAMA2; (-) strand; PAM type: YTN; PAM sequence: TTG
atcttagtaaagtggtgact

SEQ ID NO: 189530 - DNA, 20 bp, Artificial Sequence
  Description of Artificial Sequence: Synthetic oligonucleotide
  Target: LAMA2; (-) strand; PAM type: YTN; PAM sequence: TTT
gatcttagtaaagtggtgac

SEQ ID NO: 189531 - DNA, 20 bp, Artificial Sequence
  Description of Artificial Sequence: Synthetic oligonucleotide
  Target: LAMA2; (-) strand; PAM type: YTN; PAM sequence: TTT
tgatcttagtaaagtggtga

SEQ ID NO: 189532 - DNA, 20 bp, Artificial Sequence
  Description of Artificial Sequence: Synthetic oligonucleotide
  Target: LAMA2; (-) strand; PAM type: YTN; PAM sequence: CTT
ttgatcttagtaaagtggtg

SEQ ID NO: 189533 - DNA, 20 bp, Artificial Sequence
  Description of Artificial Sequence: Synthetic oligonucleotide
  Target: LAMA2; (-) strand; PAM type: YTN; PAM sequence: CTC
aggcttttgatcttagtaaa

SEQ ID NO: 189534 - DNA, 20 bp, Artificial Sequence
  Description of Artificial Sequence: Synthetic oligonucleotide
  Target: LAMA2; (-) strand; PAM type: YTN; PAM sequence: TTG
actcaggcttttgatcttag

SEQ ID NO: 189535 - DNA, 20 bp, Artificial Sequence
  Description of Artificial Sequence: Synthetic oligonucleotide
  Target: LAMA2; (-) strand; PAM type: YTN; PAM sequence: CTC
cgttgactcaggcttttgat

SEQ ID NO: 189536 - DNA, 20 bp, Artificial Sequence
  Description of Artificial Sequence: Synthetic oligonucleotide
  Target: LAMA2; (-) strand; PAM type: YTN; PAM sequence: TTA
actccgttgactcaggcttt

SEQ ID NO: 189537 - DNA, 20 bp, Artificial Sequence
  Description of Artificial Sequence: Synthetic oligonucleotide
  Target: LAMA2; (-) strand; PAM type: YTN; PAM sequence: TTT
aactccgttgactcaggctt

SEQ ID NO: 189538 - DNA, 20 bp, Artificial Sequence
  Description of Artificial Sequence: Synthetic oligonucleotide
  Target: LAMA2; (-) strand; PAM type: YTN; PAM sequence: TTA
cgaatagaaaatttaactcc

SEQ ID NO: 189539 - DNA, 20 bp, Artificial Sequence
  Description of Artificial Sequence: Synthetic oligonucleotide
  Target: LAMA2; (-) strand; PAM type: YTN; PAM sequence: CTT
acgaatagaaaatttaactc

SEQ ID NO: 189540 - DNA, 20 bp, Artificial Sequence
  Description of Artificial Sequence: Synthetic oligonucleotide
  Target: LAMA2; (-) strand; PAM type: YTN; PAM sequence: CTA
tcttacgaatagaaaattta

SEQ ID NO: 189541 - DNA, 20 bp, Artificial Sequence
  Description of Artificial Sequence: Synthetic oligonucleotide
  Target: LAMA2; (-) strand; PAM type: YTN; PAM sequence: CTA
aacctatcttacgaatagaa

SEQ ID NO: 189542 - DNA, 20 bp, Artificial Sequence
  Description of Artificial Sequence: Synthetic oligonucleotide
  Target: LAMA2; (-) strand; PAM type: YTN; PAM sequence: CTA
acctaaacctatcttacgaa

SEQ ID NO: 189543 - DNA, 20 bp, Artificial Sequence
  Description of Artificial Sequence: Synthetic oligonucleotide
  Target: LAMA2; (-) strand; PAM type: YTN; PAM sequence: TTA
tctaacctaaacctatctta

SEQ ID NO: 189544 - DNA, 20 bp, Artificial Sequence
  Description of Artificial Sequence: Synthetic oligonucleotide
  Target: LAMA2; (-) strand; PAM type: YTN; PAM sequence: TTA
ttatctaacctaaacctatc

SEQ ID NO: 189545 - DNA, 20 bp, Artificial Sequence
  Description of Artificial Sequence: Synthetic oligonucleotide
  Target: LAMA2; (-) strand; PAM type: YTN; PAM sequence: TTT
attatctaacctaaacctat

SEQ ID NO: 189546 - DNA, 20 bp, Artificial Sequence
  Description of Artificial Sequence: Synthetic oligonucleotide
  Target: LAMA2; (-) strand; PAM type: YTN; PAM sequence: TTC
acatttattatctaacctaa

SEQ ID NO: 189547 - DNA, 20 bp, Artificial Sequence
  Description of Artificial Sequence: Synthetic oligonucleotide
  Target: LAMA2; (-) strand; PAM type: YTN; PAM sequence: TTT
cacatttattatctaaccta

SEQ ID NO: 189548 - DNA, 20 bp, Artificial Sequence
  Description of Artificial Sequence: Synthetic oligonucleotide
  Target: LAMA2; (-) strand; PAM type: YTN; PAM sequence: TTT
tcacatttattatctaacct

SEQ ID NO: 189549 - DNA, 20 bp, Artificial Sequence
  Description of Artificial Sequence: Synthetic oligonucleotide
  Target: LAMA2; (-) strand; PAM type: YTN; PAM sequence: CTG
gcaagtattttcacatttat

SEQ ID NO: 189550 - DNA, 20 bp, Artificial Sequence
  Description of Artificial Sequence: Synthetic oligonucleotide
  Target: LAMA2; (-) strand; PAM type: YTN; PAM sequence: TTA
gctggcaagtattttcacat

SEQ ID NO: 189551 - DNA, 20 bp, Artificial Sequence
  Description of Artificial Sequence: Synthetic oligonucleotide
  Target: LAMA2; (-) strand; PAM type: YTN; PAM sequence: CTG
attagctggcaagtattttc

SEQ ID NO: 189552 - DNA, 20 bp, Artificial Sequence
  Description of Artificial Sequence: Synthetic oligonucleotide
  Target: LAMA2; (-) strand; PAM type: YTN; PAM sequence: TTA
ctgattagctggcaagtatt

SEQ ID NO: 189553 - DNA, 20 bp, Artificial Sequence
  Description of Artificial Sequence: Synthetic oligonucleotide
  Target: LAMA2; (-) strand; PAM type: YTN; PAM sequence: TTT
actgattagctggcaagtat

SEQ ID NO: 189554 - DNA, 20 bp, Artificial Sequence
  Description of Artificial Sequence: Synthetic oligonucleotide
  Target: LAMA2; (-) strand; PAM type: YTN; PAM sequence: CTA
gtatttactgattagctggc

SEQ ID NO: 189555 - DNA, 20 bp, Artificial Sequence
  Description of Artificial Sequence: Synthetic oligonucleotide
  Target: LAMA2; (-) strand; PAM type: YTN; PAM sequence: CTC
ataaaataaagaagaaaaga

SEQ ID NO: 189556 - DNA, 20 bp, Artificial Sequence
  Description of Artificial Sequence: Synthetic oligonucleotide
  Target: LAMA2; (-) strand; PAM type: YTN; PAM sequence: TTA
tgctcataaaataaagaaga

SEQ ID NO: 189557 - DNA, 20 bp, Artificial Sequence
  Description of Artificial Sequence: Synthetic oligonucleotide
  Target: LAMA2; (-) strand; PAM type: YTN; PAM sequence: TTT
atgctcataaaataaagaag

SEQ ID NO: 189558 - DNA, 20 bp, Artificial Sequence
  Description of Artificial Sequence: Synthetic oligonucleotide
  Target: LAMA2; (-) strand; PAM type: YTN; PAM sequence: TTT
tatgctcataaaataaagaa

SEQ ID NO: 189559 - DNA, 20 bp, Artificial Sequence
  Description of Artificial Sequence: Synthetic oligonucleotide
  Target: LAMA2; (-) strand; PAM type: YTN; PAM sequence: TTA
gttttatgctcataaaataa

SEQ ID NO: 189560 - DNA, 20 bp, Artificial Sequence
  Description of Artificial Sequence: Synthetic oligonucleotide
  Target: LAMA2; (-) strand; PAM type: YTN; PAM sequence: TTT
agttttatgctcataaaata

SEQ ID NO: 189561 - DNA, 20 bp, Artificial Sequence
  Description of Artificial Sequence: Synthetic oligonucleotide
  Target: LAMA2; (-) strand; PAM type: YTN; PAM sequence: TTT
tagttttatgctcataaaat

SEQ ID NO: 189562 - DNA, 20 bp, Artificial Sequence
  Description of Artificial Sequence: Synthetic oligonucleotide
  Target: LAMA2; (-) strand; PAM type: YTN; PAM sequence: TTT
ttagttttatgctcataaaa

SEQ ID NO: 189563 - DNA, 20 bp, Artificial Sequence
  Description of Artificial Sequence: Synthetic oligonucleotide
  Target: LAMA2; (-) strand; PAM type: YTN; PAM sequence: TTT
tttagttttatgctcataaa

SEQ ID NO: 189564 - DNA, 20 bp, Artificial Sequence
  Description of Artificial Sequence: Synthetic oligonucleotide
  Target: LAMA2; (-) strand; PAM type: YTN; PAM sequence: TTT
ttttagttttatgctcataa

SEQ ID NO: 189565 - DNA, 20 bp, Artificial Sequence
  Description of Artificial Sequence: Synthetic oligonucleotide
  Target: LAMA2; (-) strand; PAM type: YTN; PAM sequence: TTT
tttttagttttatgctcata

SEQ ID NO: 189566 - DNA, 20 bp, Artificial Sequence
  Description of Artificial Sequence: Synthetic oligonucleotide
  Target: LAMA2; (-) strand; PAM type: YTN; PAM sequence: TTT
ttttttagttttatgctcat

SEQ ID NO: 189567 - DNA, 20 bp, Artificial Sequence
  Description of Artificial Sequence: Synthetic oligonucleotide
  Target: LAMA2; (-) strand; PAM type: YTN; PAM sequence: CTT
tttttttagttttatgctca

SEQ ID NO: 189568 - DNA, 20 bp, Artificial Sequence
  Description of Artificial Sequence: Synthetic oligonucleotide
  Target: LAMA2; (-) strand; PAM type: YTN; PAM sequence: CTA
tatgcaaagcaaatcttttt

SEQ ID NO: 189569 - DNA, 20 bp, Artificial Sequence
  Description of Artificial Sequence: Synthetic oligonucleotide
  Target: LAMA2; (-) strand; PAM type: YTN; PAM sequence: TTA
agcaaaaaggatatgctata

SEQ ID NO: 189570 - DNA, 20 bp, Artificial Sequence
  Description of Artificial Sequence: Synthetic oligonucleotide
  Target: LAMA2; (-) strand; PAM type: YTN; PAM sequence: CTT
aagcaaaaaggatatgctat

SEQ ID NO: 189571 - DNA, 20 bp, Artificial Sequence
  Description of Artificial Sequence: Synthetic oligonucleotide
  Target: LAMA2; (-) strand; PAM type: YTN; PAM sequence: TTC
ttaagcaaaaaggatatgct

SEQ ID NO: 189572 - DNA, 20 bp, Artificial Sequence
  Description of Artificial Sequence: Synthetic oligonucleotide
  Target: LAMA2; (-) strand; PAM type: YTN; PAM sequence: CTG
ttcttaagcaaaaaggatat

SEQ ID NO: 189573 - DNA, 20 bp, Artificial Sequence
  Description of Artificial Sequence: Synthetic oligonucleotide
  Target: LAMA2; (-) strand; PAM type: YTN; PAM sequence: TTG
ctgttcttaagcaaaaagga

SEQ ID NO: 189574 - DNA, 20 bp, Artificial Sequence
  Description of Artificial Sequence: Synthetic oligonucleotide
  Target: LAMA2; (-) strand; PAM type: YTN; PAM sequence: TTT
gctgttcttaagcaaaaagg

SEQ ID NO: 189575 - DNA, 20 bp, Artificial Sequence
  Description of Artificial Sequence: Synthetic oligonucleotide
  Target: LAMA2; (-) strand; PAM type: YTN; PAM sequence: TTT
tgctgttcttaagcaaaaag

SEQ ID NO: 189576 - DNA, 20 bp, Artificial Sequence
  Description of Artificial Sequence: Synthetic oligonucleotide
  Target: LAMA2; (-) strand; PAM type: YTN; PAM sequence: TTA
gaatattttgctgttcttaa

SEQ ID NO: 189577 - DNA, 20 bp, Artificial Sequence
  Description of Artificial Sequence: Synthetic oligonucleotide
  Target: LAMA2; (-) strand; PAM type: YTN; PAM sequence: TTT
agaatattttgctgttctta

SEQ ID NO: 189578 - DNA, 20 bp, Artificial Sequence
  Description of Artificial Sequence: Synthetic oligonucleotide
  Target: LAMA2; (-) strand; PAM type: YTN; PAM sequence: TTT
tagaatattttgctgttctt

SEQ ID NO: 189579 - DNA, 20 bp, Artificial Sequence
  Description of Artificial Sequence: Synthetic oligonucleotide
  Target: LAMA2; (-) strand; PAM type: YTN; PAM sequence: TTT
ttagaatattttgctgttct

SEQ ID NO: 189580 - DNA, 20 bp, Artificial Sequence
  Description of Artificial Sequence: Synthetic oligonucleotide
  Target: LAMA2; (-) strand; PAM type: YTN; PAM sequence: CTC
aaagaaatttttagaatatt

SEQ ID NO: 189581 - DNA, 20 bp, Artificial Sequence
  Description of Artificial Sequence: Synthetic oligonucleotide
  Target: LAMA2; (-) strand; PAM type: YTN; PAM sequence: CTC
ctcaaagaaatttttagaat

SEQ ID NO: 189582 - DNA, 20 bp, Artificial Sequence
  Description of Artificial Sequence: Synthetic oligonucleotide
  Target: LAMA2; (-) strand; PAM type: YTN; PAM sequence: TTA
gggtctcctcaaagaaattt

SEQ ID NO: 189583 - DNA, 20 bp, Artificial Sequence
  Description of Artificial Sequence: Synthetic oligonucleotide
  Target: LAMA2; (-) strand; PAM type: YTN; PAM sequence: CTT
agggtctcctcaaagaaatt

SEQ ID NO: 189584 - DNA, 20 bp, Artificial Sequence
  Description of Artificial Sequence: Synthetic oligonucleotide
  Target: LAMA2; (-) strand; PAM type: YTN; PAM sequence: CTC
ttagggtctcctcaaagaaa

SEQ ID NO: 189585 - DNA, 20 bp, Artificial Sequence
  Description of Artificial Sequence: Synthetic oligonucleotide
  Target: LAMA2; (-) strand; PAM type: YTN; PAM sequence: CTA
tagtctcttagggtctcctc

SEQ ID NO: 189586 - DNA, 20 bp, Artificial Sequence
  Description of Artificial Sequence: Synthetic oligonucleotide
  Target: LAMA2; (-) strand; PAM type: YTN; PAM sequence: TTG
ccatctatagtctcttaggg

SEQ ID NO: 189587 - DNA, 20 bp, Artificial Sequence
  Description of Artificial Sequence: Synthetic oligonucleotide
  Target: LAMA2; (-) strand; PAM type: YTN; PAM sequence: TTT
gccatctatagtctcttagg

SEQ ID NO: 189588 - DNA, 20 bp, Artificial Sequence
  Description of Artificial Sequence: Synthetic oligonucleotide
  Target: LAMA2; (-) strand; PAM type: YTN; PAM sequence: TTG
gcaatgagataaatagtttg

SEQ ID NO: 189589 - DNA, 20 bp, Artificial Sequence
  Description of Artificial Sequence: Synthetic oligonucleotide
  Target: LAMA2; (-) strand; PAM type: YTN; PAM sequence: CTT
ggcaatgagataaatagttt

SEQ ID NO: 189590 - DNA, 20 bp, Artificial Sequence
  Description of Artificial Sequence: Synthetic oligonucleotide
  Target: LAMA2; (-) strand; PAM type: YTN; PAM sequence: CTC
ttggcaatgagataaatagt

SEQ ID NO: 189591 - DNA, 20 bp, Artificial Sequence
  Description of Artificial Sequence: Synthetic oligonucleotide
  Target: LAMA2; (-) strand; PAM type: YTN; PAM sequence: TTC
aatctcttggcaatgagata

SEQ ID NO: 189592 - DNA, 20 bp, Artificial Sequence
  Description of Artificial Sequence: Synthetic oligonucleotide
  Target: LAMA2; (-) strand; PAM type: YTN; PAM sequence: TTA
ttcaatctcttggcaatgag

SEQ ID NO: 189593 - DNA, 20 bp, Artificial Sequence
  Description of Artificial Sequence: Synthetic oligonucleotide
  Target: LAMA2; (-) strand; PAM type: YTN; PAM sequence: CTC
gacagaattattcaatctct

SEQ ID NO: 189594 - DNA, 20 bp, Artificial Sequence
  Description of Artificial Sequence: Synthetic oligonucleotide
  Target: LAMA2; (-) strand; PAM type: YTN; PAM sequence: CTG
tgtaacctcgacagaattat

SEQ ID NO: 189595 - DNA, 20 bp, Artificial Sequence
  Description of Artificial Sequence: Synthetic oligonucleotide
  Target: LAMA2; (-) strand; PAM type: YTN; PAM sequence: TTG
ctgtgtaacctcgacagaat

SEQ ID NO: 189596 - DNA, 20 bp, Artificial Sequence
  Description of Artificial Sequence: Synthetic oligonucleotide
  Target: LAMA2; (-) strand; PAM type: YTN; PAM sequence: CTT
gctgtgtaacctcgacagaa

SEQ ID NO: 189597 - DNA, 20 bp, Artificial Sequence
  Description of Artificial Sequence: Synthetic oligonucleotide
  Target: LAMA2; (-) strand; PAM type: YTN; PAM sequence: CTG
acttgctgtgtaacctcgac

SEQ ID NO: 189598 - DNA, 20 bp, Artificial Sequence
  Description of Artificial Sequence: Synthetic oligonucleotide
  Target: LAMA2; (-) strand; PAM type: YTN; PAM sequence: TTA
ctgacttgctgtgtaacctc

SEQ ID NO: 189599 - DNA, 20 bp, Artificial Sequence
  Description of Artificial Sequence: Synthetic oligonucleotide
  Target: LAMA2; (-) strand; PAM type: YTN; PAM sequence: CTG
ttactgacttgctgtgtaac

SEQ ID NO: 189600 - DNA, 20 bp, Artificial Sequence
  Description of Artificial Sequence: Synthetic oligonucleotide
  Target: LAMA2; (-) strand; PAM type: YTN; PAM sequence: CTC
tgttactgacttgctgtgta

SEQ ID NO: 189601 - DNA, 20 bp, Artificial Sequence
  Description of Artificial Sequence: Synthetic oligonucleotide
  Target: LAMA2; (-) strand; PAM type: YTN; PAM sequence: TTA
tctctgttactgacttgctg

SEQ ID NO: 189602 - DNA, 20 bp, Artificial Sequence
  Description of Artificial Sequence: Synthetic oligonucleotide
  Target: LAMA2; (-) strand; PAM type: YTN; PAM sequence: CTT
atctctgttactgacttgct

SEQ ID NO: 189603 - DNA, 20 bp, Artificial Sequence
  Description of Artificial Sequence: Synthetic oligonucleotide
  Target: LAMA2; (-) strand; PAM type: YTN; PAM sequence: TTC
ttatctctgttactgacttg

SEQ ID NO: 189604 - DNA, 20 bp, Artificial Sequence
  Description of Artificial Sequence: Synthetic oligonucleotide
  Target: LAMA2; (-) strand; PAM type: YTN; PAM sequence: CTT
cttatctctgttactgactt

SEQ ID NO: 189605 - DNA, 20 bp, Artificial Sequence
  Description of Artificial Sequence: Synthetic oligonucleotide
  Target: LAMA2; (-) strand; PAM type: YTN; PAM sequence: TTC
ttcttatctctgttactgac

SEQ ID NO: 189606 - DNA, 20 bp, Artificial Sequence
  Description of Artificial Sequence: Synthetic oligonucleotide
  Target: LAMA2; (-) strand; PAM type: YTN; PAM sequence: TTT
cttcttatctctgttactga

SEQ ID NO: 189607 - DNA, 20 bp, Artificial Sequence
  Description of Artificial Sequence: Synthetic oligonucleotide
  Target: LAMA2; (-) strand; PAM type: YTN; PAM sequence: TTG
tgtttcttcttatctctgtt

SEQ ID NO: 189608 - DNA, 20 bp, Artificial Sequence
  Description of Artificial Sequence: Synthetic oligonucleotide
  Target: LAMA2; (-) strand; PAM type: YTN; PAM sequence: CTT
gtgtttcttcttatctctgt

SEQ ID NO: 189609 - DNA, 20 bp, Artificial Sequence
  Description of Artificial Sequence: Synthetic oligonucleotide
  Target: LAMA2; (-) strand; PAM type: YTN; PAM sequence: TTA
taggaacttgtgtttcttct

SEQ ID NO: 189610 - DNA, 20 bp, Artificial Sequence
  Description of Artificial Sequence: Synthetic oligonucleotide
  Target: LAMA2; (-) strand; PAM type: YTN; PAM sequence: CTA
attataggaacttgtgtttc

SEQ ID NO: 189611 - DNA, 20 bp, Artificial Sequence
  Description of Artificial Sequence: Synthetic oligonucleotide
  Target: LAMA2; (-) strand; PAM type: YTN; PAM sequence: TTA
gctaattataggaacttgtg

SEQ ID NO: 189612 - DNA, 20 bp, Artificial Sequence
  Description of Artificial Sequence: Synthetic oligonucleotide
  Target: LAMA2; (-) strand; PAM type: YTN; PAM sequence: CTG
ttagctaattataggaactt

SEQ ID NO: 189613 - DNA, 20 bp, Artificial Sequence
  Description of Artificial Sequence: Synthetic oligonucleotide
  Target: LAMA2; (-) strand; PAM type: YTN; PAM sequence: CTA
acataactgttagctaatta

SEQ ID NO: 189614 - DNA, 20 bp, Artificial Sequence
  Description of Artificial Sequence: Synthetic oligonucleotide
  Target: LAMA2; (-) strand; PAM type: YTN; PAM sequence: CTA
ctaacataactgttagctaa

SEQ ID NO: 189615 - DNA, 20 bp, Artificial Sequence
  Description of Artificial Sequence: Synthetic oligonucleotide
  Target: LAMA2; (-) strand; PAM type: YTN; PAM sequence: CTC
acacagagctactaacataa

SEQ ID NO: 189616 - DNA, 20 bp, Artificial Sequence
  Description of Artificial Sequence: Synthetic oligonucleotide
  Target: LAMA2; (-) strand; PAM type: YTN; PAM sequence: TTC
tcacacagagctactaacat

SEQ ID NO: 189617 - DNA, 20 bp, Artificial Sequence
  Description of Artificial Sequence: Synthetic oligonucleotide
  Target: LAMA2; (-) strand; PAM type: YTN; PAM sequence: CTT
ctcacacagagctactaaca

SEQ ID NO: 189618 - DNA, 20 bp, Artificial Sequence
  Description of Artificial Sequence: Synthetic oligonucleotide
  Target: LAMA2; (-) strand; PAM type: YTN; PAM sequence: TTA
aatcacttctcacacagagc

SEQ ID NO: 189619 - DNA, 20 bp, Artificial Sequence
  Description of Artificial Sequence: Synthetic oligonucleotide
  Target: LAMA2; (-) strand; PAM type: YTN; PAM sequence: TTT
aaatcacttctcacacagag

SEQ ID NO: 189620 - DNA, 20 bp, Artificial Sequence
  Description of Artificial Sequence: Synthetic oligonucleotide
  Target: LAMA2; (-) strand; PAM type: YTN; PAM sequence: TTT
taaatcacttctcacacaga

SEQ ID NO: 189621 - DNA, 20 bp, Artificial Sequence
  Description of Artificial Sequence: Synthetic oligonucleotide
  Target: LAMA2; (-) strand; PAM type: YTN; PAM sequence: CTG
ttttaaatcacttctcacac

SEQ ID NO: 189622 - DNA, 20 bp, Artificial Sequence
  Description of Artificial Sequence: Synthetic oligonucleotide
  Target: LAMA2; (-) strand; PAM type: YTN; PAM sequence: TTG
cctgttttaaatcacttctc

SEQ ID NO: 189623 - DNA, 20 bp, Artificial Sequence
  Description of Artificial Sequence: Synthetic oligonucleotide
  Target: LAMA2; (-) strand; PAM type: YTN; PAM sequence: TTC
catcatgttgcctgttttaa

SEQ ID NO: 189624 - DNA, 20 bp, Artificial Sequence
  Description of Artificial Sequence: Synthetic oligonucleotide
  Target: LAMA2; (-) strand; PAM type: YTN; PAM sequence: TTT
ccatcatgttgcctgtttta

SEQ ID NO: 189625 - DNA, 20 bp, Artificial Sequence
  Description of Artificial Sequence: Synthetic oligonucleotide
  Target: LAMA2; (-) strand; PAM type: YTN; PAM sequence: TTG
caaaaatttccatcatgttg

SEQ ID NO: 189626 - DNA, 20 bp, Artificial Sequence
  Description of Artificial Sequence: Synthetic oligonucleotide
  Target: LAMA2; (-) strand; PAM type: YTN; PAM sequence: TTA
ttgcaaaaatttccatcatg

SEQ ID NO: 189627 - DNA, 20 bp, Artificial Sequence
  Description of Artificial Sequence: Synthetic oligonucleotide
  Target: LAMA2; (-) strand; PAM type: YTN; PAM sequence: CTA
caaattattgcaaaaatttc

SEQ ID NO: 189628 - DNA, 20 bp, Artificial Sequence
  Description of Artificial Sequence: Synthetic oligonucleotide
  Target: LAMA2; (-) strand; PAM type: YTN; PAM sequence: TTG
aagtatgaataactacaaat

SEQ ID NO: 189629 - DNA, 20 bp, Artificial Sequence
  Description of Artificial Sequence: Synthetic oligonucleotide
  Target: LAMA2; (-) strand; PAM type: YTN; PAM sequence: TTT
gaagtatgaataactacaaa

SEQ ID NO: 189630 - DNA, 20 bp, Artificial Sequence
  Description of Artificial Sequence: Synthetic oligonucleotide
  Target: LAMA2; (-) strand; PAM type: YTN; PAM sequence: TTG
taccacatttgaagtatgaa

SEQ ID NO: 189631 - DNA, 20 bp, Artificial Sequence
  Description of Artificial Sequence: Synthetic oligonucleotide
  Target: LAMA2; (-) strand; PAM type: YTN; PAM sequence: TTA
ttgtaccacatttgaagtat

SEQ ID NO: 189632 - DNA, 20 bp, Artificial Sequence
  Description of Artificial Sequence: Synthetic oligonucleotide
  Target: LAMA2; (-) strand; PAM type: YTN; PAM sequence: TTT
attgtaccacatttgaagta

SEQ ID NO: 189633 - DNA, 20 bp, Artificial Sequence
  Description of Artificial Sequence: Synthetic oligonucleotide
  Target: LAMA2; (-) strand; PAM type: YTN; PAM sequence: CTA
gaaaaaacgtttattgtacc

SEQ ID NO: 189634 - DNA, 20 bp, Artificial Sequence
  Description of Artificial Sequence: Synthetic oligonucleotide
  Target: LAMA2; (-) strand; PAM type: YTN; PAM sequence: TTC
ctagaaaaaacgtttattgt

SEQ ID NO: 189635 - DNA, 20 bp, Artificial Sequence
  Description of Artificial Sequence: Synthetic oligonucleotide
  Target: LAMA2; (-) strand; PAM type: YTN; PAM sequence: TTC
aacaatgagattcctagaaa

SEQ ID NO: 189636 - DNA, 20 bp, Artificial Sequence
  Description of Artificial Sequence: Synthetic oligonucleotide
  Target: LAMA2; (-) strand; PAM type: YTN; PAM sequence: TTA
tcaacaaaataaatacatat

SEQ ID NO: 189637 - DNA, 20 bp, Artificial Sequence
  Description of Artificial Sequence: Synthetic oligonucleotide
  Target: LAMA2; (-) strand; PAM type: YTN; PAM sequence: TTT
atcaacaaaataaatacata

SEQ ID NO: 189638 - DNA, 20 bp, Artificial Sequence
  Description of Artificial Sequence: Synthetic oligonucleotide
  Target: LAMA2; (-) strand; PAM type: YTN; PAM sequence: TTA
aaaaatagtttatcaacaaa

SEQ ID NO: 189639 - DNA, 20 bp, Artificial Sequence
  Description of Artificial Sequence: Synthetic oligonucleotide
  Target: LAMA2; (-) strand; PAM type: YTN; PAM sequence: TTT
aaaaaatagtttatcaacaa

SEQ ID NO: 189640 - DNA, 20 bp, Artificial Sequence
  Description of Artificial Sequence: Synthetic oligonucleotide
  Target: LAMA2; (-) strand; PAM type: YTN; PAM sequence: TTT
taaaaaatagtttatcaaca

SEQ ID NO: 189641 - DNA, 20 bp, Artificial Sequence
  Description of Artificial Sequence: Synthetic oligonucleotide
  Target: LAMA2; (-) strand; PAM type: YTN; PAM sequence: TTT
ttaaaaaatagtttatcaac

SEQ ID NO: 189642 - DNA, 20 bp, Artificial Sequence
  Description of Artificial Sequence: Synthetic oligonucleotide
  Target: LAMA2; (-) strand; PAM type: YTN; PAM sequence: TTA
aagaagtttttaaaaaatag

SEQ ID NO: 189643 - DNA, 20 bp, Artificial Sequence
  Description of Artificial Sequence: Synthetic oligonucleotide
  Target: LAMA2; (-) strand; PAM type: YTN; PAM sequence: TTA
taagtattaaagaagttttt

SEQ ID NO: 189644 - DNA, 20 bp, Artificial Sequence
  Description of Artificial Sequence: Synthetic oligonucleotide
  Target: LAMA2; (-) strand; PAM type: YTN; PAM sequence: CTA
aacatattataagtattaaa

SEQ ID NO: 189645 - DNA, 20 bp, Artificial Sequence
  Description of Artificial Sequence: Synthetic oligonucleotide
  Target: LAMA2; (-) strand; PAM type: YTN; PAM sequence: TTA
tctaaacatattataagtat

SEQ ID NO: 189646 - DNA, 20 bp, Artificial Sequence
  Description of Artificial Sequence: Synthetic oligonucleotide
  Target: LAMA2; (-) strand; PAM type: YTN; PAM sequence: TTT
atctaaacatattataagta

SEQ ID NO: 189647 - DNA, 20 bp, Artificial Sequence
  Description of Artificial Sequence: Synthetic oligonucleotide
  Target: LAMA2; (-) strand; PAM type: YTN; PAM sequence: CTA
tatgccatatatttatctaa

SEQ ID NO: 189648 - DNA, 20 bp, Artificial Sequence
  Description of Artificial Sequence: Synthetic oligonucleotide
  Target: LAMA2; (-) strand; PAM type: YTN; PAM sequence: TTA
ctatatgccatatatttatc

SEQ ID NO: 189649 - DNA, 20 bp, Artificial Sequence
  Description of Artificial Sequence: Synthetic oligonucleotide
  Target: LAMA2; (-) strand; PAM type: YTN; PAM sequence: CTT
actatatgccatatatttat

SEQ ID NO: 189650 - DNA, 20 bp, Artificial Sequence
  Description of Artificial Sequence: Synthetic oligonucleotide
  Target: LAMA2; (-) strand; PAM type: YTN; PAM sequence: TTA
tgaagtgcttactatatgcc

SEQ ID NO: 189651 - DNA, 20 bp, Artificial Sequence
  Description of Artificial Sequence: Synthetic oligonucleotide
  Target: LAMA2; (-) strand; PAM type: YTN; PAM sequence: TTT
atgaagtgcttactatatgc

SEQ ID NO: 189652 - DNA, 20 bp, Artificial Sequence
  Description of Artificial Sequence: Synthetic oligonucleotide
  Target: LAMA2; (-) strand; PAM type: YTN; PAM sequence: CTT
tatgaagtgcttactatatg

SEQ ID NO: 189653 - DNA, 20 bp, Artificial Sequence
  Description of Artificial Sequence: Synthetic oligonucleotide
  Target: LAMA2; (-) strand; PAM type: YTN; PAM sequence: CTA
acctttatgaagtgcttact

SEQ ID NO: 189654 - DNA, 20 bp, Artificial Sequence
  Description of Artificial Sequence: Synthetic oligonucleotide
  Target: LAMA2; (-) strand; PAM type: YTN; PAM sequence: CTA
agaataataactaaccttta

SEQ ID NO: 189655 - DNA, 20 bp, Artificial Sequence
  Description of Artificial Sequence: Synthetic oligonucleotide
  Target: LAMA2; (-) strand; PAM type: YTN; PAM sequence: TTC
atagactaagaataataact

SEQ ID NO: 189656 - DNA, 20 bp, Artificial Sequence
  Description of Artificial Sequence: Synthetic oligonucleotide
  Target: LAMA2; (-) strand; PAM type: YTN; PAM sequence: CTT
catagactaagaataataac

SEQ ID NO: 189657 - DNA, 20 bp, Artificial Sequence
  Description of Artificial Sequence: Synthetic oligonucleotide
  Target: LAMA2; (-) strand; PAM type: YTN; PAM sequence: CTA
cccaagcagatgtcaatgaa

SEQ ID NO: 189658 - DNA, 20 bp, Artificial Sequence
  Description of Artificial Sequence: Synthetic oligonucleotide
  Target: LAMA2; (-) strand; PAM type: YTN; PAM sequence: CTC
tacccaagcagatgtcaatg

SEQ ID NO: 189659 - DNA, 20 bp, Artificial Sequence
  Description of Artificial Sequence: Synthetic oligonucleotide
  Target: LAMA2; (-) strand; PAM type: YTN; PAM sequence: TTG
tcatctctacccaagcagat

SEQ ID NO: 189660 - DNA, 20 bp, Artificial Sequence
  Description of Artificial Sequence: Synthetic oligonucleotide
  Target: LAMA2; (-) strand; PAM type: YTN; PAM sequence: TTG
tgtgtcaaacacgccacatt

SEQ ID NO: 189661 - DNA, 20 bp, Artificial Sequence
  Description of Artificial Sequence: Synthetic oligonucleotide
  Target: LAMA2; (-) strand; PAM type: YTN; PAM sequence: TTA
cattgtgtgtcaaacacgcc

SEQ ID NO: 189662 - DNA, 20 bp, Artificial Sequence
  Description of Artificial Sequence: Synthetic oligonucleotide
  Target: LAMA2; (-) strand; PAM type: YTN; PAM sequence: CTT
acattgtgtgtcaaacacgc

SEQ ID NO: 189663 - DNA, 20 bp, Artificial Sequence
  Description of Artificial Sequence: Synthetic oligonucleotide
  Target: LAMA2; (-) strand; PAM type: YTN; PAM sequence: TTA
acttacattgtgtgtcaaac

SEQ ID NO: 189664 - DNA, 20 bp, Artificial Sequence
  Description of Artificial Sequence: Synthetic oligonucleotide
  Target: LAMA2; (-) strand; PAM type: YTN; PAM sequence: CTG
aaattaacttacattgtgtg

SEQ ID NO: 189665 - DNA, 20 bp, Artificial Sequence
  Description of Artificial Sequence: Synthetic oligonucleotide
  Target: LAMA2; (-) strand; PAM type: YTN; PAM sequence: CTG
aaggccatgctgaaattaac

SEQ ID NO: 189666 - DNA, 20 bp, Artificial Sequence
  Description of Artificial Sequence: Synthetic oligonucleotide
  Target: LAMA2; (-) strand; PAM type: YTN; PAM sequence: TTC
cactgaaggccatgctgaaa

SEQ ID NO: 189667 - DNA, 20 bp, Artificial Sequence
  Description of Artificial Sequence: Synthetic oligonucleotide
  Target: LAMA2; (-) strand; PAM type: YTN; PAM sequence: TTT
ccactgaaggccatgctgaa

SEQ ID NO: 189668 - DNA, 20 bp, Artificial Sequence
  Description of Artificial Sequence: Synthetic oligonucleotide
  Target: LAMA2; (-) strand; PAM type: YTN; PAM sequence: CTT
tccactgaaggccatgctga

SEQ ID NO: 189669 - DNA, 20 bp, Artificial Sequence
  Description of Artificial Sequence: Synthetic oligonucleotide
  Target: LAMA2; (-) strand; PAM type: YTN; PAM sequence: TTA
gactttccactgaaggccat

SEQ ID NO: 189670 - DNA, 20 bp, Artificial Sequence
  Description of Artificial Sequence: Synthetic oligonucleotide
  Target: LAMA2; (-) strand; PAM type: YTN; PAM sequence: CTG
caatccaattagactttcca

SEQ ID NO: 189671 - DNA, 20 bp, Artificial Sequence
  Description of Artificial Sequence: Synthetic oligonucleotide
  Target: LAMA2; (-) strand; PAM type: YTN; PAM sequence: TTC
tgcaatccaattagactttc

SEQ ID NO: 189672 - DNA, 20 bp, Artificial Sequence
  Description of Artificial Sequence: Synthetic oligonucleotide
  Target: LAMA2; (-) strand; PAM type: YTN; PAM sequence: TTT
ctgcaatccaattagacttt

SEQ ID NO: 189673 - DNA, 20 bp, Artificial Sequence
  Description of Artificial Sequence: Synthetic oligonucleotide
  Target: LAMA2; (-) strand; PAM type: YTN; PAM sequence: TTT
tctgcaatccaattagactt

SEQ ID NO: 189674 - DNA, 20 bp, Artificial Sequence
  Description of Artificial Sequence: Synthetic oligonucleotide
  Target: LAMA2; (-) strand; PAM type: YTN; PAM sequence: TTG
agagattttctgcaatccaa

SEQ ID NO: 189675 - DNA, 20 bp, Artificial Sequence
  Description of Artificial Sequence: Synthetic oligonucleotide
  Target: LAMA2; (-) strand; PAM type: YTN; PAM sequence: CTA
tattgagagattttctgcaa

SEQ ID NO: 189676 - DNA, 20 bp, Artificial Sequence
  Description of Artificial Sequence: Synthetic oligonucleotide
  Target: LAMA2; (-) strand; PAM type: YTN; PAM sequence: TTA
gggagagtccaaataaagac

SEQ ID NO: 189677 - DNA, 20 bp, Artificial Sequence
  Description of Artificial Sequence: Synthetic oligonucleotide
  Target: LAMA2; (-) strand; PAM type: YTN; PAM sequence: CTA
tagtaattagggagagtcca

SEQ ID NO: 189678 - DNA, 20 bp, Artificial Sequence
  Description of Artificial Sequence: Synthetic oligonucleotide
  Target: LAMA2; (-) strand; PAM type: YTN; PAM sequence: TTA
ctatagtaattagggagagt

SEQ ID NO: 189679 - DNA, 20 bp, Artificial Sequence
  Description of Artificial Sequence: Synthetic oligonucleotide
  Target: LAMA2; (-) strand; PAM type: YTN; PAM sequence: TTT
actatagtaattagggagag

SEQ ID NO: 189680 - DNA, 20 bp, Artificial Sequence
  Description of Artificial Sequence: Synthetic oligonucleotide
  Target: LAMA2; (-) strand; PAM type: YTN; PAM sequence: TTT
tactatagtaattagggaga

SEQ ID NO: 189681 - DNA, 20 bp, Artificial Sequence
  Description of Artificial Sequence: Synthetic oligonucleotide
  Target: LAMA2; (-) strand; PAM type: YTN; PAM sequence: TTT
ttactatagtaattagggag

SEQ ID NO: 189682 - DNA, 20 bp, Artificial Sequence
  Description of Artificial Sequence: Synthetic oligonucleotide
  Target: LAMA2; (-) strand; PAM type: YTN; PAM sequence: TTT
tttactatagtaattaggga

SEQ ID NO: 189683 - DNA, 20 bp, Artificial Sequence
  Description of Artificial Sequence: Synthetic oligonucleotide
  Target: LAMA2; (-) strand; PAM type: YTN; PAM sequence: TTT
ttttactatagtaattaggg

SEQ ID NO: 189684 - DNA, 20 bp, Artificial Sequence
  Description of Artificial Sequence: Synthetic oligonucleotide
  Target: LAMA2; (-) strand; PAM type: YTN; PAM sequence: TTT
tttttactatagtaattagg

SEQ ID NO: 189685 - DNA, 20 bp, Artificial Sequence
  Description of Artificial Sequence: Synthetic oligonucleotide
  Target: LAMA2; (-) strand; PAM type: YTN; PAM sequence: TTC
caagaattttttttactata

SEQ ID NO: 189686 - DNA, 20 bp, Artificial Sequence
  Description of Artificial Sequence: Synthetic oligonucleotide
  Target: LAMA2; (-) strand; PAM type: YTN; PAM sequence: TTA
aataatgtattccaagaatt

SEQ ID NO: 189687 - DNA, 20 bp, Artificial Sequence
  Description of Artificial Sequence: Synthetic oligonucleotide
  Target: LAMA2; (-) strand; PAM type: YTN; PAM sequence: TTG
tattaaataatgtattccaa

SEQ ID NO: 189688 - DNA, 20 bp, Artificial Sequence
  Description of Artificial Sequence: Synthetic oligonucleotide
  Target: LAMA2; (-) strand; PAM type: YTN; PAM sequence: CTA
tccagagttgtattaaataa

SEQ ID NO: 189689 - DNA, 20 bp, Artificial Sequence
  Description of Artificial Sequence: Synthetic oligonucleotide
  Target: LAMA2; (-) strand; PAM type: YTN; PAM sequence: CTC
cctatccagagttgtattaa

SEQ ID NO: 189690 - DNA, 20 bp, Artificial Sequence
  Description of Artificial Sequence: Synthetic oligonucleotide
  Target: LAMA2; (-) strand; PAM type: YTN; PAM sequence: CTA
agaatcctccctatccagag

SEQ ID NO: 189691 - DNA, 20 bp, Artificial Sequence
  Description of Artificial Sequence: Synthetic oligonucleotide
  Target: LAMA2; (-) strand; PAM type: YTN; PAM sequence: TTA
atacacaagtagacacacta

SEQ ID NO: 189692 - DNA, 20 bp, Artificial Sequence
  Description of Artificial Sequence: Synthetic oligonucleotide
  Target: LAMA2; (-) strand; PAM type: YTN; PAM sequence: TTT
aatacacaagtagacacact

SEQ ID NO: 189693 - DNA, 20 bp, Artificial Sequence
  Description of Artificial Sequence: Synthetic oligonucleotide
  Target: LAMA2; (-) strand; PAM type: YTN; PAM sequence: CTA
aaaatttaatacacaagtag

SEQ ID NO: 189694 - DNA, 20 bp, Artificial Sequence
  Description of Artificial Sequence: Synthetic oligonucleotide
  Target: LAMA2; (-) strand; PAM type: YTN; PAM sequence: TTA
atacaaaatagacacactaa

SEQ ID NO: 189695 - DNA, 20 bp, Artificial Sequence
  Description of Artificial Sequence: Synthetic oligonucleotide
  Target: LAMA2; (-) strand; PAM type: YTN; PAM sequence: TTT
aatacaaaatagacacacta

SEQ ID NO: 189696 - DNA, 20 bp, Artificial Sequence
  Description of Artificial Sequence: Synthetic oligonucleotide
  Target: LAMA2; (-) strand; PAM type: YTN; PAM sequence: TTA
atagtagatttaatacaaaa

SEQ ID NO: 189697 - DNA, 20 bp, Artificial Sequence
  Description of Artificial Sequence: Synthetic oligonucleotide
  Target: LAMA2; (-) strand; PAM type: YTN; PAM sequence: TTT
aatagtagatttaatacaaa

SEQ ID NO: 189698 - DNA, 20 bp, Artificial Sequence
  Description of Artificial Sequence: Synthetic oligonucleotide
  Target: LAMA2; (-) strand; PAM type: YTN; PAM sequence: TTT
taatagtagatttaatacaa

SEQ ID NO: 189699 - DNA, 20 bp, Artificial Sequence
  Description of Artificial Sequence: Synthetic oligonucleotide
  Target: LAMA2; (-) strand; PAM type: YTN; PAM sequence: TTT
ttaatagtagatttaataca

SEQ ID NO: 189700 - DNA, 20 bp, Artificial Sequence
  Description of Artificial Sequence: Synthetic oligonucleotide
  Target: LAMA2; (-) strand; PAM type: YTN; PAM sequence: TTT
tttaatagtagatttaatac

SEQ ID NO: 189701 - DNA, 20 bp, Artificial Sequence
  Description of Artificial Sequence: Synthetic oligonucleotide
  Target: LAMA2; (-) strand; PAM type: YTN; PAM sequence: TTT
ttttaatagtagatttaata

SEQ ID NO: 189702 - DNA, 20 bp, Artificial Sequence
  Description of Artificial Sequence: Synthetic oligonucleotide
  Target: LAMA2; (-) strand; PAM type: YTN; PAM sequence: TTG
gtggtttttttaatagtaga

SEQ ID NO: 189703 - DNA, 20 bp, Artificial Sequence
  Description of Artificial Sequence: Synthetic oligonucleotide
  Target: LAMA2; (-) strand; PAM type: YTN; PAM sequence: TTT
ggtggtttttttaatagtag

SEQ ID NO: 189704 - DNA, 20 bp, Artificial Sequence
  Description of Artificial Sequence: Synthetic oligonucleotide
  Target: LAMA2; (-) strand; PAM type: YTN; PAM sequence: TTT
tggtggtttttttaatagta

SEQ ID NO: 189705 - DNA, 20 bp, Artificial Sequence
  Description of Artificial Sequence: Synthetic oligonucleotide
  Target: LAMA2; (-) strand; PAM type: YTN; PAM sequence: TTT
ttggtggtttttttaatagt

SEQ ID NO: 189706 - DNA, 20 bp, Artificial Sequence
  Description of Artificial Sequence: Synthetic oligonucleotide
  Target: LAMA2; (-) strand; PAM type: YTN; PAM sequence: TTT
tttggtggtttttttaatag

SEQ ID NO: 189707 - DNA, 20 bp, Artificial Sequence
  Description of Artificial Sequence: Synthetic oligonucleotide
  Target: LAMA2; (-) strand; PAM type: YTN; PAM sequence: TTG
ttttttggtggtttttttaa

SEQ ID NO: 189708 - DNA, 20 bp, Artificial Sequence
  Description of Artificial Sequence: Synthetic oligonucleotide
  Target: LAMA2; (-) strand; PAM type: YTN; PAM sequence: TTT
gttttttggtggttttttta

SEQ ID NO: 189709 - DNA, 20 bp, Artificial Sequence
  Description of Artificial Sequence: Synthetic oligonucleotide
  Target: LAMA2; (-) strand; PAM type: YTN; PAM sequence: TTT
tgttttttggtggttttttt

SEQ ID NO: 189710 - DNA, 20 bp, Artificial Sequence
  Description of Artificial Sequence: Synthetic oligonucleotide
  Target: LAMA2; (-) strand; PAM type: YTN; PAM sequence: TTG
gttttgttttttggtggttt

SEQ ID NO: 189711 - DNA, 20 bp, Artificial Sequence
  Description of Artificial Sequence: Synthetic oligonucleotide
  Target: LAMA2; (-) strand; PAM type: YTN; PAM sequence: TTT
ggttttgttttttggtggtt

SEQ ID NO: 189712 - DNA, 20 bp, Artificial Sequence
  Description of Artificial Sequence: Synthetic oligonucleotide
  Target: LAMA2; (-) strand; PAM type: YTN; PAM sequence: TTT
tggttttgttttttggtggt

SEQ ID NO: 189713 - DNA, 20 bp, Artificial Sequence
  Description of Artificial Sequence: Synthetic oligonucleotide
  Target: LAMA2; (-) strand; PAM type: YTN; PAM sequence: TTT
ttggttttgttttttggtgg

SEQ ID NO: 189714 - DNA, 20 bp, Artificial Sequence
  Description of Artificial Sequence: Synthetic oligonucleotide
  Target: LAMA2; (-) strand; PAM type: YTN; PAM sequence: TTT
tttggttttgttttttggtg

SEQ ID NO: 189715 - DNA, 20 bp, Artificial Sequence
  Description of Artificial Sequence: Synthetic oligonucleotide
  Target: LAMA2; (-) strand; PAM type: YTN; PAM sequence: CTG
aagtaggttttttggttttg

SEQ ID NO: 189716 - DNA, 20 bp, Artificial Sequence
  Description of Artificial Sequence: Synthetic oligonucleotide
  Target: LAMA2; (-) strand; PAM type: YTN; PAM sequence: TTC
tgaagtaggttttttggttt

SEQ ID NO: 189717 - DNA, 20 bp, Artificial Sequence
  Description of Artificial Sequence: Synthetic oligonucleotide
  Target: LAMA2; (-) strand; PAM type: YTN; PAM sequence: TTT
ctgaagtaggttttttggtt

SEQ ID NO: 189718 - DNA, 20 bp, Artificial Sequence
  Description of Artificial Sequence: Synthetic oligonucleotide
  Target: LAMA2; (-) strand; PAM type: YTN; PAM sequence: TTT
tctgaagtaggttttttggt

SEQ ID NO: 189719 - DNA, 20 bp, Artificial Sequence
  Description of Artificial Sequence: Synthetic oligonucleotide
  Target: LAMA2; (-) strand; PAM type: YTN; PAM sequence: CTA
tatgattttctgaagtaggt

SEQ ID NO: 189720 - DNA, 20 bp, Artificial Sequence
  Description of Artificial Sequence: Synthetic oligonucleotide
  Target: LAMA2; (-) strand; PAM type: YTN; PAM sequence: TTA
gagtactatatgattttctg

SEQ ID NO: 189721 - DNA, 20 bp, Artificial Sequence
  Description of Artificial Sequence: Synthetic oligonucleotide
  Target: LAMA2; (-) strand; PAM type: YTN; PAM sequence: TTG
ttagagtactatatgatttt

SEQ ID NO: 189722 - DNA, 20 bp, Artificial Sequence
  Description of Artificial Sequence: Synthetic oligonucleotide
  Target: LAMA2; (-) strand; PAM type: YTN; PAM sequence: TTT
gttagagtactatatgattt

SEQ ID NO: 189723 - DNA, 20 bp, Artificial Sequence
  Description of Artificial Sequence: Synthetic oligonucleotide
  Target: LAMA2; (-) strand; PAM type: YTN; PAM sequence: CTA
gagatttgttagagtactat

SEQ ID NO: 189724 - DNA, 20 bp, Artificial Sequence
  Description of Artificial Sequence: Synthetic oligonucleotide
  Target: LAMA2; (-) strand; PAM type: YTN; PAM sequence: CTC
tagagatttgttagagtact

SEQ ID NO: 189725 - DNA, 20 bp, Artificial Sequence
  Description of Artificial Sequence: Synthetic oligonucleotide
  Target: LAMA2; (-) strand; PAM type: YTN; PAM sequence: TTC
tctagagatttgttagagta

SEQ ID NO: 189726 - DNA, 20 bp, Artificial Sequence
  Description of Artificial Sequence: Synthetic oligonucleotide
  Target: LAMA2; (-) strand; PAM type: YTN; PAM sequence: TTT
ctctagagatttgttagagt

SEQ ID NO: 189727 - DNA, 20 bp, Artificial Sequence
  Description of Artificial Sequence: Synthetic oligonucleotide
  Target: LAMA2; (-) strand; PAM type: YTN; PAM sequence: TTT
tctctagagatttgttagag

SEQ ID NO: 189728 - DNA, 20 bp, Artificial Sequence
  Description of Artificial Sequence: Synthetic oligonucleotide
  Target: LAMA2; (-) strand; PAM type: YTN; PAM sequence: TTA
gaaaagcagttttctctaga

SEQ ID NO: 189729 - DNA, 20 bp, Artificial Sequence
  Description of Artificial Sequence: Synthetic oligonucleotide
  Target: LAMA2; (-) strand; PAM type: YTN; PAM sequence: TTT
agaaaagcagttttctctag

SEQ ID NO: 189730 - DNA, 20 bp, Artificial Sequence
  Description of Artificial Sequence: Synthetic oligonucleotide
  Target: LAMA2; (-) strand; PAM type: YTN; PAM sequence: TTC
ccaagtttagaaaagcagtt

SEQ ID NO: 189731 - DNA, 20 bp, Artificial Sequence
  Description of Artificial Sequence: Synthetic oligonucleotide
  Target: LAMA2; (-) strand; PAM type: YTN; PAM sequence: TTC
aaaatccagcgttcccaagt

SEQ ID NO: 189732 - DNA, 20 bp, Artificial Sequence
  Description of Artificial Sequence: Synthetic oligonucleotide
  Target: LAMA2; (-) strand; PAM type: YTN; PAM sequence: TTT
caaaatccagcgttcccaag

SEQ ID NO: 189733 - DNA, 20 bp, Artificial Sequence
  Description of Artificial Sequence: Synthetic oligonucleotide
  Target: LAMA2; (-) strand; PAM type: YTN; PAM sequence: TTT
tcaaaatccagcgttcccaa

SEQ ID NO: 189734 - DNA, 20 bp, Artificial Sequence
  Description of Artificial Sequence: Synthetic oligonucleotide
  Target: LAMA2; (-) strand; PAM type: YTN; PAM sequence: CTG
aaatattttcaaaatccagc

SEQ ID NO: 189735 - DNA, 20 bp, Artificial Sequence
  Description of Artificial Sequence: Synthetic oligonucleotide
  Target: LAMA2; (-) strand; PAM type: YTN; PAM sequence: TTG
tctgaaatattttcaaaatc

SEQ ID NO: 189736 - DNA, 20 bp, Artificial Sequence
  Description of Artificial Sequence: Synthetic oligonucleotide
  Target: LAMA2; (-) strand; PAM type: YTN; PAM sequence: TTT
gtctgaaatattttcaaaat

SEQ ID NO: 189737 - DNA, 20 bp, Artificial Sequence
  Description of Artificial Sequence: Synthetic oligonucleotide
  Target: LAMA2; (-) strand; PAM type: YTN; PAM sequence: TTT
tgtctgaaatattttcaaaa

SEQ ID NO: 189738 - DNA, 20 bp, Artificial Sequence
  Description of Artificial Sequence: Synthetic oligonucleotide
  Target: LAMA2; (-) strand; PAM type: YTN; PAM sequence: TTA
agaagtgttttgtctgaaat

SEQ ID NO: 189739 - DNA, 20 bp, Artificial Sequence
  Description of Artificial Sequence: Synthetic oligonucleotide
  Target: LAMA2; (-) strand; PAM type: YTN; PAM sequence: TTT
aagaagtgttttgtctgaaa

SEQ ID NO: 189740 - DNA, 20 bp, Artificial Sequence
  Description of Artificial Sequence: Synthetic oligonucleotide
  Target: LAMA2; (-) strand; PAM type: YTN; PAM sequence: CTT
taagaagtgttttgtctgaa

SEQ ID NO: 189741 - DNA, 20 bp, Artificial Sequence
  Description of Artificial Sequence: Synthetic oligonucleotide
  Target: LAMA2; (-) strand; PAM type: YTN; PAM sequence: TTG
atggtaaacgggcctttaag

SEQ ID NO: 189742 - DNA, 20 bp, Artificial Sequence
  Description of Artificial Sequence: Synthetic oligonucleotide
  Target: LAMA2; (-) strand; PAM type: YTN; PAM sequence: TTT
gatggtaaacgggcctttaa

SEQ ID NO: 189743 - DNA, 20 bp, Artificial Sequence
  Description of Artificial Sequence: Synthetic oligonucleotide
  Target: LAMA2; (-) strand; PAM type: YTN; PAM sequence: TTT
tgatggtaaacgggccttta

SEQ ID NO: 189744 - DNA, 20 bp, Artificial Sequence
  Description of Artificial Sequence: Synthetic oligonucleotide
  Target: LAMA2; (-) strand; PAM type: YTN; PAM sequence: TTT
ttgatggtaaacgggccttt

SEQ ID NO: 189745 - DNA, 20 bp, Artificial Sequence
  Description of Artificial Sequence: Synthetic oligonucleotide
  Target: LAMA2; (-) strand; PAM type: YTN; PAM sequence: CTT
tttgatggtaaacgggcctt

SEQ ID NO: 189746 - DNA, 20 bp, Artificial Sequence
  Description of Artificial Sequence: Synthetic oligonucleotide
  Target: LAMA2; (-) strand; PAM type: YTN; PAM sequence: TTG
aaactttttgatggtaaacg

SEQ ID NO: 189747 - DNA, 20 bp, Artificial Sequence
  Description of Artificial Sequence: Synthetic oligonucleotide
  Target: LAMA2; (-) strand; PAM type: YTN; PAM sequence: TTA
ggcaagattgaaactttttg

SEQ ID NO: 189748 - DNA, 20 bp, Artificial Sequence
  Description of Artificial Sequence: Synthetic oligonucleotide
  Target: LAMA2; (-) strand; PAM type: YTN; PAM sequence: TTA
tgtgttaggcaagattgaaa

SEQ ID NO: 189749 - DNA, 20 bp, Artificial Sequence
  Description of Artificial Sequence: Synthetic oligonucleotide
  Target: LAMA2; (-) strand; PAM type: YTN; PAM sequence: TTG
cacattatgtgttaggcaag

SEQ ID NO: 189750 - DNA, 20 bp, Artificial Sequence
  Description of Artificial Sequence: Synthetic oligonucleotide
  Target: LAMA2; (-) strand; PAM type: YTN; PAM sequence: TTT
gcacattatgtgttaggcaa

SEQ ID NO: 189751 - DNA, 20 bp, Artificial Sequence
  Description of Artificial Sequence: Synthetic oligonucleotide
  Target: LAMA2; (-) strand; PAM type: YTN; PAM sequence: CTA
atgtatcagaatgaaaaaat

SEQ ID NO: 189752 - DNA, 20 bp, Artificial Sequence
  Description of Artificial Sequence: Synthetic oligonucleotide
  Target: LAMA2; (-) strand; PAM type: YTN; PAM sequence: TTC
taatgtatcagaatgaaaaa

SEQ ID NO: 189753 - DNA, 20 bp, Artificial Sequence
  Description of Artificial Sequence: Synthetic oligonucleotide
  Target: LAMA2; (-) strand; PAM type: YTN; PAM sequence: TTT
ctaatgtatcagaatgaaaa

SEQ ID NO: 189754 - DNA, 20 bp, Artificial Sequence
  Description of Artificial Sequence: Synthetic oligonucleotide
  Target: LAMA2; (-) strand; PAM type: YTN; PAM sequence: TTT
tctaatgtatcagaatgaaa

SEQ ID NO: 189755 - DNA, 20 bp, Artificial Sequence
  Description of Artificial Sequence: Synthetic oligonucleotide
  Target: LAMA2; (-) strand; PAM type: YTN; PAM sequence: CTT
ttctaatgtatcagaatgaa

SEQ ID NO: 189756 - DNA, 20 bp, Artificial Sequence
  Description of Artificial Sequence: Synthetic oligonucleotide
  Target: LAMA2; (-) strand; PAM type: YTN; PAM sequence: TTA
caaatccagtgacttttcta

SEQ ID NO: 189757 - DNA, 20 bp, Artificial Sequence
  Description of Artificial Sequence: Synthetic oligonucleotide
  Target: LAMA2; (-) strand; PAM type: YTN; PAM sequence: TTC
caattacaaatccagtgact

SEQ ID NO: 189758 - DNA, 20 bp, Artificial Sequence
  Description of Artificial Sequence: Synthetic oligonucleotide
  Target: LAMA2; (-) strand; PAM type: YTN; PAM sequence: TTG
gaattccaattacaaatcca

SEQ ID NO: 189759 - DNA, 20 bp, Artificial Sequence
  Description of Artificial Sequence: Synthetic oligonucleotide
  Target: LAMA2; (-) strand; PAM type: YTN; PAM sequence: TTT
ggaattccaattacaaatcc

SEQ ID NO: 189760 - DNA, 20 bp, Artificial Sequence
  Description of Artificial Sequence: Synthetic oligonucleotide
  Target: LAMA2; (-) strand; PAM type: YTN; PAM sequence: TTT
tggaattccaattacaaatc

SEQ ID NO: 189761 - DNA, 20 bp, Artificial Sequence
  Description of Artificial Sequence: Synthetic oligonucleotide
  Target: LAMA2; (-) strand; PAM type: YTN; PAM sequence: TTA
tattttggaattccaattac

SEQ ID NO: 189762 - DNA, 20 bp, Artificial Sequence
  Description of Artificial Sequence: Synthetic oligonucleotide
  Target: LAMA2; (-) strand; PAM type: YTN; PAM sequence: TTT
atattttggaattccaatta

SEQ ID NO: 189763 - DNA, 20 bp, Artificial Sequence
  Description of Artificial Sequence: Synthetic oligonucleotide
  Target: LAMA2; (-) strand; PAM type: YTN; PAM sequence: CTA
gagggaaaatttatattttg

SEQ ID NO: 189764 - DNA, 20 bp, Artificial Sequence
  Description of Artificial Sequence: Synthetic oligonucleotide
  Target: LAMA2; (-) strand; PAM type: YTN; PAM sequence: TTA
ggaagagctagagggaaaat

SEQ ID NO: 189765 - DNA, 20 bp, Artificial Sequence
  Description of Artificial Sequence: Synthetic oligonucleotide
  Target: LAMA2; (-) strand; PAM type: YTN; PAM sequence: TTT
aggaagagctagagggaaaa

SEQ ID NO: 189766 - DNA, 20 bp, Artificial Sequence
  Description of Artificial Sequence: Synthetic oligonucleotide
  Target: LAMA2; (-) strand; PAM type: YTN; PAM sequence: CTT
taggaagagctagagggaaa

SEQ ID NO: 189767 - DNA, 20 bp, Artificial Sequence
  Description of Artificial Sequence: Synthetic oligonucleotide
  Target: LAMA2; (-) strand; PAM type: YTN; PAM sequence: CTC
tttaggaagagctagaggga

SEQ ID NO: 189768 - DNA, 20 bp, Artificial Sequence
  Description of Artificial Sequence: Synthetic oligonucleotide
  Target: LAMA2; (-) strand; PAM type: YTN; PAM sequence: TTA
aggtaatctctttaggaaga

SEQ ID NO: 189769 - DNA, 20 bp, Artificial Sequence
  Description of Artificial Sequence: Synthetic oligonucleotide
  Target: LAMA2; (-) strand; PAM type: YTN; PAM sequence: TTT
aaggtaatctctttaggaag

SEQ ID NO: 189770 - DNA, 20 bp, Artificial Sequence
  Description of Artificial Sequence: Synthetic oligonucleotide
  Target: LAMA2; (-) strand; PAM type: YTN; PAM sequence: TTA
tccatgtttaaggtaatctc

SEQ ID NO: 189771 - DNA, 20 bp, Artificial Sequence
  Description of Artificial Sequence: Synthetic oligonucleotide
  Target: LAMA2; (-) strand; PAM type: YTN; PAM sequence: CTT
atccatgtttaaggtaatct

SEQ ID NO: 189772 - DNA, 20 bp, Artificial Sequence
  Description of Artificial Sequence: Synthetic oligonucleotide
  Target: LAMA2; (-) strand; PAM type: YTN; PAM sequence: TTA
agtgacttatccatgtttaa

SEQ ID NO: 189773 - DNA, 20 bp, Artificial Sequence
  Description of Artificial Sequence: Synthetic oligonucleotide
  Target: LAMA2; (-) strand; PAM type: YTN; PAM sequence: TTC
agaatagttaagtgacttat

SEQ ID NO: 189774 - DNA, 20 bp, Artificial Sequence
  Description of Artificial Sequence: Synthetic oligonucleotide
  Target: LAMA2; (-) strand; PAM type: YTN; PAM sequence: TTT
cagaatagttaagtgactta

SEQ ID NO: 189775 - DNA, 20 bp, Artificial Sequence
  Description of Artificial Sequence: Synthetic oligonucleotide
  Target: LAMA2; (-) strand; PAM type: YTN; PAM sequence: TTG
aatttcagaatagttaagtg

SEQ ID NO: 189776 - DNA, 20 bp, Artificial Sequence
  Description of Artificial Sequence: Synthetic oligonucleotide
  Target: LAMA2; (-) strand; PAM type: YTN; PAM sequence: TTA
gatggaaaattgaatttcag

SEQ ID NO: 189777 - DNA, 20 bp, Artificial Sequence
  Description of Artificial Sequence: Synthetic oligonucleotide
  Target: LAMA2; (-) strand; PAM type: YTN; PAM sequence: TTT
agatggaaaattgaatttca

SEQ ID NO: 189778 - DNA, 20 bp, Artificial Sequence
  Description of Artificial Sequence: Synthetic oligonucleotide
  Target: LAMA2; (-) strand; PAM type: YTN; PAM sequence: TTT
tagatggaaaattgaatttc

SEQ ID NO: 189779 - DNA, 20 bp, Artificial Sequence
  Description of Artificial Sequence: Synthetic oligonucleotide
  Target: LAMA2; (-) strand; PAM type: YTN; PAM sequence: TTT
ttagatggaaaattgaattt

SEQ ID NO: 189780 - DNA, 20 bp, Artificial Sequence
  Description of Artificial Sequence: Synthetic oligonucleotide
  Target: LAMA2; (-) strand; PAM type: YTN; PAM sequence: TTT
tttagatggaaaattgaatt

SEQ ID NO: 189781 - DNA, 20 bp, Artificial Sequence
  Description of Artificial Sequence: Synthetic oligonucleotide
  Target: LAMA2; (-) strand; PAM type: YTN; PAM sequence: TTG
tcattttttagatggaaaat

SEQ ID NO: 189782 - DNA, 20 bp, Artificial Sequence
  Description of Artificial Sequence: Synthetic oligonucleotide
  Target: LAMA2; (-) strand; PAM type: YTN; PAM sequence: TTA
cattgtcattttttagatgg

SEQ ID NO: 189783 - DNA, 20 bp, Artificial Sequence
  Description of Artificial Sequence: Synthetic oligonucleotide
  Target: LAMA2; (-) strand; PAM type: YTN; PAM sequence: TTC
gaacattacattgtcatttt

SEQ ID NO: 189784 - DNA, 20 bp, Artificial Sequence
  Description of Artificial Sequence: Synthetic oligonucleotide
  Target: LAMA2; (-) strand; PAM type: YTN; PAM sequence: TTA
taacaaccccatgaaataga

SEQ ID NO: 189785 - DNA, 20 bp, Artificial Sequence
  Description of Artificial Sequence: Synthetic oligonucleotide
  Target: LAMA2; (-) strand; PAM type: YTN; PAM sequence: CTT
ataacaaccccatgaaatag

SEQ ID NO: 189786 - DNA, 20 bp, Artificial Sequence
  Description of Artificial Sequence: Synthetic oligonucleotide
  Target: LAMA2; (-) strand; PAM type: YTN; PAM sequence: TTA
acccttataacaaccccatg

SEQ ID NO: 189787 - DNA, 20 bp, Artificial Sequence
  Description of Artificial Sequence: Synthetic oligonucleotide
  Target: LAMA2; (-) strand; PAM type: YTN; PAM sequence: TTT
aacccttataacaaccccat

SEQ ID NO: 189788 - DNA, 20 bp, Artificial Sequence
  Description of Artificial Sequence: Synthetic oligonucleotide
  Target: LAMA2; (-) strand; PAM type: YTN; PAM sequence: TTA
tttaacccttataacaaccc

SEQ ID NO: 189789 - DNA, 20 bp, Artificial Sequence
  Description of Artificial Sequence: Synthetic oligonucleotide
  Target: LAMA2; (-) strand; PAM type: YTN; PAM sequence: CTT
atttaacccttataacaacc

SEQ ID NO: 189790 - DNA, 20 bp, Artificial Sequence
  Description of Artificial Sequence: Synthetic oligonucleotide
  Target: LAMA2; (-) strand; PAM type: YTN; PAM sequence: CTG
ccttatttaacccttataac

SEQ ID NO: 189791 - DNA, 20 bp, Artificial Sequence
  Description of Artificial Sequence: Synthetic oligonucleotide
  Target: LAMA2; (-) strand; PAM type: YTN; PAM sequence: TTG
tatggtctgccttatttaac

SEQ ID NO: 189792 - DNA, 20 bp, Artificial Sequence
  Description of Artificial Sequence: Synthetic oligonucleotide
  Target: LAMA2; (-) strand; PAM type: YTN; PAM sequence: TTT
gtatggtctgccttatttaa

SEQ ID NO: 189793 - DNA, 20 bp, Artificial Sequence
  Description of Artificial Sequence: Synthetic oligonucleotide
  Target: LAMA2; (-) strand; PAM type: YTN; PAM sequence: TTA
ataatggtatttgtatggtc

SEQ ID NO: 189794 - DNA, 20 bp, Artificial Sequence
  Description of Artificial Sequence: Synthetic oligonucleotide
  Target: LAMA2; (-) strand; PAM type: YTN; PAM sequence: TTA
taataacaaatagtattaat

SEQ ID NO: 189795 - DNA, 20 bp, Artificial Sequence
  Description of Artificial Sequence: Synthetic oligonucleotide
  Target: LAMA2; (-) strand; PAM type: YTN; PAM sequence: TTA
ttataataacaaatagtatt

SEQ ID NO: 189796 - DNA, 20 bp, Artificial Sequence
  Description of Artificial Sequence: Synthetic oligonucleotide
  Target: LAMA2; (-) strand; PAM type: YTN; PAM sequence: TTT
attataataacaaatagtat

SEQ ID NO: 189797 - DNA, 20 bp, Artificial Sequence
  Description of Artificial Sequence: Synthetic oligonucleotide
  Target: LAMA2; (-) strand; PAM type: YTN; PAM sequence: CTG
tcatttattataataacaaa

SEQ ID NO: 189798 - DNA, 20 bp, Artificial Sequence
  Description of Artificial Sequence: Synthetic oligonucleotide
  Target: LAMA2; (-) strand; PAM type: YTN; PAM sequence: CTC
tgtcatttattataataaca

SEQ ID NO: 189799 - DNA, 20 bp, Artificial Sequence
  Description of Artificial Sequence: Synthetic oligonucleotide
  Target: LAMA2; (-) strand; PAM type: YTN; PAM sequence: CTA
agaccaactctgtcatttat

SEQ ID NO: 189800 - DNA, 20 bp, Artificial Sequence
  Description of Artificial Sequence: Synthetic oligonucleotide
  Target: LAMA2; (-) strand; PAM type: YTN; PAM sequence: TTC
ataaccaatgatgcctaaga

SEQ ID NO: 189801 - DNA, 20 bp, Artificial Sequence
  Description of Artificial Sequence: Synthetic oligonucleotide
  Target: LAMA2; (-) strand; PAM type: YTN; PAM sequence: CTT
cataaccaatgatgcctaag

SEQ ID NO: 189802 - DNA, 20 bp, Artificial Sequence
  Description of Artificial Sequence: Synthetic oligonucleotide
  Target: LAMA2; (-) strand; PAM type: YTN; PAM sequence: CTG
gggaaaaaaaacaaagaaag

SEQ ID NO: 189803 - DNA, 20 bp, Artificial Sequence
  Description of Artificial Sequence: Synthetic oligonucleotide
  Target: LAMA2; (-) strand; PAM type: YTN; PAM sequence: TTA
ggagccactggggaaaaaaa

SEQ ID NO: 189804 - DNA, 20 bp, Artificial Sequence
  Description of Artificial Sequence: Synthetic oligonucleotide
  Target: LAMA2; (-) strand; PAM type: YTN; PAM sequence: TTA
ataacaaatggttaggagcc

SEQ ID NO: 189805 - DNA, 20 bp, Artificial Sequence
  Description of Artificial Sequence: Synthetic oligonucleotide
  Target: LAMA2; (-) strand; PAM type: YTN; PAM sequence: TTA
attaataacaaatggttagg

SEQ ID NO: 189806 - DNA, 20 bp, Artificial Sequence
  Description of Artificial Sequence: Synthetic oligonucleotide
  Target: LAMA2; (-) strand; PAM type: YTN; PAM sequence: TTA
ttaattaataacaaatggtt

SEQ ID NO: 189807 - DNA, 20 bp, Artificial Sequence
  Description of Artificial Sequence: Synthetic oligonucleotide
  Target: LAMA2; (-) strand; PAM type: YTN; PAM sequence: TTA
atacataacattattaatta

SEQ ID NO: 189808 - DNA, 20 bp, Artificial Sequence
  Description of Artificial Sequence: Synthetic oligonucleotide
  Target: LAMA2; (-) strand; PAM type: YTN; PAM sequence: TTA
atacatatatgtatattaat

SEQ ID NO: 189809 - DNA, 20 bp, Artificial Sequence
  Description of Artificial Sequence: Synthetic oligonucleotide
  Target: LAMA2; (-) strand; PAM type: YTN; PAM sequence: TTA
ttaatacatatatgtatatt

SEQ ID NO: 189810 - DNA, 20 bp, Artificial Sequence
  Description of Artificial Sequence: Synthetic oligonucleotide
  Target: LAMA2; (-) strand; PAM type: YTN; PAM sequence: TTA
acaacattattaatacatat

SEQ ID NO: 189811 - DNA, 20 bp, Artificial Sequence
  Description of Artificial Sequence: Synthetic oligonucleotide
  Target: LAMA2; (-) strand; PAM type: YTN; PAM sequence: TTA
ttaacaacattattaataca

SEQ ID NO: 189812 - DNA, 20 bp, Artificial Sequence
  Description of Artificial Sequence: Synthetic oligonucleotide
  Target: LAMA2; (-) strand; PAM type: YTN; PAM sequence: TTA
atacataacattattaacaa

SEQ ID NO: 189813 - DNA, 20 bp, Artificial Sequence
  Description of Artificial Sequence: Synthetic oligonucleotide
  Target: LAMA2; (-) strand; PAM type: YTN; PAM sequence: CTA
agtatattaatacataacat

SEQ ID NO: 189814 - DNA, 20 bp, Artificial Sequence
  Description of Artificial Sequence: Synthetic oligonucleotide
  Target: LAMA2; (-) strand; PAM type: YTN; PAM sequence: TTG
aaaacaggagaactaagtat

SEQ ID NO: 189815 - DNA, 20 bp, Artificial Sequence
  Description of Artificial Sequence: Synthetic oligonucleotide
  Target: LAMA2; (-) strand; PAM type: YTN; PAM sequence: CTT
gaaaacaggagaactaagta

SEQ ID NO: 189816 - DNA, 20 bp, Artificial Sequence
  Description of Artificial Sequence: Synthetic oligonucleotide
  Target: LAMA2; (-) strand; PAM type: YTN; PAM sequence: CTA
tgtgtcatgggtccttgaaa

SEQ ID NO: 189817 - DNA, 20 bp, Artificial Sequence
  Description of Artificial Sequence: Synthetic oligonucleotide
  Target: LAMA2; (-) strand; PAM type: YTN; PAM sequence: TTG
aaagctatgtgtcatgggtc

SEQ ID NO: 189818 - DNA, 20 bp, Artificial Sequence
  Description of Artificial Sequence: Synthetic oligonucleotide
  Target: LAMA2; (-) strand; PAM type: YTN; PAM sequence: TTT
gaaagctatgtgtcatgggt
